United States Patent Application Publication US 2004/0214272 A1 - sequence listing, part 57

SEQ ID NO: 314655 - protein, 73 aa, Zea mays
  Clone ID: MRT4577_50024C.1.pep
FLHAYSAAHTFTFGRRIGRSPLNSPPIDAHLPLRYEIRTAELVLRDGPYTRGVLQHHHKMAKDARPVAAASHE

SEQ ID NO: 314656 - protein, 53 aa, Zea mays
  Clone ID: MRT4577_50025C.1.pep
GHTRGTKQNTAARAYNHSHIVTLRTRRPCSAVQCSACRGSTKTKTKKGLQDKK

SEQ ID NO: 314657 - protein, 115 aa, Zea mays
  Clone ID: MRT4577_50026C.1.pep
MHSGDKSEGCLRGLRVQAGGKYEGCLSAVCGTLGRDISWIGYSRFEPVILYIEVYSHECMLLGSGRYVDDTKFVKAEVGVFGADGSRESEVCNYAHHVHENEQWQSYRIDRCELI

SEQ ID NO: 314658 - protein, 105 aa, Zea mays
  Clone ID: MRT4577_50027C.1.pep
MAAAGMAAKAAAATTIAHVVVDEDELFDLDIALLDGRDHDHRRGGGGRRSSPAAGADADAGHVLLANCLLPLRSVSNAVPVVATSGRLSSSSLFFGYYSSSSRRL

SEQ ID NO: 314659 - protein, 39 aa, Zea mays
  unsure (1)..(39): unsure at all Xaa locations
  Clone ID: MRT4577_50028C.1.pep
TSTVTHLTFTELQXCDILRLSSEGDEAARDGVESSPGXS

SEQ ID NO: 314660 - protein, 84 aa, Zea mays
  Clone ID: MRT4577_50029C.1.pep
SGKESTSDGPQGRRLRCPDSRREEYPSRYLPPRAGMYGVDSKPHALREIAKVEDPPRQVLPQGEPQGVHSRTGWRGLWSRLMLE

SEQ ID NO: 314661 - protein, 164 aa, Zea mays
  Clone ID: MRT4577_5002C.1.pep
WYHQNSNWKLIWRDFFFQPAGPPFWVSHPFGPGDPPFRGFFHFPPFFKGVSLSLFGGWVFFLIRLNFFFNPGGGFPLWGGFPFPVVVFGGVFFFPPPCFCYLPFSPHRPFFFPAHSFGGFFPSAKFSFFLKKGFSQKPLFPCTLVPPLNFFVFLFTSGWGLFFF

SEQ ID NO: 314662 - protein, 86 aa, Zea mays
  Clone ID: MRT4577_50030C.1.pep
MRQPAGARHTLQMAQQSLSFYTRIPRTHTGKWNEAPWGGGTLFPLSSTPRGFHGNKPRGITDYYKAIGINKSASQRADKKGLIRGL

SEQ ID NO: 314663 - protein, 134 aa, Zea mays
  unsure (1)..(134): unsure at all Xaa locations
  Clone ID: MRT4577_50031C.1.pep
KGVXFLTHMMSRGPPASAHGLSPSLPGEEFEHRMFLREPSLCLRSQSPSWTRSQRNLPPPSAWSPYPALSHRPRSCSTQPEVDFSTFICACAALLLFRGALWMARLPGPWCRAILALLADQRKQTERRMCKPTI

SEQ ID NO: 314664 - protein, 298 aa, Zea mays
  unsure (1)..(298): unsure at all Xaa locations
  Clone ID: MRT4577_50032C.1.pep
MAQYRQQYGVGFSDSRGHQHQALPDWHRPHHASAKPSSRIRRPGKPAPRRRSPAAAVAAALLLLAAVFLLSRRISRSSAEVSQDSSAGEALPEWNQSKSWKKLKFGQGGGXRSARDSRYWDRDDRRRDEDYTEDEKEKNSGGTGASTDAGGSGDKGTTSEAGGEDKGLTLETGSGAKDVPEASEGGKAGTLYNEGGRKELAQYEAAAMGATGTGVKEVDPDDEYDDGIDMQDDLEDAHLHSSDGGRKLGGGSHESVEEKDEVTTERRTEAGGGIADNHDITSPDKKKFQVLEIRSMCP

SEQ ID NO: 314665 - protein, 37 aa, Zea mays
  Clone ID: MRT4577_50033C.1.pep
DIALTMSQPGQQVVLCVEFLYYRRDEFVLNELSWLLI

SEQ ID NO: 314666 - protein, 385 aa, Zea mays
  Clone ID: MRT4577_50034C.1.pep
TTPYFITTPVVMTIYKPARRGAPYKNRTVQRANPHDEFRMMACFHSTRNIPTIINLMESSRGTRKRGITVYAMHLVELSERSSAICMVHKARRNGMPFWNRRRNGDGGGDQLVVAFETYQQLSRVSIRAMTAISDLETIHEDVVTSAHQKRAALIVLPFHKLHQIDGHMESLGDQYQHINQRVLHHAPCSVGILVDRGLGGVAQVAASDVSYTIVVIFFGGRDDREALAYGMRMVEHPGIGLHVLRFLLQSGGAASDDDASFLEEFRTKVANGNDSVRYEDRTVGGKEEVVEAIKATGRCNLFLVGQGTPCMPLVDWSTDSPELGPVGTYLALPEFSTVASVLVMKQYDPMAKHDDFVEEVADIAVDVDTPGPSNRGTNTSFHAG

SEQ ID NO: 314667 - protein, 88 aa, Zea mays
  Clone ID: MRT4577_50035C.1.pep
RCLASGSCLRGLAFYPRGGSLNRLPPTLQLLDRENPWFTTLTRLLPLTLLPNGLSHNLARAKLTSLLFPRLFRQWHSLCCGSFRSETG

SEQ ID NO: 314668 - protein, 87 aa, Zea mays
  unsure (1)..(87): unsure at all Xaa locations
  Clone ID: MRT4577_50036C.1.pep
GYTMSFITKVDGEAAQGIAHSSAAMVIHSENGYQLPASTATQQPVPQRATQQFQAPHNPNFMPNRHGFSPHFGSLMGVXPQKINHFF

SEQ ID NO: 314669 - protein, 52 aa, Zea mays
  unsure (1)..(52): unsure at all Xaa locations
  Clone ID: MRT4577_50037C.1.pep
VFDRPRTWILYXXMDRDKSLLLAMTSSFITSSFSYPSPLFDLTHQMALSSYL

SEQ ID NO: 314670 - protein, 123 aa, Zea mays
  Clone ID: MRT4577_50038C.1.pep
LLGFKRAPFLCPPPWFGENPRDWSAFPPMPWGGSSPGYPFSAVSGPGEPLPFFVTRFKGGWPGVLPFWPPICGGGPPGGGKKFFFPAPPFFSFSPSFFFLCRKKKIKKKKKKKNPPHQKKTNP

SEQ ID NO: 314671 - protein, 1159 aa, Zea mays
  unsure (1)..(1159): unsure at all Xaa locations
  Clone ID: MRT4577_50039C.1.pep
MPPRTRKTVRKSTGPIGVPRHQLAPRHEDSSSGSNDPIGDLEAQVEQLRTELCHRNNVWVEDDELAERDLALDWAVNSHSIAWDKEAKARARVAELSTAVDNLQILSEWELDLLVQRVKPLAEDPLEADEWIRVIEQKFGLLRCTETQKPLFAAQQLRGPASTWWGNYVAIQPAGHQITWDKFRLAFREHYIPEGVLHMKQEEFMKLKQGXAQYLNKFNHLSHRKWSPTSTSPTVELSARRWQLKPSMLAQESQRAMXDRPNQGPEKRQRLVIRPFNQNCSSPRPPSYPFKQPVFICPATTPTSTNQPSAPGTRFPALPSSSTGCFNYGKSGHFIKDCPYPKKNRSNDQQSSGSSAQGKGNPANNTSGKNMKKTGRIYYMQMATTPEGEPVLLGTFLMANHPAVILFDSGASHTFISKKFVEQHCIPYNESREGFIIHSPGGQIFTKEVDFHVPVTLAERDFPTNMIVLKGQDIDVILGMNWLAQHKAILNTDLRSIRLSYGQEEVLLSIPVAIPAKPIGRVYEAIIPEIQDIPVVCEFSDVFPEDLPGLPPERDVEFVIGLKPAIFVKKKDQTLRMCVDYRPLNEVTIKNKYPLPRIDILFDQLTGARVFSKIDLRLGYHQIRIRPEDIPKTAFTTRCDEAFEQLKVLLTTAPVLAQPDIEKPFDVYCDASDHKSLKYIFTQSELNMRQRRWLELIKDYELEIHYHPGKANVVADALSRKAFYHCLTMKTSDITLCQEMEKLDLGMIQHETSNHLKLESVLLQRIIDAQRKDEGMKHIHEKMEAGKANCFRRDNQGVVWFNNRIVVPKNDEIRQQILDEAHLSRYFIHPGSTKMYHDLKQHYWWTKMKIEIARYVAKCNTCRRVKAIHMKTAGPLQSLPIPTWKWEDISMDFIMGLPRTAKGYDSVWVIIDRLTKIAHFLPVKVKYPVIAYAELYIARILSLHGVPKTIVSDRGPQFLSKFIEELHKSLGERCFFRSDMEKETEEKVRRIIHNLKEAQARQKSYADKRRQPLHFKVEDHVYLKVSPMKGVSRFGVKGKLAPRYIGHFPILERYGPVAYRLQLPETLSAVHNVFHVSQLKKCLRVPDRTIEVTDVALELDLTYSKHPVQVLDQKDRISQRKTLKFYKIQWNQHTEDEATWETQDFLDKNFPGFIASCKL

SEQ ID NO: 314672 - protein, 52 aa, Zea mays
  Clone ID: MRT4577_5003C.1.pep
GKHITHDITAYLNAPCLSTEQHTLLFHPGIPRTPGSLDHVHFNTLIQYHLFH

SEQ ID NO: 314673 - protein, 69 aa, Zea mays
  Clone ID: MRT4577_50040C.1.pep
KLGVYQKRKKKPRVVKKHKSSLPQEKGPLLGLNTHGVGVGPPGCLGLGWRGPHAQYYGGPIIIKRGPFP

SEQ ID NO: 314674 - protein, 238 aa, Zea mays
  Clone ID: MRT4577_50041C.1.pep
MAKGRAHPSKRPTHQLILAAVLSVSVLLPLLVPAAATVAVAVAEGGGKQLAVGKDEGKLVAEGDAGGGGLVEENEFAGGFGSLDSMLQWAIGNSDPEKLKEGAVDVQKLSADELLERRQEIKELMEKLKMPSDADLMKIAIDDLNNSSISLEDRQRALQELLVLVEPIDNANDLEKLGGLLPVIQELNNANEEIRTTSAWVLGTASQNNELVQTRIRVYGAPPFVVTVGYPTAMAGAL

SEQ ID NO: 314675 - protein, 62 aa, Zea mays
  Clone ID: MRT4577_50042C.1.pep
SQTGGVCMPQGIKVYSKGVESLDHKSTWVGLRMVVLNPWNMLANLCPILFVCPCKKPFSQKI

SEQ ID NO: 314676 - protein, 83 aa, Zea mays
  Clone ID: MRT4577_50043C.1.pep
ALGHMLFLRGSIIRRAPPLSTRSFFKNKSLELARLVHHLLLFMSQLCSYLNVSPLRVFMQRFLCLPLTPPTFSYLVVVKCLCI

SEQ ID NO: 314677 - protein, 269 aa, Zea mays
  unsure (1)..(269): unsure at all Xaa locations
  Clone ID: MRT4577_50044C.1.pep
MGTRALPLPCQLELLLGEDRGRWPPEARFIEAAHLGDVRRIKEIAKELDVRGHGIPVTVASTSYMGMNALHAAGGRGRLPAYQYLVEEVKMDINKPDTSQDYSPVEHAVTYGNLPAVRYLLDHGADLHQQRSGNITLLHSAAARGHSEIVKYLLSRGVDIDAQSIIGTPLAFAAQKGHATVVKILLQHNADPNKGTLILGPLDMALHKSNVSCAKLLIQGGANVSGAGPCYNPLVTAAEKGLTEAIKCLLEAGANPNVXDRFGRLPIEL

SEQ ID NO: 314678 - protein, 113 aa, Zea mays
  Clone ID: MRT4577_50045C.1.pep
GRYRTGRAEPTHAPFEGQEGLAGTGDLLGLGCITNLLVASHGRGHLLRCRTLELQSRPPDPEATHLRATRCTGTRTLLWKHRLEEPIQMREPLTVADAHPNGQLTTGELGDET

SEQ ID NO: 314679 - protein, 113 aa, Zea mays
  Clone ID: MRT4577_50046C.1.pep
SSTFIAVMANSHACQLFRVVTCMFFVTQYAQLRGRSAASEGSQCRMTRLGSLLCCLSDWTQCRMSLFGDAPWCVRHDEYGSEHPRDVHWAESRAEAGGSSSHHVHNHINVRYG

SEQ ID NO: 314680 - protein, 171 aa, Zea mays
  Clone ID: MRT4577_50047C.1.pep
MPVTAAEDKAAACPATVGPDQLVPSQVATAARPSAPRAMRPAAAAAYLVTVEEVTATWRDGEAPASATGHDEAPAFVSDQWGRVTLWNAAFVRAASADDGDEAAAPVVLGGALPAWGTCAGFTCRVRARHWSARRVGSPVVAPCDVWRLDAAGSYLWRLDLQAALTLGGCL

SEQ ID NO: 314681 - protein, 158 aa, Zea mays
  Clone ID: MRT4577_50048C.1.pep
MAAAPERPLAVDFEALSYISSLVEAFQAFDSDNDGLVTAPELRGLLASLGLAKSEAEARDMLARADADRDGRLSVEEFLDVMNAGELGLGALGAVLQSALPTLEAAGGALVGADELARALGALGSASAEDCAAIVECLDGDGDGAITIEEFRLMADLL

SEQ ID NO: 314682 - protein, 52 aa, Zea mays
  Clone ID: MRT4577_50049C.1.pep
KNREFPPNLGLPPYKISLSRIIFYPPLLMAFPFSSLKSVFKPPSPHKTSTQP

SEQ ID NO: 314683 - protein, 60 aa, Zea mays
  Clone ID: MRT4577_5004C.1.pep
PRQKNFFSPVFFRANKPLFNGKRLFGSCRFGFYKGMVLILEILPIFFLKPNPLYFFSFYS

SEQ ID NO: 314684 - protein, 68 aa, Zea mays
  Clone ID: MRT4577_50050C.1.pep
CPQLCLIANSFKITHLVAIPFIINNIWDFALLIITWQLAILFKLSFPLKKNFFHPLSYLKLFNSLFPL

SEQ ID NO: 314685 - protein, 35 aa, Zea mays
  Clone ID: MRT4577_50051C.1.pep
HSLSSHAFPDLGIACRQPPISCAVALVIFRAKRVG

SEQ ID NO: 314686 - protein, 44 aa, Zea mays
  Clone ID: MRT4577_50052C.1.pep
ETCVDVLAALIVSGEFQGTVASVTGSSKVVARGSNAAPRVSKLE

SEQ ID NO: 314687 - protein, 236 aa, Zea mays
  Clone ID: MRT4577_50053C.1.pep
HDAYQVVYRINVGGPAIGPDAWALGRRWETDAAYVQSKEAVKDVSVPTSTIRFPDGTSRLVAPALVYASAARMADADVGSPNFNLTWKVDVDPSFSYLVRLFFADIVSKATNDLYFDVYIGGRKAVSGLDLSTVAGGELAAPYYKDFVVNSSLLEDGKLSVQVGPMGQDTGRIDALLNGMEVLKMSNSVGSLDGEFGVDGQKADDGSGGRKAVAAVGFAMMFGAFAGLGAMVVKWY

SEQ ID NO: 314688 - protein, 103 aa, Zea mays
  Clone ID: MRT4577_50054C.1.pep
VRGKRSYVFMVCRYSRRTTGRRVAFLLSSVQEVSSCVSRWGLTSLGRFISVSTVRGRGVCGFPPLRRRISRGGASYRVIMVSDECVHTDRQWHTRSESVSKRC

SEQ ID NO: 314689 - protein, 136 aa, Zea mays
  Clone ID: MRT4577_50055C.1.pep
TRLSETRHLTSAATSLLRRSPLQLNLKETDGSMAAAAAVYRRVLKAVQKHVGGGATKQHFRDFVAAEFRAPVGSKADARARLRLAGDYAYLLTSVQHHKDLLLSYNIAVDRSDEMKKILNKSAASVGLQLPDVYQP

SEQ ID NO: 314690 - protein, 78 aa, Zea mays
  Clone ID: MRT4577_50056C.1.pep
EKTIGTFLLGRGEQKPMAGSNLSRAKGGYALKTAGSGLMLQKRPRGGDWGGFKKGKIGPPIQHWGNPNQLVPSKMNKK

SEQ ID NO: 314691 - protein, 152 aa, Zea mays
  Clone ID: MRT4577_50057C.1.pep
MDDWDTATKIGSRARGPGNAQRETVVRGKAALNAAQRAGGLTTEKKYSSANAGSAPEGQRMTKVDRSDDIIKPNTIGKTVGDVIAKTRQQIEPKMTQKDLATRCNTTQAVVAEFERGSAAPDQKVLGAMERVLNVKLRGTDIGAPKFPNKKK

SEQ ID NO: 314692 - protein, 123 aa, Zea mays
  unsure (1)..(123): unsure at all Xaa locations
  Clone ID: MRT4577_50058C.1.pep
PPWFFPGFLSGCVVSGSRLXWWGPPFSLLFGALXPGLAFLPVLXXLCLGLAPVGLPWWGLVLAGCPLASCPPAXGFVVWGCPVFPWFGSPCFRCLALALGVSSPPCGCFFFSLFGLGPWCSFF

SEQ ID NO: 314693 - protein, 155 aa, Zea mays
  unsure (1)..(155): unsure at all Xaa locations
  Clone ID: MRT4577_50059C.1.pep
EQKTDNARNEVLVLGSENKXAGPFGTVKSVRTNPTVVPDESVNPRXDKLLEKVAVNKEIIVVLANSNVKPMLELQIASVKRVGIQKYLIVALDDSMESLCESKEVVLYKRDPDKAVDMVGKSGGNHAVTGXKFRVLREFLILGXSVLLSDVDIVF

SEQ ID NO: 314694 - protein, 137 aa, Zea mays
  unsure (1)..(137): unsure at all Xaa locations
  Clone ID: MRT4577_5005C.1.pep
AFQTGPPPPPGFTRVPPQVGGPPPPEVVLQTPPPLLKGTISFPAGVPEPRAHQTPALWFPGCPPPGIPGDVXFPPPRPKPXGPPQMAPPPKVRCGFFPFDPPFIPLGRANFGPFPPPLFFFRVFLKNIFFLANLALG

SEQ ID NO: 314695 - protein, 86 aa, Zea mays
  Clone ID: MRT4577_50060C.1.pep
RSKPTQTPTGRATSWSWGPIAALKNKTIYKGKKGGKKKTVPPFSKNERYDIKAPPEDSVRNIRKTLGFRTHGTRLAPEGLQHRDPE

SEQ ID NO: 314696 - protein, 99 aa, Zea mays
  Clone ID: MRT4577_50061C.1.pep
PASTGVPSSALSVSPASQSYCSFVSASVASWRLIHRVLSSLILLATVALAFSTGVVVLLFLPGSVLRSRGHLLRSPHVRDAEILGGTGLVDWCCCPTRP

SEQ ID NO: 314697 - protein, 84 aa, Zea mays
  Clone ID: MRT4577_50062C.1.pep
GRTATRGAGHGPSREGDERRAEGGSRGVRELLGCFSPQFTVPDSRNSVWRGRQAWPGRVEEDHGRDAEGARYGRARYQRGRGHG

SEQ ID NO: 314698 - protein, 56 aa, Zea mays
  Clone ID: MRT4577_50063C.1.pep
AGAGAYNFGMQENYKTYASPVYQTTKSIFTRDNSEAGADDLDCTFTTLLCLLGASY

SEQ ID NO: 314699 - protein, 72 aa, Zea mays
  Clone ID: MRT4577_50064C.1.pep
RVRVGSTRSKGVSLRLGMRGGVFPRVLFIRNCFLAHLAFLFHDCCYNLGVGHCSSRFSLVVAVFRISAFVSG

SEQ ID NO: 314700 - protein, 104 aa, Zea mays
  Clone ID: MRT4577_50065C.1.pep
MVAPVRKTLAGTDGTEPNIIFEEYLANWRYTDDEVYVFDGGNDSTSNGFVVKSIMSTGQYFEVAELYTVTFLCIVSQDSETAISWAEKAHLTEQSRQDLLKKLH

SEQ ID NO: 314701 - protein, 55 aa, Zea mays
  Clone ID: MRT4577_50066C.1.pep
IGPSRPSCITALQLFAGYYLPRPMPRSRMSCRRSMPVIAAMAILNPELSKLFRSL

SEQ ID NO: 314702 - protein, 284 aa, Zea mays
  unsure (1)..(284): unsure at all Xaa locations
  Clone ID: MRT4577_50067C.1.pep
MVGLSEGEKHFIRGGIAQDLRTDGRRRLQFRSLSVQTGVIPQANGSARVRLGATEIIASVKAELGKPSILHPDKGKVAIFVDCSPTAEPLFEGRGSEELSAELSVSLQRCLLGGKSGAGAAIDLSSLIVVDGKVCXDLYIDGLVVSSDGNLLDALAVAIKVAXLSDTGIPKVNVSVSAASDEEPEVDVSDEEFLQFDTSGVPVIITLTKVGRHYIVDATSEEESQMSSAVSVSVNRHGQICGLTKRGGAGLDPSVIFDMIAYFAVKCQRTSCKKKTKKKKKNPR

SEQ ID NO: 314703 - protein, 125 aa, Zea mays
  Clone ID: MRT4577_50068C.1.pep
TIQDTDGIPPDQHRLIFAGKQGEDGCTLADYNIQNESTLHLDLRLRGSMQIFAKTLTGKTITLQVESSDTINNVKANIQDNEVIPPNQQRLIFDSKQMEDGTTLADYNIHKESTLHLALQLLGDH

SEQ ID NO: 314704 - protein, 140 aa, Zea mays
  unsure (1)..(140): unsure at all Xaa locations
  Clone ID: MRT4577_5006C.1.pep
MSISRDSMLKRRATGGTQNACRCKRXHELGRQAANTKLPSNKTVRRVRGLGGNVKCRLLRLXDTGNYSWGSEAVTRKTRILDVXVYDASYNELGMTHTLGNTAIVQDDAAPFKQWHLTHYGGDMWYRKIIPAAKNDYADG

SEQ ID NO: 314705 - protein, 37 aa, Zea mays
  Clone ID: MRT4577_50071C.1.pep
LNLPEQTAFGHFTRPCFTAGAFLSRNERRKHEARTNN

SEQ ID NO: 314706 - protein, 176 aa, Zea mays
  Clone ID: MRT4577_50072C.1.pep
MAFWPVAISCIAAAEGHFMDYRMAYVAALLVSMAWTMQVLRYIVYVAVAKLAHGRLTYGIHVLGGAVEAFCDTIFGPAFGDICMGAMAVPVNSAVRGLARAMKTAAGGNDEFILSGQGCCFAVSEKMLGRANRWGFVHVGARGKAFCVASRDVWSLFVLRGIAELVDSDLTGSFCF

SEQ ID NO: 314707 - protein, 448 aa, Zea mays
  unsure (1)..(448): unsure at all Xaa locations
  Clone ID: MRT4577_50073C.1.pep
LRRXRTGANILVDNKGCIKLADFGASKQVEKLATATAAKTMKGTPYWMAPEVIVGSGHNCSADIWSVGCTVIEMAIGKPPWSHEYQEVSLLYYVGTTKSHPPIPEHLSTEAKDFLLKCLQKEPEMRSVASDLLQHPFVTRVLEDFCQLNHAGPKETSKNELPSYVVPTVDSDLSRPGKLRNLNSNKLSDTRPLWDQRCNDDDICEFADEDNVPMVGSSFNPMSEPSDEWENKLDISPEQQFSQSREFGGLAKLAESQMSENDFTFPCEGSCEEDDEFTESKIKEFLDEKATDLKKLQTPLYEFYNTVNAGVSQGVSDVCRANNVTNPQLPPRATKMVGGAALEPICVNLKNVNPKSCTRRFSRGSVESNHVLREIASPELNILEDKVHDDSEDSPSLSFSEIQRKWKEELDQELKREREMRSGGYGKAPSPSSTSRRLTGKRDRSPVY

SEQ ID NO: 314708 - protein, 66 aa, Zea mays
  Clone ID: MRT4577_50074C.1.pep
VGHPKHVLTHPCIHARSIYLAPTRSRWGSGNIARVSAPRRTAPGTSITHSRSPGPTTRTAPKANPQ

SEQ ID NO: 314709 - protein, 129 aa, Zea mays
  unsure (1)..(129): unsure at all Xaa locations
  Clone ID: MRT4577_50075C.1.pep
RRYLGERLENGDDXXAEELTSEEKDGGTSRCLLEMERVKEEGGGKWEEEGXRRHNDGEQSRVHEXXTYEASKRERRREKGLDQRWSADAGVVEYDHKXPERRTPPLDHQGDIXLRELHRTNXETTWDET

SEQ ID NO: 314710 - protein, 81 aa, Zea mays
  unsure (1)..(81): unsure at all Xaa locations
  Clone ID: MRT4577_50076C.1.pep
MMSARSMMALRTAHTSKIILGRGLFTTSTRLGLKESSTQTDVDYDKHKQDSLRKQKEGSGHWKPELASDSXGGRQGGQIGR

SEQ ID NO: 314711 - protein, 219 aa, Zea mays
  Clone ID: MRT4577_50077C.1.pep
MSLLLGMLLAMHLFQRRDAAAAERVPAVIVFGDSTADTGNNNFIQTLLRGNYTPYGRDFAGGAATGRFSNGRLAADFVSQGLGLPPSVPAYLDPGHSIHQLASGVSFASTGSGLDDITGQIFSAVTLTQQIEHFKEYKEKLRRGMGAAAANHIVGRALYLFSVGASDFLGNYLLSPIRRYRFTLPEYEAYLAGAAQAAVRAVYALGATHFSPYPSAYPP

SEQ ID NO: 314712 - protein, 90 aa, Zea mays
  unsure (1)..(90): unsure at all Xaa locations
  Clone ID: MRT4577_50078C.1.pep
DSTGQRYMWTSEVRSSHKLPNIHLSGWQSFGLTFGMSQLIDDQITSRXSASRAVSRPTTLPICHSIMMQSALYAQTPLFWGDSESARDDV

SEQ ID NO: 314713 - protein, 113 aa, Zea mays
  unsure (1)..(113): unsure at all Xaa locations
  Clone ID: MRT4577_50079C.1.pep
PCEHIDLKTHIPWDKETVXTTXKRTEKLLVCTFDSLDSHEAADTGGFSAEIVNYIVMRCLQRFDAPVKRVSTIDTPLPLKDXPCYMPTNNRVVDAMIAAIDYLNMMLDQGRVP

SEQ ID NO: 314714 - protein, 76 aa, Zea mays
  unsure (1)..(76): unsure at all Xaa locations
  Clone ID: MRT4577_5007C.1.pep
IYYFIYDLLRTVLQSSADQIQPRFAGFIAPFRSGLRFHQHNPMAEAVLLAVTKIGSVLGDEPAKTIXNKLSXKIKL

SEQ ID NO: 314715 - protein, 221 aa, Zea mays
  Clone ID: MRT4577_50080C.1.pep
MSGGHAKKEMVTGEKPATSHGKAPFGESGNKVKGSPSHDKSRQSGEKKKKMKKKIIEQGASSTPDVQPVAFKATEENKEDSTPSRVPIDASKLDNEEMTLIIKSFRQILKQRRGKDYKPRSKKVCYNCGKSGHFIAKCPLSSDSDRGDNKNGREKKRYYKKKGGDAHVCQEWDSDESSTDSSSDKDAANIAVTKGFLFPNVGHKCLMAKDGKKKKVVGDHN

SEQ ID NO: 314716 - protein, 65 aa, Zea mays
  unsure (1)..(65): unsure at all Xaa locations
  Clone ID: MRT4577_50081C.1.pep
MADHAYQPTVLNKLEGQVHLSSSFSEGVQSCNIWPTVSPYERRFVTWYYMTKSLXGRSLAVSDSI

SEQ ID NO: 314717 - protein, 42 aa, Zea mays
  Clone ID: MRT4577_50082C.1.pep
DHIDTYGEKGWVEINKHYALFHERGLSKVPRGPSKDKKRYKK

SEQ ID NO: 314718 - protein, 485 aa, Zea mays
  unsure (1)..(485): unsure at all Xaa locations
  Clone ID: MRT4577_50083C.1.pep
MKKVVYYETDSSSPSTSGSDTPSVTSKRHERKKFSKIPLCYPRISKRTPLLSVPLGKPPMFDGEDYNMWSDKMRHHLTSLHTSIWDVVEIGVHVPSPGDEDYDSDEVAQIRHFNSQATTILLVSLSREEYNKVQGLKSAKEIWDVLKSAHEGDEVTKITKRETIEGELGRFMLHQGEEPQAMYNRLKTLVNQVRNLRSTKWDDHEMVKAPXKIIEQGASSTPDVQPVAFKATEEKKEDSTPSRVPIDASKLDNEEMALIIKSFCXILKQRRGKDYKSRSKKVCYKCGXKKKEKKRYYKKKXGDAHVCREWDSDESSTDSSSDEDAANIAVNKGLLFPNVGHKCLMAKDGKKKKVISRSSTKYATSSDEENSSDDEDNLLTLFANLNMQQKEKLNELISAIHEKDELLDSQEDFLIKENKKHVKVKNAYALAVEKCEKLTSELSTCHDTISNLRIENANLIAKVEKSNICDDSIANLRNDNSSLIA

SEQ ID NO: 314719 - protein, 687 aa, Zea mays
  Clone ID: MRT4577_50084C.1.pep
MSGGHAKKEMVTGEKPATSHGKAPFGESGNKVKGSPSHDKSRQSGEKKKKMKKVVYYKTDSSSPSTSGSDTPSITYKRHERKKFSKIPLRYPHISKHTPLLSVPLGKPLIFDGEDYCMWSDKMRHHLTSLHASIWDIVEFGAHEPSVGDEGYDSDEVAQIQHFNSQATTILLASLSREEYNKVQGLKSTKEIWDVLKTAHEGDEVTKIIKREMIEAELGHFMLHQGEDPQAMYNRLKTLVNQVRNLGSTKWDDHEMVKVILRTLVFLNPTQVQLNRDPRYKLMSPEEVIGKFVSFELMIKCSKKIIEQGASSTPDVQPVAFKATEENKEDSTPSRVPIDASKLDNEEMTLIIKSFRQILKQRRGKDYKPRSKKVCYNCGKSGHFIAKCPLSSDSDRGDNKNGREKKRYYKKKGGDAHVCQEWDSDESSTDSSSDKDAANIAVTKGFLFPNVGHKCLMAKDGKKKKVHSRDTPKYTTSDDERSSNDNNDDLISLFANLTMDQKKKLNELIETINEKDDLLECQEDLLVKENKKFVKLKNAYALEVEKCENLSKELSICNDSISCLIDENASLNAKIEELNVCKPFPSIVEHVTICTRCRDINVVAIDDHLAMIKEQNDHIAKLNAKIVEHGLENENFKFAQSMLYNGRHPGIKDGIGFQQGSQSNTKLNAPKNKLSNFVKGKAPMVQD

SEQ ID NO: 314720 - protein, 405 aa, Zea mays
  Clone ID: MRT4577_50085C.1.pep
MSGGHAKKEMVTGEKPATSHGKAPFGESGNKVKGSPSHDKSRQSGEKKKKMKKVVYYKTDSSSPSTSGSDTPSITYKRHERKKFSYDSDEVAQIQHFNSQATTILLASLSREEYNKVQGLKSTKEIWDVLKTAHEGDEVTKIIKREMIEAELGHFMLHQGEDPQAMYNRLKTLVNQVRNLGSTKWDDHEMVKVILRTLVFLNPTQVQLNRDPRYKLMSPEEVIGKFVSFELMIKCSKKIIEQGASSTPDVQPVAFKATEENKEDSTPSRVPIDASKLDNEEMTLIIKSFRQILKQRRGKDYKPRSKKVCYNCGKSGHFIAKCPLSSDSDRGDNKNGREKKRYYKKKGGDAHVCQEWDSDESSTDSSSDKDAANIAVTKGFLFPNVGHKCLMAKDGKKKKVVGDHN

SEQ ID NO: 314721 - protein, 98 aa, Zea mays
  unsure (1)..(98): unsure at all Xaa locations
  Clone ID: MRT4577_50086C.1.pep
MARTQSAVAVAVVAAVLLLAAAATTSEAAITCGQVSSAIARWVSYARGTGCGPYAFCCSGVRNLXSGSRTDDLRDAGCICLGCVQGEVCGPCGGGGGV

SEQ ID NO: 314722 - protein, 784 aa, Zea mays
  Clone ID: MRT4577_50087C.1.pep
MSGDHAKKEMVTSEKPTTSHGKAPSGESDNKVKGSPSHDKSRRSGEKKKKMKKVVYYETDSSSPSTSGSDTPSVTSKRHERKKFSKPPMFDGEDYNMWSDKMRHHLTSLHTSIWDVVEIGVQVQGLKSAKEIWDVVKTAHEGDEVTKITKRETIEGELGRFMLHQGEEPQAMYNRLKTLVNQVRNLGSTKWDDHEMVKVILRSLIFLNPTQVHLIRDDPRYKLMYPDEVIGKFVSFELMIKGSKKIIEQGASSTPDVQPVAFKATEEKKEDSTPSRVPIDASKLDNEEMTLIIKSFRQILKQRRGKDYKSCSKKVCYKYGKPGHFIAKCPLSSDSYRDNDKRGKKKEKKRYYKKKGGDAHVCREWDSGESSTDSSSNEDAANIAVNKGLLFPNVGHKFLMAKDGKKKKVKSRSSTKYAISSDEDNSSDDEDNLLTLFANLNMQQKEKLNELISAIHEKDELLDSQEDFLIKENKKHVKVKNAYALEVEKSNVCDDSIVNLRNENTSLIAKIDKSNASLSSLRNENEKLIAKAKDLDVCNVSITNLRDENAILHAKIVELNDCKPSTSTIDHASICTRCRDVNIDAIHDHFAMIKQQNDHIAKLDAKIAEHELENEKFKFARSMLYSGRCPGIKDGIGFQQGDNVKLNAPPKRLSNFVKGKAPMPQDNEGYILYPTGYPEDKIRRIHAKKTHSHHAFIYKNEASSSRRSTHVKMPKKKTPIASNEPNVSFKTFDASYVLTNKSGKVVAKYVGGKHKGSKTCVWVPKVLVSNVKGPKTVWVLKNKA

SEQ ID NO: 314723 - protein, 43 aa, Zea mays
  Clone ID: MRT4577_50088C.1.pep
ETSTEERDCSLQIKNGCLDWYSYNLLRQTITESGLLADAPSTC

SEQ ID NO: 314724 - protein, 120 aa, Zea mays
  Clone ID: MRT4577_50089C.1.pep
TRVSRACIRALGSSVACSTHDWRARPGLLGRADDRIVVGAFAVLVQGRWVLRCCPWVARYCWVSSMAMGLRAWSWSRPPDCAPWVNVGLRRPCSLALSAIGWEFTALYSPRISVSMHACS

SEQ ID NO: 314725 - protein, 74 aa, Zea mays
  Clone ID: MRT4577_5008C.1.pep
WNIGYSAAIVSRSLSHLYLKLYKSTTLYMTCYEQFYNHPRTKFNRGSHISHESYPPTIPPYSLCIFSNIFYSIY

SEQ ID NO: 314726 - protein, 63 aa, Zea mays
  Clone ID: MRT4577_50090C.1.pep
LDCVYGIAVLVNVSYIHNIHRDKESLGLMSDSTLWCYAVQRTCCTDIMARRERRCDGARGFFT

SEQ ID NO: 314727 - protein, 62 aa, Zea mays
  Clone ID: MRT4577_50091C.1.pep
NSLAAADCASDSARKSFVQRFNCPLQTCYTALQQPKPPTEAYDLQPASFAPPLQCRLRSPEP

SEQ ID NO: 314728 - protein, 87 aa, Zea mays
  Clone ID: MRT4577_50092C.1.pep
PRFGLKGVPTLIRWEDGPPPPPLGDNKAPLKDKVDALLWAGGNLVLTTDRSGFPFGFHLGKGAIIKNMDCNSVYLHAGPKIGESFEA

SEQ ID NO: 314729 - protein, 44 aa, Zea mays
  Clone ID: MRT4577_50093C.1.pep
NFIMGVSINKKGPVLNCGYAICHFVGFIKTYALFYENSYSQIFS

SEQ ID NO: 314730 - protein, 170 aa, Zea mays
  unsure (1)..(170): unsure at all Xaa locations
  Clone ID: MRT4577_50094C.1.pep
PAPVGFSRSSXRCSSVLPSFGSPCPWFLSGFLGPFRLVVAESRVGMGAXWWSWLVPXSLAVXSGLGFFCLPVLFFFLKKPVAAFFXXGXSAPPRPVXGXGXVSVSRXVLSGLAVLXXGSGWWXAXPCXFCXVFXPSPCPVXXXXRSXRSLPPXXIPXXXXXXXSALLALL

SEQ ID NO: 314731 - protein, 260 aa, Zea mays
  unsure (1)..(260): unsure at all Xaa locations
  Clone ID: MRT4577_50095C.1.pep
RPGREDVDEMHALFHELKSGMRLSSVLFPYAPTPTNRRRDRARAKLLKIFSEVVRSRRRRGEEEKEKEEDVLQSLIDSRYKDGRASTEEEVTGMIILLVFGGMDTSTLASTWTGARLLSTPAAMAAAVEEQRRILTDHGDRVGYSEFMQMTTLHWSIKEALRMHPPSAVFFRKARRSFGVRTRDGREYEVPGGHTVASPVLFNSHLPSVYKDPDVYDPTRFGPXREEDRGGGKFTYEGVSCGRHSCVGEAYAYLQIXVML

SEQ ID NO: 314732 - protein, 55 aa, Zea mays
  unsure (1)..(55): unsure at all Xaa locations
  Clone ID: MRT4577_50096C.1.pep
MAVKMPINRIALCSHXEVYHPGALKAAFAEFISTLIFVFAGHGSGMAFSKLTGGG

SEQ ID NO: 314733 - protein, 126 aa, Zea mays
  Clone ID: MRT4577_50097C.1.pep
CIEHQEQINLDGTSEAAPTLVGHIHLDKGHLERINISTQDILQKCQEVSGRFGKKKGHLCHIFKKITFATCDCSFTQMPIDGKLHKVPCVQFAFSDDIVLSESIERAVNVIADSVCSVLLDTIIKR

SEQ ID NO: 314734 - protein, 90 aa, Zea mays
  unsure (1)..(90): unsure at all Xaa locations
  Clone ID: MRT4577_50098C.1.pep
SANRGDTKEMRVAATGVIHSLLRGGVTXPFITKVKNCLLGGGQGEHYFLKKKGPSCRQQRECPEKTRWGAPRGPCGWNPGQKQACPPGAP

SEQ ID NO: 314735 - protein, 48 aa, Zea mays
  Clone ID: MRT4577_50099C.1.pep
MDCVHQKKKKKKKKKKKKKKKKKKKKKKKKKKKKKKKKKKKKKKKKTL

SEQ ID NO: 314736 - protein, 37 aa, Zea mays
  Clone ID: MRT4577_5009C.1.pep
MRRSTPRGLSSIGTAMGKPLATDEEHKEFANLRHDFQ

SEQ ID NO: 314737 - protein, 58 aa, Zea mays
  Clone ID: MRT4577_500C.1.pep
APRLHSFRLYRHSWVRVLHTHPGQSRSRPNTTHHRRCQTSRTASPHHARPVWRPTPAC

SEQ ID NO: 314738 - protein, 70 aa, Zea mays
  Clone ID: MRT4577_50100C.1.pep
PLYAPLFKIIVPPLYPLYRDLWFHQVYRPWCVGMCSMVDVDPSGVACQVIYHCITTVPPLCTADRVCSYL

SEQ ID NO: 314739 - protein, 305 aa, Zea mays
  Clone ID: MRT4577_50101C.1.pep
MARLRHTARKSVIPFLHSCLAERPLHRPVTGQSSHLERLHYRLHEEQEHRRQELEQQGSSSSLQQEAPPAPPLGVPTAGVAVGGDPDDGGDDSSSSHSTDLSEEQEPEGWVARPITRDAARGCHFHDALDTLLRQALDRRTWSIEYRCVVFQHSRGVYPDRWEATCLVRRLENSLQGAEVCSEHYSISEQDSAEAAMQDVARHALSHYCSVLGGVVVSPVSEDNPRLSSIVNLATMLNTELDHALDELSRVRAEIAQLRAERVECRHLEDGSPALVGTQYPYRSRQRGHHAYGNPDCRTRINLEP

SEQ ID NO: 314740 - protein, 217 aa, Zea mays
  unsure (1)..(217): unsure at all Xaa locations
  Clone ID: MRT4577_50102C.1.pep
SKAITEDELIYIRAQYNLLEPNSADGRICIDNFRMVSTCIMMHXILPMSSIFPFPPLNMQALLQNCTDAMKESRTLEILHAXKHGLVYSQPYLLPFCTCILVFSSAFHFACVTTXLEPLAYRRMDFEEFRAATISPYQLEAVPRWEEIASTAFGYFEHEGNRAITIEELAQEMNLSAAAYSVVRDWIRPSDGKLSFLGYTKFLHGLTMRSGNARRHH

SEQ ID NO: 314741 - protein, 54 aa, Zea mays
  Clone ID: MRT4577_50103C.1.pep
ICRLLITNRLASEMYTTVPGTCSFSQSRLPYPSCLNRALVSAPLLAPSAAAAMS

SEQ ID NO: 314742 - protein, 383 aa, Zea mays
  Clone ID: MRT4577_50104C.1.pep
MLFDCLSLLTSSPRTSSAPRTTPSISMGDSGGRRGPPLPRLLDLIPDGKERKGREAQDAGRSKNSGGFGGEEDAKLELKLGPPGLTLVEEGTTATVPRDGGVLQRETTTTPTLSLGCFPRNPSKPAVDAATAGTKRGFFDTAVEAKTEGRDERMEQQAGAGCGNELALDEKTAAAAASERQKGSCCPPTPQHAPPAATVHSGAHVLQLGRRPPTRPPTRPPTRPRTRGLAHHHHGSSSKQPTEPQNSEASRKEKPACKKNPLVKINMDGIPIGRKVDLAAYDSYERLSLGVKELFHGFLQAQKDMSPTAGKIFSQLLDGSGEYTLVYEDNEGDRMLVGDVPWNVFVSTAKRLRVLRSSELAKGLVGTRPPQIAVAPRRGPPDC

SEQ ID NO: 314743 - protein, 59 aa, Zea mays
  unsure (1)..(59): unsure at all Xaa locations
  Clone ID: MRT4577_50105C.1.pep
PRIQPSPRSWSSFSPTYPPPPGSFICYEITPPKTPPXSPLPCPKSIASSSHCNAPNSTI

SEQ ID NO: 314744 - protein, 71 aa, Zea mays
  Clone ID: MRT4577_50106C.1.pep
ELNNRPPQGGPRGGLKRRAFPEKAPRLGTLFFAPDAMSGAEADRGIFWKVPKASTPPVLSLPRARFVGAER

SEQ ID NO: 314745 - protein, 81 aa, Zea mays
  unsure (1)..(81): unsure at all Xaa locations
  Clone ID: MRT4577_50107C.1.pep
LVLVSSVLLSSIRDGSAGITSSFVRPQWPGVDIPVDHEVXAAPKGYNAPQQVHITQGDYDGXAVIVSWVTPDEPXTRHVQY

SEQ ID NO: 314746 - protein, 91 aa, Zea mays
  Clone ID: MRT4577_50108C.1.pep
PPKKTPLFEETANFPQTLSPRPRTVKTGNTHPPPQGVNSPPGPAPGGATTRSPDRWKVLFLSPFPPGGRNRNFLKPGAREVHVASIRWKGR

SEQ ID NO: 314747 - protein, 65 aa, Zea mays
  Clone ID: MRT4577_50109C.1.pep
SLVWNRLGVHMAGMDYTPSFQCPKGTLVSGTRSTKYPVETLEARDTTTEEELLTNTEMIVDISGF

SEQ ID NO: 314748 - protein, 117 aa, Zea mays
  Clone ID: MRT4577_5010C.1.pep
PGSFFPVPGCRLGTHRFALAEPQFLPLQEEDTRFVVVTFYKFLPLDDPHAEFGRHLIFLQYYRVSVGTREAQESDHRTGGRREGTRSLNSSETAKIGRLKRERLPKMIRLLLLLSTE

SEQ ID NO: 314749 - protein, 62 aa, Zea mays
  unsure (1)..(62): unsure at all Xaa locations
  Clone ID: MRT4577_50110C.1.pep
MASTAGXLARPAAQKGAVPLFYRRALKDTLNWPVNRNFFYQNPSNFRNKFKANRPVNNLNLV

SEQ ID NO: 314750 - protein, 151 aa, Zea mays
  unsure (1)..(151): unsure at all Xaa locations
  Clone ID: MRT4577_50111C.1.pep
IQDKEGIPSDHQRLIFAGGHLEDGRTLADYNXQNESTLHLTPXPKGGMQIFVKTLTGKTNTLEVEFSYTIYNVKVNIHDKEGIPPDQQRLIFAGKQLEDGRTLADYNIQKESTLHLVLRLRGGMQIFAKTLTVKTITLEVESSDTIDNVKA

SEQ ID NO: 314751 - protein, 482 aa, Zea mays
  Clone ID: MRT4577_50112C.1.pep
MASWLEQLQRELAARGLTVASIPGKGRGLIATCTFFPGDVILNQEPYASTPNKILVGSSCDHCFTSGNLRKCSMCRVMWYCSSNCQKEEWKLHQLECRAMAALTEDRKKMLTPTIRLMVRLALKRKLQNEKVIPSSSIDNYNLVDGLESHISKVDENQLVLYAQMANLVSLILPFIELDLKEIAQTFSKFACNAHTICDPELRPLGTGLYPVISIINHSCVPNAVLIFDGRTAYVRALQPINKDEEVSISYIETAAVTKKRNNDLKQYFFTCTCPRCVKGFDEDALLEGFRCKNQACDGFLLPNSGKKAYTCQKCGASRDVEEIKNMRSEILQLSDKASSFLSSGNKAEAGSIYKIIEQLERNLYHAFSTTLLHTCETLLKIYLELQDWWTALTYCRLTIPVYERVYPPFHPMIGLQFYTCGKLEWLLEFTEDALKSLTRAADILKVTHGVKSQFMKELFGKLEEARAEVSFRLSSRHGHDE

SEQ ID NO: 314752 - protein, 113 aa, Zea mays
  unsure (1)..(113): unsure at all Xaa locations
  Clone ID: MRT4577_50113C.1.pep
SVGGKGDNSKGDVGGKGKGSGKSGGADGKGKGGGQSDGAYGKGSASKGGGSXRSATTTTRPATTAMGGEGGDNGGGDDDKGGRGATNLSSLVYFSISGSGSGSRSRSGSGMVG

SEQ ID NO: 314753 - protein, 117 aa, Zea mays
  unsure (1)..(117): unsure at all Xaa locations
  Clone ID: MRT4577_50114C.1.pep
MAASRESLSLGGTMPRHNGKATAIPTSIDNSTFIVSSSRDKSTLACYLTNXVHCTTESGVTADYGITLRRLTGQSHFVHDVMISSDGQIALSDSWDGEIRLWDLCTCLTTXRFVGHE

SEQ ID NO: 314754 - protein, 56 aa, Zea mays
  Clone ID: MRT4577_50115C.1.pep
RKFPKSRFLKTDRNFASKRGSVPTRFFAKELSYKTTENKKVKDRVMPVVHINLRGP

SEQ ID NO: 314755 - protein, 99 aa, Zea mays
  unsure (1)..(99): unsure at all Xaa locations
  Clone ID: MRT4577_50116C.1.pep
FASLPSRPSSQLXXRGCXVDXCAARITCSLQDVXSRCVDAAXLXGFALXTSALLVSXASAYXTPKRLXYDXIQIKTYMEVNGTGXGNXCXXIXVGVXSX

SEQ ID NO: 314756 - protein, 142 aa, Zea mays
  Clone ID: MRT4577_50117C.1.pep
VAKMKKGGIVGNKARGAIMDAQPVPNACFNGPLAGNGGDGWFPQPAPKGPPGGYMPNHAMAPPIFGAPIYGHLRDSDGVRALLKRDFKGGGFPGQKYLVKEGPLARQDPGPPEMVLGRGGFFGEKLRGKNPRGGPGVLDGEP

SEQ ID NO: 314757 - protein, 108 aa, Zea mays
  Clone ID: MRT4577_50118C.1.pep
ASTPSSCRTRRGRRFFPSDPIRSPAPPPSPARGGVSRPSGWTRAGDAGSSWPGAAARQTPRRRRTRPRCRTRAGRRQELAEVHGPREGAGKVRRARRLRGPRRPRQRA

SEQ ID NO: 314758 - protein, 114 aa, Zea mays
  Clone ID: MRT4577_50119C.1.pep
TGAGDIDLAAFLAVAARKMGAKQSEARLAECFNVFDDACSGSIPPEELRQVMVSHGDRLTEEEGFRRGHGRTDCGGFCSGWREAGAVSNRDLIVSRDLVWILTFDDQHDYLEQY

SEQ ID NO: 314759 - protein, 241 aa, Zea mays
  Clone ID: MRT4577_5011C.1.pep
SSLSLSLPLWPPPPWPLPPGASTGLRSGVRSGATTRTRSPRSPPSISPPPTRSKPPPTKSSTPTTPTPAASRAPTASTSSASTAKRTSSAITSPSPASRASTSSQPSAPPTSTKPSRARPVPRASLSPTPWRSALASVAASAASLAPRTVSSLVLRTPLLVRTRALASTLRRLRTTPRASSLMSTLPRLFLVPSVVSLHRWMQSMKMSNGGTSDAGVHRGDCMAWSRGDYFVFFYSQKPNL

SEQ ID NO: 314760 - protein, 351 aa, Zea mays
  Clone ID: MRT4577_50120C.1.pep
MAGANFLSTAALVARGVAACSSISTPTRRHPQIRVCCRADAEALEAYAHEERLRFRRRDFIGTCVGTAVALEMIDGSTSFSGVATAADLIERRQRSEFQSKIKDTLYVAIKAKPELVPSLLTMALNDAMTYDKTTKTGGANGSIRLETSRPENSGLSSALDLLTEAKKEIDSFSKGGPISFADLIQFAAQSALKRSFLDAAIAKCGGNEEKGRTLYSAYGSNGQWGLFDRTFGRADAQEADPEGRVPDWSKASVQEMKDRFVAVGLGPRQLAVMSAFLGPDQAATEGRLIADPDCRPWVEKYQRSRETVSRTDYEVDLITTLTKLSSLGQKINYEAYTYPKQKIDLGKLKL

SEQ ID NO: 314761 - protein, 110 aa, Zea mays
  Clone ID: MRT4577_50121C.1.pep
PPKREGRGFFNRGSGVGDHPPEKGGGGNMVPGWREISAPRVYVSTVRKNKRRWAPALLLGGCPGMVRDPSRIRPELFPPCLFLKSFFYCTRGFRAPPKKKKAWIKLKPPP

SEQ ID NO: 314762 - protein, 390 aa, Zea mays
  Clone ID: MRT4577_50122C.1.pep
MAGANFLSTAALVARGVAACSSISTPTRRHPQVPFQTRGNRVILGLPLQIRVCCRADVEAMEAYAHEERLRFRRRDFIGTCVGTAIGLEMIDGSTSFSGVATAADLIERRQRSEFQSKIKDTLYVAIKAKPELVPSLLTMALNDAMTYDKGRKWSAEDNLTSDKFLDLDHPLLQHLILSFLKQSPETSRPENSGLSSALDLLTEAKKEIDSFSKGGPISFADLIQFAAQSALKRSFLDAAIAKCGGNEEKGRTLYSAYGSNGQWGLFDRTFGRADAQEADPEGRVPDWSKASVQEMKDRFVAVGLGPRQLAVMSAFLGPDQAATEGRLIADPDCRPWVEKYQRSRETVSRTDYEVDLITTLTKLSSLGQKINYEAYTYPKQKIDLGKLKL

SEQ ID NO: 314763 - protein, 114 aa, Zea mays
  Clone ID: MRT4577_50123C.1.pep
SFGKKRKRNSGARTSRSEMGRVIQEIKSPSPWGSSMASGVIKDLSFICAWARAQGWEIDKQLDRYPLKTPDKVLHLQIPHRDKPSIITPFPPKKFNDASRTSSSFIKQQTASCF

SEQ ID NO: 314764 - protein, 117 aa, Zea mays
  Clone ID: MRT4577_50124C.1.pep
GSAAAAAGPFGEPPWIVDCSVLQTGSVGAMLTQFFLRQTRRGVCHPLCAERWQKLAQSCCAFAQSMSHAGGANPGLYCCQQVIAYTTVGLANGSCYTLALWARGLPALRKACVANPV

SEQ ID NO: 314765 - protein, 106 aa, Zea mays
  unsure (1)..(106): unsure at all Xaa locations
  Clone ID: MRT4577_50125C.1.pep
GRVGGRVGGRVGGRVGLASVIMFKDWDRQNPTQIVTEMCGFVTILSGTFLLHKTKDMVDGXPPNLPIRLPKHADEDGYADDVIPLRSAADGIPLRSPRATDSFRSS

SEQ ID NO: 314766 - protein, 103 aa, Zea mays
  Clone ID: MRT4577_50126C.1.pep
LARSSPSSMWPLTSLSIQSRSCPLDCSHSSVRFTSRWSRYLLRCVTARPSCGRLSTDEPAVTSSSWKLQASTRQWMCVCLSRSPSAPPWYALCPYPCTPPGRR

SEQ ID NO: 314767 - protein, 127 aa, Zea mays
  Clone ID: MRT4577_50127C.1.pep
YYGAVTPSIIARTSGEQCDLRECQSLSSVSNVSSAGDNSDGMNQEIHQSVVPFELYLSVSVGEHIRTMLSGSVPHDIAPLLESLLALSVDGHERCSIPHVVGVFRGTQVPRLLSHGKSCQQHQLRRC

SEQ ID NO: 314768 - protein, 192 aa, Zea mays
  Clone ID: MRT4577_50128C.1.pep
HPCIATILLREIVCQCTIRATATLAGDGYSHCEASAAAPCQINNARECWKDTKNGRTYSACNDDGCKCPDGFKGDGRHKCEDIDECKERTACQCKECKCKNTWGSYECGCSGGLLYMKEHDTCISKSGASEAGWGFLWVIFFGLVAAGIAGYAVYKYRIRRYMDSEIRAIMAQYMPLDNQGDVQSHSHHIEM

SEQ ID NO: 314769 - protein, 70 aa, Zea mays
  unsure (1)..(70): unsure at all Xaa locations
  Clone ID: MRT4577_50129C.1.pep
KQASPRKISPPGVNVLFXPPQQDLERNPETFWCRACVKGKKNPQVWGGSPSNHIFWKMAQRIHILXXKAS

SEQ ID NO: 314770 - protein, 106 aa, Zea mays
  Clone ID: MRT4577_5012C.1.pep
FQQQLFPFSQLGIAYFQQQQLFSFNQLAALNPPGYLQQQILLPFSQVGAANRGSFLKQQQLVPFYQQFGANPATLFQIQQLLPFVQLALTDRTASYQQNIIGGALF

SEQ ID NO: 314771 - protein, 129 aa, Zea mays
  unsure (1)..(129): unsure at all Xaa locations
  Clone ID: MRT4577_50130C.1.pep
CKNTWXGSYECGCSGCLLYMKEHDTCISKSGASEAGWGFLWVIFFGLVAAGIAGYALYKYRIRMYMDSEIRAIMAQYMPLDNLRSQIEPFMSAWRKMTGGCKLDVLEPGLIGFYMSIHIIRVQFIHRIH

SEQ ID NO: 314772 - protein, 55 aa, Zea mays
  Clone ID: MRT4577_50131C.1.pep
AKENRLDAHVSRRMDLISGLKYNLLMSHHYGFGMGPKGLCVVTASRHHDRSLEIQ

SEQ ID NO: 314773 - protein, 63 aa, Zea mays
  Clone ID: MRT4577_50132C.1.pep
LKILQYYRGSTLVSRPRKKRINLTDNPPKGLNMDFFASTNNNKLAFTSCTNHSDKKSTAQMIN

SEQ ID NO: 314774 - protein, 45 aa, Zea mays
  unsure (1)..(45): unsure at all Xaa locations
  Clone ID: MRT4577_50133C.1.pep
GLSAMGGGAPXSSTPQVLPSRXSRXPGPPRXTXXRRPYVVSHPGP

SEQ ID NO: 314775 - protein, 313 aa, Zea mays
  Clone ID: MRT4577_50134C.1.pep
LINNAYRPRLSFESNASCRCGVWAVMAGVERFANKGVGSNLVTYLTSVVGMSTAAAAKSVIAWNGVSFMLPLVSAVLADSAHWDRYCTIAASSLLYVLGMVALTTWALLGTRMPRSTLFFPLYLMSIGQGGYQPSLQAFGADQLSIGDDDDDGDGDTEPGASSTPEEKAKVKSMFFRWWYFGMCSGSLLGNSTMSYVQDNLGWGLGFAIPCAVMALSVAAFFCCTPLYKRHRQVQQPKGTGIRPSPSSVFNFKSVLGASRKISLPPSRSSDDNGDAISELELQEKPLKTDEASESSPDEAAAAPGVAKVILGL

SEQ ID NO: 314776 - protein, 103 aa, Zea mays
  unsure (1)..(103): unsure at all Xaa locations
  Clone ID: MRT4577_50135C.1.pep
NGNFEIKFGLKDPYMNKAIQMAASTGWKGAGIQLPYRLCKGSMKTHVRLTRXLWKKLMLKDVVIDATWRIVRSPNKGSTVLRPXTNTLTAVYYGHLADVVLPS

SEQ ID NO: 314777 - protein, 69 aa, Zea mays
  Clone ID: MRT4577_50136C.1.pep
SNKCSWHVGKQAHVDLRWPRASGTPDMYARCYRPVSWGMRAFTCLRPFLTLQKKKKKKKKKSTLRCYHC

SEQ ID NO: 314778 - protein, 99 aa, Zea mays
  unsure (1)..(99): unsure at all Xaa locations
  Clone ID: MRT4577_50137C.1.pep
DELTLAKTDLEMQVXDLNEELAYLKKNHEEEMKEFSNQAVGQVNVEMDATPGIDLTRVLAEMREQYEALAEKNRRDAEAWFQAKSAELNKEVSSNAAMI

SEQ ID NO: 314779 - protein, 120 aa, Zea mays
  unsure (1)..(120): unsure at all Xaa locations
  Clone ID: MRT4577_50138C.1.pep
PPPPFFFFFPYSPTPFFLSPLPPIFSILNLSCLRSSPVLLHFSTFRSSLLLIFALFSIQXGIVLLSPLSPSSLGSRFPFPLVLPLPLLPLSTFPPSSASLFFPSPSFCAPPPSPSPSLPP

SEQ ID NO: 314780 - protein, 107 aa, Zea mays
  unsure (1)..(107): unsure at all Xaa locations
  Clone ID: MRT4577_50139C.1.pep
KKTHPLPPSPXPPXPTAQTPHPLASLPPPPQXPPRAQRRQLTRSXPKQLAPPPXTSTXXXXPPPPTDPPEKGSPPPALPRSPQRSGSGPRQWPWVTIRRLMTTRPTG

SEQ ID NO: 314781 - protein, 872 aa, Zea mays
  Clone ID: MRT4577_5013C.1.pep
MSPAVASASSGDRIRTYEDFVRVHAYLLAAAGIPPSLHRRLYRKLADEVFDGGEVFAVEPCEDGRQRRLVLTADQSLGKESDVFLVDHAWSFRLPDALKQLREVPGLAERMAALMCVDLDRKIEEDEQDDDESGSLEHVSQVVEKERARVQERSDSTAWLELEELGIDDDMLVALDLSANFPNLVALNLWGNKLRDPEKVMQEIRKCTKLKALWLNENPVLGKSIDKAVLDGLSGLEIYNSHFTSKAGEWALGFCADIVGVDNPCSSVESTLFGSIGTIDLSDRCIHKLPEVFSPSKLPSLSKLNVRGNPLDQISGDDLLKLFGGFTQLQELEVDIPGPLGNSAISILESLPNLSLLNGVDSSSIIESGKHIVDSALEPRLPEWSPEEPLAERVIGAMWLYLMTYRLADDEKIDETPVWYVMDELGSAMRHSDNANFRIAPFLFMPEGKLHTAISYTILWPTHDVHTGEECTRDFLFGIGEDKQRSARLTAWFRTPENYFIQEFRRYQEQLQSNSICSSTKIEETQTPSTKSVRPRDGRVLRVYTDIPHVEEFLTRPEFVLTTDPKEADIIWVSMQVDSEVKNAVGLTDQQYTNQFPFEACLVMKHHLAETIHKAWGSPEWLQPTYNLETHLSPLIGDYCVRKRDGMDNLWIMKPWNMARTIDTTVTGDLSAIIRLMETGPKICQKYIERPALFQGRKFDLRYIVLVRSIRPLEIFLSDVFWVRLANNQYTLEKTSFFEYETHFTVMNYIGRMNHMNTPEFVKGFEKEHQVKWLDIHESVRSTIRHIFEAAAAVHPEMQNPFSRAIYGVDIMLDNRFKPKVLEVTYCPDCGRACKYDTQALVGSQDTIRGRDFFNSVFGCLFLDEQTHVLPL

SEQ ID NO: 314782 - protein, 160 aa, Zea mays
  Clone ID: MRT4577_50140C.1.pep
HGLASTPAPISTTTCRPAVLATAAASETRGGAPVRSSGIETSTVGLGCEAVTGQVTEVNKDTFWPIVEAAGDKVVVLDMYTEWCGPCKVMAPKFQEMSEKNLDVVFLKLDCNQDNKPLAKELGIKVVPTFKILKGGKVVKEVTGAKIDELAQAIDTVKSD

SEQ ID NO: 314783 - protein, 129 aa, Zea mays
  unsure (1)..(129): unsure at all Xaa locations
  Clone ID: MRT4577_50141C.1.pep
SVDRDLXGGAVFKRGRGDSLCSHGGSCRCRCWGARFRPESVRHQCYCPAAMMKPSRFLGWWIAAFANTWSSLLTSIAPVLSSTVPYIPHGLFSTLLHFEMIYNFFIFFIYFFQSWLLCPNPIYIHHYSF

SEQ ID NO: 314784 - protein, 180 aa, Zea mays
  Clone ID: MRT4577_50142C.1.pep
MALRLPISSSHGLASTPAPISTTTCRPAVLATAAAQKRSLLLATASETRGVAPVRSSGIETSTVGLGCEAVTGQVTEVNKDTFWPIVEAAGDKVVVLDMYTEWCGPCKVMAPKFQEMSEKNLDVVFLKLDCNQDNKPLAKELGIKVVPTFKILKGGKVVKEVTGAKIDELAQAIDTVKSD

SEQ ID NO: 314785 - protein, 46 aa, Zea mays
  unsure (1)..(46): unsure at all Xaa locations
  Clone ID: MRT4577_50143C.1.pep
IFEYQNGRSDVVQVDEAGYDNCDKANALSSXSKGHTYAFQPPNRTP

SEQ ID NO: 314786 - protein, 182 aa, Zea mays
  Clone ID: MRT4577_50144C.1.pep
MALRLPISSSHGLASTPAPISTTTCRPAVLATAAAQKRSLLLATASETRGVAPVRSSGIETSTVGLGCEAVTGQVTEVNKDTFWPIVEAAGDKVVVLDMYTEWCGPCKVMAPKFQEMSEKNLDVVFLKLDCNQDNKPLAKELGIKVVPTFKILKGGKVVKEVTGAKIDELAEAIEIANKKSG

SEQ ID NO: 314787 - protein, 89 aa, Zea mays
  Clone ID: MRT4577_50145C.1.pep
LFSPSPLEIGEASSASSMLACCFLNCVTVIGWFLLPLFCPFFSFFLSCFQLVVDAVFFSRDKISIMSSVNEELYLLSKEKKKKKRPLGP

SEQ ID NO: 314788 - protein, 60 aa, Zea mays
  unsure (1)..(60): unsure at all Xaa locations
  Clone ID: MRT4577_50146C.1.pep
VXTHPCFGQXXRRXGCRFXTTGPRGLLAPLAPSQEADEVPGPAAATCRGAGTENAWVEPG

SEQ ID NO: 314789 - protein, 58 aa, Zea mays
  Clone ID: MRT4577_5014C.1.pep
PRGDPPPQKIVTYEAQVSTQKTKAPGKCPMALFTGPFSTIVGGDQKCPTIPGIFAHQT

SEQ ID NO: 314790 - protein, 57 aa, Zea mays
  Clone ID: MRT4577_50150C.1.pep
RTALLAVPLSGTSHVVRLKELIRRGQRRSGAARGAGEGWGAVAMRNRKPHKAVFVCK

SEQ ID NO: 314791 - protein, 210 aa, Zea mays
  Clone ID: MRT4577_50151C.1.pep
MVLNSTSPGRIADHGSSISEPLLKDTIPATANGHGVDCSQQQQVVASEETVVVLVNNNDHFTSLKPAESGVTSQEGSDSNAASSETPQRPPPPADEAPNQNGTGKDKQKEPVSAGCSSSRQLFPPGRIIHMVALPPQQPDPNSGDGTSSGEIVGIYETPRGLYGKIRLAPNMIKEHYMPSYIRTMESLLEQLQKDDDDGSVCTCTAPSDL

SEQ ID NO: 314792 - protein, 141 aa, Zea mays
  Clone ID: MRT4577_50152C.1.pep
QAPTHTRMTAWASRQPLLSNLSITRVEIPPILDTTQASGGRLDRVYMTNDHIVDVSLVLTHGMKENVSLHRRAVERRVRATLITGDLRIRRLHAVYYQAATPDCIRCLGEYLSVRSIERANISTQAAGTSGSALATGLAEP

SEQ ID NO: 314793 - protein, 85 aa, Zea mays
  unsure (1)..(85): unsure at all Xaa locations
  Clone ID: MRT4577_50153C.1.pep
STVRYPYEIMHAKIVALNCCRPSPSAVERXVLCCTRRMHVDVNAIYAPRRLLKQRNVGIAIQDADILEXRVXNEKCIFASSMLYN

SEQ ID NO: 314794 - protein, 112 aa, Zea mays
  Clone ID: MRT4577_50154C.1.pep
GALLVGPPWHGPAMQVRVFFLPVPPATASFGRGGGACSAVCHGSRVGRTSVGTSSPSPFMRQRSAPSASLATKLLSLSIATLGAACACPRADCRWGAPQTLPSLGCLAAGSN

SEQ ID NO: 314795 - protein, 419 aa, Zea mays
  unsure (1)..(419): unsure at all Xaa locations
  Clone ID: MRT4577_50155C.1.pep
ADSELQLARARCVALQDHLAASPDLPRHPALRSLLRLVNAELRFLSSLRLAPATPLSSNLPHLVALHLVLTHPAIRSPSRLSPLPGVDFSCAFRGRPAWVLVSASNPARLAWAPPGGLRARFAAALEAARGAPPATRPEKLLVVFSRGVGVDIARGLTEGFEAVEADLLEEFIGDSEEENEHGWVVISXTRVRSSGISXFEIDVVEGASEVLLPSDVAVDEVSADEEELLGFWGSFAAFMEKMWKVSRELVNLDTTALVAIVSGISNGGVGKLMAAPEAETRARFKCNYKFVMDQAQYELQFPILIELRKAVEGKQCIICETVNLEFKEIVSMCGGPEENTRARHLLKQLTIVPDNPSARMMDLPTTRKLAMKNKIVFGTGDHWRAPTLTANMGFVRAVSQSGMSLLTIEHRPRALIGL

SEQ ID NO: 314796 - protein, 211 aa, Zea mays
  Clone ID: MRT4577_50156C.1.pep
LGRAQPYPLRTTLSLGIPLPLLVLMAEHKSSSSVACCTSVELPTLAATPSPSPPWIWPSLHLSFQPWTATSPAYSKSAPHLLNISAPCPISLSRATLLVLHGVDMGLAPATSPRWVSSGRRDAASYTSCASLVLALALVHGAAAATTLLRVAPSTCSMKYCSELQLDLHSPCATSQTPLVVDVVLRASSVRRKSQVHGQHIHNSNPIGQVR

SEQ ID NO: 314797 - protein, 61 aa, Zea mays
  Clone ID: MRT4577_50157C.1.pep
AKCSNFLREAPVGGWLCARKEESRIVRLFQQQEAFSANHRAQGLGQWSLASWQIIRRSAQY

SEQ ID NO: 314798 - protein, 196 aa, Zea mays
  Clone ID: MRT4577_50158C.1.pep
LQLQPWKGASPAYSRSAPHLLNISAPCPISLSRATLLVLHGVDMGLAPATSPRWVSSGRRGVASYTSCDFLVLALALGHGAAAATTLLRVAPSTCSMKYCSELQLDLHSPCGDVTNSARCRCRASGIACSTKIPSPWTAHAQLKSDRPGTLIDHVLWKTSGIDLQVMLMDEAKMDESTKCQDGRYLPSGRQLTTLT

SEQ ID NO: 314799 - protein, 41 aa, Zea mays
  Clone ID: MRT4577_50159C.1.pep
SNSNRSQPATQARCHAITARSPFSLPTAISSRWSKLSRLFV

SEQ ID NO: 314800 - protein, 61 aa, Zea mays
  Clone ID: MRT4577_5015C.1.pep
LKKWRVLAKKKKKKKKKKKKKKKKKKKKKKKKKKKKKKKKKKKKKKKKKKKKKKKKGGARF

SEQ ID NO: 314801 - protein, 39 aa, Zea mays
  Clone ID: MRT4577_50160C.1.pep
AKSPALCVFGSSQALNICQFNLLGSSCRHIKLYLKNPHQ

SEQ ID NO: 314802 - protein, 147 aa, Zea mays
  Clone ID: MRT4577_50161C.1.pep
MEGALASAATGALQSVVAKLQALLRDEYRRLTGMRGKMEWLTGELVAMKAFLTDMSRDETPPDEQRKLWMKDVRELSYDIEDSLDDFFVQHAAKPDGIMEKMASLLERTKSRHRIGKEFDAIKRKVMEADARRKSYSTDRPVAKARS

SEQ ID NO: 314803 - protein, 134 aa, Zea mays
  unsure (1)..(134): unsure at all Xaa locations
  Clone ID: MRT4577_50162C.1.pep
MYIRDEHMWSISTDTHRDLSMREVSTLRGRTSKGSTADQHXGXGGGFIGDHHEVIPTSGDCFAVGDDNLXGYMDSRGNEGLGYRDGGVPGVVEVDTTELVGEVSCTPPXCDLLAVAVFXGADHHSGAAVAQEKP

SEQ ID NO: 314804 - protein, 201 aa, Zea mays
  unsure (1)..(201): unsure at all Xaa locations
  Clone ID: MRT4577_50163C.1.pep
LWVIKKNFFGNPSRIGRFSPYRPSCHXPPLFQPLPSSTXTPSRAPAVASXDRPCPLDRADPSPPLARNLRRRPXSPPTSPPSINGGNCRSHEWPPPSPSPTLPLPSIKPTTTEFSPPVSSSPSPSPSLPFSLARPPPLPPDRPPPRSXPASASSRLCXPSPRSRPGPSXSPLTTPCSTPFLLSLRSSTNCSNARTVRCDDS

SEQ ID NO: 314805 - protein, 92 aa, Zea mays
  Clone ID: MRT4577_50164C.1.pep
MDKAAVLAEVITHVKKLKSTAAHIRDRCAAVPADADDVVVELVHGGAAPPSAGGGVLVRATLSCDDGADVFADVRHALRPLRLSVVGSEVTT

SEQ ID NO: 314806 - protein, 68 aa, Zea mays
  unsure (1)..(68): unsure at all Xaa locations
  Clone ID: MRT4577_50165C.1.pep
PPRRRTENAGGAGRPNQAVREKGPTVGSADPSNPGDPRIGPTAKDAAAAVAALVXGSRTVESWRLXRG

SEQ ID NO: 314807 - protein, 188 aa, Zea mays
  Clone ID: MRT4577_50166C.1.pep
MDDMGSVPFADAGLLDGFYGGSHGHGGDYELLASQLGAGASSTSPAILDGSVPLVDAAASAEEATRSKGDHLQDDKAAMALKSHSEAERRRRERINAHLATLRTMVPCSDKMDKAAVLAEVITHVKKLKSTAAHIRDRCAAVPADADDVVVELVHGGAAPPSAGGGVLVRATLSCDDGADVFADVRHA

SEQ ID NO: 314808 - protein, 120 aa, Zea mays
  unsure (1)..(120): unsure at all Xaa locations
  Clone ID: MRT4577_50167C.1.pep
PARRASDERGAEARGVPGAAAFRTRAQQDAAPPAVQQPRPQSAEAPTVPRRDDDRRLEVRRRGVLQQLVADVDVGRVEVDRGAGRVPEAAAAAPGTGLGEHIPEARVLDTAAPRXRPRXR

SEQ ID NO: 314809 - protein, 143 aa, Zea mays
  Clone ID: MRT4577_50168C.1.pep
PLGGRPGFLAVRALGFFFGRVSGGARPQFLIHKKGPGGGRPKGKGMWLVPLGRWAKRPLDQSSGGKGFGTPPPFLFFLVPGKKKKKDPPPLFCTFGIKEFLFFFKFLTVGKKKNFGIWFNYKNPTPGQMGKAKKKKKKAPTTP

SEQ ID NO: 314810 - protein, 68 aa, Zea mays
  unsure (1)..(68): unsure at all Xaa locations
  Clone ID: MRT4577_50169C.1.pep
XLYGLFLLPWGHFLDSEQSTYLPNSWAHMIKACLFKGHQVTIDKQVNRDNLAPLHLVISKTQCCAARK

SEQ ID NO: 314811 - protein, 91 aa, Zea mays
  Clone ID: MRT4577_5016C.1.pep
ILEWLLCSSGSPSTVGDRLSFTVLGLGSSPSARGELIGQTFKLSVTRSKSLGSVQSKSTIVIDRYDHVIAVTIITLALAPSLACFTPYPIR

SEQ ID NO: 314812 - protein, 181 aa, Zea mays
  Clone ID: MRT4577_50170C.1.pep
DSPRCEVVCGNFLSMPFPDASFDGAYSIEATCHAPRLQDVYGEVYRVLKPGGLYVSYEWVTTPLYRAEDPDHVECIHGIERGDALPGLRRQDEIASIAKEVGFEVLKEQDLALPPALPWWTRLKMGRIAYWRNSLVVRVLTMLRVAPKGVSEVHEMLYETAQHLTRGGETGIFTPPTEEAN

SEQ ID NO: 314813 - protein, 203 aa, Zea mays
  Clone ID: MRT4577_50171C.1.pep
IGYLEAGLDSPRCEVVCGNFLSMPFPDASFDGAYSIEATCHAPRLQDVYGEVYRVLKPGRLYVSYEWVTTPLYHAEDPGHVECVHGIERGDALPGLRRQDEIAAIAKEAGFEVLKEQDLALPPALPWWTRLKMGRIAYWRNSIVVRVLTLLRIAPKGVSEVHEMLYETAQHLTRGGETGIFTPMHMVLLRKPPAAASTEEEAK

SEQ ID NO: 314814 - protein, 58 aa, Zea mays
  Clone ID: MRT4577_50172C.1.pep
LLISTLSSHFIYQASPTSPDRILYMGGGFLLTLPSHATLFRPLLPRFQLPCSPVHYLF

SEQ ID NO: 314815 - protein, 370 aa, Zea mays
  Clone ID: MRT4577_50173C.1.pep
MEAATMAWTAAVVGAGLVYWFVWVMGAAEVKGKRAVDLKMGSITRDKVQDKYTQYWSFFRRPKETATTAASAEKVPAFVDTFYNLVTDIYEWGWGQSFHFSPSLPGRSHRDATRVHEERVADLLGARPGHRLLDVGCGVGGPMRAIAAHSGSDVVGITINEYQVKRARAHNRKAGLDSPRCEVVCGNFLSMPFPDASFDGAYSIEATCHAPRLQDVYGEVYRVLKPGGLYVSYEWVTTPLYRAEDPDHVECIHGIERGDALPGLRRQDEIASIAKEVGFEVLKEQDLALPPALPWWTRLKMGRIAYWRNSLVVRVLTMLRVAPKGVSEVHEMLYETAQHLTRGGETGIFTPMHMVLLRKPAAAASTEEAN

SEQ ID NO: 314816 - protein, 65 aa, Zea mays
  Clone ID: MRT4577_50174C.1.pep
APPPLVPFGNTVGACPPVIGASRPITRLGTPPPPLAHPRKPSPPFAHPRELSPRKNLIPAERESF

SEQ ID NO: 314817 - protein, 53 aa, Zea mays
  Clone ID: MRT4577_50175C.1.pep
NEARNSSTSQHRLLRATYNTGGDLPITRFHASCYARDDLPFCLELHHSGCVGS

SEQ ID NO: 314818 - protein, 133 aa, Zea mays
  Clone ID: MRT4577_50176C.1.pep
FFEARCNSIVCDKYIEYALCDQDKERWISSSRCWQYQSAPPVMSSLGEEWNSTCGFAQHRRSQRVYKFAEQPTSTVPTSLVLVVISEGADFVLSERNKSVFSWYPVGHILWVPVGIAELFCTGGERDSRQDEL

SEQ ID NO: 314819 - protein, 56 aa, Zea mays
  Clone ID: MRT4577_50177C.1.pep
GEDCTKKIHGGGGGQGQLIGVNRHSSSHRPPHPSKPPTLLYHARRLPDTSRLAPTA

SEQ ID NO: 314820 - protein, 106 aa, Zea mays
  unsure (1)..(106): unsure at all Xaa locations
  Clone ID: MRT4577_50178C.1.pep
RYHGSTLIAASLSGLPALHQKFDLPAPFVLHTDCPHYWRFRLPDETEEEFSTRLANNLENLVLKEGPETIAAFIAEPVMGAGGVILPPRXLFEKIXAVLKXYDILL

SEQ ID NO: 314821 - protein, 158 aa, Zea mays
  Clone ID: MRT4577_50179C.1.pep
MADRVTVVSPRDPWPLSTVTVDDLEALVADGLLRPLSGDPQPEWVVHASEAVSTPPPGYVVSFVSFHERGFGVPASRFMRALLHYYGVELHNFNPNSIAQAAIFEAVCEGFLGVDPHWDLWTHLFSVELFALTTGEKKVCMVVRAGGCTLQLRQGRAQ

SEQ ID NO: 314822 - protein, 99 aa, Zea mays
  unsure (1)..(99): unsure at all Xaa locations
  Clone ID: MRT4577_5017C.1.pep
GFLMLVLLSACATNDTMAPQXXQSHITILLLPYLSPSMTEICEYAIEQHXTIQNAMEIKRLPSSALLLQHPRDLLQXIPLXYVLAHDIKVQEQQLLELS

SEQ ID NO: 314823 - protein, 169 aa, Zea mays
  unsure (1)..(169): unsure at all Xaa locations
  Clone ID: MRT4577_50180C.1.pep
VPGPGAPQQNGPAPQQGPTNRDDRREPEATGKTQRAPAGNTRGATHRSRERQPDAEGGREPHHADGRRRTATXTARTGPPPRRSPGTAGQGRRRRSRKARRRASRDEREELAHGAXERXGXAPPRPTGGRAXERKREEGGGRAQGHGGHQGQAAQQTGXRQGQAPTTTP

SEQ ID NO: 314824 - protein, 103 aa, Zea mays
  unsure (1)..(103): unsure at all Xaa locations
  Clone ID: MRT4577_50181C.1.pep
HKSPQTPRQYTKYSHIIGLQAAITTIPIQGRTARQRQQHEDRYNGTDNTWTLLLNEARKTKDFHQGLXQRAEWTKRGSYPLLMYNTIHWGGGLERRNTSLPRP

SEQ ID NO: 314825 - protein, 81 aa, Zea mays
  Clone ID: MRT4577_50182C.1.pep
KKNKKKKQKKRDGITIKKRDLNSINCPIFHTFGTGKTKSLPTLKNLQNSQNFASCQNKKKGKTDRFSQELHIQNANGTPPE

SEQ ID NO: 314826 - protein, 75 aa, Zea mays
  Clone ID: MRT4577_50183C.1.pep
QSNVSQNRPYHFFLKGWNNSLHPFAGVYLPVQKLHVPGLQKHELHPLIPKMGLLFSQTSSNPKKTCLPPIFSPLL

SEQ ID NO: 314827 - protein, 101 aa, Zea mays
  Clone ID: MRT4577_50184C.1.pep
RYQRLEGSSSEQAASNSPSRTAECGGDQLDHGQPEDRASPEFYASVSALQYALKGVAWNLGMSFVNRHGQPEHSGDSGVGCIHGGAIGGDHKESVCRLEPN

SEQ ID NO: 314828 - protein, 40 aa, Zea mays
  Clone ID: MRT4577_50185C.1.pep
SLSLDGLAIRLRRQYNAAYVVAHAGGPPWAHSSAFYLSST

SEQ ID NO: 314829 - protein, 46 aa, Zea mays
  Clone ID: MRT4577_50186C.1.pep
LPALAAKLASRRFCTGSVTGHWAFSPAVPVLPACALIRRAKGSVLW

SEQ ID NO: 314830 - protein, 52 aa, Zea mays
  Clone ID: MRT4577_50187C.1.pep
TPAILYCSCSAWSGRRPLALPCRGHGKPASTLLTDSVPGVIVEPSEDQLPAC

SEQ ID NO: 314831 - protein, 59 aa, Zea mays
  Clone ID: MRT4577_50188C.1.pep
HKQQTLIVIGTENCSKLYVSGSTSDAWHRERFMQKGQYSTMGCHLLAPSVGGLTCSACC

SEQ ID NO: 314832 - protein, 344 aa, Zea mays
  unsure (1)..(344): unsure at all Xaa locations
  Clone ID: MRT4577_50189C.1.pep
MTRIENVQCTTYTKAYVPLSSGAYSRKKPTCHKYCASVELTWKPCRLVGYRDFRLKELACQQLAHGVDEQYPVKSSTVEQTQDRQPCLPQGDAYFAGLSKKEIERRRKIGAANKGKVPWTKGRKWSEEHKKVIRQRTAEALRDPKVXHIRKKMLGHRQLHRQTSKDKISAALRTVWERRIVSVRSRQKVLQIWSNSIAEAAKNGGHGQDMLGWDSYERMKSEMVSTFLWIKERGRMVKKLERAVAKIAAKRLQVVRRREEQATRMKKLKPDKTLLQNADRQPARVVVSARPKLKERLAKWHGRKKELETVISSRARKRGLRNPPRRQMAAESLEALSTSAAGAP

SEQ ID NO: 314833 - protein, 120 aa, Zea mays
  Clone ID: MRT4577_5018C.1.pep
PPQTGRGRFRPRPVFKGSGKKQGKTGEGCPPRGCPPARAPNPRGPGGPPKQRAGNRGPGKPPGNQSRGNGWEGCRKPPPTAPGLLEKVIKKGGGQNPEVWGGVFVKNLDWGWKGGPQGPP

SEQ ID NO: 314834 - protein, 108 aa, Zea mays
  Clone ID: MRT4577_50190C.1.pep
TRDQLWRTNAWIRLDSCKAIIYYQSNSSKKKTQIKAPTFDLRELSHNFFSRTGRRAAHHYIKKEELGPKWTNTRKLPYWPKTQKYNLGFGFLHLFQQRKGLQLRRWLE

SEQ ID NO: 314835 - protein, 62 aa, Zea mays
  Clone ID: MRT4577_50191C.1.pep
KICRSILKCLNFAIVLSQTMVGSFTKLLWCKNSLCIKAWVFPIGPSIVCTKGHLSNIFCLFF

SEQ ID NO: 314836 - protein, 73 aa, Zea mays
  unsure (1)..(73): unsure at all Xaa locations
  Clone ID: MRT4577_50192C.1.pep
GGGGRAXXXGGVVVWEECPACGAFSPPPKSMLTEGGGGAREXXGGGSTVGAAFEGRLLFGKKTIFFYKSPLAP

SEQ ID NO: 314837 - protein, 56 aa, Zea mays
  Clone ID: MRT4577_50193C.1.pep
TVKVVVFGPRALTLVNLDQHARLVVVERPKDLHNHRLDGGVNWLKPNTKLSMCAST

SEQ ID NO: 314838 - protein, 134 aa, Zea mays
  unsure (1)..(134): unsure at all Xaa locations
  Clone ID: MRT4577_50194C.1.pep
DRRVQTHLTSNSHNKLSRLLIQLEEFITAAHLLEQPTITRGSAVKTDQLRPHTEVDPLTSTAYLHHXHCPPVADISHIIHAAILTPDELLSFYAHTAPNAGIRIQLQQLPKFRNRTFEFSSTFSLYTINVSCFI

SEQ ID NO: 314839 - protein, 168 aa, Zea mays
  Clone ID: MRT4577_50195C.1.pep
QDAGSDSVETTDKASFSTHVVHHKSSKTKGQLQKDLLGIKRKALVLRRGGKNTEAEEELEKAKVLEQQLADMEESNNLSASQGVTTAGGDEILLVHASESGMSVVTLCGSPSKPQIETTNPNQGDVGEESRVGRSPALSQPAFTDPLGSEKGHIHLLEVLNKTHGWCG

SEQ ID NO: 314840 - protein, 1067 aa, Zea mays
  unsure (1)..(1067): unsure at all Xaa locations
  Clone ID: MRT4577_50196C.1.pep
MLEKIGLPPKPSMRGATWVVDASHCQGCSVQFSLFTRKHHCQRCGGLFCSSCTQQRMVLRGQGDSPVRICDPCKKLEEEARHELRYGHKNRATRATTKSASKPEDEILSEILGGGERIQSLDSLLPGRTTSSASTSRRTSSNLSTDAKGDESLSAEAHNYELNNTASIFTPEELRQHAVEEKKRYKTLKSEGKPEEALRAFKHGKELEKQAAALELELRRTRRMATKATNISSAVGTSMTAGSDEXKQKGLQLGKXKKEKNDLASELRDLGWSDADLRDETKAAPMSLEGELTQILREVAPKPLEGKRTGGIDKSQVNALKRQALLLKREGRLAEAKEELKKAKILEKQLEEQEILGEAENSDDDLAAIIRNMDDDKNDDIFIDDSKFPAFNFEQIMVASNDLATDGHFDVTDDDMNDPDMAAALKSFGWSEEDDKQLENLEPVSSNQEGLKEQVLSLKREAVANRRSGNVVEAMSLLKKAKLLEKDLKTEEPDSKVPSLERQKTTHAEDATYAGTNVRPIPTPKSKLAIQRELLALKKKALALRREGKVDESEEELRKGSVLEKQLEELENSSKPPVAKETRSFPSNPPYKVEPPNINLADEVYEPEVTDKDMQDPALLSVLKNMGWEDAGSDSVETTDKASFSAHVVHHKSSKTKGQLQKELLGIKRKALALRRGGKNTEAEEELEKAKVLEQQLAEMEESNNLSASQGVTTAGGDEILLVHASESGTPVVTLCGSPSKPQIETTNPNQGDVGEESRAGRSPALSQPAFTDPLGSEKGSHSPSVVHDRNEHQKTQGDDTLKDEILLHKRKAVAFKREGKMAEAREELKLAKQLEKHLEGAQQDTMDGVGDSITPAVEQNSLVQQPASSSNHTDDITSPPPAQASKRTQPQKAMSSRDRLKIQRESLAHKRNALKLRREGKTAEADAEFELAKELESQLEESDNQSSSSGGKSSEPNDTSVENLLDPQIMSALRSIGWSDMDLSMQSSSAQPLKPVQSSSSQPPQKVEAKSSVAATSKPQSERSQLEEQIKAEKLKALNLKREGKQAEALEALRSAKRLEKKLNSA

SEQ ID NO: 314841 - protein, 53 aa, Zea mays
  Clone ID: MRT4577_50197C.1.pep
STSRSHGTRFDYSICNCKHYECDHMIRLVQKNCLLYSEIHEATIYVVNPISLV

SEQ ID NO: 314842 - protein, 49 aa, Zea mays
  Clone ID: MRT4577_50198C.1.pep
PPATIKGVVTMCERRLYLPGSIAYIPHYHFKKHLTHPTTISNCAETRPY

SEQ ID NO: 314843 - protein, 59 aa, Zea mays
  unsure (1)..(59): unsure at all Xaa locations
  Clone ID: MRT4577_50199C.1.pep
AFCPGRVGCVGXHFWRKTNLPRSRKKKKKKKKKKKKKKKSKKKKKKKKKKKVLCVVTTA

SEQ ID NO: 314844 - protein, 99 aa, Zea mays
  unsure (1)..(99): unsure at all Xaa locations
  Clone ID: MRT4577_5019C.1.pep
LGFYLQLRIVYGGVAKIVWADPKNALISTFAVAITGAITTPLDVMNTRLIVQGHVNQYTVIVSCAQTILIEXCPKAFLKGIYPRVLWIAIFATIFFGML

SEQ ID NO: 314845 - protein, 75 aa, Zea mays
  Clone ID: MRT4577_501C.1.pep
IRYVADGSPTNGELKTADLVSTPAHSVASIPPSTPALHVAPALLSTPVRCSSLFITPPYCSSGMQAIFIFDLSPC

SEQ ID NO: 314846 - protein, 51 aa, Zea mays
  Clone ID: MRT4577_50200C.1.pep
SYVPALENENQPPDNSFKFHVLSYFLNIEELIIMSKYILSCRTPCTLRNLK

SEQ ID NO: 314847 - protein, 74 aa, Zea mays
  Clone ID: MRT4577_50201C.1.pep
IKLSPSSARWLISLVQSFMFHMSSTYHSIALSWLLGEVGYYIIGSTKKSLSGMTKNSVLRLMLAGFHYFTHYLF

SEQ ID NO: 314848 - protein, 73 aa, Zea mays
  Clone ID: MRT4577_50202C.1.pep
SHTCRGLVLAGHVAGPRFGRRSSACPRPPGSRPPPCFNGADVDDGEGVGVGAHLIQVRVLQHQLAAMSEQPTP

SEQ ID NO: 314849 - protein, 80 aa, Zea mays
  Clone ID: MRT4577_50203C.1.pep
PPPTPPTASASLSLFRLFVSASGRRFFSAQKIPRRWSPYLDIGNARMHGNRKMMETERRCRWCHRPNSGCSEVNGWGELT

SEQ ID NO: 314850 - protein, 472 aa, Zea mays
  unsure (1)..(472): unsure at all Xaa locations
  Clone ID: MRT4577_50204C.1.pep
MLMSHSQQMANSRKPPGLRLLGGAGSLRTYQTLVLVLTFLAYTCFHMTRKIPSIVKSALDPQTKVGFSHWGRLHASRNALTTGWLPFNTADGSALLGEIDVAFLAAYSVGMFFAGHIGDRMDLRVFLTVGMAGTAVFTTLFGAGYWLNVHSFYYFLVIQMVSGLFQSVGWPSVVAVVGNWFGKSKRGLIMGIWNAHTSVGNIAGSLLAAFLLKFGWGWSFAVPSLIMALVGLMVYVFLPVSPEAMEIDSDGGELNCEDAVKEPLLEPGQEVKHSAVGFLEXIGFFFLLWFYINCTXLCFSYRWRLSDSAAGVLSTLFDVGGVVGGILAGHISDHLDARALTAASFTFSAIPALFFYRVYGNVSLAWNIALMFVTGMLVNGPYALITTAVSADLGTHSSLNGNSRALATVTAIIDGTGSIGAAVGPLLTGYISARSWSAVFTMLMASALVAGLLLSRLVAAXVASRRTPARPC

SEQ ID NO: 314851 - protein, 52 aa, Zea mays
  unsure (1)..(52): unsure at all Xaa locations
  Clone ID: MRT4577_50205C.1.pep
PPFLAVLIQFQTLPNXXTVHXTPSTAPXISISSKYFLFFFFFSSILVVTSAI

SEQ ID NO: 314852 - protein, 385 aa, Zea mays
  unsure (1)..(385): unsure at all Xaa locations
  Clone ID: MRT4577_50206C.1.pep
AISLQESSVQIHSLHSWAHPRAIREAKRAAGTGSPWEFSSSSGYHATRKTTSIVKSVLDPKTXEPRHVVGALLXLATSSISRTSKVRXNSTALSSGGGGWAPFNAAEDGTALLGEIDLAFLGAYAAGMFFAGHLGDRVDLRVLLTVGMVGTGLFTAAFGAGYWLDVHSFYYFLAVQMVAGLFQSSGWPSVVAVVGNWFGKSKRGLIMGVWNAHTSVGNISGSLVAAAMLRYGWCWSFVVPGVVIALVGLAVFLLSPVAPDVIGVQEDLCLKDAPLLERRRADVEEKAVGFIEAWRIPGVAPFALCLFFCKLVAYTFLYWLPFYISHTAIGGEYLSDSAAGVLSTLFDVGGVVGGILAGHISTTYARALTAASFTFSAIPALFLRV

SEQ ID NO: 314853 - protein, 384 aa, Zea mays
  unsure (1)..(384): unsure at all Xaa locations
  Clone ID: MRT4577_50207C.1.pep
MGSSSGHQRSKTRSRNRKPLGIQLLERVRGSGSPISFRSCQALVLVLTFLSYASYHATRKTTSVVKSVLDPKTKTNLGTSSAHYWPPSHLFYLHNLKDADNSSAGGSLSSGGGGGWVPFNEAEDGTVXLLGEIDLAFLGAYLFQSSGWPSVVAVVGNWFGKSKRGLIMGVWNAHTSVGNISGSLIAAAMLRYGWCWSFAVPGGVIALVGLAVFLLLPVAPDVIGVQDQEDLCLEDDEKKPSDMDAPLLQRRRSDVEEEAVGFIEAWRIPGVAPFALCLFFCKLVAYTFLYWLPFYISHTAIGGEYLSDSAAGVLSTLFDVGGVVGGILAGHISDHLDARALTAASFTFSAIPALFFYRVYGNVSLAWNIALMFVTGMLVNGPYA

SEQ ID NO: 314854 - protein, 667 aa, Zea mays
  unsure (1)..(667): unsure at all Xaa locations
  Clone ID: MRT4577_50208C.1.pep
MLPHDSEDPKHSQERSGPADEGGVLALGTVARQQKRSHHRLAAVQHRRRLRAASSAFLSFLPRGSARAAARNISAACPLQEQRRSALLQSCFKAAVLHRPATATAISFVTSGRRRPSSGLSYISLQESSVRIHSLMGSSSSHQRSKTRSRNRKPLGIQLLERVRGSPISFRSCQALVLVLTFLSYASYHATRKTTSVVKSVLDPKTKTNLGTSSAHYWPPSHLFYLHNLKDADNNRRRGPXPPARPPRRQEPERRVDDADGVAVVAGLLLSGSWRRRWSPRWSPXRPPLLRATCSGASSSMDGAGYWLNVHSFYYFLGLQMVSGLXYQSVGWPSVVAVVGNWFGKSKRGLIMGIWNAHTSVGNIAGSLLAAFLLKFGWGWSFAVPSLIMALVGLMVYVFLPVSPEAMEIDSDGGELNCEKDAVKEPLLEPGQEVKHSAVGFLEAWRIPGVAPFALCLFFSKLVAYTFLYWLPFYISHTRIGGEYLSDATAGSLSTIFDVGGVLGGVLAGHISDRLNARAITAASFTYCAIPALFLYRAYGSMSMAWNVSLMFVTGMFVNGPYALITTAVSADLGTHSSLNGNSRALATVTAIIDGTGSIGAAVGPLLTGYISARSWSAVFTMLMASALVAGLLLSRLVAAEVVAKMESRRTPAPADSDLPVSSMDEP

SEQ ID NO: 314855 - protein, 40 aa, Zea mays
  Clone ID: MRT4577_50209C.1.pep
CLLLLSHRSTGPIVPPPLINKTALVSLGVSQARWMGLERF

SEQ ID NO: 314856 - protein, 73 aa, Zea mays
  Clone ID: MRT4577_5020C.1.pep
IKGGIGPLKKKQKTPPKGWRPKKKKKKILKKKKKKKKKKKKKKKKKKYLIYILKKIYKKKYIFIFVFFFFFFF

SEQ ID NO: 314857 - protein, 57 aa, Zea mays
  Clone ID: MRT4577_50210C.1.pep
NYVIRWVRVWIFRVHGSSSRLFNLLGYVGDRIRLLPLYTYVPMLGMGQGVLYQTDDV

SEQ ID NO: 314858 - protein, 91 aa, Zea mays
  Clone ID: MRT4577_50211C.1.pep
NRGRPSGRGERILLQTTHWRQSPAQHRRLGHIYPHALRVCRHCTRAPRRRHTGTRSGTSQALQTWTILVNELCTSIRPRRCFMRLSRTLSL

SEQ ID NO: 314859 - protein, 87 aa, Zea mays
  Clone ID: MRT4577_50212C.1.pep
KITVVCFFKGPQVMGLKSWYKLAGSPHKKSSSPAMAAPVRKNVSFHSLRKGIIANWGLFVPTVMTVPFPRNQTLFCSCVQCALANGI

SEQ ID NO: 314860 - protein, 109 aa, Zea mays
  Clone ID: MRT4577_50213C.1.pep
MSSSFDSITAVVGDDDELPPAPFDTAVDGTAAEYGGEQQGFGMRRGHRFAASYSSFGTAVSEDDLGGAGGEGGGGYGGFGIPPYSNGGPAYGYADNDANGGGHVMGAKT

SEQ ID NO: 314861 - protein, 51 aa, Zea mays
  Clone ID: MRT4577_50214C.1.pep
HIRFLICLQWRFDKYDLRSISPFSSQRSRGESHSSWFSCFYLVVIPRYLSS

SEQ ID NO: 314862 - protein, 72 aa, Zea mays
  Clone ID: MRT4577_50215C.1.pep
MARCRAVGRLCGERRPVKIQEERRPREYDREHSYSGWAKVLENTLRDEEELRAILGDSIGNMELMRKRWRHV

SEQ ID NO: 314863 - protein, 107 aa, Zea mays
  unsure (1)..(107): unsure at all Xaa locations
  Clone ID: MRT4577_50216C.1.pep
GGRWGGGGSQPRAAICIRGGGVPVGFLWAPFLPHLVFFPFFYFFPGIPGGFKTCLVLYWAINFFLTXFXXXKKKKKKKKKKKKKKKKKNKKKKKKKKKKSTLRCYHC

SEQ ID NO: 314864 - protein, 58 aa, Zea mays
  Clone ID: MRT4577_50217C.1.pep
HEGNKIHVTIIVSPETMVCSALQDSSNGRIFFFRKKLVPWYRQSSDRHPRVMIKDQQN

SEQ ID NO: 314865 - protein, 56 aa, Zea mays
  Clone ID: MRT4577_50218C.1.pep
HHLVELGTGHHSVIATLLFYPGGGGVALIATPLSPRGGLLPVLPGAGFCGLLWLQT

SEQ ID NO: 314866 - protein, 67 aa, Zea mays
  Clone ID: MRT4577_50219C.1.pep
RSPVRLPVAQLVPPHRKGTSGEKKVRKVDMLDADHPRREGQGQLICGNDSVSLSSAPITKMPWREED

SEQ ID NO: 314867 - protein, 82 aa, Zea mays
  Clone ID: MRT4577_5021C.1.pep
DLSTMIMMMHCKYKSHACSVKQPTKLREQYINLYPFWFIPRIIDLHSQNISASRKFTNCEDVLDLDKPISLSFQNNNTYFLF

SEQ ID NO: 314868 - protein, 45 aa, Zea mays
  Clone ID: MRT4577_50220C.1.pep
VVFPSSSWKTTSVVFHSSSPYRLCLCSGRWGKASQEIKKKIAEKE

SEQ ID NO: 314869 - protein, 416 aa, Zea mays
  Clone ID: MRT4577_50221C.1.pep
MNQLLLIVLQKQRQQQMMDGFGGYYDECMYWRQNDEIHDAHKEASAPCSSAPVSHLGAHQQECWQHSSYGSQHHDNQNLLEMEVRVRGEMSQIQHEIYELQKLVESCIASQVKMQHSIKEEVCSALREAGLMPNQPDTTAAKGGNCCIPETMGDIENHNNPIQFNDRPWIESPNSWRSLCVVTQSDCHALSHNADICNLLERKKVSKSLESDFSNKMNQLLLTALQKQRQQRMMDDFGGYYDERMYWRQNDEIRDADKEASAPCSLAPVAHLGAHQQESWQHSSFGSQHQHHDNQNLLEMEVRVRGEMSQIHQEIYQLRKLVESCIASQVKMQHSIKEEVCSALREAGLMRSQPDTAAAKRGNCCICHRMQVDSLLYRCGHVCTCFDCADQLKSSGMSCPICQSPIDDVVLARLNF

SEQ ID NO: 314870 - protein, 364 aa, Zea mays
  Clone ID: MRT4577_50222C.1.pep
MTSTAAEGAGSGSLNPPHSNPSGDGGPRIRSPPGKGNKPVALADITNTGKPNAARSITVPDLVKENTKLLTLLNEKTKIIDLSRVEIYKLRLALQASKQQNLHLTQTNSQMLAEINTGKDRIKMLQHELSCTTALLKVKDSELGTRKTEINELPQKTDLKVWDTFNNQLKIKDGTICRFNLLVSYNVIQEIPEACSSETEVQSHKIGDKAFNSKQNHLTGSQSSLSFNTVDTPEPPEDNTVKRCSKKRSSIEDVNAKLDTITSEPLRHEEKRKSRRKISARLNSVSSEHTDIVVETEHKDVIVSLAGSTSNVSMEQRTNQEQDGDCFSRKSNENQILGRRSLRRAAEKVVSYKEMPLNVKMRRP

SEQ ID NO: 314871 - protein, 76 aa, Zea mays
  Clone ID: MRT4577_50223C.1.pep
FLFGLVFGREVIGAWNPLNCYCLRWEEISATTFVEGCAKSLRASPTNNTQGGIICKRASPRVNSTSYYIQTSKQLF

SEQ ID NO: 314872 - protein, 236 aa, Zea mays
  Clone ID: MRT4577_50224C.1.pep
PGCDFGEAVNFSHSLVSFSLSSESEVQDRKTQRFGRVKSSNSHSRDHYILSIYAPGFEVGIRPPSANCLAHSYIATSVKWCRGDHGAWPPRCRRRAGRGGVPRGPRRAQLPRAAGALYTATRDGWLQRMMHPNNGSWERWRFVGGTGLLGVAPSADGTMLVCDADKGLLRVGDEGVTLLASEVEGSPIRFADAAIEASDGTVYFSDASTRFGFDRWFHHFLEFHSTGRLLQYDPGR

SEQ ID NO: 314873 - protein, 79 aa, Zea mays
  Clone ID: MRT4577_50225C.1.pep
FVTRAPPRVQRLEKLGEGALDAPEDVYVDAAAGGALYTATRDGWLQRMMNNGSWERWRFVGGTGLLGVAPSADGTMLVC

SEQ ID NO: 314874 - protein, 85 aa, Zea mays
  Clone ID: MRT4577_50226C.1.pep
RWSTQVSILSRIIQSRSSRAPIIVGVNSSVVGLKPAAAVPHAAAASSPAKRVQLAAPDGRRAALLGLAAVFSVTGTTWSANGTIF

SEQ ID NO: 314875 - protein, 369 aa, Zea mays
  unsure (1)..(369): unsure at all Xaa locations
  Clone ID: MRT4577_50227C.1.pep
MAPGLLAAAAVLAAVAASLAAHVALNCPVQPVPSHRPPPTPPPNNLLQRLEKLGEGALDAPEDVYVDAAAGGALYTATRDGWLQRMMHPNNGSWERWRFVGGTGXLGVAPSADGTMLVCDADKGLLRVGDEGVTLLASEVEGSPIRFADAAIEASDGTVYFSDASTRFGFDLWFHDFLEFSSTGRLLRYDPRSGETSVVLDRLGFANGVALPRDEAFVVVCETMRFRCIKVWLKGDKAGEAETFVDLPGWPDNIRLGSDGHFWIAVLQLRSPWLDFITRWTFTKRVVASFPALSEWSKGAAKGAMVAQVSEDGTILRVLDDSQGKVINFVTSVTEFNGDIFLGSLATNFVGKLSLARVAQEQEQGAVSS

SEQ ID NO: 314876 - protein, 64 aa, Zea mays
  Clone ID: MRT4577_50228C.1.pep
LCSRSIITHIGSLVVGSSLDYGIEPMLQDCLGELYCGFISALRSMTYILMLSIPWQTTLVVIKS

SEQ ID NO: 314877 - protein, 89 aa, Zea mays
  unsure (1)..(89): unsure at all Xaa locations
  Clone ID: MRT4577_50229C.1.pep
AGKWKGIIYREKGCLEKKKKKKKKKKKKKKKKKKKLKKKKKKKKKXKKKKKKKKKVPFPAGPPAKNPVFSTIPPINYINGHQTPFCPTL

SEQ ID NO: 314878 - protein, 129 aa, Zea mays
  Clone ID: MRT4577_5022C.1.pep
KQPVGFKSIFNQLPRAQAFGFQSKIFGPPSQVKKEKKVFSPPPPKIANYGVPICLWKPSFLCGSFYQRKDFETRGESFPLNPLPPGGKGKKPFFPSWRNVNFPRGLHHQQNIFVVFCPKGAFSVALPPK

SEQ ID NO: 314879 - protein, 396 aa, Zea mays
  unsure (1)..(396): unsure at all Xaa locations
  Clone ID: MRT4577_50230C.1.pep
MPLPSDSGSGARAMSKQFKVLLPTSFHKLRISDELAGCFDAGEGEGAPEPTALVVSPFGKVWRVEVVRDGHGASLGRGWAEFLAAHGVGIGWFVVLRYEGGGALTVKVFDTSLCIKEFGAPAAVMPSKSCKSIFCKPQFIRIFHSNLSEKMMLPARFVKDYVSEARLNSRIAIIFSPIAKFWRVELKNDQSGIFFTGGWSQFLDFHGIKNGEVLLLKYEGNMVFKFKAFGLSGCQKDFKNQNAGIQLNTKKQQETPPIRKRKSNDEKSSSEENKRLKTPVTSPSPSDPSLEKPYQIGTSSWIKKRINTYALEQFLALSVKFCNSIGFRMACTITLKTATNSTRSWQVRGTAYKWHRYIIGVGWKSFCQDNRLKAGDLCAFNIIEXRCGMLLSRAQH

SEQ ID NO: 314880 - protein, 101 aa, Zea mays
  Clone ID: MRT4577_50231C.1.pep
MAIAGLPLEAHAALVRAALRVSPASAAIHKDASQELAAATTSTAPRFHDGDVSATAAAQWAPAQLCEEPVSSTWPGSFRTRTQAEPPSPEQSQKMDLDLRL

SEQ ID NO: 314881 - protein, 71 aa, Zea mays
  Clone ID: MRT4577_50232C.1.pep
SALNDIALLCEGSIFPQSYFISYVAADKSCGFQVIVHVQPLRVCACHRVVVIPFDSGSLFRVNKLAWQLCV

SEQ ID NO: 314882 - protein, 122 aa, Zea mays
  unsure (1)..(122): unsure at all Xaa locations
  Clone ID: MRT4577_50233C.1.pep
QDTTQGQGHMCYFNFNDIREXMIDMDAVVTTIDNSRPDKKLLGDLRVGAXYRSGIGPGVHYIALPRIPSRGGSAHRVVKKLGVLDTNITWVNPXDCGFKTRKLTEVKPGLTNIVWDSKLILT

SEQ ID NO: 314883 - protein, 89 aa, Zea mays
  Clone ID: MRT4577_50234C.1.pep
IYILMCCCRCYRLVGSSTIGVIGLGPVYISTDSSERSSLPSHIPIRKTKQHQHNRSIARAAAATPTVSSGRALPVRTMDTRVLCVVTTA

SEQ ID NO: 314884 - protein, 105 aa, Zea mays
  Clone ID: MRT4577_50235C.1.pep
TKNGKKKTIFQATMSKPPGDQTPGKVFPGTFVPGTGDTSRKGKSPGGFFGRGGFRHGGFQPPLRGVPLGPRQKGVHPGRAYPSLRGGVLGAPHGKGETPGAKIGG

SEQ ID NO: 314885 - protein, 249 aa, Zea mays
  Clone ID: MRT4577_50236C.1.pep
MFGYQKGLDVEAGTSGAAATGGARQLYPGMQESPELRWALIRKIYVILSLQLLLTAVVAAVVVKVRAIPHFFTTTSAGLGLYIFLIILPFIVLCPLYFYHEKHPVNLILLGLFTVAISFAVGMTCAFTSGKVILESAILTTVVVLSLTAYTFWAVNRGKDFSFLGPFLFAAIIVLLVFALIQILFPLGKLSQMIYGGLASLIFSGYIVYDTNNIIRRYTYDQYVWAAVSLYLDVINLFLSLMTLFRAAD

SEQ ID NO: 314886 - protein, 131 aa, Zea mays
  unsure (1)..(131): unsure at all Xaa locations
  Clone ID: MRT4577_50237C.1.pep
CSPDRNGERNKDGSGHIKDIPCSNCAKWCPKDKVIKRILQRNIVEQAAVIDEREACAHDGYGLPKLYTXDHHXVSCXIHAHIARGRSHENRKKRESPQRFTRREDGPRSVQEPARPTAAATTAPPAGAPRT

SEQ ID NO: 314887 - protein, 89 aa, Zea mays
  unsure (1)..(89): unsure at all Xaa locations
  Clone ID: MRT4577_50238C.1.pep
PAEARRRSSSAPEEGERNAPRAPCSRRRCAPAAPAAASXTDGXLPNGNFEEGPPKPAPANGTAAPGAHAIPRRETPGLVEHIEPGHKQG

SEQ ID NO: 314888 - protein, 76 aa, Zea mays
  unsure (1)..(76): unsure at all Xaa locations
  Clone ID: MRT4577_50239C.1.pep
FSFRLSNGQHPLSLSSIGSVCDVAXISFSHDIRXPDKLVDTLNVMELRCGAKEFEQSRDPSLLQPGTFYLGKVDAM

SEQ ID NO: 314889 - protein, 82 aa, Zea mays
  Clone ID: MRT4577_5023C.1.pep
VFGLGMLSHTAPSYHYICVCVIQVSSQNDGCSTYIIQSKTIENRWNELGKNVFTDGKKITWLISLLSNDNHLICTDAGARAC

SEQ ID NO: 314890 - protein, 42 aa, Zea mays
  Clone ID: MRT4577_50240C.1.pep
DYTLVYTFYIVTMMYNLASHNTVFQYIISSVKHKSLTFKSNT

SEQ ID NO: 314891 - protein, 69 aa, Zea mays
  unsure (1)..(69): unsure at all Xaa locations
  Clone ID: MRT4577_50241C.1.pep
SREKVMQVTLPSLSRSFLNRGFLANTGLPGVKLLKNPGRLPRKAPPSPKTVXXXXAMLSVGGSVVRSCD

SEQ ID NO: 314892 - protein, 86 aa, Zea mays
  Clone ID: MRT4577_50242C.1.pep
LLIYWQLWGVNADNVLLFLVPCSLLPGVVPGSWGAPHSCVSYISTVRCNGGTLLQLPAPLPFLHPALTEPGSVLPTTPQRWCPLKI

SEQ ID NO: 314893 - protein, 150 aa, Zea mays
  Clone ID: MRT4577_50243C.1.pep
LLLSFFSLRAREGKREKKKTRKAHAHTAEPNRSPRPLTRPDRASAEGMGGAGDGEGAGSESPPSGARATLNIRCANGAKFTLQADLGETVGAFKEVVAGSCDVPAPQQRLIYKGRILKDEQTLKSYGVETDHTIHLERGVAQPAASGAPA

SEQ ID NO: 314894 - protein, 40 aa, Zea mays
  Clone ID: MRT4577_50244C.1.pep
AVKVGWLNICAGKMSVICWLVWEFKFLLSQVRMRRSTRLF

SEQ ID NO: 314895 - protein, 96 aa, Zea mays
  Clone ID: MRT4577_50245C.1.pep
SRHIKLQGRVLSFQVGSYDSSSNCLHVEAPISCPNKIRGCRPYPVLVGPVSRCPPIGSLAQFAPGCGVLCSDGQGIIALKLHSLRPVGPRHYKNTH

SEQ ID NO: 314896 - protein, 100 aa, Zea mays
  Clone ID: MRT4577_50246C.1.pep
SKFVIQPHHLYLHRGKKVFLNGKKPRYKTWGKKTWGKPPNQGQGLGGIRPHFIKKNFNKKRGHKYCTRKPKGPPGKKIYLAPAKKIRNLPKETRGGWENP

SEQ ID NO: 314897 - protein, 118 aa, Zea mays
  Clone ID: MRT4577_50247C.1.pep
GRVRRHAHRRLDVARALHTCTPSVGSNGALPVGGLLLARCDVVGLGRLRPPLMQPPTLLDHGQGIGRRLDLTHLVQPPTLLPCVTTAAHLYVGAPDQGRRGHQHLGRQGPGAQGELAR

SEQ ID NO: 314898 - protein, 68 aa, Zea mays
  unsure (1)..(68): unsure at all Xaa locations
  Clone ID: MRT4577_50248C.1.pep
SYSARAHLKYLLNPKIKEAITXKFTEYLRRAEEIRAVLDEGGAVPGAIGXDVVVLTRRKTKGQDGYGG

SEQ ID NO: 314899 - protein, 79 aa, Zea mays
  Clone ID: MRT4577_50249C.1.pep
GTLLQTSSPFMPFPMCLSLCDCMNRHRLLCSNPSLNFGPGGSVGSNDRQTTSSLILSHHKHGTVGPSIFIRVPPMANMV

SEQ ID NO: 314900 - protein, 79 aa, Zea mays
  Clone ID: MRT4577_5024C.1.pep
RAGTGILTSPKPHTPRSRDSCDTRRTEYVTKVTQDIVGPKERLECKHFGTGKLERSIDGVTDGNGTYTIELKDRQQEDI

SEQ ID NO: 314901 - protein, 149 aa, Zea mays
  unsure (1)..(149): unsure at all Xaa locations
  Clone ID: MRT4577_50250C.1.pep
GRGDCRVRQWRRRPGPRGPGRDLAARYLTIVELRVPPAGSARRPCHVLAARVRTPVVSLHSALAACAQGRTXQGGSGGPWHTLSQAHRRPHPFVRRALKAVSTRGGPTGGSGWALAHPKPGPSETPPXRPSSAEGSFNFPILQLPVSRT

SEQ ID NO: 314902 - protein, 43 aa, Zea mays
  Clone ID: MRT4577_50251C.1.pep
ISNDRYLLATTIYMYACMGRSPNSFYLFFLGVLMTKKKGRATT

SEQ ID NO: 314903 - protein, 41 aa, Zea mays
  Clone ID: MRT4577_50252C.1.pep
IVSMSYTQLRAKHHESRTIHKYCQRIKRTEPSYIGENLRCG

SEQ ID NO: 314904 - protein, 364 aa, Zea mays
  Clone ID: MRT4577_50253C.1.pep
MDAKPRNLGGSLPVPNVQDLAARPGDELTPPVLSRYLRDDVDGADANGDAASSVPVVDLARLLDPSSHGDEESAKLKAACEEWGFFQVINHGVPDAVVADVKADLQAFFRLPLADKRAVAQEPGGIEGYGQAFVVSEDQKLDWADMLFLSTQPPEYRAPRFWPARPATFGDSLARYSAEVQRVAARLLASMAANLGVADAARLARVADAQAVRVNYYPACPHGRGRVLGLSPHSDAAGLTLLLQVSAVPGLQIRRRGAWISVDPIPGALVANVGDVVEVLTNGRYKSIEHRALVSPTHHRVSVAAFHSARFGDTYAPLEETMVDGDEPARYRSIGVEDYVRLVLSSKLQGKNIMDAMKINPVTE

SEQ ID NO: 314905 - protein, 148 aa, Zea mays
  Clone ID: MRT4577_50254C.1.pep
GRSSPAAARSCHLRLPSIAPHAPTPAAPRLHFRWPPRTEVPIPTRTRRLSVPVPLVQDRNLPTSKTPAAVGFAPPSRLGFWHIFLLRPISHLAVHGAVCHKFARPASCFPSSFRAQTSPVNTTENWLKNVDKKFNVISRQTYRKNIVY

SEQ ID NO: 314906 - protein, 48 aa, Zea mays
  Clone ID: MRT4577_50255C.1.pep
PRVRPRVHPRVRPRVRRAPGLGLLCYFSWDLLSQPYSMVKVFTLHVWQ

SEQ ID NO: 314907 - protein, 1012 aa, Zea mays
  Clone ID: MRT4577_50256C.1.pep
MAPKRKASSSSVAIIPPIDPNTQLPFAGNHMSVVSKSDLLHLVSIGVLPPKELCLWWICRGVTVPTEDNHESIIYIPFLIRGLALPISPFFRGLLDFYRLNLTHLNPNSILQVSVFVHLCEAFLGVLPHFGLWKYLYHCRPGMAGGQHQLVGGTSLEMRRGRKTDYLDIPLKDSIKGWRLEWFIVENHGNSLPPRSGRQPDVRTPSWTESPTDQEVAEAGALLAEVGLLKERGLTAEAVVADFVFKNIQPLKDRAYPAYLYRGLADSTRVTNRRIPVVDLVSRLEMILRGKVSNIGAPVAYSAWNLPPSQAFTSFVSNPPAGDSGLGLRVRPSPKEVSALVASLGEIPDDERQVHFEVSLNPSDVEISAMLDMLAEDSSDAALAETLVVAPILEAGKALDAQRSDDVRPKCSRRADQPTSPAEGQKKKKRRLHRVSSLDRGAGPSVPVAEEVPVPEFTEADPNGCDPTAADPNGCDVRVVDEDDEEDDEIPVIRKNSRRYIASGESSGVPSPALSALIGLQELSLANFDQTLEDMVPEDLLSEPADGDAMVVCADVLDAGLGSSRAASRASSTLERGLEGQEAGLDCIAPMEVTEGPSALEVAVAENSAPMDGANAYPAPEGVAGDDPARMGSTSCDPAPKGVAGDDPARMGSASCDPAPEGVRVGSPSHTSMDVHVGSSPPHSGCMAVAQAFGQGVALEASAPDDRVLASADDTELVPADSLRVVPVGDPSPSHQLTSHDLGVPSFFSNLQALVDEMSSRLKLQGASVPEGALSLARWNPVLLQRRVSDLEVANADMARQYSDLEEKYSQGQTELARRCSDLEEKYSQGQTELARVSASLNDVNTLNSTLHAQLNSEKEEKCALATSRDNLDKLYRDASNSLSILERSHHFTREELDNHRYKLQESLDDVIRLRQLVSTKDAVIKDLRASKKSVAQELENARLAVKVAEETSATLRAQRDKAMDKTIHAGRILMRRPGVVVPDDIVADVNVAPDSSSRPSSSVAPEKNIAK

SEQ ID NO: 314908 - protein, 255 aa, Zea mays
  Clone ID: MRT4577_50257C.1.pep
MSSRLRLQGASVPEGALSLAHWNPVPLQRRVSDLEVANADMAQQYSDLEEKYSQGQTELARRCSDLEEKYSQGQTELARVSASLNDVNTLNSTLHAQLNSEKEEKRALATSRDNLDKLYRDASNSLTILERSHRFTREELDNHRYKLQESLDDVIRLRQLVSTKDVVIKDLCASKKSVAQELETARLAVKVAEETSATLRAQRDKAMDKAIRTGRILMRRPSVVVPDDIMADVNAAPDSSSRPSSSVAPEKNIAK

SEQ ID NO: 314909 - protein, 53 aa, Zea mays
  Clone ID: MRT4577_50258C.1.pep
LTARGRLSSPDREKIHERCDPCHYLGLKYHCINMQLECSTEQGKAWEVITEGA

SEQ ID NO: 314910 - protein, 87 aa, Zea mays
  Clone ID: MRT4577_50259C.1.pep
PYHVKPIAGFDNPQRTETIWTAALSYIVPSIVTGTSRCEKVYPILIATHMGTIKNLVNGMGRISRIVDSVELTSEEVNLCESTTTRS

SEQ ID NO: 314911 - protein, 70 aa, Zea mays
  Clone ID: MRT4577_5025C.1.pep
ERRYTYHLLTDGGQLKRTAHLSLTTYHTQTQTSVTPSQHEQQHASACIYPHRPINNRYLLAIHLSLYRGG

SEQ ID NO: 314912 - protein, 62 aa, Zea mays
  Clone ID: MRT4577_50260C.1.pep
SNSSFTCTLIYPQQMLVGLPVTLRMISWGPPLGLPFFFIPSLLTSFLGVCFPLVNGNSPGFS

SEQ ID NO: 314913 - protein, 173 aa, Zea mays
  unsure (1)..(173): unsure at all Xaa locations
  Clone ID: MRT4577_50261C.1.pep
PTAPTYHIITYEPRVLSQSPQSDSTFFMIKPDGVQRGLIGEIISRFEKKGFYLKALKLVNVDRSFAEMHYDDLSSKAFFQGLVDYIISXGPVQLMXVWRAMSVGTLAXLRSLWPSCTLSSEPVSIRVDFDVDIVRNDIHGTDIIASDIKDIALRVPDGPVDWHSSHHPCIYDN

SEQ ID NO: 314914 - protein, 50 aa, Zea mays
  Clone ID: MRT4577_50262C.1.pep
GPLFINIFIISNLKTLKSLPQNSYPLNNQPPFFSKTRNIIPLKSQHTSLN

SEQ ID NO: 314915 - protein, 92 aa, Zea mays
  Clone ID: MRT4577_50263C.1.pep
RWMAVYFAKLEPMHHVSLESVYTARSQGPVRTKLRDTKDGKSMTQVPCTVLSTRSADAPKIASTKRAEAVTHIINYQGILLWEQVPQTTKGK

SEQ ID NO: 314916 - protein, 110 aa, Zea mays
  Clone ID: MRT4577_50264C.1.pep
PVKERPALSSPSTPRSRWRRQTSCSPTSSTSASSSTWTAALETGLKKSKASSMGDGRKQSSCCCPQSLMLRVINWVEMEQSSGDSSGRKTAHPRAAAVARKLRIKAKNPS

SEQ ID NO: 314917 - protein, 132 aa, Zea mays
  Clone ID: MRT4577_50265C.1.pep
IGFFFFFLARQEDCTICLALLSVMISTKKYEQVLCVSNQPSNINRVGGEIYGGGECAPPYVSVHIKGKCTSIDESASFSQSTGVQGHTTAGFGVIYWFGPRGMASTGAAPPRSKISPAYRHNLNLFLSLSLH

SEQ ID NO: 314918 - protein, 519 aa, Zea mays
  unsure (1)..(519): unsure at all Xaa locations
  Clone ID: MRT4577_50266C.1.pep
PQSPSKVSDASHSIYATLPLAQADLVLQAQLHLGQFVHVDRLDPASPVPVIVGARPRGSKAPLVVGTPDPAARAKPAAPRRGSWGPEQNAXIKPTTLNFDAERTTPVKERPALSTPVKDRAGGATPARERGAAATPGRERTAAASPALSSASLRKSSSVLPRLTRSKSFVADRDQQHPRIPKSPFPTEKSSVSCTASRATRRVAKEEEPSSPPSDDELGSSATSTKKRSATAARVPVPGKLSLLGKDAMEQREQAQKVALEALRNASATDNVARIYKLFSEVSKTARPEAPATCFDSFLSFHQEAVQAVTDIEAIQAATSMAAAVASDEQQLEDAPPVLQEIAQNRTVVRRRGIGLGSVSKSVSFAPGTLDPKQDDGGGKAIRSSSASRKCLATDKIGEDGGDEKRSSSSGPSSATTTTAHSALGSSLKLAKKIQAEAGSWFMDFLEAALETGLKKSKASSMGDGRKQSSCCCPQSLMLRVINWVEMEQSGGDSSGRKTAHPRAAAVARKLRIKAKNPS

SEQ ID NO: 314919 - protein, 72 aa, Zea mays
  Clone ID: MRT4577_50267C.1.pep
GRRTENRRRLRSCTAADAWADAWADAWAPRVRSDSVGSHPGQLPDRSPARRTTLSLITSSQYYDACDESPNL

SEQ ID NO: 314920 - protein, 98 aa, Zea mays
  Clone ID: MRT4577_50268C.1.pep
GRAPRDPLKVLPRTDGPFVIGEMFAACFFVRLLGPRSLWPWWVPLGDSVSRAVGASPWGGPFLVPPFWTERPCLRWTGWARLVSSKKILKNPQKKKGG

SEQ ID NO: 314921 - protein, 39 aa, Zea mays
  unsure (1)..(39): unsure at all Xaa locations
  Clone ID: MRT4577_50269C.1.pep
LNNPXNXGVGLLQGGGLKTGSAALEENEERPQGGAWNWN

SEQ ID NO: 314922 - protein, 525 aa, Zea mays
  unsure (1)..(525): unsure at all Xaa locations
  Clone ID: MRT4577_5026C.1.pep
MGARRRLLADTPPEHRHRQGAPASDWSAGYLNGWLSQPTPIFGLRLWVLIGIAVGAAIVLVLLLIFVCLSRRRRRRRLAANPYYPADTKLLKKHLQQQATPTPTPTKDIQEIVRRQQEPAXARQGRAAAAAAAADSAAAXPPQHRPPARKTPGSGVSATTSGGSERDGATPRSTGSGAGVPEVSHLGWGHWFTLRELEEATGGLAEENVIGEGGYGIVYKGTLHDSTLVAVKNLLNNRGQAEKEFKVEVEAIGRVRHKNLVRLLGYCVEGAYRMLVYEYVDNGNLDQWLHGDVGEVSPLTWDVRMNIMLGTAKGLAYLHEGLEPKVVHRDIKASNILLDQQWNAKVSDFGLAKLLCSERSYVTTRVMGTFGYVAPEYASTGMLNERSDVYSFGVLIMEIITGRCPVDYTRAAGEVQLVEWLKNMVAERKAEEVVDSKMAERPPPKTLKRALLVALRCVDPDANKRPKMGHVIHMLEMDDLQFRDDKRPGAGRDGRRPQGPDRYSSKLGGGREPQQARAPASVQMR

SEQ ID NO: 314923 - protein, 73 aa, Zea mays
  Clone ID: MRT4577_50270C.1.pep
TKDAGAGAAKTKTKSSSNTEVVIGRTGGTNAIASEEATTRTRKASEEEEEAVRSSRGRRRLRQSSAFYSETLT

SEQ ID NO: 314924 - protein, 120 aa, Zea mays
  unsure (1)..(120): unsure at all Xaa locations
  Clone ID: MRT4577_50271C.1.pep
ENLVLFTIKLPLHPFLSQKLGDIMEMMFGGRYVIMVMAVFSIYRGLIYNEFXSIPFGLFGKSAXLWSLQHGTCSELPFLNSLKMKMPSLLGVARMNFGIVISYFNAKNFRNSLNVWKRWN

SEQ ID NO: 314925 - protein, 157 aa, Zea mays
  unsure (1)..(157): unsure at all Xaa locations
  Clone ID: MRT4577_50272C.1.pep
KNPARCLPDRIPLPYYSEMDDIELDEVQFHVHKIPPAPGAHVETKPTQYYSXQYNDAVCLHMNSAVTFFXSFDMPLLFVRGEKFNKAIFHCNNIVXGSVNQELPHYTRTGSMYSHCIXVDILYKEGXCGTXLPRFITLTASVRRYYEYKDLLVDNME

SEQ ID NO: 314926 - protein, 81 aa, Zea mays
  Clone ID: MRT4577_50273C.1.pep
RRGNVLCLTLPTPTLRGDWTITTTLEHSNARAIRELCLAATGDRPLTTPGHLDTHPPHMPTRGAVLHTTATLYHQHLAGDH

SEQ ID NO: 314927 - protein, 91 aa, Zea mays
  unsure (1)..(91): unsure at all Xaa locations
  Clone ID: MRT4577_50274C.1.pep
RCWLCASCYLPHLGASFDPITCRTPAFSEAWSSACSVTVKHTILIPLVDFLVGQLNFTGPCEGHVAIQXDVNLLASTDLSRYKDPVHWINI

SEQ ID NO: 314928 - protein, 68 aa, Zea mays
  Clone ID: MRT4577_50275C.1.pep
GQRKKKIYAPKNRKENRTPIKGPPSLINNFTLTPPSPITKNHIGIYYYFFFYIFFILFYYPNFSHFWL

SEQ ID NO: 314929 - protein, 111 aa, Zea mays
  Clone ID: MRT4577_50276C.1.pep
MTEAIFGDPVVWLMGVPHRDKRNTQLAELLGVSSLKAGQIYSTPWVFGGGYLRHIIQDIAVSGNILGLTAPGSFFIDNIQLATVHVTNLHWVISSVYSRQIQTVASLWGLF

SEQ ID NO: 314930 - protein, 128 aa, Zea mays
  unsure (1)..(128): unsure at all Xaa locations
  Clone ID: MRT4577_50277C.1.pep
IGPWPKIQRGVFGXGWYFCLSLRDKLSRREMPVEKRVALVDKCIKEIRLGLVGAPQNLVIKMVEKEGAREYARGDLVGARAPVEVERVSPLGMKVCVGCLFPPPPPTKLIGYGWGTHNCFLTNFSPAR

SEQ ID NO: 314931 - protein, 65 aa, Zea mays
  Clone ID: MRT4577_50278C.1.pep
TSDIKIDVETQLAHLSAVVSVMGTPVSAVISLAGGTSAGDDSEELYYVGSAAEITPRMTEWFGHQ

SEQ ID NO: 314932 - protein, 111 aa, Zea mays
  Clone ID: MRT4577_50279C.1.pep
RHHNRISSKPNGPNGTTTKVEDTEVVPKNECYEVDLDLYQNAPKMQDYPYLIVATHNVPHACVHVTTQNYMDDTDDSNHSETLHILLICGGKHRPYMELTTSTTLPTSVTP

SEQ ID NO: 314933 - protein, 41 aa, Zea mays
  unsure (1)..(41): unsure at all Xaa locations
  Clone ID: MRT4577_5027C.1.pep
CFGLIYNDILHRVKYDPFYSIFLHSIISLDLHRXVCSYRYN

SEQ ID NO: 314934 - protein, 219 aa, Zea mays
  Clone ID: MRT4577_50280C.1.pep
MSTATATLAAARSPAVALLSLRRRAPAAAPIRFPGLRVGSGCRHIAMASAAHSRAPTDPLPKGADLFFRAVISNMEKVYLSRNPTAKTILELVNGYGINSLSDFFTDFGYLPREELRFPAKKLRALWFSPPTNDGYSGTGTYGPLPRIFISELLVDELTTQSQEIIHKYIKTSGNGNNHAAIASTSGELTWEKPIYSRFPDLSRESEYAAWTLVNGYAL

SEQ ID NO: 314935 - protein, 179 aa, Zea mays
  unsure (1)..(179): unsure at all Xaa locations
  Clone ID: MRT4577_50281C.1.pep
WNLLQHRSPQPSLLLHSRLVDQRPLAKILHLTLNVLQRPRNQGADLFFRAVISNMEKVYLSRNPTAKTILELVRSYDGDHICYDHFAFRTFGVITSIYSVIVLHSVXLDILITXLRFPAKKLRALWFSPPTNDGYSGTGTYGPLPRIFISELLVDELTTQSQENYHKYIKTSGMEIIML

SEQ ID NO: 314936 - protein, 354 aa, Zea mays
  Clone ID: MRT4577_50282C.1.pep
VSRFPSSIFASNCAIGSSARVGAISLIFVWNLVRCVGRIQVSSEYQLLDKSISPGADLFFRAVISNMEKVYLSRNPTAKTILELVRSYDGDHICYDHFAFRTFGVNGYGINSLSDFFTDFGYLPREELRFPAKKLRALWFSPPTNDGYSGTGTYGPLPRIFISELLVDELTTQSQEIIHKYIKTSGNGNNHAAIASTSGELTWEKPIYSDFQILSRESEYAAWTLVNGYALNHATIATHRLESDIRSINKFNKFVEDNGFKLNSEGGILKVSPDGLLQQSSTVADSSLFTFADGITESIPRSYIEFAERLLLPQFKDLQDEEVKEYHRRDGFEVGNADKIFESTSKDQLTRRSA

SEQ ID NO: 314937 - protein, 61 aa, Zea mays
  unsure (1)..(61): unsure at all Xaa locations
  Clone ID: MRT4577_50283C.1.pep
GPSFFQPMPQPCNQGKGPWEGLNQKDPFPRFKGXKVVQEKKGLEGHFXKGMQHNPKNNFPG

SEQ ID NO: 314938 - protein, 148 aa, Zea mays
  Clone ID: MRT4577_50284C.1.pep
MKSTNSSTSLLLCLFIVLFAVLVNSANVGIPIPLPPCDSSNHSNACVWDSVNKNSDTVRLVLIDVVGSVLDKNLLDLVAKVQLLGINVLAKIKVRQAQRSLIDVKADIDLALKLYHIDGVFYDEGALVCSPYFDDLYAHVKLKLGGLV

SEQ ID NO: 314939 - protein, 80 aa, Zea mays
  Clone ID: MRT4577_50285C.1.pep
RPNLSMWPLLMPTWCGGKWHGRYKDCSSVRGVGVTDAATIVLFYTGSVYLNNFFLNCSRFYIIWYWECRVLIIMFFSFFL

SEQ ID NO: 314940 - protein, 46 aa, Zea mays
  Clone ID: MRT4577_50286C.1.pep
SFLRECIVCMWFRTCVLGRGLAHYITSFIAFIYIHLDIHRIIIIIS

SEQ ID NO: 314941 - protein, 76 aa, Zea mays
  Clone ID: MRT4577_50287C.1.pep
TPCRKRITRTIMGWNQRKMDQCNLIISLLLFMTGKLANPLKRGSKGKNNGVVSKNDVANHIKSNHKPSIYGGNPKP

SEQ ID NO: 314942 - protein, 74 aa, Zea mays
  Clone ID: MRT4577_50288C.1.pep
RILQTGDFFYGKEINSQDGPTKTLKNPFTKPPPGETLTTIKGLLPPWGSQVTAENQKRGRFPPLFLTGRFLSGP

SEQ ID NO: 314943 - protein, 65 aa, Zea mays
  Clone ID: MRT4577_50289C.1.pep
RERKTPVCRMAAAEKPAAVRRAEELVEREMGGRHTSHDSSHALIVRDLALYLSPDECLFCPYRLL

SEQ ID NO: 314944 - protein, 72 aa, Zea mays
  Clone ID: MRT4577_5028C.1.pep
DQAHIHCARASCALSGLLERLIVALCLRSVSIRSPKQLHSYLHQGGQQNDFRASFLSDPWMYSTTYIDVLMS

SEQ ID NO: 314945 - protein, 166 aa, Zea mays
  unsure (1)..(166): unsure at all Xaa locations
  Clone ID: MRT4577_50290C.1.pep
MPLWGAAASAAPAADGDAARAPSGSGGGVKVIRSLLPTRRRLRLDPPAKLYFPYEPGKQVRSAVRIKNISKSHVAFKFQTTAPKSCFMRPPGGVLAPGESIIATVFKFVEHPENNEKPMDKCKVKFKIVSLKVKGPVEYVPELFDEQEGQVPVEQXLRVVFLDAER

SEQ ID NO: 314946 - protein, 113 aa, Zea mays
  unsure (1)..(113): unsure at all Xaa locations
  Clone ID: MRT4577_50291C.1.pep
GSPRIDSVSERIETAVSDAQDRCFVRXLXWPWNDHSLXEDVQSYGXLHLDLDNPLIRRGXRSRYFGCISFSNEEAMRNAIWVMNGKXLHGPIICVFEVHSRGGRGGFADRSIR

SEQ ID NO: 314947 - protein, 228 aa, Zea mays
  Clone ID: MRT4577_50292C.1.pep
MPLWGAAASAAPAAEGDAARAPSGSGGGVKVIRSLLPTRRRLRLDPPAKLYFPYEPGKQVRSAVRIKNISKSHVAFKFQTTAPKSCFMRPPGGVLAPGESIIATVFKFVEHPENNEKPMDKCKVKFKIVSLKVKGPVEYVPELFDEQKDQVAVEQILRVVFLDAERPSPQMDKLKRQLAEAEAALEARKKPPEDNGPRIVGEGLVIDEWKERRERYLARQQIEGVDSV

SEQ ID NO: 314948 - protein, 424 aa, Zea mays
  unsure (1)..(424): unsure at all Xaa locations
  Clone ID: MRT4577_50293C.1.pep
MDSDECPNEDSTSISNDDGGYQPAEYSPVAAASSRLRRSARKSFAYNINGTTQDDISEVKVSYGSHEASTSGRRVVTDVREGMWRQNSRSVGLRSARNKRESNSFLDTHPLGRRHQVSFKYSWLMLLEHEDSYRYIPQLDDEVMYLGQGHEEYLKQVQSSEFCPWNRIKGLKAVELCKIQGLDYATYRGSGESCCKLTIEFVDCTSSGFGKTFMITLRELVNFPDFLVERTRYEAAMERNWTHRDKCKVWWRDEEDRXGTWWEGRVMAVTPKSPDFPESPWEKYVIQYKEDGSDHAHSPWELHETGSLWDPWKHPHMDLTVRDKLLSEMENLQEMSHRDQDHYGVLKLDKVAEKSDFINRFPVQFSIEVIKARLANKYYRTLGAVRHDTTVMLSNAESYFSKSSEMTKKIRKLSELLDQIFSSL

SEQ ID NO: 314949 - protein, 302 aa, Zea mays
  unsure (1)..(302): unsure at all Xaa locations
  Clone ID: MRT4577_50294C.1.pep
MTSARDPFYPSLRRRPFHPLPLLSRSTRTIHLPAPDADGEPLLLLPPEEVGHQGQRVQEEEEQQQAAGRLGLCHMPLWGAAASAAPAADGDAARAPSGSGGGVKVIRSLLPTRRRLRLDPPAKLYFPYEPGKQVRSAVRIKNISKSHVAFKFQTTAPKSCFMRPPGGVLAPGESIIATVFKFVEHPXNNEKPMDKCKVKFKIVSLKVKGPVEYVPELFXSMKDQVAVEQILRVVFLDAERPSPQMDKLKRQLAEAEAALEARKKPPEDNGPRIVGEGLVIDEWKERRERYLARQQIEGVDSV

SEQ ID NO: 314950 - protein, 975 aa, Zea mays
  unsure (1)..(975): unsure at all Xaa locations
  Clone ID: MRT4577_50295C.1.pep
LSDEVGRVFIIGTGQGESQKDAKYDQFFLGDYRPLIRDTNGSVIDQETQLAPYRRNMQDLLCDAGMIPYPEPFQSMFQKPRLGTLGLEWRPPSVNFAVGPTYNATTGEYQTIPIIDPDRWEPVPEITDFIELEPENEVISDDTDSEYNGMDEYSSEGEQDIMSGDSSGTSYSSGEIDADNPDRLNLRRSRRKEKKSXADLVTSSGRRVIRKRFLDDPGVATVSRPHRGRKSRNGCSSKKKRSPKSRGLRPRRRAAETALITFPKKGVSTEEDEDDSESFSDSELNTDSTEAEQLEWSGQLRTRREINSPFDIDDVTDPSQFTDNKENSGTGKKLVLRIPRRDLRTQFPLGSGKAECSIQDKAVKSLSLANHEPVEHELTIEPGHSPASKAELTIDGDLHDSSAVCSNNSIRWGEVKMRSSKRCKYSEPAGGLWSSSNNVALQDIEGSSSQQIPHEYGDGIQPSVVQNVQEVQHGTILDNIPENNSTDEHTRENFGDLEKIANNINAHADGVNDTVQAPNTSQPQLKVKFKSRGSADAVGNIMNSKHVKDSVQCGDDSSINQPRNADFYIVPKSSQECLDKSTSLHDSKKPYLDASKKYTAVYKRSKRKNKKKMDSDEXWCLETGQGCRKVRFHQQVSCSXVAAASSRLRRSARKSFAYNINGTTQDDISEVKVSYGSHEASTSGRRVVTDVREGMWRQNSRSVGLRSARNKRESNSFLDTHPLGRRHQVSFKYSWLMLLEHEDSYRYIPQLDDEVMYLGQGHEEYLKQVQSSEFCPWNRIKGLKAVELCKIQGLDYATYRGSGEHGCKLTIEFVDCTSSGFGKTFMITLRELVNFPDFLVERTRYEAAMERNWTHRDKCKVWWRDEEGQVGGTWWEGRVMAVTPKSPDFPESPWEKYVIQYKEDGSDHAHSPWELHETGSLWDPWKHPHMDLTVRDKLLSEMENLQEMSHRDQDHYGVLKLDKVAEKSDFINRYF

SEQ ID NO: 314951 - protein, 422 aa, Zea mays
  Clone ID: MRT4577_50296C.1.pep
MARKKIREYDSKRLLREHLKRLAGIDLQILSAQVTQSTDFTELANQEPWLSSMKLVVKPDMLFGKRGKSGLVALNLDLAQVRQFVKERLGVEVEMGGCKAPITTFIVEPFVPHDQEYYLSIVSERLGNTISFSECGGIEIEENWDKVKTIFLPTEKQMTPDACAPLIATLPLEVRTKIGGFIRAVFSVFQDLDFSFLEMNPFTLVNGEPYPLDMRGELDDTAAFKNFNKWGNIVFPLPFGRVLSPSESFIHELDEKTSASLKFTVLNPKGRIWTMVAGGGASVIYADTVGDLGYASELGNYAEYSGAPKEEEVLQYARVLLDCATSDPDGRKRALLIGGGIANFTDVASTFSGIIRALREKESKLKAARMNIYVRRGGPNYQTGLAKMRTLGAELGVPIEVYGPEATMTGICKEAIDCIMAA

SEQ ID NO: 314952 - protein, 88 aa, Zea mays
  Clone ID: MRT4577_50297C.1.pep
GSTPLQLLNYISEEDDDCHTSNQRSGEMCPQTDSAFHPGKLYSLSEPTLVLTPYKQGLWNTKSQNVKPSQLRVDLILSNWSHASADAW

SEQ ID NO: 314953 - protein, 47 aa, Zea mays
  unsure (1)..(47): unsure at all Xaa locations
  Clone ID: MRT4577_50298C.1.pep
KKKIETKKSNKKKNKPPKKKKKKKKKKKTPKKKKKKKKXSILRCYHC

SEQ ID NO: 314954 - protein, 67 aa, Zea mays
  Clone ID: MRT4577_50299C.1.pep
SAREMKRCGERASGPPRGEVDCGYGRRSWGRRQEVVGKEGREGMIQIIPSVRFEWLKKRMLSSDLNN

SEQ ID NO: 314955 - protein, 59 aa, Zea mays
  Clone ID: MRT4577_5029C.1.pep
MKKKRFGSQKKKKKKKKKKKKKKKKKKKKPKKKKKKNKKKNKKKKKKKKKKKKKGSRSR

SEQ ID NO: 314956 - protein, 84 aa, Zea mays
  Clone ID: MRT4577_502C.1.pep
NIKICLIHVKTLCAEILGHLKVLFKPVNGRQKKPPFLYHVYVVQKHSLHVSCIFALGQGSWFLKKKKKKKKKKKKKKKKIFDIK

SEQ ID NO: 314957 - protein, 155 aa, Zea mays
  Clone ID: MRT4577_50300C.1.pep
MEFKVASKAAALPAAWHGTSQGAQGRSSVAFGSAWRKASSPPARALFAATNNSAPVTRVEKQRIDQSQILTLDSVRTSLIRLEDSIIFGLLERAQYCYNADTYDSNSFHVDGFGGSLVEFMVRETEKLHAKVGRYKSPDEHPFFPEDLPETLLPP

SEQ ID NO: 314958 - protein, 104 aa, Zea mays
  Clone ID: MRT4577_50301C.1.pep
LQRWTLPLPLPLHAAYRGTLWLQRCPLQRPYVSVSFSPPPRSSVSLFITLNTVLRAQPGGGGARRLDGVWRCMTKILPRRGSVGRDRDESGDAVCGGTGRIEGA

SEQ ID NO: 314959 - protein, 76 aa, Zea mays
  unsure (1)..(76): unsure at all Xaa locations
  Clone ID: MRT4577_50302C.1.pep
RIAPRKQERFLYRKTTDHLTXRCTPPPQNAVYHKKKKDKTPVHHTARGTAKPKTRLSPPTIDRARSPEPSCASCST

SEQ ID NO: 314960 - protein, 77 aa, Zea mays
  Clone ID: MRT4577_50303C.1.pep
RTRGRTRGRTRGRTRGVPDGTVMKTIHTEKGSCLATDSHITCKDGKVSQDILLRLRDTETGDLVLRLTWVNIPGVAR

SEQ ID NO: 314961 - protein, 61 aa, Zea mays
  Clone ID: MRT4577_50304C.1.pep
GLLMLFGLTARGATETINPQCSQDPIATLLTPYLSPAAKPMCETPIVQPYRNQQANVTGIK

SEQ ID NO: 314962 - protein, 50 aa, Zea mays
  Clone ID: MRT4577_50305C.1.pep
DNISLKLQPYHVAQQELMIEESIKHMAFNTPKNICLPDVHVKTDTGEITM

SEQ ID NO: 314963 - protein, 91 aa, Zea mays
  Clone ID: MRT4577_50306C.1.pep
KSWAPLKSKRTQINSIGVTAKVPFKKPKMPGAPVILKTPKNRGRGYLFSGPPWFSPLKRATAEGPFPFAPGRVKESGPGCLGRAGKNANRG

SEQ ID NO: 314964 - protein, 150 aa, Zea mays
  Clone ID: MRT4577_50307C.1.pep
LDCFWICIVHRRPREYGVPGAGGSCPVSGRRETKAELQRGVQVELTSQRQSEGRGGAGRGAVTNLEVRAVAAGRPPGAGEEVPESVACIRNETEAGAASGVRRLGSRRVSHGFPVDTCESGGNRMLVCVGGSRAPKERAEHRKRELRTGR

SEQ ID NO: 314965 - protein, 154 aa, Zea mays
  Clone ID: MRT4577_50308C.1.pep
SRADPRVREKILVDHEERRRLAQASGGEFVATDLVDVLLQLSEESTKLESESEARLPRDGVKALIQDIIAGGTESSAVTIEWAMAELLRHPEAMAKATDELDRVVGSGRWVAERDLPELHYIDAVVKETLRLHPVGPLLVPHYARERTVVAGYD

SEQ ID NO: 314966 - protein, 80 aa, Zea mays
  Clone ID: MRT4577_50309C.1.pep
GTPRAPFPPGDLGFIFKRKGPWVRGPFFWKKNGGKSGGSPFWKKKKKKKKRKKKKKKKKKKHKKKKPKPKKKKKKKKKKK

SEQ ID NO: 314967 - protein, 145 aa, Zea mays
  Clone ID: MRT4577_5030C.1.pep
EHTVKFSPLESIVICSCKKFEFAGILCSHALKILDVHNIKYVPKNYILKRWTVDAKVLHISSMCNIHEDPKVKISNRYSTLCRIFNRIAVRASQSDEAYFISTKNAENLAEEIEKILKIRSESDLDNSCIPQGTYFLSHNYDPSS

SEQ ID NO: 314968 - protein, 78 aa, Zea mays
  unsure (1)..(78): unsure at all Xaa locations
  Clone ID: MRT4577_50310C.1.pep
DSKRNAGDSHVTVLAPLXMGLPLFMVHMPSITVSGAGINRCRRVRCPRHYNRARARDACWIMWVGPLVGGSMWPFYIQ

SEQ ID NO: 314969 - protein, 162 aa, Zea mays
  unsure (1)..(162): unsure at all Xaa locations
  Clone ID: MRT4577_50311C.1.pep
MGLGLLFATRRSTESVASLSVAANDLLSKHRLPKGLIPXSETSYSSNEATIAFIEXLVSTXYGHFCSQLDNYKRTISGKLSRDTITDLSGIQAKKLFLWIYVTMMYARPEQSTMXIHVDFGSKSLSACMIRKVRTCGSRADAQLREGCGAIGELDLLPACQE

SEQ ID NO: 314970 - protein, 185 aa, Zea mays
  unsure (1)..(185): unsure at all Xaa locations
  Clone ID: MRT4577_50312C.1.pep
LACLPASPLAGLLPPSNPGSVPALASRRVASWLLRSVSCLLAGSAAGLRAGWAPAPPSRGGSLFNRAAGYVFDGAAQAASAAPAPAAGATGGGALADAFAGAGAVGLVCPVVVALVCLRFGAGLPALLAALVVLVLAVLLVLXVALRLVLGVVRPLALGGAGGLVLGRRVLLAGCPLVVPVGWAF

SEQ ID NO: 314971 - protein, 249 aa, Zea mays
  unsure (1)..(249): unsure at all Xaa locations
  Clone ID: MRT4577_50313C.1.pep
MSRHCVTLLVIIFGLLQMAVALYSNPSSTHPNCTERCGNVSIQYPFGFGSGCFRQPDFSLTCDDGGGGGGNQPPKIFLHDGITEVLPDSGGTVGLSRLIDVAISHTIFMAPGIPSYNFSWNLSSFTMLDGSFNVTGCDFDIYLQEPGTNGSIPRCTNSCPQNITETVARHDCNGTGCCILYVGVSVRDFQLKFVRHDNGARGDHDALSNGSALWDTINITSNWAQIYWXIDDQPTCARAKERXNYACVS

SEQ ID NO: 314972 - protein, 29 aa, Zea mays
  unsure (1)..(29): unsure at all Xaa locations
  Clone ID: MRT4577_50314C.1.pep
EEKLLXXAXQRXKGNINSALLYIELXDLL

SEQ ID NO: 314973 - protein, 69 aa, Zea mays
  Clone ID: MRT4577_50315C.1.pep
ISFFYKSTRGWQLKLNFFFFLYSNHKGSGTRGDHLAHPIQNGPVFAKPGQLVNPGRLGGLKPTNSIPFP

SEQ ID NO: 314974 - protein, 39 aa, Zea mays
  Clone ID: MRT4577_50316C.1.pep
FSGNLGTAYIKKFRTKSSDARWNESISTETESIHPWAGA

SEQ ID NO: 314975 - protein, 51 aa, Zea mays
  Clone ID: MRT4577_50317C.1.pep
RCETNISKFVHKHGAFTIHGLWIHAVPLKGFSATRLNKNSRRIGHFLFKRS

SEQ ID NO: 314976 - protein, 118 aa, Zea mays
  Clone ID: MRT4577_50318C.1.pep
RGCPWPDARGRVQHRVALVLGPVGEQRVGVVGGHGQALHLDGGVGGARVEHGEAAIWGNKIAWGHAVSRDLIHWRHLPLAMVPDQWYDTNGVWTGSATTLPDGRTRTERCFFFFSPPP

SEQ ID NO: 314977 - protein, 109 aa, Zea mays
  unsure (1)..(109): unsure at all Xaa locations
  Clone ID: MRT4577_50319C.1.pep
CGLSAKKLSFVDLAGSERVKKSGSAGKQLKEAQSINKSLSXLADVIGSLSSDGQHIPYWNHKLTMLMSDYLMWIVYKKRYYTLIIHLSFHYDYIMWIACKKKVLYFNQS

SEQ ID NO: 314978 - protein, 126 aa, Zea mays
  Clone ID: MRT4577_5031C.1.pep
MCHRRDRESETDRLEAPARAGDGEGRRALRTRGRWVLVLPRLLVVLLLRRDQGHLPSVRIGSAIRLLLSCWRKASGPSGSWLLPARANALFYVPLACRCQKKFAQYTCPRCNVRYCSLSCYKACSR

SEQ ID NO: 314979 - protein, 83 aa, Zea mays
  Clone ID: MRT4577_50320C.1.pep
LVFFFLFFFSFFGNISFTVFFVDLRFSTGKDTTIGPKGNAPEPHYKKPSHERIKKATKPKAKDPHSNGMNPIKRAMAALQNKN

SEQ ID NO: 314980 - protein, 73 aa, Zea mays
  Clone ID: MRT4577_50321C.1.pep
HIDRSKVRSEQIGSGDTFEQIRKYNFPQASVTDHRVGLSHHSIADVTEGQSLVMFDDALRLQEEMDPNDSFGA

SEQ ID NO: 314981 - protein, 32 aa, Zea mays
  Clone ID: MRT4577_50322C.1.pep
ILFFQSYLTNFFSMNNRGTYGTLPFVNGRKCR

SEQ ID NO: 314982 - protein, 68 aa, Zea mays
  Clone ID: MRT4577_50323C.1.pep
LCFMCSRHQCLMLGFSRVHPQYHMLLAPTSPSRGPAGRRPVMITHGIITDLARYPHVRPLPTARSPDA

SEQ ID NO: 314983 - protein, 80 aa, Zea mays
  Clone ID: MRT4577_50324C.1.pep
IRHEAPGARGGVHTLPERRRHSITGSVLSKTIGLSCLSPRSSYVWLGGKGRNSRKPIPMRGGGSLYCFSHIALYSLKMMY

SEQ ID NO: 314984 - protein, 180 aa, Zea mays
  unsure (1)..(180): unsure at all Xaa locations
  Clone ID: MRT4577_50325C.1.pep
TSDGRQRHAFIGLGFRERPEAYDFQAALHDHMKYLNKKKAAEEMIQHYEKQSSVDYSLKEGETLVLQLKNKETGTKTKSTFFEQGLNKLSVNEKTSAKEAPVSLKLPPPPPSPVSPTDSGVAASPFKAEFPPQEQPPAEPVSRTSALPSKGEPAPELPAXREDEEQETVDEDFGDFQAAG

SEQ ID NO: 314985 - protein, 288 aa, Zea mays
  unsure (1)..(288): unsure at all Xaa locations
  Clone ID: MRT4577_50326C.1.pep
MATGGGNEQPPAEAEPLELVLFQVAECYVYLIPPRKTAASYRADEWNVNKWAWEGALKVVSKGEECIIKLEDKKTGELYARAFLREGEPHPVEPVIDSSRYFVLRVEENIDGRQRHAFIGLGFRERPEAYDFQAALHDHMKYLNKKKAAEEMIQHYEKQSSVDYSLKEGETLVLQLKNKETGTKTKSTFFEQGLNKLSVNEKTSAKEAPVSLKLPPPPPSPVSPTDSGVAASPXKQNFLPKSNHLLNPSAEPXLPSKGEPAPELPAAAEKMKEQESVDEDFGDFQAAG

SEQ ID NO: 314986 - protein, 146 aa, Zea mays
  unsure (1)..(146): unsure at all Xaa locations
  Clone ID: MRT4577_50327C.1.pep
MSTKFDIPKFDGKISFAIWHIQMKVVLXQFVVQKALQTQPADMTDDKWQDIDERALSAIQLSLSFDVLREVMHEKSAAILWKKLEELYMTKSLTNKLRLKERLSPIRMSEGTSMQSHLNKLNSIIMYLESLVVKIDNEYKTILLTP

SEQ ID NO: 314987 - protein, 734 aa, Zea mays
  Clone ID: MRT4577_50328C.1.pep
MGLDNTYGDLSGMFYGGLSYDGYTDHSSANDYFRFADPLPATVPQMAAEACSNPSSTVSRANTETDNPEDWEFISDESLDYISRMLMEEDIDEKVSMYQAESAALRAAAKPFYDILGHKFPPSPDRQLISWSMDSPSESSSSICTQSVASTVTSSSFGTRVDSNRRYDVGLSEQLEAFRGLCGQASNPLVGTSSDASNAVDELEDLLITNGGIPEYLFESLPTWDFRRGIEEAQKSLPVSDKLVIDLETGGIARPQEARKDVPLNAKKDDVLKAKKNRQSEDLDLMEGRNIKQSAFCSDEPGWIEMFDDLLRQTEKKATVLRELMRSEASKNSQVTQTKGPSGPRPRGRKPTKNDVVDLRTILIHCAQAVAADDRRTANELLKQIRHHSKPNGDGTQRLAHCFADGLEARLAGTGSQLYRKLIAKRTTASDMLKAYHLFLAASPFKRLSHFLSNQTILSLTKNASKVHIIDFGIYFGFQWPCLIRRLSKREGGPPVLRITGIDVPQPGFRPTERIEETGQRLAEYAEKFKVPFEYQGIASKWESIRVEDLKVGKDEVVIVNCLYRFRNLIDETVAVDSPRNRVLNTIRQVNPAIFIHGIVNGSYSVPFFITRFREALFHFSALFDMLETTVPRDDAQRALIEREMFGREALNVIACEGSDRVERPETYKQWQVRNLRAGFVQSPLNQEIVMKAMDKVKDIYHKDFVIDEDSGWLLQGWKGRILYAISTWKPKNN

SEQ ID NO: 314988 - protein, 98 aa, Zea mays
  Clone ID: MRT4577_50329C.1.pep
VTREPRLGPRALDTSHPQLPPNKATDRANPDNTKGQKRRAGTTITTAGHNPSPPGSAITKGDPTISHDNRREGWNANAPHSVAGHKTPRAAWTHATGR

SEQ ID NO: 314989 - protein, 51 aa, Zea mays
  Clone ID: MRT4577_5032C.1.pep
DYLVAWIVMIQMTGSALTIPDITHPEIISGVLKPAYRVSDLKYTLLCYASC

SEQ ID NO: 314990 - protein, 76 aa, Zea mays
  Clone ID: MRT4577_50330C.1.pep
VQTERVVLRDLIQLLHGLFSMDVIVKVYFISRTRMRAAHHYIKRGKVQSGPKYNTKTKPLSLHSSTPTNGVGGEPD

SEQ ID NO: 314991 - protein, 66 aa, Zea mays
  Clone ID: MRT4577_50331C.1.pep
KQDTLKQVEIMFAFLLSRVIFSTLLIYRFGLSSVIPSTSITPLSFHNGVNGRSNKTIIWVMAHGIK

SEQ ID NO: 314992 - protein, 57 aa, Zea mays
  Clone ID: MRT4577_50332C.1.pep
LTLETLQPGPVALGGPGFSPRGKFREPLQIPGVAKVTPPVMTPPGFGAPSGFEQTLI

SEQ ID NO: 314993 - protein, 369 aa, Zea mays
  Clone ID: MRT4577_50333C.1.pep
MSDDSDGQRQCRRGVTVDVELGAAMALADMAGVAGPGGEQPPPVRRATPAPSAHQEDEASTRLSLELGEVSIQASPCSSSSSFGGHPPPPPSHQAAYQQPAVPEPATTGYGPRPRHAVTEAEKEAKRLRRVLANRESARQTILRRQAIRDELARKVADLSSQNESMKKEKDVVMEEYLSLKEANKQLKEEVAKTSRKPAMPAQQQAAESLVPAPPRPGFLYSAAPPAPVPVPYVWGSWPPSAAAGSEQHGSPPPLCLQPCAWYYPAVADPRGSPSSAHAQQPPAFQDPRAATGEEDTDDDPCSLTLGLEVDKRSAPVGIVAGPASGSGSGGGGAQSDRDRAAQARRRRRDLTKLKHTHAAARPGSSEQW

SEQ ID NO: 314994 - protein, 135 aa, Zea mays
  Clone ID: MRT4577_50334C.1.pep
PYKKKKKKKKKKKKKKKKKKKKKKKKKKKKKKKKKKKKKKKKKKKKGGAVFKVSKFPFRGLPRFLPFFLGPLNLIFLAVFLQGGGGKTLGFPNFFPFEIFPFFPIWVNTKGAPPFRLSKSLPPFIGNGYPPFLGL

SEQ ID NO: 314995 - protein, 75 aa, Zea mays
  Clone ID: MRT4577_50335C.1.pep
KIFFLPTFKIQVNKFFKKMGRKFFFLLKGNFFFWPIAGYNTKLGTFLKLFFGFWPNFPHLYLTAFPLDANGLKSF

SEQ ID NO: 314996 - protein, 50 aa, Zea mays
  Clone ID: MRT4577_50336C.1.pep
VACSFLFRTLFFLLCSRSSADCCCTLSHKTFPVIYIHKALVRFYPNPYGL

SEQ ID NO: 314997 - protein, 46 aa, Zea mays
  Clone ID: MRT4577_50337C.1.pep
HLVQFCYVERAVLSILTPAISCIYYFSFLNNLIIFNIIFFFIKIHY

SEQ ID NO: 314998 - protein, 86 aa, Zea mays
  Clone ID: MRT4577_50338C.1.pep
MVFLQEEMSWNVLISPDQLSPKGLLLRKSIIVRLLEDVTNRKASKEHGYYIAVNELKTISEGKVRELSGDVLFPVTFTCITQRPMK

SEQ ID NO: 314999 - protein, 63 aa, Zea mays
  Clone ID: MRT4577_50339C.1.pep
GLPTPPPLTKSSSDYAYVRFLRRAGAAADLDYLYFVYRLRLFHHQRIDCIIPSTNTAISFTSK

SEQ ID NO: 315000 - protein, 62 aa, Zea mays
  Clone ID: MRT4577_5033C.1.pep
DSYDSTINSQTTGPTIDGQVIRLVRPGCLYTYTIIVTISPACINAYISSYLSLPISKDWYST

SEQ ID NO: 315001 - protein, 92 aa, Zea mays
  Clone ID: MRT4577_50340C.1.pep
MGVFLQRRGRGSRCNTQPYPHWTDLMTMTRRERNQQSGNPESPGNLTITYSHIALRCKYFACTVNKARLSKVMTLSPKTNRYTRATSSTAFS

SEQ ID NO: 315002 - protein, 85 aa, Zea mays
  unsure (1)..(85): unsure at all Xaa locations
  Clone ID: MRT4577_50341C.1.pep
VKSLCSQIRSELANPYRFLWKVRIPQKIKIFXWLIIRNRILSKGNLKNRNWRGGTDCCFCGLFESTNRLFFECSVAKYIRRLIQI

SEQ ID NO: 315003 - protein, 849 aa, Zea mays
  Clone ID: MRT4577_50342C.1.pep
MARIMTTRRSDSIADMMPEALRQSRYYMKSCFQRYVSRGSRLMKQQHLLEELHAGSSDSFLGHVISCTHEAVVLPPYVALAVRRNPGVWEYITVHSGDLTVQQITPSDYLRRKESLYDDHWAQDDNSLEVNLSLCLSTPRLTLPSSIGNGMHLLSRFLSSSLGGVNKIKPLLDYLLALRYQNTKLLISDTLLDTVGKLQAALLLAQAFVSEQHPDTPFQQMAHRFHEWGLEKGWGDTAGACGQTLGFLSEMLQAPDPVSVDRFFSRVPSVFDVVIFSVHGYFGQHKVLGMPDTGGQVVYILDQVRALEEELLQRIKGQGLTFKPNILVVTRLIPEAKGTTCNVELEPIDKTRHSSILRVPFKTQDGQDLPHWVSRFDIYPYLERYAQDSCTKILHILGRKPDLVIGNYTDGNLVAYLVSRKLGVTQGTIAHALEKTKYEDSDVKWREMDHRYHFSCQFTADMIAMNTSDFIIASTYQEIAGSKDKPGQYESHYAFTMPGLCRFATGISVFDPKFNIAAPGADQSVYFPFTLKHKRLMGLHPQIEELVYGKEENDEHIGYLQDRSKPVIFSMARLDKVKNITGLVEWYGQNKRLRDLANLVVVGGLLDPKHSKDREEIEEINEMHSLINKYQLKGQIRWIKAQTDRVRNGELYRCVADTRGAFVQPALYEAFGLTVIEAMNCGLPTFATNQGGPAEIIVNEVSGFHINPLDGKEASNKIANFFQKCNEDPMYWNRMSTAGLQRIYECYTWQIYATKVLNMGSMYGFWRTLDKQEKQDKQHYLHMFYNLHYRKLANTVPKVGEQPEQATAAALPDRSATRPKERGTQIRIQRTVSNLLGPVLPASHLSDAA

SEQ ID NO: 315004 - protein, 62 aa, Zea mays
  Clone ID: MRT4577_50343C.1.pep
NTIEEHSTRSNSSKIRYLSRKAPALPPVCFLLYSAHCAVINLPFSFFFFFCFIIKIFKFIFL

SEQ ID NO: 315005 - protein, 29 aa, Zea mays
  Clone ID: MRT4577_50344C.1.pep
DVSALINPPNSIWINLVYACFIFIFLETG

SEQ ID NO: 315006 - protein, 121 aa, Zea mays
  Clone ID: MRT4577_50345C.1.pep
LPSLLCCSKSAHMESTYTLRSTYMMSSPTLPPELLLLIVDAVVPPNPHLLFPASNSTTRTLLALTKVSRATHAQATRLLRKRCMFVDSSRRLADILLCMPRLVPTLPPVLSLRHISELYIA

SEQ ID NO: 315007 - protein, 161 aa, Zea mays
  Clone ID: MRT4577_50346C.1.pep
MSRPQEDGIIRFGDHISLKHVTTGRFLTSKGDEHYESGSQQQKVFSSEQLLGDESTWIVLPPRVTEEEPGYEVGFEDEIRLKHIPTRANLHSHEVESPASGQQEVSCFGNDDESDENDIWKVLQFDEDDEQYDDFWRVNQPAIIRHVQNGKLLHSHEGALS

SEQ ID NO: 315008 - protein, 199 aa, Zea mays
  Clone ID: MRT4577_50347C.1.pep
MIRLQTYAVFSLLATITSVYYAFSSREQFYPAMVYLSTSKICFVLLLNTGLVAMCVAWQLVKRVFLGTLREAEVERLNEQSWREVVEILFAVTIFRQDFSVSFLAMVAALLLVKALHWLAQKRVEYIETTPSVPMLSHIRIVSFMLFLLVVDCLFLANSLGSLIQKREASVAIFFSFEYMILATSTVSTFVEYVFYVSD

SEQ ID NO: 315009 - protein, 109 aa, Zea mays
  Clone ID: MRT4577_50348C.1.pep
MGFLANNIMVVGAVLAALVVRGSCGPPKVQPGISITTNYNGKWLTASATWYCQPNCACAPDNCCACGINNVNLPAYTMIIACGNFPIFNDGNGCGSCYEVRCKEKPDCS

SEQ ID NO: 315010 - protein, 163 aa, Zea mays
  unsure (1)..(163): unsure at all Xaa locations
  Clone ID: MRT4577_50349C.1.pep
SKQQTKAPRRAXXQXXAXAAXXXAPXTAQNXPQDXXDPHNAARADXGXGPGGGDDTXAAXAQSXAAQRQGDXKXXHXGGPNGENXXXGXAGADGXAXDAXGXXXXEKQXXDHDTNSXAEGQXXGHXTQXXXRDXTAXGXARXXXDNNAGGXNSGRNNPPGNGA

SEQ ID NO: 315011 - protein, 135 aa, Zea mays
  Clone ID: MRT4577_5034C.1.pep
PKPDFQGLSKLNQGGVKGEGGPLDFHLATTKWGRGSKKEGNNFTRVLYRGVYRLHPPRKRPDGQRQDIKSDKQGGRQGVLFFSPKPWGKEGRPKGLWGCKTVGGVILKEPWERGKKNSGRGAQIWDYGGWGAGTI

SEQ ID NO: 315012 - protein, 40 aa, Zea mays
  Clone ID: MRT4577_50350C.1.pep
MNSVRGHGHAWNNPPNWASPVSNGFAPIQHGGPPCFHDSN

SEQ ID NO: 315013 - protein, 52 aa, Zea mays
  Clone ID: MRT4577_50351C.1.pep
MILAALSANSDGHILAERIHGVPAEERLHWPSFLLKLGPENLKGPKNQELHA

SEQ ID NO: 315014 - protein, 114 aa, Zea mays
  Clone ID: MRT4577_50352C.1.pep
MPGVRDVSAEAFISAYSSHLKRSGKLDVPVWVDIVKTGTGKELAPYDADWFYIRSAAVARHIYLRKHVGVGALQKLHGSAANRGNRPSHHTDASGSIERKILQSLEKIGVLEKD

SEQ ID NO: 315015 - protein, 139 aa, Zea mays
  Clone ID: MRT4577_50353C.1.pep
MEALASPAASFLPGIPSPSPSHLARAPPRSAAAALSRPPSGRYIAAAAAAATGDHWGADHQHYHGGRAGASEAGPTASARGVKCDVDVVSWRERRVLASVPVAADVDTLWQVITDYERLADFIPNLVQRLMGENSISRW

SEQ ID NO: 315016 - protein, 55 aa, Zea mays
  Clone ID: MRT4577_50354C.1.pep
SSSPPTRRRHGTPDSLVMEEVVNKGTERAMGWSLGNTSYSNDSQGEGGGGGGEEG

SEQ ID NO: 315017 - protein, 134 aa, Zea mays
  Clone ID: MRT4577_50355C.1.pep
MASENKVFGFEEVAKHNVTKDCWIIIAGKVYDVTPFMDEHPGGDEVLLAVTGKDATADFEDIGHSDSARDMMEKYHIGQIDASTIPAKRAHVQPQQAPSHADKDNDLPIKILQFLVPIMILGLAFGIRQYTKSE

SEQ ID NO: 315018 - protein, 134 aa, Zea mays
  Clone ID: MRT4577_50356C.1.pep
MASENKVFRFEEVAKHNVTKDCWIIIAGKVYDVTPFMDEHPGGDEVLLAVTGKDATADFEDIGHSDSARDMMEKYHIGQIDASTIPAKRTYVHPQQAPSHSDKNNDLLIKILQFLVPIMILGLAFGIRQYTKSE

SEQ ID NO: 315019 - protein, 154 aa, Zea mays
  unsure (1)..(154): unsure at all Xaa locations
  Clone ID: MRT4577_50357C.1.pep
MGTATTNGSAEQASAPVPALKFLMYRRTGWIGGLLGGLCAAQXGIPFLYSAGRLENRTQLEADIDTTQPTHKSNAADVTARPNNHWCQTHRAETIRANNKSTLTLNNMCXGRRVLLINYATRXISKYDASHPIGCGAGFKDEDTPNFGGSSYSK

SEQ ID NO: 315020 - protein, 109 aa, Zea mays
  unsure (1)..(109): unsure at all Xaa locations
  Clone ID: MRT4577_50358C.1.pep
MLWVATGGRQYAAMAVTCVLFTCVCALHHYGALRVGSLVAPVVLAWLYCMGALGLPNIIHCNPHIYQPLYPTYMSKVLXKKTPKYGWMSLVPIWLCMTGSDAAFADLDH

SEQ ID NO: 315021 - protein, 112 aa, Zea mays
  Clone ID: MRT4577_50359C.1.pep
VAKKKTCRVSQIKERVQTGSPQIVKDGQIVWALEKDPCWNAAPLLVSVNNSRWLYPSRRGWSMGRVVRTTASERADEASDRWKSLQGRGGGGVGCEDETSRSGGNTWSLDSG

SEQ ID NO: 315022 - protein, 63 aa, Zea mays
  Clone ID: MRT4577_5035C.1.pep
SHEPSPTGERDVCTASARTLRYRHRPGQARSDGRRALAYTRLSPSCPPCPIVSRPSSLVLQTD

SEQ ID NO: 315023 - protein, 175 aa, Zea mays
  Clone ID: MRT4577_50360C.1.pep
MASKRILKELKDLQKDPPTSCSAGPAGEDMFHWQATIMGPPDSPYAGGVFLVNIHFPPDYPFKPPKVSFKTKVFHPNINSNGSICLDILKEQWSPALTISKVLLVWAPLFPWICCWSYVSLIHLGSSYCIVVYVCRRPTIVAIHHSEVVGHASPICTCACLPSGRCCLVNVHRTR

SEQ ID NO: 315024 - protein, 148 aa, Zea mays
  Clone ID: MRT4577_50361C.1.pep
MASKRILKELKDLQKDPPTSCSAGPAGEDMFHWQATIMGPPDSPYAGGVFLVNIHFPPDYPFKPPKVSFKTKVFHPNINSNGSICLDILKEQWSPALTISKVLLSICSLLTDSNPDDPLVPEIAHMYKTDRPKYESTARSWTQKYAMG

SEQ ID NO: 315025 - protein, 122 aa, Zea mays
  Clone ID: MRT4577_50362C.1.pep
VNEHKRILNELKDLQKDPPTSCRAGPAGEDMFHWQATIMGPPDSPHAGGVFLMNIHLPPHYPFKPPNFSFKTKGFHPNINSNGTICLDILKEKRTHALTITKDLLSICSLLTDPNPDDPHVP

SEQ ID NO: 315026 - protein, 53 aa, Zea mays
  Clone ID: MRT4577_50363C.1.pep
VVTVSVMLVPCTVLRSQVSVLVVRSMLLCSAAVRRLSRYVEYARVSQVLSRSL

SEQ ID NO: 315027 - protein, 130 aa, Zea mays
  unsure (1)..(130): unsure at all Xaa locations
  Clone ID: MRT4577_50364C.1.pep
MASKRILKELKDLQKDPPTSCSAGPAGEDMFHWQATIMGPPDSPYAGGVFLVNIHFPPDYPFKPPKVSFKTKVFHPNINSNGSICLDILXLLTDPNPDDPLVPEIAHMYKTDRPKYESTARSWTQKYAMG

SEQ ID NO: 315028 - protein, 218 aa, Zea mays
  unsure (1)..(218): unsure at all Xaa locations
  Clone ID: MRT4577_50365C.1.pep
MAVVEVVTSELVAPSEPTPRRPLWLSNLDLAARNGYTPTIYFFRRPQDSSDGRLRADSCFSTHALRAALAAALVRFYPFAGGSAPPAXGRAEIDCNAAGALLVVARSAAALEDFLHDFAPSKAMNDTFVPTYDSAGPDAPLLLLQVTFFRCGGVALGTAMHHFVIDGRSAFHFIRTWSSIARGDTAAAPPSLDRTPLRARPLLTTAAALFDTPTSTAA

SEQ ID NO: 315029 - protein, 63 aa, Zea mays
  Clone ID: MRT4577_50366C.1.pep
KDRGPFIRNLMAKDAPPPSFFRNLILHAIEGFNFGTFLPPAGSGPYFQHKLISGTGWVVDHKG

SEQ ID NO: 315030 - protein, 148 aa, Zea mays
  Clone ID: MRT4577_50367C.1.pep
MASKRILKELKDLQKDPPTSCSAGPAGEDMFHWQATIMGPPDSPYAGGVFLVNIHFPPDYPFKPPKVSFKTKVFHPNINSNGSICLDILKEQWSPALTISKVLLSICSLLTDPNPDDPLVPEIAHMYKTDRPKYESTARSWTQKYAMG

SEQ ID NO: 315031 - protein, 148 aa, Zea mays
  Clone ID: MRT4577_50368C.1.pep
MAVVEVVTSELVAPSEPTPRRPLWLSNLDLAARNGYTPTIYFFRRPQDSSDGRLRADSCFSTHALRAALAAALVRFYPFAGRLRAAGRGGRAEIDCNAAGALLVVARSAAALEDFLHDFAPSKAMNDTFVPTYDSAGPDAPLLLLQVR

SEQ ID NO: 315032 - protein, 128 aa, Zea mays
  Clone ID: MRT4577_50369C.1.pep
MAYMRILKELNDLQEEAPTLCSARPASEDMFHWQATIMGPPDSPYAGGVFLVNIHFPAHYPFKPPMVSFKTKVFHPNINSNGSICLDILKEHWTPALTIYNGLLSICSLLTNLNRDDHFVQEIAHMYK

SEQ ID NO: 315033 - protein, 112 aa, Zea mays
  unsure (1)..(112): unsure at all Xaa locations
  Clone ID: MRT4577_5036C.1.pep
LLKDAIRVPXDFVIFLEXELVDGEIFFICAKVFVFSFCLPIVKSIIDIEGKDVTITVFFKMVGYAXHGLNIXSKKXISSCVINLFSIIIFDRAAIYVFVMKTNLLISFEECF

SEQ ID NO: 315034 - protein, 148 aa, Zea mays; identical to SEQ ID NO: 315030
  Clone ID: MRT4577_50370C.1.pep

SEQ ID NO: 315035 - protein, 148 aa, Zea mays; identical to SEQ ID NO: 315024
  Clone ID: MRT4577_50371C.1.pep

SEQ ID NO: 315036 - protein, 121 aa, Zea mays
  unsure (1)..(121): unsure at all Xaa locations
  Clone ID: MRT4577_50372C.1.pep
NYAASSHRSSSHHLSYGRRVPLFGHRSACHSRRSDTWSAPLHIGMDSVSPRHRVLAYGSQQSQRLLRPPXSLLLIPIARTAIALLLVRPAIAMGQAAVGLLLCLPTIPPATAAILLPDAVG

SEQ ID NO: 315037 - protein, 148 aa, Zea mays; identical to SEQ ID NO: 315030
  Clone ID: MRT4577_50373C.1.pep

SEQ ID NO: 315038 - protein, 59 aa, Zea mays
  unsure (1)..(59): unsure at all Xaa locations
  Clone ID: MRT4577_50374C.1.pep
RPNTIXHTITKTLFVFTTNHQSVKAAWFTVSRGSTDTAPRSMSTNTPTHSDSLISVPSA

SEQ ID NO: 315039 - protein, 49 aa, Zea mays
  Clone ID: MRT4577_50375C.1.pep
PPSCGLLYIVMTARPSAIRDRYHRSPRRLQQKFLAPFCSRANAVARRIS

SEQ ID NO: 315040 - protein, 79 aa, Zea mays
  Clone ID: MRT4577_50376C.1.pep
LQAYNINWQNTEYKLHYHKIKTFKQYSKKDLTKTSHQEYKNYTPTQSIKNVNYQIKQSTTCIFVITSTPRLPSSAVRCW

SEQ ID NO: 315041 - protein, 137 aa, Zea mays
  Clone ID: MRT4577_50377C.1.pep
PAGVNGKHAETGVVKHALSLIRRAFWRIQHDGPVTTARMTVFSLDKPPDGGGVHSYRPGVRSTPERAAGRRTASSLAVQNNGTMQLDDTIGGGRELSKHFIDIAACGSSRRTLALLTIERVSSVRGGVSPSRSLFHA

SEQ ID NO: 315042 - protein, 71 aa, Zea mays
  Clone ID: MRT4577_50378C.1.pep
RWLARTTVPNLPTICSLSSKKKCPCIKYIENYIVRAIPLVFEIIDYFFSPLHLSNWHNFIHMYLYASMIGS

SEQ ID NO: 315043 - protein, 70 aa, Zea mays
  Clone ID: MRT4577_50379C.1.pep
CALCILVLTASSTRRHTMRRLSVPTISAGLSMAPSASANYCISAISFATPTDGPHGGSGAAVNGRKCEGG

SEQ ID NO: 315044 - protein, 79 aa, Zea mays
  Clone ID: MRT4577_5037C.1.pep
IRLEVKDKDNVTLEDVLQPGTNMLAAGYCMYGSSCTLVLSTGNGVNGFTLDPSLGEFILTHPNIKVNDKKNSTLLFFPG

SEQ ID NO: 315045 - protein, 38 aa, Zea mays
  Clone ID: MRT4577_50380C.1.pep
SITGNFVFKIQALLLYDEGIQDKDRSKRIKVNAEAITR

SEQ ID NO: 315046 - protein, 48 aa, Zea mays
  Clone ID: MRT4577_50381C.1.pep
TIYANFCLCYNKKNNILTSLSARSAGPGKSYGSPVILPPYLGAQSIPC

SEQ ID NO: 315047 - protein, 93 aa, Zea mays
  Clone ID: MRT4577_50382C.1.pep
MAKFFNYTIIQGLLMLSMVLLASCAIHAHIISGETEEVSNTGSPTVMVMMGANRKIIEDNKNLLCYLRALEYCCARTRQCYDDIKKCLEHCRG

SEQ ID NO: 315048 - protein, 105 aa, Zea mays
  Clone ID: MRT4577_50383C.1.pep
NSFIFTGRSRAVTDKSPMSRIVLRTLANNGSVNGRKQSIVVYVPKPGVKKRYLLPESRKNKVVYMQSSRCVSPQPMLQVSGRHSNFIYRILVKSVNCCSPGLWRS

SEQ ID NO: 315049 - protein, 55 aa, Zea mays
  Clone ID: MRT4577_50384C.1.pep
PVCACARVQLQGRSVLSSLACIVTTGNHALGTSRCMHAVFGKYHSVVWQRRPCAA

SEQ ID NO: 315050 - protein, 181 aa, Zea mays
  unsure (1)..(181): unsure at all Xaa locations
  Clone ID: MRT4577_50385C.1.pep
GYLEAGRDPLIIPYSPPWLAPSLLEHPPCPAHHHASELSTMNHTDAMLFAPRVRCWEYRYDSSIVHLTRPIXRSDNGRLLVYNVKLVYDVYPDRENHGGMNRYVXKGIVYDYSKNKCITQLYYHMNNTSVCEDKTARNIDGLKELNSYCANDDRSYKXCEIIXLVDCAHDXIKTYPRIKCL

SEQ ID NO: 315051 - protein, 92 aa, Zea mays
  Clone ID: MRT4577_50386C.1.pep
AKFFNYTIVQGLLMLSMVLLASCVIHAHIISGETEEVSNIGSPTVMVTMGANRKIIGDNKNLLCYLKALEYCCERTKQCYDDIKKCLEHCHG

SEQ ID NO: 315052 - protein, 93 aa, Zea mays
  Clone ID: MRT4577_50387C.1.pep
MAKFFNYTIVQGLLMLSMVLLASCVIHAHIISGETEEVSNIGSPTVMVTMGANRKIIGDNKNLLCYLKALEYCCERTKQCYDDTKKCLEHCHG

SEQ ID NO: 315053 - protein, 99 aa, Zea mays
  Clone ID: MRT4577_50388C.1.pep
TKERGAVCSSCTQHLGQGGAAADGLRKPQVHSARALPFSCQKLHQGNAARHTGLWQPLGTRRCPWEGRAWPGQVLGPEQHLPVLSCPPTPSQLKPSPAR

SEQ ID NO: 315054 - protein, 80 aa, Zea mays
  Clone ID: MRT4577_50389C.1.pep
ALLGNQYIPNQNLTFLPPLFLKIWDWDSPKNSDLNSFGFRIGLIRRPIITIPISTFLPPYNKVIWNWYSPRGSSRVDLQA

SEQ ID NO: 315055 - protein, 113 aa, Zea mays
  Clone ID: MRT4577_5038C.1.pep
LVSSRANPPSFCRLYQRGGRVVVGDDKLWFRGGHGIGGRRAMIKAVRKRLGKDGDEFFLSIHLNHCWWRRVQAHSFLCPTARREKNKHTPLFSTPTEKCSRFPRDNYFFSFPA

SEQ ID NO: 315056 - protein, 37 aa, Zea mays
  Clone ID: MRT4577_50390C.1.pep
NVQCNRFPLCVSYLMHFICPPRALADDLRFAPGPCPV

SEQ ID NO: 315057 - protein, 127 aa, Zea mays
  unsure (1)..(127): unsure at all Xaa locations
  Clone ID: MRT4577_50391C.1.pep
EPRSGHSRHSYVRWPXKSEWTRGNCGGELAXXXXLRGPPTPAGPGLGAKACAAVAASMEGASACVVVAHGAAGRRSSGGTCSARAMPXXLFALPFCRRSKGTLVWPYRAATSGPDPEKGPWPSRSLR

SEQ ID NO: 315058 - protein, 44 aa, Zea mays
  Clone ID: MRT4577_50392C.1.pep
KDHGLLMAASFQCLSTMIWFIKEHSYIFAYFDYIMHSVLENYMT

SEQ ID NO: 315059 - protein, 167 aa, Zea mays
  Clone ID: MRT4577_50393C.1.pep
EGILAPREKNGRVFLPLNKKPPGDLFWGGNKRPQSHGKFFPQFCSRGAQPSYFRPSKKRARGFPEGEAGNRGPPKKTQKARSWVGPKKQAPLKGPPLLIRVPWGKTINHSPVPVGISGGKSLFDFSQNTPNGRRGAGTHPREKKKCGFLGLFSLPTRWGWKAKQKLY

SEQ ID NO: 315060 - protein, 72 aa, Zea mays
  unsure (1)..(72): unsure at all Xaa locations
  Clone ID: MRT4577_50394C.1.pep
PTRPPTRPPTLSPTRXPTXAPPFLFGLNKXHXXKVSPQLAPGCYSEREQGNGPGKLPFYLHNPKLLPHKQAL

SEQ ID NO: 315061 - protein, 62 aa, Zea mays
  Clone ID: MRT4577_50395C.1.pep
KKAFPGSMSEGYQTPCVVRAKRAPIAFLPKTFPPTKGIGFLNFQAYKQNLFPCMENPTSGVT

SEQ ID NO: 315062 - protein, 52 aa, Zea mays
  Clone ID: MRT4577_50396C.1.pep
SNPFFYSLLSCILIAGKLCSLCLLMPNSQCSCIHVSNIYLKHLALSVQLYVF

SEQ ID NO: 315063 - protein, 116 aa, Zea mays
  Clone ID: MRT4577_50397C.1.pep
EAPPPGKRGGPGAQGATPGREPERANPPGGNSGPRGAKKKWGATKGPTFGKGWPPPGGLGLAPLLFEKTLFVLVKGVFPFSVTPGLVLRRVFPPRGWELCFGPGPPLFTQGVFFSP

SEQ ID NO: 315064 - protein, 43 aa, Zea mays
  Clone ID: MRT4577_50398C.1.pep
FARLASTGVRTALKSKPQSHLTFPSLQVFSTKWFRFYFCSKTS

SEQ ID NO: 315065 - protein, 98 aa, Zea mays
  Clone ID: MRT4577_50399C.1.pep
MKLEMTAAAMVLLLLTSGAEAKVCYSRSRTFKGWCYHSINCIAICITEGDTSGFCQAGACMCTYECLNGVVAGGGGQHPSVGSSLRGGADAKAAVPSV

SEQ ID NO: 315066 - protein, 503 aa, Zea mays
  Clone ID: MRT4577_5039C.1.pep
SPPTNNRRRVGGPKVRCVATEKHDETAAVGAAVGVDFADEEDYRKGGGGELLYVQMQSTKPMESQSKIASKLSPISDENTVLDLVIIGCGPAGLSLASESAKKGLTVGLIGPDLPFTNNYGVWEDEFKDLGLESCIEHVWKDTIVYLDNNKPILIGRSYGRVHRDLLHEELLKRCYESGVTYLNSKVDKIIESPDGHRVVCCDKGREIICRLAIVASGAASGRLLEYEVGGPRVCVQTAYGVEVEVENNPYDPSLMVFMDYRDCFKEEFSHIEQENPTFLYAMPMSSTRVFFEETCLASKDAMSFDLLKKRLMYRLNAMGIRILKVYEEEWSYIPVGGSLPNTDQKNLAFGAAASMVHPATGYSVVRSLSEAPRYASVISDILGNRVPAEYMLGNSQNYSPSMLAWRTLWPQERKRQRSFFLFGLALIIQLNNEGIQTFFEAFFRVPRWMWRGFLGSTLSSVDLILFSFYMFAIAPNQLRMNLVRHLLSDPTGSSMIKTYLTL

SEQ ID NO: 315067 - protein, 193 aa, Zea mays
  Clone ID: MRT4577_503C.1.pep
ASPAPSPGPALPWSGSLDSVCQRRERFMRSMGLECCPAPPQADAVATVGDVDKEEEVVPEFGRLWSQSDENDCSMSSWSTEETRSLEDGVSDDNSVSGSSRDDASSKVSRSFSSLSFIQRLMSRSGKISGVPKAVERRRNGWLRRLGLRAGILDHGGDEASTSSLESEQNRRGRYEKVKVRSYRKRSKELSAV

SEQ ID NO: 315068 - protein, 227 aa, Zea mays
  Clone ID: MRT4577_50400C.1.pep
RTARHPEGRNIGSTLPFRRQVPPPPRWRRRRCRHRQRRRPPRSLFELPSDFFDSSVLLRAHPSTAPSAVEPSEPSRPPPTQQQHQQLSEAAGSRWTCNTCASEFESLQEQREHFKSDLHRLNVKLSMAGKTIIKEEDLDKADSDSLFDDLEISSVSGSEDEQENGPASERVLSVKGKEEFRKKLYFRCASGEMISIYRCMLLKEHEEPLIDCKSGQMEMHLVYRRRR

SEQ ID NO: 315069 - protein, 56 aa, Zea mays
  unsure (1)..(56): unsure at all Xaa locations
  Clone ID: MRT4577_50401C.1.pep
YMVANQSYALCEADDPEPTRADIXVPAYVPLLRDNEAETQITVAEKDTNFCRILNS

SEQ ID NO: 315070 - protein, 83 aa, Zea mays
  Clone ID: MRT4577_50402C.1.pep
KTSTSLLSANALRLSVDALLTPADRLGGAELRGLPRFRDHSPFPRLLPQQQDRDRALPVQSRRDARRWSRWPTTRRWSRPPTR

SEQ ID NO: 315071 - protein, 143 aa, Zea mays
  unsure (1)..(143): unsure at all Xaa locations
  Clone ID: MRT4577_50403C.1.pep
QAFFFFFFFFLFFFFFFFFFFFFFFPFFYWGPLLREKPHIKKGERKRGNHKKKRKXGGKGKGSKKARGKGGGGGXEGTRGGGAPKGNATPPGGGTGGGEXTPGAAKTRGAGPGAKPGGXGQGPPPARRCPPGKSRPRQKTGPT

SEQ ID NO: 315072 - protein, 241 aa, Zea mays
  unsure (1)..(241): unsure at all Xaa locations
  Clone ID: MRT4577_50404C.1.pep
MSARRFLNILVSDCQKFTYMLRRFDLSHNQFFYPTPEEAAEHAKVVPPLTGMPDKSTLSANSSAGAGHNKKKKPMYIRPPAPMVNMKPSICAKTRYDRWGEMDCFPLTETKLFFTDSSARIFRFDADTHCIDTMPSLHTPKSDPLSFSIPPNPTTSKEGEGEGGGLYIMDRILRPNKEGQVQFESISYRRRCNHSSKAWHCDALPPPXFVHDPXYKXAXICSYALVGGHTICISIRGVGTY

SEQ ID NO: 315073 - protein, 57 aa, Zea mays
  Clone ID: MRT4577_50405C.1.pep
MALTCSDIFKIFFAVVLPPLGVFLERGCTCDLLINIGLTCLGYIPGIIHALYIILKY

SEQ ID NO: 315074 - protein, 121 aa, Zea mays
  Clone ID: MRT4577_50406C.1.pep
MPPPAPRRIILLAAASAAALLLWPAACVTADDGSTAFLPPPPPEPASPFPFCPARPPGVSSGPFPWSPSPPPPPPPSSVAMLPQDPGFLAAGACPVGGAAAVAWLLLPLLAVLSAFLLLSQ

SEQ ID NO: 315075 - protein, 46 aa, Zea mays
  Clone ID: MRT4577_50407C.1.pep
PKCRNCFYKSSIQHRDISVCGYFNMIKMLGTHHKPVCVSNGNARGW

SEQ ID NO: 315076 - protein, 60 aa, Zea mays
  Clone ID: MRT4577_50408C.1.pep
CARGPPEPSIETLNGDVEEGVDVEQADVPQLEQSKKSKYLGLRVRQALSGIRKGSPQPRA

SEQ ID NO: 315077 - protein, 63 aa, Zea mays
  Clone ID: MRT4577_50409C.1.pep
KKVLHAPLWEIFLPHNYPSPDDYISSLSICYKQWVHSTNLQGWKDYLFFEPGPIGFFETSLSL

SEQ ID NO: 315078 - protein, 206 aa, Zea mays
  unsure (1)..(206): unsure at all Xaa locations
  Clone ID: MRT4577_5040C.1.pep
YIPVGGSLPNTXXKTLXFGAAASMVHPATGYSVVRSLSEAPRYASVISDILGNRVPAEYMLGNSQNYSPSMLAWRTLWPQERKRQRSFFLFGLALIIQLNNEGIQTFFEAFFRVPRWXALFTLSQLVFREIQCAEGYYLHEVFDNHYFSLNRMWRGFLGSTLSSVDLILFSFYMFAIAPNQLRMNLVRHLLSDPTGSSMIKTYLTL

SEQ ID NO: 315079 - protein, 52 aa, Zea mays
  Clone ID: MRT4577_50410C.1.pep
IIDRQLHTYSYGGLQLLHKQNLVALHYVRYEAARVLRDNDVSMRHYCDVQNL

SEQ ID NO: 315080 - protein, 454 aa, Zea mays
  unsure (1)..(454): unsure at all Xaa locations
  Clone ID: MRT4577_50411C.1.pep
MDVLGFLFSKAEEEGLLQQLSYRKKLHRVSMYADDVALFLHPSTADMALSLDILKLFGAASGLHNNAQKSNVYPIRCSEQDLAVARNMLPGGISAFPCTYLGLPLSLHKLSKHQFQPIVEKIADQLPNWKADLMTRAGRRVQVQHVLTSMMVYLAMAVDIPKWGLDAIDKIRRGFLWRGRKEARQEELGGLGISSFLELCWALRMRWRWLQKTDPTRPWSDLHIKVPGKARAFFMEVVITEVGDGTNTKFWKDKWLYGKRIKDLTPXLYNIIPKRIINSRTVYEAITDKKWISDIQGPLTVGILTDYLQLWDMTSVWQLQPKVEDKHVFSIAPNGIYSAKTAYEGFFLGSVIFPHHKKIWKTWALPKCCFFIWPVAQNRLWPADRLAKRGLSHPEKCPFCDQEDETIDHLLVTCSFSREFCVTMSLRAANEERMQWEIAGAKGLCHLAVPLAES

SEQ ID NO: 315081 - protein, 134 aa, Zea mays
  Clone ID: MRT4577_50412C.1.pep
HPGGQHRQPVHVIAAGLRDVRVGAQRRHAVVVGHAGCASRMRRGKPHASSPGLPNAEAVNHRPRPCHPRQPGYFSSAGTNSKYRLSNTNQNPACGDRAVTSVTRRVAATVVCIVVHFRLNYLATLPRSRGSTGE

SEQ ID NO: 315082 - protein, 54 aa, Zea mays
  Clone ID: MRT4577_50414C.1.pep
GLSTCGHLIFNFTHTQKKMNSYSIVRKDTTIILNGYIKVGTLIHNSILILQPHM

SEQ ID NO: 315083 - protein, 221 aa, Zea mays
  Clone ID: MRT4577_50415C.1.pep
ALFFFFPGTPIFVFGRRAVEEQLRFLTEEAGVPEAELQRVLRRRPRLLVCPVAARLRPTLYFLRALGVPDLHRRADLLSFSVEDKLLPRIEFLESLGLPARAARSMARRFPALFGYGVDGNMRPKAEYLLGVGAMGRRADELYEFPEYFSYALAARIVPRHEACAASGVAMPLPAMLRPGEAKFRATLDSCVGSTLPRRRSALWHATWVDDDATAAKETMV

SEQ ID NO: 315084 - protein, 112 aa, Zea mays
  Clone ID: MRT4577_50416C.1.pep
KASESDEMGWRGIEIQTTILIYKINKKKGKVKLNRCNSSCCCRRPPPHATIYYCKCATKWFWLQAEWAHQQLKLKTRQAINQSHACEAQVDANQRQIGRLATVQRRPAASRR

SEQ ID NO: 315085 - protein, 63 aa, Zea mays
  Clone ID: MRT4577_50417C.1.pep
VDSHTISSRSMCASLRSCCEGDLRLKAVDRLTRWSGNVCAFATSITTVGAHLLKILYGCSSAA

SEQ ID NO: 315086 - protein, 111 aa, Zea mays
  Clone ID: MRT4577_50418C.1.pep
PKNLYPLKNGLGSQQKIKNFFILLLARGGKNNPNFQVFPGGQEKPHLFPFLLIPKGSPLFTKDWGAFFFKLRGGAWLNINDSGEGKKARPRFFLVNRGPNHCHLRRGVGPQ

SEQ ID NO: 315087 - protein, 218 aa, Zea mays
  unsure (1)..(218): unsure at all Xaa locations
  Clone ID: MRT4577_50419C.1.pep
CPLTLLVPPCLQLWLSPVFLVVSCSLFFCPPPLQVVPPFPLLGGFPLFPLPAPRLVPFSPLGGGPFAFFLRQRVWPLPLRRGAPLCFFFCPPLWWPFFPPVVGALXALFPPPLLGPFFPPHVATPVALFRPPPLLPFSPPSLAVPPRVLQPPPFGGALLFIFCVLFCFSPVPLLFCGAPPVLSFKGPYKKKKKKKKKKKKKKKKKKNIRSKKKKKKAA

SEQ ID NO: 315088 - protein, 147 aa, Zea mays
  Clone ID: MRT4577_5041C.1.pep
PATLALFSRHRPVGRRRSTERRSRTPRATARGHVHLCTRTHRRSLLHRARTTLALVPNMAATDSEGGGAPLLHAGRHPAPVRKLATAAADRAPTQGREVLENRSIATEEDPRIDNHLGKRRIHAHARGAGIENATLQNREMAVRLEI

SEQ ID NO: 315089 - protein, 499 aa, Zea mays
  Clone ID: MRT4577_50420C.1.pep
MGKEATLAFTPTWVVAIVCLVIVSISLAAERSLHYLGKYLECKKQKALFSALQRLKEELMLLGFISFVLSLSQGFIVSICIPETSTDFMLPCNRGNSRVAEEGAKICNKKGDVPLLSLEALHQLHIFIFVLGLVHVVFCATTISFSGAKMRKWKHWETEIHREVHEKLQQEKNEGQGSSLSIVVLHREHQDEFVHKRTKGFWMKLAVASWITAFLKQFQDSVSKSDYEALRSAFVVEHYPEKPDIDFHKYMTRAVEYEFKRVVGISWYLWLFVILFLLLNINGWHTYFWLAFLPLFLLLIVGAKLEHIITRLAQEAAISLSNNTEEVPKIKPCKDHFWFHKPELVLHLIHFILFQNSFEISFFFWILVSEGFGSCMMERKPYVISRLVIGVIIEVICSYITLPLYAIVTHMTGQIKLHGFGSRVHESVHGWIGLRKKPFSFWKIPGGDPNADSGREADVTRRVAKERSGSSRSMPMAPADEIVTVDDVAVAAAAVGQGP

SEQ ID NO: 315090 - protein, 215 aa, Zea mays
  unsure (1)..(215): unsure at all Xaa locations
  Clone ID: MRT4577_50421C.1.pep
MVKAYLRYEPALSFGVVASPESNVVYDPSGRRLLAAALDRFAAWDLKRGLPSATFTPSSSSASLAVSCVASSPAAASASASSVASGHADGSIRLWDAETGACEATLHGHRSAASAIRFAPSGAVLASGSKDCDVILWDVVAQAGLFRLRGHRDQVTDLVFLDSGKKLVTCSKDKFIRVWDLDTQHCLQIVGXHHSEIWSMDVDPSEKFLVSGSAD

SEQ ID NO: 315091 - protein, 142 aa, Zea mays
  Clone ID: MRT4577_50422C.1.pep
DGPAQVAWHDDLPPQLGLGQLLPPHPARAYRLPDRHPRRLGRRGRPFARGGGGTSSAGSWVTLGRWPLPRTKLGKLPVFVFFFDYFFLGACLVCCSGRWCDWQPDGRELGKEENEMAVDFIGGRRRGTGFTNGRGIKTVALT

SEQ ID NO: 315092 - protein, 70 aa, Zea mays
  Clone ID: MRT4577_50423C.1.pep
RVSLGTAQVGVASRPHSDLAITSVCCAVVFYERASPLTNKQVESPSRVASVTLSCTRRSSSWPRQADHAS

SEQ ID NO: 315093 - protein, 94 aa, Zea mays
  Clone ID: MRT4577_50424C.1.pep
ASLPGSASAPALTNRERRRPEGRSVSSPSSPLLPAPWHVVRVASVATANLCGCCHPARRQANPTDDKACRVGEARGYVSRWTSLPRLFEQSRVQ

SEQ ID NO: 315094 - protein, 58 aa, Zea mays
  Clone ID: MRT4577_50425C.1.pep
TAHERFATVLKSLHAAVSALAADEAELLFANRYCRHLFGIRPGGHFELSSDVFDRVQA

SEQ ID NO: 315095 - protein, 125 aa, Zea mays
  Clone ID: MRT4577_50426C.1.pep
PFEGVAPPMRGEGCPPPRGGVPRSPGGPRIFLRSPPPSGGLGVRGWLSQGYLHPWPRDFSDSPQEVQLVSEGVPSQSLGPDRGYFEPFPFHLEEYFLGARLNKNQTERGEGIHWGRSGGDDTPPR

SEQ ID NO: 315096 - protein, 91 aa, Zea mays
  Clone ID: MRT4577_50427C.1.pep
CPAVVLSLVYFRRPRARIITFRNLRSHVGSSSFGVIFFISRPGTCSGRHPGFVRGWGRNNKSWGCRVCPTFWIHFCRSTGALPPRIGDRGQ

SEQ ID NO: 315097 - protein, 78 aa, Zea mays
  unsure (1)..(78): unsure at all Xaa locations
  Clone ID: MRT4577_50428C.1.pep
LQLLKDRRKCDKLDDPMLXGRLPMRGIYQALAGAAMCLQEQATTRPHIAEVATALSYXDXQAYDPNAPVQQSRSNAFT

SEQ ID NO: 315098 - protein, 109 aa, Zea mays
  Clone ID: MRT4577_50429C.1.pep
VERLKLLCELKLCEDVAINTVANTLALAEQHHCYQLKTVCLKFVALPENLKAVMQTDGFDYLQQSCPSLLTELLEYVAKVGDHSVSPCLYSTEVLDGGDANGRRVKPRI

SEQ ID NO: 315099 - protein, 180 aa, Zea mays
  unsure (1)..(180): unsure at all Xaa locations
  Clone ID: MRT4577_5042C.1.pep
MSRSTMDLSXTGFAGKAANVSSWSAFLVARVTTLNTEGKAKTGVEDERPXNAPTAPLHLXTLSVETPSXLXSDXPADYRXDTAWLAAYPDTLAKNRELDVIRCXRWAMLGAIXWIFPELLNRIGGELGEAVWFKAASHIFSEGVLDYLGXPRLIHAHSILVICDCQVVLMCAVXGYRIAG

SEQ ID NO: 315100 - protein, 426 aa, Zea mays
  unsure (1)..(426): unsure at all Xaa locations
  Clone ID: MRT4577_50430C.1.pep
MGAGRVCRGGPFSASPAAGAAAGRPFPPLTASSSSSPSSAPSETASTSVTKTVNGSHHFKIAGYSLSKGIGVGKFIASESFNVGGFDWAIYFYPDGKSGEDGAAYVSLFIALASEGTDVRALFELTLVDQSGKGQDKVHTHFGRSLESGPYTLKYRGSMWGYKRFFKRVALETSDYLKDDCLLVNCXVGEVQSHTXSNMALHIGQLLTSGKRTDIAFEVDGEMXDIAFESFGEMFPAHKVILSARSPVFRAQLFGPMKDKDMKCIKIEDMEAPVFKALLHFMYWDELPDIEELTGVNTTWVSTLMAQHLLAAADRYALERLKLLCELKLCEDVAINTVANTLALAEQHHCYQLKTVCLKFVALPENLKAVMQTDGFDYLQQSCPSLLTELLEYVAKIGEHSVSPCLYSTEVLDGGDANGRRVKPRI

SEQ ID NO: 315101 - protein, 62 aa, Zea mays
  Clone ID: MRT4577_50431C.1.pep
DRPTIVEHMDDHIDIDNLMAELMVNLDYNLDYGTTDGTIMAGAMVEPAEKLAEHLIERIMEA

SEQ ID NO: 315102 - protein, 626 aa, Zea mays
  Clone ID: MRT4577_50432C.1.pep
DKALVKRLSSCETMGSATTICSDKTGTLTLNKMTVVEAYFAGTKLDPCDDVSQMSDSAASLIIEGIAQNTTGTVFLPEDGGAAELTGSPTEKAILSWGLKIGMDFDDVRTKSSVIHVFPFNSEKKRGAVAVQLDDGVHIHWKGAAEIVLSSCKSWLSVDGSVQSMSAEKHDEFKRSIEDMGANSLRCVAFAYCSFDIEKIPMEDITSWELPEDDLTLLGIIGIKDPCRPGVRDAVRLCTTAGVKVRMVTGDNIETAKAIALECGILDANSVISEPVVIEGKVFREMSESARGEAADKIIVMGRSSPNDKLLLVQALKRKGHVVAVTGDGTNDAPALHEADIGLSMGISGTEVAKESSDIIILDDDFTSVVKVVRWGRSVYANIQKFIQFQLTVNVAALVINVVAAVSSGDVPLNAVELLWVNLIMDTLGALALATEPPTDNLMKRNPVGRREPLVTNIMWRNLFVQALYQVAILLIFDFDGVRILRLQNESRSDAEKITNTFIFNTFVFCQIFNEFNARKPEEKNVFKGVTKNHLFMGIIGITTVFQILIIQFLGKFFKIVRLGWRLWLVSVAIGLVSWPLAYVGKFIPVPVRPLPDYFKPRCCRETAAPRRGGRWAELKRNEWAV

SEQ ID NO: 315103 - protein, 126 aa, Zea mays
  Clone ID: MRT4577_50433C.1.pep
VSTLMAQHLLAAADRYALERLKLLCELKLCEDVAINTVANTLALAEQHHCYQLKTVCLKFVALPENLKAVMQTDGFDYLQQSCPSLLTELLEYVAKIGEHSVSPCLYSTEVLDGGDANGRRVKPRI

SEQ ID NO: 315104 - protein, 422 aa, Zea mays
  unsure (1)..(422): unsure at all Xaa locations
  Clone ID: MRT4577_50434C.1.pep
MGAGRVCRGGPSSASPAAGRPFSTLAASSSASPSSAPSETASTSVTKTVNGSHHFKIAGYSLSKGIGVGKFIASESFNVGGFDWAIYFYPDGKSAEDGAAYVSLFIALASEGXDVRALFELTLVDQSGKGQDKVHTHFGRSLESGPYTLKYRGSMWGYKRFFKRTALETSDYLKDDCLLVNCTVGVVQSHTEGPKIYTIPVPRSNMALHIGQLLTSGKRTDIAFEVDGEMFPAHKVILSARSPVFRAQLFGPMKDKDMKCIKIEDMEAPVFKALLHFMYWDELPDIEELTGVNTTWVSTLMAQHLLAAADRYALERLKLLCELKLCEDVAINTVANTLALAEQHHCYQLKTVCLKFVALPENLKAVMQTDGFDYLQQSCPSLLTELLEYVAKAGEHSVSPCLYSTEVLDGGDANGRRVKPRI

SEQ ID NO: 315105 - protein, 85 aa, Zea mays
  Clone ID: MRT4577_50435C.1.pep
MDLADPKADPLSSFLRHHGALCLSRRVAMARDCTATSVPALRPWLDDLLPLLVDLLMAAHILALGYWIYRLTTDGCRQPALSKKD

SEQ ID NO: 315106 - protein, 148 aa, Zea mays
  unsure (1)..(148): unsure at all Xaa locations
  Clone ID: MRT4577_50436C.1.pep
MMGGGLVMDQGMMFPGVHNFVDLLQQNGGDKNLGFGALVPQTSSGEQCVMGEGDLVDPPPESFPDAGEDDSDDDVEDIEELERRMWRDRMKLKRLKELQLSRGKDPAGGVVGDPSKPRESQEQARRKKMXRAPDGILKYMLKMMEGCR

SEQ ID NO: 315107 - protein, 56 aa, Zea mays
  Clone ID: MRT4577_50437C.1.pep
PAGSPDTLETMNHLNLDLPLVVTALLFNHSKSDWDYTESLTNIIFKRQDRYLSICE

SEQ ID NO: 315108 - protein, 88 aa, Zea mays
  Clone ID: MRT4577_50438C.1.pep
VILGAPPSLTIVNATYNSDISVTCLTPAYVAGRLPFLYVSVSNDGANYFSNELMLTYGVVPCICEISFVANFLFSLADFLLSLVPLCP

SEQ ID NO: 315109 - protein, 120 aa, Zea mays
  Clone ID: MRT4577_50439C.1.pep
PFRGKVKGGGLTKSPAEPRARELKGEKNFTFSPFWGGGARLKKKFPPQPRPGKRLFKLPPPQGHPHWGGPRNPRSQNWNWGNNRGRRPPPELGGLPQLPHHFPQEHPFAFGAQCPWGWQN

SEQ ID NO: 315110 - protein, 73 aa, Zea mays
  Clone ID: MRT4577_5043C.1.pep
VLAGTWLTIITCHFHKSTAWIPTAPAPPVKRLGMPSVACSAREARSDPSVFLWSLNFRTGVSPSQRVLGYLSL

SEQ ID NO: 315111 - protein, 71 aa, Zea mays
  Clone ID: MRT4577_50440C.1.pep
ASSHRDNVLILPPEAPRFSLVSGRLTSQFRCSPNERRRAIKLSIGMDLPREKQWAGMAIVTTIGRTRTPQG

SEQ ID NO: 315112 - protein, 92 aa, Zea mays
  Clone ID: MRT4577_50441C.1.pep
FGSSASQPKSLSPSPWAPAAPLSSTPKPSASSGSKTPKRGTYYPSSLTGAITTTWHVYICCWSRTRPGLTVESSSLIIRTASTMSVRRRRRP

SEQ ID NO: 315113 - protein, 96 aa, Zea mays
  Clone ID: MRT4577_50442C.1.pep
HPLFSLFSRTISGRLASVPSVTSWPTFNIFLPLPPIMQGRRVHIHVHHIPDFSIVLYFAHQYQDAAISRQLDRLQVLPVGHRCTHQSRWHSHQRPA

SEQ ID NO: 315114 - protein, 82 aa, Zea mays
  Clone ID: MRT4577_50443C.1.pep
MVSVSPSNGEQGGVQVHPIQTHSTVDPVAPSISVGAAAPSRALGASTKKSADEVELLLRRNAELEREVAALRLELSSGRPSA

SEQ ID NO: 315115 - protein, 198 aa, Zea mays
  unsure (1)..(198): unsure at all Xaa locations
  Clone ID: MRT4577_50444C.1.pep
MLQCLDGVKQLLAVLLKCCHIDLKQPNGLEDPEVLARETVFSVSEVEALYELFKKISSAVIDDGLINKEEFQLALFKTNKKESLFADRVFDLFDTKHNGILGFEEFARALSVFHPNAPLDEKIEFSFQLYDLKQQGFIERQETFEEADTXHDGKIDKEEWRNLVVRHPSLLKNMTLQYLKDITTTFPSFVFHSQVDDT

SEQ ID NO: 315116 - protein, 225 aa, Zea mays
  Clone ID: MRT4577_50445C.1.pep
MLQCLDGVKQLLGVLLKCCHIDLKQPNGLEDPEVLARETVFSVSEVEALYELFKKISSAVIDDGLINKEEFQLALFKTNKKESLFADRVFDLFDTKHNGILGFEEFARALSVFHPNAPLDEKIEFSFQLYDLKQQGFIERQEVKQMVVATLAESGMNLLDEVIESIIDKTFEEADTKHDGKIDKEEWRNLVVRHPSLLKNMTLQYLKDITTTFPSFVFHSQVDDT

SEQ ID NO: 315117 - protein, 44 aa, Zea mays
  Clone ID: MRT4577_50446C.1.pep
ISMHAGTKVVLLKVFDCVDILFKVQEFGTSSSLILPWGIGAISI

SEQ ID NO: 315118 - protein, 72 aa, Zea mays
  Clone ID: MRT4577_50447C.1.pep
KTKTYRANKSPNTNSGGNAETYIYMGNKNWGIGQLIQFGTTKFPRGPTFFSNSALNKFLTMFKKTGPLGLDF

SEQ ID NO: 315119 - protein, 59 aa, Zea mays
  Clone ID: MRT4577_50448C.1.pep
TRYRRTIYLPSPFTPRILDHGQGHLFTDAVHIHIRHQPFTKHRIPQTHTQPHQHTPQAH

SEQ ID NO: 315120 - protein, 90 aa, Zea mays
  Clone ID: MRT4577_50449C.1.pep
LKCPGIICIETGTRGGRGVHLKARRGEGRRYILNTIQYKRGEPEKKKKPKKTEKIKGKRYIYPEKTEGELTPPGAAAAAAATATAEALVY

SEQ ID NO: 315121 - protein, 64 aa, Zea mays
  Clone ID: MRT4577_5044C.1.pep
VFHEGPVFSVFFVPDVTCLPFLCVFGGHFKVPAPGTSASPKCEEDPLCQGLHFFPPPPGLSTCS

SEQ ID NO: 315122 - protein, 120 aa, Zea mays
  Clone ID: MRT4577_50450C.1.pep
FSPNPPKNGGRGFFDGPSKARVRSFLDAPPKTPARGFFFVSRAVDFRGGAFRSAPKRYVSPSKFAGAFGIQYPPVLVEPGFWGSPEIKSRGPGLEPPGFPKKREPLFLNNQAFLVNDPLD

SEQ ID NO: 315123 - protein, 60 aa, Zea mays
  Clone ID: MRT4577_50451C.1.pep
FDFFQNCPLCEAARPGSHFCWSFKAARSGGAPLGAPSRPRSLGTCLKNVILRGLGFNACK

SEQ ID NO: 315124 - protein, 98 aa, Zea mays
  Clone ID: MRT4577_50452C.1.pep
EMHMHDHNRVLSVEHTLCIRHKAHMLLMANSRHNIRSHLTMGKLPTRIMPCCYECLLQEERPDSILAIQVLGQAFHGFLLTINSWGTGAKDLLMMVKL

SEQ ID NO: 315125 - protein, 599 aa, Zea mays
  unsure (1)..(599): unsure at all Xaa locations
  Clone ID: MRT4577_50453C.1.pep
FIERESDIGRSEVDPFDFPRENLRVRHLXAHNFKDVEIRTPSYDQESTDDYYGNFNSSHDTLAHGSSTTAWDKQNDKAQDNSSPVVFDQYDSDVEQENLLDTFSSKHTEQLPAPGDHMRFSTADWSEQHTSESPSKQRTSALFSRTETQLSDNLGTNKSDIPSPHSYHNMRPAFDSDGGSSDEEIATTTHAVPLRSHSGGSASSVLNKGGGPDASPIFDYSGAHAVRNLNRVQSRDSDLSEEETDLDKFKGSSFARANEQQLLPSAIRTSATSDDKEDDISLNFGKLTPGLRNKPRQPPPYTKVSRESILPKQSLPKVSAGTEESVDSEENTTFKQDRSSPQSSFSARTSSGKDYDSGLYERNRSVGTHWEAKSTIARNSSGLDDAEKLSDLPTNISLPTTKSSERWNSSKVPYHEKPGIGTRREVRSTLARNYFDSDDSEEELEQQQIPQSKQSGVLIQSRRTREVTSDTKRDGRFQTGAQYGDETESVTSKTQVHQGFNSSSTERSERRDPSVYPRVAVQRSSSKAEQIESPMERGKPQGAEMRSTLFRGNEEDTETSSGTPKESTPKTPPAHVHPKLPTDYDSFAAHFRSLRTNRP

SEQ ID NO: 315126 - protein, 61 aa, Zea mays
  unsure (1)..(61): unsure at all Xaa locations
  Clone ID: MRT4577_50454C.1.pep
HGRSRDKCSTLALMLRHQQTSLVLVTVVAIXALIELSADLCVVLLERRQVITSIKLPWPNV

SEQ ID NO: 315127 - protein, 135 aa, Zea mays
  unsure (1)..(135): unsure at all Xaa locations
  Clone ID: MRT4577_50455C.1.pep
MVVTSIEINNFGRIARLMRLVALQSDDDHLDAGHLPFIATTXMTYMSEYNTVDGHMPHRDIALKDSLTLLFGDKKSTXSSCGSLHEIPXLESGVESIVEICGILAEWADSAENLTRATSKVVISAPSIDPSMYVV

SEQ ID NO: 315128 - protein, 105 aa, Zea mays
  Clone ID: MRT4577_50456C.1.pep
LHASMHSIILSPRSAGFKPRAKMGQRGRGHPRGGRSGGGEGGGEGRLNVQLNDALTIPTTSAFAPAFPPSRSSLRRASRRSQGPPWQAKRWYQKGQLEAYCYTLG

SEQ ID NO: 315129 - protein, 201 aa, Zea mays
  unsure (1)..(201): unsure at all Xaa locations
  Clone ID: MRT4577_50457C.1.pep
VAAVAGSGDTQTQATKMARAMASATELLASHCVEAAQHAGARHDQVAAAVQAAVGVGSPGDLVTLTAAAATALRGAATLKQRVQRETARSNASVLPYERGSSWSPDIWCKEGDLLKRTRKGGLHRIRVSIYINKRSQVILKLKSKHLGGALSKNNMSVVYGVYRELPTWAGKGSVEETCWFXLNTVQGFAEVECRGRHQQT

SEQ ID NO: 315130 - protein, 46 aa, Zea mays
  Clone ID: MRT4577_50458C.1.pep
GNQRHARLSDELIRDTHPKSSTFPYTSTLPNPPIHILTNGLYFGHS

SEQ ID NO: 315131 - protein, 117 aa, Zea mays
  Clone ID: MRT4577_50459C.1.pep
SPIRILLDMSCKQHATLMSRPRAKADATIYLIPSNYYQILISDVDLTPPYLTAVTGTPSLLPRRKSLTVNEIEVIMLGVSICYHLLCIATSRNFPIIPYAGLIDFDLYYCLPDDTEL

SEQ ID NO: 315132 - protein, 56 aa, Zea mays
  Clone ID: MRT4577_5045C.1.pep
HGSPGTVKEYCSLFIGTGHTLGGITIFPLIRDYHRVLNIYGIKGKGGGDAHRHHQA

SEQ ID NO: 315133 - protein, 115 aa, Zea mays
  Clone ID: MRT4577_50460C.1.pep
GRGSPTAVTVDHRRDSLPLAGFGALDHARVFAETHGTRARWITSVLGWKVAGISCQGNSLATDPPLINVMPLRCLTRGQGQVPQDEELEGYCDEFVRGLGRCLPINYGCWIVVFI

SEQ ID NO: 315134 - protein, 143 aa, Zea mays
  Clone ID: MRT4577_50461C.1.pep
MPAINDNGPVVLQLGGDLNHGIRIPASPVESDDTCYITSTGPLSPNLMLMSILPVAPIPQPSAREPWRGGRRAVLMFLLPRHLPSYPYLLGTTVPRRGNSTGGINYSPRSSLRASSHGGISEHHGKYFFLCVGHQIERRTVRP

SEQ ID NO: 315135 - protein, 96 aa, Zea mays
  Clone ID: MRT4577_50462C.1.pep
MAPATGGKKQKKKWSKGKVKDKANHAVVLDKQTSDKLQKDVQSYRLITVATLVDRLKINGSLARKALNDLEENGQIKKVVGHSKLSIYTRATGAAE

SEQ ID NO: 315136 - protein, 78 aa, Zea mays
  Clone ID: MRT4577_50463C.1.pep
GVYGPFGPYDIAAPQCYEFFENIALFSLSSGQAGKVFFFFFFFFFFFFFFFFFFVFFFFEYERSFFFRHKYKSVLLPW

SEQ ID NO: 315137 - protein, 107 aa, Zea mays
  Clone ID: MRT4577_50464C.1.pep
KSSGIMSPLGPGPGKATQSRTWGGFPGPTMSTWSQAPWGIRGKCYVRFPPSLKSSSITKKKKRLGEFPPPFPKKNGVKLSISLSGVQGRPGLVSNLSFGTPSNPEFE

SEQ ID NO: 315138 - protein, 175 aa, Zea mays
  Clone ID: MRT4577_50465C.1.pep
MDRPRKRGADSLSSRAALMLDAEREPEKTWGPIVEIHYVGGTYRGRCQEGVPEGKGRLTFSDGSFYDGLWRYGKRSGLGTLFHSNGDVYHGTWRDDLIHGKGWYYFHSGDRWFANFWKGKANGEGRFYANDGSIFFGHFRNGWRHGESLLVDANGSRWIEVWADGVLINRTKMEK

SEQ ID NO: 315139 - protein, 95 aa, Zea mays
  unsure (1)..(95): unsure at all Xaa locations
  Clone ID: MRT4577_50466C.1.pep
GGDMVITPVVKKLLXQFPPFSGQEDRVALARFFQTRXVVPMNKGEVDPGGFLAPGLPKKGGTQSFRALLWGGLPEGGVLPPPPGGPLQLQLGGPS

SEQ ID NO: 315140 - protein, 114 aa, Zea mays
  unsure (1)..(114): unsure at all Xaa locations
  Clone ID: MRT4577_50467C.1.pep
LCPLRRGLASCRXPLPPSLGLVLLARXVCVFXXPGSVFGAFVGXLLAVLVPVXPARAVVGRPACLRPRLAAGLPGVGSXLGFGPAPCLRFCPALSRCXRSPVAKSVAWVGPGVP

SEQ ID NO: 315141 - protein, 230 aa, Zea mays
  unsure (1)..(230): unsure at all Xaa locations
  Clone ID: MRT4577_50468C.1.pep
MALQYVEAQRQARPDLADWYADLADLYQRKLWHQLTLKLDQFLQIPAAQTGDTLIQLYNNFISDFETKINLLKLAQFAVIASRQYPDKDAAITFLEGIITKLRETRELRINEPILHVKMQIAAIHLDKGNHKECKNLLEEGKTTLDGMTDVDPTVHASFYWISSQYHKSLQEFAEFYKNALLYLAYTTVGSLSESFKLDLAFDLSLAALLGDNIYNFXGELLAHPIINSL

SEQ ID NO: 315142 - protein, 92 aa, Zea mays
  unsure (1)..(92): unsure at all Xaa locations
  Clone ID: MRT4577_50469C.1.pep
LGTSRXGRDWPFFIKQQTKKNWRTGKGLPPSTQETIQLVDRPCLPWYSCFRHGSDQRVVSSPLEVLVLCQQCLILVPAFEFCCMDLRVYTFD

SEQ ID NO: 315143 - protein, 82 aa, Zea mays
  Clone ID: MRT4577_5046C.1.pep
GKENQAPTPAYWNPPNGSINGSWAYPGKHTFKTLFWNLDGYALPMKPKPLLEGGHSKNSHYCQQNKRTTGGLLVQPAQNYQK

SEQ ID NO: 315144 - protein, 241 aa, Zea mays
  unsure (1)..(241): unsure at all Xaa locations
  Clone ID: MRT4577_50470C.1.pep
MALQYVEAQRQARPDLADWYADLADLYQRKLWHQLTLKLDQFLQIPAAQTGDTLIQLYNNFISDFETKINLLKLAQFAVIASRQYPDKDAAIAFLEGIIAKLLETRELRINEPILHVKMQIAAIHLDKGNHKECKNLLEEGKTTLDGMTDVDPTVHASFYWISSQYHKSLQEFAEFYKNALLYLAYTTVGSLSGSFKLDLAFDLSLAALLGDNIYNFXGELLAHPIINSLIGTKXVEWVYH

SEQ ID NO: 315145 - protein, 230 aa, Zea mays
  unsure (1)..(230): unsure at all Xaa locations
  Clone ID: MRT4577_50471C.1.pep
MALQYVEAQRQARPDLADWYADLADLYQRKLWHQLTLKLDQFLQIPAAQTGDTLIQLYNNFISDFETKINLLKLAQFAVIGSRQYPDKDAAITFLEGIITKLRETRELRINEPILHVKMQIAAIHLDKGNHKECKNLLEEGKTTLDGMTDVDPTVHASFYWISSQYHKSLQEFAEFYKNALLYLAYTTVGSLSESFKLDLAFDLSLAALXLGDNIYNFXGELLAHPIINS

SEQ ID NO: 315146 - protein, 193 aa, Zea mays
  Clone ID: MRT4577_50472C.1.pep
MALQYVEAQRQARPDLADWYADLADLYQRKLWHQLTLKLDQFLQIPAAQTGDTLIQLYNNFISDFETKINLLKLAQFAVIASRQYPDKDAAIAFLEGIIAKLLETRELRINEPILHVKMQIAAIHLDKGNHKECKNLLEEGKTTLDGMTDVDPTVHASFYWISSQYHKSLQEFAEFYKNALLYLAYTTVGSLS

SEQ ID NO: 315147 - protein, 206 aa, Zea mays
  Clone ID: MRT4577_50473C.1.pep
MALQYVEAQRQARPDLADWYADLADLYQRKLWHQLTLKLDQFLQIPAAQTGDTLIQLYNNFISDFETKINLLKLAQFAVIASRQYPDKDAAITFLEGIITKLRETRELRINEPILHVKMQIAAIHLDKGNHKECKNLLEEGKTTLDGMTDVDPTVHASFYWISSQYHKSLQEVAEFYKNALLYLAYTTVGSLSESFKVDLAFGLSL

SEQ ID NO: 315148 - protein, 70 aa, Zea mays
  Clone ID: MRT4577_50474C.1.pep
TTSDCPLQTLTPTCLSNSSSGVDQRCTNYHRPAIGYTTDQLVEHLQKLKRHYTIYDHPDILTDAVQAIHV

SEQ ID NO: 315149 - protein, 168 aa, Zea mays
  unsure (1)..(168): unsure at all Xaa locations
  Clone ID: MRT4577_50475C.1.pep
MALQYVEAQRQARPDLADWYADLADLYQRKLWHQLTLKLDQFLQIPAAQTGDTLIQLYNNFISDFETKINLLKLAQFAVIGSRQYPDKDAAITFLEGIITKLRETRELRINEPILHVKMQIAAIHLDKGNHKECKNLLEGGKTTLDGMTDVDPXVHASFYWISSQYIS

SEQ ID NO: 315150 - protein, 61 aa, Zea mays
  Clone ID: MRT4577_50476C.1.pep
SITSFIFSGNHKNSLGGYKTLSGTLKSTFTGGWSDTQKKKDHSSNTARTHSVCFYHPKLIN

SEQ ID NO: 315151 - protein, 80 aa, Zea mays
  Clone ID: MRT4577_50477C.1.pep
MPATPTIIGALLGLGTQMYSNALRKLPYMRHPWEHLLGMGLGAVFVNQLVKFDEKLKEDLDKMLERARLANEQRYIDDDE

SEQ ID NO: 315152 - protein, 67 aa, Zea mays
  Clone ID: MRT4577_50478C.1.pep
MANFAAQIKDKFLGLVDRVAGRGRAGGGKDDVQEPTTKLHTVQRVEVRSRGRAAEPVVDGGSTAGAN

SEQ ID NO: 315153 - protein, 90 aa, Zea mays
  unsure (1)..(90): unsure at all Xaa locations
  Clone ID: MRT4577_50479C.1.pep
EVSLSTVPASGHHSGPSLHAENHTSQTFTQHFLPQSQKAHKEDHEVAVLGAPPXTILPRSTVINIHSETSVPDHVVWSLFNTXFLNWCCL

SEQ ID NO: 315154 - protein, 192 aa, Zea mays
  unsure (1)..(192): unsure at all Xaa locations
  Clone ID: MRT4577_5047C.1.pep
MRSPRKFVFKTPLLCFLPIYXKNFYLPASXKSKKNFRKFGYIDRGTKEFNDQQRKNPSPDFPSFRYGREPGYWDKDHNLVAVPEMIPEIIVPDLTDFKLKPYVSYRAPDTVEGEFTAKDLFHVVYGSKIEKDFIEGRLSEDGSPLEPSEEELLTAEEARNAHLKLGSDVFTDVENIVNDDEWMKEQPKLEYN

SEQ ID NO: 315155 - protein, 136 aa, Zea mays
  unsure (1)..(136): unsure at all Xaa locations
  Clone ID: MRT4577_50480C.1.pep
MAATSGPPASANGNGSLAGVAAAVGAPTNPMATALLTDQYQFSMAYAYWKAGKHADRAVFDLYFRKNPFGGEFTVFAGLEECIKFMANFKFTEHDISFLQSVMPTCEGAFFDYLGESDCSDVEVASIPXGTIGFPK

SEQ ID NO: 315156 - protein, 86 aa, Zea mays
  Clone ID: MRT4577_50481C.1.pep
GSSSNEGAWPVPSSNQKVTHVHSTSLKADNEEYVTSYETAAVAVTAWSHLLWTSMWRTPQRASKGDTGYVSMDCNKEQKEGAPVAN

SEQ ID NO: 315157 - protein, 181 aa, Zea mays
  Clone ID: MRT4577_50482C.1.pep
ACMKTTTYYSNSSTTLLPRLLTFRAYWMLSHASEVGRPAHIAQDAEARVAAAEEGHTAAVCVTLTRVDSIPYVWHADPAYLIIINPPPRDTYIIIICMVVDPFDKAVRVCRHVAACVVILIRGRALHVPRLACRHCQGPFLSRRSTPQIILVNVAAPVCVVMPLRVEWCSLSCTSSLSASP

SEQ ID NO: 315158 - protein, 66 aa, Zea mays
  Clone ID: MRT4577_50483C.1.pep
GFGPRQRAWDPRPCSIICTIECCAAPCRIHPTGGRGCMHVSRIARPWTRTTQACDSVTGSGEHVRV

SEQ ID NO: 315159 - protein, 59 aa, Zea mays
  unsure (1)..(59): unsure at all Xaa locations
  Clone ID: MRT4577_50484C.1.pep
SIRRHGESVHRCEKTQSGIRREQGKDGFHRGHGEVEXRGRYRRCGEGPGYVAPSSSEFL

SEQ ID NO: 315160 - protein, 61 aa, Zea mays
  Clone ID: MRT4577_50485C.1.pep
CSKSLIIYAFHFDLPYLISMKQLLLEMPTCRVVNVWMKLNMALSSLSMLNCLDPGVLSFLH

SEQ ID NO: 315161 - protein, 54 aa, Zea mays
  Clone ID: MRT4577_50486C.1.pep
SQGAIPSHPKLIDTESGAAFLPPCSGFAHITLASTTMFAFLATLLDTPILLLPT

SEQ ID NO: 315162 - protein, 62 aa, Zea mays
  Clone ID: MRT4577_50487C.1.pep
HLQRYGDMTRGLDDVLQAHTTVPRANWLLTIKEADAVKKACDDATPVMNGLRANCNFSTLST

SEQ ID NO: 315163 - protein, 147 aa, Zea mays
  Clone ID: MRT4577_50488C.1.pep
SCSVGDIQENKDLVFFLCVSELSEGAHFFEQPEPGAAVELPRRKLSHGAFVALRRTWTDSSLFPAVTAQGSRSRSAMERESRSRVLSETASCAGTPRSVQSTCSLQRRYSSRSILKPHDGALDMSPRFSYCKPAADREKMISTEDTP

SEQ ID NO: 315164 - protein, 47 aa, Zea mays
  Clone ID: MRT4577_50489C.1.pep
YSCMIQRIRCPKGALHLCKTSVFLTHMRVHAGRERIRRSLPVTIQYK

SEQ ID NO: 315165 - protein, 94 aa, Zea mays
  Clone ID: MRT4577_5048C.1.pep
SWLPASPRSASPPRSHNETTQPVFRLSSTLTRLQHTDHDRGSVSFPGYEVLVSRRVPFRQSLVSASLPHSSRWLALFAFLPSSSKTCARTMEPP

SEQ ID NO: 315166 - protein, 219 aa, Zea mays
  unsure (1)..(219): unsure at all Xaa locations
  Clone ID: MRT4577_50490C.1.pep
GSFPRVSKGFFFQGGGFPPNKWFWGGRFFGGSFYEKNFSPKPFGPGGFNKAKIGPPPKGRPFFXFSPGKPPGWAPPPSGFGPFLKGGAXKPPXPKDPPGRFFPTTLPNFLIWGGPPGPLREGXFLGVLTLGAPKFFFSXGGAPPFGGPPXPFNFWGGPPXSFFFPRGPPSPLKPXWAGAFPKKKKLAPLPSKKKKKKKKKKKKKKKKKKKKKKKKKKLE

SEQ ID NO: 315167 - protein, 537 aa, Zea mays
  Clone ID: MRT4577_50491C.1.pep
MERESRSGVLSETASCAGTPRSVQSTCSLQRRYSSRSILKPHDGALDMSPRFSYCKPAADREKMFNRRHSLNLPEQLPGHYSRKATERTQKASSKSVADLVGEIAALEQEVIRKELHLLSLYRRAFDQYVSESCSFTSEQQVDQEFLKSIDEGALRLRDIKRSAAFDLPTTTISGSEQDQEAPPEPKAGARHSSLVNFLSASISEYVPKISCKLSEDILGCIAAVYCKLSGAEGECCVASPSPSVSSWSTFSPRRRNDSWSPRSRCNNFDSWSPRPCGVEKESGEQSPGVMMVVVPRIRVDADTFEYASKMLETTRSLIQRLEKVDPVKMTHEEQLCFWINIHNALVMHAFLAYGLHDKRMKSTDMILKAAYNVGGQSVNAQTIQNSILGCQSHRPSLWVRALFTPAKRSAARHPYALQHPEPVAHFALSTGAFSDPPVRLYTAKKIQQQLEAARTEFIRGSVAVRKQALLLPKVLHYYARDAALELRHLVELVCESLSDAQQKQLQLLQRRAVDKCVEWMPYKSSFRYVVHRDLAD

SEQ ID NO: 315168 - protein, 45 aa, Zea mays
  Clone ID: MRT4577_50492C.1.pep
SHIDDIYNINTMHQIISTIMYTTLPCLYIYRFPTFLLYIYINYSI

SEQ ID NO: 315169 - protein, 156 aa, Zea mays
  unsure (1)..(156): unsure at all Xaa locations
  Clone ID: MRT4577_50493C.1.pep
GTANKPPRPDPQNRAPTTTRGKANATKKEEARLRAGGGGAGKRKNADASGKPKRPTTAPXAXHARNRQEHQARGPGNKSDAAXSKAAGEKRRTRAEQEKQTQADQAGQKKQDKEKTKANXEKESTSXKKXKTDDDDGPKPEXDEEXGXXDEDNDDD

SEQ ID NO: 315170 - protein, 51 aa, Zea mays
  Clone ID: MRT4577_50494C.1.pep
AAHAEDSPSLHMVIVSRSAAKYYGLISAMVSTKEQYTQWDDVMVSTDLRSL

SEQ ID NO: 315171 - protein, 62 aa, Zea mays
  Clone ID: MRT4577_50495C.1.pep
KREHTECYQRILRGNDVMVFSQRDQGEHPVICGDRAECSKSRLIPCGRGVLLESYCRLYDEW

SEQ ID NO: 315172 - protein, 63 aa, Zea mays
  Clone ID: MRT4577_50496C.1.pep
IAASYVFSGFIIVRDDACVVAVGVLGGSGGMDGSWQSAPCLWSSSRHIYNNIIYLYYGDILYL

SEQ ID NO: 315173 - protein, 49 aa, Zea mays
  Clone ID: MRT4577_50497C.1.pep
NSLGFPSNIFRFWGYNYHFKGTTALGLPYFFLRFYIQHPIHNKKTFLGH

SEQ ID NO: 315174 - protein, 466 aa, Zea mays
  Clone ID: MRT4577_50498C.1.pep
IGGLEAGRDAQDRPYGRCRRTAAMGGGDDAAAGVGDGFAWDADSQLYYHASTAFYHDPVAGWYYSSRDSQYYVYKNGNYMPLTTDLENEPTANHPYDEANQDVLEHSSGLETTILDNENEIPGPPSEWMEETLINLYLSGYSNNEVNAESSLVIAHSNEEDRIETTGNKLDSLTSDSASASLHDATSQQTEVETETKNSAYVYESLGEEEEKWHAQYGQVERSNDDQHLPPTIDIWDWDVVQDHVNKGQPVVRLVGCLSRGSNKLHPSLPTRGGLVRTAPVREVHLDLVQVSTGKLYRLRNPSRKYLATLSAYDSSNPTKDWGFPDINLNKQSTAKCQSEVLADKSCGGGSVSAANTMEPNTKVYRDRAAERRILHRGLGVGPGQKQSNTNNFDEYEESIEDMDSMGVASADLNFQSSGLLSAKRIMENMGWKQGEALGKSRKGIVEPIQPSINKHGAGLGWRQTR

SEQ ID NO: 315175 - protein, 30 aa, Zea mays
  Clone ID: MRT4577_50499C.1.pep
YIILSTHVNISLKNSSIIVLQIKNRSSPLF

SEQ ID NO: 315176 - protein, 60 aa, Zea mays
  Clone ID: MRT4577_504C.1.pep
NFSAQLGWVFLTMPCLTIFLYPGICFKNRVFCLFVRPRSLNDSSPSLLVNVPLGFVLTNF

SEQ ID NO: 315177 - protein, 353 aa, Zea mays
  Clone ID: MRT4577_50500C.1.pep
GNNEDSSVALTRGDFAGELQVQQVEQDELLPPPKLESSKSPDGGKSVSSFPNQGCFPQFFEGLDWMIPPSCYQDSNGIHSVTASDSIFNPSEGIPPSTMNADGMDAFQTSCLSECFPNSIQEFISSPDINTLTFMSPEMQHLDAQHDGSNLQSTSNSYVQMSFSEESQSASLSGLHMEAVHINSSCLQPLATGSFDAGTFSKLSNIKECQALPLQEIHSSSMGTPSCSMDAAAVEYCMDRSVKPLKPPVRTYTKVQKLGSVGRSIDVTRFRDYHELRSAIACMFGLQGKLEHPGSSDWKLVYVDYENDVLLVGDDPWEEFINCVRCIRILAPSEVQQMSENGVHVLNDCMQMA

SEQ ID NO: 315178 - protein, 137 aa, Zea mays
  unsure (1)..(137): unsure at all Xaa locations
  Clone ID: MRT4577_50501C.1.pep
RSFSPGYTRRNLRLKTQIFEKTMIVRIMNLGENPPDNGGILQAXLPDLVGVPPGAXLIILDGNQVVDRRTLADXNMHWDRAMHFMTHVKGGMGIFAKALTNKAIGLDVEHSVSIYNPKEMMQXQRGVPYEQELFTFS

SEQ ID NO: 315179 - protein, 93 aa, Zea mays
  Clone ID: MRT4577_50502C.1.pep
RELVHGVLFSIVDGGSTQPLIIYLASLSMPCQRTLASAAADGRLLLVEAAVLLCLSVPPGRAAPPVAEVPDFLFFTSKLPFKHFSCYVTICST

SEQ ID NO: 315180 - protein, 558 aa, Zea mays
  Clone ID: MRT4577_50503C.1.pep
MDASLLLSVGLALVLIPLSLSLLNRLRRENMGALEAGRTNPRRRAAMDASLLLSVGLALVLIPLSLSLLNRLRLGRLPPGPRPWPVLGNLRQIKPVRCRCFQEWAERYGPIISVWFGSGLTVVVSTSELAKEVLKENDQQLADRPRNRSTQRFSRNGQDLIWADYGPHYIKVRKLCNLELFTPRRLEALRPIREDEVTAMVESVHRAATAPGNEGKPMVVRKHLSMVAFNNITRLAFGKRFMNANGDVDEQGREFKTIVNNGIKIGASLSVAEFIWYLRWLCPLNEELYKTHNERRDRLTMKIIDEHAKSLKESGAKQHFVDALFTLKQQYDLSEDTVIGLLWDMITAGMDTTVISVEWAMAELVRNPRVQKKLQEELDRVVGRDRVMLETDFQNLPYLQAVVKESLRLHPPTPLMLPHKASSNVKIGGYNIPKGANVMVNVWAVARDPKVWSNPLEYRPERFLEENIDIKGSDFRVLPFGAGRRVCPGAQLGINLVASMIGHLLHHFEWSLPEGTRPEDVNMMESPGLVTFMGTPLQAVVKPRLEKEELYNRVPVEM

SEQ ID NO: 315181 - protein, 112 aa, Zea mays
  Clone ID: MRT4577_50504C.1.pep
SLTGESNGWAGAFSLSPPSRHWAAAAAAVTAGPSTYSTSRACTDLHYQEHAGRHRQSKWHCRRCHPKTAGGWGRLASPGTVATTHKNGLSTPIPDKGKRLYKCPILSPGNVP

SEQ ID NO: 315182 - protein, 105 aa, Zea mays
  Clone ID: MRT4577_50505C.1.pep
DSPCSDRLGQPNTSRPPERKCRALHLRSSSTSSPSTDLSAAYVPEESLWQVVVQRHRSSAIMHEVLQTLGTAHDSAAIKTARANGHHAGSRPAVAAAPSSSSSRK

SEQ ID NO: 315183 - protein, 73 aa, Zea mays
  unsure (1)..(73): unsure at all Xaa locations
  Clone ID: MRT4577_50506C.1.pep
IIASDFELATSEAYGLPRAIPYRILHALAAGIXHLPALSLEQSSVLSLQVHQVHLLAQNIMAQLLLQLVLANF

SEQ ID NO: 315184 - protein, 86 aa, Zea mays
  Clone ID: MRT4577_50507C.1.pep
PFNHLVLTPYAFLLYSFFFPLPFASFFHHFFFFNPPLLFPSYPQGVGFFYSFFQQLQFLPFSPQNLAPLCCLFTTPFFFFFFPFIL

SEQ ID NO: 315185 - protein, 67 aa, Zea mays
  Clone ID: MRT4577_50508C.1.pep
FIVTCLYNRQSRNACHENKLPMLNATFVLTNLYSSTNPRIISRLISKVNSLASHRSNILLKYPKKKI

SEQ ID NO: 315186 - protein, 56 aa, Zea mays
  Clone ID: MRT4577_50509C.1.pep
NLRPKPFLLFFNYPTITRYGTGDGFCDFYREPPPLFLIGIGDGYSYAFTFMISNGA

SEQ ID NO: 315187 - protein, 81 aa, Zea mays
  unsure (1)..(81): unsure at all Xaa locations
  Clone ID: MRT4577_5050C.1.pep
IAHIAPIPCILHLYLSPAAACMCENPIDQTYRIQQAIASRILPSLILLLQHASTLLQQLTLGHLEGQNXRVHNVQNLGLPN

SEQ ID NO: 315188 - protein, 75 aa, Zea mays
  Clone ID: MRT4577_50510C.1.pep
APVRVRQAAGGPQAAPVDEQVRHLQRKYDDTVIKPEADGALGALHHELLLELREQDGLLLPCACLVPLRPKGRIW

SEQ ID NO: 315189 - protein, 115 aa, Zea mays
  unsure (1)..(115): unsure at all Xaa locations
  Clone ID: MRT4577_50511C.1.pep
MAGCTFSGDETAPFFGXLGAGAXLVFCCMGAVYGTGKSGAGDGSMGDKRPXLGVKSIDRGDAAGALGIYRHVMAGTIYNEDNPKAKPCFLFDGYRHLSSGLAXALDGLADGTGIV

SEQ ID NO: 315190 - protein, 51 aa, Zea mays
  Clone ID: MRT4577_50512C.1.pep
IFQLLASKDQSPLIRRNSFLIMDLRLHITIVYESSTPRMIVFSLRVISKIC

SEQ ID NO: 315191 - protein, 65 aa, Zea mays
  unsure (1)..(65): unsure at all Xaa locations
  Clone ID: MRT4577_50513C.1.pep
NDLDIGAELDGDDIGDDMEGTVHGGGNVVDLVVNEQSPRPXEVFSELQKGIGSLWEMPDPWTHAW

SEQ ID NO: 315192 - protein, 62 aa, Zea mays
  unsure (1)..(62): unsure at all Xaa locations
  Clone ID: MRT4577_50514C.1.pep
ASSVILFFWSCKFTNVSSHDIMAGVAIEDNEARALMAAQAIISCEDTLVNLQDQKNRMTEEX

SEQ ID NO: 315193 - protein, 67 aa, Zea mays
  Clone ID: MRT4577_50515C.1.pep
AAPPEEVGALRLKSDRSICAVCNRALQPSGNVQYGHGVSFPCPSRFCLGPLIFEFVVINPCPVRQPR

SEQ ID NO: 315194 - protein, 170 aa, Zea mays
  Clone ID: MRT4577_50516C.1.pep
PRLRLRRQPKPEPSKSVSAPPRHLSSCNPAKPSEPASSSTGQGDARKRGLARSKHGSSPAPRLRKQGSRHKNYGRRKTHQPSPPPRLLDPSEPVAESGDPGLGPREQRKRPSSGAEVAPPGRAGAPHSREDDSAGSLELPSRAAASRRRRKRKRASGGKEGKAGARCRMN

SEQ ID NO: 315195 - protein, 128 aa, Zea mays
  Clone ID: MRT4577_50517C.1.pep
MAADMQIVLAAGRKIEAQYVEMKVPLYSYGCEKKIKKALSHLKGIHSVQADYHEQKVTVWGICDRDDVLAAVRKKRRAARFWDDDGGELGPRERAPTPGREAPKQYLAAFAAYRWRKSWKKLFPLIRL

SEQ ID NO: 315196 - protein, 44 aa, Zea mays
  Clone ID: MRT4577_50518C.1.pep
TDGDHGTTLIAVLVLSPGSSHQACARVRFRSCGPRCLEHLVCVV

SEQ ID NO: 315197 - protein, 38 aa, Zea mays
  Clone ID: MRT4577_50519C.1.pep
TRSSKKKKKKKKKKKKKKKKKKKKKKKKKKKKRALWPG

SEQ ID NO: 315198 - protein, 75 aa, Zea mays
  Clone ID: MRT4577_5051C.1.pep
RVSFFPNPPKFSPLGFFPVKSSPPPPFRGGLKKSPFLACPPVFPKKKKKKKKKKKKKKKKKKKKKKKKKKKTTQH

SEQ ID NO: 315199 - protein, 27 aa, Zea mays
  Clone ID: MRT4577_50520C.1.pep
IKLCNDGHLSVFRWHYRRPVNLIEVAR

SEQ ID NO: 315200 - protein, 167 aa, Zea mays
  unsure (1)..(167): unsure at all Xaa locations
  Clone ID: MRT4577_50521C.1.pep
TTLNMATPFQHFSPEWQRAGRKIPYTEKGLYTQEALFIYMGNIRVRLYGINXTTGADPYYCMPCPTGXNRGTAMEXGVTPTXTSGMGMHLIVGSNIIEDGHSGKEDRXALVNXAQEVELVCLINIEEAXAYEPTVLYGSGSQLGTRNAMIMILQLIFAGMIVIRLQE

SEQ ID NO: 315201 - protein, 428 aa, Zea mays
  Clone ID: MRT4577_50522C.1.pep
MPNYEPQRWSFFRNLAQNEFPKKDEAQDLAKIEEGVYPLDHLEHDTTNVKNLDLQSDTTVEVPSIVSRTNVDPSISIPGFVSSQIDNPTTTKNVEGFQVDNPFTNMHEMMPSHLDFEEQKTEEGRAVGPVMDASFKDNDFEYLQIIKNEDLEELRELGSGTFGTVYHGKWRGSDVAIKRIKKSCFTGRSSELERLAHEFWREAEILSKLHHPNVVAFYGVVKDGPGGTLATVTEFMVNGSLRHVLQRKDKYLDRRKRLIIAMDAAFGLEYLHSKNIVHFDLKCDNLLVNLKDQSRPICKVGDFGLSKIKRNTLVSGGVRGTLPWMAPELLNGSSNKVSEKVDVFSFGIVMWEILTGEEPYANMHYGAIIGGIVNNTLRPHVPASCDPEWRRLMEQCWAPDPAQRPAFTEIAGRLRSMSVAANQAKATK

SEQ ID NO: 315202 - protein, 240 aa, Zea mays
  unsure (1)..(240): unsure at all Xaa locations
  Clone ID: MRT4577_50523C.1.pep
MAATIXSWHAIHIFDSRGNPTVEIDMFGSNVTIVRLAVLTGAYPGVYDALELRDDGSDYLYKAVTKGVXNVNXVIGPALIAKXPTDQTXIDNFMXIHHVDGTIYECLWSKHNLAANAILYVTLAVCIAGNSINSIPLYHHIDNLCDNNNLMMPAAAFHVIDGXGSHAXNKLAMQEFMIXLPTGAGSLNEAMNMNGEHYHHLKYRIINEYAKEATNDEAKCALAPNIPHNEEGLELLKTAL

SEQ ID NO: 315203 - protein, 50 aa, Zea mays
  Clone ID: MRT4577_50524C.1.pep
NAWVELCYNCDIGSNNTREYSARAIRQQPSDHLLKFEPFRHVITARVAQK

SEQ ID NO: 315204 - protein, 97 aa, Zea mays
  Clone ID: MRT4577_50525C.1.pep
VSRSPTQTLVKGGHNSSNWCDSPWRSTGTTNISWYNRIKVQGHSAFTDTVSAPTTRRARGRKTRTVVRVGSINTGWTCRTTFASCNSQRLSPLPVWL

SEQ ID NO: 315205 - protein, 130 aa, Zea mays
  Clone ID: MRT4577_50526C.1.pep
RPASGGPASALGGPRLARRLHFGAERKDPAPTAKIREAGAGRAPAVPFRPREEKPRRPEAGEKNPLLVIDLRSRPPGATCVESDSPRGWRASCCLGSTNTGYYYRCICVLLCWLTGRGRKMLHLITTVSV

SEQ ID NO: 315206 - protein, 70 aa, Zea mays
  Clone ID: MRT4577_50527C.1.pep
IRLEGSLLANGFKQVGQHDGPGRRMDSLEDNVSCKQNHPMDHCAAPVVRALRANGGQRRDLRTQATSVIL

SEQ ID NO: 315207 - protein, 134 aa, Zea mays
  Clone ID: MRT4577_50528C.1.pep
SSSCTVRLRGTRGARACSAVVIGADGGHATPTSWHFPALGLQLTFDVGVIAIFGHRLAGHVKEELRRNYFTMEKGYNSFPIPVACTSYSQAIKARQRLAPVLTGILADRRPRRTDYYDDHGLLNALMRSLDNSG

SEQ ID NO: 315208 - protein, 113 aa, Zea mays
  Clone ID: MRT4577_50529C.1.pep
DGRDRGGPEADSLLAQGRQAVWLGSRSRWGRPGVWRCRPGDLAGRALDRRGPKLVHGGGKVGAFSLGARARTPLFCVGCLSMYFVFSSLPFFPCPFFFFFFLLFYNFYVFFFF

SEQ ID NO: 315209 - protein, 147 aa, Zea mays
  unsure (1)..(147): unsure at all Xaa locations
  Clone ID: MRT4577_5052C.1.pep
APHMASQLRRAPCPGXHGLRXLTPXAQVPRCAAAVRPXRGXGRKXXRRRRGIPLAYYISAXXHLLWMSGERTIDRFDALFAXXGSGLXRRRRNPARRXGGADSLEVARLSGLHERVKPLPGSTLXXDTLXPAAPSGHIPRRLASVLR

SEQ ID NO: 315210 - protein, 96 aa, Zea mays
  unsure (1)..(96): unsure at all Xaa locations
  Clone ID: MRT4577_50530C.1.pep
TDVRSGMYNDFPDTGERQHLSAGASALPTFYFIFWLANSGLPDAXIXMLARTRAGVFRNHYYMLDALELKALNLLSKAEDKSSIEHTGTAHRWDVL

SEQ ID NO: 315211 - protein, 240 aa, Zea mays
  Clone ID: MRT4577_50531C.1.pep
RPGVDYDETFNPVVKFATVCAVLSLALSRNWAIHQLDVKNAFLHGTLTETVYCSQPTGFVDATHPDLFYRLNRSLYGLKQAPRAWYSRFATYLSFIGFVEAKSDTSLFIYRRGDDIVYLLLYVDDIHQQAINILERAGMSDCKPCSTPIDTQAKLSEDDGPPIADATAYRSLTGALQYLTFSRPDIAYAVQQVCLHMHTPRKPHLTALKRILRYLRGTLDYSLLLRSSPTLELVVYADAD

SEQ ID NO: 315212 - protein, 70 aa, Zea mays
  Clone ID: MRT4577_50532C.1.pep
NLNLKFNPPYNGFREKIQSKNSKKKKIKNNERTNFWELFQSKCESFIKTLLQTTNILHQIEITSCCQDSH

SEQ ID NO: 315213 - protein, 36 aa, Zea mays
  unsure (1)..(36): unsure at all Xaa locations
  Clone ID: MRT4577_50533C.1.pep
NLFVSLKTRYMNPKPAFRMXSRYDQNNFALQRSNST

SEQ ID NO: 315214 - protein, 74 aa, Zea mays
  Clone ID: MRT4577_50534C.1.pep
GCLLGNGVVGRRRRNWGLRCMACSRIEDCRSDIVVGSINRRCGSSNVRVCLARSTKWLGCCKRVSLCAGRVGPG

SEQ ID NO: 315215 - protein, 70 aa, Zea mays
  Clone ID: MRT4577_50535C.1.pep
KDSSHREELASVPIFSKRWGRENSLYHETLRVCCTSCFLGLDNSITILIYRRVKLTLNEKSFISSRAVKY

SEQ ID NO: 315216 - protein, 172 aa, Zea mays
  unsure (1)..(172): unsure at all Xaa locations
  Clone ID: MRT4577_50536C.1.pep
GNRGTPPDPPRTKMTQVGPATKNKPRAKRPRPGGKPKNAPGDRPPKKKGPKPXGLTLRXNMDKRPPXRRGRGRGXPPRTKKPGPGGRPGKPGPAPEGGPSFPKGRPKKTGGKQGQSGFPGEKGNXPQRPPXKPEAKRESPXPKGEQPQKXWGPRPPSRGNRNAPPKKNPTPG

SEQ ID NO: 315217 - protein, 70 aa, Zea mays
  Clone ID: MRT4577_50537C.1.pep
KNYFLKTQTKKKNGGLISNFLLFTTFLLRQPNYYYSPPIFTLRAGSSLSFPSQNADATHSHNLTPHHYLA

SEQ ID NO: 315218 - protein, 59 aa, Zea mays
  unsure (1)..(59): unsure at all Xaa locations
  Clone ID: MRT4577_50538C.1.pep
HVLPSFEFSTGARPFIMTXGSXGGPWRKRITDLDGTEGDLPWWCVDCITLNRYPKENTK

SEQ ID NO: 315219 - protein, 102 aa, Zea mays
  Clone ID: MRT4577_50539C.1.pep
ITRVPVPRPKNFPPGETQGFGRGKLSPKNPIFGYQVRFGLEGGPKPPGTGALGPNLLTREGGVPNGAAKAGLGGPPLTRNREPRINSGGVGPPWGAPSLWQV

SEQ ID NO: 315220 - protein, 174 aa, Zea mays
  Clone ID: MRT4577_5053C.1.pep
LLRCLCASAFCVASFLWLVRLCCPFVYLSGVPPVCFAFLLCVTACPFPPFFSVWRRSPPVLLCCLFSFGAWPWFTLAFGLQCLLSVSLGFVFGVPWAGFSVVLGAGCSFVPLPPRGSLSSSGPVLVCCFFLGSPVSWGRALSGCRWRLVCRWLVRLPSVFGGFLAPPLAWFRNS

SEQ ID NO: 315221 - protein, 108 aa, Zea mays
  Clone ID: MRT4577_50540C.1.pep
DPQRIGGGGPSHGGLNAPRGCQGALVNRARFPGRVALKRFFFFKPPLGALEQFPLLGASQNHRVCLVCLGPGVCAPRHGAWAPPVPKRMAKKKIYVKNISTINVIQLE

SEQ ID NO: 315222 - protein, 101 aa, Zea mays
  unsure (1)..(101): unsure at all Xaa locations
  Clone ID: MRT4577_50541C.1.pep
GAVRRVPAGLSRAVWVXVWLAAAVLRFGLWACFFVGLVGVCVCSVCGLAVGGPGXRFCGAGARVGCWVVFSVVASPGGALSVPVGCGLGSGVCVSLSLFCS

SEQ ID NO: 315223 - protein, 100 aa, Zea mays
  Clone ID: MRT4577_50542C.1.pep
MVGANEVGGLECERKPLAEVVGDCVQRWFQDGSKKARKGDVANQVLVAQMFFSGYGTPKNEYKGKQWMDRVSRFRSSALKVGMKRPGYNASDSDSDDANQ

SEQ ID NO: 315224 - protein, 104 aa, Zea mays
  Clone ID: MRT4577_50543C.1.pep
MVGANEVGGLECERKPLAEVVGDCVQRWFQDAYKEARKGDVANQVLVAQMFFSGYGTPKNEYKGKQWMDRASRFRSSALKVGMKRPGYNASDSDSDDANDDANQ

SEQ ID NO: 315225 - protein, 764 aa, Zea mays
  Clone ID: MRT4577_50544C.1.pep
MEFFAATGEDDDSIDTSNLPAKQASWELSPQASRSMGVPGAHLQRAAANFNSFDLNSEAPNYGSFTQLVLSPSIPNPDLEFGAGRRGKVAGQHSVSPSHAAAPQKSCRVDTTSVARNPITMGAHGGHHRSVASLRGAKASRLHPEIGSRHGNLGVGASSNVTAPSLADTDHAQDMEDEVVIDAFSNGEHYDKANWNSENTNVFCDLCVEEMRAGNHSNGFLTARAYKNIAEKYFLTTGLRHSRQQFKNRWQALKRMYNFWLWVNKQTGQGSVFDDDAFWESNTKGQSEWKKLRYAPPEWIDQFEIMFQHVAVDGSSACIPGEQIFNKGGCGDKKDVDGRKRVGQSSICATSPQKKTKSPMMDSSSSDEEDIRINFALQQGSLIQQYGAIACLFGAYYNDKFMNKSMQRQPKVTGMEWVMTTMRNSVSCFNMFKMSREIFDRLHCLLVASYGLKGTSKMSSVEALAMFLWIIGAPQSVRQADNRFERSTETVSRKFDEVLECMYRLSADIIKPKDPEFRTVHPKLRVAHFSPHFDNCIGALDGTHVPVVVPAPKLLQYVGRHGYASQNVLAICDFDMRFTFAVAGWPGSAHDMRVFNDAIRKYGDKFPHPPPGKFYLVDSGYPNRPGYLAPYKGTKYHLAEFRQGCNPCGKKEVFNYVHSSLRNVIERAFGVLKMKWRILLHLPSYPLEKQSKIVLACMALHNFIRESAMPDMDFDICDHDDNYMPMEAPISSHSRGRSDQLGDEDHNMNLFRDNLADALLAMQS

SEQ ID NO: 315226 - protein, 40 aa, Zea mays
  Clone ID: MRT4577_50545C.1.pep
ASPPAGVPVIPELQNFFFFFFFFFFFFFFFFFFFFFFVFS

SEQ ID NO: 315227 - protein, 79 aa, Zea mays
  unsure (1)..(79): unsure at all Xaa locations
  Clone ID: MRT4577_50546C.1.pep
DXPVXRVVSXXXXXXLPXXXRXLERXEPEVXSTDSWNXADLXXRPPXAESHXDXSVCXHXXXRCRXRMRGHXESVCXGD

SEQ ID NO: 315228 - protein, 107 aa, Zea mays
  unsure (1)..(107): unsure at all Xaa locations
  Clone ID: MRT4577_50547C.1.pep
WNDSAPTGTWGVFDDGGARTPTANLPEAKLYKSEHLQRPENRALVEKAKYIHIAGSSLTVPSDSIQXLVAEHAAANYKXFPMNXLLPSICEFLXDAQENVLXPIADY

SEQ ID NO: 315229 - protein, 97 aa, Zea mays
  Clone ID: MRT4577_50548C.1.pep
PSAPGTPLSPRAASSPASSQPCAPEPTAAASPPTCPTACPRTSPPRTGPPCTGSRSAAPTCRPPSALPASPLLEPDRPHTACPSGPPAPPAQDHPGR

SEQ ID NO: 315230 - protein, 56 aa, Zea mays
  Clone ID: MRT4577_50549C.1.pep
INLLFPLWLLKMLDEYDTYVTYQRSIHSCFGAFSIDRLQGGVWIKWKFFFSVRSIC

SEQ ID NO: 315231 - protein, 70 aa, Zea mays
  Clone ID: MRT4577_5054C.1.pep
MSALFNFNSFLTVVLLVICTCSYIKMQFPAILNDRTGFRGFFWKAARIGERLSPWVSVGCLAMGISTIFF

SEQ ID NO: 315232 - protein, 84 aa, Zea mays
  Clone ID: MRT4577_50550C.1.pep
SVHIPYIFQPISIPHVPSELHRTSVAMILVHNISGLYKSKSLASVDRISWSRVHVLLRDLETPPQEQMNVIREATSTHASAHAS

SEQ ID NO: 315233 - protein, 68 aa, Zea mays
  Clone ID: MRT4577_50551C.1.pep
MAIPVEEAIAALSTFSLEDEQPDVQGLAVLLSSERYATNSPIEYSDVAAYRLSLGEDTKAINQLNTLT

SEQ ID NO: 315234 - protein, 100 aa, Zea mays
  Clone ID: MRT4577_50552C.1.pep
THERQQRAHGPYARQERAPHQPWLRLGSPTKPPATAGFLRAGRGSSRARRRKELRRIRDGVRGKELDLMGQGGADWRRERGERGREEVEEEEVRTGGFLF

SEQ ID NO: 315235 - protein, 531 aa, Zea mays
  unsure (1)..(531): unsure at all Xaa locations
  Clone ID: MRT4577_50553C.1.pep
MSSEDKAMANRVTSHSPKAMVSEPDPNRMMMFRSNMEYSQTNGQTNAVLGPVAIFWDIENCPVPCDVRPEDVAGNVRMALRMHPVVRGAVTMLSAYGDFNAFPRRLREGCQRTGVKLVDVPNGRKDAADKAILVDMFLFALDNHPPSSIMLISGDVDFAPALHILGQRGYTIVIAIPSSVTVSSALSSAGSFVWDWPSLARGEGVVIPRSLVRRLADYPCYVNSGNMGQFPDNQNEEEAIVYTGTSRNEYGGRPXRQSNVLLXTSQTTREPSKALYTVEDVNCGTSSRPHNLSCRQSESPETDQGLTDEQSWWVRPGDLQGLKGQLIRLFELSGGCVPLVRIPSEYLKLFGRHLYVSEYGAVKLVHLFEKLADSFVVVGKGHKKMICLCNSGDRNLKNYPSTPIILTKKNRGNSALEESTIGACQQLGSSSDELSEDEPIINPDINVACVFNEHLDSFRREIQELLVCYSCPVPLGNFESLYEQRYKKIIDYESLGVTGLEELVEKVKDVVDLHEDQTSKSKFLIANYTTG

SEQ ID NO: 315236 - protein, 109 aa, Zea mays
  Clone ID: MRT4577_50554C.1.pep
TSTLRAFLDLGLNLRARRHDVPTKAYDLLCLFTPHLSSPFAKTGASSSCDSTVACQTSCYIAMGHKSFRCGAYAINLNYLAVPFIGILLNQNANKHGSAPLMYMLDLRM

SEQ ID NO: 315237 - protein, 236 aa, Zea mays
  unsure (1)..(236): unsure at all Xaa locations
  Clone ID: MRT4577_50555C.1.pep
MDESWRCTMGSVLPRQRSSDQHAAGHQNLAPDDFRDVYGGPPRTVLLRSFGGEAVDYHSPTGHGHQYTSYGGAEAFCRRPYANGRAAAVPTEQGFFDDIFGARRHMRSRSSSKSKSSSAVSSDEXHPPASAGRWPPPAAAAAXDATLSSFTSRLRPVTIPSRRYDSSPPSTSTRGEYYQSSSTCSTAPYPAARYYYGDDAKAAGSRSNHSRAGGDGSAATRHHRDHRGGSSFCCFT

SEQ ID NO: 315238 - protein, 123 aa, Zea mays
  unsure (1)..(123): unsure at all Xaa locations
  Clone ID: MRT4577_50556C.1.pep
SSPHGGLYDQIEXFMQCKXPFVEPEVSVFCEKAKDIXXEESXXQXXKSPVTICXEXQGQXQEXXEXXRNXGKXPETNNXXKGEXXDXXXNXXEXXTXXXXXKXRXXQRNTKXRGNXESRQKXQ

SEQ ID NO: 315239 - protein, 586 aa, Zea mays
  Clone ID: MRT4577_50557C.1.pep
MGSSEGTAVDPDSENQDSISPRADVGIPVAEGDVPVADRTDIPELRLATPGTRWLRARADGKQQVKEFELARGRAHTGKKSWIVSFDGVNNVDEARQIVGSAVLVKARDRPEIEDDEFYSLDLVGMRVIVKDTGKLVGTVGQVFNFGGGDLLQVIMGSSEGTAVDPDSENQDSISSREHVWIPFAEDIVPDVDMASREMRITPPKGLLELNSRSDKRSKKERRAMEWKDRKRFQRRVIAGKKVLSEMDQVHVLEGLVSGDKVQKASLAEQIGSIDFQLFRHAVHCVSKQIESSSMNLLANSSLSRKKVIKIPYKTLINLGDKAEHAFSSEFKNGLDILLKSKAAIVLVRNGSDSDTEFLSLLNSFSELMKVVENKVSPPLIVIAPAGHVESVRKCLVENDYFGFDTQKVWVLEELELPVVSICSEGNRKKVLMKSPWEIIKKPTGSGAIFSLLLSNKILETLNEMGVQYTQICSSSNKPIIGHPLLFGAVASRGADVGIQVSKTGETLDDFDVILSIDQLNKMCRDVTQIRFSARSEQNVHVEHVDGQWVAVQPEVANSHRLHAEVTSVLDSCAPDKLCVMEIVEQ

SEQ ID NO: 315240 - protein, 94 aa, Zea mays
  Clone ID: MRT4577_50558C.1.pep
PSSALSKHVLFYAPDNLVGQRTIYPASVPHTNKKIRNYILMILWRTLLKVLLPLIMRKNPLLKLIYLISLNKKLKSFTMNSLIQYFTTCLTTDI

SEQ ID NO: 315241 - protein, 57 aa, Zea mays
  Clone ID: MRT4577_50559C.1.pep
TTRPAYIVPLPLLATDNPPALRCWFITVFYVTTSSCPIHSTTTSSRTACCGRSWESG

SEQ ID NO: 315242 - protein, 86 aa, Zea mays
  unsure (1)..(86): unsure at all Xaa locations
  Clone ID: MRT4577_5055C.1.pep
EEQPARSGVFDEDIEDVKXADAESVVADEGNYSNGCRRTEEKLDVGSVTGSSHSEGKSLGEKSQLTTCSRAVGCDFESGDSAELGV

SEQ ID NO: 315243 - protein, 93 aa, Zea mays
  unsure (1)..(93): unsure at all Xaa locations
  Clone ID: MRT4577_50560C.1.pep
MESPPITELNSLPKSKGRSKNFSEDEDILLVSAYLNISKDAIVGRDQKEGRFWEIIENYFHDNKTFXTDRNASSLXHRWAFIHKEVMCISSIP

SEQ ID NO: 315244 - protein, 59 aa, Zea mays
  Clone ID: MRT4577_50561C.1.pep
RPAARAGLPFRPFSDSSLLANLLYPPRSIFGRTNAVRRAPSFWFGTPNNIGMVIIKFWF

SEQ ID NO: 315245 - protein, 125 aa, Zea mays
  unsure (1)..(125): unsure at all Xaa locations
  Clone ID: MRT4577_50562C.1.pep
MVAQSHYRAQSPSVLPSPPHGPSPPPPASTAPRRRXPPPGPRPSHQPPRHPPHPPLPPPPPQAPHPAPPRRPPRTPTSSPRPPRPRPRPTPAPSSPARPAPPRPPTSRPLRRHRRLGTTGGPTKY

SEQ ID NO: 315246 - protein, 100 aa, Zea mays
  Clone ID: MRT4577_50563C.1.pep
FVLVWGTRTRGPCLRKKKKKKKKKKKKKKKKKKKKKKKKKKKKKKFHHHTQKSTKELQRHTGVEQKQTKGRNQGFTTRRGTTARRRGGRWPRPVSAPRGG

SEQ ID NO: 315247 - protein, 149 aa, Zea mays
  Clone ID: MRT4577_50564C.1.pep
MRSDKAGKMLADVLLKGLQGSRPVTLVGFSLGARVVFKCLQELAQLGNNVGIVERAVLIGAPVSVQGEMWEPARKMVAGRFVNVYSTNDWILGVTFRASLFTQGLAGIQDVHVPGVENVDVTELVVGHSSYLSLLQKILDHLELNTYYP

SEQ ID NO: 315248 - protein, 93 aa, Zea mays
  Clone ID: MRT4577_50565C.1.pep
SFNSGPPLFVLSIIIRTNSIEAEHMHASIHPAMELYQGRNSSQSVPLYFSVYCPLSPVQGGVSAGGAKFVGGVLEELSRHCLRVRGWVTPPLF

SEQ ID NO: 315249 - protein, 103 aa, Zea mays
  Clone ID: MRT4577_50566C.1.pep
MSGRGKGAKGLGKGGANRHLKVLRDNIQRITNPPIRTLARRGGVKRISGLISQETHGVLTIFLENTILNSITYTEHARRKTATAMYVVYALNRQGPTLYRFRG

SEQ ID NO: 315250 - protein, 46 aa, Zea mays
  Clone ID: MRT4577_50567C.1.pep
WVPRCHIAVLEAFKRRVKLSSCMRVESHGHWGGAIQLFGVLFKQSV

SEQ ID NO: 315251 - protein, 105 aa, Zea mays
  Clone ID: MRT4577_50568C.1.pep
MGCKPLATERPDPIGRSASPSPCSSYQPSPRASYNPSAASSSFPSSGSSSHITLGGSNFMGGVEGSSLIPWLKNLSSSSSFASSSKFPQLHHLYFNGGSISAPVT

SEQ ID NO: 315252 - protein, 29 aa, Zea mays
  Clone ID: MRT4577_50569C.1.pep
PNSINKTKFLLNRRDTCHQLFKELEKGSH

SEQ ID NO: 315253 - protein, 91 aa, Zea mays
  Clone ID: MRT4577_5056C.1.pep
WPTSLCQRCTIVHLGLNRTRTKESHIRRGNGIHILHRPILIREVYSNSSITLVPVRHDVDDHLPQLIQNDRTRGPTSELRAAACMPSHLSM

SEQ ID NO: 315254 - protein, 51 aa, Zea mays
  Clone ID: MRT4577_50570C.1.pep
LARRIWLHCELIIRYHQGSSTNQLVCSIYVIYSLVAHIAVKCPSRTATSLS

SEQ ID NO: 315255 - protein, 101 aa, Zea mays
  unsure (1)..(101): unsure at all Xaa locations
  Clone ID: MRT4577_50572C.1.pep
GLKWRATYNXYHIRWPPPSREXKTGVVYKANFPDREGRTVIIIRPTKENSTSHYVQIPFLAYXLLENANLDQRERQEKMVWQTDITLLTMSHTTPQKTAQT

SEQ ID NO: 315256 - protein, 80 aa, Zea mays
  Clone ID: MRT4577_50573C.1.pep
ASQQYMFMISIIQSKLCSTCVSTQPNCGVSSATRLPNKIVAAGQASYAFVQPFLPRMLQKTRCCALVFYPVVTYQHSFVP

SEQ ID NO: 315257 - protein, 317 aa, Zea mays
  unsure (1)..(317): unsure at all Xaa locations
  Clone ID: MRT4577_50574C.1.pep
MATMSAASHRCCASSLRALTVLFVLAALVSDVGGRHHHHVCRPYFSCGGFSNISYPFRRQGDPSGCGVQSYELVCTDTDATIRIGSGTYTVLSINSTYSYFWVVDANLDIQSSCPLPWWDXMVRPVLPTHIVGGLSSGLISXYPNSMSIIFVNCSKPIENNDIYEPVPCLSNSSFIYLLTHYSYGYALAEILEPSCGYLAMIYLGGPGIPVPKNTSYPDVVKLMRNGFGLRFPSSIGDRGIRECFAESVRNFLKEPRKYQIVDILMVEELWACFLDQHGSTNNVVTSVIIDIIKTIPICMVASEIYTCFFAGLDWSP

SEQ ID NO: 315258 - protein, 37 aa, Zea mays
  Clone ID: MRT4577_50575C.1.pep
NKRKKRWYRCKRWLKISLVITSKRMAIMRVNRKWSIA

SEQ ID NO: 315259 - protein, 178 aa, Zea mays
  unsure (1)..(178): unsure at all Xaa locations
  Clone ID: MRT4577_50576C.1.pep
MPMSDSSLRALTVLFVLAALVSDVEGRHHRHVCPHFSCGGLSNIWYPFRRQGDPSGCGVQSYELVCTDTDATIRIGSGTYKVLSINSTYSHFWVVDANLADIQSSCPLPRWDXMLGGPVVTYIVGGLSSAMIFLILIRCGFTLTLTLIGPVATHIVRGLSSAMIPSFLLWIIRGGLSL

SEQ ID NO: 315260 - protein, 468 aa, Zea mays
  Clone ID: MRT4577_50577C.1.pep
MPVPMNTSYPDVVKFMRSGFALRFPLSYGDNIRECLAENTRMPWFCSAFHEEPRNSTGIREQILDILTFETLWFCVLDQLGSTNNDVKSVLIDIIVGIIPFVLWGLKSAHVICRFVLMPLAVFVFLAYKYWKTRITIDAVEKFLRMQHMLVPMRYAYTNIIAITAHFRDKLGQGGYGTVYKGVLQPGEVHVAVKMLGNSNCNGEEFISEVATIGKIHHVNVVRLIGFCSEENIRALIYEFMPRGSLDKYIFSSEKTFSWDKLNEIALGIARGLNYLHHGCDMQIIHFDIKPHNILLDSNFVPKVADFGLAKLFPKDDNFVPLSAMRGTIGYIAPEMVSRSFGVISSKSDVYSFGMLLLEMTGGRRNADPHAGSSSQAYYPSLVYKQLSQGDANRISEGVDMHELEKKLCIIGLCCIQIKPQDRPTMSEVIEMLEAGVDGIQMPPRPYFCDEEGDSSYSIISELDIIEE

SEQ ID NO: 315261 - protein, 46 aa, Zea mays
  Clone ID: MRT4577_50578C.1.pep
LPEKFLEIHYLRPQPLQEEDAYCSHPLGGRQAPHQRHRTSSPNRPA

SEQ ID NO: 315262 - protein, 200 aa, Zea mays
  unsure (1)..(200): unsure at all Xaa locations
  Clone ID: MRT4577_50579C.1.pep
MCGAALHRTTTFCXAGPARPRRXGHAGARITMLRTVKSAPHRRWDSPDRPNYIGPLSENTPSNLSGXYPATKXWNTARLSSGTNTFARCRQLQVIHSRRLRLWAMGXMFPNILANNGVKFRNWACLKGGAHILSYCGLNYLANPNLMHAERILSIWTRQMVLMGFFKGYRAXGAPLVQGLHNEYPGEPFDPLGLVDDPET

SEQ ID NO: 315263 - protein, 123 aa, Zea mays
  unsure (1)..(123): unsure at all Xaa locations
  Clone ID: MRT4577_5057C.1.pep
GQGPGHTFRRSRKRQVMXIRPSGKVXIKLLTVIXRHAIHLHSYGTLDDHRLREIVDQLHGRLNQRDGISPRLDIEVPHLEEWTARVLPYTQPGXIARTTYACIMDHKDVRLENGTGKDLRIFY

SEQ ID NO: 315264 - protein, 158 aa, Zea mays
  unsure (1)..(158): unsure at all Xaa locations
  Clone ID: MRT4577_50580C.1.pep
SQCLAWRKSSTPSCPRPVTTASPCRRSSGRPTRTAMSPASGPPPAPGGXRRGQRRRQRPRRSARHQAXILNEMRSRQMKRRSRXAWTWTRRRCLCRRALLSPGRTPRSIQEPSSTRCQVPRRARASWWRERPRRRSRRRRQPTGGTATRTTRARRSSP

SEQ ID NO: 315265 - protein, 46 aa, Zea mays
  unsure (1)..(46): unsure at all Xaa locations
  Clone ID: MRT4577_50581C.1.pep
SSCQIFNWPLPXXLTNTCYPTMILLPNILLLKVYSIPYTTSSRRIC

SEQ ID NO: 315266 - protein, 96 aa, Zea mays
  unsure (1)..(96): unsure at all Xaa locations
  Clone ID: MRT4577_50582C.1.pep
LARALHARGVGITEFHTAGARPRDRISSTADYXRLEIELAXEVEMPGLMAXRAEFSPSKLFAGSRISGSLHMTIQTAVLIETLTELGAEVRWCYCN

SEQ ID NO: 315267 - protein, 90 aa, Zea mays
  Clone ID: MRT4577_50583C.1.pep
ARMRQCEAGCFMRETNRFFGPAHASSHGRERIGPPPPLCPSVHNLVARVSYSQLDLFCLTNLNILHGDSGKGIMQTLEREGVISDLLFSC

SEQ ID NO: 315268 - protein, 269 aa, Zea mays
  unsure (1)..(269): unsure at all Xaa locations
  Clone ID: MRT4577_50584C.1.pep
MPLPPQPVRRSCPILLAVNDTCGVTRMASTCAARVPSLRWAPQRGWVGSWVSVRPAKCRTSGGHAVVCAAVSFRPCIDIHKGKVKQIVGSTLRDLANDSMELVTNFESDKSPAEFAKFYKADELLGGHVIMLGANPSSQAAALEALRAYPISXYVFSDGKMNTXRLRKLVELVGKQRLVLDLSCRKSGGXYPCWLGIDEELVELLGHYSPIPVTYAGGVSTMDDLERIKKAGKSRVDVTIGSALDIFGGDLPYKDVVLWHRKQSMVGQV

SEQ ID NO: 315269 - protein, 124 aa, Zea mays
  unsure (1)..(124): unsure at all Xaa locations
  Clone ID: MRT4577_50585C.1.pep
QLNNRSLITPSLSKVCIIPFPLSPCRIFKFVKQNRSSCCNRSNPSLQCIFDKEKDDKFTVWCKIIHSEGNGFGGNICFFFPNNGCNPAATNKRLVRQGCNGGTKRRRRSYLSRPWLLACAGXPX

SEQ ID NO: 315270 - protein, 145 aa, Zea mays
  Clone ID: MRT4577_50586C.1.pep
SLGLRHEARPGHMPPFPGRQMGGGLWGALGSCGPPVDCRRFALQRNRYPKGKHIPPGPPPGDGCPHHGGGCRDQFLGPVQKNCAGGNRQFLLRGPPFGGLCFPCIKTGPSPKKTPFSCFVSKKKKKKKNNKCRGVEGGGGGGGGE

SEQ ID NO: 315271 - protein, 61 aa, Zea mays
  unsure (1)..(61): unsure at all Xaa locations
  Clone ID: MRT4577_50587C.1.pep
RLSGERLPSKKTSVKMSNLNPEWNEHFRFIVKDPDTQVLELHMFDWEKVSSXKMHDKLGMQ

SEQ ID NO: 315272 - protein, 26 aa, Zea mays
  unsure (1)..(26): unsure at all Xaa locations
  Clone ID: MRT4577_50588C.1.pep
XHXXHXXSENFXXXLEXPRSVNSFAY

SEQ ID NO: 315273 - protein, 113 aa, Zea mays
  unsure (1)..(113): unsure at all Xaa locations
  Clone ID: MRT4577_50589C.1.pep
FLLSDKHADAGRAKYRLLDTARTHKGATDECFNCVYQREDXVGKVGVSVARELMDGAGDALKTNITTLGPLVLALSEQLKFLTCVMMRRVFRVKGVRPYIPDFRRAFEHFCVY

SEQ ID NO: 315274 - protein, 146 aa, Zea mays
  unsure (1)..(146): unsure at all Xaa locations
  Clone ID: MRT4577_5058C.1.pep
SLPLPSACRAWIQLQPRYPSRPAVARRISPPRARPNGAGRVLPISLPHVFLSLPWTPEFFYSASSCLRTCPPTPRSARGAPWCRARPWLGPARRSCSLGRAHFLLSRSLLCSFPWRAPLLPWWSSSLVAAPNRALSPTVVLTSSXL

SEQ ID NO: 315275 - protein, 150 aa, Zea mays
  unsure (1)..(150): unsure at all Xaa locations
  Clone ID: MRT4577_50590C.1.pep
MLRFWRTQRSTTSSNALSVVEMNVHMDCDGCEKRVRKAMSRLQGVSSVEIDMDRQKVTVTGYVDRREVLRAARRTGRAAEFWPWPYDGEYYPFAIQYLEDNTYMATDRYYRHGYNDPMIGXLPVPRLHAXIDDDALAVFHVDNVHACAVM

SEQ ID NO: 315276 - protein, 256 aa, Zea mays
  unsure (1)..(256): unsure at all Xaa locations
  Clone ID: MRT4577_50593C.1.pep
MARVYVGNLDARVTSGELEDEFRVFGVLRSVWVARKPPGFAFIDFDDRRDAEDAIRDLDGMXSVFWLNLFEALPGHFSFMKRNPCDYLIRRXIKSFLLLDLTFFGERXHFDCSGFAICYSLLLHFPLIFVGLTIHWCMVSXIGKNGWKVELSRSTNGRGSRDRYGGSESKCYECGETGHFARECRLRIGSGGLGSGRRRSRSRSRSRSRSRSRSRSRSPRYRRSPSYSRRSYSPRYRSPRRRSPSPARARSYSRSP

SEQ ID NO: 315277 - protein, 101 aa, Zea mays
  unsure (1)..(101): unsure at all Xaa locations
  Clone ID: MRT4577_50594C.1.pep
GWGLGGKGTWWDCCPPPPGGGGVSGEGARSTTREWSGSSEAVSCGERRRRRSGVGGGXQXFQKNSLRHDTCGRRPAVSFRCESRAEMAVARAGRGRLGEAV

SEQ ID NO: 315278 - protein, 75 aa, Zea mays
  Clone ID: MRT4577_50595C.1.pep
WFSPFAIFSEAMKGKVHWSLLCYTTVVLGRSIFVLFVSHSDLKQVKCFFLGGDGARCELIIFLFCAESSDQDQER

SEQ ID NO: 315279 - protein, 128 aa, Zea mays
  Clone ID: MRT4577_50596C.1.pep
MGCGGGERMEEDEAGTASSSSSPPIVQLGYDQVLSVLRLLPPEAVLSFAATCRVFRAWASSDALWEALCCRDWGSRATAALAERRRDRGGGLQAPGRRVYAEVARLGALSARRVPARGASPRPRAAHS

SEQ ID NO: 315280 - protein, 52 aa, Zea mays
  Clone ID: MRT4577_50597C.1.pep
RTWKCFTEITKHRVAVNTKDLDPLRHILQEGKGPEQLKAYWHQPHLENGTID

SEQ ID NO: 315281 - protein, 424 aa, Zea mays
  unsure (1)..(424): unsure at all Xaa locations
  Clone ID: MRT4577_50598C.1.pep
MGKEKTHINIVVIGHVDSGKSTTTGHLIYKCGGIDKRTXLEKFEKEAAEMGKGSFKYAWVLDKLKAERERGITIDISLWKFETSKYYVTIIDAPGHRDFIKNMITGTSQADCAVLIVAAGVGEFEAGISKNGQTREHALLAYTLGVKNXIVGVNKMDCTEPPYXPEFPGRPTRPAAPMDSTEATYSQKRYEEIVKEVSTYIKKIGYNPDTVAFVPISGWNGDNMLEPSANMPWFKGWKVTRKDGSASGTTLLEALDCILPPTRPTDKPLRLPLQDVYKIGGIGTVPVGRVETGVLKPGMVVTFAPVNVTTEVKSVEMHHEALSEALPGDNVGFNVKNVSVKDVRRGNVAGDSKNDPPMEAAGFTAQVIILNHPGQISAGYAPVLDCHTAHIACKFAELKEXIDRXSGKXLEDAPSPESAMLHCD

SEQ ID NO: 315282 - protein, 135 aa, Zea mays
  unsure (1)..(135): unsure at all Xaa locations
  Clone ID: MRT4577_50599C.1.pep
AVLDTVGSVSLXSAGGDLAANGMVSGDEYIAEWLRXTKNLRIKSQASHAPAAACLKQLQDTVATCINAEGRYTLYDLEMSWQTIRKALXDCSCXMRSTLRDLXEATLSHVCEMVLSDSSARPDELRLRAKGLATL

SEQ ID NO: 315283 - protein, 167 aa, Zea mays
  unsure (1)..(167): unsure at all Xaa locations
  Clone ID: MRT4577_5059C.1.pep
EERWRKGDGPLRIDLGTTYSCVGXWXHDRSDHCNDQVPTTPXTSLTDSERXIGDAARTXVAMNPINTALMPSVIGRRFSDASVQSDIKWAFKXISGPGRTMMXVHQGEENICTEEISLVYKMRNCEXYLGSTQMLGTVPAYLMTKRQAKRXGDAGLMAGYHDHSCSS

SEQ ID NO: 315284 - protein, 58 aa, Zea mays
  unsure (1)..(58): unsure at all Xaa locations
  Clone ID: MRT4577_505C.1.pep
DLFMHSHDIDLIMTLLRTWRIHWPQDPLPYIGHKLMSEEPLEERSMIRVXPKAQSLNV

SEQ ID NO: 315285 - protein, 164 aa, Zea mays
  Clone ID: MRT4577_50600C.1.pep
ASAHADDIADDFFPLCDIDGVIVHMYLPRDRWTGYSRGLYFVRDKDQDEAHKVDGRLDGRLVIMRQIMVHCAKAGPNAERIIMGPIMEPVARPRGRSTRRRPRQEYRDDYQDDYHDRHYRKRSRNQCRHGYSRDRYCHRDYRHRSLSPRLTTARSSRSHSRTRG

SEQ ID NO: 315286 - protein, 463 aa, Zea mays
  unsure (1)..(463): unsure at all Xaa locations
  Clone ID: MRT4577_50601C.1.pep
MGKEKTHINIVVIGHVDSGKSTTTGHLIYKCGGIDKRTIEKFEKEAAEMGKGSFKYAWVLDKLKAERERGITIDISLWKFETSKYYVTIIDAPGHRDFIKNMITGTSQADCAVLIVAAGVGEFEAGISKNGQTREHALLAYTLGVKQLIVGVNKMDSTEPPYSQKRYEEIVKEVSTYIKKIGYNPDTVAFVPISGWKWRNMLEPSANMPXWFKGWKVTRKDGSASGTTLLEALDCILPPTRPTDKPLRLPLQXVYKIGGIGTVPVGRVETGVLKPGMVVTFAPVNVTTEVKSVLVLPDPLRGALPGDNVGFNVKNVSVKDVRRGNVAGDSKNDPPMEAAGFTAQVIILNHPGQISAGYAPVLDCHTAHIACKFAELKEKIDRRSGKKLEDGPKFLKSGDAAIVDMVPGKPMCVESFSDYPPLGRFAVRDMRQTVAVGVIKAVDKKAAGAGKVTKSAQKAQKAK

SEQ ID NO: 315287 - protein, 38 aa, Zea mays
  Clone ID: MRT4577_50602C.1.pep
NGEIIVKPPSSSMPGRCPGSPHSSLQNSFSINLISQNL

SEQ ID NO: 315288 - protein, 119 aa, Zea mays
  Clone ID: MRT4577_50603C.1.pep
CRPGPRGATRAPRPPACRAASEPCTSCACRSRRWPSRWLSVSSRTAAREPVGSSLDQLRVRPPSLPSFRGHSAHGCQICVRSSPPAAGSVSLNSSSARGPARSRRSARQRIGAGGVVLT

SEQ ID NO: 315289 - protein, 54 aa, Zea mays
  Clone ID: MRT4577_50604C.1.pep
HSSSLPLNNLCSCTHEQYTSYCFIQHPCISISFSFTYVTRGNYSGAVKLLWKLV

SEQ ID NO: 315290 - protein, 65 aa, Zea mays
  Clone ID: MRT4577_50605C.1.pep
APSMSPPSFWFAPCHLSPRNPFRAPGPARSPSPTTASAPCVSAPTPSMPQLVVIFPPPTLRAIPI

SEQ ID NO: 315291 - protein, 126 aa, Zea mays
  Clone ID: MRT4577_50606C.1.pep
CRHRPPLPGYGGSGTPRCRTPSRLCKHAIVSTYSVVVSSSHKRNLQLYILYGRRPSRALKTTDLYMYMSLPSASSPWQKKHRCRNGQAVVSDTVGAGAREEEKKRPKEAAAELAPFWTSTTSFLAV

SEQ ID NO: 315292 - protein, 220 aa, Zea mays
  Clone ID: MRT4577_50607C.1.pep
MSPSSALAQASVRSLCARGSRARQSGGNVGSRVLYTPFTSSTPLHHPLLRPSSPARPAHFSSHRPHTRTIMSKAPGKVLNIGNINPHVKAAQYAVRGELAVKSEEYRAKLAKGEGSDLPFDTVIAANIGNPQQLDQKPITFFRQVASILENPGLLEHEDVLLNSLGYKSDVVDRARKLLKEVKSVGAYSQSQGAPGIRQSVAEYIERRDGYPAQFEDIYL

SEQ ID NO: 315293 - protein, 133 aa, Zea mays
  Clone ID: MRT4577_50608C.1.pep
LKKTLLRNEFANRNHPFSSRASVAPAQATEIWSPGASPESASDGGFSHSPSPELATATAAAAITAPVSVAAALEKARAGAGDLSRQTADRRRRDARRRGAMTVEGRSDQQASRRGERLPRIGTRWFTVGRGGQ

SEQ ID NO: 315294 - protein, 199 aa, Zea mays
  Clone ID: MRT4577_50609C.1.pep
GYLEAGRAGTSRPALGAAPAAPTSSSIKSTTSNHKQGHSSPPRHRQERRRRQGQLRRRFLQPLFLFFFFPCTGADGVADDRLPFPAPVLLLPRGARRRQGHIHVQRREGVLPARSAAAAISWQRRTMTTLPRSGSWQRQRQRQRTAPPSSAIRPLLPASRSEVVAGRAGGRVDHRSRTGTVGLPATGGLPWRKQRCSSP

SEQ ID NO: 315295 - protein, 69 aa, Zea mays
  Clone ID: MRT4577_5060C.1.pep
LLDSHSTYPKRPHVTRTYSGTYHALQTYEALPYNCDYIPLLLFKIKGILKEVFLLFSHYLSFESKFTFH

SEQ ID NO: 315296 - protein, 154 aa, Zea mays
  Clone ID: MRT4577_50610C.1.pep
MADNAGLVGLLLEQHQLRPPAAASRAPPQITSKATRPLLATAKNDVVDKGSSAAASFSRSSSSSSSRAPAPTVSPTTACPFLHRCFFCHGELADGRDIYMYRGERAFCSEECRCRHILAEEDDDDTTTSVGVVAAAADCSTQLRHQALAASFTF

SEQ ID NO: 315297 - protein, 104 aa, Zea mays
  unsure (1)..(104): unsure at all Xaa locations
  Clone ID: MRT4577_50611C.1.pep
PGIFFFLDETLLEQNLCRLIEPHSRVGIAHIAEMIELPIAPVXKKLSQMIVDKKFAGALDQGAGCLLIFEDFKAEEIFPAPLETLLNVGKVVGSPYVRAAKIMA

SEQ ID NO: 315298 - protein, 121 aa, Zea mays
  Clone ID: MRT4577_50612C.1.pep
VCGICFDAFPAGGTRSAGCAAHYYCDGCWCGYVAAAVGDGARCLALRCPDPSCAAAVVRELVDEVARDDDRARYARFWLRSYVEESGGRIRWCGGAGCTRSVELLGGLEAEAVASAVDVVC

SEQ ID NO: 315299 - protein, 179 aa, Zea mays
  Clone ID: MRT4577_50613C.1.pep
KKKKKKKKNKKKKKKKKKKKKKKKKKKKKFLLARLAFPGGPFWGFLSPWWLFVVAFWGPIWAFPFSFSISLFTFFCPFFWKNPFCNPLYFPSFTSLFKHLFLDQWGPTKWPFPKVPSPFWPLVTALWRPLFPGPFGGSLQVVPSICPPPLARSLGFFPFLFSLFFRVSPAGFPWGVFFG

SEQ ID NO: 315300 - protein, 114 aa, Zea mays
  Clone ID: MRT4577_50614C.1.pep
KPGAASHWREKSSTSKSVHNNCQPCDCEASPFLPVPATLDSTLHSFQHANTVYAMALLLFSCPHWLAFFEPWVKTPFQMGHVGVSLLDQQVRMFYGPMIASPQGNFAFGSGSLL

SEQ ID NO: 315301 - protein, 118 aa, Zea mays
  unsure (1)..(118): unsure at all Xaa locations
  Clone ID: MRT4577_50615C.1.pep
MKNGSVSSSCALVSAAMRLCNGRCHLAPARCAAWACTGRWLPALTNDVCGCRAGLYPXYAEYXLGQPQCXPLAAGCPIYAGXGQTSAMYQPXLRQQCCQQQMRMMDVQSVAQQLQMMM

SEQ ID NO: 315302 - protein, 75 aa, Zea mays
  Clone ID: MRT4577_50616C.1.pep
RRLSEVGNRFMCQLLGLANAGRSQKRPYSVSMMELSDPIVLYNLPFDVYEHTLYVHANQHMIKPCEAIHDDYYMI

SEQ ID NO: 315303 - protein, 72 aa, Zea mays
  unsure (1)..(72): unsure at all Xaa locations
  Clone ID: MRT4577_50617C.1.pep
HATQAPPNKHQTAAKKNQHQHQHNYHKQPSHPHPNRQEEEHASNQQXAHHHHLPSRHHHXHQQEHPQNHKAY

SEQ ID NO: 315304 - protein, 45 aa, Zea mays
  Clone ID: MRT4577_50618C.1.pep
FSLSRGLHEHEYPGRTCLMHKPDLCQILVHEKFRFSRSGNRRRGP

SEQ ID NO: 315305 - protein, 125 aa, Zea mays
  unsure (1)..(125): unsure at all Xaa locations
  Clone ID: MRT4577_50619C.1.pep
SIQVYKRYRELAAVYEXSAPYQGMAGKVHMIWITMIASDGVHLVVHTKRYIQVAXLMAEXACSXTCVYTNITSVGRWFVLAVALEGSVAVMEALKHTMAVLPEEHVQNHCYEAGFCDICSCDSCA

SEQ ID NO: 315306 - protein, 81 aa, Zea mays
  Clone ID: MRT4577_5061C.1.pep
PELVRLENETSPNRHKNFGHGSPPGAKFWCENEGHQLFKCSMPFLMIVYIARSIRLSWVWLHEQVAIALWTEIRRGNVPIS

SEQ ID NO: 315307 - protein, 173 aa, Zea mays
  unsure (1)..(173): unsure at all Xaa locations
  Clone ID: MRT4577_50620C.1.pep
CQSWDVIPTRLIQRNKERFAFLKWASNAFHNMQVFPPGSGTVHQVNLEYLARVVFNEDGILYFDSVVGTDSHTTMINSLGVAGWGVGGIEAVVAMLGQPMGMVLPGVVGFKLSGKLRDGVTTTDIVLTMTQMLRKHGAIGKFVEFYGVGVGELSLPARATIAXMSXEXGATMG

SEQ ID NO: 315308 - protein, 92 aa, Zea mays
  Clone ID: MRT4577_50621C.1.pep
TTLKTHRGTKYCLWILGNGTTLLASNSIWADLVRDSKRRRCFFDAFKDKDLAEVVMFATKPEQWNRREQVRPGGAIRSLLISFECCCPETGF

SEQ ID NO: 315309 - protein, 635 aa, Zea mays
  unsure (1)..(635): unsure at all Xaa locations
  Clone ID: MRT4577_50622C.1.pep
MAANSTATKHAFKRILTSLIKPGGGEYGKFFSLPALNDPRIDKLPYSIRVLLESAIRHCDNFQVTESDVEKIIDWENTSPKLAEIPFKPARCILMDNTGVPAVVDLAAMRDMMPKLGCDPYKINPLIPVDAVIDHAVRVDVAGTYDALDRNEELEFQRNKERFAFLKWASNAFHNMQVFPPGSGTVHQVNLEYLARVVFNEDGILYFDSVVGTDSHTTMINSLGVAGWGVGGIEAVVAMLGQPMGMVLPGVVGFKLSGKLRDGVTTTDIVLTMTQMLRKHGAIGKFVEFYGVGVGELSLPARATIANMSPEYGATMGFFPVDQVALDYLKLTGRSDETVSMIEAYLRANKMFVDEHEPETERVFSSHLELDLSEVEPCVSGPKRPHDRVPLKEMKSDWHACLDNEVGFKGYAVPKEQQGKVVKFDFHGRPAEIKHGSVVLAAICSSTNTSNPSVMIGAGLVAKKACELGLEVKPWVKTSLTPGSVVATEYLKHSGLQDYLNQQGFHVAAHGCATCVGNSGDLDGSVSAAITENDMVAAAVLSANRNFEGRVNPLTRANYLASPPLVVAYALAGTVDIDFEKEPIGVGKGGNEVFLRDIWPSNQKIDEVVESSVQTHLXFKKVYDSIMELKFWWLH

SEQ ID NO: 315310 - protein, 705 aa, Zea mays
  unsure (1)..(705): unsure at all Xaa locations
  Clone ID: MRT4577_50623C.1.pep
ETLRLAFIDNNKGSRIISTTRKSEVTSGNKVYKPKPLSDDNSKRLFYTRIFGGEDKCPDNEVDEVSNKILRKCGGIPLAIITMASLLVGKSWGQWFEVCNSIGFGDKDIEQVDKTMSILSLSYYDLPCHLRTCLLYLSSFPEDYIIDKNSLIWKWIAENFVHKKPGVWLFEVGEGYFNDLVNRSMIQAVASKDSSIIDGCRVHDMVLDLLRSLAREENFVTVLYNDEDMLSEISSTRRLAHQKSTMDAHLHNYKQGMQHLRSLTVYRCGADKELSFLLSFKLLRVLDLENVYTTSWHNARHIGNLIHLRYLGLKRTYMPELPEEIGALKFLQTLDLVENFFMEELPSSIGQLTQLVCLRASGLITSMPRGVIKTLTALEELAVQCQFNEXLQVPXQFKELGSLSELRVLKIKVISTMEQSILPDLMQSLGNLHKIQSLKLESHPGCGRADNAMFDAMALPGHLRHLLVSEYFVHLYRLPSCINPLCLVKLSHLELYVIDMDEHSMQILGELAELRHLVLSTRSTVRVNNVAADGFFHKLRSCKFYTSMVLFVLNEDSSVSFTLWNGTDDLVLSYGKKDGECPSAPAVMPNLEELLFSAQPKWSLMKCQGSHGNLGLEHLRSLQKVTAVISCELYMFEAEKMEAELGISCDRYFVEAWVMDAEDGLRDAIGVHPNHPTLVLGRKNEGVLASDVSDDTDADSATRRT

SEQ ID NO: 315311 - protein, 111 aa, Zea mays
  Clone ID: MRT4577_50624C.1.pep
TGPETLSGMSGRTRAKAIIRLCPVTPKNFGDHTAIRRVEFTTYSSQHPLMLSCLTPMRVVCPQQGVIMGLLGPCFSVVECMTKEELFVPLLSLWEQLYRDVCLTGTKKELV

SEQ ID NO: 315312 - protein, 54 aa, Zea mays
  Clone ID: MRT4577_50625C.1.pep
TDPWGANSLTLIFFFLYQIPLLLSIILTYKRSFINHHTLSSFHLLFNQSRLPIL

SEQ ID NO: 315313 - protein, 55 aa, Zea mays
  Clone ID: MRT4577_50626C.1.pep
GLRDKVLRTKLLAVYARVEYGNALGSSGGSLRPNERQELICQGGNHKPNKTIDDE

SEQ ID NO: 315314 - protein, 194 aa, Zea mays
  unsure (1)..(194): unsure at all Xaa locations
  Clone ID: MRT4577_50628C.1.pep
MAAGFPMAYHLRLYFLLSLLLRLRLIHPRQGSPCSDSEEHHXYESKDDAEAPKTYPHKAATVRKNGFIVIKNRPCKDVEASTSKTGXHGHIKCHFGAIDIFNGKEIEDIVPSSHNCDIPHVNRTEYQLIDISEDGFASLLTSYGNTEDDLRLPTDETLVAQIKEGFESVKDLGETVQSAMGEEQICAMKDGGPK

SEQ ID NO: 315315 - protein, 55 aa, Zea mays
  Clone ID: MRT4577_50629C.1.pep
SSPGKAGRCGPVLEVLTSFCTSVAGLLTSSGLAVVSFSEISLTGCDPAINLFVFP

SEQ ID NO: 315316 - protein, 80 aa, Zea mays
  unsure (1)..(80): unsure at all Xaa locations
  Clone ID: MRT4577_5062C.1.pep
SGSAKLYPGASASQPIPFLFKAFXHPARELVYLWSPWKLLAFDLVHRRAQEWVFGSEKKGTHLIQVWLFPFSRHLANALA

SEQ ID NO: 315317 - protein, 193 aa, Zea mays
  unsure (1)..(193): unsure at all Xaa locations
  Clone ID: MRT4577_50632C.1.pep
MSDSEDHHFQSKDDAGASKTYPQQAGTVRKNGFIVIKNRPCXVVEGSTSKTDKHGHAKCHFVAIDIFNVKKLEHIVPSSHNCDIPHVNRTEHHVIDISEDGFVRLLTSDDNAKDDVKLPTDETLVDHIKEGFXSVKDLGVTVQSAMMKGDIWTWKGVVPTCFLDFGDRTLLYLNLYPRRRVSPKDCYRDIHLP

SEQ ID NO: 315318 - protein, 66 aa, Zea mays
  Clone ID: MRT4577_50633C.1.pep
WYASLTGDCRCQVRIPCFYIVLKKKILKTLPDSAAARRCGSAHSPPRPHRSPSTVKHGGGWTPVSR

SEQ ID NO: 315319 - protein, 160 aa, Zea mays
  unsure (1)..(160): unsure at all Xaa locations
  Clone ID: MRT4577_50634C.1.pep
MSDSEEHHFESKADAGASDTYPQHAATGRNNGFIFFKNRPCKGVQVSTSXTGKHGXHAKCHFGAINIFSVKKLGDIAPSSHYCDIPYVNRTEYQLIDISEDVSASLLTSYGKTNDDLRLPTDDTLEVQINEWFXSAKDLVVTVPSAMGEEHICALNDVAP

SEQ ID NO: 315320 - protein, 36 aa, Zea mays
  Clone ID: MRT4577_50636C.1.pep
AEEHLGIPALLLAEDMVALKVPDRLSILTYVSQYYN

SEQ ID NO: 315321 - protein, 162 aa, Zea mays
  unsure (1)..(162): unsure at all Xaa locations
  Clone ID: MRT4577_50637C.1.pep
MPHSDEHHFXESEADTXASETYPQDGVTXRKNGXYVDMKNRPCKVGEDSTCETGKHGHSKCHFVDIHLFHGKRLEYIVTSSRKCDIPYVNRTEYHVIDISEDGFVNLLTSDGDTKDDLRLPTDETLVAHIREGFESGKDLVVTVQTAMTQEHICAMKDVGPK

SEQ ID NO: 315322 - protein, 182 aa, Zea mays
  unsure (1)..(182): unsure at all Xaa locations
  Clone ID: MRT4577_50638C.1.pep
YLVKWASSVVERRGRTEXQVIFEDSEHSSTYCLAFKVINPSHLPPLKELQKLMRIQSLRCHALYNHGATRLSVIPIHASRSQALRXFYYRYLSICWGIELPDAVVIVGETGDSDYEELFGGLHKTVILKGGFNTPANRIHTVRRYPLQDVVALDSSNIIAIEGFSTGDIRSAMQQKLGIPTR

SEQ ID NO: 315323 - protein, 185 aa, Zea mays
  unsure (1)..(185): unsure at all Xaa locations
  Clone ID: MRT4577_50639C.1.pep
EHHFKSKGDAGASKTYPQQAGTVRKNGFIVIKNRPCKAVEVSTSKTGXNGHAKCHFVAIDIFNGKKLEDIVPSSHNCDIPHVNRTEYQLIDISEDGFASLLTSDGNAKDDLRLPTDETLAGQIKEGFESGKDLVVTVQSAMGDEQICALKDGAPNQLPCLWRQNPTGSQLKSDQKCITRGLYTET

SEQ ID NO: 315324 - protein, 32 aa, Zea mays
  unsure (1)..(32): unsure at all Xaa locations
  Clone ID: MRT4577_5063C.1.pep
KNESGRPPCIXMNQVPVKFYHGPLASDPLGRV

SEQ ID NO: 315325 - protein, 102 aa, Zea mays
  Clone ID: MRT4577_50640C.1.pep
QGFGPSPSHNSYMVCGSPYSSNSRRRPPRISSSPSDVLPRRIFLVWAQVPSAELLAGRKKQRRNPSWWTSGSYLVPFRIFCQGASYMLGIRGVAAGALSLLY

SEQ ID NO: 315326 - protein, 63 aa, Zea mays
  Clone ID: MRT4577_50642C.1.pep
LSFFVFFFAFYGDTTRAIKILQRGGDAGQWLKPTEHVDESSWVGSYISLPLRIYLTLPKCWNL

SEQ ID NO: 315327 - protein, 116 aa, Zea mays
  Clone ID: MRT4577_50643C.1.pep
VGGVWCNMSPRPSSSVSPRRRPLHERTPSQTNSAEVSPGRRGKRRDEIDFYSSTPYPTKPAQVLLPRPGIGQDYALHGAYGVSDASSVSTETYTATGPVDVVNHEEQRHREVSVNS

SEQ ID NO: 315328 - protein, 98 aa, Zea mays
  Clone ID: MRT4577_50644C.1.pep
YHHERHLAAGLPLFARVGKSLSRTGVTIYMRAQKKGNRESVSSSGGGDVRASSGRRGWRCRKLTKEDDTLRYKLDRIPFLEEKVRKVRENVKIMSLDI

SEQ ID NO: 315329 - protein, 47 aa, Zea mays
  Clone ID: MRT4577_50645C.1.pep
PSPLLDTSYGSDANSVSAGRPTEPASMPNDHRVMCRVQCLDVSNLDF

SEQ ID NO: 315330 - protein, 140 aa, Zea mays
  Clone ID: MRT4577_50646C.1.pep
SNHVRRRSRRSRHHCLVICSQLEAHHLDLQRPHHDMGLWFTAPTWFPVLADQRSLVRSSISTKAQLNSLNSGELNGWKAPCMTSTMSAQRYSSHQISQGFSKHFVLRIHGLARVGSRADDRINDDEDTCDGCASFFRHQS

SEQ ID NO: 315331 - protein, 45 aa, Zea mays
  Clone ID: MRT4577_50647C.1.pep
NHPSEGPESVLPEITTHRDSVNNIDWLTLRHTIPQGKDPEHLKVF

SEQ ID NO: 315332 - protein, 198 aa, Zea mays
  Clone ID: MRT4577_50648C.1.pep
MEGQFQVGKEEVIQAWYMDDSEEDQRLPHHREPKEFIPLDKLSELGILSWRLNADDWENDENLKKIREARGYSYMDICDVCPEKLPNYEAKIKNFFEEHLHTDEEIRYCLEGSGYFDVRDQDDQWIRVAVKKGGMIVLPAGMYHRFTLDSDNYIKAMRLFVGEPVWTPYNRPHDHLPARKEYVEKIINRGGNQAVEAR

SEQ ID NO: 315333 - protein, 183 aa, Zea mays
  unsure (1)..(183): unsure at all Xaa locations
  Clone ID: MRT4577_50649C.1.pep
MDRSTGLMTTIRLLAAAALLVLASGQQQPPAAASCTASLLTSFTPCFSFLTSSNGSSGSPPTRECCRSLAALVDAGTGCACLVLTGAVPLGVPVNRTLAVSLPRACDSMSVPLQCRDTSAQSPATGPVAADTPPATPASPAAATTPDAPTATPPXTQGREAXLPTSGSARASARRDARAVSAR

SEQ ID NO: 315334 - protein, 83 aa, Zea mays
  Clone ID: MRT4577_5064C.1.pep
FFFFYFFFFFWFGFFFFLVWFFFFFSFLFWGATPQRESLRERIPPFFLKQTLNTHPFLIINPTPLRTRAGFQPPFVSKKQKGP

SEQ ID NO: 315335 - protein, 68 aa, Zea mays
  unsure (1)..(68): unsure at all Xaa locations
  Clone ID: MRT4577_50650C.1.pep
RTPACTTAGPLCGPVRLLRXPXRPSMLRPAARRRAGGTPTMMHPHYPSPCVVVRHPTSDLVDVQITSY

SEQ ID NO: 315336 - protein, 80 aa, Zea mays
  Clone ID: MRT4577_50651C.1.pep
RGSTQASKLRLIKREHTHGSTYLGPPAPAAMAASIIPSSALALAPQGLPPLGRRPSSFPFFGSKRRFRTNNPNGIGVALT

SEQ ID NO: 315337 - protein, 41 aa, Zea mays
  Clone ID: MRT4577_50652C.1.pep
MHMPCPCAGLKGLYCAGARLTTMMGDDGLFPYAEYLMQPEC

SEQ ID NO: 315338 - protein, 91 aa, Zea mays
  Clone ID: MRT4577_50653C.1.pep
ADQRSQLAVIAKSHATVLFARRRSFLFSPAICRLIMTRVVVFNPNSSSDTRLAMFCLLVISPIWVMWAEYQNTCQMFDEAKTRIYQHSHKY

SEQ ID NO: 315339 - protein, 142 aa, Zea mays
  Clone ID: MRT4577_50654C.1.pep
HHLELSSKCRAAAKLPLPWLTVGCPCCAPFFPVPRWPPCSSSSWWPLTRSRLGRASALSAAPLALTSLPWLPARVRPGFLFPATLAGRLFALVVDVESLCAQPCPYARRGRFPASCPRFCRASLLDAVHALCMEQRNKNRVR

SEQ ID NO: 315340 - protein, 81 aa, Zea mays
  Clone ID: MRT4577_50655C.1.pep
INWPWFKNAVTGKTLGFPILIFWRNNPLFSGCLNTKKAHTILPFQKFAHLNWKWELPLIGPIKPGGWGVSPNVTLYILQGS

SEQ ID NO: 315341 - protein, 73 aa, Zea mays
  Clone ID: MRT4577_50656C.1.pep
GSWPSSLGPWILHSAIRSRISLRNVLVLPALDLIGSRMLPTYDKGGINELVVSRMGPCAFLIVSLGAMMEVLP

SEQ ID NO: 315342 - protein, 204 aa, Zea mays
  Clone ID: MRT4577_50657C.1.pep
RGAAEPRSALLSFPPETPAWNNKSKRSRSKKNKTNADQALALDYVRAWVLPVPPPLKPSAADVDGFLPVQATRRGDVLFELHSHSNHSDGFLSPSALVERAHRNGVKVLALTDHDTMAGIPEAVSAASKFGMRIIPGVEISALYNPRCDELDGMLLNIRDGRYLRAKNMLEKLTTLKVPIKWEHVNKIAGDGVAPGRLHIARAM

SEQ ID NO: 315343 - protein, 69 aa, Zea mays
  Clone ID: MRT4577_50658C.1.pep
GLVPLLVVHGSDIVIVDIPTVNLFLIHGIGASRHCFLPWRQVKKSYMQRASYRLSVQDDVSLEGRGNRL

SEQ ID NO: 315344 - protein, 93 aa, Zea mays
  unsure (1)..(93): unsure at all Xaa locations
  Clone ID: MRT4577_50659C.1.pep
AGRFGDXXXKKKNFQKEKKKKKRTLRDEAASEGGGSPRTEESAVLEIYNIELKAAADLRGGPRHPLPTIASWTTFHRGPAVNTLAAENLMVLH

SEQ ID NO: 315345 - protein, 127 aa, Zea mays
  Clone ID: MRT4577_5065C.1.pep
ARHHRYVVLAYDVQASNPSAITSGCGDAQAAYAGSRFHTRVADLYYCTVHSSRSVYSRGCRRHSCLGMTKSFREMRNRIVGARSTVLRKSFIDDEHVEVLELRRDKVHLRSSRLHVLACTRSDSTRW

SEQ ID NO: 315346 - protein, 313 aa, Zea mays
  unsure (1)..(313): unsure at all Xaa locations
  Clone ID: MRT4577_50660C.1.pep
MTSNTIPHDHRHHRQEMDQLQALAVKPQVKRQVRRRRTHTSRPYQENLLNMAEARREIVTALKIHRASSRRXATQVPAXQEPPLRQPPFAQLQQQQEEPKHVQEAFLDPSRSQPAVDEEASLAHTTMSYASFTNNPLRSSPPAHWIAARSYCSPPPILRLPCDITPPELPPTAAMGGLGLDLDQYQYQYQGGLERLVRSLPAQPLGLNLSFQGFGVSVDDGAKDDCEDLLALPLTQPSPAASYSCSPPAVETVTTHACAPSPALSATDAENHSVIDAPAPPAAALVPALDGEMAQQASVGGEMQGVEWSEAAA

SEQ ID NO: 315347 - protein, 416 aa, Zea mays
  Clone ID: MRT4577_50661C.1.pep
MGNKKSKRSRSKKNKTNADQALALDYVRAWVLPVPPPLKPSAADVDDFLPVQATRRGDVLFELHSHSNHSDGFLSPSALVERAHRNGVKVLALTDHDTMAGIPEAVSAASKFGMRIIPGVEISALYNPREVAGACETVHILAYYGMCGPSRCDELDGMLLNIRDGRYLRAKNMLEKLTTLKVPIKWEHVNKIAGDGVAPGRLHIARAMVEMGYVENLRQAFNKYLGDDGPAYARGSEPFAETVVQLISRTGGFSALAHPWSLKNPDAIIRSLKGAGLNGMEVYRSDGEVNGFSELAEKYGLLKLGGSDFHGRGGKDESDVGTVKLAITTLCCFLKMARSIWSSAMKDILLKFAEEPSAANLGNMLKFGRLTKFAGFSPINNGIHVVDFCLSSWSSNDDIEDVELEEVRLKLAHYAE

SEQ ID NO: 315348 - protein, 36 aa, Zea mays
  Clone ID: MRT4577_50662C.1.pep
IIDTSCSSDSCVSRDHIHVSVVRVVMSVTGSRVHQA

SEQ ID NO: 315349 - protein, 58 aa, Zea mays
  Clone ID: MRT4577_50663C.1.pep
SFLIHGDRRAHLPLPEKPNISSCCSPTWTAGKGLIGGPVGLAVARRRQDPGPGFGREP

SEQ ID NO: 315350 - protein, 151 aa, Zea mays
  unsure (1)..(151): unsure at all Xaa locations
  Clone ID: MRT4577_50664C.1.pep
MTNPRVFFDMTGEGAPEXHIVMELYANDVPKTGDXFRALCTDEKGVGKSGKPLHYKGSTFHRDIPEFMXQGGEFTRGNGTVGESIYGEKVPDEKLGRKHTAPGELSMVNAGSNTNGSEFFICTVATPWLDGKHDVFGQVVEGXMDVVKAIA

SEQ ID NO: 315351 - protein, 88 aa, Zea mays
  unsure (1)..(88): unsure at all Xaa locations
  Clone ID: MRT4577_50665C.1.pep
KRFSGSTSGTXATLSICGAHVEDEGDYYCYVLGAFDEHGVFGGGTKETVLGQPKAAPSVTLFPPSSEELQANKATLVCLISDFYPGAV

SEQ ID NO: 315352 - protein, 40 aa, Zea mays
  Clone ID: MRT4577_50666C.1.pep
WWVLSLHFITMSPKSPPSLGSPQMDGCHKGGCHGATGFTR

SEQ ID NO: 315353 - protein, 597 aa, Zea mays
  Clone ID: MRT4577_50667C.1.pep
MADLPSVRAPPAADLTSTAPGMADPGRPIPYTAVSTNSHAGGYLPTATAAAPAAATTAPSVAVAAATARAAELGLPGYPTYTGALALAVDPAGPSPTSVLRQPPPGFQTTRPPLLLLGCDTPPPPVAPTLAGGVLEYPHASGLHTDTIAALHAQAAGVHNIRSLVSIVLDPASSHYLRWRAQVVLTLRRFALADHVLDDPVALPSPTWAQMDSVVISWLHDTITVELQDIIHDQSNTARQAWLALEGQFLGNREAWALHLDAQFHLFSQKELSVDDYCRQMEGMVDSLRDLGEPVADRTLVLNLLCGLSPRYGYLKALIKRTVPFPTFHAVRNELLLEELTMTLEAPTPASALYSATPGAQAPFGGQATRTPSTVPPLATLLRLLVRLPPPTSVVAATRAAVGAAALPVAVPPAGVATKAGPRSTTPGSAPSPCGRVRAPVPHDLATRTPLARCDSIGPLYALRPSSAGASSPPILVSTTTSTTWHRRLGHPGPDVMTKLSRTLDSSCIRGHFEGHCHACQLDRHTRLPFPTSYSRAEQAFDLVHYDLWTSPVLSLSGYKYYLVILDDFSHFLWTFPLQLKSDTLTVLTHFFAWVFT

SEQ ID NO: 315354 - protein, 133 aa, Zea mays
  unsure (1)..(133): unsure at all Xaa locations
  Clone ID: MRT4577_50668C.1.pep
MEAESFLITAXGSTDGDPNTLCEQVSDAEXTLCLAHDPESKEVCKICIKTNMVMVLDEITTXASADYQKSVRDTCHEIAFIYDNEGAXDADRCNGPENMLHQXPDIAQGGDGHFTERPGEMGSGDHGQMSGDA

SEQ ID NO: 315355 - protein, 384 aa, Zea mays
  unsure (1)..(384): unsure at all Xaa locations
  Clone ID: MRT4577_50669C.1.pep
MERQGMEGNNLLHFLDTPSAHYRRTCDGFEAQHGGDEHSETSDTDPANAREMLEYLLNQPANKICADCGSPDPKWVALPFGTFICIKCSGTHRSLGVHISKVISVNLDEWTDDEVNCLAESGGNSVVNSRYEAFLPENKKLKQDCSTEERNDFIRKKYQFQQFVCDPQFSCXYHLTESMHHXKNHQQHNSSKYGFGHTFRNSWRKKDSDSKSLKKMSDVGMIEFVGLVKVNIVKGTDLAVRDVMSSDPYVLIHLGHQSMKTKVIKNTLNPIWNERLMLSIPDPIPPLKLQVFDKDTFSSDDRMGEAEVDIRPLIAATKEHENSTITESTELYRWSASEDSNGVLAKDSVISVASGKVKQEITLRLQNVERGEVEIEIECVPLSQ

SEQ ID NO: 315356 - protein, 91 aa, Zea mays
  Clone ID: MRT4577_5066C.1.pep
ICLILFKSDINYCLLAYTGSKRKKAIIAGTLSSLLFLCLVILTFFSACKYGMLPFKSKDEPRIESFLQKNGNLYPKRYTYADVKRMTRSFT

SEQ ID NO: 315357 - protein, 384 aa, Zea mays; identical to SEQ ID NO: 315355
  unsure (1)..(384): unsure at all Xaa locations
  Clone ID: MRT4577_50670C.1.pep

SEQ ID NO: 315358 - protein, 127 aa, Zea mays
  Clone ID: MRT4577_50671C.1.pep
NSARATHRPQPRNPTGTRGPGGTSSTRHEQEPSKREGAKRARWRGPRPEDSQPNAASRTRLAADTRTAPLQLSTTPGKVTTTRNSHQLLRPTGPVNSPGPVLRHLTPLAPSEKRGPHYPMSGLTDER

SEQ ID NO: 315359 - protein, 185 aa, Zea mays
  unsure (1)..(185): unsure at all Xaa locations
  Clone ID: MRT4577_50672C.1.pep
KIPYHQGAMTTIHSYIGDHELLDASHRDLRRARAASSNXVPTYTDAAKXLXLALPNLKGXLNWIALQVPTPNAGAGDSLDRLQXKTLXEEVNHMFRXAWDKELTVILDVCYHQLEFVDFRCFDNCFNINDCVTXMVMDDDMDKGIFWYNNERGYSNMVNNLINICNIPVGWKRYIGIAVFNCLPC

SEQ ID NO: 315360 - protein, 101 aa, Zea mays
  unsure (1)..(101): unsure at all Xaa locations
  Clone ID: MRT4577_50673C.1.pep
SAQPRLERHDRRRRGVRQARRRRPTPVDRHAVAHRAAAGSSSSSSPVLVEREENNVVDTMECHLRPQQLVLPFDCLIGIPLAFDLYISFSAVLGLXRNPGR

SEQ ID NO: 315361 - protein, 50 aa, Zea mays
  Clone ID: MRT4577_50674C.1.pep
CYSPRIPPSLYWEESFCEDTALKVVKKNLRSQPNIIIFGQASRLDFLMGA

SEQ ID NO: 315362 - protein, 587 aa, Zea mays
  unsure (1)..(587): unsure at all Xaa locations
  Clone ID: MRT4577_50675C.1.pep
MKTVTSCLKLHPADVDKDAPFPSKSPRINRAAPVPSKLPSADKATPVLPKSSLSVNKAALVRPKSPAVDKATPVCPESPAVDKVTPVRPRSPAVDKATPVRSQSPAVDKATHVCPQSPSVDKATPSIDKATPVRPKSPAIDKVTPIPPKSPPVDKASPAPPKSLSGAKDVPVPSRSLQIDRFIPAPPRLSQVDKAALPSSEQSHISPATNSEAQGATTRKVTTTTSLSEAAAAWRPSSAPVLPTPRSTGPAASHIQTSTLLSRSMSEAAGRRPVNDPSFSAPSYTPQTYRNAIIGKSGLSMTSASLAYQPSSLDQDTAPSRPLSAYASSTVMMPPAGRSDQSSARHGFKSGPGKLEAHDGWQQWKGDNNVDMHLWRDHAPYQQMTNSQAYEQSRRDDTYQQACSRGTEKFSRHAGLQARQQFQTETPASHVWHQPQGPVAEEFPHLDIINDLLEEDQINGSIPESFRQDYNVFGLPFSPRGNVSDMGMASVRSPARFNSPKYEXGLSGAYDMNAVNGLRERQFPSLDSYSNGLSDVSASKPWLNGSASPSVSLGVNTNGYHPQVGDYPLGNGVNGVSLWRRHANGRW

SEQ ID NO: 315363 - protein, 607 aa, Zea mays
  Clone ID: MRT4577_50676C.1.pep
MDPVSNKVNGSSLKMKVTMASPCSKSHPADMDKDASLPSKSPRTNRAAPVPPKLPSADKATLVPSKLPSVDKATPVPQKSPLVNKVAQARPKSPAVDKATPHRPKSPAVDKATPVRSQSPAVDKATLVRPQSPAVDKATPVRPQSAAVDKATPVRPKSPAIDKATPIAPKSPPVDKASPALPKSLSGAKDALFPSRSLQIDKFTPAAPRLSQDDKAALPSSEQSHISPATSSEAQGATTRKVTTTTSLSEAAAAWRPSSAPVLPTPRSTGPAASHIQTSTLLSRSMSEAAGRRPVNDPSFSAPSYTPQTYRNAIIGKSGLSMTSASLAYQPSSLDQDTAPSRPLSAYASSTVMMPPAGRSDQSSARHGFKSGPGKLEAHDGWQQWKGDSNVDMHLWRDHAPYQQMTNSQAYEQSRRDDTYQQACSRGTEKFSRHAGLQARQQFQTETPASHVWHQPQGPVAEEFPHLDIINDLLEEDQINGSIPESFRQDYNVFGLPFSPRGNLSDMEMASVRSPARFNSPKYDGGLSGAYDMNAVNGLRERQFPSLDIYSNGLSDVSASKPWLNGSASPSVSLGVNTNGYHPQVGEYLGGGVNGVSLWRRHANGRW

SEQ ID NO: 315364 - protein, 408 aa, Zea mays
  Clone ID: MRT4577_50677C.1.pep
MEEPDCPEGSVPDRGGERRTASLPLPAAFLEFLSENGLDPAVYSMAATIPRYIRLKPGMESKIAEIEAELKCALDKVLWLPGFYAIPPEIQIAGSKAYQQGKIYGIDAASGAAILALDVRPGNHVLDLCAAPGAKLCMLADTLGTTGSLTGVDVAKHRLAACRTMLQKYSLGDRTRLFVADGTLFSLLPVNSRMQRMEGSIGVEENGSIFPEWTSRRSWKDRQKTRKANANGQQHLLAASEPELIYYGKHSGLVGQCKSDVFCPSVDDEACTSGYDKVLVDAECTHDGSIKHIQKFEFWGWKSLDRRVLDAERTENLLQLQLHLLTNGFKLLKTGGSLVYSTCSLTVAQNECVVQQFLSTHPSADLQKINLADNWPCRSGGIPKTLRFDPAVSQTSGLFVAKFCKLPT

SEQ ID NO: 315365 - protein, 127 aa, Zea mays
  Clone ID: MRT4577_50678C.1.pep
VSESVKERAKERPALSTRLSRFVDAFGNTGVPTGLRTVSATLSMSLSLFVRSLSRHPRRFRLCMLCGIVSGIVFGSEFSSGHSYAHVGAELGSASGAPRCAGHCPVNRPSGEGSVRSRKPPTLYIGS

SEQ ID NO: 315366 - protein, 105 aa, Zea mays
  Clone ID: MRT4577_50679C.1.pep
LYAWVRTNNNNTGIRRDDGEKRTAKARLPRLTGVPASNGNPPVTAPPPRTPIRPADFRPVPVRGGPGTPTAQGPRLHAPDRLLCPGRVRQRRARRARGRRREGLL

SEQ ID NO: 315367 - protein, 107 aa, Zea mays
  Clone ID: MRT4577_5067C.1.pep
GGKKGGKKGWNRTFTREGLKSYPQPKTFSGPLKKKAQLQGGGGGAHWGGGQSKKQKGPGGKKPPPPLNRSRTGHSWSNRKYDIFTLKTRGDGGKTGRVGLCKTKGGG

SEQ ID NO: 315368 - protein, 94 aa, Zea mays
  unsure (1)..(94): unsure at all Xaa locations
  Clone ID: MRT4577_50680C.1.pep
GGFFFFFFFCWRSEAFFYAGARXIKLNGTQGHHHGPEPSAHHASRTTPVPYHTTIFNWAPGSRFLIFSVSREGVQIQRHHRERRGWGGADTHKH

SEQ ID NO: 315369 - protein, 231 aa, Zea mays
  Clone ID: MRT4577_50681C.1.pep
MNDADVGKQVQQMVRFILQEADEKASEISVAAEEEFSIEKLQLVESEKRRVRQEYERKEKQVDVRRKIEYSTELNAARIKLLRAQDDVVTGMKESAGDALLRVTKDANAYKRVLKGLIVQSLLRLREPALVLRCREADRSLVEAVLEVAKKEYAEKAKVNLPKIIIDGKVYLPPQRTSRDAHGPSCSGGVVLASQDGKIVCDNTLDARLSVSFRQKLPEIRKKLFSQRVSS

SEQ ID NO: 315370 - protein, 67 aa, Zea mays
  unsure (1)..(67): unsure at all Xaa locations
  Clone ID: MRT4577_50682C.1.pep
DFVGKVWWLRYWYCNSCQSYFLTKGWSRFIKEKGLQAGXVFRYYRSSVGAYSMLFIDLQACDSAEHS

SEQ ID NO: 315371 - protein, 43 aa, Zea mays
  Clone ID: MRT4577_50683C.1.pep
FKVYDDVKKIASVYMVFSVHILVYMMHLDNSRRAKFSIGIYKG

SEQ ID NO: 315372 - protein, 82 aa, Zea mays
  Clone ID: MRT4577_50684C.1.pep
SGLNVLFRPGSYPLLSKSFGWKKKKPPLPQKRFFLGGVNTRPLLIGPVKENYCCAKKSICFFFFFKTQIVWVYPLCLQNKCL

SEQ ID NO: 315373 - protein, 71 aa, Zea mays
  Clone ID: MRT4577_50685C.1.pep
ENPGIGSFRWAHALTLGDTEPSPTTLVHHTFEPGQTGADPHLIGGRGAPTRGTAVWAFHGGGPNPKQGAEK

SEQ ID NO: 315374 - protein, 50 aa, Zea mays
  Clone ID: MRT4577_50686C.1.pep
STSGGYFSHMTFPMYFSGTPIKKSPLFFLRPANVCSMRFVPMPASIETTH

SEQ ID NO: 315375 - protein, 101 aa, Zea mays
  Clone ID: MRT4577_50687C.1.pep
HRGPPPLPPDAHFYLAHVGSKTVPKHVTRRQSVLATYADYVRTHTRTTHRETPVTRTVLNRTIPWHTAMYTRGETNPSTRARQIHWGLETLAAVAECARPH

SEQ ID NO: 315376 - protein, 103 aa, Zea mays
  Clone ID: MRT4577_50688C.1.pep
HSRSRCFTQLVMARGLKASGVKLPCAGLDLNASKLESNLATGAFVLRPPRPKLGRSCPKGPCHWLSPPGPRAAAGRLEAPFPTGGVVNPFVRVRRSPELEFGT

SEQ ID NO: 315377 - protein, 131 aa, Zea mays
  Clone ID: MRT4577_50689C.1.pep
TVSRCTSRLRPAPPGAGTPWFWASASSLVDLLHILLDLRHLRCYDLDPKKFDEDFNILNWWHEHKLSYPILSILARDVISVPVSTISSESAFSLCGRIIEERRRRLAPEMVEMLLCMKDWELREARGQHST

SEQ ID NO: 315378 - protein, 347 aa, Zea mays
  Clone ID: MRT4577_5068C.1.pep
MAGLLPQHPATVDMSDSVLISSCFTHKFKINYVETEKVAVEHSVRSEQILAGGHLWRIICFPRRIGGMKESNVEYLSIYLCHESESKDVKAVFEAFVMYKEGTPSLAHKKKLVHVFSPKAGGRHIHGWPCFVERSVLQSFYVTNSGSFVIVGAVKVLQEDPLDVPPSNLGIHLGGLLLGSTDGSDVSFVVGGERFAAHRAVLAARSPVFKAQFFGSMAEATMSSITLHGITAATFKAMLRFVYTDACPEEAPSEAFQDLLAAADRFQLDRLKILCASKLWNNVSVDTVSATLICAEIYNCPQLKRKCIGFFGEGKGFKTKAVLTDGFAQLSQQFPSILDELRKKVGA

SEQ ID NO: 315379 - protein, 110 aa, Zea mays
  Clone ID: MRT4577_50690C.1.pep
IFFFVNLKKFGGGRFLKFPFFKPRCLPTFFFFFGPPLFPLGGWFQKPCRGEPPPFAQFWTGHGNPFLQGGYKRRGRGFRFFCQIFWARWWSPRPFLFLPFFGGGGGGFPP

SEQ ID NO: 315380 - protein, 215 aa, Zea mays
  Clone ID: MRT4577_50691C.1.pep
MDGAPPMPCCCGIGAIAGIGIGILTGAAAAIDIAGPVRGASSRAAMGVFVVLTIFGLPSPCPCPCACAWRPAGSSMSRSSKSSSMSMSMSSNLTCLFLPGLPPPPWPPPPCPPACPWPCPLPPPPPPPCPPWPPPPCPPWPCPLPLAFPCLGALPGATAPCFCCFPPPPPPPKPKPKPPTTCMSVMTLPASEVSLSATSSASKGPDTVTVLFFSS

SEQ ID NO: 315381 - protein, 212 aa, Zea mays
  Clone ID: MRT4577_50692C.1.pep
MSTVVMVVDLECDKCYKKIRKVLCKVQDKVSIRTISYDEKNNTVTVSGPFDAEEVADRLTSDAGKVITDIHVVGGFGFGLGGGGGGGKQQKHGAVAPGKAPKQGKASGNGHGQGGHGGGGHGGHGGGGGNGHGHGQAGGHGGGGHGGHGGGGKPGKNKHVKFDDMDMDMDDDFDDLDMDEPHAHAHGHGHGHGHGHGHGDGKPKIVRTTNTP

SEQ ID NO: 315382 - protein, 146 aa, Zea mays
  unsure (1)..(146): unsure at all Xaa locations
  Clone ID: MRT4577_50693C.1.pep
MVKTDAPMPKIKGGLFQKKKGFRKLXERRKARESRKKTKEVPAXKKKERVYPKKEPILSVQKWGKQSPPGGFPKGNYFVPPLYFXKGKKGFSXSKKKRAGVFSGDRFGGXLTRXGGKNGGARGSQFGPGGCKGVKKQNPFWPPKDF

SEQ ID NO: 315383 - protein, 81 aa, Zea mays
  Clone ID: MRT4577_50694C.1.pep
FISLGLQSKRAPCSPALYYWSRPPTSGTTPRRRLILTYIETTKLLGLTVCHITFLCERVFPLQTRTIYWRGFMDRIASAAD

SEQ ID NO: 315384 - protein, 195 aa, Zea mays
  Clone ID: MRT4577_50695C.1.pep
CCCSATWLGARYWQQALHELDPVFKKFSFSESVASLFSSLGYKRPAVIQSMYIFKQPGIGGEVVPHQDNTFLYTEPRTCTGLWLALEDATINNGCLWAIPGSHKKGLVRRMVRDENGTHFDRPSPVYDQKEFVPLEVKSGALVVIHGDLIHQSFENLSPASRHAFSLHVVDTEGCKWSEDNWIQRKTAPEPLYVS

SEQ ID NO: 315385 - protein, 79 aa, Zea mays
  Clone ID: MRT4577_50696C.1.pep
KAREIFGTTSIFQKTVSYKLIQTGPNRLSLYTKIKHPKAMVSSLVSNKFRLLKNLGGFEPPSIRDSTPRLAVKRMTSPC

SEQ ID NO: 315386 - protein, 257 aa, Zea mays
  unsure (1)..(257): unsure at all Xaa locations
  Clone ID: MRT4577_50697C.1.pep
MPPASTLTADQLIFFETNGYLVMDSFSSAXKVREMRDRMAELVAGFDGANSGVFSTKDHRQLKDVYFFKSAENISFFFEEKAYGDNGCLKQPKELSINKVGHALHELDPVFXFKKFSFSESVASLFSSLGYKRPAVIQSMYIFKQPGIGGEVVPHQDNTFLYTEPRTCTGLWLALEDATINNGCLWAIPGSHKKGLARRMIRDENGTHFDCPSPAYDQKEFVPLEVKSGALVVIHGXGDLIHQRIQRKTAPEPLYVS

SEQ ID NO: 315387 - protein, 92 aa, Zea mays
  Clone ID: MRT4577_50698C.1.pep
RRIQLHRPDTFAHCMSEDHFLAVVRAIRQELRSALFAEDSHITIVSITQVNSIWSPTTAQFAKTSSSYHLPYHFPGSILMLEEESTGHSGYA

SEQ ID NO: 315388 - protein, 121 aa, Zea mays
  unsure (1)..(121): unsure at all Xaa locations
  Clone ID: MRT4577_50699C.1.pep
MRDSYWKGRPFEAYVLPYHNYSCQPYYLHSQPEXRNCHSKXLRIAPDNATTGCNSSSTEAAFVGLVEFRTLMMLSMAENNTGPPTDGGVAHRLEPNCAVYNYAMEANGSNVLPHNKDAKGS

SEQ ID NO: 315389 - protein, 73 aa, Zea mays
  Clone ID: MRT4577_5069C.1.pep
PLYWNLLSISLNERELCPLSSSASLGGLLGSSISFLSSSVNPALRPPRPPPPLVTGPQVFKKPPLGRLGSKTY

SEQ ID NO: 315390 - protein, 47 aa, Zea mays
  Clone ID: MRT4577_506C.1.pep
CTACIHPYKELPGMMTGSKIINHYTLIYTKQRCPFHLPRYHLITLTR

SEQ ID NO: 315391 - protein, 99 aa, Zea mays
  Clone ID: MRT4577_50700C.1.pep
KIMRHVPPNFTKPYNNNYPTTTSKQHEQPKPRTQENPPTYQQEAKLKKTLGTIYPQENRLPNKKDLHQKGRAPPEGEGKTPAFGLSWADGTILGGPTPP

SEQ ID NO: 315392 - protein, 231 aa, Zea mays
  unsure (1)..(231): unsure at all Xaa locations
  Clone ID: MRT4577_50701C.1.pep
RPGSHLISSHLITLTLSLSTLSTNKQLSSSNSTPKPTITXSSLPSPPPPPSSALLPLPTRLSSSTTVTLPSMSSPFPSTAXPGPLTTXSSLASDSLRTSAPLALPSRLPTPELSTSLSSLATPPTPTTSTTSSTLSTATPSPASTTSSTLVMAARSSTARLVTPSATAPPAARRTTAALTPSPSTPRSAPSKRLANKSRCSLRSIVNDWFFFIIPTFSIYIIRQHQSLPTR

SEQ ID NO: 315393 - protein, 141 aa, Zea mays
  unsure (1)..(141): unsure at all Xaa locations
  Clone ID: MRT4577_50702C.1.pep
PPLNNAQRHAPQHSPPKKEEHNTAXXKEKXKGRNRESPDTRTKHPNPSQKTAPETPPRQKVATYTQNMENREQNSRPQAQPSQQAADTPLKQHPDAPRRLQHQEDHCHPPSSSDAPQNNTRQRDAHTAPRVLTRRNPPDHP

SEQ ID NO: 315394 - protein, 176 aa, Zea mays
  Clone ID: MRT4577_50703C.1.pep
RDLIQEHIAFRVWPLVESWEIPKETITKSSEGDLVRLKYTFRYGDKFDEPNDDWLKCIEATSDELLGAYSKEEDNALSAAFGGRGRKRMNRVFDAIDFVYPDYRYPLRGQGKKRKAATLAAPAKLVPKAAGKKMKVLTPPPRYIEPVVVPEFGGEASSAAETRETIPPTQRTKEPA

SEQ ID NO: 315395 - protein, 88 aa, Zea mays
  Clone ID: MRT4577_50704C.1.pep
RFKKSGPDFKGMDFKFIPFGAERRMCPGMAFGLAHIELALGALLFPFDWKLPKGVVPKKINMAKAVAIPAPPRFDLVVLPVKRLPVSI

SEQ ID NO: 315396 - protein, 68 aa, Zea mays
  Clone ID: MRT4577_50705C.1.pep
FLPPPYPAPQMEPEMKSVASPPCESLIRYTLCPMSSSLTSATPIASPMLRSPLSVTPRGPSPIQRSVR

SEQ ID NO: 315397 - protein, 39 aa, Zea mays
  Clone ID: MRT4577_50706C.1.pep
TQFYKLFTHIQTNPHNLYIILLSMIINVHLPTSFSSPTY

SEQ ID NO: 315398 - protein, 116 aa, Zea mays
  unsure (1)..(116): unsure at all Xaa locations
  Clone ID: MRT4577_50707C.1.pep
AAXVGAGGGFXXGXSPPPLRRVGVFLGPPFXXRPXLCVPAFXRPPRFARXXXLVXAXXRGRPXXVLXPLRAFPPGLPGASVPLWSVLPCAPFALGLRVAGWPGLPVFSLLLLASCV

SEQ ID NO: 315399 - protein, 87 aa, Zea mays
  Clone ID: MRT4577_50708C.1.pep
SQPKREKKHKRTLKTNRQEYHNANRALYSMLKKEQHQLTPPKPSNKCEKIIMHDELINNQLLRREPRWIIRTRTNNNNEDQPAAAQR

SEQ ID NO: 315400 - protein, 113 aa, Zea mays
  Clone ID: MRT4577_50709C.1.pep
RSYTKMSLHSSLTMSLLSFSFLLLRTFSAKAIVPPSETFRFVNDGEFGPYVVEYGANYRVISIANAPFQLAFYNTTCNAFTLALRMATTRSESLFRWYWEANRGNPVRENATF

SEQ ID NO: 315401 - protein, 71 aa, Zea mays
  Clone ID: MRT4577_5070C.1.pep
RSMEEGGRPYMRPSAFNAFKGRVPAVSSATVYITLVRMLTGTLRIHRLTLEAMRFRPSDAYRRAPHHADSA

SEQ ID NO: 315402 - protein, 44 aa, Zea mays
  Clone ID: MRT4577_50710C.1.pep
KKNLFFFVSNSHIIKQSYKYTNFAVTRQFPSSNGNRVAEGILVS

SEQ ID NO: 315403 - protein, 81 aa, Zea mays
  unsure (1)..(81): unsure at all Xaa locations
  Clone ID: MRT4577_50711C.1.pep
PRSPADMCSEIIPKAKDGGLSTIKTYWTCNMXHSPKRQSXSSKGQNDVARLFHLIQDHDMYAMVPVGPFIQAXWNDASTAL

SEQ ID NO: 315404 - protein, 123 aa, Zea mays
  Clone ID: MRT4577_50712C.1.pep
RPGNAASPCMRSSNRHYTLKRQEATTTISHSANLIMEGCRRCLLFFAMDLRKRDTHLRVCWSVKSRPLQSHPVQSSPDQTVEIECVQVTELKMTSKASQPQVKADPFDFRLRLSIADHSIWTD

SEQ ID NO: 315405 - protein, 55 aa, Zea mays
  Clone ID: MRT4577_50713C.1.pep
MIMMTKVQKKKKKIKKKKKKHKKKKKKKKKKKKNKKKQKKKKNGGAPPYVFYYPR

SEQ ID NO: 315406 - protein, 58 aa, Zea mays
  Clone ID: MRT4577_50714C.1.pep
GGKLYKSPGKPNLTGGGGALDLNIWGQETFNEVFLRKAIITGPTPHKKNLQRGLPPGV

SEQ ID NO: 315407 - protein, 89 aa, Zea mays
  Clone ID: MRT4577_50715C.1.pep
ICCVPASASTNNSCMMETATARLAGGSNTCPSFSTCYRHVRGRAAMASCSTGNSSLPFSIRAVRYETQDLLFTPLFFYLRSSLRTLFFQ

SEQ ID NO: 315408 - protein, 102 aa, Zea mays
  Clone ID: MRT4577_50716C.1.pep
SIKMFKFVVLAALLAMANANGLLHAGYAAPALAAVPAVAHSQAVVGSAVVGHQVHSQVSYVPKVVSQPLSIVKPATYQISSGASIPATGKIIAAAPLLAKPI

SEQ ID NO: 315409 - protein, 54 aa, Zea mays
  Clone ID: MRT4577_50717C.1.pep
CCVQIVEQSSLLDVGMVVADQQNGHFSTVPLVEEMISNPLTILSGYSNCRGYSF

SEQ ID NO: 315410 - protein, 127 aa, Zea mays
  Clone ID: MRT4577_50718C.1.pep
PGRMCAINAETKKPTCICVTECSKNNDLRRKVCSNYNTTWQSDCHLHKHRCLCEENLSEDCTEQHKHMHIDYYGECTEDIKCKPEVLVDFPRRMREWLYNILTSEHTKLNSINTEEDLAHKWVDAVI

SEQ ID NO: 315411 - protein, 49 aa, Zea mays
  Clone ID: MRT4577_50719C.1.pep
GGIGVNVPIKSVRTYRDSNVSLFEPSLKYQRFPRLKKMGDRVRTGQQAA

SEQ ID NO: 315412 - protein, 188 aa, Zea mays
  unsure (1)..(188): unsure at all Xaa locations
  Clone ID: MRT4577_5071C.1.pep
MAATSEEAIKQFSALMEQXNVHQGNLRGTLMRFLKAREWSVPKAYKMLMDCLNWRVQNEIDIVLAKPILPSDIYRVIRDTLLVGLTGYSKQGQPVYAFGVGLSTFDKASVNYYVQSHIQMNEYRDRVVLPAASKKFGRQINTCLKVMDMTGLKLSALSQIKMLTMITTVDDLNYPEKTETYYIVNAPY

SEQ ID NO: 315413 - protein, 51 aa, Zea mays
  Clone ID: MRT4577_50720C.1.pep
YFYVMTYHMSATVIEAEESKKMASKINVTAGRCMCVYLVTVKMNVSCYLLK

SEQ ID NO: 315414 - protein, 54 aa, Zea mays
  Clone ID: MRT4577_50721C.1.pep
AKGRGARALSQRRVIVRKSGGADQAGWPAGKCVQAEGRLKSQRDQRVGQGHQLR

SEQ ID NO: 315415 - protein, 353 aa, Zea mays
  Clone ID: MRT4577_50722C.1.pep
MSSSGPSPATGTHHTRSTPLQVIHVLGNFMRIWSVYSLYSYLSNSGDSIVGFIFSCLVPTSVIFLVLQKPWKGRPLPNSQVVPTVVNGGILAFYFVLWGKGLLACGPLVALLAEYAGAVLGVLSAALYGRKFNIWKKIGGLAAMLVAYYLLSIGWSTRTHSPLYSFGSEPIEKARQTFGVKEMMVPITAGILSALRRVLARRVSLKNQLKRRLHAITIASATCFLFPFAMWDTILGSASDSIVKLQLPSWAYFSTVLFGMVLIFYVDNVAEEKLHLVFSSPRHLMVSTGCIIVLETVYQMDFSLLGFLVCSVILGFGISEATSLERSKKSPLETHELSNGVFHNQLPISELPS

SEQ ID NO: 315416 - protein, 88 aa, Zea mays
  unsure (1)..(88): unsure at all Xaa locations
  Clone ID: MRT4577_50723C.1.pep
VFIHCSNYLLGGGRTSVGWPLFISRMWVVVGKGLKPQKYSCLGGVITHKKVRCLGVSVLLFGRRVFFSEENXXELKQKDRSRPLCXLG

SEQ ID NO: 315417 - protein, 45 aa, Zea mays
  Clone ID: MRT4577_50724C.1.pep
WKGRSVNAFLKLSQLAKWGFVARRFKVCKDRVLSEYYVVKRRPMK

SEQ ID NO: 315418 - protein, 268 aa, Zea mays
  Clone ID: MRT4577_50725C.1.pep
VNGGIMAFYFVLWGKGLLACGPLVALLAEYAGAVLGVLSAALYGRKVNIWKKIGGLAAMLVAYYLLSIGWSTRTHSPLYSFGSEPIEKARQTFGVKEMVVPITAGILSALRRVLARRVSLKNQLKRRLHAITIASATCFLFPFAMWDTILGSASDSIVKFQLPNWAYLSTVLFGMVLIFYVDNVTEEKLHLVFSSPRHLMVSTGCIIVLEIVYQMDFSLFGFLVCSVILGLGIFETTSLERSKKSPLETHELSNGVFHNQLPITELPS

SEQ ID NO: 315419 - protein, 85 aa, Zea mays
  Clone ID: MRT4577_50726C.1.pep
HGAHGITQVGTNNYNSISNKPDSDWHKKLKLANVPVGAYINTSGRQVLLRHKLRDNRGETWRHPSSAIQDYLQMTEDQYAYNLVT

SEQ ID NO: 315420 - protein, 85 aa, Zea mays
  Clone ID: MRT4577_50727C.1.pep
GIESFSFNKSINKRIQTIIVPSCRASQGGRAPTLVLPNYRMIHQHHNRKDSLQHCRHPDKLEMIKSIRAWVAHMKHASHIAYRGI

SEQ ID NO: 315421 - protein, 68 aa, Zea mays
  Clone ID: MRT4577_50728C.1.pep
HQDQRHQHELSQNHQTNSLQLLAPNILQLHYLLIKPSLLFCITPNISTSLYISILSSFPNPLFHLAGI

SEQ ID NO: 315422 - protein, 96 aa, Zea mays
  Clone ID: MRT4577_50729C.1.pep
CLTAPLIRSLSFNSPRSHTTLKHGMCRLRQHQRMRRWRTVACVDHRSRLALVPRLALLQGAALIGGMISCISETFARILFLSNSLAFMILWDYQPL

SEQ ID NO: 315423 - protein, 139 aa, Zea mays
  unsure (1)..(139): unsure at all Xaa locations
  Clone ID: MRT4577_5072C.1.pep
HRHTMPSCFHTAPPDHLHMIRHHTITFAADSRWTVLTTSIDRSRQLLRISIVVLLSELLGGESASVHMAVRYMGGHRCGCGCFGRPXRKRRPSVPKGWRRASARWPGHGRAREEGKQRKDDDSIEDLALARVAVDIMWP

SEQ ID NO: 315424 - protein, 64 aa, Zea mays
  Clone ID: MRT4577_50730C.1.pep
FWPGGPNLGNFWQWKAKNLLVFMFYRAHQQRVGAPTGDVCWWKPGAGPKMVPLKGGPHPFFFCP

SEQ ID NO: 315425 - protein, 123 aa, Zea mays
  unsure (1)..(123): unsure at all Xaa locations
  Clone ID: MRT4577_50731C.1.pep
DSSQSNNCGQSSVYHTLKRTLVAKGVNNFAQQNGGSLSLAARPRAQAVNHQFLSFFLWAERAKKDDALSNLCSTLGQLKXMAVDMDIEIDRQNKALVPFSDDITELNFRLKGVNQCGHQLLGK

SEQ ID NO: 315426 - protein, 174 aa, Zea mays
  unsure (1)..(174): unsure at all Xaa locations
  Clone ID: MRT4577_50732C.1.pep
WHDDRVEIIAYDHHNRTXPRYVSFTDSQGPIGXDANKNQVXALKPINTVFDGKRLCXRSTSAAAAQSDIKLWSCWTTLCGXAETAMIADTXKGEAKTFAAEEISSMSLIEMREIAEAYPATTIHNAVVTVPAYFYDSERHXTKDXASVIAALHVVRILHEPTGAAIGYALDKNA

SEQ ID NO: 315427 - protein, 200 aa, Zea mays
  unsure (1)..(200): unsure at all Xaa locations
  Clone ID: MRT4577_50733C.1.pep
MLLLDGDLVLSSSGSTGAASRTSDSGRELVAALLESPGIRHAVDRLKVAPERRISAGQEGAPKHVYVFQREYATVDPARVELVGTDEATTCIGVVIRNNKTGMXEKEVSIYLILTSVSHMDFPEIVEGGIKQMLELXVHLIGGFADASTKVVRSSGKKHIKQEGYSYPLCCKIVEVLHKSQLQFHLRSFCVLENNTKSDS

SEQ ID NO: 315428 - protein, 397 aa, Zea mays
  Clone ID: MRT4577_50734C.1.pep
RNKPSEKKLETRWCAYLDEAWKLVPSAPLFESETHFPALLRQRLRPPAACSSSTATLSSPPPEAPAPAPAPSRTSDSGRGLVAALLESPGIRHAVDRLKVAPERRISAGQEGAPKHVYVFQREYATVDPARVELVGTDEATTCIGVCVIRNNKTGMTSVSHMDFPEIVEGGIKQMLELLGDDNAPFDVHLIGGFADASTKVVRSSGKKHIKQEGYSYPLCCKIVEVLHKSQLQFHLRSFCVLENNTKSDSFGNALPIIGGFVVETSSGVVIPATFDMDSRCPDEVVRRIRVSVSSYDPTWQGRLLETYDTQDDVFQIAPACWMPDWADIASSLNQLSDSEVLLRCSTSPAAEPPHFVENERRIWKYLIDNPDWEETFPKHKPRVFHRASDGSWSRYS

SEQ ID NO: 315429 - protein, 102 aa, Zea mays
  Clone ID: MRT4577_50735C.1.pep
RLTLQHPNAAPRVFAHAASVAMAFLWLEFSQSFQVLAILASTRTHAVALGYRFWVGAGLPARGAAHVALACQLGLLRCKLACHVGVLWMHLGAVGGGCSGMR

SEQ ID NO: 315430 - protein, 96 aa, Zea mays
  Clone ID: MRT4577_50736C.1.pep
RSAPKKAKTLLNNMAFNSLKHLLRVPITSTLLLHRLPKSLWTELFMVETKRPMTSKNWIERSSLRIMVPLLRAAAEDAVKEYGDVLCRSIIYCLSC

SEQ ID NO: 315431 - protein, 76 aa, Zea mays
  Clone ID: MRT4577_50737C.1.pep
FGSSGEACVFERILLFMINDSKKQNRVPNRRERHKLPIRPLWNAHLLHSHLMTLLSMTKQFTKIGWSLNHCSVWHL

SEQ ID NO: 315432 - protein, 34 aa, Zea mays
  Clone ID: MRT4577_50738C.1.pep
PPPPPPPPPPPPPPPPPPPLFWEPEPKKPRNGFP

SEQ ID NO: 315433 - protein, 38 aa, Zea mays
  Clone ID: MRT4577_50739C.1.pep
TCQHGEESRHRLRTAPMTIPYRSRSHSPVKCLGTTMRS

SEQ ID NO: 315434 - protein, 199 aa, Zea mays
  unsure (1)..(199): unsure at all Xaa locations
  Clone ID: MRT4577_5073C.1.pep
FFFFFFFFFFFFFFFFFFFFFFFFLGKGGGKGGPKTPKXKKQRTPPPYPSPQXEHKPKTHPPKPQKQGGXEWAQKPPPKGGAPLGGHRGGGPPXGGPKQGAKPEPQKPGKKHQKKNWGKTPPQGGGHAKAPGGGGAFLRQRPQKREKGKGAPQGVHRNGAPKNHTGPKGMGDPGSKNLRGGEEKGHPHGGRKNRPPTSK

SEQ ID NO: 315435 - protein, 85 aa, Zea mays
  Clone ID: MRT4577_50740C.1.pep
LGNNVVSVYLCASWTVQGGICECFLAQHCCMIGRKRGGVSFPARKFDSARLPCNVLVLTQSARQASASGPEHRAHYLWRPVHCRA

SEQ ID NO: 315436 - protein, 50 aa, Zea mays
  Clone ID: MRT4577_50741C.1.pep
GESNFKSLNRLDAPTAFHGVGAWVYRHRHSMTGQGASIHALFQMSMYLMF

SEQ ID NO: 315437 - protein, 104 aa, Zea mays
  Clone ID: MRT4577_50742C.1.pep
QGVVGQNGQAISIIGGPLPPVVLTPFRLVSPNIYWMPVMAPGVFCPTRYSPYFCPPPYLVKKEIEDLTAGLANGRIFSLENIPQLVAPEAKGPANSPAPAPLGV

SEQ ID NO: 315438 - protein, 105 aa, Zea mays
  unsure (1)..(105): unsure at all Xaa locations
  Clone ID: MRT4577_50743C.1.pep
PPDYNIQRDEPLHQALRLRGGMQIFVKTLTGKTITLXXESFYTIDNVLLGEQNKLSFQPHQXGXTXGGEGVEEHPPXXXNKXXKENXRHQGQQQQKGQKAERSRR

SEQ ID NO: 315439 - protein, 105 aa, Zea mays
  Clone ID: MRT4577_50744C.1.pep
QKPLQPCPFCPQNNIKAVLERQLWGPWVESPRNIFWGVLPIDMEGFLALKRFVHKVATTKFTPAGVEGYLKKFRMVGPSTIDMGLNRRVSSVKSNESYVTSTAVS

SEQ ID NO: 315440 - protein, 460 aa, Zea mays
  Clone ID: MRT4577_50745C.1.pep
MDITQVLLAAQSPDANLRTVAEGNLTQFQEQNLPNFLLSLSIELSNDEKPPESRRLAGIILKNSLDAKDSAKKELLTQQWVSVDPSIKLKIKESLLVTLGSSVHDARHTSSQVIAKVASIEIPRREWQDLIAKLLENMTSPGASAPLKQATLEALGYVCEEISPQDLEQDQVNAVLTAVVQGMNQAELSPEVRLAAVKALYNALDFAESNFANEMERNYIMKVVCETAMSKEVEIRQAAFECLVAIASTYYSHLDPYMQTIFDLTANAVKGDEEPVALQAVEFWSAICDEEIALQDEYEGSEDGNSTVHFRFIEKALPLLVPMLLETLLKQEEDQDQDDNAWNISMSGGTCLGLISRTVGDAVVPLVMPFVEANITKPDWHCREAATFAFGSILEGPSVEKLAPLVQAGLDFLLNTMNDANSQVKDTTAWTLGRVFELVHSPAGANSIINDSNLSRIMSV

SEQ ID NO: 315441 - protein, 45 aa, Zea mays
  Clone ID: MRT4577_50746C.1.pep
GLNALRVPLQSLPESTSSEGSRAYIASTRACNTSMATSKTQRVAQ

SEQ ID NO: 315442 - protein, 50 aa, Zea mays
  Clone ID: MRT4577_50747C.1.pep
KIHEGLKNAFNVMSSNPWASVNTGGTPTLFIYCIIRGRRAWRPLTYIFGW

SEQ ID NO: 315443 - protein, 102 aa, Zea mays
  unsure (1)..(102): unsure at all Xaa locations
  Clone ID: MRT4577_50748C.1.pep
EGDSYCLYISNSPVHEYNLSSYQKIIKTERLLLHYLKGIVKSVGRRGGGEXDYNACVLIHATVSGRSPPSSHSGTKHISHGWHACTHQPETGLANGHNILGI

SEQ ID NO: 315444 - protein, 43 aa, Zea mays
  Clone ID: MRT4577_50749C.1.pep
SSILLYLFSFFFFFFIFFLFFFFFFFFFFFFFFLIFFFSPDAW

SEQ ID NO: 315445 - protein, 315 aa, Zea mays
  Clone ID: MRT4577_5074C.1.pep
LVEICLQNVHQGNLRGTLMRFLKAREWSVPKAYKMLMDCLNWRVQNEIDIVLAKPILPSDIYRVIRDTLLVGLTGYSKQGQPVYAFGVGLSTFDKASVNYYVQSHIQMNEYRDRVVLPAASKKFGRQINTCLKVMDMTGLKLSALSQIKMLTMITTVDDLNYPEKTETYYIVNAPYVFSACWKVVKPLLQERTKKKIQVLYGSGRDELLKVMDYESLPHFCKREGSGSSSDSLDGVDCYSYDHPFHQQLYNYMKQQQSLNQDSVGPRKQGSVHVDVPSPGLEEAKIAETIKAELQNLRGTGGLAHSFSSIQIEGP

SEQ ID NO: 315446 - protein, 117 aa, Zea mays
  unsure (1)..(117): unsure at all Xaa locations
  Clone ID: MRT4577_50750C.1.pep
VGFYSPSGSGSATRGYTGFGDVGERIVMVSSHVXYRCFFGGLAWATDDHYLHNVFSTYCQVLECKIILHRETHMSRCWGSVTFSTEEAIRNAIQGINGKXLDVRTITVNEAHSRSPR

SEQ ID NO: 315447 - protein, 105 aa, Zea mays
  unsure (1)..(105): unsure at all Xaa locations
  Clone ID: MRT4577_50751C.1.pep
SSGNNAEYFFFFFFFFFFSSLINDMNKSLAGGIIPVSFVLASARWEYSILGVLKATFLSPGTLGCYHCLRGNXRKLGXVIRGXELGXKVGVMMVIGVFWGKLLLG

SEQ ID NO: 315448 - protein, 38 aa, Zea mays
  Clone ID: MRT4577_50752C.1.pep
LTNFFFYDNSMHPTLFICTYVVYKIYSAVYSSYLISCR

SEQ ID NO: 315449 - protein, 74 aa, Zea mays
  Clone ID: MRT4577_50753C.1.pep
FRNPKLLILLLILTVLSSQHSIHWWAGAIAPSPMEARHRGTSWSHSHADHVLELMCHSSPCYPHFVSVATLIHL

SEQ ID NO: 315450 - protein, 781 aa, Zea mays
  Clone ID: MRT4577_50754C.1.pep
MAESEVSPAAAGGGGRLRNAFGGVLCAFTLLLIGVVAFSIRLFSVIKYESVIHEFDPYFNFRVTQFLSKNGIYEFWNWFDDRTWYPLGRVIGGTVYPGLTLTAGTMWWLLNSLNIPLSVETVCVFTAPIFSANASWATYLLTKEAKGTGAGLMAAAILAMVPSYISRSVAGSYDNEAVAIFALIFTFYLYVKTLNTGSLFYATLNALSYFYMVCSWGGYTFIINLIPMHVLLCIVTGRYSSRLYIAYAPLVVLGTLLAALVPVVGFNAVMTSEHFASFLVFIILHVVALVYYIKGLLTPRLFKVAMTLVISVGLAVCFAVVAILVALVASSPTKGWSGRSLSLLDPTYASKYIPIIASVSEHQPPTWPSYFMDINVLAFLIPAGIISCFLPLSDASSFMVLYLVTAVYFSGVMVRLMLVLAPAACILSGIALSEVFSVLTRSIKLQLSKLFDDSPTSSGDSSPESSTNSTKNENRNEKHETAPKEKTSKKNRKKEKEVAESVPVKPKKENRPLVLPFELSVMGILLLIVLGGFYVVHCVWAAAEAYSAPSIVLTSRSRDGLHVFDDFREAYAWLSHNTDVDDKVASWWDYGYQTTAMANRTVIVDNNTWNNTHIATVGTAMSSPEKAAWEIFNSLDVKYVLVVFGGLVGYPSDDINKFLWMVRIGGGVFPHIKEPDYLRDGQYRVDAQATPTMLNCLMYKLCYYRFVETDGKGFDRVRGYEIGKKHFKLTHFEEVFTTHHWMVRIYKLKPQKNRVRGKLKKLKASAKTSSTLAAGRKNPWQ

SEQ ID NO: 315451 - protein, 350 aa, Zea mays
  unsure (1)..(350): unsure at all Xaa locations
  Clone ID: MRT4577_50755C.1.pep
VVELRLPGAGLMGNLPSGVLGNLSALRTLSLRYNALTGPIPDDLSRLSELRAIYFQHNSFSGEVPAALFELKNLVRLDIAGNKFSGKISQDFNKLIRLGTLYLDGNSFTGEIPKLQLPALEQFNVSYNQLNGSIPNTLRKMPKDSFLGNTGLCGGPLGLCPGESAPTPAGSPESQPGAGGAADVGGGKKKKLSGGAIAGIAIGSVFGVLLLLALLFFLCXRGLARLGRRRRWRRGGNSAWGRWMSSQRDRTAQQAATTALRRPSQFXTAAAAAAAATATAAAKTGGSTGSKKLIFFGPMADDPPFDLXDLLRASAEVLGNGXFGTAHKAVMXTGXSVAVNRLKDVDLPEP

SEQ ID NO: 315452 - protein, 454 aa, Zea mays
  unsure (1)..(454): unsure at all Xaa locations
  Clone ID: MRT4577_50756C.1.pep
MRKKGRAVPEWLNSPIWSATPPAPAQPDPYGADLAPPPPPKPPPPPATASPVPPTSRPXLSKKVVNMGELRRLACLGVPDGGXVSDPSSGSAGGLFGKWGMXYSVGALLRVTFSMRXEMELDVAVVKRDDLGKKRCIFXPTIVQLLLGYLPTDRSLWTYELEKKRSQYSAYREEFLLNPSEKLRMIEETKLSRKKDTSIERIGFLSRFEVTNEEHPLSSGKSSLWNQYFQDSELLEQIDRDVKRTHPDISFFSSKSNQESLRRILIIFSKLNPSIRYVQGMNEVLAPLFYVFKNDPDPSNSASAEADAYFCFVELLSGFRDNYCKHLDNSSVGIRSTLSKLSQLLKRHDEELWRHMEVTTKVYPQYYAFRWITLLLTMEFSFNVCIHIWDAILGDPEGPSDTLMRICCAMLILVRKRLLAGDFTANVQLLQHYPATNIDHLLHIANRLRGTVPG

SEQ ID NO: 315453 - protein, 98 aa, Zea mays
  unsure (1)..(98): unsure at all Xaa locations
  Clone ID: MRT4577_50757C.1.pep
MEKRLLPSLHRALGEKLAHPKKTPGGLLLPDTYKHVSAYKGGGGAPGERHGARNLPPGALREGDSALLPECGGTEYNLASDKXHLLFREHHILRTLGV

SEQ ID NO: 315454 - protein, 420 aa, Zea mays
  unsure (1)..(420): unsure at all Xaa locations
  Clone ID: MRT4577_50758C.1.pep
MRKKGRAVPEWLNSPIWSATPPAPAQPDPYGADLAPPPPPKPPPPPATASPVPPPPSYEQAVGVGGGRREEEDDEGAGAVIRAHLLSDFKAALSKKVVNMGELRRLACLGVPDGGTGVRPVVWKSEKLRMIEETKLSRKKDTSIERIGFLSRFEVTNEEHPLSSGKSSLWNQYFXELLEQIDRDVKRTHPDISFFSSKSNQESLRRILIIFSKLNPSIRYVQGMNEVLAPLFYVFKNDPDPSNSASAEADAYFCFVELLSGFRDNYCKHLDNSSVGIRSTLSKLSQLLKRHDEELWRHMEVTTKVYPQYYAFRWITLLLTMEFSFNVCIHIWDAILGDPEGPXYITTTGINLWTSYSAKPLHILMQDTLMRICCAMLILVRKRLLAGDFTANVQLLQHYPATNIDHLLHIANRLRGTVAG

SEQ ID NO: 315455 - protein, 102 aa, Zea mays
  Clone ID: MRT4577_50759C.1.pep
FHFHDRIENVTRNRAPTEYCPFPIYQTNHQRFQTTGRTPVPPSGTPRQAKRRSSPMFTTFFDSCTHRQENQTGKKLVRIQAITNTALFLHAPRPLSRRAGVP

SEQ ID NO: 315456 - protein, 106 aa, Zea mays
  Clone ID: MRT4577_5075C.1.pep
VGCLSGWLGAPYSVFPRCFFLPLECEGLFCQLGGSFKGSQARFVDLTSRENWSSALVVLPVRLVMAGVGFPGFFRLFFRLVVGWALVVGWPVPGVPCFGALYSGSV

SEQ ID NO: 315457 - protein, 151 aa, Zea mays
  unsure (1)..(151): unsure at all Xaa locations
  Clone ID: MRT4577_50760C.1.pep
ERTSLEFFFFFFFFLRFRPGTIPRRPSCGNEGDEEDKGKKAYRLGGXAHLPHPQKKSRVPPAATTITAMISILAQERLLGFALGSVSIGGFVLHQRRAIYRSIAEADGSPYFYQPGEIASRRSSTELAHVWNKAVDETLGRLVVYLSSRGW

SEQ ID NO: 315458 - protein, 134 aa, Zea mays
  Clone ID: MRT4577_50761C.1.pep
VLQVPKVHNKPIQSQKKGFKSKEQSNAPDSVRCTRKIDSELASFGNLRGRSSIIHRTVWCNTGLSGVPAEQRLLRANGRLQRTLNVLQCVPARAEVSAGVRRRTGQSTGPVRCTTGLSGGPNCQSSNGRNPTTK

SEQ ID NO: 315459 - protein, 172 aa, Zea mays
  unsure (1)..(172): unsure at all Xaa locations
  Clone ID: MRT4577_50762C.1.pep
GAAAMGGHYSPTGSAAEAGGERGVRGVRERPWGKWAGEIRDPHKGGVVGVXTFNTAEAAGRAYYEAALRFRGSRAKLNFPEDARLTTGPSAAGAPAGGGSTRTMAVAGSGGGSYQQEASAXVXFADYLQYQMMLLQGGTSGQGSSSHGGDPXYYYYGGHRGAGAGAGGGAMS

SEQ ID NO: 315460 - protein, 697 aa, Zea mays
  Clone ID: MRT4577_50763C.1.pep
MLAGLSEDSDVSEGFDVESEDEDAENRPWRPSHTIFGKSSIKQSQIDAMKGRYFRDMSIVRTGGDSATPAPEVDEVVVYRSFMKAGLLFPLSKFLVKVLKTFQIFLHEIIPDAIRMGVFIWAVRSQGLEPSAKCFCNMHELSYETKATGKEQYHNNFGCYGFVPRSDVSYPVPTFRKRWPGALMEEWFYVKNDLVAREDIKGIIQRPIRSRFGIRRPATALGNEIETCQRSFNTVCTFIGTRDLVQEHIAYRVWPLVNDWEMPKEAAAGSSQGGLVYLKYTFRYREQFDEPNNEWLNCIEATSDELLGAYKRAEDDAMTVAFGERGRRRLNSVFDVIGSVYPDYSYPLRKQGKKRKVPTSAISVVPKATVLKLVERTSSTTEPGHPAPAGSKRESAEMPKVSAIESAKAPRHAIEAKGKATEELEREETAGPPKILSPPSELELSKTAEAATVRAKPEAGPTVPTEAEPAGAEQRTEQESSDVGLALEKKDVPEKVKSTTPEAPSKDIDFIIRHALGKRLSEEEIAEAKHYARELEYPKGALVYNGTDEDDFLYCLPNNKEISVCREMAKNMGFPKLEVGLSAMSKDDLADSLAYNSLMGLILSNALRAQKNAEDESFQIALSNLRSEVIRLRNEVTEKDKILLSLLDRVKASEANLAAQSEAHRAEIEDLKKKLAEKNEDFEVAKAKQEISEWTSA

SEQ ID NO: 315461 - protein, 79 aa, Zea mays
  unsure (1)..(79): unsure at all Xaa locations
  Clone ID: MRT4577_50764C.1.pep
HSSNPNCYAKVILMSTNPPLXIYAKEHIEASEELFYDYPYGPDQAPSWANIPXTYKERXSFLSHHRAHILALYLNIISG

SEQ ID NO: 315462 - protein, 95 aa, Zea mays
  Clone ID: MRT4577_50765C.1.pep
NRSAVTLLALSSHGLVGTAPLSPLAAEHRAVPAPCRSFPSRARSRPGADLLHATLRTSPVPSDRAHRAASLNVPTCRSRFAEATAAPASSPSLCL

SEQ ID NO: 315463 - protein, 133 aa, Zea mays
  Clone ID: MRT4577_50766C.1.pep
STKDGIGFLAATALKEEYSVDGDSTCAMTIARSIIVRLLRARVRSCPDDEPSGPLVRYLLLPPLSLAESDRATHDAARLRLRSGNGEAPSCSLEIAACNAVVPLRGGVFRRACLHHCRPSVGPIYMTFVVRAR

SEQ ID NO: 315464 - protein, 554 aa, Zea mays
  unsure (1)..(554): unsure at all Xaa locations
  Clone ID: MRT4577_50767C.1.pep
NQFGVVPCGLRRRRKSETLRAQYIDVRELRICAGTWNVAGRLPPNDLDIQEWLDMEEPADIYVLGFQEIVPLNAGNIFGAEDNRPVAMWEHIIRETLNKISPDKPKYKSHSDPPSPSRFKPSDDAFVMEDELISESDSEGDGEVHPLNEQDLVDSVDGIHGNKCEPQTILQDDEFSRLPSVKTFDRSNNLSFKESNXSRRSXQKILTKTFSHSERLGMIWPEPPLDMLAQCLPDSTKSFASGKVLRSYLSFKSVNGDSGPFAEDNSVPDFHMSCAAVKRKRPYFVRIISKQMVGVYLSIWVRRSLRKHIQSLKVSTVGVGAMGYIGNKGSISVSMSIYQTHFCFICCHLTSGEKEGDELKRNADVQEIHRRTIFNPVSRVNMPKTIYDHERIVWLGDLNYRINLPYEKTHELISKQDWNELFGKDQLKVELKKGHLFEGWTEGVINFPPTYKYKVNSEKYISDDNKSGRRTPAWCDRILSHGKGMRLLSYKTVDLRLSDHRPVTAVYMADVEVFSSKKLQRALTFTDAEAEEQLSFEEDSASGIYNLGLYESSR

SEQ ID NO: 315465 - protein, 61 aa, Zea mays
  Clone ID: MRT4577_50768C.1.pep
SISVSMSIYQTHFCFICCHLTSGEKEGDELKRNADVQEIHRRTIFNLVSRVNMPKTIYDHE

SEQ ID NO: 315466 - protein, 94 aa, Zea mays
  unsure (1)..(94): unsure at all Xaa locations
  Clone ID: MRT4577_50769C.1.pep
VRETAPVDWSSAEKGSPTIFGKTKGKAKDKVKKPKKHNEKDRLEEKEHKKHKHLDKYRSXIRDKDRXKDKEKEKGKSGNDHLGRDDSQEHEEKR

SEQ ID NO: 315467 - protein, 485 aa, Zea mays
  Clone ID: MRT4577_5076C.1.pep
MLMTSTKKRGGKWKFVLTGVLGGAAIVVTLGLSVLVFCLLRRKGRKPRGRGVEQTEEGIRSGRRSSSVNPVTMSPMASPRASGSPKGVPIITDEFTYEQLHHAAGGFGNDNLVKHGHSGDMYYGVLESGFQVVIKKIDLKTSKKCQGELSFLTKHTHGRIVPLLGHLAKDEEELLVYKYMAKGDLTTALHKKSVEVEQGLRSLDWITRLKIAIGVAEALCFLHDECNPPLVHRDIQASSVLLEDKFEVCLGSLSEICTQQSAGSQSFFSRILRSSKSLDKNIPGPPASCSYDIYCFGKVLLELITGNFGASGSTNADSEEWLARTLDYINANDKEGVSGIVDPTLVVDDDHLEEVWAVSIVAKTCLNPKPSRRPLARYILKALENPLRVVREQEEFQSSPSHLRSTPSQGSWRFAFHGNKYHSWEAMPTSGQALARKNTAKSQGTEGSDEDEENSFSFKRASRDDFPDPIEFEGGVVVKEYPQTS

SEQ ID NO: 315468 - protein, 156 aa, Zea mays
  unsure (1)..(156): unsure at all Xaa locations
  Clone ID: MRT4577_50770C.1.pep
LKVELKKGHLFEGWTEGVINFPPTYKYKXVNSEKYISDDNKSQTLSSNNAGRRTPAWYILFYMIYALLVIFFYXEIIIVEVMFVYLKLLVACSNXCDRILSHGKGMRLLSYKTVDLRLSDHRPVTAVYMADVEVFSSKKLQRALTFTDAEAEEQLS

SEQ ID NO: 315469 - protein, 68 aa, Zea mays
  Clone ID: MRT4577_50771C.1.pep
RYVCNIVLRRTSWLCSVSLTVELVLLCEPPCRRSIMFGAFHLSAVGSPADKLYVQSLAQCSALTPIRV

SEQ ID NO: 315470 - protein, 65 aa, Zea mays
  Clone ID: MRT4577_50772C.1.pep
QKKRLTRLIEKGNGRQNNNQSVQPNGLLGQNCNNFRNGGYFGEGPQKNGGNRPGALLNNLTPGFF

SEQ ID NO: 315471 - protein, 203 aa, Zea mays
  Clone ID: MRT4577_50773C.1.pep
MWAPGGSSSPTCLEDYIAGQHQLEHDDDEADKLMKQVCRSQSVPATSVARRRSSGTTAKGKGSRRVADSSSLRRLRVVPLRVPLPPPPPLQDEAARGTADAIATTVTTGEEEEDQDIAAEEAVCRICMVALSEEAVFKLECCCKGELALAHRACAIKWFSIKGNGSCDVCSQEVLNLPVTLRRLPDHPSVIQAAAALAQAQAQ

SEQ ID NO: 315472 - protein, 291 aa, Zea mays
  Clone ID: MRT4577_50774C.1.pep
MEAPLLLPISTASSCIEIAEGAVPSGPRARSSSSMPSAQSFVLRVVTVVAVACASLFAQHEAGKGFAVSVANDLPRGSAAARRFDLLLVSNGRAERALLRASRAVERALFPDPSFPRRQVRRVTVRMAARNLTGAAVHSAAPGEYVVSLGPGLASSAPAAEAALRRAIARVWLWDGRGAAPARVTESMVDYLASAAAEVEVEVEAPPSAAGCGMSARLLRLLEARREGFVARLNRAMRDRWSDAAVDAALGAPARLACHDQKKGATALTGRGTTTSPRWTPDAARGSSVAT

SEQ ID NO: 315473 - protein, 130 aa, Zea mays
  Clone ID: MRT4577_50775C.1.pep
LVVKETLRLHVPVPFLLPRECREACRVMGYDVARGTKVLVNAWAIARDAAYWGDPEAFRPERFEGGGGAVDFRGADMEFIPFGAGRRMCPGMSLGLVNMELALAGLLYHFDWTLPDGDGEVLDMSEAFGI

SEQ ID NO: 315474 - protein, 79 aa, Zea mays
  unsure (1)..(79): unsure at all Xaa locations
  Clone ID: MRT4577_50776C.1.pep
LSDSARGLGGVMGLPALAAGPXGRPGASRGWPSWPGWPAGGPWALRWCLSGSARPXFCVCGGFLSASVGLRLRFGRPCL

SEQ ID NO: 315475 - protein, 52 aa, Zea mays
  Clone ID: MRT4577_50777C.1.pep
GRGGPRATSSAKAPIRLSGILQLNKKTLNINFSRQAYYKKGWQLGKPLYSDD

SEQ ID NO: 315476 - protein, 105 aa, Zea mays
  Clone ID: MRT4577_50778C.1.pep
PPPPPPPPPLKKQGDIFHELIELEFWFLEPKHHRSNNQIYGTRKMTTSYTLSYKKIPFLQGVKKTPKNRSYDKITALLTYLNKIPHQHHKHFSTSSNFRALRGHC

SEQ ID NO: 315477 - protein, 124 aa, Zea mays
  Clone ID: MRT4577_50779C.1.pep
EGVRLELCTPDRPGLLSDVTRTFRENGLLVAQAEVSTKGDMATNVFYVTGTTAGQAVQQNAIEAVREKVGVDCLVVEEHRPQLYQKARGQDDRDDRNGAGIGLFYLGNLVKRNLYNLGLIKSCS

SEQ ID NO: 315478 - protein, 90 aa, Zea mays
  Clone ID: MRT4577_5077C.1.pep
IFYGNFYFRIPITINGVNKEGLIRAYEYFNNCFKDPLAFTVVIVGKIDPAISLPLVLQYLGGIPRVQDATQPLSRDDLRGLPFKFPATII

SEQ ID NO: 315479 - protein, 96 aa, Zea mays
  Clone ID: MRT4577_50780C.1.pep
SVLSSSKILALMSNALVFACRRDSSRATFSLSASISNRKVPASAYMLVPAPASGIAQMAVTSETMASSAAVEYAHRSGEAEVQKKRRRSGAECRRV

SEQ ID NO: 315480 - protein, 91 aa, Zea mays
  Clone ID: MRT4577_50781C.1.pep
YRDMAQEDTNSAVDKMGTSQAPRQHLSQNRASLTSKVTAKIRKILLKAKAPRKKKTTMYPVLAAALKFHKDDDVYPAAAGVKQQQQHNKEM

SEQ ID NO: 315481 - protein, 40 aa, Zea mays
  Clone ID: MRT4577_50782C.1.pep
CAQSASSTPSIRGFRLGTKVVVWVRRCFAMAHECRSHVPR

SEQ ID NO: 315482 - protein, 109 aa, Zea mays
  Clone ID: MRT4577_50783C.1.pep
HNPRTYLTHFSLSPPILLEVLQNRAVHSNFAITNTTMKHHSSIEHTIAPDQAPAASYTYPPPAPASMTWPHLTPEHTQDVHIKTLITNPTYILYHYCLPYILTQQRNII

SEQ ID NO: 315483 - protein, 76 aa, Zea mays
  Clone ID: MRT4577_50784C.1.pep
CGWVLLAWFGRLGFLRWSVGGVFLCTVGVGSWGSWLFVVGVPFGVSVVGCCGVFGDPACFFWPRCLAPALPWLTTW

SEQ ID NO: 315484 - protein, 74 aa, Zea mays
  Clone ID: MRT4577_50785C.1.pep
PAPPTTSPCPACPNTEDFGSSVSYTIGCVHWLSSAFSRSNLLSWFTYDNRHFQCLANPKAISQVFQYAGIATSI

SEQ ID NO: 315485 - protein, 60 aa, Zea mays
  Clone ID: MRT4577_50786C.1.pep
RKRGAHPLLRGCTIKKRGKQRAPTNLAILLRPGPVRLTYSNGHGNWWESSFMMQQLFFIV

SEQ ID NO: 315486 - protein, 70 aa, Zea mays
  Clone ID: MRT4577_50787C.1.pep
VSRKTASCLASSNGTSEASNNNAYLCTRYLSASLQITIGAHSCGDLKHVHSSLEEYTSLSSSADLLNSNG

SEQ ID NO: 315487 - protein, 77 aa, Zea mays
  Clone ID: MRT4577_50788C.1.pep
LPLVCFLKKKKKKKKKKKKKKKKKKKKKKKKKKKKKKKKKKKKKKKKKKGGALFKETKFYSPVFERKNFFLGAPKIK

SEQ ID NO: 315488 - protein, 51 aa, Zea mays
  Clone ID: MRT4577_50789C.1.pep
CLGHLQPGEAKTKLILVPLYILHSSVRWNQILPCLYGTINAGPMMFLSAIS

SEQ ID NO: 315489 - protein, 57 aa, Zea mays
  Clone ID: MRT4577_5078C.1.pep
RGDVEYMIIKPDCLEHVVMGINGQLPGPTIMAEVGDILDIALTNKLFTEGTVIHWDG

SEQ ID NO: 315490 - protein, 412 aa, Zea mays
  Clone ID: MRT4577_50790C.1.pep
MRLPPASAPAASPSRGPRRRSPLPPMRAPLPSAAAPDSPGRGLKRKLGCIDSATRMGRKKRLESEYELGAEIGQGKFGSVRICRAKVGGDEFACKELPKNGEETVHREVEIMQHLSGHPGVVTLRAVFEDADKFYLVMELCSGGRLLDEIAREGKFSEQRAAIVIKDLMAVLKYCHEMGVVHRDVKPENILLTKAGKVKLADFGLAARVTNGQKMFGVAGSPAYVAPEVLSGSYSEKVDIWGAGVLLHVLLHGSLPFQGGSLDAVFESIKTLELDFSSTPWESISVLGRDLIGRMLNRDVSCRMTADEVLSHPWVVFYTECPLKVVAANLCLPNKVIAPKIPWGRHKSECDSLSDASQRSEDQDECGIVDALAAAITRVRISEPKRSRLCSPAITIQQECSSNLKNNLCTAF

SEQ ID NO: 315491 - protein, 103 aa, Zea mays
  unsure (1)..(103): unsure at all Xaa locations
  Clone ID: MRT4577_50791C.1.pep
ISVLRFSQLCLFFLFQFLFWSVILDHCRGGKKHYLNPCGNAWALHYERMMWQFFLVWVPLYPNILFTKTYYLDYFXSWYFVCFNAXILMSXILFLDLPFNASK

SEQ ID NO: 315492 - protein, 57 aa, Zea mays
  unsure (1)..(57): unsure at all Xaa locations
  Clone ID: MRT4577_50792C.1.pep
MSWQAYVDDQLLCDIEGQHLSAAAIVGTYGSIWAQSENFPELEPEEVAXMIQDFDEP

SEQ ID NO: 315493 - protein, 85 aa, Zea mays
  Clone ID: MRT4577_50793C.1.pep
QFPIACCSGFPQPGNGYKFHAILTDEAAQVAPLLLAQQLASQKQEGKVNRFSPLSTVPWQQSSAVRFTPKLPSSGINALFYSWSL

SEQ ID NO: 315494 - protein, 108 aa, Zea mays
  Clone ID: MRT4577_50794C.1.pep
PIQQNDHEFFVTESSWVYQTCKFPSIFMTVESGKKKHAPPRSGRWTRREREREREKDPWRRFWMSSAARSGSVLWLPFFPAPALVVSGERRNRRKRGAAGLCPFLPGR

SEQ ID NO: 315495 - protein, 350 aa, Zea mays
  Clone ID: MRT4577_50795C.1.pep
MAPRQPLLPSFLYAASSGVNGSREAPPVVAGAPSEPLGKIEMFSPAYYAAGALGGAAACGFTHAAVTPLDVIKCNIQIDPAKYKNTSSAFSVVMREQGLRGFFRGWAPTFVGYSAQGAFKYGLYEFFKKTYADMAGPEHAARYKTLIYLAGSATAEVFADVALCPMEAVKVRVQTQPGFARGLSDGFPKIVRAEGYAGLFRGLVPLWGRQIPYTMMKFATYENIVEMTYKHLIPTPKDQCSKPLQLGVSFGSGYVAGVFCAAVSHPADNLVSFLNNAKGATVGDAVKNLGLLGLFTRGLPLRILMVGTLTGAQWVIYDSFKVMIGLPTTGGAPAPATVPMEGLGELKASA

SEQ ID NO: 315496 - protein, 109 aa, Zea mays
  Clone ID: MRT4577_50796C.1.pep
MGEAHSDEFCHCQGCAGKYALLRDEENPRLAIFERRLPCCGCGIGWSSFLLGFLCPLIWYFAAILYCCKYYNKDPRERPGLAASAVAALIFTVLAIIALSVALIICVYK

SEQ ID NO: 315497 - protein, 114 aa, Zea mays
  Clone ID: MRT4577_50797C.1.pep
MLGIRLVGVFKKILGKSTGYLNDQESQKALVFCCEFIKLCVPATVMHAVLQLSARLTKTHALAALFFESGGLASLLNLPGTCIFPGFETLASAIVRHLSVFLLVLQQDYIQSPS

SEQ ID NO: 315498 - protein, 125 aa, Zea mays
  Clone ID: MRT4577_50798C.1.pep
CPGSFSDRRRSLPMFRRTVNDKNRCATRDHGPVYPHRSRDVGLLRRASGRTTATRILSSTRETGPLPRTSSSPTTRASWVMRTKTKWHGPLYGAFMPTGSSRRRVSDVTVQKDISMRIFEGFSVT

SEQ ID NO: 315499 - protein, 45 aa, Zea mays
  Clone ID: MRT4577_50799C.1.pep
CVVILSIRFYVRLNFISYMHVFDVVFNFVQCNHSYGVNASFNLLS

SEQ ID NO: 315500 - protein, 87 aa, Zea mays
  Clone ID: MRT4577_5079C.1.pep
FSPRLVVESSMPGLTSWWVFVCIFLPCSSFSFPIDQPFYPAFFFNALGFFLKKKKKKKKKKKKKKKKKKKKKKKKNNGRPLGRVCRP

SEQ ID NO: 315501 - protein, 122 aa, Zea mays
  Clone ID: MRT4577_507C.1.pep
MEEQKDPSTAPGLGLAAPIKSLRIGEEGLLPIVASEEIVPGALLGGRALREWRRAVVHGTDVIVSRQRRVDNPPAATRRANLHAYALLRHPHIVTLLAATTHGEVITVVCDYDLLPAPGPNP

SEQ ID NO: 315502 - protein, 119 aa, Zea mays
  Clone ID: MRT4577_50800C.1.pep
MSRHPEVKWAQRIDKVYITVQLPDAKDAKVNLDPDGVFTFSGSAGTNLYELKLDLNDKVNVEASKISVGVRSIFCIVEKAEAKWWKKLVRDDQRAPHFVKVDWDKWVDEDDDGMLCTFL

SEQ ID NO: 315503 - protein, 62 aa, Zea mays
  Clone ID: MRT4577_50801C.1.pep
LPPGRLGRLVLAPTAPSTGWPPRSAAPGQPHWNLTAAAAATRTRRGSSGTAYMASPVPRIGI

SEQ ID NO: 315504 - protein, 65 aa, Zea mays
  unsure (1)..(65): unsure at all Xaa locations
  Clone ID: MRT4577_50803C.1.pep
TTSGRGASRLPRSSLVRSNKTCLLRNQEALNSRFCRLSTQTPCTFFVKPPNSILWGGGGNLHXTS

SEQ ID NO: 315505 - protein, 202 aa, Zea mays
  Clone ID: MRT4577_50805C.1.pep
NFHMAIAAGVAVGVVLHAGAHLTCDFPLLLHASDAKYEPMKPFFGETRPPNYWWFVKGTAGWTGIVMVVLMSISFVLAQPWFRRNKLKDTNPLKKMTGFNAFWFTHHLFAIVYALLIVHGTSLYLTKEWYKKTTWMYIAYPVFLYSCERIVRLFRRHDSVKIQKVAVYPGNVLALYMSKPPGFKYRSGQYIFINCGAVSPYE

SEQ ID NO: 315506 - protein, 157 aa, Zea mays
  unsure (1)..(157): unsure at all Xaa locations
  Clone ID: MRT4577_50806C.1.pep
XASATXTXTSGGGGXQPPPPXQQPPPXQXPRGXXPXXXXXPXXXHXPPPXQXPPPXQXPPPPSHXPTQPPRPQPQPQPHPXPGQQPQPSPXQXQGTRSKGNTPNQGQSKKNPRQKSNPTATPNXTTKSQTKRPKXRQQHRQEKPKDRNQTKGKKETT

SEQ ID NO: 315507 - protein, 116 aa, Zea mays
  Clone ID: MRT4577_50807C.1.pep
LASWKPKRGWMPKCFFRYFPPETLLLLGLGRVLSPMISVFLPQLKGDFSEEKGPHALQGFFPAKIPGAPAALGADPMVPPPPWLGVVPPAFNPPFPVVVFLPLVMVGNAFNKKWGF

SEQ ID NO: 315508 - protein, 43 aa, Zea mays
  Clone ID: MRT4577_50809C.1.pep
QNVYQCLFNNSCATKAIMGSSSRADGVGEGLKLAKSSFDDVRY

SEQ ID NO: 315509 - protein, 68 aa, Zea mays
  Clone ID: MRT4577_5080C.1.pep
AVCLATSLASFLLYRRSVMSCPPSPWVSVSSLAFLLLCLVFVLFSQFSSMFVLFFFLSLSWRSRSSFS

SEQ ID NO: 315510 - protein, 120 aa, Zea mays
  unsure (1)..(120): unsure at all Xaa locations
  Clone ID: MRT4577_50810C.1.pep
MASNILYLHALIALFASATNAFIIPQCSLAPGSIITQXLTSYLXMSFEHPVVQAYRLQQAIAVQRLXQPNSQVQQHNLXHLTLHTIASQQKQQFLPELSHLDMVNPVGYLQQQLLASNPL

SEQ ID NO: 315511 - protein, 205 aa, Zea mays
  unsure (1)..(205): unsure at all Xaa locations
  Clone ID: MRT4577_50811C.1.pep
MSRHPEVKWAQRIDKVYITVQLPDAKDAKVNLEPDGVFTFSGSAGTNLYELKLDLNDKVNVEASKISVGXRSIFCIVEKAEAKWWKKLVRDDQRAPHFVKVDWDKWVDEDDDGADINMDGMDFSNFGGMGGMGGMGGMGDMAGMGGLGGMGGMGGLGGMGGMGMDDFEDESDDEEEVSKPQAADKAVEAEETESAETKIEAAQSS

SEQ ID NO: 315512 - protein, 41 aa, Zea mays
  Clone ID: MRT4577_50813C.1.pep
HSYKDAGRHTLRRYTAGVRTKNILDDRYLRTARLSWGVDAK

SEQ ID NO: 315513 - protein, 58 aa, Zea mays
  Clone ID: MRT4577_50815C.1.pep
GYMIYFMLITDVAGELVLNYSISRTENVMYFMHVNKGMTCSCSTENGNWKSNTLCIPK

SEQ ID NO: 315514 - protein, 56 aa, Zea mays
  Clone ID: MRT4577_50816C.1.pep
FIKILGFLSLAYSKILNGYFNLCIVYLILIEINRFIPKTLPLLFFITFLYRCTICI

SEQ ID NO: 315515 - protein, 81 aa, Zea mays
  Clone ID: MRT4577_50817C.1.pep
TVKIAHEWKFQRTSIYVHCYKTTNINFVYSGFKKKVEILCKELEHKVHLVKTILRLNTRSEPKLSKCTLLLGFSWCTLFTL

SEQ ID NO: 315516 - protein, 117 aa, Zea mays
  unsure (1)..(117): unsure at all Xaa locations
  Clone ID: MRT4577_50818C.1.pep
KGKIEAREGHNRSNEAGSTVGGKGQTLSCKQYAEKAYMNMTLXLHNESNVDQKVDDDVQQGDLHACVQTHDHTQLAKVLKHTMKEKRMELADPADDTLPKDRHDAEKELLTVLRTSK

SEQ ID NO: 315517 - protein, 330 aa, Zea mays
  Clone ID: MRT4577_50819C.1.pep
MQQPQAHNHYSYSTASGPSPTLQAASAMPSSAQVLLCLAAVLAAAAATTAEAHSQCLDNPPDRSIHGRQLAEAGEVVHDLPGGLRAYVSGAASSSRAVVLASDVFGYEAPLLRQIVDKVAKAGYFVVVPDFLKGDYLDDKKNFTEWLEAHSPVKAAEDAKPLFAALKKEGKSVAVGGYCWGGKLSVEVGKTSDVKAVCLSHPYSVTADDMKEVKWPIEILGAQNDTTTPPKEVYRFVHVLRERHEVPFRRQDRRDGPRLHGQLVQQAPQLNEACTAPTRLNSINHSSAVIFCFDSWLPRLIFMATTSSTTVISLIFFVSMYFFSFLFAFL

SEQ ID NO: 315518 - protein, 190 aa, Zea mays
  Clone ID: MRT4577_5081C.1.pep
MVVRASSRRQSALLLLVAVLVLFASTAMVQQQRIARPPCSPPGRLFQRCTNLPVRGANLYWTNHAANAFRAPQATSGWVAGGVNTELASTMAGRSLFIASHSQGGNSAVPVLMTYLESTATTPSGSPCPLGRPRSTRAARTPSTRRWRCRGTARCRTLCGIRAALWRGNRDAQLGARPRRSCGKSPRTGR

SEQ ID NO: 315519 - protein, 246 aa, Zea mays
  unsure (1)..(246): unsure at all Xaa locations
  Clone ID: MRT4577_50820C.1.pep
LLALAAHASDPKEAERLRHLASPAGKKEYSQWIIASQRSLLEVISEFPSAKPPLGVFFAAIAPRLQPRYYSISSSPRMAPTRIHVTCSLVHGQTPTGRIHKGVCSTWMKNSTPSEESKECSWAPIFVRQSNFKLPADPTVPIIMVGPGTGLAPFRGFLQERLALKETGVELGRAILFFGCRNRQMDFIYEDELNNFAESGALSELVVAFXSREGPTKEYVQHKMAEKAAELWSIVSRAGYVYVCGD

SEQ ID NO: 315520 - protein, 168 aa, Zea mays
  unsure (1)..(168): unsure at all Xaa locations
  Clone ID: MRT4577_50821C.1.pep
MPSSAQVLLCLAAVLAAAAATTAEAHSQCLDNPPDRSXHCSDRSIHGRQLAEAGEVVHDLPGGLRAYVSGAASSSRAVVLASDVFGYXADKVAKAGYFVVVPDFLKGDYLDDKKNFTEWLEAHSPVKAAEDAKPLFAALKKEGKSVAVGGYCWGGKLSVEXVGKTSDV

SEQ ID NO: 315521 - protein, 94 aa, Zea mays
  unsure (1)..(94): unsure at all Xaa locations
  Clone ID: MRT4577_50822C.1.pep
HHRPFRRQDRRDGPRLHGQLVQQAPQLNEACTCTXVTRLNSINHSSAVIFCFDSWLPRLIYXMATTSSTTVISLIFXRTFFVSSNSLYFFFAFL

SEQ ID NO: 315522 - protein, 74 aa, Zea mays
  Clone ID: MRT4577_50823C.1.pep
NDEWKPHAAKAASSSYPDDTMFQHSILLRQMHAPHLTTPTLGPTPPSTGLNLTKPPDLNRALPDHNTMALGDPP

SEQ ID NO: 315523 - protein, 324 aa, Zea mays
  unsure (1)..(324): unsure at all Xaa locations
  Clone ID: MRT4577_50824C.1.pep
MPSSAQVLLCLAAVLAAAAATTAEAHSQCLDNPPDRSIHGRQLAEAGEVVHDLPGGLRAYVSGAASSSRAVVLASDVFGYEAPLLRQIADKVAKAGYFVVVPDFLKGDYLDDKKNFTEWLEAHSPVKAAEDAKPLFAALKKEGKSVAVGGYCWGGKLSVEVGKTSDVKAVCLSHPYSVTADDMKEVKWPIEILGAQNDTTTPPKEVYRFVHVLRERHEVPXRQDLPGSRARVRLQVQHHRPFRRQDRRDGPRLHGQLVQQAPQLNEACTAPTRLNSINHSSAVIFCFDSWLPRLXFVMAKTSTTVISLIFCLFKLSVFFFFAFL

SEQ ID NO: 315524 - protein, 71 aa, Zea mays
  Clone ID: MRT4577_50825C.1.pep
IPGSLDCQERGPLSYSFCSPWWRWLRYSRTAHAPPLSPYKPARSTSLATWSPPPTLPPSMTCRSTSTVVTT

SEQ ID NO: 315525 - protein, 491 aa, Zea mays
  unsure (1)..(491): unsure at all Xaa locations
  Clone ID: MRT4577_50826C.1.pep
MQGKTSMMGSNARPHAVLIPYPAQGHVTPLLQLAKVLHSRGFFVTYVNSEYNHXRLLRSRGADSLAGLDDFRFETIPDGLPPSGSDDDVTQDIPALCESLSRSGAAPFRDLLARLNGMPGRPPVTCVVLDNFMSFAQRVASEMGILAVVFCTMSACGFMGYLHFKELMDRGYVPLKDESYLTNGYLDTVLDWVPGMRGIRLRDMPSFIRTTDPDEFMVHFDSGEAQNARRAQGIIVNTFDALEQDVVGALRGVFPRVYTIGPLLTFARAMARPDASAICGNLWKEDLSCLGWLDAQGPGSVVYVNFGSITVMTPAQLAEFAWGLANCGRPFLWVIRPDLVTGEKAMLPEEFYAETRERGLFLSWCPQEQVLSHPSTGLFLTHSGWNSTLESIRAGVPMICWPFFAEQTTNCRYACANWGIGLEIDNNVTRDEVARLIEEAMDGEKGKDMKAKATVWKEKAVAATESGGTSSVSIDRLVEFLLEGNVPTAAG

SEQ ID NO: 315526 - protein, 82 aa, Zea mays
  Clone ID: MRT4577_50827C.1.pep
PWSRICCASSCSGRALRPWRYVGSLEWASTCVYVYLFMFLRLLVGLRILMCLFVSCFFFCLIAPPVCLSMFDFVMCGQIRRW

SEQ ID NO: 315527 - protein, 155 aa, Zea mays
  Clone ID: MRT4577_50829C.1.pep
KKKKKKKKKKKKKKKKKKKKKKGRPKKEGTELTAPGSQPPTPPLGPPKFNPRAAVPHRRDGKTPGETPRSRPAAHPPFTPRRHNEEARPGGPPQQLFQLNGKGDPPWAAPLTPATGAGPPRGTTILAPTQGPAPGPDSPAFLAQLGGLPRHAWRG

SEQ ID NO: 315528 - protein, 89 aa, Zea mays
  unsure (1)..(89): unsure at all Xaa locations
  Clone ID: MRT4577_5082C.1.pep
EHSSSFANTSITPILISQVGAADYIALARNYHTIFISEIPAMSMKIRDKARRFITLIDELYNHHCRLICLAASSIDDLFQGTXEGPLFD

SEQ ID NO: 315529 - protein, 88 aa, Zea mays
  Clone ID: MRT4577_50830C.1.pep
MGRWLKPDVYPLIGAMSLVTGMCVFQLTRNVFLNPDVRVSKSNRQSAVPENEEEGERYSQHAFRRFISAHRPEVFPAINRFFSGFSAK

SEQ ID NO: 315530 - protein, 68 aa, Zea mays
  Clone ID: MRT4577_50831C.1.pep
YHHFQFAFNQIRRAGVVQNSNFQASENESEKKEKNGQLIRQPPHWRRCFQRKKQNQLNQRAAKAVLSI

SEQ ID NO: 315531 - protein, 61 aa, Zea mays
  Clone ID: MRT4577_50832C.1.pep
MGIFRKLACSYSQRVCMLRTMVAQLVKHERIETTVAKAMEVRRKVYQMRQLEKEVLSMQQD

SEQ ID NO: 315532 - protein, 237 aa, Zea mays
  Clone ID: MRT4577_50833C.1.pep
MSSHGDPRLLYTIGGIKAYHIQQGEETSLTPSGPQTLSLLMVPTNSPFADSGARGQNEEDFYLHLNLPPELDLPLPATTQIYHQPPRSYLIPRWDLGPDSHAFTRIEFPPIGKGSNSVTQEDIDTFETILAQCTAFLERAQAPSHEKGKGDVKAYNPQNYRPGEGYASSGGQGEVVLVDEENGSIVGELAEGAQVHADPAIKQGSKNPVEIVVSPDGQRIDIRPLRRRLPLTWPVIP

SEQ ID NO: 315533 - protein, 73 aa, Zea mays
  Clone ID: MRT4577_50834C.1.pep
TGVAGSNDSICTYVSIDPYVVVYTVQDVLATVQLVIYSVCVISLFALSLWFILFVKRSKQFSSPVKRTKKKTK

SEQ ID NO: 315534 - protein, 171 aa, Zea mays
  Clone ID: MRT4577_50835C.1.pep
ASIDDSMEWFEDKVRTVSLLEANGFSVQSIQSVLTELIEIKSERARIHGEIGKLSSKLAENTASSSRVGALLDEKDGAAAQLEQELGRIRQESQKMAQEKEKIDAEGVSIKTACSGYEDLCSDAERKFKEVLAQLRRKGARAVVLSMYRSGLRSMCCGYFCASRSVSFMYL

SEQ ID NO: 315535 - protein, 264 aa, Zea mays
  unsure (1)..(264): unsure at all Xaa locations
  Clone ID: MRT4577_50836C.1.pep
MNNSLIEPNGNDDMCTDHAATKLAKSNHVMETATLPIDGSSQCIIDISPLRSCSALERSLPSPPQASFVKRSPVWRVVDAKHVFKELPQQPHFLPLQKYPPTLREGIALGMMVSFSELVKFTMEASIDDSMEWFEDKVRTVSLLEANGFSVQSIQSVLTELIEIKSERARIHGEIGKLSSKLAENTASSSRVGALLDEXMERQLSSSKNSXIRQESQKMAQEKEKIDAEGVSIKTACSGYEDLCSDAERKFKEVLAQLRRKSAR

SEQ ID NO: 315536 - protein, 43 aa, Zea mays
  Clone ID: MRT4577_50837C.1.pep
QLSCGGCHSAQTKSDDDVPIMLWVVSSDVKGHESVVIWLHPSG

SEQ ID NO: 315537 - protein, 201 aa, Zea mays
  unsure (1)..(201): unsure at all Xaa locations
  Clone ID: MRT4577_50838C.1.pep
MSAWLKHSVDSIRGNSKKSEQYWSDVAQEYNLTTPKNRQRTKNQVKERWQWHKINKWASMFNDCYLKVRXRRIYTGGYSDEMWLEKXHQLYEQETKGPHFILMNVWNMVRSLAKWIXYNNPIQTKRKETQKDNNVEGCGLDDIDLPRSMGQKKAKXMLHVKEKEKQKIXIDIDELDRFEKIQNDVRANRLKLLEMQGKLNN

SEQ ID NO: 315538 - protein, 64 aa, Zea mays
  Clone ID: MRT4577_5083C.1.pep
MGDRSSSQHMGASAGLVAVLLLLVQGAGTVPAGASYAEVTIRRGLALSRHTHMGSARAPPPLRS

SEQ ID NO: 315539 - protein, 146 aa, Zea mays
  Clone ID: MRT4577_50840C.1.pep
LHEAAIWERMRTWLSGQGSICMSISLASAHPPRGRPSCGLTHLLRNQRRRKSSLVLPYSKVKAGLPTGCLLGGCVGRSHSVKFRDTDCRQGVPNLGTGGGSFTFCLSFSLGCGRDIHFQGGGGSTKCIVVPLVTSHLFLIKEAAEP

SEQ ID NO: 315540 - protein, 139 aa, Zea mays
  unsure (1)..(139): unsure at all Xaa locations
  Clone ID: MRT4577_50841C.1.pep
AQIXXIXXCXXSTXXPLFYXLKNLXPLRISPNNKXSXIXXTXHCLPLLLPQQXPXQQSXFFCXHAQVXAKPFRPPGGXAAGDQXPFLKKNHEQIXTELNLRASLFXFFFXYHFRVXSYLSPXTHFLXKYLATWXSQXIX

SEQ ID NO: 315541 - protein, 41 aa, Zea mays
  Clone ID: MRT4577_50842C.1.pep
TWFYLDWAAHIYIPQNVEEKSFQQLNTHYMIITATNNFKHG

SEQ ID NO: 315542 - protein, 53 aa, Zea mays
  Clone ID: MRT4577_50843C.1.pep
RNKIFFTLPKRPKKWPPLQTGIRVFFIRRCPIEETGLLCGFYPLFKPRWDNSS

SEQ ID NO: 315543 - protein, 48 aa, Zea mays
  Clone ID: MRT4577_50844C.1.pep
GLDAAQLYGTNCANIHQSGGPNTIYIEGQFSPMGSGLKIHGGEIHNVT

SEQ ID NO: 315544 - protein, 175 aa, Zea mays
  Clone ID: MRT4577_50845C.1.pep
MARSMVLLAREIDFSPHDEGRQFRWGFYEGMLPTRKAMREDVIRYLRTFKARAVVDNPPELSFLHILVPPQSRPLPPTCMGLDSARISSTDKNLVALYAGGYRPGSDLLGGYLIYDASNDSLSVIPPLPSDDLRGAMGHQSAVIMCDPHGEGYLLAELIKKGGGLAGVWLWKSSA

SEQ ID NO: 315545 - protein, 79 aa, Zea mays
  Clone ID: MRT4577_50846C.1.pep
LWRPCGALMSPPIFPYSPMFWLQPHHSLYQLCSYLPMDRHKASFKSMFGHKLMVLSSAIMYSFLPRYQLWAALNSFRSK

SEQ ID NO: 315546 - protein, 70 aa, Zea mays
  unsure (1)..(70): unsure at all Xaa locations
  Clone ID: MRT4577_50847C.1.pep
IGILPGRLELGVASASQQGWFGPVALVNFAVLSVLSLXTLXNCWGGGGGXYXXIXYXXXKKKKKKKXLPF

SEQ ID NO: 315547 - protein, 146 aa, Zea mays
  Clone ID: MRT4577_50848C.1.pep
LHYTTHLSFESTTRHVVSDRRSLLLLPILPLIADPPPSNSLSARPRRGLMHPWHCIRVLVSSSSDTTSRKAEHIGRTRPWMRSSMFKAACECLTRKLRIPNWKAPLPRKNRHLMIAYTCLFPEDDRSRRYAICCAVDHLNRHCTRC

SEQ ID NO: 315548 - protein, 100 aa, Zea mays
  Clone ID: MRT4577_50849C.1.pep
DHTRATPAYHCVALPGVGATHARIINTYSRWWTTAWRSYSRLIKATSISSSTMHDAGAVQLARSLAGTSVNSVSASRELCVLSLMVEITVASRTRQTDRD

SEQ ID NO: 315549 - protein, 87 aa, Zea mays
  unsure (1)..(87): unsure at all Xaa locations
  Clone ID: MRT4577_5084C.1.pep
MSKDKHHKHEHHLRSCCGCMESCLLALVLIGAFVSLLGYLNLRPSKAAFYLEDLQVGRAIGVGKPSVXVRGRGTLPSRNRNDAGGIF

SEQ ID NO: 315550 - protein, 74 aa, Zea mays
  Clone ID: MRT4577_50850C.1.pep
GELTRENIASPRQSYAILDLHAHSTHAAPCTLRRLTLFFLTLVASTGRRRRRCWTPGAPTAGTSWATPGRTPGP

SEQ ID NO: 315551 - protein, 197 aa, Zea mays
  unsure (1)..(197): unsure at all Xaa locations
  Clone ID: MRT4577_50851C.1.pep
MAECRIQDWKRASTPESVSRHETSIPRTKQRNIFSLLAQRELSPRTKNQAKNLWTKPPRLDACPIESKFWGTYAQHDLLSWAEAEFLHWWIPKYCPLTPSSKATIAAAFSTDGRVLASTHGDHTVKIIDWQTGKCLNVLLGHHRTPWVVRFHPQRSDILASXGSLDCEVRLWDAKTSRCTAELVFYRPXASFAFHAT

SEQ ID NO: 315552 - protein, 390 aa, Zea mays
  unsure (1)..(390): unsure at all Xaa locations
  Clone ID: MRT4577_50852C.1.pep
MAAPARRRSCISSGGAGAPPSAXCFASSPPSAARCEAGPRXMLKGMDYXYSEPEIXHDLRHVCVSSSXDWVQAQGFRPGQALMLWKCLYGNNVWAHFYDELAGLNKDFRKMITEHADLKALIVKDIHRIEPDVXQILVSIEDGSVIXTVIIPCTRGRTTVCVSNEVGWAMKCQFPFTXKGMGQPFHNIDNVIKASAIMVHEQGHFSPRKVTVSTSGFVPQLGTQLLAAASLNARTDEVRNWIMTINRKENLNLLLGTLRGELNLRKKNKXVLSEYAMLSGVNXAVDDAKSLXVELLQGIPCKXINLISLSSLDGSQSKPTSDDKMIEFGKLLIQGGLTVFVRXSRGDDQXMAACGQLREPGDYQLPLHRAPEKILRSSCDARQCITVNWS

SEQ ID NO: 315553 - protein, 85 aa, Zea mays
  Clone ID: MRT4577_50853C.1.pep
VPGLAQVMESHTMGFPVYGVFCDHRSSSCGQAFIILICSGLYKQPKRPCHAFWRGRWCNAAPLGTVGCGSLSGRPTCSSILAADT

SEQ ID NO: 315554 - protein, 69 aa, Zea mays
  Clone ID: MRT4577_50854C.1.pep
ISRGNFTLKRTPPPFHKNTLGGGVLFAIKNFFIQNIKRAILPTGAKGQSLGVKQNRVNYLHDHPDTGAI

SEQ ID NO: 315555 - protein, 122 aa, Zea mays
  unsure (1)..(122): unsure at all Xaa locations
  Clone ID: MRT4577_50855C.1.pep
VLCCYGAGRSTQPHPNPRRSSCSPQGKQSNAEPRAKRRSPAKPPAKRRVDKRDTEFCCSFCSRRSPVECRIDVNNVLGEPSCVVCQENLTTTVNALTEPIALYIERMDQCXRVTTVEGDHDP

SEQ ID NO: 315556 - protein, 55 aa, Zea mays
  Clone ID: MRT4577_50856C.1.pep
KRMDYYDSDHHEDFEFISGTRMRKLAREGQKPPEGFMAPKAWTVLVEYYKSLEKA

SEQ ID NO: 315557 - protein, 70 aa, Zea mays
  unsure (1)..(70): unsure at all Xaa locations
  Clone ID: MRT4577_50857C.1.pep
VDRRVREMIEYMDKVTKTVATEEHTVEDPIDESVAXTIVIGTLRASWRITSSIEPTDEGQGDDDRITDIM

SEQ ID NO: 315558 - protein, 60 aa, Zea mays
  unsure (1)..(60): unsure at all Xaa locations
  Clone ID: MRT4577_50858C.1.pep
FLISSYLSPLFLRYSRXQGVANLTLHFSDNLGGDTTKIYYIGXRGEATQDKKDXGGTIVL

SEQ ID NO: 315559 - protein, 62 aa, Zea mays
  Clone ID: MRT4577_50859C.1.pep
PRNKSRSRGPLTLSPPLIWRWLTPTLWGKNNVCAVNDLDQKKGFVLVSHKPGKRNRDCCFIK

SEQ ID NO: 315560 - protein, 208 aa, Zea mays
  unsure (1)..(208): unsure at all Xaa locations
  Clone ID: MRT4577_5085C.1.pep
PRPPGPVLVATSNHAPXELNQDGMQRDIFLXLLSKLDENCNEILVGTEKDYRRLIPTEGSTEVHYFWPATSDARSMYEAMWHDITDQSGGNIVSVTIPVMFGRSIEIPQSCNGVARXGAADYIAIARNYHTIFISEIPAMSMKIRDKARRFITLIDELYNHHCRLICLAASSIDDLFQGTEEGPLFDLESFQFETESEGTKLRRGCFG

SEQ ID NO: 315561 - protein, 32 aa, Zea mays
  Clone ID: MRT4577_50860C.1.pep
MALLMLLWFSICFSRALAVVQICVIQIFGREC

SEQ ID NO: 315562 - protein, 70 aa, Zea mays
  Clone ID: MRT4577_50861C.1.pep
QLLMSHMRSGPMPIPCASEPGSYECAAEVWPWSHAHDAHRHSNRISSATTISSQAPIKPTRVRGSVSGRI

SEQ ID NO: 315563 - protein, 84 aa, Zea mays
  Clone ID: MRT4577_50862C.1.pep
LEGRKGSKLVPQFFFLPPIGLKAVGEGINPRNLKALQGVPQRFIWFLRPPPPFGFQQLTKFAKCCFKPTFSQLPQFRRVVLKKN

SEQ ID NO: 315564 - protein, 52 aa, Zea mays
  Clone ID: MRT4577_50863C.1.pep
RTRVRRNRARPSAHQPKPRPVRPRSRRRRRRIPRTPSTRPLPGWTPTRWPRR

SEQ ID NO: 315565 - protein, 74 aa, Zea mays
  Clone ID: MRT4577_50864C.1.pep
YESILNALKLLRHSINFIFLKKSLLEPPGLFQFELHYLQAVAFHQHSINPVVSLLCWIPFPQFCFLLPWFMPLF

SEQ ID NO: 315566 - protein, 121 aa, Zea mays
  Clone ID: MRT4577_50865C.1.pep
ISNKYLKDPVIIDLVGDSDQKLPEGISLYSIASDNFGKPSIIGPLIKEHANGGKCIVFTQTKREADRLAYVMGRSYQCQALHGDISQNQRERTLSGFRDGRFNIPVATDVAARGLDIPHVD

SEQ ID NO: 315567 - protein, 103 aa, Zea mays
  Clone ID: MRT4577_50866C.1.pep
MQGEEEEAAHRRKQQYVRLRRGYGGGLKTTVLTTTRAADPDIRCPRRRGDGWAEVEMGEFHVAGDEGDAAAVEVRVQEVDCRRWKRGLVVLGVEIRPKQHTPC

SEQ ID NO: 315568 - protein, 141 aa, Zea mays
  Clone ID: MRT4577_50867C.1.pep
STDPLHTFPMRNTWLALCLAGASRLLLMIDTRTLVDVEARCPFLRALLRTGRGHGAHRRASRDHPVSPAYARCLCGCTYTTVYSGAETASCLSTTRGTTRPTWIAGTTTQACAGYTESTTTGTGYMRTAPARGSLQCYDLS

SEQ ID NO: 315569 - protein, 44 aa, Zea mays
  Clone ID: MRT4577_50868C.1.pep
IDLRTRLSCGNRDVQKKKNKERGRPGSDGTCGTPHRALMAVQGR

SEQ ID NO: 315570 - protein, 82 aa, Zea mays
  Clone ID: MRT4577_50869C.1.pep
VFLPDTAFTALATFKARVMASPFLAGPALGAISASRNSPELGSLPLESQHPPKYLVPHQIRPLPQTDRVGSPDGGLSRTPSA

SEQ ID NO: 315571 - protein, 79 aa, Zea mays
  Clone ID: MRT4577_5086C.1.pep
RGRRHFSFSPLIDGVTFCWKFPVAWEGAGQRWFVDLEDLGNAGRYQDGRRERRRRRTNCLLVCSKENRLTRLPLQVSEL

SEQ ID NO: 315572 - protein, 80 aa, Zea mays
  unsure (1)..(80): unsure at all Xaa locations
  Clone ID: MRT4577_50870C.1.pep
AAASAATQRGRAARASARNGTXKXNXANXATGGQKKXEXEDDQKPXAXXDRREXQEXXGEGGGEEXKXXXXKNRGGXXKQ

SEQ ID NO: 315573 - protein, 91 aa, Zea mays
  Clone ID: MRT4577_50871C.1.pep
IHTCLCDEDMLQLCEPTEREVRCPVLYVERGFRLTPNPQQYHLFLGTHSKNGAYEVLCGLVLGVIPKTLESIMYQPVCNVFYEPFFLEKIK

SEQ ID NO: 315574 - protein, 33 aa, Zea mays
  Clone ID: MRT4577_50872C.1.pep
FVDNTNCLSLFEKKPLGLSSLLDEESTFPRATD

SEQ ID NO: 315575 - protein, 49 aa, Zea mays
  Clone ID: MRT4577_50873C.1.pep
PTPVSASNAVGRNPRPRWSWHAGRWLTPEAADGHALPLHPIARCRYVMD

SEQ ID NO: 315576 - protein, 85 aa, Zea mays
  Clone ID: MRT4577_50874C.1.pep
LHKYKSRSFSWTLDCLSMLPSCLLSFSWKLLVHNGPINHGADLLFLAKAELLLLLRRAMATAAAPPHAAVADDADGEHERPLERH

SEQ ID NO: 315577 - protein, 79 aa, Zea mays
  Clone ID: MRT4577_50875C.1.pep
QGPDTRLEPCRSLQSLVVRLEVSKQGHPLVHHLDTKVLLSIDNSEGSYDLHQKWPRKKWLCTSRTITLVACCCLPDAGG

SEQ ID NO: 315578 - protein, 61 aa, Zea mays
  unsure (1)..(61): unsure at all Xaa locations
  Clone ID: MRT4577_50876C.1.pep
AGLKKLDDHLLTRSYITAYQACKDDLRVYTSFSDGPSSDYINAPRWPHHIDALXRLSAITA

SEQ ID NO: 315579 - protein, 96 aa, Zea mays
  Clone ID: MRT4577_50877C.1.pep
VSFAAFFREQETPQMLRFRTLLGGGRDPGQMKTGFQFTEMRNDALSVLYKSTRAIVETATRRGGACTNAGNVFNHTKTSSHKGVSQNLFTSGEAPG

SEQ ID NO: 315580 - protein, 69 aa, Zea mays
  Clone ID: MRT4577_50878C.1.pep
SPFYFKGAGSLSFIVDSKTQKQWAQKPMNTPVVRTQTHQGIPVASEAHTEKGRTDALLSRQETRISGDE

SEQ ID NO: 315581 - protein, 88 aa, Zea mays
  Clone ID: MRT4577_50879C.1.pep
LEPAGGRSPLPRDPLLAPTVYITCRPKATPRPAKCYLHIKNQPNTKLIDWPVGCEPNNRMYDVRRNRNAADEIPYWVPLVASEKENDS

SEQ ID NO: 315582 - protein, 613 aa, Zea mays
  Clone ID: MRT4577_5087C.1.pep
MILSRLHVRVTRRSPASAALRDAATRALASAGLFRGLHGGAAGDGASSEHGREPTGPLTLYRKLVSQGKLTHDSYQENVASELDNLLSRLQRYEMEMEDYHDKLYFWENSREKERRRLLVEEAEDKQRGGVWIDERRGFLDKLVARRRRGSIEPGVGKWVSYLNREKKLDTLVGHRPVAPVAPKGLYLYGNVGSGKTMLMDMFYGATEGVIKHRRRFHFHEAMLEIHDHMHDVWKRRDDDKSIHSSAFSWISSLPFDTKIKEWLIGEEKYKQQTQEKHILLAVADKFLVDRQANKTGASILCFDEIQTIDVFAVVALSGILSRLLSTGTVLVATSNKAPEDLNQDGMQRDIFLELWAKLDENCNEILVGTEKDYRRLIPTEGSTEVHYFWPATSDARSMYEAMWHDITDQSGGNIVSVTIPVMFGRSIEIPQSCNGVARFDFEYLCGRPVGAADYIALARNYHTIFISEIPAMSMKIRDKARRFITLIDELYNHHCRLICLAASSIDDLFQGTEEGPLFDLESFQFETESEGTKLRRDVLAEGNAGSGPSTTGLVAILSGQEEMFAFRRAISRLIEMQTPLYLERVQAVHPSFRRPGLASNNRPAVPQPAPVV

SEQ ID NO: 315583 - protein, 114 aa, Zea mays
  Clone ID: MRT4577_50880C.1.pep
MEKGSSGPSCRAAICGIVVLLCAVAFSCSLAAEFRKVKEKDMKLDGSLCSLPRSSAFELGVAAIAFFFVAQLVGTTAAPCTACAAEPMRSQSSAARHGVAFVALPSFSRRDMFR

SEQ ID NO: 315584 - protein, 202 aa, Zea mays
  unsure (1)..(202): unsure at all Xaa locations
  Clone ID: MRT4577_50882C.1.pep
MSWGIMWPLISTKKXSWYPETLPDSSLHGLHGYRVFLTISVILGDGLYNILKVLYSTIEAFVSRYRNRKANTLPVSNDGTPADATTETESFDDKRRLELFTKDQIPKTVALGGYVVLAAITIGCLPLIIPQLKWYHILVAYIVSPALAFCNAYGCGLTNWSFASAYGKLAIFSFGAWAGASHSGVIVALAACGVMMSIVGTA

SEQ ID NO: 315585 - protein, 97 aa, Zea mays
  unsure (1)..(97): unsure at all Xaa locations
  Clone ID: MRT4577_50883C.1.pep
QKERWHQQLQEASNCRTVIPLLLELESNIRGVAFSASWLKPIDDWPLEXLLVHQRAHLVLXQYQKRGVGGRRGRRRSVASESGTATATDEDNSWTWW

SEQ ID NO: 315586 - protein, 68 aa, Zea mays
  Clone ID: MRT4577_50887C.1.pep
FYLCRAIKEITPLWAPRRGVYPRVGCDHGRPPLPCSQGARMYLLIRSPGGMCSAYTVIMSVWVCVSNN

SEQ ID NO: 315587 - protein, 84 aa, Zea mays
  Clone ID: MRT4577_50889C.1.pep
ERHLHPFSHDTTRPAVLDNHRSAGRAPQRSAPLISDACRRSMLSTTATEQTRNVKPGATVPPRHELVSPRLHDTDGANNHDRRF

SEQ ID NO: 315588 - protein, 46 aa, Zea mays
  unsure (1)..(46): unsure at all Xaa locations
  Clone ID: MRT4577_5088C.1.pep
RXLVIRLEAAWGGKLTIHTSTQYDVVVFQGSVPPRHPAASDVGRRA

SEQ ID NO: 315589 - protein, 64 aa, Zea mays
  Clone ID: MRT4577_50891C.1.pep
LWKVGSVPFGGARLNSSPVSVSGDVLFNLFTRLTLLSPTVGALVHVLEAGTILQAYVVPRVCLC

SEQ ID NO: 315590 - protein, 80 aa, Zea mays
  unsure (1)..(80): unsure at all Xaa locations
  Clone ID: MRT4577_50892C.1.pep
LLFIASPXSLGSVVSSVFPRXAPNAGRLRPLAPRGLVVCRLAHPLGRPEDPGHVRHALLPLPEPRLHSCHQGRARHGLLP

SEQ ID NO: 315591 - protein, 51 aa, Zea mays
  Clone ID: MRT4577_50893C.1.pep
AQTLKANQFFPFSPFKTKTPPPPKTQTPPPRTFPNSLIHLAPHFSPLKTGH

SEQ ID NO: 315592 - protein, 140 aa, Zea mays
  Clone ID: MRT4577_50894C.1.pep
SPASGQITWWSTCANPGPPWASTSFSTCPIWPKGPCKSSLRTQKMLPGAVPLVGQTTGKCPFWCSAATGGTNFPAVGSGRIPIFATLPWKASMVANGFSVGSPTRNFQKRLKKPLRNPGCLNKNDFGLARPNDAKGCFPR

SEQ ID NO: 315593 - protein, 58 aa, Zea mays
  Clone ID: MRT4577_50895C.1.pep
SFVHKICPICLPLSLWAVISSWSMIYHRRSGLVVAYVQLYSLSVTTVSIRRSMLAPYV

SEQ ID NO: 315594 - protein, 78 aa, Zea mays
  Clone ID: MRT4577_50896C.1.pep
YSRICLPFLSQQLSVVSTCSHCESFGGGVGLQPRRAALQEHQLAQTSGVWRAPPYLNCRHPHPPRRLQTQVHRLPCPS

SEQ ID NO: 315595 - protein, 95 aa, Zea mays
  Clone ID: MRT4577_50897C.1.pep
KQAPRLLTAQPVVTQVGGGVCEREAQRGGDGHRQRQEVEHQKVGKRMGLVSRTCAAAFTECRYCATQEEEMRLQIQHPTPVSRLGPHGRMHLVQE

SEQ ID NO: 315596 - protein, 130 aa, Zea mays
  unsure (1)..(130): unsure at all Xaa locations
  Clone ID: MRT4577_50898C.1.pep
FYPSWSSVTSLALGRRRRPKPRAEDSDGLFVGDEHPDLYTTADAEDIQPLACHNGTGMAHAGSAAHDAPRAAPPIIVGRPRNSERMLRMRQKDAYAAVEAQRKRGILTHQNPIDHXLRATWDXMDKPWHH

SEQ ID NO: 315597 - protein, 70 aa, Zea mays
  Clone ID: MRT4577_50899C.1.pep
KTKTIFPWTVSRPIIKKKTPQKKSISCKPRVNKLALEKTPYGCPFSMHGVVRYWETLCKPSLAGLIKNFF

SEQ ID NO: 315598 - protein, 66 aa, Zea mays
  unsure (1)..(66): unsure at all Xaa locations
  Clone ID: MRT4577_5089C.1.pep
GRVGPNDVSXIAITRKKPKWSKILAHFRSSSSDMKELVLSLPRTAQSDSGETETEPSVTAKSRAEP

SEQ ID NO: 315599 - protein, 73 aa, Zea mays
  Clone ID: MRT4577_508C.1.pep
LTKEGEFIGLTAQTYVLMGTAGGFNPQGKNEARGMSVSLIGEQTAESNTTSTRWKNAKKWAPGIAEGTFRTLI

SEQ ID NO: 315600 - protein, 56 aa, Zea mays
  Clone ID: MRT4577_50900C.1.pep
QYLITSPRTPCSLHHYIQERQNDPPASHGHEQGALHRPCRGHLVHRFAALMGFQEA

SEQ ID NO: 315601 - protein, 47 aa, Zea mays
  unsure (1)..(47): unsure at all Xaa locations
  Clone ID: MRT4577_50901C.1.pep
KTCGLNASKAGLMVKFFVPPKYCSCHLKQIKGNGXPRRXLKKQAXLL

SEQ ID NO: 315602 - protein, 35 aa, Zea mays
  Clone ID: MRT4577_50902C.1.pep
KSFDHAKLYFKFKILDFQTTSNEKTITMKVLHLKK

SEQ ID NO: 315603 - protein, 71 aa, Zea mays
  unsure (1)..(71): unsure at all Xaa locations
  Clone ID: MRT4577_50903C.1.pep
MVQGMEQLQLHVNQVHRLATLXKHQAGHVKKALELSVLCDAIVXIIVFYGHGMIYDLATTVTIEELIEMYK

SEQ ID NO: 315604 - protein, 84 aa, Zea mays
  unsure (1)..(84): unsure at all Xaa locations
  Clone ID: MRT4577_50904C.1.pep
PICFVGKKVSKAPKIQCLXEPLTLQRKHTRIIDKKIAKKKSEAVEYQKLLXHRLKEXRDRHNESLAKRRSKLSTSAKASSRTSA

SEQ ID NO: 315605 - protein, 160 aa, Zea mays
  unsure (1)..(160): unsure at all Xaa locations
  Clone ID: MRT4577_50905C.1.pep
EPASAGGYGKGRKLKLEMVVVSVDYYKEGXIIRVRRKNNSENDHVKMGQYYTLELELKRPLDLRKEIXDWLALETIQQACDTXASADLAGIMMHEGLXHLFLIGKSITXTRARIETLIPRKHGPAIVGYKRDLKKFFEYVFEGILKHNDFXVVQCNVILS

SEQ ID NO: 315606 - protein, 182 aa, Zea mays
  unsure (1)..(182): unsure at all Xaa locations
  Clone ID: MRT4577_50906C.1.pep
MYASERRTTGPQSPCTSVLLVLVKYVYIYFRCGDRIPTVRRFEAHSTVSTPRFLRNRLAAQTRSTSAWSLKAGLWDSLRSGLLKNNSSTETVEPPPAPLEEEEPLPVEIVLLERTLPDGSTEHILFSSAGDVDVYDLQALCDKVGWPRMPLSKIADSLRYSYXAATLYSMIRSSETGTCLIV

SEQ ID NO: 315607 - protein, 71 aa, Zea mays
  Clone ID: MRT4577_50907C.1.pep
YVQYGLRNQITLACFSLPRTSQTEWDWEFVVPKKAEALTHQVICKSAQLKRSFYVWPQARKTSLKQAEVLV

SEQ ID NO: 315608 - protein, 54 aa, Zea mays
  Clone ID: MRT4577_50908C.1.pep
AIINAYYNSDSENDYSHLFSAGTYDTQVTRMPDKTMDQNELHCTEKTSDICFDL

SEQ ID NO: 315609 - protein, 371 aa, Zea mays
  unsure (1)..(371): unsure at all Xaa locations
  Clone ID: MRT4577_50909C.1.pep
MYIYISVGTLEAGRDLIHNLRSTVTGRKLLLSRKHPRPLHCSSPPTSLTRSPLPAQLRSAPGDTQASRSRERALKMPPAFAAAPSSSICGVRIPTVRRFEAQSTVSTPRFMRNRVAAKTRSTSAWSLKAGLWDSLRSGLLKNNSSTETVEPPPAPLEVEEPLPVEIVLLERTLPDGSTEQILFSSAGDVDVYDLQALCNKVGWPRRPLSKIAASLRNSYLVATLYSIIRSSETGXASLFDXQALLWSYALVEARVXSEGYLQKFIFLDDEHXCTCRSYLTEGEEKNSSLGMARATSDHAFNATIWDVLVDPSYQGQGLGKALMEKVIRTLLQRDINNITLFADNKVIDFYKNLGFEVDPQGIKGMFWYPRF

SEQ ID NO: 315610 - protein, 34 aa, Zea mays
  Clone ID: MRT4577_5090C.1.pep
PCVYSLPITKIFSAQYKPLSCTIYQTYVYCSYTC

SEQ ID NO: 315611 - protein, 89 aa, Zea mays
  Clone ID: MRT4577_50910C.1.pep
HAGGVRVNKREFLRGQKRVGYSRGRTLTNKQNPIQLRPKLRIFPPPLPQNYATETPAKIAAASKTSGENYRGRLPLSPPPPLSLSPDTW

SEQ ID NO: 315612 - protein, 187 aa, Zea mays
  Clone ID: MRT4577_50911C.1.pep
VIGRSPATFDNTDCSRFGPGAAISHRDSGIGYNQPNFRCPVTGAWNNPSPPSFTFPTQYDHSGHVPLHRQLGGLPKLSFPKFDGTSPKLWQKRCEDYFAMYATEITVWVRVASMHFEGVAGRWFQSIEPQVSSWSWQQFCQAVHDRFGREQHELVIRKLFHIRQTSSVQDYVDRFCELIDVLVPKKK

SEQ ID NO: 315613 - protein, 63 aa, Zea mays
  Clone ID: MRT4577_50912C.1.pep
LQREESESLASLLKEKGASWWCIGSVYQQVRKSLSMGWDPGRACCSLPWAQFLYFLLSRMSPQ

SEQ ID NO: 315614 - protein, 76 aa, Zea mays
  Clone ID: MRT4577_50913C.1.pep
SIGSSAATTRPAETRRSRGDILDLLTSTLDGMTRIYGSMSDSDSGDVPTCHRPIALLPSPHGGEPPDVLLISCSRD

SEQ ID NO: 315615 - protein, 58 aa, Zea mays
  Clone ID: MRT4577_50914C.1.pep
ALTGYTEPDIPLKRHCLIYHICLLIHPKYRGSHTLYEDHTTTIRDPRTLGAVESNSAS

SEQ ID NO: 315616 - protein, 124 aa, Zea mays
  Clone ID: MRT4577_50915C.1.pep
KASFNVVVILQYHIFSFSFLICVVKQLKVVLMSEALEEVVPSMKGGCEEEGLNLEATELRLGLPGCESPEREGVFKSVVCLGPRGVSLMPLMETGMVEDLKKMPLPCFLQLQGVLVVLVLVLPS

SEQ ID NO: 315617 - protein, 641 aa, Zea mays
  Clone ID: MRT4577_50916C.1.pep
MAGQPRERGSRSSRKGRSARAGLAQAPPPASDPDLTVGEDAAPWLRATADELEERLLKRLDEAYAAALARLADLGHGEEASLEAVLHSGHCYGKLNDPVSNIVANARAYLSDPGHASAAGGFADLRRLEEYSLAGLVCLLQSSRPTLTRAEALWCLLSSDLRIEEAIAISSSFNGEPSSIAESEEHLPAVAETAQRGYIHYHNTTATAAQDPTLFDPEAFMRLAICQGPAAATISCLKAAGWSRSSGAAPEGQPRESFTKKLSTEELIESVVAELEALDIDKKDPPDANPDPKNQMARELIKQTREMETQLKERKEWAQGKAIQAARKLGADLTELRVLRMEHDENQRRKKEKQVMEDDTMKRLAHLENELKKKSGQLDRSNATVQRLEMENAEIRAEMEAAKLSASETEKQCQGLLRKEKKDSKRLEVWERQKAKLKEDIAECKTNITQAERELAEVNKAIKNMEKKMREDTRVKEENMVLLEDERRKKEAAKADNDRRLEELRRKKEVESECYKDDLHRLQDELSRLQKSAGATQTAVPSANFPGTANRSAAQAAKQQAILRPQPASNRSLPPPAQKPSRRRDCVACKKAAACVILLQCAHQVLCVGCNKLHEDKGITRCPCCSAEVEERIRVFGASSN

SEQ ID NO: 315618 - protein, 81 aa, Zea mays
  Clone ID: MRT4577_50917C.1.pep
AVSRCSDRRGGDRRRLRVTSTHQHGRWGCPGVSKIGRAFEDCDRRRSCMLSRMVESKGRLDGIDSRLMEPDTRGMQGGGYG

SEQ ID NO: 315619 - protein, 70 aa, Zea mays
  unsure (1)..(70): unsure at all Xaa locations
  Clone ID: MRT4577_50918C.1.pep
ERPRTHGVVLAAFAWLRCDSEVVEDCSSFVRGHGILTRSVSXLGADPRYVRVSILDLDDAYGIFVKRVSS

SEQ ID NO: 315620 - protein, 57 aa, Zea mays
  Clone ID: MRT4577_50919C.1.pep
FILSFFFFFSFSFSLCFWGFNPFIFNVAEQGLKVVLDTRHAEAIVDNTITASYSSLP

SEQ ID NO: 315621 - protein, 164 aa, Zea mays
  unsure (1)..(164): unsure at all Xaa locations
  Clone ID: MRT4577_5091C.1.pep
RTKTEILAVLAGSTDKHDNCFHSSDAFATFDIGCHKQGKSNGAYVTVKPGSKGTIKWDTWPDSHVGPVQEYIAPCNGDCGSVNPYSLQWTKISSKAWKSGSNPGKWATDDLIDNNFSWDITFPNVATGNYVVRHEIIALHAXGQTNGAQAYPQCVNFKVEGSGT

SEQ ID NO: 315622 - protein, 78 aa, Zea mays
  Clone ID: MRT4577_50920C.1.pep
LGRKHSFETPNSRLSRNKATPLNSHIHGQQAGTNNLKARKNIKFGNKRGFGGAGHPRITQCQGPAGLGLLETLFNENL

SEQ ID NO: 315623 - protein, 220 aa, Zea mays
  Clone ID: MRT4577_50921C.1.pep
RSVKWLYRVKAIKDPSRAPVQSAEYLYFPQQVGKHNLKMTDGIQIQEMPVSSGIMFPWTKQVVIHNGKIRCKGWAYSGGGRWPERVELSADGGFNWYTIPLENLSKKRKWTWRTWHYDLPCDVEGWVEIVVRCWDNAMNTQPPEIRTAWNWGLHVTHSCHRISVYSVNRTRPKTDARLKEFEDRGIPFGPITVPLEFPSQTWEDYEKFWRGHDPRDAEDD

SEQ ID NO: 315624 - protein, 90 aa, Zea mays
  unsure (1)..(90): unsure at all Xaa locations
  Clone ID: MRT4577_50922C.1.pep
LQQRLLPFQVGAVANIGAGLKQQHWLAFYPQGAGNIDALMQQQQLLPFYPQNVADIVXFLQQRQLXPFDXHTLTSPTTLLQPPTIGGAIY

SEQ ID NO: 315625 - protein, 56 aa, Zea mays
  unsure (1)..(56): unsure at all Xaa locations
  Clone ID: MRT4577_50923C.1.pep
GREKLSYVPXGGGAIDMGAPATVTVGGAAPAEEANKEEKVXDKQEFDXDMGFTLFD

SEQ ID NO: 315626 - protein, 205 aa, Zea mays
  Clone ID: MRT4577_50924C.1.pep
MSTSKGSAAKGGGGKKKEVKKETKLGMAYRKDDNFGEWYSEVVVNSEMIEYYDISGCYILRPWAMEIWELMKEFFDAEIKKLKLKPYYFPLFVTENVLQKEKDHIEGFAPEVAWVTKSGKSDLEAPIAIRPTSETVMYPYFSKWIRSHRDLPLRCNQWCNVVRWEFSNPTPFIRYLICWLANVVMLFSLPALLSHVLQDAPILST

SEQ ID NO: 315627 - protein, 102 aa, Zea mays
  unsure (1)..(102): unsure at all Xaa locations
  Clone ID: MRT4577_50925C.1.pep
ALKSSGHPHKTLPPFFYFFPPFGKKGFFFFLQKXPLTPNENTIHTQVYISLYSFPVQISKTIITNYTAKTCPLITSWHTFGAANTTTTKTSPKTPFPPPFPF

SEQ ID NO: 315628 - protein, 508 aa, Zea mays
  Clone ID: MRT4577_50926C.1.pep
MSTNKGSAAKGGGGKKKEVKKETKLGMAYKKDDNFGEWYSEVVVNSEMIEYYDISGCYILRPWAMEIWELLKEFFDAEIKKLKLKPYYFPLFVTENVLQKEKDHIEGFAPEVAWVTKSGKSDLEAPIAIRPTSETVMYPYFSKWIRSHRDLPLRCNQWCNVVRWEFSNPTPFIRSREFLWQEGHTAFATKEEADEEVLQILELYRRIYEEFLAVPVSKGRKSEMEKFAGGLYTTSVEAFIPNTGRGIQGATSHCLGQNFAKMFDITFENEKGVREMVWQNSWAYTTRSIGVMVMTHGDDKGLVLPPKVAPIQVIVISVPYKDADTTAIKGACESTVYTLDQSGIRADQDTRENYSPGWKYSHWEMKGVPLRIEIGPKDLANKQVRVVRRDNGAKVDIPVTNLVEEVKVLLDEIQKNLFKTAQEKRDACVHVVNTWDEFTTALNNKKLILAPWCDEEEIEKNVKTRTKGELGAAKTLCTPFEQPELPEGTLCFASGKPAKKWSFWGRSY

SEQ ID NO: 315629 - protein, 228 aa, Zea mays
  unsure (1)..(228): unsure at all Xaa locations
  Clone ID: MRT4577_50927C.1.pep
MSTNKGSAAKGGGGKKKEVKKETKLGMAYKKDDNFGEWYSEVVVNSEMIEYYDISGCYILRPWAMEIWELLKEFFDAEIKKLKLKPYYFPLFVTENVLQKEKDHIEGFAPEVAWVTKSGKSDLEAPIAIRPTSETVMYPYFSKWIRSHRDLPLRCNQWCNVVRWEFSNPTPFIRSREFLWQEGHTAFATXEEADEEVLQILELYRRIYEEFLAVPVSKGRKSEMGKFA

SEQ ID NO: 315630 - protein, 115 aa, Zea mays
  unsure (1)..(115): unsure at all Xaa locations
  Clone ID: MRT4577_50928C.1.pep
RSGNPSQYNKMSFHTWPIXGWELDIXGPLPAVSGNIMFALVAVEXFSKCIEDRDVFTIKSNTAHKFLWQKIVFSFGEPPLHAFRHHQEVQMVPPPPPPPHQQPPNKQQRYLSLPG

SEQ ID NO: 315631 - protein, 158 aa, Zea mays
  Clone ID: MRT4577_50929C.1.pep
MSLMPWFGGGRGGMDPFSSDLWDPFGSPWPLDRSRREGGSRDDATAMARTNVDWHENDKEHIFSAEIPGVRKEDVKVEVEDGNVLKISGEKTREEEHKGDAWNRVERSFGSFMRRFRLPENAKADSIRCTMLDGVLRVVVPKDEEAQKQRNVRSIDIA

SEQ ID NO: 315632 - protein, 83 aa, Zea mays
  unsure (1)..(83): unsure at all Xaa locations
  Clone ID: MRT4577_5092C.1.pep
PGLSFSCNLTLLSGRAFFAFRRXXLTRHAGPGSKSKHLATTWQGNFSREPCFATASYQRADGLATTTLDHARNPSPEPSPHED

SEQ ID NO: 315633 - protein, 510 aa, Zea mays
  unsure (1)..(510): unsure at all Xaa locations
  Clone ID: MRT4577_50930C.1.pep
MSTSKGSAAKGGGGKKKEVKKETKLGMAYRKDDNFGEWYSEVVVNSEMIEYYDISGCYILRPWAMEIWELMKEFFDAEIKKLKLKPYYFPLFVTENVLQKEKDHIEGFAPEVAWVTKSGKSDLEAPIAIRPTSETVMYPYFSKWIRSHRDLPLRCNQWCNXVVRWEFSNPTPFIRSXRXFLWQEGHTAFANKEEADEEVLQILELYRRIYEEFLAVPVSKGRKSEMEKFAGGLYTTSVEAFIPNTGRGIQGATSHCLGQNFAKMFDITFENEKGVREMVWQNSWAYTTRSIGVMVMTHGDDKGLVLPPKVAPIQVIVIPVPYKDADTTAIKGACESTVYTLDQSGIRADQDTRENYSPGWKYSHWEMKGVPLRIEIGPKDLANKQVRVVRRDNGAKVDIPVTNLVEDVKVLLDEIQKNLFKTAQEKRDACVHVVNTWDEFTTALNNKKLILAPWCDEEEIEKDVKTRTKGELGAAKTLCTPFEQPELPEGTLCFASGKPAKKWSFWGRSY

SEQ ID NO: 315634 - protein, 128 aa, Zea mays
  Clone ID: MRT4577_50931C.1.pep
NVVGQQLKFPDCPGTSSASRDLIRGLLAKEPQSRLGVKRGAAEMKQHPFFEGVNWALIRCSTPPGVPRAVEPATVAVALPAQAKPKPAPAPAPAERVEINSGGGGSKRISGASSGAECGGKFLDFEFF

SEQ ID NO: 315635 - protein, 119 aa, Zea mays
  unsure (1)..(119): unsure at all Xaa locations
  Clone ID: MRT4577_50932C.1.pep
SNSLHAPFVLNVDCDHYMNNSKALREAMCFLMDPVLGEKICYVQFPQRFDGXDQHDXYXXHGGVFFDXNMXGLXGIXGXXXVGTGCVFXRPALXGXDAPXAXXPPFXTCFCWPPXCCLC

SEQ ID NO: 315636 - protein, 254 aa, Zea mays
  Clone ID: MRT4577_50933C.1.pep
MEHFRRGVEFGMASFQRCHPLSCQMAESAPVDAQKADNTRCKEKSRHSKRCHCHLEEMPVIPEQAMEFLSRTWSPSSTDLFQILSPSSLGSSLEDPEQDEARGDGGDDDDKEKHLGTVRLNGGTNQLFNQTCRLVAGGRPNCGQRRHKLVQPAWLRVGNMKAMLRGFLLDSVPVTGSRRRRRRDELRLHSAQAHAAVSVAQLAAAVAGIVSACDLRPAASAGAGGDRRLGTVLASAAALVATVCAEAAETTGAN

SEQ ID NO: 315637 - protein, 364 aa, Zea mays
  unsure (1)..(364): unsure at all Xaa locations
  Clone ID: MRT4577_50934C.1.pep
QLVRSVLTAIPIYRLIAIPCPKWVVKAIDKIRRGFLWKGRKDVRGGHCVVGWXIRWLWLKKTQPDRPWVEFDVHVHPNVTAMFSASVCSMVGDGAGTLFWTDRWLHGQCISEIAPSLLNRVSIRLRKRKTVQQALKDNSWVGDISGSLTAEVIVEFLIIWDLTQDIHLQPGVPDAFRWLPCVSGEYSAKTAYQRFLAGSVEFEPGKRIWKSWAPPKCKFFIWLASLNRCWTADRLARRGLDHPRKCVLCDQQQETIQHILISCVFSRNLWWQILCKVGLQLVAPGLETSIFQDWWSMAEDLVPALHREGFNTLVILVAWWIWKHINACVFDGVSPNSNAVLQQIHEDARLWEMAGAKALRRLWP

SEQ ID NO: 315638 - protein, 93 aa, Zea mays
  unsure (1)..(93): unsure at all Xaa locations
  Clone ID: MRT4577_50935C.1.pep
MRECISIHIGQAGIQFXNPCWHLHCLEHDIQTDGHMTIDKTIDGGDDAFNTIFTETGARKHVPGALDADLEPTVIDDANTGTYHQHLHTEQLI

SEQ ID NO: 315639 - protein, 275 aa, Zea mays
  Clone ID: MRT4577_50936C.1.pep
MLCCAGHQASLLLFALLSVSSLLLVDGSHQDQEFGEAVGSRILQTNPDAHEVHCSRERSRAAWEAIDEYLMPFVEKEKYELPSKCRLRPDNDMFREQEQHKIHFDINEWHCGFCKKAFRAEKFIDQHFENRHKNLVDNSEGRCMADLCGALHCDLMMQFKKPKSKCNAAAATRNRHLCESLADSCFPINQGLAASRLHEFFLRQFCDAHTCSKGTKPFPKGGRKQTNRLYLALSILTLILLPLFYLIVFLHQREMRKGTQDLKRFSKIGQKKKPS

SEQ ID NO: 315640 - protein, 66 aa, Zea mays
  Clone ID: MRT4577_50937C.1.pep
AIVVAGMGFFTDAYDLFCISLVTKLLGRIYYTVEGSATPGTLPPHVSASTPPVPRRRSRTSCGGSS

SEQ ID NO: 315641 - protein, 46 aa, Zea mays
  Clone ID: MRT4577_50938C.1.pep
YRKAILKGTFNHFKYFGKEQINSKIHSSINYNRMSQVFFKKIDNIF

SEQ ID NO: 315642 - protein, 46 aa, Zea mays
  Clone ID: MRT4577_50939C.1.pep
YKFLSNIVFWSLPRIIPGYLGNLTVFFFQRQRQSPIAWHTFVLLVY

SEQ ID NO: 315643 - protein, 121 aa, Zea mays
  unsure (1)..(121): unsure at all Xaa locations
  Clone ID: MRT4577_5093C.1.pep
MRDEDERVVLCSYTAAXIDIMAKIKQVQTHMRRTEGEKMRAYITLKELLQLAHDTNTYPTRRKLVIMQTLLHLVNENEQRLNDSESVIXCNAHYLEKQHLHKANSLTELLEQDPPFARDIL

SEQ ID NO: 315644 - protein, 98 aa, Zea mays
  unsure (1)..(98): unsure at all Xaa locations
  Clone ID: MRT4577_50940C.1.pep
RCTLLRTRRSCDLSLSXVVRLHKAAAEILDSRSGDVERLXQPKVTVXDLCEKGRLFHMRATGNVDQNAKRTSDRGIASPTCVSVNDTVCHFSSIATDD

SEQ ID NO: 315645 - protein, 43 aa, Zea mays
  Clone ID: MRT4577_50941C.1.pep
KKGIKVLPDGRVTKIPQGMVTDQFGMIGLLRYIRAAETDPGMV

SEQ ID NO: 315646 - protein, 65 aa, Zea mays
  unsure (1)..(65): unsure at all Xaa locations
  Clone ID: MRT4577_50942C.1.pep
PSFSGNSSCGRSHNFNHPPPPPYFSSEALVKKARGPICGSDSNTRVTTPPLWHHKLSRQVSAVIX

SEQ ID NO: 315647 - protein, 37 aa, Zea mays
  Clone ID: MRT4577_50943C.1.pep
DQAIATGMGRIQNLYENVAEPVANNAWAYATNFVPGQ

SEQ ID NO: 315648 - protein, 34 aa, Zea mays
  unsure (1)..(34): unsure at all Xaa locations
  Clone ID: MRT4577_50944C.1.pep
FWSIIVHCRRTSSTGLKSPIVVAGTRWARXREIP

SEQ ID NO: 315649 - protein, 88 aa, Zea mays
  unsure (1)..(88): unsure at all Xaa locations
  Clone ID: MRT4577_50945C.1.pep
ILSTFFNSIMGITVSIAFWTLTVFFPVQMYIRHRQVRRFXTKWIAPQSLSFVCFLVPPASXIGXSVQGAVISLKTYVPFKLRSLAPCA

SEQ ID NO: 315650 - protein, 383 aa, Zea mays
  Clone ID: MRT4577_50946C.1.pep
MGRPRKTKAEPEPAPAFHSARGKVEIRGSGLRCETTEQGLTISGPRGAKVVVSVSGDQKGASNGVGEGSQFILLNPSDADSQTKSLLEEVLMLYKKELPTMDYAADTGRKSGFLETCTTNGKYKTLILMSSSAAQHEEVIATVSYQIVPADTQYAEIPLAVVRSSYQRVGIGKLLYKELSQRLQNVGVTSIFCWADKVSEGFWLKQGFVSVGEVNTKGKIRKIPVRADIKRALCFPGGSTLMVAHLNKELPVMQTWEKPQTSLHTVVPDSISPGDTNVSCENMVLQTYKRRVVRNTAKVATNEVSNAYSESSLSEQEPKKCMYKTSSSSLKSKRIRCSNHGDNCQDMNQIGVHDNNLCSSPENSPHVILKEHHIPSTGAHIYS

SEQ ID NO: 315651 - protein, 94 aa, Zea mays
  Clone ID: MRT4577_50947C.1.pep
VPGPTWGPRPLDPTRGTPSIMGNLRSTIGPKVIGMRPLKVPPWPRVLTFVRFDLPCFVGKNTLGSQNFIAPKFIFKKVPDCYKRPALFLCKTHI

SEQ ID NO: 315652 - protein, 589 aa, Zea mays
  Clone ID: MRT4577_50948C.1.pep
MRVGGGRDDDDEVSRKLKSMDVDKLENGGREESPRPAVKYHGWKAMPFIIGNETFEKLGTLGTSANLLVYLTQVFHMRSVDAATLLNGLNGTTSLAPIIGAFLSDAYLGRYLALAIASVASLIGMFLLTMTAGANSLHPPECSVGETCEKATSYQFAVLFVAFAFLVLGSAGIRPCSMPFGADQFDPNTESGKRGINSFFNWYYFTFTAAMMISATVIIYVQSNVSWPIGLGIPTALMFLACVLFFVGTRLYVRVTPEGSPFTSVVQVLSAALKKRSLKQPKDPKQDLFDPPHTSAIVTKLAHTDQFRCLDKAAIVASPDEVRSGGGAPADPWRLCSVQQVEEVKCLIRIVPVWSTGIIYYVAVVQQSTYVVLSALQSDRHLGGAGFQIPAASFTVFAMLAQTLWIPFYDRLLLPKLRKITGKEEGFTLLQRQGIGIALSTVAMVISAIVEDRRRAIALSQPTLGTTITGGAISAMSSLWMVPQLMILGLSEAFNLISQIEFYYKEIPEHMRSVAGALAFCNLALGNYLSGFLVTIVHRTTGSGQNWLAQDLNKGRLDLFYWTIAGIGVFNLIYFVICARWYRFKGTSN

SEQ ID NO: 315653 - protein, 84 aa, Zea mays
  Clone ID: MRT4577_50949C.1.pep
MSAAVRWLGVYREVLLVGVLLSWFPNIPWDRQPFSALRDLCDPFLALCREVMPPVFGRKLDLSPLVAFMAIDIIIMILRPQPRM

SEQ ID NO: 315654 - protein, 90 aa, Zea mays
  Clone ID: MRT4577_5094C.1.pep
PQGRSIEVMSLYRRDKGSDGRVRSVGSYRRETQGSVVRLRCWRANGVSSSEARRVSSYVSRRSVPAEFVFLIARPMPIRVCTAGGNGAFF

SEQ ID NO: 315655 - protein, 79 aa, Zea mays
  Clone ID: MRT4577_50950C.1.pep
LPCSNEPDLTWRKAIPLTSWKASGIRRAVDGGHTVFQMVRQAQSDPGGVVVEDHRCSRRHRPYFSSPTGESYEQEELLS

SEQ ID NO: 315656 - protein, 591 aa, Zea mays
  Clone ID: MRT4577_50951C.1.pep
MLVGGGRDDEEVLRKLKSMDVDKLENGGGGGDAESPRPVVKYHGWKAMPFIIGNETFEKLGTLGTSANLLVYLTQVFHMRSVDAATLLNGLNGTTSLAPIVGAFLSDAYLGRYLALAIASIASLIGMFLLTLTAGADSLHPPECGVGEACEKATSYQFAVLFVAFAFLVLGSAGIRPCSMPFGADQFDPHTESGKRGINSFFNWYYFTFTAAMMISATVIIYVQSNVSWPIGLGIPTALMFLACVLFFMGTRLYVRVTPEGSPFTSVVQVLSAALKKRSLKQPKDPKQDLFDPPHTSAIVTQLAHTDQFRCLDKAAIVASQDELRPGGAAPADPWRLCSVQQVEEVKCLIRIVPVWSTGIIYYVAVVQQSTYVVLSALQSDRHLGGAGFQIPAASFTVFAMLAQTLWIPFYDRLLLPKLRKITGKEEGFTLLQRQGIGIALSTVAMVISAIVEDRRRAIALSQPTLGTTITGGAISAMSSLWMVPQLMILGLSEAFNLISQIEFYYKEIPEHMRSVAGALAFCNLALGNYLSGFLVTIVHRTTGSGQNWLAQDLNKGRLDLFYWTIAGIGVFNLIYFVICARWYRFKGTSN

SEQ ID NO: 315657 - protein, 490 aa, Zea mays
  unsure (1)..(490): unsure at all Xaa locations
  Clone ID: MRT4577_50952C.1.pep
MRVGGGRDDDDEVSRKLKSMDVDKLENGGREESPRPAVKYHGWKAMPFIIGNETFEKLGTLGTSANLLVYLTQVFHMRSVDAATLLNGLNGTTSLAPIIGAFLSDAYLGRYLALAIASVASLIGMFLLTMTAGANSLHPPECSVGETCEKATSYQFAVLFVAFAFLVLGSAGIRPCSMPFGADQFDPNTESGKRGINSFFNWYYFTFTAAMMISATVIIYVQSNVSWPIGLGIPTALMFLACVLFFMGTRLYVRVTPEGSPFTSVVQVLSAALKKRSLKQPKDPKQDLFXPAASFTVFAMLAQTLWIPFYDRLLLPKLRKITGKEEGFTLLQRQGIGIALSTVAMVISAIVEDRRRAIALSQPTLGTTITGGAISAMSSLWMVPQLMILGLSEAFNLISQIEFYYKEIPEHMRSVAGALAFCNLALGNYLSGFLVTIVHRTTGSGQNWLAQDLNKGRLDLFYWTIAGIGVFNFIYFVICARWYRFKGASN

SEQ ID NO: 315658 - protein, 589 aa, Zea mays
  unsure (1)..(589): unsure at all Xaa locations
  Clone ID: MRT4577_50953C.1.pep
MRVGGGRDDDDEVSRKLKSMDVDKLENGGGEESPRPAVKYHGWKAMPFIIGNETFEKLGTLGTSANLLVYLTQVFHMRSVDAATLLNGLNGTTSLAPIIGAFLSDAYLGRYLALAIASVASLIGMFLLTMTAGANSLHPPECSVGETCEKATSYQFAVLFVAFAFLVLGSAGIRPCSMPFGADQFDPNTESGKRGINSFFNWYYFTFTAAMMISATVIIYVQSNVSWPIGLGIPTALMFLACVLFFMGTRLYVRVTPEGSPFTSVVQVLSAALKKRSLKQPKDPKQDLFDPPHTSAIVTKLAHTDQFRCLDKAAIVASPDEVRSGGGAPADPWRLCSVQQVEEVAHTNHILPVGSTGIIYYVAVVQQSTYVVLSALQSDRHLGRAGFQIPAASFTVFAMLAQTLWIPFYDRLLLPKLRKITGKEEGFTLLQRQGIGIALSTVAMVISAIVEDRRRAIALSQPTXGTTITGGAISAMSSLWMVPQLMILGLSEAFNLISQIEFYYKEIPEHMRSVAGALAFCNLALGNYLSGFLVTIVHRTTGSGQNWLAQDLNKGRLDLFYWTIAGIGVFNFIYFVICARWYRFKGASN

SEQ ID NO: 315659 - protein, 46 aa, Zea mays
  Clone ID: MRT4577_50954C.1.pep
VTDSQLILTDQQISVMLTRGKLVLSSIHHRAWPHASYRLLCFMNYC

SEQ ID NO: 315660 - protein, 56 aa, Zea mays
  Clone ID: MRT4577_50955C.1.pep
RVSSQTAATLAGTCAQRRAAIGACEHSGSECRAQQHHVQRRHAAQEGDVCSYAVIL

SEQ ID NO: 315661 - protein, 48 aa, Zea mays
  unsure (1)..(48): unsure at all Xaa locations
  Clone ID: MRT4577_50956C.1.pep
TKRLTQDTVHTQHRTRLAQRQLFKGRSFKLIXRSLLXLGGGEELLKRP

SEQ ID NO: 315662 - protein, 392 aa, Zea mays
  Clone ID: MRT4577_50957C.1.pep
FNPNSSSDPWMDVAPSSPSNRHQRKMILSISTLIAIVGGAVIVIGVVTITVLNLRAHATASRSALPTPLSDDYHSQSAESPENEAKSGKLVMFGRGSSDFSADGHALLNKDCELGRGGFGTVYKAVLRDGQPVAIKKLTVSSMVKSEHDFKQHVKLLGKVRHHNIVTLKGFYWTSSLQLLIYEFIPAGSLHQHLHECSYESSLSWVERFDIIVGVARALVHLHRYGIIHYNLKSSNVLLDTNGEPRVGDYGLVNLLPMLDRYVLSSKIQSVLGYMAPEFTCTTVKVTEKCDIYSFGVLVLEILSGRRPVEYLEDSVVVLSDLVSDALDDDRLEDCMDPRLSGEFSMVEATLIIKLGLVCASQVPSQRPDMAEVVSMLEMVRSPQGTPEDDLV

SEQ ID NO: 315663 - protein, 74 aa, Zea mays
  unsure (1)..(74): unsure at all Xaa locations
  Clone ID: MRT4577_50958C.1.pep
KCPVVXDKAWHKITASPASSLATSDSPPDMAKIAREVDPLPDDSTPEFKMYMVGAENRNMPKCHALNMTTHLVP

SEQ ID NO: 315664 - protein, 135 aa, Zea mays
  Clone ID: MRT4577_50959C.1.pep
MFPSSSATGPRFLRPFTATAPRRAMAACTGAPSDPPMQQSSPTKAVRVVVKGRVQGVFFRDWTVEMARSLGLAGWVRNRRDGTVEALLSGDPDKVDEMVSRRIPVGPPAAVVTAVVPSPAEPVSPDEGFHRKPTA

SEQ ID NO: 315665 - protein, 184 aa, Zea mays
  Clone ID: MRT4577_5095C.1.pep
QEKHKFKMPDDEMEDYVAQELGAVTLKLSQKAVECPGVTEQLTKLKEEGYPMSVVSTSAKSRVVASIEKAGIAHFFPPEHVYSAATSLNPPSSKPDPKIYLYAAEQLGVKPSEAITVEDSKSGATAAMRAGIPCIGYVGIYGIEEGKDKMDQMAKLLTEETKCAAIMYDWKDFPECLKKVEAKL

SEQ ID NO: 315666 - protein, 101 aa, Zea mays
  unsure (1)..(101): unsure at all Xaa locations
  Clone ID: MRT4577_50960C.1.pep
RCKPKNPGCIGVVPSDLYSLHYLRRKPGLCLRYYDGDRNGXILWEGTSGPIHAPCWTVHGLMPAKWRXHGLLQARRSDSMDXNPSDNTKANFTDAHGTYDS

SEQ ID NO: 315667 - protein, 107 aa, Zea mays
  Clone ID: MRT4577_50961C.1.pep
SFTKTVAKIQDTDVSRCRSEHLTIRYGSTINCSSKTYVLYQNQWLVATALLSLVAVSPFFWRRTRPRSRSRVDRYWYTLMDHEREVNGDVLVPQYCSPIISCPRRES

SEQ ID NO: 315668 - protein, 70 aa, Zea mays
  Clone ID: MRT4577_50962C.1.pep
VITRRLAPTADPYRSSAAAAHGDLRGAVHRRLLDTGLLVPGFGGHATQGAWPENGQTELLGTHCRVRCRA

SEQ ID NO: 315669 - protein, 98 aa, Zea mays
  Clone ID: MRT4577_50963C.1.pep
RRLRQRRCTCASTESSPDTYHAPYFCEGCMLLLHKLPNSSTVPLQTLSAYDRRYSTTGLRMPSSTRARLSAARKAYISRLLEGGCFCPIHSKRMTISS

SEQ ID NO: 315670 - protein, 115 aa, Zea mays
  Clone ID: MRT4577_50964C.1.pep
RPGGLRPCLPVAREADSLPRCARRGHPPCWCSPLWRPSSPWAPFVASSSSHCYPLNHRRAGLPLIRGIHRLSRAQSRMPSLGPCVLLSSSPSLIPNARHGPRRRPTLYPRHACRL

SEQ ID NO: 315671 - protein, 366 aa, Zea mays
  Clone ID: MRT4577_50965C.1.pep
LGTSSPPGVPFRKTTTARFSPSPGSRGASAAHPSAMAPAAPDADAYDIPWVEKYRPSRVADVVGNSDAVARLEVIARDGNMPNLILSGPPGTGKTTSILALAHELLGPSYRDAVLELNASDDRGLDVVRNKIKMFAQKKVTLQPGRHKIVILDEADSMTSGAQQALRRTMEIYSNTTRFALACNTSSKIIEPIQSRCAIVRFSRLSDQEILGRLMIVVAAEKVPYAPEGLEAIIFTADGDMRQALNNLQATFSGFRFINQENVFKVCDQPHPLHVKNMVKNVLDGKFDEACSALKQLYDLGYSPTDIITTLFRVVKNYDMAEYLKLEMLKETGFAHMRICDGVGSFLQLSGLLAKFALVRETAKAP

SEQ ID NO: 315672 - protein, 109 aa, Zea mays
  Clone ID: MRT4577_50966C.1.pep
QKQIVNQWKISVFSQHRVSTSVCKLLAQSSACWRQRVQGGWLRSEYLVVATFQVGVLWSSSGSNVAAGKSLYAQTANGLRSCLIREQIFSEAGGGAGGDFVEGEAADPT

SEQ ID NO: 315673 - protein, 68 aa, Zea mays
  Clone ID: MRT4577_50967C.1.pep
GSCEHGGARLSSPHPLVGPACLGQNQSFKGHKRGRGKRSPARYTATIPHIHSWTSLNWAGGWGCHGGA

SEQ ID NO: 315674 - protein, 55 aa, Zea mays
  Clone ID: MRT4577_50968C.1.pep
KCPPPPPKKKDNCLKNIIKKKKKKKKKKKKKKKKKKKKKKKKKKKKKKKKKKNPH

SEQ ID NO: 315675 - protein, 63 aa, Zea mays
  Clone ID: MRT4577_50969C.1.pep
CSIATLLSVRAHCSSRMACSTTQQTLCSLVCTRSCVELGSGGSSPLLVWPEFFGHGPFITNFV

SEQ ID NO: 315676 - protein, 146 aa, Zea mays
  Clone ID: MRT4577_5096C.1.pep
REGIPLFIGRTGNSNWGKNKRDHHENCLFDRTKTKLDGGGNNNKRRRAAPLQPEGGEHPTVQSDAVELGEKIRERDPPVQGRLGGVWNWAKQPLGFFFAGVEKGNYRNPRRVTVFVSRHPGIHPFVPVIRHKLDASCREQGFGCIN

SEQ ID NO: 315677 - protein, 77 aa, Zea mays
  Clone ID: MRT4577_50970C.1.pep
SRVILAYSTHAFLTQKTMLAPLLKKQAFIKGDRFGSSWWGGPAGRLMVSFFFSSWGGSWTSGGTGFLWAISNAGDPM

SEQ ID NO: 315678 - protein, 259 aa, Zea mays
  Clone ID: MRT4577_50971C.1.pep
MATSRCGKQRQPLLHSPTPADANGGGAAKRRRFVSFLAVTAALVASYHLLVPTNSSHYHALFLSLGSNATAAAHLRALTLRPHVAGTEANAATARYVLHAFSSLSFPAHITPYSVLLSYPVHRSLSLAAAPGLAARPFSLVQETYKGDPYAEAAAEVLPTYFAYSGSGSVTAEVVYANYGHNEDYAYLASRGVDVVGKVALVRYGDIHCEDMVRNARAAGAAAAIVYTDAKDFGGSAAKGEKRKWFPDARWLPATGVQV

SEQ ID NO: 315679 - protein, 81 aa, Zea mays
  Clone ID: MRT4577_50972C.1.pep
SVVLMCISPSRCSTTSTSFHFSTHGRPARGPSWPCNCASCRQRAVSSVSAEPAKPGGSYLALVAVSVSSPSVPPRRQHTRP

SEQ ID NO: 315680 - protein, 200 aa, Zea mays
  unsure (1)..(200): unsure at all Xaa locations
  Clone ID: MRT4577_50973C.1.pep
MTGTRKTQAYPQSSRCSQFSPSTLTTSRLLPSLLHMPVQTTTAFLPSALYAHKEKALNDSIFFLVDRITXSVLRMHXATLGLRTVRATTSRDIRKQMKTASTPSSTPASSSAKKTLREGTDVINVPLPVIILSTWNGLLETNNWNVIMCCRHLLNVYMAHKAAEHEQRQITTSCHLGPHPPCDSRAPEQSRTRSQLERPI

SEQ ID NO: 315681 - protein, 51 aa, Zea mays
  Clone ID: MRT4577_50974C.1.pep
RCPGLLSPLPVAAPLLIWGLLAFLPPFGGGGFFFSSLLTPSFKLGLPSYLT

SEQ ID NO: 315682 - protein, 139 aa, Zea mays
  unsure (1)..(139): unsure at all Xaa locations
  Clone ID: MRT4577_50975C.1.pep
MWRSRRPIHPSVVRLEDCDTETAPRWQVVDFEEGXFFFKRIREASKPLVGSVVKKLTVTVDIKYLTANLSVSTEECRHVTNKTNAMIFCSHTCLSSFSKCQVTNILINHGIMHLCMYVKAAFACGIYAVVXWSAGAVKY

SEQ ID NO: 315683 - protein, 124 aa, Zea mays
  Clone ID: MRT4577_50976C.1.pep
AQSAGLRTVVFLPCKGGVLELGSAVPVRETPETLRALQTALAVARPPAREECMRIFGQDLSPGGSARAPRSVDNWAPHPHLAAQATAASALASKEAAAGHKAPEPPRSIDFSKPGKPGHGQAGC

SEQ ID NO: 315684 - protein, 113 aa, Zea mays
  unsure (1)..(113): unsure at all Xaa locations
  Clone ID: MRT4577_50977C.1.pep
PYISAFDSLKNMAIALXRLKSGTLFXDSIIITDAPALAESFAEETWGXHTEAEKSAFDKAQKSKDEENAAKGGDNEDDDLEDEKGDDKAFQVKADSDAEDSKDSDYDNQHVEL

SEQ ID NO: 315685 - protein, 97 aa, Zea mays
  Clone ID: MRT4577_50978C.1.pep
RFASVRKAAEALLVSATFRALRGPSEWSPPPDRLVSLRLASLSLRWLLQSWCPALTFIHPLTTTHPLILYVPSTFFLSFFFFDVNHCKGFPTQYIFH

SEQ ID NO: 315686 - protein, 76 aa, Zea mays
  unsure (1)..(76): unsure at all Xaa locations
  Clone ID: MRT4577_50979C.1.pep
TFFKYSRCTXSVSSVPPAYYADLTTFRARFYMEPDSSDSGSMASRGPPPWGRNINAGCVGNDAERALPSTERHPKR

SEQ ID NO: 315687 - protein, 67 aa, Zea mays
  Clone ID: MRT4577_5097C.1.pep
SRPSARDSHVSGVCGRDKPNQTFFRKCGEAASWVRTHDEITLTTAPYLFNVVNKVKLRWILYVFYCS

SEQ ID NO: 315688 - protein, 70 aa, Zea mays
  Clone ID: MRT4577_50980C.1.pep
QPRAPRTLPLHTALPTSLIAWELIPNPAVNSSHSSTPSRSALRSTSARPISKSLTHAGSCTALSMACKLT

SEQ ID NO: 315689 - protein, 99 aa, Zea mays
  Clone ID: MRT4577_50981C.1.pep
PRGGKPHPGQAPAPPTGAPPGAAFPRGGGPPQVPGPGCARPPPAGAPKAPCSSAGEPFPPSYLEKPCAFWISLLLASGLIIGPARRLMAGLGSFSGTKK

SEQ ID NO: 315690 - protein, 49 aa, Zea mays
  Clone ID: MRT4577_50982C.1.pep
FCLGSYGAREDPNHTIRCMLSWNTTKYMAAAFKRSQGVQAHNAILGVHN

SEQ ID NO: 315691 - protein, 49 aa, Zea mays
  Clone ID: MRT4577_50983C.1.pep
EYIVCSKENGVFLDRSDVVAFYHFQSRCKFECLMLFMMDGDSRRRRGRR

SEQ ID NO: 315692 - protein, 99 aa, Zea mays
  unsure (1)..(99): unsure at all Xaa locations
  Clone ID: MRT4577_50984C.1.pep
RLHIAKSTIFVTTVNRPKRFYNVSEKSPVGNVVIDXITKFISESYTHNESGIIYCFSKKECVXVAQELRXRGISAHXEHADMEILNPDKIHRRIDTHRM

SEQ ID NO: 315693 - protein, 53 aa, Zea mays
  Clone ID: MRT4577_50985C.1.pep
VNNKCGALEKVAKALEPPGKAGARGSPETFPHYNKIKHEAQCTLRPYDRHYAG

SEQ ID NO: 315694 - protein, 152 aa, Zea mays
  Clone ID: MRT4577_50986C.1.pep
KLLDPSSITSLHQPQRTNVRLVATLFPLGGLLLVLSGLALAASTVGLALATPVFLLFSPVLVPAALLIGTAVAGFLTSGALGLGGLSSLTCLANTARQAFQRTPDYVEEARRRMAEAAAHAGHKTAQAGHGIQSKAQEAGAGTGAGGGRTSS

SEQ ID NO: 315695 - protein, 147 aa, Zea mays
  Clone ID: MRT4577_50987C.1.pep
HASAHASADAWGHLALGFGTRPSRHHALILSAVALSGSPASRRSPQPRPRGLAARRSAPALLPLGLRSSLACLRSAVAPSADRLQHRRGPWRRCPELLRIGHPRIARTTALPTGGRPLVAHPVGVGHSAGRPPSEDCSHTFWTSACQ

SEQ ID NO: 315696 - protein, 178 aa, Zea mays
  Clone ID: MRT4577_50988C.1.pep
MADRDRSGIYGGGAYGQQQGGGRPMGEQVKGMIHDKGPTASQALTVATLFPLGGLLLVLSGLALAASTVGLALATPVFLLFSPVLVPAALLIGTAVAGFLTSGALGLGGLSSLTCLANTARQAFQRTPDYVEEARRRMAEAAAHAGHKTAQAGHGIQSKAQEAGAGTGTGAGGGRASS

SEQ ID NO: 315697 - protein, 54 aa, Zea mays
  Clone ID: MRT4577_50989C.1.pep
KLRGNKEGYRTFQPFRKKAPVTTPCRKTKKLRRPKYLAGNGGSTMALPRFQVGP

SEQ ID NO: 315698 - protein, 62 aa, Zea mays
  unsure (1)..(62): unsure at all Xaa locations
  Clone ID: MRT4577_5098C.1.pep
PTRPQCIITNASSIILSTSSAAAGSVRIGEWRQAVEEESVRXXFKNTTPCLPSQNSPRGNRR

SEQ ID NO: 315699 - protein, 86 aa, Zea mays
  Clone ID: MRT4577_50990C.1.pep
GHGGEGLRPLNFGPRGKEEASWSSFDGYGEGNVLVSMGERMPAGTSEVTGQAEPPTLTERSLRALGLSGNVTAKIYIYIYINHSWE

SEQ ID NO: 315700 - protein, 84 aa, Zea mays
  Clone ID: MRT4577_50991C.1.pep
AKFSKAFLTPKRECLGAPGPVLYSGAAQKKSLRHRFNPTSCPRIPTCINPVRHWAARHLTPQVLFQQPTKQMNGGRGERIGRVG

SEQ ID NO: 315701 - protein, 102 aa, Zea mays
  unsure (1)..(102): unsure at all Xaa locations
  Clone ID: MRT4577_50992C.1.pep
RRAPRPHPTRSTRRPRPPRTSKPKAAAARQRAXRHHKKGAPAQQNTLPSPQGTTSASARPLPVTDAENTSSRTYRGPERAAKSRRTLDTNXQTKKKKQGPET

SEQ ID NO: 315702 - protein, 253 aa, Zea mays
  Clone ID: MRT4577_50993C.1.pep
MQQNRKPQMNSTIQKSGAMMSDNWATPALDEFCAEYFKSPKDAGFSQLKEGNTHYKASQPKNSGHFQQQASSSGGEVDDGPPAMQYLYHPDPRVGDLFRNRLQHFVPIGAGSTRANEQNRAKSLRSCRRQSSSSAAATDDWVTPGRVSVPTDASKRRVHASGTHSGSGHWFTNDSGRKVYVSKNPHELTGRDAYRQYQKESGRGFNRYKKKGSSGTKRGAAQVKTETAAKRGTAQVKTETAAKRGTSRAKRKR

SEQ ID NO: 315703 - protein, 73 aa, Zea mays
  unsure (1)..(73): unsure at all Xaa locations
  Clone ID: MRT4577_50994C.1.pep
GITVKHRXQGMFLHXRQYTVNLLEHVGMAKCKPCATXVNTQGKVSAXRPLVADPTGYRSIVGALQYLIFTRPE

SEQ ID NO: 315704 - protein, 155 aa, Zea mays
  Clone ID: MRT4577_50995C.1.pep
MDPITRPAAPSFHRPAVATAKHLHQAAATLARRNGVSRRCLLTLLMSTAAIPGGSESRKALLQEYLKKSKENKEKNDKERLDDYNKRNYRDYFGLIEGQVREKTEEERTESEKRILEWLDKNRQKTKHNLKIHYKLISARRVNVQCMYGELQNLM

SEQ ID NO: 315705 - protein, 123 aa, Zea mays
  Clone ID: MRT4577_50996C.1.pep
MDPITRPAAPSFHRPAVATAKHLHQAAATLARRNGVSRRCLLTLLTSTAAIPGGSESRKALLQEYLKKSKENKEKNDKERLDDYNKRNYRDYFGLIEGQVREKTEEERTESEKRILEWLDKNR

SEQ ID NO: 315706 - protein, 275 aa, Zea mays
  unsure (1)..(275): unsure at all Xaa locations
  Clone ID: MRT4577_50997C.1.pep
SLCPGRRAGGGGGRHGFPRRALPGGDGAQRRLRYLRRRRRFRGRAAGGLPRSQEPGDEPPREKVPKTYPPSXPTPHARSDTPPXPPPHAPPPPPLPPPGAPPXPPPPFPSPPPPPPPPRPPPPHPPPPPAPPSPPXPPPRPPPPPPGPPPPPAPPXPPPRPAPPRPPPPPPPPPPPPPPPPPPPXPPPPRARPAPPPPPPPPPPPPPPRPPPXPPRPPPPAPXPPPPPRHPPPPAGPRRGTHPPPPRPPQPPRPLSHPPPPPPPPPPPRPPPPTP

SEQ ID NO: 315707 - protein, 35 aa, Zea mays
  Clone ID: MRT4577_50998C.1.pep
MDEPEHHGHSHGRRERQLGRETCGQQSPAGLEVPN

SEQ ID NO: 315708 - protein, 93 aa, Zea mays
  unsure (1)..(93): unsure at all Xaa locations
  Clone ID: MRT4577_50999C.1.pep
PFXXXGAPFXXXGGVXPSLXLXVXSVXFPXXSGSXXXXXSLVLCXLXSPSPXSFXAWVVXXXXXXXXRXWXGPXXRXLGLGXPPXXXVSLXVV

SEQ ID NO: 315709 - protein, 52 aa, Zea mays
  unsure (1)..(52): unsure at all Xaa locations
  Clone ID: MRT4577_5099C.1.pep
RRLPDASRFITTGCYVLFLRSVAIVAFRLDMQSHLPLXPSPCLLPSCRVRAG

SEQ ID NO: 315710 - protein, 79 aa, Zea mays
  Clone ID: MRT4577_509C.1.pep
YGGHRNVSKTCNTPGLYFVSCRKICPKLRSLVGISISRSRLSPFIKPVMKACPNLELFISSTAKFGTHPCRVLCAVTSA

SEQ ID NO: 315711 - protein, 79 aa, Zea mays
  Clone ID: MRT4577_50C.1.pep
SQHARDTGYFFSGTSHSQAATTPAPPVMSQREQEPGTGADIGRSPPVTSYLYALALLLVGPSLYRRAHVHTLPHELEPN

SEQ ID NO: 315712 - protein, 55 aa, Zea mays
  Clone ID: MRT4577_51000C.1.pep
ATNRSWLTNRKNERNLEIQPNAVRKKKKKKGERVIGSKLTTRECEGIDFHIVATK

SEQ ID NO: 315713 - protein, 227 aa, Zea mays
  unsure (1)..(227): unsure at all Xaa locations
  Clone ID: MRT4577_51001C.1.pep
METSSAPAAATEAGWYVLGPNQEGVGPYALAELREHFANGYFNESTMLWAEGWKEWMPLSSISELHSAVAAKDQSEQDAPDVDDDFEKFQKEVIEAETEVKALKGSDVDRQDDERPATPPDGEEEFTDDDGTIYKWDRTLRAWVPQNDASGSKEDYAVEEMTFAVEEEIFQAPDILGPALEEINTLSESKNKDXDKAEMRGDXKRKSYENPAEKKEATXPPTXWLIS

SEQ ID NO: 315714 - protein, 77 aa, Zea mays
  unsure (1)..(77): unsure at all Xaa locations
  Clone ID: MRT4577_51002C.1.pep
MASIAGSSALSFAMPVKAINSNSLAFSPVRKGNTXLXGQPVPMRSVYCAAKKDTXDKVGEIAKKRVGVADDAGGWGE

SEQ ID NO: 315715 - protein, 115 aa, Zea mays
  Clone ID: MRT4577_51003C.1.pep
MEGGKKNVEKPSVWKKAKETKAPKARGEEDGLQSQGCWSSWIAIKIKLCKLDDLEFNPNLKHAKKGKTMKKVKYASHNNVLQRVEANWRKNGGKRTYRVFSRRTRPSTRPVWWCT

SEQ ID NO: 315716 - protein, 105 aa, Zea mays
  Clone ID: MRT4577_51004C.1.pep
YALITNAVSADLGTHSSLNGNSRALATVTAIIDGTGSIGAAIGPLLTGYISSKSWSAVFTMLMAAALLAGLLLTKLVCAELQGKTPTSASKDVADAQGTYYSDEV

SEQ ID NO: 315717 - protein, 137 aa, Zea mays
  unsure (1)..(137): unsure at all Xaa locations
  Clone ID: MRT4577_51005C.1.pep
PCVVVPPKSGWSPXQEKIMRAQPLWDSSKQGYMRGKRVVEITPRPPITKELRPKVARDNESEELKPPARLVFQPALMERGFTLPAPKEFGSSIYKSVQKGLALSPAATVEEENEAEDHPEVEKEPEPDPSSFDKGGL

SEQ ID NO: 315718 - protein, 417 aa, Zea mays
  Clone ID: MRT4577_51006C.1.pep
GREKKKKALALAPPKPSSRTGDTPPRTRKNRIDLRIFLTIGMVGTAVFTALFGAGYWLNVHSFYYFLVVQMVSGLFQSVGWPSVVAVVGNWFGKSKRGLIMGVWNAHTSIGNIAGSLLAAFLLEFGWGWSFAVPSLVMALVGLVVYVSLPVSPEVMEIDIAGSGELNCEKDTGTVKEPLLEPGQQVKHKAVGFLEAWRIPGVAPFALCLFFSKLVAYTFLYWLPFGRGHTRIGGEYLSDATAGSLSTIFDVGGVLGGVLVGHISDRLNARAITAASFTYCAIPALFLYRTYGSMSMAWNVSLMFVTGMFVNGPYALITTAVSADLGTHSSLNGNSRALATVTAIIDGTGSVGAAIGPLVTGYVSSRSWSAVFTMLMAAALLAGLLLSKLVCAELQGKTHSSVSKDAGGEHGAYSDEV

SEQ ID NO: 315719 - protein, 57 aa, Zea mays
  Clone ID: MRT4577_51007C.1.pep
HIGHALYHFKLRRMSLLMLGSSYSCQIDAFERERMKAIGSWSWWCEHPRLCVDCIER

SEQ ID NO: 315720 - protein, 57 aa, Zea mays
  Clone ID: MRT4577_51008C.1.pep
RRTLSTIHDMNNIGGLYGGNALCHGDDSYLRCSCSHRRHRRADHRPQDGWRRAHHLV

SEQ ID NO: 315721 - protein, 62 aa, Zea mays
  Clone ID: MRT4577_51009C.1.pep
YNLLVVYLMTTQFKLPRFTDLDGSCSIACKLDCSRDLSTSNRQIVESGLYNYMEMVSRPASR

SEQ ID NO: 315722 - protein, 119 aa, Zea mays
  unsure (1)..(119): unsure at all Xaa locations
  Clone ID: MRT4577_5100C.1.pep
DAWAPPGTLWYLARARNARLRAAVSDKDGALQSLRQEYKCVRVSEAAAPXASSATTTTACRTPASSAKTAPAPGYGLNQRLPNGSSMKGTPRSASQRWTPDKPRTPSNRRTYSIREPGK

SEQ ID NO: 315723 - protein, 51 aa, Zea mays
  Clone ID: MRT4577_51010C.1.pep
FKIHCQRSSPITVCVKFKRSGKSISTLYLASDEALEAEYRKEMLHLGLVWF

SEQ ID NO: 315724 - protein, 71 aa, Zea mays
  Clone ID: MRT4577_51011C.1.pep
KKIFLPPHQGWSQWPLVPNQLCGLFMLKKNVNGAPGPWNQAGFGPGCLFVFKIICPRFVKNSQSFSSFGLC

SEQ ID NO: 315725 - protein, 40 aa, Zea mays
  Clone ID: MRT4577_51012C.1.pep
CTRCIWVTSRAPQQRICSSAAATSLCLCSVPLHVCLDVTG

SEQ ID NO: 315726 - protein, 479 aa, Zea mays
  unsure (1)..(479): unsure at all Xaa locations
  Clone ID: MRT4577_51013C.1.pep
MAALESNKKLRLLLVPFFATSHIGPFTDFAVRLATANPDAVELTLAVTPANVHVVRSALGRYGAEAGGVVKIATYPFPRVDGLAPGVENLSAAGDDGWRIDAVAVDEASTRPAQEALIREQSPDAVITDVHFIWNNAVAGELGVPCVTFSVVGIFSTLVMYHLGRDVVIRDGQEVTVPGLPLAGAGDTDPRIRVAGVXDAGRSTTXVRRCHVEMGRCFGVTLNSFVDLEQPYCDMCVSSGYLKRAYFVGPLSLPLPPAGASTRDSPCLAWLDTKPRFSVVYVCFGTFAAISEDQLRELALGLEASKKPFLWVVRADGWTPPEGWEERVGERGMLVRGWAPQTAILSHPAVGAFLTHCGSSSLLEAAAAGVPMLTWPLVFDQFIEERLVTEVLKIGERVWSXTEHEIRGAKGRGMAAEVVARAVARFLEPGGTGEAARSKAGVLAAKARSAVAEGGSSFCDLRRLVNDLIEARTAAGTNA

SEQ ID NO: 315727 - protein, 100 aa, Zea mays
  Clone ID: MRT4577_51014C.1.pep
VLKEMLEEEVGNNTQKNRFTYSDLCVQIPEPKLRLCLLRTLEFLFSLMCSYYTIMSFSSGDKNIDSKGPDEAYKDGTSQNSSETLVNLGRGHSSAAVTQD

SEQ ID NO: 315728 - protein, 86 aa, Zea mays
  Clone ID: MRT4577_51015C.1.pep
HFSPGTSFSLVFPKFGPGLGSPSNAPRCFGISPWGGRARGFFFKKKKKKKKKKKKKKKKKKKKRKKKKKIKKHKKKKKKKKKKKAC

SEQ ID NO: 315729 - protein, 137 aa, Zea mays
  Clone ID: MRT4577_51016C.1.pep
GSELQEKSSYRRLLFDCVNVALIEIGENALLSALPWSKRSSRTWRGTSSPDLGVEVWSILKDWIHGARMFVVSKRDNAGIILDRIVKQEVEARGWVKLMMAQVVVITEELEGGVMEELVEEAVLDFYSLFSVVRYRL

SEQ ID NO: 315730 - protein, 130 aa, Zea mays
  Clone ID: MRT4577_51017C.1.pep
LLIQDLFHATVSFKSGPALFSEKGSFLLSTARGKKYKHRFDNVDPSSLQQYIVHQLAFPSLPLALLFVVLLIQNHVTKRLWLQGNIFRTTPQWSMLAPKVIQKHDKERMSMRDHLFGADSSLLKGGSSYV

SEQ ID NO: 315731 - protein, 85 aa, Zea mays
  unsure (1)..(85): unsure at all Xaa locations
  Clone ID: MRT4577_51018C.1.pep
YLYSLDKDTFKKLHHLDVNSLRGDTDSYTALAFYNDACNLVTGXAEEAIKVLGIDDTYSKSFKILKINWPAGVHSTAVTSQRGYH

SEQ ID NO: 315732 - protein, 89 aa, Zea mays
  Clone ID: MRT4577_51019C.1.pep
GPLFKGFGEKKNPRPSSLWKTNGVEIESPLSRVSPPVFKKSRVSKKVLKLGAQGLKKLGPIFPGPGFMSRRENSRGVEKGPAPQAVLSP

SEQ ID NO: 315733 - protein, 76 aa, Zea mays
  Clone ID: MRT4577_5101C.1.pep
PRVRPRVRPRRRLTHPAFTPASPNKVPPFSDIHRGDRKSAAMASIPATTFGGILFGLFCAAGGAAVDNELSEYVIQ

SEQ ID NO: 315734 - protein, 86 aa, Zea mays
  unsure (1)..(86): unsure at all Xaa locations
  Clone ID: MRT4577_51020C.1.pep
ISLPXTTFWGVFLRVFPFFSPEQQVHSLNLPLAFQAPRQKRTEKVSNGIKPSTIAAAGCLCSVLTISHERNGGQIRFTERGPFTNY

SEQ ID NO: 315735 - protein, 123 aa, Zea mays
  Clone ID: MRT4577_51021C.1.pep
VSPSRRTPHVLLLIFGPGSMRSSSRAAIGTRRRGNAMLDRAPCARAPTSTRAGAWKRMWPQSRPRSWYQGGNWIRGWPRSSGCSSPRAGPASTCWHCMPPHINLCLLQLVPKSCSCILSCESC

SEQ ID NO: 315736 - protein, 68 aa, Zea mays
  Clone ID: MRT4577_51022C.1.pep
DPPGCRNSARGKGRACIHLLALHAPSYQFVFATISSQVLFVYSLLRIMLTTAIESHFSQSRVSILTIF

SEQ ID NO: 315737 - protein, 107 aa, Zea mays
  unsure (1)..(107): unsure at all Xaa locations
  Clone ID: MRT4577_51023C.1.pep
MLLVLVPPADAVSSSSSSVATVDVGDDPAEGGQRRLLIVVTTTRSAPXPGAFFFXLLPLAHTLSLXGPPVVWTVVXSPPPTRXTAEVLRGTGVMYRHLSFRPVGNLT

SEQ ID NO: 315738 - protein, 97 aa, Zea mays
  Clone ID: MRT4577_51024C.1.pep
MATALGLGARSGLRLLSAGAEAASATSSRAFHSTGTRRMGAHAHDEPYYVHAKHMYNLHRMKHQQLKVCLAVLAAVGTGIGVPVYAVVFQQKKTASA

SEQ ID NO: 315739 - protein, 111 aa, Zea mays
  Clone ID: MRT4577_51025C.1.pep
VHPVTSSDHSARCISLPHPEHARCIVHSRRSPSCMIWRSNVQSHSPGLPQNIQPPAFCLLSATAVVWFSRRAWFVLRFMPSSRMCLAAPAPQLPHQPMHRPAAPLPSQPNA

SEQ ID NO: 315740 - protein, 110 aa, Zea mays
  unsure (1)..(110): unsure at all Xaa locations
  Clone ID: MRT4577_51026C.1.pep
GPENPGSPTRPIITPPRHTPXGRAHKKTPGVKNTNQRTDTTRRPERPPTGAKTEGGRPKADEKQAQKKEDEESNTGPKARPNQDGKKQHPGTHQNAETTTNDKAEPDQKN

SEQ ID NO: 315741 - protein, 58 aa, Zea mays
  Clone ID: MRT4577_51027C.1.pep
RPGRVPTRCEGRSCLHRAATNVSAVRNGNYGSGDSRCWTCSPWSSTWTLLTGTRTSKA

SEQ ID NO: 315742 - protein, 85 aa, Zea mays
  Clone ID: MRT4577_51029C.1.pep
ANDFAYCLCGSNSYNWPKNTKNAHIFPFFPTCSTQGMNKCCIELVRVARITHLEYTRQGSEPTNRAVRSVVTLARPGCQSCGRRY

SEQ ID NO: 315743 - protein, 124 aa, Zea mays
  unsure (1)..(124): unsure at all Xaa locations
  Clone ID: MRT4577_5102C.1.pep
SSPGASHNTSGPPLPVDASTVRSLPKTHSPLRRFLPKPTGRFGASSQKPTTWHFYFTTHPHPXAMGXSSPTFLFFPHLIHFRLQPLPSXPPVHLTTLPFLRFLPVHLHSVRLNRPHLPSLPVGF

SEQ ID NO: 315744 - protein, 429 aa, Zea mays
  Clone ID: MRT4577_51030C.1.pep
MSRGSAKREMETGEKATRHEKAPLRESGTKVKEGSSPRIMLHRSGDKKKKMKKVVYYETDSSSPSTSGSDAACVTSKCHERKKYSKMPLRYPRISKRAPLLFIPLGKPPYFDGEDYCMWSDKMRYHLTSLHTSIWDIVEFGAQEVIGKFVRFELMIKDSKHIVNLEQGATSTPEVQPVAFKATEEKKEESTSSRLPIDASKLDNEEMTLIIKSFHQILKQRRGKDYKPRSKRVCYKCGKHNHFIAKCPMSSDSDSGDDKRGKKEEKKYYKRKGNDAHDAANIAVNKGLLFPNVSHKCFMAKDDKKKNVQTRTTPKYTTSSHEGSSSEDEDDLLTLFANLNMQQKEKLNELIGAIHEKDELLDSQEEFLVKENKKHVKVKNAYAQEVEKNENLTKDISMCHDSITNLRNENASLNAKIDKLNESISSLRT

SEQ ID NO: 315745 - protein, 36 aa, Zea mays
  Clone ID: MRT4577_51031C.1.pep
DVKPAVLFHRWGRQIELALIHEHTSSGHNAPDATNY

SEQ ID NO: 315746 - protein, 154 aa, Zea mays
  unsure (1)..(154): unsure at all Xaa locations
  Clone ID: MRT4577_51032C.1.pep
MAPLLADAMNHVAAHPVLMSHLLXPTTRVFSRXHDLPASSPESSKRKLYLSFTRQSAILCSQNGVLMLSPSEIPQRDWFPSEFIFGVRTSVYQIVGVCHEDGKGESHWDHVWHNHPVRILDGRHSHIGANSEHMYNTDVKLLTEMRMXDPYRAP

SEQ ID NO: 315747 - protein, 84 aa, Zea mays
  Clone ID: MRT4577_51033C.1.pep
KKPEKFFGNHGFFRVFDPYLLKTTRGCLEDKRCRNKRVQGFDRSGETILSTFWGELGQHLQWVIIKPPFLQGWAKNYAAPLGIF

SEQ ID NO: 315748 - protein, 247 aa, Zea mays
  unsure (1)..(247): unsure at all Xaa locations
  Clone ID: MRT4577_51034C.1.pep
MARRALELAAVLLALAALAAVAAGGDIVHQDDEAPKIPGCSNDFVLVKVQTWINKKDKDEFVGVGARFGPKIESKEKHANWTNLLLADPSDCCTPPREKVAGDILLVERGNCKFTTKAKVAESAGASAIIIINDKHELYKMVCETNETNLDIGIHAVLLPKDAGSSLQRSLSSGEVGTILCASYWSAWSAREADIEQEKLLKDGREVAPNFEPGGSSGMVDINMVSAIXFVVIASCFLIHSTADVPL

SEQ ID NO: 315749 - protein, 545 aa, Zea mays
  Clone ID: MRT4577_51035C.1.pep
MARRALELAAVLLALAALAAVAAGGDIVHQDDEAPKIPGCSNDFVLVKVQTWINKKDKDEFVGVGARFGPKIESKEKHANWTNLLLADPSDCCTPPREKVAGDILLVERGNCKFTTKAKVAESAGASAIIIINDKHELYKMVCETNETNLDIGIHAVLLPKDAGSSLQRSLSSGEVLVELYSPDRPLVDTAEVFLWLMAVGTILCASYWSAWSAREADIEQEKLLKDGREVVPNFEAGGSSGMVDINVASAIMFVVVASCFLIMLYKLMSYWFVELLVVIFCIGGVEGLQTCLVALLLMSRRFKPAAESYVKVPFLGAVSYLTLAVCPFCVAFAVVWGVFRQLPFAWIGQDILGIALIVTVIQIVRIPNLKVGSALLGCAFLYDIFWVFISKRWFHESVMIVVARGDKTDEDGVPMLLKIPRMFDPWGGYSIIGFGDILLPGLLVAFSLRYDWAAKKTLQSGYFLWSMVAYGSGLLITYVALNLMDGHGQPALLYIVPFTIGTFLALGMKRGELRNLWTKGQPERVCTHMHPSPKDSPVAVSSLS

SEQ ID NO: 315750 - protein, 157 aa, Zea mays
  unsure (1)..(157): unsure at all Xaa locations
  Clone ID: MRT4577_51036C.1.pep
MAAAVLLAAILALSPLPLSLASPSAAAAADRITRLPGQPPVNFSMYSGYVTDDAAAGRALFYWLIEAAVEKPETAPLVLWLNGGPGCSSVGYGASEELGAFRINADGRTLSINPYSWNKMSNVLFLDAPAGDGXPYSNSSSDLLAPGDNKTSHDSYT

SEQ ID NO: 315751 - protein, 536 aa, Zea mays
  Clone ID: MRT4577_51037C.1.pep
MAAAAVLVVLTVSALAGAAAGGDIVHHDDEAPKIPGCSNDFILVKVQSWVNGKEGGEFVGVGARFGPKIVSKEKHANRTKLTLADPMDCCSPPKHKVPGDVLLVQRGKCKFTKKAKFAEAAGASAIVIINHVHELYKMVCEKNETDLDINIPAVLLPKDAGSALHTLLTNGNTVSVQLYSPDRPVVDTAEVFLWLMAVGTVLGASYWSAWSAREAVIEQEKLLKDGHEDLLNVEARGSSGMVDINVASAIMFVVVASCFLIMLYKLMSYWFVELLVVIFCIGGVEGLQTCLVALLSRWFKPAAESFVKVPFLGAVSHLTLAVCPFCVAFAVVWAVFRQLPFAWIGQDILGIALIVTVIQIVRVPNLKVGSVLLGCAFLYDIFWVFISKRWFHESVMIVVARGDKTDEDGVPMLLKIPRMFDPWGGYSIIGFGDILLPGLLVAFSLRYDFSAKKGLRSGYFLWAMVAYGSGLLITYVALNLMDGHGQPALLYIVPFTLGTLIALGWKRGELQNLWARGEPERVCTHMHMPLLPTTPN

SEQ ID NO: 315752 - protein, 63 aa, Zea mays
  Clone ID: MRT4577_51038C.1.pep
RTNTCKPVLLRGQDPDHLLSPNTHPTCAALDVGTDCLIFISFPGEHTSSWTYGTVTVRHYKRS

SEQ ID NO: 315753 - protein, 89 aa, Zea mays
  Clone ID: MRT4577_51039C.1.pep
KKKNAPPLLIKKRCLFKQKRGGGGGFFFFVFIIVNAKKYPGVWLITRCGLLFQNQFDIHNYKLCILILFMYGLFFRMVAFAAMILLKKR

SEQ ID NO: 315754 - protein, 61 aa, Zea mays
  Clone ID: MRT4577_5103C.1.pep
AGWVQMSRKWGANWQALSGLVGQGLSFAVTTTGGQYLQFLYVVPGWWQFGMTFATNQNFAY

SEQ ID NO: 315755 - protein, 87 aa, Zea mays
  unsure (1)..(87): unsure at all Xaa locations
  Clone ID: MRT4577_51040C.1.pep
LPPPFYMPSALYLPSQQXSHPWLYPTQPPXLSPCQQFGSCGFSRVGSPLLGQCVEFLRHHCSPAATPYSSPHCQVLQQQCCHQIRQV

SEQ ID NO: 315756 - protein, 45 aa, Zea mays
  Clone ID: MRT4577_51041C.1.pep
IKSTLYATLNLMTTIRFRYLDLSLNICRDFSLLQRHSCMYGVFYI

SEQ ID NO: 315757 - protein, 146 aa, Zea mays
  unsure (1)..(146): unsure at all Xaa locations
  Clone ID: MRT4577_51042C.1.pep
SAGGSCFPLGLSSAGPCRRLWSCAAESSPALAPALLPGPGLAGXPSWCCSRGVRRRRRSPRPFVXGSAGRVXGAGAGPGXSPPXSPXLLAPXSLPPAPXXAPLGRGFXSRXXXVAPSXXXXPASLXSGXALGGGXXXPRLRPXLXL

SEQ ID NO: 315758 - protein, 69 aa, Zea mays
  Clone ID: MRT4577_51043C.1.pep
RPLKPYPARPFPLVPRGPRPRPRPSAAGLINPSPTAAAMAGPSGASSSSRGAGVVVDRFYSPPHVRRQH

SEQ ID NO: 315759 - protein, 95 aa, Zea mays
  unsure (1)..(95): unsure at all Xaa locations
  Clone ID: MRT4577_51044C.1.pep
RSLPAAGEFVSTSAEDAGAHLSFDLGHGEVGPKQDTRTLFNRWTFNDFQGNHIWMNDYLDVNATKHAMXLSHTDARFFKKGIRKAQCPDREGGTN

SEQ ID NO: 315760 - protein, 124 aa, Zea mays
  unsure (1)..(124): unsure at all Xaa locations
  Clone ID: MRT4577_51045C.1.pep
FFTFNQPXCLPSLWYXDILHTAGRCSXSPXLINSTXXPYLIPHHLRLSHSFFFXRYQNKYQLHHNEKILILLDFIXLXPFIYSNSHHSSSHQAIDFHLYFFLYPIVHXQYPYSIQYISKNRLPF

SEQ ID NO: 315761 - protein, 44 aa, Zea mays
  Clone ID: MRT4577_51046C.1.pep
LQSAPYAIHDFNYSLNFQPRRRYSYIFLNTRSFRVRQSLQIRNQ

SEQ ID NO: 315762 - protein, 91 aa, Zea mays
  Clone ID: MRT4577_51047C.1.pep
MMNGGGGQKRRNSKIIPYEYRVESDPKFFDKSWRKLHDAIREIYNHNSMSLSFEELYRLTLRARLRFPDFSVAALFHALRSRCMIADDSDR

SEQ ID NO: 315763 - protein, 65 aa, Zea mays
  unsure (1)..(65): unsure at all Xaa locations
  Clone ID: MRT4577_51048C.1.pep
PXPSPRRPARRVLFDNLXPIIVSIPLXXASRXNRXPIXSYAVCVVGPSLTSLLEKIXAPHFPVYT

SEQ ID NO: 315764 - protein, 116 aa, Zea mays
  Clone ID: MRT4577_51049C.1.pep
KEPALFFKKSNGGVNIFPYPQPLHRRREEETPEGTSRFPPINFCKTRIFFIAWGGFYPPQNGENAGLKRVRKGFFVKGKPSWPKGRAPWFFKDNREPFFSGEDHLWAGPLLPFLPP

SEQ ID NO: 315765 - protein, 56 aa, Zea mays
  Clone ID: MRT4577_5104C.1.pep
VSYTSMPSVPHPPWHRICMVIQRGRNDASAHGARARLWTSLSIVPISCSPYLSCKC

SEQ ID NO: 315766 - protein, 58 aa, Zea mays
  Clone ID: MRT4577_51050C.1.pep
PLNWWFWRKILYPQIRVFTANIYSWGMLSFTGGVPMDSINGHQGPEKIFTERWVSHGG

SEQ ID NO: 315767 - protein, 81 aa, Zea mays
  Clone ID: MRT4577_51051C.1.pep
AALDIYWKAPMGHEHPPAGETTTPLLSEQVKDLEDHPVYLTNGPTNGWSWWEHPCTGLPTKLITGDKVHGVCPLFFGDGAR

SEQ ID NO: 315768 - protein, 102 aa, Zea mays
  Clone ID: MRT4577_51052C.1.pep
HLTYKNNFTYAETAAGRDRHHQRNVALEHIEHHRLAGVVLFAGLGDVFDLRFFDELRGISAFGAWPVATMRRGERKVVVRGPACPSPAVTAWFPQDLGGKGK

SEQ ID NO: 315769 - protein, 110 aa, Zea mays
  Clone ID: MRT4577_51053C.1.pep
TPFRDTLGGRFAAKIRNPPNPPRVGFVTLNSGEAENPPYNWAARPLNGPLARTNFPGLATTSGRPGPTCNSGSTVKSSRDPGPGDPKARAGHCGRHNSKPYIPQRKGRQT

SEQ ID NO: 315770 - protein, 90 aa, Zea mays
  Clone ID: MRT4577_51054C.1.pep
EHCLPRQISIESHTFEEEGRTQAVRKEPHMAGPIYRHCTSRTAKQLIACALVSLSFDHLPPLQRSSSFFLPSTTSSNRSSMSATSPPRST

SEQ ID NO: 315771 - protein, 210 aa, Zea mays
  Clone ID: MRT4577_51055C.1.pep
MFGYRKADPDLEAGGSSLLYPGMTESPVSNFFVSSNAGVALYIFLIILPFLVLCPLRYYHQKHPVNLLLLGLFTVAISFAVGMTCAFTSGKIILEAAILTAVVVISLTAYTFWAAKRGHDFNFLGPFLFAAIMVLMVFSLIQIFFPLGKISVMIYGGLASLIFCGYIIYDTDNVIKRYTYDEYIWAAVSLYLDVINLFLSLLQLLRAADS

SEQ ID NO: 315772 - protein, 87 aa, Zea mays
  unsure (1)..(87): unsure at all Xaa locations
  Clone ID: MRT4577_51056C.1.pep
RFSWFHDQECLRSQIRAYFKDXQRQATQDAATMAGLNVLRIINEPTACDMGYELXDRKATTGGEKNVLICEPGGGTIDGCLLTTEEG

SEQ ID NO: 315773 - protein, 243 aa, Zea mays
  Clone ID: MRT4577_51057C.1.pep
MFGYRKADPDLEAGGSSLLYPGMTESPELRWAFVRKIYVILAVQLAMTAAVSAFVVKVPAVSNFFVSSNAGVALYIFLIILPFLVLCPLRYYHQKHPVNLLLLGLFTVAISFAVGMTCAFTSGKIILEAAILTAVVVISLTAYTFWAAKRGHDFNFLGPFLFAAIMVLMVFSLIQIFFPLGKISVMIYGGLASLIFCGYIIYDTDNVIKRYTYDQYIWAAVSLYLDVINLFLSLLQLLRAADS

SEQ ID NO: 315774 - protein, 439 aa, Zea mays
  Clone ID: MRT4577_51058C.1.pep
MKKKKKKRPLGPVRTMVIKALIWMQNPHESFEELKSIIACELSDPAWPSSLLNDVLLTLHARIKATPDMAATLLEIARIFDTKVPGKIDAADLQLLWKTCLVRAGPDGKHTALEAVTIVLDLPPPQPGSMSGLTSVDMVSASDPKSAMALQRLVQAAVWFLGENANYAASEYAWESATPPGTALMMLDADKMVAAASSRNPTLASALTRLQRCAFSGSWEIRIAAVQALTTIAIRSGEPYRLQIYEFLHAWALGGVQSNFSELQLSNGENQGASGTGLGSLISPMLKVLDEMYRGQDDLARDIRQHDNSKQEWSDEELKKLYETHERLLDFVSLFCFVPRAKYLPLGPTSAKLIEIYRNRHNISASGGLSDPAVATGISDLMYESKEVHKETNTVQSGIDPDLAMAWAAGLEDDVWANNAPAVDKVKDFLAGAGTDAPD

SEQ ID NO: 315775 - protein, 80 aa, Zea mays
  Clone ID: MRT4577_51059C.1.pep
LWNKLHIGQQLPRMFWLWWVKNCEHGHHWHLILWTEQTWWLRERVITSRDTRTPTPMQWYASRARGREFLFSLLSVPAEP

SEQ ID NO: 315776 - protein, 81 aa, Zea mays
  unsure (1)..(81): unsure at all Xaa locations
  Clone ID: MRT4577_5105C.1.pep
TSRPAGPPPARLRYCTFVARSTVVLAXVRRFHGDFTTIAAQWLQKLPASNKFTYNCDGHTFSYLIEKGFSVGLIWTWINEV

SEQ ID NO: 315777 - protein, 267 aa, Zea mays
  unsure (1)..(267): unsure at all Xaa locations
  Clone ID: MRT4577_51060C.1.pep
MFGYRKAGPDLEAGGSSLLYPGMTESPELRWAFVRKIYVILAVQLAMTAAVSAFVVKVPAVSNFFVSSNAGVALYIFLIILPFLXSPALPSFGGFFPRELKLVATFCXVLCPLRYYHQKHPVNLLLLGLFTVAISFAVGMTCAFTSGKIILEAAILTAVVVISLTAYTFWAAKRGHDFNFLGPFLFAAIMVLMVFSLIQIFFPLGKISVMIYGGLASLIFCGYIIYDTDNVIKRYTYDEYIWAAVSLYLDVINLFLSLLQLLRAADS

SEQ ID NO: 315778 - protein, 142 aa, Zea mays
  Clone ID: MRT4577_51061C.1.pep
PRPKNRDPFAYIYSVKPALDQCPSVWVSGTSPCCSRVTPAENGEEGEVTEEKTSPPLESQAETCLYFDICESEPDSPTNKENGEEGEVTEEKTSPPLESQAGSRLYFDICESEPDSPTNKGEEATNFCCFCSKVVPNKEKQD

SEQ ID NO: 315779 - protein, 287 aa, Zea mays
  Clone ID: MRT4577_51062C.1.pep
MPAAASHPSPTGPLVARPPASSSPPAGRPASQTLARRAREKLDAMFGYRKADPDLEAGGSSLLYPGMTESPELRWAFVRKIYVILTVQLAMTAAVSAFVVKVPAVSNFFVSSNAGIALYIFLIVLPFIVLCPLHYYHQKHPVNLLLLGLFTVAISFAVGMTCAFTSGKIILEAAILTAVVVNSLTAYTFWAAKRGHDFNFLGPFLIAAIMVLMVFSLIQIFFPLGKISVMIYGGLASLIFCGYIIYDTDNIIKRHTYDQYIWAAVSLYLDVINLFLSLLQLLRAADS

SEQ ID NO: 315780 - protein, 76 aa, Zea mays
  Clone ID: MRT4577_51063C.1.pep
GVAGLYEACSIIISENGEEGEVTEEKTSPPLESQAETWLYFDICESEPDSPTNKGEVATNFCCFGSKVVSNEEKQE

SEQ ID NO: 315781 - protein, 79 aa, Zea mays
  Clone ID: MRT4577_51064C.1.pep
FTYISKMTSIITNLLQVIFTKVGLFYKYISWTFSEFKAPFSIFQARIFKRKKAAKIKQDLVFFPLYSTFFLTFPKTYAW

SEQ ID NO: 315782 - protein, 47 aa, Zea mays
  Clone ID: MRT4577_51065C.1.pep
MPLLVSKRAHAEARMLAPRLTCTAHSIQPRTLVLAWSTNDHVKRIRI

SEQ ID NO: 315783 - protein, 92 aa, Zea mays
  unsure (1)..(92): unsure at all Xaa locations
  Clone ID: MRT4577_51066C.1.pep
AHLALQTSQSQHQQQQFLPSVSHLAVVSPVTYLQQQLLASNPLDLAXNVAXAYQQQQQVQQFMPVXSQLAMVSPAVYLQLLSYRPLAVGNAP

SEQ ID NO: 315784 - protein, 60 aa, Zea mays
  Clone ID: MRT4577_51067C.1.pep
REAPSNAAVSEQLVRPNAGNSMLILLLQERKGKLWKTYQSSRHKPSNDLPRRISDRCRAS

SEQ ID NO: 315785 - protein, 188 aa, Zea mays
  Clone ID: MRT4577_51068C.1.pep
MQEFQSIPGLAGRLFGGAAAPGDLRRAQAAQHGPGGARCGGASPAAPEAVKCPRCESTNTKFCYYNNYNLSQPRHFCKSCRRYWTKGGVLRNVPVGGGCRKAKRASPSASASASSPASSSAPSTPASADAAKNPRRASASPRSNSGSASPTAAAATTPTPTDPSTSATPSSNGVAFTGSHHSSNPFST

SEQ ID NO: 315786 - protein, 144 aa, Zea mays
  unsure (1)..(144): unsure at all Xaa locations
  Clone ID: MRT4577_51069C.1.pep
LLEYLDRTAGKLATLLRKFAGLSSNKXLLKAQSTVLDHFNNSLMMHGLNNLLKGMGVPIIKHTLQXICRCVTDTHTIHXMDDAIINRAXAEDAILISSNSLFRRQAVNILPLTKVNQAIYLITTGASDERFTRTSKSFAECLAG

SEQ ID NO: 315787 - protein, 177 aa, Zea mays
  Clone ID: MRT4577_5106C.1.pep
PILPLIFSPQHPKICSAAETKTGFSAPTSDFRLLLRLSKSSDTTSKRDETEVRSVTLVVVASGIVAAGTSMAARPGVRRLDASLPAKLYRTCCASAPRLKDLAGRSCCGNGGECDCAGAVAVARRGICDEEAREDGAAAMFVGYRWWQRARRFWELVIQATTGRQAGRSGTRVSCSR

SEQ ID NO: 315788 - protein, 35 aa, Zea mays
  Clone ID: MRT4577_51070C.1.pep
MAHSSDPSVSTTLVSSVEPLSYRLIDRFRVRTRDN

SEQ ID NO: 315789 - protein, 50 aa, Zea mays
  Clone ID: MRT4577_51071C.1.pep
MVTFVTSGTLACQPSFSLRNLMLLLQQLDDEGTYTSVTCVLRVHSESHGG

SEQ ID NO: 315790 - protein, 176 aa, Zea mays
  Clone ID: MRT4577_51072C.1.pep
MPASASSPSPSPLEIVSCSALEDPWSPTMAIAGDKFTVVQRVPRDVSDGLLGKFADTSAFGFDYDRSALWSPLVLRPEAMLLAQCPAGRPRPTAATMAAASPEAEEGALRLLAMVVTSHAMLSTDVEASGLNHSANVLPLILGFLHSSAVLCIQRVNTVTISSLYDQRRWEAEDTM

SEQ ID NO: 315791 - protein, 178 aa, Zea mays
  unsure (1)..(178): unsure at all Xaa locations
  Clone ID: MRT4577_51073C.1.pep
MRIPHIILLHDRHLKARRVEIMMDVYTNVVTKTALNFPALFTVDKGVGXCAKPVHYKGSTFDRVIPEFMWQGEDFTRGNGTGGDFIYGEKFPDENFVRKHTVPGVLSMGNAGANTKVSQFFIWTVVTPXVDGKHVVFGQVDEGMDVVKAIEKVGTRNGSTSKVVKVADCGQLSYISLI

SEQ ID NO: 315792 - protein, 193 aa, Zea mays
  unsure (1)..(193): unsure at all Xaa locations
  Clone ID: MRT4577_51074C.1.pep
SCDPDXTADGKPIVPCGLIAWSLFNDTYSFTRGKENLTVNKKDISWKSDREHKFAKNVYPSNFQNGALIGGKKLNSSIPLSEQEDLIVWMRTAALPTFRKLYGRIYVDLKANDTITVRLSNNYNTYSFGGKKKLVLSTATWLGGKNDFLGFAYLIVGGLCIFLAFAFTLLYLIKPRKLGDHNYLSWNRHPAGR

SEQ ID NO: 315793 - protein, 59 aa, Zea mays
  unsure (1)..(59): unsure at all Xaa locations
  Clone ID: MRT4577_51075C.1.pep
MASAPVLPNARFRGLFFYPTFRAGSIYVPSSLPDAPAAAVAPVQPPPXAGPSWRGSLAT

SEQ ID NO: 315794 - protein, 86 aa, Zea mays
  Clone ID: MRT4577_51076C.1.pep
TITLMTRGIPSSFATFCYARLMRKPEQGQAQTRGTLEQGTLIQVLFIQVVQAISERRRGPWNGGICLRPGTCWGHIGPKTNPICFT

SEQ ID NO: 315795 - protein, 97 aa, Zea mays
  Clone ID: MRT4577_51077C.1.pep
RTQDWDPLELPRYSEDRITRSLRLVPKHHGLNTRHTIAGDRLLVGSGWTGRVRGGTAPVPRSGPTGSAFPSPSFEPGGRTPTPLQLVNPRMGEGQVG

SEQ ID NO: 315796 - protein, 71 aa, Zea mays
  Clone ID: MRT4577_51078C.1.pep
TLLSPPLQPAFTSELQLQCLGREPILIDKRRADQAPYALLSYTQWYTGYSTSSKMILRSSSKPCVLRACLF

SEQ ID NO: 315797 - protein, 89 aa, Zea mays
  Clone ID: MRT4577_51079C.1.pep
EDPESVQRTASQSVKTNKPAWGMMMPRNNRGPRNPPPSPPHPILPPFRPPHPWPEWIPTTASLPLLALGQSPLGSSQSEQTGAGGLRNR

SEQ ID NO: 315798 - protein, 282 aa, Zea mays
  unsure (1)..(282): unsure at all Xaa locations
  Clone ID: MRT4577_5107C.1.pep
VVIILYNSLLAEPYPKSEPPPDDLLPPEAPAAALPLPPTLPPAPPPNLTPPKTPAPMLAPIPPSAPPDPPPETPASAPVPXDXPLPPAFPPTPPPTLAPPETPAPTVALVPALAPPDPPPETLVPASAPVYAFPLPPAFPPMLPSTLAPPETPASTPPDPPPETPASAPVPVYALPLPPAFPPTPPPTLAPPETPAPTVAPAPASAPPEDPPLETPAPVPXRXPLPPTLPPTPPPTLASLETPAPTVAPVPASAPADPPLETLVPASAPVYALPLPPTFPPT

SEQ ID NO: 315799 - protein, 81 aa, Zea mays
  unsure (1)..(81): unsure at all Xaa locations
  Clone ID: MRT4577_51080C.1.pep
PPRLAGRDRDLLCVTSSSSSTLFLPPPPVPGCFMPALRSLCSASTRQPHVTHAYIANGLYHQAAPXITRRLRLLLHTNLSA

SEQ ID NO: 315800 - protein, 81 aa, Zea mays
  unsure (1)..(81): unsure at all Xaa locations
  Clone ID: MRT4577_51081C.1.pep
MKRNPRVTSFRRKCRKAHFTAQYSVRRVLMSMALSTELXHXTNVRSIPILXDDKVQVVRGTYKGLEVKLVHVXRRCYVIHV

SEQ ID NO: 315801 - protein, 75 aa, Zea mays
  Clone ID: MRT4577_51082C.1.pep
QGAQKDIKFGGEGTPPQKKTKLLIKFPSPLNKKGPTKWRKQGGGSPQNRKLWKKGGFKTWLLRKIQGYPSRKNNF

SEQ ID NO: 315802 - protein, 75 aa, Zea mays
  Clone ID: MRT4577_51083C.1.pep
RFGSQYYFVCIMIMIIKRFSLSLIMFLTFISAFFFLLSLIIIENASPPPAPGTRCEGGHPALRSAAHPRCRANEW

SEQ ID NO: 315803 - protein, 60 aa, Zea mays
  Clone ID: MRT4577_51084C.1.pep
RPRVRKKKKKKKKKKKKKGRKKKKKRKKKKKKKKKKKKKHVKQKHGTLDGISGTPNKQPL

SEQ ID NO: 315804 - protein, 53 aa, Zea mays
  Clone ID: MRT4577_51085C.1.pep
SARPLCFPCRRTRAKSLSPHDSPRPAATPLRTFAAPTGDQALIAFAPWLLGRG

SEQ ID NO: 315805 - protein, 99 aa, Zea mays
  unsure (1)..(99): unsure at all Xaa locations
  Clone ID: MRT4577_51086C.1.pep
LAWATTNXWLEKAFPSFGGILDPKVVADREMGRFHGFGLVSFSSENSMIPAIXNITGKELDGGPISVSQAQSXRGGGGAGGRRKGGGDAYVDAGAACTD

SEQ ID NO: 315806 - protein, 141 aa, Zea mays
  Clone ID: MRT4577_51087C.1.pep
FAPFSKSGKKVRGLFYGLFGDAPSLFWESQNHFGVFGFGGETQGPPFVSFPLNFVLDKVWFLAPFWPRPFYSWEPLFGPQPGTGLVFSLVIYRVLGARGSFPQEVPPRVLLFFGDLWDSRGSWGPGFFGAPPLFSRRPAPC

SEQ ID NO: 315807 - protein, 36 aa, Zea mays
  Clone ID: MRT4577_51088C.1.pep
HPLSARERHDGGTYWRSNMSHRPTVTITQGYGPNRP

SEQ ID NO: 315808 - protein, 97 aa, Zea mays
  unsure (1)..(97): unsure at all Xaa locations
  Clone ID: MRT4577_51089C.1.pep
MLGKFPPENMRLKVPIKWPKSRDVVWKANIPHTHLAKEKSDXNWMVEAGEKIXFPGGGNHFHHGADXYISNIANIXNINNEGMLRTVLDVGXCGVAS

SEQ ID NO: 315809 - protein, 208 aa, Zea mays
  unsure (1)..(208): unsure at all Xaa locations
  Clone ID: MRT4577_5108C.1.pep
MAAAPSSLASSSHIPRRATATAPAQSHSPPLPQQLRPARSFKRGALAQHVRYSFAGREASRRRTPGACFVVSSSQPGLAAIDVPAATIPDATTTSVTERTSVSSLLEVVSEDLLSLNNNLKSLVGAENPVLVSAAEQIFGAGGKRLRPALVFLVSRATAELAGLSELTAENRRLAEIIEMIHTXSLIHDDVIDDSGMKKXXKETYFTN

SEQ ID NO: 315810 - protein, 84 aa, Zea mays
  Clone ID: MRT4577_51090C.1.pep
DKREKGEGGDLSAAVYNLGGEMSSEEEDKEEEKVSRKAASDLRSRLTSERLRGFIPLPPPPPPSHLEHLIRLGLTKSIMSRPGR

SEQ ID NO: 315811 - protein, 181 aa, Zea mays
  unsure (1)..(181): unsure at all Xaa locations
  Clone ID: MRT4577_51091C.1.pep
KKKKKKKKKKKKKKKKKKKKKKKKKKKKKKKKKKKKGRADFKEPKLAAPSWGPHFFFLGPPNLTSWAGVLKRGXWENPXGVPHFCGLGALPLFAPWGNTPLSPPVPLSKRARTLEGYGNPPCWGALAPRAVGFPHSGTVTFSSPLAPVPFPFCLSFLARFFGFPRKALTRGFPLGLRFGVF

SEQ ID NO: 315812 - protein, 222 aa, Zea mays
  Clone ID: MRT4577_51092C.1.pep
MSAPHSAPHHPSLAAGDAKKQPHLGADPSKKASCFGGGGDHHPKKPGPSAAKLALASFLGVIILLAADASLTGAGAHRRLRQQYLHYVGVGVGVGVGGGGITDSLSWLSVPDRPNFTDDLLARWLAPGGSPCRDARTANISVEVLDDAAARGEATTLGAGEIHEVTFWALDEAGQRRCLGGDYFEVDLSGDAWKSRPPIVDHGDGSYSFRLQVAPRLTSGEF

SEQ ID NO: 315813 - protein, 81 aa, Zea mays
  Clone ID: MRT4577_51093C.1.pep
MSKMFRGNNNPSSNYELPVESVVRVKKVERIEANNLVSKPKPSQTKVTRSLTVSVVRVGDVDEMPDDSHSSFVSVPIAAHT

SEQ ID NO: 315814 - protein, 149 aa, Zea mays
  Clone ID: MRT4577_51094C.1.pep
AANFFFFFLLFKSSLSCCSFLYPVEFNLLHKLQLFFSISLDRSKIVIILSGKRRPSSLRNVEDTRRLISREARLEISRAPVQEGGWGLRHDSACAEAKPGAKRRLCRCAGSPVPMLVEERGRGHDRRVPRRSHGAPRTKLVAVGTRYGA

SEQ ID NO: 315815 - protein, 91 aa, Zea mays
  Clone ID: MRT4577_51095C.1.pep
MSKMFRGGNNNHPSSRAGSATTSSYELPVESVVRVKKVERIEANNLASKPKPWQTKVTRSLTVSVVRFGDVDEMPDDSHSSFVSVPIAAHT

SEQ ID NO: 315816 - protein, 251 aa, Zea mays
  Clone ID: MRT4577_51096C.1.pep
RPGEGRGFGSHCGRHRIGYLEAGRVQLQVLADSPSPSTSAARRRFPSAAAPPPLPLFLVVDLVSGTMARSLSTALVRGLMRSSRASTSAAVSRPAIQQFMNYSSGLSGTPNANGDSVTTRVAADHDTHQDFQPTSKSSDMSFSDIVAQDVKEHPVVIYMKGYPDAPRCGFSALAVKVLQQYGVPISARDILSDLKLKESVKAYSNWPTFPQIFIKGEFVGGSDIILTMHQKGELKELLGDIAQKAEQSGSS

SEQ ID NO: 315817 - protein, 98 aa, Zea mays
  Clone ID: MRT4577_51097C.1.pep
YTPSPGLGGRQLILPRVTVTSFCMGERPSQDLSSSTTMTIFQPFNLLRAIRWQNLVLLRLQGPCHNSRCRKEGGKSRYHGAMYLRRVIRCIWNNHVKW

SEQ ID NO: 315818 - protein, 75 aa, Zea mays
  Clone ID: MRT4577_51098C.1.pep
RGRWRATTRSPPSPPGSSRPRCAWSSPGTSPSTRSPRALSPFGSSPRPRILVMVMMGVAGTRGSVYVMTASDGLL

SEQ ID NO: 315819 - protein, 113 aa, Zea mays
  unsure (1)..(113): unsure at all Xaa locations
  Clone ID: MRT4577_51099C.1.pep
LWWFFFLVPRPGPRSEGARPPPWPGGIGGPRPVPXRGKPGPKGVPGGKPXGPKPPKIAPRSXRLPPGGPVGPPPPINGPAPPARFPAGXPPSPSXNKPPPPGERALANWALFP

SEQ ID NO: 315820 - protein, 82 aa, Zea mays
  unsure (1)..(82): unsure at all Xaa locations
  Clone ID: MRT4577_5109C.1.pep
LGSRFLHLYALDGYCLALGAFGRLYGSGRFFIVGAVCFFGGGWRDFLCGDYSFGXWXWGFSKLKKVSXLLXFLLFLMFLCRV

SEQ ID NO: 315821 - protein, 728 aa, Zea mays
  unsure (1)..(728): unsure at all Xaa locations
  Clone ID: MRT4577_510C.1.pep
TRAVAGRISRAEFHFRHRPFPLCPSFLVFSICLALLAFGSTSTPFIHFLDFFGGVRKSSPFPLPPLVKASKQKWCGAIRVSKLPIFPIPILLLVAAAASTGWPCPATPPPRRGHAPXQPQPPPPTLNSLIDSWPPPPPPXSSPLPASSRPTATPPDTAATPPXPSPLPHPPLLHPPPTPTPTPXPSPGPPQHTASPPPRAAAAPPRPPLLSPPPTSPTPSAAPTPSPSPPASPAPAPPPFSAPPPSARPLPTPAIAVDPARGKNPSWNKSSSPGAPSRSPSAPFGGLGNGVVAIAAAVVALLLLSLLVTAVWFNRKRKRKQMSGYRAGLMSPFSSQQPSGESANVGWSADPSVHTNYSAGSPRLKQCLSDISMGNSRFFSYDELYQITDGFSAQRLLGEGGFGSVYKGRLPDYKDVAVKRLKDGGGQGEREFQAEVEIISRVHHRHLVSLVGYCISNDQRLLVYDFVSNNTLHYHLHGHGMPVLEWSARVKIAAGAARGIAYLHEDCHPRIIHRDIKSSNILLDNNFEAKVADFGLARLALDAVTHVTTRVMGTFGYMAPEYASSGKLTERSDVFSFGVVLLELITGRKPVDASRPMGDESLVEWARPLLSRALDTGDLEGLVDPRLEMKLDEVEMFRMVEAAAACIRHSASRRPRMSQVVRVLESSADIDLTNGVQPGQSQLFNVANAAEIRMFRRMVAGAQDDDSSDLTQYDWSRGSDAAPGSRIL

SEQ ID NO: 315822 - protein, 75 aa, Zea mays
  Clone ID: MRT4577_51100C.1.pep
IPFDIFEMKHIVFWGGGANKQKSAGGTNSHYPTGVWIHKDPKKTIKRGTLRKKKKGGFPEPKFKSRSRRMDPLPR

SEQ ID NO: 315823 - protein, 147 aa, Zea mays
  Clone ID: MRT4577_51101C.1.pep
PTRPRGVSSSFPWPALAPTSSSALPSPSAPPPGVLPRRACSSAHRAPASFLRRPLTPVSLSPGAATSLWSFKRVSSLLRSSLGVPPVLDRSPVSRALPAAARAHRPACSSSPRPPAPSRGPWLRCSEISEEKSMWTSEKKQPQYSVR

SEQ ID NO: 315824 - protein, 99 aa, Zea mays
  Clone ID: MRT4577_51102C.1.pep
FDPTNHWLFMCVSVGDKLPMGAPELMMSPQGLWQGVLRPELVKRRDEKYNISTDDLKHTRAEIAEPEWINPMADYWKQHGKCFVLDIATVEMNRHAQFP

SEQ ID NO: 315825 - protein, 208 aa, Zea mays
  Clone ID: MRT4577_51103C.1.pep
MDPKLVEVTQLFDRFKASNFDVCATLLSQLKVLLTKFPSLPPLFQQTPNAVEELKLAREIYEQAVILSVKMEDQDAFERDFCQLKPYYMDTCGIIPPSSVEYPIMGANLLRLLVQNRIAEFHTELELLPTKALDNAYIKHGVELEQSFMEGAYNRVLSARQTAPHETYIYFMDLLVKTVRDEIAGCSEKGYDYLSINDAKQMFKFSSD

SEQ ID NO: 315826 - protein, 50 aa, Zea mays
  Clone ID: MRT4577_51104C.1.pep
ENVFFLHQTQNRYWVACNKHGPGSRHLYGTFNITKQISGGTQLTIILKWT

SEQ ID NO: 315827 - protein, 47 aa, Zea mays
  Clone ID: MRT4577_51105C.1.pep
DQTFMCKNLTLACPGSADIVHTRAVVSLCFVSRRRYSVSRAPETRYE

SEQ ID NO: 315828 - protein, 345 aa, Zea mays
  unsure (1)..(345): unsure at all Xaa locations
  Clone ID: MRT4577_51106C.1.pep
MQQYRSQLEQEVKKLQRQLEEEVDLHMALADAVTQNVAPILKSSMKLPHKAQELLINIASLEITVSNLEKKLNDLYYQLCHERNERLLAENNXDACHLHPPMSTSXSTCTCTWEEHISSLRDLKFGGSESMRSMRQDLFPELEDGQDMGEDPEGQQIVSLNRLLEKHRDSSLNRLLEKHRDEEMQESGSMENEGNENEQPDTLSFEQSILKITSIKGGNLWXHPNELSEEMVRCMRNIFLRLSESLKISPKTSSDCSSSSVERLSGSTLASFSDSSIMPSMLRSPSVDSNHNDETMKEVRNFDPYKGNGKETXRDFGNYRSAAGDLGMPVGRDQLEYGFGGFKEV

SEQ ID NO: 315829 - protein, 197 aa, Zea mays
  Clone ID: MRT4577_51107C.1.pep
MQESGSMENEGNENEQPDTLSFEQSILKITSIKGGNLWSNPNELSEEMVRCMRNIFLRLSESLKISPKTSSDCSSSSVERLSGSTLASFSDSSIMPSMLRSPSVDSNHNDETMKEVRNFDPYKVNGKETRRDIGNYRSAAEVSWMSVGKDQLEYASEALKKFRFAAAALAKPMSPHRYITCLQTVQTLVHIYKNFSI

SEQ ID NO: 315830 - protein, 88 aa, Zea mays
  Clone ID: MRT4577_51108C.1.pep
SGVAPGVHLPPLTPPVFFHQQKLLPFTQLVEATGVSFLPKQQLWPFSHQFGVNPAPFLQLQQLLPFVHLVLKDPGASYQKKIIGGALF

SEQ ID NO: 315831 - protein, 224 aa, Zea mays
  Clone ID: MRT4577_51109C.1.pep
VRLAVSVRNSRVDHASAKGLDFSDRIGKTKRTGYESGDYEMLGEGLGVKETPQQKYQRLLHEVQELTTEVEKIKTTVKESATEEKLTPVVLAKQLAALKQQLVASHLEKLLGPDAAINLADPDGALAKRLLLQLEATKSSKGSSGGKATAGAPPDSSLVTYELHSRPEQDKFSQAAKVAELEKRLTELEATVRCDQDAQNPLSAGLQGACLMETVELLQAKVSA

SEQ ID NO: 315832 - protein, 60 aa, Zea mays
  Clone ID: MRT4577_5110C.1.pep
MAKSKNHTAHNQSFKAHKNGIKKPKRHRQTSTKGMDPKFLRNLRYSRKGNKKSCEAESEE

SEQ ID NO: 315833 - protein, 102 aa, Zea mays
  Clone ID: MRT4577_51110C.1.pep
ILSILVQTWQTGSKYSPIFLKRGEESSSKFLCLLTFKRWPLFLQSETTSQIMFVTCGQRLAESPTFFELWILDLYIPFIRHGSGLPGDQVELFFLPSIFTLL

SEQ ID NO: 315834 - protein, 134 aa, Zea mays
  unsure (1)..(134): unsure at all Xaa locations
  Clone ID: MRT4577_51111C.1.pep
MAYDGIGHSTCMTPTGVARTPMGXFLGALASLPATXFASIAIQPALERANVDPALEHEDYLGNVFSANLRHAPARQAALGAGTPNSDVRTTVNKVVASXGMKSTMFSRQAIQFGITDTALNSCMESMCNAPKFI

SEQ ID NO: 315835 - protein, 130 aa, Zea mays
  Clone ID: MRT4577_51112C.1.pep
MVLMQADPFLSELTNMYERSTEKGSVWVTMKRSSMKCQARLKKMASKGEPVEYRCLVRATDGKRNISTSLSAKEYLKFQASYALVLKAHMHALKKRERKDRKKTVEAEKIPEKEPKKQKKSSSKKSAGSK

SEQ ID NO: 315836 - protein, 73 aa, Zea mays
  Clone ID: MRT4577_51113C.1.pep
DRPYDNNYYTLLTHETGLYTAQRVQSNPDQGVPIFVTRMRLLGRRNTARFPSNRSEKRLFGRNIGPSISTNTF

SEQ ID NO: 315837 - protein, 93 aa, Zea mays
  Clone ID: MRT4577_51114C.1.pep
PKWADPSRIQRSTQNPVSKRFPQSNVSIKNTTEQKISLTILFERPRSSFFIAPKNFALPPFLSPCSSLNLSGTHKYFFDGDKKKLKKKTHKTH

SEQ ID NO: 315838 - protein, 105 aa, Zea mays
  Clone ID: MRT4577_51115C.1.pep
RPWEPSFSFAGSVSPAPSTIGAPLPIPGAAPVRSGRDGWHSQDAPCHSGRCGYLPTHDMVLIYASHHLYIGLCLCSVVIGRMVYPGFSLSYRMHLVIYCPGTLST

SEQ ID NO: 315839 - protein, 795 aa, Zea mays
  Clone ID: MRT4577_51116C.1.pep
MDLLRSHLHKVRIPEPTNRIHKDECCVSFDTPRSEGGLYVDMVSFLGFGREYVEWNFEKTGNPVYLHIVQRRKPEPDEADRPLKKPTLLAIGVEGGFGDQEPEYDETFEIVILPDFICLPFPSVDLPEKVRLAVDKVLLAESADRKEQLAAWVADKKNISAYAMDLQQLDNGVIVPPTGWKCSKCDKTENLWLNLTDGMILCGRKLWDGSGGNNHAIEHYEQTKYPLAVKLGTITADLEAADVFSYPEDDSVEDPLLAQHLSHFGIDFSSLQKTEMTTAERELDANTNYDWNRIQESGKDAELLFGPGYTGLANLGNSCYMASIMQVMFSIHPFISRYFEKQSLKAAFATAPADPTVDLNMQLTKLAHGLLSGKYSAPAKEGQEGIRSRMFKSVITANHPEFSSMRQQDVLEFFLHLIDRVEKANPGDRELNPFSGFKFVVEERVQCPSGKVSYNKRSDNVLSLSIPLHEATNKEQLEAFNEKKAAMNLDGKEVSNEDIVRPRVPLEACLASFSGPEEIPDFYSTALNSKTTVTKTAGFTTFPDYLVLHMRKFVMETGWVPKKLDVYIDVPDTIDITHMRSKGLQPGEELLPEGGSGDDSAEPANPVASEDIVTQLASMGFNYLHCQKAAINTSNTGVEEAMNWLLSHMDDPDINDPISKDSRAYEPSVDEASVQTLISFGFQEDIAIKALKASGGNIEKATDWIFSHPEASTSASADSSTSNVNADDTYIPDGSGRYKLMAFVSHMGTSTHCGHYVAHVLKDGRWTIFNDSKVAVSVDLPKEMGYLYFFQRISN

SEQ ID NO: 315840 - protein, 246 aa, Zea mays
  unsure (1)..(246): unsure at all Xaa locations
  Clone ID: MRT4577_51117C.1.pep
MRFDSLFCATMATLSSALCTRPKAVVYRGPASSPGCPEAIGNLLESSSYHFKVIYAGPNESVDVTDETLQGAAIYAHGGGPNWDKAYRQTKKYQRTIQKFVGNGGHYMGFCLGAYLAGPNDGYDLLPRGVETDQEIERRGAQVKDEDDTVIQVDWTFESGKTDKKRWMYFQDGVVIKGLSAKTPGHVIGRYSYNGDVASSXHPYGKGXVGLVGPHPEADKTWYEDAEIEKSEGVRRDIGHDFIQAT

SEQ ID NO: 315841 - protein, 187 aa, Zea mays
  Clone ID: MRT4577_51118C.1.pep
MRCCCLACSLARSLVHHINNNQVGTSGGPRRAPTEAKLKVAINGFGRIGRNFLRCWHGRGDASPLDVIAINDTGGVKQASHLLKYDSTLGIFDADVKPVGDNAISVDGKVIKVVSDRNPSNLPWGELGIDLVIEGTGVFVDREGAGKHIQAGAKKVLITAPGKGDIPTYVVGVNADQYNPDEPIISN

SEQ ID NO: 315842 - protein, 91 aa, Zea mays
  unsure (1)..(91): unsure at all Xaa locations
  Clone ID: MRT4577_51119C.1.pep
SKQKVDNIHXHWTETFTXDLQNKPFTKQTSIFLKKGAGCFNISLHCPFTPLSRNTKSLILPQMERHQTSSVIQTSYSPIPSLASNLLISDV

SEQ ID NO: 315843 - protein, 53 aa, Zea mays
  unsure (1)..(53): unsure at all Xaa locations
  Clone ID: MRT4577_5111C.1.pep
GAEGVVKGVVVGGTGEAEXEAXVLNVRKKTPPSFWATNQKKKTNRWGRRSPNE

SEQ ID NO: 315844 - protein, 132 aa, Zea mays
  unsure (1)..(132): unsure at all Xaa locations
  Clone ID: MRT4577_51120C.1.pep
YDPAKEAASFXTPQVIXIMNXHAGQIGNGXAPVLDXHTSHIAVKFAELITKIDRRSGKELEKEPKFLKNGDAGMEKMTPTKPMVVETFSAYPPCGRFPARHMSQTVVVGVIKSVKKKAPPGAKVPKAAPKKK

SEQ ID NO: 315845 - protein, 70 aa, Zea mays
  Clone ID: MRT4577_51121C.1.pep
TAIHPEMDIDITTRHRSQASSAGPKLLGIAACPRLCSIRPTSALLPQAADYRSSSCSLGSSSSIPTRPCD

SEQ ID NO: 315846 - protein, 71 aa, Zea mays
  Clone ID: MRT4577_51122C.1.pep
SAPRLCNSCLAGWSLMLSCSKWPSRYGLVIVLPGCSRTNGQDGHSHASKALLTRVEPCKSLVCARVSPPGI

SEQ ID NO: 315847 - protein, 245 aa, Zea mays
  unsure (1)..(245): unsure at all Xaa locations
  Clone ID: MRT4577_51123C.1.pep
MVDKKKKKKKKKKVLILWSVAMASSMLSATTVPLQQGGGLSEFSGLRSSASLPMRRNATSDDFMSAVSFRTHAVGTSGGSRRAPTEAKLKVAINGXGRIGRNFLRCWHGRGDASPLDVIAINDTGGVKQAFHLLKYDSTLGIFDADVKPVGDNAISVDGKVIKVVSDRNPSNLPWGELGIDLAIXEGTGVFVDREGGEKHIQAGAKKVLITAPGKGDIPTYRVGVNAEXYNPDEPIIRNAXSCTT

SEQ ID NO: 315848 - protein, 367 aa, Zea mays
  unsure (1)..(367): unsure at all Xaa locations
  Clone ID: MRT4577_51124C.1.pep
MMCPRLAFQLPKVLPVCEHHKREMSLPSKHVSPRKATKSSFRKQYEGPNRHVSRHTEHQKTKLVMKDRNTGPAHMRSCRPTKQIDCTCSSASLDSSPKTKEVNDAEPRCSKSVKTFENVMAKKRKRPILSYDEDAKAMQMEVRMRRRHRESGVMKLRRSTENSDEAMCPGNSNNQLTNDHTKARKQRRANKDNKTPPVNASVPCTQIDAARLASDQQSFICTRPIDRPYWTGIMKIGQEYISLVAHLSNQACKKVQELSMSLPPLMKVTKHSKLKAWPGRWKASEPTAECVGLYFFSDNMRELDQLVHYLNDHSLVLKYVVGFAKLLISPSVFLPEQCQTFQGKRYLWXGVFKRRMNTGRIHHVNAK

SEQ ID NO: 315849 - protein, 307 aa, Zea mays
  unsure (1)..(307): unsure at all Xaa locations
  Clone ID: MRT4577_51125C.1.pep
MASSMLSATTVPLQQGGGLSEFSGLRSSASLPMRRNATSDDFMSAVSFRTHAVGTSGGPRRAPTEAKLKVAINGFGRIGRNFLRCWHGRGDASPLDVIAINDTGGVKQASHLLKYDSTLGIFDADVKPVGDNAISVDGKVIKVVSDRNPSNLPWGELGIDLVIEGTGVFVDREGAGKHIQAGAKKVLITAPGKGDIPTYVVGVNADQYNPDEPIISNASWHTNCLAPFVKVLDQKFGIIKGTMTTTHSYTGDQRLLDASHRDLRRARAAALNIVPTSTGAAKAVSLVLPNLKGKLNEVXTETXRVPT

SEQ ID NO: 315850 - protein, 81 aa, Zea mays
  Clone ID: MRT4577_51126C.1.pep
FSWKYMASVLSAMGTALCNTPRSCHEANLLTPTVKYTSCHLCSVNELNVTKLNCNTKCHAMPPQNADTSKNLSLQVSNFNQ

SEQ ID NO: 315851 - protein, 105 aa, Zea mays
  Clone ID: MRT4577_51127C.1.pep
KTAREKGRKGLENKGSNRKEGAVKRRPNEAGNRGEPPPSRAFKGRERGAAQAPSGFRNFGKGGRGGTPSNWEKRGKGEVPPLPKAGVFPGFSKYNDGQRRPMNWN

SEQ ID NO: 315852 - protein, 94 aa, Zea mays
  unsure (1)..(94): unsure at all Xaa locations
  Clone ID: MRT4577_51128C.1.pep
DLAGSERVKKXSGSAGKQLKEAQSINKSLFALADVIGALSSDGQHIPYRNHXMLMSDYLXGLSAKKLSFVDLAGSERVKKSGSAGKQLKEAQKP

SEQ ID NO: 315853 - protein, 65 aa, Zea mays
  Clone ID: MRT4577_51129C.1.pep
TNIPTSTNGWNVCGHRSMIGIPLWLQTLKHWLNLLNLVATKSKMMLCFKAYYNYVLVSVFAVCGS

SEQ ID NO: 315854 - protein, 53 aa, Zea mays
  Clone ID: MRT4577_5112C.1.pep
GLPERLNVTLKKTPPPLSTDTLKPHTSFRKSELYSVYINSHDIICSCNSMLIL

SEQ ID NO: 315855 - protein, 80 aa, Zea mays
  unsure (1)..(80): unsure at all Xaa locations
  Clone ID: MRT4577_51130C.1.pep
MLERLPSXVXFEDYLPVXXDRXGDDGLMXELAXGFXLLMDPARXXITVDSLXRNXPLLXXCGMXXADLRXMLXDXDFDCD

SEQ ID NO: 315856 - protein, 172 aa, Zea mays
  unsure (1)..(172): unsure at all Xaa locations
  Clone ID: MRT4577_51131C.1.pep
GGDLEHHRQCEGQHQDKEVIPPDHERLIFAGKQLEDGRTLPDYCIQKESTLHLXVLRLRGDAKKRKNKTYCKPKKIKHKHKKVKLSELQCYNVDDTTSNATRLRKECPNTECGAGVFMDNHFDRHYCCKCGLTYVYNQKEQLLDPICFIRLAYRTSSYSVTRIESHEHLIDG

SEQ ID NO: 315857 - protein, 106 aa, Zea mays
  unsure (1)..(106): unsure at all Xaa locations
  Clone ID: MRT4577_51132C.1.pep
TDGQQEGLNTPYDEYLKGATGRNDIDHDKGTPRIEPEEEGRAHYLKAATXEARAGGSMAEDLDAREEHSXNLTALEEDVKRPKTVSSKEGLGQKFRQPSGTGTTTT

SEQ ID NO: 315858 - protein, 143 aa, Zea mays
  unsure (1)..(143): unsure at all Xaa locations
  Clone ID: MRT4577_51133C.1.pep
MGHGDRCDRTXGDEHDYFRAAHGGDLQDLDAHVDDDPCLCRRATLYDRVSGLHIADGYGRLEVLGKVWDHGEPTDGGNXHKQTPLMLAEIDGMTDCMLKLLQAEANIVMIDYQDWRTCLDHAYYLDRVGXLHAILTAARTTPG

SEQ ID NO: 315859 - protein, 164 aa, Zea mays
  Clone ID: MRT4577_51134C.1.pep
KKGTQDDTLGVATTCNCWWHPPNTRIATTHESKANLELGLPDQWRKQLGAAPGRKGTPPKRQHRSSRSKMSEPRSRAQEHRGRHGGDQRWGASSRAMQGPGQQRSGWRGRGFEGLGREMGGVEREGGCRECKDGRTRCSSPARSRCSRRQAGLGGREAEEPRAE

SEQ ID NO: 315860 - protein, 58 aa, Zea mays
  Clone ID: MRT4577_51135C.1.pep
VALTRPLARLPALLAESLAMVPQFVENSKNHGTNFIGCIKSKLSSKVGFRIFRTVRNY

SEQ ID NO: 315861 - protein, 1064 aa, Zea mays
  Clone ID: MRT4577_51136C.1.pep
MPAKYLGALAEDRRPDLYRQVGCVTGILQAFDRRHHLASSHKRLLPPTGHAPSNPSKGGECTRYSPQVVLEKNSSKTWADSQRAPATELSQTSYSSSPSSSFSSLDGNRSTQQDLSSTDRMLFPERPFKSSPKLKSSFDSDNGLDYPDDALTKSKNMPIVQSSLPTLGIRNLVKDSIYKDSHELSVRISTEEEVKDHPSNCGDQPMQLNGPHHDSTQGKSKGLMDINESLRVLAKLREASWTPPESVHHARLSYDAPRFSREGKEATSKLREVPRLSLDIKEGHLWNREIDSRLDPSLSSADRNSNTVTGSNAAFETQQEQPACKRLPSVVAKLMGLEELPEHNQSTASSHACNTVQENKQDAMLNSLSISYQYEHAPQQERNPDSTVRNLPNSKFPVQTAPWKQQERIVLPRKLPKGSKGAHGREPAAPWNQLKDLDFQQPNKDLRALKQILDSAKGLLENKKREEAFMPKLYNGNHDDQEMASANMRLNRNTNNMWMPEESNAESSFKSPIVIMKPSKSANLYSKVDSSVFPLGGSSDLPQPQTSNSTDRRKASTINRTAKGQYAKLSPRVPTSQPLVSCDRRSYGRNDDSSNNQKSSSLLVTESSTRRQQLPRNSSVSMQKNKNSTSPKLLQRKLDPERRARPPIPSAESNKSERQSGDRNNSETVSPRSKFRRKLVRPQGDDGMPIGLNNRTRSLYQHDNDMSIRSDGSISVASELDIISNDRSTGVNISNFEQGIGTPSGRNPQKVKTSYDASMDVPSVDPSAAISERPSPVSVLDSSFDQEDLFPTSRTPNSLAVDDERETLEEPWKPSVAIQSKNNKLANVASLLEKLQQLSVNKDEDAPPVDHIAFLCETESPDHRYVSEILLASGLLMKDLGSGQTGLQLHSSGYPINPDLFHVLEQRKAGWVSTPDGIHQSRSGTKSDPRRAHRKLMFDTVNELLLQKFEKETAVYALSSFTRAKDPPAKTFSGQQLPKFISSGIEELDMERSSISQKDSSVIPDAEILRRLQGWTSFSKELPGMVLEIERSIFKELVDEVVHGESADGPEMKAAGRRRRRLFA

SEQ ID NO: 315862 - protein, 87 aa, Zea mays
  Clone ID: MRT4577_51137C.1.pep
APLLIPFPLLSSLGCRACLLRISVRRRAGSRCPPARCPARAAPGAGGAPARLVAAPPAWITGLALHVKRWLAQWWPRPGAGPGCPVL

SEQ ID NO: 315863 - protein, 247 aa, Zea mays
  unsure (1)..(247): unsure at all Xaa locations
  Clone ID: MRT4577_51138C.1.pep
LKHCSLKPADDERETLEEPWKPSVAIQSKNNKLANVASLLEKLQQLSVNKDEDAPPVDHIAFLCETESPDHRYVSEILLASGLLMKDLGSGQTGLQLHSSGYPINPDLFHVLEQRKAGWVSTPDGIHQSRSGTKSDPRRAHRKLMFDTVNELLLQKFEKETAVYALSSFTRAKDPPDAEILRRLQGWTSFSKELPGMVLEIERSIFKELVDEVVHGESADGPEMKAAXDREGGSFSDLRNGPAFRAG

SEQ ID NO: 315864 - protein, 977 aa, Zea mays
  unsure (1)..(977): unsure at all Xaa locations
  Clone ID: MRT4577_51139C.1.pep
PGKLGGGPILLRSRGKGRLVVRHRLWAASSAGRLRLPLHRRKRSGARGGPKSKGLMDINESLRVLAKLREASWTPPESVHHARLSYDAPRFSYDGKEATSKLREVPRLSLDIKEGHLWNREIDSRLDPSLSSADRNSNTVTGSNAAFETQQEQPACKRLPSVVAKLMGLEELPEHNQSTASSHACNTVQENKQDAMLNSLSISYQYEHAPQQERNPDSTVRNLPNSKFPVQTAPWKQQERIVLPRKLPKGSKGAHGREPAAPWNQLKDLDFQQPNKDLRALKQILDSAKGLLENKKREEAFMPKLYNGNHDDQEMASANMRLNRNTNNMWMPEESNAESSFKSPIVIMKPSKSANLYSKVDSSVFPLGGSSDLPQPQTSNSTDRRKASTINRTAKGQYAKLSPRVPTSQPLVSCDRRSYGRNDDSSNNQKSSSLLVTESSTRRQQLPRNSSVSMQKNKNSTSPKLLQRKLDPERRARPPIPSAESNKSERQSGDRNNSETVSPRSKFRRKLVRPQGDDGMPIGLNNRTRSLYQHDNDMSIRSDGSISVASELDIISNDRSTGVNISNFEQGIGTPSGRNPQKVXRISLQLCLLSKASLIXMIMYISNTXTMEKIIICNGNSICFWSCINLSPNASCCWARKREWKIKSHDIRCCMSHFYGLCLQKTSYDANMDVPSVDPSAAISERPSPVSVLDSSFDQEDLFPTSRTPNSLAVDDERETLEEPWKPSVAIQSKNNKLANVASLLEKLQQLSVNKDEDAPPVDHIAFLCETESPDHRYVSEILLASGLLMKDLGSGQTGLQLHSSGYPINPDLFHVLEQRKAGWVSTPDGIHQSRSGTKSDPRRAHRKLMFDTVNELLLQKFEKETAVYALSSFTRAKDPPAKTFSGQQLPKFISSGIEELDMERSSISQKDSSVIPDAEILRRLQGWTSFSKELPGMVLEIERSIFKELVDEVVHGESADGPEMKAAGRRRRRLFA

SEQ ID NO: 315865 - protein, 79 aa, Zea mays
  unsure (1)..(79): unsure at all Xaa locations
  Clone ID: MRT4577_5113C.1.pep
TSFASQCSSKDIVHNIEKAFVPPDFNGREQNCKMKLRDDISVTKDHLSVATDIFEDDPSLHMIEIPKTXNITLKFHNFY

SEQ ID NO: 315866 - protein, 229 aa, Zea mays
  unsure (1)..(229): unsure at all Xaa locations
  Clone ID: MRT4577_51140C.1.pep
MKAKIPVILCKLEKXFPHAFFDVMLHLAVHLPDEAVLRGPVQYGWMYPVXRRLLTLKRVVRNMARPEGSIAEAYVANECLTACSRYFDDIDTRHNREGRNKERVDLRKGDFSVFQHGVDLLGAPRLTYLEDNYDRMVWFVLNNCPEVEQYLKIYKEELADQGTPYVQKTHDKQFSFWFKKHIAKLRYVDGEDISDDLFALSCEPDLRVRIFSACLVDGVRYHTIDRERN

SEQ ID NO: 315867 - protein, 63 aa, Zea mays
  unsure (1)..(63): unsure at all Xaa locations
  Clone ID: MRT4577_51141C.1.pep
KWAQLVGWVRKXPLVTWVHKNFQGILTNETRCLMCETITAKNETFFDLSVDIEQNSSLTSCLK

SEQ ID NO: 315868 - protein, 162 aa, Zea mays
  unsure (1)..(162): unsure at all Xaa locations
  Clone ID: MRT4577_51142C.1.pep
DTRHNREGRNKERVDLRKGDFSVFQHGVDLLGAPRLTYLEDNYDRMVWFVLNNCPEVEQYLKYNTLIXLIYVCDLLIIRFDVRINYVSXCRIYKEELADQGTPYVQKTHDKQFSFWVKKHIAKLTYVYGEDISDDLFALSCEPDLLVXIFSACLVDGVRYSH

SEQ ID NO: 315869 - protein, 110 aa, Zea mays
  Clone ID: MRT4577_51143C.1.pep
ARAIRTIPMEGDVVQLIMKIYANLGTYLQNEPLQLLDAVLDSADRPILVLDNDEELSQTPGFLIPLEDKNSYEIGFPLVSISDWDSYQILCQKSSKKLQKNNEETSFKYL

SEQ ID NO: 315870 - protein, 175 aa, Zea mays
  unsure (1)..(175): unsure at all Xaa locations
  Clone ID: MRT4577_51144C.1.pep
MAKMVLLCVLVSFLLMPLASLALTQDFCVADLTCSDTPAGYPXGGRSSVTANDFYFHGLAGQGKIXTHPAGSELLFVTQGTVAAGFISSGSNTVYTKTLYAGDIMVFPQGLLHYQYNAGTGAAVGLVAFSSPNPGLQITDFALFANNLPSAVVEKVTFLDDAQVKKLKSVLGGSG

SEQ ID NO: 315871 - protein, 212 aa, Zea mays
  Clone ID: MRT4577_51145C.1.pep
MAKMVLLCVLVSFLLMPLASLALTQDFCVADLTCSDTPAGYPCKSSVTANDFYFHGLAGQGKINPLIKAAVTPAFVGQFPGVNGLGISAARLDIEVGGVVPLHTHPAGSELLFVTQGTVAAGFISSGSNTVYTKTLYAGDIMVFPQGLLHYQYNAGTGAAVGLVAFSSPNPGLQITDFALFANNLPSAVVEKVTFLDDAQVKKLKSVLGGSG

SEQ ID NO: 315872 - protein, 80 aa, Zea mays
  Clone ID: MRT4577_51146C.1.pep
LAAVSRCHGQNGVALRARLLPPDALGLPSPDAGLLRRRPDLQITDFALFANNLPSAVVEKVTFLDDAQVKKLKSVLGGSG

SEQ ID NO: 315873 - protein, 107 aa, Zea mays
  unsure (1)..(107): unsure at all Xaa locations
  Clone ID: MRT4577_51147C.1.pep
MALQNIGASNKDDAFYRYKMPRMLTKIEGRGNGIKTNIVNMVDIAKALARPASYTXQYFGCELGAQSKFDEKTGISLVNGAHDTSKLAGLLENFIKKYVQRYGXGNP

SEQ ID NO: 315874 - protein, 59 aa, Zea mays
  Clone ID: MRT4577_51148C.1.pep
IRELFLSSHALLELSRVHESSYPASYFLSPCFYFYSGINFSFFLGGFFCSNLACTNYDC

SEQ ID NO: 315875 - protein, 107 aa, Zea mays
  Clone ID: MRT4577_51149C.1.pep
WGPPGPARLQGPRGGAGGPHLFVLEGGRGPPPPLEDPPLVNGLFGGSPGPPPDWGLLRQTPLWPPPAPGLLKKSWGGPFDRFLVRGAPPRGFVFSPPRFWGSPFFLS

SEQ ID NO: 315876 - protein, 104 aa, Zea mays
  Clone ID: MRT4577_5114C.1.pep
HRSVDALIYALHEQTPMLGHANTALKVHRKRIQLHSNLVDTKLSPTAGFHNPSCMLRWKQEPELQLVIYCASFVLPAADVRRMIFSPTAHVALVLGRPNSDCSG

SEQ ID NO: 315877 - protein, 165 aa, Zea mays
  unsure (1)..(165): unsure at all Xaa locations
  Clone ID: MRT4577_51150C.1.pep
NLTQKFSLEIQVDFEKYEGMIKVMEKVVXTVNSMELTXEEHYLLPVACKNVIGIRCASWRIVSSIEYREXGCVNMDRATLIEGYHNKIEVELNKICVGILKLFASHLPPSLIVPKSKVFYLKMKGDYYRILLWRSWPPYPIRLWLMLNLSTLLILLVVSPNRFGF

SEQ ID NO: 315878 - protein, 164 aa, Zea mays
  Clone ID: MRT4577_51151C.1.pep
RRKLLGRPSETVCPSIGLPLVTRILCNFTPDEFCPDPVPGMVLEELNSESLLDRSTDIDMVSTFPVTAAPVVYWAPTLEDVREKVADTACGNPELDRRGSMVQRRGYTSDDDLDALEFPLASLYDKSNPPSPCNNGVAHFSTRQVASMENVRHELLREVWCERL

SEQ ID NO: 315879 - protein, 64 aa, Zea mays
  Clone ID: MRT4577_51152C.1.pep
CVKFKKKKKKKIKKKKKKKRKKIKKKKKKKKNKKKKKKGVSLLKNQFHKILHLKVLTLLKFTYN

SEQ ID NO: 315880 - protein, 92 aa, Zea mays
  Clone ID: MRT4577_51153C.1.pep
LYPWLWMDVISSCRGCTSTCYGTRRRGRRWPDCRSRPRAKWRLVPYCAGVLRGTAVACLAVLSQRRSRVLPSGTCSLSASSSLESAGATLSV

SEQ ID NO: 315881 - protein, 49 aa, Zea mays
  Clone ID: MRT4577_51154C.1.pep
NKRPAVICTYLSPFVGHHLNMFKWVKKAKCLPINLVCLNGMKYTCPEMG

SEQ ID NO: 315882 - protein, 63 aa, Zea mays
  Clone ID: MRT4577_51155C.1.pep
GQERGGKDTFQSHKAFLSAGFIYWYAIRSVSLISKKGFYCLPGLFLSNIYTRQGVFISFMVLD

SEQ ID NO: 315883 - protein, 42 aa, Zea mays
  Clone ID: MRT4577_51156C.1.pep
KENGIPQGIPKPHSPKTTTLKLSIYESQSCAVLSHQSSIQNE

SEQ ID NO: 315884 - protein, 46 aa, Zea mays
  Clone ID: MRT4577_51157C.1.pep
LILVNRAEMLRMAHSVFCPSDCRMKRFFGTAFEISVNLGSLFWRPL

SEQ ID NO: 315885 - protein, 99 aa, Zea mays
  Clone ID: MRT4577_51158C.1.pep
PAGRPAIPAGLAISHTVWREPAAWRIIVAAPRILVVPPHRKGCSCSTGCHRWDPGEVLAIPLPTRARFQVPSSVLSRPVCAASVSASPERLSPGDFEET

SEQ ID NO: 315886 - protein, 102 aa, Zea mays
  unsure (1)..(102): unsure at all Xaa locations
  Clone ID: MRT4577_51159C.1.pep
FMCLFMCLWMXGWAYATLDSTSLVTVRSDPNSLRYPGALPYLILSSRNRLPRGYSIAYAFRHRKKTKQTITFKQRAATEVFLPLPSLNKPFPSXNKLQRKAP

SEQ ID NO: 315887 - protein, 281 aa, Zea mays
  unsure (1)..(281): unsure at all Xaa locations
  Clone ID: MRT4577_5115C.1.pep
VILFQDMLDVVTRDIMEEQDQLGTLLESAHGANSRKHEGIPAGDQQDQLFAKAIKFPVVESNAWTEKIKRLHLLLTVKESAMDVPINLDARRRISFFANSLFMDMPNAPKVRNMLPFSILTPYYKEDVLFSLQNLEERNEDGVSILFYLQKIYPDEWKNFLERVGCKNEEVLREDEQLEEKLCLWVSYRGQTLTRTVRGMMYYRKALELQAFLDMANNDDLMKGYRAMEVMSEDSPLKTQCKAIADMKFTYVVSCQLYGIQKRSXSLAHMNFLRLMPEYPS

SEQ ID NO: 315888 - protein, 57 aa, Zea mays
  Clone ID: MRT4577_51160C.1.pep
HPFCSSIIFWTNNMDYFKVHVVESSFVLPIYPTPTNALWLSFFDMFHFNKSHTSTIH

SEQ ID NO: 315889 - protein, 102 aa, Zea mays
  Clone ID: MRT4577_51161C.1.pep
GSLSARVIIFPFHLAFIMNKVTNDIQGVVSWSIFCPLKRLDEMLLNASIVYQTVLCVSTQSFIVKGGFSCRSSPQENFFHPAVNEGFFFQVQKTLKYPGTGG

SEQ ID NO: 315890 - protein, 90 aa, Zea mays
  Clone ID: MRT4577_51162C.1.pep
MACHTQARMFPPPLLQSPMSNVKMWQAQGFLLWSREGEARAGSRFYSSENAELEQQPTRQMGYQSNCLTARLGAGASERLQYSCLPETRV

SEQ ID NO: 315891 - protein, 83 aa, Zea mays
  Clone ID: MRT4577_51163C.1.pep
RYPRRCSKNGPRSRPPPRMPPRSKSNRQGYPHVPKRGIPHLYPKHCSFCCPAPRGQPGLFLFWLKVMHPKAGALMFVLVTHSE

SEQ ID NO: 315892 - protein, 54 aa, Zea mays
  Clone ID: MRT4577_51164C.1.pep
PFAIPTLSSPKTSLRLWLHHSIPISCLTYNPLWFKRLQSISTHLVCAHSAFNPS

SEQ ID NO: 315893 - protein, 141 aa, Zea mays
  unsure (1)..(141): unsure at all Xaa locations
  Clone ID: MRT4577_51165C.1.pep
GCPRRGRRRCAGASSASPPTRGPATPPAPRAXAPHHXEAAPXAAAAAASRRPGRDAPTAPPPGRRCRRAPPAAAVASASSSCPRSPATRAAAAASACHRTSAALPPPRRRSWPXSASPSPPSTARRDTRLXSPPSPPRRRG

SEQ ID NO: 315894 - protein, 152 aa, Zea mays
  unsure (1)..(152): unsure at all Xaa locations
  Clone ID: MRT4577_51166C.1.pep
PKADLTVYLFALFXKNKKLGPTSKRNYGLFFPDEKKVYDIPFTTEGLKHYRDGGHTPVTGGDQVTKPPMSGGVSKSLNGYTWCVANGDAGEERLQGGLDYACGEGGADCRPIQPGANCYSPDTLEAHASFAFNSYYQKKGRAGGSCYFGGAA

SEQ ID NO: 315895 - protein, 133 aa, Zea mays
  unsure (1)..(133): unsure at all Xaa locations
  Clone ID: MRT4577_51167C.1.pep
MFDRSQPVSMLTKASSQFSAGRCARYIXMGKYTKRVXCGRAVCLPPVPSHLPPDMLELPRGTGAHNKKSAMGTCHLXLTVRNDXELSKLRPSVTIAHPCVPSTIHHTLRPKKSRRKVKAYSGAPSQEFNPAAD

SEQ ID NO: 315896 - protein, 163 aa, Zea mays
  unsure (1)..(163): unsure at all Xaa locations
  Clone ID: MRT4577_51168C.1.pep
MINAYFDIIIGDKPAARIVFKLYDDVXVPKTARNFRELATGQNGFGYAGSSFHRVIPQVMLQGRDFTAHNGTGGKSIYXEKFADENFQLKHTKPGLLSMANAGKNTNGSQFFITTVATSWLDGAHVVFGEDVEGMDAEQEVEKQGRPSGKPKSKVLITASGTV

SEQ ID NO: 315897 - protein, 70 aa, Zea mays
  unsure (1)..(70): unsure at all Xaa locations
  Clone ID: MRT4577_51169C.1.pep
KSYELKGNYEKAFELFGEAAEAGSEAAEVVVGRYYSTGLGVKKSKTKAAEFFKSAADTGXAAGFYFYGEA

SEQ ID NO: 315898 - protein, 81 aa, Zea mays
  unsure (1)..(81): unsure at all Xaa locations
  Clone ID: MRT4577_5116C.1.pep
PAKDVVEQEEFVQGVNXWLNKPKGSVPVAGAFSFWFINEYFIXSSQEHNELVXRSDKTVKSXENTGWCIAKTVEILIMRKA

SEQ ID NO: 315899 - protein, 108 aa, Zea mays
  Clone ID: MRT4577_51170C.1.pep
ALHIYSSRVRPVTVEKEVLMEATARRISPGVSRSHGGDLVDPVVQEGAGDQGPTPPYLILKFLAQVKVFSAVHRSPERAGAPPYMVTIRREREELRAWMLEELPAGSR

SEQ ID NO: 315900 - protein, 114 aa, Zea mays
  Clone ID: MRT4577_51171C.1.pep
QTLLDYRGSRTLCCRLAMSRAEGPEPVQAVFERGRIDGEGDPEPVLASHNTPCNNQAPRNLFPPCHTFHLKNKKKKKVISIKVDATTTCAEAEQMNRSDLPSRATVVYAYSREQ

SEQ ID NO: 315901 - protein, 118 aa, Zea mays
  unsure (1)..(118): unsure at all Xaa locations
  Clone ID: MRT4577_51172C.1.pep
VSHSSVSVLLFAPHSRILMFISEDTSKSASDFSFPKVHSEFIFSSCSFVGLLXSIFKVEKEGASLKAALGCXLFSLGAKHKWFPSRPLXLCFSPLVCCAAXVFLWXXCXCAPFFACSP

SEQ ID NO: 315902 - protein, 61 aa, Zea mays
  Clone ID: MRT4577_51173C.1.pep
RIANYKIKFLQPNNQQTFFPQHYNNMFIFSLIQGNLKLCLTMLSWAVFLKNKGIIGSFFSP

SEQ ID NO: 315903 - protein, 123 aa, Zea mays
  Clone ID: MRT4577_51174C.1.pep
MSSSQSPEPCTPGTPSPVLSVRIVSLDYYMAPPLPGFGFSRSPFHGEEVEEVPVVRIYGSTPAGQKTCLHIHRVLPYFYIPCSEELVCNLEKGDSYITGLLSDLEKALQARGPSKRKHVHGWD

SEQ ID NO: 315904 - protein, 65 aa, Zea mays
  Clone ID: MRT4577_51175C.1.pep
TAVPFQSFLLETTRFWEPMLTLSVSFRHRVNRRWVRLASTKVLFFSPRHSVKCSGVVFWFISVTG

SEQ ID NO: 315905 - protein, 96 aa, Zea mays
  unsure (1)..(96): unsure at all Xaa locations
  Clone ID: MRT4577_51176C.1.pep
YTVITDGLPSRKDXLTPWMAATLIDFYINVFAISVWVAHKESSWISTTIWIVLLICFGSITTCGYIVIQLFKVSYQDPIYHVLLNSHSKYGIPTSL

SEQ ID NO: 315906 - protein, 304 aa, Zea mays
  unsure (1)..(304): unsure at all Xaa locations
  Clone ID: MRT4577_51177C.1.pep
MEEGDVRVDLDKLPIKRLEAIEETGNEHYPPDTSNEEQRLAAIRRIDFSWVIEKDAKKAKKAAEADTAQQAWPWQGLMESLQQAHQELSVVIDLIGTVEANDAVAVASXTKPKSQPNEILVDMAVSAATKLQRLRHLSWYFKQSAKTMEQQFQKETRFXLLNXGSYLXGRVLNVKAVKKLKLLSXVLRLQQNWKVKRQRAVGSPGSEGFMFDLVDSSQLDTTTVLRLSPLSLIPIDQDSSGTLSVQIPQKSLRSLSLKFHGDIVNNAESSAIEKKEGTLTNTTAEAEKDVLADNDVNKSIRHAH

SEQ ID NO: 315907 - protein, 74 aa, Zea mays
  unsure (1)..(74): unsure at all Xaa locations
  Clone ID: MRT4577_51178C.1.pep
QEFGLARFKSNVTKTMNXFEYILAKLQGEAPSKTLVETAKEAKEKAKETALAATEKAKDLATKAATKQQQQQLV

SEQ ID NO: 315908 - protein, 73 aa, Zea mays
  Clone ID: MRT4577_51179C.1.pep
SPPASASAAANGRALVRWDQILPRRFLRVLLVEHDDSTRHIVTALLRKCGYRVDDVADRMKACDVMLERAYDF

SEQ ID NO: 315909 - protein, 58 aa, Zea mays
  Clone ID: MRT4577_5117C.1.pep
ISERCKQHFLFQIGKDTCIQITSISRQYHLVKLFTPLGRRMGQGPTPVGETDQCESAQ

SEQ ID NO: 315910 - protein, 121 aa, Zea mays
  Clone ID: MRT4577_51180C.1.pep
PEALRGLPLAPPMVGPPAYPYFQAQPEPEPQPDPEPDAEEERVKLLKQIEFYFSKENLCSDVYLRQQMDGQGWVDLSLIAGFKKVQGLKKDLQYIKETVQSSSVLEMKDNKIRKHGDWEKW

SEQ ID NO: 315911 - protein, 101 aa, Zea mays
  unsure (1)..(101): unsure at all Xaa locations
  Clone ID: MRT4577_51181C.1.pep
PRXGVXVVQSCDSPXXRRXRVEMKRGKTLXXWDGSFLIPGINXWNSQPPXXYANARXRGCTTRPLPVPGIXTAHRPTXRPLHNDQTGMIPDTTGXGFATDG

SEQ ID NO: 315912 - protein, 158 aa, Zea mays
  unsure (1)..(158): unsure at all Xaa locations
  Clone ID: MRT4577_51182C.1.pep
LFLSSIPXRSXGSGGLRARGXKMKXGRRPEPKIIVWDTWGPGLQWQILGGGGTIGRWCSXGGDPWKAIDXKKSQGERICNQGGGDVGSGSKVLXXQRHPHHRXFFKGVPQFENPLXAKRNTPRRRTPVGVLGTTRAFHHRPRPLFRAPRGFWTTWRES

SEQ ID NO: 315913 - protein, 75 aa, Zea mays
  Clone ID: MRT4577_51183C.1.pep
RPGRPLFFSFSFFDRSPTMQPCTIIITDGEEPTGRRGGDGRTSSPLAHSSTGSCRRGVAPFSRFGPSFPARTLQN

SEQ ID NO: 315914 - protein, 97 aa, Zea mays
  unsure (1)..(97): unsure at all Xaa locations
  Clone ID: MRT4577_51184C.1.pep
MRQGVLAVPFFAVVWGGAFFLGAEAQQRGHQTERIXGSAGNVLKNNPVGGLKVYVSDLPSKSNKKLLKKDPRCLSHMFAGEILLHRFLLSSAVRPLN

SEQ ID NO: 315915 - protein, 34 aa, Zea mays
  Clone ID: MRT4577_51185C.1.pep
TLMLYVVLKNSYYFKQGPLFCGKKYKCWKDLKLV

SEQ ID NO: 315916 - protein, 149 aa, Zea mays
  unsure (1)..(149): unsure at all Xaa locations
  Clone ID: MRT4577_51186C.1.pep
APTTLDSNDDNSILGPTVLDXRLTYIAALIYASFIDTFIXVTDXLSRQATVXRIADDLILSVESDDASPHAAMVAAPDVAXRAAXLGFTALHIKLHATVGNKTKTPAAGVQTALTHLARSXLRIGRIDHVTPDATNITLRIPRMRVYEM

SEQ ID NO: 315917 - protein, 69 aa, Zea mays
  Clone ID: MRT4577_51187C.1.pep
DVSAYVLVLQPPFLNMLNHHWMIQAPCGYLSIIVKGNMVHSVYGHLNVAIAHPRSPRGPVLHTCTYVFI

SEQ ID NO: 315918 - protein, 94 aa, Zea mays
  Clone ID: MRT4577_51188C.1.pep
MDDDTDEMTINDYYASLPFAALFSACKAKGLKVSCVLCYCSEGDNMPESFQLAEAICKLLGHGPEKFHGNGSNGWIVPLSWKSVYGPPPDMSIF

SEQ ID NO: 315919 - protein, 71 aa, Zea mays
  unsure (1)..(71): unsure at all Xaa locations
  Clone ID: MRT4577_51189C.1.pep
NLGINFXQELFSLAILVCFKIGPFLLDESXLVVITALTVEFVPDTKGVPLKSMAQVFVRHWYWGRFVIVPP

SEQ ID NO: 315920 - protein, 57 aa, Zea mays
  Clone ID: MRT4577_5118C.1.pep
NVNASGNFGVNSAPVSPNGQGTPHLYSFTFKMTYLLSNLHCHARIYERGGESFSFLR

SEQ ID NO: 315921 - protein, 142 aa, Zea mays
  Clone ID: MRT4577_51190C.1.pep
PTRIANSQTVKKRFSSPRLVPTLAPSDLAWTPDRDISTTSSGETAVADLLLSRRKNASAADEDGTTPRTGSTTSVRPTASPPLWPTTCSSATPSSCSDPRPLSWLTGLYQLFLILMINMQKQQRLHIMLLYGSISCWLPDMT

SEQ ID NO: 315922 - protein, 304 aa, Zea mays
  unsure (1)..(304): unsure at all Xaa locations
  Clone ID: MRT4577_51191C.1.pep
MAGAQSWRTYLCCVGGSAAVEDDGSTLRRRRRRGGSGSSSSKDSPRSSSSRMSLTSLGSSSETLSPEDLSLTLSGSNLHAFTYAELRSATASFSRANFLGCGGFGPVYRGAVGEALRPGLRAQDVAVKYLDLEGGAQGHKEWLAEVFFLGQLRHKNLVKLIGYCYEAEHRMLVYEFMSFGSLENHLFKSTNGALPWMTRMKIAVGAAKGLAFLHDADPPVIYRDFKASNILLDSDYNTKLSDFGLAKDGPXGDETHVTTRVMGTHGYAAPEYILTGHLTAKSDVYSFGVVLLELLSGRQSVDRS

SEQ ID NO: 315923 - protein, 281 aa, Zea mays
  Clone ID: MRT4577_51192C.1.pep
MEFALVESESFSPSCPTLIMPALSIGNVGQLAVDLLISSSRARRVAYLDEPSVLPCAGNDAFGPDAVGDLALALEAYESTSHKLGFIQQRSPVTTGMMVSFAKNVADFISSIGKNHIVIISSLDSGKRRVIDASSDMQVYYLSSCNEDGSDPEYEKLGWKKLEDYDPSQKRWNCLASLVEGGGLSEDLDDDTDEMTINDYYASLPFAALFSACKAKGLKVSCVLCYCSEGDNMPESFQLAEAICKLLGHGPEKFHGNGSNGWIVPLSWKSVYGPPPDMSIF

SEQ ID NO: 315924 - protein, 66 aa, Zea mays
  Clone ID: MRT4577_51193C.1.pep
LNSVSLNPSRDKFVWDGHKNGIFSVQSMYHLLMYNPNNNRNKMIWRLKIPLKIKVFLWYLGRGAIL

SEQ ID NO: 315925 - protein, 138 aa, Zea mays
  unsure (1)..(138): unsure at all Xaa locations
  Clone ID: MRT4577_51194C.1.pep
RYHSEGPTQQSKCLPQAAPTAXNPSLPSEAHPGSLRRLKTAFSPNRNSMRSASPSSIISSSTTPLTRNSSPHSHRSSGSSIRQLLAVRRKPSMYEFEMEEEKHLFEQELDVLEPRPSMGRGTSEVHVVGIFEVLDGKC

SEQ ID NO: 315926 - protein, 43 aa, Zea mays
  Clone ID: MRT4577_51195C.1.pep
KGCPKFFVRPQKKKKKKKKKKKKKKKKKKKKKKKKKKKKKPQT

SEQ ID NO: 315927 - protein, 139 aa, Zea mays
  Clone ID: MRT4577_51196C.1.pep
MALSGFAGVYTEVIIKKNPSRNINAQNFWLYIFGMLFNLVAICVQDFDAVMNKGFFHGYSFITVLMILNHALSGIAVSMVMKYANNIIKVYSTSVAMLLTAIVSVFLFGFHLSLAFLLGSTVVSVSVYLHSVGKLQQRN

SEQ ID NO: 315928 - protein, 140 aa, Zea mays
  unsure (1)..(140): unsure at all Xaa locations
  Clone ID: MRT4577_51198C.1.pep
WLPGGCXXXXXXXGXWAWCGCRVRWXCRGXXGXRPCCPRSRAARXCXWRXXSRXXXGRRRKKKALAPPPAXLPSXXPXXAXXXRXXGXARXGXXXXXXXXXLAVAXGFLLPXLLVXSPALLLRACXVNWXVPXAGVXWCV

SEQ ID NO: 315929 - protein, 93 aa, Zea mays
  Clone ID: MRT4577_51199C.1.pep
TRIFKVIVTATLTKGRELCGSKYKKRLSGNQANLKRGILCDKEEPLYTEKCNYLHFNGFMIHELNDSTVDLEDKQHYSVRWMVLEELTEADKR

SEQ ID NO: 315930 - protein, 169 aa, Zea mays
  unsure (1)..(169): unsure at all Xaa locations
  Clone ID: MRT4577_5119C.1.pep
MARTKQTARKSTGGKAPRKQLATKVRLYLPVPICCSDPLDGSRCKTALTRRRLLFRCXARKSAPTTGGVKKPHRYRPGTVALREIRKYQKSTELLIRKLPFQRLVREIAQDFKTDLRFQSHAVLALQEAAEAYLVGLFEDTNLCAIHAKRVTIMPKDIQLARRIRGERA

SEQ ID NO: 315931 - protein, 116 aa, Zea mays
  unsure (1)..(116): unsure at all Xaa locations
  Clone ID: MRT4577_511C.1.pep
FLFFFFFFFFFGVFFFFFFFFFFFFFFFLGGQSGDIPGAKXYFFMDLPPPFFLLRPCAGGNLDGGARGXLIEGEGQGFAPPLLGAPKHGXKKFALAEPGGHPGNSGPDPEGDPTFP

SEQ ID NO: 315932 - protein, 62 aa, Zea mays
  Clone ID: MRT4577_51200C.1.pep
WVWRTAYARLLVMLIKTEFCIINACQLVYIVLDATHQECYSLAVAEHSLCCAVSSVNMDLRC

SEQ ID NO: 315933 - protein, 113 aa, Zea mays
  unsure (1)..(113): unsure at all Xaa locations
  Clone ID: MRT4577_51201C.1.pep
PCVRDQCLKDGVNXSXTDSCGGTPENRCRFXTGSTHAEGDKSGADMVRIWLXPFARYSEAPDSHPEALGPDMEHALNESEIVYWHMEQPRLGELGETLATRYRLGRIRYALMG

SEQ ID NO: 315934 - protein, 91 aa, Zea mays
  unsure (1)..(91): unsure at all Xaa locations
  Clone ID: MRT4577_51202C.1.pep
MASLANNIMVGGAILAALGCGDSCGPPNVPPGPNIITNYNGQWLIVRATWYCQSNRAXTPDNRXLCWIKNVNLPPYIFMTACGNVPIFNDC

SEQ ID NO: 315935 - protein, 103 aa, Zea mays
  Clone ID: MRT4577_51203C.1.pep
DVGNNGGHARHGISDNVLQEVEERALGVPPEEVRVISREFVGVNSQYVHVVEVIDVVVREEAVEVVSLGFKTQVGSIVSNTKFLDCQVYISWEYHVNVVFGVV

SEQ ID NO: 315936 - protein, 77 aa, Zea mays
  unsure (1)..(77): unsure at all Xaa locations
  Clone ID: MRT4577_51204C.1.pep
IRCATNLYVSERLSCRSVRVXRDHVHITAVPYSRSTRVVVGASSRCIQSVAYTLHRIYVVSKSYDVYKCMRHDDRLS

SEQ ID NO: 315937 - protein, 127 aa, Zea mays
  Clone ID: MRT4577_51205C.1.pep
VVSGKGKENRGKDIVRNSYKTELARQILLSFIVKSVHDSLGPSRAEPERKPSGSDEASNEQTSVLGKNASGSGRKDPDKQEKATEVTKGLKDTEGFTVVSKRRRRPQPFMNPINGLYSQPSICTSVS

SEQ ID NO: 315938 - protein, 72 aa, Zea mays
  Clone ID: MRT4577_51206C.1.pep
TVQTTQTKSSNQQAAARTQRTAMASLTMMASVAGRGGGRAFARRQLRRGQVPQGRSRPAPGHASSNRCQARR

SEQ ID NO: 315939 - protein, 51 aa, Zea mays
  Clone ID: MRT4577_51207C.1.pep
ESLGKRRVLPIRLFRVETCSPVINNWSTRLPFVTANEKTCMQTWRPNIFKG

SEQ ID NO: 315940 - protein, 157 aa, Zea mays
  Clone ID: MRT4577_51208C.1.pep
MEPPYFFVNKLEHVSTLRLSSVNCSFEARSNFSWIGDLQSLKTLKISDCYSTKTMPSWIGNLTSLRSLDIRYCGSIGPIPQLIDNLTTLEYLTISDCAFTGQLPSSVGNLENLRFLQISYNYQGLSGPITPTIGHLNKLTVLILRDCSFSGRIPNTI

SEQ ID NO: 315941 - protein, 157 aa, Zea mays
  unsure (1)..(157): unsure at all Xaa locations
  Clone ID: MRT4577_51209C.1.pep
TGPGRPPEGGKPNTRXPAQGGPSPGPTRAKPRAKPAPGGKGNPVTIPNKKKPGSKKKKARGAKGGSQPKQIGGGKPPPPQAENQTPPPQKKKGQPPGRGGGGKGRPPPSPPTDTGRRGRRLRGXVRSPKGGGAGPHKTRGQRRKKHGNKRPGKGPEP

SEQ ID NO: 315942 - protein, 169 aa, Zea mays
  unsure (1)..(169): unsure at all Xaa locations
  Clone ID: MRT4577_5120C.1.pep
MARTKQTARKSTGGKAPRKQLATKVRLYLPVPICCSDPLDGSRCKTALTRRRLLFCCXARKSAPTTGGVKKPHRYRPGTVALREIRKYQKSTELLIRKLPFQRLVREIAQDFKTDLRFQSHAVLALQEAAEAYLVGLFEDTNLCAIHAKRVTIMPKDIQLARRIRGERA

SEQ ID NO: 315943 - protein, 46 aa, Zea mays
  Clone ID: MRT4577_51210C.1.pep
NLCLQEPHKSPAPDDNKDCAKYTADGTDEGTIPHGTDMSHEPQDGQ

SEQ ID NO: 315944 - protein, 70 aa, Zea mays
  Clone ID: MRT4577_51211C.1.pep
AQMIDEAEGLEKIEILQSHDNNDIYDKAVKILETFWTEDNEKEGNDENHAPQSGFQFGSTNVPPGQFNFI

SEQ ID NO: 315945 - protein, 62 aa, Zea mays
  Clone ID: MRT4577_51212C.1.pep
LAIAIGEVQEVAFSAGGNFIRGWDGHTRPPVEVLKMFWGGFSQGFLETNVFELGGLYGPSWP

SEQ ID NO: 315946 - protein, 57 aa, Zea mays
  Clone ID: MRT4577_51213C.1.pep
PVVMFAWGSTQVIRRIIVGLCTACVVTRIVSAWYFARAIGRQCRVLEPLLGKYHTWR

SEQ ID NO: 315947 - protein, 111 aa, Zea mays
  Clone ID: MRT4577_51214C.1.pep
PPGQGGRPPPVEGRPLGFRQLPPFCQLPPRAFPGVPRGQQPRGVAQVCPAPRIQRRGVGFCPNKGPPCPAPSGLLGGPPISFLGGPAPVNGGLLILFRSRGPFSFSWGPGG

SEQ ID NO: 315948 - protein, 74 aa, Zea mays
  Clone ID: MRT4577_51215C.1.pep
QNFGSLVIAQNPRKMIFLRVFKRWPVYQYYVFNVPKMSKVCDVKKNSRRMRKTLGCFVERKNPEPKKRWLVLQK

SEQ ID NO: 315949 - protein, 61 aa, Zea mays
  Clone ID: MRT4577_51216C.1.pep
STWCRTLSLTFISPSTISCVSQASFGVPIDTPSTLHAPMGAIRLCKLSEYGHPGYMLIIQY

SEQ ID NO: 315950 - protein, 98 aa, Zea mays
  Clone ID: MRT4577_51217C.1.pep
LCAGSLGSVIRSLGSIVLAGCCSLFPPLRLGTWEDLSFVDNYNSSSAESLVLCWFSVLLVPRFWSAEISRSWRQQMSRMIIFSHEYVDMATLNISQLV

SEQ ID NO: 315951 - protein, 117 aa, Zea mays
  Clone ID: MRT4577_51218C.1.pep
SGNAHSGDLKRSWLTQLVFKKKKKKKKKKKKKKKKKKKKKKKKKKKKKKKKKKKKKKKKKKKKKKFSGPPPPFFFRGKKKKKPFSPQKKKRGRFFFSPSKPGRKAKTPGGPPQKRAL

SEQ ID NO: 315952 - protein, 218 aa, Zea mays
  unsure (1)..(218): unsure at all Xaa locations
  Clone ID: MRT4577_51219C.1.pep
DHLNPRVQGERSAWLNWLRSDAVGFDGWRLDFAKGYSPAVARMYVESTGPPSFVVAEIWNSLSYSGDGKPAPNQDQCRQELVDWARAVGGPAMAFDFPTKGLLQAGVQGELWRLRDSSGNAAGLIGWAPEKAVTFVDNHDTGSTQKLWPFPSDKVMQGYAYILTHPGVPCIFYDHMFDWNLKQEISTLSAIXARNGIRAGSKLRILXADADAYVARRR

SEQ ID NO: 315953 - protein, 100 aa, Zea mays
  unsure (1)..(100): unsure at all Xaa locations
  Clone ID: MRT4577_5121C.1.pep
FTKRGTRFFFFWFIFWFFPSLCPLCLVALVLLSRPLFGGVLSLSAWGGGGVXASLWWAPGLACGRVSPFSLPLGVELVPCVLSLFALVALLLMPCLAGGG

SEQ ID NO: 315954 - protein, 44 aa, Zea mays
  Clone ID: MRT4577_51220C.1.pep
LCFMKTARRKRPQWQPDKGNTTVGDLNLGKNHTTHTLITTLNAY

SEQ ID NO: 315955 - protein, 119 aa, Zea mays
  unsure (1)..(119): unsure at all Xaa locations
  Clone ID: MRT4577_51221C.1.pep
TRENGEKAMAKPIIXHSLESIHLLXDADSIQVGRHSIINRGPREDATRIGSTGVVRRQAVDISPLRRENQTIYLLTTXARESAIKNIKTIAECLADESINTANGSFNSYAXRKRNKIER

SEQ ID NO: 315956 - protein, 190 aa, Zea mays
  Clone ID: MRT4577_51222C.1.pep
NRKSHPHSQKKKKKKKKKKKKKKKKKKKKKKKKKKKKKKKKKKKKKKKKKKKNFSPAPSPLGGAKKGGAPPGGGGGVFPPPPGAGGAGKLKKKNLFFPLPKNWVLGKKGGGAKQRNFAQMGKRATPKTGGGGTLGAPFKKINLWGTKPSQKNPPPRGLGKSPLKWAPGKYPPPKQKGGGFWRVFRGKFCP

SEQ ID NO: 315957 - protein, 154 aa, Zea mays
  unsure (1)..(154): unsure at all Xaa locations
  Clone ID: MRT4577_51223C.1.pep
PHPHRTTASTNRVRSIPPXPSLEREASLPSATFSCPPVAETNKENYTLIRREATTDRASXRKQLRAPGHMYVQNHDQSTCTRPNLYNKVQHRTSPPPMAITRYSKKNPXHIITHTGHGNEATRERLVQNRTQPNTCPXKXASNTRNDPXGNKSY

SEQ ID NO: 315958 - protein, 76 aa, Zea mays
  Clone ID: MRT4577_51224C.1.pep
YKQVTLMYKNCLLPRALEWYHQPFVIIESAIRRSIAQCSLLDPVQVLTMPVCLRCHAICNIPLCMNNTSVLQPTRV

SEQ ID NO: 315959 - protein, 101 aa, Zea mays
  Clone ID: MRT4577_51225C.1.pep
KSLYTGYRTFHKPPSSDLKHPTTTCERCTMASGARISRSSPSSRSAAASRRPPRRTSSPDRSTPARPAESPHPHPRRPPLPPPAAARARPDAWADAWADAW

SEQ ID NO: 315960 - protein, 78 aa, Zea mays
  Clone ID: MRT4577_51226C.1.pep
LSKRPQYTNRIYQAKMIQCVGLSQKVINFCYLASWQSKVSFQKLITSLLQIIMMQKYNVVTHSKVRAWRLTTALRLSN

SEQ ID NO: 315961 - protein, 90 aa, Zea mays
  Clone ID: MRT4577_51227C.1.pep
GDKIFPREKVFPFFSPSLVPSWVPLLTPPSFLEFPLRGVGAGVKKKKKKKKKKKKKKKKKKKNKKKKKKKKKKKKKKKKKQKKKKKKKKL

SEQ ID NO: 315962 - protein, 199 aa, Zea mays
  unsure (1)..(199): unsure at all Xaa locations
  Clone ID: MRT4577_51228C.1.pep
AASFNXILTSSGAAKTVGKVFPDLNGKLTGMSYRVLTVYVSVVDLAFIIDYGASYXRIXRAIKTAPKGPLKGIMGYVXSRIWXTDFLGDSRSSLFEAKAGVALXAHFVYLVCWLYKEXGFTIRVVYMICHMFYTQYTGFFPLLFMDGWFLCTLKNSVLGSYYGLSCSGSVRTYLAIVWPLANPGCCQPCELFDVKFIVI

SEQ ID NO: 315963 - protein, 99 aa, Zea mays
  unsure (1)..(99): unsure at all Xaa locations
  Clone ID: MRT4577_51229C.1.pep
XRMGDFWXPSKXQIXFCXPXXLQXAHLXXPXACXXXIWGPXKXXVVXCXXLXXFEGGGGWGGXXKATXXXLXSLVCXWTESLGMKTLXXVCXSSPNWGF

SEQ ID NO: 315964 - protein, 71 aa, Zea mays
  Clone ID: MRT4577_5122C.1.pep
MNIFDRKINFDALVIFSHITPSTQQHLKKVYASFALCMFVAAAGAYGPMVTHFIQAGLMSALSSLIVMMWL

SEQ ID NO: 315965 - protein, 138 aa, Zea mays
  unsure (1)..(138): unsure at all Xaa locations
  Clone ID: MRT4577_51230C.1.pep
AARVFQLTRELGHKSDGETIEWLLQQAEPAILAATGTGTIPANYSSLNISIRSGAAAPAARAAPFPALALHPHHHHQAAPAHDMSXMMAGYHHHLLPPQPEPQEDPSAGDAYMRKRYREDLFKEDDERQDPSAPKARE

SEQ ID NO: 315966 - protein, 136 aa, Zea mays
  Clone ID: MRT4577_51231C.1.pep
GALFFFFFFFFPGKKGSYNNYPTTNSRGGKTKAPPHQIAPAPPGPLFFFPPRICKPPAEKKKQHKSESWDFLFLAGSGEKCLWKLTKCLSPQHLGRPRVYPEAGGFPFSNSGHGKKKHRKKWLGLRTPHIPMLPNR

SEQ ID NO: 315967 - protein, 63 aa, Zea mays
  Clone ID: MRT4577_51232C.1.pep
FIPKKGTFHLHFFRQRKKFVCPFFKTGGFQRFPPNFLLCQAFKKLNGLLVFPVVFFFRIKRRL

SEQ ID NO: 315968 - protein, 173 aa, Zea mays
  unsure (1)..(173): unsure at all Xaa locations
  Clone ID: MRT4577_51233C.1.pep
RITHHPLRVATGGDLAXVQRTGCTITKTTXSVVKVFXRIDPKSQASWAXRARIRSAVSRXGMGQGEFSAARGHLSAPDKESWXDGAEYDEGEDGAMGHESDSLYWQGVVAPPPQWCPGIGPQWFRNRGCLYRLANILRRWESACSCWSLFACLSSCGLHVGVLTPRKKKKKKR

SEQ ID NO: 315969 - protein, 42 aa, Zea mays
  Clone ID: MRT4577_51234C.1.pep
MVSGSGVCAKHRCVDALQHMLGRLSYIIAKELLNGHKVVVVR

SEQ ID NO: 315970 - protein, 98 aa, Zea mays
  unsure (1)..(98): unsure at all Xaa locations
  Clone ID: MRT4577_51235C.1.pep
APPGDPAPQNGRXVARVGFRLGGRGNPAPKKGAXTSTSSDPPGGGAYXLSPHYLDRSLVQDYRFHPVGLRKPGEYLHFQGGSLDHNLANNEAPGGGPH

SEQ ID NO: 315971 - protein, 94 aa, Zea mays
  Clone ID: MRT4577_51236C.1.pep
IVEFENCKVLITDQKITSIKEILPILEKTTQLRAPLFIIAEDITGEALATLVVNKLRGILNVAAIKAPSFGERRKAVLQDIAIVTGVRSRMRPR

SEQ ID NO: 315972 - protein, 87 aa, Zea mays
  Clone ID: MRT4577_51237C.1.pep
DFVQLFFLVFVFFQLVFFLCFFFYFFFCANYHIKKQENQEKVFLLNRSIHTCNLKWLVSTITCIGSAAVHLHTPNIHPNTTDKDLNI

SEQ ID NO: 315973 - protein, 213 aa, Zea mays
  Clone ID: MRT4577_51238C.1.pep
MWVRPWTIKAAMKARRDPGRGAERRGRRALMAASQRITRSGRGAEGEEGVDGGCGIGSRQRITGSGRGAEGQEGVCDSRPRRRRKRERERGGGGGPLPVDHGGDESASESGAEGEDRSKRLLEQRRADKAEQAAKSISRICLDVDKLATKARKGCIVWGRRASHGEGDGAKNGGGVAASSKICVGGGYGLVGVVARIAGRQWRPSIDGEPRGR

SEQ ID NO: 315974 - protein, 572 aa, Zea mays
  Clone ID: MRT4577_51239C.1.pep
MASANAISTASLLRPLSQGRATRSQRFVVRANAKDIAFDQKSRAALQAGVEKLANAVGVTLGPRGRNVVLDEYGNPKVVNDGVTIARAIELYDPMENAGAALIREVASKTNDSAGDGTTTASVLAREIIKLGLLSVTSGANPVSLKKGIDKTVQGLIQELENKSRPVKGGGDIKAVASISAGNDEFIGSMIAEAIDKVGPDGVLSIESSSSFETTVEVEEGMEIDRGYISPQFVTNLEKSIVEFENCKVLITDQKITSIKEILPILEKTTQLRAPLFIIAEDITGEALATLVVNKLRGILNVAAIKAPSFGERRKAVLQDIAIVTGAEFLAKDLGLLVENATEEQLGTARKVTIHQTTTTLIADAASKDEIQARIAQLKKELAETDSVYDTEKLAERIAKLAGGVAVIKVGAATETELEDRQLRIEDAKNATFAAIEEGIVPGGGAAYVHLSTVVPKIKEAIEDPDERLGADIIQKALVAPASLIAHNAGVEGEVVVEKIKESDWEVGYNAMTDKYENLMEAGVIDPAKVTRCALQNAASVAGMVLTTQAIVVEKPKPKPQVAEPPEGALTV

SEQ ID NO: 315975 - protein, 136 aa, Zea mays; identical to SEQ ID NO: 250043
  Clone ID: MRT4577_5123C.1.pep

SEQ ID NO: 315976 - protein, 92 aa, Zea mays
  Clone ID: MRT4577_51240C.1.pep
QKPLLRQPSGPTSSPNSVWTGLYKNKECFLDLSPVQGPFVVYSDVGTRFAHCVPCYCILDIGKFWSCISQDWQVRLAQVISCVYRLSLPYTK

SEQ ID NO: 315977 - protein, 149 aa, Zea mays
  Clone ID: MRT4577_51241C.1.pep
PWRRARWWSVSLLLSWPRLLRPTTTRASRTFAGCRVQKDVGKGDKSGDKGTAEKFAIYQKHRSSLADTVQFRRPAAPTSSVNADIVGTSTLQSASLPKQESSTATSKSYTFREGDRVRYVGPAQLSSLSQRLLSFCWLRCWKRDIMWCG

SEQ ID NO: 315978 - protein, 129 aa, Zea mays
  Clone ID: MRT4577_51242C.1.pep
DRLQLELLAPLQDAESQKDVGKGDKSRDKGTAEKFAIYQKHRSSLADTVQFRRPAAPTSSVNADIVGTSTLQSASLPKQEPSTATSKSYTFREGDRVRYVGPAQLSSLSQRLLSFCWLRCWKRDIMWCG

SEQ ID NO: 315979 - protein, 66 aa, Zea mays
  unsure (1)..(66): unsure at all Xaa locations
  Clone ID: MRT4577_51243C.1.pep
GPTFIVPATQNVWMDVYSLPVPGXGGKTCAQXLFYEAGCNTPSCPYCSTCXGGPGYTFAQLNEPNG

SEQ ID NO: 315980 - protein, 144 aa, Zea mays
  unsure (1)..(144): unsure at all Xaa locations
  Clone ID: MRT4577_51244C.1.pep
MENGGGGGGDGGKSDVPADANEHCPGTQSEEAGKADACAGCPNQQICATAPKGPDPDLVGIVERMATVKHKILVLSGKGGXGKSTFSAQLSFALAEMDCQVGLLDIDICGPSIPKMLGLEGQDIHQSNLGWSPVYVESNLGVMS

SEQ ID NO: 315981 - protein, 134 aa, Zea mays
  unsure (1)..(134): unsure at all Xaa locations
  Clone ID: MRT4577_51245C.1.pep
MAKNAPLAIAALILIAGSLVLLFFTILAGVTDTTPLNKTYFLRADTSGITGARSVTQWTYFYFCGEGNNDCSSARPAPAFGRPGXGGASNAXEDIIGSHGGGTTSTHYFYMWRXGWVFFLIALFFETFAFFGAF

SEQ ID NO: 315982 - protein, 309 aa, Zea mays
  unsure (1)..(309): unsure at all Xaa locations
  Clone ID: MRT4577_51246C.1.pep
GIFKISCLQVDSRASTKYATSSDEENSSDDEDNLLALFANLNMQQKEKLNELIGAIHEKDELLDSQEDFLIKENKKHVKVKNAYAQEVEKCEKLTSELSTCHDIISNLRNENAKLIAKVEKLDVCDDSIVSLRNDNASLITKIDKLNASLSSLKIENEKLIAKAKDLNVCNVSISNLKNENAILHAKIDELNACKPSTSSVDHVTICTRCRDINVDAIHDHLALIKQQNDHIAQLSAKINEHDLENEKFKFARSMLYNGRRPGIKDGIGFQQGDNVKLKTPKRLSNFVKGKAPWXQDKKGYILYPTGYP

SEQ ID NO: 315983 - protein, 466 aa, Zea mays
  Clone ID: MRT4577_51247C.1.pep
MQQKEKLNELIGAIREKDELLDSQENFLIKENKKHVKVKNAYAQEVEKCEKLTSELSTCHDIISNLRNENAKLIAKVEMLDICDDSIVNLMAKDGKNKKLKSRASTKYTTSSDEGSSSKDEDDLLTFFANLNMQQKEKLNELIGAIHEKDELLDSQEKFLIKENKKHVKVKNAYAQEIEKCENLTNELSICHDTISNLRTENASFIAKVEKLNAYLNVCNDSISNLRNENAILHAKIDELNVCKQSTSTVDHVSICTRCRDIDVDATHDHLALIKQQNDHIAQLTTKINEHEIENENFKFARSMLYSGRRPGIKDGIGFQQGGNVKLNAPKKLSNFVKGKAPMVQDNEGYILYPAGYPEHKIRRIHARKPYNVSHHALMYKNEASSSRQSTHVKLPKKKYPTASNEPIISFKTFDASYVLTNKSGKVVAKYVGAKHKGSKTCVWVPKVLVSNVNRPKTVWVPKNKA

SEQ ID NO: 315984 - protein, 62 aa, Zea mays
  Clone ID: MRT4577_51248C.1.pep
MFILAVTSFRFVEHAPVFLLLASRQGSLQWVTVFTANTIVAVSFQNMPRQFNLAMLGISFMI

SEQ ID NO: 315985 - protein, 307 aa, Zea mays
  unsure (1)..(307): unsure at all Xaa locations
  Clone ID: MRT4577_51249C.1.pep
CLQVDSRASTKYVTSSDEDNSSDDEDNLLALFANLNMXQKEKLNELIGAIHEKDELLDSQEDFLIKEDKKHVKVKNAYAQEVEKCEKLTSELSTCHDTISNLRNENVKLIAKVEDLNDCDDSLVKLKNNNANLIAKIDKLNESIASLNIENDKLITKAKNLNVCNDIVSNLRNENVMLHAKIDELNVCKPSTSTNEHVTICTRCRNVNVDTIHDHLALIKQQNDHIAQLSAKINEHDLENEKFKFARSMLYSGRRPGIKDGIGFQQGDNVKLSAPKKLSNFVKGKANMAQDNEGYILYPAGYPEHII

SEQ ID NO: 315986 - protein, 76 aa, Zea mays
  Clone ID: MRT4577_5124C.1.pep
EKVSMKFFTFNRYSLHLVEISLDLGLVCACDDPCGVSVCYNMYHTFDESGDGIDQGCDQVRLKLYQYHGYSLPLVE

SEQ ID NO: 315987 - protein, 43 aa, Zea mays
  Clone ID: MRT4577_51250C.1.pep
NSSCHPSASTYPGLNFQLCQQPLLPLSSSLTVLPSFFIHTILS

SEQ ID NO: 315988 - protein, 484 aa, Zea mays
  Clone ID: MRT4577_51251C.1.pep
MAFIIKSFHQILKQRRGKEYKPRSKKVCYKCGKLDQFIAKCPLSSDNDRADDKKGKRREKMRYYKKKGDDAHICREWDSDESSTDSSSDEDAANIAVNMGLLFPNVGHKCLMAKDSKKKVKSRASTKYATSSDEENSSDDEDNLLALFANLNMQQKEKLNELIGAIHEKDELLDSQEDFLIKENNKHVKVKNAYAQEVEKCEKLSSEFSICHDTISNLKNENAKLIAKVEKLNVCDNSLVNLKNDNASLISKIDKLNESLSSLKIENNNLIAKAKDLNVCNVSISNLRNENAILHAKIDELNACKPSTSIVDHVSICTRCRDINVDAIHDHLALIKQQNDHIAQLSTKINEHDLENEKFKFARSMLYNGRRPEIKDDIGFQQGDNVKLNAPKRLYNFVKGKALMAQDNEGYILYSPGYLEHKIRRIHSRKSHSGSHHVFMYKCEASSSRKSTHVKLPKKKSPIASNEPNVSFKTFDASYVLTNK

SEQ ID NO: 315989 - protein, 157 aa, Zea mays
  unsure (1)..(157): unsure at all Xaa locations
  Clone ID: MRT4577_51252C.1.pep
QQVDSRASTKYATSSDEENSSDDEDNLLALFANLNMQQKEKLNELIGAIHEKDELXDSQEDFLIQENKKHVKVKNAYAQEVENCEKLTSELSTCHDIISNLRNENEKLIAKAKDLNVCNISISNLRDENAILHAKIDDLNSCKPSTSIVSHVSICTK

SEQ ID NO: 315990 - protein, 99 aa, Zea mays
  unsure (1)..(99): unsure at all Xaa locations
  Clone ID: MRT4577_51253C.1.pep
NPPIHPGNEWGEPNQQHTSLFFYIKQHQPSYFYPPKNNSLTKNYNPTQNNTPPPXPNFYPPXITPTPXXFTXFPPPXXPXPIFXKPPPFFSPPPFFPPP

SEQ ID NO: 315991 - protein, 156 aa, Zea mays
  Clone ID: MRT4577_51254C.1.pep
QHDSRSSTKYATSSDEENSSDDEDNLLTFFANLNMQQKEKLNELISVIHEKDELLDSQEDFLIKENKKHVKVKNAYAREIEKCEKLTSELSTCHDVISNLRNDNAKLIAKVENLNVCDDSLVSLRNDNASLVTKIDKVNASLSSLKIENGKLIAKA

SEQ ID NO: 315992 - protein, 148 aa, Zea mays
  unsure (1)..(148): unsure at all Xaa locations
  Clone ID: MRT4577_51255C.1.pep
PAGSRASTKYATSSDEASSSDDEDDLLTLFANLNMQQKEKLNELISAIHEKDELLDSQEDFLIKENKKHVKVKNAYAXEVEKCEKLTSELSTCHDVISNLRNDNANLIAKVENVNVCDDSXLVXNDNASLITKIDNLNASLSSLKIEN

SEQ ID NO: 315993 - protein, 678 aa, Zea mays
  Clone ID: MRT4577_51256C.1.pep
MSGDHAKKEMVTGEKPATSHGKAPSGESGNKKREESPPRVKSHRSGNKKKKMKKVVYYETDSSSPSTSGSDTPSVTSKRHERKPPVFMVKIIVPSIGDEDYDADKVAQIQHFNSQATTILLTSLSQEEYNKVQGLKSAKEIWDVLKTAHEGDEVTKITKREMIEGELGRFMLNQGEEPQAMYNRLKILVNQVRNLGSTKWDDHEMVKVILRSLVFLNPTQVQLIRGDPRYKLMSLEEVIGKFVSFELMIKGSKQIIEQGATSTPEVQPVAFKATKEKKEESTSSRLPIDASKLDNEEMALIIKSFRQILKQRREKDYKPRSKKVCYKCGKPSHFIAKCPSSSDSDRGDDKKGKRKEKKRYYKKKGGDAHICREWDSDESYTDSSSDEDAANITVNKGLLFPNFGHKCLMTKGGKKKVKSRASTKYATSSDEDNSSDDEDNLLALFANLNMQQKEKLNELIGAIHEKDELLDSQENFLIKENKKHVKVKNAYAQEVEKCEKLTSELSTCHDIISNLRNENVKLIAKVEKLDVCDDSIVSLRNDNASLVTNIDKLNTSLSSLKIENEKLIAKAKDLNVCNISISNLRDENAILHAKIDKLNACKPSTSTISYVSICTRCKDVNVDAIHDHIAMIKQQNDHIAKLDAKIAEHELENEKFKFARSMFYNGRRPVIKDGIGFQ

SEQ ID NO: 315994 - protein, 137 aa, Zea mays
  unsure (1)..(137): unsure at all Xaa locations
  Clone ID: MRT4577_51257C.1.pep
STKYATSSDEENSSDDEDNLLALFANLNMQQNEKLNELIGAIHEKDELLDSXEDFLIKENKKHVKVKNXYAREIEKCEKLTNELSTCHDIISNLRNDNAKLIAKVEKLNVCDDSFANLKNDNASLLAKIDKLNESIS

SEQ ID NO: 315995 - protein, 54 aa, Zea mays
  Clone ID: MRT4577_51258C.1.pep
SQKYADKSTFLSFFLLATIIYSSSNGDADYSCISVGGTVSLQQYCRGQVHRTVP

SEQ ID NO: 315996 - protein, 55 aa, Zea mays
  Clone ID: MRT4577_51259C.1.pep
QTLFWQPCNFTFREGFFKGAGSSSRMLLQNDLKHLRITVDLDARANKQYPRPTAI

SEQ ID NO: 315997 - protein, 136 aa, Zea mays; identical to SEQ ID NO: 199630
  Clone ID: MRT4577_5125C.1.pep

SEQ ID NO: 315998 - protein, 90 aa, Zea mays
  unsure (1)..(90): unsure at all Xaa locations
  Clone ID: MRT4577_51260C.1.pep
MISNSPSVVKVFSRMPHKFSLMYAKRALVHWXIGXGMQEGQFSKARQDPKALKKDSHEFRAEFDEVNNRLKGKEYYTSSLITQHQASMVP

SEQ ID NO: 315999 - protein, 47 aa, Zea mays
  Clone ID: MRT4577_51261C.1.pep
RPQKVACQNYRDMPFYLPCLIQHGDLVCIKRKFRGLYQANMLYSGLG

SEQ ID NO: 316000 - protein, 31 aa, Zea mays
  Clone ID: MRT4577_51262C.1.pep
ALARHTSRPKRFEFDTTLQQLLSLSTSLLTP

SEQ ID NO: 316001 - protein, 208 aa, Zea mays
  unsure (1)..(208): unsure at all Xaa locations
  Clone ID: MRT4577_51263C.1.pep
RRGRGTLLPTVFFFCDNPIRKRYWIHLAXAVGISPKLLLELQQSXPYYRAPPLMHLLAQSIWAQQLQLLELAHLADYYQGQQVIPFLLLDGLNFVFYLXQQQQLRFTQLXAAYXQKLLTFNQLTALNSSAYXDSXQLLPFSQLAGVSPATXLTQPQLXPFYHNAVANDGTFLQLRQLLPFNQLALTNPTAFYQQPMIGGALFYISYEL

SEQ ID NO: 316002 - protein, 61 aa, Zea mays
  Clone ID: MRT4577_51264C.1.pep
LTSRVAKCSNSSTLCTYSHCSCKQTYKSLQRNHQHQHGNSSSMRSYCTRQGTHGVQLLLSI

SEQ ID NO: 316003 - protein, 383 aa, Zea mays
  unsure (1)..(383): unsure at all Xaa locations
  Clone ID: MRT4577_51265C.1.pep
MTPSKPPGKRRRSAPPPRLPSPAPPVALSPPGFVADRAEAAARVERLLRYQFCDRALLEEALTHQSFSDGALSYQRLEFVGDAALGLAFSNFLYLTNPTLGPGALSTLRAANISTEKLARVAVRHDLYPLLRRKCPRLDLLVGQFIESVKQELMHDLATAPYGGSVVKAPKVLADIVEAIAAAVYVDCKFDLEKLWKVXKTVALHMKGMXEPIITAETIDEQPVTTLHELCQKHGKVAQFKTWQKDGMIVVNVFVGGEMVGLGSSEQKVIAKLNAARDALGKLIGGAKQQVLINCAANGLVDDIAELRECKQKLIEQCIRKHWPKPIFKLEKEGGPAHERNFVCSVQVDTQTGTFVTIGESMSRVKDAENSAAHKMVELLLKL

SEQ ID NO: 316004 - protein, 153 aa, Zea mays
  Clone ID: MRT4577_51266C.1.pep
FMKNSALHFLREKKQSLCSASAFWKNRVHLRKKKKKKASRRRRRRGRLRKRMAEGGEEARRRAAIAEYRKKLLTCRELEARVKTGNTPLPHPLPPVYPCVDVIVGLWGSVSWRLRAAIADGGIWILRYYGGGVGFWLPQFGFGGCGVFSAVQP

SEQ ID NO: 316005 - protein, 47 aa, Zea mays
  Clone ID: MRT4577_51267C.1.pep
CCTIMRGVCMCSYQPSDRLYLKKRPLSLSLPLTTLLLKLIGVLPFNC

SEQ ID NO: 316006 - protein, 60 aa, Zea mays
  Clone ID: MRT4577_51268C.1.pep
PTQISNTSSNKLFTTLLITILIPILFLPIKISIPTLYYNDILPKFHIHYTIIPIPSIISL

SEQ ID NO: 316007 - protein, 245 aa, Zea mays
  Clone ID: MRT4577_51269C.1.pep
RSTRRQRRPRNQPGRRRRHQLPYPHHCLAGPCQRNSYRKSGRGRERSPSPSWTSSSQARLLRIRSIAFESSKWKMDLIQLFITACVPVFNMLLVTGVGSFLATDFAGILSKEARKHLNNVVFYVFNPSFVSIYLAKTITMESLAKLWFMPVNILLAFTFGLFFGWIVVKVTRAPAKLRGLILGCCSAGNLGNIFLIVIPALCKEKGSPFGAPDVCQDIGLAYSSLSRAIGAVFVWSIAYNIIASH

SEQ ID NO: 316008 - protein, 104 aa, Zea mays
  unsure (1)..(104): unsure at all Xaa locations
  Clone ID: MRT4577_5126C.1.pep
CITTGSIGPAPARFLLLLRHWHIGKLLITISVXNVEENSAALRELVYLLPGALQYISGVILFEETLYQKTKDGKHFVDXLKEGGVXPGIKVDRGTIEVVRTGKE

SEQ ID NO: 316009 - protein, 168 aa, Zea mays
  unsure (1)..(168): unsure at all Xaa locations
  Clone ID: MRT4577_51270C.1.pep
ERPPGQVNKLSFFVHTFLFQKMQXVALPVINQQTHGNXTPYSESQQLIPLKQAAXTLNPAGYXGHQVLPFKQVKXDYXRNNKGLQGTTRTXLNKGGYWGCDKLLPXSQLAAGNRASFLTQEQMLPFYQQSAANPDNLLQLQQLLPFVQLALTDPAAYYQQHIIGGALF

SEQ ID NO: 316010 - protein, 48 aa, Zea mays
  Clone ID: MRT4577_51271C.1.pep
QIKKNGGSISEKKGSRSPALYNGYQCVCVQNIVVIRPRIQIVLSVCRP

SEQ ID NO: 316011 - protein, 71 aa, Zea mays
  unsure (1)..(71): unsure at all Xaa locations
  Clone ID: MRT4577_51272C.1.pep
TSFVRDRSVVAPLPRLXQDSEGLLKRWHKPCREEFTKVEARTAIVFTAMGLVRFFVNLMLIPINNIIVSSG

SEQ ID NO: 316012 - protein, 55 aa, Zea mays
  Clone ID: MRT4577_51273C.1.pep
SFHDCITILLEGGGSVWIFFLGASRVYVIGSVGGFGGQTTPTVKGGDEEVFRTRG

SEQ ID NO: 316013 - protein, 96 aa, Zea mays
  Clone ID: MRT4577_51274C.1.pep
LGVSLAVCKAGAAEKGVPLYRHIADLAGNPDLILPVPAFNVINGGSHAGNKLAMQEFMILPVGASSFKEAMRIGAEVYHHLKGVIKAKYGKDATMW

SEQ ID NO: 316014 - protein, 373 aa, Zea mays
  unsure (1)..(373): unsure at all Xaa locations
  Clone ID: MRT4577_51275C.1.pep
PASAPRPPRVRSKPRGSGSPFKCIGIGFVQQMNSEKDEELSAAKQRIVEHNCIAASRNXCVIMLNAKLATTTRLTHDVIRRVLGVKMNMTTWAALADNQQKREPIHPITSRVQEFIHNNELMNLKRQLDEFVEDXQSWLDEINQKQSELGAARITIEKLRQREHFMVAEIKLLKAENSNYKTIILNLEAEVKNLTRQQNLQLRINHHVKTKEENILLKRQNEELSAKLKQLGGILTRTKEELARYRVSNGRDPHELIEEEELLRKKLDESERDRSQLAENLSSLCSSILKVAGVSDSESDATLLKASECLDQLQCRIASLEGQVEDLNLKCKLVREKARLCELRSNSSSLRTGAKGNLTSPSPDTSPSISSFR

SEQ ID NO: 316015 - protein, 66 aa, Zea mays
  Clone ID: MRT4577_51276C.1.pep
TTRPGCQQWRRRLVSSNRLLRFGKKGREGGVVWLHTILETPNPNLGWAAILIDGLVYGLGLSPLQL

SEQ ID NO: 316016 - protein, 97 aa, Zea mays
  Clone ID: MRT4577_51277C.1.pep
LLRTPSAASARREPSRERPAAPNGIATGSTAGDEAREVDEEACMNAMQLAAATILPMTLKNANELGQLEELQKEAGGGKAALAPEEEGARMPTEPND

SEQ ID NO: 316017 - protein, 34 aa, Zea mays
  Clone ID: MRT4577_51278C.1.pep
LWDLLGAWGMFRFGELLPLAVVLSKCLEVSMRGA

SEQ ID NO: 316018 - protein, 67 aa, Zea mays
  Clone ID: MRT4577_51279C.1.pep
RQQEVNTAESGVDYLEASLTHSMPTVNDDNNSNNNNNNKTKVQVKNSAWGVLLQAGEGACSTWMGHT

SEQ ID NO: 316019 - protein, 50 aa, Zea mays
  Clone ID: MRT4577_5127C.1.pep
AYIAPLRLNFTPKTIIILRAKSKSTRTIHISPHNLHLNSASMTTSHNFTR

SEQ ID NO: 316020 - protein, 460 aa, Zea mays
  unsure (1)..(460): unsure at all Xaa locations
  Clone ID: MRT4577_51280C.1.pep
MDVLHNQTPRSPEERTIDRKLLIHDFQVIILAGGVGRNMRPITSDTMPKSLLPVANRILLSYQLEFVIKMRFPEVIVVTAEGYEEVIQLFLITYGEAFPELRIKLQVVNDYTNTAGVLLHLRPILTRDFIVIGGDLIVEGNFLHHMADKHRARDAAVTVLGFRRKIEEEGAGGASSSSAAGEDEEYFAVEPTTGRLLMLFDSTSVSSEFIRVKKKLFRKFPNFTLHSSSMRDAHFYMFSRWTLDLLENDPSLSIKSDFVPFLSRCQYDQHLVEKLEIPSFLSPVVAEMSSVKHDPEDKVKCYLXNFQMLKEXYCDRVDSISSFFHINRTIAEGGKEYQPTEPRGPSNKAINFIATTAKIEKTTAIPSGSIVGADTIIGDRVGVKKTMIGKHCKVHSNAKAINSVIFDHVTVEEGAKIQNSIIGQHCYIEKNAELTDCILGAGNKVEAGAVWRGKKLTARI

SEQ ID NO: 316021 - protein, 206 aa, Zea mays
  Clone ID: MRT4577_51281C.1.pep
PRVRFIVQSLNATFLALLLVITITLCLLALLEIKWSGITLHEWWRNEQFWVIGGTSAHPAAVLQGLLKVIAGVDISFTLTSKPGTGDDGEEDAFAELYEVRWSFLMVPPVTIMMVNAVAVAVASARTLYSEFPQWSKLLGGAFFSFWVLCHLYPFAKGLLGRRGRVPTIVFVWSGLISMTISLLWVYISPPAGARELIGGGGFSFP

SEQ ID NO: 316022 - protein, 120 aa, Zea mays
  Clone ID: MRT4577_51282C.1.pep
FLEISSLISIAPIPHQTSARTTRASISSPSTSFFHTHTDRMEFRCQDAEGDTRRDRAASDVDRRALREAQELAMSDGWSRVGLRAWRDRQRGDADHQSRPQRARHPGRGRVVHSMLEQRR

SEQ ID NO: 316023 - protein, 90 aa, Zea mays
  Clone ID: MRT4577_51283C.1.pep
FPSAFASRHIAIIYIEKMIAKLKILSCGLRISILVDLIEFPSHPGLRFLTLLIPISVVLCMCLFRHRWLQTAVVILTQSVAVKFSKMFCP

SEQ ID NO: 316024 - protein, 71 aa, Zea mays
  Clone ID: MRT4577_51284C.1.pep
VRVSLYPHAAALLPDRVRLPQKDDSTGFHGPAVTPLSLSYATRPPGVRRFVCPALATSSATDCRATGSGTG

SEQ ID NO: 316025 - protein, 112 aa, Zea mays
  Clone ID: MRT4577_51285C.1.pep
SFARIDRRLTPLGFGPIAASSSRAQRSQHRQLKFEDNAKATNDSRWRIPMYKMPYAPPPPAVPPPGYVPSPHFPYPGRLLSSGHPYGDLAGNMENSAPHSLDRWIQGDGCGA

SEQ ID NO: 316026 - protein, 842 aa, Zea mays
  unsure (1)..(842): unsure at all Xaa locations
  Clone ID: MRT4577_51286C.1.pep
MSDWSSPAAPTFFPFGPQAEGWDVTFKVKYGDTLKRFYGCANGSHFDMNLSALRARIDTAFKFGPDVDFVLTYTDEDGDIVMLDDDDDLRDAALRQRLNPLRITVQLKKNQPTEKKDTSAPVKSAAQDPLSQLMSAIEGLKPVQEDSLAHIKSAIGEAIKSIPEPIPDALAKLSHEILDAAPPPLAELMKPFAQLMAPNNNGNGPSDVHAEGSSSSSSAQVPAEAKNEPKVRPSLGLKTVLKEAAGPVPNAGASQVQQPLMYPSVEEMLFPCNSVDKSVCKGKIDAQSKGKSVTSSGIQPAPHSLRTHAPPPPHPCISEWSRAQRSQHRQLKFEDNAKTTNDSRWRIPMYKMPYAPPPPAVPPPGYVPSPHFPYPGRLLSSGHPYGDLAGNMENSAPHSLHRWIQCDGCGAQPIVGPRYKSNVKEDYDLCDSCFQRMGNEMEYTKIDKPILPHRFLRDPHVYRKVHHPRVLMKSRREKLESRFILDVTVLDGTLMTPSTPFTKIWRMHNNGSVVWPRGTQLVWVGGDQFALQTSVPLEIPVDGFPVDKEIDVPVDFVAPTRPGRYISYWRLASPSGQKFGQRVWVHIQVEDPSFVNDNNRNAAINLNLPPESYSSNTTNLIDVNIEPADSAXLVHMLSAQRSSISVQXFPEPSKSVPFTLATTSLSAAAPTNQTGDVPMSSTPAAACLPSVNVPMHEVVTTHTPSPITPVLPTTIHFSAPVSAPAIAPELASGAVGVPPPVSAVVPELSELDVHNEEKLLRELEEMGFRQVDLNKEILRQNNYNLEQSVDDLCGVNEWDPLLAELEEMGFDDTEMNKELLAKNEGSIKRAVMELIAREKKDK

SEQ ID NO: 316027 - protein, 89 aa, Zea mays
  Clone ID: MRT4577_51287C.1.pep
YGPGPVSVQPGCDNKLSSHLSRSPPVSSISNSSCAAPTSAGHAQAAATNISKQCQATLEIEPQLLQPWCTHPVHDLSDAHTVKKIKELG

SEQ ID NO: 316028 - protein, 55 aa, Zea mays
  Clone ID: MRT4577_51288C.1.pep
LLTCYLKPAWAPFKMPLGQRSRKNQIVENYTGLVLLMKGWNPNVFSKTGIFQGGR

SEQ ID NO: 316029 - protein, 164 aa, Zea mays
  Clone ID: MRT4577_51289C.1.pep
GEDWSGDSIVYAYRSGEVVRLPKGASIPFPLKVLEYELFPIFPLKEIPENISFAPIGLVDMFNSSGAIESIDINPVAAKNPEFFDGEISSAFPALSDNRFPTALVFVSVKGCGRFGAYFFQGPLKCPVESPKTDFPFDPEVGLVTLNLPVPREEMFKRHVEILV

SEQ ID NO: 316030 - protein, 136 aa, Zea mays; identical to SEQ ID NO: 199630
  Clone ID: MRT4577_5128C.1.pep

SEQ ID NO: 316031 - protein, 94 aa, Zea mays
  Clone ID: MRT4577_51290C.1.pep
TERDNVATAVTCYMKQYKTSKEEASDLLWNSVEQAWKSMNHEYLTWTSIPSSLLIRVINLARMMETMYKEIDGYTDSKLLKEWISKLLDQPIPF

SEQ ID NO: 316032 - protein, 106 aa, Zea mays
  unsure (1)..(106): unsure at all Xaa locations
  Clone ID: MRT4577_51291C.1.pep
PGHRRIESSXXRLLDEQKXMVGVVSVSEAVQIADDNDLILAILSMDGDPPVLRLFEERDYKKHRYEQQKKKKIQQKRSVAKRMGLKELKMGYESPQFEFCFSSIGY

SEQ ID NO: 316033 - protein, 49 aa, Zea mays
  Clone ID: MRT4577_51292C.1.pep
ACGQRYRGSNLITYIQLTDRCFTTSPLLKPLAFLTQRPYWKNPFLPLPN

SEQ ID NO: 316034 - protein, 60 aa, Zea mays
  Clone ID: MRT4577_51293C.1.pep
ITMHSVGSGVAFVGTAIAKSFGLVGSGIGSGPGHVTFGMGAVSSGPGKAGKFIARTVTGP

SEQ ID NO: 316035 - protein, 142 aa, Zea mays
  unsure (1)..(142): unsure at all Xaa locations
  Clone ID: MRT4577_51294C.1.pep
KGGGGYKPSGPPFEKLFRQRGGFKTKTKPLKKGGTIKTKNKRPFEKKNKKFFGASPGGNPKDPPPEKNRGPDPPPPSLGDPXRGPPPQNXSPRGGPPGNRGPKNPAPTPCARPAQKKPAKNRXPGGLGTNSQSPNTPPPPGS

SEQ ID NO: 316036 - protein, 100 aa, Zea mays
  unsure (1)..(100): unsure at all Xaa locations
  Clone ID: MRT4577_51295C.1.pep
TAYRCNPDHSPLSDASDSSRQLEGYRHEVTISTGFGIHLTQEECVPPGFTQKRDENGCLGCVHVAVLDSGLTLSHSRRYCRYYRSSXRRGPPPPPPPFFF

SEQ ID NO: 316037 - protein, 84 aa, Zea mays
  Clone ID: MRT4577_51296C.1.pep
GGKGIYANQDRSNQHFGLFLITQEAGPGGPTPAHIHTHTHTIGGLGQVNRVHFRIQAGFWERKVLNAWVQAPLFLKGRAWPNRL

SEQ ID NO: 316038 - protein, 88 aa, Zea mays
  Clone ID: MRT4577_51297C.1.pep
VEELEGTNHGRYEPQRRRAQTRRGSGVGRRRLIAGEAGASGRARGQPLCSAQVVGRRRRHGLCTGRSGPRCSMSISTRAWSERGLGDR

SEQ ID NO: 316039 - protein, 64 aa, Zea mays; identical to SEQ ID NO: 191971
  Clone ID: MRT4577_51298C.1.pep

SEQ ID NO: 316040 - protein, 52 aa, Zea mays
  unsure (1)..(52): unsure at all Xaa locations
  Clone ID: MRT4577_51299C.1.pep
KNAPQTKKKTKKEPXPPPPPPPKPPPPPPYGPRPPPPPGPPSHFLPAPYPFL

SEQ ID NO: 316041 - protein, 93 aa, Zea mays
  Clone ID: MRT4577_5129C.1.pep
LVLRQGRVYTFLSVVETHGAIRVLLLPPTVWSTRRLLFQLAADLAQIVTATPSSVKRTSRDWSYESRWSRPVRVSSTFGLLASSIQASLARMS

SEQ ID NO: 316042 - protein, 76 aa, Zea mays
  Clone ID: MRT4577_512C.1.pep
TRPPKRPSHPRSFTHLITKGLALFLRHPQGGGENDCIHPAAVLASVPAPATTTAAVILLLCVVLSLSTADDPNLSD

SEQ ID NO: 316043 - protein, 100 aa, Zea mays
  Clone ID: MRT4577_51300C.1.pep
MAENKGRVALFLAGLAAGNLLGLAPAGPPKTWGPTQMTPWGAPIVGKAGPPPGCWARLKGPPGTWFCQFKRNPSMQGFVNSPNGKKVFPPCKGSLPRCLF

SEQ ID NO: 316044 - protein, 152 aa, Zea mays
  Clone ID: MRT4577_51301C.1.pep
MLERKIRQNVDLSTNLIGVLFKSDLNGRAYKITKHLYDNGYYIKMEKLIATLCEDKKFIDAAEFSLFSLRKRHELGVAVHSQVLDGLCSNGRTSEAFQLFYELIENKRTSAVAAPHSLVFLHHALEEAGMVQEAGFVAKQMRRATATTRRRS

SEQ ID NO: 316045 - protein, 72 aa, Zea mays
  Clone ID: MRT4577_51302C.1.pep
LSPMKEGFLIVLAHQMDSFRPKRALYSKVASTTVTSVMERPVHVSDETSYEAAPKAHKSAEDHDDRSIPPLI

SEQ ID NO: 316046 - protein, 72 aa, Zea mays
  unsure (1)..(72): unsure at all Xaa locations
  Clone ID: MRT4577_51303C.1.pep
HETVVSCAYCYHSSTXYCXCDILNMIDESSLRIXSQDFSFTTVNALTEPIDIYSEWIDECERVNTVEGDDGA

SEQ ID NO: 316047 - protein, 100 aa, Zea mays
  Clone ID: MRT4577_51304C.1.pep
PKNPKGHTPSPRGGTILPTFPLSRAKPLKSPPLIATPVKKPRFITTRGWHHQGGQNHGFYPQGTLNQGGAPEGRATKRGGPKLPLANNNFGNGARGEPNR

SEQ ID NO: 316048 - protein, 72 aa, Zea mays
  Clone ID: MRT4577_51305C.1.pep
FLFFIFFFFFYFLFLGFFNKLFGGQQHKGWSNPRNIKHTGGTKRTVTQKDKSRGDRIWTDTDTDQKNSLEEK

SEQ ID NO: 316049 - protein, 127 aa, Zea mays
  unsure (1)..(127): unsure at all Xaa locations
  Clone ID: MRT4577_51306C.1.pep
XSSXXPRXGDFPTQAPTHTKQQPRQADASHPPRDHREPAPATAEPAAGAPPATXPRRTDTPRXPAAAXRQAPGPTXGAHGRQAPRNREAAQPGRRPAARAPRRRSRRPRRPRRTRGTEARTXTPRPP

SEQ ID NO: 316050 - protein, 96 aa, Zea mays
  unsure (1)..(96): unsure at all Xaa locations
  Clone ID: MRT4577_51307C.1.pep
VKQGKLLADLARRLGLHYVVYSGLENIKKLTAGRLAAAHFDGKGEVEEYFRDIGVPMTSVRLPCYFENLLSHFLPHKXPDGKSYLLSLPTGDVPMD

SEQ ID NO: 316051 - protein, 83 aa, Zea mays
  Clone ID: MRT4577_51308C.1.pep
DLYYVSFEEVLFSPGTLHYLMIVLWLFDHCILLFDRCIIWTNYEYAYYCIIITCCLLYRPLQRLLLFCCLNHLLSIFLKVLCI

SEQ ID NO: 316052 - protein, 59 aa, Zea mays
  Clone ID: MRT4577_51309C.1.pep
WVGKTPGFLWLTLDQEGISTGGQTAKGKTVVSSPKNLPKKGWGAFKCKVSKAGGELKFG

SEQ ID NO: 316053 - protein, 118 aa, Zea mays
  unsure (1)..(118): unsure at all Xaa locations
  Clone ID: MRT4577_5130C.1.pep
NAWEGAAGEEQAERGTASARGNQKKRGRSEQRGNTPRARRPQAPARRRTPAEPNRGRGGQXTPPRSKRHXNSRGPTXPPAAGTAPGKEKRGPPPRRPAPXGGGPGPRAGGGPTRGPRR

SEQ ID NO: 316054 - protein, 81 aa, Zea mays
  Clone ID: MRT4577_51310C.1.pep
KFSAHDLYIKLSLSILDLNKKKKKKKKKKKKKKKKKKKKKKKKKKKKKKGGKKKKKKKKNPPRGAPQKGKIGANSHKRGAL

SEQ ID NO: 316055 - protein, 101 aa, Zea mays
  Clone ID: MRT4577_51311C.1.pep
MGRHALAKSAALLREVKNKQRTTNLVKRLEPTEVKSPETSLWVPHPMTGIYYPKGFEWVMEDVPTSAASFQQSYWFRTGEAEPASSTTSKNDSASFDHPFA

SEQ ID NO: 316056 - protein, 54 aa, Zea mays
  unsure (1)..(54): unsure at all Xaa locations
  Clone ID: MRT4577_51312C.1.pep
XXGGAGKRPSSGRPHSYKIKLCKSIMLTSKFLHQGKTLHTSVIWIKTLNAAISS

SEQ ID NO: 316057 - protein, 92 aa, Zea mays
  Clone ID: MRT4577_51314C.1.pep
IAICREVKNKQRTTNLVKRLEPTEVKSPETSLWVPHPMTGIYYPKGFEWVMEDVPTSAASFQQSYWFRTGEAEPASSTTSKNDSASFDHPFA

SEQ ID NO: 316058 - protein, 56 aa, Zea mays
  Clone ID: MRT4577_51315C.1.pep
NLPKILSRILITLRSDSIFQVRIHTIDGWLNNYRIHRFSEQRCSKHHENLRRLRID

SEQ ID NO: 316059 - protein, 95 aa, Zea mays
  Clone ID: MRT4577_51316C.1.pep
PPHGGAPRRRLILLTARGAAIIPPHPPLPCTTSFYRLRPLADGGERRERKRQMNPLLALISTRAKSPHTRKKQGSRSTPFFFLPTTRGRVMLLWK

SEQ ID NO: 316060 - protein, 40 aa, Zea mays
  Clone ID: MRT4577_51317C.1.pep
FETFLCPFLTCNKNLPNTNVFPTFSGIIMLNKHLAFGFIR

SEQ ID NO: 316061 - protein, 63 aa, Zea mays
  Clone ID: MRT4577_51318C.1.pep
TRPRERPPFFFFFILTFFVCLCTTNEYMCNFSLQVKMDTGCREIGLNSDLHFKRVYVHHHRDT

SEQ ID NO: 316062 - protein, 93 aa, Zea mays
  Clone ID: MRT4577_51319C.1.pep
VFVAAYGVKDILPEKPRYYTILKLVVDTNGETDANNVLQETLLCVRDKLAKPMVLMPNDNVLPAQDNHRLHSYFDPIKLDESKTLTTILHTLL

SEQ ID NO: 316063 - protein, 144 aa, Zea mays
  Clone ID: MRT4577_5131C.1.pep
CNYYPSLIYAESMTHSIACLQIPNYPELRSDYAAAMMHSIACLQIPVIVASGPYTCGGFFFQNTISSSIWELLAMICDCQQQTVQCYFSHLFSELRVSITPKKNAYRQLDQYPNWNAEFCTKLTHFNQPKLGVWTTSGDINGHP

SEQ ID NO: 316064 - protein, 129 aa, Zea mays
  unsure (1)..(129): unsure at all Xaa locations
  Clone ID: MRT4577_51320C.1.pep
MLKGVHSTLHLPFDHNMXMAQNLTGQNFFNASDTVSVQATFPYKCDESKILQTVAYDLVGYIVYEIDQHPYHNVFYNGTIDDVEAGGLLSAESGLLITLEIALVGLLWIWTYXRCQQLSKKTKKAPKVE

SEQ ID NO: 316065 - protein, 69 aa, Zea mays
  Clone ID: MRT4577_51321C.1.pep
SIESVAHLLGGHSQAADVVVRTPANGVPRGLGPAPPPCRQPHYCLLRSYAHVKSCNRQLSPLVFDRSEC

SEQ ID NO: 316066 - protein, 108 aa, Zea mays
  unsure (1)..(108): unsure at all Xaa locations
  Clone ID: MRT4577_51323C.1.pep
SHLTLVHSSGGVYYAXDPAACCICLLKRQRCAVTLDQPMTISLLSLNTSSTYFPTHLLTAPERIPSCSTQHTSQHHKGANLVRLTRALSRIISAHLTALLPDPSSVPP

SEQ ID NO: 316067 - protein, 175 aa, Zea mays
  unsure (1)..(175): unsure at all Xaa locations
  Clone ID: MRT4577_51324C.1.pep
MIIIAMDLMFDIVTFRRSQESATRHEEMQQKTGLVEAIIVEIQDRDKIGGSYLHSDAICCTPELDKEKSCKVGEVIIRPNPDNPDWPKRIQTFFDGKNEETTMGTQSVSINKTGMYYLYFMFCDPQLRGLKITGRTVWRNPHGYIPGKMAPMMTFFGFMSLAYLALXLLWFLQFV

SEQ ID NO: 316068 - protein, 76 aa, Zea mays
  unsure (1)..(76): unsure at all Xaa locations
  Clone ID: MRT4577_51325C.1.pep
GYLGFSRGAGAVADVQYRCFVGGXLAWATSNESLENAFASYCEILDSKVITDRVTARSRGISFITFSFENYMLCPI

SEQ ID NO: 316069 - protein, 191 aa, Zea mays
  Clone ID: MRT4577_51326C.1.pep
MASDRHVLILGGNGKISRLLTVMLLKKSWTVTSLIRNPDQIEDVKRISEGLPGTHKIVVHDLITITSKEKAAAVIDEVKPDSVVFSAGPGRGTDQDTIIRIDRDAAIFFVQASVANKAITHHVQVSYLGARREQAPWWTPEDWEGWKKVNSTFLGPYYEPKVAADEALVTEGKKRESLTAVSVRPGGLTDK

SEQ ID NO: 316070 - protein, 61 aa, Zea mays
  Clone ID: MRT4577_51327C.1.pep
CRTSSKLLADSSFVKRSSCFLVDLDINAVNVVFGFVERRGVSITQWNKIASTRLSKARIFT

SEQ ID NO: 316071 - protein, 284 aa, Zea mays
  Clone ID: MRT4577_51328C.1.pep
MATSTSVPVLLLLAAAAGLLLLPGSLAWQSSNCAPGAPGSGSPTWPSPGSGSGGGHSKPPKHHHGKPPKCPPCTPPYVPPTPRPSPPYVPPYVPPTPRPSPPPYVPPYVPVPPTPRPSPPYVPPYVPVPPTPRPSPPYVPPTPRPPTPPYVPPTPPYVPPTPRPSPPYVPPYVPPTPRPSPPYVPPYVPPTPPAVRTCPIDTLKLNACVDVLSGLIHLVIGQEARSKCCPLVQGVADLDAALCLCTTIRARLLNINIYLPIALNLLITCGKHAPSGFQCPPLYD

SEQ ID NO: 316072 - protein, 86 aa, Zea mays
  Clone ID: MRT4577_51329C.1.pep
KNDGRQEYAMRLPSLAATGCKNVGSPHTYTSVCSEDLYSTSRRTLEIKTADMRMAPQLTAIKTKPPLFSLSYTSPAFNPPSCEFSP

SEQ ID NO: 316073 - protein, 84 aa, Zea mays
  Clone ID: MRT4577_5132C.1.pep
TKYFTRGGYSEDSRHKKGLLRPEASEGMVNQVCPNVNVLEVKVVINRRVKGRMLLLSNFWLNITSKSRQRMLIRLTMLSHLEHL

SEQ ID NO: 316074 - protein, 255 aa, Zea mays
  unsure (1)..(255): unsure at all Xaa locations
  Clone ID: MRT4577_51330C.1.pep
MATSTSVPVLLLLAAAAGLLLLPGSLAWQSSNCAPGAPGSGSPTWPSPGSGSGGGHSKPPKHHHGKPPKCPPCTPPYVPPTPRPSPPYVPPYVPPTPRPSPPPYVPPYVPVPPTPRPSPPYVPPYVPVPPTPRPSPPYVPPTPRPPTPPYVPPTPPYVPPTPRPSPPYVPPYVPPTPRPSPPYXCPIDTLKLNACVDVLSGLIHLVIGQEARSKCCPLXRGVADLXAALCLCTTIRARLLNINIYLPIALNLLIT

SEQ ID NO: 316075 - protein, 322 aa, Zea mays
  Clone ID: MRT4577_51331C.1.pep
MTPRGRRENSPSRAAALSQGAMATSTSVPVLLLLAAAAGLLLLPGSLAWQSSNCAPGAPGSGSPTWPSPGSGSGGGHSKPPKHHHGKPPKCPPCNPPYVPPTPRPSPPYVPPYVPPTPRPSPPYVPPYVPVPPTPRPSPPYVPPYVPVPPTPRPSPPYVPPYVPVPPTPRPSPPYVPPTPRPPTPPYVPPTPPYVPPTPRPSPPPYVPPYVPPTPRPSPPYVPPYVPPTPPAVRTCPIDTLKLNACVDVLSGLIHLVIGQEARSKCCPLVQGVADLDAALCLCTTIRARLLNINIYLPIALNLLITCGKHAPSGFQCPPLYD

SEQ ID NO: 316076 - protein, 110 aa, Zea mays
  Clone ID: MRT4577_51332C.1.pep
MGIEILCLIFIFLLLGRVLTRSYAVSPSSPAMSGSAELRLSPGPWQLPLIGSQHHLLLSRFSDLPHGALREMSGTYGPLMLLRLGSVPTLVASFAEAAREVMRIHDVAFC

SEQ ID NO: 316077 - protein, 219 aa, Zea mays
  Clone ID: MRT4577_51333C.1.pep
SPSARCSSGVFSLLCSPELLQLDRSASPSLFPCELDSCSPMEFAQLPAPVTRARRPAPWMLALLAAILLGQRIPSLLSLSIPCSLAADSLYLPWTPAAPLVPASARRGVYARAAPLLAATSSPFLQPGFCFSSAPASRASPSGRLRSQRRAHCSLGLGRDLAVVRQLQRLCSSLRARSIPRSALSCSQVRCPAELDPYRAHLSWCPWPRPASCSTHSRS

SEQ ID NO: 316078 - protein, 110 aa, Zea mays
  unsure (1)..(110): unsure at all Xaa locations
  Clone ID: MRT4577_51334C.1.pep
IXFFNFGARPPAVTGPVSGKWRQRFLPRNLPGPYTELVLLLNVECWVTKGKQPGLFHDALQNYIYQRASAFTPVFRKERLPWPPRFEREQPVVNEAPAPPNLGGGGYTKS

SEQ ID NO: 316079 - protein, 61 aa, Zea mays
  Clone ID: MRT4577_51335C.1.pep
KNTERHQPAKITIGEQPTAGPRVPYIHGVRTAPRNEVTQLDSHQARLYICTPPGPVKTETP

SEQ ID NO: 316080 - protein, 75 aa, Zea mays
  Clone ID: MRT4577_51336C.1.pep
GSVYSLTLDEFQSSLGGATKDFGSMNMDELLRNIWSAEETHSVTAADHAARAPYVQCQGSLTLPCTLSQKTVDEV

SEQ ID NO: 316081 - protein, 68 aa, Zea mays
  Clone ID: MRT4577_51337C.1.pep
TPLTIPPYTSSTTTPMYSPLITTPNSISPNSPSTSTLSHIYYTSFSSTTPSYCTPRSTYSHSLSISPP

SEQ ID NO: 316082 - protein, 52 aa, Zea mays
  Clone ID: MRT4577_51338C.1.pep
QKEFYPKIPPPRAFGGVSIGAFPPPAYFKGGIGSGTGKFPPLPIKNQNFEPF

SEQ ID NO: 316083 - protein, 193 aa, Zea mays
  unsure (1)..(193): unsure at all Xaa locations
  Clone ID: MRT4577_51339C.1.pep
RTGSSPNVTHASSTARARAIPSPRYATLPRRRVLLVLLHGRPDRPRGASSPKQANARPAVXAANDEYVLQCEELLPTKLHRYLTCTKDHTLKGIAGHQDLHRALRYDDRTHSLCGNHCRAPSYDSDRVTGEDAHISWILYIXLWCPSSAKVRSARLDASXNQKYMSGLSGIHGGLHATDASEISLNEIKDRSR

SEQ ID NO: 316084 - protein, 295 aa, Zea mays
  unsure (1)..(295): unsure at all Xaa locations
  Clone ID: MRT4577_5133C.1.pep
TYIRRLYQPYLVSGSIRMQWHRAGLIALWEFSEEHLKQRSGQDVPLQQVDNPIEKSWGVMVVIKSLQFVATAIDVALKETSQYGIGVRSVSNSNHVHSNQSNMLHIALVGINNQMSTLQDSGDEDQTQERVNKLFKILKDNTITSHLNVSSVKVVSCIIQRDEGRPPMRHSFQWSVDKLYYXEEDPMLRHVEPPLSTFLELEKVNLEGYNEVKYTPSRDRQWHTRTLIKNKKDQRLNDQRMFLRTIVRQPSATNSFLTGNIDNEVGHTQASSSFTSNSILRSLMGALEEIELHAH

SEQ ID NO: 316085 - protein, 78 aa, Zea mays
  Clone ID: MRT4577_51340C.1.pep
RNQTACHFLGGSTHHITAQSTVKEPLASITKKARKLTHYLTKWHIPTAVWPGSKPNSSRIQGPRGGLPKTSIGGQTPR

SEQ ID NO: 316086 - protein, 29 aa, Zea mays
  Clone ID: MRT4577_51341C.1.pep
CHHFLIPCYVYRLCNMLSLNLVAWTTVAI

SEQ ID NO: 316087 - protein, 68 aa, Zea mays
  Clone ID: MRT4577_51342C.1.pep
EVPHESVFSDSQPDVNTISCKISSQHSPGTGISARSDLAASFNVAEFTAQSSRHETSTQQSPLNISGQ

SEQ ID NO: 316088 - protein, 52 aa, Zea mays
  Clone ID: MRT4577_51343C.1.pep
SPRTPPPPVFQVGFFVQAIVPGKGPLETPPVHFVGPVTTNAWAFAPNFFPGN

SEQ ID NO: 316089 - protein, 187 aa, Zea mays
  unsure (1)..(187): unsure at all Xaa locations
  Clone ID: MRT4577_51344C.1.pep
GREKNTKKKKKKKKKKKKKKKKKKKKKKKKFFWEKPKRGGTQIQFNFSKFFPKGLSGFPLKISLFLIFGKTGAGPLPVGGGPKDWKLFGPPTIIFPEPGFTRPNKIGNPVGPPGGAPDNYLKKKKGKTNPLPTKKNXKGYKXEKKPSKMVRPENSLEKRGGTGTGGPASKTATIDEETPLNPFGPPP

SEQ ID NO: 316090 - protein, 91 aa, Zea mays
  Clone ID: MRT4577_51345C.1.pep
VGPLVVAAIEAFSPQYILQAGAIKALGSFKSNASSAGLVCAAMAGVRVVVAVIQDAPIIDQIHLGADGWFRSPYFVSPALQCARVLHLVLV

SEQ ID NO: 316091 - protein, 76 aa, Zea mays
  Clone ID: MRT4577_51346C.1.pep
GRGQPMLEPGFPRLLPSPGGTLHLRAKLTPFFLFFFWKCPLLGEQPAPMMQSPNKVCFPPCLFLARQEERGNFPPL

SEQ ID NO: 316092 - protein, 96 aa, Zea mays
  Clone ID: MRT4577_51347C.1.pep
SAYCEILQDVKRELCCNGTVVRVPLLGQVIPLLGVHSENVASFLVQAGPPKIGGLQASRGVRALFILVPYIVGLPILGSFLLRPVCSLCLLIFGPA

SEQ ID NO: 316093 - protein, 64 aa, Zea mays
  Clone ID: MRT4577_51348C.1.pep
EVASGATCEDSGGAATGTVEAAWRRRRRPRDLMTSCGCRPAPSCCCSGLDGTRAEGRSLCCCLC

SEQ ID NO: 316094 - protein, 121 aa, Zea mays
  Clone ID: MRT4577_51349C.1.pep
CPSVLSRPRAAFFFHFFLPCVTLRFHSAAAAAAWLVAPPILLSSASDEFAFAAASYQHTRPLTDHVIRLPRRRASAALSGNQTDLAGPLQWSHHITSHARGRPGHDAVAAAVVGAVSPGVI

SEQ ID NO: 316095 - protein, 62 aa, Zea mays
  Clone ID: MRT4577_5134C.1.pep
QQWVPRYYSFLRFLRFLRAATNAAIITHSSLASNQFISRSPLQILQWPLNTSFVEPMRFNKR

SEQ ID NO: 316096 - protein, 116 aa, Zea mays
  Clone ID: MRT4577_51350C.1.pep
CGSGESSVCTDPVFSQMSPIAKITVVVRDDGLLRHRAYWVVLESHHTTPHLFMASPCEAIDQSATSFTPELVLHRDACLLRGLATLQHIRSEVSSHLKITLVTGISSARSRTGTTG

SEQ ID NO: 316097 - protein, 480 aa, Zea mays
  unsure (1)..(480): unsure at all Xaa locations
  Clone ID: MRT4577_51351C.1.pep
MALQTLNPYRHAAAVSPVPSPVPHRGHPPPHAVLHLPPRRRLAGGAARPLAVAAAVSGAVNEARRRGVPQEGGEDGRKDTDLATLGNLCVDVVLSVPQLPPAQQEERKAYMERLAASPPDQKFWEAGGNCNLAFAAARLGLNCSTLGHVGEEIYGKFLLDVLQAEGISVVGMLGNTNAAACRQAYETLLCWVLVDPFQKHGFCSRADFSKEPAFSWIRKLPVDIRTAIHHSKILFCNGYAFDEFFPDVNKWFIDXVVDVPIPGVVFELSPXKSLLHGNLDEQRALEHALRLSDVLLLTSDEAESLTNRRNPVQAGQELLKRGIRTKQVVIKMGSRGSIMITKNTISCANAFKIDVVDTVGCGDSFTAAIAFGFLHDLPAVNTLTLANAVGAATATGCGAGRNVARLDKVLQLMREADLNEDITLWTELTEGNSLRIEVSILSGIARNGFSENIVAVPVTKVVSELLPMFEAVPVRSAVQA

SEQ ID NO: 316098 - protein, 49 aa, Zea mays
  Clone ID: MRT4577_51352C.1.pep
THSTFPMITLPLRLESSHNMPSSSTTLDTYTTPTPKTHSVTHSHITPQL

SEQ ID NO: 316099 - protein, 216 aa, Zea mays
  unsure (1)..(216): unsure at all Xaa locations
  Clone ID: MRT4577_51353C.1.pep
KLPADIRTAIHHSKXLFCNGYAFDEFFPDVIASSIDCAICSGTAVFFDPGPRGKSLLHGTLGEQRALEHALRLSDVLLLTSDEAESLTNIRNPVQAGQELLKRGIRTKQVVIKMGSRGSIMITKNTISCAPAFKIDVVDTVGCGDSFTAAIAFGFLHDLPAVNTLTLANAVGAATATGCGAGRNVARLDKVLQLVREADLNEDVTLWTELTEGNSL

SEQ ID NO: 316100 - protein, 87 aa, Zea mays
  Clone ID: MRT4577_51354C.1.pep
TFIQHYADLIVISMLQHPLATALFQHTTNAATTHHRQWHPQASKRLHQCRCHLPQAQCTSCPSVLCVGGRKIQHTLQINSERYVCVH

SEQ ID NO: 316101 - protein, 279 aa, Zea mays
  unsure (1)..(279): unsure at all Xaa locations
  Clone ID: MRT4577_51355C.1.pep
MWRRHHLLRLLPPPATAATAAAPSHFLRHLSTSSTPTPAASLASSLASALTALSTTPPPATTPDAYFSLHFSDVRPTNALLAEALALSPPATSRAAADLFRFLVRRRSLHPSDGALAPIVRHLARRRDFPAVRALIQEFPTALGPTTLDAYLQQLTRAGRPTDAVKVFDELPEQLRNREALTLLVSSLSSEGFPSHAERAAKKVASEIFPDDNICTLLVSGYANAGKLDHALRLIGETRTGGFHPGLDAYNADLDCVCRLXRKKDPLRTPIEAEKLLVD

SEQ ID NO: 316102 - protein, 80 aa, Zea mays
  Clone ID: MRT4577_51356C.1.pep
MGGGNAQKSKMARERNAEKNKGGKGSQLEVNKKAMNIQVSSSSCLPCVPVEILGVFPDSLGFQATPSGFGRSSHGAILEP

SEQ ID NO: 316103 - protein, 50 aa, Zea mays
  Clone ID: MRT4577_51357C.1.pep
NPMFKEILYLHYSCKLHFFSITNSFLHSGWVTVSMEPYTNPLRQGSLNNG

SEQ ID NO: 316104 - protein, 115 aa, Zea mays
  unsure (1)..(115): unsure at all Xaa locations
  Clone ID: MRT4577_51358C.1.pep
LSYISRDRVPLSSPDVSNGVPSASARGYIDAPRTTLDMLDSPVEXEKVRXQNKRLVQSPSSFFMDVKXTGDSDITTVFSHSQTDDVRHACQTVLCEPTGGKVRLTDVCSFRRKGD

SEQ ID NO: 316105 - protein, 84 aa, Zea mays
  unsure (1)..(84): unsure at all Xaa locations
  Clone ID: MRT4577_51359C.1.pep
SVKDTETTTVCFYLARCXAEGSLVDRWQIVTVPDSDCTIQDMDIFHDNLVLFLRKNGTPLFCSISMPIDVQEPKELDDLNPMFF

SEQ ID NO: 316106 - protein, 86 aa, Zea mays
  Clone ID: MRT4577_5135C.1.pep
NTLPYIIMASAGVRPNQSRSTPNNQITMSPLPNRGGIGAGGIARCRVVSAVCCSIPWSGSPSIQSQVRIPPGTAHVSASISTWIIA

SEQ ID NO: 316107 - protein, 100 aa, Zea mays
  Clone ID: MRT4577_51360C.1.pep
CVDMHLSQSVRASFCSTVCSVVAKPCSVEPYVLLYPVIPTSHICQPCLCMDLECVYQWLSCQSLSKRVLLSFRYTVLITSQPRVRERGASRPPRQRATSS

SEQ ID NO: 316108 - protein, 124 aa, Zea mays
  Clone ID: MRT4577_51361C.1.pep
TRVLSFSGSSVGTTRGWRFPPSPLTNPPCLQQPRVPQGAPLPFASPTGFKGGWGKSTDSKDNSEAPEANKESQKKMGFPPLGLKTRKFSCVKAQVLASCTSKKQIFHGCFYREGFPVSGKTIPP

SEQ ID NO: 316109 - protein, 142 aa, Zea mays
  unsure (1)..(142): unsure at all Xaa locations
  Clone ID: MRT4577_51362C.1.pep
YPLPCSPPRPTPPARSASRGPAPELRIARXPGSHPTPPPPPACGPHPPGRPSPXSSSPNRLPPPISPMMPTTSPSASAPSPPLPLPTRAIXPSPRTLSTXTARATSTPSKPCAHPFPSPSMRXSPPPFPSGKPLQSLLHHSH

SEQ ID NO: 316110 - protein, 48 aa, Zea mays
  Clone ID: MRT4577_51363C.1.pep
KHNPTQALAIINLFVWREQLITCPHVLYKLYCNPNSTGVGLGYGRLFI

SEQ ID NO: 316111 - protein, 49 aa, Zea mays
  unsure (1)..(49): unsure at all Xaa locations
  Clone ID: MRT4577_51364C.1.pep
KVEDPTAKVPPLRKESPNPECGAGVLMANHFDPQXCGKCGLTKVYNQQG

SEQ ID NO: 316112 - protein, 127 aa, Zea mays
  Clone ID: MRT4577_51365C.1.pep
FVGYRGRLIAFVSPLVSGVRPNMPLVFRSSIMHGLPWFSADQCKDAVYHRRSDQLASVFPAGGHKHTRSTTVFINVRLDGVVVATQVMNGAVVCFLPATRCLSAGVQNEKEKKRKAQPFQQKKKKEK

SEQ ID NO: 316113 - protein, 71 aa, Zea mays
  Clone ID: MRT4577_51366C.1.pep
SRPAGRPVPTPSFTPASCLGAYHEYQTTGGQAPSLPCPRWRQQGPRPRWPPALNPRRQTNTSSCRPRGRRS

SEQ ID NO: 316114 - protein, 121 aa, Zea mays
  Clone ID: MRT4577_51367C.1.pep
NTEGQLYSLYIDNRGVRWIQDLSSHGKVMTVAPGNSGCLYTVFPRKSIVVGINASTGNISWTQNTGPISNEKNLPTVDSNGWMSIGSLDGALYSISPDGEMRKFLGETANGSVIHVGPVLD

SEQ ID NO: 316115 - protein, 68 aa, Zea mays
  Clone ID: MRT4577_51368C.1.pep
SLRRLRVAAMAPHGTSVCRREHLADLELSEGGIQHELLPHIEKPQILTIPGIGVAQVRSYGARVMVEC

SEQ ID NO: 316116 - protein, 51 aa, Zea mays
  Clone ID: MRT4577_51369C.1.pep
LPSLGRFNLANVVICLPDQRLEFGHFSACRMGAKSWWHATTMCVGTDKLCT

SEQ ID NO: 316117 - protein, 51 aa, Zea mays
  Clone ID: MRT4577_5136C.1.pep
CRCCCLSSLWWGRASAHAHKRTAARVMIIGTSTRPSHITSRAESELSAVTE

SEQ ID NO: 316118 - protein, 123 aa, Zea mays
  Clone ID: MRT4577_51370C.1.pep
MANGCPTTTTSSLLLFFLLSYLLIGHALCSQGHNGRTSGADYVVQYLHQELPGKHIVLQETVKGLNKGILPKYARRMLIGSIAPICTYNECRGCRFKCTAEQVPVDANDPMNSAYHYKCVCHR

SEQ ID NO: 316119 - protein, 75 aa, Zea mays
  unsure (1)..(75): unsure at all Xaa locations
  Clone ID: MRT4577_51371C.1.pep
HRLLTILTCHNRTCLCNITTAALLKGLHRRAYTPPLXSGXAAEKKKIPPLPPRIASEQKKQIQGVWFKLPRPAFS

SEQ ID NO: 316120 - protein, 96 aa, Zea mays
  Clone ID: MRT4577_51372C.1.pep
LFAHFNLTCGEGADYVVQYLHQELPGKHIVLQETVKGLNKGILPKYARRMLIGSIAPICTYNECRGCRFKCTAEQVPVDANDPMNSAYHYKCVCHR

SEQ ID NO: 316121 - protein, 66 aa, Zea mays
  unsure (1)..(66): unsure at all Xaa locations
  Clone ID: MRT4577_51373C.1.pep
LNVGPRFHDVKKNTDXXWKDLNPKFVLQFYRDVVATGDKSFARAVWXSVYIAMAYMEQLIKDXDGM

SEQ ID NO: 316122 - protein, 54 aa, Zea mays
  Clone ID: MRT4577_51374C.1.pep
VVLGPCFVAEGPARRNSFGKSCLYVMPKLPLMKLRCYSVFEDEGSNRLKDGMTF

SEQ ID NO: 316123 - protein, 71 aa, Zea mays
  Clone ID: MRT4577_51375C.1.pep
SLPTRSISRQRHHTRGGFYKAERALKTSVAAQVPYIHCGQLLRTFPVPEPTVLTCSRQEQHYPFSIFLRLN

SEQ ID NO: 316124 - protein, 75 aa, Zea mays
  unsure (1)..(75): unsure at all Xaa locations
  Clone ID: MRT4577_51376C.1.pep
EIKEKLAGSLXDGAPXGNLMKGYSFNGMEKEAMDCYAEVLGEGSTVRFRAASYNMVLDALAKNGKLTYSLLRYRR

SEQ ID NO: 316125 - protein, 88 aa, Zea mays
  Clone ID: MRT4577_51377C.1.pep
LPHTRLVKNFVHTAPRLSHCTRDPYFHKSTDAFDTHAQPHAHASGEPAQLLKRALSADIGSMTPAGARQTRYSALSLRITSILRHHPP

SEQ ID NO: 316126 - protein, 97 aa, Zea mays
  unsure (1)..(97): unsure at all Xaa locations
  Clone ID: MRT4577_51378C.1.pep
ACARSXSSXRLXGXGXXPGCLXCAXXSACAWRGXSXXXXLRVRAPLXXXCVCXXXXXXPXLRCLCPXXXSSACAVXCVWGAXLLLPPAGCSFXXFGX

SEQ ID NO: 316127 - protein, 118 aa, Zea mays
  unsure (1)..(118): unsure at all Xaa locations
  Clone ID: MRT4577_51379C.1.pep
AEDAEYILYDRLRSASGRRHTVAGNMATPGERLQTLLSWSDPRATCLIARSTLLAARVLYHTPMRIVALTATLDVVGPPRXRAGRPSLCRNYFQTRNLYLEKPPTSRGNHSKGLPRPA

SEQ ID NO: 316128 - protein, 66 aa, Zea mays
  Clone ID: MRT4577_5137C.1.pep
RLGHFSPVRVPMYHPLGPAHLLVFPIFKIWAHSSFLLEKRQVLGFCSKIQNKSRPAHLEPKFQVAK

SEQ ID NO: 316129 - protein, 73 aa, Zea mays
  Clone ID: MRT4577_51380C.1.pep
SNGDLLLCFSIFANGMNREVMFHPKNLSSGSHLSAASLFCLVCHYAVVMQCPVVSKHRFRIFIESHFLFTKTT

SEQ ID NO: 316130 - protein, 139 aa, Zea mays
  Clone ID: MRT4577_51381C.1.pep
ASSLAFSMPAASTLMRFASAGRSAAATASLFARLAERAALSTKAVAVECHAPTLGSHRAASVDLRLHRPPVVVPPPAMTAPASQTLSYLKEQTPEGKVKFVAEEKDLESDETLWALYERWCEAFNQKRDHDEKVRRFST

SEQ ID NO: 316131 - protein, 80 aa, Zea mays
  unsure (1)..(80): unsure at all Xaa locations
  Clone ID: MRT4577_51382C.1.pep
IELSXLFTAATXXPIHPASWCEXCPFFTPPQLSPFSQHAAXHXGPLSQPPQLXPLTTLALPPPAAFSPHPLIGGPSFSFL

SEQ ID NO: 316132 - protein, 86 aa, Zea mays
  Clone ID: MRT4577_51383C.1.pep
RPESTTAAVVFLPLLAVLLLAACDDRPPLLCWTLIDTENAMLDRPIGLYQRPLMIRIIDQSSLYIYLCLCIVCLGLLVPPPLNLDL

SEQ ID NO: 316133 - protein, 118 aa, Zea mays
  Clone ID: MRT4577_51384C.1.pep
YSKAKHHKIPFIKKYQGRVINFPRKEMHQLFSTQLLSPNASYKVIKILKQQGGSKCTRACLDNTTLVFLGGDHLAISFCLVTCSDYPSLGSSISITLRLIQLLPFTSCDQLACLMRCM

SEQ ID NO: 316134 - protein, 64 aa, Zea mays
  Clone ID: MRT4577_51385C.1.pep
AVVTTQSTFFFFFFFFFFFFFFFFINNNHLQILGGISASIHDATPVHNVKNLQQQLSRAPVRTH

SEQ ID NO: 316135 - protein, 29 aa, Zea mays
  Clone ID: MRT4577_51386C.1.pep
MARVRTKIANKTSRQVIDNYYSRLILDFY

SEQ ID NO: 316136 - protein, 125 aa, Zea mays
  Clone ID: MRT4577_51387C.1.pep
MPLRYISRDATHVPGTGPTTLSLPHRTKHNHKEQEVDTELRAESVLCFAHRSTDLGMADWGPVLIGLVLFILLSPGLLFQIPGKGRIIEFGNFQTSGLSILVHAVIYFALLAIFLLAVGVHIYLG

SEQ ID NO: 316137 - protein, 54 aa, Zea mays
  Clone ID: MRT4577_51388C.1.pep
SGFSHRITLLASSRLSPTTSVQDFLSPSSPLPVEFMVFGCRWRTERAISNYVGS

SEQ ID NO: 316138 - protein, 110 aa, Zea mays
  Clone ID: MRT4577_51389C.1.pep
DSSHLLSLAPNPIFTHTIFDCFFQPHSNLHIPTHLHFPPQVHQTPPYHFPPASHLPTTLHLPPPIHFPAHTSLQSSPSQYPTLPPRSQPHPHPHPCPFQQTNSYPFQIKA

SEQ ID NO: 316139 - protein, 97 aa, Zea mays
  Clone ID: MRT4577_5138C.1.pep
RGVIAAAGDAGETIADGGARSPSILDLIVGGVEFGPCRAELMVGMISVGKIGGQNTLNSPALCRGSSHSRGQPHRHFISSKDTHTRIALHSASCRAI

SEQ ID NO: 316140 - protein, 862 aa, Zea mays
  Clone ID: MRT4577_51390C.1.pep
MNKVQIKSKERRRKEKSWLYTAKRLFRSGAPDSVRFVLRTVRGTSPDSTVSGLGPFDLIGGRSARVIYSWSEVRVPQVARSRTDKSETQGTLKRFLRRAQNEFELKVKKIRSDNGSEFKNLQVEEFLEEEGIKHEFSAPYTPQQNGVVERKNRTLIDMARTMLGEFKTPECFWTEAVNTACHAINRVYLHRLLKKTSYELLTGNKPNVSYFRVFGSKCYILVKKGRNSKFAPKAVEGFLLGYDSNTKAYRVFNKSSGLVEVSSDVVFDETNGSPREQVVDCDDVDEEDVPTAAIRTMAIGEVRPQEQDERDQPSSSTMVHPPTQDDEQVHQQEACDQGGAQDDHVMEEESQPAPPTQVRAMIQRDHPVDQILGDISKGVTTRSRLFNFCEHYSFVSSIEPFRVEEALLDPDWVLAMQEELNNFKRNEVWTLVPRPKQNVVGTKWVFRNKQDEHGVVTRNKARLVAKGYAQVAGLDFEETFAPVARLESICILLAYAAHHSFRLYQMDVKSAFLNGPIKEEVYVEQPPGFEDERYPDHVCKLSKALYGLKQAPRAWYECLRDFLIVNAFKKFEMSMMGELNYFLGFQVKQLKDGTFISQTKYTQDLLKRFGMKDAKPAKTPMGTDGHTDLNKGGKSVDQKAYRSMIGSLLYLCASRPDIMLSVCMCARFQSDPKECHLVAVKRILRYLVATPCFGLWYPKGSTFDLVGYSDSDYAGCKVDRKSTSGTCQFLGRSLVSWNSKKQTSVALSTAEAEYVAAGQCCAQLLWMRQTLRDFGYNLSKVPLLCDNESAIRMAENPVEHSRTKHIDIRHHFLRDHQQKGDIEVFHVSTENQLADIFTKPLDEKTFCRLRSELNVLDSRNLD

SEQ ID NO: 316141 - protein, 890 aa, Zea mays
  Clone ID: MRT4577_51391C.1.pep
MGIKARRCDGSLAFKGVLDGKLYLVDFAKEEAGLDACLMAKTCMGWLWHRRLAHVGMKNLHKLLKGEHVIGLTNVHFEKDRPCAACQAGKQVGGSHHTKNVMTTSRPLELLHMDLFGPVAYLSIGGSKYGLVIVDDFSRFTWVFFLQDKSETQGTLKRFLRRAQNEFELKVKKIRSDNGSEFKNLQVEEFLEEEGIKHEFSAPYTPQQNGVVERKNRTLIDMARTMLGEFKTPECFWSEAVNTACHAINRVYLHRLLKKTSYELLTDEEDVPTAAIRTMAIGDVRPQEHLEQDQPSSSTTLQPPTQDDEQVHQKEACDQGGAQDDHVMEEEAQPAPPTQVRATIQRDHPVDQILGDISKGVTTRSRLVNFCEHYSFVSSIEPFRVEEALLDPDWVLAMQEELNNFKRNEVWTLVPRPKQNVVGTKWVFRNKQDEHGVVTRNKARLVAKGYAQVAGLDFEETFCSVARLESIRILLAYAAHHSFRLYQMDVKSAFLNGPIKEKVYVEQPPGFEDERYPDHVCKLSKALYGLKQAPRAWYECLRDFLIANAFKVGKADPTLFTKTCDGDLFVCQIYVDDIIFGSTNQKSCEEFSRVMTQKFEMSMMGELTYFLGFQVKQLKDGTFISQTKYTQDLLKRFGMKDAKPAKTPMGTDGHTDLNKGGKSVDQKAYRSMIGSLLYLCASRPDIMLSVCMCARFQSDPKECHLVAVKRILRYLVATPCFGLWYPKGSTFDLVGYSDSDYAGCKVDRKSTSGTCQFLGRSLVSWNSKKQTSVALSTAEAEYVAAGQCCAQLLWMRQTLRDFGYNLSKVPLLCDNESAIRMAENSVEHSRTKHIDIRHHFLRDHQQNGDIEVFHVSTENQLADIFTKPLDEKTFCRLRSELNVLDSRNLD

SEQ ID NO: 316142 - protein, 283 aa, Zea mays
  unsure (1)..(283): unsure at all Xaa locations
  Clone ID: MRT4577_51392C.1.pep
NPPPTVNRPPCLHPPLLHLLLLVVAAAALRGAPLADAGADTCKAWLVQSIPTDMPHLSRIPGVLSTGDVLQWLSGNATKSLDILAQYWXSCPSRTIRNRGTTGXKSDMRRFGADEGRRVYKALENAADRKIKIRIVQHSGFAPDFDQESADLAAGRPNVENATVLFEDWWGSGVVHAKVWISDKKDVYIGSANNDWKSLTQVKELGIYFAGCPHIAKTVEVYFQNLWTLSTLNSTFYTKQAWDTQWQISRKVPCWSHFLQPKERCRFASPSAGHSDLLLSAQI

SEQ ID NO: 316143 - protein, 283 aa, Zea mays
  Clone ID: MRT4577_51393C.1.pep
DKSETQGTLKRFLRRAQNEFELKVKKIRSDNGSEFKNLQVEEFLEEEGIKHEFSAPYTPQQNGVVERKNRTLIDMARTMLGEFKTPERFWSEAVNTACHAINRFYLHRLLKKTSYELLTGNKPNVSYFRVFGSKCYILVKKGRNSKFAPKAVEGFLLGYDSNTKAYRVFNKSSGLVEVSSDVVFDDTNGSPREQVVDCDDVDEEDVPTAAIRTMAENPVEHSRTKHIDIRHHFLRDHQQKGDIEVFHVSTENQLADIFTKPLDEKTFCRLRSELNVLDSRNLD

SEQ ID NO: 316144 - protein, 1018 aa, Zea mays
  Clone ID: MRT4577_51394C.1.pep
VYASGGSSWIIDSGCTNHMTGEKKMFTSYVKNKDSQDSIIFGDGNQGKVKGLVESLGYNLLSVSQLCNMGYNCLFTNIDVSVFRRSDGSLAFKGVLDGKLYLVDFAKEEAGLDACLIAKTSMGWLWHRRLAHVGMKNLHKLLKGEHVIGLTNVQFEKDRPCAACQAGKQVGGAHHSKNVMTTSRPLELLHMDLFGPVAYLSIGGSKYGLVIVDDFSRFTWVFFLQDKSETQGTLKRFLRRAQNEFELKVKKIRSDNGSEFKNLQVEEYLEEEGIKHEFSAPYTPQQNGVVERKNRTLIDMARTMLGEFKTPERFWSEAVNTACHAINRVYLHRLLKKTSYELLTGNKPNVSYFRVFGSKCYILVKKGRNSKFAPKAIEGFLLGYDSNTKAYRVFNKSSGLVEVSSDVVFDETNGSPREQVVDLDDVDEEDVPTAAIRTMAIGDVRPQEQDEQDQPSSSTMVHPPTQDDKQVHQQEACDQGGAQDDHVMEEEAQPAPPTQVRAMIQRDHPVDQILGDISKGVTTRSRLVNFCEHYSFVSSIEPFRVEEALLDPDWVLAMQEELNNFKRNEVWTLVPRPKQNVVGTKWVFRNKQDEHGVVTRNKARLVAKGYAQVAGLDFEETFAPVARLESIRILLTYAAHHSFRLYQMDVKSAFLNGPIKEEVYVQQPPGFEDERYPDHVGKADPTLFTKTCDGDLFVCQIYVDDIIFGSTNQKSCEEFSRVMTQKFEMSMMGELNYFLGFQVKQLKDGTFISQTKYTQDLLKRFGMKDAKPAKTPMGTDGHTDLNKGGKSVDQKAYRSMIGSLLYLCASRPDIMLSVCMCARFQSDPKECHLVAVKRILRYLVATPCFGLWYPKGSTFDLVGYSDSDYAGCKVDRKSTSGTCQFLGRSLVSWNSKKQTSVALSTAEAEYVAAGQCCAQLLWMRQTLRDFGYNLSKVPLLCDNESAIRMAENPVEHSRTKHIDIRHHFLRDHQQKGDIEVFHVSTENQLADIFTKPLDEKTFCRLRSELNVLDSRNLD

SEQ ID NO: 316145 - protein, 1831 aa, Zea mays
  Clone ID: MRT4577_51395C.1.pep
MDPMGKGMVVNNNEKESIFNEPKDDKPTDSGSSHKRKDGKKKKTRRIKEIVYYDSDESSSSQKDDDDYEKKKTVNSNFSFDYSRIPQNTNAHLLSIPLGKPPHFDGEDYGFWSHKMRSHLFSLHPSIWEIVENGMHFDSSDNPMFINEQIHKNAQATTVLLASLCRDEYHKVSGLDNAKQIWDTLKISHEGNDVTMLTKMELVEGELGRFAMIRGEEPTQTYNRLKTLVNKIRSYGIYGSTRWTDHDVVCLMLRSFTVLDPHLVNNIRENPRYTKMTPEEILGKFVSGRMMIKEARYVDDALNGPINEPQPLALKATRSNETLPSKVAQIEAAGLNDEEMALIIKRFKTALKGRKGQPSKTKTKGKRSCFKCGKLGHFIANCPDNDSDQDQGNKREKKKNYKKAKGEAHLGKEWDSNCSSSDSDNEGLAATAFNKSSLFPNERHTCLMAREKKVCTRNTTYASSSEDESSDEDEIDYSCLFKGLDRTKVDKINELIDALNDKNRLLEKQEDLLYEEHDKFVEAQKSHALEVKRNEMLSCELSSCHETISNLRSINDDLNAKLEIASKSTSCVENDVICNRCKDFDIDACSEHIASIAKLNDEIASLNDQLKTSKSEFDKLKFARDAYTIGRHPSIKDGLGFKREVKNLTSHKASISTKEKGKAPMASNAKKNHAFMYHDRKFSGNVHDDRSCNAYNAFDSHAMFASSSSYMHGRNVFRRNVVHHMPRRNVVNIPRKVNEPSTIYHACDASFAICGKDRKVYASGGSSWIIDSGCTNHMTGEKKMFTSYVKNKDSQDSIIFGDGNQGKVKGLGKIAISNEHSISNVFLVESLGYNLLSVSQLCNMGYNCLFTNVDVSVFRRSDGSLSFKGVLDGKLYVVDFAKEEAGLDACLIAKTSMGWLWHRHLAHVGMKNLHKLLKGEHVIGLTNVTFEKDRPCAACQAGKQVGGAHHSKNVMTTSRPLELLHMDLFGPVAYLSIGGSKYGLVIVDDFSRFTWVFFLQDKSETQGTLKRFLRRAQNEFELKVKKIRSDNGSEFKNLQVEEFLEEEGIKHEFSAPYTPQQNGVVERKNRTLIDMARTMLGEFKTPEYFWSEAVNTACHAINRVYLHRLLKKTSYELLTGNKPNVSYFRVFGSKCYILVKKGRNSKFAPKAVEGFLLGYDSNTKAYRVFNKSSGLVEVSSDVVFDETNGSPREQVVDLDDVDEEDVPTAAIRTMAIGDVRPQEQKEQDQPSSSTMVHPLTQDDEQVHQQEACNEGGAQDDHMMEEETQPAPPTQVRAMIQRDHPVDQILGDISKGVTTRSRLVNFCEHYSFVSSIEPFRVEEALLDPDWVLAMQEELNNFKRNEVWTLVPCPKQNVVGTKWVFRNKQDEHGVVTRNKARLVAKGYAQVAGLDFEETFAPVARLESIRILLAYAAHHSFRLFQMDVKSAFLNGPIKEEVYVEQPPGFEDEWYPDHVCKLSKALYGLKQAPRAWYECLRDFLIANAFKVGKVDPTLFTKTCDGDLFVCQIYVDDIIFGSTNKKSCEEFSRVMTQKFEMSMMGELNYFLGFQVKQLKNGTFISQTKYTQDLLKWFGMKDAKPAKTPMGTDGHTDLNKGGKSVDQKAYRSMIGSLLYLCASRSDIMLSVCMCARFQSDPKECHLVAVKRILRYLVATPCFRLWYPKGSTFDLIGYSDSDYAGCKVDRKSTSGTCQFLGRSLVSWNSKKQTSVALSTAEAEYVAAGQCCTQLLWMRQTLRDFGYNLSKVPLLCDNESAIRMAENPVEHSRTKHIDIRHHFLRDHQQKGDIEVFHVSTENQLADIFTKPLDEKTFCRLRNFGEAMGFLGQDSSRFGI

SEQ ID NO: 316146 - protein, 1573 aa, Zea mays
  unsure (1)..(1573): unsure at all Xaa locations
  Clone ID: MRT4577_51396C.1.pep
MDPKGKGMVINDKEKETFVNELNDDKPTDSGSSHKRKDGRKKKTRRIKEIVYYDSDESSSSQKDDDDHDRRKTVNSNFSFDYSRIPHSSNTQLLPIPLGKPPHFDGEDYGFWSHKMRTHLFSLHPSIWEIVESGMKFDSSDSPVFINEQIHKNAQATTVLLASLCRDEYHKVSGLDNAKQIWDTLKISHEGNDVTLLTKMELVEGELGRFAMIRGEEPTQTYNRLKTLINKIRSYGSTQWTDHDVVRLMLRSFTVLDPHLVNNIRENPRYTKMSPEEVLGKFVSGRMMIKEARYVDDALNGPINEPQPLALKATRSKEALPSKVAQIEAAGLNDEEMALIIKRFKTVLKGRKGQPSKTKAKGKRSCFKCGKLGHFIANCPDNDSDQDQGNKREKKKNYKKAKGEAHLGKEWDSDCSSSDSDNEGLATTAFNKSSLFPNEHHTCLMAREKKVSTPNTSTYASSSEDESSDDDEIDYSCLFKGLDRTKVDKINELIDALNDRNILLEKQEDLLYEEHDKFVEAQKSLALEIKRNEMLSSELSSCHETIAKLKIFNDDLNAKLEVVSKSNSCVEIVETCNRCKDFDIDACSDHLVSISKLNEELASLNAQLKTSKNEFDKLKFARDAYTIGRHPSIKDGLGYKREAKNLTSHKAPISAKEKGKAPMASSVQKNHAFMYHDRRQSRNAYRSCNAYNVFDSHAMFASSSSYVHDRNVGRRNAIHNLPRRNVVNVPRKVYASGGSSWIIDSGCTNHMTGEKKMFTSYVKNKDSQDSIIFGDGNQGKDKSETQGTLKRFLGRAQNEFELKVKKIRSDNGSEFKNFQVEEFLEEEGIKHEFSAPYTPQQNGVVERKNRTLIDMARTMLGEFKTPERFWSEAVNTACHAINRVYLHRLLKKTSYELLTGNKPNVSYFRVFGSKCYILVKKGRNSKFAPKAVEGFLLGYDSNTKAYRVFNKSSGLVEVSSDVVFDETNGSPREQVVDCDDVDEEDVPTAAIRTMAIGEVRPQEQDERDQPSSSTMVHPPTEDDEQVPQVEALDQGGAQDDQVMEEEAQLAPLTQVRAMIQRDHPVDQILGDISKGVTTRSRLVNFCEHYSFVSSIEPFRVEEALLDPDWVLAMQEELNNFKRNEVWTLVPRPKQNVXWVFRNKQDEHGVMTRNKARLVAKGYAQVXRLYQMDVKSAFLNGPIKEEVYVEQPPGFEDERYPDHVCKLSKALYGLKQAPRAWYECLRDFLIVNAFKVGKADPTLFTKTCDGDLFVCQIYVDDIIFGSTNQKSCEEFSRVMMQKFEMSMMGELNYFLGFQVKQLKDGTFISQTKYTLDLLKRFGMKDAKPAKTPVGTDGHTDLNKGGKSVDQKAYRSMIGSLLYLCASRPDIMLSVCMCARFQSDPKECHLVAVKRILRYLVATPCFGLWYPKGSTFDLVGYSDSDYAGCKVDRKSTSGTCQFLGRSLVSWNSKKQTSVALSTVEAEYVAAGQCCAQLLWMRQTLRDFGYNLSKVPLLCDNESAIRMAENPVEHSRTKHIDIRHHFLRDHQQKGDIEVFHVSTENQLADIFTKPLDEKTFCRLRSELNVLDSRNLD

SEQ ID NO: 316147 - protein, 85 aa, Zea mays
  unsure (1)..(85): unsure at all Xaa locations
  Clone ID: MRT4577_51397C.1.pep
GFLVQPLVSLSSDMCTGRWGQRMRFILIRCMLICLAVIVVGFSIDIXAALRDTKEYCSLYHDHAXHAVIVYVLGFWLLDFSNHTV

SEQ ID NO: 316148 - protein, 115 aa, Zea mays
  Clone ID: MRT4577_51398C.1.pep
SSLAGPLLSRGRVGGWPVATPCLVLTAGGRPPGARLAGGSAGCHGSRAHGRRQTARGQVGSAAVQAADPLRLSLRPSLPWRRRRQAEVISEVKYSLVCLLIHSGRHEILLPRAEY

SEQ ID NO: 316149 - protein, 826 aa, Zea mays
  Clone ID: MRT4577_51399C.1.pep
MCRRNVVHMPRRNFAHVPRKVVNKPFTIYYACNASFAICRKGKKVYASGGSSWIIDSGCTNHMTGEKKMFTSYVKNKDSQDSIIFGDGNQGKVKGLDVSVFRRSDGSLAFKGVLDGKLYLVDFAKEEAGLDACLMAKTCMGWLWHRRLAHVGMKNLHKLLKGEHVIGLTNVHFEKDRPCAACQAGKQVGGAHHSKNVMTTSRSLELLHMDLFGPVAYLSIGGSKYGLVNVDDFSRFTWVFFLQDKSETQGTLKRFLRRAQNKFELKVKKIRSDNGSEFKNLQVEEFLEEEGIKHEFSAPYTPQQNGVVERKNRTLIDMARTMLGEFKTPECFWSEAVNTACHAINRVYLHRLLKKTSYELLTGNKPNVSYFRVFGSKCYILVKKGRNSKFAPKAVEGFLLGYDSNTKAYRVFNKSSGLVEVSSDVVFDETNGSPREQVVDCDDIDEEDVPAAAIRTMAIGEVRPQEKDDQPSSSTTVHPPTQDDEQPFRVEEALLDPDWVLAMQEELNNFKRNEVWTLDEHGVVTRNKARLVAKGYAQVAGLDFEETFAPVARLESIRILLAYAAHHSFRLYQMDVKSAFLNGPIKEEVYVEQPPGFEDDRFPDHVCKLSKALYGLKQAPRAWYECLRDFLVANAFKVGKADPTLFTKTCDGDLFVCQIYVDDIIFGSTNQKSCEEFSRVMTQKFEMSMMGELNYFLGFQVKQLKDGTFISQTKYTQDLLKRFGMKDAKPAKTPMGTDGHTDLNKGGKSVDQKAYRSMIGSLLYLCASRPDIMLSVCMCARFQSDPKECHLVAVKRILRYLVATPCFGLWYPKGLKASRPLVGFSD

SEQ ID NO: 316150 - protein, 52 aa, Zea mays
  Clone ID: MRT4577_5139C.1.pep
LALPSQGIHQELLSTREINQGVTSFQSAVRIVISCRTYMLIFLQHQPMYPGR

SEQ ID NO: 316151 - protein, 178 aa, Zea mays
  unsure (1)..(178): unsure at all Xaa locations
  Clone ID: MRT4577_513C.1.pep
FFLLGVIVVVRYPSGCFPLLPYSSGRPCHSVHFVAVPRGAAXSRVLICADATXKAAYVLKGXSEAEDVGALTQDXDGPTXTGNDRITGLTRVLHXGYHRHQLGDTXTNGCIXTGPHFTPDNLTHAGPEDEVRCAVDLENIXVNXAEGIAEATIVDXQSPLTRPNSVAGTIFAXHELED

SEQ ID NO: 316152 - protein, 1607 aa, Zea mays
  Clone ID: MRT4577_51400C.1.pep
MDPKGKGIVINDKEKEFFVNEPRDDKSNDSGSGHSRKDGKKKKTRRIKEIVYYDSDESTSSQKDDDHNEYERKKPVNSNFSFDYSRIPQSTNAHLLSIPLGKPPHFDGEDYGFWSHKMRSHLFSLHPSIWEIVESGMHFDSTDSPMFINEQIHKNAQATTVLLASLCRDEYHKVSGLDNAKQIWDTLKISHEGNDVTLLTKMELVEGELGRFAMIRGEEPTQTYNRLKTLINKIRSYGSTRWTDHDVVRLMLRSFTVLDPHLVNNIRENPRYTKMSPEEVLGKFVSGRMMIKEARYVDDALNDPIHESQPIALKATRSKEALPSKVAQVEAAGLNNEEMALIIKRFKTVLKGRKGQPSKTKTKEKRSCFKCGKIGHFIANCPDNESDQEKGNKREKKKHYKKAKGEAHIGKEWDSDCSSSDSDNEGLAATAFNKSSLFPNERHTCLMAREKKVSTHDTSTYASSSEDESSDDDEIDYSCLFKGLDRSKINKINELIDALNYKNRLLEEQEDLLYEEHDKFVSAQNSLALEIKRNEMLSSELSTCHESISKLKSVNDDLNAKLEIASKSTSCVEIVETCNRCKDFDIDACSEHLVSISKLNDELASLNAQLKTSKSNFDKLKFARDAYTIGRHPSIKDGLGYKKEAKNLTRHKAPISAKEKGKAPMASSVQKNHAFMYHDRRESRNAYRRCNAYDAFDSHDMFASSSSYVHDRNVGRRNVVHNMPRRNVVNVPRKVYASGGSSWIIDSGCTNHMTGEKKMFTSYVKNKDSQDSIIFGDGNQGKDKSETQGTLKRFLRRAQNEFELKVKKIRSDNGSEFKNLQVEEFLEEERIKHEFSAPYTPQQNGVVERKNRTLIDMARTMLGEFKTPERFWSEAVNTACHAINRVYLHRLLKKTSYELLTDNKPNVSYFRVFGSRCYILVKKGRNSKFAPKAVEGFLLGYDSNTKAYRVFNKSSGFVEVSSDVVFDETNGSPREQVVDCDDVDEEDVPTAAIRTMAIGEVRPQEQDERDQPSSSTTVHPPTQDDEQVHQKEACDQGGAQDDHVMEEEAQPAPPTQVRAVIQRDHPVDQILGDISKGVTTRSRLVNFCEHYSFVSSIEPFRVEEALLDPDWVLAMQEELNNFKRNEVWTLVPRPKQNVVGTKWVFRNKQDEHGVVTRNKARLVAKGYAQVAGLDFEETFAPVARLESIRILLAYAAHHSFRLYQMDVKSAFLNGPIKEEVYVEQPPGFEDERYPDHVCKLSKALYGLKQAPRAWYECLRDFLIANAFKVGKADPTLFTKTCDCDLFVCQIYADDIIFGSTNQKSCEEFSRVMMQKFEMSMMGELNYFLGFQVKQLKDGTFISQTKYTQDLLKRFGMKDAKPAKTPMGTDGHTDLNKGGKSVDQKAYRSMIGSLLYLCASRPDIMLSVCMCARFQSDPKECHLVAVKRILRYLVATPCFGLWYPKGSTFDLVGYSDSDYAGCKVDRKSTSRMCQFLGRSLVSWNSKKQTSVALSTAEAEYVAAGQCCAQLLWMRQTLRDFGYNLSKVPLLCDNESAIRMAENPVEHSRTKHIDIRHHFLRDHQQKGDIEVFHVSTENQLADIFTKPLDEKTFCRLRSELNVLDSRNLD

SEQ ID NO: 316153 - protein, 1048 aa, Zea mays
  Clone ID: MRT4577_51401C.1.pep
MTGEKKMFTSYVKNKDSQDSIIFGDGNQGNVKGLGKIAISNEHSISNVFLVESLGYNLLSVSQLCNMGYNCLFTNIDVSVFRRSDGSLAFKGVLDGKLYLVDFAKEEASLDACLIAKTSMGWLWHRRLAHVGMKNLHKLLKGEHVIGLTNVQFEKDRPCAACQAGKQVGGAHHSKNVMTTSRPLELLHMDLFRPVAYLSIGGSKYGLVIVDDFSRFTWVFFLQDKSETQGTLKRFLRRAQNEFELKVKKIRSDNGPEFKNLQVEEFLEEEGIKHEFSAPYTPQQNGVVERKNRTLIDMARMMLGEFKTPERFWSEAVNTACHAINRVYLHRLLKKTSYELLTGNKPNVSYFRVFGSKCYILVKKGRNSKFAPKAVEGFLLGYDSNTKAYRVFNKSSGLVEVSSDVVFDETNGSPREQVVNLDDVDEEDVPTAAIRTMAIGDVRSQEQKEQDQPSSSTMVHPPTQEDEQVHQEETYDQGGAQDDQVMEEEGQPAPPTQVRAMIQRDHPVDQILGDISKGVTTRSRLVNFCEHYSFVSSIEPFRVEEALLDPDWVLAMQEELNNFKRNEVWTLVPRPKQNVVGTKWVFCNKQDEHGVVTRNKARLVAKGYAQVAGLDFEETFAPVARLESIRILLAYAAHHSFRLFQMDVKSAFLNGPIKEEVYVEQPPGFEDERYPDHVCKLSKALYGLNQAPRAWYECLRDFLIANTFKVGKADPTLFTKTCDGDLFVCQIYVDDIIFGSTNQKSCEEFSRVMTQKFEMSMMGELNYFLGFQVKQLKDGTFISQTKYTQDLLKRFGMKDAKPAKTPMGTDGHTDLNKGGKSVDQKAYRSMIGSLLYLCASRPDIMLSVCMCARFQSDPKECHLVAVKRILRYLVATPCFGLWYPKGSTFDLIGYSDSDYAGCKVDRKSISGTCQFLGRSLVSWNSKKQTSVALSTVEAEYVAAGQCCAQLLWMRQTLRDFGYNLSKVPLLCDIESAIHMADNPVEHSRTKHIDIRHHFLRDHQQKGDIEVFHVSSENQLADIFTKPLDEQTFCRLRSELNVLDSRNLD

SEQ ID NO: 316154 - protein, 1010 aa, Zea mays
  Clone ID: MRT4577_51402C.1.pep
KDRKIVARKLGAKCKGDKTCIWVPKTIVTNLVGPNKSWVYASGGSSWIIDSGCTNHMTGEKKMFTSYVKNKDSQDSIIFGDGNQGKVKGLGKIAISNEHSISNVFLVESLGYNLLSVSQLCNMGYNCLFTNVDVSVFRRSDGSLAFKGVLDDKLYLVDFAKEEAGLDACLIAKTSMGWLWHHRLAHVGMKNLHKLLKGEHVIGLTNVQFEKDRPCAACQAGKQVGGAHHNKNVMTTSRPLELLHMDLFEPVAYLSIGGSKYGLVIVDDFSRFTWVFFLQDKSETQGTLKRFLRRAQNEFELKVKKIRSDNGSEFKNLQVEEFREEEGIKHEFSAPYTPQQNGVVERKNRTLIDMARTMLGEFKTPECFWSEAVNTACHAINRVYLHRLLKKTSYELLTGNKPNVSYFHVFGSKCYILVKKGRNSKFAPKAVEGFLLGYDSNTKAYRVFNKSLGLVEISSDVVFDETNGSPRQQVCDFDDVDEEEVPTAAIRTMAIGDVRPQEQDGQDQPSSSTMVHSPTQDDEQVHQKEACDQGGAQDDHVMEEEAQPAPPTQVRAMIQRDHPVDQILGDISKGVTTRSRLVNFCEHYSFVSSIEPFRVEEALLDPDWVLAMQEELNNFKRNEVWTLVPRPKQNVVGTKWVFRNKQDEHGVVTRNKARLVAKAYAQVAGLHFEETFAPVARLESIRILLAYAAHHSFRLFQMDVKSAFLNGPIKEEVYVEQPPGFEDERYPDHVCKLSKALYGLKQAPRAWYECLRDFLIANAFKVGKADPTLFTKTCDGDLFVCQIYVDDIIFGSTNKKSCEEFSRVMTQKFEMSMMGELNYFLGFQVKQLKDDTFISQTKYTQDLLKRFGMKDAKPAKTPMGTDGHTDLNKGGKSVDQKAYRSMIGSLLYLCASRPDIMLSVCMCARFQSDPKECHLVAVKRILRYLVATPCFGIWYPKGSTFDLIGYSDSDYAGCKVDRKSTSGTCQFLGRSLVSWNSKKQTSVALSTAETEYVAAGQCCAQLLWMS

SEQ ID NO: 316155 - protein, 74 aa, Zea mays
  Clone ID: MRT4577_51403C.1.pep
GPYQGCRYAASPCARPWSSPRWRRLLVPVTAPTASSTSAGLYSIKYALYCANLSSSNFSPIILIHLSHAKSFNS

SEQ ID NO: 316156 - protein, 47 aa, Zea mays
  Clone ID: MRT4577_51404C.1.pep
MDDAELQRRKRLVVYKTYDVEGKVRESVRRGVNWIKGKCSSVVYGWW

SEQ ID NO: 316157 - protein, 118 aa, Zea mays
  Clone ID: MRT4577_51405C.1.pep
SSFLGQSISFYIGTDKSLETKTHNISSAAFLGNIGRAIPDTEMIGGKKKFLFERIGSLPWGPPGRSRPLPPPGGPVGRLRLLGALVGDPNSEHGGGGILGAALVAWPGAVLFLRRRGP

SEQ ID NO: 316158 - protein, 107 aa, Zea mays
  Clone ID: MRT4577_51406C.1.pep
QVGRKDDISHLYKGGHIPTSMSPPPNLPTLTNPQEKLDYSFYIPPNPSPKDKTKKKDPNSDQGRRNKRRYGGRAPRKAQLIGSSTTLMDRNGGEIGRWRGGLGGRWS

SEQ ID NO: 316159 - protein, 76 aa, Zea mays
  Clone ID: MRT4577_51407C.1.pep
GWGGLGGGDMAVGMTNPKRMLQAVVSYSFVQMRYIIFPAYLLVGLCKYRCCIYRIRLLQKKKKKKKKKVLCVVTTA

SEQ ID NO: 316160 - protein, 55 aa, Zea mays
  Clone ID: MRT4577_51408C.1.pep
LASYQTAELIFNPCACISYQVSVYHSNPALVAIYGLHGPLPWLCNVQIMSVYKCK

SEQ ID NO: 316161 - protein, 246 aa, Zea mays
  unsure (1)..(246): unsure at all Xaa locations
  Clone ID: MRT4577_51409C.1.pep
WTGTAERSAGGGVGWADDGASDHHQPYTTLEHFPLIQFTPRRTDSRTXSPRRRRSCTRPGASSAAARRRPSPPAPSWAPGPPRRCRPARRRTAXPPEVDGAAVGGGPVXRCRSASAPRRHRRRRPADKAGPVXPRRRRCTSAXSPGVXGPRRRRSWCSRSAARAXRRRARPRAHAPGALHPGRRRPRXASRRRRCSSGRPPPPRRRTCCPSPRTTPTSPLASLSFFFTHSLRASSLCDNGQSKRRE

SEQ ID NO: 316162 - protein, 49 aa, Zea mays
  Clone ID: MRT4577_5140C.1.pep
NLKKMIFNATSYAVSKTSVAYSSIMIRPAGAPPTVMSQKTRGFAIEIGS

SEQ ID NO: 316163 - protein, 106 aa, Zea mays
  Clone ID: MRT4577_51410C.1.pep
SRRRLKNTLSLLPNNRVHALATPGARDRAGTTAGRRRRTAERHGEAMGSRSTHAPVTPAVSRGCQPWPSLTSRLALRWSWTDAGHTPATSCSYCQLTLILCCFCGD

SEQ ID NO: 316164 - protein, 59 aa, Zea mays
  Clone ID: MRT4577_51411C.1.pep
TSVALPCSGEARHPSTTTACITCAASACVTWTPALDTVEDGHTLIENSTRLLQGIYHIL

SEQ ID NO: 316165 - protein, 156 aa, Zea mays
  Clone ID: MRT4577_51412C.1.pep
MSSGTSSGSSRWVQSSRSEDDLDLQAQMERRRKRRKESNRESARRSRQRKQEHLDDLTSQVNQLKDQNKQLSMALSITSQNLVAVQAQNSVLQTQKMELDSRLGALTEILWYMNSSTSTSTAPTNPAIANDFTAWSRASDILGGTSYSAIDLYQCF

SEQ ID NO: 316166 - protein, 84 aa, Zea mays
  Clone ID: MRT4577_51413C.1.pep
RGKPLQSEGEKTTGAGRELLTIFGGLQITGDLQLRSISVAGYKDIYRGETLKRSVLSLPATGLRFDRQLGRLLQNLDHKLNKLT

SEQ ID NO: 316167 - protein, 62 aa, Zea mays
  Clone ID: MRT4577_51414C.1.pep
PKGVLRSALKTPLASRGLSVVGFSKTLGHLWPPPPPWRPVIGCHVASRPLLLITIKNRNKAF

SEQ ID NO: 316168 - protein, 65 aa, Zea mays
  unsure (1)..(65): unsure at all Xaa locations
  Clone ID: MRT4577_51415C.1.pep
SCVYPVFQKVRTVRXITSAKPGLFGXIKWNFTKFLVDKNGKVVGRYGTSTAPMSIQKDIQKALDE

SEQ ID NO: 316169 - protein, 67 aa, Zea mays
  unsure (1)..(67): unsure at all Xaa locations
  Clone ID: MRT4577_51416C.1.pep
IRSLEVINYMGDWILNHFFFLTPRTNLYPTEPRSLPSSSLRAHWEDGHHTFFFXEXPARGPNSTSKE

SEQ ID NO: 316170 - protein, 65 aa, Zea mays
  Clone ID: MRT4577_51417C.1.pep
MGAAESVPETSIHEFTVKKVRTVRLKLRLPSLACSDHQMELFQVFGGQERKGRWEIRNVDSSNVD

SEQ ID NO: 316171 - protein, 86 aa, Zea mays
  Clone ID: MRT4577_51418C.1.pep
INFGQTDSDLFHVSLPSPAPTPALTPIERVAAIAWSTRKRYILHQDSSSTLRVISVHLFSISVSQGDVSRSDRRLLQSSDAVLRLR

SEQ ID NO: 316172 - protein, 104 aa, Zea mays
  unsure (1)..(104): unsure at all Xaa locations
  Clone ID: MRT4577_51419C.1.pep
AKQSASLPTVPMARTKQTARKFTGGKAPMKHLATKAARKFATATGXVKKPHRFRPDTVELLEIRMYQKSTDLLIHKLPFQHHVREIAQDFKTDLRLQSCVVAAL

SEQ ID NO: 316173 - protein, 149 aa, Zea mays; identical to SEQ ID NO: 245649
  Clone ID: MRT4577_5141C.1.pep

SEQ ID NO: 316174 - protein, 100 aa, Zea mays
  Clone ID: MRT4577_51420C.1.pep
KSKRQTYSWFDKGRGGPHPQHHRPIIKPKLPPLMTSAGVSSAPSTGGGPQTAQAHGGLKRLRTCRPPWRRTTRGGEPSFRTMEPGKGRPSPRCLPAKIKP

SEQ ID NO: 316175 - protein, 68 aa, Zea mays
  Clone ID: MRT4577_51421C.1.pep
KLSTLNKAAGVKTRKTKLDSKRQSLRECMPRLRLLQGMVRVHGLGQRVPRVSYILKVAWRDSVIGNCS

SEQ ID NO: 316176 - protein, 167 aa, Zea mays
  Clone ID: MRT4577_51422C.1.pep
QPDGIITHDHGEIAEYLQGDQNQITQPTPRRGTNPPTKPPTPKPTPPTYTPSPKPPTPKPTPPTYTPSPKPPTHPTPKPTPPTYTPSPKPPTPKPTPPTYTPSPKPPTPKPTPPTYTPSPKPPATKPPTPKPTPPTYTPTPKPPAKPPTYTPTPPVSHTPCPPPPYY

SEQ ID NO: 316177 - protein, 59 aa, Zea mays
  unsure (1)..(59): unsure at all Xaa locations
  Clone ID: MRT4577_51423C.1.pep
APLGSXCFAPFRXVRRLVSPPGVWXXRRPXSSLCRCCGFLVALVGRPVCSRASPLVLCV

SEQ ID NO: 316178 - protein, 91 aa, Zea mays
  Clone ID: MRT4577_51424C.1.pep
YYKKFPTAPPVRWIFFNGIHQHLITFEVGEVLKNSNWQAPARCLSGGNPNPPKGAGNEFHGKKPGSFYLMDSMIRFPGAPPPPEVASFAHR

SEQ ID NO: 316179 - protein, 99 aa, Zea mays
  Clone ID: MRT4577_51425C.1.pep
LACLSAGLLISFSLCESHSSFIWLPCTKFQRLSIRRSHNVRDVIVYLCGSHTLMLCDLAIVHFCPHFFGCLWSISMLPALVDLRIWTTWVDLRMMVVHW

SEQ ID NO: 316180 - protein, 58 aa, Zea mays
  Clone ID: MRT4577_51426C.1.pep
VTGSVWVSFHKQLHEVARSSRFGQLADFGCFGMFIHPGNQVETTRITCCLGVLGLHRL

SEQ ID NO: 316181 - protein, 75 aa, Zea mays
  Clone ID: MRT4577_51427C.1.pep
SKKKKKKKKRGGGGKKKKKKKKKKKKKKKKKKKKKKKKKKKKGRPFLGGPNFPSPSFQLITFFWGGPNLIYLPVF

SEQ ID NO: 316182 - protein, 141 aa, Zea mays
  Clone ID: MRT4577_51428C.1.pep
AQACIGCIVSTDLMLAIHFFRQSDLHQFAYIKIYLFFSSMSVYAALVWTMLYEELVSERDTVHSVAVVRCLGPRLLRSNPDRPLHRYRSAIAPNSHSGSRVGAGASRQSGSARPHPLLLGQHTEDPGEGRERLRRRLGPKP

SEQ ID NO: 316183 - protein, 66 aa, Zea mays
  Clone ID: MRT4577_51429C.1.pep
RVTVSLVMSWTLSSAMAPGVSVRESGDTSENKKFVSGIITSGKDAYTRMPLRDLISVTGSSVTAVS

SEQ ID NO: 316184 - protein, 173 aa, Zea mays
  Clone ID: MRT4577_5142C.1.pep
KKKKKYADSELRCPPSGEVPGVGWFFAPPTPALKCGKTTAKKFWATPNLLEKTLMRFLKGLKPNFQGFFQDRGSYKQNQHQIFFRGFFLPGEQCWPKITGFYNFGFLKTPPGKGEKKINRPPFPLEGETFLEKRDPFLFGLKKGATPGVYHGGVLKIGAKKGLSSCPIGRGKT

SEQ ID NO: 316185 - protein, 971 aa, Zea mays
  Clone ID: MRT4577_51430C.1.pep
MGIKARRSDGSLAFKGVLDDIHLVDFAKEEAGLDACLIAKTSMGWLWHRRLAHVGMKNLHKLLNGEHVIGLTIVTFEKDRPCAACQAGKQVGGAHHSKNVMTTSRPLELLHMDLFGPVAYLSIGGSKYGLVIVDDFSRFIWVFFLQDKSETQGTLKRFLRRAQNEFELKVKKIRSDNGSEFKNLQVEEYLEEEGIKHEFSAPYTPQQNGVVERKNRTLIDMARTMLGEFKTPERFWSEAVNTACHAINRVYLHRLLKKTSYELLTGNKPNVSYFRVFGSKCYILVKKGRNSKFAPKAVEGFLLGYDSNTKAYRVFNKSSGLVEVSSDVVFDETNGSPREQVVDLDDVDEEDVPTAAIRTMAIGDVRPQEQEEQDQPSSSTMVQPPTQEDEQVHQEEACDQGGAQDEHVMEEEAQLAPPTQVRAMIQRDHPVDQILGDISKGVTTRSRLVNFCEHYSFVSSIEPFRVEEALLDPDWVLAMQEELNNFKRNEVWTLVPRPKQNVVGTKWVFRNKQDEHGVVTRNKARLVAKGYAQVAGLDFEETFAPVARLESIRILLAYAAHHSFRLFQMDVKSAFLNGPIKEEVYVEQPPGFEDERYPDHVCKLSKALYGLKQAPRAWYECLRDFLIANTFKVGKADPTLFTKTCDGDLFVCQIYVDDIIFCSTNQKSCEEFSRVMTQKFEMSMMGELSYFLGFQVRQLKDGTFISQTKYTQDLIKRFGMKDAKPAKTPMGTDGHTDLNKGGKSVDQKAYRSMIGSLLYLCASRPDIMLSVCMCARFQSDPRECHLVAVKRILRYLVATPCFGIWYPKGSTFDLIGYSDSDYAGCKVDRKSTSGTCQFLGRSLVSWSSKKQTSVALSTAEAEYVAAGQCCAQLLWMRQTLRDFGYNLSKVPLLCDNEGAIRMADNPVEHSRTKHIDIRHHFLRDHQHKGDIEVFHISFENQLADIFTKPLDEQTFCKLRSELNVLDSRNLD

SEQ ID NO: 316186 - protein, 1817 aa, Zea mays
  Clone ID: MRT4577_51431C.1.pep
MDPKGKGIVINDKEKESFVNEPRDDKSNDSGSGHRRKDGKKKKTRRIKEIVYYDSDESTSSQKDDDHNEYERKKPVNSNFSFDYSRIPQSTNAHLLSIPLGKPPHVDGEDYGFWSHKMRSHLFSLHPSIWEIVESGMHFDSTDSPMFINEQIHKNAQATTVLLASLCRDEYHKVSGLDNAKQIWDTLKISHEGNNVTLLTKMELVEGELGRFAMIRGEEPTQTYNRLKTLINKIRSYGSTRWTDHDVVRLMLRSFTILDPHLVNNIRENPRYTKMSPEEVLGKFVSGRMMIKEARYVDDALNGPINEPQPLALKATRSKEALPSKVAQIEAAGLNDEEMALIIKRFKTVLKGRKGQPSKTKAKGKRSCFKCGKLGHFIANCPDNDSDQDQGNKRERKKNYKKAKGEAHLGKEWDSDCSSSDSDNEGLAATAFNKSSLFPNERHTCLMAREKKVSTHNTSTYASSSEDESSDDDEIDYSCLFKGLDRTKVDKINELIDALNDRNILLEKQEDLLYEEHDKFVEAQKSLALEIKRNEMLSSELSSCHETIAKLKSFNDDLNARLEVASKSNSCVEHVMDCTRCKDFNVDACSEHLVSISKLNDEVASLNAQLKTSKSNFDKLKFARDSYTIGRHPSIKDGLGYKREAKDLTSHKAPISAKEKGKAPMASSAKKNHAFMYHDRRHTRNANRSYNVFDSYAYDSHDMFASSSFYVHGRNVGRRNVVHNMTRRNVVNVPRKVNEPSTIYHALNASFAICRKDRKVIARKLGAKCKGDKTCIWIPKEIVTNLVGPNKSWVYASGGSSWIIDSGCTNHMTGEKKMFTSYVKNKDSQDLIIFGDGNQGKVKGLDVSVFRRCDGSLAFKGILDGKLYLVDFAKEEAGLDACLMAKTCMGWLWHRRLAHVGMKNLHKLLKGEHVIGLTNVHFEKDRPCAACQAGKQVGGSHHTKNVMTTSRPLELLHMDLFGPVAYLSIGGSKYGLVIVDDFSHFTWVFFLQDKSETQGTLKRFIRRAQNEFELKVKKIRSDNGSEFKNLQVEEFLEEEGIKHEFSAPYTPQQNGVVERKNRTLIDMARTMLGEFKTPECFWSEAVNTACHAINRVYLHRLLKKTSYELLTGNKPNVSYFRVFGSKCYILVKKGRNSKFAPKAVEGFLLGYDSNTKAYRVFNKSSGLVEVSSDIVFDETNGSPREQVVDCDDVDEEDVPTAAIRTMAIGEVRPQEQDERDQPSSSTTVHSPTQDDEQVHQKEACDQGGAQDDHVMEEEAQPAPPTQVRAVIQRDHPVDQILGDISKGVTTRSRLVNFCEHYSFVSSIEPFRVEEALLDPDWVLAMQEELNNFKRNEVWTLVPRPKQNVVGTKWVFRNKQDEHGVVTRNKARLVAKGYAQVAGLDFEETFAPVARLESICILLAYAAHHSFRLYQMDVKSAFLNGPIKEEVYVEQPPGFEDERYPDHVCKLSKALYGLKQAPRAWYECLRDFLIANAFKVGKADPTLFTKTCDGDLFVCQIYVDDIIFGSTNQKSCEEFSRVMTQKFEMSMMGELNYFLGFQVKQLKDGTFISQTKYTQDLLKRFGMKDAKPAKTPMGTDGHTDLNKGGKSVDQKAYRSMIGSLLYLCASRPDIMLSVCMCARFQSDPKECHLVAVKRILRYLVATPCFGIWYPKGSNFDLIGYSDSDYAGCKVDRKSTSGTCQFLGRSLVSWNSKKQTSVALSTAEAEYVAAGQCYAQLLWMRQTLRDFGYNLSKVPLLCDNESAIRMAENPVEHSRTKHIDIRHHFLRDHQQKGDIEVFHVSTENQLADIFTKPLDEKTFCRLRNELNVLDSRNLD

SEQ ID NO: 316187 - protein, 871 aa, Zea mays
  Clone ID: MRT4577_51432C.1.pep
MATSRPLELLHMDLFGPVAYLSIGGSKYGLVIVDDFSRFTWVFFLQDKSETQGTLKRFLRRAQNEFELKVKKIRSDNGSEFKNLQVEEFLEEEGIKHEFSAPYTPQQNGVVERKNRTLIDMTRTMLGEFKTPECFWSEAMNTACHAINRVYLHRLLKKTSYELLTGNKPNVSYFRVFGSKCYILVKKGRNSKFAPKAVEGFLLGYDSNTKAYRVFNKSSGLVEVSSDVVFDETNGSPREQVVDCDDVDEEDVPTTAIRTMAIGEVRPQEQDERDQPSSSTMVHPPTQDDEQVHQQEACDQGGAQDDHVMEEEAEPAPPTQVRAMIQRDHPVDQILGDISKGVTTRSRLVNFCEHYSFVSSIEPFRVEEALLDPDWVLAMQEELNNFKRNEVWTLVPRPKQNVVGTKWVFRNKQDEHGVVTRNKARLVAKGYAQVAGLDFEETFAPVARLESIRILLAYATHHSFRLFQMDVKSAFLNGPIKEEVYVEQPPGFEDERYSDHVCKLSKALYGLKQAPRAWYECLRDFLIANAFKVGKADPTLFTKTCDGDLFVCQIYVDDIIFGSTNKKSCEEFSRVMTQKFEMSMMGELNYFLGFQVKQLKDGTFISQTKYTQDLLKRFGMKDAKPAKTPMGTDGHTDLNKGGKSVDQKAYRSMIGSLLYLCASRPDIMLSVCMCARFQSDPKECHLVAVKRILRYLVATPCFGLWYPKGSTFDLIGYSDSDYAGCKVDRKSTSGTCQFLGRSLVSWNSKKQTSVALSTAEAEYVAAGQCCAQLLWMRQTLRDFGYNLSKVPLLCDNESAIRMAENPVEHSRTKHIDIRHHFLRDHQQKGDIEVFHVSTENQLADIFTKPLDEKTFCRLRSELNVLDSRNLD

SEQ ID NO: 316188 - protein, 39 aa, Zea mays
  Clone ID: MRT4577_51433C.1.pep
KQEELPQVIVAQSLMKLALKKDRVDRPSIQDQYQQESQL

SEQ ID NO: 316189 - protein, 871 aa, Zea mays
  Clone ID: MRT4577_51434C.1.pep
MTTSRPLELLHMDLFGPVAYLSIGGSKYGLVIVDDFSRFTWVFFLQDKSETQGTLKRFLRRAQNEFELKVKKIRSDNGSEFKNLQVEEFLEEEGIKHEFSAPYTPQQNGVVERKNRTLIDMARTILGEFKTPECFWTEAVNTACHAINRVYLHRLLKKTSYELLTGNKPNVSYFRVFGSKCYILVKKGRNSKFAPKAVEGFLLGYDSNTKAYRVFNKSSGLVEVSSDVVFDETNGSPREQVVDLDDVDEEDVPTAAMRTMAIGDVRPQEHLEQDQPSSSPMVHPPTQDDEQVPQVEAHDQGGAQDDQVMEEEAQPAPPTQVRAMIQRDHPVDQIMGDISKGVTTRSRLVNFCEHYSFVSSIEPFRVEEALLDLDWVLAMQEELNNFKRNEVWTLVPRPKQNVVGTKWVFRNKQDEHGVVTRNKARLVAKGYAQVAGLDFEETFAPVARLESIRILLAYAAHHSFRLYQMDVKSAFLNEPIKEEVYVEQPPGFEDERYPDHVCKLSKALYGLKQAPRAWYECLRDFLIINAFKVGKADPTLFTKTCDGDLFVCQIYVDDIIFGSTNKKSCEEFSRVMTQKFEMSMMGELNYFLGFQVKQLKDGTFISQTKYTQDLLKRFGMKDAKPAKTPMGTDGHTDLNKGGKSVDQKAYRSMIGSLLYLCASRPDIMLSVCMCARFQSDPKECHVVAVKRILRYLVATPCFGLWYPKGSTFDLIGYSDSDYAGCKVDRKSTSGTCQFLGRSLVSWNSKKQTSVALSTAEAEYVAAGQCCAQLLWMRQTLRDFGYNLSKVPLLCDNESAIRMVENPVEHSRTKHIDIRHHFLRDHQQKGDIEVFHVSTENQLADIFTKPLDEKTFCRLRSELNVLDSRNLD

SEQ ID NO: 316190 - protein, 466 aa, Zea mays
  Clone ID: MRT4577_51435C.1.pep
MSRLSFRPRPLDIHKKLPILKSVREFEDEEPGVAPLSSARAGVLLRHSGTELPASGANNATEGEGNQALSKKNAQEIPTPQFDGVDTYERDYTRTFAQPTSYIRGRGARAEISEFVEYDLDNEDEDWLEEFNSERKNINPEKLEALLFKLEVLDHRARERAGAITPTFIGPVPVLLQLDAAMEALQYLSVRNAVFQAVYNYWKSKRERWQKPILRRLQPPPPVNDTNPYNVFRPREKAHRLHTRRMQRRENNIQSFEKLRLVRRNLEQAKALMDALIKREETKREAMECQVNLQRVQMKYKHEAQLVEDGTTLSGFQQTSSRFESSDDDVDSDDTATEQTYIRPAVFHPRFSANKLSVIPPLRIKRERELKRRPQQNGCVFKRDPEEPVFLFTRPLDPEKLVAAGIKPPPDPPIENGATSPPFRCRGRIGRGGRIIFDRWNPLLRTPIDQETYYVPYGHRPPSPEG

SEQ ID NO: 316191 - protein, 707 aa, Zea mays
  unsure (1)..(707): unsure at all Xaa locations
  Clone ID: MRT4577_51436C.1.pep
DNSETQGTLKRFLRRAQNEFELKVKKIRSDNGSEFKNLQVEEFLEEEGIKHEFSAPYTPQQNGVVERKNMTLIDMARTMLGEFKTPERFWSEAVNTACHAINRVYLHRLLKKTSYELLTGNKPNVSYFXVFGSKXEEDVPTAAIRTMAIGDVRPQEQLEQDQPSSSTLVHPPSQDDEXVPQVEAHDQGGAKDDQVEEEEAPQAPPTQVRATIQRDHPVDQILVXNEVWTLVPRPKQNVVGTKWVFRNKQDEHGVVTRNKARLVAKGYAQVAGLDFEETFAPVARLESIRILLAYAAHYSFRLYQMDVKIAFLNGPIKEEVYVEQPPGFEDERYPDHVCKLSKALYGLKQAPRAWYECLRDFLIANAFKVGKADPTVFTKTCDGDLFVCQIYVDDIIFGSTNQKSCEEFSRVMTQKFEMSMMGELNYFLGFQVKQLKDDTFISQTKYTQDLLKRFGMKDAKPAKTPMGIDGHTDLNKGGKSVDQKAYRSMIGSLLYLCASRPDIMLSVCMCARFQSDPKECHLVAVKRILRYLVATPCFGIWYPKGSNFDLIGYSDSDYAGCKVDRKSTSGTCQFLGRSLVSWNSKKQTSVALSTAEAEYVAAGQCCAQLLWMRQTLRDFGYNLSKVPLLCDNESAIRIAENPVEHSRTKHIDIRHHFLRDHQQKGDIEVFYVSTENQLADIFTKPLDEKTFCRLRSELNVLDSRNLD

SEQ ID NO: 316192 - protein, 871 aa, Zea mays
  Clone ID: MRT4577_51437C.1.pep
MTTSRPLELLHMDLFGPVAYLSIGGSKYGLVIVDDFSRFTWVFFLQDKSETQGTLKRFLRRAQNEFELKVKKIRSDNGSEFKNLQVEEFLEEEGIKHEFSAPYTPQQNGVVERKNRTLIDMARTMLGEFKTPERFWSEAVNTACHVINRVYLHRLLKKTSYELLTGNKPNVSYFRVFGSKCYILVKKGRNSKFAPKAVEGFLLGYDSNTKAYRVFNKSSGLVEVSSDVVFDETNGSPREQIVDCDDVDEEEVPTAAIRTMAIGEVRPQEQDERDQSSSSIMVHPPTQDDEQVHQKEACDQGGAQDDHVMEEEAQPAPPTQVRATIQRDHPVDQILGDISKGVTTRSRLVNFCEHYSFVSSIEPFRVEEALLDPDWVLAMQEELNNFKRNEVWTLVPRPKQNVVGTKWVFRNKQDEHGVVTRNKARLVAKGYAQVAGLDFEETFAPVARLESIRILLAYAAHHSFRLFQMDVKSAFLNGPIKEEVYVEQPPGFEDERYPDHVCKLSKALYGLKQAPRAWYECLRDFLIVNAFKVGKADPTLFTKTCDGDLFVCQIYVDDIIFGSTNQKSCEEFSRVMTQKFEMSMMGELNYFLGFQVKQLKDGTFISQTKYTQDLLKRFGMKDAKPAKTPMGTDGHTDLNKGGKSVDQKAYRSMIGSLLYLCASRPDIMLSVCMCARFQSDPKECHLVAVKRILRYLVATPCFGLWYPKGSTFDLVGYSDSDYAGCKVDRKSTSGTCQFLGRSLVSWNSKKQTSVALSTAEAEYVAAGQCCAQLLWMRQTLRDFGYNLSKVPLLCDNESAIRMAENPVEHSRTKHIDIRHHFLRDHQQKGDIEVFHVSTENQLADIFTKPLDEKTFCKLRSELNVLDSRNLD

SEQ ID NO: 316193 - protein, 1624 aa, Zea mays
  unsure (1)..(1624): unsure at all Xaa locations
  Clone ID: MRT4577_51438C.1.pep
MDPKGKGIVINDKEKESFVNEPRDDKSNDSGSGHRRKDGKKKKTRRIKEIVYYDSDESTSSQKDDDHNEYEKKKPVNSNFSFDYSRIPQSTNAHLLSIPLGKPPHFDGEDYGFWSHKMRSHLFSLHPSIWEIVESGMHFDSTDSPMFINEQIHKNAQATTVLLASLCRDEYHKVSGLDNAKQIWDTLKISHEGNDVTLLTKMELVEGELGRFAMIRGEEPTQTYNRLKTLINKIRIYGSTRWTDHDVVRLMLRSFTVLDPHLVNNIRENPRYTKMSPEEVLGKFVSGRMMIKEARYVDDALNGPIHEPQPIALKATRSKEALPSKVAQVEAAGLNNEEMALIIKRFKTALKGRKGQPSKTKTKEKRSCFKCGKIGHFIANCPDNESDQEKGNKREKKKHYKKAKGEAHIGKEWDSDCSSSDSDNEGLAATAFNKSSLFPNERHTCLMAREKKEIDYSSLFKGLDRTKVEKINELIDALNEKDRLLEKQEDLLYEEHDKFVEAQKSYALEVKRNEVLSSELSSCHETIATLKGVNNDLNAKLEVASKSNSCVEHVMVCTRCKDFNVDACSEHLVSISKLNDEVASLNAQLKTSKSEFNKLKFARDAYTIGRHPSIKDGLGFKREAKNLTSHKAPIPAKEKGKAPMAGSAKKNHAFMYHDRRHTRNANRSYNVFDSYVYDSHDMFASSSFYVHDRNVGRRNVVHNMPRRNVVNVPRKVNEPSTIYHALNASFAICRKDRKVIARKLGAKCKGDKTCIWIPKEIVTNLVGPNKSWVYASGGSSWIIDSGCTNHMTGEKKMFTSYVKNKDSQDSIIFGDGNQGKVKGLDVSVFRRSDDSLAFKGVLDGKLYLVDFEKEEDKSETQGTLKRFLRRAQNEFELKVKKIRSDNGSEFKNLQVEEFLEEEGIKHEFSAPYTPQQNGVVERKNRTLIDMARTMLGEFKTPERFWSEAVNTACHTINRVYLHRLLKKTSYELLTGNKPNVSYFRVFGSKCYILVKKGRNSKFAPKAVEGFLLGYDSNTKAYRVFNKSSGLVEVSSDVVFDETNGSPREQVVDCDDVDEEDVPTAAIRTMAIGEVRPQEQDKRDHPSSSTTVPPPTQDDEQVHQQEACDQGGAQDDHVMEEEAQPAPPTQVRAMIQRNHPVDQILGDISKGVTTRSRLVNFCEHYSFVSSIEPFRVEEALLDPDWVVAMQEELNNFKRNEVWTLVPHPKQNVVGTKWVFRNKQDEHGVVTRNKARLVAKGYAQVTGLDFEETFAPVARLESIRILLAYAAHHSFRLYQMDVKSAFLNGPIKEEVYVEQPPGFEDERYPDHVCKLSKALYGLKQAPRAWYECLRDFLIVNAFKVGKADPTLFTKTCDGDLFVCQIYVDDIIFGSTNQKSCEEFSRVMTQKFEMSMMGELNYFLGFQVKQLKDGTFISQTKYTQDLLKRFGMKDAKPAKTPMGTDGHTDLNKGGKSVDQKAYRSMIGSLLYLCASRPDIMLSVCMCARFHSDPKECHLVAVKRILRYLVATPCFGIWYPKGSNFDLIGYSDSDYAGCKVDRKSTSGTCQLLGRSLVSWNSKKQTSVALSTAEAEYVAVGQCCAQLLWMRQTLRDFGYNLSKVPLLCDNESXIRMAENPVEHSRTKHI

SEQ ID NO: 316194 - protein, 1151 aa, Zea mays
  unsure (1)..(1151): unsure at all Xaa locations
  Clone ID: MRT4577_51439C.1.pep
MASSVQKNHAFMYYDRRQPRNAYRSCNAYNAFDSHAMFASSSSYVHDRNVGRRNVVHNMPRRNVVNVPRKVNEPSTIYHALNASFAICRKDRKVIARKLGAKCKGDKTCIWIPKEIVTNLVGPNKSWVYASGGSSWIIDSGCTNHMTGEKKMFTSYVKNKDSQDSIIFGDGNQGKVKGLDVSVFRRSDXSLAFKGVLDGKLYLVDFVKEEAGLDACLIAKTSMGWLWHRRLAHVGMKNLHKLLKGEHVIGLTNVHFKKDRPCAACQAGKQVGGSHHTKNVMTTSRPLELLHMDLFGPVAYLSIGGSKYGLVIVDDFSRFTWVFFLQDKSETQGTLKRFLRRAQNEFELKVKKIRSDNGSEFKNLQVEEFLEEEGIKHEFSAPYTPQQNGVVERKNRTLIDMARTMLGEFKTPECFWSEAVNTACHAINRVYLHRLLKKTSYELLTGNKPNVSYFRVFGSKCYILVKKGRNSKFAPEAVEGFLLGYDSNTKAYRVFNKSSGLVEVSSDVVFDETNGSPREQVVDLDDVDEEDVPTAAMRTMAIGDVRPQEQDERDQPSSSTTVHPPTQDDEQVHQKEACDQGGAQDDHVMEEEAQPAPPTQVRAVIQRDHPVDQILGDISKGVTTRSRLVNFCEHYSFVSSIEPFRVEEALLDPDWVLAMQEELNNFKRNEVWTLVPRPKQNVVGTKWVFRNKQDEHGVVTRNKARLVAKGYAQVAGLDFEETFAPVARLESIRILLAYAAHHSFRLFQMDVKSAFLNGPIKEEVYVEQPPGFEDERYPDHVCKLSKALYGLKQAPRAWYECLRDFLLANAFKVGKADPTLFTKTCDGDLFVCQIYVDDIIFGSTNQKSCEEFSRVLTQKFEMSMMGELNYFLGFQVKQLKDGTFISQTKYTQDLLKRFGMKDAKPAKTPMGTDGHTDLNKGGKSVDQKAYRSMIGSLLYLCASRPDIMLSVCMCARFQSDPKECHLVAVKRILRYLVATPCFGLWYPKGSTFDLVGYSDSDYAGCKVDRKSTSGTCQFLGRSLVSWNSKKQTSVALSTAEAEYVAAEQCCAQLLWMRQTLRDFGYNLSKVPLLCDNESAIRMAENPVEHSRTKHIDIRHHFLRDHQQKGDIEVFHVSTENQLADIFTKPLDEKTFCRLRSELNVLDSQNLD

SEQ ID NO: 316195 - protein, 73 aa, Zea mays
  Clone ID: MRT4577_5143C.1.pep
GGGGFFFFFFFFFFFFFFFFFFFFFFFKKKKAGFRIYIVSNHIIGDQLRGVCPGGNPINQHAGGHPSLHEPKD

SEQ ID NO: 316196 - protein, 1005 aa, Zea mays
  Clone ID: MRT4577_51440C.1.pep
VYASGGSSWIIDSGCTNHMTGEKKMFTSYVKNKDSQDSIIFGDGNQGKVKRLGVSVFRRSDGSLAFKGVLDGKLYLVDFAKEEAGLDACLIAKTGMGWLWHRRLAHVGMKNLHKLLKGEHVIGLTNVHFEKDRPCAACQAGKQVGGVHHSKNVMTTSRPLELLHMDLFGPVAYLSIGGSKYGLVIVDDFSRFTWVFFLQDKSETQGTLKRFLRRAQNEFELKVKKIRSDNGSEFKNLQVEEFLEEEGIKHEFSAPYTPQQNGVVERKNRTLIDMARTMLGEFKTPECFWSEAVNTACHAINRVYLHRLLKKTSYELLTGNKPNVSYFRVFGSKCYILVKKGRNSKFAPKAVEGFLLGYDSNTKAYRVFNKSSGLVEVSSDVVFDETNGSPREQVVDCDDVDEEDVPTAAIRTMAIGEVRPQEQDERDQPSSSTTVHPPTQDDEQVHQQEACDQGGAQDVHVMEEEAQPTPPTQVRAMIQRNHPVDQILGDISKGVTTRSRLVNFCEHYSFVSSTEPFRVEEALLDLDWVLAMQEELNNFKRNEVWSLDEHGVVTRNKARLVAKGYAQVAGLDFEETFAPVARLESIRILLAYAAHHSFRLYQMDVKSAFLNGPIKEEVYVEQPPGFEDERYPDHVCKLAKALYGLKQAPRAWYECLRDFLIANAFKVGKADPTLFTKTCNGDLFVCQIFVDDIIFGSTNQKSCEEFSRVMTQKFEMSMMGKLNYFLGFQVKQLKDGTFISQMKYTQDLLKRFGMKDAKPAKTPMGTDGHTDLNKGGKSVDQKAYRSMIGSLLYLCASRPDIMLSVCMCARFQSEPKECHLVAVKRILRYLVATPCFGLWYPKGSTFDLVGYSDSDNAGCKVDRKSTSGTCQFLGRSLVSWNSKKQTSVALSTAEAEYVAAGQCCAQLLWMRQTLRDFGYNLSKVPLLCDNESAIRMAENPVEHNRTKHIDIRHHFLRDHQQKGDIEVFHVSTENQLADIFTKPLDEKTFCRLRSELNVLDSRNLD

SEQ ID NO: 316197 - protein, 222 aa, Zea mays
  Clone ID: MRT4577_51441C.1.pep
RNFAHIPRKIVNKPSTIYYACNAPFAICRKGKKVYASGGSSWIIDSGCTNHMTGEKKMFTSYVKNKDSQDSIIFGDGNQGKDKSETQGTLKRFLRRAQNEFELKVKKIRSDNGSEFKNLQVEEFLEEEGIKHEFSAPYTPQQNGVVERKNRTLIDMARTMLGEFKTPERFWSEAVNTACHAINRVYLHRLLKKTSYELLTGNKPNVSYFRVFGSKCYILVKK

SEQ ID NO: 316198 - protein, 226 aa, Zea mays
  unsure (1)..(226): unsure at all Xaa locations
  Clone ID: MRT4577_51442C.1.pep
MSSSSDNPNTVTXRPLQQEQQXDAADKKKKQEEKTEEEEGGGGFIDKVKDFIHDIGEKIEEAVGFGKPSADVARIHVPHIGLHRADLVVDVLIKNPNPVPIPLVDIDYLIDSDGRKLVAGLIPDAGTIRAHGEETVKVPITLDFDDIRSTYADIKPGSIIPYLLRVISLVDXPVFGRIKIPLDKSGEIPIPVQPDVDVXKXKFHHFSFEETTATIHLSLENQNDFD

SEQ ID NO: 316199 - protein, 61 aa, Zea mays
  Clone ID: MRT4577_51443C.1.pep
MDPKLALMYAKGAFVHWYFGEGMEEGEFFEARGDLGALEKDYEGVGADFNEGEDGAEGDEF

SEQ ID NO: 316200 - protein, 197 aa, Zea mays
  Clone ID: MRT4577_51444C.1.pep
MSSSSDNPNTVTDRGLFSKSSKDDGADKKKKQEEKKEDGEEGGGGFIDKVKDFIHDIGEKIEEAVGFGKPSADVARIHVPHIGLHRADLVVDVLIKNPNPVPIPLVDIDYLIDSDGRKLVAGLIPDAGTIRAHGEETVKVPITLDFDDIRSTYADIKPGSIIPYLLRVIFLVDVPVFGRIKIPLDKSGEIPIPYKPD

SEQ ID NO: 316201 - protein, 107 aa, Zea mays
  unsure (1)..(107): unsure at all Xaa locations
  Clone ID: MRT4577_51445C.1.pep
MSSSSDNPNTVTXRPLQQEQQXDAADKKKKQEEKTEEEEGGGGFIDKVKDFIHDIGEKIEGAVGFGKPSADVARIHVPHIGLHRADLVVDVLIKNPNPVTIPIVDIE

SEQ ID NO: 316202 - protein, 214 aa, Zea mays
  unsure (1)..(214): unsure at all Xaa locations
  Clone ID: MRT4577_51446C.1.pep
MSSSSDNPNTVTDRGLFSKSSKDDGADKKKKQEEKKEDGEEGGGGFIDKVKDFIHDIGEKIEEAVGFGKPSADVARIHVPHIGLHRADLVVDVLIKNPNPVPIPLVDIDYLIDSDGRKLVAGLIPDAGTIRAHGEETVKVPITLDFDDIRSTYADIKPGSIIPYLLRVIFLVDVPVFGRIKIPLDKSREIPXPYKPDVDVDKIKFHHFSFEETT

SEQ ID NO: 316203 - protein, 74 aa, Zea mays
  Clone ID: MRT4577_51447C.1.pep
KKPPLLFFKLYLYYFYFIIIFLIFLLFIFFFIFFFFFFFFFFFFFFFFFFFFFFFFFFFFFFFFWLKVECNWYT

SEQ ID NO: 316204 - protein, 130 aa, Zea mays
  Clone ID: MRT4577_51448C.1.pep
PRVRGRVGFTTKTLDASASCDSLALVRSAHETRRRRRDIAAASASSRPLPAVGPFSLELPETMSSGLDMSLDDLIKQSKSRPKANPASSSGPARRAHPARAAPYPPVAPKARATADSPYGVYSEQIAAIA

SEQ ID NO: 316205 - protein, 74 aa, Zea mays
  Clone ID: MRT4577_51449C.1.pep
RLVLCLRAPVRMSGVYHRFRPRVGPLCGPSLLEALGLSPFICVRQSHLHCWSCRAGESFPPLYICYRRVGSSPK

SEQ ID NO: 316206 - protein, 113 aa, Zea mays
  Clone ID: MRT4577_5144C.1.pep
LLSIQSLSTPQFPPEYPTPPPSSSCPRPSVKKRARPRPPGAPAPRCGYTSSRSGGLADDSAGRRHGRAAAQSYFEAELVHGEYKVTRHRQPPGGSTAPSPRASRWSWAQGVTN

SEQ ID NO: 316207 - protein, 145 aa, Zea mays
  unsure (1)..(145): unsure at all Xaa locations
  Clone ID: MRT4577_51450C.1.pep
GRAGRSAPPSPRLPSSPPPWPPSASPPXPAPHXSSRPPHLLPPPRTPHWAPAVSASPPDSDSPPRRRRAVRGALPLPMAGPRLRRVPLRWRSWRGTPTLAQTLPEAPRPPRGRPTRSSPRTTCRRRCAASQLQMLTTMGGLESPG

SEQ ID NO: 316208 - protein, 96 aa, Zea mays
  unsure (1)..(96): unsure at all Xaa locations
  Clone ID: MRT4577_51451C.1.pep
FPVLQSYMRHCRNHLLYYQRRKNEDYMIGACQEVDSLSDMSGHLKLIHWSWHQILQRNQKMSSQPSSLATSYWRGSYSLLASRWPSTNEDFXPKRT

SEQ ID NO: 316209 - protein, 71 aa, Zea mays
  unsure (1)..(71): unsure at all Xaa locations
  Clone ID: MRT4577_51452C.1.pep
RKRACFKRSGKSSASWDAPSQARFCASISILARAPTGQPXEARSIWMHLLAKWTPSLGMNIATRLNLKPNM

SEQ ID NO: 316210 - protein, 188 aa, Zea mays
  unsure (1)..(188): unsure at all Xaa locations
  Clone ID: MRT4577_51453C.1.pep
FPDKKGSPQFPVTGAPKNHHTQFFPTASPGNVFSGPAVESKVFHPXNFGFPMWAPPGMIGRPRPSPFPVLPHGFGFYAAERRGFVPSLSYGXQRSPPAISVVAPVCSPPLAAAPVCLFLRLGGVSGGSPRQGGGHASAGSAPVPELPRLHGKVGGSLFFWGGVGVRLRIGFLFLCWLGLVSEAVEKNV

SEQ ID NO: 316211 - protein, 61 aa, Zea mays
  Clone ID: MRT4577_51454C.1.pep
QAQSRKDRRVSTGCARGPATWLCLPSAKKGTAPLTTYPPQLQEGTLHTQHGRILLQLLFEM

SEQ ID NO: 316212 - protein, 152 aa, Zea mays
  Clone ID: MRT4577_51455C.1.pep
MGVLRSTQSLQAEVDELRAALLAGGGHEAAGGWRRSAGHADAKRSPGGDAGGAAARAVCVTGGISFVGFAVVDRLLRHGYTVRLALETQGIYPDVVLPHYYLGGTYPSASLSPGRSLSLPFAPSSGSGLWPWPWSGCTCARFCSLICSSSPA

SEQ ID NO: 316213 - protein, 101 aa, Zea mays
  Clone ID: MRT4577_51456C.1.pep
RSWREIKTAEVEMAAEDNPAAVRPAEDLLEREMAWRYLSHDSGHALWVRHLSLSLEGEEGLYVSERLFTWRTGHSSVRLSISQVYHEHCGGYETSIDIVYI

SEQ ID NO: 316214 - protein, 116 aa, Zea mays
  unsure (1)..(116): unsure at all Xaa locations
  Clone ID: MRT4577_51457C.1.pep
LDGLGFFFGGPELLPLSFEEPRLRHHHFCRLGRHFDELSSGGGRRRDRGRERAGGLSFFFFFFFFFFFFFFFFFFFXSTTCVASATSIKLYSCYHEHNTTTVLPLNQSLHRAQTNV

SEQ ID NO: 316215 - protein, 122 aa, Zea mays
  unsure (1)..(122): unsure at all Xaa locations
  Clone ID: MRT4577_51458C.1.pep
XFFFFFFFFFFFFFFFFFFFFFWGRNPIFTFFGPTHIYGYNPIYKRGLRAHHSNLKKRFGLVGCLKVGPGTDLYFLRDGQNLPMRYRGGPLGKRPSAPWGKKPPGWGELPGAYTMARIFSRG

SEQ ID NO: 316216 - protein, 53 aa, Zea mays
  Clone ID: MRT4577_51459C.1.pep
KTTRKCININLSIPLNTHLTSNTYHKYHPPTNNSHFTYIQTLPFNLSKFFQHN

SEQ ID NO: 316217 - protein, 392 aa, Zea mays
  Clone ID: MRT4577_5145C.1.pep
MAPVPVSVSATLAPPPPKATSRSWERRAPADAAFAAVSSVAISAALLTLTPVAPAAALSKEDVAGSLTKAVDTVSQAIDVGGKAAEQVAAVLKALGEAVKPALPVLKSASDEALKLAAPVVSAASKQATEALQGAGVDPAPVLSVAKTAAEQSTKVIDAAKPVASAAVETITSLGPEDYVVAAGAAFLAYLLVPPVWSLVSSSLRGYKGDLTPAQALDKVTTQGYVLIDVRSDKDKAKAGLPQLPSNAKNKLVSVPLEDLPSKLKGMVRNAKKAEAEIAALKISYLKKIGKGSNVIIMDSYSDVAKTVAKTLDSVGFKNCWVMAGGFSGRKGWAQSRLGTDSYNLSVVEVVTPSRVIPAVAGRRTGTTAARIGTASSASRATTRKLLPGGVD

SEQ ID NO: 316218 - protein, 89 aa, Zea mays
  Clone ID: MRT4577_51460C.1.pep
SKGRTDTNTVTEANGNTILLIDIDNSAEARMGPHINTFSRRRHRRRNRRHHPCADRRCRHRLRSRRHHPCAVRCSRHRRHYRRHGVRLH

SEQ ID NO: 316219 - protein, 30 aa, Zea mays
  Clone ID: MRT4577_51461C.1.pep
RHQDIKGNRHQDKRKRVRVGNQDTSGTSQG

SEQ ID NO: 316220 - protein, 1642 aa, Zea mays
  Clone ID: MRT4577_51462C.1.pep
MDPKGKGIVINDKEKESFVNEPRDDKSNNSGSGHKRKDGKKKKTRRIKEIVYYDSDESSSSQKDDDNDYRKTVNSNFSFDYSRIPHSSNSHLLSIPLGKPPHFDGEDYGFWSHKMRSHLFSLHPSIWEIVENGMKFDSSDSPMLINEQIHRNAQATTVLLASLCREEYNKVSGLDNAKQIWDTLKISHEGNDITMLTKMELVEGELGRFAMIRGEEPTQTYNRLKTLINKIRSYGSTRWTDHDVVRLMLRSFTVLDPHLVNNIRENPRYTMMTPEEVLGKFVSGRMMIKEARYVDDALNGPLHEPQPIALKATRNKESLPSKVAQVEAAGLNDEEMALIIKRFKTVLKGHKGQPSKNKTKGKRSCFKCGKIGHFIANCPDNDSDQEQGNKREKKKNYKKAKGEAHLGKEWDSDCSSSDSDNEGLAATAFNKSALFPNEHHTCLMAREKKTSKSDFEKLKFARDAYTVGRHPSIKDGLGFKREAKNLTSHKAPIPAKEKGKAPMASSAKRNHAFMYHDRRHARNACNDFDSYVYDSHAMFAPSSSYVYDRNVTRRNVVPKKNVIHAPRKVANEPSTIYYTCNAPFAICRKDKKVYASGGSSWIIDSGCTNHMTGEKKMFTSYVKNKDSQDSIIFGDGNQGKVKGLVESLGYNLLSVSQLCNMGYNCLFTNIDVSVFRRCDGSLAFKGVLDGKLYLVDFAKEEAGLDACLIAKTSMGWLWHRRLAHVGMKNLHKLLKGEHVIGLTNVQFEKDRPCAACQAGKQVGGSHHTKNVMTTSRPLEMLHMDLFGPVAYLSIGGSKYGLVIVDDFSRFTWVFFLQEKSETQGTLKRFLRRAQNEFELKVKKIRSDNGSEFKNLQVEEFLEEEGIKHEFSAPYTPQQNGVVERKNRTLIDMARTMLGEFKTPECFWTEAVNTACHAINRVYLHRILKNTSYELLTGNKPNVSYFRVFGSKCYILVKKGRNSKFAPKAVEGFLLGYDSNTKAYRVFNKSSGLVEVSGDVVFDETNGSPREQVVDCDDVDEEDIPTAAIRTMAIGEVRPQEQDEREQPSPSTMVHPPTQDDEQVHQQEVCDQGGAQDDHVLEEEAQPAPPTQVRAMIQRDHPVDQILGDISKGVTTRSRLVNFCEHYSFVSSIEPFRVEEALLDPDWVLAMQEELNNFKRNEVWTLVPRPKQNVVGTKWVFRNKQDERGVVTRNKARLVAKGYAQVAGLDFEETFAPVARLESIRILLAYAAHHSFRLYQMDVKSAFLNGPIKEEVYVEQPPGFEDERYPDHVCKLSKALYGLKQAPRAWYECLRDFLIANAFKVGKADPTLFTKTCDGDLFVCQIYVDDIIFGSTNQKSCEEFSRVMTQKFEMSMMGELNYFLGFQVKQLKDGTFISQTKYTQDLLKRFGMKDAKPAKTPMGTDGHTDLNKGGKSVDQKAYRSMIGSLLYLCASRPDIMLSVCMCARFQSDPKECHLVAVKRILRYLVATPCFGLWYPKGSTFDLVGYSDSDYAGCKVDRKSTSGTCQFLGRSLVSWNSKKQTSVALSTAEAEYVAAGQCCAQLLWMRQTLRDFGYNLSKVPLLCDNESAIRMAENPVEHSRTKHIDIRHHFLRDHQQKGDIEVFHVSTENQLADIFTKPLDEKTFCRLRSELNVLDSRNLD

SEQ ID NO: 316221 - protein, 773 aa, Zea mays
  Clone ID: MRT4577_51463C.1.pep
MTTSRPLELLHMDLFGPVAYLSIGGSKYGLVIVDDFSRFTWVFFLQDKSETQGTLKRFLRRAQNEFELKVKKIRSDNGSEFKNLQVEEFLEEEGIKHEFSAPYTPQQNGVVERKNRTLIDMARTMLGEFKTPERFWSEAVNTACHAINRVYLHRLLKKTSYELLTGNKPNVSYFRVFGSKCYILVKKGRNSKFAPKAVEGFLLGYDSNTKAYRVFNKSSGLVEVSSDVVFDETNGSPREQVVDCDDVDEEDVPTAAIRTMAIGEVRPQEQDERDQPSSSTMVPPPTQDDEQVHQQEACDQGGAQDDHVMEEDAQPAPPTQVRAMIQRDHPVDQILGDISKGVTTRSRLVNFCEHYSFVSSIEPFRVEEALLDPDWVLAMQEELNNFKRNEVWTLVPRPKQNVVGTKWVFRNKQDEHGVVTRNKARLVAKGYAQVAGLDFEETFAPVARLESIRILLAYAAHHSFRLNQKSCEEFSRVMTQKFEMSMMGELNYFLGFQVKQLKDGTFISQTKYTQDLLKRFGMKDAKPAKTPMGTDGHTDLNKGGKSVDQKAYRSMIGSLLYLCASRPDIMLSVCMCARFQSDPKECHLVAVKRILRYLVATPCFGLWYPKGSTFDLVGYSDSDYAGCKVDRKSTSGTCQFLGRSLVSWNSKKQTSVALSTVEAEYVAAGQCCAQLLWMRQTLRDFGYNLSKVPLLCDNESAIRMAENPVEHSRTKHIDIRHHFLRDHQQKGDIEVFHVSTENQLADIFTKPLDEKTFCRLRSELNVLDSRNLD

SEQ ID NO: 316222 - protein, 871 aa, Zea mays
  Clone ID: MRT4577_51464C.1.pep
MTTSRPLELLHIDLFGPVAYLSIGGSKYGLVIVDDFSRFTWVFFLQDKSETQGTLKRFLRRAQNEFELKVKKIRSDNGSEFKNLQVEEFLEEEGIKHEFSAPYTPQQNGVVERKNRTLIDMARTMLGEFKTPEYFWTEAVNTACHAINRVYLHRLLKKTSYELLTGNKPNVSYFRVFGSKCYILVKKGRNSKFAPKAVEGFLLGYDSNTKAYRVFNKSSGLVEVSSDVVFDETNGSPREQVVDLDDVDEEEVPTAAIRTMAIGDVRPQEQDEQDQPSSSTMVHPPTQDDEQVHQQEACDQGGAQDDHAMEEEAQPAPPTQVRAMIQRDHPVDQILGDISKGVTTRSRLVNFCEHYSFVSSIEPFRVEEALLDPDWVLAMQEELNNFKRNEVWTLVPRPKQNVVGTKWVFRNKQDEHRVVTRNKARLVAKGYAQVAGLDFEEKFAPVARLESIRILLAYAAHHSFRLYQMDVKSAFLNGPIKEEVYVEQPPGFEDERYPDHVCKLSKALYGLKQAPRAWYECLRDFLIVNAFKVGKADPTLFTKTCDGDLFVCQIYVDDIIFGSTNQKSCEEFSRVMTQKFEMSMMGELSYFLGFQVKQLKEGTFISQTKYTQDLLKRFGMKDAKPAKTPMGTDGHTDLNKGGKSVDQKAYRSMIGSLLYLCASRPDIMLSVCMCARFQSDPKECHLVAVKRILRYLVATPCFGLWYPKGSTFDLVGYSDSDYAGCKVDRKSTSGTCQFLGRSLVSWNSKKQTSVALSTAEAEYVAAGQCCAQLLWMRQTLRDFGYNLSKVPLLCDNESAIRMAENPVEHSRTKHIDIRHHFLRDHQQKGDIEVFHVSTENQLADIFTKPLDEKTFCRLRSELNVLDSRNLD

SEQ ID NO: 316223 - protein, 70 aa, Zea mays
  Clone ID: MRT4577_51465C.1.pep
TVRGYCSSIYRQRAQPKQKYIVTTRFQGSKTRARTSPSVLGSSLTHMMTHSTEMNVTTLIYNRVLYKIDK

SEQ ID NO: 316224 - protein, 92 aa, Zea mays
  unsure (1)..(92): unsure at all Xaa locations
  Clone ID: MRT4577_51466C.1.pep
RSRGAERRASSWSRRLYEAVGRDHVVGSSXAAVGFAARECTDPPPAPLVDAAELGXSWSLCRAVVAGFIARLVFLXITVASVIGYKHQTDAS

SEQ ID NO: 316225 - protein, 1812 aa, Zea mays
  Clone ID: MRT4577_51467C.1.pep
MDPKGKGMVVDNNEKESIFNELKNDKSTDLGSSHKRKDGKKKKTRRIKEIVYYDSDESSSSQKDDDHNDYERRKPVNSNFSFDYSRIPQSSNSHLLPIPLGKPPHFDGEDYGFWSHKMRTHLFSLHPSIWEIVESGMQFDSSDSPMFINEQIHKNAQATTVLLASLCRDEYNKVSGLDNAKQIWDTLKISHEGNDITMLTKMELVEGELGRFAMIRGEEPTQTYNRLKTLINKIRSYGSTIWTDHDVVRLLLRSFTILDPHLVNNIRENPRYTKMSPEEVLGKFVSGRMMIKEARYVDDALNGPINEPQPFALKATRSKEALPSKVAQIEAAGLNDEEMALIIKCFKTVLKGHKGQPSKTKTKGKRSCFKCGKIGHFIANCPDNDSDQEQGNKREKKKNYKKAKGEAHLGKEWDSDCSSSDSDNEGLAATAFNKSTLFPNERHTCLMAREKKVCTRNSTYASSSEDESSDEDEVDYSCLFKGLDRTKVDKINELIDALNEKNILLEKQEDLLYEEHDKFVEAQKSLALEIKRNEMLACELSTCHDSISKLKSINDDLNAKLVEAHKSNSCVEHVEICTRCKDVDINACSEHLVSISKLNDELASLNAQLKTSKSEFEKLKFARDAYTIGRHPSIKDGLGFKREAKSLTSHKTPISTKEKGKAPMANSVKKNHAFMYYDRRYSRNAFRGHNVFDSHAYDSYAMTASSSHVMHGRNVLRKNVVHQMPRRNVVHNAPRKVVNEPSTIYCALNASFAICRKDKKIVARKLGAKCKGDKACIWVPKDICTNLVGPNMSWVYASGGSSWIIDSGCTNHMTGEKKMFTSYVKNKDSQDSIVFGDGNQGKVKGLVESLGYNLLSVSQLCNMGYNCLFTNVDVSVFRRSDGSLAFKGVLDGKLYLVDFAKEEAGLDACLIAKTSMGWLWHRRLAHVGMKNLHKLLKGEHVIGLTNVQFEKDRPCAACQAGKQVGGAHHSKNVMTTSRPLELLHMDLFGPVAYLSIGGSKYGLVIVDDFSRFTWVFFLQDKSETQGTLKRFLKRAQNEFELKVKKIRSDNGSEFKNLQVEEFLEEEGIKHEFSAPYTPQQNGVVERKNRTLIDMARTMLGEFKTPERFWSEAVNTACHAINRVYLHRLLKKTSYELLTGNKPNVSYFRVFGSKCYILVKKGRNSKFAPKAVEGFLLGYDSNTKAYRVFNKSSGLVEVSSDVVFDETNGSPREQVVDCDDVDEEDVPTAAIRTMAIGEVRPQEQDERDQPSSSTTVHPPTQDNEQVHQKEACVQGGAQDDHVMEEEAQPAPPTQVRAVIQRDHPVDQILGDISKGVTTRSRLVNFCEHYSFVSSIEPFRVEEALLDPDWVLAMQEELNNFKRNEVWTLVPRPKQNVVGTKWVFRNKQDEHGVVTRNKARLVAKGYAQVTGLDFQETFAPVARLESIRILLAYAAHHSFRLYQMDVKSAFLNGPIKEEVYVEQPPGFEDERYPDHVGKADPTLFTKTCDGDLFVCQIYVDDIIFGSTNQKSCEEFSRVMTQKFEMSMMGELNYFLGFQVKQLKDGTFISQTKYTQDLLKRFGMKDAKPAKTPMGTDGHTDLNKGGKSVDQKAYRSMIGSLLYLCASRPDIMFSVCMCARFQSDPKECHLVAVKRILRYLVATPCFGIWYPKGSNFDLIGYSDSDYAGCKVDRKSTSGTCQFLGRSLVSWNSKKQTSVALSTAEAEYVAAGQCCAQLLWMRQTLRDFGYNLSKVPLLCDNESAIRMAENPVEHSRTKHIDIRHHFLRDHQQKGDIEVFHVSTENQLADIFTKPLDEKTFCRLRSELNVLDSRNLD

SEQ ID NO: 316226 - protein, 1004 aa, Zea mays
  Clone ID: MRT4577_51468C.1.pep
MKIVARKLGAKCKGDKTCIWVPKTIVTNLVGPNKSWVYASGGSSWIIDNGCTNHMTGEKKMFTSYVKNKDSQDSIIFGDGNQGKVKGLGKIAISNEHSISNVFLVESLGYNLLSVSQLCNMGYNCLFTNVDVSVFRRSDGSLAFKGVLDGKLYLVDFAKEEAGLDACLIAKTSMGWLWHRRLAHVGMKNLHKLLKGEHVIGLTNVQFEKDRPCAACQAGKQVGGSHHTKNVMTTSRPLEMLHIHLFGPVAYLSIGGSKYGLIIVDDFPRFTWVFFLQDKSETQGTLKRFLRRAQNEFELKVKKIRSDNGSEFKNLQVEEFLEEEGIKHEFSAPYTPQQNGVVERKNRTLIDMARTMLGEFKTPEYFWSEAVNTACHAINRVYLHRLLKKTSYELLTSNKPNVSYFRVFGSKCYILVKKGRNSKFAPKAVEGFLLGYDSNTKAYRVFNKSSGLVEVSSDVVFDETNGSPREQVVDLDDVDEEDVPTAAIRTMAIGEPFRVEEALLDSDWVLAMQEELNNFKRNEVWTLVPRPKQNVVGTKWVFRNKQDKHGVVTRNKARLVAKGYAQVAGLDFEETFAPVARIESIRILLAYVTHHSFRLYQMDVKSAFLNGPIKEEVYVEQPPGFEDERYPDHVCKLSKALYGLKQAPRAWYECLRDFLIANAFKVGKADPTLFTKTCDGDLFVCQIYVDDIMFGSTNKKSCEEFSRVMTQKFEMSMMGELNYFLRFQVKQLKDGTFISQTKYTQDLLKRFGMKDTKPAKTPMGTDGHTDLNKGGKSVDQKAYRSMIGSLLYLCASRPDIMLSVCMCARFQSDPKECHLVAVKRILRYLVATPCFGLWYPKGSTFDLIGYSDSDYAGCKVDRKSTSGTCQFLGRSLVSWNSKKQTSVALSTAEAEYVAAGQCCAQLLLMRQTLRDFGYNLSKVPLLCDNESAIRMAENPVEHSRTKHIDIRHHFLRDHQQKGDIEVFHVSTENKLADIFTKPLDENTFCRLRSELNVLDSRNLD

SEQ ID NO: 316227 - protein, 116 aa, Zea mays
  unsure (1)..(116): unsure at all Xaa locations
  Clone ID: MRT4577_51469C.1.pep
KELKHQLSLMLSALKSLFPGEALSTTHPNMDSXLRNQTRIILFNRKDIISTDDMNAXATYFRNQGIKHVFSNCHIXMLTMKLCRMAKSVPSVANTYRNENGLLPPPIRAKIPTYPN

SEQ ID NO: 316228 - protein, 131 aa, Zea mays
  unsure (1)..(131): unsure at all Xaa locations
  Clone ID: MRT4577_5146C.1.pep
RTRGRTRGRTLGFLLAHATAVARYRTKYQXYICLEVGTMAAQKGKVGIVLDFNCDEALTNSPDDQASSQRAWDFYIGWNVDPLINGLYSQIMQDLVXEMLPRFTSELANLVNGSADYIVINEYTSIYVKGQ

SEQ ID NO: 316229 - protein, 38 aa, Zea mays
  Clone ID: MRT4577_51470C.1.pep
MAQKETNGSNGEHISTRPPPTPAPLRFSPLFQANLPIL

SEQ ID NO: 316230 - protein, 78 aa, Zea mays
  Clone ID: MRT4577_51471C.1.pep
MMMVVQLVAHHLYTMIQFERAVDASNRLFEPALMQQQQQLLAAQGLNPMAMMMAQNMPAMGGLYQYQYQFASYRTNPC

SEQ ID NO: 316231 - protein, 1647 aa, Zea mays
  Clone ID: MRT4577_51472C.1.pep
MDPKGKGIVINDKEKESFVNEPKDDKSNDSGSGHRRKDGKKKKTRRIKEIVYYDSDESTSSDKDDDYDKQKTVNSNFSFDYSRIPHSSNSHLLSIPLGKPPHFDGEDYGFWSHKMRSHLFSLHPSIWEIVENGMKFDSSDSPMFINEQIHKNAQATTVLLASLCRDEYNKVSGLDNAKQIWDTLKISHEGNDITMLTKMELVEGELGRFAMIRGEEPTQTYNRLKTLINKIRSYGSTRWTDHDVVRLMLRSFTVLDPHLVNNIRENPRYTKMTPEEVLGKFVSGRMMIKEARYVDDALNGPINEHQPLALKATRSKEALPSKVAQIEAAGLNDEEMALIIKRFKTVLKGHKGQPSKTKTKGKRSCFKCGKIGHFIANCPDNDSDQEQGNKREKKKNYKKAKGEAHIGKEWDSDCSSDSDNEGLAATAFNKSSLFPNERHTCLMAREKKVSTRDSTYASSSDNESSDDDIDYSCLFKGLDRSKIDKINELIDALNDKNVLLEKQEDLLYEEHDKFVEAQKSLALEIKRNEILSCELSTCHDSIASLKSKNDDLNAKLEKSSKSTSCVEHVEICTRCKDFDVDACSDHLVSISKLTEELASLNAQLKTSKNEFDKLKFARDAYTIGRHPSIKDGLGFKREAKNLTSHKTPIPAKEKGKAPMATSVKKNHAFMYHDKKNSRNAYDSYAMTASSSHVVHDRNIGRRNVVHNMPRRNVPRKVNEPSTIYHALNASFAIYRKDRKVYASGGSSWIIDSGCTNHMTGEKKMFTSYVKNKDSQDSIIFGDGNQGKVKGLDVSVFRRSDGSLAFKGVLDGKLYLVDFAKEEDKSETQGTLKRFLRRAQNEFELKVKNIRSDNGSEFKNLQVEEFLEEEGIKHEFSAPYTPQQNGVVERKNRTLIDMARTMLGEFKTPERFWSEAVNTACHAINRVYLHRLLKKTSYELLTGNKPNVSYFRVFGSKCYILVKKGRNSKFAPKAVEGFLLGYDSNTKAYRVFNKSSGLVEVSSDVVFDETNGSPREQVVDCDDVDEEDVPTAAIRTMAIGEVRPQEQDERDQPSSSTMVLPPTQDDEQVHQQEADDQGGAQDDHVMEEDAQPAPPAQVRAMIQRDHPVDQILGDISKGVTTRSRLVNFCEHYSFVSSIEPFRVEEALLDPDWVLAMQEELNNFKRNEVWTLVPRPKQNVVGTKWVFRNKQDEHGVVTRNKARLVAKGYAQVAGLDFEETFAPVARLESIRILLAYAAHHSFRLYQMDVKSAFLNGPIKEEVYVEQPPGFEDERYPNHVCKLSKALYGLKQAPRAWYECLRDFLIANAFKVGKADPTLFTKTCNGDLFVCQIYVDDIIFGSTNQKSCEEFSRVMTQKFEMSMMGELNYFLGFQVKQLKDGTFISQTKYTQDLLKRFGMKDAKPAKTPMGTDGHTDLNKGGKSVDQKAYRSMIGSLLYLCASRPDIMLSVCMCARFQSDPKECHLVAVKRILRYLVATPCFGLWYPKGSTFDLVGYSDSDYAGCKVDRKSTSGTCQFLGRSLVSWNSKKQTSVALSTAEAEYVAAGQCCAQLLWMRQTLWDFGYNLSKVPLLCDNESAIRMAENPVEHSRTKHIDIRHHFLRDHQQKGDIEVFHVSTENQLADIFTKPLDEKTFCRLRSELNVLDSRNLD

SEQ ID NO: 316232 - protein, 80 aa, Zea mays
  unsure (1)..(80): unsure at all Xaa locations
  Clone ID: MRT4577_51473C.1.pep
NCHLQWEDAQVLRPNLYVPPKQYPNCKEGDLPLIIAIDXQPMALIGVMQVXGDITNARTTDVXHFDGCKADLVVCDGGFG

SEQ ID NO: 316233 - protein, 1843 aa, Zea mays
  Clone ID: MRT4577_51474C.1.pep
MDPKGKGMVVDNNEKESIFNEPKNDKSTDLGSSHKRKDGKKKKTRRIKEIVYYDSDESSSSQKDDDHNDYEQRKPVNSNFSFDYSRIPQSSNSHLLSIPLGKPPHFDGEDYGFWSHKMRSHLFSLHPSIWEIVDSGMHFNSSDSPIFINEQIHKNAQATTVLLASLCRDEYNKVSGLDNAKQIWDTLKISHEGNDATLLTKMELVEGELGRFAMIRGEEPTQTYNRLKTLINKIRSYGSTRWTDHDVVRLMLRSFTVLDPHLVNNIRENPRYTKMSPEEVLGKFVSGRMMIKEARYVDDALNGPINEPQPFALKATRSKEVLPSKVAQIEAAGLNDEEMALIIKRFKTVLKGHKGQPSKTKTKGKRSCFKCGKIGHFIANCPDNDSDQEQGNKREKKKNYKKAKGEAHLGKEWDSDCSSSDSDNEGLAATAFNKSTLFPNERHTCLMAREKKVCTRNSTYASSSEDESSDEDEVDYSCLFKGLDRSKIDKINELIDALNEKNILLEKQEDLLYEEHDKFVEAQKSLALEIKRNEMLACELSTCHDSISKLKSINDDLNAKLVEAHKSNSCVEHVEICTRCKDVDINACSEHLVSISKLNDELASLNAQLKTSKSDFDKLKFARDAYMVGRHPSIKDGLGFKREAKNLTSHKTPISTKEKGKAPMANSVKKNHAFMYYDRRYSRNAFRGHDVFDSHAYDSYAMTASSSHVMHGRNMLRRNVVHQMPIKNITHAPRKVVNELSTIYCALNASFAICRKDKKIVARKLGARCKGDKTCIWVPKDICANLVGPNMSWVYASGGSSWIIDSGCTNHMTGEKKMFTSYVKSKDSQDSIVFGDGNQGKVKGLVESLGYNLLSVSQLCNMGYNCLFTNVDVSVFRRSDDSLAFKGVLDGKLYLVDFAKEEAGLDACLIAKTCMGWLWHRRLAHVGMKNLHKLLKGEHVIGLTNVKFEKDRPCAACQAGKQVGGAHHSKNVMTTSRPLELLHMDLFGPVAYLSIGGSKYGLVIVDDFSRFTWVFFLQDKSETQGTLKRFLRRAQNEFELKVKKIRSDNGSEFKNLQVEEFLEEEGIKHEFSAPYTPQQNGVVERKNRTLIDMARTMLGEFKTPERFWSEAVNTACHAINRVYLHRLLKKTSYELLTGNKPNVSYFRVFGSKCYILVKKVRNSKFAPKAVEGFLLGYDSNTKAYRVFNKSSGLVEVSSDVVFDETNGSPREQVVDLDDVDEEDVPTAAIRTMAIGDVRPQEQEEQDQPSSSTMVNPPTQDDEQVHQQEACDQGGAQDDHVMEEEAQLAPPTQVRTMIQRDHPVDQILGDISKGVTTRSRLVNFCEHYSFVSSIEPFRVEEALLDPDWVLAMQEELNNFKRNEVWTLVPRPKQNVVGTKWVFRNKQDEHGVVTRNKARLVAKGYAQVAGLDFEETFAPVARLESIRILLAYAAHHSFRLYQMDVKSAFLNGPIKEEVYVEQPPGFEDERYPDHVCKLSKALYGLKQAPRAWYECLRDFLIVNAFKVGKADPTLFTKTCDGDLFVCQIYVDDIIFGSTNQKSCEEFSRVMTQKFEMSMMGELNYFLGFQVKQLKDGTFISQTKYTQDLLKRFGMKDAKPAKTPMGTDGHTDLNKGGKSVDQKAYRSMIGSLLYLCASRPDIMLSVCMCARFQSDPKECHLVAVKRILRYLVATPCLGLWYPKGSTFDLVGYSDSDYAGCKVDRKSTSGTCQFLGRSLVSWNSKKQTSVALSTAEAEYVAAGQCCAQLLWMRQTLRDFGYNLSKVPLLCDNESAIRMAENPVEHSRTKHIDIRHHFLRDHQQKGDIEVFHVSTENQLADIFTKPLDEKTFCRLRSELNVLDSRNLD

SEQ ID NO: 316234 - protein, 120 aa, Zea mays
  unsure (1)..(120): unsure at all Xaa locations
  Clone ID: MRT4577_51475C.1.pep
GVRFPSGPPPFSPGAFLFGLLLRRLFVAPGFGLPSGGFWRFWAFVVFLLGPRFSPGVSFWPPPFSAVLVSGPPLLGPSFGSLFSASWRPLVRLPLGPAFFFIAAFPGPGRVGXRLGPPRV

SEQ ID NO: 316235 - protein, 1817 aa, Zea mays
  Clone ID: MRT4577_51476C.1.pep
MDPKGKGMVINDKETFVNELNDDKPTDSGSSHKRKDGRKKKTRRIKEIVYYDSDESSSSQKDDDDHDRRKTVNSNFSFDYSRIPQSSNSHLLSIPLGKPPHFDGEDYGFWSHKMRSHLFSLHPSIWEIVENGMKFDSSDSPMLINEQIHRNAQATTVLLASLCREEYNKVSGLDNAKQIWDTLKISHEGNDITMLTKMELVEGELGRFAMIRGEEPTQTYNRLKTLINKIRSYGSTRWTDHDVVRLMLRSFTVLDPHLVNNIRENPRYTMMTPEEVLGKFVSGRMMIKEARYVDDALNGPINEPQPLALKATRSKEALPSKVAQIEAAGLNDEEMALIIKRFKTALKGRKGQPSKTKTKEKRLCFKCGKLGHFIANCPDNDSDQDQGNKREKKKNYKKAKGEAHLGKEWDSDCSSSDSDNEGLTVTAFNKSTLFPNERHTCLMAREKKVCTRNSTYASSSEDESSDEDEVDYSCLFKGLDRTKVDKINELIDALNDKNMLLEKQEDLLYEEHDKFVEAQRSHALEVKRNEMLSCELSSCHETISKLRSINDNLNAKLEIASKSNSCVEIVETCNRCKDFDIDACSDHLVSISKLNEELASLNAQLKTSKNEFDKLKFARDAYTIGRHPSIKDGLGFKREAKNLTSHKALIPAKEKGKAPMASSVQKNHAFMYHDKRQTRNAYRSYNAYNAFDSHAMIASSSFYVHDRNVGRRNVVHNLPRRNVVNVPRRVNEPSTIYHALNDSFAICRKDRKIVARKLGAKCKGYKTCIWVPKDICTNLVGPNMSWVYASGGSSWIIDSGCTNHMTGEKKMFTSYVKNKDSQDSIIFGDGNQGKVKGLVKSLGYNLLSVSQLCNMGYNCLFTNVDVSVFRRSDGSLAFKGVLDGKLYLVDFAKEEADLDACLIAKTSMGWLWHRRLAHVGMKNLHKLLKGEHVIGLTNVQFEKYRPCAACQAGKQVGGAHHSKNVMTTSRPLELLHMDLFGPVAYLSIGGSKYGLVIVDDFSRFTWVFFLQDKSETQGTLKRFLRRAQNEFELKVKKIRSDNGSEFKNLQVEEFLEEEGIKHEFSAPYTPQQNGVVERKNRTLIDMARTMLGEFKTPERFWSEAVNTACHAINQVYLHRLLKKTSYELLTGNKPNVSYFRVFGSKCYILVKKVRNSKFAPKAVEGFLLGYDSNTKAYRVFNKSSGLVEVSSDVVFDETNGSPREQVVDLDDVDDEDVPTAAIRTMTIGDVRPREQLEQDQLSSSTMVHPPTQDDEQVPQVEAHDQGGAQDVQVEEEEAQSAPPTQVRAVIQRDYPVDQILGDISKGVTTRSRLVNFCEHYSFVSSIEPFKVEEALLDPDWVLAMQEELNNFKRNEVWTLDEHRVVTRNKARLVAKGYAQVTGLDFEETFAPVARLESIRILLAYASHHSFRLFQMDVKSAFLNGPIKEEVYVEQPPGFEDERYPDHVCKLSKALYGLKQAPRAWYECLRDFLIANAFKVGKADPTLFTKTCDGDLFVCQIYVDDIIFGSTNQKSCEEFSRVMTQKFEMSMMGELNYFLGFQVKQLKDGTFISQTKYTQDLLKRFGMKDAKPAKTPMGTDGHTDLNKGGKSVDQKAYRSMIGSLLYLCASRPDIMLSVCMCARFQSDPKECHLVAVKRILRYLVATPCFGLWYPKGSTFDLVGYSGSDYAAYKVDRKSTSGTCQFLGRSLVSWNSKKQTSVALSTAEAEYVAAGQCCAQLLWMRQTLRDFGYNLSKVPLLCDNESAIRMAENPVEHSRTKHIDIRHQFLRDHQQKGDIEVFHVSTENQLADIFTKPLDEKTFCRLRSELNVLDSRNLD

SEQ ID NO: 316236 - protein, 120 aa, Zea mays
  Clone ID: MRT4577_51477C.1.pep
GAGRRRDPRPRRAPSTTDHRASGPCWSSGSVGPDPKFLILLRCGRMHERCAGLAKPGRRGRPPIPGLAVPPPRLVTGRVAPAAPRALAERNLSERASADERGANRRAMQSPSPFLHSSAS

SEQ ID NO: 316237 - protein, 1813 aa, Zea mays
  Clone ID: MRT4577_51478C.1.pep
MDPKGKGMVINDKEKETFVNELNNDKPTDSGSGHKRKDGRKKKTRRIKEIVYYDSDESSSSQKDDDNDYRKTVNSNFSFDYSRIPPSSNSHLLSLPLGKPPHFDGEDYGFWSHKMRSHLFSLHPSIWEIVENGMKFDSSDSPMFINEQIHKNAQATTVLLASLCRDEYNKVSGLDNTKQIWDILKISHEGIDITMLTKMELVEGELARFAMIRGEDPTQPYNWLKTLINKIRSYGSTRWTAHDVVHLLLRSFTILDPHLVNNIRENLRYTKMSPEEVLGKFVSGRMMIKEARYVDDALNGPINEPQPLALKATRSKEALPSKVAQIEAAGLNDEEMALIIKRFKSVLKGHKGQPSKTKTKGKRSCFKCGKIGHFIANCPENESDQEHGSKREKKKNYKKAKGEAHLGKEWDSDCSSSDSDNEGLAAIAFNKSSLFPNERHTCLMAKEKKVCTRDGTTYDSSSDDESSDDDEIDYSCLFKGLDRNKIDKINELIDALNEKDKLVEKQEDLLYEEHDKFVEAQRSHALEVKRNEMLSRELSSCHETISKLRSINDDMNAKLEIASKSTSCVENAITCTRCKDINLDAYSEHLACISKLNEEVASLNAQLKTSKSDFEKLKFARDAYTVGRHPSIKDGLGFKREAKNLTSHKTPIPAKEKGKAPMASSVQKNHAFMYHDRRQTRNAYRNYNAYDDFDSHAMFASSSSYMHGRNMSRRNATHHVPRKNIIHAPRKVVNEHSTIYCALNASFAICRKDRKIVARKLGAKCKGDKTCIWVPKDICTNLVGPNMSWVYASGGSSWIIDSGCTNHMTGEKKMFTSYVKNKDSQDSIIFGDGNQGKVKGLDVSVFRRSDGSLAFKGVLDGKLYLVDFAKEEAGLDACLIAKTSMGWLWHRRLAHVGMKNLHKLLKGEHVIGLTNVQFEKDRPCAACQAGKQVGGAHHSKNVMTTSRPLELLHMDLFGPVAYLSIGGSKYGLVIVDDFSRFTWVFFLQDKSETQGTLKRFLRRAQNEFELKVKKIRSDNGSEFKNLQVEEFLEEEGIKHEFSAPYTPQQNGVVERKNMTLIDMARTMLGEFKTPERFWSEAVNTACHAINRVYLHRLLKKTSYELLTSNKPNVSYFRVFGSKCYILVKKGRNSKFAPKAVEGFLLGYDSNTKAYRVFNKSSGLVEISSDVVFDETNSSPREQVVDCDDVDEEDVPTAAIRTMAIGEVRPQEQDERDQPSSSTMVHPPTQDDEQVHQQEAGDQGGAQDDHVMEEEAQPAPPTQVRAMIQRDHPVDQILGDISKGVTTRSRLVNFCEHYSFVSSIEPFRVEEALLDPDWVLAMQEELNNFKRNEVWTLVPRPKQNVVGTKWVFRNKQDEHGVVTRNKARLVAKGYAQVAGLDFEETFAPVARLESIRILLAYAAHHSFRLYQMDVKSAFLNGPIKEEVYVEQPPGFEDERYPDHVCKLSKALYGLKQAPRAWYECLRDFLIVNAFKVGKADPTLFTKTCDGDLFVCQIYVDDIIFGSTNQKSCEEFSRVMTQKFEMSMMGELNYFLGFQVKQLKDGTFISQTKYTQDLLKRFGMKDAKPAKTPMGTDGHTDLNKGGKSVDQKAYRSMIGSLLYLCASRPDIMLSVCMCARFQSDPKECHLVAVKRILRYLVATPCFGLWYPKGSTFDLVGYSDSDYAGCKVDRKSTSGTCQFLGRSLVSWNSKKQTSVALSTAEAEYVAAGQCCAQLFWMRQTLRDFGYNLSKVPLLCDNESAIRMAENPVEHSRTKHIDIRHHFLRDHQQKGDIEVFHVSTENQLADIFTKPLDEKTFCRLRSELNVLDSRNLD

SEQ ID NO: 316238 - protein, 133 aa, Zea mays
  Clone ID: MRT4577_51479C.1.pep
MALALAGLPHAASRLVPRVRQPPFRALCAAAAAGDASKRMLVLYTKPGCCLCDGLKEKLHAASMLAGTPYSLASLELQERDITTNPEWERLYQYEIPVLAKVLPDGTEEVLPRLSPRLSVELVQKKIYFAFDQ

SEQ ID NO: 316239 - protein, 138 aa, Zea mays
  Clone ID: MRT4577_5147C.1.pep
MSVEILDGRTVQSFVEDEGAFNASVDGRFAALDADHDGRLCYSEMAGEIMSLRVLEKHFGVDDAGAVGPDELAKLYRVLFARFDRDGDGGVDREEFRAEMKEVMLAVANGLGFMPVQMVVEEGSFLKVAVDRELARAA

SEQ ID NO: 316240 - protein, 198 aa, Zea mays
  Clone ID: MRT4577_51480C.1.pep
MSAATGYSRFLRQYMREPQRHQLVEAEETDSGRTMQLFPTRAGGGTSSSSHEQSDDGAQAANKATLSIFYEGRMLVFEEFPADKAKALMQLAAGSSGSSSAAAPNNKDAPVPVVRVRRVPEQPAATAPLAVVPSDLLPIARKVSLQRFLQKRKERIAATEPYPEPEKDDVPATATATATGWQATALKDKPAPASWLGL

SEQ ID NO: 316241 - protein, 108 aa, Zea mays
  unsure (1)..(108): unsure at all Xaa locations
  Clone ID: MRT4577_51481C.1.pep
SLRTNTLWVNLKAIYTLVGAAALKRESLSNPSEGDGVKVARLLTETGSALRLFDITTGTNVTRSRLLPVTATCDLXLVQPDLYTLTEGFVIRCPXERSSANASIELGP

SEQ ID NO: 316242 - protein, 1660 aa, Zea mays
  Clone ID: MRT4577_51482C.1.pep
MDPKGKGIVINDKEKESFVNEPRDDKSNDSGSGHRRKDGKKKKTRRIKEIVYYDSDESTSSQKDDDHNEYERKKPVNSNFSFDYSRIPQSTNAHLLSIPLGKPPHFDGEDYGFWSHKMRSHLFSLHPSIWEIVESGMHFDSTDSPMFINEQIHKNAQATTVLLASLCRDEYHKVSGLDNAKQIWDTLKISHEGNDVTLLTKMELVEGELGRFAMIRGEEPTQTYNRLKTLINKIRSYGSTRWTDHDVVRLMLRSFTVLDPHLVNNIRENPRYTKMSPEEVLGKFVSGRMMIKEARYVDDALNGPIHEPQPIALKATRSKEALPSKVAQVEAAGLNNEEMALIIKRFKTALKGRKGQPSKTKTKEKRSCFKCGKIGHFIANCPDNESDQEKGNKREKKKHYKKAKGEAHIGKEWDSDCSSSDSDNEGLAATAFNKSSLFPNERHTCLMAREKKVSTHDTSTYASSSEDESSDDDEIDYSCLFKGLDRSKINKINELIDALNDKNRLLEKQEDLLYEEHDKFVSAQNSLALEIKRNEMLSSELSTCHESISKLKSVNDDLNAKLEIASKSTSCVEIVETCNRCKDFDIDACSEHLVSISKLNDELASLNAQLKTSKSNFDKLKFARDAYTIGRHPSIKDGLGYKKEAKNLTSHKAPISAKEKGKAPMASSVQKNHAFMYHDRRQSRNAYRRCNAYDAFDSHDMFASSSSYVHDRNVERFMHPGGSSWIIDSGCTNHMTGEKKMFTSYVKNKDSQDSIIFGDGNQGKVKGLGKIAISNEHSISNVFLVESLGYNLLSVSQLCNMGYNCLFTNVDVSVFRRSDGSLAFKGVLDDKLYLVDFAKEEAGLDACLIAKTSMGWLWHRCLAHVGMKNLHKLLKGEHVIGLTNVQFEKDRPCAACQAGKQVGGAHHSKNVMTTSRPLELLHMDLFGPVAYLSIGGSKYGLVIVDDFSRFTWVFFLQDKSETQGTLKRFLRRAQNEFELKVKKIRSDNGSEFKNLQVEEFLEEEGIKHEFSAPYTPQQNGVVERKNRTLIDMARTMLGEFKTPVRFWSEAVNTACHAVNRVYLHRLLKKTSYELLTGNKPNVSYFRVFGSRCYILVKKGRTSKFAPKAVEGFLLGYDSNTKAYRVFNKSSGLVEVSSDVVFDETNGSPREQVVDCDDVDEEDVPTTAIRTMVIGEVRPQEQDERDQPSSSTTVHPPTQDDEQDEHGVVTGNKARLVAKGYAQVTGLDFEETFAPVARLESIRILLAYAAHHSFRLFQMDVKSAFLNGPIKEEVYVEQPPGFEDERYPDHVCKLSKALYGLKQAPRAWYECLRDFLIANDFKVGKVDPTLFTKTCDGDLFVCQIYVDDIIFGSTNQKSCEEFSRVMTQKFEMSMMGELNYFLGFQVKQLKDGTFISQTKYTQDLLKRFGMKDAKPAKTPMGTDGHTDLNKGGKSVDQKAYRSMIGSLLYLCASRPDIMLSVCMCARFQSDPKECHLVAVKRILRYLVATPCFELWYPKGSTFDLVGYSDSDYAGCKVDRKSTSGTCQFLGRSLVSWNSKKQTSVALSTAEAEYVAAGQCCAQLLWMRQTLRDFGYNLSKVPLLCDNESAIRMAENPVEHSRTKHIDIRHHFLRDHQQKGDIKVFHVSTENQLADIFTKPLDEKTFCRLRSELNVLDSRNLD

SEQ ID NO: 316243 - protein, 61 aa, Zea mays
  Clone ID: MRT4577_51483C.1.pep
PAGSNIIRLLQVLRLKKKKKKKKKKKKKKKKKKKKKKKKKKKKKKNMKPQKEQKIKRTPKI

SEQ ID NO: 316244 - protein, 45 aa, Zea mays
  Clone ID: MRT4577_51484C.1.pep
KKKIKKLKKKKKKKKKKKKKKKKKKKKKRKIKLKNKKKINMGGGV

SEQ ID NO: 316245 - protein, 100 aa, Zea mays
  Clone ID: MRT4577_51485C.1.pep
MSYYSGDRSSYCSLRATNTYVDSYKFDYCSNSSRSFGSSPLRDQRPGAATNRPTRPVTGAHVRCTRPSVPSRSGPTSLAPPRRRRPPWRSLDPGQPAWSA

SEQ ID NO: 316246 - protein, 157 aa, Zea mays
  Clone ID: MRT4577_51486C.1.pep
SPHLDRPRRLLRPTRMDGCGSTSKRHPSMDDRDGRRPDILRCGARISSHHQHNLRSAARVTSVVVAFNIFFQITGRSLVLACCPFPFSIHSYIQFRHHIVPLQSFIRFLDQKVGFFCFLGETNKPLGYLEQIYYHISCLIFFISNYTLQKKKKKICG

SEQ ID NO: 316247 - protein, 70 aa, Zea mays
  Clone ID: MRT4577_51487C.1.pep
IHADLPTVPFYPKLFTFRGHSDITAFITTEVLGAPPTGCCLCAPLMGTFLHSLFSSPLYEGTTCGYAPFV

SEQ ID NO: 316248 - protein, 64 aa, Zea mays
  Clone ID: MRT4577_51488C.1.pep
LPRQSSSGERTDVRRLKTMGSRQHIIERHCRHCCQTAASEGGCCGILASADRSRYFIFVKNLVF

SEQ ID NO: 316249 - protein, 141 aa, Zea mays
  Clone ID: MRT4577_51489C.1.pep
LKVEVDRLAAEQEPELQNRNVGDDGYRLWQQVDWEGFGIGSSMLPSEPSAAAQVPSREAEPEPHLEVEQSVSPAPSAATSYDVAVPHWFQRHADPSELMGFASRGLIKAPFVSAFERLLAAIICPGHPNAQIPCRLRDEAL

SEQ ID NO: 316250 - protein, 67 aa, Zea mays
  Clone ID: MRT4577_5148C.1.pep
KGAESHQPAHHLAVSQRALSGVRDRWRYDALAEPLQPHHGPDVPVQWTVNAGLRRQGSASSASKMCP

SEQ ID NO: 316251 - protein, 161 aa, Zea mays
  Clone ID: MRT4577_51490C.1.pep
MSDSEEHHFESKADAGASKTYPQQAGTIRKNGYIVIKNRPCKVVEVSTSKTGKHGHAKCHFVGIDIFTGKKLEDIVPSSHNCDVPHVNRVEYQLIDISEDGFVSLLTESGNTKDDTKLPSDEALQAQIKSGYDEGKDILLTVMSAMGEEQICAVKEIGGKN

SEQ ID NO: 316252 - protein, 160 aa, Zea mays
  Clone ID: MRT4577_51491C.1.pep
MSDEEHQFESKADAGASKTYPQQAGTIRKNGYIVIKGRPCKVVEVSTSKTGKHGHAKCHFVGIDVFTGKKLADIVPSSHNCDVPHVDRTEYQLIDITEDGFVSLLTDSGNTKDDLRLPTDEALEGQIKSGYDDGKDLLLTVMSSMGEEQICAVKEIGGKN

SEQ ID NO: 316253 - protein, 41 aa, Zea mays
  unsure (1)..(41): unsure at all Xaa locations
  Clone ID: MRT4577_51492C.1.pep
QPGASGGEKEXLPLGIYIFFFVDAFLLTVDIIKSCYLFQNK

SEQ ID NO: 316254 - protein, 545 aa, Zea mays
  unsure (1)..(545): unsure at all Xaa locations
  Clone ID: MRT4577_51493C.1.pep
MASRARPLHAIYMTSSSHDPDKWAHLVKEYASQSLLREAALVYARNLPRRTHHQPLLPVLLKAAAASSPTELGLGKSLHAEALKSAFARDLLVGTTIVSMYCKCGALADARRAFDEMPDRNVISYNALLAGYAVAGDMDGALALFGGMRSWTHVTWATLIRGFAEKGDMAEARRWFEATPPGMRTVVTWTVLVQGYVCAGDMETAREVFDRMPARNAFVWSSMVTGYFKAGDAEEARAVFDRIPTRNLVNWNALIAGYAQIGCSEQALEAFHLMLQERVKPDEFTMASLLSACAQLGSLEQGKKVHDFINQEHIRKNHFVMNGLIDMYAKCGDLAHARYIFDSMRWKNNECWNTMISALASHGQSDEALHLFFQMERSGRKPNTITVLAVLGACTHGGFVDEGLQIFNKLDAYGVGAGVEHYGCLVDLLGRAGKLKEAYEIVNNMSEEPNEXVRFQYIXGACRVHRDAEMSRLVTEEILRLHSFHASSTDAEYLMLANIMAASERWAQAAPIRRKMAPRGVEKTPARSSLELGIPGCQVYAGSGQ

SEQ ID NO: 316255 - protein, 73 aa, Zea mays
  unsure (1)..(73): unsure at all Xaa locations
  Clone ID: MRT4577_51494C.1.pep
RLLYLYVISVDSLRRPTFFLHILESFLPRSIVASCDYSSMLDRPYPRIFRHVCFSLSVSTVYSSXDSAYDHSL

SEQ ID NO: 316256 - protein, 70 aa, Zea mays
  unsure (1)..(70): unsure at all Xaa locations
  Clone ID: MRT4577_51495C.1.pep
APPPAXDGPKLSVGFFGLSREQYPFEISQDSWVPPRTSPYLGIRMESIXXEGXIXXIIPPHTPPQWFVFF

SEQ ID NO: 316257 - protein, 1808 aa, Zea mays
  Clone ID: MRT4577_51496C.1.pep
MDPKGKGIVINDKEKESFVNEPKDDKSNDSGSGHRRKDGKKKKTRRIKEIVYYDSDESSSSQKDDDNDYRKTINSNFSFDYSRIPHSSNSHLLSIPLGKPPHFDGEDYGFWSHKMRSHLFSLHPSIWEIVENGMKFDSSDSPMLINEQIHRNAQATTVLLASLCREEYNKVSGLDNAKQIWDTLKISHEGNDVTMLTKMELVEGELGRFAMIRGEEPTQTYNRLKTLVNKIRSYGSTRWTDHDVVRLMLRSFTVLDPHLVNNIRENPRYTKMSPEEILGKFVSGRMMIKEARYVDDALNGPIHEPQPIALKASRSKEALPSKVAQIEAAGLNDEEMALIIKRFKTALRGRKEHPNKTKTKGKRSCFKCGKIGHFIANCPDNDSDQEKKSGKWEKKKNYKKAKGEAHIGKEWDSDCSSSDSDNEGLAATAFNKSTLFPNERHTCLMAKEKKVCTRNSTYASSSEDESSDEDEVDYSCLFKGLDRSKIDKINELIDALNEKNILLEKQEDSLYEEHDKFVEAQKSLALEIKRNEMLACEVSTCHDSISNLKSINDDLNAKLVEANKSNSCVKHVEICTRCKDVDINACSEHLVYISKLSDEVASLNAQLKTSKSDFEKLKFARDAYTVGRHPSIKDGLGFKREAKNLTSHKAPIPAKEKGKAPMATSAKRNHAFLYHDKRQTRSYDAFDSYVCDSHAMFAPSSSYVYDRNVTRRNVVPKRNVANVHRKVVNEPSTIYCALNASFAICRKDRKVIARKLGAKCKGDKTCIWVPKEIVTNLVGPNKSWVYASGGSSWIIDSGCTNHMTGEKKMFTSYVKNKDSQDSIIFGDGNQGKVKGLDVFVFRRSDGSLAFKGVLDGKLYLVDFAKEEAGLDACLIAKTSMGWLWHRRLAHVGMKNLHKLLKGEHVIGLTNVQFEKDRPCAACQAGKQVGGAHHSKNVMTTSRPLELLHMDLFGPIAYLSIGGSKYGLVIVDDFSRFTWVFFLQDKSETQGTLKRFLRRAQNEFELKVKKIRSDNGSEFKNLQVEEFLEEEGIKHEFSAPYTPQQNGVVERKNRTLIDMARTMLGEFKTSECFWSEAVNTACHAINRVYLHRLLKKTSYELLTGNKPNVSYFRVFGSKCYILVKKGRTSKFAPKAVEGFLLGYDSNTKAYRVFNKSSGLVEVSSDVVFDETNGSPREQVVDLDDVDEEDVPTAAIRTMAIGEVWPQEQNERDQPSSSTMVHPPTQDDEQVHQQEACDQGGAQDDHVMEEEAQPAPPTQVRAVIQRDHPVDQILGDISKGVTTRSRLVNFCEHYSFVSSIEPFRVEEALLDPDWVLAMQEELNNFKRNEVWTLVPRPKQNVVGTKWVFRNKQDEHGVVTRNKARLVAKGYAQVAGLDFEETFAPVARLESIRILLAYVAHHSFRLFQMDVKSAFLNGPIKEEVYVEQPPGFEDERYPDHVCKLSKALYGLKQAPRAWYECLRDFLITNAFKVGKADPTLFTKTCDGDLFVCQIYVDDIIFGSTNKKSCEEFSRVMTQKFEMSMMGELNYFLGFQVKQLKEGTFISQTKYTQDLLKRFGMKDAKPAKTPMGTDGHTDLNKGGKSVDQKAYRSMIGSLLYLCASRPDIMLSVCMCARFQSDPKECHLVAVKRILRYLVATPCFGLWYPKGSTFDLIGYSDSDYAGCKVDRKSTSGTCQFLGRSLVSWNSKKQTSVALSTAEAEYVAAGQCCAQLLWMRQTLRDFGYNLSKVPLLCDNESAIRMAENPVEHSRTKHIDIRHHFLRDHQQKGDIEVFHVSTENQLADIFTKPLDEKTFCRLRSELNVLDSQNLD

SEQ ID NO: 316258 - protein, 1320 aa, Zea mays
  unsure (1)..(1320): unsure at all Xaa locations
  Clone ID: MRT4577_51497C.1.pep
MPYGKGEEDRLLEKQEDLLYEEHDKFVEAQKSYALEVKRNEVLSSELSSCHKTIATLKSVNDDLNDKLEVASKSNSCVEHVEICTRCKDFDVDACSDHLVSISKLTEDLASLNAQLKTSKNEFDKLKFARDAYTIGRHPSIKDGLGFKREAKNLTSHKAPIPTKEKGKAPMATSAKRNHAFLYHDRRQTRNAYRSYNAYDDFNSHAMFASSSSFMHGRNMSRKNAMPRKNVIHAPRKVVNKPSTIYYALNASFAICRKDKKIVARKLGAKCKGDKTCIWVPKDICTNLVGPNMSWVYASGGSSWIIDSGCTNHMTGEKKMFTSYVKNKDSHDSIIFGDGNQGKXESLGYNLLSXRSDGSLAFKGVLDGKLYLVDFAKEEANLDACLIAKTSMGWLWHRRLAHVGMKNLHKLLKGEHVIGLTNVQFEKDRPCAACQAGKQVGGAHHSKNVMTTSRPLELLHMDLFGPVAYLSIGGSKYGLVIVDDFSRFTWVFFLQDKSETQGTLKRFLRRAQNEFELKVKKIRSDNGSEFKNLQVEEFLEEEGIKHEFSAPYTPQQNGVVERKNRTLIDMARTMIGEFKTPECFWTEAVNTACHAINRVYLHRLLKKTSYELLIGNKPNVSYFRVFGSKCYILVKKGRNSKFAPKAVEGFLLGYDSNTKAYRVFNKSSGLVEVSSDVVFDETNGSPREQVVDCDDVDEEDVPTAAIRTMAIGEVRPQEQDEQDQPSSSTKVHPPTQDNEQVHQQEACDQGGAQVDHVMEEEAQPVPPTQVRAMIQRDHPVDQILGDISKGVTTRSRLVNFCEHYSFVSSIEPFRIEEALLDPDWVLAMQEELNNFKRNEVWTLVPRPKQNVVGTKWVFRNKQDEHGVVTRNKARLVAKGYAQVAGLDFEETFAPVARLESIRILLAYAAHHSFRLFQMDVKSAFLNGPIKEEVYVEQPPGFEDERYPDHVCKLSKALYGLKQAPRAWYECLRDFLIANAFMVGKADPTLFTKTCDGDLFVCQIYVDDIIFGSTNKKSCEEFSRVMTQKFEMSMMGELNYFLGFQVKQLKDGTFISQTKYTQDLLKRFGMKDAKPAKTPMGTDGHTDLNKGGKSVDQKAYRSMIGSLLYLCASRPDIMLSVCMCARFQSDPKECHLVAVKRILRYLVATPCFGLWYPKGSTFDLVGYSDSDYAGCKVDRKSTSGTCQFLGRSLVSWNSKKQTSVALSTAEAEYVAAGQCCAQLLWMRQTLRDFGYSLSKVPLLCDNESAIRMTENPVEHSRTKHIDIRHHFLRDHQQKGDIEVFHVSTENQLADIFTKPLDEKTFCRLRSELNVLDSRNLD

SEQ ID NO: 316259 - protein, 1842 aa, Zea mays
  Clone ID: MRT4577_51498C.1.pep
MDPKGKGIVINDKEKESFVNEPRDDKSNDSGSGHRRKDGKKKKTRHIKEIVYYDSDESTSSQKDDDHNEYERKKPVNSNFSFDYSRIPQSTNAHLLSIPLGKPPHFDGEDYRFWSHKMRSHLFSLHPSIWEIVESGMHFDSTDSPMFINEQIHKNAQATTVLLASLCRDEYHKVSGLDNAKQIWDTLKISHEGNDVTLLTKMELVEGELGRFAMIRGEEPTQTYNRLKTLINKIRSYGSTRWTDHDVVRLMLRSFTVLDPHLVNNIRENPRYTKMSPEEVLGKFVSGRMMIKEARYVDDALNGPIHEPQPNALKATRSKEALPSKVAQVEAAGLNNEEMALIIKRFKTALKGRKGQPSKTKTKEKRSCFKCGKIGHFIANCPDNESDQEKGNKREKKKHYKKAKGEAHIRKEWDSDCSSSDSDNEGLAATAFSKSSLFPNERHTCLMAREKKVSTHNTSTYASSSEDESSDDDEIDYSCLFKGLDRSKINKFNELIDALNDKNRLLEKQEDLLYEEHDKFVSAQNSLALEIKRNEMLSSELSTCHESISKLKSVNVDLNAKLEIASKSTSCVEIVETCNRCKDFDIDGCSDHLVSISKLNEELASLNAQLKTSKNEFDKLKFARDAYTIGRHPSIKDGLGYKREAKDLTSHKAPISAKEKGKAPMASSTKRNHAFMYHDRRQTRNAYRSYNAYDDFDSHAMFASSSSYMHGRNMSRRNAIHHVPRKNIIHAPRKIVNEPSTIYCALNASFAICRKDRKIVARKLGAKCKGDKTCIWVPKDICTNLVGPNMSWVYASGGSSWIIDSGCTNHMTGEKKMFTSYVKNKDSQDSIIFGDGNQGKVKGLVESLGYNLLSVSQLCNMGYNCLFTNVDVSVFRRSDGSLAFKGVLDGKLYLVDFAKEEAGLDACLIAKTSMGWLWHRRLAHVGMKNLHKLLKGEHVIGLTNVQFKKDRPCAACQAGKQVGGAHHSKNVMTTSRPLELLHMDLFGPVAYLSIGGSKYGLVIVDDFSRFTWVFFLQDKSETQGTLKRFLRRAQNEFELKVKKIRSDNRSEFKNLQVEEFLEEEGIKHEFSAPYTPQQNGVVERKNRTLIDMARTMLGEFKTPERFWSEAVNTACHAINRVYLHRLLKKTSYELLTGNKPNVSYFRVFGSRCYILVKKGRNSKFAPKAVEGFLLGYDSNTKAYRVFNKSSGLVEVSSDVVFDETNGSPREQVVDYDDVDEEDVPTAAIRTMAIGEVRPQEQDERDQPSSSTTVHPPTQDVEQVLQKEACDQGGAQDDHVMEEEVQPAPPTQVRAVIQRDHPVDQILGDISKGVTTRSRLVNFCEHYSFVSSIEPYRVEEALLDPDWILAMQEELNNFKRNEVWTLVPRPKQNVVGTKWVFRNKQDEHGVVTRNKARLVAKGYAQVAGLDFEETFAPVARLESIRILLAYAAHHSFRLFQMDVKSAFLNGPIKEEVYVEQPPGFEDERYPDHVCKLSKALYGLKQAPRAWYECLRDFLIANAFKVGKADPTLFTKTCNGDLFVCQIYVDDIIFGSTNKKSCEEFSRVMTQKFEMSMMGELNYFLGFQVKQLKDGTFISQTKYTQDLLKRFGMKDAKPAKTPMGTDGHTDLNKGGKSVDQKAYRSMIGSLLYLCASRPDIMLSVCMCARFQSDPKECHLVAVKRILRYLVATPCFGLWYPKGSTFDLVGYSDSDYAGCKVDRKSTSGTCQFLGRSLVSWNSKKQTSVALSTAEAEYVAAGQCCAQLLWMRQTLRDFGYNLSKVPLLCDNESAIRMAENPVEHSRTKHIDIRHHFLRDHQQKGDIEVFHVSIENQLADIFTKPLDEKTFCWLRSELNVLDSRNLD

SEQ ID NO: 316260 - protein, 1815 aa, Zea mays
  Clone ID: MRT4577_51499C.1.pep
MDPKGKGIVINDKEKESFVNEPRDDKSNDSGSGHRRKDGKKKKTRRIKEIVYYDSDESTSSQKDDDHNEYEKKKPVNSNFSFDYSRIPQSTNAHLLSIPLGKPPHFDGEDYGFWSHKMRSHLFSLHPSIWEIVESGMHFDSTDSPMFINEQIHKNAQATTVLLASLCRDEYHKVSGLDNAKQIWDTLKISHEGNDVTLLTKMELVEGELGWFAMIRGEEPTQTYNRLKTLINKIRSYGSTRWTDHDVVRLMLRSFTVLDPHLVNNIRENPRYTKMSPEEVLGKFVSGRMMIKEARYVDNALNGPINEPQPLALKAMRNKEALPSKVAQVEAAGLNNEEMALIIKRFKTALKGRKGQPSKTKTKEKRSCFKCGKIGHFIANCPDNESDQEKGNKREKKKHYKKAKGEAHIGKEWDSDCSSSDSDNEGLAATAFNKSSLFPNERHTCLMAREKKVSTRDSTYASSSDNESSDDDDIDYSCLFKGLDRSKIDKINELIDALNDKNRLLEKQEDLLYEEHDKFVNAQNSYALEVKRNEVLSSELSSCHETITTLKSVNDDLNAKLEGASKNSCVEHVEICTRCKDFDVDTCSKHLVSISNLNDEVASLNAQLKTSKSEFDKLKFARDAYTIGRHPSIKDGLGFKREAKNLTSHKAPIPAKEKGKAPMATSAKRNHAFLYHDRKNSRNAFRSYDAFDSHAYDSCTMTASSSHVMHDRKVGRRNVIHNMPRRNVVNIPRKVNEPSTIYHALNASFAICRKDRNVIARKLGAKCKGDKTCIWVPKTIVTNLVGPNKSWVYASGGSSWIIDSGCTNHMTGEKKMFTSYVKNKDSQDSIIFGDGNQGKVKGLDVSVFRRRDGSLAFKGVLDGKLYLVDFAKEEAGLDACLIAKTSMGWLWHRRLAHVGMKNLHKLLKGEHVIGLTNVQFEKDRPCAACQAGKQVGGAHHSKNVMTTSRPLELLHMDLFGPVAYLSIGGSKYGLVIVDDFSRFTWVFFLQDKSETQGTLKRFLRRAQNEFELKVKKIRSDNGSEFKNLQVEEFLEEEGIKHEFSAPYTPQQNGVVERKNKTLIDMARTMLGEFKTPERFWSEAVNTACHAINRVYLHRLLKKTSYELLTGNKPNVSYFRVFGSKCYILVKKGRNSKFAPKAVEGFLLGYDSNTKAYRVFNKSSGLVEVSSDVVFDETNGSPREQVVDCDDVDEEDVPTAAIRTMAIGEVRPQEQDERDQPSSSTKVHPPTQDDEQVHQKEACDQGGAQDNQEMEEETQPAPPIQVRAMIQRDHPVDQILGDISKGVTTRSRLVNFCEHYSFVSSIEPFRVEEALLDPDWVLAMQEELNNFKRNEVWTLVPHPKQNVVGTKWVFRNKQDEHGVVTRNKARLVAKGYAQVAGLDFEETFAPVARLESIRILLAYAAHHSFRLYQMDVKSAFLNGPIKEEVYVEQPPGFEDERYPDHVCKLSKALYGLKQAPRAWYECLRDFLIVNAFKVGKADPTLFTKTCDGDLFVCQIYVDDIIFGSTNQKSCEEFSRVMTQKFEMSMMGELNYFLGFQVKQLKDGTFISQTKYTQDLLKRFGMKDAKPAKTPMGTDGHTDLNKGGKSVDQKAYRSMIGSLLYLCASRPDIMLSVCMCARFQSDPKECHLVAVKRILRYLVATPCFGLWYPKGSTFDLVGYSDSDYAGCKVDRKSTSGTCQFLGRSLVSWNSKKQTSVALSTAETEYVAAGQCCAQLLWMRQTLRDFGYNLSKVPLLCDNESAIRMAENPVEHSRTKHIDIRHHFLRDHQQKGDIEVFHVSTENQLADIFTKPLDEKTFCRLRSELNVLDSRNLD

SEQ ID NO: 316261 - protein, 89 aa, Zea mays
  Clone ID: MRT4577_5149C.1.pep
MTSATPRLGSTPHLFFPFSFSLAFLCCIAVCNAAGDEAAALLAVKASLVDPLGKLGGWNSASASSRCIWDGVRCNARGVVTGLNLAGMN

SEQ ID NO: 316262 - protein, 132 aa, Zea mays
  Clone ID: MRT4577_514C.1.pep
MAKSASQTGKQVARSCQGRFNPPWAVQPVLVNFDQSALWYYIEFFVDSLLLELLAPRRLGVSCNFQPQMKKGGHNTKVTKKPFHDGSKDNLGFEDLKHTMLVICNATGELSSHNALNLLRQEPTAYTYTDTQ

SEQ ID NO: 316263 - protein, 69 aa, Zea mays
  Clone ID: MRT4577_51500C.1.pep
FRRGMIFFTLVLKKEGNGGFLKKGGYGPFWRGVPRFSWEVVKPLKAEKPFFALGASFFLKKAFGLVWSG

SEQ ID NO: 316264 - protein, 443 aa, Zea mays
  unsure (1)..(443): unsure at all Xaa locations
  Clone ID: MRT4577_51501C.1.pep
MEVEILESCMVKPSDDIGTPPPPMHVVWLSNLDLLVARSHTPTVYVYRPSPDPDFFSPGVLSAALSKALVRFYPLAGRLAQDGAGRPQIHCTGEGALLVTARADATLQDIPGGFAPSDELRQMLVPSAADGEDRAGILAMFQVTSFKCGGVCVGAAIHHTAADGLAALDFVNTWAAIASKGVDEAAPAPRPWLDRTLLRARSPPDVRFDHSEYSPRGGGGPKXRRGSRSXSAILPMSKTQVDALRAGMKVGRVKAVVAHVWRCACIARGLAGDEDTRLYMTADARSRVRPPLPEGYLGNAIFRASAVATAGDVVSEQLDAVAGRVSGATARLDDEYVRSLVDYLEQVVGDVAGLRKGEWVMPETDLWVISWQGLPIYDADFGWGRPAFMGRACLQFSGLVYLVPGPDGDGRLDVVVAMEPKSLARFKELLYELKGAGVPCTAD

SEQ ID NO: 316265 - protein, 1763 aa, Zea mays
  Clone ID: MRT4577_51502C.1.pep
MDPKGKGIVINDKEKESFVNEPRDDKSNDSGSGHRRKDGKKKTRHIKEIVYYDSDESTSSQKDDDHNEYERKKPVNSNFSFDYSRIPQSTNAHLLSIPLGKPPHFDGEYYGFWSHKMRSHLFSLHPSIWEIVESGMHFDSTDSPMFINEQIHKNAQATTVLLASLCRDEYHKVSGLDNAKQIWDTLKISHEGNDVTLLTKMELVEGELGRFAMIRGEEPTQTYNRLKTLINKIRSYGSTRWTDHDVVRLMLRSFTVLDPHLVNNIRENPRYTKMSPEEVLGKFVSGRMMIKEARYVDDALNGPIHEPQPIALKATRSKEALPSKVAQVEAVGLNNEEMALIIKRFKTALKGRKGQTSKTKTKEKRSCFKCGKIGHFIAKCPDNESDQEKGNKREKKKHYKKAKGEAHIGKEWDSDCSSSDSDNEGLAATAFSKSSLFPNERHTCLMAREKKVSTHDTSTYASSSEDESSDDDEIDYSCLFKGLDRSKINKINELIDALNDKNRLLEKQEDLLYEEHDKFVSAQNSLALEIKRNEMLSSELSTCHESISKLKSVNDDLNAKLEIASKSTSCVEIVETCNRCKDFDIDACSEHLVSISKLNDELASLNAQLKTSKSNFDKLKFARDAYTIGRHPSIKDGLGYKKEAKNFTSHKAPISAKEKGKAPMASSEQKNHAFMYHDRRQSRNAYRRCNAYDAFDSHDMFASSSSYVHDRNVGYASGGSSWIIDSGCTNHMTGEKKMFTSYVKNKDSQDSIIFGDGNQGKVKGLVESLGYNLLSVSQLCNMGYNCLFTNVDVSVFRRSDGSLAFKGVLDGKLYLVDFAKEEAGLDACLIAKTSMGWLWHRRLAHVGMKNLHKLLKGEHVIGLTNVQFEKDRPCAACQAGKQVGGAHHSKNVMTTSRPLELLHMDLFGPVAYLSIGGCKYGLVIVDDFSRFTWVFFLQDKSETQGTLKRFLRRAQNEFELKVKKIRSDNGSEFKNLQVEEFLEEEGIKHEFSTPYTPQQNGVVERKNRTLIDMARTMLGEFKTPERFWSEAVNTACHAINRVYLHRLLKKTSYELLTGNKPNVSYFRVFGSRCYILVKKGRNSKFAPKAVEGFLLGYDSNTKAYRVFNKSSGLVEVSSDVVFDETNGSPREQVVDCDDVDEEDVPTAAIRTMAIGEVRPQEQDERDQPSSSTTVHPPTQDDEQVHQKEACDQGGAQDDHVMEEEAQPAPPTQVRAVIQRDHPVDQILGDISKGVTTRSRLVNFCEHYSFVSSIEPFRVEEALLDPDWVLAMQEELNNFKRNEVWTLVPRPKQNVVGTKWVFRNKQDEHGVVTRNKARLVAKGYAQVAGLDFEETFAPVARLESIHILLAYVAHHSFRLYQMDVKSAFLNGPIKEEVYVEQPLGFEDERYPDHVCKLSKALYGLKQAPRAWYECLRDFLIANAFKVGKADPTLFTKTCDGDLFVCQIYVDDIIFGSTNQKSCEEFSRVMMQKFEMSMMGELNYFLGFQVKQLKDGTFISQTKYTQDLLKRFGMKDAKPAKTPMGTDGHTDLNKGGKSVDQKAYRSMIGSLLYLCASRPDIMLSVCKCARFQSDPNECHLVAVKRILRYLVATPCFGLWYLKGSTFDLVGYSDSDYAGCKVDRKSTSGTCQFLGRSLVSWNSKKQTSVALSTAEAEYVAAGQCCAQLLWMRQTLRDFGYNLSKVPLLCDNESAIRMAENPVEHSRTKHIDIRHHFLRDHQQKGDIEVFHVSTENQLADIFTKPLDEKTFCRLRSELNVLDSRNLD

SEQ ID NO: 316266 - protein, 1163 aa, Zea mays
  Clone ID: MRT4577_51503C.1.pep
MDFPPPSDHPAAAALGTTSAAGLGAAPAVSGAGAAGLGMAAAAGHHVAAGAPTAASTRAADLAAVHRTSAATSVEHHNAAGAPTRASTRAADFGPSGFGLLGYPTCAGVFTCLPLPTRLTGHPPPGFPPTRPLVADATWASPPPSTDSTLPSTIAAIQAALAASQERERAASRALDQERALAATLTAQMATVQRLILSPPPVDSGTPPPTPDATHASGLEADHIAALHAQAAGLQNIWSLVFFLQDKSETQGTLKRFLRRAQNEFELKVKKIRSDNGSEFKNLQVEEFLEEEGIKHEFSAPYTPQQNGVVERKNMTLIDMARTMLGEFKTPECFWSEAVNTACHAINRVYLHRLLKKTSYELLTGNKPNVSYFRVFGSKCYILVKKGRNSKFAPKAVEGFLLGYDSNTKAYRVFNKSSGLVEVSSDVVFDETNGSPREQVVDCDDVDEEDVPTAAIRTMAIGEVRPQEQDERDQPSSSTTVHPPTQDDEQVHQKEACDQGGAQDDQVMEEEAQPAPPTQVRAVIQRDHPVDQILGDISKGVTTRSRLVNFCEHYSFVSSIEPFRVDEALLDPDWVLAMQEELNNFKRNEVWTLVPRPKQNVVGTKWVFRNKQDEHGVVTRNKARLVAKGYAQVAGLDFEETFAPVARLESIRILLAYVAHHSFRLFQMDVKSAFLNGPIKEEVYVEQPPGFEDERYPDHVCKLSKALYGLKQAPRAWYECLRDFLIVNSFKVGKADPTLFTKTCDGDLFVCQIYVDDIIFGSTNQKSCEEFSRVMTQKFEMSMMGELNYFLGFQVKQLKDGTFISQTKYTQDLLKRFGMKDAKPAKTPMGTDGHTDLNKGGKSVDQKAYRSMIGSLLYLCASRPDIMLSVCMCARFQSDPKECHLVAVKRILRYLVATPCFGLWYPKGSTFDLVGYSDSDYAGCKVDRKSTSGTCQFLGRSLVSWNSKKQTSVALSTAEAEYVAAGQCCAQLLWMRQTLRDFGYNLSKVPLLCDNESAIRMVENPVEHSRTKHIDIRHHFLRDHQQKGDIEVFHVSTENQLADIFTKPLDEKTFCRLRKEGELVDFQKNCLVILDILPNGMVIPAGVQAYLAGLTFVLSALPCSTPILATLLGYVDTSRDPIIGGSLLLTYTTDYVARLPTIASFARALQVTVGSWCSNSMRW

SEQ ID NO: 316267 - protein, 130 aa, Zea mays
  Clone ID: MRT4577_51504C.1.pep
SPSLSPLRQMRICACGRPRFWNSTVYNTAAGRQINKEVVSQLHGALPTRNSHQSNGKRQTLTLSHRSKTAGSGVQPTAAPAQPQDDGQPPSPNFVTAARQRQAGRASDLAKRDAAERKGRSGEEGTNEKQ

SEQ ID NO: 316268 - protein, 1051 aa, Zea mays
  unsure (1)..(1051): unsure at all Xaa locations
  Clone ID: MRT4577_51505C.1.pep
DPTRVGHLSPKPKFALQVYASGGSSWIIDSGCTNHITGEKKMFTSYVKNKDSQDSIIFGDGNQGKVKGLGKIAISNEHSISNVFLVESLGYNLLSVSQLCNMGYNCLFTNVDVSVFRRSDGSLAFKGVLDGKLYLVDFAKEEAGLDACXIAKTSMGWLWHRRLAHVGMKNLHKLLKGEHVIGLTNVQFEKDRPCAACQAGKQVGRAHHSKNVMTTSRPLELLHMDLFGPVAYLSIGGSKYGLVIVDDFSRFTWVFFLQDKSETHGTLKRFLRRAQNEFELKVKKIRSDNGSEFKNLQVEEFLEEEGIKHEFSAPYTPQQNGVVERKNRTLIDMARTMLGEFNTPERFWSEAVNTACHAINRVYLHRLLKKTSYELLTGNKPNVSYFRVFGSRCYILVKKGRNSKFAPKAVEGFLLGYDSNTKAYRVFNKSSGLVEVSSDVVFDETNGSPREQVVDCDDVDEEDVPTAAIRTMAIGEVRPQEQDERDQPSSSTMVHPPTQDDEQVHQQEAGDQGGAQDDHVMEEEAQPAPPTQVRAMIQRDHPVDQILGDISKGVTTRSRLVNFCEHYSFVSSIEPFRVEEALLDPDWVLAMQEELNNFKRNEVWTLVPRPKQNVVGTKWVFCNKQDEHGVVTRNKARLVAKGYAQVAGLDFEETFAPVARLESIRILLAYAAHHSFRLYQMDVKSAFLNGPIKEEVYVEQPPGFEDERYPDHVGKADPTLFTKTCDGDLFVCQIYVDDIIFGSTNQKSCEEFSRVMTQKFEMSMMGELNYFLGFQVKQLKDGTFISQTKYTQDLLKRFGMKDAKPAKTPMGIDGHTDLNKGGKSVDQKAYRSMIGSLLYLCASRPDIMLSVCMCARFQSDPKECHLVAVKRILRYLVATPCFRLWYPKGSTFDLVGYSDSDYAGCKVDRKSTSGTCQFLGRSLVSWNSKKQTSVALSTAEAEYVAAGQCCTQLLWMRQTLRDFGYNLSKVPLLCDNESAIRMAENPVEHSRTKHIDIRHHFLRDHQQKGDIEVFHVSTENQLADIFTKPLDEKTFCRLRSELNVLDSRNLD

SEQ ID NO: 316269 - protein, 173 aa, Zea mays
  Clone ID: MRT4577_51506C.1.pep
MTSQPTKPFSVSGKTAIVTGAGSGINFEFAKILLSKNCNIVIADLSLRPEAQDLVSQYSSSSSPRAVFIKTDVTSWKDLSNAFRTTVQEFGDLDIVCPGAGVYEPTWSHFWHPPGSPESKDDSEGDGYKLLDINLVHPIRATQMAISYWMHGPGAKASPDNPKREIHISFRCC

SEQ ID NO: 316270 - protein, 1838 aa, Zea mays
  Clone ID: MRT4577_51507C.1.pep
MDPKGKGIVINDKEKESFVNEPKDDKSNDSGSGHRRKDGKKKKTRRIKEIVYYDSDESSSSQKDDDNDYRKTVNSNFSFDYSCIPHSSNSHLLSIPLGKPPHFDGEDYGFWSHKMRSHLFSLHPSIWEIVENGMKFDSSDSPMFINEQIHKNAQATTVLLASLCRDEYNKVSGLDNAKQIWDTLKISHEGNDITMLTKMELVEGELGRFAMIRGEEPTQTYNRLKTLINKIRSYGSTRWTDHDVGRLMLRSFTVLDPHLVNNIRENPRYTKMTPEEVLGKFVSGRMMIKEARYVDDALNGPINEPQPIALKATRSKEALPSKVAQVEAAGLNNEEMALIIKRFKTALKGRKGQPNKTKTKEKRSCFKCGKIGHFIANCPDNESDQEKEDKREKKKHYKKAKGEAHIGKEWDSDCSSSDSDNEGLAATAFNKSTLFPNERHTCLMAREKKVCTQNPTYASFSEDESSDDDEIDYSCLFKGLDRSKIDKINELIDALNDKNRLLEKQEDLLYEEHDKFVEAQKSHALEVKRNEMLSCELSSCHETISSLKSINDDLNAKLEKSSKLTSCVEHVVICTRCKDFNVDACSEHLECISKLNDEVASLNAQLKTSKSDLDKLKFARDAYTIGRHPSIKDGLGFKREVKNLTSHKAPISAKEKGKAPMASSVQKNHAFMYHDRRQTRNAYRSFNAYDDFDSHVMFASSSSYVHDRNVDRRNVVHNMPRRNVVNVPRKVMNGPSTIYHALNASFAICRKDRKIVARKLGAKCKGDKTCIWVPKEICANLVGPNMSWVYASGGSSWIIDSGCTNHMTGEKKMFTSYVRNKDSQDSIIFGDGNQGKVKGLVESLGYNLLSVSQLCNMGYNCLFTNVDVSVFRRSDGSLAFKGVLDGKLYLVDFAKEEAGLDACLIAKTSMGWLWHRRLAHVGMKNLHKLLKGEHVIGLTNVHFEKDRPCAACQAGKQVGGAHHSKNVMTTSRPLELLHMDLFGPVAYLSIGGSKYGLVIVDDFSRFTWVFFLQDKSETQGTLKRFLRRAQNEFELKVKKIRSDNGSEFKNLQVEEFLEEEGIKHEFSAPYTPQQNGVVERKNRTLIDMARTMLGEFKTPERFWSEAVNTACHAINRVYLHRLLKKTSYELLTGNKPNVSYFRVFGSKCYILVKKGRNSKFAPKAVEGFLLGYDSNTKAYRVFNKSSGLVEVSSDVVFDETNGSPREQVVDCDDVDEEDVPTAAIRTMAIGEVRPQEQDERDQPSSSTMVHPPTQDDEQVHHQEACDQGGAQDDHVMEEEAELAPPTQVRAMIQRDHPVDQILGDISKGVTTRSRLVNFCEHYSFVSSIEPFRVEEALLDPDWVLAMQEELNNFKRNEVWTLVPRPKQNVVGTKWVFRNKQDEHGVVTRNKARLVAKGYAQVAGLDFEETFAPVARLESIRILLAYAAHHSFRLYQMDVKSAFLNGPIKEEVYVEQPPGFEDERYPDHVCKLSKALYGLKQAPRAWYECLRDFLIVNAFKVGKADPTLFTKTCDGDLFVCQIYVDDIIFGSTNQKSCEEFSRVMTQKFEMSMMGELNYFLGFQVKQLKDGTFISQTKYTQDLLKRFGMKDAKPAKTPMGTDGHTDLNKGGKSVDQKAYRSMIGSLLYLCASRPDIMLSVCMCARLQSDPKECHLVAVKRILRYLVATPCLGLWYPKGSTFDLVGYSDSDYAGCKVDRKSTSGMCQFLGRSLVSWNSKKQTSVALSTAEAEYVAAGQCCTQLLWMRQTLRDFGYNLSKVPLLCDNESAIRMAENPVEHSRTKHIDIRHHFLRDHQQKGDIEVFHVSTENQLADIFTKPLDEKTFCRLRSELNVLDSRNLD

SEQ ID NO: 316271 - protein, 80 aa, Zea mays
  unsure (1)..(80): unsure at all Xaa locations
  Clone ID: MRT4577_51508C.1.pep
AKFDDKVFSREKNQKVKKAQGXFFRXKKEASKSLPVFKKDDPKAVDFALVKAIXGVPELKTYFGARFSFRDGGKPPEMVF

SEQ ID NO: 316272 - protein, 101 aa, Zea mays
  Clone ID: MRT4577_51509C.1.pep
QWEVPFFFSISEFKERPLWFQTEGCNLAFKSSTNKNLFGGVHRPPVVRFLNTCINEKRAGTLPEIIPCLLFFLLKKKKPKKKKKKKKKKKKKKKLEKGSRY

SEQ ID NO: 316273 - protein, 210 aa, Zea mays
  unsure (1)..(210): unsure at all Xaa locations
  Clone ID: MRT4577_5150C.1.pep
ESLIKKXQKEISSLKXELQQLRRGMMGNGGILPTDQEDLVNLKLQLEAGQVKLQSRLEQEEEAKAALMGRIQRLTKLILVSTKSSISSNVSGKTNFRRRHSFGEDELVYLPDRKREYFVDDDDVSLDSELSLEGKLDLNNPEESARFGRRNHKRGMLGWFKLKKSDQLSGLSSSVDGDSTASVSPSCSKSSQQKHLLLDLKDGRRKSMTR

SEQ ID NO: 316274 - protein, 251 aa, Zea mays
  unsure (1)..(251): unsure at all Xaa locations
  Clone ID: MRT4577_51510C.1.pep
MSSFSTEPITLLRCRTAERQYTMPGKGHEQRILIYLGTKHSCVSVWEQYRCKIIGNHQGXRTTPSYFHFTVCERLMXNACKNQVAMNFIITVFDVITCISMRFTDALAKDIKVRPFKVISGPGEKLMIVVQHKGEEKQLAAEEISSMALIKMREIAEAYLGSTIKNAVGTVPAYFNDSQRQATKDAGVIAGLNVLRIINEPTAAAIAYGLDKKATSXVGEKXNVLIFDLESDTFDVPXTPIEEXIFDVKPQ

SEQ ID NO: 316275 - protein, 90 aa, Zea mays
  Clone ID: MRT4577_51511C.1.pep
MSDVQQRIDQLVKTNDILLFMKGNASFPMCGFSGRAVQILKACGVDPKNIATVNVLDDQEIRQGIKDYSHWPTIPQLYVKGEFIGGSDIM

SEQ ID NO: 316276 - protein, 86 aa, Zea mays
  Clone ID: MRT4577_51512C.1.pep
KQASYGLSYCSELWPVPCHGHLPRHQSGSYNITIASYRSQSPVATATDETSRGAVGTDERRDPRLAPAPTEAEVEQKVETLRCVLQ

SEQ ID NO: 316277 - protein, 216 aa, Zea mays
  unsure (1)..(216): unsure at all Xaa locations
  Clone ID: MRT4577_51513C.1.pep
SPRPACVSAPPHPQPVSARRRPSRLRERGAPLRRSDRELQAKRRGEPIRNHHGSGSRRLRSRRSCGRHVHLRPLISCSLCKETIERVRWDLHKGEKCLQRIVACEYCEFELPAVDLHEHQDVCGNRTELCQTCRKYIRLCEWIGHEIQCHTSSNGSXTHPVPEQFQRENYDRRRRCGXRPARPAHASPHKRLLFTIAVTGIAVMVGSILFQRDESF

SEQ ID NO: 316278 - protein, 208 aa, Zea mays
  Clone ID: MRT4577_51514C.1.pep
MAAAAADSDPAAAVADMSTCAHCQREIPSSNIDLHSVHCARNLQKCQHCGEMIPRKLMDEHYDANHAPISCSLCKETIERVRWDLHKGEKCPQRIIACEYCEFELPAVDLHEHQDVCGNRTELCQTCRKYIRLREWIGHEIQCHTSSNGSADTSRFSANLIDVFKCQSNSRERTTTAAAGAAGTTSTCSCFTTQAASLHNRCHWNSSY

SEQ ID NO: 316279 - protein, 210 aa, Zea mays
  unsure (1)..(210): unsure at all Xaa locations
  Clone ID: MRT4577_51515C.1.pep
MAAAAADSDPAAAVADMSTCAHCQREIPSSNIDLHSVHCARNLQKCQHCGEMIPRKLMDEHYDANHAPISCSLCKETIERVRWDLHKGEKCPQRIVACEYCEFELPAVDLHEHQDVCGNRTELCQTCRKYIRLCEWIGHEIQCHTSSNGSXTHPVPEQFQRESYDRRRRCGXRPARPAHASPHKRLLFTIAVTGIAVMVGSILFQRDESF

SEQ ID NO: 316280 - protein, 64 aa, Zea mays
  Clone ID: MRT4577_51516C.1.pep
LEAQAASYQKQGSIAQGKYKHQQRQNGPRGWYASSSNTATIRKGTPNSSGSACPRTTRLDTVTA

SEQ ID NO: 316281 - protein, 252 aa, Zea mays
  Clone ID: MRT4577_51517C.1.pep
RGRPELLKRVSPTYYHALFAMSITSFDTAPGRGGFLTFNSSPPRIYLTSTYPAPEKALLAWQEEGYDAQFLPYEPRKQSQTEYVNTIRKLTETCRLGEHYAIIAYGEAASLVLKTAQKPLAKCCAIVAFYPTLLPSPKTMYPRSHQLQVHVACLSQASARPEMCEWKLYRYERCASGFLDPSSPAYSEVEANLAWTRALASIRKGFGKNVDLEPIAIAHWNARFEDDDPDRASMAVAKNMTQDSPHVTILPQ

SEQ ID NO: 316282 - protein, 73 aa, Zea mays
  unsure (1)..(73): unsure at all Xaa locations
  Clone ID: MRT4577_51518C.1.pep
PLGLARDPDQAAILKVKEIKNGRRAMFSMLAFFIQAXVPGEGPVGNLAKPLRDPLGNNLVPVISGAPEGTPSL

SEQ ID NO: 316283 - protein, 111 aa, Zea mays
  Clone ID: MRT4577_51519C.1.pep
FHQLSFGRRHTIFIPSFSSLRKALSTHRVVRPRDPKGNLVQAKASWLMMPHLTVSSVHSPHRFSCMPSKPSPGSFVGSLACALQAYHLFSKCPLKFCGAVGKKRCLKPRAE

SEQ ID NO: 316284 - protein, 102 aa, Zea mays
  Clone ID: MRT4577_5151C.1.pep
GAVHECLSESGSIPAVSRHVLRCMRLTQKRSTRDRSASSRHASSLSNDRHARPASSSICFRRLQLSRATTTLLTVVGGSGKRTEQINGHVRKGSCCRASARS

SEQ ID NO: 316285 - protein, 76 aa, Zea mays
  unsure (1)..(76): unsure at all Xaa locations
  Clone ID: MRT4577_51520C.1.pep
STGSHQNSEVKRAWARVVLGWVYLCPEPTCVHHDPSRALGDLTGIKKHYCRKHGEKSXKCDSXQQRYACXADWRRT

SEQ ID NO: 316286 - protein, 79 aa, Zea mays
  unsure (1)..(79): unsure at all Xaa locations
  Clone ID: MRT4577_51521C.1.pep
HRATGLSPRIARLTSAGGAPGKTTREAAEKPTPLKPASPGRRRPRPPPPRGRAASCAKGRENNPKEGHXQGQKKKRPFL

SEQ ID NO: 316287 - protein, 515 aa, Zea mays
  Clone ID: MRT4577_51522C.1.pep
MYKNQLQELAQRSCFNLPSYTCLREGPDHAPRFKAAVNFNGEQFESPGFFSTLRQAEHAAAEVALAALARRGPSYSLAARILDETGVYKNLLQEVAQRVGAPLPLYTTERSGVGHLPVFTCTVELAGITFTGDHAKNKKQAEKNAASAAWSALKQLVREEVNSSNETENSDEQEQIRIARALLNYRLKEKMAMANYPHVSPFPKKFPMQPERKPSFGQSSQSSYSKILPLFRPKSNSRSRPESPASTDGASQMPGRAMDIHTPSPRSRFPAAEAAPYVPVGHFRMPCHSMAPSVTIRTAVPVFSAPPLPPPSARPQQLPPLMSHPPPIRMASPVRMRPASPMFASSAPAQGPKLVRPVQLKDVQDQPRKETAPSVIPVQVKDVQYQSRKSSMSPVIPVLVKDAQRQPLPVQTKDVQTQTQAPKESLADPIPAIRPAVKIDLPAQGKKEASAGATSEAPSSATGNNGAMERGTSSDVLLARRSRAAADGDGDKVEAKHEAEAQAVAEAAIRQLEIN

SEQ ID NO: 316288 - protein, 169 aa, Zea mays
  Clone ID: MRT4577_51523C.1.pep
SNDFKDIFDVDHFKESLKEDIVIVDSLPPHYRRVKPYVRAPTSWSRASFYRDFAKILRKFKVVRLTHTDSRIVNNGLAPSLQKLRCRANYEALQYRKEIEELGNTLVDRLRNESQHYIALHLRYEKDMLAFTGCNHNLTLDEAAELTDMRFKVRHWKEKDINSEERRLQ

SEQ ID NO: 316289 - protein, 68 aa, Zea mays
  Clone ID: MRT4577_51524C.1.pep
LILRRLYLPLSNFGIIFTHILFAKGEKVVKKGFYFTQISIFWRFMLKGEKSISPKQKDRTTTNFQNLS

SEQ ID NO: 316290 - protein, 98 aa, Zea mays
  unsure (1)..(98): unsure at all Xaa locations
  Clone ID: MRT4577_51525C.1.pep
RTLGRKRGLPRNGWISCDEFSKVGFVYRENSSSPCHYECRYRTMLKLPMFCCIYATQVSTDLHDAIKSYPDAFHGVSXFYNIKHTHFVSFITYKPPGS

SEQ ID NO: 316291 - protein, 86 aa, Zea mays
  unsure (1)..(86): unsure at all Xaa locations
  Clone ID: MRT4577_51526C.1.pep
MDDPSSGFNKHKHKRGRKAKALSAFPDHSFPSPSVGPAPAGRRGRKPRHHEALADVDATRSPYXPRRGEPKPVANRGDVVAMAESG

SEQ ID NO: 316292 - protein, 90 aa, Zea mays
  Clone ID: MRT4577_51527C.1.pep
KKKKFFPFNKWAALNPVVFLQQQILLPFSQLVKASGASFLKKKKLLRFYKQFGVNPATFLKVKQLLPFVQLVLTNQEASYQKKIIGGALF

SEQ ID NO: 316293 - protein, 80 aa, Zea mays
  Clone ID: MRT4577_51528C.1.pep
ETEYAADISPEYQTKAGLILARVRTCARPYRPAGLRRQPDHVRSGAAGHQVYMYNMTGCTLLRLRVPTTIMMAAIRQLMG

SEQ ID NO: 316294 - protein, 95 aa, Zea mays
  unsure (1)..(95): unsure at all Xaa locations
  Clone ID: MRT4577_51529C.1.pep
SDLVARVTPGLVGADLANVVNESAILAARRGXGQPVSREDIMDAVEREKYGVTGRQEADSERQGLTQLFPWRSKPGNKPSSPDDFRGLMGYHTLS

SEQ ID NO: 316295 - protein, 93 aa, Zea mays
  unsure (1)..(93): unsure at all Xaa locations
  Clone ID: MRT4577_5152C.1.pep
DIYRRGARTKGALVDVAYCEELGVSLLEAAMNGXLFMRHKXGSPVEIDQVQYNGXLSDPDDQIASDAALYKLPFNEHLWSRRRQNGLTNTDQI

SEQ ID NO: 316296 - protein, 58 aa, Zea mays
  Clone ID: MRT4577_51530C.1.pep
VLARDELSMCTVHLSSDMDYHGDRVDINMLSSTCLLDRFLFFVSCKSYGGNKNEKNHG

SEQ ID NO: 316297 - protein, 61 aa, Zea mays
  Clone ID: MRT4577_51531C.1.pep
SLINGPEKGGNVFTCLPRLCWNQNALTLNGNFHVYFPDNKVNGKKKHFRCLRAFDQTPSFL

SEQ ID NO: 316298 - protein, 63 aa, Zea mays
  Clone ID: MRT4577_51532C.1.pep
MLPLVLFFSFFVLFLFLFYSYPCACKKKKIERKQKKNKKKKKKKKKKKKKKKKKKKKKKKKKK

SEQ ID NO: 316299 - protein, 87 aa, Zea mays
  unsure (1)..(87): unsure at all Xaa locations
  Clone ID: MRT4577_51533C.1.pep
KITFYFLITRRRKFNKKPLFVGRFRGGTKKFSYIRIHGWVDKVLIEKKLKGERVYKKSTYLXGRGMVCENNNGFIYVQKNGLKQQGE

SEQ ID NO: 316300 - protein, 69 aa, Zea mays
  unsure (1)..(69): unsure at all Xaa locations
  Clone ID: MRT4577_51534C.1.pep
SPGVWDXRRRAARPCSPHGRRAARGWVSREMWRILPISSEFGDPGSRTGTEEWRDVGEGGKGARRLRIS

SEQ ID NO: 316301 - protein, 150 aa, Zea mays
  Clone ID: MRT4577_51535C.1.pep
NQINLCIGGQTNLGEPNFRRDNTRNEGDGQAHQTRGGGRPTLTYKNEHGLFPIAPRPLYLMPYFEPKKNRAAGIDGPHMAQSKGAYSTDRPPTPMNPGGDNRYYGPYLLEGRERSALKTRAYHWEKHGVQRGSVAPQQTLLEGQLTAPMQ

SEQ ID NO: 316302 - protein, 78 aa, Zea mays
  Clone ID: MRT4577_51536C.1.pep
STFASTRASTRPSIMDTRGWVSRPIDSGRVAASVTARGGRSCAALLLHVRHRQERWGSGGIAPTVESHQQGGRVHLQC

SEQ ID NO: 316303 - protein, 130 aa, Zea mays
  unsure (1)..(130): unsure at all Xaa locations
  Clone ID: MRT4577_51537C.1.pep
VRPVLIXKLESCLEENGLRQDSIVMRMTGCPNGCARPWLAEVAFVGKAYGAYNMYLGGGYHGQRLNKLYRQSIKEDEILAIMKPLLKRYALERNEGERFGDFCVRSGIIVATTDGQNFHDNVAEEEEDEE

SEQ ID NO: 316304 - protein, 240 aa, Zea mays
  Clone ID: MRT4577_51538C.1.pep
MTADSTIPSQAAVASQNNTSNGQPRTKICVYCGSAPGASPAHIEAARALGKAMAENNIDLVYGGGTVGLMGEVAKSLCAINGPDSVHGIIPEALVKYERDGTYGTVNEHNHIVPEESVYGHTTVVKDMHTRKKLMAEEVFAGGPGSGFIGLSGGFGTMEEIFETTTWNQLGIHNRGIVLLNIEGYWDGIVQWMDRAAEQGFVKPANKDILVNADTPEGAIQALRDYKVSDAIYQLQWGSQ

SEQ ID NO: 316305 - protein, 79 aa, Zea mays
  Clone ID: MRT4577_51539C.1.pep
KKNVTVHSANVTTTTTPQTKTLLALYTHTHTQRERERELQDRSCWMAAFWSPVRLVGNLIWNLILRLPFLDGSLVIGMP

SEQ ID NO: 316306 - protein, 79 aa, Zea mays
  unsure (1)..(79): unsure at all Xaa locations
  Clone ID: MRT4577_5153C.1.pep
CWAVVGLWCPSSVFKQLGPLELVVLDPGLFRSPFVFASPAKRVGSWYNYPVFVICFWCWXFKNRQCLKKNPPLVDRVWV

SEQ ID NO: 316307 - protein, 62 aa, Zea mays
  Clone ID: MRT4577_51540C.1.pep
VPYLTSRILSFGQGELHAGRGLVSRRQPPHSHQSHRRLRGKLESSSVTTSTAVPSLSRLLLR

SEQ ID NO: 316308 - protein, 276 aa, Zea mays
  unsure (1)..(276): unsure at all Xaa locations
  Clone ID: MRT4577_51541C.1.pep
MTAPKPGGGAVAAARAAAAGPRTVLMTGVSRGLGRALALELARRGHAVVGCGRSAEQLRSLEAEITSPSRHFLTVADVRSDSSMSELAKAVLEKKQVPDIIVNNAGTINKNNKTWNLPVEDFDMVVDTNIKGTANVLRHFVPLMIARRHGIIINLTSGWGRSAAAEVIPKATKCIIVDPFCXSKSLVXLNCTLPFQVAPYCASKWAIEGLTRSLAKELPPGIAAIALSPGVVNTDMLTSCFGSSAALYQTTETWAPKAATMILSLSLDDNGASLTV

SEQ ID NO: 316309 - protein, 51 aa, Zea mays
  unsure (1)..(51): unsure at all Xaa locations
  Clone ID: MRT4577_51542C.1.pep
WVDPRVRVFLLNIMKMTCAHCFHISGGVXRHLDFFYCFGCHKKCQVSFKVL

SEQ ID NO: 316310 - protein, 155 aa, Zea mays
  unsure (1)..(155): unsure at all Xaa locations
  Clone ID: MRT4577_51543C.1.pep
MSELAKAVLEKKQVPDIIVNNAGTINKNNKTWNVPVEDFDMVVDTNIKGTANVLRHFVPLMIARRHGIIINLXPLVAPYCASKWAIEGLTRSLAKELPPGIAAIALSPGVVNTDMLTSCFGSSAALYQTTETWAPKAATMILSLSLDDNGASLTV

SEQ ID NO: 316311 - protein, 61 aa, Zea mays
  Clone ID: MRT4577_51544C.1.pep
LISLSSTKVFRISFIGWFIVHVCSCILRFIFLHTLCVIFMIPVPSAYFLKKEWTDEWEDAW

SEQ ID NO: 316312 - protein, 115 aa, Zea mays
  unsure (1)..(115): unsure at all Xaa locations
  Clone ID: MRT4577_51545C.1.pep
GTANVLRHFVPLMIEKRHGIXINLSSGWGRSAAAEVAPYCASKWAIEGLTRSLAKELPPGLAAIALSPGVVNTDMLNSCFGSSAALYQTTETWAPKAATMILSLSLDDNGASLTV

SEQ ID NO: 316313 - protein, 54 aa, Zea mays
  Clone ID: MRT4577_51546C.1.pep
FDSSENELAMLDLVQVFVETLDMCFKNVCELDIVFNFNKAAEMVMQLLCPSRSR

SEQ ID NO: 316314 - protein, 72 aa, Zea mays
  Clone ID: MRT4577_51547C.1.pep
LSRYNTSTICSWKRLLALIQQWEVSWDDTLDPAVSYKIGQVVDAKVIHLDYNNSRIFLSLKDVKARFHKLRE

SEQ ID NO: 316315 - protein, 65 aa, Zea mays
  Clone ID: MRT4577_51548C.1.pep
LPRLARLRIERGERKALGSSTLPLGSPLLRHALSMGDCWCGQRRHRDGLRKGSTTPMSRCGRRGS

SEQ ID NO: 316316 - protein, 48 aa, Zea mays
  Clone ID: MRT4577_51549C.1.pep
MNKVGPTPALFKAEMPWSARRGNLSEKQRVFKTVKGGSFIAYLMQCSL

SEQ ID NO: 316317 - protein, 357 aa, Zea mays
  Clone ID: MRT4577_5154C.1.pep
MEAPAPWRVLEFYSGIGGLRYSLMASGVRTEVVEAFDINDVANDVYEHNFGHRPCQGNIQTLTASDLDKYKAHAWLLSPPCQPYTRQGLQKHSADARAFSFIKILNLMQDMSYPPQMLFVENVVGFEVSDTHDQLLEVLSSLNFNTQEFILSPLQFGVPYSRPRYFCLAKREPVRFRHAFVNNKLLQTPMCLSLTLSSTSQGSDHQTEEELEPVCKPIKDFLVKEADGGTPDETVLQDYMVPVNLIERWGNAMDIVYPEFKRCCCFTKSYYRYVKGTGSLLATSKNLNVPEEKLQISSLKELGLRFFTPREVANFHSFPSNFCFPDHISLRQQYAMLGNSLSIAVVGPLLHYLFAEA

SEQ ID NO: 316318 - protein, 164 aa, Zea mays
  unsure (1)..(164): unsure at all Xaa locations
  Clone ID: MRT4577_51550C.1.pep
MAKEPMRVLVTGAAGQIGYALVPMIARGVMLGADQPGILHMLDISPAAEALNGGKKEVGDAAVPFLKGGGGTTEGGEARTGGKGGRMGGGIPKKGGMGREEGIFKKGLIYQIQAXALEAKPVPTGRVWGVATPQTPMVLIWKELVPLFPKRNVICLTRLNTTRV

SEQ ID NO: 316319 - protein, 82 aa, Zea mays
  Clone ID: MRT4577_51551C.1.pep
SNKTGGVPPRFGGKWGEIVITIKEGTKVDLRRVPRFPKVAGYSPSMAAPKGSLFVNKPPQQPVKPVCNQAKTVPVGIQQKSC

SEQ ID NO: 316320 - protein, 33 aa, Zea mays
  Clone ID: MRT4577_51552C.1.pep
RLSRYSLCVVSPSSSYHSSHASVHFNIAKFMAT

SEQ ID NO: 316321 - protein, 87 aa, Zea mays
  Clone ID: MRT4577_51553C.1.pep
FSITYAGLLLTAISRQWREICHSLYTVGRIKRRRHRQSETCNTFTERIYIVMPRYIVAWVRFRYSHGTACPPLALSIDNARCSSGCW

SEQ ID NO: 316322 - protein, 69 aa, Zea mays
  Clone ID: MRT4577_51554C.1.pep
LYQRTCAPPRDPSVGPKCFYVLLFLEFIKPSLVPLELQNNKKKKKKKKKRKKKKVSALLPVKGESSPGG

SEQ ID NO: 316323 - protein, 51 aa, Zea mays
  Clone ID: MRT4577_51555C.1.pep
FLTRDLMNMNLLISARSLIFSSAQVYRWQLIAAVDKQFYTRSGHEIFDSDE

SEQ ID NO: 316324 - protein, 223 aa, Zea mays
  unsure (1)..(223): unsure at all Xaa locations
  Clone ID: MRT4577_51556C.1.pep
SDRDSSRDCWRMSDGNNFRVRSKNFVYDKSKIPAGKPLMELVAVDWFKDAKRMDHVARRKGCAVQVAAEKGLFALAINLQVPXHYSMVFYFVTKKLIPNSLLQRFVDGDDEFRNSRFKLIPSVPKGSWIVRQSVGSTPCLLGKAVDITYIRGSNCGEIDVDIGSSTVANGVLGLVCGAITTLVVDMAFLVQANTYDEFPERLIGAVRMSHIELSSAIVPVLED

SEQ ID NO: 316325 - protein, 154 aa, Zea mays
  unsure (1)..(154): unsure at all Xaa locations
  Clone ID: MRT4577_51557C.1.pep
CDSLYKATRLHGVLLEVAHVPFLKDRYALCLQLECIQFGIIRSCSDLVTGKALACKSIAKVRLVSAADMHGVKLKIEVMTLLGGQPNIVXLKAVYEDRDSVHLIMELCAGGELFHRLQERDCFSERERVLNGEAKYDRKIVTISSIDGKDNKLC

SEQ ID NO: 316326 - protein, 119 aa, Zea mays
  Clone ID: MRT4577_51558C.1.pep
MHDFCFTIPYGFAVLAGGVLGYLRRGSTASLAGGAGAGALLLLAGFVSLKAFEKRRNSYVALALETLCALALTFVMGQRFLETSKIMPAGVVAGLSAVMSAFYLFKIASGGNHIPPKKE

SEQ ID NO: 316327 - protein, 88 aa, Zea mays
  Clone ID: MRT4577_51559C.1.pep
SSLVGGRPSLLCRSLRLLGRFKAFDERTGPHTHATGERCDYHLLLTDAYLKARKKNNWTIGKCFNCGNRGHFAQDCPKPKKEEALFDN

SEQ ID NO: 316328 - protein, 60 aa, Zea mays
  Clone ID: MRT4577_5155C.1.pep
GGGGVVLRGKKGQLVKVVQRKDKGNKTYIGGKKGDAQKKLIIKGPRRRIKGPKVLGSGVF

SEQ ID NO: 316329 - protein, 43 aa, Zea mays
  Clone ID: MRT4577_51560C.1.pep
MGLAHLSVQAVKLQQAAVVRVLQHPIKQSQLQFLAHVTMPTIS

SEQ ID NO: 316330 - protein, 98 aa, Zea mays
  unsure (1)..(98): unsure at all Xaa locations
  Clone ID: MRT4577_51561C.1.pep
ICXKKIKKKKKKKKKKKKKKKKKKKKKKKKKKKKKKKKKKKKKKKKGGGGSFFPNKVPAFSPRGLRNSFFPLPKTPPGNPRGVPPRNPGYSPRGPGIF

SEQ ID NO: 316331 - protein, 87 aa, Zea mays
  unsure (1)..(87): unsure at all Xaa locations
  Clone ID: MRT4577_51562C.1.pep
GPTIYSLVWTCIRKCSXKKKKKKKKKKKKKKKKKKKKKKKKKKKKKKKKKKKKKKKKKKKKKGGPGTHSRPRPRWEKKVGNPQWGTD

SEQ ID NO: 316332 - protein, 125 aa, Zea mays
  unsure (1)..(125): unsure at all Xaa locations
  Clone ID: MRT4577_51563C.1.pep
HNQKIYKTRLAQVAVAYEPAWAYXTGQSFSPLAQDSRKYPPSWRDXLKTNARPEVATIYTIIYXSYMTGVNXKELAAQPDVDGGLVGGPYLKPVLIDMINAHNGEVWLTCSSEYEHTFFMINCAM

SEQ ID NO: 316333 - protein, 78 aa, Zea mays
  Clone ID: MRT4577_51564C.1.pep
FAPLFEQKGKLDEALSNIQFGQPWVEAQIDRQAILDENMSRGAGHKGLFESRGLIPPRVIQVYLLGRVFEGKLGTFWV

SEQ ID NO: 316334 - protein, 247 aa, Zea mays
  unsure (1)..(247): unsure at all Xaa locations
  Clone ID: MRT4577_51565C.1.pep
DFVLTQSGCGTRSGIVFPCGGPSEARATGAGASGTGISGARVFGLGTTGINGSGAHGSSSITMSSSESFSSSFGSISSISSSAGSXLSAKISSSDASVPSTETSSSERSYLEWFSSXESXSSAGSSVLTSYCSSATQFQLAGPSGCASNVSSSSDSRSQSSYPSKSSSDRACEGLASRLWEGPTSNDDGGNTPVLERGNTPVLIQMFPQVLFWTVKRVHAIIEEICLFCEKSHNKQITFLSLDDKPN

SEQ ID NO: 316335 - protein, 91 aa, Zea mays
  unsure (1)..(91): unsure at all Xaa locations
  Clone ID: MRT4577_51566C.1.pep
NGTGLRRCXALVPPLTGLPPTATGARRRASSTSQVQTISSSAWLTASAAVAGTRWPAQSLRWCHDRITCMAWPRGNNKMVVYASRVQYESP

SEQ ID NO: 316336 - protein, 83 aa, Zea mays
  Clone ID: MRT4577_51567C.1.pep
GNVQGKLFYGWNSLSWLRCRGSQMWIRWIPLGVCLPFVQKLAVLRQGKISFEVSTQFFENKPCIVSRQLGQRVSLLSPSWSAS

SEQ ID NO: 316337 - protein, 90 aa, Zea mays
  Clone ID: MRT4577_51568C.1.pep
VAPVSTKGAGVSMLAAAGTVSESAGPALALVYERMSTEGTGLSLGLSNNLLGWILLGVFGLIWSLYTIYTCDLDEDEESGGLWIRSTLSC

SEQ ID NO: 316338 - protein, 144 aa, Zea mays
  unsure (1)..(144): unsure at all Xaa locations
  Clone ID: MRT4577_51569C.1.pep
KVWKKTGSRWVPIKNKVFFFLGLNKLPPFXDQNFPRSGECQFSLNQKGFVLXTNFGPPYGGKSPKKSFLAKASEGPALAFGFKSNPPRGPLSIFKNLRGAGGGPPMIKKVFLIWDRGNLIGDFSRVPPFKKGGWFWGDFWGKGF

SEQ ID NO: 316339 - protein, 104 aa, Zea mays
  unsure (1)..(104): unsure at all Xaa locations
  Clone ID: MRT4577_5156C.1.pep
VDFSWPAVFKWVKPWENPSLTRLNRIPLYPVCVIWSRPEQTAIDNLCSPWLVIGAHREAPRNXAINRGVTRSVTHTLAITLQPPTSGFFPSFPFIFGGFPRLAL

SEQ ID NO: 316340 - protein, 121 aa, Zea mays
  Clone ID: MRT4577_51570C.1.pep
IRHEGRIRLNAILHLLASHPPQRRPATWILASRLRVRTSRSPRHASAAGHQLRRCLNNFIRSFEGATSFHSTSASAKTYTSAVATPVKKPYSLATIAGERRITAIKATKDAQAGNILSCCN

SEQ ID NO: 316341 - protein, 63 aa, Zea mays
  unsure (1)..(63): unsure at all Xaa locations
  Clone ID: MRT4577_51571C.1.pep
PPDGFLCPGGWKGLVXYYYSLGPSQGSSKLREPVSALNMGSGSDNEPSYISPNGFFCHKTGVV

SEQ ID NO: 316342 - protein, 117 aa, Zea mays
  Clone ID: MRT4577_51572C.1.pep
PRGGGAPRKQTLPKGGRKHHQAKQSQLYGAGRALNGRAGAHRQYVQRLMRRAGTRKVPQTAGLELGETTNHACLNTTTGNPYSEPHSTYNAWRRAGHSWRAPTQSRGGASRAYRRTH

SEQ ID NO: 316343 - protein, 81 aa, Zea mays
  Clone ID: MRT4577_51574C.1.pep
HAYRYHIKECTSCNKPLFMFDERSKTGKAVLDALCTYYPSIGGILLAMGNVGLFIHSLHGPVISTYCDRKHGLLPEIAQNL

SEQ ID NO: 316344 - protein, 83 aa, Zea mays
  unsure (1)..(83): unsure at all Xaa locations
  Clone ID: MRT4577_51575C.1.pep
XXAFXXSSXGAGGXTEGGXAXRYXXSIXYXLPQQIFSILAAASQXXFLLVDLXYXFAXXVLXVDMXDXPIXXXFXDDXAAXSV

SEQ ID NO: 316345 - protein, 220 aa, Zea mays
  unsure (1)..(220): unsure at all Xaa locations
  Clone ID: MRT4577_51576C.1.pep
NAAGVCRHRRCSPAFTAPNSPPCLPCALQPLHSPSFSPGQDLLGPWIKKKKLEVSNTSHTYKHHCSVGVDVHEIFFKRSRLRVVLSYIGIIFLLVNACQPLLTKESLSLGSVWNITFAVLVAKCLQYKPVKRESVVIMPAFGVQLEXTFLEILKPMINECVTPVTCYWSLALLLRDEEELLLVFQRSRPPVKMLVPIWKALCTLTNSQHPSPSQIPNHDP

SEQ ID NO: 316346 - protein, 82 aa, Zea mays
  Clone ID: MRT4577_51577C.1.pep
PPNYQLPAIFCQHTAVFARFCREEREEAATMDEPPPQSDDDRKLSRRSTPRSPRSVMRSSRRCSHPRDETKPALPYPMTIVT

SEQ ID NO: 316347 - protein, 84 aa, Zea mays
  unsure (1)..(84): unsure at all Xaa locations
  Clone ID: MRT4577_51578C.1.pep
MEALKRPGHXGYFLEXTGGDFLGEVTGRANVICHQHHRQCYRRKIKDKHLKALAPDYVGTKPGMLHAQNAPFFAAKLQITTLAC

SEQ ID NO: 316348 - protein, 273 aa, Zea mays
  Clone ID: MRT4577_51579C.1.pep
MSSNLFLDWSREWGIGAIAVSTENPDKARATHAPAASFLPSQRRRSLSPPSLLSRLHRAQLSSLPPLRASAASLPIVFAWPGSTGTMDQEKKLEVSNTSHTYKHHCSVGVDVHEIFFKRSRLRVVLSYIGIIFLLVNACQPLLTKESLSLGSVWNITFAVLVAKCLQYKPVKRESVVIMPAFGVQLEIHFWSGRVDHRFVPIGKILKPMINECVTPVTCYWSLALLLRDEEELLLVFQRSRPPVKMLVPIWKALCTLTNSQHPSPSQIPNHDP

SEQ ID NO: 316349 - protein, 121 aa, Zea mays
  unsure (1)..(121): unsure at all Xaa locations
  Clone ID: MRT4577_5157C.1.pep
MDFSDIFRMVNFAVXAFIVLGGVAKLFPFNDFSAXILGVYLIIFGAGTALLEFQIPPQIARYASFMFSFLGRGIFYVFIGCVTVGSGWYRYIPGTIVGIIGLAYIVLEYIPSIEPPANMRD

SEQ ID NO: 316350 - protein, 75 aa, Zea mays
  Clone ID: MRT4577_51580C.1.pep
HWFSYRSSRSQSCPFCRDNLKKTCPSDLWIYVEDQDVVDMETVSSENLRRLFMYISKLPLIVPDVIFSVYDSQIK

SEQ ID NO: 316351 - protein, 147 aa, Zea mays
  Clone ID: MRT4577_51581C.1.pep
MRTGTGGGATAGGKVKKSGYQYEEAYAGTGAGGYGAHYGGGPAVAQKQGYRQGIYESESESESESDESDCEEAFLPHGGVQHSYGYGGGAYMQEKHGAGNLGGVRRYESYESRDDLGGGRRYESSYQSTVQYTGSPTKNRHVLRYGA

SEQ ID NO: 316352 - protein, 274 aa, Zea mays
  unsure (1)..(274): unsure at all Xaa locations
  Clone ID: MRT4577_51582C.1.pep
LDLGRAEVLAAVTPTSRFVFDANFEPTIQSGHVNIQGSIPVTYVDNSSIEESPEEADGKQGIIRIPVWARDRGSSNEISEARMVRDKTEEGWEFQLAEKLKGLSYNMLEPGEVRIDADIKDGGMMLITALSPYANWLQGYADVLLQVKGTVDQPVVDGSATFNRAIVNSPFLRTPLTNFAGTIQVIFNRLCIRSMESRVGRKGRLSMKGSLPLKNSEPSANDKIDLKCEVLDIRAKNILSGQVDSQLQVTGSILRPDLSGMIRLSHGEAYXPHD

SEQ ID NO: 316353 - protein, 85 aa, Zea mays
  Clone ID: MRT4577_51583C.1.pep
KSALSRFGMIIHGVHRSAPNGCSPRPSNGFFKDNPFEGLPFEKIGMKLFASCFGGQHYVIKILLQRSAYILSLAAEFAIRPYLAR

SEQ ID NO: 316354 - protein, 112 aa, Zea mays
  Clone ID: MRT4577_51584C.1.pep
RCAAVAQKQGYRQGIYESESESESESESDESDCEEAFLPHGGRTPQGGVQHSYGYGGGAYKHGAGNLGGLRRYQSYESREDLGGGRRYETYQSTVQYTGSPTKNRHVLRYGA

SEQ ID NO: 316355 - protein, 472 aa, Zea mays
  unsure (1)..(472): unsure at all Xaa locations
  Clone ID: MRT4577_51585C.1.pep
MHSLVRRGNGYGYGYGGYGSSNPHMNYHRQNTESVTTVVTEMNRMAVDDKPCYGGGVQKQACKVEAFQEHDEXQGRRGRAAEALLLQGGQGGGARCCCRRQKLARRVIQGGGGGEARRXTEYGARYGGVAAVKKPGYNYKQHEAYGETEGAGYGYGAGGVKKQAGYSYAQEACGESYGGAHHGGAGAVAQTYAYDQQQAYKHKNAAGAGAGYGAPYGGGAVQQHDGHKDVYRHGAAAGGKVKKNGYQYQEAYGGTDAGGYGAHYGGGGGAVQQYGYGGATTDGKVKKGGHQYYGGSGAGGYDSHYGGGGGGAVQQYGGYHKDAYGYGGGATAGGKAKKSGYQYEEAYAGTGAGGYGAHYGGGAAVAQKQGYRQGIYESESESESESESDESDCEEAFLPHGGRTPQGGVQHSYGYGGGAYKHGAGNLGGLRRYQSYESREDLGGGRRYETYQSTVQYTGSPTKNRHVLRYGA

SEQ ID NO: 316356 - protein, 153 aa, Zea mays
  unsure (1)..(153): unsure at all Xaa locations
  Clone ID: MRT4577_51586C.1.pep
QVIEYLAYHDRTHVRSIWRVGSHLLGQXFDYPYMTLIWIKGFFVRKYSWSAIAGYTLKKGVYPVGSMFEQISFLDAPKKKDCVHIAENKEGGLAMVAFQGLSGQVSPSGKGPLFMWAFHLVPPAHSTYFCTLRRNFLKPAIRAFLCSFRKVVF

SEQ ID NO: 316357 - protein, 69 aa, Zea mays
  Clone ID: MRT4577_51587C.1.pep
WPSQFTPLFLRPQVTPCRFHLHVGWAPPNLPPLFIATTTSRPLTHSIMKPLTPLSTPPKLTLPLLYCTA

SEQ ID NO: 316358 - protein, 110 aa, Zea mays
  unsure (1)..(110): unsure at all Xaa locations
  Clone ID: MRT4577_51588C.1.pep
TKRPPTRPPTRPPTRPKNIKKNKKISKXGKKGNKKKNDQPFSKKDWXDIKATSVFTVHNXIGNTLVSRKQGMRIASEGLKHRIFEVCLTDLHGDDDKAYTKIMFHAEDVQ

SEQ ID NO: 316359 - protein, 56 aa, Zea mays
  Clone ID: MRT4577_51589C.1.pep
VVKKNTVFPIYRKPIHILWFGLSVFFLCGQIYIILYNQTPEENNKARHIDTTSFDT

SEQ ID NO: 316360 - protein, 56 aa, Zea mays
  Clone ID: MRT4577_5158C.1.pep
SVSGINKRSCYSRKKKKKKKKKKKKKKNFCLGVCLVCLTPRPPPSRKRRAAPRRAV

SEQ ID NO: 316361 - protein, 95 aa, Zea mays
  unsure (1)..(95): unsure at all Xaa locations
  Clone ID: MRT4577_51590C.1.pep
MEVAPAYYTVHILTYYSMCGPSRCDEFDGILLNIIDGRYLLPKNMLENLTTLNVPIKWYHVNKISXTDXAPNRFHITKAIVXNGYVENLRQPFNK

SEQ ID NO: 316362 - protein, 56 aa, Zea mays
  Clone ID: MRT4577_51591C.1.pep
AKAENDKYGPSIVHRKCLLFFGPKRCKTIRGPFFQAPAPDFFSFWRWSFISMTKIF

SEQ ID NO: 316363 - protein, 52 aa, Zea mays
  Clone ID: MRT4577_51592C.1.pep
SVNSNSTFSRNKDAKMVRYELELVGFLIRLFLNPRELKPDSLGDFHFPFSRN

SEQ ID NO: 316364 - protein, 56 aa, Zea mays
  Clone ID: MRT4577_51593C.1.pep
RPARGLVSAGLAAASWLPWGCHRRVLPCCPALRETGRHCRHCPRRRLGSVGSEKKG

SEQ ID NO: 316365 - protein, 46 aa, Zea mays
  Clone ID: MRT4577_51594C.1.pep
PNPCSPITREQGEGVRAPLVRGIIWVVRPTRIGRAHLAAPFLGDGR

SEQ ID NO: 316366 - protein, 70 aa, Zea mays
  Clone ID: MRT4577_51595C.1.pep
SILEHPHSGFAHPPVMLSDSSSDPVRTLRSGLSSILGRTCAHLAADACGRLPYVTSRLSGNSKRQGTRLH

SEQ ID NO: 316367 - protein, 76 aa, Zea mays
  Clone ID: MRT4577_51596C.1.pep
MGLPSIFNSKPVSYPPPREKCAGPSCTNPYKYRDSKTLLPLCSLACYKAVQGRPPDQGTDAAQGSGGGQESAGKQA

SEQ ID NO: 316368 - protein, 121 aa, Zea mays
  unsure (1)..(121): unsure at all Xaa locations
  Clone ID: MRT4577_51597C.1.pep
MAAAPVEVGAQGTVGSLVLREVEYFRRMEVAGGHGKKSSSKVVGASXRQRQRQPVERQRQEAEADDEEEGCRSSRQWXFLPRMCSSAEVAEDPGSGRRERPSRVRYRPLGDDDGDALPQQD

SEQ ID NO: 316369 - protein, 74 aa, Zea mays
  Clone ID: MRT4577_51598C.1.pep
RIYASRPQNHTVRLPRVSADTLRLRIRGAGGQPRRQSLFRIFPAVVSLVAANREEEGSLTVGIYAPHMLPAGLE

SEQ ID NO: 316370 - protein, 43 aa, Zea mays
  Clone ID: MRT4577_5159C.1.pep
HGGCVPTAPARYSKDSPGVAGSIRQARRHRRYPYSFWEGKIRK

SEQ ID NO: 316371 - protein, 165 aa, Zea mays
  unsure (1)..(165): unsure at all Xaa locations
  Clone ID: MRT4577_515C.1.pep
MVDRDRRGIYGGAHATYXDXHHKGGGCLPMGDQVKGMLHDKGPTASQALTVATLIPMDGLVMALLGLSLTASTVGLATATPVLLILRPMLVSTSLIIGTAGIGFLTSGTLGLGGLCSXLTCLANTARAXFQTTQDYVXEDAHRXRLADAADHAEHNIGQVGHAIQ

SEQ ID NO: 316372 - protein, 142 aa, Zea mays
  Clone ID: MRT4577_51600C.1.pep
RADPHLLVQLRASYSIRVGVQRATIGQLGVHLRRVEDAGLGVGASVLVGATDAADNIVRLIPWANMILQVPLPPRTVQSPRPLSGTCSSRPGYSSSNSSTATTTGPQSAISIAGARAVPVKTQPKPKRNQTKPAGRAVQVQR

SEQ ID NO: 316373 - protein, 90 aa, Zea mays
  Clone ID: MRT4577_51601C.1.pep
VRSIIERDYRLWLCHGDKRARAFHHHSWPSPLLGVSVDCRTSAVRSRASSAGSQRGSHSGRGLRRWCSLSSGPNVCMRVVCVQVIRGLCV

SEQ ID NO: 316374 - protein, 90 aa, Zea mays
  Clone ID: MRT4577_51602C.1.pep
FLPYIVVPGVAIDAKLATRCSRVVICSLSLTGGSRHAASMFVGVSSNTLCTLRFAVPSTIFNLGQRQGRIVQRTPEGTVLTLLHGCVRAI

SEQ ID NO: 316375 - protein, 40 aa, Zea mays
  Clone ID: MRT4577_51603C.1.pep
SDPYKLYSPYDVLVSITVHVEVSLENAFLNLVQCVQSKLL

SEQ ID NO: 316376 - protein, 74 aa, Zea mays
  Clone ID: MRT4577_51604C.1.pep
DLERTRGKNKKLKKKKKKKKKKKKRKKKKKKKKKKKKKKKKKKRGAALFFFFWDIKPLFLYKSPPQKAKGNTGS

SEQ ID NO: 316377 - protein, 207 aa, Zea mays
  unsure (1)..(207): unsure at all Xaa locations
  Clone ID: MRT4577_51605C.1.pep
MAGKIYXLLTRVGRSASAGTASIFHECXSQARIDCLLPTDLSTAEFIGCETSILEPYRIQQGVTGEILTISTWLLEQSLVVLQKLPXEHLAAQTIMAHQLQQLVLADLGGXFEKQQVLALNQLAXLNSDFYLQQQQXPFNQLADAYRQEELSLNTIGRLNYPAYLRAQQLLPFSQVAGARPAAFITQPQLVKLYQHAAPNAGTLLQV

SEQ ID NO: 316378 - protein, 52 aa, Zea mays
  unsure (1)..(52): unsure at all Xaa locations
  Clone ID: MRT4577_51606C.1.pep
TRRPKSYXFLXXHYILFXXXLAPVITDRVAEFXFHXTPXXIXHXXXXIXXIT

SEQ ID NO: 316379 - protein, 98 aa, Zea mays
  unsure (1)..(98): unsure at all Xaa locations
  Clone ID: MRT4577_51607C.1.pep
VENXIMTWAPKTFSEITPESXIRVWSLLPFACHCIDEIFILGCGRHVQLVSPELRMFIRSTGMKLEAVDSRNAASTYNILNEEGRPVAAAVLPYGVTC

SEQ ID NO: 316380 - protein, 106 aa, Zea mays
  Clone ID: MRT4577_51608C.1.pep
EQNTAHDPGTARFLYNADNDTGTSQAHTFPACSYYRHEHYVARPYIRRQGGGFLTSSSGRNHTFWSSTVPPAATALGATPSWFGVHPRRAEHSGLGEGVQILVGVP

SEQ ID NO: 316381 - protein, 138 aa, Zea mays
  unsure (1)..(138): unsure at all Xaa locations
  Clone ID: MRT4577_51609C.1.pep
GLIISIFNDRSFITIFYXRLXPISMAHLWKXLTRIFXSGMALASYLALMTAIFLWAMHNTRFLXDKFDDDVDHVXYHEMISGLYLXLSIMSQAVILVTXDTVXTFVERPGLVLVTEFLLDKLAVSLLYVYANWGYDRI

SEQ ID NO: 316382 - protein, 88 aa, Zea mays
  unsure (1)..(88): unsure at all Xaa locations
  Clone ID: MRT4577_5160C.1.pep
LIVKVHHNSYQPSTFHDFTGMVARRDIVTTTSLLKHFDMSAFFLIILFTISWXNATHSEPFPCLVRPHPPEISFTVLSSCFAILFGPT

SEQ ID NO: 316383 - protein, 74 aa, Zea mays
  Clone ID: MRT4577_51610C.1.pep
LALHARHETIRTTPRRNNGTRRSYAAGDWHILKKTPVANLVQLHKSQHLVLLIRMPVSMDFRLMIVRSVLHALR

SEQ ID NO: 316384 - protein, 58 aa, Zea mays
  Clone ID: MRT4577_51611C.1.pep
MAGPVAAVTEAWDKLTVFLYSQLYDERNWAKNKKLAKALGVFAGSILFMRTCGDMVAI

SEQ ID NO: 316385 - protein, 310 aa, Zea mays
  Clone ID: MRT4577_51612C.1.pep
MAAFLAPPCTSFYRSSAFLTPCSSNRRSTALRAAAVRGSAVTRAQRTVSARWVPSRLAVARPAARKACLEELDTTNMLLRQRIVFLGSPVDDTSADLIISQLLLLDAEDQTKDIKLFINSPGGSITAGMGVYDAMKFCKADVSTVCFGLAASMGAFLLAAGTKGKRYCMPNARIMIHQPSGGAGGKVTEMGLQIREMMYEKIKINKIMSRITGKSEEQIDEDTKFDYFMSPSEAKDYGIVDNIIDEGKPGLVAPLAGSVPPPKSRVWYLWKASGPTRKIMKHLPSEEKLIHNGNGSATGDDGKLKEATAT

SEQ ID NO: 316386 - protein, 85 aa, Zea mays
  Clone ID: MRT4577_51613C.1.pep
QTSQWTKRTAGELLSDMQFLEHDRSTNTIVTTLQISYQHLPYHLKQCFAFCPMFPVGYEFVQCFADGLVNSNGRRPVEMVAGRCF

SEQ ID NO: 316387 - protein, 70 aa, Zea mays
  Clone ID: MRT4577_51614C.1.pep
ALVYLHYQKSNHGARKTTKIKFRIREKHRNEIEGACSYSVVAIGYLTLVGGRRLSSTRYNYPQTHASAHA

SEQ ID NO: 316388 - protein, 417 aa, Zea mays
  unsure (1)..(417): unsure at all Xaa locations
  Clone ID: MRT4577_51615C.1.pep
GYLEAGRGPSGWPGCPARGQPQLPTAPPFPLSVKRAGGLFRFLVYIAAAAVPSPPWPPPPXPNPVVLGCGGISVDYLATVASFPNPDDKIRSLALKVQGGGNTGNALTAAARLGLRPRIISKVANDAQGRSILSELQTDGVDTSYILVAENGNSPFTYIIVDEQTKTRTCIHTPGSPPMVPEELTKANSSSALDGVDIVYFDVRLHDIALLVAEEASQRKIPILIDAERKREGLDELLNFASYVVCSAKFPQAWTGASSIPVALVSMLSRLPNIKFVIVTLGEKGCLMLERSSTDASEAGEIDAEALFESLEKSIDQSSTIPKCVASKSNLRISADGVGSISGRLLLGTAEVIPPGELIDTTGAGDAFIGAVLYGLCTSMPPERMLPFAARVAGCGCRGLGARTSLPHRADPRLAGY

SEQ ID NO: 316389 - protein, 100 aa, Zea mays
  Clone ID: MRT4577_51616C.1.pep
KRLRQISKEAHLSLAMLASYLNDVLPSMLTVKANNGELKEIMRFQKLARADLKNNLSKKKMKALIPQAVRATYIGGLLVLCAGSIVVSGSSFDAEEFLSF

SEQ ID NO: 316390 - protein, 72 aa, Zea mays
  Clone ID: MRT4577_51617C.1.pep
MEAFLTKYDIKLNNAILAEEKHLPMYDELATNSNAEYIAGRATPNSISPAHRLLPSSVAPPYPPPPPPLPPC

SEQ ID NO: 316391 - protein, 344 aa, Zea mays
  Clone ID: MRT4577_51618C.1.pep
MENMLHLAPSSQAQALALDRSSVFSREHVPPAVSAVTSLPVIDMSRSRDEVRRAILDAGMEFGFFLVVEHGIPEEVMRDMLEVCEEFFQLPAASKAYMYSEDSQRPNRIFSGTTYDTGGDKYWRDCLRLACPSSFPVGTRDDWPHTPQRLRGVVERFTALTRGLGVELLRLLSEAMGIRPDYFEGDISAGDVVLNVNHYPPCPSPEKTLGLPPHCDRNLITLLLQGSVYGLDVAYRGEWIKVEPMPGAFVVNFGQQLEVVTNGLLKSVEHRVVTSSTLARTAVATFIMPTPDCLIGPSKEFLAGDKPPCYRTIRFGDFMRMYNTVKLGSSINQTTDLKNVQKKI

SEQ ID NO: 316392 - protein, 188 aa, Zea mays
  unsure (1)..(188): unsure at all Xaa locations
  Clone ID: MRT4577_51619C.1.pep
MENMLHLAPSSQALALDRSSVFSREHVPPAVSAVTSLPVIDMSRSRDEVRRAILDAGMEFGFFLVVEHGIPEEVTRDMLEVCEEFFQLPAASKAYMYSEDSQRPNRIFSGTTYDTGGEKYWRDCLRLACPSSSPVGTRDDWPHTPQRLRGVVERFTALTRGLGVELLRLLSEXMGIRPDYLEGDISPG

SEQ ID NO: 316393 - protein, 167 aa, Zea mays
  unsure (1)..(167): unsure at all Xaa locations
  Clone ID: MRT4577_5161C.1.pep
KKKKKKKKKKKKKKKKKKKKKKKKKKKKTKKREGLLRSLFPQNPTVGDAKGKGHTDVGAPTXVRXNIYVFXGKGGXKIQLFQYKTHGKIMSPVLFLDLSKLGNIAKGLTFATTPLEGFLYWIEGSRGWANVVDIEKTSTTMVLAENGDGGNDLDLIVTTMKGNVFCF

SEQ ID NO: 316394 - protein, 68 aa, Zea mays
  Clone ID: MRT4577_51620C.1.pep
MPSATFLEVLLAILLPPFFVFLRYGYSDLFSIQQLLTFLGYIPGNIHSTYMLIAQVLRRGGHENSLST

SEQ ID NO: 316395 - protein, 82 aa, Zea mays
  Clone ID: MRT4577_51621C.1.pep
LVLRPSVWFQRASSFVAAIPSSTQFPAPSEWVLPANASVVPTGFTSGVVAGGDPSQPVLGGLGRGPIRRRSSLSRLHLQSVG

SEQ ID NO: 316396 - protein, 107 aa, Zea mays
  Clone ID: MRT4577_51622C.1.pep
KKPQGGPQEENEPNAKKSEDPSKRKPRPKGGEEKRDHAPGDPQRQERAGNKERPTREANKGQKKVTPPPPAPGRQAKNKRKPETKQTARERQFTGRANRNKFKMARE

SEQ ID NO: 316397 - protein, 92 aa, Zea mays
  unsure (1)..(92): unsure at all Xaa locations
  Clone ID: MRT4577_51623C.1.pep
RTLNKAQVLFTVVVPELVDQIQGSLAQNGLNINFWXVVYWLACGAPLMSNALTLDLGKGLGKEKNTIPLSSLGPKKEIIRKKKKKRTAPSDN

SEQ ID NO: 316398 - protein, 90 aa, Zea mays
  Clone ID: MRT4577_51624C.1.pep
VALLSLLALHAAQGAALGTPMEDTTSSNYPSGTEGLSEFLNFNKLQSAFKSDDFLNWHVLTDMFKKALPFINWEFFPKVKGLRSAVPDSQ

SEQ ID NO: 316399 - protein, 106 aa, Zea mays
  Clone ID: MRT4577_51625C.1.pep
TNFLNIIIKNHRYMLLNQLFTTIQGCIRTHPLSWCVTYHDAALEQRHNLYCSRGAELGCTIRGTEGYGVGGHSWRHNGFVCFSFFQLPATKSCYGLSNAYLFSPLL

SEQ ID NO: 316400 - protein, 165 aa, Zea mays
  unsure (1)..(165): unsure at all Xaa locations
  Clone ID: MRT4577_51626C.1.pep
GKRDPQSGTHATRKIATKRTTASSAATTILGSRRWRRKDTEDSRSRRTCTRRQRARAQPSANTERDKHAMTNVCPRERGARERDRPKPSGAQQGRANAAPPPPPGETDRHRAQHPRRRQQATEAQPESRPPAENPRGQHHTTGQQQPARLPRRGRHXRGPKNRAA

SEQ ID NO: 316401 - protein, 92 aa, Zea mays
  Clone ID: MRT4577_51627C.1.pep
PSYHFTTRAHSSIQSFCGRRHPHKKIACLFCSVADACVLFHLLERKPLPFGDLLFLCSNEIFLVCGFKIPEAHVGVVMDHGPNTCFTNQQSP

SEQ ID NO: 316402 - protein, 58 aa, Zea mays
  unsure (1)..(58): unsure at all Xaa locations
  Clone ID: MRT4577_51628C.1.pep
APWPPVERTNGRFLPRFPLPENPQTEQIPPPMENGVFPVPVPKGDPQNPXVKSLQISG

SEQ ID NO: 316403 - protein, 110 aa, Zea mays
  Clone ID: MRT4577_51629C.1.pep
MAPARRTARKSTGAKAAEKQLATKGARKSAPATGVVKKLHRFRPGTVALREIGKSLKSTELLIREVAFQRLVREIAQALQSDLRFQSSAVSRLGEAAERYLVARCEDASL

SEQ ID NO: 316404 - protein, 45 aa, Zea mays
  Clone ID: MRT4577_5162C.1.pep
AVSWNVTQPVILCCVSSLTVRDLLHYYSALVEWMDSLISGCISRP

SEQ ID NO: 316405 - protein, 198 aa, Zea mays
  Clone ID: MRT4577_51630C.1.pep
FKNHRPFKMQPDIPYRKSHQQAPDEWKLEQGLEPARLGIRNQSSIQINTESHRLNPNDHEELKGSDIPEDPDLDVQNERPGWKGYVEWEDYPEKKAKAHQRFSRFTFPPPPEFQLEPLPATNPVLEGKRWKLWHKAIGGVLDQVPRISWETVLKEKHPEMLHLLEFPYNGRSAQESSDQRLHYAKRVLFRSESRWHPR

SEQ ID NO: 316406 - protein, 64 aa, Zea mays
  Clone ID: MRT4577_51631C.1.pep
LVLPSPNRGIEFPFFFFFEKYCRGSPYIEFSVVINIWKLILQNHLIPKQLSYYLCYHQIPQPVR

SEQ ID NO: 316407 - protein, 38 aa, Zea mays
  Clone ID: MRT4577_51632C.1.pep
HCFRGRKGAQYWSCVFQITHLCLFKIAKQCLHMTNLIF

SEQ ID NO: 316408 - protein, 236 aa, Zea mays
  Clone ID: MRT4577_51633C.1.pep
SWVRNNIQAYPSVSFRYVCVGNEVAGGAAQDLAPAMENVHAALAAAGLGHIKVTTSVSQAILGVYSPPSAAEFTGEARGYMGPVLQFLARTGSPLMANIYPYLAWAYNPSAMDMSYALFTSSGTVVQDGAYGYQNLFDTTVDAFYVAMGKNGGSGVPLVVSESGWPSGGGVQATPANARVYNQYLINHVGRGTPRHPGAIETYLFSMFNENQKESGVEQNWGLFYPNMQHVYPISF

SEQ ID NO: 316409 - protein, 123 aa, Zea mays
  unsure (1)..(123): unsure at all Xaa locations
  Clone ID: MRT4577_51634C.1.pep
PPPPPPPPPPPPPPPPPPPPPSPPPHPRPPPXAPPRPXPPPPPPPPHPPPPPPPPHPPRGPPPPPAPPPRPPXPPPPPPPPPPQPPSHTLPPLSPPPNPPARIALAPSFCLPHPHSFLAPPSC

SEQ ID NO: 316410 - protein, 124 aa, Zea mays
  Clone ID: MRT4577_51635C.1.pep
DTSSHFCPMKTREEEKKNIYDPTMSRFSATNPAGNRAEGMYRRRPDVGHARPNLNRSNERQPQREPADGAEGSPHLRHLAEGGGQGVETAACSRRKAEPRREVVAMADCNRALGCGRVNHDARP

SEQ ID NO: 316411 - protein, 270 aa, Zea mays
  Clone ID: MRT4577_51636C.1.pep
MERILRCFNLGPTGSEDDDISFTLTVETFSFEELSAATDNFSSTLRIGSGGQATVYEGHIPHIGQVAVKRLRTNDFPSKQRAFLMEVYVLNSTNHPHIVKLLGCCSEGTERLLVYEYVKGGTLRHRLKELNWYTRMRIARDTATVLEKLHLQSDPPIIHRDFKSDNILLSTNLSPKVSDFGIAKIAPAGDELTAATSETLGTYGYASPGIFRPLNATVMTDIYSFGVVLLEIITGKPAIDHSKEGDEHYLVHWRQVFFGADYVIKEQVLE

SEQ ID NO: 316412 - protein, 67 aa, Zea mays
  Clone ID: MRT4577_51637C.1.pep
STPGAHGILHHTAPAVAEKRDEAAGAGSHRRLMPPDSVTARSHRPPDNAHSGTIQKRGSFPPSKPPP

SEQ ID NO: 316413 - protein, 74 aa, Zea mays
  Clone ID: MRT4577_51638C.1.pep
KFTLKGGDPFFCPKRVKPPFSRGQLHKKKKSPGGFCFQKKKKKKKKKKKKKKKKKKKKKKKKKKKKKKKKKKKK

SEQ ID NO: 316414 - protein, 45 aa, Zea mays
  Clone ID: MRT4577_51639C.1.pep
LATMVGTDRAWRAALVVLVLTGMVPYPRLGLRRSTCSLPLSVRCG

SEQ ID NO: 316415 - protein, 105 aa, Zea mays
  Clone ID: MRT4577_5163C.1.pep
RPTRGSARWKPPATCRKRREKARTPTERERNNLPYGWYSYLAVWGSAWLPGASLGVKDGVRGFLWACGSPWEPLLPDSSVAHHRGWDSMSCNRWYRWRNMKDGTM

SEQ ID NO: 316416 - protein, 47 aa, Zea mays
  Clone ID: MRT4577_51640C.1.pep
SHLHSHHISYLYYHLTKKTLPLLNLQSLHYINLSPSQLNLIHHILFS

SEQ ID NO: 316417 - protein, 41 aa, Zea mays
  Clone ID: MRT4577_51641C.1.pep
ARPLSDHTTAAAPPGSAPDSHTMDPGPVEDLTPDPGTRWRR

SEQ ID NO: 316418 - protein, 172 aa, Zea mays
  unsure (1)..(172): unsure at all Xaa locations
  Clone ID: MRT4577_51642C.1.pep
MAGGFRVLHLVRPFLAFLPEVQSADRKIPFREKVIYTVISLFIFLVCSQLPLYGIHSTTGADPFYWMRVILASNRGTVMELGITPIVTSGMVMQLLVGSKIIEVDNRVREDRALLNGAQKLLGILIAIGEAVAYVLSEMYGSASQLGTGNAILIILQPFXFAGIIVXICLDE

SEQ ID NO: 316419 - protein, 44 aa, Zea mays
  Clone ID: MRT4577_51644C.1.pep
HTYVPLTSQIEIVVLTSGSYGIELSFLTLLLDLTYSLFGQLPVR

SEQ ID NO: 316420 - protein, 71 aa, Zea mays
  Clone ID: MRT4577_51645C.1.pep
QSSSSGGTGRAAAASPRSGGEAISRCGRYGRHEIPAWNDGLTRHWTFWTLNGVFPERSRWRAECALSSTKA

SEQ ID NO: 316421 - protein, 78 aa, Zea mays
  Clone ID: MRT4577_51646C.1.pep
HSRPHKHFHIFQVLHTHTPNVPANLLLRGGGLLLGRRHVCCPGSLHPPLTRLPASLLPGEVRGCQHCLTSPTPTTIHH

SEQ ID NO: 316422 - protein, 53 aa, Zea mays
  Clone ID: MRT4577_51647C.1.pep
EPNITLFFLCYKQPTPRCHGHAFCQPPTLSDITQAPIDPVLLDHTPYYIYVAH

SEQ ID NO: 316423 - protein, 63 aa, Zea mays
  Clone ID: MRT4577_51648C.1.pep
GNSRFTYTVLVDGCSKKTNEWGKTIIEYKTNKPSRLPFLDIAPLDIGGADQEFFVDIGPVCFK

SEQ ID NO: 316424 - protein, 79 aa, Zea mays
  Clone ID: MRT4577_51649C.1.pep
RIPVTTDLAAMLNQRRGWPSTQSTTRLAIVDTVKFPTRRELWQTFLRTPSTTFALLAHGSLRRAPQPSSCNRGGPRLPI

SEQ ID NO: 316425 - protein, 111 aa, Zea mays
  Clone ID: MRT4577_5164C.1.pep
RILLKHTTVPSPSPTSHDSVAPKGRAPSNLNLPRPSTITPTPTKGSRVSLYIYARPSPEIDGVGNFASMGRVARGTQKLIHPPSGTHHARQAYPLMLWIQLSRCDGSRPSC

SEQ ID NO: 316426 - protein, 100 aa, Zea mays
  Clone ID: MRT4577_51650C.1.pep
TGKTEPKPGLKKHKTMVYPGKNNPGTYKKKEGPQKKNIPGKKKPLNPGKSPKPAIQNGMPPATGVKKKKRPGKKKSPPLEKASCLNQGSLKAKPPGRGPK

SEQ ID NO: 316427 - protein, 172 aa, Zea mays
  Clone ID: MRT4577_51651C.1.pep
KKKKKKKKKKKKKKKKKKKQKKKKKKIKKWFVPLAGATFGGFFSNFLPLGGGFSLLFWAPFGPFLSFFTMDWPRFYRVRTGKPLVLPILFPLGHFPFSPIGVLQKRPPSIAFPNIFAAWLAIGPPLLGAFKGGGGGGSPQLYPFPFQRLIPRSFFFFPFLLGPFPGFFPLRF

SEQ ID NO: 316428 - protein, 97 aa, Zea mays
  Clone ID: MRT4577_51652C.1.pep
TNGAYKSVMHRVVAQPDGNRMSIASFYNPGSDAVIFPAPALVNKAAAGDGDGVGVYPRFVFEDYMKLYVRHKFEAKEPRFEAFRSMETDSSNCIAIA

SEQ ID NO: 316429 - protein, 60 aa, Zea mays
  Clone ID: MRT4577_51653C.1.pep
KTIIYMPEPCILLSFLTGVYPSLLTIKYFAAAAVVSRTCCYCCSSSETGNLWFLYCLQLT

SEQ ID NO: 316430 - protein, 117 aa, Zea mays
  Clone ID: MRT4577_51654C.1.pep
ASGCLLTGPGWQRARVTRKQRLARAQLVVLKTGYCWAGAGSHHFFLAAGGGGGAPVVFFFSRSCWLPLLPCASCHGLWTYQGVDALGMPAPAWAWGGSSSPFLPYRSFRSLAPSGAP

SEQ ID NO: 316431 - protein, 89 aa, Zea mays
  Clone ID: MRT4577_51655C.1.pep
LVNHLAEQFPWSPFGISAVSQMGTSEPSEYVLPGTYWSLPETPSPIPVLMTPRPPCTHTIRLWAASSPVCPPFPAVDHSRDGSRHTWAG

SEQ ID NO: 316432 - protein, 93 aa, Zea mays
  Clone ID: MRT4577_51657C.1.pep
GRPRRRSRRLLPLLRRGPRQRDRQLRLFGRLFPGRTAGRAACRRGHRQLRDIMSCAARSAPLGRGYDTVSAVVHYCLHCHTPNSRMMAVYRRR

SEQ ID NO: 316433 - protein, 44 aa, Zea mays
  Clone ID: MRT4577_51658C.1.pep
QWTISFYGQLTSGWLAIQTIGRSVMTILTRWTELLYADYSKLES

SEQ ID NO: 316434 - protein, 54 aa, Zea mays
  Clone ID: MRT4577_51659C.1.pep
CIFKGKFRSSITQLLTYGNLTVSPCGPESNRCFQARSPSISNPRHPTCKALNVV

SEQ ID NO: 316435 - protein, 90 aa, Zea mays
  Clone ID: MRT4577_5165C.1.pep
VMYRSAQSCSMYVYMLCTCVRWLLQIGWLMPISYMKMLNYSVHQDMASSRPYRLWPSQLTLPSCSCISQHRGHKRSGSEPIMPSYDASRS

SEQ ID NO: 316436 - protein, 79 aa, Zea mays
  Clone ID: MRT4577_51660C.1.pep
ISENAQFLDPWKNSIRYTTPFLQSAMQAPFFCYLTVEASYQGMEIASQICLGAGTAPMGIISPKRHMCGEYLARYTLEW

SEQ ID NO: 316437 - protein, 122 aa, Zea mays
  Clone ID: MRT4577_51662C.1.pep
EGNRERRRKRRKKKGKERGEGPPQRGQAHRSRGAQPPRQKGVPSGDRAGPPAGQAVQLAKGATAPGLLTRGPTGETRPRNKGIKPGENQGYPRPRGGGNPRPRKALKGAPERGEMEPAPTQA

SEQ ID NO: 316438 - protein, 82 aa, Zea mays
  Clone ID: MRT4577_51663C.1.pep
KKNPGGAGGVKILERKGEGKTKKNGGFSPPGIRPPTKKGARAFKNWSPPEKRGNRNHSPLGKIWGTKKPLKFWAMGPPPPEI

SEQ ID NO: 316439 - protein, 96 aa, Zea mays
  Clone ID: MRT4577_51664C.1.pep
REQTPAHHTCPICHGILVYSTVVESDLAIQSAPTHMSCFSSTVDLSHSDYLISRSDRRKLGLSPNQSAIDTVSYASDVGAPTRISSVQGPQEGLRR

SEQ ID NO: 316440 - protein, 86 aa, Zea mays
  Clone ID: MRT4577_51665C.1.pep
PSRTKPCDTVLGGAPSSDSERMNWAHAASEGYVLKVSSFCFIKVTDLLLPKQWWYDAFIKILRQSAGNIRLALMRGTPILLSAMLR

SEQ ID NO: 316441 - protein, 65 aa, Zea mays
  Clone ID: MRT4577_51666C.1.pep
ARCRHHLLASLQVTARGECEAKHSRERSYPPSTQRAGEKLPAKVATRLNLGGWSIQSDPIYPEGK

SEQ ID NO: 316442 - protein, 51 aa, Zea mays
  Clone ID: MRT4577_51667C.1.pep
NGKPQYFSVIYVQDESSHVGLSSQECSNTLQRTNNNRYNTDYYTLVSSSNG

SEQ ID NO: 316443 - protein, 106 aa, Zea mays
  unsure (1)..(106): unsure at all Xaa locations
  Clone ID: MRT4577_51668C.1.pep
RKRPQGQQPKKTAIKGGRRLTLMARLKRLNPPARWGDMGGTKPRPGPPKKGLPLGPPHRGQGLLRRLFPVNLFKPRPDSGGPAKAVKTGPGPGLGLGRXLAFPFAC

SEQ ID NO: 316444 - protein, 187 aa, Zea mays
  unsure (1)..(187): unsure at all Xaa locations
  Clone ID: MRT4577_51669C.1.pep
MIPPADSLLKYDTPVLVSRNTEKRSPKARLLKVSPQQPGPSGSAPQPPKTKLPSTPCVPDPTKQVEEILNAILPPREWVEDTQLWIQQVSSTPSTRMDVVHLQEQLDLKLQQRQARETGICPVRRELYSQCFDELIREVTINCAERGLLLLRVRDEIRMTIAAYQTLYESSVAFGMRKALXAEQGKS

SEQ ID NO: 316445 - protein, 161 aa, Zea mays
  Clone ID: MRT4577_5166C.1.pep
DPRVCRAAGFYEARKDKVKTRRPPPPFIHRARRFGKPAVQQYGVNQRSCQKPPRNHFERGQRLHHLATSSTPDDLVELVPRRANVGTKAKTSPFARCLRPPRCTNGDKTTGRLTLRPIRHRTKTCGRGRLILRPRPAWRLTCDPAHCNRPCVAAAHYGPNL

SEQ ID NO: 316446 - protein, 276 aa, Zea mays
  unsure (1)..(276): unsure at all Xaa locations
  Clone ID: MRT4577_51670C.1.pep
SKARRPEHVWGAKAPARRSRRPRRPLRQSKGKRSRRKGRSDTTRSKKKKKTQQKQKTTRARQQTKTKQKKKKDKEGQKTEPEKRTKKTNKNEQRGKKKHKANETKHKMEKTKKKTQHKKNKPKKKKKKKKTKKPETKQKEPKRENQKKIEKKHNQQTKRKNKQQHKRNKKRDKQTTKQXTQNRTKKQKKRNRKNTKKKKQHKTHKTKRQQTHKKPNQKPQATKQKKKKQQKXKTKKKPTKQQKKQKKQKPKKQQTKKTHKQKTNTTKTKNNNNQPK

SEQ ID NO: 316447 - protein, 88 aa, Zea mays
  Clone ID: MRT4577_51671C.1.pep
RGPPNLIQHSTHFFLFEREALGNHLVGQLHGRFYKGPDQLKLLGAKLLGACLEQYDLISLQKKGCHKLRPPIFMFLAGPNYICSFQLC

SEQ ID NO: 316448 - protein, 56 aa, Zea mays
  Clone ID: MRT4577_51672C.1.pep
NYIGGSTSFLVGGRPSILRSCTTRGIELTPNILVNTGCIDLDKRFMTLSQRGPSTE

SEQ ID NO: 316449 - protein, 112 aa, Zea mays
  unsure (1)..(112): unsure at all Xaa locations
  Clone ID: MRT4577_51673C.1.pep
MTTKMLMLLALIALCVSATNALIIAQCSLATSVIISQIAAPVTSMGYEHLDVQANMQQRAIAASVLQQLIVQLQQEFLPHLTIQAMTTQQXQQLLPALIQLAMVNPVCYLQE

SEQ ID NO: 316450 - protein, 73 aa, Zea mays
  unsure (1)..(73): unsure at all Xaa locations
  Clone ID: MRT4577_51674C.1.pep
RVDHASTQASADAWADAWAEPVPTPRPEPKTEPMPEPKPESKISSELKPERKPEPMPXHRPEAVPEPKARPFP

SEQ ID NO: 316451 - protein, 153 aa, Zea mays
  unsure (1)..(153): unsure at all Xaa locations
  Clone ID: MRT4577_51675C.1.pep
VWTCKGACSSFLRRVARSTPRPAVKSRPSTFIHHATGLFTVSTIMRAIVRAPSKSRVPPSMAPHTSFRVRCSRYLHRWWSIDELRDEEHQTAIALSTSYVLLHTSGMGPRHNGRPAVPEARTYLLDTVSRLTIQVYPXSWTAVMMTFDNVGML

SEQ ID NO: 316452 - protein, 35 aa, Zea mays
  Clone ID: MRT4577_51676C.1.pep
VAALDKRAWRPRRPKLLAPIGAKMLLVFFNMSYAW

SEQ ID NO: 316453 - protein, 188 aa, Zea mays
  unsure (1)..(188): unsure at all Xaa locations
  Clone ID: MRT4577_51677C.1.pep
LPPIASSPRFSTTCLQTNNGHWKQERLGLRGGALALLLLLFVHGGQRAAEAGGDAFVRVQGTRFVQDGKPFFANGFNAYWLMTFGADPARRGKVTXGGGSALQYSPGRYNENTFQGLDFVLSEARKHGIKMILSLVNNYDSFGGRKQYVQWARERGQTIGSDDEFFTNPFVKGIYKNHIKAVLTRVNT

SEQ ID NO: 316454 - protein, 392 aa, Zea mays
  Clone ID: MRT4577_51678C.1.pep
MGLRGGALALLLLLFVHGGQRAAEAGGDAFVRVQGTRFVQDGKPFFANGFNAYWLMTFGADPARRGKVTSALSQAAGAGLSVARTWAFSDGGGGGGSALQYSPGRYNENTFQGLDFVLSEARKHGIKMILSLVNNYDSFGGRKQYVQWARERGQTIGSDDEFFTNPFVKGIYKNHIKAVLTRVNTITGVAYKDDPTIMAWELMNEPRCQSDVSGHAIQSWITEMAAHVKSIDGNHLLEAGLEGFYGASSARRSANPSGYQVGTDFIAWLDAHIADARAVLRKPLLVAEFGESRHDPGYSGGQRDAVFGTVYARVYDSARAGGPAAGALFWQLLAEGMDSYGDGYEVVLPQAPSTAGVIATQSRRLQGLARAFVRARKAHQGKAGKGAKGGGN

SEQ ID NO: 316455 - protein, 40 aa, Zea mays
  Clone ID: MRT4577_51679C.1.pep
RHYADWADKIHGLILPADGPQDVHNVHVPLGVAGQIIPWN

SEQ ID NO: 316456 - protein, 70 aa, Zea mays
  Clone ID: MRT4577_5167C.1.pep
PETGNARSAGAANDECMLKPGELQTKRLNRFITVRTDNKTKEIAEDQVGDRATRADDLEHSPPEDDCRYA

SEQ ID NO: 316457 - protein, 46 aa, Zea mays
  unsure (1)..(46): unsure at all Xaa locations
  Clone ID: MRT4577_51680C.1.pep
MTADXIQATHEQCLKSEMDGYVSKPFEGEQLYREVARFFQNQDQVQ

SEQ ID NO: 316458 - protein, 39 aa, Zea mays
  unsure (1)..(39): unsure at all Xaa locations
  Clone ID: MRT4577_51681C.1.pep
YSXKKKKKKKKKKKKKKKKKKKKIKKKKKKKKKKGEFKS

SEQ ID NO: 316459 - protein, 153 aa, Zea mays
  Clone ID: MRT4577_51682C.1.pep
MQTRTQLCHIHILRNNMSVEILDGKTVQSFVEDEGAFHSSVDGRFAALDTNHDGLLSYSEMAQELMSLRVLEKHFGVDESAMSRGELVELYRGLFARFDRDGNGTVDLEEFRAEMKEVMLAVANGLGFLPVQMVVEEGSFLKVAVDRELAKAT

SEQ ID NO: 316460 - protein, 479 aa, Zea mays
  Clone ID: MRT4577_51683C.1.pep
PQTLIGDPGRIRQIITNLVGNSIKFTEKGHIYLTVHVVEEIMHCLEVETGTQYTNTLSGYPVANRKRSWENFRLFSRELNSSEMPFAPIASDSISLMISVEDTGAGIPFDAQSRVFTPFMQVGPSIARIHGGTGIGLSISKCLVGLMKGEIGFASKPQVGSTFTFTAVLTRVHSSRNENKSSEFKEINALVVDHRPVRAKVTKYHLQRLGVQTELTTDLDQYISKNNCGSQIAKLVLIDKETWLKESHSMPLLVTKLRNKDQPDSTKLFLLENPKSSVKSNSHIFREYNLNVIMKPLRASMLQVSLQRALGGIDKLHCRNGVVGNSTLGSLLHKKRIIVVDDNIVNLKVAAGALKKYGAEVTCADSGKEAITLLKPPHNFDACFMDIQMPEMDGFEATKRIRVMERDLNEQIECGEAPPECVGVRQWRTPILAMTADVIQATHEQCLKSEMDGYVSKPFEGEQLYREVARFFLNQDQVQ

SEQ ID NO: 316461 - protein, 79 aa, Zea mays
  Clone ID: MRT4577_51684C.1.pep
SNKTSIFENAIYILQLRPKQYRPKTMHNKMPTNACTNNQYLICTAGTFRGRKISLPTLYYSGRGHLRLVNAAGLFFHTP

SEQ ID NO: 316462 - protein, 566 aa, Zea mays
  Clone ID: MRT4577_51685C.1.pep
LGMLQMLMDTDLDTTQQDYVRTAQASGKTLVSLINEVLDQAKIESGKLELEVVPFDLRTVCDDILSLFCGKAQEKGLELAVFVSDQVPQTLIGDPGRIRQIITNLVGNSIKFTEKGHIYLTVHVVEEIMHCLEVETGTQYTNTLSGYPVANRKRSWENFRLFSRELNSSEMPFAPIASDSISLMISVEDTGAGIPFDAQSRVFTPFMQVGPSIARIHGGTGIGLSISKCLVGLMRGEIGFASKPQVGSTFTFTAVLTRVHSSRNENKSSEFKEINALVVDHRPVRAKVTKYHLQRLGVQTELTTDLDQYISKNNCGSQIAKLVLIDKETWLKESHSMPLLVTKLRNKDQPDSTKLFLLENPKSSVKSNSHIFREYNLNVIMKPLRASMLQVSLQRALGGIDKLHCRNGVVGNSTLGSLLHKKRIIVVDDNIVNLKVAAGALKKYGAEVTCADSGKKAITLLKPPHSFDACFMDIQMPEMDGFEATKRIRVMERDLNEQIERGEAPPECAGLRQWRTPILAMTADVIQATHEQCLKSEMEGNVSKPFEGEQLYREVARHFSNRGELQ

SEQ ID NO: 316463 - protein, 102 aa, Zea mays
  Clone ID: MRT4577_51686C.1.pep
WVSQAGRNPVFYLPLEGLPWVFVNRGGLERGGQVATLAHAVFYNAVEGDLFAPKAPSGVWISPCHVLQVPEMSPACCVPRFRSGTSRCRFRGAQSPYKTLTS

SEQ ID NO: 316464 - protein, 43 aa, Zea mays
  Clone ID: MRT4577_51687C.1.pep
VVVVKEPSNFLSPSPLIRILIKASQHHLLACRNRDNDNTEDSS

SEQ ID NO: 316465 - protein, 83 aa, Zea mays
  Clone ID: MRT4577_51688C.1.pep
TITPVPQYTGDRDLASPAHPRPPPPRKAGNGREEVEGDVEAEEERAHGDGATAATWKPMILFGRGGCPTRDLERPPAALIRRL

SEQ ID NO: 316466 - protein, 115 aa, Zea mays
  Clone ID: MRT4577_51689C.1.pep
WTSGPSPASTASSSDSTFLQHEGSASPSPVRTSTDASLGGLHNKKPARRLTDSCNSRFPVPYARMVGPSHGEIRLVRVYELGVRVRGYGLLSTPCPCVHIGFPLGVYHVVTNKKR

SEQ ID NO: 316467 - protein, 77 aa, Zea mays
  Clone ID: MRT4577_5168C.1.pep
KRRGLKKRNHLLLPCLIACCSPPLMPVGHPQIEAPTESYEAIPTRPISLSVSQKRSCHQISRLTGLYLITDGYIVNL

SEQ ID NO: 316468 - protein, 199 aa, Zea mays
  unsure (1)..(199): unsure at all Xaa locations
  Clone ID: MRT4577_51690C.1.pep
NCSLSAVNGXEGGIASVNEGEVGMITVAFLIVLFSLQRFGTSKVGLAVGPALFVWFCCLAGGGVCNLRVYGPEVLQAFNPVYIYYYFERNPTEAWMSLGGCLLCATGSEAMFADLCYLSVKSVQLTFVFLVLPCLLLGYLGQAAFLMENLDKSQQVFFLSIPSQAFWPVVFIATLAALIASRAMTTALFSTIKQATALG

SEQ ID NO: 316469 - protein, 355 aa, Zea mays
  unsure (1)..(355): unsure at all Xaa locations
  Clone ID: MRT4577_51691C.1.pep
MSTSVSAAAVAALVPPLTGRRSPPASRVPQICRRRIRSKPRIFSSSPSFPIVPAAAMATGGAAPTASDAGSKKKLLIFDSEEDLAVSLAKYTAELSEKFAAERGAFTAVLSGGSLIEALRFFDFPCTIRYSSFLWVIRGTKXISRRHWFRRKLTEPPYLDSVDWSKWHVFWVDERVVPKDHVDSNYKLAYDGFLSKVPIPPGQVYAINDALSAEGAADDYEACLKQLVKNGVISMSAATGFPRFDLQLLGMGPDGHIASLFPGHPLVNEKERWVTYIKDSPKPPPERITFTFPVINSSAYVAMVVTGAGKAAAVQKALSDKQTSSDLLPVEMAVLQDGEFTWFTDKAAVSLLQNK

SEQ ID NO: 316470 - protein, 88 aa, Zea mays
  Clone ID: MRT4577_51692C.1.pep
QQQQQHGHHQHASPRHPPGAPGGGVTAAERSQKAAPKLLLRRSGAVPGGRVACVGGGRALHRLKRRHDDHLRFRALTTRAWTEITRLT

SEQ ID NO: 316471 - protein, 121 aa, Zea mays
  Clone ID: MRT4577_51693C.1.pep
ARTRSELNSVVRCCCCAGACCRLSFAVAVVLLATAASMNHGQRYGRGWLDGDCYVARSGVFGGAAALVVVTALITLGLTFATESAAGAMATTPASSPATRARIRVDAASADAEQPGGRSRQ

SEQ ID NO: 316472 - protein, 65 aa, Zea mays
  Clone ID: MRT4577_51694C.1.pep
VIQLSEKPETGKSFFGKISRPLSSMAVSQSASFLPIAESPSVLTVMLYGTVQLTMQCQATVGMSF

SEQ ID NO: 316473 - protein, 147 aa, Zea mays
  unsure (1)..(147): unsure at all Xaa locations
  Clone ID: MRT4577_51695C.1.pep
PGNVVRGRGGGPGFPVGGRXSRGGGGGKGGPGGKGXGHNSKEPSGGEGKNGKAGGXGGNQPKIKGAGQMTGGKKGKPGGEGKKGIPQGGGRGGLXGSGTRGGFPGNRGKGKSQKALNAGAGKXGPQGGQACLGQKAKKTGGRGGKGG

SEQ ID NO: 316474 - protein, 217 aa, Zea mays
  unsure (1)..(217): unsure at all Xaa locations
  Clone ID: MRT4577_51696C.1.pep
MDLTSPSPAARRAAAIARHLXQPPPPSXSSPLEPSCCLSYVPPESTERPAAFAPADLRLLLDGHDLPTRDWLFRAMEESPLFRSRSSRTGSRVFVAPDFNDGKEGQREATMRRIAYLNRRGVFRGWLTEDGAAAELRKLALLDCIAIYDHSLAIKIGVHFFLWGSAIKFLGTKRHHDKWLVATENYDIKGCFAMTELRHGSNVRGIGTIATYDSETR

SEQ ID NO: 316475 - protein, 48 aa, Zea mays
  Clone ID: MRT4577_51697C.1.pep
LNHPCSYTPFFYTGHVHSNWENSSSLCIYSNLMYQQQHYYHVTTQYRY

SEQ ID NO: 316476 - protein, 47 aa, Zea mays
  Clone ID: MRT4577_51698C.1.pep
VVLIRAHWYLARQPTVAVQVHVHNGWCSIPRPFAFRCVCSTAAASER

SEQ ID NO: 316477 - protein, 81 aa, Zea mays
  unsure (1)..(81): unsure at all Xaa locations
  Clone ID: MRT4577_51699C.1.pep
LFNSPFRAAARAXAXXPLVSLFLLFFFWSSQCLICFFIRXGXIYPGLXIXAWPXXXXXPRGGGGHVCXXVGFEILYVVNAS

SEQ ID NO: 316478 - protein, 955 aa, Zea mays
  Clone ID: MRT4577_5169C.1.pep
MCPAAASIPTRPAGDPEPQIQRWLHEIGATNSALECATAATNSRREDRRGMVSHSSTITPAMKHSGQGGRRQALAGTRARWSFNGWRGGERLRQYIHRAKGTVALTSSKGQRFEVGIAVTTATRLAAFLVDGKFVGVNIRVVRDFPDVFPEELPGMPPDTEVEFVIYLLPRTAPISKRSYRMSVEELKELKKQLTELREAGSLNDVTVKNKFLLPRIEDLFDWMRDVRVFSKIDLRSGYHQMKIRPSDISKTDFLTQYGLYELTVMSFGLTNAPAYFMNLMNKVFMEYLDRFVVVFIDDILIYSKNESDHEQHLRLVLQKLRDNQLYAKFSKCEFWIDKVPFLGHIISNGGIAVDPAKVKEIMEWRVPTTVTEIRSFLGLAGYYRRFIEGFSKIAKPMTSLLEKGREFKWDEKCQDSFDQLKERLMSPPVLIMPDLQKGFDIYCDACGQGLGYALSRKEHVHSAFVVQLPDELAKDFERLNLGMGQVGDAKIQEIKDLITEGRGPEFTEDEQGTIWFKSRICVPDIDSLRETILKEAHDSVYSIHPGSTKMYQDLKQKYWWYGLKRDVAAHVAMCDVCQRVKAEHQRPAGLLHPLKIPEWKWEEIGMDFITGLPRTQKGYDAIWVIVDRLTKVAHFIPVKTTYKGSQLAELYMARIVCLHGVPKKIVSDRGSQFTSRFWRSFHENMSTKLNFSTAYHPQTDGQTERTNQVLEDMLRACALQHGGSWDKSLPYAEFSYNNSYQASLKMSPFEALYGRKCRTPLYWDQTGERQFFGPELIQEAEEQVRIIRENLRVAQTRQKSYADNRRRPLEFEEGDYVYLKVSPLRGMRRFKVKGKLSPRFIGPFLILKQVGEVAYQLELPDSLSDVHNVFHVSQLKKCLRVPEEQLPMEDLNVQDDLTYAEYPVKILDTLTRVTRNKVIKMCKVQWSHHGEDEATWEREEELRIDFPHLFPRSS

SEQ ID NO: 316479 - protein, 67 aa, Zea mays
  Clone ID: MRT4577_516C.1.pep
KCAFLFLGSHKPRTKNFFFGLLLFFYILKRAPPMLGGWLNAGGFVKASWLNGKNCCLWQRVPAVGPP

SEQ ID NO: 316480 - protein, 113 aa, Zea mays
  Clone ID: MRT4577_51700C.1.pep
MGKNNPLLKITRIPHRHGLNYAMKMKMGTNLGHQLFCPRFSSGRRIPSCLWIIWKPHGSKVKVARRDFSSCAIKGRVVCISSALLNYRRLKLLLKNHRHQQIAIKVFWSAKAG

SEQ ID NO: 316481 - protein, 81 aa, Zea mays
  Clone ID: MRT4577_51701C.1.pep
ELTAGIDQPSRRPPPFFFWGFFFLGGEFPTSLNHYLKIKRTGPISIILSIFFNYTYKKKALRIFHKKKTLFAVLSGFFITT

SEQ ID NO: 316482 - protein, 122 aa, Zea mays
  Clone ID: MRT4577_51702C.1.pep
FSPRGFPVPRLLVGENFFALFFAPSPFSLGPFPRLVEKFFSLNFGPVPSFGGLLPPPVFLSLFWKGFPLPPFVISFALRVRSGLVFTPSLSPLWNLSFGLLSDLCKSLPLLFQCVCFKFYFC

SEQ ID NO: 316483 - protein, 198 aa, Zea mays
  unsure (1)..(198): unsure at all Xaa locations
  Clone ID: MRT4577_51703C.1.pep
MDTHHRSIMSCCLVCIIDMAAGSALLLPASSQLAMPDIPNLKVGSHDPSTTRKCSNIKSDHTTXSATCDARCPLIRRFQGPMCKTCCLXNCYPXGMSCXDPLLHGAXDENNFYFHGXKKDRXFCIDSDAALHINAHCIGKRNPDMSRDFTWIQALGIRFAHHHLYVAAQRTPRWDAAADHLALALDDEDVDVASLLPR

SEQ ID NO: 316484 - protein, 298 aa, Zea mays
  unsure (1)..(298): unsure at all Xaa locations
  Clone ID: MRT4577_51704C.1.pep
MDPSSPPRRCSLLLRLLLLAVAALALRLLYGAFLSVSAGPAGWPLYRPAATATTTTRRRTHVVQADVPSPEVWRTRHWRRAVDYHAAILAPHIAAGALAPASRAVCLGGPQEALAMRELGVAKAVAVGRRRAPPLVVAGGDRRLPFDSPSADFVFAGRALDAAKRPADLAAEAARILKPDGHLVVLTSSAADAYSLRSIQALLPTLRLVQSREIDAQDDGDSSTLRELVFQKNPHPTGTGAGNSSVNNCSVGDHRRXLLAHAEPLIQEEPLKPWITLKRNIKNIKYLPALADISFKRR

SEQ ID NO: 316485 - protein, 167 aa, Zea mays
  Clone ID: MRT4577_51705C.1.pep
MSVTLHTSHGDIKVEIYCESVPKTAENFLALCGSGYYDKSPFHRVIPKFMAQTGAPATPNPPENPKGGRSIWGGAFEDEIRPALRHGARGVLSMANKGPGTNGSQFFITFDKAPHLDGLNTVFGRVIGDEGLATLAKMEAVEVDRKNRPKEPVRIENVTIHANPLAG

SEQ ID NO: 316486 - protein, 120 aa, Zea mays
  Clone ID: MRT4577_51706C.1.pep
MDAAMALALLFFCVLLLASGAIAFLLIRHCLARAPPHRHRQAQPEAAAKQLQQQALLAIKKEPAPRRLAWREVEALTGGFDEAAVVGRGGSSTVYLARLLDGSPVAVKVHPLVRPPSAGC

SEQ ID NO: 316487 - protein, 194 aa, Zea mays
  Clone ID: MRT4577_51707C.1.pep
RGASARPMQPHAAAFRSSQAIVAVAIGTHVVEFDALSGSKIASIDLGARVVRMAYSPTTSHVVIAILEDATIRSCDFATEQTLVLHSPEKKTDHVSIDTEVHLALTPLEPIVFFGFHKRMSVTGTVDGGRPPTKIKTDLKKPIVNLACHPRLPVLYVAYAEGLIRAYNIQTYAVHYTLQLAVDSTIKLIGAGAF

SEQ ID NO: 316488 - protein, 99 aa, Zea mays
  unsure (1)..(99): unsure at all Xaa locations
  Clone ID: MRT4577_51708C.1.pep
IEPSGVSYKYFALALGKGVQTAKIEIXKLKLLEFPCRKGIVEVAKIIYEVQDKAKAYAFELKLICICNKWNRQHLKVPNELLEQAKAPAQPALKEMDSD

SEQ ID NO: 316489 - protein, 35 aa, Zea mays
  Clone ID: MRT4577_51709C.1.pep
TPPGSTRLINPSYVGTIIVAEANYVASKNHQLGGA

SEQ ID NO: 316490 - protein, 87 aa, Zea mays
  Clone ID: MRT4577_5170C.1.pep
VHYKIAEVKHVTRARLKELIRKPLAGMQEVNVLPMVQPGGVHIRLLFGRPMSRNEHPRLDCGHAPHPLNKLVTACRPSGCIFTHTAC

SEQ ID NO: 316491 - protein, 92 aa, Zea mays
  unsure (1)..(92): unsure at all Xaa locations
  Clone ID: MRT4577_51710C.1.pep
SNGADQFIVSDPCKVPQAKPAMTLMSGMAGLMSQTFATTHQKVYSLTCTMATAGDXRQPPMAAMALEGDQAQNSQYSAKGKSTRQPXNVTLT

SEQ ID NO: 316492 - protein, 190 aa, Zea mays
  unsure (1)..(190): unsure at all Xaa locations
  Clone ID: MRT4577_51711C.1.pep
MKFVLPKPSAVRHQELETHDHHNLRAFYDRMISHQELAQALAEEXRCYDFGILXACDSCSFXVLSXVFTSHGDPLLLRKXHPWLQGHCRRYDQHNWNAVHDRILXRDLYAIDLLNVNRRDXDMXPDLTDTAKAMIRXPITPSQIGKLHNLNIPHDGRNDPITYRRTFSTTIRNEVMMHLLIPLLETPLTL

SEQ ID NO: 316493 - protein, 40 aa, Zea mays
  Clone ID: MRT4577_51712C.1.pep
HMGRHRVNTAKRNEHVGHSSQSAAAILYPYVCSSNCSYVK

SEQ ID NO: 316494 - protein, 551 aa, Zea mays
  Clone ID: MRT4577_51713C.1.pep
MESLRLAVTHRPALPLPTSHSHLRRRHLHLHLHSYPNPLSLSPPIASHLSPIPRRHLPPLLASASASQASSKPAASAASGGAKPLPLFLSLAAGLAVRFLVPRPAEVTPEAWQLLSIFLSTIAGLVLGPLPVGAWAFLGLTATVATRTLPFTAAFGAFTNEVIWLIVISFFFARGFVKTGLGDRVATYFVKWLGRSTLGLSYGLAISEALISPAMPSTTARAGGVFLPIVKSLSLSSGSKPNDPSAKKLGSYLVQSQLQAAANSSALFLTAAAQNLLCLKLAEEIGVSIGNPWITWFKVSSVPAVLGLLVTPYLIYKIFPPEIKDTPEAPALAAEKLKNMGPVTKNEWVMIGTMLLAVSLWIFGETIGVSSVVAAMIGLSILLVLGVLNWEDCLNEKSAWDTLAWFAILVGLAGQLTNLGIVSWMSNCVAKVLQSFSLSWPAAFVVLQASYFFIHYIFASQTAHVGALYSAFLAMHLAAGVPALMSALALAYNANLFGALTHYSSGQSAVYFGAGYVDLPDVFKLGFITAAINAVIWGVAGALWWKFLGLY

SEQ ID NO: 316495 - protein, 125 aa, Zea mays
  Clone ID: MRT4577_51714C.1.pep
RSITPRVRSPSPPPTPTTTTDGGDDACGGGGGAAPPSRPAPPLPGLLGRHRRLQIRRPAGARAPRAGRGGWREVHVRQGAGRQGGRASRTQGHRREVVREWNRRSGVWELLEFFWTLLAFNNLPK

SEQ ID NO: 316496 - protein, 65 aa, Zea mays
  Clone ID: MRT4577_51715C.1.pep
LRMPDVRGLVSEPQNRRKYEGLKISLRIQFSILNKENLAPPVSRSQTSPSSPCRLIYPYLVHRAF

SEQ ID NO: 316497 - protein, 37 aa, Zea mays
  unsure (1)..(37): unsure at all Xaa locations
  Clone ID: MRT4577_51716C.1.pep
LLCLLLPAAGAGRAPYSSNILXFSCMNMDVXPQXTTT

SEQ ID NO: 316498 - protein, 69 aa, Zea mays
  unsure (1)..(69): unsure at all Xaa locations
  Clone ID: MRT4577_51717C.1.pep
LPFTHRVSVAPSAFLTQXHLLPFYLXTAPIVGALLPLLLLLPFVRRGVCPPAAFCLPPFLGGRPLSDCL

SEQ ID NO: 316499 - protein, 56 aa, Zea mays
  Clone ID: MRT4577_51718C.1.pep
TEKTTEGDTTTRERSSYTPSRMVKSRQNIKPFFSLRPNGRSDPPYNPLSVFSQDPG

SEQ ID NO: 316500 - protein, 91 aa, Zea mays
  unsure (1)..(91): unsure at all Xaa locations
  Clone ID: MRT4577_51719C.1.pep
FEQFFQIQAYLLNEWSILFFIYFIYNIXRLVCLRYFGGGKIHMLGHGRRSNFLCLAFQNGKIELEAVVTALRNNLLACLPCVGLLYHAISC

SEQ ID NO: 316501 - protein, 33 aa, Zea mays
  Clone ID: MRT4577_5171C.1.pep
SIHNISFSIPTIIYHYFHPWEGAKAPGHTLHHT

SEQ ID NO: 316502 - protein, 89 aa, Zea mays
  unsure (1)..(89): unsure at all Xaa locations
  Clone ID: MRT4577_51720C.1.pep
QQKLFPIKKLAALNPPAYXQKQILLPFSQLAAPNRVSFLTKQQFLPFXKQFSANPPTLLQLQQFLPFVQLALKNPTASYQQNIIGGALF

SEQ ID NO: 316503 - protein, 81 aa, Zea mays
  Clone ID: MRT4577_51721C.1.pep
PFAVRVSTPRIVRVGCCLIRPVCSRISKPCLFQWYYSPSQCMSTVHATCCRVQLVSMVVFPFLSSALLLGGGGGGAALCMH

SEQ ID NO: 316504 - protein, 51 aa, Zea mays
  Clone ID: MRT4577_51722C.1.pep
HLSLSLSRLLTRPPRTCGGPWMLFHLMTFKTMLAIRLLEPTSEIYSLQALS

SEQ ID NO: 316505 - protein, 45 aa, Zea mays
  Clone ID: MRT4577_51723C.1.pep
VKNGVPYWLKKNSWGESWGENGYFKMELGKNMCGVATCASYPIVA

SEQ ID NO: 316506 - protein, 172 aa, Zea mays
  Clone ID: MRT4577_51724C.1.pep
MVKYSRDPSNPTKSAKACGKDLRVHFKNTRETAFALRRMPLGKAKRYLEDVLAHKQAIPFRRYCRGVGRTAQVKNHQPNGQGRWPAKSAQFVLDLLKNAESNAEVKGLDVDNLYISHIQVNQAQKQRRRTYRAHGRINPYMSNPCHIELILSEKEEPVKKEADNVVAPRKAI

SEQ ID NO: 316507 - protein, 107 aa, Zea mays
  Clone ID: MRT4577_51725C.1.pep
KSPSTGFLGRFPGAKRGRFSPFSKRAKNGRPQNCRGNPPRIIIFLRWAPVKHSPPKICKGSLFSKKLKKRGFKKIRGVFRLKLKKMGAMPTTIVKRCPFAGCLGAPG

SEQ ID NO: 316508 - protein, 104 aa, Zea mays
  Clone ID: MRT4577_51726C.1.pep
MDPSERPAVVFDNGTGYSKLGFAGNSEPSFTIPTVVAVNESFLDQSEQCSSANWLAQYNAGVMADLDFFIGDEALSHFKTSGLYSLRSPIRHGQVNDWDTMERF

SEQ ID NO: 316509 - protein, 34 aa, Zea mays
  Clone ID: MRT4577_51727C.1.pep
NQYYHHNIIYFVYKAEFVTINGASNDLAPNRTQN

SEQ ID NO: 316510 - protein, 65 aa, Zea mays
  Clone ID: MRT4577_51728C.1.pep
LHRLFIQGEIQFAGRGILCFSSKHLLYRYPKRESYSGEGLGNSLRSVVITVDELFSRCGRSQYHS

SEQ ID NO: 316511 - protein, 247 aa, Zea mays
  unsure (1)..(247): unsure at all Xaa locations
  Clone ID: MRT4577_51729C.1.pep
MATASSSGGAGALVLAFVTVAVLLSPALAAPLDGAGFHSATCPQLESIVLSSVQAALQREVALAAGLLRIFFHDCFPQGCDASVYLKGSGTEQAMGPNTTLQPRALQLVEDIRAKVHAACGATVSCADISALATRDAVVLSGGPNYTVPQGQFDSLAPASQNAVNALPSPATSSVSALARAFSAKGLRDLADLVALSGAHTVGRTGCPFFRDRAQRMDDAFSXRLAANCSAAPSRLXNLDVVTPDLF

SEQ ID NO: 316512 - protein, 77 aa, Zea mays
  Clone ID: MRT4577_5172C.1.pep
LSHPVPEQRVWNSFFGAPGAHHGGLLLNGPCWDPALTSPRANLGGAEGALGHRKQGKKGRSCGEMTLIFDCYPNLDL

SEQ ID NO: 316513 - protein, 48 aa, Zea mays
  Clone ID: MRT4577_51730C.1.pep
WVCVSVVIGPIINDISVTCIWHVSLHVMGLYILNLSSLVAKKKKKKRP

SEQ ID NO: 316514 - protein, 73 aa, Zea mays
  Clone ID: MRT4577_51731C.1.pep
NSYTYRIEHQNYGSFKLIKSIKLCSGKNKPFMLLCSILKLLYLKKCCTKQGSILLNFESNLLLMLVTLIFSNN

SEQ ID NO: 316515 - protein, 192 aa, Zea mays
  unsure (1)..(192): unsure at all Xaa locations
  Clone ID: MRT4577_51732C.1.pep
HSPRASGGLVEMGDAVDDIICATDAAVAVEDAASGKPAMLSSLGGQGEEEHEEKDNEDKSGESEVINPPEDAGGEATSPLEGLKPRLSKGNQSHGPNAVKSKSPTSGDEGQTRKKAPNSSLPVSHGDAGVGSNKDGKNESRSSSVDATLLDDSKEKRKTXKPLAQLFSIKSDEEQSNGGECXASKSWQHSII

SEQ ID NO: 316516 - protein, 76 aa, Zea mays
  Clone ID: MRT4577_51733C.1.pep
LELGLRLRINDFDAAMAYPVARSMPGVYTGDIGAIHEGNYTRTGDTMMYGALAVDVAPSWAWVRSYWIAAGAERHG

SEQ ID NO: 316517 - protein, 108 aa, Zea mays
  Clone ID: MRT4577_51734C.1.pep
HSPRASGGLVEMGDAVDDIICATDAAVAVEDAASGKPAMLSSLGGQGEEEHEEKDNEDKSGESEVINPPEDAGGEATSPLEGRKPRLSKGNQSHGPNAVKSKSPTSGD

SEQ ID NO: 316518 - protein, 321 aa, Zea mays
  Clone ID: MRT4577_51735C.1.pep
CHGNQSHGPNAVKSKSPTSGDEGQTRKKAPNSSLPKAPIVQVSHGDAGVGSNKDGKNESRSSSVDATLLDDSKEKRKTQKPLAQLFSIKSDEEQSNGESAKPRKVGSIPSYGFTFKCDERSEKRREFYSKLEEKIHARELEISNLQAKSKETEEAELKMLRKSLNFKATPMPSFYKEPTPVKVELKKIPPTRAKSPKFGRSKNKSTPETEENATADQPAHLSLEENVSQTGVKKPTPLNPAKKPQRKSLPRLPSEETGPLDATSRQLIKSAKLDAVSAPETGSATGQVQLQGSETETDSGQGPVEAGANPDEQDASEQSVV

SEQ ID NO: 316519 - protein, 78 aa, Zea mays
  Clone ID: MRT4577_51736C.1.pep
GGRPGRFFFFFFFFNFFFFFFFFFFFPIIFFPYKLSLPIPRDNTGHGKHCHPGGGGTQRNPSPLKEKTSELGSKPAAP

SEQ ID NO: 316520 - protein, 65 aa, Zea mays
  Clone ID: MRT4577_51737C.1.pep
VTSYIRHRKSRKQGLEKLHFLVPGQGFVEGLVMGLRNGLAPGVGRRPSPGCRRGGARAQRGEREK

SEQ ID NO: 316521 - protein, 105 aa, Zea mays
  unsure (1)..(105): unsure at all Xaa locations
  Clone ID: MRT4577_51738C.1.pep
NSDFNPDIXVVELCNEDDFLVLACDGIWDCMSSQQLVDFIHEHINTESSLSAVCERVLDRCLAPSTMGGDGCDNMAMILVQFKKPVSDKKKADVGEQSAKGKEES

SEQ ID NO: 316522 - protein, 127 aa, Zea mays
  unsure (1)..(127): unsure at all Xaa locations
  Clone ID: MRT4577_51739C.1.pep
KNGDARVRKDGGLFKKILTGGEKWENPKWPDEVXVHYEAQLEDGTVVAKADGKEFTVMEGHFCPALANAVKTMKKGEKVLFTVKPLYGFGEKGKPAACAEGAVPANATLQNTFVDVSWKTVSEVTDY

SEQ ID NO: 316523 - protein, 118 aa, Zea mays
  Clone ID: MRT4577_5173C.1.pep
MASEEGVVIACHTKAEFDAQMAKAKEAGKLVVIDFTASWCGPCRAIAPLFVEHAKKYTQAVFLKVDVDELKEVTAEYKIEAMPTFHFIKNGETVETIVGARKDELLALIQKHTASASA

SEQ ID NO: 316524 - protein, 62 aa, Zea mays
  Clone ID: MRT4577_51740C.1.pep
DRHIKMELRSNKGEGQRLTYKNHKGSQANELAILTPCTICINKRLMDINQNELVMTDLYKIS

SEQ ID NO: 316525 - protein, 137 aa, Zea mays
  Clone ID: MRT4577_51741C.1.pep
MTHSLKITVHNCEHLEDVETGGKNDPYVRISLACTDDKQYGAHKTSTKKNAGKNPEWNETITFENYEKSTSPECFIEVMEQDMTADAPIGYCMIPLTQVLNAENHVLKGRFNLFNTKGKEHGSISPDLAIVAPGQAA

SEQ ID NO: 316526 - protein, 110 aa, Zea mays
  Clone ID: MRT4577_51742C.1.pep
LSLRRPLANPAFFLGPTMFVFCSPGRVGVLKTLFWRVGVLADPMFFHGYEPLYGGRFLGRILHLGKLKGTFFLRVRPPRKTMARMPFGPGLPSCAVPGNQKKTSLLPPPP

SEQ ID NO: 316527 - protein, 115 aa, Zea mays
  unsure (1)..(115): unsure at all Xaa locations
  Clone ID: MRT4577_51743C.1.pep
FGHQEARIRGYQAVQHNNQAHLERAVQAHPVPVFIHGNSAFQFYNSGVFSGPXETPLPSAXVPVVXYGSLVKDSVGGKWWIVNNLWGQGWAXNGYVRMARRVRAREGMCSFAIKP

SEQ ID NO: 316528 - protein, 81 aa, Zea mays
  Clone ID: MRT4577_51744C.1.pep
MPELATGGGGGDIGKRIGHGGGHGRYDAGVYAISFCYSPMGKYINTLFKKQIELHWLCHWAAKKSIMTGWYTSTGELSTTI

SEQ ID NO: 316529 - protein, 105 aa, Zea mays
  unsure (1)..(105): unsure at all Xaa locations
  Clone ID: MRT4577_51745C.1.pep
APXPRTRPTARRTPPATXPRTAXAPXAPPQARPPGAXPRGRRGRRPGPPPRAPAAPPPSPPTPPPTTPPAGPARPTGAQGDQPGSSATPPGATHNEDPGPPNRTA

SEQ ID NO: 316530 - protein, 86 aa, Zea mays
  Clone ID: MRT4577_51746C.1.pep
FRKMATFLLVVLIIIHVNISYFKQPALTVFWPVSQNVCPFRVTIQQVFYNQDYAVCSHVIHISYGSGGQAAHSRSKLPSSKIMHCP

SEQ ID NO: 316531 - protein, 100 aa, Zea mays
  unsure (1)..(100): unsure at all Xaa locations
  Clone ID: MRT4577_51747C.1.pep
PAADPGQRPSMGAVPKMLGGGVLSPCMSELCFDPPLELLAGGEHVSGRVREASWMXLGFWPVDPPMLARAWVMFCGLLGPIKNSXXGVALPPPXXSYYXX

SEQ ID NO: 316532 - protein, 117 aa, Zea mays
  unsure (1)..(117): unsure at all Xaa locations
  Clone ID: MRT4577_51748C.1.pep
MAAVTAADIGLSSSSASSPADAANAKAASPXSSPCKHLQILSSGEPAAXGSPCARAVLAHVSTTXTIVAVPAKTSNKHDEGLVTNKYKPKDADVRRCLCNTRITCDDAPGETWHMVF

SEQ ID NO: 316533 - protein, 117 aa, Zea mays
  Clone ID: MRT4577_51749C.1.pep
MSVRIKAVVDRFVMELKEALDADIQDRVMKEREMQSYIAEREREVAEREAAWKAELSRREAEIARQEARLKVERENLEKEKSVLMGTASSQDSQDGALEITVSGEKYRCLRFSKAKK

SEQ ID NO: 316534 - protein, 41 aa, Zea mays
  Clone ID: MRT4577_5174C.1.pep
SGWIPRSPNTRNYRSRCWLRSPVAFMGIKSARRLSGPRFLL

SEQ ID NO: 316535 - protein, 39 aa, Zea mays
  Clone ID: MRT4577_51750C.1.pep
PCVTSSSTVVLRYTISCMVHILRCICQMCSFMLNNCPTR

SEQ ID NO: 316536 - protein, 254 aa, Zea mays
  Clone ID: MRT4577_51751C.1.pep
PRVRTDPNSTGPPPDMQLLLPFVESALPVAYGVLAIQLFHEIGHFLAAFPKNVKLGIPFFIPNFTLGTFGAITQFKSILPDRKTMFDISMAGPVAGAALSFSMFFVGLLLSSNPVGASDLVEVPSQLFQGSLLLGLISRATLGYRAMHAATVSIHPLVIAGWCGLTTSAFNMLPVGCLDGGRALQLGGPLSLPWGLYVLICQRTPEKPCLNDVSDVGSWRRAALIASVFLVVLTLIPLWDELAEELGVGLVSSF

SEQ ID NO: 316537 - protein, 44 aa, Zea mays
  Clone ID: MRT4577_51752C.1.pep
SEVRFMHDGQERLGGVVGDSFVPLVDAAKKPVPICVCSAYVKIH

SEQ ID NO: 316538 - protein, 561 aa, Zea mays
  Clone ID: MRT4577_51753C.1.pep
MAAALASSPLVHLTTSRLRLPRPQASASSSGPVCSIGVCLGWRLKVGWRALRRRDRLRCFSTDGGGGEEGEKRGEEEASATAAASPASAPAETQVGAGEELASERSRSGSFSSSSSSSGNPGVSSEPPLLSFSVDNIDTVKLLELLGPEKVDPVDVMAIKEKLFGYTTFWLTKEEPFGDLGEGVLFIGNLRGKREEIFAKLQRQVRELTGDKYNLFMVEEPNSEGDDPRGGPRVSFGLLRKEVSEPGPTTLWQYVISLLLFLLTMFSCIELGIASKISSLPPEIVSYFTDPNATGPPPDMQLLLPFVESALPVAYGVLSIQLFHEIGHFLAAFPKNVKLGIPFFIPNFTLGTFGAITQFKSILPDRKTMFDISMAGPVAGAALSFSMFFVGLLLSSNPVGASDLVEVPSQLFQGSLLLGLISRATLGYRAMHAATVSIHPLVIAGWCGLTTSAFNMLPVGCLDGGRALQGAFGKDALFGFGLTTYSLLGLGVLGGPLSLPWGLYVLICQRTPEKPCLNDVSDVGSWRRAALIASVFLVVLTLIPLWDELAEELGVGLVSSF

SEQ ID NO: 316539 - protein, 175 aa, Zea mays
  Clone ID: MRT4577_51754C.1.pep
MAAALWTLLVAVALSAALASNRPVAATATAAAEAANEVLRAHQLPGGLLPAGITAFRHDAATGAFEARLDAPCTARFEVGLRYNATVSGVISPGQIADISGVAAQDLFMWFPVHDIKVDIPSSGVIYFNVGVVKKHLPLAVFDAPPACTPDPLLQRLEDVGEGGLAVVGAAASRR

SEQ ID NO: 316540 - protein, 53 aa, Zea mays
  Clone ID: MRT4577_51755C.1.pep
TGPSPQRSPPASGQKLHQLLKPETQTTLASLIDAPYPTTSSHIFFYSSSPVLR

SEQ ID NO: 316541 - protein, 95 aa, Zea mays
  Clone ID: MRT4577_51756C.1.pep
LLPTFAVAAEEQRAQVAELQARAAGVPDELLVCLVGNMITEEGLPTYMTMGNRIGPAEGVTDATGRDGHGWARWLRGWTAEENRHGDLLNRYLYL

SEQ ID NO: 316542 - protein, 96 aa, Zea mays
  Clone ID: MRT4577_51757C.1.pep
KTAGLLFPSLQCFLCWPPLHDPQAVRNPPARQFFRIIRGAGGSSPASLPVILMMQPGVGFFCSTPCCPQYYYLRCCPPLLRTDNIITPYKIIPRFF

SEQ ID NO: 316543 - protein, 86 aa, Zea mays
  Clone ID: MRT4577_51758C.1.pep
SLRGVFVLDTFTLLLKYSPSLIPIPPMCIKFAPFSYTFDFSVVSVCSVIVNCFFTLFQPMFLVSSLTTYHTHLIHTPPLLAFFSRS

SEQ ID NO: 316544 - protein, 80 aa, Zea mays
  Clone ID: MRT4577_51759C.1.pep
PGGGERGPSLYTGTTLFTHFRRVQHRGGFLTVPMERFTHTQRGAPLNNGFYKTRGFTIYPLHMFYVEGGAFSEEKRKALL

SEQ ID NO: 316545 - protein, 110 aa, Zea mays
  unsure (1)..(110): unsure at all Xaa locations
  Clone ID: MRT4577_5175C.1.pep
SPGPARAAAPAWFAARPSPPLFFFFGWSVHLGGRRRAVGDLPGGAFLLXGXGGGLAVFGGGLSVPVVVPCLXAASGGXLFGFALGLXXGVSVLGAFLXXFFPGLLXXPAR

SEQ ID NO: 316546 - protein, 114 aa, Zea mays
  Clone ID: MRT4577_51760C.1.pep
MISFKERIYVAMRRFLLRNRKKGKKKKGEKKESSSKYVLFLKQARLACFANFSGRTVDHPDLLKYSCQVECRVRPVKPARIWSARTTEPQQEKSDGEVSSSGSSVAADLDARSH

SEQ ID NO: 316547 - protein, 63 aa, Zea mays
  Clone ID: MRT4577_51761C.1.pep
SGGRAGKSFCARSKGRRQWFSSNPFWCSLHRLSPPHCLCLPVQLTSSTEYPNLHDNIYDYCLY

SEQ ID NO: 316548 - protein, 229 aa, Zea mays
  unsure (1)..(229): unsure at all Xaa locations
  Clone ID: MRT4577_51762C.1.pep
PPPPPPPPPPPPPPPPPPXPXXXPPPPPPPPPPPPPPPPPPPXXPPPPPPPPPPPXPPPPXXPPPPPXPPPPPPPXPPPPPPPPXPPXPPPPPPXPXPPPPRAPLPXGPPPRXCRPRPCRXPPSSPSRXGVPPVXLXXWXPLVLGPALPLAGPGVCLRFSSGFSPSLASPPVPLPRVGPPWLSGLRWVPLPPRGFPALPPFSPVLGARFSAVLGSLASSFRPAGAPPPV

SEQ ID NO: 316549 - protein, 208 aa, Zea mays
  Clone ID: MRT4577_51763C.1.pep
CICTFWNGWSYIGCSTLIFLSIIVTLQPMEIYVDDEAKLTLHGLVQHYIKLSEAEKNRKLNDLLDALDFNQVVIFVKSVSRAAELNKLLCECNFPSICIHSGMTQEERLTRYKNFKEGHKRILVATDLVGRGIDIERVNIVVNYDMPDSADTYLHRVGRAGRFGTKGLAITFVSSSSDSDVLNQVQERFEVDIKELPEQIDTSTYMPS

SEQ ID NO: 316550 - protein, 91 aa, Zea mays
  Clone ID: MRT4577_51764C.1.pep
WFNQMPYITLLRSCAATCIWHQDSHYNVYVCVIPLICSQVFCTNSQSRHGHMNCGLVILSMQHQRLWNFLSLVLSGSATLLATPCRVVVLP

SEQ ID NO: 316551 - protein, 55 aa, Zea mays
  Clone ID: MRT4577_51765C.1.pep
GKGNLDGQGPTVWSKNSCTKKYDCKNLPNTLVKDYMNNGEVFEDTLFNFKFFHMN

SEQ ID NO: 316552 - protein, 67 aa, Zea mays
  unsure (1)..(67): unsure at all Xaa locations
  Clone ID: MRT4577_51766C.1.pep
TGEGMEXMEFSKAESNMNDLVLGYQQYQDGTAYXEEYKDXEEVQANDMLGEGCYRVKPCGHRANGPR

SEQ ID NO: 316553 - protein, 57 aa, Zea mays
  Clone ID: MRT4577_51767C.1.pep
AFEGASFPLGIGSSEFKCRIEFFFYHSHFFYPSMLEGEASLANMPIMCPPVKKKTKY

SEQ ID NO: 316554 - protein, 119 aa, Zea mays
  Clone ID: MRT4577_51768C.1.pep
VLNGCFAIVHVWSTFTRSYYCAGAGVGGSGTRRPRRTWAQRSRHHTHAGDSGWWWSASSEAEEQEEEEERRGSDLATRRTPPVPPSPRPLDPADPAPPPALPSFRHRPPPTHPIHPRPG

SEQ ID NO: 316555 - protein, 180 aa, Zea mays
  unsure (1)..(180): unsure at all Xaa locations
  Clone ID: MRT4577_51769C.1.pep
MSLTGTAAFRATKIPRALPPKCGEPAASCWGWASFYPPPGAAKSTKAPPPWCVYLIASSXDPXRTYVGVTTDFPRRIHMLENANLIHSFSXLRQHNGELKGGAKASSAGRPWNLACLVEGFANRSEACEFESKWKIVSRKIARKRTELSMKSVLQHREAALSRVETFMDCSHLKIKWQSS

SEQ ID NO: 316556 - protein, 50 aa, Zea mays
  unsure (1)..(50): unsure at all Xaa locations
  Clone ID: MRT4577_5176C.1.pep
SPHLSSPLRRLLRSRRPNRWRPTLFGYARXGPQRELKYALESFWGWKSTA

SEQ ID NO: 316557 - protein, 100 aa, Zea mays
  Clone ID: MRT4577_51770C.1.pep
YTWQSPRVCTQSSACVPYRLVSAMNLTAVRSTESSLVKPDSGATIKTFPSKRAYPANTPRRTIWLITCAISALAGEVVSRSIDRINYRIEAHALNSTGRV

SEQ ID NO: 316558 - protein, 77 aa, Zea mays
  Clone ID: MRT4577_51771C.1.pep
ESFSGPGRPAARPPWPLQLLVAPLPSFSSLCSQARSRLSGHEHESQCSVGLAHGYSISMSTLSFVWDHGVPSSRSRT

SEQ ID NO: 316559 - protein, 62 aa, Zea mays
  Clone ID: MRT4577_51772C.1.pep
VNECRDRYEPDARLGATSRRTFPVVSCTSARRPKYRQATTCGKPLSQAQIPPVAVAGGGGKY

SEQ ID NO: 316560 - protein, 94 aa, Zea mays
  unsure (1)..(94): unsure at all Xaa locations
  Clone ID: MRT4577_51773C.1.pep
MGSTGGDVARLVDEEARMHAMRLAXGIILAMTLKNHMPLGLLDVLQQEVGGPQVELPPEAVAAXMPTGPRGPXALGASCNXMLRLLVYYEILRR

SEQ ID NO: 316561 - protein, 46 aa, Zea mays
  unsure (1)..(46): unsure at all Xaa locations
  Clone ID: MRT4577_51774C.1.pep
LGPEVPVMGQIELDKDHESLWRWEEHLHGQADTXHLGETAEPEVTE

SEQ ID NO: 316562 - protein, 164 aa, Zea mays
  unsure (1)..(164): unsure at all Xaa locations
  Clone ID: MRT4577_51775C.1.pep
GLCRTTANQPTLLHKLGGQLQLYSHFSGGVRXARTSAPYCPPYERILDMGGGLSQNLXGSSMSVSGGINAPXMPTPLFGNAPLEKGGKNFMIECMMGGVSDSATNTANAPIERAKLFIQNQDEMNKSGTLSQPYKGIADCFKRTIKDEGFSFLWRGNTDNVIRY

SEQ ID NO: 316563 - protein, 127 aa, Zea mays
  Clone ID: MRT4577_51776C.1.pep
MSLFRRLFYRRPPDGLVEISGNILVFDHCYSTDLLEEDELMPYIGGILKQLLGRHSIDSFMVFNFEGSKKDNQIASIFSYYDMSVMGYPRNYEGCPLLTMEMIHHFLRSSESWLSLSQDNFLLIHAE

SEQ ID NO: 316564 - protein, 83 aa, Zea mays
  Clone ID: MRT4577_51777C.1.pep
YRAAIDAGRPSQNSTSPNATTRVATGPIAEPLAPIGDMDLGVQYAHQLSVAILQEHRIVHCPADSPSARASRSRRFRRHRPRV

SEQ ID NO: 316565 - protein, 71 aa, Zea mays
  Clone ID: MRT4577_51778C.1.pep
VSEAPCSCGTGGSCEHHEKGRQRYGLFKDPVSGAELREALVAKLLPCSRADSGLPCRMLRAGHPYTTKASG

SEQ ID NO: 316566 - protein, 36 aa, Zea mays
  Clone ID: MRT4577_51779C.1.pep
ISCFVKKTHHVWQVWCKKELVTRGDDWQFYPVLLLL

SEQ ID NO: 316567 - protein, 170 aa, Zea mays
  unsure (1)..(170): unsure at all Xaa locations
  Clone ID: MRT4577_5177C.1.pep
MRSGRRMAAALVALAWVLAAVAVAAAQKYNAIFNFGDSITDTXXNLCSSGRPSQITFTQPPYGETYFGTPTCRCCDGRVIPDFLCSKFGLPFLPPSKSTTAFFRSLGLSDKIWNNGPISFQLEWFQQVASAVCGGGQAQQADCKSYLANSLFVFGEFGGNDYNAMXLFGN

SEQ ID NO: 316568 - protein, 71 aa, Zea mays
  unsure (1)..(71): unsure at all Xaa locations
  Clone ID: MRT4577_51780C.1.pep
ISVVYMSSNPVEHQHTKHIEIDLHFVRERVAVVDLWVLHVSTTSXYVDIFTKGFLSSVFTEFRTSLNVRSG

SEQ ID NO: 316569 - protein, 247 aa, Zea mays
  unsure (1)..(247): unsure at all Xaa locations
  Clone ID: MRT4577_51781C.1.pep
MAAAAAAQPRVMVLPFPAQGHVIPLMELSRKLAGHGLAVDFVNTEFNHDLVMEAMAEKGAIPDGIHMLTVPDGLGPGDDHADIGKFVKDLPAAMSGRLEEMIRSRKIRWVIVDVSMSWALQVATTAGARVASFSTYSAAVFALRMNLPKLIEDGVLDESGNVKGQGKIQMVPPIDASEIPWVSLASTSAPERRRNNIQNVLKTNLSMPLXAEVVICNTXMELEPDALALLPNALPXGPLVEPTSRPA

SEQ ID NO: 316570 - protein, 88 aa, Zea mays
  Clone ID: MRT4577_51782C.1.pep
HSCPYRVDGCMRVQGDLLIAHVRRRLQGDGLSVNNRSRLVRLIVLATPWVTLAYRSARPANHLDEEEEDGFQCPWLPCRASRSYERGT

SEQ ID NO: 316571 - protein, 145 aa, Zea mays
  unsure (1)..(145): unsure at all Xaa locations
  Clone ID: MRT4577_51783C.1.pep
LGLXLPVLPVXVPRLGAPXLAXVAXPLAGVAPSARLVAXRLGCAPSGAGAVAGXVXGLRLAFLLLFLLRXASAAASSALSPVLXLAVPLLSLCAAAAASSSGLLXSPAVVLLGRLSPGCGRARRRRCAWAPXAPLCRXASAPLSL

SEQ ID NO: 316572 - protein, 157 aa, Zea mays
  unsure (1)..(157): unsure at all Xaa locations
  Clone ID: MRT4577_51784C.1.pep
QILDQLELSGAGRPGLPMMPQQPSGPQVNGMHPSVTAGVNRFLLPVSECECTLSTLLDELQPDQWPVEAGNRAIRCTGVALSVAAGLLGACMPGTGAMIIALLGGPCTEGPGMIVSKDLAETXIIRSHTXFDKDAAVCADTIVGQGNTTALENVWAR

SEQ ID NO: 316573 - protein, 77 aa, Zea mays
  Clone ID: MRT4577_51785C.1.pep
PRIAGLLSVEQRTRGLCDARGDILQVCHHHVSSRGETGFRCRFSSPSRPSRHKCIIHPGMCNVIPLVPWHFIVWDLR

SEQ ID NO: 316574 - protein, 74 aa, Zea mays
  Clone ID: MRT4577_51786C.1.pep
IALPPKPQSLRSSCITRNNQILNALNKRTIKDRRHIKFRDTQMPTKKQHHLKTTNNNQYSAKNIHYIKCTMACE

SEQ ID NO: 316575 - protein, 59 aa, Zea mays
  Clone ID: MRT4577_51787C.1.pep
PESGETPHVAGGHIACAWAGKDVTSVVTEKCARAQRQRRALVCALLHRCSERRLCGARV

SEQ ID NO: 316576 - protein, 47 aa, Zea mays
  Clone ID: MRT4577_51788C.1.pep
VTNIRLSRYMSHFQELTLEHQHPILLPLGKNRVRATKRRDTGNCPPD

SEQ ID NO: 316577 - protein, 148 aa, Zea mays
  Clone ID: MRT4577_51789C.1.pep
MGNNSTMSTEMEWLETLAADLTKHMDKVQEHLAKVDVCLGNMKQGGSKNEIAPAAKEKLECEAVTKQLEVETKHAIDQARRAFLKEETARSLTVLELVEEVANCSSPTRRGRRHQGALNTDIPSPVYSHQPLPRPPTTLPQLSLPTYD

SEQ ID NO: 316578 - protein, 591 aa, Zea mays
  Clone ID: MRT4577_5178C.1.pep
MLRISALVENRNHEYEYFRTLHADNVPNNNAFMENESNLKETEGTCTGNIIEKTWVKLLKDATSGRKCNGMEETIHAVIDKAGFASGCPKDASSNVVEGVFTLSCYENPAITACREVLMRNPASWSELNISESFHLPPLNDGNMRRAIFADGHSAGTSTDYKFGFQFDDLEHVRQEDDRRTLEDLYAFPTLLPCAKENALLSEILPMQKDSTLASRVLKFIQNMSMKDPLQPVGIIQECLSKCIKRQVDLIGNQILCKLMGEWRLMDELFVLRAIYLLGSGDMLQQFLITIFDKLDRGNSWDDDFELNNLLQESIRNSADKMLLTAPDSLVVSLAKYDTHNGEEGLSTSKKGRALGFGIDALDMLNFTYKVSWPLDLIINTEALKKYNQVMGFLLKVKRAKFVLDETRKWMWKARGRTTHNFKQHLIVAQKLLHFVDAFHQYVMDRVYHSAWTELCDGMTAATTLDEVMEVHEAYLSSIQRQCFVASDKLWALIASRVKTILGLALDFHNVEQTLSTGGTASAVRTRCEMEIDRIEKQFDECVIFLLRILSFKLNVGHFPHLADLVTRINYNHYFMSDSGSFSAIPGSRPR

SEQ ID NO: 316579 - protein, 63 aa, Zea mays
  unsure (1)..(63): unsure at all Xaa locations
  Clone ID: MRT4577_51790C.1.pep
RRGRLSSXHWPSIYNDKTGVTLAIPNLIALPHMPISPFDVISNKIVPIVFSNNCSVKIANWTL

SEQ ID NO: 316580 - protein, 996 aa, Zea mays
  Clone ID: MRT4577_51791C.1.pep
MVATTRRALFLSCFHGGSEMSPRLSLRPRYPSMPRRPKGVAAAGGGGNGDLEAAVGTGDDEEEKVAVFSVSGMTCAACAGSVEKAVKRLPGIHDAAVDVLWGRAQVVFYPAFVSENKITEAIEDVGFEAKLIDEEVKEKNILLCRLHIKGMACKYCTSTVEFALQASPGVQRASVALATEEAEIRYDRRIISASQLIQAVEETGFEALLVTAGEDQSRIDLKMDGVLDERLIMILKSSIQALPGVENVKFNSELHKVTVSYNPDHTGPRDLIEVIKAATFGHVNASIYLEADGRDQHRYGEIKQYRQSFLWSLIFTIPVFLTSMVFMYIPWLKDGLEKKVVNMMSIGELLRWILSTPVQFVIGRKFYTGAYKAMCRGSPNMDVLIALGTNTAYLYSVYSVLRAATSGNYMSTDFFETSSMLISFILLGKYLEILAKGKTSEAIAKLMDLAPETATLLVYDYEGNVVGEKEIDSRLIQKNDVIKVVPGGKVASDGFVIWGQSHVNESMITGESQPVAKRKGDTVIGGTVNENGVLHVRATFVGSEGALAQIVRLVESAQMAKAPVQKFADHISRVFVPLVILLSMVTWLAWFVAGRLHSYPQSWIPRFMDSFQLALQFGISVMVIACPCALGLATPTAVMVATGVGASHGVLIKGGQALESAQKVDCIVFDKTGTLTIGKPVVVDTRLLKNMVLREFYDYAAAAEVNSEHPLAKAIVEHAKKLRPEGNHMWPEAREFISVTGQGVKAEVSGKSVIVGNKGLMLSSGIGIPLEASEILVEEEGKARTGIIVAVDREVAGVISVSDPTKPNALQVISYLKSMNVESIMVTGDNWGTANAIGREVGIEKIIAEAKPEQKAERVKELQLSGRTVAMVGDGINDSPALVSADVGLAIGAGTDVAIEAADIVLMKSNLEDVVTAIDLSRKAFFRIRMNYVWALGYNVVGIPIAAGVLFPSTGFRLPPWVAGAAMAASSVSVVCWSLLLRYYKAPKIAGTAKEI

SEQ ID NO: 316581 - protein, 95 aa, Zea mays
  unsure (1)..(95): unsure at all Xaa locations
  Clone ID: MRT4577_51792C.1.pep
NTPKQGLITDPDTSIWNNRHADERXGCEKVYGGMDSSHYKGDHTFVPVTRNGYRLVNXLGDVLVDVKTTGFCAGGLASISYSGTTLFVGPTYIIT

SEQ ID NO: 316582 - protein, 999 aa, Zea mays
  Clone ID: MRT4577_51793C.1.pep
MAASTRALFLSCFHGGGGAEVSRHLALRPRYPSNPRRPRSAVVAGEGGEGGGSGGDLEAAKGTADRDEEEKVSVFAVTGMTCAACAGSVEKAVKRLPGIHDAAVDVLGGRAQVVFYPAFVSEGKIREAIEDVGFEAKLINEEVRAKNILVCRFHIKGMTCTSCTNTVESALQAFPGVQRASVALATEEAEIHYDRRIVTASQLIHAVEETGFEAILITTGEDRSRIDLKLDGVLSERLTMILKSSIQALPGVEDIKIDTELHKVTVSYKPDQTGPRDLIEVIESATSGGVTASIYAEAGGREHHRYGEIKRYRQSFLWSLIFTIPVFLTSMVFMYIPGLKDGLEKKVINMMSIGELLRWILSTPVQFVIGRKFYTGAYKAICHGSPNMDVLIALGTNTAYFYSVYSVLRAATSENYMSTDFFETSSMLISFILLGKYLEILAKGKTSEAIAKLMDLAPETATLLMYDYEGNVVGEKEIDSRLIQKNDVIKVVPGGKVASDGFVIWGQSHVNESMITGESRPVAKRKGDTVIGGTVNENGVLHVRATFVGSETALAQIVRLVESAQMAKAPVQKFADQISRVFVPLVIVLSLLTWLVWFLAGRFHGYPYSWIPSSMDSFQLALQFGISVMVIACPCALGLATPTAVMVATGVGASQGVLIKGGQALESAQKVNCIVFDKTGTLTVGKPVVVNTRLLKNMVLREFFDYVAAAEDNSEHPLAKAIVEHAKKFYSEENHIWPEARDFISVPGHGVRAKVCDRSVIVGNKSFMLSSSIDIPVEASEILMEEEEKAQTGIIVAMDQEVVGIISVSDPIKPNAREVISYLKSMNVESIMVTGDNWGTANAIGKEVGIEKIIAEAKPEQKAEKVKELQLLGKTVAMVGDGINDSPALVSANVGLAIGAGTDVAIEAADIVLMKSNLEDVITAIDLSRKTFFRIRMNYVWALGYNVIGIPIAAGVLFPSTRFRLPPWVAGAAMAASSVSVVCWSLLLRYYKSPKKFDN

SEQ ID NO: 316583 - protein, 72 aa, Zea mays
  Clone ID: MRT4577_51794C.1.pep
MANRPQLASLAASAEALHEKRKAKNDPEMMNGHREPEVVARRRRRDAPPASSSSTHVLQEVTYGYTATIDAS

SEQ ID NO: 316584 - protein, 56 aa, Zea mays
  Clone ID: MRT4577_51795C.1.pep
TFKLVPARKCTTIKNLLGTPRKLLSVKNILFFTLDYVGTDSEKKNNFPTRGPNFID

SEQ ID NO: 316585 - protein, 74 aa, Zea mays
  unsure (1)..(74): unsure at all Xaa locations
  Clone ID: MRT4577_51796C.1.pep
PRWRFPSEMPVFWGWSAFGLKKCEISNHVLAPNTLAPQPSPNQVPVHVMHMLLERGVCSFQLVTKXICPLRRPF

SEQ ID NO: 316586 - protein, 67 aa, Zea mays
  unsure (1)..(67): unsure at all Xaa locations
  Clone ID: MRT4577_51797C.1.pep
KTGYTAATMSGRXKGGKGLGQGGXKRHRKVLRDNIQGITKPAIRRLLSXRGGVKRISGXLIYEETRG

SEQ ID NO: 316587 - protein, 132 aa, Zea mays
  Clone ID: MRT4577_51798C.1.pep
MGPTMEVDPRRLVRKTHKGEFQVEVEEPDGFSVEVELGSNVTNIPSKAVEDQTKSNGTDGKVDVEEKDKASDSASHNEDGRTGNNGIPGDVECIDNEKADLMQELILDDVKDTVNLPPIPSLDEFMQGLDSE

SEQ ID NO: 316588 - protein, 423 aa, Zea mays
  unsure (1)..(423): unsure at all Xaa locations
  Clone ID: MRT4577_51799C.1.pep
AWNLWADLCACTFACVCAGDYDKTVRIDNVTRVPPSSASPRTAYGEKEELKGTDVKVLGFGGLPDTIKPGVLGNGKIDSMKVAXEVRVLVRGGIGKXNFYIXKGDPSAGXSNPIGFRKGDAITXADGNSSVIMDSSXHKDYGNRTETSCADNSATIGKGKSDXRGXGARSKHVRAKKHDRMTSFNLSATDPANNGEALGAMSSNLKPPYTNTHXRKDTSTKDAIAMVFGDSFNMDGTYTGDLLGTMTINIATGAGDDRTLTGFGILKANTIGAIRGFGYGTSTGSSGWHKDEKDAMDTNAKDRISKKMTPGACTKVHEDVAHASIGRKTYHENTKTDDLVNFTPTDTKHRFNKPRIGNGVPKAIAKDAIPKNTIGILRNLEVASSSRIVKSLRIGAITDDAXLEHSGVNNEITVSRLNVDGEY

SEQ ID NO: 316589 - protein, 372 aa, Zea mays
  unsure (1)..(372): unsure at all Xaa locations
  Clone ID: MRT4577_5179C.1.pep
MRSGRRMAAALVALAWALAAVAVAAAQKYNAIFNFGDSITDTGNLCTSGRPSQITFTQPPYGETYFGTPTCRCCDGRVIPDFLCSKFGLPFLPPSKSTTADFKEGANMAITGATAMDAPFFRSLGLSDKIWNNGPISFQLEWFQQVASAVCGVGQAQQADCKSYLANSLFVFGEFGGNDYNAMLFGNYSADQASTYTPQVVAAVASGVEKLVAMGAXDVVVPGVLPIGCFPIYLTFYGTSSSADYDSLGCLRKFNDLSTNHNNQLQAQISGLQAKYKSARIMYADFYSAVYDMVKNPGSYGFSTAFQTCCGSGGGKYNYQNSARCGMPGASACSNPAAHLSWDGIHLTEAAYKQITDGWLNGPYCHPAILHS

SEQ ID NO: 316590 - protein, 144 aa, Zea mays
  unsure (1)..(144): unsure at all Xaa locations
  Clone ID: MRT4577_517C.1.pep
GGIYENFHKTEGLFPSCVNKGQVQSFRDSFNIGVAGVLQRGAWXNPXGVPQFNRLAGLSPFAGWGNPEEAPTXSPFQTFPFLNGEWTXPCPAPLTSQGVGVPHRVTAPLARALLPAXFGFVPSLCAPFFGFPLKPLIWGFSLGF

SEQ ID NO: 316591 - protein, 244 aa, Zea mays
  Clone ID: MRT4577_51800C.1.pep
CFSNEMFSAVVYEGSSVFPSGLEGEYTTCISVMPLNNTVLPIQQHDPYRTVPGYHIATGCSDGTVKLWKMTCAEDSLHTKKERHIWELVGMFGAHQGPIDIVSLSGCGRVITVGRNLKKNSTSIHIWEATKIRGDGNFLLGDTLMLQDHIVGLDGLSLGDGRFLLAVYLANELHIYSHKHPSFQNVLHTKNSKEEHLWSCIVLSHSHHDIVGFLWGPKATVVLVHENHLSLFSSWLVTGDNEYM

SEQ ID NO: 316592 - protein, 82 aa, Zea mays
  unsure (1)..(82): unsure at all Xaa locations
  Clone ID: MRT4577_51801C.1.pep
SXXXXXXXXXHNSFQPLISFNCKMNINRVSSSLAQSRSVPFTVHPNKKQSRSVRDYQTQNRAAPFLESGMERLCSTWFRFVH

SEQ ID NO: 316593 - protein, 198 aa, Zea mays
  unsure (1)..(198): unsure at all Xaa locations
  Clone ID: MRT4577_51802C.1.pep
PSLAGDDEEGDRSPNDPVPTWRGAFARRAGPGDTHAPPPPPTPPFLQLALDALASWGSDPKQPHWRHPELRRALASNDQTDELRRIRASVQDSAVKAKEKVRSLHEAIQKLDKYKNIVTRKRQRATEASSSPDKLGAAGACSSSTGALRMGAQNNSAVLSKRVRSSLADARXEGRGSVPTRQGPXLVSNEKNSPVEKE

SEQ ID NO: 316594 - protein, 49 aa, Zea mays
  Clone ID: MRT4577_51803C.1.pep
YNGQRCSTSRLANPSGAAFHSRFHGWIMGLLTVIAQRGAPRGVANTSAS

SEQ ID NO: 316595 - protein, 61 aa, Zea mays
  Clone ID: MRT4577_51804C.1.pep
QLQVNSSAQATPFTCTVFTNVTQYSEISRALHEQLTMVLVFRFGPPVSSPWITGASTRTDF

SEQ ID NO: 316596 - protein, 84 aa, Zea mays
  Clone ID: MRT4577_51805C.1.pep
THTITGCDNSCCGPCLPAPSIMSTPDTHNTHQTVRYTRLEINESIQRATTHYRSATPVLLVLARRWKRWRDLDDDVSVCTNIKA

SEQ ID NO: 316597 - protein, 185 aa, Zea mays
  unsure (1)..(185): unsure at all Xaa locations
  Clone ID: MRT4577_51806C.1.pep
MAQSQQMASRKPPGLRLFGGAGSLRTYQTLVLVLTFFAYACFHMTRKITSIVKSALDPQTKMGFSHWGRLHLHTSEAPALNTGWLPFNTADGSALLGEIDVAFLAAYSIGMFFAGHIGDRIDLRIFLTIGMXVGTAVFTALFGAGYWLNVHSFYYFLSGPTPRRGSPPGDGCTCTPSEALALNTG

SEQ ID NO: 316598 - protein, 41 aa, Zea mays
  Clone ID: MRT4577_51807C.1.pep
GTQRPLCFIVSASQLHTFAQNRKASQIHWTFLHRGAGPKFS

SEQ ID NO: 316599 - protein, 265 aa, Zea mays
  unsure (1)..(265): unsure at all Xaa locations
  Clone ID: MRT4577_51808C.1.pep
MFGFGHHHKDQAPAASGPNQIFKIYCRASEDYCLAVRDGEVVLAPVNPKDETQHWLKDMRFSTTVKDEEGMPAFALVNKATGLAVKHSIGQSHPVKLVPFNPAYEDASVLWTESKDVGKGFRCIRMVNNTRLNFDALNGDKDHGGVHDGTTVVLWEWCKGDNQCWKIWPWAEAHAXSSPAPPWATTPXMGGGPPVHAVRIFCKAGEDYSLTARNGTVCLAPTNPRDDYQHWIKDMRHSNKIRXDEEGYPXAFAIVNKVTGECIKH

SEQ ID NO: 316600 - protein, 30 aa, Zea mays
  Clone ID: MRT4577_51809C.1.pep
TRANDKLSELVMCVAHVFSVCHRFPSALGL

SEQ ID NO: 316601 - protein, 363 aa, Zea mays
  Clone ID: MRT4577_5180C.1.pep
MRSGRLAVAVALAWAFAASAAAAQKYNAIFNFGDSITDTGNLCTNGRPSQITFTQPPYGETYFGTPTCRCCDGRVIPDFLCSRFGLPFLPPSKSTTADFKKGANMAITGATVMDAPFFRSLGLSDKIWNNGPISFQLQWFQQVTSAVCGQDCKSYLANSLFVFGEFGGNDYNAMLFGNYNADQASTYTPQIVSAIAAGVEKLVAMGATDVVVPGVLPIGCFPIYLTVYGTSNSADYDALGCLKKFNDLSTNHNAQLQAQISALQAKYKSARIMYADFYSAVYDMVKNPGSYGFSSVFQACCGSGGGKYNYQNSARCGMSGASACSSPASHLSWDGIHLTEAAYKQITDGWLNGPYCRPAILHS

SEQ ID NO: 316602 - protein, 194 aa, Zea mays
  unsure (1)..(194): unsure at all Xaa locations
  Clone ID: MRT4577_51810C.1.pep
PTRPRTRGRTRGAEMAPPRWRGSLTAGYQFFLALGVLIANLVNYATAHASWGWRVSLGLAGAPAVAIFVGALFLTDTPSSLVMRGRADGARAALLRVRGPDADVEAELRDITKAVEAARRGEDGAFRRMATRREYRPHLVLAVAVPMFFQLTGVIVLAFFAPFVVPTVGFGSSAALIGAVVLGAXNLGFLVLST

SEQ ID NO: 316603 - protein, 52 aa, Zea mays
  unsure (1)..(52): unsure at all Xaa locations
  Clone ID: MRT4577_51811C.1.pep
AGASFFSDSSGLHILYTIRSLXIFVFTYARDLNSSKFASKQRFDNPRVSGRV

SEQ ID NO: 316604 - protein, 115 aa, Zea mays
  Clone ID: MRT4577_51812C.1.pep
LIPIQNKNLSSLILSPVPTPKSDYCFLFRGCDLFYATICFAVRVFVNGGCRRIGAVIVRLHLSVLILPGEVPGLGVNERRPPLSIHAVSLGGIYGCSDATLLLVVTNAGSSSSTG

SEQ ID NO: 316605 - protein, 186 aa, Zea mays
  unsure (1)..(186): unsure at all Xaa locations
  Clone ID: MRT4577_51813C.1.pep
AAARASRDRPRARAREEQARRATEXXNRGGEPXGPDAGXPAXXGRGRRRRPDXRQPGNXKXGRXGXHXXXSHGGDRATXPXXGXGGGAERGSGSRDERRRKGRGEATXDXATGXAXXAGPAXTXXXNXRARPRPGDPXDXASXKPADEXKGAKAEXTDRARKXGKGDEDSRAXQPRRRAKPGXGDE

SEQ ID NO: 316606 - protein, 56 aa, Zea mays
  unsure (1)..(56): unsure at all Xaa locations
  Clone ID: MRT4577_51814C.1.pep
EDEWERMKTELHGLLVYMVEADMGTLLPLIIWAHTMXQDLQIARSCWMECANPHSD

SEQ ID NO: 316607 - protein, 41 aa, Zea mays
  unsure (1)..(41): unsure at all Xaa locations
  Clone ID: MRT4577_51815C.1.pep
PNRDNAWINQWIFXVGPFNGDALIAIYHQVIIIAIPFNSRS

SEQ ID NO: 316608 - protein, 97 aa, Zea mays
  unsure (1)..(97): unsure at all Xaa locations
  Clone ID: MRT4577_51816C.1.pep
STEDTLSGKTITLQAEPSDTSDDARAKSQDXEGIPTHHQWLIFDGKQLADESTLADYNVKKESTTQLAIPLRERMYTFAKTLPEYFSPPRGSTLTPL

SEQ ID NO: 316609 - protein, 144 aa, Zea mays
  Clone ID: MRT4577_51817C.1.pep
TGPGPRGWPAPTRRSPAPGAGRGAPATARTPRTCSRRFMPERSRSRPLEDQPSKGASIGAAEGLLFCMPSMALFQATRAIYFFCPPMLVISCERPQCSPRIFVFVGWRDLSQKKKKKKKKKKKKKNEKKKKKKKKKVLCVVTTA

SEQ ID NO: 316610 - protein, 47 aa, Zea mays
  Clone ID: MRT4577_51818C.1.pep
LGGLDFQDHNLGRRNQPPPFAKSWLKGRLGPLEACRVMTHGQHWLPK

SEQ ID NO: 316611 - protein, 153 aa, Zea mays
  Clone ID: MRT4577_51819C.1.pep
IRHEAQPSPSPSLSSLCPSPPHRSPLSSKPQLFSLPLPCAPPLRASTPLPLLSSPSRSSSLSSPARRRCGHPARRRCVALHAAATGALRAAVTAPALLCFPANAAALTPQGIAPTTAQRRPVDASRTPCAAAGALRSMARRVRCLRFHARLSP

SEQ ID NO: 316612 - protein, 138 aa, Zea mays
  Clone ID: MRT4577_5181C.1.pep
SGGAQAIEIVFSALARPDGNSLLPRPGYKLYEARAVFSGMEARYFDLVPGEGWEVDTDGVRALADKNTVAVVIINPGNPCGNVYSYEHLAKVAETARKLGVFVVADEAYAHLTFGERRFVPMGVFGAVAPVITLGSIS

SEQ ID NO: 316613 - protein, 49 aa, Zea mays
  Clone ID: MRT4577_51820C.1.pep
KVYKKNCFLLKKKKKKKKKKKKKKKKKKKKTKKKKKKKKKLVPARAAAR

SEQ ID NO: 316614 - protein, 64 aa, Zea mays
  Clone ID: MRT4577_51821C.1.pep
GTKQICFFFLGGGHSFKTNLTWHVQQTAQYAEHTFGAPLILFLTGANLFLALLSSVFLSTSLFH

SEQ ID NO: 316615 - protein, 77 aa, Zea mays
  Clone ID: MRT4577_51822C.1.pep
FIGRQNKMVPEASFVPRLPWQCEIDLWWFGLVPYVPPPEKKPPPSSFPSFFFPLPFGKKKKKEKETLGRAPQQGETT

SEQ ID NO: 316616 - protein, 66 aa, Zea mays
  Clone ID: MRT4577_51823C.1.pep
QYTFHFFISQLKYLPHSTLSSIQLTPFPITLCSIFFPFNYTRSFFYQIPDISFFFPLLFLPYTSSP

SEQ ID NO: 316617 - protein, 288 aa, Zea mays
  Clone ID: MRT4577_51824C.1.pep
MGAPKQKWTSEEEDALRAGVRKHGAGKWRTIQKDPEFSPVLSSRSNIDLKDKWRNLSFSASGLGSSKLRVPKITGPSSSPSSSSQPLLLPAANKFTEATLPADAEKKPQDGKTLPKYGAMIMEALLELNEPNGSDIAAIFGFIEQRYAVQPTFRRFLASKLRRLADSNKIEKIDKSYRLPDSLATRTPAPMNASAPKQKDPSKPSKVSKAIGLFSASSPALEAAMAAAVKVADAEAKAHDAHDQTMEAERIFKMAEDTESLLIIAAEIYDRCSRGEITTLVPVAQREI

SEQ ID NO: 316618 - protein, 359 aa, Zea mays
  unsure (1)..(359): unsure at all Xaa locations
  Clone ID: MRT4577_51825C.1.pep
MGAPKQKWTSEEEDALRRGVRKHGAGKWRTIQKDPQFSPILSSRSNIDLKDFRVLGGLPAGCCSFVGSTVVDLGHRRRDFVFGVTDKCRRRLKWPCYAAEGCFDVIILLKDNDAVVVMDTQCRITCXMPAKRHSSQXQRAQQLLLLGXIQCDKFEGYPANDTTLYRDSWLGRYCPQEXLRVFNLSNLRPWYGAMIMEALSELNQPNGSDIDAIFDFIKQRHVVQSTFRRFLPSKLRRLADSNKIEKVDNFYRLPDSFATRTPAQIKVSDPKQKDPSKASKTIGLFAASSPALEAAMAAAVKVTDAEAKAHDAHDQMMEAERMLKMAEDTESILTIAAEIYDRCSRGEITTLVPVAQREF

SEQ ID NO: 316619 - protein, 150 aa, Zea mays
  unsure (1)..(150): unsure at all Xaa locations
  Clone ID: MRT4577_51826C.1.pep
EVMLSGHAVTLSERSASGTRLIEDVACEAGDEEEADAAARVVYRASFQELMPNYLQYDTIIWALISLLLVLAWGIGLLLLLYLPYKRYVLKKDILSRQLFVTESKIVYKATRPSYMPFMGIVKKEIKVPLHLIXDVIIEQGELCIPIYPT

SEQ ID NO: 316620 - protein, 265 aa, Zea mays
  Clone ID: MRT4577_51827C.1.pep
MLSGHAVTLSERSASGTRLIEDVACEAGDEEEADAAARVVYRASFQELMPNYLQYDTIIWALISLLLVLAWGIGLLLLLYLPYKRYVLKKDILSRQLFVTESKIVYKATRPSYLPFMGIVKKEIKVPLHLIVDVIIEQGCLQSAYSLYIFRIESIAHGKPASVDELQFHGVHNPDFLRKVITREASRSIREVQSWKNRLYSEEGPSHVQSSGLHSPSAKVRASPICAAFDSKGKISDNILLHKIEELNRSVKNLESLLVRSHRRE

SEQ ID NO: 316621 - protein, 78 aa, Zea mays
  Clone ID: MRT4577_51828C.1.pep
GEPPLVFPASVPWAIREALRAGRKEFLVSPSPPKSPVPFQMDGPGTMPVVKELFGLDVVERYLEKGFAARAGPNPGKA

SEQ ID NO: 316622 - protein, 105 aa, Zea mays
  Clone ID: MRT4577_51829C.1.pep
LGTSRPAGFPRSLLASILFLRAAWSATTWRHRSLVSPNEPRVFLPRRDAGLYPLTFDVVSKPASSALLLSLLIEQRTTFEVLTDIVARPFCNLRAHNQRQEEIKL

SEQ ID NO: 316623 - protein, 56 aa, Zea mays
  unsure (1)..(56): unsure at all Xaa locations
  Clone ID: MRT4577_5182C.1.pep
YLQLRDRTRGFTKLVIRRRQSNHHDKRDQTCWVDRRRDDDEQDGGTERGVWSGXQS

SEQ ID NO: 316624 - protein, 153 aa, Zea mays
  unsure (1)..(153): unsure at all Xaa locations
  Clone ID: MRT4577_51830C.1.pep
GTQSRSPHGVPGRSRGRHRKVKGAPASRGPRGRXQRCRGPWASLVLGVTADAEHVVITHAGGGRKILRIEPXGGGAXXDASKVVEGXRGXXKKKVGPPPPPXGXGGGXGLXWVGXGXXRWXRGXWLXXGGXAXXLWXWRPPXXLWXAAPPPPS

SEQ ID NO: 316625 - protein, 83 aa, Zea mays
  Clone ID: MRT4577_51831C.1.pep
TYACTGADNPNIAPLRFVGLIQITHLQCKINDKSKLYDDQALQNIFLKNNLLNIAHNVKDSQLKTLLGDNCIPKHRIHDYAKL

SEQ ID NO: 316626 - protein, 67 aa, Zea mays
  Clone ID: MRT4577_51832C.1.pep
HDCTRRGLAHNKAGTTMLHIYLSTLEWINHLLNKICQHNGVRVYYAEYNRSNHKATTWIWFTLKKSV

SEQ ID NO: 316627 - protein, 95 aa, Zea mays
  Clone ID: MRT4577_51833C.1.pep
SHHPKTGVLGPQGLLLICSPPPLTFEHRRQGSGPKGAITPARGRREVAPRLLNRIMTTRDNATTAPHTADTKTMDVREQSVQRDARACYKNKHEH

SEQ ID NO: 316628 - protein, 220 aa, Zea mays
  Clone ID: MRT4577_51834C.1.pep
MTWRGHRTCPVCTGLSGQTVLGGIVDHDFGPVFDKTPIGSVCASGIFLSKLECAHALRTYLCSKDMDMDRNIIDFGEHRGNCRDIQQSLADGACIDNVFMQCFIECVRGDSSKHIPSLNAHQLILDVNVGIMVPMLRAGHWTLYVVNFQIGRIHVLDSNPYGPELGGTTWKNYHCTPMDMGDRKISRSRLIMSTLNLAIQNVRPRSSCRKRVTPKRGGVN

SEQ ID NO: 316629 - protein, 128 aa, Zea mays
  unsure (1)..(128): unsure at all Xaa locations
  Clone ID: MRT4577_51835C.1.pep
KPGPAPRPRGCAPALAVARLAGRRAQAPEATAPHQCAPGALARAAGAGGARVAGSRARAAGAGGRASQAAAPEPPGRGPRTXGNRARATRAKRPRXAGRRAPEPXRPGAAXPRGDAPGRRRRGRGHRA

SEQ ID NO: 316630 - protein, 129 aa, Zea mays
  Clone ID: MRT4577_51836C.1.pep
VSAPLGLWLQPSSGSYELLVYVLPERLSEQVAAFHLGQLGVYLSCLPWFLPVSISVLFQGPSQPARYRFWSAGPVLPALRARCVLWSSLPWPVSCFLQAYALSCTPLRGGFPSGCRLVCGGVEALFAFC

SEQ ID NO: 316631 - protein, 190 aa, Zea mays
  Clone ID: MRT4577_51837C.1.pep
LAIEAFGKVGSIDQAEKIWIHIKSTKKLSLTEQFNSMLSVYCRHGVVDKASSVFKEMRANGCQPNAITYRHLALGCLKSGLVKEALNTIDMGKKEVVTKKVRSSTPWLETTHLLLENFAEIGDLENAKRLYSELNESKYSRNSFVYNTLLKAYVKAKVYEPDLSRTMILRGAMPDAETYSLLRLIEQFKI

SEQ ID NO: 316632 - protein, 59 aa, Zea mays
  Clone ID: MRT4577_51838C.1.pep
KGRYGCALTSCLPLHETLRILQNVCGILLLGEELGVFCVFSETPTGAKFVILGDTLIVV

SEQ ID NO: 316633 - protein, 684 aa, Zea mays
  Clone ID: MRT4577_51839C.1.pep
MRKRDLGILLLAAFAIFFSLHHEGDFSFRESWYHLTDEDFPIKYEVLLPTHDAKIQVLQPPHARHLNDDSAFQEARVMADISLLPDNVRLASGRRPIAMAVGNVDRSYRPGEVRKQVLVVVTSGWSVMCFDHNLKKLWEHNLQDDFPHAAHHREVAISITNYTLKHGDAGLVIVGGRMEMQHHSADLFDEFMIPEHNMDDRRRSASEKQGSEAGNADLRHFALYAFAGRSGDRRWSRKNENIQSQPSDASVMLPQHNYKLDVHALNSHQPGQFECREFRESILGIMPHHWDRREDTTLQLAHFRKHKRKQVKRTPGKAVINSVNKPIEHNPPGKDASNRIARALGKAADMANSNKARKAQRMQYVPTITNHTQVWWVPNVVVVHEKEGIEVVHLASGRTICKLHLNEGGLHADINGDGVLDHVQVVGGNGIKEQTVVSGSMEVLKPCWAVATSGVPVREQLFNVSICHYNHFNLFHHGDFSRSFGRTFDTAGLEVATPILVQTDDGHKHRRGSHGDIIFLTSRGEVTSYSPGLLGHDAVWRWQVSSGATWSNLPSPSGMMENIVVPTLKAFSLRAYDPKEVIIAGGDQEAVVLSPSGGILAMIELPAPPTHAHLLEDFSGDGLTDMIVVTSGGIYGFVQTRQPGALFFSTLVGCLIVVIGVVFVSLHLSSSNAAKPRASSSEYR

SEQ ID NO: 316634 - protein, 53 aa, Zea mays
  Clone ID: MRT4577_5183C.1.pep
PDREWTGSAHATRFSSIYIHERRKILVSDTTEGWVAQLRAQLSLGLSAGEPAT

SEQ ID NO: 316635 - protein, 85 aa, Zea mays
  Clone ID: MRT4577_51840C.1.pep
PLMRNRRNRLRRFLMTLAIQPALHCLCLPSQDSGPLISTGIVRLLSSFLSLEIRATLWRYAMGSRLSCLLNYPRFLHSIDLILIR

SEQ ID NO: 316636 - protein, 105 aa, Zea mays
  Clone ID: MRT4577_51841C.1.pep
LHRGRSFPLKFHFRSKFFQKPSGVPTKHNFLRNLAQRLKSFPRCFCKNHQGAPQTTPSFCFFFGPSSPLFLLGAHQKKKPGPPPLNFPKISVGTNGGPSFFRTKG

SEQ ID NO: 316637 - protein, 64 aa, Zea mays
  Clone ID: MRT4577_51842C.1.pep
QEAHVQATTPTVLTNSQAESFIAHLLTQTTALHSYSYCTLGTKTLDIRLKAYTSVKTPEKIQLS

SEQ ID NO: 316638 - protein, 86 aa, Zea mays
  Clone ID: MRT4577_51843C.1.pep
RHEDFMRALAASVDRRYADASRRGPLPASMHEKTSVAQRRGNRQKWSVSSPLNIDDILVSGFLLLCERLSGGLPCSVFGLSRRWGE

SEQ ID NO: 316639 - protein, 119 aa, Zea mays
  Clone ID: MRT4577_51844C.1.pep
DFNYTTGARARLGDGGGDHIRVGEEISDREWGRRLRCRLHEGSEDGGGGMLHRARSTGGRGTVEVCGGGRRRSEGREGGGGGSRASMAENRGARAGVRWIRGAFGRDPRRGKGRGGGVR

SEQ ID NO: 316640 - protein, 112 aa, Zea mays
  Clone ID: MRT4577_51845C.1.pep
MAVNTPSTCCRSSDGASECACAQKATCSCGQKSALQCTCAKAPVENTVNGPRCSCRARPAGECTCDRAASENVTPSGATCACGSRPAGGCTCEKAADGGFNPANEIDFTTKK

SEQ ID NO: 316641 - protein, 68 aa, Zea mays
  Clone ID: MRT4577_51846C.1.pep
TPLLRDHPGGKGGPSKRREEPFPAKPLGKKAKKPRAQNFGGPFGKIPHKIGAHPKKKPPFWNGPKRVN

SEQ ID NO: 316642 - protein, 94 aa, Zea mays
  unsure (1)..(94): unsure at all Xaa locations
  Clone ID: MRT4577_51847C.1.pep
FLTSSXSTXPXLXPSIXPSARGAILLLPILXLPKTTREGGVFSLQRPRLASRCELLQHLLRRHLFYKQYYLPFFPPGVSLLMDLHLAGLFHQLQ

SEQ ID NO: 316643 - protein, 77 aa, Zea mays
  unsure (1)..(77): unsure at all Xaa locations
  Clone ID: MRT4577_51848C.1.pep
PGRPSFLRGRLRNPRWVRRWLRRLRWGRXAMQAVAYHHLVTAFYVGNIGNKADIFFFFSNSGRFGGGEPTADVNRSN

SEQ ID NO: 316644 - protein, 71 aa, Zea mays
  unsure (1)..(71): unsure at all Xaa locations
  Clone ID: MRT4577_51849C.1.pep
VLVGAMAIVTLPLGVEVGSLDGRERMDYTLLFDSAFNPPAVIVWPGEVAVWYRCXSFMVMVVYFWLSRAAV

SEQ ID NO: 316645 - protein, 58 aa, Zea mays
  unsure (1)..(58): unsure at all Xaa locations
  Clone ID: MRT4577_5184C.1.pep
MAGCSTAAAAASLLLLLLVSLAAAADMSIVSYGERTXEEARRMYAEWMAAHGRTYNAV

SEQ ID NO: 316646 - protein, 65 aa, Zea mays
  unsure (1)..(65): unsure at all Xaa locations
  Clone ID: MRT4577_51850C.1.pep
GWRGSTLFGFVVQPIEMAPXDVEYHCFVGGLTWATDDHYLHNGFTTYGEGPLLKMILYRETQKCP

SEQ ID NO: 316647 - protein, 88 aa, Zea mays
  Clone ID: MRT4577_51851C.1.pep
VGYCYLVSWFHFYLCSSFYKTNKPFKRYNLPIWGGNFVPAGEKNLRSVYSFNIDRHIPGFTIKFFTMKVSIARLFNPQGGTGPTIYVP

SEQ ID NO: 316648 - protein, 79 aa, Zea mays
  unsure (1)..(79): unsure at all Xaa locations
  Clone ID: MRT4577_51852C.1.pep
LKFKLATGAFFCRPPXPTLGGLGPKGRFLWLSPPGQRAGGGRFKVSFPRGGFFYFFQXXLKGKRNFNRQTPFFFRIHLD

SEQ ID NO: 316649 - protein, 40 aa, Zea mays
  Clone ID: MRT4577_51853C.1.pep
LKEHSKGTYMRCMEVEQALSLDPDVQCLLQTPTKGLDIIR

SEQ ID NO: 316650 - protein, 81 aa, Zea mays
  Clone ID: MRT4577_51854C.1.pep
KKGQPHDVSYHIDVVFCSFIINFNSKKIMLKNRYMVIYIEHILTIKTYFTRSYQSYSTCSSVYLQISSAIWLQPMWFSISS

SEQ ID NO: 316651 - protein, 83 aa, Zea mays
  Clone ID: MRT4577_51855C.1.pep
PPPKMPLMGPTKRAPFKCGIRHLWFPSSSVGPKFYVKPKFCSKGSQWFHYHGLCPLLNLKSPKGPVKKVCVLPFITLGPRQFL

SEQ ID NO: 316652 - protein, 51 aa, Zea mays
  Clone ID: MRT4577_51856C.1.pep
ETCTPSGTRPGINPGVKRSLDGGPPFFFFFFRNQKFVIFYVYVNSSRLTSF

SEQ ID NO: 316653 - protein, 516 aa, Zea mays
  unsure (1)..(516): unsure at all Xaa locations
  Clone ID: MRT4577_51857C.1.pep
MAPGRMGSRCKRDALAETTPTEYEKQRAAHVMRNNQMFQRLGINQLRTIMTATRVRSKDDCSEESGSLYDGEDSEGSEQEEDFQVAKGVRSHNSTHVAEKTTQGTRGHKRVVAPGVNEQQIRITRQRSATINQQSFLNLTTTTHPSSTATTNQESTQNITSATQFTSSAAAEQNYTQGLTAAAQANSPIQADISDHIADEELVPRQRSMGKQLESLSRGLGTKIPIQIYDGKRRPEPPIQVAKFASEGGIILRQHIPIFPHWKEYKKQENEGKITDYIGKLAGQFTMDVDSKAVKDACVDMIKGGQRQMRYRLKRKYFTGVPANQVRTTSPVPCMTDDQWKDLVQMWSTPNHKNNCVKXKYKDVEPSAIDLFKEMHCSKKKGFSEVVQKAIGDMEAMVATPAEDGQLAKSATEVVSNVLPGSSKFLHNAGLLPSSKRSNTGTVSARMQELQSQLDNERREKDGLREDMDTLKAKSQSSEATIANQSTEIADLKKSLAENSILLRQILSISRDQLNP

SEQ ID NO: 316654 - protein, 123 aa, Zea mays
  unsure (1)..(123): unsure at all Xaa locations
  Clone ID: MRT4577_51858C.1.pep
LGSSVLVACXLCARSRRRRRLALVLLVVLLLALLLSLVRPSFLWLCCXLLRCVRWRGWAGGRWSGRCVRXCGRRGCCPARPALAPACARLRGCSAAACVLCLPVVVAPVAPVFFXFFNLIAVA

SEQ ID NO: 316655 - protein, 291 aa, Zea mays
  Clone ID: MRT4577_51859C.1.pep
GTHSIFPHWKEYKKQENEGKITDYIGKLAGQFTMDVESNAVKDACVDMLKGGQRQMRYRLKKKYFTGVPANQVRTTSPVSCMTDDQWRELVQMWSSPNHKNNCVKNKLNREKVQFPQCTGSQSYVAKAYVVRQEKYKDVEPSAIDLFKEMHCSKKKGFSEVVQKAIGDMEAMVATPAEDGQLTKSATEVVSNVLPGSSKFLHNAGLLPSSKRSNTGTVSARMQELQSQLDNERREKDGLREDMDTLKAKSQASEATIANQSTEIADLKKSLAENSILLRQILSISRDQLNP

SEQ ID NO: 316656 - protein, 398 aa, Zea mays
  Clone ID: MRT4577_5185C.1.pep
RFAAMGMTSFCGGPADGSNLTGVGEIRLVPWVPTLVRLPWSRHEEMVMADMQIRPGEGWEYCPRNTLRKVTKVLLDEFNVTMKAGFENEFFLRRKLVSNGVEMWVPYDNTNYCSTSAFDGASSILQEVYSSLKDSGIVVEQLHAEAGKGQFEIALKYILCTVAADKLIYARETIKSIARKHGLVATFLPKPDLDDFGSGSHVHLSLWENDQNVFMGSSKDNFHGMSKTGEQFLAGVYHHLPSILAFTAPHPNSYDRIQPDTWSGAYLCWGKENREAPLRTACPPGVPLDLVSNFEIKSFDGCANPHLGLAAIVAAGIDGLRRHLKLPEPIESNPSDHSSKLKRLPQNLQESVESLSADKVLHELIGDKLVTTAIAIRKAEINHFAKNPGALKDLIHRY

SEQ ID NO: 316657 - protein, 103 aa, Zea mays
  Clone ID: MRT4577_51860C.1.pep
SLFRNHLRFFFFFFVYSTMVRFQTRCLTVLQRVEKKSLLTSVQLATKAMHCHRGRQDHVIPCASLFWVEHHCFEAFLYAARIFSIWFIIKINVVTHISLLRHD

SEQ ID NO: 316658 - protein, 118 aa, Zea mays
  Clone ID: MRT4577_51861C.1.pep
EKIFWNPFVILSIHKFCYFNLITYIYSMLQIFLLLLCLFDHGALPDPLPHCFAKSRKKVITHISAASNEGHALPQGPTRPCHTLCQLVLGGTPLLRSLSVRRKDFLHLVHHQDQCCYT

SEQ ID NO: 316659 - protein, 180 aa, Zea mays
  unsure (1)..(180): unsure at all Xaa locations
  Clone ID: MRT4577_51862C.1.pep
MSSGTGRSSTRRGRGGSFTLRHQPPVVDIGCNCRRPKLFSVFSSSLFRGGGKPKSPNASSASTTTAFTATTAGGRSRSRSGTTTATSTDSSSWGPASFVATNSLYEEPVPAAVAPPQEREQQEARRRRRQQRRRRSRXAAARAPRCGGGGGGXDGEEQEQEEYGLRVARESGAVAVDSRE

SEQ ID NO: 316660 - protein, 183 aa, Zea mays
  unsure (1)..(183): unsure at all Xaa locations
  Clone ID: MRT4577_51863C.1.pep
RHWMNYVLTXLHHPARHQRASISHPSHXDVASSCPPRSAGSHLRCIQFCHTRSHDLKSQAXGRXFTLVEVNADGIPNNFVXFIGVSGDLRRKNKSLXGLRGNAQRLWTYKGQLGIFPRRGRKGNGEDSTPEELGTCTQVRGDYMPITRVEKXRSCEVVKITDEMKPFAGYCKLRLERMNDKHL

SEQ ID NO: 316661 - protein, 65 aa, Zea mays
  Clone ID: MRT4577_51864C.1.pep
GYGLPPNRQKDNGVMCVYRQRSLCVYTTPLPSSHAPPSIKVRPFVLSGHKNNPGFVCILHPLWSE

SEQ ID NO: 316662 - protein, 67 aa, Zea mays
  unsure (1)..(67): unsure at all Xaa locations
  Clone ID: MRT4577_51865C.1.pep
QLPVVSPPPFVTQTHLLPFCQHGVPNGSTXLVTATLXPFIHLALATPAAFYHQPIIGGALFEISYQL

SEQ ID NO: 316663 - protein, 53 aa, Zea mays
  Clone ID: MRT4577_51866C.1.pep
ISEKLTIHEEKLIGPNDAASYKIVVGALQYLTLTRPYIAFRPTRSVNAITEII

SEQ ID NO: 316664 - protein, 70 aa, Zea mays
  Clone ID: MRT4577_51867C.1.pep
DVELGARLKSLDPHAAAASRGGRRVHVVKLSGVGGLGRMVGGLPVPSPFKGAPGRSEPSGPAARGGSAPD

SEQ ID NO: 316665 - protein, 199 aa, Zea mays
  unsure (1)..(199): unsure at all Xaa locations
  Clone ID: MRT4577_51868C.1.pep
TLTRRAAAPXAGRYXVMEXCTPXXGAQXPRXXXFRALCXXGRVRVVWHRSGXGPLHLQWASXPSXPRHSXRVHXXPGGATXXPAATGTXGGEVHSIGEEVSPDEEVLCRKAHRPRCGSPWSNVRVPTSNVLPXSSFCTRRDPLVSTASSSFFGLVRRGHGVLFWFFVXVGSFVCLLLSCCLLSFSACWFCLFFFVCFFF

SEQ ID NO: 316666 - protein, 75 aa, Zea mays
  unsure (1)..(75): unsure at all Xaa locations
  Clone ID: MRT4577_51869C.1.pep
MGLGNLEPTSENIXESFVAVVKNKDGYVSESEMIQAINETIGGERFAGRIGMKRFEEMDWDKNGTVTFKEFLLGF

SEQ ID NO: 316667 - protein, 147 aa, Zea mays
  unsure (1)..(147): unsure at all Xaa locations
  Clone ID: MRT4577_5186C.1.pep
STKRRSLHHKPPWGPKFFAFLRRLAFFTGVVTATFCPNGEQALMVPFLPRYLPXILVPVGKNPAFNPYRLNQACEAGTLPXSPWLFKHXPALSLVRSLVQTIRAHQLQQLELPVITQVAVANLSPTLTTPCVSFNHCYTEPCVICRT

SEQ ID NO: 316668 - protein, 56 aa, Zea mays
  Clone ID: MRT4577_51870C.1.pep
TGVRESSLGKTRYGAFRVCPNGSGSPPTARFLGQVWGFAGNPPVSQPLSPATWRGE

SEQ ID NO: 316669 - protein, 232 aa, Zea mays
  Clone ID: MRT4577_51871C.1.pep
ELAYICQEIKNPLSGIRFTNSLLQMTDLNDDQRQFLETSSACEKQMSKIVKDASLKSIEDGSLVLEKSEFSLGDVMNAVVSQTMSLLRQRDLQLIRDIPDEIKDASAYGDQCRIQQVLADFLLSMVRSAPSENGWVEIQVRPNVKQNSDGTNTELFIFRFACPGEGLPADVVQDMFSNSQWSTQEGVGLSTCRKILKLMGGEVQYIRESERSFFLIVLEQPQPRPAAGREIV

SEQ ID NO: 316670 - protein, 69 aa, Zea mays
  Clone ID: MRT4577_51872C.1.pep
MMDTELTLNQLLISHFPSSLVTDHSHWQSPDVSRDAEWEEACATLSSAPITHLRAYEANSALLYLSSCL

SEQ ID NO: 316671 - protein, 37 aa, Zea mays
  Clone ID: MRT4577_51873C.1.pep
YLLALIALITSATNADHYKHNRLTKQQKNIITQKLPT

SEQ ID NO: 316672 - protein, 65 aa, Zea mays
  Clone ID: MRT4577_51874C.1.pep
ERRKQEGRRHSPRGTSPPTALLSLPPPHGASTPDFVARNPREGGGGDRCDLGGEGGEETKERLRG

SEQ ID NO: 316673 - protein, 54 aa, Zea mays
  Clone ID: MRT4577_51875C.1.pep
MITPSFLTWELYFTGLLLRRCTPHSKTKRHICIPLVGQLCDPYDAQLTLHYYYY

SEQ ID NO: 316674 - protein, 47 aa, Zea mays
  Clone ID: MRT4577_51876C.1.pep
IDHGRVCERVWRAPGLRNCVARLEGQNVWCAGERVLRTGGGRVVKLG

SEQ ID NO: 316675 - protein, 90 aa, Zea mays
  Clone ID: MRT4577_51877C.1.pep
IASSFLLSGCPDSIHSKVKLMWHSACMFCGTGFSIVQWFSSGCSQGHGVCTLHLLAYLSICMGSFSLDVLLLFTISNETLYVSAVGNFPT

SEQ ID NO: 316676 - protein, 122 aa, Zea mays
  unsure (1)..(122): unsure at all Xaa locations
  Clone ID: MRT4577_51878C.1.pep
HQRAARILAFLAFLVFXEGVVPGTLIHHGYTKYLLPXTSARFEYPTIQSYRLQEGITASVLRALALTVQQPYALLQQPSLVNLYLQRIAAQQLQQQLLPTINQVVAANLAAYLQQQQFLPFN

SEQ ID NO: 316677 - protein, 41 aa, Zea mays
  Clone ID: MRT4577_51879C.1.pep
SCNSLLHSLSSIQLTDLLIQSIFQNYILPDLIIYYSYSHYN

SEQ ID NO: 316678 - protein, 117 aa, Zea mays
  Clone ID: MRT4577_5187C.1.pep
DSDSGDIDAGGFALTSARKASRLAVDGYSSFSPHESSPATSSLQMHGCDNSAAVGTIPKLTHTNQSPFINNAKKINPVLKRNYSVREEPYGETRRVRQRSMPATGARQTAPHPTNRT

SEQ ID NO: 316679 - protein, 95 aa, Zea mays
  unsure (1)..(95): unsure at all Xaa locations
  Clone ID: MRT4577_51880C.1.pep
MDPYYAHRPXSSGQQSPDDWTTNXSDAPVWNNNXVLTVRQRGPILVEDHHLIQKLPQIHRERIPEQGAHARRASDNGSFEDTHDVYHLTCAXDFL

SEQ ID NO: 316680 - protein, 59 aa, Zea mays
  Clone ID: MRT4577_51881C.1.pep
IIGSGMDTHGYLVPGRVCVGRFFCTRGRVRGWGRVYVHGYGSRELIPTGEFPIDISSPV

SEQ ID NO: 316681 - protein, 106 aa, Zea mays
  Clone ID: MRT4577_51882C.1.pep
FMVAGLCRALPGGRNAAADQRWPGIPREPLLDDAPTVGALLVPAFSASRAPHGHPPLQGPWGFTPYPTVLTPYLFKPWRNSSRRSMPVLALLASPSLTFPCLPPPC

SEQ ID NO: 316682 - protein, 106 aa, Zea mays
  Clone ID: MRT4577_51883C.1.pep
LVECPDEAMIGQGGGYLALATQLHWVGLHGPVPPNSSSSIMWCESFFFFFPPPFLFFLLSFFSFSPPPPFFNFCSWKVWDFFGVQKKKKKKKKKKKKKKKNKHTPT

SEQ ID NO: 316683 - protein, 44 aa, Zea mays
  Clone ID: MRT4577_51884C.1.pep
EKFFQEYFFGNLVKVYDQIRIRFLQLNDMPAIFDCLKGLFNDPL

SEQ ID NO: 316684 - protein, 50 aa, Zea mays
  Clone ID: MRT4577_51885C.1.pep
GYTLAMAFSYNPGVRLVCPAPGCPGGSPNPPDMKTHACGGTSTSQVPFCP

SEQ ID NO: 316685 - protein, 33 aa, Zea mays
  Clone ID: MRT4577_51886C.1.pep
LVKKNSHIRIKINVYSLYKNHHCCLSLILAVEM

SEQ ID NO: 316686 - protein, 37 aa, Zea mays
  Clone ID: MRT4577_51887C.1.pep
QGDVKQVRAFFKSAHHAHRLNSEGTEGKVGTQEGAIL

SEQ ID NO: 316687 - protein, 125 aa, Zea mays
  Clone ID: MRT4577_51888C.1.pep
RGSWCLPRGRGAPWRGGPRSLVLSLFCSPVFCASPRALVFRLGAARASVRFVWCPCVARGARAGVRVCASPPPRVGWLGRPRFPSPSPRRPWLGLRSARALGGFSGLAPCWVGGRFVRSCPGGVL

SEQ ID NO: 316688 - protein, 89 aa, Zea mays
  unsure (1)..(89): unsure at all Xaa locations
  Clone ID: MRT4577_51889C.1.pep
LSTCAGTSLADIVNASTEASLXKMPIIIGHPRPVHAEILSTSPPNADRELHXKAKYGITEMCADLXNWASKSPYGYTASDSPNLNASSR

SEQ ID NO: 316689 - protein, 41 aa, Zea mays
  Clone ID: MRT4577_5188C.1.pep
RPRNAWVGRWWVRARNNTARGTVGTSQTFTFASCTVKLLSN

SEQ ID NO: 316690 - protein, 71 aa, Zea mays
  Clone ID: MRT4577_51890C.1.pep
GLEKEYRCGVSSQYIFCREAANASIIYRGRQWFFHSWTSVPIFGSPYGNPWSRAPAGGVTLGYRKLCSNPP

SEQ ID NO: 316691 - protein, 96 aa, Zea mays
  unsure (1)..(96): unsure at all Xaa locations
  Clone ID: MRT4577_51891C.1.pep
MDPVRNSVCVTGAGGFVASDLVKLLLSRSEDAVCGTVHESGATTNAQLKVLAGAEETLQLLNADLMDYXAIASALAGCHGVFHVANPVVSHRPSNP

SEQ ID NO: 316692 - protein, 91 aa, Zea mays
  Clone ID: MRT4577_51892C.1.pep
RPFSNLSMKIKGLLRSTTHKSPEIGDSHTWYTRHAPADLSHSLSVTYFKFISVNSVSFLTSVLHKLIEDSLKTPIYQPKTYRLPPQRAEVL

SEQ ID NO: 316693 - protein, 64 aa, Zea mays
  Clone ID: MRT4577_51893C.1.pep
FIPFFQPKTGIHPHGLKKRSWNYISGFQPLNTNPLVSGSGGNQFFVNPNPLLKGLDRNLGKATQ

SEQ ID NO: 316694 - protein, 138 aa, Zea mays
  Clone ID: MRT4577_51894C.1.pep
HQLCVDFLFPVTATRKAKDVIKSVKKCIGSRSKTTQLFTVMLLEMLLNNCGEPVHRQVIDNGLLPILVKIVKKKTDLPVREKIFLLLDATQTSLGGAKARFPQYYEAYYELVVKKVSGPMANLFTIREHHSIVLSLAS

SEQ ID NO: 316695 - protein, 37 aa, Zea mays
  Clone ID: MRT4577_51895C.1.pep
CPCPFWIILVKLGASQIVIQMRYIISADFTSPAEQIG

SEQ ID NO: 316696 - protein, 216 aa, Zea mays
  Clone ID: MRT4577_51896C.1.pep
MLRKAVVAFIACTAFFLAFSAYSRRQGVAEVQLPAVTHRVYLDVEIDGQHIGRIVIGLYGEVVPKTVENFRALCTGEKGVGSNGKPLHYKGTPFHRIIPGFMIQGGDIVRGDGKGSESIYGGIFPDENFTVKHTHPGVVAMANSGLDSNGSQFYITTIKTSWLDGEHVVFGRVIQGMDTVYAIEGGAGTYNGKPRKKAVITDAGEIPKEKWGDQEA

SEQ ID NO: 316697 - protein, 42 aa, Zea mays
  Clone ID: MRT4577_51898C.1.pep
DDIYMNAALNVSAALAKNLFVFLESYSSDSIGASKHVSILHD

SEQ ID NO: 316698 - protein, 53 aa, Zea mays
  Clone ID: MRT4577_5189C.1.pep
TNLLYSFHLILFSKDLSWPSRSRLLINLAASSLTTSNPNRRGRRSQPTSKKAP

SEQ ID NO: 316699 - protein, 93 aa, Zea mays
  Clone ID: MRT4577_518C.1.pep
RLVSMGVYRPLAQMNETNPRAKKQYHNTFGCYSCASRSGKSCPAPTFLKRCPAGCMTEWLYEKSAWTSQRRYIEDHYAPHWSTLRPAEAESGY

SEQ ID NO: 316700 - protein, 273 aa, Zea mays
  Clone ID: MRT4577_51901C.1.pep
MGTLGRAIFTVGKWIRGTGQAMDRLGSTIQGGLRVEEQVSRHRTIMNIFEKEPRIHRDVFVAPSAAVIGDVEIGHGSSIWYGSILRGDVNSIHIGSGTNIQDNSLVHVSKANISGKVLPTIIGSNVTVGHSAVLHACTIEDEAFVGMGATLLDGVVVEKHSMVGAGSLVKQNTRIPSGEVWVGNPAKFLRKLTEEEIAFIAQSATNYINLAQVHAAENAKSFDEIELEKMLRKKYAHKDEEYDSMLGVVREIPPQLILPDNILPHNAQKAVAR

SEQ ID NO: 316701 - protein, 85 aa, Zea mays
  unsure (1)..(85): unsure at all Xaa locations
  Clone ID: MRT4577_51902C.1.pep
LWVPYITILFHPPGGGFLSNCGXRTTXLDAINHGVPELTRPNLTDQFCSQRLLFNNLCVIIMCGVKLTSMSLPDEAHGVQVTSAY

SEQ ID NO: 316702 - protein, 386 aa, Zea mays
  unsure (1)..(386): unsure at all Xaa locations
  Clone ID: MRT4577_51903C.1.pep
TYHAVVLAYGAESDRSLGPTRPYTLGLHSRVRFVCSYTGHPDMCDFCPDLKNTESAVVLGQGNVALDVARILLRCKAELATTDITDYALDALRGSTIRKVYLVGRRGPVQAACTAKELREILGLKNVRICIKAADLVTTPADEEEMRNSRIQRRVYELLSKTAHGGNNYNGQKELHFVFFRKPIRFIPAENGSTVGAVQLEKTVLKGDEVTGKQVAAGTGEFEDLKCGLVLKSIGYKSLPVQGLPFDKNRGVVPNLRGRVLSSESEIATVERGLYVVGWLKRGPTGIVATNLHCAEETVGXSILEDDKKGVLRPPFDSTKHGRAGLLEFLCLERPPFLPHGGVPNISARDRTAEPLRDTARRKMPVWGGLQKGPTEWDAGNRPSPG

SEQ ID NO: 316703 - protein, 76 aa, Zea mays
  Clone ID: MRT4577_51904C.1.pep
GAADLPKPRLLVAPPPTCIHCSSSSPQTLSFPPARILSPPLGRERDIRMPATQGPQILRYASVGSSGKAAAAKSGK

SEQ ID NO: 316704 - protein, 51 aa, Zea mays
  Clone ID: MRT4577_51905C.1.pep
AGRLGLSPYRVTQMEGGAVSVRGHRPGLASRDANRPSATARPGRLHDFAPS

SEQ ID NO: 316705 - protein, 155 aa, Zea mays
  Clone ID: MRT4577_51906C.1.pep
KLQFPIPSNDYSFQLAIRKWELYGKVFHKHIFNLSKDVMSLDENERIISRGPPNILHCDDTSMVISFTRGPLFFIFNFNPQVSHPSYRVGVDEAGEYQLIFNTDETKYGGCETLKSSQYMRRTSDKRADGCRNSLELALPSRSAQVYKLVRILRI

SEQ ID NO: 316706 - protein, 84 aa, Zea mays
  Clone ID: MRT4577_51907C.1.pep
NAYMTRMLKPCLGIAKARGINRTMPQANSRTPASVNSGQNNGFPLESSHCYQASLPDLSTAVLSDAQLVGSVVIHEKIFSHLPN

SEQ ID NO: 316707 - protein, 96 aa, Zea mays
  Clone ID: MRT4577_51908C.1.pep
GVGVAGSSFWLPHAVRLAVAPRPVGLPVPGGPVADALVVVLGGNVGPGRHLPGMIRLHRGRRIQGSPPRAWILVERHHIFLFIWVLQIRFSMFPAG

SEQ ID NO: 316708 - protein, 91 aa, Zea mays
  Clone ID: MRT4577_51909C.1.pep
SPSVPYTGASNQKCIPVVTATAAVLGCSRLQSDIAGAGIPKNGKVGRSPPAEEVEAFLVVFERGMRCAFWSITTMTSSRTLPWTAAGSSGF

SEQ ID NO: 316709 - protein, 114 aa, Zea mays
  unsure (1)..(114): unsure at all Xaa locations
  Clone ID: MRT4577_5190C.1.pep
MMWTDSEIIDAPDAMYNAQKISPGPSMISAAYKGIIKCLTVMQRHDYIDEFXYVDDHRADKIVMQLNGILNKCGVISPRFDAGVNDIKEWTLRLLPSHQHSYILLTTSAGIMYH

SEQ ID NO: 316710 - protein, 50 aa, Zea mays
  Clone ID: MRT4577_51910C.1.pep
MGSTQRPRGSGLLTFSTEEAMRNAIEGMNGKELDGRNITVNESQSRGGRG

SEQ ID NO: 316711 - protein, 77 aa, Zea mays
  Clone ID: MRT4577_51911C.1.pep
YEDFIGSVINHGKAPHHPTKMNKIGGIISSVDEDNKRTVGLLSNKATIYHKLLSSVTPADEKLLEGCIIACQASILV

SEQ ID NO: 316712 - protein, 82 aa, Zea mays
  Clone ID: MRT4577_51912C.1.pep
CYKTGRNTAAAAAPSSTRGGKEHQPAPWSRRRPPPPSCPRRPWPGLHLAPSTRVRVAIREKTTRRTIRDKTKDKTKKREKAK

SEQ ID NO: 316713 - protein, 144 aa, Zea mays
  Clone ID: MRT4577_51913C.1.pep
PEFRGWTNGVRHPRPSIHVLHTSSRQSSRCREPSPPTARSLLWQVAPTLQTVSHPAGAGSPSTGPPLTMAAPAGTTLTIRPRQSPGRPTRRRLQSAPLRPSSRLLRASGCLCATRFVAHSLMPSAHSLLLTCSAHLLPLHRPTR

SEQ ID NO: 316714 - protein, 65 aa, Zea mays
  Clone ID: MRT4577_51914C.1.pep
MVPVDCIYAVLPSLELPILEVNILFLGLNTAGMTTLFHLLKDKRFVQHQAMLYATSNDCIMDRIN

SEQ ID NO: 316715 - protein, 109 aa, Zea mays
  unsure (1)..(109): unsure at all Xaa locations
  Clone ID: MRT4577_51915C.1.pep
IVNYGALFKHQLPFKQLNCGYPKKAVAFKQLTXLNCAGYXQQQQLLPFNAXLLDVKPXIFLTQQQLVAFYLNAMPNAGTIXQLQQLLTLKQLALTDXTEVYQQPMIDGA

SEQ ID NO: 316716 - protein, 89 aa, Zea mays
  Clone ID: MRT4577_51916C.1.pep
AASRSFVTALWSSLISVMIVGSGVGARISGYVRTSSGGQPFLCVWFTIQHSQGRIGSRERVHTSYRGSHRYSEKDDVAGHASDISRHSR

SEQ ID NO: 316717 - protein, 94 aa, Zea mays
  Clone ID: MRT4577_51917C.1.pep
GKRQKFLFWGVLPGNQLLNKYNFIQGLYDSGALLKKQNGKKKAIWPITNIGQKWLCFGTVSYNLKGDGKKKKKRIGLIECSIRGTWVFLETAHE

SEQ ID NO: 316718 - protein, 45 aa, Zea mays
  Clone ID: MRT4577_51918C.1.pep
TLQFCYKCDVMTCRVANRTDEESASHTFIFLVQLSSHGKLRAIFC

SEQ ID NO: 316719 - protein, 128 aa, Zea mays
  unsure (1)..(128): unsure at all Xaa locations
  Clone ID: MRT4577_51919C.1.pep
PTAYDDSQARSSADKLELNQRDPVDGKAAQLLKIHAIKSKCRFEQLEYAQDTRQNAWQQFXTTGKAKKAGVFSCRMRESFXESPDDHIGXVGVTGIGKGLTDFHRREKLVLLTGGSCDAADDDQEYTE

SEQ ID NO: 316720 - protein, 126 aa, Zea mays
  Clone ID: MRT4577_5191C.1.pep
GLYISHPNYVHKSTSVYRFMTRSEHAWTLDYSQSALILHVACQEVACTGYLYSERLSGVVVEERSAAEALSEGDGPDQQLQWFRRRISHRWEVSHHRCRLVCIRGRSRQSLVVVLVHYLPFSLYVR

SEQ ID NO: 316721 - protein, 94 aa, Zea mays
  Clone ID: MRT4577_51920C.1.pep
LKETTVRQALLMPFELRPTPVIISSPARTLPLPRLSGLVIVRTSEVGALHLFGSWKNEGALVGFSELVKGLAKDRTVMFMAWRNDVASRIRNQN

SEQ ID NO: 316722 - protein, 91 aa, Zea mays
  Clone ID: MRT4577_51921C.1.pep
GLNFGVFRGPPIPLWGAVGPPKKNVVFFFRGRDFGFCGPGRIFFFEWFPGGPKKKKKKKKKKKKKKKKKKKKKKKKKKKKKKKKKKKKKAA

SEQ ID NO: 316723 - protein, 53 aa, Zea mays
  Clone ID: MRT4577_51922C.1.pep
IVFFFCFIVENQRKKCFEMCTFRQFHKLKAQSRLSKLQATVARAKRDVRPPLN

SEQ ID NO: 316724 - protein, 162 aa, Zea mays
  unsure (1)..(162): unsure at all Xaa locations
  Clone ID: MRT4577_51923C.1.pep
PFENIFHKKKKVFMGQFAFSPPKAGNSLACFXLWLGQRVIGXKLTLAWKIWLANKNWDFFPQKEKIKGVXLELLKLKVSVQSIHDNLLLLKSKKANIRDVIYQPNFRVTWLNILSLFFSIPVFFFQFWHLHPPPPKIKLICPNFLKKMLSNKLIFIFFFFFP

SEQ ID NO: 316725 - protein, 149 aa, Zea mays
  Clone ID: MRT4577_51924C.1.pep
IDFASIRFLSSHHHNQMKSEIYERRGGGAIRGRGRGHGASFSVLCVGGYPAFVFRFSPSLCHRWMVSFCSAPAYFAPIFLKERKRPILLYHDDIKTPIPLNCFAYDCFQMPSPTRALPETMLSCPKNQPSVVHQEAVMIVQPSANCQLL

SEQ ID NO: 316726 - protein, 84 aa, Zea mays
  Clone ID: MRT4577_51925C.1.pep
TLSTAPKIDAPKQAAPPILPQEPDLRQLRFTPRFCQTRRLPGPQRLYQLHLFLCLPPSPLSASLVLTFPLSSNSMLLCCAARAS

SEQ ID NO: 316727 - protein, 258 aa, Zea mays
  unsure (1)..(258): unsure at all Xaa locations
  Clone ID: MRT4577_51926C.1.pep
GDSGIPGRAEFVLWGCAMQDLLEXGAQLHAQVLKTNLISDSFVGSTLVYMYGNCGLISLSLQLFNEIGYRTEIAWNAVINVYAQHGHGWGAIQAFDRMTSSGIRPNHITFVCLLTACSHAGLVDEGLGYFHSMKDAHGIEPKAEHYSCIIDMYGRAGRLDEAEKFISEMPVKPSAYAWCSLLGACRMQGNKELGEVAAQNLMKLDPXNTGIHISLSGIYASLGQWEDVKAVKKSMKYISIKKLPGFSXVDANKKTRVF

SEQ ID NO: 316728 - protein, 38 aa, Zea mays
  Clone ID: MRT4577_51927C.1.pep
NKKKKKAARSKESKLTSPSFQPNNLFITPPKSNSLPLF

SEQ ID NO: 316729 - protein, 137 aa, Zea mays
  unsure (1)..(137): unsure at all Xaa locations
  Clone ID: MRT4577_51928C.1.pep
NAPGPGAPGRDPXPPGXPPPXPPAEGPPAGGARPPAGAPHGGGARGGPGEPPPXQXGEGRKQXPPGPPGFPPPTGXANPGPGNGKARPLGGYGPPKSKFHPPPGGGAXGSTPPVCPXPPPSIFMVSFRSFAHTCHPW

SEQ ID NO: 316730 - protein, 111 aa, Zea mays
  Clone ID: MRT4577_51929C.1.pep
MADMIQNFFTENQQCLENPAKDRAIAHVVGFCFWFPALLAGYVDFGKLYATRRAPYPEDFTNEELGIPSDEEGLAPVNENPKSYQTGNLMRPENFVPYVVKNYYGVTPYEG

SEQ ID NO: 316731 - protein, 90 aa, Zea mays
  Clone ID: MRT4577_5192C.1.pep
AVVTTQSTLFFFLFFFIPTHGLHAYIAVKPTQVPRIYDDVWLTCLALICSFAKLLPAIPNKTFFTSKFKKPWSFLFEVIKLYRHRLVLDQ

SEQ ID NO: 316732 - protein, 106 aa, Zea mays
  unsure (1)..(106): unsure at all Xaa locations
  Clone ID: MRT4577_51930C.1.pep
SLKIHPFFPLNMPIIREVVLITNPYFISHPFYKKFSGNFLCNLLGKWKESXYSCQSIPFGCLAYYLTAPSNLADVLANTFHALFYVVFILSSCALFXSKTLIEISF

SEQ ID NO: 316733 - protein, 203 aa, Zea mays
  unsure (1)..(203): unsure at all Xaa locations
  Clone ID: MRT4577_51931C.1.pep
MAMTTAVTGLAVAATAPIRSFLSSAAASVSLPADLRDLASDLASDPAVSYRSLRAIWCATSPDTRPPLRDLLXGADFVLPSPKPREKSDELKARLEKLRETQERKEYAELVRDVAPPSKDDAPEPFSSYKDQIGFGLHVVVIMFTGYLVGFAMFKALFNNNAVLNAAGGILGLVGGMLVETILFIIRSSSKELASVPRSKKAQ

SEQ ID NO: 316734 - protein, 227 aa, Zea mays
  unsure (1)..(227): unsure at all Xaa locations
  Clone ID: MRT4577_51932C.1.pep
MPPKKAAASKADVAKKQKVVEDKTFGLKNKNKSKNVQKYVQSLHQSVQPKPDPTKTAAKKKKEEEKAREKELNDLFKVAVSQPKVPVGVDPKSILCEFFKVGQCQKGFKCKFSHDLNVQRKGEKIDIYSDKRDGEEEDTMDDWDQETLEKVIASKNAEYQQNKPTDIVCKHFLDAVEKKQYGWFWVCPMAXQECRYRHALPPGYVLKSQMKALLEEESXKVAIEDEI

SEQ ID NO: 316735 - protein, 135 aa, Zea mays
  Clone ID: MRT4577_51933C.1.pep
MAMTTAVTGLAVAATAPIRSFLSSAAASVSLPADLRDLASDLASDPAVSYRSLRAIWCATSPDTRPPLRDLLQGADFVLPSPKPREKSDELKARLEKLRETQERKEYAELVRDVAPPSKDDAPEAFSSYKDQKLS

SEQ ID NO: 316736 - protein, 204 aa, Zea mays
  Clone ID: MRT4577_51934C.1.pep
MFSGTQQKCKVCTKTVYPMDQLSTDGAVFHRACFKCHHCKSTLSFSSYSPFEGVPYCKPHFAQLFKETGSYNKSFQSQSPAKSATEKLTPELTRSPSKAAGMFSGTQDKCATCGKTAYPLEKVTVEEKSYHKSCFKCSHGGCALSPSNYAALEGILYCKHHFSQLFKEKGSYNHLIKCASVKRAAEAQTAQAAAQAAPAAAESS

SEQ ID NO: 316737 - protein, 94 aa, Zea mays
  unsure (1)..(94): unsure at all Xaa locations
  Clone ID: MRT4577_51935C.1.pep
PAGCLVCENAIVKRCKIQQAIAGGMVPSSALLLQHLIPKLAVPMXVHLLAQNIRAQQLQQLVLANLDVYSEQQQFLAFNQLAALNSATYLQQQQ

SEQ ID NO: 316738 - protein, 193 aa, Zea mays
  unsure (1)..(193): unsure at all Xaa locations
  Clone ID: MRT4577_51936C.1.pep
GGTPSPYSSLLGGALLRFAHLTQPRLETGRLFTCVHHGRCRSSDKHRFVENSLIGAYVACGDVGAAGKVFHEMTVKDVISCTSIVAAYSRSRDMGSAEEVCXALVKDMVAWTAMVTAYAQNAMPVKALEPFEQMEVAGMPIDEASLTGAICSARCGEARRLGSGNCMEWSWEECSCRVGFFAGDNTHPWIPDI

SEQ ID NO: 316739 - protein, 120 aa, Zea mays
  Clone ID: MRT4577_51937C.1.pep
RSTQRPRSRGRSRGRTRGFCPVFGWGLRLLLCPRSCSWDFLERLLAQCRAQGLWLRLWLRLTGWVSGGLFCFFLLGLVVGLVEFVLVSVVRPVGGHRRFERLPWNPFWKASVVVGGVLDV

SEQ ID NO: 316740 - protein, 268 aa, Zea mays
  Clone ID: MRT4577_51938C.1.pep
MGQDVVAHVYDAATAGSDTTVLHINRFFKDAIGLGGIFHTAIQVYGDEEWSFGYCERGTGVFSCPPCKNPMYTYRESIVLGKTNCCILKVNQILRELSWEWPGHSYELLSRNCNHFCNTFCEKLEVSKLPGWVNRFANAGDTALEVAETTAGKLKQAKKEIVTACKAASTFLTGTSSSASSNAEDTGGSTSTGNSLFEGAWIRSIIGMTMKPSKSLVCVDSSDSDSSGSESESDGDQPNSDDNAERQAKGVKQERGTKKKNNGPHCHS

SEQ ID NO: 316741 - protein, 280 aa, Zea mays
  unsure (1)..(280): unsure at all Xaa locations
  Clone ID: MRT4577_51939C.1.pep
MPSFSAGASSQKQQFARGRQLIRQQRKSLPIASVEKRLVEEVRNNDTLIIVGETGSGKTTQLPQFLYDGGLCQDGKVIGITQPRRVAAVTVAKRVAEECNDHIGKKVGYSIRFDDSTSNATRIKYMTDGLLLREALLDPLLSKYSVIVVDEAHERTVHTDVLLGLLKKCNIPELIPIKXKTLLGHSQNVTIKECQGIRCAPLKLIIMSASLDAKCFSDYXXGGAKAVHIQGRQYPVDILYTYQPESDYMDATLVTIFXSIWXEGPGDILAFLTGQEEIES

SEQ ID NO: 316742 - protein, 179 aa, Zea mays
  unsure (1)..(179): unsure at all Xaa locations
  Clone ID: MRT4577_5193C.1.pep
MAAAAAMMVSGGRAALVVXGRALRGGXAMAAAQQASNVRATYHLYNPAQNGWDLNRVSAYCATWDADKPLSWRQKHGWTAFCGPAGQKGQAACGKCIRVCVCATFTFPPAGLSQEIVGLLQVKNRATGASITVRIVDQCSNGGLDLDYDTAFKPIDTNGQGFQAGHLTVNYQFVNCGDN

SEQ ID NO: 316743 - protein, 62 aa, Zea mays
  Clone ID: MRT4577_51940C.1.pep
SRFNPIGLAVYPQASADGNGDDFKSVWIAMFRMIGFFAQAIVTAKGDDREPYPSTEFNRSEQ

SEQ ID NO: 316744 - protein, 88 aa, Zea mays
  Clone ID: MRT4577_51941C.1.pep
KYLGPPSSFLGNPWRFPATPKKMFVLTFKAPSREFSFGRRFFLPKSFFPSFFFRRVWTWGCFLRHPKKFSGQLVFLCPQIFFFDHFLN

SEQ ID NO: 316745 - protein, 55 aa, Zea mays
  Clone ID: MRT4577_51942C.1.pep
VPSRNNFTPGFKFLTTARSMVWVRIYSAVKCFRGGMQFPATHSNNKKSKKMNRGS

SEQ ID NO: 316746 - protein, 91 aa, Zea mays
  Clone ID: MRT4577_51943C.1.pep
FCKGNDWLFFSRFHYLCWWAAPLVLCFPSRHLKKGLFWFSQASKGMRNGRATFIVWWGTPVPFFCTLVLPRNYLARNKGRCSLQTTSCFVY

SEQ ID NO: 316747 - protein, 94 aa, Zea mays
  Clone ID: MRT4577_51944C.1.pep
KKEWVFQNGKRREVLPFRSRPRLLSGDGQKKSCQLGETPGFNRINSCRNLKDCGLKSVCQRSYAMDGAPGPKVLCKGRPLGLGPLTHSHHGNGL

SEQ ID NO: 316748 - protein, 60 aa, Zea mays
  Clone ID: MRT4577_51945C.1.pep
RRSPTLAILHLDLIVLPHVDGTVCGSKDISSRTDFNYNTMLVIFRVDALTCSTQKLKLLE

SEQ ID NO: 316749 - protein, 62 aa, Zea mays
  Clone ID: MRT4577_51946C.1.pep
HRGACIQALMLLFQAGVCLVIYDVHVWCCIDPVYNQICGLLTFTNEADMRTAIPDNYVQCIQ

SEQ ID NO: 316750 - protein, 50 aa, Zea mays
  Clone ID: MRT4577_51947C.1.pep
KKKKKKKKKKKKKKKKKKKKKKKKKKKKKKKKKKKKKKKKKFFSLGPKPP

SEQ ID NO: 316751 - protein, 88 aa, Zea mays
  Clone ID: MRT4577_51948C.1.pep
QSMVHHLMYGREECPVDGYADYCLAHNALLGALKDHAQAKPFHWHEQQSAGAEELVRIGEGEQSPGGPNGRSGPGSVGVGAKRMVFTH

SEQ ID NO: 316752 - protein, 52 aa, Zea mays
  Clone ID: MRT4577_51949C.1.pep
TQVKDSSGDPPPWPGTTYGPAGSISKVYAPNRLIRCPASAAAGMHSALMRQA

SEQ ID NO: 316753 - protein, 68 aa, Zea mays
  unsure (1)..(68): unsure at all Xaa locations
  Clone ID: MRT4577_5194C.1.pep
LGGGXLGSVFAPRLCPPGWPVGSRLLGRRAPASLLVAVAPLWGGGRLXLGPPRLRLPVGRAASPAWLL

SEQ ID NO: 316754 - protein, 61 aa, Zea mays
  Clone ID: MRT4577_51950C.1.pep
GITNSTPLKIISSSRLVRKGCRKPNVWLQFSFEFFFQLVLSINVFYILFLSHLNKEMIRNT

SEQ ID NO: 316755 - protein, 100 aa, Zea mays
  unsure (1)..(100): unsure at all Xaa locations
  Clone ID: MRT4577_51951C.1.pep
QAHFTWKQLNFFKKGETGGVGLPGKRXWFRFWGGGGFFFTPRWGWTFPLGPGYCLWWGLFSPFPKGGFFSFFGPWVLLAFFPFGSGRSFFCGVFFLLGFL

SEQ ID NO: 316756 - protein, 35 aa, Zea mays
  Clone ID: MRT4577_51952C.1.pep
PVRLYVTAVAFAFHNVPALSRHEAVLTSLVSIVIC

SEQ ID NO: 316757 - protein, 53 aa, Zea mays
  Clone ID: MRT4577_51953C.1.pep
MKGTDLVLCKESCALSQHSNLVLYGRIQCKGKCTEQKGITAPAMKVCQEDCDK

SEQ ID NO: 316758 - protein, 56 aa, Zea mays
  Clone ID: MRT4577_51954C.1.pep
HSLNGKFSIDTQVRVSEKHVRDRVYTLNLYYLWQQSSGRRPTLPGDWALLNLLGRF

SEQ ID NO: 316759 - protein, 49 aa, Zea mays
  Clone ID: MRT4577_51955C.1.pep
SWFFYQLQHTIHGMHHLQLRLIHTHIEHFEACNITHNKYTHRLHILIRN

SEQ ID NO: 316760 - protein, 113 aa, Zea mays
  Clone ID: MRT4577_51956C.1.pep
MPAPHWVGVPPPKEKKKKGFLVKIKEKLPGPPKKPEVSPVVTPPPLVETPPPISAFPEEKKGFLAKIKKKLPGFPPQPPGGEEKKKKVFFLKKNLLRVNNNYVGGGLMLFFVL

SEQ ID NO: 316761 - protein, 175 aa, Zea mays
  unsure (1)..(175): unsure at all Xaa locations
  Clone ID: MRT4577_51957C.1.pep
MTSISKRRKFVADGVFYAELSEFFTRELAEEGYSGCEVRVTHARTEVIIRATHTQEVLGQKGRRIRELTSLVQKRFKFPEGSVELYAEKVQQRGLCAVAQCESLRYKLLGGLAVRRACYGVLRFIMESNAKGCEVVVSGKLRDARAKSMKFTDGFMIHSGQPCVDFVDSRXRHVL

SEQ ID NO: 316762 - protein, 90 aa, Zea mays
  Clone ID: MRT4577_51958C.1.pep
VTAGHKVPERAVRQILIDNPGQHKHSLNRDMREPPQVNDAPQTKPYGPRRSNDTPLPQPTGLNELRCHVWYPTRESIRHSQSCTVGRGTQ

SEQ ID NO: 316763 - protein, 36 aa, Zea mays
  Clone ID: MRT4577_51959C.1.pep
MGFGHRTTGGLPGKFYVAIDPSDYAALPCHPQVGHA

SEQ ID NO: 316764 - protein, 110 aa, Zea mays
  unsure (1)..(110): unsure at all Xaa locations
  Clone ID: MRT4577_5195C.1.pep
FPARATRPALAEQNEDGFSILFYLQKIXPDEWKNFLERVHCESEDQLHETEHSEEQLRLWASYRXQTLTRSVRGMMYYRQAIVLQASLDMARDDDLMEGFRAADLLSESD

SEQ ID NO: 316765 - protein, 80 aa, Zea mays
  Clone ID: MRT4577_51960C.1.pep
EENGNTPSPPPSPIPPNRPWQPPPQLPPSPLPSPPPARRPHRGSGHPPPGQQSPLGRVAPIRSRSPPLTQNWRVNLGRVK

SEQ ID NO: 316766 - protein, 169 aa, Zea mays
  unsure (1)..(169): unsure at all Xaa locations
  Clone ID: MRT4577_51961C.1.pep
MATRPSADAANDECLLRFSELYXSHALHRFLAFKXDDKFKEIPVDQVGDPASRYQDFANSLPDNDCRYAIYDFDFVTGQXVQKSXIFYILWSPSSAKAKTKMFYASSNQKFKSGLNVIQVKLHATDASEISLDEITIRLARDHHDHASWTCPTTAHLYAMIDLLLRKTA

SEQ ID NO: 316767 - protein, 127 aa, Zea mays
  Clone ID: MRT4577_51962C.1.pep
RVPVERGATNNMALSFRLVAGVLLVLALALLSSSAEERSAGRAATVSAMGSDHDQTSEAPVPPLRPLGSRKPVAAPPPPRPAHPRASIRPFPPPRPSQPQPQPQAAATTTLVGVGCVRLGSRQALVL

SEQ ID NO: 316768 - protein, 105 aa, Zea mays
  Clone ID: MRT4577_51963C.1.pep
RVRVERGATNNMTLSFRLVAGVLLVLALALLSSSAEERSAGRAASVSAMGSDHDQTSEAPVPPLRPLGSRKPKAAPPPPHPRASIRTRPSPRSRLLQPPPPPPGS

SEQ ID NO: 316769 - protein, 31 aa, Zea mays
  Clone ID: MRT4577_51964C.1.pep
VGGMHDLITFTRKTVRTTGYTPRLQADIVQI

SEQ ID NO: 316770 - protein, 80 aa, Zea mays
  Clone ID: MRT4577_51965C.1.pep
GVFPGKGSLFSKAGFSQGGKLFPKAGGEKPSKGLTQAKLIPLQNGKGPSSRGPLRGPLITYKNRGSKTLGPGGPFGGFSR

SEQ ID NO: 316771 - protein, 194 aa, Zea mays
  unsure (1)..(194): unsure at all Xaa locations
  Clone ID: MRT4577_51966C.1.pep
EIAGIGSIAPHIRIHLGTIHSWVHXETTTAIQIIVLHQLMRNMPSYACFNESERLLLDACKKQRVVNRINTVFDVNYLIGPRIMEVSAQSDLMLRPLLDISVPVDKAMIVVQYKIDXRQLLQLNRSPLCLLXKVRXIAEAXLGMTIKNAVITXVPVYFNDSQTHYTKDAELIAVLNVLPIFHETTDAAIAYGLD

SEQ ID NO: 316772 - protein, 248 aa, Zea mays
  Clone ID: MRT4577_51968C.1.pep
MEPSPQPMGVAAGGSQVYPASAYPPAATVAPASVVSAGLQSGQPFPANPGHMSAQHQIVYQQAQQFHQQLQQQQQQQLQQFWVERMTEIEATTDFKNHNLPLARIKKIMKADEDVRMISAEAPVVFAKACEIFILELTLRSWMHTEENKRRTLQKNDIAAAITRTDIYDFLVDIVPRDEMKEDGIGLPRAGLPPMGAPADAYPYYYMPQQQVPGSGMVYGAQQGHPVTYLWQEPQQQQEQAPEEQQSA

SEQ ID NO: 316773 - protein, 336 aa, Zea mays
  Clone ID: MRT4577_51969C.1.pep
MVIRSYSSFHCGLLISRAAWRRHYPFFWAVRPSVPPPPSPLPLPQPRTRFSSSSSLRSTKRSAAKTSMDSSSVGEPFYVVRKGDVIGIYKTLSECQAQVSNSVRDPSVTVFKGYSLRKDTEEYLAARGLRNALYAIDATDARDELFDDLVPCPFQQPDGAASSTLKRSQEIEIGPSKKHPKVDEQVPLPDSHLSCILEFDGASKGNPGKAGAGAIIRQVDGSVIAQLREGLGIATNNAAEYRALILGLTYAAKKGFKYIRAQGDSKLVCNQVQDIWRVKNDNMASFCKKVKELKGTFHLFQIRHVLREYNSAADAQANFAVELPVGEVQEQSNFPC

SEQ ID NO: 316774 - protein, 71 aa, Zea mays
  unsure (1)..(71): unsure at all Xaa locations
  Clone ID: MRT4577_5196C.1.pep
VILYGEPGSSNSLVAEAAAYSESAALLRGVGSRLISXYLGDGHELVSELFRVDDEHSPSIVIIDEIDAVGT

SEQ ID NO: 316775 - protein, 124 aa, Zea mays
  Clone ID: MRT4577_51970C.1.pep
MLGNVAHPQVGVPMGGTLMQSWMELWNEWEIQTVVVASFSLQVLLFFFAGIRRYTVSSILKVLLWFVYLFADVVATYGLGHMSSSVSKKSSSEHQLVAFWAPFLLLHLGGQDTITAYALEDNEL

SEQ ID NO: 316776 - protein, 41 aa, Zea mays
  Clone ID: MRT4577_51971C.1.pep
SRPGINVPDYNEQVAVRQLQASDQRVCRYASGSACATSCSA

SEQ ID NO: 316777 - protein, 68 aa, Zea mays
  unsure (1)..(68): unsure at all Xaa locations
  Clone ID: MRT4577_51972C.1.pep
VSGXDAARSGAGATQRSSPPGCVAXEYGRERVCGFSPSRRMKTNEKQRLQLRTRKARALTAVLERRTG

SEQ ID NO: 316778 - protein, 31 aa, Zea mays
  Clone ID: MRT4577_51973C.1.pep
KKKKKKKKKKKKKKKKKNKKKKKPKKKKKKR

SEQ ID NO: 316779 - protein, 129 aa, Zea mays
  Clone ID: MRT4577_51974C.1.pep
WPGFFCFLGPRPTSPPPVWPSWSPRCLNDSIHRRRLQVPVTGVAPLFPSWAWAPQAPPLLGLGPSPAPLLQGVWGPPRPWPASCVFFPWALPPPFCFPFAFLFITPVPLRLLFVAAQEKLLQQKDQNAH

SEQ ID NO: 316780 - protein, 73 aa, Zea mays
  Clone ID: MRT4577_51975C.1.pep
TKLASSSHVTYDNGFSLHTKSSNIATANGHGRERAQPLGIISERAHQALALEHLENMWTNGKNSQPENVDHIS

SEQ ID NO: 316781 - protein, 258 aa, Zea mays
  unsure (1)..(258): unsure at all Xaa locations
  Clone ID: MRT4577_51976C.1.pep
MGLLSSLPPHRRGAFSGGGWQWSFLDVVWGVFLIAVVVFLALVFTPRRGDPILTTPSVARAGGTVPPCAASEVDLLPCEDPRRSSRLSREMNYYRERHCPTRGEALACLVPPPRGYRIPVPWPESLHKIWHDNMPYGKIAERKGHQGWMKHEGSYFIFPGGGTMFPDGAEQYIEKLSQYVPMKTGVIRTGLDMGCGVASFGGFLLKENIMTLSFAPRDSHKSQIQFALERGXPAFLLMLGTRRLPFXAQSFDFVIGSR

SEQ ID NO: 316782 - protein, 69 aa, Zea mays
  Clone ID: MRT4577_51977C.1.pep
PHVRNDYTFELLSSTNTVPCNNHPSMIQTILTYTTTGILKPTYNMTYDLQHIIYKHILTTSRLRSKQQR

SEQ ID NO: 316783 - protein, 254 aa, Zea mays
  Clone ID: MRT4577_51978C.1.pep
MAIPRARLTRLLLHFGSRGSRFLAQPFSTSSSAHGLFPSLWATPSTAGAWRRAFHDGRPRGPLWRSKKLIGKEALFAIQGLKRFKGDEEKLADFVRRYVARLLKADKLAVLGELERQEEVDLAVNMFLVITKEDWYKPDIYMYKDLIIALAKCKNMEEAMVIWGNMRDENLFPDSQTYAEVIRGFLRYGSPSDAMNIYEDMKKSPDPPEELPFRVLLKGLLPHPLLRNRVKQDFEEMFPERHIYDPPEEIFGMH

SEQ ID NO: 316784 - protein, 193 aa, Zea mays
  Clone ID: MRT4577_51979C.1.pep
PGPPSSFFLKLDISKAFDSVSWAFLIEVLSHLGFGNIWRNLISNLLASSSTQVLLNGSPGIPIRHRRGLRQGDPLSPMLFVLIMDVLSSMFLLAEDRGLLHNLLEGNVRNRISIYADDVVLFVKPIVEDLNCVKVILDCFGSASGLVCNMNKSCAIPIKCSDQAVQQGCNLLRCSSTSFPCNYLGLPISDRKL

SEQ ID NO: 316785 - protein, 410 aa, Zea mays
  Clone ID: MRT4577_5197C.1.pep
MARMISRPAVLLSPLAMIVVAAAVMALAPAPVAATKYNITKILAPYKEYSKFNDMLSKTRLAYDINRRQTITVLAVDNSAMSALDHYSLQTIRHILELHVLVDYYGDKKLKKLAHGSTASSSMFQATGSASGMSGYVNITRKDGKVSFMTEDADDTAKPSRYVKSVKEFPYDIAVLQVSSIISSAEAEAPVPPPAPVDLEELLSKRYCKSFASLLSANAEVFRAVNETKDNGLTLFCPVDSAVAAFAATYKNLTAKAKAAILLYHAVPDYFSLQLLKSNNGMVTTLATASDKKMDYSYDVKNKGETVTLQTRVVTSSVTATVGDMEPLAVYAVNKFLQPKELFKVVEAPAPAPEPSKKKKAGRGGSDDDSSDDSGDSTADAEKGDAAPALLVRWLVTAVATAGVAYALMG

SEQ ID NO: 316786 - protein, 119 aa, Zea mays
  Clone ID: MRT4577_51980C.1.pep
TCGVVMRRWAHILNPRVCQKRADPAAQEEGLDGSLHETHEALATVPHHLKAVAWRVSAASAPSTPSSGAKTDFFPPPRVCVTATSAAARSVGDRSFGHRNPKDHKFKKKKTLKKQKNPR

SEQ ID NO: 316787 - protein, 43 aa, Zea mays
  unsure (1)..(43): unsure at all Xaa locations
  Clone ID: MRT4577_51981C.1.pep
APRPSVHSGPYAAXEADISSRSYLDRHQQSHTMMNWSQLSQSL

SEQ ID NO: 316788 - protein, 48 aa, Zea mays
  Clone ID: MRT4577_51982C.1.pep
ESYIENFTSSHLAAKLAILAFEALEKRLLDKLSVPSSLVMIYYLLHMC

SEQ ID NO: 316789 - protein, 412 aa, Zea mays
  Clone ID: MRT4577_51983C.1.pep
INTGRVTFLRSIGLREYSRYLTFNHPCSHEKPLLSHLRFFPWVVNEVYFKVWRQGRTGYPLVDAGMRELWATGCPRARIRVVVSSFFVKVLQLPWRWGMKYFWDTLLDADLESDALGWQYISGSLPDGRELDRIDNPQFEGYKFDPHGEYVRRWLPELARLPTEWIHHPWDAPESVLQAAGVELGSNYPRPIVELDAANSRLQDALSEMWELEAASRAAMENGMEEGLGDSTDERPIDFPQELRMEVDRQPVQPAIHAQGVTGRRREDQMVPSMTSSFIRAETELTADFGHTSEDSRPEVPSNIHHLQARPEREETVDGGTGNAVRVHGNHHQQNLQNNIHRVLGIAPSISEASSSWTGRDGGVVPVWSPPAASGNSDPYAADEADISSRGYLDRHPQSHTMMNWSQLSQSL

SEQ ID NO: 316790 - protein, 174 aa, Zea mays
  unsure (1)..(174): unsure at all Xaa locations
  Clone ID: MRT4577_51984C.1.pep
IXPXXTXQXXXLXSXNIXVQLFXPPSIPPLXXXDCADRAXXXAXYPIAHCTXXTXXXTPTRXXQXCXNIILELXIKXSXXSXHSLQRHRRXLXXRCRGCRCXLRXXCXXXSXXRRPPRARPWVVXXXWXRVWVVVAXXAXSGCXLRPXXXCXXLRPAXRPRLPPRGXVLPPGXS

SEQ ID NO: 316791 - protein, 170 aa, Zea mays
  Clone ID: MRT4577_51985C.1.pep
LRMEVDRQPVQPAIHAPGVTGRRREDQMVPSMTSSFIRAETELTADFGHTSEDSRPEVPSNIHHLQARPEREETVDGGTGNAVRVHGNHHQQNLQNNMHRVLGIAPSISEASSSWTGRDGGVVPVWSPPAASGHSDPYAADEADISSRGYLDRHPQSHTMMNWSQLSQSL

SEQ ID NO: 316792 - protein, 36 aa, Zea mays
  Clone ID: MRT4577_51986C.1.pep
NSPLANSGDSIALIGATTGLRFSEWHSRALVLKAGC

SEQ ID NO: 316793 - protein, 80 aa, Zea mays
  Clone ID: MRT4577_51987C.1.pep
ARPEREEIVDGATGNTVRVNGTQQQQNLQNNMHRVLGIAPSISEASSSCTGREGGLVPSTCKQFRFTIHKQSISQSSDRR

SEQ ID NO: 316794 - protein, 524 aa, Zea mays
  Clone ID: MRT4577_51988C.1.pep
MWHQKLGDLSRCPWDELIFEDESERGSNALLARAWSPGWQNADKALTAFLDGPLVDYSANHKKADSASTSLLSPYLHFGELSVRKVFHLVRMKQLMWSNDGDRAGEESCTLFLRAIGLREYSRYLTFNHPCSLEKPLLSHLRFFPWVVDEVHFKVWRQGRTGYPLVDAGMRELWATGWVHDRIRVVVSSFFVKVLQLPWRWGMKYFWDTLLDADLESDALGWQYISGSLPDGRELDRIDNPQFEGYKFDPHGEYVRRWLPELARLPTEWIHHPWDAPESVLQAAGVELGSNYPRPIVELDAANSRLQGALSEMWELEAASRAAIENGMEEGLGDSTDEPPIDFPQELRMEVDRQPAQPAIIHTPVVAGWRREDQRVPSMTSSLIRAETELTADFGNTSEDSRPEVPSNIHLQARAEREETVDGATGNTVRVNGNQQQQNLQNNMHRVLGIAPSISEASSSWTGREGGLVPVWSPPAASVHSDPYAADEADISSRSYLDRHQQSNTMMNWSQLSQSLTTGWEVDN

SEQ ID NO: 316795 - protein, 45 aa, Zea mays
  Clone ID: MRT4577_51989C.1.pep
FSLQGAASKIKIYMALGVGNGGELFDKIVIKGKLLEHEGRRLLQH

SEQ ID NO: 316796 - protein, 153 aa, Zea mays
  unsure (1)..(153): unsure at all Xaa locations
  Clone ID: MRT4577_5198C.1.pep
MAAAAAMMVSGGRAALVVXGRALRGGXAMAAAQQASNVRATYHLYNPAQNGWDLNRVSAYCATWDADKPLSWRQKHGWTAFCGPAGQKGQAACGKCIRVKNRATGASIVARIVDQCSNGGLDLDYETVFKKIDTNGQGYQMGHLNVDYQFVAC

SEQ ID NO: 316797 - protein, 47 aa, Zea mays
  Clone ID: MRT4577_51990C.1.pep
IWPPLTWGLSSHPPKAVPIQALVPLSTCVTPCCILKEPSIRPTCMIY

SEQ ID NO: 316798 - protein, 64 aa, Zea mays
  Clone ID: MRT4577_51991C.1.pep
HFVHAQANRYELLYSSQHPIRRGLDAVPVQACLLKGLQLLLQPPRVCLPTFLVAHHELHARVRV

SEQ ID NO: 316799 - protein, 67 aa, Zea mays
  Clone ID: MRT4577_51992C.1.pep
RITVESGGMSYSKKIVYSISKIPIPRNDRKQTGPYILLHLFICTYNFTVFLRLVKTRVVAHNIGAKM

SEQ ID NO: 316800 - protein, 189 aa, Zea mays
  unsure (1)..(189): unsure at all Xaa locations
  Clone ID: MRT4577_51993C.1.pep
SPLACPSAXXVARGLLFLFLXXCLLXLXFVGCPSGFLXXXCXXXLXXXXXXFLXCXLXRLLXXPWXPXLXXGPCXXXPXXSLFXXPSPXSXXXXXRRRPPLXVPPPXGVVSXXXPAEIIKAAALPPGAXGAXAAXAXXLXRPFPXXAASAPPPAXXXXVFLVAGXGPGGAALSPGXAFXXASVGRGXXR

SEQ ID NO: 316801 - protein, 164 aa, Zea mays
  unsure (1)..(164): unsure at all Xaa locations
  Clone ID: MRT4577_51994C.1.pep
KKSTPKPKAPPEQKRQGRPGPGRADHSRAGGPRQAKTGAGATPTQGGRGPNGTEENRNPAKRSGGTPGGTAEPEARDTGRXGDRXKQAXREGRKXQPRGTEANGGXQHPSGPEAPSRDRAKEXXXXRAXAKXAATAQGPATRPDREKRQGRRGXKRPXTGGQRP

SEQ ID NO: 316802 - protein, 89 aa, Zea mays
  Clone ID: MRT4577_51995C.1.pep
KTPFFKNKGLWCSQEKRSHRKKGSPPGWDWEGTDRSNEGTLKPGNEGLDPGQETGFLFLKNCLVFGLLGGGGDQVGEKAGTGSMAGAGA

SEQ ID NO: 316803 - protein, 93 aa, Zea mays
  Clone ID: MRT4577_51996C.1.pep
KWGGAKKKKNRCRVTFPAKYESIWGPRPLEVLLSLTHMTCGFSFGGAFQRLSRPGMESLFFQKFYAFAQAGKLACLVRKPYTTLQLEMGRIFG

SEQ ID NO: 316804 - protein, 58 aa, Zea mays
  unsure (1)..(58): unsure at all Xaa locations
  Clone ID: MRT4577_51997C.1.pep
GATHSFNYGSVDGCQYPMAMKXPSGWTFRCVAILKTGEHALITLSFADQCNYTGSGCW

SEQ ID NO: 316805 - protein, 78 aa, Zea mays
  Clone ID: MRT4577_51998C.1.pep
SGAPRPGPSHSASSADQPGTHLLSLSCHSREAPSPGSIDGPSRRPGRSAPRALLGRRGHGARPGLVAQAHYSASATQD

SEQ ID NO: 316806 - protein, 113 aa, Zea mays
  Clone ID: MRT4577_51999C.1.pep
SRPPFAAPLSTFSPRGKSPWRSGSCPPASCWSCTAAGRQARGLPFLSPAPLTPRGPFCGTRLGLKGFCPSRSCSCSRPGSIFFDDDDARTKYSTSYPAPLSLFGSSLIFKIPF

SEQ ID NO: 316807 - protein, 153 aa, Zea mays
  unsure (1)..(153): unsure at all Xaa locations
  Clone ID: MRT4577_5199C.1.pep
MAAAAAMMVSGGRAALAVXGRALRGGGXMAAAQQASNVRATYHLYNPAQNGWDLNRVSAYCATWDADKPLSWRQKHGWTAFCGPAGQKGQAACGKCIRVKNRATGASIVARIVDQCSNGGLDLDYETVFKKIDTNGQGYQMGHLNVDYQFVAC

SEQ ID NO: 316808 - protein, 126 aa, Zea mays
  unsure (1)..(126): unsure at all Xaa locations
  Clone ID: MRT4577_519C.1.pep
TTLNSAAYLLHLLVLPFNHASDTXPXQFLPFNPLTALNSPAYVQQQQLLPFIQLATENPAAFLTQQQLLSYYLHTSPNLGTLLQLQQLLTFKQLALTNLTSYYLHLINSRTLYYNAYDLSFNTQVS

SEQ ID NO: 316809 - protein, 967 aa, Zea mays
  Clone ID: MRT4577_51C.1.pep
MAPKRKTSSSSAVVIPPIDPNSQLPFAGNHMSVISEPELLHLVSIGVLPPRELCSWRICHGFTVPTEDTHEYVVYAPFLLRGLGLPISPFFRGLLDFYHLNLTHLNPNSILQISIFVHLCEAFLGVLPHFGLWKYLYHCRPGMAGGQHQLVGGASLEMRRGRKTEYLEIPLKDSIKGWRLEWFIVENYGNSLPSRSGRQPDVRTPSWTESPTDQEVAEAGVLLAEVGLLKERGLTAEAVVTDFVFKNIQPLKDRAYPAYLYRGLADSTRVTNRRIPSADLVSRLEMILRGKVSNVGAPVAYSAWNLPPPKAFTLFVSNPPITDGSLGLRVRPSAEEVNALVASLGEIPDDERQVHFEVPLNPSDAEISAMLDLLVEDSSDAAPAGALVVAPLLEADTTLDTQKPVSTRLRRPCRANQPDPSADEQKKKRRRLRRVSSLDRDAGTSVPATEEVPATRFTNADPNGCTQSAADPNVGAPSVADPNGGAACVANVDDEEEEDEIPLTWKNSRQIIASGESSGVPSPALSALIGLQELSVANFDQTLEDMVPEDLLSEPVDDGAMEVCVDVPDAGLRSSRASSTLERDLEGRETDLDRPGPMEVAEGPSTLEVATAENLDPEDGADTCPAPEDVAGDDLARVRSVSLCPAPEGAAGDDPAQVGSANYDPAPEGTELIPTGSLQAASGGGLTPGYQLISPDLGIPSFFSNLQALVDGMTSQLRLQGASVPEVASSLACWNPVLLQHRVSELEATNAGMTRQISTLEEKHSQDQAELVQRCTDFEEKYSQSQTELGQVSAALDDANALSSSLHAQLNSEKEEKRILAASRDSLDRLYRDSSNSLTILERSHRFTMEELDNQRCKLQESADEVIRLKQLISAKDATIKELRASKKSIVQELETARLAVKVAEETSVTLRAQRDRAMDKAIRAGRILMRRPGVVVPEDIRADVNAAPDSSSRPSSSVAPEKDIAK

SEQ ID NO: 316810 - protein, 103 aa, Zea mays
  unsure (1)..(103): unsure at all Xaa locations
  Clone ID: MRT4577_52000C.1.pep
LALLLAXXXXAFXAASXLXXPPSXSXXXXSXSASXCSSXXXGPXXGXXXVLXGGXXXXXXXWXCGSRPXXWXPXXXVRWVXXXXXPRAFLPAPXSLXPPXSSP

SEQ ID NO: 316811 - protein, 39 aa, Zea mays
  Clone ID: MRT4577_52001C.1.pep
TPHLTIITDSLKMYIQNITSRGPGYLSDRAAQNVEASFV

SEQ ID NO: 316812 - protein, 185 aa, Zea mays
  Clone ID: MRT4577_52002C.1.pep
RRPQVKYAGAPPAAFFPMVLNVVRRAEQMLIQNESRVKEYLPITGLADFNKLSAKLIFGADSPAIQENRVATVQCLSGTGSLRVGGEFLARHYHERTIYIPQPTWGNHPKVFTLAGLTARSYRYYDPATCGLDFQGLLEDLSSAPSGAIVLLHACAHNPTGVDPTLEQWEQIRQLMRSKALLPFF

SEQ ID NO: 316813 - protein, 40 aa, Zea mays
  Clone ID: MRT4577_52003C.1.pep
RRSSQHTILTRIRQALDLTDTEEEQINSPRARIRDYMPQL

SEQ ID NO: 316814 - protein, 265 aa, Zea mays
  unsure (1)..(265): unsure at all Xaa locations
  Clone ID: MRT4577_52004C.1.pep
MASPSVFAGIAQGPEDPILGVTVAYNKDPSPVKVNLGVGAYRTEEVKPMVLNVVRRAEXDFNKLSAKLIFGADSPAIQENRVATVQCLSGTGSLRVGGEFLARHYHERTIYIPQPTWGNHPKVFTLAGLTARSYRYYDPATCGLDFQGLLEDLSSAPSGAIVLLHACAHNPTGVDPTLEQWEQIRQLMRSKALLPFFDSAYQGFASGSLDKDAQSVRMFVADGGELLMAXSYAKNMGLYGKRVGALXIVCGSADIAVKVEKSLKL

SEQ ID NO: 316815 - protein, 73 aa, Zea mays
  Clone ID: MRT4577_52005C.1.pep
TKHHTSPLHNKLSHFPNIHHSKKKSSRPKPRNKNQILSTQLKRGRHKKKITLANFPLKKRKNRKQFHPPRNYK

SEQ ID NO: 316816 - protein, 257 aa, Zea mays
  unsure (1)..(257): unsure at all Xaa locations
  Clone ID: MRT4577_52006C.1.pep
MASPSVFAGIAQGPEDPILGVTVAYNKDPSPVKVNLGVGAYRTEEGKPMVLNVVRRAEQMLIQNESRVKEYLPITGLADFNKLSAKLIFGADSPAIQENRVATVQCLSGTGSLRVGGEFLARHYHERTIYIPQPTWGNHPKVFTLAGLTARSYRYYDPATCGLDFQGLLEDLSSAPSGAIVLLHACAHNPTGVDPTLEQWEQIRQLMRSKALLPFFDSAYQGFASGSLDKDAQSVRMFVADGGELLMAQSYAXNMGC

SEQ ID NO: 316817 - protein, 48 aa, Zea mays
  Clone ID: MRT4577_52007C.1.pep
VIVYLILLLFLCFMGFQTDGAFAAWLFSYTCSFGVCCFSQTFGTKVNN

SEQ ID NO: 316818 - protein, 315 aa, Zea mays
  Clone ID: MRT4577_52008C.1.pep
MPTANVRAAQPSADRRLSTLVRHLLPSSPRTSAATATSADSSLQPFPTMASPSVFAGIAQGPEDPILGVTVAYNKDPSPVKVNLGVGAYRTEEGKPLVLNVVRRAEQMLIQNESRVKEYLPITGLADFNKLSAKLIFGADSPAIQENRVATVQCLSGTGSLRVGGEFLARHYHERTIYIPQPTWGNHPKVFTLAGLTARSYRYYDPATRGLDFQGLLEDISSAPSGAIVLLHACAHNPTGVDPTLEQWEQIRQLMRSKALLPFFDSAYQGFASGSLDKDAQSVRMFVADGGELLMAQSYAKNMGLYGERVGALAS

SEQ ID NO: 316819 - protein, 108 aa, Zea mays
  unsure (1)..(108): unsure at all Xaa locations
  Clone ID: MRT4577_52009C.1.pep
MEAKVGKFFDSVXVFFSGSDQLSWCDADIIAGCEKEAAEANGSDESKNECLTRFSWALVHSRRTEDIERGIAMLEASIASTTDPLKMREKLYLLAVEHFPRGDSSRSS

SEQ ID NO: 316820 - protein, 127 aa, Zea mays
  Clone ID: MRT4577_5200C.1.pep
LEGAAAACVGYPVPPVATILAQRIYRTRHRVRGPCCRAALNFRCGNRRLAGGTTPFIFVSPPGGPAHRDGTRWACRVVIMVSPSFGCSMVLDCNGYCTEKEKTIGWALLSAAGHQFANALVLVHDHC

SEQ ID NO: 316821 - protein, 39 aa, Zea mays
  Clone ID: MRT4577_52010C.1.pep
SPSPIIAGRSIGGSAGIGPKNDHIDWKSGVLAYFSHGAF

SEQ ID NO: 316822 - protein, 41 aa, Zea mays
  Clone ID: MRT4577_52011C.1.pep
YLIGEILRLNPVYNIPDYYLFSTMDINIPVSALAHPVYNII

SEQ ID NO: 316823 - protein, 1472 aa, Zea mays
  unsure (1)..(1472): unsure at all Xaa locations
  Clone ID: MRT4577_52012C.1.pep
MPWSMRSRGNWRIELSTRKGQVDWRSYVPSPFMGVEGSRCRHEEGVRVDDCGPHVRLPGEPRDEKGRVLGGRGKKMARNAVDKATSIDAQLRLLAPQKLSDDDKLVEYDALLLDRFLDILQDLHGEDIRETVQECYELAAEYENKLDPKMLDEIGNVLTSLDPGDSIVITKSFSHMLILANLAEEVQIAYRRRIKLKKGDFVDENSATTESDIEETLKRLMHQLKKSPLEVFDALKNQTVDLVLTAHPTQSVRRSLLQKHGRIRNCLTQLYAKDITPDEKQELDEALQREIQAAFRTDEIRRAPPTPQDEMRAGMSYFHETIWKGVPKFLRRVDTALKNIGINERLPYNAPIIQFSSWMGGDRDGNPRVTPEVTRDVCLLARMMAANLYNAQIEDLMFELSMWRCSDELRVKVDQLYHSSKKDTTKHYIEFWKQVPPSEPYRVILSDVRDKLYNTRERARHLLASGFSEIPEEATFTDVEQFLEPLELCYRSLCACGDRSVADGSLLDFLRQVSTFGLSLVRLDIRQESDRHTDVMDAITEYLGIGSYRKWPEEKRQEWLLSELNGKRPLFGPDLPKSDEIADVLDTMPGEEPPQRDARRRRNRRWNIRRHHEAWEQDPAQPVSRDEVSEVGETSDERVFRERRNSRRCYRRQAQDRDREQAEQDARLRRENPLFARNLNYDFARAMNTPSEVGGVLARIADGLPRTPDAEGYLRLLTRAANHLLPPAHPPSDLQHAINSRRDAQSSINASRERRHENEIRRRGEYDRDHGVSARSRATGVESATASTGGTTRGRSRRNVSNSPPQDRHHNRRQDNQWPFFRVTIDLVEMVFAKGDPGIAALYDKLLVSEDLWPLGARLRANYEETKQLLLQVAGHKDLLEGDPYLKQRLRIRDSYTTALNVCQAYTLKRIRDPGFQVKPRPHLSKDIMDMGKPASELVKLNTTSEYAPGLEDTLILTMKGIAAGMQNTGXPVCLSSFCRGSHIIWREPLNAWICGDXYTLLHSNLCPAWPRPGRMTFHVLAELPSDSFGAYVISMATAPSDVLAVELLQRECHVKKPLRVVPLFEKLADLESAPAALARLFSVEWYRNRISGKQEVMIGYSDSGKDAGRFSAAWQLYKAQEELINVAKLYGVKLTMFHGRGGTVGRGGGPTHLAILSQPPETIHGSLRVTVQGEVIEQSFGEEHLCFRTLQRFTAATLEHGMHPPISPKPEWRALMDEMAIVATKEYRSIVFEEPRFVEYFRXLATPEMEYGRMNIGSRPSKRKPSAGIESLRAIPWIFAWTQTRFHLPVWLGFGAAFKHVLDKDIRNLQTLQEMYNQWPFFRVTIDLVEMVFAKGDPGIAALYDKLLVSEDLWALGARLRANYEETKQLLLQVAGHKDLLEGDPYLKQRLRIRDSYTTALNVCQAYTLKRIRDPGFQVKPRPHLSKDIMDMGKPASELVKLNTTSEYAPGLEDTLILTMKGIAAGMQNTG

SEQ ID NO: 316824 - protein, 73 aa, Zea mays
  unsure (1)..(73): unsure at all Xaa locations
  Clone ID: MRT4577_52013C.1.pep
LKQLTTSILXTCXXVLDXXLAPQNPSPNRGAPPPPLPSGPNSGPADPERASPAGMYQGDAVVDEERGAHRGAP

SEQ ID NO: 316825 - protein, 133 aa, Zea mays
  Clone ID: MRT4577_52014C.1.pep
QKSEARFISLEMDQAQFEGWRPEVEKRLDNIALELHRANKFMERGSMATDLSKPGIIPSSTSAFGRTQIGNHFADGPDGNRFADNHRDPGFGRDSPQPHGPVKGTIPCGIKCPFQAWKVQDFELGTKPPGHCV

SEQ ID NO: 316826 - protein, 79 aa, Zea mays
  unsure (1)..(79): unsure at all Xaa locations
  Clone ID: MRT4577_52015C.1.pep
HLATHTVGFALNTTSPLGTPRFYLLMRLAPSSXAAHTTILFHSSQAPIAALFHTYLPSIIAWACDNPAFQPSRLKQAMA

SEQ ID NO: 316827 - protein, 129 aa, Zea mays
  Clone ID: MRT4577_52016C.1.pep
GVLGFFFFFLFFFEFVFQKENNNGGGGQESVKPQKNPPPAPGEKGKRKPGGPQAPKEGRETPGKGTTPRGPPIWGAKRGPGEPAVRGPKRARKKRKQLAPKNRGPPARGDPPPTRGAAPKTKNILGERG

SEQ ID NO: 316828 - protein, 84 aa, Zea mays
  Clone ID: MRT4577_52017C.1.pep
VPEGQNQLENKKVWLGGLLGAQKKEKKGGVFHVKGGEFPPSQKKLSIWPPNEFFCKFRYFGKKKKKNKQKKKKKKKKKTAQRRI

SEQ ID NO: 316829 - protein, 45 aa, Zea mays
  Clone ID: MRT4577_52018C.1.pep
MKVRIVALALLALVASASFSTSGCCGCQTPPFHLPSSFYMLSFFL

SEQ ID NO: 316830 - protein, 88 aa, Zea mays
  unsure (1)..(88): unsure at all Xaa locations
  Clone ID: MRT4577_52019C.1.pep
ESWHACMYRSLIPFSTHSSFPFRSXNHLLVCSKKYRIATKXIXFALSLDTNSSPHQIISCEGDFYFFFEKLKITRLKPYKAFINICFS

SEQ ID NO: 316831 - protein, 93 aa, Zea mays
  unsure (1)..(93): unsure at all Xaa locations
  Clone ID: MRT4577_5201C.1.pep
LRKEIVGKKKGRRRDAAVGLFVFPAQSRVTGAKYSYQWMALAXQNGWHVMLDAGALGPKDMDSLGLSLFRPDFIITSFYRVFGADPTGLGCLL

SEQ ID NO: 316832 - protein, 63 aa, Zea mays
  Clone ID: MRT4577_52021C.1.pep
RLQRCTLPRTIGQRFWHFHLFLWLVHSTSRQFVNKLTKKKKKKAAPICRFPGILVNYCLLKIL

SEQ ID NO: 316833 - protein, 175 aa, Zea mays
  Clone ID: MRT4577_52022C.1.pep
SIYLDCRVLVEYDIRIKRGQTRQEDLPVIDGAATFSELTYIRGAITNRISGDSGGSMDIARALFRNSVEATVEVWVSNLGRCVSGLDLFITGFVGRIPEEIKIFRGSIGDLCVVKRFVVAVRLNSVLFLLFKVPAFGTDPICRFAFRAVAHGCISGYRELNSCTVDVKVTWSNLY

SEQ ID NO: 316834 - protein, 85 aa, Zea mays
  Clone ID: MRT4577_52023C.1.pep
PLVDQDTRSLCTNITGHWLYSYNTLTKMLHTHTMLAIVAYGKDSQYLKTLTLRRFTLGAQRSKTSSRYPGGQSCIVGQHARIMDN

SEQ ID NO: 316835 - protein, 98 aa, Zea mays
  Clone ID: MRT4577_52024C.1.pep
PPPFFSLVPVAGGYWVLLFDDDSQYALSAEPCGGGLWFLCSPPSFGVVVPPPLVERAPLEGSAVSLLPRPPLVAPPPFCSPAPPGGGGVWWFLSLFGK

SEQ ID NO: 316836 - protein, 58 aa, Zea mays
  Clone ID: MRT4577_52025C.1.pep
PLFFFFFSTVHRMLVEKRRFLNTNNVERDGFEQECYSFFQSRQMRKQKGSNNPGKPGR

SEQ ID NO: 316837 - protein, 258 aa, Zea mays
  unsure (1)..(258): unsure at all Xaa locations
  Clone ID: MRT4577_52026C.1.pep
MKLWLPFLRNIGDDSTRGSDVGSAFAEDHKPAWRCFSFQEISVATNDFHPDNMAGRGGYAEAYKGTLADGHLVAVKRLAKGTPSEQKEKEFLAELGIQGHVCHPNTSYLLGCCVENGLYLIFEFCTNGTLASALHGKGGRTLEWPLRYKIAVGVARGLQYLHMFCRHRIIHRDIKASNVLLGHDFEPQISDFGLAKWLPKQWTHHSVVPIEGTFGYLAPEYFMHGIVDEKTDIFAFGVLLLEIVTGRRPIDCSXQSLL

SEQ ID NO: 316838 - protein, 87 aa, Zea mays
  Clone ID: MRT4577_52028C.1.pep
FFMTSCVFPLPAPLLQVPVADAAQHMRYHGFRHGDFEVRRPFAIRLPVAPVAGLLKLHNGNLTSSDPLTATTPLHRLSLLMSERYKH

SEQ ID NO: 316839 - protein, 97 aa, Zea mays
  unsure (1)..(97): unsure at all Xaa locations
  Clone ID: MRT4577_52029C.1.pep
YIKFIFIFFLFFFXFGTKEGFQCITWCANSPSMIKRSITDILLPQNYQVSTDECYECEIMVYSSCGVIQPFAYRSLPHWHPKKEEYMKSEIIFSNTQ

SEQ ID NO: 316840 - protein, 192 aa, Zea mays
  unsure (1)..(192): unsure at all Xaa locations
  Clone ID: MRT4577_5202C.1.pep
RPHAPEPPAHAGGLPEAPEHLTHPPHPPISQHTNPPNNAASKHNSQSSSCQQTPQHQPSQXYPQTPSXQTPPQHTPXSQQTTYSQHSHXXXAXYPPPPXSTHPSPTPPPPXSHPPXYPPPXKHHXXPPTQPHPPPTILKTQPXPPPPXXPSTYPXSXXSTHHPQHYTTTPPSPXLNPHXSTTNLSLTSPHLP

SEQ ID NO: 316841 - protein, 62 aa, Zea mays
  Clone ID: MRT4577_52030C.1.pep
VGERRPAVKMLIGHYEVYDGANAVHAAWGESLIQTISLCGLDHRYLHANGVKHGLEALERGR

SEQ ID NO: 316842 - protein, 79 aa, Zea mays
  unsure (1)..(79): unsure at all Xaa locations
  Clone ID: MRT4577_52031C.1.pep
TIQYLIVHASLLWNHKYFVHKNAHTGTFVHMATFRCQICSQMMMIEKDARLLELSLYDTFSETQLPTLARSWPLSRSCX

SEQ ID NO: 316843 - protein, 149 aa, Zea mays
  unsure (1)..(149): unsure at all Xaa locations
  Clone ID: MRT4577_52032C.1.pep
PGSHPLFFAHEHAYSAGVSHVPYRTLLPTTCSSYIHAPTMRLHTGSLYADEGKLVIQCPVHVGIDADRSAWFEQDESVHDTAXKVRDLVHTVXLQEQPAFTKKSFVAYIYRXIKNLTGGLELERAGEFKKGVEXATKFLLIKLKDPQFF

SEQ ID NO: 316844 - protein, 78 aa, Zea mays
  Clone ID: MRT4577_52033C.1.pep
PFFFWGTPGPRPTRGGPPLAQFLLSLGPRGHRDLWGGDQPFFFFYPPLGKNFNHLVGGGIWEPLPLSAPNPPKLKGSR

SEQ ID NO: 316845 - protein, 38 aa, Zea mays
  Clone ID: MRT4577_52034C.1.pep
FSLVKNFYIVTVAVVCTIRLYSIPFYFFIFIFFFSDAW

SEQ ID NO: 316846 - protein, 238 aa, Zea mays
  Clone ID: MRT4577_52035C.1.pep
MIPNLSALQNHFGAAAAGSDDLGALFSADAADQLALEFPTCNDFDGFQKATKEMVNNKKGTTTLSFIFDKGVIVAADSRASMGGYISSQTVRKIIEINPYMLGTMAGGAADCQFWHRNLGVKCRLHELANKRRISIAGSSKTLANILYSYRGMGLSIGTMIAGFDETGPGLYYVDSEGARLKGSRFSVGSGSLYAYGILDEGYKFNMSVEEAAELARRAIYHATFRDGASGGCVSVYY

SEQ ID NO: 316847 - protein, 506 aa, Zea mays
  Clone ID: MRT4577_52036C.1.pep
MSAAASQSSVKAMAAAAAAVAMLLSAAAAVAAQHDYGDALHKCILFFEGQRSGRLPPDQRLRWRRDSGLHDGAAAGVDLTGGYYDAGDNVKFGFPMAFTATLMSWGLIDFGRSFGPHREEARKAVRWATDYLMKATAKRNTVYVQVGDAFRDHACWERPEDMDTPRTVYKVDPSHPGSDVAAETAAALAAGSIVFRDADPAYSKRLLDRAVAVFEFADKYRGPYSGSLHAAVCPCYCDYDGYQDELLWGAAWLHRASRRREYRDYIKRNEVALGASDAINEFGWDNKHAGINVLISKEVLMGKDEFFRSFRENADNFICSLLPGISNHPQIQYSPGGLLFKVGSSNMQHVTQLSFLLLAYSNYLSHAGGRVSCGSSSASPVQLRRVAKRQVDYILGDNPLRMSYMVGYGARFPRRIHHRASSLPSVAAHPARIGCKAGAAYYTSPAPNPNLLVGAVVGGPTDDSDAFPDARAVFQQSEPTTYINAPLMGLLAYFSAHPNPAESGGD

SEQ ID NO: 316848 - protein, 108 aa, Zea mays
  Clone ID: MRT4577_52037C.1.pep
RPHGTTPGQLPVRPPAPPPARRDTRPQPTADRCGGTQPQAHPAHCSHGPLPLAIYHPWPLPTSSALSRTRLGRDALPSTAASDTSTHKHRFAPCSVGFFWIVNHNVAP

SEQ ID NO: 316849 - protein, 264 aa, Zea mays
  unsure (1)..(264): unsure at all Xaa locations
  Clone ID: MRT4577_52038C.1.pep
GFADPPYPTPATTRVLPIRLTPRRPPPDPLRPTLSPLPTMVGYGIQSMLKDGHKHLSGLDEAVLKNIGAGRELSAITRTSLGPNGMNKMVINHLDKLFITNDAATIVNELEVQHPAAKLLVLAARAQQEEIGDGANLTISFAGELLEKAEELIRMGLHPSEIIIGYTKAINKTLEILDDLVEKGSENMDVRNREEVVLRMKSAVASKQFGQEDVLCPLVADACIQVCPQNPANFNVDNVRVAKLVGGGLHNSSVVRGMVLXNDA

SEQ ID NO: 316850 - protein, 49 aa, Zea mays
  Clone ID: MRT4577_52039C.1.pep
CAGSDQRSDDTTALQDSLLKLGTGRCRRCRHGTEAQVASLLRDDIRPGA

SEQ ID NO: 316851 - protein, 61 aa, Zea mays
  Clone ID: MRT4577_5203C.1.pep
HNQPSCEYSRTGPSLLKWLASEVLTGGIGIHVLLIICPCAFQPTATPLRSRYSINLHSWQH

SEQ ID NO: 316852 - protein, 53 aa, Zea mays
  Clone ID: MRT4577_52040C.1.pep
SDASFSPWAGIVLLVILYPKVLKCEYALRGVTVIHAQRLLPLLPSQTGSLPFD

SEQ ID NO: 316853 - protein, 75 aa, Zea mays
  unsure (1)..(75): unsure at all Xaa locations
  Clone ID: MRT4577_52041C.1.pep
MPSKGPLQSXVQVFGRKKTATAVAHCKRGNGLIKVNGRPLEMIEPRTLQYKLLEPVLLLGKERFAGVDIRVRVKG

SEQ ID NO: 316854 - protein, 64 aa, Zea mays
  Clone ID: MRT4577_52042C.1.pep
NRPLNSDTILFVKKPAQNQGTANSPKNGEKTVSYLKGESPSSEGFLTQAGQTEEPRCSALKKKT

SEQ ID NO: 316855 - protein, 124 aa, Zea mays
  Clone ID: MRT4577_52043C.1.pep
PGAWFNLIKNNSTQKRTAPRSNETSRSQHDALVGKDVILYALLRSDQPVAKGTIISTKPNTILAGQSLGRQCCEVIVSCVLKRDAHLPRPYANMETMGDANKMSIAWPYNRLKITNKASTPPAV

SEQ ID NO: 316856 - protein, 498 aa, Zea mays
  Clone ID: MRT4577_52044C.1.pep
MEMVGGSADAIPGLLSYGWAGLWSTLASLLFLWSMVQDHLPFQLEEQLSALARRALAAVTPYVTITIDEHDADSFGRSEAYLAAEAYLGATLAGRASRLRAELPGGSDRVSLAVDDHVEVTDAFRGARMRWRKTRTLRRGNVIAWNPREEERRAYCLTFHRRHRALVEAAYLPHVLAEGRAATVRNRQRRLYTNNASGDWGGGDDGPRAWTHVKLEHPSTFATLAMDPDRKREVVDDLDMFRDGRDYYASVGKAWKRGYLLFGPPGTGKSTMIAAMANYLGYDIYDLELTAVKSNTELRKLFIETKSKSIIVIEDIDCSIDLTGKRKKKIRDKNDTRKKKKKAPWEEEDKDEGSKVTLSGLLNFIDGLWSACGGERIIVFTTNHKDKLDPALIRRGRMDMHIEMSYCCFQGFKVLAKNYLGVQEHDGELFGDIRRLLEEVDMTPADVAENLMPRSKTKDADACLRRLVKALEEAKEAALLAAKAKQLDGIKDEEGNRR

SEQ ID NO: 316857 - protein, 95 aa, Zea mays
  unsure (1)..(95): unsure at all Xaa locations
  Clone ID: MRT4577_52045C.1.pep
PVAANLSLNFASPTIAALARSNIMGTQLNFTDSYRYSTAAPTAAAHKIVSLFSKKPAHNPKPASVSSSSTDIIYELSKXYGPDRKIYLPDGLLHL

SEQ ID NO: 316858 - protein, 22 aa, Zea mays
  Clone ID: MRT4577_52046C.1.pep
VCDLRNEVFLKSQTQIFIVAAR

SEQ ID NO: 316859 - protein, 142 aa, Zea mays
  Clone ID: MRT4577_52047C.1.pep
PVTLWPLKRRLTPLPGPLMRRRLTPLRRLTLLPPPLTLLLPRVTPLPTVGGVRAIPRGIEEINRWGPPAQVILLAPGLFPQVQRVNLGWFGVGCGPSVFLIKGRSVSVVSAVLILGSSRPMHQPAWIGDQWVLLPPSGFILS

SEQ ID NO: 316860 - protein, 43 aa, Zea mays
  Clone ID: MRT4577_52048C.1.pep
DMEKCSAEEECTIELFEWKLASRQFMVVHSIVGMVARDVMYGV

SEQ ID NO: 316861 - protein, 58 aa, Zea mays
  Clone ID: MRT4577_52049C.1.pep
MTYSHVILSIQRCPLTPMNHHDKIQRLLLFRSAERQWLVMTQHECTVPPRQPNAGSTG

SEQ ID NO: 316862 - protein, 94 aa, Zea mays
  Clone ID: MRT4577_5204C.1.pep
LILWLKSKSLSPAPAAARYGYILIDYKRTITRPYLEAHRNEPGMPPGHQTLHLQVLQRHRRAHMTGHHLVSYQVYPEANINVNGRPGALPMPQR

SEQ ID NO: 316863 - protein, 76 aa, Zea mays
  Clone ID: MRT4577_52050C.1.pep
KKNPRVRGILQFTPGFPFCSLFNRCESPNFPFPAPGATPSNPKQGVWPFDPTPEASLFYFRNPEATWRLNQRGPLF

SEQ ID NO: 316864 - protein, 103 aa, Zea mays
  unsure (1)..(103): unsure at all Xaa locations
  Clone ID: MRT4577_52051C.1.pep
MADGDLEVLSVLDTGKTQWYQFTAIVVGGMGFLTDAYDLFCISLGTKLLGRMYYTVEGYETPGSLPSNVSECVNGXALLGNASWQMLFGWLFDKLGLMNVYGM

SEQ ID NO: 316865 - protein, 75 aa, Zea mays
  Clone ID: MRT4577_52052C.1.pep
LPPFLVAVPVCPCAVCACCALVFSGPVGCCSGVLRLLCRVWCRRAAPRLFGRRPCRCCVLLICDGCSRTRGGRVV

SEQ ID NO: 316866 - protein, 123 aa, Zea mays
  Clone ID: MRT4577_52053C.1.pep
GACSSGNLFVEERHFCGDRLPPSSGTLLFGVRNVRAGVYALNSFSWGGFFLSSGLALPLGPLSLGCLRAPGPVVDCPGLLGPFLSLFSGLVIGVFRPEPPAYPRGRPRLVNPARGAATFSLGT

SEQ ID NO: 316867 - protein, 148 aa, Zea mays
  unsure (1)..(148): unsure at all Xaa locations
  Clone ID: MRT4577_52054C.1.pep
EIREASQKRGLLRVLXTQQMSQEVRDWLDMSLKNAAXDKWLXLPRAFTVCGRMKPEEAAVATLSALPDEVMYTIGTVLPYEDSVRERRRKCEFLEMQEELIKAEEAKKGTEETARQKKEEPSMNEPEAVEDDFALEEMSVATVREELR

SEQ ID NO: 316868 - protein, 142 aa, Zea mays
  Clone ID: MRT4577_52055C.1.pep
VWKLPEAATVPVAVVVENPIMDADSWPALPGLSSPPPPAAGPVAKASPKAASPASTGAVMSPPSLANPGAPDANPGSEAPVRNPVVQRALVMPAANGLEKIAPAPEPSPVYVPNARSNGADPHQNGRFGFQPHGPGGGYVGG

SEQ ID NO: 316869 - protein, 64 aa, Zea mays
  Clone ID: MRT4577_52056C.1.pep
QIRTEGGEINCGRFLIELLTPSHTPTLLFKIKGTGTRGVYNNWGRAAEPTNSTSPRRAVRTQRP

SEQ ID NO: 316870 - protein, 73 aa, Zea mays
  unsure (1)..(73): unsure at all Xaa locations
  Clone ID: MRT4577_52057C.1.pep
VPTGPSTLLGCKAFGVDTKGSSMTCSVLDVPSKGVDTAKIAGFALATSELLAXDASTDGTPKKVTYNKIDSKT

SEQ ID NO: 316871 - protein, 179 aa, Zea mays
  unsure (1)..(179): unsure at all Xaa locations
  Clone ID: MRT4577_52058C.1.pep
NVLISSIVMKEEALFVPQYYCKLMVIIVVIEGWVCVHLVGHKESKEPLSFESSRAELCRHYVFVISAAYPVAIQATSGVNFSGFGINGNIINRNLFAGKTDNVISSIGRALDGKDVLGLTFYGCGERVMXLIYKQSGSCFVDGLHRQQEQRKGSHQQGQQKGRKGACVFWISMELRPGN

SEQ ID NO: 316872 - protein, 103 aa, Zea mays
  Clone ID: MRT4577_52059C.1.pep
AFSQWNLRPGCRGPTPLWGSPGGASPPSVFSPGSPRWSPPRGSRASPEGSSPTRVWPTRCGPPPVGVSALWWGLPLSVNPRPPPSWGGFFGSPLCFKPRALVG

SEQ ID NO: 316873 - protein, 76 aa, Zea mays
  Clone ID: MRT4577_5205C.1.pep
PAGMQLCTGKNDEAVVGSSSARYCCRGETKEEMHDKAHVCIVVGQKGLGFVKDTAYEGGSEDSDKWGRQRGGEGQT

SEQ ID NO: 316874 - protein, 128 aa, Zea mays
  Clone ID: MRT4577_52060C.1.pep
PGEYFKMGDNLNLAHVNYSLKKVIKLLVTLTVLMTIVVGINIWDVMRHDTEETWVVRERLPVTTPVYNMSLSDRINNLIKENNKRIKESHVVEDHVLEEYSSEEDDISSEEDDLHITLPPLPNNETLP

SEQ ID NO: 316875 - protein, 46 aa, Zea mays
  Clone ID: MRT4577_52061C.1.pep
RIQFSIFILKHSLIEQLLGIHYLFHWLPMRLIDKLTIHTTHYIERM

SEQ ID NO: 316876 - protein, 54 aa, Zea mays
  unsure (1)..(54): unsure at all Xaa locations
  Clone ID: MRT4577_52062C.1.pep
ATMRDKRPETRVYGWTFFDCRISVKGTKNRTIEFEXPESQRTSILXLSNIGVLC

SEQ ID NO: 316877 - protein, 40 aa, Zea mays
  Clone ID: MRT4577_52064C.1.pep
NELGKGANIQRNTPPVKMVTSRDQIDHGPMKRTRYGHNLN

SEQ ID NO: 316878 - protein, 83 aa, Zea mays
  Clone ID: MRT4577_52065C.1.pep
GGPVYQKGVFETAGLGMVEGEPGKSGQEKQPPGRLTNLPRLSPWALQKKRKVFFLVLGALLLRLFSRGLWGCKNRLWKGKKIK

SEQ ID NO: 316879 - protein, 70 aa, Zea mays
  Clone ID: MRT4577_52066C.1.pep
GRRRTTPTTSPRPRTTTYLHNADSTDSEDLEAQKILDRETQRSRGFCFVTFSTEEAMQNAIEGMNRKELD

SEQ ID NO: 316880 - protein, 225 aa, Zea mays
  Clone ID: MRT4577_52067C.1.pep
HKNAHSYNTLLAALLRRPDTLPDAFRLFDTMPADSRNLVSYNTLMSSLAHHGRQVEALRVVARLARDRFLGPGLAMDRFTVVSVATACAGIGAARPLREMHGAVVVSGMEFTVIMANAMSNAYSKARRVEDARHLFDQVSIRDNVTWTSMISGYCQVKKLHEAVQVFDMMPDKDRIAWTALISGHEQNGEEDTALELFEQMLAKGVSPTPFCLGVSFWCMCQNLD

SEQ ID NO: 316881 - protein, 59 aa, Zea mays
  Clone ID: MRT4577_52068C.1.pep
FDICAELCCLSFQPMPFLRAAFWPSLRKKNKNIGFLVTIAKGRVSTNYVPIIYMSTGAA

SEQ ID NO: 316882 - protein, 81 aa, Zea mays
  unsure (1)..(81): unsure at all Xaa locations
  Clone ID: MRT4577_52069C.1.pep
KTLCPRLALILVPLNFQSPLFFFDVFFLPPEGGFPPFVKKSWFXKLSVKKKKKKKKKKKKKKKKKKKKKKKKKTKKKKKKR

SEQ ID NO: 316883 - protein, 109 aa, Zea mays
  unsure (1)..(109): unsure at all Xaa locations
  Clone ID: MRT4577_5206C.1.pep
KITAFPCLTYIAVNKEGETVSNISPNAANADTWGVCPGKDIIHATDADHASLMVGKDEAYEIWTRGWGRMYPEGDASRDLLXKVQMTYYLVTLVDNYYIQGDLLASLTI

SEQ ID NO: 316884 - protein, 220 aa, Zea mays
  unsure (1)..(220): unsure at all Xaa locations
  Clone ID: MRT4577_52070C.1.pep
MVQIAAVKRMKGRAPLSVVVAIIGGLALAGVIFTDDLRSLTEIMEKKGKAKEHKRTTSLHAGTRTRKMPLTPPPQPAKAAFDPSRCSVTEGYWAYNRSKELLYTDQTCPFIDRQVSCQRNGRPDSDYLRWDWHLDDCSLPRFDPVALLEMLRGKRMMFVGDSLQMGQWLSMVCLVNSAVPYTARSMERSTXLSVFTATEXNATIEFYWAXYLVEATPTAT

SEQ ID NO: 316885 - protein, 48 aa, Zea mays
  Clone ID: MRT4577_52071C.1.pep
LAFSPTSTHGTCGIYTVPGNPPAALARCSTLLPCALTTWPPTSTTSPM

SEQ ID NO: 316886 - protein, 80 aa, Zea mays
  Clone ID: MRT4577_52072C.1.pep
MLQRFGAMKSRERKRQEIPVNHGHPLGGRERVFFGGYCTWAGRPGYGRVCHRHRREAYGKLRALRGGAAARYVWCVRGTH

SEQ ID NO: 316887 - protein, 146 aa, Zea mays
  unsure (1)..(146): unsure at all Xaa locations
  Clone ID: MRT4577_52073C.1.pep
MHNVHICFRVIDRSLCAVCRMCPSSEIMEKKGKAKEHKRTTSLHAGTRTRKMPLTPPPQPAKAAFDPSRCSVTEGYWAYNRSKELLYTDQTCPFIDRQVSCQRNGRADSDYLRWDWHLDDCSLPRVDPVALLEKLRGKRMMXVGDC

SEQ ID NO: 316888 - protein, 144 aa, Zea mays
  unsure (1)..(144): unsure at all Xaa locations
  Clone ID: MRT4577_52074C.1.pep
KPSLTGPGTGRGIPQFPNIPIXKPVTPSIFFGFSKWGLGPPKXFFQEEIQLGRGLIWPNSTQAPNWCPPLMPCPIPLLPAKPPLHPNLANFXGVTFNGSQRLGLEGLPIESRAPEGTFRKKAPVLDKVGEGPLTETKTRLAPGI

SEQ ID NO: 316889 - protein, 231 aa, Zea mays
  unsure (1)..(231): unsure at all Xaa locations
  Clone ID: MRT4577_52075C.1.pep
QNVVEELEKDLNHMIVRHSAWAVVHACIKCLCALSESAGRGPGLVENLVNIFYKHLCGANSDSQLLGRSLFCLGLLLRYGYQLMLTSENQLDFPKIINLLQRKYLLKDDFSLKVRALQTLGYILIAKPEFMLQKDMLNLIETALSSEVDYRFKIQGLQNLYEYLRDAESQLTAESTAXNLLGSVKXGRSEVSVAAGAGDTNICGGIIQLYWSSILERCLDTNDQVRQSALK

SEQ ID NO: 316890 - protein, 125 aa, Zea mays
  Clone ID: MRT4577_52076C.1.pep
MNHPEQEQQAAESEKAVTTLLGVWASPYVLQVKWALAMKGVEYEYVEEDLRSKSAQLLAYNPVHKKVPVLVYKGRPVAESQVILEFIDDAWSHRGDPILPRDPYQRAMGRFWATVQQDKLSAPIW

SEQ ID NO: 316891 - protein, 109 aa, Zea mays
  Clone ID: MRT4577_52077C.1.pep
MASGELACTYAALILSDDGIAITAEKIATIVKAANIKVESYWPALFAKLLEKRNVEDLILSVGSGGGAAPVAAAAPAGGAAAAAAPAVEEKKEEAKEESDDDMGFSLFD

SEQ ID NO: 316892 - protein, 140 aa, Zea mays
  unsure (1)..(140): unsure at all Xaa locations
  Clone ID: MRT4577_52078C.1.pep
MASGELACTYAALILSDDGIAITXSFSLAAGSFKSPRLFFLSGXEMRDCSSSWQAEKIATIVKAANIKVESYWPALFAKLLEKRNVEDLILSVGSGGGAAPVAAAAPAGGAAAAAAPAVEEKKEEAKEESDDDMGFSLFD

SEQ ID NO: 316893 - protein, 57 aa, Zea mays
  Clone ID: MRT4577_52079C.1.pep
TKNMKVSIVRTHKTSIISSMEKNNIYISTLLFNIAVITYWDILFYLDMISCHNDTCV

SEQ ID NO: 316894 - protein, 157 aa, Zea mays
  unsure (1)..(157): unsure at all Xaa locations
  Clone ID: MRT4577_52080C.1.pep
MVTKNNGARMHPNHEHVPVPVNISQDRQPIGTRAYLTNLNDYNEPPPPPLLEPGSIKTXSFYGSGIFHLLATLIXYLYISIMTAMRGSRPTTSATSCAIQHIXWCXXGMIMLLVYGMVIIYVXHINPVMTFRMVMTTKMSITXAVLYIMMQMPVIHL

SEQ ID NO: 316895 - protein, 167 aa, Zea mays
  Clone ID: MRT4577_52081C.1.pep
NPELLIILRDLGISEMSRSRERRVHVSWASLTKLESLRVLKLATPTEVHLSLESEEAVRSMDVISRSLESVTLVGITFEEDPMPFLQKMPRLEDLILLSCNYSGKMSVSEQGFGRLRKLDLLMRSLDELQIEEEAMPNLIELEISVSKRETKLIIPNRLKENGQIYC

SEQ ID NO: 316896 - protein, 46 aa, Zea mays
  Clone ID: MRT4577_52082C.1.pep
KKKKKKKKKKKKKKKKKKKKKKKKKKKKKKKKKKKKKKKKKKGRPF

SEQ ID NO: 316897 - protein, 140 aa, Zea mays
  unsure (1)..(140): unsure at all Xaa locations
  Clone ID: MRT4577_52083C.1.pep
MPTTEEKMASQTMATHSGARTQPRFTNGDQVRPXTHGHNLILKAVHSQMVAQRGXRAGGPDARXMRIAPCFGTDETAFIGFTARNDQEDVTKAGTSDELRNAXIDMLQGTMRIAVDKWQTWQXADSSAEWAVXEDNNLYL

SEQ ID NO: 316898 - protein, 96 aa, Zea mays
  Clone ID: MRT4577_52084C.1.pep
RLCLARFFIKKKEDFTGPCNTYKPITAHIVDTVILETDAFHFSSNRRKTIQSMKPFLDITLQITNANGLTFHLQITNLNSEFLYDDIFKRWTAKDC

SEQ ID NO: 316899 - protein, 115 aa, Zea mays
  unsure (1)..(115): unsure at all Xaa locations
  Clone ID: MRT4577_52085C.1.pep
MPRRIYYAIKEPLLVFLYVISRPEFSSGGGGGWFHHPXPPTIFFNPPYSYYVYYCYANLHTLDKLCEFKGMTTIXLRAHCGEAGDIDHLGGSRLTXHTLTLALNAPRSLYRPCPY

SEQ ID NO: 316900 - protein, 166 aa, Zea mays
  unsure (1)..(166): unsure at all Xaa locations
  Clone ID: MRT4577_52086C.1.pep
AWSYPSASAPVQSSLTPLLAYLFPSLNRRHGPRSTHEVYTPIGGADPEIYXLLKREKRSQXMNIEIIASEXNFTSFAAMEVLGSXLTNNHSEGMPEGHYYSGNDEHDDIENLXQPRALDAFRLDXPNAWERHEQXYSGVPSHTFAALLXLLKTQDRNXMGVELPTG

SEQ ID NO: 316901 - protein, 80 aa, Zea mays
  Clone ID: MRT4577_52087C.1.pep
GVGSSSASSYVPGVQAGCAPRLVLGLLCGPGSYPARGAGFFAWQLTGPCPALLLFKHADNNLLKAFYLRPNGRLVPSKLM

SEQ ID NO: 316902 - protein, 139 aa, Zea mays
  unsure (1)..(139): unsure at all Xaa locations
  Clone ID: MRT4577_52088C.1.pep
MPEYQHSASITTTTSNNHSSTLHLNLITKPPKTITMKFFSAVSAAVLGFSSMASALTASYDPGYDDAARSMNAASCSDGANGLVARFPTQGRLPRFPLIGAHQGIAGWNRPPXGTCYRPHPTTPRPLYPPALAHTATRL

SEQ ID NO: 316903 - protein, 187 aa, Zea mays
  Clone ID: MRT4577_52089C.1.pep
MALLAPSPRALCVREAAAASPHPHSLATAACSTVGGGVAGRALWLWNGGGTGRRRERRERVRAEAYFWDVSKPVEMEEIDSMEKLDDALRWSVENNQPIIIDWMASWCRKCIYLVPRMEKIAGEYPGVRFYFVDVNKVPQAVVKRGNVTKMPTIQLWKDGEWKAEVIGGHKAWLVMDEVREMIQKNK

SEQ ID NO: 316904 - protein, 49 aa, Zea mays
  Clone ID: MRT4577_5208C.1.pep
SSPTRYSRSKPSSAAPTLVVPGEPRLVWCLCVLGDTGLGLGCAGVGVAG

SEQ ID NO: 316905 - protein, 65 aa, Zea mays
  Clone ID: MRT4577_52090C.1.pep
IIPVTLSCFIVSQIKRFSSVSKVICISLSCHPDKYFRCYEVFTCSRVSWCAFIFLSPCPYVCFFF

SEQ ID NO: 316906 - protein, 53 aa, Zea mays
  Clone ID: MRT4577_52091C.1.pep
GICDCCICWPNCLGGSVIGRLYRLGIMHFLLYSPLSILCSVWLIFSITSRVDF

SEQ ID NO: 316907 - protein, 157 aa, Zea mays
  unsure (1)..(157): unsure at all Xaa locations
  Clone ID: MRT4577_52092C.1.pep
CRGSPLADVCSFCGGLLLGPLVESAPHKNVXPEMLGPPPVWPPQCFACQAFCPPGGLGPLAVPFVFRSLSVQLPALSLGLQPRLAPPPGLPLRWVSSPPSLRLFLPGVVSPGGLFGAPWSGVPLFPLAVFCSLVSCYPCLFAPPRYYRLEGGFFFIA

SEQ ID NO: 316908 - protein, 34 aa, Zea mays
  Clone ID: MRT4577_52093C.1.pep
GKEIKLSNAKVFLTSLRCIKSASVLNLGHTTAQL

SEQ ID NO: 316909 - protein, 58 aa, Zea mays
  Clone ID: MRT4577_52094C.1.pep
IDSSNQTPHKVLSLVRNAELPRLLSYSLAALPDPESIIPISIPYKGSFYKKSWLKIPI

SEQ ID NO: 316910 - protein, 80 aa, Zea mays
  unsure (1)..(80): unsure at all Xaa locations
  Clone ID: MRT4577_52095C.1.pep
MSALLQXLPLVHLLAQNIKAHQLQQLLLGGRDTYSDQQQFLXYNQLSSXNYTSYFQQQQLTFSHVPATYTQNVILFNQLA

SEQ ID NO: 316911 - protein, 58 aa, Zea mays
  Clone ID: MRT4577_52096C.1.pep
MTSACPTCIPLVSTPSACPFKKTTDSRFRHRTDTCRASTGGGRGLNTENDGPLWLPTW

SEQ ID NO: 316912 - protein, 133 aa, Zea mays
  Clone ID: MRT4577_52097C.1.pep
MSSSMGHESSGGGADEEDPAGLQRVIWLRQMLHRWQSSSSRIAAERRSSASDDGDRANPDDANATTDQSSNGDPTPAAADNASSSSSSRNQMLPAAPHGAADEEDEDEDRRLLSRVLLVEERRRGCPPDAAAC

SEQ ID NO: 316913 - protein, 151 aa, Zea mays
  Clone ID: MRT4577_52098C.1.pep
RVPYTVLRPDVYAPFVRAFEVMAMAGRKPPTPPFELCYDSRELGSTRLGYAVPQVDLMLESGANWTVFGGNSMVQVSDDTACFAFLEMKEEKQQGGHGYGGGAPAPAVVIGGFQMENNLLVFDEENGQLGFSGLLFGRQTTCSNFNFTLAG

SEQ ID NO: 316914 - protein, 50 aa, Zea mays
  Clone ID: MRT4577_52099C.1.pep
VLFLSFVLNNEFYFTRGTLEKKCQHRLTFLKIIQLFVTEDVRPTDLGVLI

SEQ ID NO: 316915 - protein, 55 aa, Zea mays
  Clone ID: MRT4577_5209C.1.pep
DDTMRGAHFDPHLAWSGIQCRKRRAWEAVLASELCAFRADWSDARVSKTHWGAGD

SEQ ID NO: 316916 - protein, 100 aa, Zea mays
  unsure (1)..(100): unsure at all Xaa locations
  Clone ID: MRT4577_520C.1.pep
EKRQQHLVYHRKPNEEGXPRRPXQKKGKHPQHXEKCGRSGAXAAGCGRXLEEKHKAKKDPENEHAHRFKEEVADVDAVGSDGFAFHEHHEKRDAKKHAHN

SEQ ID NO: 316917 - protein, 36 aa, Zea mays
  Clone ID: MRT4577_52100C.1.pep
NYTTATIIMELILKTIQALPTTSTFTHTNLIYYYQP

SEQ ID NO: 316918 - protein, 383 aa, Zea mays
  Clone ID: MRT4577_52101C.1.pep
MGNCGTREENAVVAAHAQVQQLHLLQHSAKNALADRKHNRTFSDISDPSTPGKIEDTKDISIYNNVIAFTLFELETITKSFRAAYVLGEGGFGTVYKGYIDENVRVGLKSLPVAVKVLNKDGHQGHREWLTEVNFLGQLRHPNLVKLIGYCCEDDHRLLVYEFMFRGSLENHLFRKTASPLPWGTRMSIALGAAKGLACLHNAQRPVIYRDFKTSNILLDSDYTAKLSDFGLAKDGPEGDQTHVSTRVMGTYGYAAPEYVMTGHLTARSDVYSFGVVLLELLTGRKSIDKSRPSREQSLVDWALPKLNDKRRLLQIIDPRLEGQYSARAAHKSCSLAFYCLSQNPKARPLMSDVVETLAPLQQGGGGSGSDPPAFLTAEAAAG

SEQ ID NO: 316919 - protein, 117 aa, Zea mays
  Clone ID: MRT4577_52102C.1.pep
SPPKKFDFYMGGQAGKIGAPRPTPSPPPHNEKGFSPNNFQEGGPSLFFGGQRSPPPKPGGGPIWYAHLATVQVGPFKKFNKKSETSPRQGGQNLGGRVPVQKIPGLHKKKRSPMFFF

SEQ ID NO: 316920 - protein, 176 aa, Zea mays
  Clone ID: MRT4577_52103C.1.pep
RHESLLWSPSSRTSAQHTHVPRPTSYLLAGRCATLQLPTHERTSCGRRTFLCHPSDGLLSTAAASVLLRLRPGVLDQISCNAAVRAACKAPSLHCKALTMSPISRRLVPRLSAPARSPQALQRTARRSPARPRSSHASTYPFIPVAPSRAQASHQGLAPQLLPGKAAHHLAQSDPT

SEQ ID NO: 316921 - protein, 429 aa, Zea mays
  unsure (1)..(429): unsure at all Xaa locations
  Clone ID: MRT4577_52104C.1.pep
MGNCGTREENAVVAAHAQVQQLHLLQQPSKNANADRKHTCMSSDISDPSTPRKVEDAKNISIYNDVIAFTLFELETITKSFRVDYVLGEGGFGTVYKGYIDENVRVGLKSLPVAVKVLNKDGHQGHREWLTEVNCLGQLRHPNLVKLIGYCCEDDHRLLVYEFMFRGSLENHLFRXLLTTFEEKGKITGMLSDAXRQLRHCXGTRMSIALGAAKGLACLHNAQRPVIYRDFKTSNILLDSDYTAKLSDFGLAKDGPEGDQTHVSTRVMGTYGYAAPEYVMTGHLTARSDVYSFGVVLLELLTGRKSIDKSRPSREQSLVDWALPKLNDKRRLLQIIDPRLEGQYSARAAHKSCSLAFYCLSQNPKARPLMSDVVETLAPLQQGGGGGSDASSGLPDCRGRRRLTGNSVVHFRAIPNPKCTPVVPACRVR

SEQ ID NO: 316922 - protein, 412 aa, Zea mays
  Clone ID: MRT4577_52105C.1.pep
MGNCGTREENAVVAAHAQVQQLHLLQNPAKNAIGDRKHNRTSSDISDPSTPRKAEDAKNISIYNDVIVFTLFELETITKSFRADYVLGEGGFGTVYKGYIDENVRVGLKSLPVAVKVLNKDGHQGHREWLTEVNCLGQLRHPNLVKLIGYCCEDDHRLLVYEFMFRGSLENHLFRKTATPLPWGTRMSIALGAAKGLACLHNAQRPVIYRDFKTSNILLDSDYTAKLSDFGLAKAGPEGDQTHVSTRVMGTYGYAAPEYVMTGHLTARSDVYSFGVVLLELLTGRKSIDKSRPSREQSLVDWALPKLNDKRRLLQIIDPRLEGQYSARAAHKACSLAFYCLSQNPKARPLMSDVVETLEPLQGSGGGDGRGQPSGLPDYRGRRRITGNSVHFRAIPNPKCSPAVPATACRVR

SEQ ID NO: 316923 - protein, 191 aa, Zea mays
  unsure (1)..(191): unsure at all Xaa locations
  Clone ID: MRT4577_52106C.1.pep
MATKXILSLLALLALFASAXTNAPIIPQWSLAPRSIITQLLPPATLVGYXHPAEQAYLLQQAIAESVLHQPIYQLPQQSLAHXTIQTIASLQPQQFLPALSQLTMVNPAAYLXQQLLASYPLAVANAVADQPQQQLQXLLPALTQVAMVNPDAYLHQQQXMLVSSTLAVCNAPTYLAQQLLQQTVPALSDA

SEQ ID NO: 316924 - protein, 88 aa, Zea mays
  Clone ID: MRT4577_52107C.1.pep
DMHSSSMHACHIQPLLVQPSISWVNLEPPPVSAGLAQSQDPSENLRALQQQQHADHQNNSPPPMVTVHTITALCKPGQQACTWGWGWP

SEQ ID NO: 316925 - protein, 93 aa, Zea mays
  Clone ID: MRT4577_52108C.1.pep
GAPISLAGSTGVHLVYVPLVTKMFQLARSSPSSLWRQPLAPNLPILREAVDSDLNLLHDSLSSRGAAHPGVWTRSWYTPTLSCSDIPAGLEVP

SEQ ID NO: 316926 - protein, 185 aa, Zea mays
  unsure (1)..(185): unsure at all Xaa locations
  Clone ID: MRT4577_52109C.1.pep
MMESSGGSGSSDPLLLAPGFRFYPTEEELLTFYLRHRLAGTKPVVEHLIPVMDIYGYHPSELQAMAGAANVCDTEQWFFFCPRAERELHGGRPARTTPSGYWKATGSPSYVYSSSPNNRVIGEKRTMVFYQGRAPTGNRTRWKMNEYKAVADMCAAAARXAPVMLRNDFSVCRVYISTGTLRSFD

SEQ ID NO: 316927 - protein, 89 aa, Zea mays
  unsure (1)..(89): unsure at all Xaa locations
  Clone ID: MRT4577_5210C.1.pep
GSTRAITLTTCQLPPHYKVFYLRDCGHMELGGIGPHLEGGHRPQCTVPPNGGVGSVPTLXVEAVGSDGSGLVKARKRDPELDYSLGGWT

SEQ ID NO: 316928 - protein, 115 aa, Zea mays
  Clone ID: MRT4577_52110C.1.pep
GGPQKKHNSNDLGGQRRIARGRNPPRKHLIGETPPAPPWGVNPLGGPQLPPPLVGTPPGRPYQGGHVFCNPNRPREPPEGAGKPQRTLKERDPRGHHRGARQVGSSDRYSERHGG

SEQ ID NO: 316929 - protein, 48 aa, Zea mays
  Clone ID: MRT4577_52111C.1.pep
AHVGGERPTSYRTGLASKYPIGHPSVAVLVAPLVGRDYAAELADTGVA

SEQ ID NO: 316930 - protein, 115 aa, Zea mays
  unsure (1)..(115): unsure at all Xaa locations
  Clone ID: MRT4577_52112C.1.pep
MGFPMCQRGDSRAPYDEDMALYGAKTSPGREHTDKDLSHADFGRLDIELTKAEMPWLMACRAXFGPSKPFAGARISGSLHMTIHTAGLIETLTALGAEVRWCSCNIFSTQDHAAG

SEQ ID NO: 316931 - protein, 238 aa, Zea mays
  unsure (1)..(238): unsure at all Xaa locations
  Clone ID: MRT4577_52113C.1.pep
LGTSRPAGRNLRGDAPRRALLQAARDPSNLLAHEAAFALGQMQDAEAIPALVAVLKDLSLHPIVRHEVQETCELALGRIEENKKVNGAESTTTSPFLSVDPALPSKHGLSVDQLRGLLLNEQXSMYQRYAALFALRNDGGDAAVSAIVAALSVKSALLRHEVAYVLGQLQNKAASDALSTVLKDVCEHPMVRHEAAEALGSIADQESIALLEEFAKDPEPIVSQSCEVALSMLEYERS

SEQ ID NO: 316932 - protein, 312 aa, Zea mays
  Clone ID: MRT4577_52114C.1.pep
MTATSAFESSPEMERFLCERLLNTEQPIAERFRALFSLRNLRGDAPRRALLQAARDPSNLLAHEAAFALGQMQDAEAIPALVAVLKDLSLHPIVRHEAAEALGAIGLEKSIPVLEESLTTDPAVEVQETCELALGRIEENKKVNGAESTTTSPFLSVDPALPSKHGLSVDQLRGLLLNEQESMYQRYAALFALRNDGGDAAVSAIVAALSVKSALLRHEVAYVLGQLQNKAASDALSTVLKDVCEHPMVRHEAAEALGSIADQESIALLEEFAKDPEPIVSQSCEVALSMLEYERSGKSFEFLFLQTPHVQS

SEQ ID NO: 316933 - protein, 27 aa, Zea mays
  Clone ID: MRT4577_52115C.1.pep
SAVSDSEPMISSRPSNGVRSSRFYWCD

SEQ ID NO: 316934 - protein, 141 aa, Zea mays
  Clone ID: MRT4577_52116C.1.pep
MGFWEAFLNWLRSLFFKQEMELSLIGLQNAGKTSLVNVIATGGFSEDMIPTVGFNMRKVTKGNVTIKLWDLGGQPRFRSMWERYCRAVSAIVYVVDAADRENMAIAKSELHDLLSKPSLTGIPLLVIGNKIDKPEAFPKQS

SEQ ID NO: 316935 - protein, 64 aa, Zea mays
  Clone ID: MRT4577_52117C.1.pep
GASFWLSPLLAREKIASEIMAWRCKICFLGPNMHGGLKEVSWGIRNGGIPSLPPKNMFIPSPGL

SEQ ID NO: 316936 - protein, 66 aa, Zea mays
  Clone ID: MRT4577_52118C.1.pep
SECLIRNNGNGNDRQHQSNCTGAETKRTTRGVLEDKLSDIKNGTDLENTPTTAETHQVGRSEPTNR

SEQ ID NO: 316937 - protein, 131 aa, Zea mays
  Clone ID: MRT4577_52119C.1.pep
SARGTTLLLLLLVYICKNGEGVSASPSLSLHRWRARTIPSPILSGLTHEPWRRRHRDPPPVVRLPTRHREARSARLGTPRAGQSGRSSTSRRALRAAKPMGGQSCSLLNAPTPYHIKAGSVAEAVKGSRVA

SEQ ID NO: 316938 - protein, 63 aa, Zea mays
  Clone ID: MRT4577_5211C.1.pep
LLTEGSIDYDIINNVPTPRLSRGNTDRFLADPNRSPKTKLGANMPSRAEHLARKSDCEPQLIG

SEQ ID NO: 316939 - protein, 120 aa, Zea mays
  Clone ID: MRT4577_52120C.1.pep
RAATASNNADHVLVIPPGHPPPLHPRNNQQPETPKLSQNPEKPLPTSSPSRPPLPPAALRRRSSIAKPKSRFVEPPTPTHPHSAHPSPVHPAAAASLTATPTHRAAGGSTPAAEVDDDED

SEQ ID NO: 316940 - protein, 107 aa, Zea mays
  Clone ID: MRT4577_52122C.1.pep
GRVGKSRTASVESQQLCPEQLRMAGRAQVSPWVSGLDTVECMAESVCRLCEMPRSGPEQCLDQGRPSLLSPLLFSRLVCVECHSAHGWCIRDDRWSVAEQEFIAASY

SEQ ID NO: 316941 - protein, 59 aa, Zea mays
  unsure (1)..(59): unsure at all Xaa locations
  Clone ID: MRT4577_52123C.1.pep
MASTETITGSSTRSTGLLEDELDIAIPTIRDIHFMHMXQPLFRPYHMVIVQDGDATNAI

SEQ ID NO: 316942 - protein, 119 aa, Zea mays
  Clone ID: MRT4577_52124C.1.pep
KEFPGPTLNGAVEQMLNEMASRPRVRSPCIQIIKTGAVPFKLCKRGNTKQFPNLGIKFPLLFPKVRPPPRKLRAPFKGSRPNLFFLWASAGGLLRPFVLCFSVQKNKGFCLCKIFCPVG

SEQ ID NO: 316943 - protein, 165 aa, Zea mays
  unsure (1)..(165): unsure at all Xaa locations
  Clone ID: MRT4577_52125C.1.pep
AYCSFVRKAHKKXLEPAQGLPAIRAGPGGIWXDGEVAEFSDYGAPAQTPKVQRYTELVDKKGGRDERMGSGSQDASQDTSGTLGAXLKXRTGNKLGGVVTNRHEAGDLDYPNQKKXHPEPPNLGPGVHPGADERATSFITDDVRHGIYAGTNPETFVRADGAFIP

SEQ ID NO: 316944 - protein, 85 aa, Zea mays
  Clone ID: MRT4577_52126C.1.pep
MVASFSRTPNALDPSQSSSFPFEWLLASKELPINKLMIILSLVISHRKLTKTETTDFPLILCFMHSFLNLRWMFPGKSIVFLDNN

SEQ ID NO: 316945 - protein, 318 aa, Zea mays
  unsure (1)..(318): unsure at all Xaa locations
  Clone ID: MRT4577_52127C.1.pep
PVQKALSDAGVKPSEXNDVILVGGMTRMPKVSETVKSVFGREPSKGVNPDEAVAIGASIQAGVLAGNVTDILLLDVTPLSLGIETLGGVFTRLINRNTTIPTKKSQTFSTAADGQTAIQVKVYQGERELTRDNKLLGDFQLTNLPPAPKGVPQIQISFDIDADGIVNVSASDKATNREQSMTIASSSGLSDSEIENMVSDAERYAESDKQRRMVIEEANRGENFVTETEKSLAEFEAQLDATEREKVKKLLTELREVAAKGAAGEAGVTADDIKAALDSAQQASLGLFQMVYEKKNKESGESATPNAEGEEAKTEEKK

SEQ ID NO: 316946 - protein, 264 aa, Zea mays
  unsure (1)..(264): unsure at all Xaa locations
  Clone ID: MRT4577_52128C.1.pep
RRAGLLPSSTGVDGHNWMYPVAFGFFEFENLDSGTWVMTHLHKALGDMPLLGGGSYACXGLTKAVATIFPNAEKRECFRHLMQNYIKRYAGQEHMYPAARAYRKEVFDQHFANVIGISDLMAWMKKEHSLLWYRSGFNPAIKCDYITNNVAEVFNNWVKDYLDLPICELADKIRTLIMDLFFRRRRIGERLNGKILPAVLNVLRARTRGLGHLSLVNCDHYCAEVRDNNNCHSRHIVDAKVHYCSCEEWQHTGKPCQHALCVII

SEQ ID NO: 316947 - protein, 594 aa, Zea mays
  unsure (1)..(594): unsure at all Xaa locations
  Clone ID: MRT4577_52129C.1.pep
DSSAAFAQSSNRGRTPYRRRCLSSPHANHKIYNVSEEKLASAYYSAHLLSLXPADDAHDLLLTAFAEFCASNLADELRKPRSLMAADDLTARDLMMAAADLTAPQTWYPSARAMRRRVVYHCGPTNSGKTHNALASFSAAKSGVYCSPLRLLAMEIFDKVNATGVSCSLRTGQEVKEVAFASHLACTIEMVSTEEIYEVAVVDEVQMMADPVRGSAWTRALLGLRAEEIHLCGDDSVLSVIRKICADTGDDLLVHQYERFKPLVVEENTLRGYFQNIRSGDWVVAFSRKKIFEIKLAIETYTHHKCCVIYGALPPETRRQQAELFNQEHNEYDVLVATDAVGMGLNLNIRRVVFYTLIKYDGEKTASVPASLVKQIAGRAGRRGSAYPHGLATTFKYDLCYLTRCLEEPLEEAEKVGLFPTFEQLEMFASQFPELTFNNLLNKLCDTCRIDDTYFICQHDNMKKVADMLEGVHGLSLKSRYGFCLAPVNTRNSEAMDHLLRFANNYSESHYVTMGLEMPSGYATNDTQFLDLETKHQVLSMYLWLAQHFGEDNFPHVQEAQTMSTNIADLLGQSLAKGCWKPQLRYQFIGQPPE

SEQ ID NO: 316948 - protein, 61 aa, Zea mays
  Clone ID: MRT4577_5212C.1.pep
DNLFCMRNALNMMTAFFELHCQVLQVCSKSPLHITTKSMLSVNLSLFNFYLASCLINKVIS

SEQ ID NO: 316949 - protein, 146 aa, Zea mays
  Clone ID: MRT4577_52130C.1.pep
RPYLCLSSSSPISFSSSRTVFGFYDSPNLPFSCHVHMLLCRHNNFRSKRPPRPCPNFWFCSGSSLNHHFRLMIMFNFFCISRTWRPLPLPCLLFLFISVIMVVLLFRLFIFSPLASLLLLFKYPLSPSFFFFPIVSFFFSPPFFSS

SEQ ID NO: 316950 - protein, 33 aa, Zea mays
  Clone ID: MRT4577_52131C.1.pep
NYVEAMVFKGLFVLMLNHVDWVGLSRFKSITSP

SEQ ID NO: 316951 - protein, 67 aa, Zea mays
  unsure (1)..(67): unsure at all Xaa locations
  Clone ID: MRT4577_52132C.1.pep
VHGGTFRGTRSMGVRYRXFLVEMGGTLAEIEERAAVLKFLPEKSLSYHLWRFLVILKSGLASFWGRL

SEQ ID NO: 316952 - protein, 91 aa, Zea mays
  Clone ID: MRT4577_52133C.1.pep
AHVPQQCLTLTEVGCLAHLTRLNVWRLDCWMSVYISGWMLTHQCTMVEIYSCQVEYSWHVQVLRCRDGRASISVNASLTKMRSCGLWLLCF

SEQ ID NO: 316953 - protein, 44 aa, Zea mays
  Clone ID: MRT4577_52134C.1.pep
LLSTTELGPVERTVNYQLQLTHIVAGTHPGQHARAATYTNGPQC

SEQ ID NO: 316954 - protein, 108 aa, Zea mays
  unsure (1)..(108): unsure at all Xaa locations
  Clone ID: MRT4577_52135C.1.pep
ISSLKELCWALHMRWLWLHKTDPXRPWANLPIQVPKKARSFFSTVLVSEVGNGARTLFWTDKWLLAPRLFAIIPKRIANXRTVLEALSNRKWISDIKGALSVGPKLEN

SEQ ID NO: 316955 - protein, 79 aa, Zea mays
  Clone ID: MRT4577_52136C.1.pep
STMRACAVLTKWDESDSESFEGFHIGNGFKWDTTRHMFEQFGDIFIAAMFDPMGIGFVSFYAFVCQSVKYKMQRRSHYH

SEQ ID NO: 316956 - protein, 141 aa, Zea mays
  Clone ID: MRT4577_52137C.1.pep
MDPSSKKVTGRLMLAVGGAVLGSLQFGYNTGVINAPQKVIEEFYNQTWNHRYGEPIPSTTLTTLWSLSVAIFSVGGMIGSFSVGLFVNRFGRRNSMLMMNLLAFVAAVLMGFSKLGKSFEMLILGRCVIGGDWGLTTGFVP

SEQ ID NO: 316957 - protein, 66 aa, Zea mays
  Clone ID: MRT4577_52138C.1.pep
PKPVVGVQPQFSLNLFKRAIMFIYPNLFGVPSFFMISSLTYQFWFKSIFVYFSCFFFTVPYTKKLT

SEQ ID NO: 316958 - protein, 158 aa, Zea mays
  unsure (1)..(158): unsure at all Xaa locations
  Clone ID: MRT4577_52139C.1.pep
PPPXGGGGVALPVAVRLAPGWASRQAIGVGPWANAASGQSAVRPGGRARSSDQQPHTEQPPGHMQNVSLPRKTRSLIFVHGDDAIEYDQKFKNNILQENPLLHAVSFYRLVSFSVGCCSDPSLCSLEQGTQPKSFSLISRAVLITCCNSVKTRFKIIV

SEQ ID NO: 316959 - protein, 108 aa, Zea mays
  Clone ID: MRT4577_5213C.1.pep
AGGDRVPAGHALRSRTRDLFARPFRKKGYIPVTTYLRTKKIGDYVDGKVNGAVPNGMPHEIYHDRTGRVWNDTKMAIGVEGEKQPHGRIIRNGFHVPCRHEQPSLCTE

SEQ ID NO: 316960 - protein, 137 aa, Zea mays
  Clone ID: MRT4577_52140C.1.pep
LIQGGVALYHSALRGPFGKAKRCGAYVGYYRQAGIKGGCGPKGYSKLGNGQGFGPVPWVVKRPAQGTCEPPPLKGEVGPLWQGRSSRPAPLLWGSAKNRPFPLCRPGQGQAFFFFFFFFFFFFFFFFFFFFFFFFFF

SEQ ID NO: 316961 - protein, 93 aa, Zea mays
  unsure (1)..(93): unsure at all Xaa locations
  Clone ID: MRT4577_52141C.1.pep
YHLQVNIYNLEAYITLVVDDTVXRDKVXQVEAFRSGFNQVFGMSSLLIFSPQELDYLICGQQEIWEATSSCSSGDGVKKLWDVLDSCKKKLPL

SEQ ID NO: 316962 - protein, 56 aa, Zea mays
  Clone ID: MRT4577_52142C.1.pep
RDARCIGPLIAPGVEGTRSGTDTLANALTRDPFSFRPFFLVTFACFPRRALNPGLS

SEQ ID NO: 316963 - protein, 76 aa, Zea mays
  unsure (1)..(76): unsure at all Xaa locations
  Clone ID: MRT4577_52143C.1.pep
MTGAADYQQMVGLRPASLKAITLTHGRYSRVDPLGIFLXAWVLLVPAVISLGGLVSHFLCRPELQGLWLDAGLANF

SEQ ID NO: 316964 - protein, 102 aa, Zea mays
  unsure (1)..(102): unsure at all Xaa locations
  Clone ID: MRT4577_52144C.1.pep
IHLLFGPRIKAEIGYPDYVLKEGEGGTIVNIYNLEAYITLVVDDTVXRDKVXQVEAFRSGFNQVFGMSSLLIFSPQELDYLICGQQEIWEVMLCTLYPSYYM

SEQ ID NO: 316965 - protein, 83 aa, Zea mays
  Clone ID: MRT4577_52145C.1.pep
GAAPNVLFGPALGSKPALFPIFGIGVRIFLRFTPFPIYGVFLAPLGNFGPLSPGPVFFAFGPPRFNSGSFSLFGGLFSFFCFF

SEQ ID NO: 316966 - protein, 363 aa, Zea mays
  unsure (1)..(363): unsure at all Xaa locations
  Clone ID: MRT4577_52146C.1.pep
MEFADDALVDEDGDSEAEEADDGEAAAGPAEIELEVLAAGVPLFDPPVFVHLHAATHLLLPSFLRSAKGKCVLVAGDPGPEEEDDTMLRVAGRRLSSSLSWRPAAAVARGPLAGAGVPDRDDDSARGRSQPRFSIDSPFFVASRGFSSTETVVPRNQDAGLADLPATVAAVKNPNPKXVYDEYNHRRFPPGAPRKTAFAYFALSGGRRRYAXLLRLLVLRGGRQRGSNRGXRALASXLPPGVPPCDPPSCVRAAVRPTTAFIXRRPTEDGIKLANSVDVTSLRHPEQDAERVKNPEWLVVIGVCTHLGCIPLPNAGDSGGXWFCPCHXSHYDISGRXIRKGPAPFNLQVRTYSFLEENKLLVG

SEQ ID NO: 316967 - protein, 114 aa, Zea mays
  unsure (1)..(114): unsure at all Xaa locations
  Clone ID: MRT4577_52147C.1.pep
MPYLLFGSSERHPEAHRAENNPGESKPEEDEPXKAXAQKAPARQKPEEANPLPARKCRAKEDPDVKKXSTKXANKRVATYKTYMLEGARXSTEPWLYSSRXMGIMNCFINDIFG

SEQ ID NO: 316968 - protein, 113 aa, Zea mays
  unsure (1)..(113): unsure at all Xaa locations
  Clone ID: MRT4577_52148C.1.pep
STPAQQSPVHAQHXDFQAGLQDPKERMTYHEKDYEPVEEGSYIKMIDMVSGKGGQLKINDISGYXLDRTVXFLVNCHLTPLPILLTRHGESIANVRRRIDXDTXLTEDGELYS

SEQ ID NO: 316969 - protein, 64 aa, Zea mays
  unsure (1)..(64): unsure at all Xaa locations
  Clone ID: MRT4577_52149C.1.pep
MAANIFALLALXLALSANVATRTIIAHCSQQYLFPVTAARFEYLSIQSYLLQXAIVLSILQSLA

SEQ ID NO: 316970 - protein, 50 aa, Zea mays
  Clone ID: MRT4577_5214C.1.pep
STYDRRQRTHVMYSLIVKPDNNISVCQMILGGQSSVVGPTHVFLPLHLNL

SEQ ID NO: 316971 - protein, 40 aa, Zea mays
  unsure (1)..(40): unsure at all Xaa locations
  Clone ID: MRT4577_52150C.1.pep
TIKXLLGXXILLLXLITLVLFFPDLLGDPDXYTPAXXXQH

SEQ ID NO: 316972 - protein, 83 aa, Zea mays
  Clone ID: MRT4577_52151C.1.pep
MEMVTGEKPATSHGKAPSGESGNKKREESPPRVKSHQSSDKKKKMKKVVYYETDSSSPSTSGSDTPSVTSKRHERKKFRTIRR

SEQ ID NO: 316973 - protein, 247 aa, Zea mays
  unsure (1)..(247): unsure at all Xaa locations
  Clone ID: MRT4577_52152C.1.pep
MSNHHRFKLSHLMPNSWFYKLRDMKKPRPASTRNRQTTRTWSKRSTSHYYHGAISPKPLLPVSPHRSYCYYLNTTHSTSLEKLHPSTSTSTLHRLNTKASXTSNSPQITTAAAQQAAPWSSXQARVPRLAATSDPHKGSAHRIYKXGTSPSSPRLRSRRLPPAPNGAGGISTTGSAIGGGRRRTAARRSFAVVKASADPPRDFKESMVQMIVENDMSAPEDLQELLECYLSPHSMEYNGVIVEVFRE

SEQ ID NO: 316974 - protein, 119 aa, Zea mays
  unsure (1)..(119): unsure at all Xaa locations
  Clone ID: MRT4577_52153C.1.pep
RTQRPVTKAAEDIHFFLFLGAGASLHHHLPPHPRPGHRLLHLHPPHRHPHCRRPRRHNNHXNMSKDXHHKHRCHHPHHIEKYHFHPEVVEDTRCVYSQNQLVAHHISSLHHHAEVNSKS

SEQ ID NO: 316975 - protein, 100 aa, Zea mays
  Clone ID: MRT4577_52154C.1.pep
AHVAASVGCAQVSFAARAHVVCAQAARGRSRGAEPRLLRLGQTSVVGIQSVIYGLQLRQDAIKFLHNREGPQIVVGAVHGRRCASLAPIPNCYEHRYLTR

SEQ ID NO: 316976 - protein, 43 aa, Zea mays
  Clone ID: MRT4577_52155C.1.pep
FFFGDYRNITGVDQGDIIFSAHKTKPLHQQVNVPHHYLLSNIY

SEQ ID NO: 316977 - protein, 198 aa, Zea mays
  Clone ID: MRT4577_52156C.1.pep
MELCVSTTASVRATAAPISFAPPRRGASASTALPLHRRIPTRGWCCASAAVPDPAPSEELASASYTVVVADKPDSPADDKVDEVSAAPSGSAEAPVAEPVSSEASPSPSTDDGGLDEILSKLNIEVTPILILTGSGAFVALWILSSVVSAVDSVPLLPKLLELVGTGYSIWFTARHLLFKESRDGMFAKFKDLKERII

SEQ ID NO: 316978 - protein, 55 aa, Zea mays
  unsure (1)..(55): unsure at all Xaa locations
  Clone ID: MRT4577_52157C.1.pep
YGTTLDTMGARHFINNLTTGSAQADCAGVIIDXTTGGVEAWISIDGQTDEHVRLA

SEQ ID NO: 316979 - protein, 94 aa, Zea mays
  Clone ID: MRT4577_52158C.1.pep
PFPSLASTARRLHPYSSRVASVPFVHPRPHACGFERAPSCMVWPVELKENWATGGYPTVSNRIEKKVLHSPDQVPNTLALRVSNFCQLHGGWGV

SEQ ID NO: 316980 - protein, 440 aa, Zea mays
  Clone ID: MRT4577_52159C.1.pep
MASVSRRVLLALLSLLLLALRHAALSAPGATFPGDKAALAALRSAVAASSVPPHSCLSSWDFSRDPCAAFPCGVSCYAPPAANSSYLRVTAVALDPAGYSGALPAALLSSLPFLASLSLADNRFHGALPAGVPLPPTLRILDLSGNAFSGAIPASLFTASSALQELYLSRNALSGGIPPQLALLGALTRLDLQHNALTGTLPSLGAMRSLVHLDVSGNVLSGSPLRVPGTLPPSLWSVAARNNSFSGPLSAAALAALPALRVLDLTGNAVSGAVPGAAFAHPALQQLRLGSNQLDAVQEAPDGGSSSQLVELDLSGNRLAGRLPACLGAMPRLAAVALDRNRFTGGIPERYAVRAAAEESTEQWVPFVRLMLQGNYLCGALPRQLRQIQEGSAVVSLADNCLPRCPHKFFFCQGAPQKDHATCPKCDTSIRRQDILLRMP

SEQ ID NO: 316981 - protein, 153 aa, Zea mays
  unsure (1)..(153): unsure at all Xaa locations
  Clone ID: MRT4577_5215C.1.pep
FYGFLASRRRRARLDQDATTAEEHLSLNLFHAEVKHKQDTTKMINRCTFYDVQXERISLNDYLVANCTKQVMYLPHTAXRYSNNQGRKDQCPIGEHLTNSHMTHGRNDRKNVMGGRIIKHTLQIIHLLTDANPIQCRXDAIINXSDPVEDATR

SEQ ID NO: 316982 - protein, 63 aa, Zea mays
  Clone ID: MRT4577_52160C.1.pep
TGLFNRSMGHGWPASLFVHCHDCSAYTPLGLPCHYIDSRCSSGEHISLGYEPSFRKVKRKVTK

SEQ ID NO: 316983 - protein, 407 aa, Zea mays
  unsure (1)..(407): unsure at all Xaa locations
  Clone ID: MRT4577_52161C.1.pep
MECSNSTSSQGHHVGKWNQVQIIDPSIVEMGPSHLPLSFMRRCRGVLCLVIMILTAFMMMVYLSPVTTFLVRLFSVHYSRKSTCFLFGMWLAMWPFLFEKINKTRFVFSGESVPAKERVLLMNSARAEVDWMYLWDFALRKGRLQCIKYILKKSLMKLPVFNWAFHIIEFIPVERKWEIDEAIIRSRLSEFKNPKDPLWLAVFPEGTDYTEKKXCIKSQEYAAEHGLPVLKNVLLPKTKGFNCCLQVLRSTIDAVYDITIAYKHRPPTFLDNVYGVGPSEVHIHISSIQVSDIPASEDGVAGWLVERFRLKDELLSGFSALGHFPDEGKGTEGDLSTADCLANFAAVVAVTGLLAYLTLFSSVWFKLFVAFNCSSLTLATCYSVHLPQMVGFGSGTPGTGSIHAKEA

SEQ ID NO: 316984 - protein, 94 aa, Zea mays
  Clone ID: MRT4577_52162C.1.pep
MTKGTSSFGKRHNKTHTLCRRCGRRSLHIQKHECSSCGYPSAKIRKYNWSEKAKRRKTVGTGRTRYLKDVSRRFKNGFQTGTPKGARGLTAEKA

SEQ ID NO: 316985 - protein, 46 aa, Zea mays
  Clone ID: MRT4577_52163C.1.pep
PVRNFPGGPTDPSCYDGAHLARYVSSYIYEDTYLGSHILVHSKSDS

SEQ ID NO: 316986 - protein, 38 aa, Zea mays
  Clone ID: MRT4577_52164C.1.pep
TPYGYTQAFPFLNYLGAKSGFYNDRRGLNSRTVAGCGP

SEQ ID NO: 316987 - protein, 50 aa, Zea mays
  Clone ID: MRT4577_52165C.1.pep
IGRHERIMQGHIRGIASEISSLKAVLQHDTCNAPRHASAHESAHASAHAS

SEQ ID NO: 316988 - protein, 111 aa, Zea mays
  unsure (1)..(111): unsure at all Xaa locations
  Clone ID: MRT4577_52166C.1.pep
RRHRHRGEGGRPAEERRGGPGGGPRGPPHPRRRRTPHDTSGSKPGPRPRQQPTPRSHGGGGRTIFFTXAQQRHLAARDVYGMLALALHKGHEAYGRHSDLTPKEEETEMNG

SEQ ID NO: 316989 - protein, 48 aa, Zea mays
  Clone ID: MRT4577_52167C.1.pep
KTALLHHNIFPQPNFKMWLILLASIDPYACMFHYSIHPNHYSLISLCI

SEQ ID NO: 316990 - protein, 102 aa, Zea mays
  Clone ID: MRT4577_52168C.1.pep
ITHGVLATTCVLVVLNCLIMFQTYYMQVLDSFKTFYTNVNQQTVLYMGTARLKSVIQMDVAYALKRHCQYSVRLAWLIACLTLSATDAYAGSTCNCVLIGLM

SEQ ID NO: 316991 - protein, 120 aa, Zea mays
  unsure (1)..(120): unsure at all Xaa locations
  Clone ID: MRT4577_52169C.1.pep
MEGKEEDVRXLRANKISERQPIGTAAQDAADDNDYKDAPPAPVFEPGELKSWAFYLSLIVYVIANFLFFYITIMTDMGVSKSTSKWATXQLMXIAWPFGGMIFALDYCTAAIMRGHINPA

SEQ ID NO: 316992 - protein, 301 aa, Zea mays
  Clone ID: MRT4577_5216C.1.pep
MQHEPWRPGAEPAAGAGAGPAPTTVDEASMERSMSFVKALQELKNLRPQLYSASEYCEKSYLRSEQKQVVLDNMKDYAVRALVNAVDHLGTVAYKLTDLYEEQASEITTLELKVACLNQQVRTCQTYTDKEGLRQQQMMGTARRHHNHYIVPYAGNKRMQAFSVTQADADFDPTPRPFSSARTLEWHLVSEKNSKTSRPDQSEIALGETKTTKASSSGFRLLGKESSASPLSRNVQSNITSLDIVSAGMKDQPTTRHLSSFSSLDNPRGRQIQKAPLRTKSMLAAFFVKHRSAKMKNVSVR

SEQ ID NO: 316993 - protein, 86 aa, Zea mays
  Clone ID: MRT4577_52170C.1.pep
VGELLTPSLGLRCGIWVLCWASRACWWPWRGSRCIENGRISRRRRVATAVPPFTVGCCTSYVHLDGQATEDLDAQQVESTEQKLVE

SEQ ID NO: 316994 - protein, 78 aa, Zea mays
  Clone ID: MRT4577_52171C.1.pep
MASSSCVIGLIALSAVPVALASLASAQLSQMSYTLYCRNCLNALSSIMSCVNCQESQEPTSVATAAYAPLLRPVRPRL

SEQ ID NO: 316995 - protein, 57 aa, Zea mays
  Clone ID: MRT4577_52172C.1.pep
QPWPVGYSSWCQDRAVNAAGGKFGCYGWISVVRQVILGRTEGQGAVTPLVFLLVAFV

SEQ ID NO: 316996 - protein, 142 aa, Zea mays
  unsure (1)..(142): unsure at all Xaa locations
  Clone ID: MRT4577_52173C.1.pep
MLCTFMLFFGPKKKKKKKKKKKKKKKKKKKKKKKNQKKKKKGGRQFPLLGLRKLGRPFGPRKFAKRVAKRFNKNKVXGRALPTPTDEHPKIYRMKFWAINEVRAKSKFWYFLKKLKKGKKRNGQMLAINKILEGNQTTIKNY

SEQ ID NO: 316997 - protein, 80 aa, Zea mays
  Clone ID: MRT4577_52174C.1.pep
MSAMTESRQQVYVSGDGFSEPMSAQHNFANNFDLNDPERAMSDYQRIMHEHTKRQLSTATDSARRRSGASSSDSVSSTSS

SEQ ID NO: 316998 - protein, 623 aa, Zea mays
  Clone ID: MRT4577_52175C.1.pep
ESLMLASQLRSEIAYRDSDISSFVILEAMTTLRCCEDFSMERLELLGDSVLKYAVSAHLFMTFLNKHEGQLSSRRQETICNATLYRLGIERRIQGYIRDAAFDPRRWLAPGQLSRRPCPCECPVNSEVVTEDIHRIDDKSIIIGKACDKGHRWICSKTISDCVEALIGAYYVEGGLKAAFAVLKWFQIETEIEEELIMEALSSASVRNYLPKVDVVELLEAKLGYTFQMKGLLIEALTHSSQQESGATYCYQRLEFLGDAVLDILITRHLFLSHKDTDEGELTDLRSASVNNENFAQVAVKHNLHQFLQHSSGFLQDQITEYVNSLESSSMDRASLLSSGPCRGPKVLGDIVESIAGAILIDSKLDLDLVWRVFKPLLSPIVTPENLELPRFRELNEWSDKNGYFIGIKCENRGDSTMAILNLQLKDLLLVRQGCGKNKVDAKAHAASLLLRDLEEKGLIIPRNASRVEQLEKNSGTVKHCNNVLDVMDTQNVAPPRQKEVAVLSTTTPGSVLDKPLVVKVKLSKGGPRISLYESCKKLQWPMPTFEFVKVEPSVCSSSCGSSQKVAPQGFAFASTITLHIPNGDVISLTGDGRADKKSSQDSAALLMLYELQRQRRFQVQEV

SEQ ID NO: 316999 - protein, 48 aa, Zea mays
  Clone ID: MRT4577_52176C.1.pep
VAGPGGPKILSRSAYQHMVNEVISRLLSFQALLNISFSMELWRHIRSC

SEQ ID NO: 317000 - protein, 101 aa, Zea mays
  Clone ID: MRT4577_52177C.1.pep
KWCEEFAWNSGDSAEVERAWRNEPSILQLNEEELLGQGICAGWADRVARRIHTYLKPSEDDRKVRAVRYQSCALDDTIYLQRSSSVAQVAPELVVYSELLS

SEQ ID NO: 317001 - protein, 305 aa, Zea mays
  unsure (1)..(305): unsure at all Xaa locations
  Clone ID: MRT4577_52178C.1.pep
VLGDIVESIAGAILIDSKLDLDLVWRVFKPLLSPIVTPENLELPRFRELNEWSDKNGYFIGIKCENRGDSTMAILNLQLKDLLLVRQGCGKNKVDAKAHAASLLLRDLEVLPFTPHSFGESCCWLIRDIACILVVLXEKGLIIPRNASRVEQLEKNSGTVKHCNNVLDVMDTQNVAPPRQKEVAVLSTTTPGSVLDKPLVVKVKLSKGGPRISLYESCKKLQWPMPTFEFVKVEPSVCSSSCGSSQKVAPQGFAFASTITLHIPNGDVISLTGDGRADKKSSQDSAALLMLYELQRQRRFQVQEV

SEQ ID NO: 317002 - protein, 207 aa, Zea mays
  unsure (1)..(207): unsure at all Xaa locations
  Clone ID: MRT4577_52179C.1.pep
MACASGACAKRIASDGTHHMMCRLSCIIFXALLCAQNVIGAPCDEIXMACGLVPHNIKYLRFLLSRMNTTPSHGTIHFRSPSQILCCTIPSMIPHHTKTREATLVRLKTYHAMPPPHHKTKRLAIPDPLIVLRLRSKHNNCLLAELSNEVRWNYHDTIXRSLTXKRKEKAKATYAMRKQMGXAALKXEVTVQEKIRYQLDILTPIQY

SEQ ID NO: 317003 - protein, 152 aa, Zea mays
  unsure (1)..(152): unsure at all Xaa locations
  Clone ID: MRT4577_5217C.1.pep
MAATTSQASLLLQKQLRDLAKHPVDGFSAGLVDDSNVFEWQVTIIGPPDTLYDGGYFNAIMSFPENYPNSPPSVRFTSEMWHPNXVESIVLSIISMLSSPNDESAANIEAAVSLTNNLLFTDLVYLTFTFFGCCNIKYSFNSKLQGRFSFSR

SEQ ID NO: 317004 - protein, 115 aa, Zea mays
  Clone ID: MRT4577_52180C.1.pep
MRPGRDGGGVSAKLTGGAGGPPPSLWKTPTPYVFLGLAFMMCVIATALLVLICTRKKASSSRRRDDGAADERAALAPLDRKPKVVVFMPGDRAQPSFLASVKPLGGGGDDGTAAA

SEQ ID NO: 317005 - protein, 82 aa, Zea mays
  Clone ID: MRT4577_52181C.1.pep
LAWYAAQRTSKKKKKKKIKNKKKTFLWAISVKNHHLGGSSNHALLGGNFCQCPSPCAISLGHLFTSPLFGKTVVKSKFLGFP

SEQ ID NO: 317006 - protein, 54 aa, Zea mays
  Clone ID: MRT4577_52182C.1.pep
KTGWTGYFKCQNCGYLQPSWPKKRPVWVFWVWPKRFSFKHVLKELEKPGPLFRF

SEQ ID NO: 317007 - protein, 78 aa, Zea mays
  Clone ID: MRT4577_52183C.1.pep
LCRSKPATFYGKDRTPYPPRAVMECVENPKTDTLNGGASCTDAYLVTILQHALSTTGRSRRDTAKRLKPCIGGNGSSM

SEQ ID NO: 317008 - protein, 161 aa, Zea mays
  Clone ID: MRT4577_52184C.1.pep
VAGSLLLHSEPLGQARSTSGDLLPMAQQADAPASTPSSPLDSTSSCSPILQQPCSSATRISCIREQQQPGSHPRGMRGSDLCRPNPRRGNTLGEASPPVLVLCSKCLIKCVNCESVLNRSPPSMSRFAHRFLTKSHNRGTHACAIRTDFIRLIAIYDSSLL

SEQ ID NO: 317009 - protein, 34 aa, Zea mays
  Clone ID: MRT4577_52185C.1.pep
VMRHDNKLECAWCRYNKSDSHFVKPFSVASYLVP

SEQ ID NO: 317010 - protein, 239 aa, Zea mays
  Clone ID: MRT4577_52186C.1.pep
SPAHLPWWPQGALDPWPSASGREQPLALSPATDFLHGVFFPNHGGRLPAPPFGAPGSGPVDLRRPPPHGTAGRRPCLYSIFPIGQHELLLADTPATLQQRHSISSIREQQQPGSHPRRMRRSDLCSPNPRRRNTLALRRCHASLIAPRRRAITVVDMHARSELISSGMLIDHVLWKTSGIDLQVMMMDEAKMDESTKCQDGRCSPSGSSINNTNLVFIPGCNFVLLWMVLSAGGLGLLI

SEQ ID NO: 317011 - protein, 41 aa, Zea mays
  Clone ID: MRT4577_52187C.1.pep
VDNRRSETSLFPVMIFCTFSNLFYHLGRGFKKKIPSHCDLC

SEQ ID NO: 317012 - protein, 113 aa, Zea mays
  Clone ID: MRT4577_52188C.1.pep
VMDKEISGAKAGGGLCQWTPTQSTFVLTFLSNIVADDTKTSTGFKKVHLNACAKALNDHFKVIRTGDQVANHLKTWKKYIRINYLKNLSAALWDENEFIVSLDHEHYKEHMAV

SEQ ID NO: 317013 - protein, 56 aa, Zea mays
  Clone ID: MRT4577_52189C.1.pep
SCIGVMCTWFPRTLVHSRFLTLFGRFRATRVWCLVWCKLVVRFALDEDARPFSKKT

SEQ ID NO: 317014 - protein, 169 aa, Zea mays
  Clone ID: MRT4577_5218C.1.pep
MAATTSQASLLLQKQLRDLAKHPVDGFSAGLVDDSNVFEWQVTIIGPPDTLYDGGYFNAIMSFPENYPNSPPSVRFTSEMWHPNVYSDGLVCISILHPPGEDPSGYELASERWTPVHTVESIVLSIISMLSSPNDESAANIEAAKEWRDKREDFKKRVRRIVRKSQEML

SEQ ID NO: 317015 - protein, 70 aa, Zea mays
  Clone ID: MRT4577_52190C.1.pep
PVPSVLAAASSSCSQDHPLLLILALGQLRCIQRLKVDLIQSSKLSYESRNIIEVIIILFNPLIHLLTTFF

SEQ ID NO: 317016 - protein, 90 aa, Zea mays
  Clone ID: MRT4577_52191C.1.pep
LLYFLSLKAQKHPDVAGTTGVVNKGQKAPGEKLPPEKGLGFSPTKNWGGVGPTQPGGKIKAPRGKKACPKPFFVRLGHFEEKNGGPNQFV

SEQ ID NO: 317017 - protein, 115 aa, Zea mays
  Clone ID: MRT4577_52192C.1.pep
MDVAAELALLLCCVLLLDYGAIAFLLIRHFLASGAEAPAAAQRHRQPQPAANQQRQQAASIAFKNEEEEAPRPLAWREEDALTGRFDKSAVVGRGGSSAVYLARLVDGWPVDVKV

SEQ ID NO: 317018 - protein, 262 aa, Zea mays
  Clone ID: MRT4577_52193C.1.pep
NRAQLLCHGPLSHALGLQFSAGARLAERLFPTAPFSLIATLRLSSSMAAPLSGVSPSRPARSSSLRSSPYRASPALAPGWIFPRLAAPLFPPAFLPRPRAMFFCSCTPVSHGRGALTPALLRRARAPCFLLAGHQKASCAQGVLVSTSFPARNFFFAPCAQPPPVELHVRAQRAPSCESSLARSPMPCTTKIAYAPHLPLDPLQAPCAGRVPLLGHGRAPALFSACALPFSPRAACPNAELGPALCSSSQSLRCRVPGRVLL

SEQ ID NO: 317019 - protein, 126 aa, Zea mays
  Clone ID: MRT4577_52194C.1.pep
ARNASQIFITSSSLATSTSRHKPDLLLNHSHCYLPLLRGHGLHPKRKASRTHTHTHTAMLLAPARHTVGRNSEKLASKQSKEETQEKDELAKHTLRLRLRYKDDLDGGHLVVLVLDNGHTHTDDTW

SEQ ID NO: 317020 - protein, 101 aa, Zea mays
  unsure (1)..(101): unsure at all Xaa locations
  Clone ID: MRT4577_52195C.1.pep
IRMTPTNPRDIKDTXTMRTFGDGGAGNYRSRLCDGDTEGIINRLWHIPRCNLLRLMEIVSAIALRMNXDSISVHVVTGDIAHNTHLWSNLDRYALPDRFLM

SEQ ID NO: 317021 - protein, 186 aa, Zea mays
  Clone ID: MRT4577_52196C.1.pep
SAGMFLLFFHRTKDSFLTYAAVQPTLASLFLRSLLRLLILCLLPRHERLSTAAGSSVVDLSSSRALIYVSSHDPSGSKLPATASLSWTAPTTSLWIFPLCFDFNIVDGEYVLVPAPATEGGQQESNLTAVEVVQDLNPTSGDFFPGPTQEDTNIEEMVAGITWPSHLPPGWTVEWDMTSAGEDHVE

SEQ ID NO: 317022 - protein, 60 aa, Zea mays
  unsure (1)..(60): unsure at all Xaa locations
  Clone ID: MRT4577_52197C.1.pep
NDKPLIHGTLGQLYMXFNSERGQTCSIKHANAISHDPNSNDSLLQLNQEIELLSQLPHPN

SEQ ID NO: 317023 - protein, 59 aa, Zea mays
  Clone ID: MRT4577_52198C.1.pep
SARASTHDLSCLLSNLRLMLLFNVHIHYSSLTHKLLISAFKSLFHPFGIIVTYTLLRKI

SEQ ID NO: 317024 - protein, 84 aa, Zea mays
  Clone ID: MRT4577_52199C.1.pep
RNACRPAGPLFLGDSWCHASRKRALSRRRSPFSVVRSRRVSRRTRSRCAPQPRHASLASSSPVGAGASGEEIGEAREKRASCRI

SEQ ID NO: 317025 - protein, 78 aa, Zea mays
  Clone ID: MRT4577_5219C.1.pep
AYIDTALLNRGYIANSANSSSTCTHGHASQGHRTGDHFRERSGGCGSQSSAAMLCNGGGNYNGGDHRDASGGMYRNDP

SEQ ID NO: 317026 - protein, 192 aa, Zea mays
  unsure (1)..(192): unsure at all Xaa locations
  Clone ID: MRT4577_521C.1.pep
ALXLIXTLLAIDPADRLTASSALRSDFFTTEPFACEPSSLPKYPPSKEIDVKRRDEEARRLRATGGRANGDGAKKTRARDRPKAVPAPEANAELQVNIDKRRFVTHAAKSKSEKFPPPHQDGAVGVPLDTSNHMDPLYEPPDPSSFSTVFTHEKGAVPTWSGPLVDPAAVVNQKRKHKFGRSSKQPATARAR

SEQ ID NO: 317027 - protein, 74 aa, Zea mays
  Clone ID: MRT4577_52200C.1.pep
PNRAPTHMGGANQLKGVIFFWALMGDFFTLDGRGGPPENYGRGLEGGPPFLKGSRIKAWVKKGKTCSLGKNGML

SEQ ID NO: 317028 - protein, 90 aa, Zea mays
  Clone ID: MRT4577_52201C.1.pep
HAYDTNKHPLKCYLLHNTLTTIGGVYYIHSLSHLSTPLQCTPHHPSQLFTNSTKSPSSSIPLINQPYCTPTPNTSTIPTASPIRYKPYYL

SEQ ID NO: 317029 - protein, 102 aa, Zea mays
  Clone ID: MRT4577_52202C.1.pep
ATSRFCTYPQRWPASGAMRCQGPIRTRIALYRIAMERGRMLLQAISRRTIDTLTCTTTIVLLQIMHLITRCCLGSSTYTMTCSTNEFTTCNTRWIQRRLPTT

SEQ ID NO: 317030 - protein, 208 aa, Zea mays
  unsure (1)..(208): unsure at all Xaa locations
  Clone ID: MRT4577_52203C.1.pep
MVELLPVGFMDWLALAVAVALYYFLVEQLSYRRKKGALPGPSLVVPFLGSIVPMIRDPAGFWDTQAARAKKSGAGLAAEFVVGRFIVFIRDSELSHRVFANVRPDAFQFVGHPFGKDLFGIFYLFGDEHKDLRRRMAPNFTPRTLSTYAAVQQRIILXHIRRLLDRNRRSVAAPIQVTCRNINLETSQTVFVGPYLTEEARERFHQDY

SEQ ID NO: 317031 - protein, 154 aa, Zea mays
  unsure (1)..(154): unsure at all Xaa locations
  Clone ID: MRT4577_52204C.1.pep
QLSASLDGNRRDGRLGGKNLSEGEHIDTARQGTXDDKDYKESPPAPLFQPAELKSGSFYRAAIAEVGGTFRFLYISILTGMGATKCTSKCTTVRIHGITCSFGSMIVALVYCTCXISGDDINPAVTFRLDLARKPSRQQLXVYIIMQWLRIICN

SEQ ID NO: 317032 - protein, 77 aa, Zea mays
  Clone ID: MRT4577_52205C.1.pep
LFACYVILGYQLQIHIFSIFKNQSWVIYDSMANQQGLQKIALFPDLTKNPKRDFILTNAMLKSIYLSECLCLLRISV

SEQ ID NO: 317033 - protein, 68 aa, Zea mays
  Clone ID: MRT4577_52206C.1.pep
RVVVASCMNPPTITYLMSATRSTIVTSILRRGWPNETRRQRAAWGRPTVLCWPRSHNWRWSSSPRKGT

SEQ ID NO: 317034 - protein, 161 aa, Zea mays
  unsure (1)..(161): unsure at all Xaa locations
  Clone ID: MRT4577_52207C.1.pep
IHSIKDISQEHKKLANGFNLFQKELERLKDENLSPLLPLDVNLTDPSLSGLERTLSQLDMXLLALELELAEALQAKKKTNILFQSSFLKQHNDEAAIFQSFRDINEVIQDTIELKRRQMAVENELKEMQGRYSELSVQFAEVEGERQKLEMNLKNRTPWRS

SEQ ID NO: 317035 - protein, 82 aa, Zea mays
  Clone ID: MRT4577_52208C.1.pep
MYVRSLAMGMGDTEITAGHEIVATDYLPLLSSYTRNAHVLLLAMLQLPLELLGNSCNDIETDTIVPGGPQLRIPHRDDKSPR

SEQ ID NO: 317036 - protein, 791 aa, Zea mays
  Clone ID: MRT4577_52209C.1.pep
VTVEELERTKMCLVQHEEDTRTLTQSLQSKHELLVHMESEIKCLRDDLMRTDENLLREKRLKEELESALASLTSQIGEKDQILLSFDEHKTEFIHLKGQLLDMGKTHSLMQDSLSQSEQIQRDLNCKNHSLQSQLSILENQLGAVVETMFSSEIEASYMRSQVREAVVQLNMLRNELEKLQLKSKDANESLRAHMSTEAELADRNSTLEAAIHSLETNLSSVIQEKEGLEELMKGHDEASNQVSNKSRDIAVNNSDRVLKDQDEILQLRVLQADLEEQVDNLKSAKDETEILNMILRSKLEEQHTVMSLLLQNQRHELINSIEENKDLTQKLAEQSLKAEEFKNLSIHLRELKEKAEAGRKEKEGSLHTMQDSLRIAFIKEQYESKVQELKGQVFVSKKYAEEMLLKLQSALDDVETGKKNEIALAKRIEELSMKVSEMEVEMLDLSADKRELSNAYDSMMTELECTKLNLDCCNEEKQKIEVSLEECSEERNRIRVELDLIKKLLENMALTDNNTSHDSSESCTPGTTSIRHVLGDGKAEPASKATPNTTKIDSGLQEHEIQSRSSSSNLSQGAEDVVKFDNNEESKNLENCDEEMESPTKNNLNSNNSIKDISQEHKKLANGFNLFQKELERLKDENLSPLLPLDVNLTDPSLSGLERTLSQLDMANEHLQSIFPSFKELPGSGNALERLLALELELAEALQAKKKTNILFQSSFLKQHNDEAAIFQSFRDINEVIQDTIELKRRQMAVENELKEMQGRYSELSVQFAEVEGERQKLEMNLKNRTPWRS

SEQ ID NO: 317037 - protein, 161 aa, Zea mays
  Clone ID: MRT4577_5220C.1.pep
GRGVTASRERDSFRATQNPSPSTDPCHGGHHQPGEPPPAEAAQSDGGYFNAIMSFPENYPNSPPSVRFTSEMWHPNVYSDGLVCISILHPPGEDPSGYELASERWTPVHTVESIVLSIISMLSSPNDESAANIEAAKEWRDKREDFKKRVRRIVRKSQEML

SEQ ID NO: 317038 - protein, 87 aa, Zea mays
  unsure (1)..(87): unsure at all Xaa locations
  Clone ID: MRT4577_52210C.1.pep
DEIYVVPDDSQNRIKIRDSFVDNTQGDEENGFSDRXPQKVIWNGGLQNTNINLKPCLVKPSHTIEIYXQMPVMMRLSPLLQTQKSGG

SEQ ID NO: 317039 - protein, 770 aa, Zea mays
  Clone ID: MRT4577_52211C.1.pep
MTKEKITEEKKLYEEKKVVDPFIARFYESMAKTNTEKIIKEIIEGLSKDSDDSDSYDVESGDEDSKDRPWQPSHTIFGKSTIKHSHIDAMRGRYFRDMSIVRIGGDNTAPAPEENEVVIYRSFLKAGLRFPLSKFVVEVLKIFQIFLHQITPEAIIWMGVFVWAVRSQGLEPSAKCFCSMHELLYETKATGKEQYHNNFGCYGFIARSNASYPVPTYQKRWPEAWMEEWFYVKNDLIKRKTSRKSYSAPSSLASAFEGQRFREKFDEPNDNWLKCIEATSDELLGTYPKAEDDALSAAFRGREKKRLNRVFDAIGFVYPDYHYPLRRQGRKRKTAASATIVVPLCRRVPTVRLAEAEGDAAEEPKLEKSVKMPEILSPLAKAELPIVQKAPAATPKRRRLATMLDVVMETTKALSLVPTKKAAEAVKDQAEAEARPSASIETKAVSPKDKADQQTLDTGMKLKYPKGALVFNGTDEDNYLYCLPDNKEISVCREIAKSMGFSKLEEGLSVMSKDDLADSLAYNSIKGVILSNALRAQKNTEDESYTEALTNLRSEKLKTSFSKVDAYSSEENFIRGDPEGVVECISGEAGAFEEILNDRGDICAFSGAWGIVAILEKAGCDHVKAIAQAEAAFSIDDMKDPSAEATLVGRKFYSDVWVNGGRELANEIIKKNEKDTHDAREEAKRAEEAAERERRIGIVFDFLASILAFWLRINSLPTTTELSLPSEPYNPLADPEMKEALDIISMANSIIDEVVDKLLNKVAEKVFREE

SEQ ID NO: 317040 - protein, 43 aa, Zea mays
  Clone ID: MRT4577_52212C.1.pep
HCIVTKTCWCYFFLVNQRNHINYYNENTSVELHKGEYMILMLQ

SEQ ID NO: 317041 - protein, 185 aa, Zea mays
  Clone ID: MRT4577_52213C.1.pep
MVRYAATEIQPAKSARARGAYLRVSFKNTRETAQAINGWKLQRAVTFLENVKEHKEAVPMRRYAGSTGRTAQGKQFGVSKARWPIKSAEFLLGLLKNAEANADAKGLDTGALVVKHIQVNQAPKQRRRTYRAHGRINPYMSNPCHIELILTEAEEVVQKSDAVAEREHLSSRQRGARLRKAITSA

SEQ ID NO: 317042 - protein, 510 aa, Zea mays
  Clone ID: MRT4577_52214C.1.pep
MEATADSLPWAAQCAGAALFAAALCVTALGVVLVFLRRWPWCSCHVCRAYLTGSWARDFTNLGDWYAHLLRESPTGTIHVHVLGCTVTANPANVEYMLRTNFDNFPKGKAFAALLGDLLGGGIFNVDGHAWRHQRKMASLELGSVAVRSYAFGIVAQEVESRLVPVLAAAADAGAVVDLQDVFRRFAFDTICKISFGLDPGCLEREMPVSRLADAFDVATRLCAMRGAAASPLVWRAKRLLNVGSERELREAIALVDELAAAVIRERRKLGVVGSHDLLSRFMASAGAGDGDDKYLRDIVVSFLLAGRDTVSSALTTLFMLLSKNPGVVAAMRAEAGDGDGDGDSAPLTYEHLKRLHYTHAVLYENMRLFPPVQFDSKFCAGPDVLPDGTYVAGGTRVTYHPYAMGRMPRIWGADHGAFRPDRWLTGAGASFVPESLYRYPVFQAGLRVCLGKELAVTEMKVVAVAVVRAFDVEVVGDSGATACAPKFVSGLTASISGGLPVRVRRRVVR

SEQ ID NO: 317043 - protein, 73 aa, Zea mays
  Clone ID: MRT4577_52215C.1.pep
GGIPSTTYNIFTMNKQKKRGKTKGTLLCFYRHGKGVSGERPELGSFHYSSLTLHAKMTKDDICFYHQLDFQSP

SEQ ID NO: 317044 - protein, 71 aa, Zea mays
  Clone ID: MRT4577_52216C.1.pep
IPCLLWTLTSTHRPYVVRVQVHVGAACSTSSLWWMSLMVACRLTYSAFPFVGPSWFRVSCDQQLIRGFYGV

SEQ ID NO: 317045 - protein, 163 aa, Zea mays
  Clone ID: MRT4577_52217C.1.pep
LLKAKEEVERAKASATTAGTRLRAVSKEIEASKASERLAIAAAQAMHESEDTGSTGASPRVVTLTVSEYHALSEKVHGAEELANERVAVALAQVELARESESRNLERVQEASNEMEKKKSDLRIALERAERANEGKLGAERELRRWRAEHVQRRKAHEAAQHA

SEQ ID NO: 317046 - protein, 119 aa, Zea mays
  Clone ID: MRT4577_52218C.1.pep
YRLFLRISGASSSSSSFSSKLRTIAGARSHPLGPASTRSHPLGSASTRSYPSGSASTCTPPLGSTSGRISANTSSQTGAEGPASVTAIGSAWAESEDSLANILSTASIFASSGLDGISK

SEQ ID NO: 317047 - protein, 113 aa, Zea mays
  Clone ID: MRT4577_52219C.1.pep
LLTCPNDSRTTIQRLRLISSMLTAVLPSTISSYSTMNYTAYNHVYLADYGHHKLYHGKNATGVISCGLVPYHDDAFCPQIQRLLSTYDLLYDGRKHLVSGTISVNVTMTLSRF

SEQ ID NO: 317048 - protein, 62 aa, Zea mays
  Clone ID: MRT4577_5221C.1.pep
KKNLILLNLLQPIKVYLALSVKSIVKNSYSFEAYFNMYLFRGSFFLAAPSSVKIVNNFFLHV

SEQ ID NO: 317049 - protein, 884 aa, Zea mays
  Clone ID: MRT4577_52220C.1.pep
MAPKRKNQSSVAAVIPFIDPNSQLLFAGNHMSVVSESDLLHLVDVGVLPPKQLCSWRICRGVTVPTEDTHESVVYVPFLIRDLSLPVSPFFCGLLDFYNLNLTYLNPNSILQISIFVHLCEACLRILPHFGLWKYLYHCRPRMAGAQHQLVGGASLEMRRRRKIEYLDIPLKDSIKGWRLEWFIVENHCKSLPLVGETARYKAHPAYLYSGITDSTRVTNKKICTEDLVSRLDMILRGKISNIGAHVAYSAWNLPPHRSFFNFVSNPPTSDGGLGLRVRPSPEDIEALVAPLCDLPNDERQVHFEMPASPDDAEIDDVLSMLAGESSDSTHAEPMAITVGQELNKTVETRKPEGTRPKRTRQVSRPTMPVEEKKKKRRLRRLSCLDQDASPSAHVCDVVPAEVLSEVNPNGGVHVEVDPNGCNRVEADPNGRDRVEADPNGCDRAEADPNGCDRTEVDPNGCNHAEVDPNGCDHAEVDPDACDRAPAVVRIFDEDEEEEEEVPLIRKNSRHYRGSWGDSDIPSPALSVLVSLQELSITDFDQALDDVVPEDMLSEPTTDDMMVVCSEIPDMGLEVSRAVSRASSTLEGVEDPSALEMAVAENPALEGGAGIYPAPEGVTGSDPALVGSASCNPAPEGVVGSHPALVGGASCNPASESVQVSSPSYTSMDVHVGSSPPRSDGVMVMHASLDSSEQVALEVGEPDARSLTSAVGAEPTLDNVLQIVPALVDGMSAQLRSHGATIPEGALSLMQWNPLVLQKQIADLKASNADMARWCSELEEKHLQLQADSTQRYSDLEEKYSQGQANLFLVSASLDDAHSLNFSLNAQLNSKRAAHEEEKRALAASRDNLDRLYRDASNSLTILERIHRFTMSDLDHHCRELQVS

SEQ ID NO: 317050 - protein, 96 aa, Zea mays
  Clone ID: MRT4577_52221C.1.pep
QNSLQNPVSYWTGDAPASKVHPMADTSRQSLQSQNVDLLAMLQPKEKPQVPTGNSGLPLCSNYPEASIVNPNLHSGDLAQGALNMRQDMQNSQNIG

SEQ ID NO: 317051 - protein, 44 aa, Zea mays
  unsure (1)..(44): unsure at all Xaa locations
  Clone ID: MRT4577_52222C.1.pep
SRRCXHAAXASXLPDXRLXDALNVXAEXLRCVSRXLYXXLXXLA

SEQ ID NO: 317052 - protein, 73 aa, Zea mays
  Clone ID: MRT4577_52223C.1.pep
LFQCVLPMHFYTDGQSSCAAAPVHAGMCWTHGRCRWPSAIQYGMGGIWSIFFLIVVLIRNLMYHGMNTPVGYA

SEQ ID NO: 317053 - protein, 41 aa, Zea mays
  Clone ID: MRT4577_52224C.1.pep
RGLRCGMHRSTDMVVPSRLHDMAYEIYHLALCAFVSFASFP

SEQ ID NO: 317054 - protein, 56 aa, Zea mays
  Clone ID: MRT4577_52225C.1.pep
GSELPRHCALVIHCIPPCVPMLCWYSHCSLHLSEYVSATFCCIIEHIVCWCTPIRL

SEQ ID NO: 317055 - protein, 76 aa, Zea mays
  Clone ID: MRT4577_52226C.1.pep
FYQTISASVLLCIHGYQNVLLGCDHLMMHITVQNIILPSTTPEGQALEVPRMPQEAIQTGVAVYTIQSYFTMRATP

SEQ ID NO: 317056 - protein, 148 aa, Zea mays
  Clone ID: MRT4577_52227C.1.pep
GQHSKDSKGHVAPKPLPAFKGFVIEEEEGSGGYGTVYRAQRTKDGKTFAIKCPHPNAHSHHVNNELKILERFGGKNCVIKYECSLKSGDLDCFVLEHVEHDRPEILKKDITLLELQWYGHCLFRALASLHKQGVVHRDVKPGNFLFCR

SEQ ID NO: 317057 - protein, 62 aa, Zea mays
  Clone ID: MRT4577_52228C.1.pep
VTRYRHLFDPPLLILASVFRVRMALSSVDCASLESMPVIAFTIVGKKFNLNPEQFKLKPECT

SEQ ID NO: 317058 - protein, 45 aa, Zea mays
  Clone ID: MRT4577_52229C.1.pep
MLKKKCGWVLYNERGFIWGVGDLFYLVGEKGFQFVKGEVGARGLM

SEQ ID NO: 317059 - protein, 91 aa, Zea mays
  Clone ID: MRT4577_5222C.1.pep
HMPALSCVRTYCRYNVAKCTSLFLKTDCFSCRRNGGIRGRISRKGSGASCGNHRKCYEENGILGKSTVPCQATRFCFQPQNAHLTSCVFSI

SEQ ID NO: 317060 - protein, 67 aa, Zea mays
  Clone ID: MRT4577_52230C.1.pep
TAFRAVRLSLWALQISAILNMVYCWKVRQWFYLLRIKFHDHLTPVSSNHPLFMHDPPPHSMVDKWIT

SEQ ID NO: 317061 - protein, 117 aa, Zea mays
  Clone ID: MRT4577_52231C.1.pep
PPPVEEALDQLENVDPDFFCFRDEAPGQVNILSPRKEGGFGLFIPKNDGKVDTVGVVPPPPVSWEPEPSFPVHPAGNNNSLIEPLVDVSSPPNPNEKECLLGPVKIKPTPLLWAFSF

SEQ ID NO: 317062 - protein, 237 aa, Zea mays
  unsure (1)..(237): unsure at all Xaa locations
  Clone ID: MRT4577_52232C.1.pep
HNKQGKKRAKQYDIKIKKLGQNKKIXRKTHTKKKEKNIKKKKHKHMYIINNKTKXKRRKYKKKKKNNNXKKKINKEKYKKXNNNNKKXKKNKKYIKKXKKKKKKKKIKKXKKIKENKLXNXKKKKKLKISTKTKKKKENKXKKNRIKIIKKRIIKIKKXNNNXKXIKIKKKEKKNNYNKXKNKNFKKKKKKKKNNIKKKKKKNKKIKXKKKILNINIYKLKKKKKKKKKKKKKKKXN

SEQ ID NO: 317063 - protein, 48 aa, Zea mays
  Clone ID: MRT4577_52233C.1.pep
NLYSMKTSPLSKQWEFMGPFLQKKVESFSLLPGTKKYVPPYKDPWKFW

SEQ ID NO: 317064 - protein, 76 aa, Zea mays
  Clone ID: MRT4577_52234C.1.pep
AAPPETGHCNPFRHGALPKCLAVTKTAGLKRVWLTGCRQTEGLYDCAPAAAYCEKMLPLALSPVREPYGRQDGHGD

SEQ ID NO: 317065 - protein, 135 aa, Zea mays
  unsure (1)..(135): unsure at all Xaa locations
  Clone ID: MRT4577_52235C.1.pep
MPVYCAMXQDELIKNAXAYIGTPVKDILAADETTETIGRXLSRIIAYNDEENRRALREFLFCCPGALHYISXAILFEETLYHKSNDGXSFVDDLKEGGVLPGIMADKGTIDVDGTDXETTTQGHDDLGKRCAMYY

SEQ ID NO: 317066 - protein, 97 aa, Zea mays
  Clone ID: MRT4577_52236C.1.pep
GIGKLVFSGGVAEMYSLEELLRASAETLGRGEVGSTYKAVMETGFIVTVKRMRDPSAGGVGAAEFGRRAEELGRVRHSNAVALRAYFQAREERLLVY

SEQ ID NO: 317067 - protein, 120 aa, Zea mays
  Clone ID: MRT4577_52237C.1.pep
MIGCRDYYFSPERERVRKLMADGTTTLTPGDGCSSKVVRDGVRLAGKLLAINDHNNNQWQVLADVWTELIIYLAPSNEEERVMGHEDALVQGGEFITVLWALTTHIGVFRPQQPASRPPC

SEQ ID NO: 317068 - protein, 84 aa, Zea mays
  Clone ID: MRT4577_52238C.1.pep
FSFFFFFIFSFFFYFGVKQREFVKIVSNRVLKKQEPNLLDLNYEAASSQTLQSRSGLSSLSTNRSNKDSLFPGLKKVPVPVPLG

SEQ ID NO: 317069 - protein, 256 aa, Zea mays
  Clone ID: MRT4577_52239C.1.pep
MRENGAARDEGPALCKAAAADGGGDVGAASARRRRRLGRATEGPAPTKRIRSGSQRSPYDSSLETATDGCCWPARLSHGAVSVIGRRREMEDAFAVALSFLASEAVGGEQEQELDFFAVYDGHGGARVAEACRERMHVVLAEEVGLRRRRSGSDDLRWEEAMAASFARVDGEVTGGLSSPHHDDAGSSLPYRTVGSTAVVAVVGRRRIVVGNCGDSRAVLSRGGVAVPLSSDHKVRTSHGRRLRMQIINKTGRPEG

SEQ ID NO: 317070 - protein, 53 aa, Zea mays
  Clone ID: MRT4577_5223C.1.pep
AFPYFPLLPAPFFSILRIPILFEVFYFHFHFLNRPTLIKLEKFEGKKKGRGYY

SEQ ID NO: 317071 - protein, 55 aa, Zea mays
  unsure (1)..(55): unsure at all Xaa locations
  Clone ID: MRT4577_52240C.1.pep
YIRRLKIDVGLCSPHVCRRQNKSVLSAPTVCVKKVSXXRKKTERVKKKKRRKRDK

SEQ ID NO: 317072 - protein, 161 aa, Zea mays
  Clone ID: MRT4577_52241C.1.pep
PTRPAASSGAGARGGGGAAEMTLEDFLARDSCAMAAVMEGDMALGFPDGDGDAAGSVAGGVGGVRGGGKRALLDPADRAVMQRQKRMIKNRESAARSRDRKQAYVAELESQVMQLEEEQTELLREQEDRRQKRLKELTERAVPVIRKKSPQDLRRTNSMEW

SEQ ID NO: 317073 - protein, 683 aa, Zea mays
  unsure (1)..(683): unsure at all Xaa locations
  Clone ID: MRT4577_52242C.1.pep
MKKRKVKDNEMNRESDEDVASDKAVDMQDDTENMEQSKDDELILGEDDVSAWRELTLHPLLLKAMRSLGFSEPTPIHKSCFPAAAHRGKDVIGAAETGSGKTLAFGLPVLQRLQDXSEKTSQDCANKSWLQRNAESMGLILXMLVTVKKTMCRDTXRKATSAHLQKLQQELSDLLQCPLQPKTFSRRYLAGAXLAITSEGTHMSGHNKRLVELHSLSFFILDEADRMIERGHFRELQSIIEMLPLTNGSDEQAARTMPNCETVPILQIKKRQTFVFSATLALSSNFRKKLKRGLSTSKASTPDDVSSIEALSKQAGMKSNAEIVDLTKASILPEKLEESFIECSEEDKDAYLYYILSVHGQGRTIIFCTSIAALRHISSILRILGINVLTNHAQMQQRARMKAVDRFRESENSILVATDGFARGMDFDDVRTVIHYQLPHSTDVYIHRSGRTARKSLAGCSIALISPTDKSRFYSLCKSLSKENLQQFPVDHAYMSGVMNRLSLARQIDKIARKTSQENANKSWLQRNAESMGLILDTSDSEEDHVQGHKKRKATSAHLQKLQQELSDLLQCPLQPKTFSRRYLAGAGVSPLLQKQLEELAKRNASNNSSKSKNKGSGFVVIGQDRVEPLQALQNSGQEVCVNIDKEREKRRVAENWRRKKHEEKKRTQEQKRKDKRKAKEMA

SEQ ID NO: 317074 - protein, 48 aa, Zea mays
  Clone ID: MRT4577_52243C.1.pep
VQQHYIGTLLSPRRALGSVISERVQYRQCNVICSTRTGATRDSALRPC

SEQ ID NO: 317075 - protein, 187 aa, Zea mays
  Clone ID: MRT4577_52244C.1.pep
MRRRGRLPAVLWLVAVTLAALLARPANAAWCIARSGASDKALQSALDYACGPAGGADCAPILTSGLCYLPNTLAAHASYAFNSIFQRSRAAPGACDFAGTATVTLTDPSYGSCTYPSSPSTAGQTGSPGSTSMPGTPTSLSPKGTGSTGGLNPPDVDSTDSNAEPLATASLSSLALLCFMYMFLQLW

SEQ ID NO: 317076 - protein, 232 aa, Zea mays
  unsure (1)..(232): unsure at all Xaa locations
  Clone ID: MRT4577_52245C.1.pep
MSTLLCRPGYLEAGPGWVPLSTRSKPPHPRRRRRREEAMHGRPRRPAKPEDEEAASAKAAKLRDLQAQVLHNHHARTYTKESIGLSFKLLETNPEAYTAWNYRKLALQHNVKELSDPQAIKSAIDDELRVAEVALRQNPKSYGAWYHRKWLLCQKLAPVDFKREFGLLDKLLKVDARNFHGWNYRRFLARFLGAPDEEELKYTXDKIXDNFRNYSPWHNRGILLSNVLIQRT

SEQ ID NO: 317077 - protein, 62 aa, Zea mays
  unsure (1)..(62): unsure at all Xaa locations
  Clone ID: MRT4577_52246C.1.pep
QPPTXTSRTNHRLFRQRPPXXPPXHDNRYLPLLXHLNKPLGTDHGSSFFLAFLAQLNIKRSG

SEQ ID NO: 317078 - protein, 61 aa, Zea mays
  Clone ID: MRT4577_52247C.1.pep
WYAHVISLVSPLASFGVWSASHQFSLRACLVPPLGMIVISKLTALLLFQVRSVQSPLHKVG

SEQ ID NO: 317079 - protein, 92 aa, Zea mays
  unsure (1)..(92): unsure at all Xaa locations
  Clone ID: MRT4577_52248C.1.pep
PRVRPRVRTQALSHRCRPPHGVHDRARRQVVVPASETSRLQAPSHRSPPPHDPEHYSLRSRGLCLVPVDQTLXLTQSNGADLWAPANTTRRR

SEQ ID NO: 317080 - protein, 46 aa, Zea mays
  Clone ID: MRT4577_52249C.1.pep
SILMGLHVASLSLEVASLYTSGDGVGQCLCSLAAELHHGIVTQESS

SEQ ID NO: 317081 - protein, 108 aa, Zea mays
  Clone ID: MRT4577_5224C.1.pep
WVTRAWTRLCTFSTSSVPACLSDMNPGGSRLYGLWATGCVKWPFAAGLGKSSCYPSMLYKENVVMCLWSLSHFVFFISFGAGLCWVSATLGVEKHYVYTAAAIVYLLK

SEQ ID NO: 317082 - protein, 244 aa, Zea mays
  unsure (1)..(244): unsure at all Xaa locations
  Clone ID: MRT4577_52250C.1.pep
ALSSPPPPPHRPPQEXNLPAAPAVHPPAPTGRSCPKLPVEEEFALHPIPGGPRPHPRPRPRPCGAAKDASVTDNALLNAPEDPCTYPDPDRGSDGIFEDPRHPVPDPSGRGRSAVTDEPAQCTQEHPKYPVTDSSTDKGPAVEHPAYTTPGYGSCSTPEPMPDKPPCGTSEDVKQRDVDPPPPAREGVGHRVVDPPRGRGRRAVPDEPEQCAQEHPKYPVPDSSSDKVFSSCSSAFRAGSRSCT

SEQ ID NO: 317083 - protein, 192 aa, Zea mays
  unsure (1)..(192): unsure at all Xaa locations
  Clone ID: MRT4577_52251C.1.pep
FFLDVEDISGRRTMHSFYSDVVRLQGLRERFSHCNSNMDAGQCFFPREVVKHIVNPVFVLNPAYDAXQVQHALAPEASDPQHSWLDCRLDISKCSPKQLGILQGFRKELHDAISEAKQKRGWGFYINSCFVHCQSLNSLTWHSPTSPRVNNKSIAEAVGDWFFDRREVKEIDCEYPCNPTCHNLVFARPFKI

SEQ ID NO: 317084 - protein, 220 aa, Zea mays
  unsure (1)..(220): unsure at all Xaa locations
  Clone ID: MRT4577_52252C.1.pep
ERWRLEINFSQEXVLMLSSMNLPDGIXRRTAVDELNMRSIFEENDVICAEVRGFQHDGSLHLQARSEKYGSDLLMQLERGQLLMVAPYLVKRKKQHFHHLEKYNVDLILGCNGFIWAGEHVVVXVKNQKRQEVSRGSALKXENFTPLETRKHICRLANSVRVLSALGFTLTVELIIETMEASASSNVEINDMLGAEFYVQTAEREAKRRADLLRKKNDAR

SEQ ID NO: 317085 - protein, 54 aa, Zea mays
  Clone ID: MRT4577_52253C.1.pep
ADTLSKWDQAEHRFHQAFSSKKYNNQVSHQLGEEFKAIEQAKSDPNDWRTPNIR

SEQ ID NO: 317086 - protein, 172 aa, Zea mays
  Clone ID: MRT4577_52254C.1.pep
MNYVDKKKKKKPAAYMNNSFSQCFFPREVVKHIVNPVFVLNPAYDAWQVQHALAPEASDPQHSWLDCRLDISKCSPKQLGILQGFRKELHDAISEAKQKRGWGFYINSCFVHCQSLNSLTWHSPTSPRVNNKSIAEAVGDWFFDRREVKEIDCEYPCNPTCHNLVFARPFKI

SEQ ID NO: 317087 - protein, 250 aa, Zea mays
  unsure (1)..(250): unsure at all Xaa locations
  Clone ID: MRT4577_52255C.1.pep
IVHTARKNQLHHESAPQEGHLPVPSFATATLLLLPLALLAAVLVAVYHNEFALQSYLARPACPSNASDTSLTGRHVAVRVAPDFRLLIGVLTLPGLYERRHLMRTVYALQQXPDGAXVDVRFVFCRLASEEQRVLVALEAMQHGDVVELDCPENMDNGKTHAYLSSVPALFGDRAYDFVMKTDDDTFLRLPQLVESLNRAPREDLYYGCMVPXCDVVRAQENEYMSXXMXYVISWDLVVDRGGRGADQEP

SEQ ID NO: 317088 - protein, 72 aa, Zea mays
  Clone ID: MRT4577_52256C.1.pep
LHVTKKVMFADLPARKMAGKTSCPEPSAVAHAKQPLSQYVMAEWSSPGISALKLDKSLPFQSHFLQLAACSL

SEQ ID NO: 317089 - protein, 73 aa, Zea mays
  Clone ID: MRT4577_52257C.1.pep
RHDNAKMKLVLWGEQTSLANLCSVGSMLALDRPFIANFIDNNHEDSQELCLEYGSATQVYMVPIAQQEEQVIR

SEQ ID NO: 317090 - protein, 648 aa, Zea mays
  unsure (1)..(648): unsure at all Xaa locations
  Clone ID: MRT4577_52258C.1.pep
MDPDTAVASADGGPFLEFVDYAISMLSSSAGDGDGYESPGDGPAPARPPXGWAVAQLLKSCCAYSSGVTAAILLSDLFQSWTEQRKSLTLKRKVKLPKLINTKNKRRRLPNTVTIDSIHEKNFLSPNSVLEVVVIAVFVLPGTNIYMLTLGDMWSASTIDIYLHRRYYDCIGQNGILKKGREVMLTGCCLRTAMEGSGHARILPTEYMVILLDEEQDEDALLLAAQFCNYSFSSLILEESRNNVPYSFYARIEKIESLEPFRCAERMQIILEDNDNAKMKLVLWGEQTSLANLCSVGSMLALDRPFIANFIDNNHEDSQELCLEYGSATQVYMVPIAQQEEQVPFTPTQVKSQGPRLSCVLTDNVASQVTLPRDLYGSVDFSKYPFRAYVSDLHDKMVGISLFGTVTSVCKISTSGTTFYLELEDTTGVVLMKLIFVGPWSLGRVGVGHMVYISGLTCALSSTNILEVSWREKEPGSLFVNLSLLPALLNSSCLHNLSPLSDLPRSTNRTHISHVRLDGIDCDSLKVSLFHNICGSVVNEHSGVLQCSFCKCACESVCARGFQLHLTIADDSADVLAWCVGQTAVEFLQISPDEYLELPEDERAMYLYTLQNESFVVAIANTRKRVDGCVVGDEAVPAWEITRAQKCE

SEQ ID NO: 317091 - protein, 230 aa, Zea mays
  unsure (1)..(230): unsure at all Xaa locations
  Clone ID: MRT4577_52259C.1.pep
TGGDKYRSFMHGEGEKNTVWRHGAPPNYDIVNKLFEEERTKEWPDGSLEEKVQRLLKTWEMEMIHKVRPDDQKSVHSQGFTASTNGMKPLTRKEWTAIGGYNAFLATKLPPEHRIYDPDKETVDSGMSTFLTAFPRGFAIEVLDVYSGPPRVAFKFRHWXYMXEGPFKGHPPHGQRVEFFGVCVFHVDEEMKVEKAEYFYERGNFLASFLSAPATAAAASASGCPVMRGN

SEQ ID NO: 317092 - protein, 50 aa, Zea mays
  Clone ID: MRT4577_5225C.1.pep
QDINQRIRAPPKKAPEILGTSAFSGKPVIGKTRIRTEGGKGSITILRTKG

SEQ ID NO: 317093 - protein, 338 aa, Zea mays
  unsure (1)..(338): unsure at all Xaa locations
  Clone ID: MRT4577_52260C.1.pep
PPRHHRATRVGVDPDAEVTFEFVPVIRQYKSGRVERLLPVNPVPPSVDAATGVASKDVTVDKATGLWARLYLPDPDLSARPDGDMRLPIVLYFHGGGLVVGSAADAPEHAFVNRLAARAGALAVSVEYRLAPEHPVPACYDDAWAALRWVVAPAADPWVRDHGDVARVFVLGFSAGGNLAHNLTLRAGSEPDLLPRGARVQGMALLHPFFLSPPAPGSEAAEGEXEVRVGARQAGXMWAFACGGWTAGPDDPRVNPLVDGAASLRRLGCARVLVCLADDALAAEGKAYYDGLLASGWAAADAKLLDSAPADHEFHLREPESAKAVLLMDRLAALISGN

SEQ ID NO: 317094 - protein, 204 aa, Zea mays
  unsure (1)..(204): unsure at all Xaa locations
  Clone ID: MRT4577_52261C.1.pep
ESYRWSPFVPITLDTSMLTVLLLLSKYRLRNVPVIEPEKPIIRNFITQTGVVKGLQQCXITVNSDDLILEAFKCMKDNKIGGVPVVEGPKRKLVGSVSIRDIRFLLLRPNLFSNFRQLTVIEFMKTLGSTLPDSESNCLVKPPPTCTPDASLGSVIDSIASRITHRIYVVDDDLEVVGVVTLRDVISCFIHEPPGYCDNYXASA

SEQ ID NO: 317095 - protein, 451 aa, Zea mays
  Clone ID: MRT4577_52262C.1.pep
MDQPEENPEFPSCDAYFEAIQSKKKLPLTLQESLTAAFAQIPVSSFPEVPAGRVIEIPGDTSVIDAVRTLSEQNIRAAPVLNPEPGAPTDWQGRYLGVIDYSAIILWVLENAELAAVALSAASATAAGVGMGAVGAVGVAALGTTGPAAVAGLTAAAIGASVAGGLTAEKGVAKDGLTAADHLGEDFYKVLLQQEPFRSTTVRSIVESYRWSPFVPITLDTSMLTVLLLLSKYRLRNVPVIEPEKPIIRNFITQTGVVKGLQQCKGRDWFDYISALPLSDLGLPFMSIDEVITVNSDDLILEAFKCMKDNKIGGVPVVEGPKRKLVGSVSIRDIRFLLLRPNLFSNFRQLTVIEFMKTLGSTLPDSESNCLVKPPPTCTPDASLGSVIDSIASRITHRIYVVDDDLEVVGVVTLRDVISCFIHEPPGYCDNYLASAMEKLEGKGVRSVEKI

SEQ ID NO: 317096 - protein, 80 aa, Zea mays
  unsure (1)..(80): unsure at all Xaa locations
  Clone ID: MRT4577_52263C.1.pep
RLSFDAHPFYLRPHFRRNGSELHDMYLLGCILMKGTMPKPAPDSAPSRGGIYSCAFPQDKPGKERRRERTSSXRPASRYP

SEQ ID NO: 317097 - protein, 98 aa, Zea mays
  Clone ID: MRT4577_52264C.1.pep
CDLFFSKYQILLVANANGAIGWSDCPLSDPVKRLSRSIICFSQTSSPYLVGFLSLPRYLVTFKPVAVTVNIPAMMAKGRSASKGTGIFYRFVCRSPAG

SEQ ID NO: 317098 - protein, 133 aa, Zea mays
  unsure (1)..(133): unsure at all Xaa locations
  Clone ID: MRT4577_52265C.1.pep
NSELFISRPSLLGNITAPASDRLGTRLQWTSSSGSPNYYTFLGTKEKTTTSESYTGMSRERTLFLSPEIQCEISNHITALRGYAMLEGGNSGLILAINNPGQRHDKMNDEYRTIQTGTPDXYTIWIGIALYIN

SEQ ID NO: 317099 - protein, 145 aa, Zea mays
  unsure (1)..(145): unsure at all Xaa locations
  Clone ID: MRT4577_52266C.1.pep
AAALNNFIRLVISAVATCGXALLLVALMCFWGCFLFQNFGKFDLPGKKREPXFGSPAKIFLGAPSFLXKNILKKLKTLVEKKSLEPGGLGFFKKLAWPMGMALALKRMGKPKKGLIRFFIEKLKKWGGVNLGNLAKKRGYGPPPE

SEQ ID NO: 317100 - protein, 91 aa, Zea mays
  unsure (1)..(91): unsure at all Xaa locations
  Clone ID: MRT4577_52267C.1.pep
PRHRERPKTPPGGPTPGKDDRSGPQREHPHGQKRESAPKGLKRETPGVSPAPPPCKTTASKVKPGDPKKEPRRRKPADESXGPPKRPPPFP

SEQ ID NO: 317101 - protein, 91 aa, Zea mays
  Clone ID: MRT4577_52268C.1.pep
PLPTGQGNIKFPLVAVAIFTTCIEEWAVFTITSSTAHKFLWQKIVCSFGEPPLYASEHHQEVQMVVHQPPPPHQQPPNKQQRYLSLKGLNS

SEQ ID NO: 317102 - protein, 70 aa, Zea mays
  Clone ID: MRT4577_52269C.1.pep
LFAEDPGSAPSGSCCSAAHAITKQSPRCLCSEMLTNTNRSAGIKAEVPITIPKRCNLADPPVGYKCGDYT

SEQ ID NO: 317103 - protein, 151 aa, Zea mays
  unsure (1)..(151): unsure at all Xaa locations
  Clone ID: MRT4577_5226C.1.pep
AVRDRSSTSGRTRTVALGSQYQLQSFGEYCQXVTYVARGGLGHNRTGWPPCYNDSPXERRPTPPIPCSCVVTGYXGNRLKRGEMSNLIAYKFQVQEDLTYVISLSSDQLEVATFMXEEGSWLKMDLYIIPNNTPFFTVGEVLTLNGMITGG

SEQ ID NO: 317104 - protein, 50 aa, Zea mays
  Clone ID: MRT4577_52270C.1.pep
WDLEALLLLFSYAVHGGGTGPSGTRSAATRHHGQSYKDLTSSLNKNPAGG

SEQ ID NO: 317105 - protein, 55 aa, Zea mays
  Clone ID: MRT4577_52271C.1.pep
DALTCEHNVKAMAPALYVLHHNILQPRWANVFMWNEWMFLNSTKPDPFLGGAWGE

SEQ ID NO: 317106 - protein, 92 aa, Zea mays
  Clone ID: MRT4577_52272C.1.pep
CMRARSWIAGPAAGPPPPRDPPPTSTVPSVHPAVKGSSAGHGPSTPTSTRQHSRVTSWPALLDCFSYPSAAHRLMRFALLSGLGINNLTSPG

SEQ ID NO: 317107 - protein, 76 aa, Zea mays
  Clone ID: MRT4577_52273C.1.pep
NLVRYTNLRSLKKKKKKKKKKKKKKKKKKKKKKKKKKKKKKKKKKKKKKKGGAVLGVPSLLPRACNVIVFFWGPLN

SEQ ID NO: 317108 - protein, 215 aa, Zea mays
  Clone ID: MRT4577_52274C.1.pep
MQLTTFLSTASAIIATASARDAVTLNQECDLSQPRARIINRCDYDIHLWSVFKGDGCPDNQMVTLKTGETYAENYQNFTNTKVGVSIKISKSSECKGSDITQLEYYRAWDDENEDFRFNYLDVSYVDCGGLDCPARKDGYYLVAGDQVGEVKASAANTWCPILSCSDAESCDKMSYVLPDDVQTKTCQLNANMDFYMCGSEAPTEDYDSTPKTKP

SEQ ID NO: 317109 - protein, 224 aa, Zea mays
  Clone ID: MRT4577_52275C.1.pep
MGSATPWGLAFFRHRSASRIFITQPGRNLRPVVIHKDDYQPCGGEKQAGLRPPPALSFKDVHHPLWGGGRAESGLRLPRGLATRFFLQHSGEKDVRQPCEGGELRLRGVDRLRRRQLPRAWLLGLGGLGAASGAASCHLDGAWLSVHRTGNGRAVRRLATFTASPTPPAAPGGVQDVVRHGGGGGVLGWSCPHSRCEDGSEDLFVCAGAATAHRCRGGRCRWWG

SEQ ID NO: 317110 - protein, 85 aa, Zea mays
  unsure (1)..(85): unsure at all Xaa locations
  Clone ID: MRT4577_52276C.1.pep
MAGSPDQEGFFNLLSHVQGDRMEGQXCSLQAGPGQTTKSQSDPTPEMDSLMDMLASTQGRRMDDQRVTVTXLPGFKPVGSKDGAQ

SEQ ID NO: 317111 - protein, 61 aa, Zea mays
  Clone ID: MRT4577_52277C.1.pep
LVIGTAAKRRCPRVVHLARYSNPYDLAEWKEHANMVYYESPGVEPSAKIAAFGFNKSLATT

SEQ ID NO: 317112 - protein, 226 aa, Zea mays
  unsure (1)..(226): unsure at all Xaa locations
  Clone ID: MRT4577_52278C.1.pep
LAGIPPLGLETITYIYSRAHNNLIDTVREMFAVLALLALAASATYAHTSRRVLMXPTATVHSYXLPAHTPPAFQLPPAQHYTLPVQLAARAHTATXSMCRSRSMCMLTLCTYATQHATALSLSXLHQLAGQKPCTYSRQLLLACNPVGMANVGQCQQQLQLQQIMTVMTXRSMENPAVYLQLLXISXLAEGNAPTHLQQQLXHQIVPAXLTQLSVENPAVYLQQMV

SEQ ID NO: 317113 - protein, 88 aa, Zea mays
  Clone ID: MRT4577_52279C.1.pep
TPTSTYAPPEVPSRVAALFLTIPYAFFLPELVFGIWVWTLVAATHVAYPLLHGWVVYVSLTSFLVSLMLLLPYIFGFYKRFDSWRVLD

SEQ ID NO: 317114 - protein, 72 aa, Zea mays
  Clone ID: MRT4577_5227C.1.pep
ELELQEEVVQEAGGGVDELTPFGREVIHMTVRRRDEERRVGVQERRSCGDNPILNAYGRYCISMMLLSIEDR

SEQ ID NO: 317115 - protein, 57 aa, Zea mays
  Clone ID: MRT4577_52280C.1.pep
SFSCQLHCRFLNKNYVFMFCVMVHSYMEPLLVQRELIFELFYYSLMEYIECHHQVLQ

SEQ ID NO: 317116 - protein, 36 aa, Zea mays
  unsure (1)..(36): unsure at all Xaa locations
  Clone ID: MRT4577_52281C.1.pep
SLPCNLHQASASSLPPLQECGDGGYAASRXRLLVHL

SEQ ID NO: 317117 - protein, 107 aa, Zea mays
  unsure (1)..(107): unsure at all Xaa locations
  Clone ID: MRT4577_52282C.1.pep
RCLLLGTFPLLIASLVILGVSNLIHXGYTNPCLIXSTRRGIGYSCCNRRGFGPIPNIICAEIFPTXSISGLCIAICADTFXICNMIITYTLTVMLCANGLSGAFSIY

SEQ ID NO: 317118 - protein, 112 aa, Zea mays
  Clone ID: MRT4577_52283C.1.pep
MATSCPTLPFDEARWIVRIRRIFDEEIEVSEDQPICVFDVPKPLLITKPEAYVPQLVALGPYHHCREEICDMERYKLSAAKRAQSHLPDMDFQKLVDVFTKQEHLVRAHYHR

SEQ ID NO: 317119 - protein, 77 aa, Zea mays
  Clone ID: MRT4577_52284C.1.pep
TTLRLAQIRCMMLENMVHNPESQCKTLCETSYVLNLQAGASRAFMFSANQFVLLWIPIGPHLVCFLASSQHSAPGLG

SEQ ID NO: 317120 - protein, 57 aa, Zea mays
  Clone ID: MRT4577_52285C.1.pep
NGYPFTSLFAIVSYACHIYLGFFYGLNLFLLLCCDLTNPYIDRAFAQALSVDPHICV

SEQ ID NO: 317121 - protein, 80 aa, Zea mays
  unsure (1)..(80): unsure at all Xaa locations
  Clone ID: MRT4577_52286C.1.pep
VPEVTGTHKVTVLFAGSSSAKIPFEAYVDXSHSDASKVTAHGPGLEPSGNIAXKTTYCEIFXAGAGTDEVDAVIQDPMGQ

SEQ ID NO: 317122 - protein, 139 aa, Zea mays
  Clone ID: MRT4577_52287C.1.pep
GHRVAMVGDGINDAPSLAAADVGIAMRTHSKENAASDAASVVLLGNRLSQVVDALSLSKATMAKVHQNLAWAVAYNIVAIPIAAGVLLPQYDFAMTPSLSGGLMALSSIFVVSNSLLLQLHGSFQNTEKRQGDLSSRLN

SEQ ID NO: 317123 - protein, 46 aa, Zea mays
  Clone ID: MRT4577_52288C.1.pep
ASGRFVLSFSLGAGPVPGLLLPEIFPNKIRAKAMALCMSVHWVRTP

SEQ ID NO: 317124 - protein, 80 aa, Zea mays
  Clone ID: MRT4577_52289C.1.pep
RGQLWINHGMNIFVLVGLYTTSTQLVVCGIFCLIDLPLLSACIYIEKSAHWRDSLTYVCAHVGNSRFLPALQPDQGTEAK

SEQ ID NO: 317125 - protein, 63 aa, Zea mays
  Clone ID: MRT4577_5228C.1.pep
FSGSTPLVRSLFRSLFFFFLKSHSSLLARQDQVTQHRGIDLLLTIYLLHSIFHHNIILNHCNT

SEQ ID NO: 317126 - protein, 82 aa, Zea mays
  Clone ID: MRT4577_52290C.1.pep
GLRRPCLLCRWPPVSRRCLRRVGRPLVRVCWLVAGVPRRDVDVVEAPGVVGLAPARVLLGRVTIAWVAPGFPAGSLRGVFLS

SEQ ID NO: 317127 - protein, 69 aa, Zea mays
  unsure (1)..(69): unsure at all Xaa locations
  Clone ID: MRT4577_52291C.1.pep
MGILSGGRLISINKMCLSKVVVTYTVPFGIKQEVCRKMKVMDVSSPIAKSIRXTHNGESVSYLLRNVTV

SEQ ID NO: 317128 - protein, 94 aa, Zea mays
  Clone ID: MRT4577_52292C.1.pep
VPVQSGAASHDIVAVAATAAQEQPCTQCRVSAIDLSIRCWPLLTMKSQHLVPPGTPRMLDSAHLDGGHRMRFVLDLSPTLDNIVEDIQVESPRE

SEQ ID NO: 317129 - protein, 55 aa, Zea mays
  unsure (1)..(55): unsure at all Xaa locations
  Clone ID: MRT4577_52293C.1.pep
MVVPPSRSRGDYDHLIKLLLIGDSGVGKSXLLLYFSDDTFXTTSFITTIGIEFQC

SEQ ID NO: 317130 - protein, 283 aa, Zea mays
  unsure (1)..(283): unsure at all Xaa locations
  Clone ID: MRT4577_52294C.1.pep
RLQVPVRNSRVDPRVRTALLSLLAGSSAFLSHPRLKGRFQRDRRNIRPNIILVLTDDQDVELGSMQVMNKTRRIMEQGGAHFINAFVTTPMCCPSRSSILTGKYVHNHNTYTNNENCSSPSWQAQHESRTFAVYLNSTGYRTAFFGKYLNEYNGSYVPPGWKEWVGLLKNSRFYNYTLCRNGVKEKHGSDYSTDYLTDLITNDSVSFFRTSKKMYPHRPVLMVISHAAPHGPEDSAPQYSRLFPNAXQHITPSYNYAPHPDKHWIMRYTGPMKPIXMEITTCY

SEQ ID NO: 317131 - protein, 94 aa, Zea mays
  Clone ID: MRT4577_52295C.1.pep
MYIRVKRNKSTYFIQCEPTETALSIKQKLHSLIDQPPSSQQLVLWPSSDVLEDSKTLADQKVDNDSIVALALRKDDGEFEEVFIARPEDFMSSS

SEQ ID NO: 317132 - protein, 161 aa, Zea mays
  unsure (1)..(161): unsure at all Xaa locations
  Clone ID: MRT4577_52296C.1.pep
FSSIPRSVSSSQTCALEDQLSDDQMAEIKEAFGLFYKDGHGCFTTHELGKXMPSLGQNPTEAELQDMINQDDADGMXTIHFPEFLTLMARKMKDTDSEEELEEAFRVFDKDHNGFISADELRHVMTNLGDELTDXEVDHMIREDDVDVDVQMHYEELVKVM

SEQ ID NO: 317133 - protein, 49 aa, Zea mays
  Clone ID: MRT4577_52297C.1.pep
TFTLTREQKQKILKNEKKKIKKKKKKKKKKKKKKKKKKKKKKGGFSGPF

SEQ ID NO: 317134 - protein, 98 aa, Zea mays
  unsure (1)..(98): unsure at all Xaa locations
  Clone ID: MRT4577_52298C.1.pep
SHFFPFDPPLETKTTTWGALVVLKTKKKPAGKKPGEEEPAVEKAPAGKKPNAENLVPAGKFAVXESGKGMMGNKKGKKSVATYKIYIFNALYYVHPDI

SEQ ID NO: 317135 - protein, 51 aa, Zea mays
  Clone ID: MRT4577_52299C.1.pep
VCSTECPECNSLRQQHIGACFLEPNHNFSPPPSSVDLKLVSSISSYKSQSV

SEQ ID NO: 317136 - protein, 91 aa, Zea mays
  Clone ID: MRT4577_5229C.1.pep
SALWAMWRPTAVQVTYKNLRWSGLFAARIPNTASVNVSQNILATIDHAGSLEQGKHMEFIGWPNVLLGVLSFGALQYPDVPFMSLPLCFFY

SEQ ID NO: 317137 - protein, 132 aa, Zea mays
  Clone ID: MRT4577_522C.1.pep
QRTVFSKAPGCPPPPRPATPAWPMPRRSGRSSHFPSRLGSPSRRASSSCAPSFTPTSPSGPWRRGRSRAPSSRISATHRSPSRSSADSDLSGSRLPDLQKRRTRGARTHWGPPRARPLLPPHPERETTRTTR

SEQ ID NO: 317138 - protein, 93 aa, Zea mays
  Clone ID: MRT4577_52300C.1.pep
ISVITSRFTFSNTQHYIAYQASKTYYQGINENDDAGGSQGLRTSCHHTNETTQLRVQTTTRLHCQQKTLYHHKKSRTLTKHHKDVMYMCDHGR

SEQ ID NO: 317139 - protein, 53 aa, Zea mays
  Clone ID: MRT4577_52301C.1.pep
CDHFFHSTFVRSGDKWAEGGTMGKLLRAKGGTHALSENNRRLETDGNIANMIT

SEQ ID NO: 317140 - protein, 175 aa, Zea mays
  unsure (1)..(175): unsure at all Xaa locations
  Clone ID: MRT4577_52302C.1.pep
MQRRTAEAVGDFRKTPIYIVGTDCTAKRNIAKLLANSIIYRYLSSEELLEDVLGGKDALRAFKESDEKGYLEVETEGLKQLTSMGSLVLCCGDGAVMNSTNLXNDMLKSTGTQATTDPDSFSQAMSKLRQRXVASQRGYSSIDLVTLEDMVLEIVRQIEKLIRAKEMMEAAGKPF

SEQ ID NO: 317141 - protein, 273 aa, Zea mays
  Clone ID: MRT4577_52303C.1.pep
MAMRAATAAATGFFSPSTVPPRRFSSVTPPASLCTARCIQRHRLRAFPSLEIPLEELNPSVDLLRRTAEAVGDFRKTPIYIVGTDCTAKRNIAKLLANSIIYRYLSSEELLEDVLGGKDALRAFKESDEKGYLEVETEGLKQLTSMGSLVLCCGDGAVMNSTNLGLLRHGVSIWIDVPLEMAANDMLKSTGTQATTDPDSFSQAMSKLRQRYDELKERYGVSDITVSVQNVASQRGYSSIDLVTLEDMVLEIVRQIEKLIRAKEMMEAAGKPF

SEQ ID NO: 317142 - protein, 63 aa, Zea mays
  Clone ID: MRT4577_52304C.1.pep
RISSLQVASLHISFFFLQQKPIYKFVLVQHKKSIRYTRQSLFRTNALPRTRFNLEKKERNQFN

SEQ ID NO: 317143 - protein, 115 aa, Zea mays
  Clone ID: MRT4577_52305C.1.pep
MNSTNLGLLRHGVSIWIDVPLEMAANDMLKSTGTQATTDPDSFSQAMSKLRQRYDELKERYGVSDITVSVQNVASQRGYSSIDLVTLEDMVLEIVRQIEKLIRAKEMMEAAGKPF

SEQ ID NO: 317144 - protein, 81 aa, Zea mays
  unsure (1)..(81): unsure at all Xaa locations
  Clone ID: MRT4577_52306C.1.pep
GRPPFFFFFVLLXGLXLXXFXXXXPVSLXCREKLCTGIYLVYNICMLVNWIRCRRAPLPSRWTCRWRSCRRPWSCCRRMRG

SEQ ID NO: 317145 - protein, 83 aa, Zea mays
  Clone ID: MRT4577_52307C.1.pep
MAVSMISSPALAGATQGLSPLGRRASSFADSCSKKNIKTDKPYAIGGGLTIESLFLTRLEEAMAREPSTGTSPHIPPPPRPPH

SEQ ID NO: 317146 - protein, 37 aa, Zea mays
  Clone ID: MRT4577_52308C.1.pep
LLKPFSNPTKSPIIFIPFSPLYIISNYSQTYHLFQHF

SEQ ID NO: 317147 - protein, 124 aa, Zea mays
  unsure (1)..(124): unsure at all Xaa locations
  Clone ID: MRT4577_52309C.1.pep
YLRQPHSSTVAAEHYYAGCGQTSAMYQPIRQQSWPHXMRMIDLHSISQHLXMIIQLERARSDSNKLYEPPLMQYQHKLLAAHGLNPMAMIIAQNMPAMXGLYHDQMHSYRTTYCGVSAAIPPYY

SEQ ID NO: 317148 - protein, 77 aa, Zea mays
  Clone ID: MRT4577_5230C.1.pep
CCEINLSSGWGGVKMFQNLFILKIYKHILHWLALHKSQLGFSARAQTTNHSLSASQTGGRQLGNGVVAGSRRGSWRG

SEQ ID NO: 317149 - protein, 50 aa, Zea mays
  Clone ID: MRT4577_52310C.1.pep
DKPVWDTPLNKTQMLLLPHYTAVLVVLVCIKTLCVTKPIYHFAWRRFKIV

SEQ ID NO: 317150 - protein, 236 aa, Zea mays
  Clone ID: MRT4577_52311C.1.pep
MVGSSPLQAVLVAPGVKDRKVLAFKRDALKDKDAVSGLIHSILASSPAQRSAFYVFDLAKVVDLFRAWRRALPDARPCYAVKCNPDPALLGALAALGAGFDCASRAEIEAVLALGVRPGDIVYANPCKPEAHLEYAAEVGVNLTTYDSEEEVAKVRRCHPGCELLLRLKGPDGGDVRVDLGTKYGAHPDEVVPLLRAAQRAGVGVAGVSFHVGSGASNLHVYRGAIQAARAAFDAA

SEQ ID NO: 317151 - protein, 51 aa, Zea mays
  Clone ID: MRT4577_52312C.1.pep
NEINSICVQPYNMLLVMGFHLGEICDFYDNDYLSRYDIKPSTRIIRDIKQL

SEQ ID NO: 317152 - protein, 55 aa, Zea mays
  unsure (1)..(55): unsure at all Xaa locations
  Clone ID: MRT4577_52313C.1.pep
ATVSANIFFLLMLLALSTCVANATNVHQCLQAPIASHISPYLSSIIGXICENPTF

SEQ ID NO: 317153 - protein, 51 aa, Zea mays
  Clone ID: MRT4577_52314C.1.pep
GCPVSQWKPSEHIRAWADGACHTQEFGDRRPQSRTLSHVHGDGHVQLADVP

SEQ ID NO: 317154 - protein, 38 aa, Zea mays
  Clone ID: MRT4577_52315C.1.pep
KKHTIFFFIKNDINHRELFIYTAEVISLLQPTHYNILS

SEQ ID NO: 317155 - protein, 120 aa, Zea mays
  Clone ID: MRT4577_52316C.1.pep
CTQSNAIQPVFIFLQVRWIIIGVPFPGIIPTVHGVTGQERSFPVRAKEASLWPVLSLGRWLLVATGQAFASLEIRAEHIVGQVAVIMGLAGIHSSDRHPGPCPICASRNGVSPSLLSSFS

SEQ ID NO: 317156 - protein, 185 aa, Zea mays
  unsure (1)..(185): unsure at all Xaa locations
  Clone ID: MRT4577_52317C.1.pep
RGRAATLTLAAAAASIAAIPAPLGPVLRRPXXGXVKCXGRKXTAVAVAXTXPGRXXIXVNXVPIELLRPEMLXXKAXEPVLLGGGSRLXXIXMRIXVGGGGKXXKIYAIXXAVAXGLXAYYXKYVXEAAKKEXKDFXXGXGXTLLVADPRGWXPKXFGGRXARAXFQXSXRWAPAPAPLSWLRAT

SEQ ID NO: 317157 - protein, 60 aa, Zea mays
  Clone ID: MRT4577_52318C.1.pep
PVILVTGDGSDNSVSLIRVALQPLGYRRSRADVVSFAWPHEIFLMRDLRGAHSAWHIVMV

SEQ ID NO: 317158 - protein, 88 aa, Zea mays
  Clone ID: MRT4577_52319C.1.pep
GFSRSARMGNLNPRDRVFASLSNIADLKSSADAATEDLDDEFDHIDESHYVDTEDSTKHKKSLIFRRFGDFFRRKSLYKPNSAPVHTL

SEQ ID NO: 317159 - protein, 71 aa, Zea mays
  Clone ID: MRT4577_5231C.1.pep
GNLFLLLAYSVSVCVVVAVIFALEEKKKGRENAFSPGIKAAILGVGTNGLKIFGIHNSKRRLLRLLGTLSP

SEQ ID NO: 317160 - protein, 61 aa, Zea mays
  unsure (1)..(61): unsure at all Xaa locations
  Clone ID: MRT4577_52320C.1.pep
MSILRAPPPCFSSPLRLRVAVAXPLAPPMRRQCXRARATYNLQLITPEGAVHPQVPDDVYI

SEQ ID NO: 317161 - protein, 152 aa, Zea mays
  Clone ID: MRT4577_52321C.1.pep
MIKQILGRLPKKPAKAGEKELAGAGPSLPSPTSDARTTTDLTASSRLVSPSNYASAATNPGQSYAPRAAGLGAGASNGFAGSAAGYEALPSFRDVPASEKPGLLLGKLAMCCVVFDFADPTKDVREKEVKRQTLLELVDYITSRHSKFPGAR

SEQ ID NO: 317162 - protein, 35 aa, Zea mays
  Clone ID: MRT4577_52322C.1.pep
KIVDIFEPEFLVIAKESTVTATVDSIQNLINLPPE

SEQ ID NO: 317163 - protein, 205 aa, Zea mays
  Clone ID: MRT4577_52323C.1.pep
MLHRSNSRNQRNRGSRIKTLLQATLLIGVIFWLLYQVKHSYDKKNEYLDDAEDQLAHNDISMFQGRKEKAGSYSDSNIQMVDDNSDVTTKPEERDADHHSDTFNYNEKTGETVFDKDSTNLNEDDKRNTERSEAEGQVNSADGNTEVNNNNNEDETTGHAEEGKHDTESNSAAESKSEVIQLGDDMSRNNYAQEENTGEASGRLM

SEQ ID NO: 317164 - protein, 97 aa, Zea mays
  Clone ID: MRT4577_52324C.1.pep
VFHQKEIVIAMVSSHVFCWAQHCLQAVKHDGMNDLVRVRKWCRGWFHQWLVLSCHDRRVQIQRGVALEVVHVSEIRIEKRRVRPSLKGRGVLRCNAI

SEQ ID NO: 317165 - protein, 67 aa, Zea mays
  unsure (1)..(67): unsure at all Xaa locations
  Clone ID: MRT4577_52325C.1.pep
MNSNPSCFPEDALGPKTQALSTYDKEYLAIIACLHAWRDYLQQXGEFSFLTDHRILTQLNEQCLYTP

SEQ ID NO: 317166 - protein, 192 aa, Zea mays
  Clone ID: MRT4577_52326C.1.pep
KIGLKPDQYTWSALLLALYRSGRCWDCLKLFHGIKGKHPTLLNDHLYNTALMSCEKLGQWEHGLQLLWLMEKRGLKLSVVSYNHVIGACEVASKPKVALKVYQRMINQRCSPDTFTHLSVIRACIWGSLWTEVEDILEEVAPDSSIYNAVIHGLCLRGKTGLANKVYAKMRSMGLVPDGKTRAFMLQHIATD

SEQ ID NO: 317167 - protein, 32 aa, Zea mays
  Clone ID: MRT4577_52327C.1.pep
PMDIHMHCRLSLNVIFMRRVDVKPSYRCVDPV

SEQ ID NO: 317168 - protein, 72 aa, Zea mays
  Clone ID: MRT4577_52328C.1.pep
GKIAEVKSTIKFQLKKVLCMGVAVGNVDMTEDELIGNIMLAIKYLVSLLKKGWQNVGSLTIKASMSPPKGLY

SEQ ID NO: 317169 - protein, 67 aa, Zea mays
  Clone ID: MRT4577_52329C.1.pep
IRLERNFANRKFFPHRNENHHRGLSNNPGGAPNHTKNFPPQPTYTTNPHPKDDDQPPTLTRHAQKPP

SEQ ID NO: 317170 - protein, 129 aa, Zea mays
  Clone ID: MRT4577_5232C.1.pep
NKQYHMFHLHCLSLHKSQLGFSARSQTTNHSLSASQTAERQLDNGVVAGSRRCSWRGERRCGGALTARPPDERRCGGPAFGRAVLRAAAAGLRAWLRRGSGRAAAAAGLRTSGTAACGVRAAGWSGRVE

SEQ ID NO: 317171 - protein, 124 aa, Zea mays
  unsure (1)..(124): unsure at all Xaa locations
  Clone ID: MRT4577_52330C.1.pep
RDPATRAAAAGRTGTKRRKPGRPGAEAXXGKGGKGXXAAKTTAAKXAXKDKGEKGPXXRXXRAGPQXXXGRXHXQXXQRTQAXGRXGATAAXXPXAPPEDPTAEGXEPAGKXXKEXKGKRGTXR

SEQ ID NO: 317172 - protein, 76 aa, Zea mays
  Clone ID: MRT4577_52331C.1.pep
ARDKGIVTHSVDGHYTFHRLHFDTDHFLWFYTRTGNSFTATAYLPSVFISRHCVMSPHTLILGRQRLPDTLSLVYN

SEQ ID NO: 317173 - protein, 90 aa, Zea mays
  Clone ID: MRT4577_52332C.1.pep
AAHRPRRAGRRVRRRAPAGRLAGLRGAPATGAQRLLVSTAHVIGYDDYDRATSEPARRMQLRSVPFNNSIIYFDPSLRSTSTFSDYGFGR

SEQ ID NO: 317174 - protein, 259 aa, Zea mays
  Clone ID: MRT4577_52333C.1.pep
MRTESLGLKLFRMYAHLVGFFRYYKSLPPISKAYGTLCFFTTVLVQLQILHPLFLYLDYPLVFKKFEIWRLLTSFFFLAPFSMKFGIRLLMIARYGVMLEKGAFDKRTADFLWMMIFGAISLLVLSVIPQLNTYVLGLPMVSMLVYVWSRENPNAQINIYGILQLKAFYLPWVMLLLDVIFGSPLMPGLLGIMVGHLYYFFAVLHPLATGKSYLKTPKWVHKIVARFRIGMQANSPVRPPANGNSGSGVFRGRSYRLNQ

SEQ ID NO: 317175 - protein, 231 aa, Zea mays
  unsure (1)..(231): unsure at all Xaa locations
  Clone ID: MRT4577_52334C.1.pep
MSSPAEYYKSLPPISKAYGTLCFFTTVLVRLHILNPLFLYLYYPRVFKKFEVWRIFTSFFFLGPFSINFGIRLLMIARYGVMLEKGAFDKRTADFLWMMIFGAISLLVLSVIPQLNTYVLGLPMVSMLVYVWSRENPNAQINIYGILQLKAFYLPWVMLLLDVIFGSPLMPGLLGIMVGHLYYYFAVVHPLATGKNYLXTPKWVHKIVARFRIGMQANAPVRAPANGNAGT

SEQ ID NO: 317176 - protein, 279 aa, Zea mays
  unsure (1)..(279): unsure at all Xaa locations
  Clone ID: MRT4577_52335C.1.pep
MSSPAEYYKSLPPISKAYGTLCFFTTVLVQLQILHPLFLYLDYPLVFKKFEIWRLLTSFFFLAPFSMKFGIRLLMXRLKFCXTDYKIVTVMNYLXCKLALVVWICFIXLACRARYGVMLEKGAFDKRTADFLWMMIFGAISLLVLSIIPLFNSFFLGIPMVSMLLYVWSRENPNAQINIYGLVQLRSFYLPWAMLLLDVIFGSSLMPGLLGIMVGHLYYFFAVLHPLATGKNYLKTPKWVHKIVARFRIGMQANSPVRPPANGNSGSGVFRGRSYRLNQ

SEQ ID NO: 317177 - protein, 86 aa, Zea mays
  Clone ID: MRT4577_52336C.1.pep
IKNNARVGWCLLKFKKTKNSDGAQKRKIPTTIFLEDITAKGRKMDQSGRRKKKGHFRTSGLLGTSKNLGKFKLRFIKISVSPAEDH

SEQ ID NO: 317178 - protein, 55 aa, Zea mays
  Clone ID: MRT4577_52337C.1.pep
FSSCLAPTVAAFFRAPADSQSCLVGPIPTIPLSLLRSRSVSGGPYTAASLGSLKP

SEQ ID NO: 317179 - protein, 243 aa, Zea mays
  Clone ID: MRT4577_52338C.1.pep
MSSPAEYYKSLPPISKAYGTLCFFTTVLVQLQILHPLFLYLDYPLVFKKFEIWRLLTSFFFLAPFSMKFGIRLLMIARYGVMLEKGAFDKRTADFLWMMIFGAISLLVLSIIPLFNSFFLGIPMVSMLLYVWSRENPNAQINIYGLVQLRSFYLPWAMLLLDVIFGSSLMPGLLGIMVGHLYYFFAVLHPLATGKSYLKTPKWVHKIVARFRIGMQANSPVRPPANGNSGSGVFRGRSYRLNQ

SEQ ID NO: 317180 - protein, 42 aa, Zea mays
  Clone ID: MRT4577_52339C.1.pep
IPGAHAWTTPYGASIFQSKESSSVLSCDISRNSKYIVTGSGD

SEQ ID NO: 317181 - protein, 37 aa, Zea mays
  Clone ID: MRT4577_5233C.1.pep
RMRRHHERVGFVLELGVRGVPSMREGMGENPAPSGLE

SEQ ID NO: 317182 - protein, 56 aa, Zea mays
  Clone ID: MRT4577_52340C.1.pep
GEMLRGACMKYITQDRLVVHNERLSAKIHIFSHNNIICLHRRVNLHVWVHDNFMWI

SEQ ID NO: 317183 - protein, 123 aa, Zea mays
  Clone ID: MRT4577_52341C.1.pep
MGVQSSEGQMMFSSIALLQQRFRELERIREKREERLLHVLAPRPVATTSPREMPVKWFFHPELLYPCRPLRDTAAASLFPACECKSFQLHGDNDPITVELWPSKTYNYKHVSGEVDVDTSLHL

SEQ ID NO: 317184 - protein, 284 aa, Zea mays
  unsure (1)..(284): unsure at all Xaa locations
  Clone ID: MRT4577_52342C.1.pep
AVTSLLHSLCRVAVXSRVRHXTXVTLXGXCPDDFAAGRNWPPNGSLEDWLSCKKSMPPLTWKARTRIVGEICSALAFIHSHKPYPIVHGDLNLGNILLDANFASKLGGLGICCLLLGGGEDDITATSLRSHPSAADRNKGTLRYTEQGGGFKSAAELMLWSDVNSFGVTILRLLTGRSQQGIGEMVEEAMEKGNLHSIIDASAGEWPLVQASQMAXFGLRCVTLGSGRQPDLAGEVWEEVEQLMKAACLTAGASRFASSSEDDPPPSYFICPIFQEVMSDPHVA

SEQ ID NO: 317185 - protein, 82 aa, Zea mays
  Clone ID: MRT4577_52343C.1.pep
STIRSNHYRFAKHIYRLLSTYCRPKDLCIYICVRLYHHRTGIELAISIPLDLQIVCVCVIKFYRCMHDACVCACIVHVMPCT

SEQ ID NO: 317186 - protein, 138 aa, Zea mays
  unsure (1)..(138): unsure at all Xaa locations
  Clone ID: MRT4577_52344C.1.pep
MRPTKPTAGEFSGGWAPRPKLVTEAPRKEAPTTDAEEKPHLHRPGTVAVLEIHKYHSKTELVIRXVPFQELGQRIAHDFKTDVRFQSHAVLALQESTEAYLDCLFNDTNLCAIHGERVTILPKXDIHLALHDPKITSA

SEQ ID NO: 317187 - protein, 64 aa, Zea mays
  Clone ID: MRT4577_52345C.1.pep
KYTQFHQLVHPFQIIDITMFHIRSLGHANALIPSHDCVIICSCLIVTRRSIAPFEDILSSIFTN

SEQ ID NO: 317188 - protein, 74 aa, Zea mays
  Clone ID: MRT4577_52346C.1.pep
RVMGLPGGQSPCGSFHQVGLCPWICHEIGLVAGSRYQVRVGFCFVVVFGPTAPVGAVSGPGVSEGLVLIVWPEQ

SEQ ID NO: 317189 - protein, 32 aa, Zea mays
  Clone ID: MRT4577_52347C.1.pep
CQGICLATWSPRFQVYLAPCPPREVKFTANIP

SEQ ID NO: 317190 - protein, 73 aa, Zea mays
  Clone ID: MRT4577_52348C.1.pep
LFEEGVLYAKKDYNLAKHPQIDAPNLQEIELMQSLKTQENATETFSWQYYYCYFINAGTEHPPNHLSLPNDIV

SEQ ID NO: 317191 - protein, 75 aa, Zea mays
  Clone ID: MRT4577_52349C.1.pep
LGSRLNLSHSQMRSPIVKTATGDVFIKAMRDCCDQSSQSMNKSRLCLTGTERITNAPPPSMIQTTQTPLCILRAQ

SEQ ID NO: 317192 - protein, 136 aa, Zea mays
  Clone ID: MRT4577_52350C.1.pep
WVPRGRPRPASRIGFRTRSEVDVLDDGFKWRKYGKKAVKSSPNPRNYYRCSAEGCGVKKRVERDSDDPRYVVTTYDGVHNHAAPGDAYLCPPPPSRGAAHYSPPVAAPSWSAALDAWEAQLHRHAAAAAHSSESSY

SEQ ID NO: 317193 - protein, 120 aa, Zea mays
  unsure (1)..(120): unsure at all Xaa locations
  Clone ID: MRT4577_52351C.1.pep
SWVTLLYFISAIFWISGLYYCNSLGYIPXDGVATNAAMDKYISAASKAMPFYSSVPXLFDSMISMGWTRRYFNIRPTGLSMYLSYMVMHRIFVKLRIYCIGRKLRDITPLYXSLHGTHHI

SEQ ID NO: 317194 - protein, 62 aa, Zea mays
  Clone ID: MRT4577_52352C.1.pep
DSFPAPLVGVSAEASSSSMSAACCRLPVLELGCWSKLLTTTLLPNSLRTGLRLRVSHRPRRW

SEQ ID NO: 317195 - protein, 79 aa, Zea mays
  unsure (1)..(79): unsure at all Xaa locations
  Clone ID: MRT4577_52353C.1.pep
PTFHELFQSVPRGLLSPVQHGLLVARCRRRFDSVXGFGRAVHGVTGRGFGGRHGSRSDEPAAAAVGRQLGQRSSGGGSY

SEQ ID NO: 317196 - protein, 48 aa, Zea mays
  Clone ID: MRT4577_52354C.1.pep
RLGLFGSIVQRKSDDYILEFDDDKEDGALPQRAVPFYRVVALPEGHRQ

SEQ ID NO: 317197 - protein, 202 aa, Zea mays
  Clone ID: MRT4577_52355C.1.pep
MAPLVPSSQPWVEKYRPRQVKDVAHQEEVVRVLTNTLETADLPHMLFYGPPGTGKTTTALAIAYQLYGPELYKSRVLELNASDERGINVVRTKIKDFAAVAVGSARKGGYPCPPYKIIILDEADSMTEDAQNALRRTMETYSKVTRFFFICNYISRIIEPLASRCAKFRFKPLSEDVMSNRILHICNEEGLTLDAQALSTLS

SEQ ID NO: 317198 - protein, 112 aa, Zea mays
  unsure (1)..(112): unsure at all Xaa locations
  Clone ID: MRT4577_52356C.1.pep
VLFSPSSCAXLXXCSFFVGSAXXLFSRLVXXXPXXLFXXPPPPXXXSXXGXXCLXXXXXGLVXXXPFSALXCFLASXXGVXXVCASSXPFPALPAXFPFLKXGFXLSAXALQ

SEQ ID NO: 317199 - protein, 284 aa, Zea mays
  Clone ID: MRT4577_52357C.1.pep
MSSSVGGGSAGGGGVDMVSLLEKAKDLDQLKKEQDEIVADINKIHKKLLASPEMVDKPVDTILLKLRGLYARAKELSENEISASNALIGLLDGLLQSGASTAQKKKIVAFYISEVGEQKKKRIKSDTDSARFSAASMRNQLDQAASLKGEQVAARVKSDDEKDEWFVVKVIHFDKETKEYEVLDEEPGDDEESTQKKYKLPMSYIIPFPKKGDPSSAPDFGQGRQVLAVYPGTTALYRATVASHRKRKSDDYILEFDDDEEDGALPQRAVPFYRVVALPEGHRQ

SEQ ID NO: 317200 - protein, 91 aa, Zea mays
  unsure (1)..(91): unsure at all Xaa locations
  Clone ID: MRT4577_52358C.1.pep
VNGERLGTYMGHTGAVWCVDADWDTKHVLTGSADNSCRLWDCETGKQLXLLKTNSAVRTCGFDFGGNIIMFSTDKQMGYQCFVSFFDLRDP

SEQ ID NO: 317201 - protein, 42 aa, Zea mays
  Clone ID: MRT4577_52359C.1.pep
APCLLASMHDRNGYHNCRAFGQFYWPHGHAGQGLPLHEESRR

SEQ ID NO: 317202 - protein, 41 aa, Zea mays
  Clone ID: MRT4577_52360C.1.pep
PAMFDVSGWADFSCSDLSWEVIITWAGGFLLPGYVTLDKSL

SEQ ID NO: 317203 - protein, 101 aa, Zea mays
  Clone ID: MRT4577_52361C.1.pep
FPFSQVGFAYFQGQQLFPFNQLAALNPPAYLQQQILLPFSQLVAANRASFFTQQQLLPFFQQFGANPPPLFQLQQLLPFVPLALTDPGASFPQPIIGGALF

SEQ ID NO: 317204 - protein, 45 aa, Zea mays
  Clone ID: MRT4577_52362C.1.pep
MTGHASLLLLLLPALADELLCCPLAHCAQYNYTFMFRGGDLFTDS

SEQ ID NO: 317205 - protein, 130 aa, Zea mays
  unsure (1)..(130): unsure at all Xaa locations
  Clone ID: MRT4577_52363C.1.pep
LFPFSRLGXAFFQGQQLFPFNQLAALNPPAYLPPQILLPFSQLAAANRASFFTQPQLLPFFPRFGANPPPLFQLHQLLPFVPLAFTDPGASFPQPIFGGALFLIAFLFPPPHKVFWIMFVAPPKLEVSFP

SEQ ID NO: 317206 - protein, 90 aa, Zea mays
  unsure (1)..(90): unsure at all Xaa locations
  Clone ID: MRT4577_52364C.1.pep
MADHHPGWRLGGXGATGDPSAAGAGMHGYGAASSMKQGSMYDVRSRAAXAATFGGSMLVLSGLILAGTVIALTVATPVLVIFSPALMPVG

SEQ ID NO: 317207 - protein, 45 aa, Zea mays
  Clone ID: MRT4577_52365C.1.pep
KSIMYFFFPQGKTVHLTTVARQKATPSSSISVPFTDHQNKAGLIV

SEQ ID NO: 317208 - protein, 49 aa, Zea mays
  Clone ID: MRT4577_52366C.1.pep
FCNLLTLRGMAQPRPIHLGVISETLRTTKVAVPSAALDLAHPGLAPRHY

SEQ ID NO: 317209 - protein, 76 aa, Zea mays
  Clone ID: MRT4577_52367C.1.pep
SPSIHFSLYLLETNRSLYACLYSTNLKMFLSVFCSHGREGHFLLVIVSALTKIVNAWLTNFTGLHFVVKGEENESC

SEQ ID NO: 317210 - protein, 350 aa, Zea mays
  Clone ID: MRT4577_52368C.1.pep
MVLFELDPDIIRWGLHHLLPAPAGYSPHCRTQTTPTTPCTAFARPPHQPIGDMGTSSSVEIKVEHVDGVDNDAIIAQALQEELSNVAFAEASGPTSAADNQQHSAVLTQQWLRPRAVHVEPASQEAGTREEPFSTCSSPGDDNNVQDSQQCLIELMDNFSVIDGEVGKRLNNMVPVPHVPKTNGEIPSVDEAISDHQRLLDRLVVYGLVDLKVKGDGNCQFRALSDQFYRTPEHHRFVRQQVVKQLESHPEIYAGYVPMDYREYLKKMSKSGEWGDHVTLQAAADSYGVKIFILTSFRDTCYIEILPVVEKSRRVICLSFWAEVHYNSIYPEGELPVLEFDNKRKRWWPF

SEQ ID NO: 317211 - protein, 96 aa, Zea mays
  Clone ID: MRT4577_52369C.1.pep
QKFYQYPIYILIYVLLKYHHPPTPHTLNLHTTLQPPFSHPQHLHLLHSFTKPSKTTTSLTTTLTIPSLPSSSNLSYSYHISKLYTSFISHTYLSTY

SEQ ID NO: 317212 - protein, 108 aa, Zea mays
  Clone ID: MRT4577_5236C.1.pep
NKLGGHIPLKKTNQNRPRKKRLPNRPLKNPENHFGLGQPTKKRGPYTQTTRQTLIVQTDQGGNLAKSKPGKPLPQETTLGHERDPREFKAPYYTELPKSEKELGRTVP

SEQ ID NO: 317213 - protein, 62 aa, Zea mays
  Clone ID: MRT4577_52370C.1.pep
VDFPSMRLGPKEVSLSIFLDEDTGHMVCGCHKLSSAFSDTLPLPLLHLGRDVCDRKRERTRG

SEQ ID NO: 317214 - protein, 69 aa, Zea mays
  unsure (1)..(69): unsure at all Xaa locations
  Clone ID: MRT4577_52371C.1.pep
HRIPVVGEVPKNPGMLFWVPSFKVKVAKKFLDXXHPPRFKPHEKKDFVCFWVSKKGVFHQNKLKAFCGV

SEQ ID NO: 317215 - protein, 50 aa, Zea mays
  unsure (1)..(50): unsure at all Xaa locations
  Clone ID: MRT4577_52372C.1.pep
NRVTVRFCPRVSDRSTFGLGVGTPVVPFVCSRYETXRNKNQPGFCSRPMF

SEQ ID NO: 317216 - protein, 49 aa, Zea mays
  Clone ID: MRT4577_52374C.1.pep
RNVGLPSPHESRHYNLCYSVFIIKYFVGITVICTLCNFHYIYLELDWRE

SEQ ID NO: 317217 - protein, 117 aa, Zea mays
  Clone ID: MRT4577_52375C.1.pep
AYGSKGPTGTRRTLTVVQPRYTINIRITTIAIAAAPKHLHQHAVTGPNNAGDLSCLLEPDGQGDKVSTDRRTAGTDDQHLTIQATKANAADDPPGASFQNLRTQARDRITIHDHHQD

SEQ ID NO: 317218 - protein, 108 aa, Zea mays
  unsure (1)..(108): unsure at all Xaa locations
  Clone ID: MRT4577_52376C.1.pep
LCILRLYWLLGKIGYGTASEALACKLPLVFVRRDSLXEEPFLRNLLEHDQNSIEMVRSDPLAGHWKPYHIRALTLQPCYNGPINGGEVVSQILQDTAIRNKCISDKAS

SEQ ID NO: 317219 - protein, 111 aa, Zea mays
  Clone ID: MRT4577_52377C.1.pep
EVAPRVREKQWQKAVNLYTEGIRLNGKVATYYSNRAAAFLELTSYRQAEADCTSAIELDSKSVKAYLRRGTAREMLGYYKEAVDDFNHALVLEPMNKTAGVAINRLKKLFP

SEQ ID NO: 317220 - protein, 97 aa, Zea mays
  Clone ID: MRT4577_52378C.1.pep
QGGKSLYPVGPQMPSGKLIWPNNFLGGPSYPKAFSPPVNKSLFQSQHVLFLKIQGFLFLIAFPIQGMCVGLCTCAVWPHEPFRFNLLLVGRKTAKKF

SEQ ID NO: 317221 - protein, 62 aa, Zea mays
  Clone ID: MRT4577_52379C.1.pep
TTAVAAVGTFPAGKRAAAGRGDIKGLGAAVDAAADGVLESIYVVKNAVAVGHDEGLVANRSC

SEQ ID NO: 317222 - protein, 86 aa, Zea mays
  unsure (1)..(86): unsure at all Xaa locations
  Clone ID: MRT4577_52380C.1.pep
GGGGXGAAATSAAASAGRSSSGXGGGGVGSDGVGGGGGXGSGSGRGRARRRGGCRGRRRRRXGCEAGSIRGRPRDGGAKRRRERGG

SEQ ID NO: 317223 - protein, 165 aa, Zea mays
  unsure (1)..(165): unsure at all Xaa locations
  Clone ID: MRT4577_52381C.1.pep
KPGASTHYXLVFLSEQSVSEPRKQSDTGKARGWHAPVVQSYHEIGFPVISIGTDNRLSPNQGARCVQGGRWVESRSPPDPHHGKGIGGGEGKQIHLCAPQGSCCSRKEEREGAAWRPDRDDGEERRGKPAAGGFERGSGEGGGCSAAAAAGSCPNPPPRHRLLEQ

SEQ ID NO: 317224 - protein, 92 aa, Zea mays
  Clone ID: MRT4577_52382C.1.pep
TRKKTNPFVARPLFSKIEEVTLKEEKEIIVTWSRASSILPAMVGHTIAIHNGKEPIPIYITNPMVSLLLGEFVPTRHFTSYKSTRKDTKSRR

SEQ ID NO: 317225 - protein, 109 aa, Zea mays
  Clone ID: MRT4577_52383C.1.pep
PAGPGSSTQQSTHALRRHMGARTHTHQASAPMVYYQEGDYCSGGGEVGGPGRLRAPLRRRPATRRSREVRGGRHGTYAPAPTTTTTMITTKSTASWRVETSARGGHQRL

SEQ ID NO: 317226 - protein, 155 aa, Zea mays
  unsure (1)..(155): unsure at all Xaa locations
  Clone ID: MRT4577_52384C.1.pep
RGKKTGPGPRGALGFPPPKPGGGRGAVPPLGGKKKRDSRGPRGFEPPPGPPKIQPPPPRGNQGGPFSRPGGGNPPGPNPPXVXPPSPSRTGGSPPPSFGPFRPXPPGXKSPGERFPPGXPNPKSLALGPXDLAPPXLFGRKPPXPGPFGLGPPPE

SEQ ID NO: 317227 - protein, 84 aa, Zea mays
  Clone ID: MRT4577_52385C.1.pep
FKNPPPPRKNGLMPRQQTVGLGLECFFFGGAPVKTWLPLPKTLPCGRVCKFSANFVLGGPIGPVLKPNGRAKCHWVGAAFPETM

SEQ ID NO: 317228 - protein, 81 aa, Zea mays
  Clone ID: MRT4577_52386C.1.pep
GGPLPFLFSQENHRANKHTTDNQDTKTAGQKHSQQNRTPNISNPTTRLTTGLGKKQAEQQHKSHRGLQGYNTQNCQGGPSF

SEQ ID NO: 317229 - protein, 74 aa, Zea mays
  Clone ID: MRT4577_52387C.1.pep
QGLSIRLVRRVHPVTAPRRGQACCLRRALVTVPATWCCGAPRAWVPSVELDMVDPFRDWLSLLFVYFVTFMAVL

SEQ ID NO: 317230 - protein, 85 aa, Zea mays
  Clone ID: MRT4577_52388C.1.pep
QQCCHQSRQVGPQPRCQAIFGLVLPSILPHHRQIGRVAWLLSAQIVQHLTAMCGLQHRTPCPSPFAVGVPLFCNFVLWFIRWLAS

SEQ ID NO: 317231 - protein, 99 aa, Zea mays
  unsure (1)..(99): unsure at all Xaa locations
  Clone ID: MRT4577_52389C.1.pep
PAAVPLIQRILEATGDVVTDQYYERLSPLVPLKSPLGSFSNIKAGDCLVTFSRRGIYKHKKRIERKGKHLCSVVYGSXPPETRTKQATMFNDDTSDLNV

SEQ ID NO: 317232 - protein, 111 aa, Zea mays
  unsure (1)..(111): unsure at all Xaa locations
  Clone ID: MRT4577_52390C.1.pep
IPPLTSLLTSKPXSPTNXLLXNNLSFHPQILFXINSXYFIKXPFNXXFXKSXKXXISYPPPLXKIHXPXXXLLPPHLXLXTKIQFPKKXTPSXSXXXXTIPXLXFPTSPXX

SEQ ID NO: 317233 - protein, 84 aa, Zea mays
  Clone ID: MRT4577_52391C.1.pep
LFLTHRNASTLPKTQQHFFPPLPKSQKDQGTEETLRFQSGTGEINGRRRGGLVAVVPVEAAGQAADHGWDPAATHHGHRLERRT

SEQ ID NO: 317234 - protein, 106 aa, Zea mays
  Clone ID: MRT4577_52392C.1.pep
MDAAGEASSPSSPSKLRDKLRTTVCCCFGAGGGPERTRWRRRGAAAGEFRYDALSYALNFDEGDDDDAYADPAAVFRYRNFNARLPSSPAAAAAVGTQRQHTTAIA

SEQ ID NO: 317235 - protein, 84 aa, Zea mays
  unsure (1)..(84): unsure at all Xaa locations
  Clone ID: MRT4577_52393C.1.pep
AFTLEEDTFSYCTYIRGGXVREVFPPKVLNFKTFEEAIKGPGEFLMSDFFKFDRPPFVHLAFQALDKFMTELTRFPIAGSTYDV

SEQ ID NO: 317236 - protein, 38 aa, Zea mays
  Clone ID: MRT4577_52394C.1.pep
DWSLGHSLLYLDSSPFTPVQSGFESRGCTSATQGREER

SEQ ID NO: 317237 - protein, 147 aa, Zea mays
  Clone ID: MRT4577_52395C.1.pep
AVETSRRPVKRTLSLPRRSSLAHPRPHSEVFHRRPGRQARPPRPPAPGPTAGRCCLLAWLPHAARPPPARKTSAGKLVAQAPTRLVRICRENMCIIPASATQRAGLCLCLWTAAGKLGYGAFPHFFLELCPFQIFLCYGPASLTVQL

SEQ ID NO: 317238 - protein, 116 aa, Zea mays
  Clone ID: MRT4577_52396C.1.pep
NLEPRACVVGHRPRSRVARPSSYGPTNIASTVCRHCGGATETDSVPAPLSGGTHPLSYHVISPLLEAPLPPTTLGEGGDGEVDREEAELKSGSGRSTDGRVTVRQIKLASDLRVFG

SEQ ID NO: 317239 - protein, 119 aa, Zea mays
  Clone ID: MRT4577_52397C.1.pep
APDGGPLSARRRPRNSGGSTLMCGCAAFPCPCQRVPVCNSAPFLGPGSGSAPRRRLSSWLTTLPHPRAVPSRKTIRRLSVRAFHFLFGRQFLCGHASNSPSPKNLCSPSDPNLCPLCSF

SEQ ID NO: 317240 - protein, 72 aa, Zea mays
  Clone ID: MRT4577_52398C.1.pep
THKIFQTKDFVDRKVGLALKLADHFEHHEPETKKLMLPGSFDSLLQNSPYAEYSMIQKWKKQIDSSKRWSGF

SEQ ID NO: 317241 - protein, 74 aa, Zea mays
  unsure (1)..(74): unsure at all Xaa locations
  Clone ID: MRT4577_5239C.1.pep
EXPVDRGVPTQPIYLLLQQCLPGALLPPTGWIYTCCSNGTTARGMLTTTSNNSGFNEGEKHLRFVADQKPEQEN

SEQ ID NO: 317242 - protein, 76 aa, Zea mays
  Clone ID: MRT4577_523C.1.pep
QAPRTFPRSTHTALAGRHAPHDQSKLPTHTITSNNFTTQANAAAFQQYLLFSSVHDTIDKLLAFQVFIWVLKILIL

SEQ ID NO: 317243 - protein, 146 aa, Zea mays
  Clone ID: MRT4577_52400C.1.pep
KKAGKKTEATGGKPLAKGAETTRENTPPKGQKAPPKGGAQKPKRPGDRAERRKGRAKQGRQRGKGGRGPQPSKPGNATENPGPRTQKKGQKKKIRGPKKEAPRREPPRTNPRSFKSGLSLFFFFFFLFFFFFFFFFFFFFFFFFFL

SEQ ID NO: 317244 - protein, 79 aa, Zea mays
  Clone ID: MRT4577_52401C.1.pep
GGKPPDKININGGGDTISGKKGPGPSPTIKGDFGQQKKSPKPPYEEIGPPTHNLPTPPYGGDRPPGAKEIPPLTNFIHN

SEQ ID NO: 317245 - protein, 98 aa, Zea mays
  unsure (1)..(98): unsure at all Xaa locations
  Clone ID: MRT4577_52402C.1.pep
MQIFVKTLTGKTITLXVESSDTVDNVKDKSQDQEGIPPDQQRLXFXXRQLEDERTLAGYNIXKEXTLRLVLXLRCXTIDKVKTRXGKEIEIDXESTDS

SEQ ID NO: 317246 - protein, 51 aa, Zea mays
  Clone ID: MRT4577_52403C.1.pep
THYVFLMGFYPQDEYSQHLLYRLNNKVREPWPETKDMGLSTTATFGQRAIL

SEQ ID NO: 317247 - protein, 115 aa, Zea mays
  Clone ID: MRT4577_52404C.1.pep
MASASVSAPVAGAGAGGGKDEELTDLVRRLMDALARYADRLPFDLDRQVRARICDLHLRSVDAFLTSPCLVARDLLGPAAQRRRLVWERLYSEYYCLGSVVLFSGKILGSQSSSI

SEQ ID NO: 317248 - protein, 101 aa, Zea mays
  unsure (1)..(101): unsure at all Xaa locations
  Clone ID: MRT4577_52405C.1.pep
MDDAHDRTVIPRDNNCLFNDGRYVIEHNPNKDXELRQVIRATAXGDPEKFSESGCEPPNEADGACILYPEKXPGAIELYMLSEYYGREIAIYDIHTTRCDL

SEQ ID NO: 317249 - protein, 302 aa, Zea mays
  unsure (1)..(302): unsure at all Xaa locations
  Clone ID: MRT4577_52406C.1.pep
GEQAPQFRSSSSTSGSPSPHCLPIRNAFAEERDRLEQRLSKPKDLSSRKTPGIFMQYKYYLGRVTKQRLREARLLMVDFLILGLAGICLGTIAKLSDKTFGMPGYIYTIIAVSLLCKIAALRSFSLERLQYFRERESGMSSLAYFLARDTIDHFSTVVKPIIYLSMFYYFNNPRSTIADNYIVLLALVYCVTGIGYTFAICFSPGSAQLCSALIPVVLTLLSTQKSTPTLIRRLCYSKWALEGFIIVNAKKYPGVXLITRCGLLFQSQFDIHNYKLCILILFMYGLFFRMVAFAAMILLKKR

SEQ ID NO: 317250 - protein, 65 aa, Zea mays
  unsure (1)..(65): unsure at all Xaa locations
  Clone ID: MRT4577_52407C.1.pep
ITLEVESSDTIDNVKAKIQDKEGIPPDQQCVIFAGTVVEXGRTLAEFHIPKESTLHLVLRXRGGQ

SEQ ID NO: 317251 - protein, 70 aa, Zea mays
  Clone ID: MRT4577_52408C.1.pep
KLIETGSLFVSVIVTAFTLQDGSSHYLKGILLLLCYIVIGACFFVTRQPASNNNGAGLSLPTGTLSAQAA

SEQ ID NO: 317252 - protein, 133 aa, Zea mays
  Clone ID: MRT4577_52409C.1.pep
ALEGIRPVEAPFEEEEELGFVAAGSPVQAASGSLVAASPQGPPVAPVSAPGLPPPVASSGSRLAVTAAVAPLFAVAPPAADPPVYNQEARESLAGLGVIASTIESGIRPWLQALNGRLRQAEHGPSDWERQLA

SEQ ID NO: 317253 - protein, 56 aa, Zea mays
  unsure (1)..(56): unsure at all Xaa locations
  Clone ID: MRT4577_5240C.1.pep
LSHGCPGXQARCPPDNSGVLXLPPGYAWVXHHILKHHPILPSGAKSLMPCAASPRX

SEQ ID NO: 317254 - protein, 44 aa, Zea mays
  Clone ID: MRT4577_52410C.1.pep
ISYCYICLIIISYINLCTRGLFQNWKTYLLNFKVERILAIYIAS

SEQ ID NO: 317255 - protein, 82 aa, Zea mays
  unsure (1)..(82): unsure at all Xaa locations
  Clone ID: MRT4577_52411C.1.pep
XXTLXXFSLXXNNXXIXXFXXXXLIXXFFFXXXIXLXXXYIYIYXXXXXXXYIXXXIRXXXXYXXXERERERERERETRTSP

SEQ ID NO: 317256 - protein, 136 aa, Zea mays
  unsure (1)..(136): unsure at all Xaa locations
  Clone ID: MRT4577_52412C.1.pep
PGLFPGGAPPGXRRAPSCPPPVKSPPXPVGEGPQGPPPGGVLPKRPGVSYAWLPPPPXPVGSPQPGXLKVLPGVNPLGGLLVPGGXPCPGFPPQGFGPPPWFFVPGPGXFFPPPPKPAVVPPKLLLPPGFLGVFPL

SEQ ID NO: 317257 - protein, 149 aa, Zea mays
  unsure (1)..(149): unsure at all Xaa locations
  Clone ID: MRT4577_52413C.1.pep
VTLLFLYVTAATVIGYKDHTDACASGAGTDSGXGGAGVLGIEWALRGMIFVLGYCADVISVGHMDRADTFGLFLARKVSLVRSLLYMGAQCLGAVCGVWLGMAFQCGYFDRYGGRANSLACGYSRGAGLGAEIDGTFELVYTVLYDTDP

SEQ ID NO: 317258 - protein, 191 aa, Zea mays
  unsure (1)..(191): unsure at all Xaa locations
  Clone ID: MRT4577_52414C.1.pep
ISISVLREFLKLITWXKKGFSQAHGDIATAQRARIELCLENHSGSASDDRTESSVAKSNTHHDRAHSSVEFALTFVLDHALIPHMNVAGGAAWLPYCVSVRLRYSFGDNSHISFLAINGSHGGRACWLQSEDWERCKQKVARAVETVNGTPAVAEPGQGRLRMVAEMIQKQLQLCLQQLRDGPLSAGSTAS

SEQ ID NO: 317259 - protein, 124 aa, Zea mays
  Clone ID: MRT4577_52415C.1.pep
MSILNSNVSTDKALPPAPPELQSAHDRVAFLTARLDSLAHRRNNINKSIKQMTELMPTDRILSSTEVMRKREIEKKKVEGLKEELAEIQREEHDLGLKLYRANKRAEREAAFEPSTLWVRRVTS

SEQ ID NO: 317260 - protein, 84 aa, Zea mays
  Clone ID: MRT4577_52416C.1.pep
HASADAWADARVHLGRPAALARRFPRRFTFTSHPTLATCRTARTSPVPLNRTKISYSPADPSLVLRHRTTRSLPTHGVLILFNT

SEQ ID NO: 317261 - protein, 86 aa, Zea mays
  Clone ID: MRT4577_52417C.1.pep
LITSLVVQIAHKFSTKTKNDTILLSLLKAFRLSYQRLDFAIYPWVGCCTRGIYSRTLAGFLRITGPDSSCCRTYNVNIWFCPYHFQ

SEQ ID NO: 317262 - protein, 53 aa, Zea mays
  Clone ID: MRT4577_52418C.1.pep
MGGGSNLPQKRKGLLKTVCLKKKKKKKKKKKKKKKKKKKKKKKKKKKKKNSRG

SEQ ID NO: 317263 - protein, 122 aa, Zea mays
  unsure (1)..(122): unsure at all Xaa locations
  Clone ID: MRT4577_52419C.1.pep
MANTPGILALGLLALMYAVVGPDDEHNCILNANFCCSKFGFWGTTDDYCRDRCQYGPCRSGXSSRGXCGSGGGXSSNVTNVVTDTIFNGIKNQATSRCEGNNLYTLSAFLSAVNPYPGLNHC

SEQ ID NO: 317264 - protein, 272 aa, Zea mays
  unsure (1)..(272): unsure at all Xaa locations
  Clone ID: MRT4577_52420C.1.pep
MAVPLPQQPGPYTSGSLGYFHLRLVGPAPALLLVRTDRLYSLSHSRRCGYRFRLRLLANPHRRRAPDLLLSTYGCDLRLTHRSGIGSPSVNGRPLRAGTPTELAVGDEVSVLRCGARYGFIVERFVSCGGFEVDAASTAGSCAEGLVFRAESLRKRLRAISESEDPLSLLRDCSGIGNLDVDIGPKKWRQDGAAELCLDNPITPASKENVLQGDCNFERDNLTTTLMLXMMATQSSLMGSKDAEMTVQXSQDVEXRNEEQYHSEGCYSDGST

SEQ ID NO: 317265 - protein, 61 aa, Zea mays
  Clone ID: MRT4577_52421C.1.pep
QMHMYIESHAAITPESFNSAFVGFWCLDDNTIKGLIKVFSVGQELSVKHKKNKQDPENYIP

SEQ ID NO: 317266 - protein, 138 aa, Zea mays
  unsure (1)..(138): unsure at all Xaa locations
  Clone ID: MRT4577_52422C.1.pep
MAGRQRIGRQYYEEPRGFRDGPPPRLARERSISPRRFEGELSSRHGELRRIRDDNQHLVDEIVGLRQAMSRLKEDLHSSSQVIPNLRAEKEAELRELTQRNLKLEAELRSSXPLRQDDLQLRSEAGSLESLRQELIAK

SEQ ID NO: 317267 - protein, 51 aa, Zea mays
  Clone ID: MRT4577_52423C.1.pep
PSCGNLFSFILLKVELSVIMHPVCVTANVLLVAQRLNVWPLHISVVCWTPP

SEQ ID NO: 317268 - protein, 138 aa, Zea mays
  Clone ID: MRT4577_52424C.1.pep
MSKEADDELDLENFEMMPMLDVDDPSFGFGTLVDTAPAPYGSAVSVSASAATSPCASSKKKKKKKTTKAAAGGGAEAPLPLPSPSPSSSTTTTNFSSGDSGEQQSNNEQGSGRRAGPGELRDDADARPARAARDRHGP

SEQ ID NO: 317269 - protein, 248 aa, Zea mays
  Clone ID: MRT4577_52425C.1.pep
TRPALLSRLIESLPADAESLIKWVVEVRRKEEGGPSLNKEEKERLFLKENVLKQVRDTRLFTIVHDLQYANKPCYNCSSSLGKDSLTRIAAVVCCQGAAMLSGNLVPRDAFCCRETSFECVQANGDGLKTVISGSVVCEGSEQGVDMLLPMSSPGASSCNSNLKSNAVKYPSSVDVLTVLLLALHPNTWLGIKDEKLKAEFQTLISTDSLPDDLKREILHLRRQLYYLKACKEEEWEDAEQPSPKQQC

SEQ ID NO: 317270 - protein, 58 aa, Zea mays
  Clone ID: MRT4577_52426C.1.pep
NPHLIPPHYLITPHHLFPITYHILHFQHYKSILFAITSTTYKTITPTYLIHSHSTPIY

SEQ ID NO: 317271 - protein, 145 aa, Zea mays
  unsure (1)..(145): unsure at all Xaa locations
  Clone ID: MRT4577_52427C.1.pep
RRLEARPCGTASRVMKKXPGXTRMPSIXTGSHKTIKDYLHNKLKKSELHIVSVALQVVMHDRTYCGEIASDASAKKRKDIMVHRAIINIVVINNITYVLTQVGTAYDRDHGICGNYILASRAMMPNYSRVCAYRRSPSIPDLSTF

SEQ ID NO: 317272 - protein, 276 aa, Zea mays
  Clone ID: MRT4577_52428C.1.pep
PTRPPTRPGQGRYRREHDSNRRTSDVRKWDGDSSEFEASDEEWDSGDDRGNALGFDNDRGSTDEHPRRFGSMRNEKSRSTRAQDFVPRGGVGEGKGFNRSYGNPDADVHNRGQGRHRRDNKRTSDARRWDDNSEIEASGEECGSGDDRDSVLGLNNDIDTGDGHPRQFKSMRNERSRSSGRQISIPGGFRGSNRIPGNSADASDGTMFRGSNGDESDTEDDDLWMLDYKGEEANSRAPKVNFPNFHSSSEDSDDNRKNGGKIGKTKKNTDESWDSD

SEQ ID NO: 317273 - protein, 76 aa, Zea mays
  Clone ID: MRT4577_52429C.1.pep
NHREFSNSNGWARQGSGVNCTIGKRSADSTQKECTASELCAAMATKMNSSVELDSNVLLFRIKHQHLLQPIPFPGF

SEQ ID NO: 317274 - protein, 69 aa, Zea mays
  unsure (1)..(69): unsure at all Xaa locations
  Clone ID: MRT4577_5242C.1.pep
DMPXTITXIFXFESXXMHSXSFLALPDLSFINYLYYIIINVIQLFFFKKKKKNLPLYIIQPYLRLHSTS

SEQ ID NO: 317275 - protein, 149 aa, Zea mays
  unsure (1)..(149): unsure at all Xaa locations
  Clone ID: MRT4577_52430C.1.pep
PFPFKGVSKVPFQFPPLFWGKRLPSKNPGVGLPSQREIFFGGGLPSLISGEVDFPISFGPPGPGIHPPPPPLPGQXPSPGLIFLTPPPGGGPPWVPPXKRAPPGGRFFFYFPFLGPWWDPPFFWGFDWFGNPPPRPPFFPGQICPPPSI

SEQ ID NO: 317276 - protein, 172 aa, Zea mays
  unsure (1)..(172): unsure at all Xaa locations
  Clone ID: MRT4577_52431C.1.pep
REFGPGTFFRHSPPGGPPVPFPRTLRGPRPXGGXRTRPFSRPCWGPPSGGPGFPRPRNLPPPRGGWGSSPRRPPRPXTPPRGGPVSLPPLGKERXGGSEPPPXKKNPPPVGGPGVSPXPLGLGAPGSGLEKPPPGAGPPSRFVCPPFGVGFPPFWSGSCFVFPVGRFGDPFN

SEQ ID NO: 317277 - protein, 84 aa, Zea mays
  Clone ID: MRT4577_52432C.1.pep
CFILNSNTLESNSTLLFILVTMAAHNSEAVHSFWVESADLFPIVQFTVLYSSGLGIQRLSSPSFGIGKFPMILHTKFLSIQTRI

SEQ ID NO: 317278 - protein, 95 aa, Zea mays
  Clone ID: MRT4577_52433C.1.pep
IDKKISMGTEDCRQRTRNMGGDISGWSARQSNQMPVTTNETNRYNLHRPQPNTYLKSPIKKRNQQIMKTQEQIQNPIPRMKSVDPHRREEKASLR

SEQ ID NO: 317279 - protein, 88 aa, Zea mays
  Clone ID: MRT4577_52434C.1.pep
GPLRSLRLILNMLVSLRKAGHEQGAMAAPPISAYKPTVALALALPTAAPPCSEGATASGAAAARLPGPLREPREESSLHRHNKVAELL

SEQ ID NO: 317280 - protein, 46 aa, Zea mays
  Clone ID: MRT4577_52435C.1.pep
WIVAWRATCYKRSSMAGRRTCCIMAVSGSQRSGIVRGCASLSSGRR

SEQ ID NO: 317281 - protein, 68 aa, Zea mays
  Clone ID: MRT4577_52436C.1.pep
CFNLACCKCYFKPSGVGFFLWGPKMGEFFFYFFKIKGGVWIGIKKNWKEGFWVPVSKEWVGPKVWSFF

SEQ ID NO: 317282 - protein, 47 aa, Zea mays
  Clone ID: MRT4577_52437C.1.pep
AGKQNCAYKNNRVKASLVSKTYSGSSIKIHFFKALVSLTRTLNFLVL

SEQ ID NO: 317283 - protein, 161 aa, Zea mays
  unsure (1)..(161): unsure at all Xaa locations
  Clone ID: MRT4577_52438C.1.pep
IRHEALSDSPPVSPEIDDAKYCRAVSTPKPQAYRAGNKTVGRWLKDRKEKKKEETRAHNAQVHAAVSXSGXVAAAVAAVAAATAAASASGKDERAARTDMAVASAATLVAAQCVEAAESIGAEREHLEAVVGSAVNVRTPGDIVTVTAAAATALRGAATLK

SEQ ID NO: 317284 - protein, 131 aa, Zea mays
  unsure (1)..(131): unsure at all Xaa locations
  Clone ID: MRT4577_52439C.1.pep
TKFRASFGELKXLVAAKXGLHPADQKXLYKDRERDSKPFLDTGGVRDRSKVVVLEDPEVRSRRIICERRSGXHLHKTDRAXPMVTFEVXDKLAPNVATLNASVPMEENVADNDVVHVTDLIMNKLLMLAHH

SEQ ID NO: 317285 - protein, 67 aa, Zea mays
  Clone ID: MRT4577_5243C.1.pep
MEPLSKKVFFSIRVDPFVGKSPKHPPKEPKRFNPKKFKYKQRKAIFFQRFNQFNSWGGANSPIKDSE

SEQ ID NO: 317286 - protein, 184 aa, Zea mays
  Clone ID: MRT4577_52440C.1.pep
VPGPPPRLGANPSPFKKAPRLEFLWPPPPYFFSRLFFFLRSQPACLGPTRAPGGNQPVGVPRPFWAVPPVYFLNCQMFPLGNFWGLRLAPCLMGPPPKNSGPVEFLPFFPWLVGPLPPWGGGGPFSNWVFPPPPVHLFLPRLSKNLKIFLWGKWLLEKKKKKKKKKKKKKKTTQKKKKNPPPPP

SEQ ID NO: 317287 - protein, 141 aa, Zea mays
  Clone ID: MRT4577_52441C.1.pep
SRLSRKKCATCAQCRPKGTALARSNCNAAAGRPSLLVAPVIAFGSARRSNCNCNGVIDRRRDKSRSGRVRRTYDLSGCDLSGSEAASAQVPRRPKHDHLLPTRVRRASQKSPAEGAATEIAQRRHSREEKTRRGQRDSGPT

SEQ ID NO: 317288 - protein, 136 aa, Zea mays
  unsure (1)..(136): unsure at all Xaa locations
  Clone ID: MRT4577_52443C.1.pep
MTKEKHHRDWILRRCCGSISACILTXAAVRGFLELVIFLRLRPSKPSFYLQDVHLRSIHLQEPALSLDLQQTIPSRKPXNERKGVHYKTLDWYTSXRHDKATIPVPMTAIYQCHNDQPQQSAGMSPDARPAFYHSS

SEQ ID NO: 317289 - protein, 60 aa, Zea mays
  Clone ID: MRT4577_52444C.1.pep
SAHPLGALRAQPSDFVRASLPPAHSSFVPISLRHVPLPLHALLCQCRVLVRPALHALLAH

SEQ ID NO: 317290 - protein, 115 aa, Zea mays
  Clone ID: MRT4577_52445C.1.pep
IITPFKKKMCDLCSVSSERHRARSLQLQCRRRPPVAFGSACDRYDLSGCDLSGSEAASAQVPRRPKHDHLLPTRVRRASQKSPAEGAATEIAQRRHSREEKTRRGQRDPGRLGGY

SEQ ID NO: 317291 - protein, 130 aa, Zea mays
  Clone ID: MRT4577_52446C.1.pep
SRLSRKKCATCAQCRPKGTALARSNCNAAAGRPSLLVAPVIAFGSARRSNCNYDLSGCDLSGSEAASAQVPRRPKHDHLLPTRVRRASQKSPAEGAATEIAQRRHSREEKTRRGQRDSGPTSPAGLEVPN

SEQ ID NO: 317292 - protein, 135 aa, Zea mays
  Clone ID: MRT4577_52447C.1.pep
LHVTMCDLCSVSSERHRARSLQLQCRRRPPVAFGSARRSNCNCNGVIDRRRDKSRSGRVRRTCDLSGSEAASAQVPRRPKHDHLLPTHVRRASQKSPAEGAATEIAQRRHSREEKTRRGQRDSGPTSRGWASFHA

SEQ ID NO: 317293 - protein, 178 aa, Zea mays
  Clone ID: MRT4577_52448C.1.pep
DGKSSDHSAAIKDLVGGYYVAWDAIKFNFPASFSITMLSWSVIEYSAKYEAAGELDHVKEIIKWGTDYFLKSFNSTADTITTLAAQVGLGDTSGGDSPNDHYCWMRPEDMDYDRPVTECHSCSDLAAEMAAALASASIVFKDNKAYSKKLVHGATTLFKFSRDQRGRYSAGSSEASIF

SEQ ID NO: 317294 - protein, 54 aa, Zea mays
  Clone ID: MRT4577_52449C.1.pep
CDILSGFNMSDQTLYHVSTVRIAFLDHHFFLNSFQLQVETIRNKTMVGKGYILK

SEQ ID NO: 317295 - protein, 73 aa, Zea mays
  Clone ID: MRT4577_5244C.1.pep
IRSVSSTLDRSRLSNCSCSVDLSDQLFFVGPSNLCFFCLTFQFHWSIRSLLTLTMPPMVKRYPLIIHYWRLMA

SEQ ID NO: 317296 - protein, 63 aa, Zea mays
  Clone ID: MRT4577_52450C.1.pep
AFARVEARCGYVVNAGPKGLFKPAQSTIIQTLLSPSLYFFYFLTNLLYSLFLFYYLLKSSSLY

SEQ ID NO: 317297 - protein, 133 aa, Zea mays
  unsure (1)..(133): unsure at all Xaa locations
  Clone ID: MRT4577_52451C.1.pep
SSPPAVANAPTNLQQKLLQQIVPALTQQVVANPVAYLQKLFPFNQLIMSNFVGSLQKGQQLLNPLAGANPLVAPFQKKQQLFPNNRFSLINPVLXSRHHPIVGGPFFRFQMKGTRKGAPQPGMCFPKKNQKIG

SEQ ID NO: 317298 - protein, 117 aa, Zea mays
  Clone ID: MRT4577_52452C.1.pep
LHFIFSLFELVFLFLNTLMLCTEISIVNKQSAIKILIYSLRMSAGFRKVLREVASRGRHVERVKNFFRNMYICAKLFRNLTPFYFLCYSRLCFLSFPMTCYAFALYLACLKLLHKTC

SEQ ID NO: 317299 - protein, 200 aa, Zea mays
  unsure (1)..(200): unsure at all Xaa locations
  Clone ID: MRT4577_52453C.1.pep
MPQNLPPILAHIGMAAPNSNDHCIASDTDPSVEDXSPSQAMLRRVXQEHMTLSSNPGVRQLKLXQMHAAGQLRHVHHISLPHLLIQPLTPLSQVRADSXPLPVDFQWLTCEIHDHLLLXDLYSLXLAHNXYVEHYENMYRFNYSPAFLCCAXLKPPXFFPDWNICVHGDESNNVVNFIWGIXTLIRALEDVFRMLEINFL

SEQ ID NO: 317300 - protein, 114 aa, Zea mays
  unsure (1)..(114): unsure at all Xaa locations
  Clone ID: MRT4577_52454C.1.pep
KGGKPKGPRPKPKSQGATEKNPGPAREGPKKTRPGGAPEGTPPPPGPKKPPPGPREQKGPNRPPPETQKXPRPGPQNGXKPGAPLKGPPRXGKKSGTPGGPKKNPGKRGRGGQK

SEQ ID NO: 317301 - protein, 86 aa, Zea mays
  Clone ID: MRT4577_52455C.1.pep
AVGPPFHNNNPSGPFPKPPVRGPGIKKPLPLPCLEENSPPSDQPLTSLLKPVFIRLRDHSRRFDPSSTTPPRTKNHFLPKDISESP

SEQ ID NO: 317302 - protein, 100 aa, Zea mays
  Clone ID: MRT4577_52456C.1.pep
RQQWYGGVPEVSCLLTLSQGRSPGGREVLLLVSPQQVINGLVLVIEHSGGSPGESGSRQCPGCLRGTRNQGRHVCSWLGSRRRIPEPQQGRSRGSVRRRG

SEQ ID NO: 317303 - protein, 58 aa, Zea mays
  Clone ID: MRT4577_52457C.1.pep
SRRSSQASQSPLLGLHGRRAQVPGLGQGLEPRRRLQGAPGVQSRGGRVPAACAEPWRP

SEQ ID NO: 317304 - protein, 119 aa, Zea mays
  unsure (1)..(119): unsure at all Xaa locations
  Clone ID: MRT4577_52458C.1.pep
HKVCFARPSHPEGFISCPRCGHEVGFRLRSKQKGRVCHYPLPKATLTCGDFAPDRSSCGAYYERATRQVLRECFRSPSSPACIKCVCFGFEAYLFKDCXANTCLGFFRPSEGTIKALRV

SEQ ID NO: 317305 - protein, 64 aa, Zea mays
  Clone ID: MRT4577_52459C.1.pep
HYSTWINILTPAPNVQGQAEPEIGATADDRHLAAESLDKEKVAASATANQQDVAAEETEAPTDA

SEQ ID NO: 317306 - protein, 207 aa, Zea mays
  Clone ID: MRT4577_5245C.1.pep
MDRARNFIPGPNQELLDIKPIRSLAPMFPAPMGVNINQSSTPPLVCVTPVGQFPTGFGGGNLPAFGSFTTFSVTANGFSQAGTSANGAIDATPISAYKTRSSGATALNGDDEPYSGNQTSASGRKAKKRSAGLSADGSDGVKVKRPKPIYKNLVAGKELAFLPASPNNPREIVEAVHMTFEALRRRHLQMDETQDASRRAELKAGAI

SEQ ID NO: 317307 - protein, 80 aa, Zea mays
  unsure (1)..(80): unsure at all Xaa locations
  Clone ID: MRT4577_52460C.1.pep
MSDGDDAARRRTAAVTDYRKKLLHHKELESRVRTARENLRAXNKEFNKTEDDLKSLQSVGQIIGEVLRPLDNERLIAKAS

SEQ ID NO: 317308 - protein, 58 aa, Zea mays
  unsure (1)..(58): unsure at all Xaa locations
  Clone ID: MRT4577_52461C.1.pep
MATKIXALLTXLALLVIAADAFIIPQCSLAPNAIIPHFLPPVTTMGYKHPTMQTYKLQ

SEQ ID NO: 317309 - protein, 49 aa, Zea mays
  Clone ID: MRT4577_52462C.1.pep
MLRIASRSGLLGGRRCYSAAAKGGLSISGVSDIIAVASGKGGVGKSTTA

SEQ ID NO: 317310 - protein, 88 aa, Zea mays
  Clone ID: MRT4577_52463C.1.pep
NKQKAGAFTWGQKHHTHPNSLPTRSKFTLSPLFFQILQPPRGPAPPCISLIGGGEHHRHHPWTNRRQGGLISQGVPKSIHWKRKSWGG

SEQ ID NO: 317311 - protein, 206 aa, Zea mays
  Clone ID: MRT4577_52464C.1.pep
MVSGSGVCAKRIVVDARHHMLGRLSSIIAKELLNGQKVVVVRCEEICMSGGLVRQKMKYLRFLRKRMNTKPSHGPIHFRAPSKILWRTIRGMIPHKTKRGEAALARLKTYEGVPPPYDKTKRLVIPDALKVLRLQPGHKYCLLGELSKEVGWNYHDTIRELEEKRKEKAKVAYERRKQLAKLRLKAEATAQEKLGSQLDILTPIKY

SEQ ID NO: 317312 - protein, 155 aa, Zea mays
  unsure (1)..(155): unsure at all Xaa locations
  Clone ID: MRT4577_52465C.1.pep
MVFACSDSRVCPSVTSGPXPGEVFNVRNIAAMVPVYDKTNHSVIGSAIKYIACAFKVEGLCGHXHSCCGDIXELVYLQDGVTDHFHFHEXELGPYSLPRSRSRESXRSAGIQDQGYIXHKARGNLSLQNLKIIDFIXDGLLNGVLQVVAGHYHFV

SEQ ID NO: 317313 - protein, 75 aa, Zea mays
  Clone ID: MRT4577_52466C.1.pep
TLATFSLIIGYLADHWNMATKELLSRKVLQNIKKHKLKQLIDDTIGSGPAESSLINSGLEVCFGPSLLPKSISDV

SEQ ID NO: 317314 - protein, 206 aa, Zea mays
  Clone ID: MRT4577_52467C.1.pep
MVSGSGVCAKRIVVDARHHMLGRLSSIIAKELLNGQKVVVVRCEEICMSGGLVRQKMKYLRFLRKRMNTKPSHGPIHFRAPSKILWRTIRGMIPHKTKRGEAALARLKTYEGVPPPYDKTKRLVIPDALKVLRLQPGHKYCLLGELSKEVGWNYHDTIRELEEKRKEKAKVAYERRKQLAKLRLKAEATAEEKLGSQLDILTPIKY

SEQ ID NO: 317315 - protein, 206 aa, Zea mays; identical to SEQ ID NO: 317311
  Clone ID: MRT4577_52468C.1.pep

SEQ ID NO: 317316 - protein, 195 aa, Zea mays
  unsure (1)..(195): unsure at all Xaa locations
  Clone ID: MRT4577_52469C.1.pep
MVSGSGVCAKRIVVDARHHMLGRLSSIIAKELLNGQKVVVVRCEEICMSGGLVRQKMKYLRFLRKRMNTKPSHGPIHFRAPAKILWRTIRGXQQRHAARIRLISSLRRALWLVRLMFAVADLXMIPHKTKRGEAALARLKTYEGVPPPYDKTKRMVIPDALKVLRLQPGHKYCLLGELSKEVGWNYHDTIRELEE

SEQ ID NO: 317317 - protein, 75 aa, Zea mays
  unsure (1)..(75): unsure at all Xaa locations
  Clone ID: MRT4577_5246C.1.pep
PAAEVVGRXQDDGDFXALRRAIVREVKDNEXLRXKIISEVKQSVVLQEDGSERMKLKDLSDAIFQDIGSKIMGQI

SEQ ID NO: 317318 - protein, 206 aa, Zea mays
  Clone ID: MRT4577_52470C.1.pep
MVSGSGVCAKRIVVDARHHMLGRLSSIIAKELLNGQKVVVVRCEEICMSGGLVRQKMKYLRFLRKRMNTKPSHGPIHFRAPSKILWRTIRGMIPHKTKRGEAALARLKTYEGVPPPYDKTKRLVIPDALKVLRLQPGHKYCLLGELSKEVGWNYHDTIRELEEKRKEKAKVAYERRKQLAKLRVKAEATAEEKLGSQLDILTPIKY

SEQ ID NO: 317319 - protein, 206 aa, Zea mays; identical to SEQ ID NO: 317314
  Clone ID: MRT4577_52471C.1.pep

SEQ ID NO: 317320 - protein, 206 aa, Zea mays
  Clone ID: MRT4577_52472C.1.pep
MVSGSGVCAKRIVVDARHHMLGRLSSIIAKELLNGQKVVVVRCEEICMSGGLVRQKMKYLRFLRKRMNTKPSHGPIHFRAPAKILWRTIRGMIPHKTKRGEAALARLKTYEGVPPPYDKTKRMVIPDALKVLRLQPGHKYCLLGELSKEVGWNYHDTIRELEEKRKEKAKVAYERKKQLAKLRVKAEKAAEEKLGSQLEILAPIKY

SEQ ID NO: 317321 - protein, 93 aa, Zea mays
  Clone ID: MRT4577_52473C.1.pep
GSHLPGGTRGFVYPPQMGNIESLTKEFVLKLELGFLGGKFCGGGQQLLLVPVGLTCVSWKKKKKGQVGGGPSPFKKKPPLSRLKIGFKKGVLV

SEQ ID NO: 317322 - protein, 50 aa, Zea mays
  unsure (1)..(50): unsure at all Xaa locations
  Clone ID: MRT4577_52474C.1.pep
MGQEKTHINIAVIRQLDSGQSSISGQLISXLRGIDKRVIEKFEKEAAEMN

SEQ ID NO: 317323 - protein, 112 aa, Zea mays
  unsure (1)..(112): unsure at all Xaa locations
  Clone ID: MRT4577_52475C.1.pep
XFHGVLNHASLELKIARAIFLVVRPALACKSCVLAACSPCKHQGVSMSYQRRTLYLRDRSGVEQGDVQPSLQRVANCGRQHSLLGRGGEMTRWRLQSVARSIGRTWWSLELA

SEQ ID NO: 317324 - protein, 90 aa, Zea mays
  Clone ID: MRT4577_52476C.1.pep
RRANDPSFLRQCRPCSRTPCCPGCCSGPPTACGILCSCSPPQQQRLWALDSLLIRIGVACPQRAASWQPIRGTRTKGDRDPAGPQGLSLP

SEQ ID NO: 317325 - protein, 63 aa, Zea mays
  Clone ID: MRT4577_52477C.1.pep
YYCHVLAVLHRCNLYVKNGEWGDRVTAANESSTLLHFFISFSSFSFSGYCYPCHARVPSVSSL

SEQ ID NO: 317326 - protein, 85 aa, Zea mays
  Clone ID: MRT4577_52478C.1.pep
KNNFFFLIFYFFLLIYFFFLYLFFIYTTKQFFIILPTIEPEKTHPKNYKKPRFQPNTQITHKKDSYPSEKEDKPWFYHYFITLLC

SEQ ID NO: 317327 - protein, 91 aa, Zea mays
  Clone ID: MRT4577_52479C.1.pep
MTLWGENYTEAGAPAADATAVPSGNGQTACVTGAAGYIGSKLLKMMLEKGYSLKGTVRHLDDLKNAHVKGLDGIHERLILCKVDLLDYDAI

SEQ ID NO: 317328 - protein, 266 aa, Zea mays
  unsure (1)..(266): unsure at all Xaa locations
  Clone ID: MRT4577_5247C.1.pep
MALSCCLLAGARAAASPSFSSSAAIRRRDHRLLTLSVVPLSLSQRCRHGLRVCCASSTSSSSPPPATPEEPDDYELLDTAGNCDPLCSADEVSSQYFEANYKPKNDLLKALTIIGTALTGAAAINHSWVAANQDIAMVLVFAIGYAGIVFEESLAFNKSGVALLMAVCLWVIRGIGAPSTDVAVQELSQSTSEVSEIVFFLLGAMTIVEIVDAHQGFKLVTDNISTRNPKTLLWVIGIVTFFLSSILDNLTSTNVMVSLLRXLVPH

SEQ ID NO: 317329 - protein, 158 aa, Zea mays
  unsure (1)..(158): unsure at all Xaa locations
  Clone ID: MRT4577_52480C.1.pep
MEAAPMRKASSQASLADPDDFDLTRLLNHKPRINVDRQRSFDDRSLGEISLAGAGTASRGGWGYXRGDGELREHVLPRRRAAVXCGTPASSTRLSFEPHPLIGEAWDALRRSMVSFRGQPLGTIAAVDHSSGEVLNYDQGVARDFVPSALAFLMKREP

SEQ ID NO: 317330 - protein, 140 aa, Zea mays
  unsure (1)..(140): unsure at all Xaa locations
  Clone ID: MRT4577_52481C.1.pep
PRRSTTQTKTDINTGCTASCTXNCVAAIAEEINDREGMVATVQTTADANTAPQGTXXEPXSNDWRGGRNVSCSITPSSNGAAKAVAEVIAELNGKLTGVPTRDATVDDSAVELTERVEXAETKDEIKAAAKGRPEGSLKD

SEQ ID NO: 317331 - protein, 512 aa, Zea mays
  unsure (1)..(512): unsure at all Xaa locations
  Clone ID: MRT4577_52482C.1.pep
VAVDTRRTRGFWFQVEPNQDFHGLVCEGANMLPSKFMEDAFRDRHGKIINIRHLDQVIKSVNRWYQERGLTGLVSYAEILSGGILRLQVSEAEVNNISIRFLDRKTGEPTVGKTQTETILRQLTTKKGQAYNRAQVKRDVETILTMGIMEDVTIIPQPVGDSSKVDLVMNLVERPSGGFSAGGGISSGITNGPLSGLIGSFAYSHRNVFGRNKKLNLSLERGQIDSIFRLNFTDPWIDGDNKRTSRTVMVQNSRTPGTLVHGGDHPDHAPITIGRVIAGLEYSRPFRPKWSGTLGLIFQHAGARDDKGNPVIRDFYNSQLTASGHDYDDTLLAKFESIYTDSGDHSSTMFVFNIEQGLPVLPEWLSFNRLTARLRQGYEIGPARLLLSASGGHMEGNFPPHEAFAIGGTNSVRGYEEGAVGSGRSYAVGSGEVSCRMFGPLEGVVFGDYGSDLGSGPKVPGDPAGARGKPGSGFGYGVGVRVDSPXLGPLRLEYAFNDRQASRFHFGVGYRN

SEQ ID NO: 317332 - protein, 120 aa, Zea mays
  unsure (1)..(120): unsure at all Xaa locations
  Clone ID: MRT4577_52483C.1.pep
XLNGXXFXDKELGVGRXQKXXXXEMELKEKFXXNVQEVAEKFXNXXLYXKNLXXTLXDXXXXXLFXXMXIVLXCKXMXDXNXXSRGSGFXAFKSAEYANRAXTXXKXQXXXXNXXXXCAV

SEQ ID NO: 317333 - protein, 91 aa, Zea mays
  Clone ID: MRT4577_52484C.1.pep
SCSCDVVEMGSVLGLCSMASWIPCLCGSAPCLLCRCCPSGNNSTVTRLIYALFLLVGVCVACVMLIPGMEEQLNKIPGFCENEIGVVPCNI

SEQ ID NO: 317334 - protein, 71 aa, Zea mays
  Clone ID: MRT4577_52485C.1.pep
TGTCSLGTRNKQYQQDCVVGIHPHRLISANSSAIFKGVVNRCKSYGSPPVESSTITVEIKNLRRVGDRIGR

SEQ ID NO: 317335 - protein, 210 aa, Zea mays
  Clone ID: MRT4577_52486C.1.pep
RSLFVFGPFGGNDYNAMLFFGLTMDQARNYTPKIVDTVASGVEQLIQLGAVDIVVPGALPVGCFAIYLTFLPSDDPADYDGHGCLRALNELSVYQNSLLQSRLAALQARYPSARIVYADYYTHIDRLVRSPARFGFTTGAVPACCGAGGGKYNFELDARCGMKGATACRDPSRHESWDGVHLTEAVNRLIAEGWLRGPYCHPPIATQSIA

SEQ ID NO: 317336 - protein, 47 aa, Zea mays
  Clone ID: MRT4577_52487C.1.pep
CGPLSGRLRSFLLLYLPCPLVVSHLPVSPLSLYGLDRCLQRVRGRVG

SEQ ID NO: 317337 - protein, 302 aa, Zea mays
  unsure (1)..(302): unsure at all Xaa locations
  Clone ID: MRT4577_52488C.1.pep
GAEHTKLXINGNFVDSASGKTFPXLDPRTGEVIAHVAEGDAEDINRXQIEVPMVARLMRYYAGWADKIHGLIVPADGPHHVQILHEPIGVAGQIIPWNFPLLMYAWKVGPALACGNTLVLKTAEQTPLSALYISKLLHEAGLPEGVVNVVSGFGPTAGAALASHMDVDKIAFTGSTDTGKIILELAAKSNLKTVTLXELGGKSPFIIMDDAXDVDLAVELAHFALFFNQGQCCCAGSRTFVHERVYDEFVEKAKARALKRVVGDPFRKGVEQGPQVHXNWIFNELLSYNLYIATHEFHGSFY

SEQ ID NO: 317338 - protein, 71 aa, Zea mays
  Clone ID: MRT4577_52489C.1.pep
CNHPMKAHLIYNPNSPTKHCWLHRHNRHQTMIKILDDGRYIRPPLLIQTYFYFPKLQPHTWALLYCCYWRK

SEQ ID NO: 317339 - protein, 71 aa, Zea mays
  Clone ID: MRT4577_5248C.1.pep
PRRAKSISHCPAYKTVWPEFPMFPCKVFIKVGVLPLYYKKVHPFRFLFFCPFHENHKKYIHMMRLDLVQLN

SEQ ID NO: 317340 - protein, 69 aa, Zea mays
  Clone ID: MRT4577_52490C.1.pep
MARRAASSLVYRCLLARAPAGAPSAAPSAPRRTVPADGMHRLLIRSHLLDLPILEKLFSSWLQRATLRQ

SEQ ID NO: 317341 - protein, 257 aa, Zea mays
  unsure (1)..(257): unsure at all Xaa locations
  Clone ID: MRT4577_52491C.1.pep
GRKPNPSARGGKAAKGEAPGTGSHYLLVLTPTPTNQPPLPAASPAAGGHGCKSPFIIMDDADVDHAVELAHFALFFNQGQCCCAGSRTFVHERVYDEFVEKAKARALKRVVGDPFRKGVEQGPQIDDEQFNKILRYIRXYGVDGGATLVTGGDRLGDKGFYIQPTIFSDVQDGMKIAQEEIFGPVQSILKFKDLNEVIKRANASQYGLAXAGVFTNSLDTANTLTRALRAGTVXWVNCFXDVFDAAIPXGGYKMSGI

SEQ ID NO: 317342 - protein, 112 aa, Zea mays
  Clone ID: MRT4577_52492C.1.pep
WRSWRLRGRFIGSALFFLMPPWPCAPGASAHTPLTAYAWTPGPRAPSFFVQRWEETKNYCGGLYPSVLSLHGHQTAERRPVDSRTGKKGAFVLAPVLGNSVSIWFSYVLFYL

SEQ ID NO: 317343 - protein, 117 aa, Zea mays
  unsure (1)..(117): unsure at all Xaa locations
  Clone ID: MRT4577_52493C.1.pep
NNNKLEVNKVDTNEDNSGNQSFSATNRNMSANIELTDGWYSLDASLDVALLEQLEKRKLFVGQKLRIWGASLCGWSGPVSFHEVSGVVKLVVHXNGTYRARWNDALGFCKHVGLPLA

SEQ ID NO: 317344 - protein, 219 aa, Zea mays
  unsure (1)..(219): unsure at all Xaa locations
  Clone ID: MRT4577_52494C.1.pep
MARRAASSLVSRCLLARAPAGAPPAAPSAPRRTVPADGMHRLLPGVLQRFSTAAAVEEPITPSVHVNYTKLLINGNFVDSASGKTFPTLDPRTGEVIAHVAEGDAEDINRAVAAARKAFDEGPWPKMTAYERFRILLRFADLIEKHNDELAALETWDNGKPYEQAAQIEVPMVARLMRYYAGWADKIHGLIVPADGPHHVQILHEPIGXVAGQIIPWNF

SEQ ID NO: 317345 - protein, 49 aa, Zea mays
  Clone ID: MRT4577_52495C.1.pep
KQMKDKTNITTSCHHTTTDTSQQLIHGLFWIKRKRDNPKRGPTDVYLSL

SEQ ID NO: 317346 - protein, 139 aa, Zea mays
  Clone ID: MRT4577_52496C.1.pep
MMWSNVPLTFDARDINLRSVPHADALVKNCKATGWDLHKVLIDNGSQADIIFLHAIDHMDINHSLLKPVDNPLYGFGGKGTFPLGKIELPLSIDTAPNARSKQITFNIVDMVYPYNAIMGQGLINKVEVAIHGLYLVMP

SEQ ID NO: 317347 - protein, 128 aa, Zea mays
  Clone ID: MRT4577_52497C.1.pep
GRRRAPFFPFKGGTGPKKFPGGQVTRAYPQTQRREAFQHPTILNYQKTNREGNNPKAAIRANPSSELGKKRGPHQARALLHPPKKKAGGWQQIGARGNNSTGILGPRPKATWPPLGKGGHPINKNWLI

SEQ ID NO: 317348 - protein, 317 aa, Zea mays
  unsure (1)..(317): unsure at all Xaa locations
  Clone ID: MRT4577_52498C.1.pep
MARRAASSLVSRCLLARAPAGAPPAAPSALRRTVPADGMHRLLPGVLQRFSTAAAVEEPITPSVQVNYTKLLINGNFVDSASGKTFPTLDPRTGEVIAHVAEGDAEDINRAVAAARKAFDEGPWPKMTAYERSRILLRFADLIEKHNDELAALETWDNGKPYEQAAQIEVPMVARLMRYYAGWADKIHGLIVPADGPHHVQILHEPIGVAGQIIPXDPRLLMFAWEHGLLPHGEAQGRARLGELLRRFRCCDSVWRGQNNRHGEGKGRCHPEKPPPGEGGGPPHQKPRVVVTPPSGPLGPKPPYIPFRGPPPTNVKR

SEQ ID NO: 317349 - protein, 75 aa, Zea mays
  Clone ID: MRT4577_52499C.1.pep
CVYVPLWCTSCLRALLARSERHGAMPGSVLICDVLAIVHGLRRRTRSLVPELQHRCSHTPVSRPLRGTSDSSPRD

SEQ ID NO: 317350 - protein, 240 aa, Zea mays
  unsure (1)..(240): unsure at all Xaa locations
  Clone ID: MRT4577_524C.1.pep
MKTTTYVSALLGLASAVSAHYTFDKLTLGGQQEGTDNQYIRKXRTATCPPSSRAFPMVXSPTDKDFTCNKGSTPSTGVFKVKAGDEIGLKQAFGGTGMQHPGPIQVYAAPVKDATSDSPYDLKWYKIHQALICKSGNAESLRXCLVLLGRGLXHFKIPSTLPDGQYLLRGEHIALHGAHAGEAEFYYACAQVEVTGNSATSIPGTSVSIPGVYKQDDAAVNFSLWGSSTSYDVXXGPDVI

SEQ ID NO: 317351 - protein, 248 aa, Zea mays
  Clone ID: MRT4577_52500C.1.pep
GRAEIPKAQTKSKRKRGQSRKGGGTRHRQPLLTGPHSHTNQPTSSACRFSCCGRALLQVLEEDIRFHYCACGGSEEPVAEASIFGGRNKFPAWLGGPRRTDGMHRLLPGVLQRFSTAAAVEEPITPSVHVNYTKLLINGNFVDSASGKTFPTLDPRTGEVIAHVAEGDAEDINRAVAAARKAFDEGPWPKMTAYERSRILLRFADLIEKHNDELAALETWDNGKPYEQAAQIEAPMVARLMRHYAGWA

SEQ ID NO: 317352 - protein, 77 aa, Zea mays
  unsure (1)..(77): unsure at all Xaa locations
  Clone ID: MRT4577_52501C.1.pep
CLIARDIQDTDVRAFSARYAHRECIWYKGCIHYSQCDVWSDTCXVITGLSAPIKYGKGDRGSSHILLTSLRVVALRC

SEQ ID NO: 317353 - protein, 549 aa, Zea mays
  Clone ID: MRT4577_52502C.1.pep
MARRAASSLVSRCLLARAPAGAPPAAPSAPRRTVPADGMHRLLPGVLQRFSTAAAVEEPITPSVHVNYTKLLINGNFVDSASGKTFPTLDPRTGEVIAHVAEGDAEDINRAVAAARKAFDEGPWPKMTAYERSRILLRFADLIEKHNDELAALETWDNGKPYEQAAQIEVPMVARLMRYYAGWADKIHGLIVPADGPHHVQILHEPIGVAGQIIPWNFPLLMFAWKVGPALACGNTLVLKTAEQTPLSALYISKLLHEAGLPEGVVNVVSGFGPTAGAALASHMDVDKIAFTGSTDTGKIILELAAKSNLKTVTLELGGKSPFIIMDDADVDHAVELAHFALFFNQGQCCCAGSRTFVHERVYDEFVEKAKARALKRVVGDPFRKGVEQGPQIDDEQFNKILRYIRYGVDGGATLVTGGDRLGDKGFYIQPTIFSDVQDGMKIAQEEIFGPVQSILKFKDLNEVIKRANASQYGLAAGVFTNSLDTANTLTRALRAGTVWVNCFDVFDAAIPFGGYKMSGIGREKGVDSLKNYLQVKAVVTPIKNAAWL

SEQ ID NO: 317354 - protein, 56 aa, Zea mays
  Clone ID: MRT4577_52503C.1.pep
YAFPRRSALTFVRRCIVEVRLPHRESYVMDPRLTTSAAAAISPAACGPGGSCPRRL

SEQ ID NO: 317355 - protein, 88 aa, Zea mays
  Clone ID: MRT4577_52504C.1.pep
FSVCSEDQEAIQAQKIWKKAIMLVWRAAANHRYANVFLQPVTDDIAPGYHSIVQRPMDLSTIKKNIENGLIRSTAEFQRDIMLMFQNA

SEQ ID NO: 317356 - protein, 70 aa, Zea mays
  Clone ID: MRT4577_52505C.1.pep
MNIFVSDRVAHESVDIVEISQEEELLIACSGWKRCRRSRARCWPSPSLVSGGAALRWRYLASEEEGRGKL

SEQ ID NO: 317357 - protein, 150 aa, Zea mays
  Clone ID: MRT4577_52506C.1.pep
AELEIGMDLWTGSPVKAETSGQGEINAATHSHHGSTLSMMDEREQKRERRKQSNRESARRSRLRKQQECEELAQKVTDLTVVNGTLRSELDELKKACEDMEAENSQLIGELEQSEAPSVVTTLSIQIDTTKAHHRSSDQHGNKNNTGSNG

SEQ ID NO: 317358 - protein, 88 aa, Zea mays
  Clone ID: MRT4577_52507C.1.pep
LTQQNGEEPRRTSPPTCPFTSNNFQLLVGHLEHACTHSSLISICCCCYRAQTRTPTPKDACHHHHPPLTCSACLPCLALPEQSAPSQR

SEQ ID NO: 317359 - protein, 59 aa, Zea mays
  Clone ID: MRT4577_52508C.1.pep
AGPPLDSHSDSQQLTHPRWEPGRTCQCACRSSQDEPYRQRRQHAVLLRLMVKLAALRPV

SEQ ID NO: 317360 - protein, 100 aa, Zea mays
  Clone ID: MRT4577_52509C.1.pep
KLGIRLEISSGVSTWLYSGDIDAVCPVTSTLYSLDILGLKINSSWRAWYSDDGEVGGYVVEYKGLIFATVRGAGHMVPTYQPQRALSLFSAFLNGKLPPE

SEQ ID NO: 317361 - protein, 128 aa, Zea mays
  Clone ID: MRT4577_5250C.1.pep
LGICRYGTLDEALDLCEKMIKNNCLPDIHTYTILLSGFCRKGKILPALVILQMMLEKGVVPDTVAYTCLLNGLINEGQVKAASYVFHEIICKEGLYADCIAYNSLMNGYLKSRNVNTIKRMMSDMYQN

SEQ ID NO: 317362 - protein, 83 aa, Zea mays
  Clone ID: MRT4577_52510C.1.pep
MAILSALSAGRHLCSESNTTEKYRRLAVKGGSSSRASRALVRRSSSWLVPEPVIRRETGSSPSPSCYALLVLALVLAAAADRD

SEQ ID NO: 317363 - protein, 125 aa, Zea mays
  Clone ID: MRT4577_52511C.1.pep
EIDDVHGEGKGAACCWAGRASSARAAGSHGSSREGDVFSLGVNEQAERGHRQGEAQPATYAGEIGKMATNKGRDARRGARSRSCWARPSSLILRWEARRKMHQEVGELEQGEHAAKNPAGLGRTQ

SEQ ID NO: 317364 - protein, 57 aa, Zea mays
  Clone ID: MRT4577_52512C.1.pep
ALRGSQPVNSYSVLSCRVCSQPYALRLGLYSELYVRRSSPVYLIPYTRTNSRLCFPG

SEQ ID NO: 317365 - protein, 486 aa, Zea mays
  Clone ID: MRT4577_52513C.1.pep
MAGLPPVARRLRLATAALLLVLLLAVTAAAAAREGRGLARVQGPPPRHRHAYAAMMYMGTPRDYEFYVAVRVMMRSLTRVRADADRVLIASADVPRDWVRAMTEEDGMRVVIVENLRNPYEGNLGGTNKRFKLTLNKLYAWTLVDYERVVMIDSDNIFLQNTDELFQCGQFCAVFINPCYFHTGLFVLQPSIDVFRSMLHDLETGRENSDGADQGFLVGCYPDLLDKPMFHPPENGTKLNGTYRLPLGYQMDASYYYLKLHWHVPCGPNSVITFPSAPWFKPWYWWSWPVLPLGLSWHKQRWDDLGYAAEMPVILMELLMYIVIIAVTRLARPGITKLCYNRRPEKQSALVQWLIKLAAIAAMVAAYSIPFFVIPRTVHPIMGWSVYLFGALALSVLVFNVFLLPPLDVLTTWLAIVGMLIVMAFPWYHDGVVRALAIFGYAFCSAPILWASMVRMMDSLQTMLERDSFFPRIGEPAQETEFSKLY

SEQ ID NO: 317366 - protein, 75 aa, Zea mays
  Clone ID: MRT4577_52514C.1.pep
KKGYYYHRFRNEKKRRSKFIKKLEDVLNCVNLHGSCILKKKIWDDGGQFVYVHEKSHKVKNWDWRHIHDVIVGRV

SEQ ID NO: 317367 - protein, 83 aa, Zea mays
  Clone ID: MRT4577_52515C.1.pep
MVTLGLNGLSYHHHEDDLSRKTDLLLKLNPVHRKVPGLGHGGRPEYDCVLIHCLCHDHSPRYHPAHAPQERQLWRYGSDLTHP

SEQ ID NO: 317368 - protein, 41 aa, Zea mays
  unsure (1)..(41): unsure at all Xaa locations
  Clone ID: MRT4577_52516C.1.pep
RKXKDYLLREINXLTKNYIXLYHLFKRXXVPVHYXCXXEXH

SEQ ID NO: 317369 - protein, 430 aa, Zea mays
  unsure (1)..(430): unsure at all Xaa locations
  Clone ID: MRT4577_52517C.1.pep
MVQRATRLPSRYTSVHTDGRSLKPDASPRMNCGSEPTTTAVEPASSSMFSFAFYGVAWPPSELESLREKYSSVCRMFSYEELKLATSNYSPDMLIGKGGTSQVFKAQLDGGTFAAIKILKPSVDAIHEFVTEVETVTSLQHENIVALRGFSFENYNLVLAYDYMPRGSLDKALHGKNDGTEFLVWERRIKIAIDIARALEFLHXRYDPXVIHGDVKSSNILLSEDFGARLCDFGLAKRVSASTPHLTCTDITGTFGYMAPEYFSHGEVNERIDVYAFGVVLLEIVSGRRPITPGSAKGQESLVGWAKPLLSSGGIKHLVDPFLGNDYDCDEMERMTLAASLCTRTSWHSRPEMSLVLKLLQGDDETMGWARSASFDGSDEEAIAAGPDLNMQSHLSLALLGVDADDTLSRCSSTERTSADGYWSRSSSFD

SEQ ID NO: 317370 - protein, 75 aa, Zea mays
  Clone ID: MRT4577_52518C.1.pep
IKHNFESLDNYDYTFDTLCEVYDSLSVTQALIFCNTHINVAWLTKKMRTHNLTVSSMHLYMPHQERDDNMGDFKS

SEQ ID NO: 317371 - protein, 59 aa, Zea mays
  Clone ID: MRT4577_52519C.1.pep
RRSELETLELQTLLEVSSSTTVPTRASFLTSSVLLTSCLFEVISEVHQVLSHWGGHLPR

SEQ ID NO: 317372 - protein, 108 aa, Zea mays
  unsure (1)..(108): unsure at all Xaa locations
  Clone ID: MRT4577_52520C.1.pep
PKKKPLGGAQAKSQRVKTNKANLVFFPRXAPKVKAGASPLEGLPPPPQGQGDNNPIPPGEKPSLKVLKVPKKKKGFSAYGKPPLEGINKKPPGAPPKKAPEPKKETKK

SEQ ID NO: 317373 - protein, 29 aa, Zea mays
  Clone ID: MRT4577_52521C.1.pep
YASQVDHECFISRRRLFGTLQLHHSSKEL

SEQ ID NO: 317374 - protein, 88 aa, Zea mays
  Clone ID: MRT4577_52522C.1.pep
QNLGCPLKKTRLGPPGNPSKILLNGPPVFGSLGGKTQGPLPPLKTVGGPPHEFQEPLKSVLRKLGFVFLGGPVLFRYKKKWGPSQAPP

SEQ ID NO: 317375 - protein, 81 aa, Zea mays
  Clone ID: MRT4577_52523C.1.pep
SNDLWRCRTFTSRRMPMIRRSYTWWELFSETKNYAYEAQEESIITTATNNMELLHSNKNGQKNIKKGPTSDLELADAWADA

SEQ ID NO: 317376 - protein, 305 aa, Zea mays
  unsure (1)..(305): unsure at all Xaa locations
  Clone ID: MRT4577_52524C.1.pep
PQRKLDCIKRLGFGLLNKVSMLFPHVFWSTXLDTFGHLVENPRRRGEFFLTSSXAAVAGGPLLMALVAGEAAHNFETMPPTDAVSSALQILRGIYEPQGIEVPDPLQSVCTRWGTDSFSLGSYSHVAVGASGDDYDALAESVGDGRLFFAGEATTRRYPATMHGAFISGLREAANITLHANARATKSKVDRSPSTNTQACAATLTDLFRQPDLEFGSFSVIFGGKASDPKSPAILKVELGASRKKNTAEGVKTEQNHSNKLLFQQLQSHFXNKQXQLYGYTLLSRQQAMGVXGVRGGDDMRVHYL

SEQ ID NO: 317377 - protein, 35 aa, Zea mays
  Clone ID: MRT4577_52525C.1.pep
KKKSLFTSIIHNPGSKGGLYTLKANPIQNTTFFLT

SEQ ID NO: 317378 - protein, 82 aa, Zea mays
  Clone ID: MRT4577_52527C.1.pep
RAQAAAAAAPPGDQLLQVVVMKVAIPCQGCAGKVRKPISKMEGVTSFSIDLESKKVTVMGHVSPAGVLESISKVKKAELLLA

SEQ ID NO: 317379 - protein, 36 aa, Zea mays
  Clone ID: MRT4577_52528C.1.pep
ETHAGMRVPLWSTSNMYSQRWHLQRWVAAHASADAW

SEQ ID NO: 317380 - protein, 69 aa, Zea mays
  Clone ID: MRT4577_52529C.1.pep
GPAQDSSPKQSRGPSLKAYRPEPSQFGTRPAPEDQVVFEGRRPARPELAVFRQPPYGLADIFTHGKEAL

SEQ ID NO: 317381 - protein, 65 aa, Zea mays
  unsure (1)..(65): unsure at all Xaa locations
  Clone ID: MRT4577_5252C.1.pep
AVVKAAAALGSNDGVNGTILCTQDGDGPTTVTGSVSGLKCCHHGXHVHPLGDTNNSWMPTXGPHY

SEQ ID NO: 317382 - protein, 132 aa, Zea mays
  Clone ID: MRT4577_52530C.1.pep
MGSFLSSLVTPPPAADDPNCAVVAAHSKATYDEQWAAHKSSSKLMVIDFSASWCGPCRFIEPAFKELASRFSDAIFVKVDVDELAEVARTWKVEAMPTFVLVKDGKEVSRVVGAKKDELERKIRMFTSSSSS

SEQ ID NO: 317383 - protein, 78 aa, Zea mays
  Clone ID: MRT4577_52531C.1.pep
DLPIPMGGGLFIFLFPFQNITYTRGFSFIIHTIYMTAWNVTLNTSPMSHARQRKAKSPYHWGELRPIRFVLFPLEHHA

SEQ ID NO: 317384 - protein, 37 aa, Zea mays
  unsure (1)..(37): unsure at all Xaa locations
  Clone ID: MRT4577_52532C.1.pep
AXAASSNELGGHHVTTLGASDEGLLARATFRRARDDS

SEQ ID NO: 317385 - protein, 102 aa, Zea mays
  Clone ID: MRT4577_52533C.1.pep
LPVTTRLVDSYKITRPSTYFPNARYLHGTSPFLPSSGQSLEASSAASSPARPPRRGGPCTLSAYDKNLEDQVRPAFVPDDVIGSSGSPDKYWSPHPKTVVFG

SEQ ID NO: 317386 - protein, 79 aa, Zea mays
  Clone ID: MRT4577_52534C.1.pep
PTVTASTCLPACLCYKFPSHNGTKKTWTKRMNGGATVALTQPRNWPPGVAAWGTRSDQPRVDVAGPGVERHAGGAVGTG

SEQ ID NO: 317387 - protein, 69 aa, Zea mays
  Clone ID: MRT4577_52535C.1.pep
MVPLVQVSPLIKLGRYSALFLGVAYGASRYNYLKPRAEEERRIAAEEKKKQDELKRIARELAEDDSILK

SEQ ID NO: 317388 - protein, 115 aa, Zea mays
  Clone ID: MRT4577_52536C.1.pep
GQKAWCECLRLTCHPGVGRWSLFPSSSMDVVFHCLGLSFIPSTQVIRMAWFRGRRRGFRDLSVGPCYQGSPRSGSVGSPAECIWCSWWVVLSSMTAGATRQPSSAAASSIAAAGD

SEQ ID NO: 317389 - protein, 88 aa, Zea mays
  Clone ID: MRT4577_52537C.1.pep
SSGNNAEYAGLSRSSQYRTIIMHIFYYITQKKGLHLDFNSLVQYFFPLPGKSLLQIMLEKHRGNSTRACTHKKKKKKKKKSTLRCYHC

SEQ ID NO: 317390 - protein, 88 aa, Zea mays
  Clone ID: MRT4577_52538C.1.pep
CILEICSQFSKKVLPPVASVHLGGCLFPRFCGPPSLVNQRGLYCRVTQKCSCPHFSRNDDHVGPLFVRQNFLVQKIHKKTDLHSLDKQ

SEQ ID NO: 317391 - protein, 53 aa, Zea mays
  Clone ID: MRT4577_52539C.1.pep
LKEMGPQLQGFKVPIKNRGGREFSSVTPPLGKIIHSQSNGFAFRIILIKYSNG

SEQ ID NO: 317392 - protein, 97 aa, Zea mays
  Clone ID: MRT4577_5253C.1.pep
RGFFTGFFKKLGPKPRGHKDRFMKGPALWLKNFPPEFKLFWFEGGAFLFPLGNTGEIKKSHLWVFWEPPNLLQRKKYNQLGRGKYTAVLFKTKAKDI

SEQ ID NO: 317393 - protein, 105 aa, Zea mays
  unsure (1)..(105): unsure at all Xaa locations
  Clone ID: MRT4577_52540C.1.pep
DREGNEAKSHFIYKPRDPSRQACRPPTDHPPHPRERRRRTRGTPPPRPTEXPTRPPQSRPPPRPTPPAPQPTPRRRRPPKPPLAPPAPAPAPAPTRGXPPAAPSP

SEQ ID NO: 317394 - protein, 117 aa, Zea mays
  Clone ID: MRT4577_52541C.1.pep
PAGDHLRFLRPGALARLRDARLRRGSRAARLPSPSSPAPAPASPSSPPPAAGDGEGIVAVPYFTPASRLLAPRCPQRKKLAAAKSVVLFAPPPPSTDLPIEAVIEFLSAPDMVVAAH

SEQ ID NO: 317395 - protein, 549 aa, Zea mays
  Clone ID: MRT4577_52542C.1.pep
MASAAARGAAVRSPLLVHHRVPLVHPSGGGSLRVGWPGIGPGREGRRRGAPVGARVFARYSQAQDFSTRLQDRAGELPKLVEDLIQTSISTGPRGAFRMAQGIQAVLGVGGEWLNDLSKTANTSAGIPSQMQLGLLSPLYLRRLFERMGATYIKLGQFVASAPTLFPAEYVEEFQKCFDQAPAVPYDVIESILREELQRPLDSVYEYIDPVPIASASIAQVHGARLKSSQKDVVIKVLKPGIEDTLVADLNFIYVVARVLEFLNPELQRTSLVGIVKDIKESMLEEVDFRKEAANIQAFQGYIDAMGFDRQAKAPFVYQHCSTKRVLTMERLYGVPLTDLDSIRSLVPDPELTLVTALNVWFGSLISCESFHADVHAGNLWLLRDGRIGFIDFGIVGRISPRTWAAMEVFLASFATEDYDAMASALSEMGATGNDINTNEFAKDLRKIFSSIQDLDTEIIVATARTPDATAVSANVVLDERQMNALFLDLVRVSESYGLKFPREFALLMKQLLYFDRYTRLLAPSMNMLRDERINISTNRQPRRTDRFQ

SEQ ID NO: 317396 - protein, 390 aa, Zea mays
  Clone ID: MRT4577_52543C.1.pep
YSKIEKLEQELREVAALEVSLYSVVPEHGCSSHKLHTPARRLSRVYIHASKFWSSDKKASVARNSVSGLVLVAKSCGNDVSRLTFWLSNTVVLREIIAQTFGTSQHSSPVKVFSSNGNANKPDRSFTSSQWKSNYNGKYVNPNIMQLPDDWQKTSTLLDALEKIESWIFSRIVESVWWQAMTPHMQTPVEDLSTPKIGRLLGQSLGDQQHGSFSIDLWRSAFQDAFSRICPLRAGGHECGCLPVLAKLVMEHCIARLDIAMFNPRVRESENEIPTDPISDPIVDSRVLPIPAGNLSFGSGAQLKNSVGNWSRWLTDTFGMDAAESEKGGQDVEVNGDDRRDTAESTCFKLLNELSDLLMLPKDMLLDKAIRKEVCPSIGLPLVTRILCNF

SEQ ID NO: 317397 - protein, 49 aa, Zea mays
  Clone ID: MRT4577_52544C.1.pep
VAVNKDLSDVYRHRGLLTAVQHCYNAIALCGSPFDLIRHTGSASGTCFL

SEQ ID NO: 317398 - protein, 76 aa, Zea mays
  Clone ID: MRT4577_52545C.1.pep
QLDLILSRPLLSVRVELRAASHGDECPFFLYSSGSYAALYSRWHSKYLEFSTVVAPLSAFLIMPIGDGQSCCDATL

SEQ ID NO: 317399 - protein, 76 aa, Zea mays
  Clone ID: MRT4577_52546C.1.pep
KEVSLCFSRISIPDTSGRRPEGHSTRAPKGDRMHNKRKHSIYQNTAPHPMINLRTGATSTECKSPPRKEKLARPNE

SEQ ID NO: 317400 - protein, 31 aa, Zea mays
  Clone ID: MRT4577_52547C.1.pep
KKDRIRSHLRKRDVDKKFMRWQSVTIKRYEC

SEQ ID NO: 317401 - protein, 266 aa, Zea mays
  Clone ID: MRT4577_52548C.1.pep
MALHAVSPAAVSSPLRALSRRFPQRSGCGCLPKQSVTICSSTNFARKLQDGPVDFAARRLVLGHSDKRAVLTHATIEEIEAEKSLIEDQAKEKMEKAIETVQTNFNTVRTGRASPAMLDRIEVEYYGTPVNLKSIAQISTPDATSLLIQPYDKSSLKLIEKTIVAANLGVTPSNDGEVIRVTVPPLTSDRRKELAKTVAKLAEDGKVAIRNIRRDAIKAYDKLQKEKKLSEDNVKDLSADLQKVTDEYMKNIDSIQKQKEQELMKI

SEQ ID NO: 317402 - protein, 243 aa, Zea mays
  Clone ID: MRT4577_52549C.1.pep
MSYFTGCGCLPKQSVMIYSTKFARPQAGPVDFAGRPLVLGRSDKRAVLMHATIEEIEAEKSLIEDQAKEKMEKAIETVQANFNTVRTGRANPAMLDRIEVEYYGTPVNLKSIAQISTPDATSLLIQPYDKSSLKLIEKTIVAANLGVTPSNDGEVIRVTVPPLTSDRRKELSKTVAKLAEDGKVAIRNIRRDAIKAYDKLEKEKKLSEDNVKDLSADLQKVTDEYMKKIESIQKQKEQELMKI

SEQ ID NO: 317403 - protein, 141 aa, Zea mays
  unsure (1)..(141): unsure at all Xaa locations
  Clone ID: MRT4577_5254C.1.pep
MAGCNNRRIYQEEMGGKKKTVDPFSKNDWYDILASSVFSVRNIGTTLLYNTHVTNIAYDGLMHRFFADCLAFLHGYYDQAHRKSWLHAQDAHCRYALTDFSGMNFTTDXLKSLVQMCHTLMADHVCVHTTCIYMLRLLCVG

SEQ ID NO: 317404 - protein, 155 aa, Zea mays
  unsure (1)..(155): unsure at all Xaa locations
  Clone ID: MRT4577_52550C.1.pep
MRQPCSVSRRAAFVGGKNARRYLVLCCGTASCMGTKVLSTXTAFNGTNKIRAYAHCAKNSEEIALLLINLDGISTNRIYVTSQGAHARSGRKKESRTSDVHIIPAGLGEAAAALTRQEYHLTPKDGNLQSQQLLLNGNVLATDADGEIPELEPVQ

SEQ ID NO: 317405 - protein, 49 aa, Zea mays
  Clone ID: MRT4577_52551C.1.pep
SHHGRSAVALERRFPFARLSLVATCLLIHAPLPQLFVLAFLKNLNRQVV

SEQ ID NO: 317406 - protein, 178 aa, Zea mays
  unsure (1)..(178): unsure at all Xaa locations
  Clone ID: MRT4577_52552C.1.pep
MACSTQVHLNQTLTITVLCCGTASCMGTKVLSTXTAFNGTNKIRAYAHCAKNSEGITLLLINLDGSSTNRIYVTSQGAHAQSGRKKGSGTSDVHIIPAGLGEAAAAAALTRQEYHLTPKDGNLQSQQVLLNGNALATDADGEIPELEPVQVEGTQPITVGPYSIVFAHVPSFYAPACL

SEQ ID NO: 317407 - protein, 71 aa, Zea mays
  unsure (1)..(71): unsure at all Xaa locations
  Clone ID: MRT4577_52553C.1.pep
ARPRCTLRNIWRGXRRRRDIVSHHGGVLPPLNKKGLNRKIGGAGYSNSSVEWKHREEERVEKYFSGIGPPG

SEQ ID NO: 317408 - protein, 64 aa, Zea mays
  Clone ID: MRT4577_52554C.1.pep
EQRLVHVAMCRVNKVQGSTREPDNVSSCQADNQVGEFTHLGGSDGQYLLWLGTTQLSNWGTLGP

SEQ ID NO: 317409 - protein, 120 aa, Zea mays
  Clone ID: MRT4577_52555C.1.pep
AGVTTQSTRGLRIKHSRILNKKNKKYNHIMKMEIKERKKGLKKITNSASALYPHVYGRITHHWSPFFVDPSWAPRSTIFWSQIFACVKFSKELTIPYHIRAGSTKGYTWGVFWGERPELI

SEQ ID NO: 317410 - protein, 88 aa, Zea mays
  Clone ID: MRT4577_52556C.1.pep
SVFHIATSRGMTPGSDTYHEPRVAVMGPCGYSCWRPHRHAGNKSGASARCHRPLSIKCAVHSLILSALQACWLRTRIHSIAEGPRDSR

SEQ ID NO: 317411 - protein, 72 aa, Zea mays
  unsure (1)..(72): unsure at all Xaa locations
  Clone ID: MRT4577_52557C.1.pep
RCARPLPRPSVPSSRWSWXPPPPLRCAFPSWALVLRAAPRLLAVVVAVGSLCCVSRSRLGCWLFXVLVXFSP

SEQ ID NO: 317412 - protein, 1368 aa, Zea mays
  unsure (1)..(1368): unsure at all Xaa locations
  Clone ID: MRT4577_52558C.1.pep
MVQIVEHRDLTPEDFLMEEEAASSMPRTSNRPAPGAAAVHAARQNTPAQSSWAPSRAAPGVLSAARELLRHPPSSTASPGAMKQWRDDVDRLLSMVHSGSARPRPRSFRRQREASASVHSPSVKAAPTKDLWAELNRRRAGENAPISSERPEDLRAELNRRRAGEGTRVSLERARERRLNFEGRNLDQDFALLAPQTPRGARTHTGVPLVGVGCTALADHLRTVTWTPKFRPHLPEKYDGTSNPSEFVQVYVTAITASGGNTTVMASYFHVALTRPARTWLMNLTPGSVYSWEELCARFTTNFASAYQQHGVEAHLHAVRQEPGETLRAFITRFTKASNDGLPPHRLPGKEKVDEGDAAAGERDLGYQSPEGVLKDVLTGDSDSGGESDRRXAVRHVRRELXLTYCRNVKSLRRERWRSTTISLGASDCPDNMAGAGILPLITAPVIANMRLHHVLIDGGAGLNVISHAAFKQLQIPRSRLGPSRPFSGVGPQPVYPLGSIALPVTFGTEENFRTENVELDVAEVNLPFNAIIGRLALYRFMAIAHYGYLVLKMPSPAGVLTVRGDRAAAVAAVEKLHALAAETARPDDGGRDPSTSGTKAPTKVPKVQPSEVDGGPIKTIQMPRIPREVIEHHLKIHLDAKPVSQKPRRQSVERQDFIRQEVRKLLDAGFIKEVHHPVWLANPVIVLKVNGKLRMCIDYTSLNKACPKDPYPLPRIDQIVDSTSGCDLLSFLDAYSGFHQIQMAREDRKHTAFVTVDGLYCYVVMPYGLRNALPTFVRAMSKTFGDLIRDKIEIYVDDIMVKTKRGSTLVEDLTLVFDKLWATRMKLNLDKCVFGVSAGKLLGFLVSHWGIEANPEKIRAIEAMRPPAWIKDVQKLTGXRSNIPRGVRRXLGEGGGPTTMDLEVSGPAVGVRTIQRPVYYISEVLHEAKARKLRHYFQAHRVVVMTSFPLRAILHNSNAIGNIANAPGGPDPDLDPTPAEPRVMVFTEPHWTLFFDGSTRQQGGSAGVVLVDPSGDQVKYMVHLEFKATNNMAEYEALIFGLSASLSLGIRQLLVKGDSQLIIKQEAGKDFTTLELQHVPRADNSAADELSTRASTWAPVPEGVFKRRLLRLTTQPAELGEGGETSTSKLAVPVALHLQNPPRIVCAIGGPAYPLAPQPVSQSGPDAWISKIRDYLKENILPEDHVSAEHIVRLAKRYAVVEGDLYRRGANGILMRCITQEEGHELFTEIHGDTHXPAQALQMILPSWPFAVWGXDILGPFPRAVGGYRFLFVAIDKFTKWPEATPVVNITQGAVVAFLRSNGQAERANTEILRGLKTCIYVCLKKHGANWVNELPSVLWGNRTTPSRATGETPFFLVYGAEACLPP

SEQ ID NO: 317413 - protein, 136 aa, Zea mays
  Clone ID: MRT4577_5255C.1.pep
MQTVRSAVLQHLRLRAAAPIAARGGGGGFARRMSAPAGQEDSSGSSSELERDIRTRVVNLVKKFDKIDADKVTETADFQKDLSLDSLDRVELVMAFEQEFSVEIPDDKADKLTCCADVAKYIISESQTSDTNAGGS

SEQ ID NO: 317414 - protein, 209 aa, Zea mays
  Clone ID: MRT4577_52560C.1.pep
QETRTESLQLENILSRSGTIPLQKIEGTERLRSQPALLTALCWERLRYTSLSLLAATGTPTSAGRRRHLPLLAALSSAGSRARPSITFLLARARPAVTFLLCWLARPAVIFLLARAPGRHLPSVGSRSSVCWPSNGRPSLCWFARRPDGQIWPEQPWPPISAQLPLQLPLRLPLRLPLFSSLCAAPSTQPWPEQRLSLWQRLSIWQRLS

SEQ ID NO: 317415 - protein, 105 aa, Zea mays
  unsure (1)..(105): unsure at all Xaa locations
  Clone ID: MRT4577_52561C.1.pep
IVEGVGDDVVAEXMHRSHVXKQRQHMHVAAVIYDAVLTLAGPVYYDIDVVAGIIHRTATTATYIKSADPMPSSEGSLADSGDMVITMAWGNVLASHLTITEYDVD

SEQ ID NO: 317416 - protein, 45 aa, Zea mays
  Clone ID: MRT4577_52562C.1.pep
LSATVQICTPLTPSVGIHTTPHVRPLHSPRYSCKLTQCQVLGCVL

SEQ ID NO: 317417 - protein, 46 aa, Zea mays
  Clone ID: MRT4577_52563C.1.pep
SSGRPGRYISKKKKKKKKKKKKKKKKKKKKKKKKKKKKKKLGPGPP

SEQ ID NO: 317418 - protein, 69 aa, Zea mays
  Clone ID: MRT4577_52564C.1.pep
VSLLMLKCRWCKLCDHRRVLKPRHCTLLTTMVSRSTPAILPTTAPRVVSLAVILKNLRQRSSRIPSVRT

SEQ ID NO: 317419 - protein, 605 aa, Zea mays
  unsure (1)..(605): unsure at all Xaa locations
  Clone ID: MRT4577_52565C.1.pep
LVASRPAGISPTKQPQVPNPVSNKLDPRRPCGAAAVAGSPSPPWRPPPRPRPPRLXRQRHXNLDSAFSRRDSDANSLCSSRPASTVGAILNFSDRATQVAALRVVNTFLAPAVTLRGPLPAARDIQAALRLLVDRLHLPRNDATFDDDLIQDLRLLGCPYKVTRSALKAPGTPHSWPVLLSVLHWLTLLCHSQGDDLDAPSGPSDDLLLYITQSYSHFLSGDDAAVETVDEEYASKARMTGEAYVATARALEKEAEELETQVNKLISGPSRREALESEKEAFNADIHKFDAVVNAWKTKFNEREQSLGDLEKELEAKVSDTQRAAAEIQDLLKQVDAQPVNVKDVDRMRREMQAIEDDIANAEKGKTALEDKVWELEAKLVTKLEELERHAEQCNQALKKLKPTVAFQYMIDSKGSSPAEMLGTGYKTVLKPALLAHAEENKRICLSNLENLNDLQKQLQGNAKVLEEERNNISSLQEKNDEIVARLNLLDREIINDDSRFTSEAAQMKDELEKKKNSLISAEKQADDFLKKSEKRLQDVTLKVEEETQAAAKELLELLDSMAEHKEFMETTIAQRRKDLYETADYIASVASKTVITQVPNPPES

SEQ ID NO: 317420 - protein, 545 aa, Zea mays
  Clone ID: MRT4577_52566C.1.pep
MAITFQHKIILRPGSVFYFGTISSVADKEGNLHRIADPPKRKPSSTISRKVRAKQEKAQPPALRAKTTSCQPGAEDPTTRRTPLSTSSTEKWTRITTKKEANEIKARQAALQLIIFYLSLIHQAIYDTPSTVSGMHGAPSTLRANDDTRTRFGAEKSMTGTTASLREEDTCVVSALTPRLRAIQWPPNFKVSNVDKYEPKQDPEGWLAVYTTAAQAAGATEDVMTTYLPIVLGQDALQWLRHLPRHCIDDWSDFSRCFVANFQSLSDKLVLPWDLKSIKRRGDETLRSYLKRFQTMRNHIPKDAEAAVIENFYRGSNDSTFVRAILQKWLNFDHPGKYPLLVDLVIRESRVKKVLVDRGSSINVTFPRTLQGLGVALKELHELDIPFFGIVPTEGEYPLGHIYMLVTFGTSENYRTEVLRFEVASFDCGYNAIIGRPGLAKFMAIPHYTYMILKMSGPQGIITVRADFQGAAKCFRVAIQAALTTKPSMTSSAQANSKPEENLTVPANEAQAVTSMRSTEETKRINLGFVDERKTAIISSSLDDK

SEQ ID NO: 317421 - protein, 285 aa, Zea mays
  Clone ID: MRT4577_52567C.1.pep
IGYLEAGRGPLCPNYGEQKFLGANSTARRRPLSSLSGNKPSPALQSLICKAHPHADPAAQATTAEVDAALDRLLFARTDLGGIVSQIDELISEALKCQNVSKKATREIESFNGFLTDTKASFKQWSSRLKQALETGLVKTEAIPKNTPGTCLNTAAKGNDKLISCSTKLPDTGSSENTPGTCLNNAAKGNDKLIRGSSKLPDTYSSQNTPGTCLHTAVKGSGKLISGSSKLPDTDPLESPCSNFTEVDMIVSPSPLVSWNTGSCIVESGKQLFLLTPLPKTKACS

SEQ ID NO: 317422 - protein, 1094 aa, Zea mays
  unsure (1)..(1094): unsure at all Xaa locations
  Clone ID: MRT4577_52568C.1.pep
MAITFQHKIILRPGSVFYFGTISSVADKEGNLHRIADPPKRKPSSTISRKVRAKQEKAQPPALRAKTTSCQPGAEDPTTRRTPLSTSSTEKWTRITTKKEANEIKARQAALQVSPPSKENMKKLVTMTIPFYPDVLFIGGRVESTPVSDDEPTAPGEEPLQRESPNHLLPVAHPPSDLRHAINSQRDARSSINASRERRHENEIRRREEYDRDHGIPARSQATRVESATASTGGTTRGWSRHHVNNSPPWDRHHHHQQEDTCVVSALTPRLRAIQWPPNFKVSNVDKYEPKQDPEGWLAVYTTAAQAAGATEDVMTTYLPIVLGQDALQWLRHLPRHCIDDWSDFSRCFVANFQSLSDKLVLPWDLKSIKRRGDETLRSYLKRFQTMRNHIPKDAEAAVIENFYRGSNDSTFVRAILQKRTSTSPPTNELRTSSEERNLHRRHHDATRTNNSTSIGRRGLVKKSTPLDHPPLAPEENLAEANVHWTTSLTPNARTTRTCATPSGTTETSSTPLGTADPSNLYHLPHHNEDPKNLDSLNSRRGEEAERSRASTEKSTSSSADMGRKKWLNFDHPGKYPLLVDLVIRESRVKKVLVDRGSSINVTFPRTLQGLGVALKELHELDIPFFGIVPTEGEYPLGHIYMLVTFGTSENYRTEVLRFEVASFDCGYNAIIGRPGLAKFMAIPHYTYMILKMSGPQGIITVRADFQGAAKCFRVAIQAALTTKPSMTSSAQANSKPEENLTVPANEAQAVTSMRSTEETKRINLGEVLGPSKKKYPQVQKLLYAVLLTARKLRHYFDDHKVIIVTGFPIGYILHNKEAIGRIAKWACELGAHDIEFRPCTTIKTQALVDFVSEWTEQQVLDNPKTAEVWRMYFDVSLKLQGAGARILFIAPGGEQLKHVLQLLFSASNNAAEYKALIHGLNIAISLGIKRLMVYGDSLVVISQINKEWDCSNESMGKYCIAVRKLEDKFEGLEFHHVERDRNAAADTLSKLGSSRTQVPPGVFVQEVPRPSISLEQEEDCNVLSQPESDSDDWREPIIRYIKNEEEPDDKTTAERIARQSAHYTHWGSXLYRRGAAGVLMKCILSATGKQLLD

SEQ ID NO: 317423 - protein, 45 aa, Zea mays
  Clone ID: MRT4577_52569C.1.pep
VVEDLKGFSWKRVQSSPTTSKPAVLEPNQRLNEHAHKTYRKDINE

SEQ ID NO: 317424 - protein, 435 aa, Zea mays
  Clone ID: MRT4577_5256C.1.pep
MEMKLTIRRVPTVVSNYQEDADKPRAGCGRNCLGDCCLPASKLPLYAFKLSPAKGSQEDAASTKLLVDILLSEWEDRMTRGLFRYDVTACETKVIPGNLGFVAQLNEGRHLKKRPTEFRVDRVLQPFDPAKFNFTKVGQEEVLFQFENSGGDDSYFLNNAPIIAVDRAPNVIAINVSPIEYGHVLLIPRVLDRLPQRIDPESFLLALQMAAEGGSPYFRLGYNSLGAFATINHLHFQAYYLSVPFPVEKAATHKIPLSEDTKKNGVTVSKLINYPVRGLVFEGGNTLDDLATVVSNACIWLQDNNVPYNVLISDCGKRVFLFPQCYAEKQALGEVSQELLDTQVNPAVWEISGHMVLKRRMDYEEASETSAWKLLAEVSLSEERFEEVKAYIFSAAGLVQYDEEEEEASDGEGPTAYVPVKVTPLPVAEGCLVLP

SEQ ID NO: 317425 - protein, 262 aa, Zea mays
  Clone ID: MRT4577_52570C.1.pep
WYSQKLTVGSARPEQRHFFPSLRRQRRWSGSGGGESPRSPNFRRRRRRDGVGVSSASSSGVAARLRRRLRRGGDGGDSSASPSVSESPPSSSLSPPVSAASSSLSPSVTAVAPSSSSPSDSSAFAFGSAPLPSVSRSEPVSPASSSEASGFASASVATVSALASTALASGSASISSVPFSPASSLASASMDSVSLSDSSSFESSLSALDSSPASASPASISDLAASSSSGSDSGSGSVGFALGFALPLPFPLPRRGGMAAAG

SEQ ID NO: 317426 - protein, 74 aa, Zea mays
  Clone ID: MRT4577_52571C.1.pep
TRQWWMCGSRIIGEIPIDLLQGGRRGKEGPRRRAKRGVRYYTDTYITYGAHATCIACHMDATLMPCTWTNFYIN

SEQ ID NO: 317427 - protein, 70 aa, Zea mays
  Clone ID: MRT4577_52572C.1.pep
RRLPIAPPGPTLALAKTCAPTSMRSRQGPHHQGGNCSPQRGGGDHPATPYQQCCQALPAMRPRRLTRQLQ

SEQ ID NO: 317428 - protein, 97 aa, Zea mays
  Clone ID: MRT4577_52573C.1.pep
MVSVLRVVVEHPQPRRQHPTAVHSPPHALVHRLVPHGRHHVDLTCYHNLEAHMHLLDGFHGSGAGFEHLGRDPALVNKSPYFLREDHMVPPGTTRAA

SEQ ID NO: 317429 - protein, 74 aa, Zea mays
  Clone ID: MRT4577_52574C.1.pep
VAMVDNAAQIARLLTGYKVCLWILLSYRVKVGFPSDILWKDGKEHKRSLEMWYTIKSEHKRKYLGACVKEMDPL

SEQ ID NO: 317430 - protein, 61 aa, Zea mays
  Clone ID: MRT4577_52575C.1.pep
HRLRGGGSIREAAWTAAGARSSRRAIVWPVWCLLWACGRAVQARCSGFLAFWTSRPGRLRG

SEQ ID NO: 317431 - protein, 137 aa, Zea mays
  unsure (1)..(137): unsure at all Xaa locations
  Clone ID: MRT4577_52576C.1.pep
SSGNNAEYAGTKYSGLAIVGLGGMGKPTLAQYVYNDKRIEECFDVRMWICISRKLDVHRHTREIIESAKKGECPRVDNLDTLQCKLRDILQESQKFLLVLDDVWFEKSHNETEWELFLAXXKKKKKKKKSTLRCYHC

SEQ ID NO: 317432 - protein, 54 aa, Zea mays
  Clone ID: MRT4577_52577C.1.pep
PPVFLWRFPLFSAKMPPPKKILVFFIDDQAYLSIEPMRWASSFFFGERSSKVPK

SEQ ID NO: 317433 - protein, 112 aa, Zea mays
  Clone ID: MRT4577_52578C.1.pep
NSYYLISLIYNFVSYRFYMFVIFKLYVVKVCFTLFKKKKLGVVACNVHTQKKLGVVAITVVPTKHGRGHMIFEGGEDTLPLSRRGGAAERQRDLSVHADAGDFLSNMSAAEA

SEQ ID NO: 317434 - protein, 65 aa, Zea mays
  Clone ID: MRT4577_52579C.1.pep
CLQCHIARHCAASAFAMTSACWVLMELFLYPPSYLSGSTCFGRVMSCYIDGLCPLCTQYMCKCTK

SEQ ID NO: 317435 - protein, 50 aa, Zea mays
  Clone ID: MRT4577_5257C.1.pep
LCEPNQTYVIMTICPTNIILYPSALHLISWRCRQPTIGWTNNCTTYTRPQ

SEQ ID NO: 317436 - protein, 214 aa, Zea mays
  unsure (1)..(214): unsure at all Xaa locations
  Clone ID: MRT4577_52580C.1.pep
GRVFGRNLLWXTIVFGTIAAISRKVVADELQVFDPEGAMCLAVHQTHYMPKRWRGKENSELVRREFETLFPYTIIMLLEEMASIFITPYLLISEVPKRVDDILRFISDFTIYVDGVGDVCSLSLFNFKKHGNRNYGSPFNALKGLRSSQGKMEKSFLSFQSVYPSCEPNADGKQFLSNLQKFKERQVRQQALAQYQALEASGFVAGTRGQRDDT

SEQ ID NO: 317437 - protein, 82 aa, Zea mays
  unsure (1)..(82): unsure at all Xaa locations
  Clone ID: MRT4577_52581C.1.pep
GGSPWTSRRKSRGKTPFWVLGSSPTRLPPCPWGPRTCSPINDSPPQPPPQKFXVFTWGWLAPNQKKLVPFQQLSHLLPPGVF

SEQ ID NO: 317438 - protein, 222 aa, Zea mays
  unsure (1)..(222): unsure at all Xaa locations
  Clone ID: MRT4577_52582C.1.pep
EFVVFMIMKSLPKEFETFHIQYNTSVTDKWNIDQLLAQCVQEEERLKQTGDSVNLVKGNIPRQNKNSKKKFKKQGKQNNQASSSNNNQPRQGGSFSVPPDTCLYCKKTGHYKRKCPEFLQYLLESXGLRTSQRLPKGRRTIRVANGVEAAVEAIGDIHLKLVNGFVLLLRDVLYVPSLRRNLISVSRLDDQHIHCHFGDRQCVIQFDNKDVGLAIRRDMLFF

SEQ ID NO: 317439 - protein, 1325 aa, Zea mays
  unsure (1)..(1325): unsure at all Xaa locations
  Clone ID: MRT4577_52583C.1.pep
MLISQIAQMKPLDGSNYHSWREDIDMITTVGEIDYALRFDKPVEPTVGTPNYDHRWMQYSIDKVKWERSNDKCMIILKRSIKEPLKSSIPECETAKEYLERVASHHQGSSKAYACYLMTEFVNAKYDGNGVRPFIQKMISIVAKINKYLGSPLHEEFVVFMIMKSLPKEFETFHIQYNTSVTDKWNIDQLLAQCVQEEERLKQTGDSVNLIKGNVPRQNKNSKKMFKKQGKQNNQASSSNNNQPRQGGSFSVPPDTCLYCKKTGHYKRKCPEFLQYLLESGKDQVTFVNESLYLEYPSYSWWIDSGATVHVANSLQGLRTSQRLPKGRRTIRVANGVEAAVEAIGDIHLKLVNGFVLLLRDVLYVPSLRRNLISVSRLDDQHIHCHFGDRQCVIQFDNKDVGLAIRRDMLYLLSQSDVVNVLDIPENDPASSGRKRKRSDGETSSKLWHYRLGHISXXRIESLVKEQILHPLDFTDLEQCRDCIKGKFAKQIKKDAKHSTRVLEIIHTDICGPFPVRTVDGFNSFITFTDDYSRYGYIYPIKERSEALDKFKQFKAEVENQHDLKIKIVRSDRXXXYYGRHTEYGQVPGPFARFLRENGIVAQYSTPGXXXXXXXXXXXXXXXXXXXXXXXSYSNLPLGLWMEAXXXAMHILNRVPSKSVARTPYELWTGRKPTLNYFHIWGCPAEARIFNPGQGKLDERTTSCHFIGYPDRSKGYRFYCPDRQTKFIETRHAIFLEDDMIKGSKVLREVDLQEKRIYVPFPMVEEPHFSIPTVVTPTVTPTVGETPAANVASSSATTTEQVASPSAHIGPEPVAQDSSEDDDSVAPSDAPLQEPQVESEPEPSLRRSQRLRKSAIPDDYEVYAAENIECDEIHMSEDIDTEGDPTXXXXXXXXXXXXXXXXXXXXXXXXXXXXXXXXXXXXXXXXXXXXXXXXXXXXXXXXXXXXXXXXXXXXXXXXXXXXXXXXXXXXXXXXXXXXXXXXXXXXXXXXXXXXXXXXXXXXXXXXXXXXXXXXXXXXXXXXXXXXXXXXXXXXXXXXXXXXXXXXXXXXXXXXXXXXXXXXXXXXXXXXXXXXXXXXXXXXXXXXXXXXXXXXXXXXXXXXXXXXXXXXXXXXSYVLGIEIRRDRQKGVLGLSQKSYIENVLKRYNMHKCNASPGPIVKGDKFGEYQCPKNQYEXXKMKSVPYASAIGSIMYAQVCTRPDLAFTTGMLGRYQKNPGIEHWKAVKKALRYLQGTKGLMLTYRRSNSLQIVGYADADWGGCRDTLKSTSGYVFMLSXXAISWKSCKQTARASSTMHAEFVATYEATGQAIWIKKFVPGLRVVDSIE

SEQ ID NO: 317440 - protein, 123 aa, Zea mays
  Clone ID: MRT4577_52584C.1.pep
KAYYGFIKILCGIERVEHAVKVFRMMKGYGHAPGVKSYSLLIEKLARHNLGDRSNALFREAVARGVPVAQGEYNVDNRYVKTKKEKTVKKRLTLPEKMRLKSKRLYKLRMSFVKKPKRRMLRV

SEQ ID NO: 317441 - protein, 106 aa, Zea mays
  Clone ID: MRT4577_52585C.1.pep
GSRYRGLGGKVGEVDAVIDTVGGDVLSRSWRAIKADGAVVTVADPPPRWALEKGVVPKELAAKPHVRYMYFVLSVDAAALSKVAAFIDEGHVKPLPRVEFPFDIGL

SEQ ID NO: 317442 - protein, 50 aa, Zea mays
  Clone ID: MRT4577_52586C.1.pep
FLFFFFLLTNEIINKRHQGKSGSGISHGLTPADPPLFFSKSKQIHRCPQA

SEQ ID NO: 317443 - protein, 98 aa, Zea mays
  Clone ID: MRT4577_52587C.1.pep
RTIGKDGKPESSGQELISGSASSIDGDSPFWYFLLFASLNQVKLVIECQKNATQGRDILRCDNRQIVLEQPPISGNCLSRINSAGLFGSSRIPSLRRG

SEQ ID NO: 317444 - protein, 52 aa, Zea mays
  Clone ID: MRT4577_52588C.1.pep
ATVAFVYPTTQARDREWTLMMRPLAQLKATDCFPLSGPESSSKRRFRPFHER

SEQ ID NO: 317445 - protein, 71 aa, Zea mays
  Clone ID: MRT4577_52589C.1.pep
IPIMAYFKKGPNPSHFGPWRAKTSFLLNGQAKSTEGLGPLPNPKKALPPRKTGIISIFSMQNKPHQSGVSS

SEQ ID NO: 317446 - protein, 192 aa, Zea mays
  unsure (1)..(192): unsure at all Xaa locations
  Clone ID: MRT4577_5258C.1.pep
MEMKLTIRRVPTVVSNYQEDADKPRAGCGRNCLGDCCLPASKLPLYAFKLTPAKGSQEDAASTKLLVDILLSESPAXACLGPRDLEGIEEAKILYAFKLTPAKGSQEDAASTKLLVDILLSEWEDRMTRGLFRYDVTACETQVIPGNLGFVAQLNEGRHLKKRPTEFRVDRVSSQFDPAKFNFTKVGQEEVL

SEQ ID NO: 317447 - protein, 171 aa, Zea mays
  Clone ID: MRT4577_52590C.1.pep
GSKSRTLRPDRRRRAGDRVSSALPSRHKTISIDSQVRLHQTSLLQKHHLLYSHCAHWPLSTGKKTLKSSMCGIALVLASDRLVIVPCATATTAALETQHSCKRKGVPDELKEALRRRGPDSLGYRSRCLLADGTVVVGDGCNDGVEGKIGVSDSSGADLFFIGATLHLRGA

SEQ ID NO: 317448 - protein, 71 aa, Zea mays
  Clone ID: MRT4577_52591C.1.pep
QSASDPWLYLHPCGGVVRRLQHQQDTLVEEWSLRPQRYPCLLCLPIQLVRCPCTSMCVVRLIREMYIYIYI

SEQ ID NO: 317449 - protein, 105 aa, Zea mays
  unsure (1)..(105): unsure at all Xaa locations
  Clone ID: MRT4577_52592C.1.pep
FGSRFFDPHFVSPPWITEYCQVYTKVLVNHNKKLLGCDPETTINCAQNYGAALEICLTLDQWGIVYSLVACXSIEGPYGVAASTGCDIGEYKLCAHPAKAGSWHG

SEQ ID NO: 317450 - protein, 163 aa, Zea mays
  Clone ID: MRT4577_52593C.1.pep
CTSPTAISAPRSPDRSWRSCPSPAQSMLWICNRCAPRPRARLPPCGARRCHHLGPAADKGWPGPPPTSRPAGATAAPPAVSLALASMRRPVLHTRMPRARRPLRRHRSAMSGIRSFPVDDAYISRVYYDSTTVAWLKTRSPIPLSLQPHRPLLLSQKSPIDSN

SEQ ID NO: 317451 - protein, 106 aa, Zea mays
  Clone ID: MRT4577_52594C.1.pep
RVFLDYLYCSILKTKKADFFSKKTKKAEYGLEPFLYCLDGFQRKKRSISFVVRNASDVSSTLFLVLVDLSCLYSFLESYHIYVGLNTRPPTCFLSFHMIIIPSRAH

SEQ ID NO: 317452 - protein, 183 aa, Zea mays
  Clone ID: MRT4577_52595C.1.pep
MAPAVKMYGWAVSPFVARALLCLEEAGVDYELVPMKREAGDHLLPDFLARNPFGQVPVLEDGDLTLFESRAIARHVLRKYKPGLLVGDGPPESAAMVDVWLEVEAHQYNPSAGAITIQCLLVPFLGGVRDQAVVDENVVKLRNVLEVYEARLSASKYLAGESVSLADLSHFPLMHYFMQTEYA

SEQ ID NO: 317453 - protein, 67 aa, Zea mays
  Clone ID: MRT4577_52596C.1.pep
PTNPARRRHTTFRELQGAPLMDGVNYTLSGLRTAGNGKRSSPCHFLRNLVAYWSRPEWPTTPLLPGF

SEQ ID NO: 317454 - protein, 416 aa, Zea mays
  Clone ID: MRT4577_52597C.1.pep
MELGLALRLVAPPPLLPCLSRRALSLPPDFVSSRVLRGRRIHASRLKHGAGVVCNAIMTYSGVEEEEMVEEEMEEEAEPAVSTRPRLELIEKPDRSLALLDEYESEELGTSLCANHRSGYVAVLGKPNVGKSTLINQMVGQKLSIVTDKPQTTRHRILGICSEPEYQIILYDTPGVIKKEMHKLDSMMMKNVRSAIGSADCVLVVADACKTPEKIDEMLEEGVGNKDIGLPVLLVLNKKDLIKPGEIAKKLEWYQKFTNVDDVIPISAKFGHGVDDIKEWILSKLPLGPAYYPKDIASEHPERFFVGEIVREKIFVQYRQEIPYSCQVNVVSYKSRPAAKDFIQVEILVEKESQRGIILGKDGKSIKMLATASRLDIEDFLQKKVYLEVEVKVKENWRQDERLLKRYGYGGEIQAL

SEQ ID NO: 317455 - protein, 134 aa, Zea mays
  unsure (1)..(134): unsure at all Xaa locations
  Clone ID: MRT4577_52598C.1.pep
PAGPGYSCQVNVVSYKSRPTAKDFIQVEILVEKESQRGIILGKDGKSIKMLATASRLDIEDFLQKKVYLEVAPSSLMWLPWTCLPSPAATQFLSDSDARDSFLVLHXEVKVKENWRQDERLLKRYGYGGEIQAL

SEQ ID NO: 317456 - protein, 103 aa, Zea mays
  Clone ID: MRT4577_52599C.1.pep
TVAVFFVGTTTGTGAENTRRTNRGAWAADAAGTDTIFFVGTRRGASGPIRPVQQRAHWSTTQACAAGGTAITGVGAGAAAEAGGSSPRFKIRTSGRTLCAHAW

SEQ ID NO: 317457 - protein, 201 aa, Zea mays
  Clone ID: MRT4577_5259C.1.pep
ESGRREAVARDHPIRNLATPPDRRARTQTLETVAMDSGGGGGSGAHKAASGSAPSPAPNPTAMLSALMSKRAKLQEELRSIERQVYDMETTYLQETNQFGSVLKGFESFLSSSKNTSNLKRSRKFQADERLFSLSSVTSPAVDEHLAGRDDGREYGAGRSKGGSTPANGQGKPKKGGRPGGRDGKRLRPSNDPDLDDEDDY

SEQ ID NO: 317458 - protein, 121 aa, Zea mays
  Clone ID: MRT4577_525C.1.pep
KTSMSKDLEKCSPSGTTPTTSVSPVESKKHEKTVPNYLRATRGSCHDFCKYGHKNPSEEEPGISGGRRKKIPAHLINLTLHRSAILDRSKDIKNRSVSLAKSSISLGEAERFAPKKASASR

SEQ ID NO: 317459 - protein, 42 aa, Zea mays
  Clone ID: MRT4577_52600C.1.pep
SPPHPASESLFGRRSTLISAIGRECVRAADWFGRLLGASASA

SEQ ID NO: 317460 - protein, 150 aa, Zea mays
  Clone ID: MRT4577_52601C.1.pep
GKPANGEGKKEKKRERGGVKEKAKITVTPGETPTIRGFKGARQGGAHRQKGWENGGRAARWGPPNRQKGGKKGFPSKRISRGTPRVFQLKTGKKDGRGNCNRGPIWGPIGAPKRHPQRPPSVGENPKKRPPQGGPGKEKNIFFLNFFLRF

SEQ ID NO: 317461 - protein, 162 aa, Zea mays
  Clone ID: MRT4577_52602C.1.pep
LWSFFFFFFFIFFIFCPFVPSLYLPFYPQNKKKGKNSHSQLPETARAAPPSLPNQSKTPLKRPQGPPRPPPAGPQQDLEEPGGTGFTENTLKPRGRPPGGPGGQAGDRAPRPPRTKSASNPWGPPGGPRKPPISGSTLETLLGSNAGGAGRCGTFATFAGFS

SEQ ID NO: 317462 - protein, 176 aa, Zea mays
  Clone ID: MRT4577_52603C.1.pep
IMSGLGGRILESSARAAGENGLQLLGTLSKPFSRAELLELLAKDTHETLSIQSSPISPVSDRQIGDALKAEAFVAHFQPKISCLTGGLVGFECLARWPQPDGSMIPPDQFICFAEQKGLIDALTRQVYDYALANLPLCNLRNQLKYALNLSPINLKDATFPHWLRNKCCEHNVKPS

SEQ ID NO: 317463 - protein, 62 aa, Zea mays
  Clone ID: MRT4577_52604C.1.pep
PTRPPTRPPTCFALFTNKTGGGSLATRKVTKLNHLNYLPNITASTMCHMVNSMSSLMAPGGP

SEQ ID NO: 317464 - protein, 410 aa, Zea mays
  Clone ID: MRT4577_52605C.1.pep
MAVDIPQWGLDAIDKIRRGFLWRGRKEAKGGHCLVAWGKVCRPLKLGGLDLFPRLIGAIPKRLINCRTVQEAIVSAKWISDIRGALSVGVLTDYIQLWELISGIELQPEVEDMHIFSIASNGVYSAKSAYEAFAMVPAIAMDQLLFIVLFDQVDSMILRDPWDWLLSAQGVGSYVERLAVRSCDPNIPLYVPSFIKKYVSWFLKPEDNKIYVRQGASADSLRMVHAWYGVWPRLFWCMGHYRDSGVEVPMVQLLGFLDDIYPYHVFKLSKALYGLKQAPRAWYECLRNFLISNAFKVGNADPTLFTKTCNGDLFSCEEFNKLKVQKFEMSMMGELTFFLGFQVKLLKEGIFVSQTKHTQYILKKFGMKDAKPIKMSMGTNGHLDIEARGKSVDQKISIRPKECHLVAVKR

SEQ ID NO: 317465 - protein, 61 aa, Zea mays
  Clone ID: MRT4577_52606C.1.pep
TVECGPPGLCLADLKSCKCILGFCQTKKIMLTKTFGFFLLGPFVLIPPQMQHVFEWGALLA

SEQ ID NO: 317466 - protein, 79 aa, Zea mays
  Clone ID: MRT4577_52607C.1.pep
RKLRVASYINSPKVVTLPLIGGAHSQYLHLYVPYASYSLFGAYKCSSFIFVVHNVVSCTPIICISARLYICILWKCFHS

SEQ ID NO: 317467 - protein, 209 aa, Zea mays
  Clone ID: MRT4577_52608C.1.pep
RGGRDDYGSRGRYDSGGTDGRSRRSARGRSRSRSPSPKRSHHHEARRSRSRSRSRSCRNFRASRSKGHSPVASSRHEKAAVISGSTQPNLGYAEHKSPPRSHSGDDHVNHPDQKDDHMGDGKMERVDLDRSPSPQYDKSAPYSPAYNGKASDSMSPNVQPKADAKYVKPSGKPEPASPLRHSKGRDDDEGIIDEDGEIAERDLRASAAV

SEQ ID NO: 317468 - protein, 49 aa, Zea mays
  Clone ID: MRT4577_52609C.1.pep
HYHEKKDGHLHWIWVKGRTIHYTMLPPFFLQCSSNLHPPSFFLYILFIN

SEQ ID NO: 317469 - protein, 89 aa, Zea mays
  Clone ID: MRT4577_5260C.1.pep
EHGFPPVHKNGDFSPPGNSSFPFSQLAGKEYKWFFPLGQPSPTPFFGPPPSLVLKIPLRAGRKGFPLLHKNHGSFRGSIPGGRACNKPA

SEQ ID NO: 317470 - protein, 245 aa, Zea mays
  Clone ID: MRT4577_52610C.1.pep
MAVQISKKRKFVADGIFKAELNEFLTRELAEDGYSGVEVRVTPTRTEIIILATRTQNVLGEKGRRIRELTAVVQKRFGFPEGSVELYAEKVATRGLCAIAQAESLRYKLLGGLAVRRACYGVLRFIMESGAKGCEVVVSGKLRGQRAKSMKFVDGLMIHSGDPVNYYVDTAVRHVLLRQGVLGIKVKIMLPWDPTGKIGPKKPLPDHVSIVEPKDEILPTTPISEQKGGKPEPPAMPQPVSRAHG

SEQ ID NO: 317471 - protein, 102 aa, Zea mays
  unsure (1)..(102): unsure at all Xaa locations
  Clone ID: MRT4577_52611C.1.pep
RLRLRRPXRRRPGAAXXXRLPRLLPRPAAXRLAXGLARGRXXRLXLLSVAXALXVFPVSCPPPXXRLSLXXXLGRLCSAWGLPLVRLXPXPAXAGWFFXCVP

SEQ ID NO: 317472 - protein, 84 aa, Zea mays
  Clone ID: MRT4577_52612C.1.pep
LAKQFVQVQNTMYNRLICIMSKPDCPRDTSIAAAAPLLSMFHDSILAGHCSAYHLCGAARRGSFTLWPFGYPVVERTATCPPFD

SEQ ID NO: 317473 - protein, 92 aa, Zea mays
  unsure (1)..(92): unsure at all Xaa locations
  Clone ID: MRT4577_52613C.1.pep
XSFFFFGSQYFRGGVXQPTFFLSFXXKSDTLKFYFTSCVPPRYLNRASLLAPNHSGGGWSKPWRGIFPRDEMSVLGFRSRPTTAVSVPFWGC

SEQ ID NO: 317474 - protein, 143 aa, Zea mays
  Clone ID: MRT4577_52614C.1.pep
PSGLEVRRAVYPVEGRLFLHIPLSAVQGGGFYARERRAKHLFRGVCSLYSLDMRHRNLFSAISNVLYNIMRNNLGLRICSRLHHISTHKRTRRLDLLGNFVIARFLWLHPALSLPGKAPGRFKIAFFISCDLCRGGCSQKPIL

SEQ ID NO: 317475 - protein, 64 aa, Zea mays
  Clone ID: MRT4577_52615C.1.pep
MDLAGVQTLKLRTNRCMECLLITQLFEIDDKCTDQEAPWSVVCQSMLRPSFFLLPIILYYVIYQ

SEQ ID NO: 317476 - protein, 108 aa, Zea mays
  unsure (1)..(108): unsure at all Xaa locations
  Clone ID: MRT4577_52616C.1.pep
RGPATATTRGKKLTPLDLGGSPETLAGDRRDFLRXAITGALGDNGLARDLFEHALSNAPEKLPLQSSPSKSVRVSTTLVEVLRRAQSTQKKRXRTLLDLLQDSQISVE

SEQ ID NO: 317477 - protein, 110 aa, Zea mays
  Clone ID: MRT4577_52617C.1.pep
ARRMHLPQLNEPPVVDASTELRTTLPATVGRPPSPSTRRRVLDSLFHRAPAPDRPHSARRHLRVPGHSPGRTSSSSRLQAASKPRSSPRILPRPSSTVRPTLQRPIGRIT

SEQ ID NO: 317478 - protein, 111 aa, Zea mays
  Clone ID: MRT4577_52618C.1.pep
HVTGTKDFFFFRYDINELNMLADALGGKLSAIHRWGVSHLGLSLRSCVKREKDQDSKTPRRVTDGPRRSYMSQASTVSLAPSLVCNEQNNNGNKMLEKASWKRKKKKKKAA

SEQ ID NO: 317479 - protein, 60 aa, Zea mays
  Clone ID: MRT4577_52619C.1.pep
SHAPYHPPLTSNTNTSTPYSILSPTTAPLIQTTIVHANSNLLKTYIASPYHSPLLVMPLK

SEQ ID NO: 317480 - protein, 117 aa, Zea mays
  unsure (1)..(117): unsure at all Xaa locations
  Clone ID: MRT4577_5261C.1.pep
MEMKLTIRRVPTVVSNYQEDADKPRAGCGRNCLGDCCLPASKLPLYAFKLSPAKGSQEDAASTKLLVDILLSEWEDRMTRGLFRYDVTACEXTKVIPGNLGFVAQLNEGRHLXKRPT

SEQ ID NO: 317481 - protein, 492 aa, Zea mays
  Clone ID: MRT4577_52620C.1.pep
MHGPYPTAAAAAASSSDDMAANGMKVALHRQVSGGSMKQNAELRRQASLESPRTGRATSRFLFGRQSSMDPNRRRGRSQSPVRAPEDLGVPDNLDATMQLLFFACQGDALGIEGLLRSGVDVNSINLDGRTALHIAACEGHRDVVRVLISWKANIDARDRWGSTAVADAKFYGHSRVYDLLKFHGAKVPRTKRTPMMVSAPAEIPEYELNPGEVQFRRGCDVTPGVYHIAKWNGTKVSVKILDRDGCSDQEAANSFRHELTVLEKVRHPNVVQFVGAVTQSIPMMIVSELHEEKDLSVCIQKKGKLKPQKVLRYGLDIARGMTYLHQCKPDPIIHCDLKPKHIFLDSGGQLKIAGFGVTRMSKVGTDKVRLIYHGALVDSFSYHTAPELYRNDAFDSSVDSYSFGFILYEMVEGSVRAPEDSGHSIRFEGLRPSLKGRLKGYPPDFKALVEECWHPQAMARPTFSEIIIRLDKIYAHFDKHGSWKDSLKLWK

SEQ ID NO: 317482 - protein, 108 aa, Zea mays
  Clone ID: MRT4577_52621C.1.pep
KTTANVHLFLTLQGGGGGGRIRVVLPNFTHNLLQFVAKNKKPITMPHDSPVSTLYKVQPVLNLPRERDAFAARYVCTQRRRRAVQAMPSIISCKKQRDKQRRAHSQCV

SEQ ID NO: 317483 - protein, 58 aa, Zea mays
  Clone ID: MRT4577_52622C.1.pep
DLSAFPSTPFQIINHFSFSRYIFFLYTYINVMSKCIVKTTHYISNYKNLRYMLCLESV

SEQ ID NO: 317484 - protein, 91 aa, Zea mays
  unsure (1)..(91): unsure at all Xaa locations
  Clone ID: MRT4577_52623C.1.pep
RAFGPSLVARGVRAPCARVFARLCSRLLCWPCMGLFSVCFMSGPVRGKRNPFLCLGFRWGVGFSVAIAPPFLXWVFLXLSQIGKIGWGKGG

SEQ ID NO: 317485 - protein, 111 aa, Zea mays
  Clone ID: MRT4577_52624C.1.pep
LLTLSLYLDFCPLFEHTFRLWTREEKEIAIVSHSGFLFHTLSMYSKECHPTIRDEVSKHFANCELRSMVLVDRSMLGSYSSRFNYAGKNPTGLDVPSDIADKKQVDEAQKN

SEQ ID NO: 317486 - protein, 61 aa, Zea mays
  Clone ID: MRT4577_52625C.1.pep
SATYASVCLLLLSAPQPGHIMHPARMYVWHCEWSSVSHSSYSLSANATSYVERSGSLVAAP

SEQ ID NO: 317487 - protein, 47 aa, Zea mays
  Clone ID: MRT4577_52626C.1.pep
RFAKVICVLVISALNDTSDALSIFHKLLTSKDTIISNPSLQNSHETL

SEQ ID NO: 317488 - protein, 161 aa, Zea mays
  Clone ID: MRT4577_52627C.1.pep
MRIAVVAPVAAAYPCSSSLAAPASATSRAHVAAAGMSYRASSFVGGGLAAVVASVAARPRRAGSGRGDALGCKCLFGLGVPELAVIAGVAALVFGPKQLPEIGRSLGKTVKSFQEAAKEFESELKKEPGEGGDQPPPATPTATGVGGAEKGLEASSSKEST

SEQ ID NO: 317489 - protein, 95 aa, Zea mays
  Clone ID: MRT4577_52628C.1.pep
LIRQQCPGAAADMIASELSCSYSHTLDARAKLDALHWHCNAGRAYPIISMLLLPMYVVLISALLAMCQLMRSTHSCHVWMASIGASTSRFRCHSH

SEQ ID NO: 317490 - protein, 58 aa, Zea mays
  Clone ID: MRT4577_52629C.1.pep
GSQDTPIYICKITRFKCISYNTIWMMNRHSIIHQDLAIHSIIIASLSLRWRKISSCLR

SEQ ID NO: 317491 - protein, 51 aa, Zea mays
  Clone ID: MRT4577_5262C.1.pep
TRPTYLVTVLKVHYFIHVCSIFTLKKKKKKKKKKKKKKKDKKKDKGGSSNR

SEQ ID NO: 317492 - protein, 71 aa, Zea mays
  unsure (1)..(71): unsure at all Xaa locations
  Clone ID: MRT4577_52630C.1.pep
VKHKKATCPKPAWIQRPGGPCTFFFSIYKPQRWXATKGHLGRTTIGRQKNXFLLGLEHVGDQVDHPVAVTP

SEQ ID NO: 317493 - protein, 61 aa, Zea mays
  Clone ID: MRT4577_52631C.1.pep
RLHSMANISSLFLSSKWQRIRTEDICHGMKSTNDYHSELFGCTPVVGSLYLWAPLTNQYMW

SEQ ID NO: 317494 - protein, 183 aa, Zea mays
  Clone ID: MRT4577_52632C.1.pep
AAKALCPVRGGSYHLRSVCSNAHSRRCHDLGGTGLHGGLLAAKAPCQYVEGAHLCKAHVMAWSSGFSLQVSLSLLAPLLRQRSSVNKGHIDLMSGRCFPPLLLSYGAGWWHAEPGCAVGCCCRLEGRSSSLGSAHACAVPHLEGRTAVERRCYEGPCGCAMVLMCWRVCCSLVVLVVDRLLSS

SEQ ID NO: 317495 - protein, 203 aa, Zea mays
  unsure (1)..(203): unsure at all Xaa locations
  Clone ID: MRT4577_52633C.1.pep
MSCFGCCGDEDTQRAPDNRNQYPGNHPARNDAYRTADPTPKGPQPVKVQPIAVPTIPMDEIREVTKGFGDEALIGEGSFGRVYFGTLRNGRGAAIKKLDSSKQPDQELLAQVSMVSRLKHENVVELLGYCLDGNTRVLAYEFATMGSLHDMLHGRKGVKGAQPGPVLXWIQRVXKIAVGAAKGLEYLHEKAQPHVIHRDIKSS

SEQ ID NO: 317496 - protein, 81 aa, Zea mays
  Clone ID: MRT4577_52634C.1.pep
VILLMDSIEIKVMILVDQVVTTFLIAPNSKRNTPNVAKVCSKIPTKAAREVAKTLLKKEIGVIVLTTNLTNTASTFLHATV

SEQ ID NO: 317497 - protein, 96 aa, Zea mays
  Clone ID: MRT4577_52635C.1.pep
SACAIPDTPSAAAAPSRMLSGVMAPRSRSASSLNPARSSGSSPATPRRSAITGSMFYYSSPAPPAPARTLINARLHALMTTRTVQVLSFLATENRK

SEQ ID NO: 317498 - protein, 59 aa, Zea mays
  Clone ID: MRT4577_52636C.1.pep
RLKPFVLHPGGVRVLSPSCWSQLAFMFKICMPGQPPLKRVCFLGKVLNLKPFFENKFSF

SEQ ID NO: 317499 - protein, 97 aa, Zea mays
  unsure (1)..(97): unsure at all Xaa locations
  Clone ID: MRT4577_52637C.1.pep
THACRRKPMEGSLCASLHDSLVAKGYTPPACWRGLXFRPLKRSFLASPCGFWGSLEPPDGEKYPSRVKGPRGXSGADPXLQEGWSRTLLKKPILLVM

SEQ ID NO: 317500 - protein, 105 aa, Zea mays
  Clone ID: MRT4577_52638C.1.pep
ALLWVPLWQTFTSCWASRCAFEPCVVQYHQSRGQPCGQLSFDPYCGSLCLRVGPGCNVLTQVCQCFFQCLLEIPLVCPTMWPSASPSYLPWGLHGSGPGTAGAHA

SEQ ID NO: 317501 - protein, 132 aa, Zea mays
  Clone ID: MRT4577_52639C.1.pep
GPPLRRTLYFFFFFIPKQHINRSRKTILGGPTNQQPIQGFEGLIALIVDSPGAAKPGIQRLPRVRVAGAPAFVCTREAAVKGDRLPVHFTVYKACSFTHGAHQWLHLFTVSGKAVCHPYGEEVVPVLVPTVS

SEQ ID NO: 317502 - protein, 72 aa, Zea mays
  Clone ID: MRT4577_5263C.1.pep
LWLQRLKKYTMSEREKMIFLQVKATSSRGARHLSWQRNDRSVAFNTPKILYSHLAEARAKDTGIIHAASDLF

SEQ ID NO: 317503 - protein, 83 aa, Zea mays
  unsure (1)..(83): unsure at all Xaa locations
  Clone ID: MRT4577_52640C.1.pep
WDYRRAHHEAQDDVFFAFEYMILATIIASSTVKTILNDIDKLRDGLRERKGENTAYYALIWDLMHXLVYMLLYMLIFINFGEH

SEQ ID NO: 317504 - protein, 53 aa, Zea mays
  Clone ID: MRT4577_52641C.1.pep
CPIGSFLCFWSDQRQKKKNRKKPRIKQKKKKKKKKKKKKKKKKKKKKKKTRGG

SEQ ID NO: 317505 - protein, 61 aa, Zea mays
  Clone ID: MRT4577_52642C.1.pep
LHTLVSAPGKFINTAGPYKYLIWNTCTKGYTSLTWMTVTTNECVMPNKTYIACHGIDLNQF

SEQ ID NO: 317506 - protein, 122 aa, Zea mays
  Clone ID: MRT4577_52643C.1.pep
QKQVEALQVPVHPLGLQRLVKVLKGRGTLKGGDHRRGPGIGAPALAPPGNRLGRVPVAADFKPRKPSFGGLIKPPEGVCQQSSQGVYPERGTRTSTTSSKQERHVGATVSGQLADTGEALAL

SEQ ID NO: 317507 - protein, 45 aa, Zea mays
  Clone ID: MRT4577_52644C.1.pep
SIHSHANKPLNLLKNVGPSIETYPSYPTLHLIPFKCLRTNSITHR

SEQ ID NO: 317508 - protein, 88 aa, Zea mays
  unsure (1)..(88): unsure at all Xaa locations
  Clone ID: MRT4577_52645C.1.pep
GRVGVGNGAATLFWSDRWIQGQRIADLAPQVFATVPKMRISKRTVHEALTDHSWVMDIXGALTXGVINEFLSLWDLLSVVVLQPGIDD

SEQ ID NO: 317509 - protein, 117 aa, Zea mays
  unsure (1)..(117): unsure at all Xaa locations
  Clone ID: MRT4577_52646C.1.pep
LFIFINLLNGNNINVRGRAQLTLTNVTXDSPKCHDLLLDHHGLFHLLQYINXHANLSILNNNTWTLSNFCPENPHPNFDHFKPTLPALXQLIHSHDHKVLTDTFCTLSYLSDFTNDK

SEQ ID NO: 317510 - protein, 56 aa, Zea mays
  Clone ID: MRT4577_52647C.1.pep
SVLRQWSRCGSACAWPLLAGSSRRLFCGSSAPRAMRRSRGLVHDSDVASKSQFKVL

SEQ ID NO: 317511 - protein, 63 aa, Zea mays
  Clone ID: MRT4577_52648C.1.pep
FKGQAVGISRPANRNCRQNRDVLFLLGFQFCIGPFKKTACMLGSDLTSFGTLNFSCVSHIPSL

SEQ ID NO: 317512 - protein, 46 aa, Zea mays
  Clone ID: MRT4577_52649C.1.pep
VDECYLSDLVLGNKFQTTMYHLDVSRSSNQIPQGLVSNQNAQTSDC

SEQ ID NO: 317513 - protein, 58 aa, Zea mays
  Clone ID: MRT4577_5264C.1.pep
IITKKKKLLLLGAGTEILYYILPFNRVTKTEYIMRLRCRYIRNNYSGPVRSVISIMDR

SEQ ID NO: 317514 - protein, 401 aa, Zea mays
  unsure (1)..(401): unsure at all Xaa locations
  Clone ID: MRT4577_52650C.1.pep
MAAEMVKAATSDKLKEMDWAKNIEICELVAQDPGKAKDVIKSVKKCIGSRSKTTQLFAVMLLEMLLNNCGEPVHRQVIDNGLLPILVKIVKKKTDLPVREKIFLLLDATQTSLGGAKARFPQYYEAYYELVSAGVQFSNRPNVLVTRAEVPVPETRTEPNNESLSTRLTEAQQEVHTQPVPDASIVQKASSVMEVLRDVLNSMDPRHPEGATDEFVLDLVEQCTFQKQRIMHLVMTSRDETLVSQAIELNEELHKVLVRHDALLSVHPTTAVASNIKEEEEEEDAESLYRRLRKGKALSQDYTDDLVPSXSDPCPRTSCHPDKRLGALNIHLPDGEEPRHDPAPLIPPPPAKHAERERFFQEKSIDXIDGGVASLPGHLRGLSQHSRDSSSSCSGSTDYGD

SEQ ID NO: 317515 - protein, 406 aa, Zea mays
  unsure (1)..(406): unsure at all Xaa locations
  Clone ID: MRT4577_52651C.1.pep
MAAEMVKAATSDKLKEMDWAKNIEICELVAQDPGNAKDVIKSIKKSVGSKNKSTQHFAVMLLEMLLNNCGEPVHRQVVDNSLLPILVKIVKKKTDLPVREKIFLLLDATQTSLGGAKAKFPQYYEAYYELVSAGVQFSNRPNVVVTRAEVPVPETRTEPNNVSLSARLHEAQQEVHTQPALDTSIVQKACSVMEVLRDVLNSMDPRHPEGATDEFVLDLVEQCTFQKQRMMHLVMTSRDEMVVSQAIELNEELHKVLVRHDVLLSVHPTTTVASNINEEENAESLYRRLRKGKALSQDYTDDSVPSFRSMPEDKLRRLLTIQSPHPDKRLGALNIHLPDGEEPRHDPAPLIPPPPAKHAERERFFQEKSIDXIDGGVASLPGHLRGLSQHSRDSSSSCSGSTDYGD

SEQ ID NO: 317516 - protein, 470 aa, Zea mays
  Clone ID: MRT4577_52652C.1.pep
MGPFYAEGVQRLVSSNMGYLMRIAAADKRQELRIFSQEVIRFGNRCKDPQWHNLDRYFSKLESEITPQPQLKETAKADMQQLMALVRHTGDLYHELHALDRFEQDYRRKLEEEKRSVTSERGDTVQIIRQELKSQRKHVHNLKKKSFWSKPLDSVMEKLVDIVHFLHVEIQDTFGPCVGESSESQESRQTLGSAGLSLHYANIISQIDNIGSRSSVPPQSTRDALYQSLPPNVKSALRTRLITPTESQEVPITRTRSSMEKTLQWIVPVANNTARAHHGFGWVGEWANTGNDPAQKQAGQPGALKIETLYHADKEKADACVLDLVVWLHILISYSRPANRSASRSPVRSPTHAAPRVVVAAATSGRPAGLTREEREMLQDAYTRRRSPGAGKSKSQELAAARGNRVALSRNDRLSKSGPSSREHGGRVFPLATGRSAAASSPVAVGFDIDRIKALEDVVDRVDAQKQTRL

SEQ ID NO: 317517 - protein, 265 aa, Zea mays
  Clone ID: MRT4577_52653C.1.pep
MAAEMVKAATSDKLKEMDWAKNIEICELVAQDPGKAKDVIKSVKKCIGSRSKTTQLFAVMLLEMLLNNCGEPVHRQVIDNGLLPILVKIVKKKTDLPVREKIFLLLDATQTSLGGAKARFPQYYEAYYELVSAGVQFSNRPNVLVTRAEVPVAETRTEPNNESLSTRLTEAQQEVHTQPVPDASIVQKASSVMEVLRDVLNSMDPRHPEGATDEFVLDLVEQCTFQKQRIMHLVMTSRDETLVSQAIELNEELHKVLVRHDALLS

SEQ ID NO: 317518 - protein, 64 aa, Zea mays
  Clone ID: MRT4577_52654C.1.pep
NLLLLSTKSNLASYHSIYCIFNCCISTLFFSLKRAEELHIIILREEKRSKVDQSTMPNGQTRPV

SEQ ID NO: 317519 - protein, 210 aa, Zea mays
  Clone ID: MRT4577_52655C.1.pep
EHHCIITKLDVWAPKLKNSPAGLCRNDPAQKQAGQPGALKIETLYHADKEKADACVLDLVVWLHILISYSRPANRSPSRSPVRSPAHAAPRVVAAAAAASSGRPAGLTREEREMLQDAYTRRRSPGAGKSKSQELSTAAAARGNMVALSRNDRLSKSGPSSREHGGRVFPLATGRSAAASSPVAVGFDIDRIKALEDVVDRVDAQKQTRL

SEQ ID NO: 317520 - protein, 601 aa, Zea mays
  Clone ID: MRT4577_52656C.1.pep
MESAAIGSQSPLSFPSSLCKGKVSSSLSIYNVKIKSNCRLEVVCHGMLATRKFMQRKKKEEVFKDGADETEQMNWRRMMREIEQEGSAVPILKTQRNRKEPLPRDVILGTLIRFKQLKKWNIVSEILEWLRTQHWWDFSEMDFLMLVTAYGKLGDFSRAERVLKYMNKKGYQPSVISQTGLMEAYGRGKQYRKAEAVFRRMQTSGPQPSPVTYQIILKSLVEGDKYKEAEAIFEDLLNEKRTSFKPDQKMFHMMIYMYKKAGDYAQARKLFAQMSERGIPLSTVTFNSLMSFETEYKEVSNIYDQMQRAGLKPDVVSYSLLIKAYGKARREEEALAVFEEMLDAGVRPTRKSYNILLDAFAISGLVEEANTVFKAMRRHRVEPDLCSYTTMVLAYVNASEMNGAEKFFRRIKEDGLKPNVVVYGTLMKGYSKLNNLEKVMRVYERMRIQGVEPNQTIYTTIMDAQGRNSDFGNAVIWFKEMEARGYPPDQKAKNILLSLAKTPEEEQEANDLVGNGPVQLEVKPDDGEVDGDDGHEVIQTDVENHRLLDDTRARNHVNGRIRAGDDYNFDEEDDDDDYEEEEDEEFDLVSFKDKRKLNFAS

SEQ ID NO: 317521 - protein, 87 aa, Zea mays
  Clone ID: MRT4577_52657C.1.pep
SLVVPLFLCLLVCLLGHHSFFRYTQSFRRDTTSNIGQVQDPSSGFHHHHHHQHIIISHLVQSMLDLYWMWYHWRRLGSGGCMILLIS

SEQ ID NO: 317522 - protein, 100 aa, Zea mays
  Clone ID: MRT4577_52658C.1.pep
SSTSCRCRCPSPPRWPSRSHTLVTQLFCWTWQFLGHGLFEKKGPSVSDLPEVFLMEPFLIFLQILNKLFGYEPYPGFCKNVDRKIEADLMASESSSRGRT

SEQ ID NO: 317523 - protein, 153 aa, Zea mays
  Clone ID: MRT4577_52659C.1.pep
MDPACVSEGDNSKNLHKIDVTVNSYFAVLDGKKVYNRGRTINLVVNPEHYTLIDLEKDVDSYFKWGSCQKPIFWVVEKGDKWQCKLTSDAQLSDLVSSFDLVKLFMTMGRCKEGEETLHVVTDVVGKEMLAAAYPVGKEMDVDNIVYEEMHVD

SEQ ID NO: 317524 - protein, 124 aa, Zea mays
  unsure (1)..(124): unsure at all Xaa locations
  Clone ID: MRT4577_5265C.1.pep
YKCEVKLTSLMATPRALPTLIAFRLCISWWWEYVKRDIPISTPRKPSLWTHDLRPKRPPIIPLHYKGEPKSWELEXGGMRKWKVVWDAGXPPTLSHCAYSGFFFFFFFFFFXGILYPAGLEVPN

SEQ ID NO: 317525 - protein, 199 aa, Zea mays
  Clone ID: MRT4577_52660C.1.pep
MGAKAAHRRGVLDLEAQFAFFRSQHRHPVNAAAHVLLTWPILFTNLLILHFLPLPLPVSPALALALAYAAAYLAVDRRAGAVAGLLFLAAWAASRALAARLGFALSWKLVLVTQLFCWTWQFLGHGLFEKKGPSVSDLPEVFLMEPFLIFLQVTTGTADKHILNKLFGYEPYPGFCKNVDRKIEADLRASESSSRGKTT

SEQ ID NO: 317526 - protein, 71 aa, Zea mays
  Clone ID: MRT4577_52661C.1.pep
TTIHNDVFNNPVAKGGGHNQKVLQHQVLQTTTGTRAAHKPDDDRIRILLVLITIITFLTLIKLRTNLLVVL

SEQ ID NO: 317527 - protein, 161 aa, Zea mays
  Clone ID: MRT4577_52662C.1.pep
MSSGGGGGQQFRYTQTPSKVLHLRNLPWECAEEELVELCKPFGRIVNTKSGVGANRNQAFVEFTDVNQAISMVSYFASSSEPAQIRGKTVYIINNKSPGETAGNVLLVTIEGVQSSDVTIDVIHMVSSKILSFSCLLKYLDGCVSMVMTNLKYACYFLDCR

SEQ ID NO: 317528 - protein, 67 aa, Zea mays
  Clone ID: MRT4577_52663C.1.pep
SDACTHDLPNAQRHWMKSTPSFISVDHDSYVSGTASLRILQGPKLNQRLIPLFSRRRSESPRTLDDR

SEQ ID NO: 317529 - protein, 137 aa, Zea mays
  unsure (1)..(137): unsure at all Xaa locations
  Clone ID: MRT4577_52664C.1.pep
MARTKDMASNPYGGIAPRKXLVIMVERKSAPSTGGVKKTHRFRPXGTVVLREIRXYQNSKELLISMLPFLSLVREIDQDFXTDLRFQSSAVSSMHEESEAXLMSVFKDTMLCTIQAEERDHHDQGHXFDRRIRAERC

SEQ ID NO: 317530 - protein, 240 aa, Zea mays
  unsure (1)..(240): unsure at all Xaa locations
  Clone ID: MRT4577_52665C.1.pep
MSSGGGGGQQFRYTQTPSKVLHLRNLPWECAEEELVELCKPFGRIINTKSGVGANRNQAFVEFTDVNQAISMVSYFASSSEPAQIRGKTVYIQYSNRQEIINNKSPGETAGNVLLVTIEGVQASDVTIDVIHMVFSAFGYVHKIATFEKAAGFQALIQYTDADTASAAREALDGRSIPSYLLPEHVTSCCLRISFSAHKDLNIKFQSNRSRDYNNPYXSINYSAMDGTLQPAVGADGREV

SEQ ID NO: 317531 - protein, 408 aa, Zea mays
  unsure (1)..(408): unsure at all Xaa locations
  Clone ID: MRT4577_52666C.1.pep
MSSGGGGGQQFRYTQTPSKVLHLRNLPWECAEEELVELCKPFGRIVNTKSGVGANHNQAFVEFTDVNQAISMVSYFASSSEPAQIRGKTVYIQYSNRQEIINNKSPGETAGNVLLVTIEGVQSSDVTIDVIHMVFSAFGYVHKIATFEKAAGFQALIQYTDAATASAAREALDGRSIPRYLLPEHVISCCLRISFSAHKDLNIKFQSNRSRDYNNPYLPINSSAIDSTLQPAVGADGRKVEGQGNVLLASIENMQYAVSEDVLHTVFSSFGTVQKIAIFEKNGGTXQALIQYPDVNTAAVSKEALEGHCIYDGGYCKLHLSYSRHTDLNVEAHGDKSRDYTISAGVIQGAPQPPGIQATTPGWQXQPSSSRAIMPTRCPSSNPSANVQVPNWTPXNSGDSPAPGTYPG

SEQ ID NO: 317532 - protein, 255 aa, Zea mays
  unsure (1)..(255): unsure at all Xaa locations
  Clone ID: MRT4577_52667C.1.pep
VSPLLPPSPRVPIPSPLCSAXPAAMVPARRPXWSTSPPSPIXPTAHPPAHPHASMKSPSPGAPXLPSPTARPLVPFREPTIAGRRSSSSAXPSLPLPNSSSPPXSPSRVPPHPSWPWMPSPAAQLQAPAHRVXPAVPSPCVSAPASPPGSAXSSQFTPAPCPCARPVACCRRGPQRTACPAPWRAGPTRLAPASPPPQPHGRSSRPTSSPLATGSRAPAHSPSSPCXPSPPARGAPXPAGVAXAPVPPSVKIRPN

SEQ ID NO: 317533 - protein, 136 aa, Zea mays
  Clone ID: MRT4577_52668C.1.pep
MQFLRGSGGGGGGFPVVAWEVLRRHFSKKRSVDVRRINPKVPKEEAVAISGRLLQILSDHGPLTVANTWNHAKDAGIAGLNSKTHMKILLKWMTGRNVVKLTCVHVGNAKKFLYSPSTESSSSSAGASPSSTSASQ

SEQ ID NO: 317534 - protein, 41 aa, Zea mays
  Clone ID: MRT4577_52669C.1.pep
SNRTSYSKHDFMFVLIAPPPVLGVVYSASCGTSCHLLSHTL

SEQ ID NO: 317535 - protein, 83 aa, Zea mays
  Clone ID: MRT4577_5266C.1.pep
SSASGGPSGYTVGGGLPCLVGVFCPPCGWGAALPAAGRGEKPVSFAGRGGAPPFFVGGGRVFSIGASQHATQITERAKSKEAE

SEQ ID NO: 317536 - protein, 125 aa, Zea mays
  unsure (1)..(125): unsure at all Xaa locations
  Clone ID: MRT4577_52670C.1.pep
GGRVLHGRPADLXVTLRAXQDPVCPXENRDLHAXADLDAPQALVGGAVQVPTLSGDDYTQGKPCAQPEQNEALRGKGSNTIHSPHYRYQYVHYTVNXPSKIXTYKRPELIDELAHDEQGQHKNDT

SEQ ID NO: 317537 - protein, 71 aa, Zea mays
  Clone ID: MRT4577_52671C.1.pep
LLQVANEVFQENIVDRGCLLGVGMVVSDQRDGLFSTVPLVREMFSNPLTIMSSYSICGGYSFWHCHFSLGG

SEQ ID NO: 317538 - protein, 57 aa, Zea mays
  Clone ID: MRT4577_52672C.1.pep
ETSTHIERFNLLSQQQHSGANICLLRTLLAICTCVDNATISSQRSYATIANLLHPYI

SEQ ID NO: 317539 - protein, 66 aa, Zea mays
  unsure (1)..(66): unsure at all Xaa locations
  Clone ID: MRT4577_52673C.1.pep
IPHVRPAECKRYRLPSSRRTVNRPYGGVLFVILVIEKIIRALLVEEQKIVKKVLPIKXTKDKTAAK

SEQ ID NO: 317540 - protein, 57 aa, Zea mays
  unsure (1)..(57): unsure at all Xaa locations
  Clone ID: MRT4577_52674C.1.pep
TPDVTPPLQEFRPVEWVXGRRPPPRPRRAGIRQIEAAPHIVTHGWMSPYLQIRILKR

SEQ ID NO: 317541 - protein, 168 aa, Zea mays
  unsure (1)..(168): unsure at all Xaa locations
  Clone ID: MRT4577_52675C.1.pep
MCARTPPSLRPMLASTRPPTHRPSASPWQETSPGALAPAPPSTDAPLTRPCAPPADSLVXLSSTPSSPQGTSTSXDPPPHRTPTPGGARPRLGQTATSSSVLRSTCLLPASCPRPHRRPLPASAPALSRFSSVASGSRHPGYLSTARSRQLQSPQRHLDIALLANGIT

SEQ ID NO: 317542 - protein, 93 aa, Zea mays
  Clone ID: MRT4577_52676C.1.pep
PIPATRGWILMDRGSKGTFGTYNGPSRFKSSAKDSTRRPLGRELLGGPPRRVCRAGCANGTGPLGANTLSWVWAGGEHRRPLLAWILTYRSSV

SEQ ID NO: 317543 - protein, 31 aa, Zea mays
  Clone ID: MRT4577_52677C.1.pep
MFGLQASGAAASWVVGRMGTDAHLYDDRDDA

SEQ ID NO: 317544 - protein, 73 aa, Zea mays
  Clone ID: MRT4577_52678C.1.pep
LFFFFFFMISPTRDYCFSKACSIHLTPFSWARHIAQGRMHAQYLFHPHTNHTFFFICLPSTHKPTRTQEPYIY

SEQ ID NO: 317545 - protein, 39 aa, Zea mays
  Clone ID: MRT4577_52679C.1.pep
LGFAHLTLTASACVGHCRSAVAGIPPPTLNKLTSICSPF

SEQ ID NO: 317546 - protein, 63 aa, Zea mays
  unsure (1)..(63): unsure at all Xaa locations
  Clone ID: MRT4577_5267C.1.pep
VPPPKENAWLSLQFLKLEFETCFKLPKGKTELLGPRLKKKKEKKKKKKKKKQKKKKXXXXKXK

SEQ ID NO: 317547 - protein, 165 aa, Zea mays
  Clone ID: MRT4577_52680C.1.pep
MDRRNRPAPLVDSSACFCRVDRSSAAAAARRIPVSKACVQPSLRASIHPLKPRPGAERSRGGACPLLPGLPDDLAIACLIRVPRADHWKLRLVCRKWCRLLAGNYFYGLRRRLGLAEQWLYAVKRDGRDGRVSWDVLDPSRGEWRALPPVPGEYAEAPTVRCAVL

SEQ ID NO: 317548 - protein, 132 aa, Zea mays
  unsure (1)..(132): unsure at all Xaa locations
  Clone ID: MRT4577_52681C.1.pep
MGLLDKLXDDTAAGPSPDTVLRRLHKQPARPVHDNIRDPLGDAEAVGAPSPVSDSEQXLLKVTRTIMIKRPALYLPSTRSAASTPPASPLGTTPPISSFAGDGGPFRRNSSCDAYDKETPPGTTSHPPPFEE

SEQ ID NO: 317549 - protein, 50 aa, Zea mays
  Clone ID: MRT4577_52682C.1.pep
SDGTSHNIAGSGYRYQRPPTKPKIHSIVDNSVIKTLRQAYMSIPTRAIML

SEQ ID NO: 317550 - protein, 75 aa, Zea mays
  Clone ID: MRT4577_52683C.1.pep
LFLDYFLLHVYFLLDGIHSLRFRKSTGKLTYREVTIFNNVFNLYKHSQSDHAERSCWASPAILDHAERSCWASPV

SEQ ID NO: 317551 - protein, 72 aa, Zea mays
  Clone ID: MRT4577_52684C.1.pep
PAVADHHHAASIGVQSYSLPAALWPNARNGATKLKTMCPVDGAHGRKCRDRLLIDHTAVQTDPKRDRNITDC

SEQ ID NO: 317552 - protein, 364 aa, Zea mays
  Clone ID: MRT4577_52685C.1.pep
MADTQKDVLFKTVQIDALVAIKIATASGKSFPSIATGSIVGMEKNNVLEITNSFPFPDVSPAQADGQNETAANLAAAAPRAKQNIAYSNEMIKFLREVNVDANNVGWYTSTSMGNFVNLNTIENQYFYQSQPNERTVALVYDVSRSSQGTLNLRAYRLSPSFVTAYKEGKFTTESLQKSGLRYHDILVELPVTIHNSHLLTSLLHQLPSSAPKEELKFPPNLAALQQDPNIPQPPLFPNYDSLDLSIDPFLEKTCDLLLESIENHHTEINNYQYYQRSLAREQAKITAWQQKRKAENAARTASKQSLLPEDEWQRLFKLPQEPSRLETLLNSRQVEQYSRQVDGFTAGVTSKMFAVKSNLLPGE

SEQ ID NO: 317553 - protein, 94 aa, Zea mays
  Clone ID: MRT4577_52686C.1.pep
HTPNVQLTQNHQLFQLIYRSTRLRGKKTDESEPKPYKREIPSGQPRRIHAFQRSTPIQPRRDKGSHFVHHPWPAFEQPDSHQKMVAKNIFVTVC

SEQ ID NO: 317554 - protein, 203 aa, Zea mays
  Clone ID: MRT4577_52687C.1.pep
MGECEDGKEYRCWEELLPDALGLIFRNLPLQEVLTVLPRVCKSWGRVVAGPYCWQEIDIEEWSQQQSKPEQIGRMVELLVGRSGGSCRRISVSGLPCDPLFSFIADNARALGTLEIPRSEISDSVVEAVAPRLSNVTFLDISSCTKIGARALEAFGRHCRSLVGLRRVMHPIDLADKVCQHDEAHAIARSMPKLRHLEMGYML

SEQ ID NO: 317555 - protein, 59 aa, Zea mays
  Clone ID: MRT4577_52688C.1.pep
RLRVFFPFRVWCGCLQPNKLVLSYLGKNSLYNFLGFLCPFVWEFRLDLKCLNCVWLSIF

SEQ ID NO: 317556 - protein, 50 aa, Zea mays
  Clone ID: MRT4577_52689C.1.pep
LLEHTLSFIVAKPVIINFDHMLICSVNSFIYVSNAINSVYNNSISGMCLI

SEQ ID NO: 317557 - protein, 68 aa, Zea mays
  Clone ID: MRT4577_5268C.1.pep
AHMIGSRCEVTKRKGARFVRAVFLTGLVDPVQYREETLQSVAMLDGDVRTCGSVNRHGCHQTQGRDGG

SEQ ID NO: 317558 - protein, 228 aa, Zea mays
  Clone ID: MRT4577_52691C.1.pep
IFRPPPSLDPLLSNPLAGPLPIPSHSQSSRRRLSTPLSRRQLVRSRRQLQPRYSTIGCVKFSRMMNRQFANMIVHNYPKGVYSLRRINLMEYLFYPSTEAAEKAEVNKKGWLSTMLKGSPKQSLPKTNINFSSLPNMADLTTRHFFSLLRGQGEGSVMFVSPNVHTMMYDTSTDFVFGMPQANFCKQSDSIALSITRRSYGQDNHKLYVIGKGEDNALGRGLELYQDN

SEQ ID NO: 317559 - protein, 354 aa, Zea mays
  Clone ID: MRT4577_52692C.1.pep
VRFHEPFHVPVVVKRHWSRHIDEGASLEAEWNARFVEYEKKYNQEAAELKSIISGELASGWENALRNYTPEMSPDATRNLSQQCLNALAKVIPGFLGGSSDLATSNMTLLKKFGDFQRDTPEERNIRFGVREHAMGAISNGIAVHSPGLIPYCATFFVFTDYMRASIRLSALSESGAIFVMTQDSVVLFFSPPPPPRVPPLTPPPALSPPLTDPPPLFFPPPLCSPPPSSPLPPRPIFPPPLFPSAPPPLIPPPPPFSFPPYPSPYLLFFYSPFPPLPFVPPPLSSPLPTPAFRCFPPFLPSPPPFAVICEVRLPPRPSSPPPSDAPLFLPLLLPHPPPLVLPPFPPFSLISPS

SEQ ID NO: 317560 - protein, 108 aa, Zea mays
  Clone ID: MRT4577_52693C.1.pep
CVLKWSILVKDPIVPLIDSFPEPECIVVNWQSGPKKGVIIPWESVKFDMLKMFFKGPPLDIQTPKKNWGLNFLIRPFLKKKKKKKTNPKKKKKKKKKKKKKKKKRAAV

SEQ ID NO: 317561 - protein, 38 aa, Zea mays
  Clone ID: MRT4577_52694C.1.pep
YIRITMVVVLHVLQCAIEPEFGPFWMHSHGRMELHGEP

SEQ ID NO: 317562 - protein, 116 aa, Zea mays
  unsure (1)..(116): unsure at all Xaa locations
  Clone ID: MRT4577_52695C.1.pep
MCASPEFYKPAPPAFSPCSSPLLLXRGRGGGGSSSRGEHRRRGDXCRRMXGGGLPPPAPRKPRAPAAPAPCRKRLFEVEVFSLRLEELERLFWRPRPAAPSPPPPFAQKKRRRVAC

SEQ ID NO: 317563 - protein, 134 aa, Zea mays
  unsure (1)..(134): unsure at all Xaa locations
  Clone ID: MRT4577_52696C.1.pep
MSASPEFYKPAPPAFSPCSSPLLLHXRGGGGSSSRGERRRNRVAXEEEDYRCRTPTGGESQVRPPGTCPPAPRKPRAPAAPAPCRKRLFEVEVFSLRLEELERLFWRPRPAAPPPPPPAQKKRRRVACPEPKKR

SEQ ID NO: 317564 - protein, 359 aa, Zea mays
  Clone ID: MRT4577_52697C.1.pep
MSSGVRSGGGGDHHGVHHQHGHGHLAGADDGAEYAFYSNDMESFFFNQPASADVNNGGSRTGADELTMPPYSSVTDYLQGFMDMDPSGLARHLDAPCLLAEDAPLKHELSVDVSYDSQGTSGAPGDGAAAMHTPNSSVSLSSSDREGEGQLRRCRKGRPKAEDDAEGDEKDQEDGENSTKANRSKKKAEKRQPRVAFLTKSEVDHLEDGYRWRKYGQKAVKNSPYPRSYYRCTAPKCGVKKRVERSYQDPSTVVTTYEGQHTHHSPASFRAGGAHLFMPNAHALPPQHLMLPSSFRPADLMGMVHPVSMGANLSMFLPTMPPHMPSPASRAHPLQQQQHQFTDYALLQDLFPSTMPNNP

SEQ ID NO: 317565 - protein, 74 aa, Zea mays
  Clone ID: MRT4577_52698C.1.pep
YFVTPCFQVVFSGATYLVGGGQFQFFPVFLFIRTNLYKYIYACGLDLSANICFFLNCVEFTRCCSAEWCLCRSP

SEQ ID NO: 317566 - protein, 115 aa, Zea mays
  unsure (1)..(115): unsure at all Xaa locations
  Clone ID: MRT4577_52699C.1.pep
VSIICNNSPLACFLYMMSRTDLKSDQPDHRCHVLYCNIVQEAAKENXALHRFRFNAHMLLAEIHGAIPATYRSAILPTYTTISFEVNSRKTIYLHSLALYCFSTIYFKKNSCVCW

SEQ ID NO: 317567 - protein, 210 aa, Zea mays
  Clone ID: MRT4577_5269C.1.pep
MIPAVKLSPAAFSVTNQRSKSAFVPSVSILNMKKFASCSLRPLYLTRLDDPHTSELKPRRQLLDFRCAASAADDKESKAEVVPASSEAAQKLKISIYFATWWALNVIFNIYNKKVLNAFPYPWLTSTLSLACGSAMMLFSWVTCLVEAPKTDLDFWKALFPVAVAHTIGHVAATVSMSKVAVSFTHIIKSAEPAFSGFGVRVILGESFRC

SEQ ID NO: 317568 - protein, 84 aa, Zea mays
  Clone ID: MRT4577_526C.1.pep
MDKHEDSGDKEHGGGGFIDKVKDFIHDIGEKIEEGFGFGKPTVDVCGMHIPNISLHRADLVVDVLIKIPYRVPIPFVDIHYLMV

SEQ ID NO: 317569 - protein, 102 aa, Zea mays
  Clone ID: MRT4577_52700C.1.pep
RPFCLKKKKKKKKKKKKKKKKKKKKKKKKKKKKKKKKKKKKKKKKKKKKKKKGAGLFGGTKFSFRGFASFYFFFGAPKFNFLGRVLKTWGWENPWVSQFKSF

SEQ ID NO: 317570 - protein, 62 aa, Zea mays
  Clone ID: MRT4577_52701C.1.pep
PTRPIGQTQRDPWLLCLVHTPQKLVLSVNINVLHLHAFWVCLNSYLICILSIWKELFWMNAV

SEQ ID NO: 317571 - protein, 83 aa, Zea mays
  Clone ID: MRT4577_52702C.1.pep
GRQDNQHSIVCCSSVQYAPLLRKRALGLAVGPGEEERQKKNPSQPRQVKADRDGRDVTYYWGRDGLTEPRTASLRVQGELKKT

SEQ ID NO: 317572 - protein, 168 aa, Zea mays
  unsure (1)..(168): unsure at all Xaa locations
  Clone ID: MRT4577_52703C.1.pep
RRAPRAATTQRTGRXTGXKXXPAKGGXSXDPXRRNNSRXKNGXKGPGXRKTGTTIFFLXXQXGXXXGAGXGATEGGRXXXKNXEKXHXXAPKKKXRGAGTXADTEAXTXXXSXQXQXHXXATGREXRXXTXXTXXKXHXXKXQGXXXXAXXXXGXXXTGPXXHXXXPH

SEQ ID NO: 317573 - protein, 59 aa, Zea mays
  Clone ID: MRT4577_52704C.1.pep
DRWKSMPRIQRRSEEAEGGANLSPIEDIGRRLIVPRRRARRMIGISEPSLGELMNIKLV

SEQ ID NO: 317574 - protein, 164 aa, Zea mays
  unsure (1)..(164): unsure at all Xaa locations
  Clone ID: MRT4577_52705C.1.pep
LSSKELENLXGQRXLLXERKQNARTXHCAQPEQLIVELTEKAKSYDGKIQSSTESLMQFVNEVKELEQKLHDNEQLLATFADNLEEQIENLKGDYIELLNQQASHRNELSMIEEQSQQQTSKNERLDEENAKYVEMRMEITAKKTKLVESYELSAEFGPVAFSI

SEQ ID NO: 317575 - protein, 69 aa, Zea mays
  Clone ID: MRT4577_52706C.1.pep
SIHHLNNNTLFSLLRAYKNNYSVSKNWQRAQDNSLCGRKILVGETLMKCFLQSIFDQYSSGRKPRLAVL

SEQ ID NO: 317576 - protein, 46 aa, Zea mays
  Clone ID: MRT4577_52707C.1.pep
ESDIFVLVHLELGWRKVPFSTFARSMNITRPPSVEYMISDCCPVYG

SEQ ID NO: 317577 - protein, 91 aa, Zea mays
  unsure (1)..(91): unsure at all Xaa locations
  Clone ID: MRT4577_52708C.1.pep
KPPKKRGLFGGKIGGKQKKLGGGEHQKRGFGGKKTPHWGGGGGGKKGFWEVGPNGTGRPNQKGXSKKGGDPGGVNHSNWGGGKFNGGKRGS

SEQ ID NO: 317578 - protein, 53 aa, Zea mays
  Clone ID: MRT4577_52709C.1.pep
MGVGGEKFQLGTVGALSLSVVSSVSIVICNKALMSSLGFNFGVRSDCVPATVS

SEQ ID NO: 317579 - protein, 74 aa, Zea mays
  Clone ID: MRT4577_5270C.1.pep
MASNKTVLIVAAMLLITLVLEAAPPATAMDCKAGCDEVTGPLHMSMEDCMKRCKEIAAKQGPRDPYKDNKLDIP

SEQ ID NO: 317580 - protein, 33 aa, Zea mays
  Clone ID: MRT4577_52710C.1.pep
VEYDVLLGLCVLGLLQTRRATVVHEPVSNAHGV

SEQ ID NO: 317581 - protein, 71 aa, Zea mays
  Clone ID: MRT4577_52711C.1.pep
GRAGHIPSPTSPASPVSGDSTPLLTSPVMGPDQDRNQRVRKDRKVRGNGPPAQPGRPARRLATSPSYQRMT

SEQ ID NO: 317582 - protein, 190 aa, Zea mays
  Clone ID: MRT4577_52712C.1.pep
YEPESTEDGIAPFSPSRVGAPQVFVICKDWQEAMARISGENVSNAMQGFASSLHELWERQDEEQRQRVKAEYVSHDFEKRLNDLRMERARVRMRNDQLQDGASEKSVVLSESGISALDDLKVDLDSMRKKLEEERARHKETIKLVNNAASSSLQAGLVPIFEALGNFTSQVVKAHEDVRFQQQQQPESED

SEQ ID NO: 317583 - protein, 67 aa, Zea mays
  Clone ID: MRT4577_52713C.1.pep
GPFFFFFFFFFFFFFFFFFFFFFFFFFFFFWGETQKIPLPGGGGGFFSPREKNFPPLGILKKGGKVF

SEQ ID NO: 317584 - protein, 237 aa, Zea mays
  unsure (1)..(237): unsure at all Xaa locations
  Clone ID: MRT4577_52714C.1.pep
LLPAPTPSSSSSTPPPVXPRPPXPRPAPPDRPRPMPSFLPFLSPSLFSYLSPRHDXQPWRPVKLCTPQAVTSPSSSSSSLLPRPRPSSXDPLPRRPGVLSPEXPSPCRCERTAALPPPRCTFPLPFPAXPPPTSPTAPRPRHHVVAPANSCKPPAIWPPRTPLPPSSSPPSSPASCLCSRRCQIERARGTLALTEAQLRDLPASLLHRVGRGPAAPPFRPHLTTDCDVAHVSSHPQP

SEQ ID NO: 317585 - protein, 27 aa, Zea mays
  Clone ID: MRT4577_52715C.1.pep
GERVMNYHTPEALVILASAAHLLLQSY

SEQ ID NO: 317586 - protein, 486 aa, Zea mays
  Clone ID: MRT4577_52716C.1.pep
MKQQQTVILYPSPGVGHIVPMVQLAKVFLRHGCDVTMVIAEPAASSPDFRIVDLDRVAASNPAITFHVLPPVPYADLAVPGKHHFLLTLQVLRRYNGELERFLRSVPRERLHSLVVGMFCTDAVDVGAKLGVPVYTFFASAAATLAVVAQLPALLSGRRAGLKELGDTPLQFLGVPPFPASHLVRELLEHPDDDELCKTMVDVWKRCTDGSGVLVNTFESLESPAVQALRDPRCVPGRVLPPVYCVGPLIGGDGGTRAAAEQERAAETRHECLAWLDEQPENSVVFLCFGSRCAHSAEQLRGIAVGLERSGQRFLWSVRTPAGTDGGSENLGALFPEGFLQRTKDRGLVVRSWAPQVEVLRHPSTGAFMTHCGWNSTLEAITAGVPMLCWPFYAEQLMNKVFVTEGMGVGVEMEGYTTGFIKSEEVEAKVRLVMESEEGRHLRGRAVALKNEAQAALRDDGPSETSFARFLFDAKNLQGHLGHGSE

SEQ ID NO: 317587 - protein, 38 aa, Zea mays
  Clone ID: MRT4577_52717C.1.pep
PLCSRAEPFCIFRGGHPQRAPAHSCARHSSQESDSGLA

SEQ ID NO: 317588 - protein, 76 aa, Zea mays
  unsure (1)..(76): unsure at all Xaa locations
  Clone ID: MRT4577_52718C.1.pep
FKKTHEKGFGLKKVEIPKGQTYPEEVIRPQQGLPFPKELRGNGMNCSGKSRHSNGHLCFPXHPPKFILDLLKNAHS

SEQ ID NO: 317589 - protein, 231 aa, Zea mays
  unsure (1)..(231): unsure at all Xaa locations
  Clone ID: MRT4577_52719C.1.pep
MTKSKGGSVDARTLVAHVLAAGAVVLVLLWCIHFRGGLALRSQDKPLIFNVXPVLMVLGPIVLGGEAILSYRSLPLARDARKKVHLALHAAGLAAGVLGVYAVFKFHVESGIPNLYSLHSWVGIAAITLYGLQWTAGFLAYFFPGASPATRRRTLPWHAVFGLLVFVLAVGTAQLGFLEKLTFMQGPPLRLPKYGAEALLVNFTSVTVLLLGVAVVLAIVDIDGTRYNTII

SEQ ID NO: 317590 - protein, 103 aa, Zea mays
  Clone ID: MRT4577_5271C.1.pep
MALEAATAPRALLAACLVLLVLGGGTGPSSVLRGAGAQAGGQCLPQLNRLLACRAYLVPGAPDPSADCCSALSAVSHECACSTMGIINSLPGRCHLAQANCSA

SEQ ID NO: 317591 - protein, 92 aa, Zea mays
  Clone ID: MRT4577_52720C.1.pep
KNGPPPMFSMVGFFVQALGPGKGPLKNPPGPIAGPGNNNAWAYAPHFVPGKLGRAPRCPFGGRKHVRAPWFSVWPPMETIVPPPRKNWVPWP

SEQ ID NO: 317592 - protein, 33 aa, Zea mays
  Clone ID: MRT4577_52721C.1.pep
PPFFFFFWAPKYNQESLIISQEQIRIPFNYWPR

SEQ ID NO: 317593 - protein, 81 aa, Zea mays
  Clone ID: MRT4577_52722C.1.pep
DMFGPMAQGFPAPSLGTTRVTCAVHDSQAPKIARSRGSMGASKGPTRRRKRAPSPTHGSEPCNPCTHLQRLLKPRETAWPF

SEQ ID NO: 317594 - protein, 143 aa, Zea mays
  Clone ID: MRT4577_52723C.1.pep
MAAEALGFMARGANGGRAAELVTRDFLGGCAAAEDDARDASARNDAVPARVHQQKHACPAAPRDLNLFPVAATTKPCAATAAAAAAPAVAGGTTATYHSVCTIEKVKTALERFERGRQHQSPHPHQQQHSGRGRWRVPRRRLP

SEQ ID NO: 317595 - protein, 230 aa, Zea mays
  unsure (1)..(230): unsure at all Xaa locations
  Clone ID: MRT4577_52724C.1.pep
MPPRAGQRTPSCTVVERCMLGYQDYATRRRALSREDGVAFFAPPWCTAFENSXLRLGGSAPRSVRLLYXLPGRAWPAQVEELLGGLSNGVIPTGALGITSAQLVLINDLHSRTVHQENALSDRLATLQEDIADRPLLPIVRQRELAAAARLGAAAAVXLLVEADELRMATARALATEILTPRQAVEMLAAGKHLHLSVRDWSRRREAAAGAQQQLGGQSAGTDNTVRPST

SEQ ID NO: 317596 - protein, 297 aa, Zea mays
  Clone ID: MRT4577_52725C.1.pep
MDMARYESCYRHWIAGQEAGLAELEAASANAAAGRATDAELRTVVERCMLGYQDYATRRRALSREDGVAFFAPPWCTAFENSVLWLGGCRPSLTVRLLYNLSGEGLEAQVEELLGGLSNGVIPTGALGITSAQLVLINDLHSRTVHQENALSDRLATLQEDIADRPLLPIVRQRELAAAARLGAAAAASGSCDGAARRRLRAARLGAADAEVDAALDSYKAALSRLLVEADELRMATARALATEILTPRQAVEMLAAGKHLHLSVRDWSRRREAAAGAQQQLGGQSAGTDNTVRPST

SEQ ID NO: 317597 - protein, 118 aa, Zea mays
  Clone ID: MRT4577_52726C.1.pep
MAKSLRSKREKRLRTLRREIAEPFYDKKEAAKLTAQAAALAAPPLQVRGPPPSQDAGSSRGASSASAMDVEMSDEGNNRSKTFLKPLGIISKKKVQLHLKIKKDKRKARKKGKFSFKK

SEQ ID NO: 317598 - protein, 56 aa, Zea mays
  unsure (1)..(56): unsure at all Xaa locations
  Clone ID: MRT4577_52727C.1.pep
KTKIYNLYGEIVFNLSFQNLLXHVSLPLYXITFYPSSHSYLHLXLKHIVWFYLVDH

SEQ ID NO: 317599 - protein, 118 aa, Zea mays
  Clone ID: MRT4577_52728C.1.pep
MAKSLRSKREKRLRTLRREIAEPFYDKKEAAKLAAQAAALAAAPLPVRGPPPSQDAGTSRAASSASAMDVEMSGAGNSRSKTFLRPLGSISKKKVQLHLKIKKDKRKARKKGKFSFKK

SEQ ID NO: 317600 - protein, 106 aa, Zea mays
  Clone ID: MRT4577_52729C.1.pep
MAKSLRSKREKRLRTLRREIAEPFYDKKEAAKLAAQAAALAAAPLPVRGPPPSQDPGTPRAASSASAMGNSRSKTFLRPLGSISKKKVQLQLKILKDRRKASISKS

SEQ ID NO: 317601 - protein, 75 aa, Zea mays
  Clone ID: MRT4577_5272C.1.pep
LLIASHHQLTESERPHTNTIRILRSVSLTSHINTLVACTYHEATEVAEAPVSTDTDATTVLADCTLLRIPYRTQA

SEQ ID NO: 317602 - protein, 148 aa, Zea mays
  Clone ID: MRT4577_52730C.1.pep
MPHWVPRGRPGLLFRRTPNPSFARCGGEPAMAKSLRSKREKRLRTLRREIAEPFYDKKEAAKLAAQAAALAAAPLPVRGPPPSQDAGTSRAASSASAMDVEMSDAGNNRSKTFLRPLGSISKKKVQLHLKIKKDKRKARKKGKFSFKK

SEQ ID NO: 317603 - protein, 118 aa, Zea mays
  Clone ID: MRT4577_52731C.1.pep
MAKSLRSKREKRLRTLRREIAEPFYDKKEAAKLAAQAAALAAAPLPVRGPPPSQDAGSSRAASSASAMDVEMSDAGNNRSKTFLRPLGSISKKKVQLHLKIKKDKRKARKKGKFSFKK

SEQ ID NO: 317604 - protein, 63 aa, Zea mays
  Clone ID: MRT4577_52732C.1.pep
FFGSASNGFFMFQLRSRCTHASVNGNGNTWADAWRELALRGGLARNEKCEHVKMTKDTRLKRE

SEQ ID NO: 317605 - protein, 54 aa, Zea mays
  unsure (1)..(54): unsure at all Xaa locations
  Clone ID: MRT4577_52733C.1.pep
GSAHYRSTDLKAGEGGHGSRSXPAHSNPIQGPGSPAPGGXGGAAEGRRGEGIRP

SEQ ID NO: 317606 - protein, 81 aa, Zea mays
  unsure (1)..(81): unsure at all Xaa locations
  Clone ID: MRT4577_52734C.1.pep
FRLLFLLRPGRCPLCGRVLACFAFFLPCSXVSLXAWXGSRXRXCFXXXXXLFLPXCGSVXVSFXAFVFCSLLWXLXVFXFV

SEQ ID NO: 317607 - protein, 43 aa, Zea mays
  Clone ID: MRT4577_52735C.1.pep
SHVAIDRRSYCADVDLFTIYSLDVLRIGCAMCSECIFTRSRLA

SEQ ID NO: 317608 - protein, 61 aa, Zea mays
  Clone ID: MRT4577_52736C.1.pep
EQDGSDSRNSDDFDETAVTSTGVQHSSMQASPDEINRPLLVVMDLIIVYREYCPKILPQKK

SEQ ID NO: 317609 - protein, 70 aa, Zea mays
  Clone ID: MRT4577_52737C.1.pep
VICEWRIHKGFCRILTMPMHVYSVSAFLIMKIIQDTTSITGFIGQTTCRFYNGLKIPDIINDQPLPQPAL

SEQ ID NO: 317610 - protein, 54 aa, Zea mays
  Clone ID: MRT4577_52738C.1.pep
SNRMSTDDRETLQGATSILNMIDGGAAVRTTVTHYNELNMRLFMRIAPEPYLTE

SEQ ID NO: 317611 - protein, 87 aa, Zea mays
  Clone ID: MRT4577_52739C.1.pep
SASKGDGGEDDGSSGDDNGKGGGVDDGKVDGDGDGEGDGGNDDGDGKGYSDDKGDGGKGNGDGSKDDDNDGKGDGGNGKASGIMLFV

SEQ ID NO: 317612 - protein, 389 aa, Zea mays
  unsure (1)..(389): unsure at all Xaa locations
  Clone ID: MRT4577_5273C.1.pep
MGNTVPVENLKVRTGKIGTALLQKLLPFVCCWLEYGLGSRRRTNLGPTLDKAQAAKIQEQEGLLRAAVNYGEGLRVPGDQRHPQSLPIHLIEVLPLGDGAQXLVIVLVVIPKXSTFAPNSVNSQGNQIQASGGQLLGRPAPSPGTTGTPNFENVSTPPMPYANSPRSGTNMMNTPSPQQHLTPQQQRQKLMQHSQPLHQPVRPSAAGMLAQSALPQLQDLQGQAQQKLQVPGQQQMQYNQALSQQFHNRQMQPGRMQPGMAQSQLNQGTQLRSHLGQFTGAANNAMFNAAQASSNSQMMANMHGSQSLMPQMQYGMAGGHPHRSHPQMLTDQMFGMGATNSSMMGMQQQQQGLYGNMQAGAQNVPQGMAGLQNQTQNPNFTQQRQQNQQ

SEQ ID NO: 317613 - protein, 125 aa, Zea mays
  unsure (1)..(125): unsure at all Xaa locations
  Clone ID: MRT4577_52740C.1.pep
GVPPPLFGGARVALRKTAAWAXPAASSGSPGXGGDSVHYLGPLSGAPPIFLTGEFLCDYCWYTARVSAGPXTFALNRELAVLHSRSAVLAAAGWLFPALLDRCHVXFRAVVWFADRRPSFCPGWA

SEQ ID NO: 317614 - protein, 92 aa, Zea mays
  unsure (1)..(92): unsure at all Xaa locations
  Clone ID: MRT4577_52741C.1.pep
VRLPWLVFSFCLLAAPGCGRLLVGGRWGLSCGAVGWWVLRFAVLVLAWSVCSQSVWVGCRPTGFFPPVRFSCVNVAWRPRGRPVAWVGPVXP

SEQ ID NO: 317615 - protein, 92 aa, Zea mays
  Clone ID: MRT4577_52742C.1.pep
VPAHPAYGLGLFGGGALPPWARWFQASFRLRGEYACGCFLPGALLSGAGPPRCCRSVVRFFGTFWLIVPSPCRGCLCIKKKVWADGRSGACC

SEQ ID NO: 317616 - protein, 123 aa, Zea mays
  unsure (1)..(123): unsure at all Xaa locations
  Clone ID: MRT4577_52743C.1.pep
DAWADSRAKAHTFVDASIVEFMKGPRIPEIYPDDPIMNDLNAACKSEPASSEPKRAAELIYKAALIYSGDTPDSPTXLRCKIYDMMTMALSGRSGMLQTDEAEGIASMDYADSSGGATTTTTT

SEQ ID NO: 317617 - protein, 53 aa, Zea mays
  Clone ID: MRT4577_52744C.1.pep
AESETEIEMCAYPFSCTSLTVDAISHDRARPHSNHQGNQNVLNVGANGSHAIY

SEQ ID NO: 317618 - protein, 122 aa, Zea mays
  Clone ID: MRT4577_52745C.1.pep
RTSVTLDRHMHPMELGDYPDGMRRNLGYRLATLTDHDADLEKGYIDSVGFNHYIIDYIKDELGRLDDQVRDYMVDTGVTYDMPFIKLRNQNPLPSSTSDITTATPCAHKKTLEHFLRTYKNH

SEQ ID NO: 317619 - protein, 100 aa, Zea mays
  Clone ID: MRT4577_52746C.1.pep
SQAPSPVNNESMHAQKKGEGGSSKQIPSSSSSSRTRCAYYYYMHATDQCNATHTLRPPQKESGVTQPPTMNHASPYLHPGRSVGRFVGRYLDHVVVGAQI

SEQ ID NO: 317620 - protein, 51 aa, Zea mays
  Clone ID: MRT4577_52747C.1.pep
IGKVSNLEVFANAIVTNNGFDDLEKIIKNITPALGLVQSNQKNYKGRPLAI

SEQ ID NO: 317621 - protein, 54 aa, Zea mays
  unsure (1)..(54): unsure at all Xaa locations
  Clone ID: MRT4577_52748C.1.pep
SVLFMSFRNACELFTTMSLDTXTTVISCGLFLMNVVALFYRNNVXXTPICTCIS

SEQ ID NO: 317622 - protein, 151 aa, Zea mays
  unsure (1)..(151): unsure at all Xaa locations
  Clone ID: MRT4577_52749C.1.pep
CWSWVAIQISLVSGTLARHPLLPRRKPCSRLNVGLTGVDNPLHHRCIHVLQTPVLNSLKNGAADRXRVVNIIMTVVDLPCEGQVVNTKAVYNAXLGLGXILSQAAXLNNXVLAFGSIDDGDEVXYFKKALCDGTLELIVVTTDQECLSCSE

SEQ ID NO: 317623 - protein, 36 aa, Zea mays
  Clone ID: MRT4577_5274C.1.pep
VSVIYCHYRPRDCDSRSLPPRVRIGEVESINNNTGR

SEQ ID NO: 317624 - protein, 52 aa, Zea mays
  Clone ID: MRT4577_52750C.1.pep
QITKRGDTVDEKIKKLDAELARYKEQIKKTRPGPAQEAVKARAMRVLKQRRM

SEQ ID NO: 317625 - protein, 53 aa, Zea mays
  Clone ID: MRT4577_52751C.1.pep
KLGVRKKKVGRRVVLPQAVTKSVWTGIIHWISAKKKKKKKKKKKDGPSAAIGS

SEQ ID NO: 317626 - protein, 135 aa, Zea mays
  Clone ID: MRT4577_52752C.1.pep
MYVLCRLILEMSRAWIFDSLVVEVQTDLDILVSAFNIQEKKNQMYMGRHILNHGHPIQRPPLHVLCILHPAPQGSQMDLICAHGAPDMLSEKALRFHCDRDQDSAALRSRFCCALHAVFLYFHSGNPTRHKDHAT

SEQ ID NO: 317627 - protein, 49 aa, Zea mays
  Clone ID: MRT4577_52753C.1.pep
KIQCKEGNLLHQQSMILAGKQMEHHRTLAVINIRKESTLHHVLRFRGGQ

SEQ ID NO: 317628 - protein, 129 aa, Zea mays
  unsure (1)..(129): unsure at all Xaa locations
  Clone ID: MRT4577_52754C.1.pep
HPLVSVLTLVWQACRWRAGGGGIVTSLSVKSGRGISFHRGAARRARQRRRERCRSPWRDRRTPDCASRRRRTKKYEDDERPQTVSGGHGCGMEALGRPLSFVPXYSRYVXAVFVMFFYPVGGLGPLCCR

SEQ ID NO: 317629 - protein, 75 aa, Zea mays
  Clone ID: MRT4577_52755C.1.pep
FFFFFFFFFFFFFFFFFKQKKRAFFFSFHSWGPISQKGKHPPFLQFWGNKFFPSGKNRLHLIPSMPPYLVGEKFG

SEQ ID NO: 317630 - protein, 89 aa, Zea mays
  Clone ID: MRT4577_52756C.1.pep
NLELVFFNSSRKRRGGQQQESTADPTHADAGAIHRRDAHHLADSARRRGRLRLRQTQSAQAVEPVQDQVIPSRSQFLSPRTPSQSRALP

SEQ ID NO: 317631 - protein, 115 aa, Zea mays
  unsure (1)..(115): unsure at all Xaa locations
  Clone ID: MRT4577_52757C.1.pep
DVLVLILAHLRPHNLLVLSDEHLLIFRGRXVDNVRTLAYSPIYEVSTXLHLVLRLTGRMQIFFNTLTAETITLPVQSSDTIDNFKANIQHKXECIPPHHHWLIFAGLHLXDGRTL

SEQ ID NO: 317632 - protein, 110 aa, Zea mays
  Clone ID: MRT4577_52758C.1.pep
PVVRELLLLNCLCVVTVGIFLSARIHCSCSNGLLFCCRSSSVFLLRTALAMHFIERGNGAVEGDDQRRVVPQFVAHAHLRIALTSLALCGFLFLPRAVGPSVLSSAAHRP

SEQ ID NO: 317633 - protein, 195 aa, Zea mays
  unsure (1)..(195): unsure at all Xaa locations
  Clone ID: MRT4577_52759C.1.pep
MGKRGKWFSAVKKVFSSSDPDGKGAKAQKADKSKSKRRWPFGKSKHSEPSISTVPGTAPAVAPLPSPPATQPHSLEIKDVNPVETDSEQNKHAYSVALASAVAAEAAAVAAQAAAEVVRLTAVTTAAPKMPVSSREELAATKIQTAFRGNLASRALRALRGLNRLKSLKDGNAVNAQXAHTCXCTQXMTRVQLNL

SEQ ID NO: 317634 - protein, 134 aa, Zea mays
  unsure (1)..(134): unsure at all Xaa locations
  Clone ID: MRT4577_5275C.1.pep
DPATFFQGALPHIFXNTKENFFRRIIGLLTKTSKICFKKKKGIKGFPCPPKPKGSMFVMGKINLYFLEGIYDEIYFFCKLAKKKFVILCPRSVLGKEKWNRIPFANESFFLFEGLERNKSFFQRHKKKNLFNGP

SEQ ID NO: 317635 - protein, 55 aa, Zea mays
  Clone ID: MRT4577_52760C.1.pep
HCYIYISPLKVSLEVVSVLHCEKTTFRKSCFPDLALWFGFWFLEGKSQARHTFNV

SEQ ID NO: 317636 - protein, 380 aa, Zea mays
  unsure (1)..(380): unsure at all Xaa locations
  Clone ID: MRT4577_52761C.1.pep
MGKRGKWFSAVKKVFSSSDPDGKGAKAQKADKSKSKRRWPFGKSKHSEPSISTVPGTAPAVAPLPSPPATQPHSLEIKDVNPVETDSEQNKHAYSVALASAVAAEAAAVAAQAAAEVVRLTAVTTAAPKMPVSSREELAATKIQTAFRGYLARRALRALRGLVRLKSLVDGNAVKRQTAHTLQCTQAMTRVQTQIYSRRVKLEEEKQALQRQLQLKHQRELEKMKIDEDWDHSHQSKEQIEANLMMKQEAALRRERALAYAFSHQWRNSGRTITPTFTEPGNPNWGWSWMERWMTARPWESRLAAASDKDPKERAVTKNASTSAXSTCIPCHLDSETSNTKQVEPPTKPAVTFNPAIEDPVSLRKGQAGKSKEQLAVQGG

SEQ ID NO: 317637 - protein, 76 aa, Zea mays
  Clone ID: MRT4577_52762C.1.pep
LNLQLPFITTVYIFPPFFLEQTILKLFFPFSKTKAPVWFFFLTTLFLFPELKKPKFPSNSELKHFSLFCLYPTLGC

SEQ ID NO: 317638 - protein, 67 aa, Zea mays
  Clone ID: MRT4577_52763C.1.pep
VIPITTQTNIFSLIWYPSRNNCNLTNYLTNPVHYTHESYVTADYCVPFRRLTGHSHLGQDYSLMPYG

SEQ ID NO: 317639 - protein, 113 aa, Zea mays
  unsure (1)..(113): unsure at all Xaa locations
  Clone ID: MRT4577_52764C.1.pep
PPPNGTQTKKQKPQNPKGKATPPENTPRPPGGGKNKGPRPKRGGNPPPPPETVVPTGNPNNCQEGGPKKKKKGPXPPRGQKTPGPKKKKKKKKKKKKKSTKKKKKKKKKPRGF

SEQ ID NO: 317640 - protein, 186 aa, Zea mays
  unsure (1)..(186): unsure at all Xaa locations
  Clone ID: MRT4577_52765C.1.pep
SDRVDRWAAWIKTSSSPPPSSAPAPFPAWGGIPPTPHRLIIIDTQLGAGHTLSDSTFTKESTLPLTLSIRGGMQILLKTLTEKTITLEDKTSDTXIKQNKAKNTEKEGIPTNKHRLIFAGKKLKNGSTLANYNIKKERKLNLVLLFMGXKKNFGKTLTGKTTTLKGEILDTIDNVKAKIKNKEGIP

SEQ ID NO: 317641 - protein, 91 aa, Zea mays
  Clone ID: MRT4577_52766C.1.pep
HWKELNEVLRSIFFHSLVTYTRPWRRTQIKASNPKGELAVHRGTVSEDLRRRPGACIWEGERTPSSPRLSTQVSLWLTSLLSPPSTGDQGF

SEQ ID NO: 317642 - protein, 346 aa, Zea mays
  Clone ID: MRT4577_52767C.1.pep
MQIREGPARRQAPSAAGALRSPLSAMMLAMFATMASFYVAGRLWQDAQNRVYLIKELDRRTGQGQSAISVDDTLKVVACRQQGKRLASLEMELAAAKHEGFVGKYTPETNGTHSGKKPLVVIGIMTSFGRKNYRDAVRKSWLPTGSMLKKLEEEKGIVVRFVVGRSANRGDTFDREIDDENRSTKDFLILDDHIESDEELPKKTKSFFANAANTFDAAFYAKVNDDIYINVDTLSAMLETHWDKPRVYIGCMKSGEVFSDSTHKWYEPDWWKFGDGKSYFRHASSEMFVISRAIAQFISINKSVLRTYAHDDVSVGSWMIGLAVKHVNEAKLCCSSWPSGAMCSAL

SEQ ID NO: 317643 - protein, 346 aa, Zea mays
  Clone ID: MRT4577_52768C.1.pep
MQIREGPARRQAPSAAGALRSPMSAMMLAMFATMASFYVAGRLWQDAQNRLHLIKELDRRTGQGQSAISVDDTLKVVACRQQGKRLASLEMELAAAKHKGFVGKYTPETNGTHSGKKPLIVIGIMSSFGRKNYRDAVRKSWLPTGSMLKKLEEEKGIVVRFVVGRSANRGDTFDREIDDENRSTKDFLILDDHIESDEELPKKTKSFFANAAETFNAAFYAKVNDDIYINVDTLSAMLETHWDRPRVYIGCMKSGEVFSDLTHKWYESDWWKFGDGKSYFRHASGEMFVISRAIAQFISINKSALRTYAHDDVSVGSWMIGLAVNHVNEAKLCCSSWPSGALCSAL

SEQ ID NO: 317644 - protein, 260 aa, Zea mays
  Clone ID: MRT4577_52769C.1.pep
AFLGKLLDGEKHEVAFTVTNAMDTWFVDANLHLWLDPRGAATAAGIVSYDAPPLDTATATLPDGPDNGLYYTTAFRHVSASGWVHTPSYGKVTATWTQRLGYENTINFRDSFFQPEVNQTTDAYSAAHVADHAGVLYAQEAQQSFTLYKFVGVVNQTDIDSYTAATKVQLGFSDDRVAAGRSGFWARSLSNSQECARDVDVEDGEAVRESWAARQTYRYEASDACFFRNVTSRGNNVVSDHSDETCVKESPAAAGGIAER

SEQ ID NO: 317645 - protein, 84 aa, Zea mays
  unsure (1)..(84): unsure at all Xaa locations
  Clone ID: MRT4577_5276C.1.pep
MMKGHVNGLKKXLIMEKSPSAYYIHCFAHQLXLTLVAGGKDNIDCHWFFXQLAYLLNVLGMSCKKISMLHVAQAEYMIEALKIG

SEQ ID NO: 317646 - protein, 60 aa, Zea mays
  Clone ID: MRT4577_52770C.1.pep
LLINITHAIPIFILRSECVGGISYSYPRTQLTVGQSRTIGQRIRCVRVRVRVPRNSETGT

SEQ ID NO: 317647 - protein, 119 aa, Zea mays
  Clone ID: MRT4577_52771C.1.pep
KRPGPPPRKNQFFFPQNGKKNPQTGGKNKFLGPKDFWAPARGLFWGGALGNSWGLFGGVVWGPRRGGFSKKSWERGLIFLAPSSGKKGSTRGRWAFRPGKKKKNLGRGFLRGDPPFLPF

SEQ ID NO: 317648 - protein, 48 aa, Zea mays
  Clone ID: MRT4577_52772C.1.pep
LGGKTDVFYLPLSMAKDQIKKSLGPKMASIKGRMAPLPNGQKGAKVAF

SEQ ID NO: 317649 - protein, 76 aa, Zea mays
  Clone ID: MRT4577_52773C.1.pep
FLKQDIIVIFQPPYIGRHICQHMQGLIVLRAQSSHQHDYEHRVQVHECTVLPSLSDLRSVESVVSFRSANACEYAS

SEQ ID NO: 317650 - protein, 74 aa, Zea mays
  Clone ID: MRT4577_52774C.1.pep
VYAPNIERHGEGLVGRRCLGISLGLGFGPARYCRPETRVRGDEPRALLVHARHLSPRRLPPVDTAANFAEWFSC

SEQ ID NO: 317651 - protein, 39 aa, Zea mays
  Clone ID: MRT4577_52775C.1.pep
PILKLYIGSTLPLLRRGGPINPILQPKHNSLAELSTTAR

SEQ ID NO: 317652 - protein, 207 aa, Zea mays
  Clone ID: MRT4577_52776C.1.pep
MFNLRRLFASALFLGLGLLFLAQTAEAAKGPKITHKVYFDITQGDQPLGRVVMGLYGKTVPETTENFRALATGEKGFGYEGSAFHRVIKNFMIQGGDFTKGDGTGGKSIYGDRFKDENFKLKHTKKGLLSMANAGRDTNGSQFFITTVVTSWLDGKHVVFGEVLEGYEIIEKIENSKTGAADRPVEAVKIAKSGELDVPPEGIHVEL

SEQ ID NO: 317653 - protein, 81 aa, Zea mays
  Clone ID: MRT4577_52777C.1.pep
ELFVLAARQGVNPKRPSASPPPSAGPLPPCRQILRQPPLFSLLGCGEDSLLLVSVSDPRSMGRTDPSLSLKSQCCSRSSPR

SEQ ID NO: 317654 - protein, 60 aa, Zea mays
  unsure (1)..(60): unsure at all Xaa locations
  Clone ID: MRT4577_52778C.1.pep
KFPGSSNYYLLHLCTQAGTYIKEFVHGDFGRTHSSIGAIIRCKAXILQLDVPDVKMDFFP

SEQ ID NO: 317655 - protein, 91 aa, Zea mays
  unsure (1)..(91): unsure at all Xaa locations
  Clone ID: MRT4577_52779C.1.pep
GLGAHCCRRQCVKSGAAAAVFGVVAFPGALCYRQLCCACSCRVGSLLLASSLLPLVLVGPVSCAGGVGSAIRVPCGGPGLFPFFCNPVXLC

SEQ ID NO: 317656 - protein, 112 aa, Zea mays
  unsure (1)..(112): unsure at all Xaa locations
  Clone ID: MRT4577_5277C.1.pep
CXXVLPXCPXXSPVXXXXGVFLPWWLPLXGVSXXASVXRPPRLXXXFPGLXPXFLXLAXXAXXPAXPLVVXXLXXAXXXXAPLXXCXPSPSSPLXXXXGWSLXVFLMXPVAA

SEQ ID NO: 317657 - protein, 263 aa, Zea mays
  unsure (1)..(263): unsure at all Xaa locations
  Clone ID: MRT4577_52780C.1.pep
FFFFFFFFFFFFFFFFFFGGGGFFFFFFFLGFFFFFFFFNKKKKQTKNPQKNPKHPPPPPPTAGGGRKGGGGGGEXKKNPKEKPKTQPKNPKHQPKPQTPTPNPPPKPGPPPKPGPPPPPGPEXGPAPRPGXKTGNGSDNGGPKPGGQTRGGAEPGAGARSGPGALTRGARPGKGXPGKGXPQKGPGGGYRNNPXRGAKRTGEMTGGLAPPRGQRPPPPARPGGEKKAAEGIWGAKGGPRGAPRGAPPKGPXPPGGNPGGKGR

SEQ ID NO: 317658 - protein, 71 aa, Zea mays
  Clone ID: MRT4577_52781C.1.pep
FFFFSFLFRKMIKGTWFIRVISRVSYTSESDMKETLPLCGFLWAKLSGGLYVDIWFASINFHESLRLFVSY

SEQ ID NO: 317659 - protein, 198 aa, Zea mays
  unsure (1)..(198): unsure at all Xaa locations
  Clone ID: MRT4577_52782C.1.pep
PGRTSVRFTRPXIAYVQQVCLXLHDXREPHLTPMKRVLCYLQGTPDHGLLCLRXLVVYTDVDWVGCPDTRRSTVGYAVFLGDNLVSYFCKXEHXVSEAEYRAIANGVDVSFXLRQLLXELHRALSRSTLIYCDNISAVYLSTNLVQHECMKHMETDLHFVCEKVGISEVYVLHVPTMLQFADIFTKGLPSMVFLEFRS

SEQ ID NO: 317660 - protein, 156 aa, Zea mays
  unsure (1)..(156): unsure at all Xaa locations
  Clone ID: MRT4577_52783C.1.pep
PKRGHPHATRRKTREPKEENXTXGPXXXEGEXXRGGXHXXAXXXDTNXXXXXXXGRETXXRXTXGXKGKXDXDEXXXXXXXXXXQEXAQRGKEXGXTAPHKKXXATGGNKTKTXGPXAQXAXRAPXXXGXKXGRXEDXTPXPTDSXRRKGGRRGRR

SEQ ID NO: 317661 - protein, 46 aa, Zea mays
  Clone ID: MRT4577_52784C.1.pep
KDPCRFSLPFERNGNHSSWLPAAYRHEQKTQFHSKDVRRPLATALP

SEQ ID NO: 317662 - protein, 269 aa, Zea mays
  unsure (1)..(269): unsure at all Xaa locations
  Clone ID: MRT4577_52785C.1.pep
FFVLKRRPLKPSPSRPPRRETADDNGGGGDDYVSEAVRPEGDTHTREEGLSKSRDRDREKDKDKERHRDRDRDRGRDRDRGRDRDLDKDRDRDLDKDRDRDKDRDRHQRHHRDKREHRDRPDDHDRHRSRDSERRRDRERDGHRRHRSRSRSRSRGRDDHRSRSHSKSKRVSGFDLGPTAQSVLPQFPTIPTPSQLPGSSIPGMFPNMLPFAVGQFNPLVMQPQAMTQQATRHARRVYVGGLPXSANEHSVAIYFNQVMAAIXXNTAGP

SEQ ID NO: 317663 - protein, 44 aa, Zea mays
  Clone ID: MRT4577_52786C.1.pep
NQRINVVTTATMVGAMKARLDGATRGHALFNKKSDALTVTLRAI

SEQ ID NO: 317664 - protein, 74 aa, Zea mays
  Clone ID: MRT4577_52787C.1.pep
PADDLQVPRNLRGSLATCQVPYLESPLRKQKYLPPCPPSKALLCSFCEPLAIHLGAHDTQASSFLPDKSPGAEP

SEQ ID NO: 317665 - protein, 59 aa, Zea mays
  Clone ID: MRT4577_52788C.1.pep
SLGGVLYIEFNNVVPNINFVTKPAPLKKTNLSNPTIYRLFWTHSCTTLITPPLFLVEFK

SEQ ID NO: 317666 - protein, 101 aa, Zea mays
  Clone ID: MRT4577_52789C.1.pep
DIFFFVFLFLVTLLLVRILLTVLLQMFRARTFDRGGGFKAPKTAIPFCGNKNSPEDERYQRMNKKADGGTFDQKKKGYGKKNGRNDIDCHVGGCPGTARAR

SEQ ID NO: 317667 - protein, 199 aa, Zea mays
  unsure (1)..(199): unsure at all Xaa locations
  Clone ID: MRT4577_5278C.1.pep
MKSKKSVHGSSCKKAKLFDGLIGRHGSEIDPCYKLFLEHLSKDRNTYVLDVPKGDHGLPFSVRYEEDYTSYGNTKGRSSPNFPNHSRRTSWGIPDGKQPDVKAIKAASRNMCCSFSPKRSYVKKTTTSLVDEPYELFLSLVKFKDGFMVIEPEPGVTIVYEREEDMPAGYDDWRTGSSTNELSLVSXLETXRETHHAKI

SEQ ID NO: 317668 - protein, 95 aa, Zea mays
  unsure (1)..(95): unsure at all Xaa locations
  Clone ID: MRT4577_52790C.1.pep
PRCTKKYIERPSPGEXMASWFSTSHRRLILVAAGLLCVLAAASASAGTSCVPGGGIPHNPIPSCAXFVTRRTCGIGPRLPWPELKRRCFRELADI

SEQ ID NO: 317669 - protein, 85 aa, Zea mays
  Clone ID: MRT4577_52791C.1.pep
HPWVRVCQVNSVDPVSDGPRHSAVSAGTALSRLDGILRCLSPAASSATISIVAELLRIVDTVFPTTSSRLAVVLGCLSGPVLIGI

SEQ ID NO: 317670 - protein, 145 aa, Zea mays
  unsure (1)..(145): unsure at all Xaa locations
  Clone ID: MRT4577_52792C.1.pep
MEGKEEDVRLGANKCSERQPIGTGGHGTGDKGYKGPPPGPLFXPGERKSWAFYRAGIAECRATFLFLYISILTRMGVXKATSKCATGGIQGIAWAFGGVSFGLVYCAGGIAGGHINXAGTFGLFLAREVSLTRXVCYIIMRCLGA

SEQ ID NO: 317671 - protein, 196 aa, Zea mays
  unsure (1)..(196): unsure at all Xaa locations
  Clone ID: MRT4577_52793C.1.pep
MKISSKWRVESIEQIIRIVLSVINSASYYTRIFNMMNRSADGCYVAVSSQGNFYLMWEXGRSGXHQLPGPWSTCLCCYVCMDLCLCVQPFWQPHIRVVAWRFXNMGWRADSGLXLLLRGXITEDFEEVQVQSXWFGILDVGYRSXEEAWAACGSNVLHKTINKGKSWMHDKAVATNLYSVKXFVLGNDDVLLRGLG

SEQ ID NO: 317672 - protein, 125 aa, Zea mays
  unsure (1)..(125): unsure at all Xaa locations
  Clone ID: MRT4577_52794C.1.pep
RRLAHDPSLNDVEETMVETIALCQRNSHNLNQQQREALWFPLLEAMMAPQKLSSSASPHPHSEALKSLTMQVLNSMAAFIALPSILQRILQDPVYXKGKLGEIQGLILGMLDTFNYEQTLLETTT

SEQ ID NO: 317673 - protein, 268 aa, Zea mays
  Clone ID: MRT4577_52795C.1.pep
MTPASTSPLAAAVLPTNLSSFSRCPPRRLPRISCLAAPERGGNNASNASPAPQQPRWGAAVSAALAAAVVAASMPAYADLNKFEAEQRGEFGIGSAAQFGSADLKKAVHVNENFRRANFTSADMRESDFSGSTFNGAYLEKAVAYKANFTGADLSDTLMDRMVLNEANLTNAVLVRSVLTRSDLGGAIIEGADFSDAVIDLSQKQALCKYASGTNPMTGVSTRKSLGCGNSRRNAYGSPSSPLLSAPPQKILDRDGFCDPATGMCDAS

SEQ ID NO: 317674 - protein, 59 aa, Zea mays
  Clone ID: MRT4577_52796C.1.pep
SRLHSFLEDSPFSSPGDHPTVVYAFGCRVELPLCGLASAICARVVLKARVIVRALGEEA

SEQ ID NO: 317675 - protein, 87 aa, Zea mays
  Clone ID: MRT4577_52797C.1.pep
PPSAFRVSASFLFCAMLVALFPALPAWFSEWWWSSLALSCLGQPRFSCERRPLVSLHCVCLSSSASVSSLVSGACAPALGCPFLSVH

SEQ ID NO: 317676 - protein, 238 aa, Zea mays
  unsure (1)..(238): unsure at all Xaa locations
  Clone ID: MRT4577_52798C.1.pep
MTPASTSPLAAAVLPTNLSSFSRCPPRRLPRISCLAAPERGGNNASNASPAPQQPRWGAAVSAALAAAVVAASMPAYADLNKFEAEQRGEFGIGSAAQFGSADLXMPAPLLLHLFFMTVLLLHCLGNLLCFNGLXKAVHVNENFRRANFTSADMRESDFSGSTFNGAYLEKAVAYKANFTGADLSDTLMDRMVLNEANLTNAVLVRSVLTRSDLGGAIIEGADFSDAXIDLSQXQALC

SEQ ID NO: 317677 - protein, 61 aa, Zea mays
  Clone ID: MRT4577_52799C.1.pep
CKYASGPNPMTGVSTRKSLGCGNSRRNAYGSPSSPLLSAPPQKILDRDGFCDPATGMCDAS

SEQ ID NO: 317678 - protein, 41 aa, Zea mays
  Clone ID: MRT4577_5279C.1.pep
FFKGAKTPFLVKSIKGAAYLVCFPLIHLSWNKTRCVQYGTS

SEQ ID NO: 317679 - protein, 66 aa, Zea mays
  unsure (1)..(66): unsure at all Xaa locations
  Clone ID: MRT4577_527C.1.pep
KNPVFINARIFFIKTPKTHVFYSDLPAVKKEDVKVEVEDGNVLLISVQRIKXKEDKGDKWHRLERN

SEQ ID NO: 317680 - protein, 176 aa, Zea mays
  unsure (1)..(176): unsure at all Xaa locations
  Clone ID: MRT4577_52800C.1.pep
LLAKSIPIANPSTVRICIXGDEEVGKSSLLTSLIKDTFVTTXPXVLPPITLPPTLGTPENVTTTIVDTASVSQEREVLKKEVRKCNGILLLYSDHYSYXRVALFWMAYFRSLRANVPVMLCANKSDLAPVGSSTAQVVEEEMLPVMTDFKEIDSGIRTSALENHNINEVFFLCQKA

SEQ ID NO: 317681 - protein, 126 aa, Zea mays
  unsure (1)..(126): unsure at all Xaa locations
  Clone ID: MRT4577_52801C.1.pep
MSWQTYVDEHLMCEIEGHHLTSAAIVGHDGTVWAQIVAFPQFKPEEMTNIMKDFDEPGFLAPTGLFLGPTKYMVIQGEPGAVIRGKKGSGGITVKKTGQALVVGIYDEPMTPGQCNMVXERLGDYL

SEQ ID NO: 317682 - protein, 147 aa, Zea mays
  Clone ID: MRT4577_52802C.1.pep
MALEAVVFPKEHPGCTAVKARPASLGCGFHTEELEVEDKGGVVLQGEAADALPPPGGAATTWDWDAVLCPCSTAPAAGAVEECWDVQQQQHQLLSVSPPPSSAVAASSSGRRKAAASEAARRRRRRPMAVRNTDEMESQRRNHIAVE

SEQ ID NO: 317683 - protein, 62 aa, Zea mays
  unsure (1)..(62): unsure at all Xaa locations
  Clone ID: MRT4577_52803C.1.pep
RIDHKFDLMYAKRPFVHWYVGKGMKKDKFSQARKNLPALXKNYKKVGAEFYKGXAGHKGDEY

SEQ ID NO: 317684 - protein, 117 aa, Zea mays
  Clone ID: MRT4577_52804C.1.pep
MSWQAYVDDHLLCDIEGQHLSAAAIVGHDGSVWAQSENFPELKPEEVAGMIKDFDEPGTLAPTGLFVGGTKYMVIQGEPGVVIRVKKGTGGITTKKTGMSLNRASKFVIMLFWSLGT

SEQ ID NO: 317685 - protein, 127 aa, Zea mays
  unsure (1)..(127): unsure at all Xaa locations
  Clone ID: MRT4577_52805C.1.pep
MSWQAYVDDHLLCDIEGQHLSAAAIVGHDGSVWAQSENFPELKPEEVAGMIKDFDEPGTLAPTGLFVGGTKYMVIQGEPGVVIRGKKGTGGIXGMSLIIGIYDEPMTPGQCNMVVERLGDYLIEQGF

SEQ ID NO: 317686 - protein, 131 aa, Zea mays
  Clone ID: MRT4577_52806C.1.pep
MSWQTYVDDHLMCEIDGQHLSAAAIFGLDGSLWAQSTGFPQLKPEEVAAITKDFDEPGTLAPTGLFVGGTKYMVIQGEPGAVIRGKKGTGGITIKKTGMALIIGIYDEPMTPGQCNMVVERLGDYLVEQGF

SEQ ID NO: 317687 - protein, 159 aa, Zea mays
  unsure (1)..(159): unsure at all Xaa locations
  Clone ID: MRT4577_52807C.1.pep
MSWQAYVDDHLLCDIEGQHLSAAAIVGHDGSVWAQSENFPELKPEEVAGMIKDFDEPGTLAPTGLFVGGTKYMVIQGEPGVVIRGKXNALTFPSHISVTPLQMFFDLRGCFHIXQGTGGITIKKTGMSLIIGIYDEPMTPGQCNMVVERLGDYLIEQGF

SEQ ID NO: 317688 - protein, 69 aa, Zea mays
  Clone ID: MRT4577_52808C.1.pep
RSPFTNFINDGDGPLPQEEEGADIFLSNGPSTRTTVSPKIRMIYHHWQPRPWTRRTSRGRMMKMAILLW

SEQ ID NO: 317689 - protein, 84 aa, Zea mays
  Clone ID: MRT4577_52809C.1.pep
VKETESYHAPDRQEHETDDYQRLYITLALRNGPDEYIHTSNWNAYASDADCRSRTSNIWTLMNLGYMAWHTRIVYTLQMTTSCA

SEQ ID NO: 317690 - protein, 155 aa, Zea mays
  unsure (1)..(155): unsure at all Xaa locations
  Clone ID: MRT4577_5280C.1.pep
GWGISTAGSGGSSDQIQYLVTRGCLKPLCRVLPPNDPDLVYTCFXGFENILRPGEAGKKGEESGANPSPGFFLKCGGLEKLEDLQDVGSARIFELAMKLLQSFWGEEVSESDDPNIPGLNDSSDTVEATSENAAAAVAVQPPPVPLPPSPPDETE

SEQ ID NO: 317691 - protein, 83 aa, Zea mays
  Clone ID: MRT4577_52810C.1.pep
TIFTPGATTFMHQAGLGHTLSSFQENSYLSPFHPRRGENADLRINPLSPPIEFWVPFTLYNKLGNLRILLKPLSSAKYNHFLS

SEQ ID NO: 317692 - protein, 44 aa, Zea mays
  Clone ID: MRT4577_52811C.1.pep
MREVADLILSFPDETPVVVLSAMGKTTNNLLLAGENAVSCGAPK

SEQ ID NO: 317693 - protein, 63 aa, Zea mays
  Clone ID: MRT4577_52812C.1.pep
GFFFFPPWVFKRVFSPFLINNPSVFPPFFFFFLTNFFFFLLESNLKCVFKFYPFFFLFFLSRN

SEQ ID NO: 317694 - protein, 87 aa, Zea mays
  Clone ID: MRT4577_52813C.1.pep
FGSRSGELFLLVDHQRKGGHLKNHVGVTHPYNDLSTATFNRGDDAELQVLYATMVHGSPPSRNFLGHREALALLATVVVLLAAHESA

SEQ ID NO: 317695 - protein, 97 aa, Zea mays
  Clone ID: MRT4577_52814C.1.pep
EKCGRRPLSSARLHHHDPAFISINPVASLRSRLTAIHWKPIWASRVYAARVGGFVGRNCSRGNRGNCSPPCRLHREAAPSRGQACHQFNRSARSRVP

SEQ ID NO: 317696 - protein, 72 aa, Zea mays
  Clone ID: MRT4577_52815C.1.pep
GRQPTVAFLGQGGEESTLPPTPAFCALHRGGGPGPAPSGPPRAMGVGGPRGRSPRVIANSKERRRSGGAGGV

SEQ ID NO: 317697 - protein, 47 aa, Zea mays
  Clone ID: MRT4577_52816C.1.pep
ALVRPNLINISPLVCLNQLHIPASLLLNHRPPQQSQPFFLYLTLHLH

SEQ ID NO: 317698 - protein, 124 aa, Zea mays
  unsure (1)..(124): unsure at all Xaa locations
  Clone ID: MRT4577_52817C.1.pep
FPLLSVVGARLVSLVGGPLPGVFALWAFYVRCGFGSRGSPPFGCRLVWGLGVALPCCGLLLRAWAFGDWLAPVFCLLCRGISFFFLPPVGSGFGRRHFVINPPPRGFVCFVLFGKKKPSLFXVG

SEQ ID NO: 317699 - protein, 109 aa, Zea mays
  Clone ID: MRT4577_52818C.1.pep
RVPGGPPEKVVDPLYPGGSFDPLGLPDDPEAFAELKVKEPKNGPPPMFSMFGFFVQAIVPGKGPLKNLPDPPADPVNNKAWAYPPNFVPAKLGGGRGPPPPPPAPPADI

SEQ ID NO: 317700 - protein, 109 aa, Zea mays
  Clone ID: MRT4577_52819C.1.pep
SSTPLLASHWGTYEICGPLADNDTLRTKKSVHHNKPSYCSTPFCKTIHPRSKTTTEAIERNHIDNKCPFTQTFYIKYRMITPTYNKSKINRTMIDSARTTCTLTTNTTC

SEQ ID NO: 317701 - protein, 205 aa, Zea mays
  unsure (1)..(205): unsure at all Xaa locations
  Clone ID: MRT4577_5281C.1.pep
RSITFSLQAPLTSISSGSSSLLHICTHLTSWLPSSNSHRKRSRVYPAAIAESPRSGVSLPSQRTRLALPSLEIPRDGSPSPEISTQYISFLNITYFPDFCSHEGRSPTPWHWATGLLDRQLDSDSATTLYDNCYTDLLRQRGRAVNLNEGDNPRRRDDLSHLRALSSVSAMRRSSIRSRNLGESCXTYTDAIRVLWSLLFECLTD

SEQ ID NO: 317702 - protein, 51 aa, Zea mays
  unsure (1)..(51): unsure at all Xaa locations
  Clone ID: MRT4577_52820C.1.pep
SLRSLGQNQYTSHVVSGFTARGMXHWVELLFGVKVLAVHRRRLSGKGWRMG

SEQ ID NO: 317703 - protein, 218 aa, Zea mays
  unsure (1)..(218): unsure at all Xaa locations
  Clone ID: MRT4577_52821C.1.pep
MKGGIAAAAVAAMATGAQAAYPHHRRAHELFRRGGEVCVPSCTTIWTTYYGEPTLVPNPPSPPKPTAQAVTTHEAPKPKPTTAYEVPXTRLPSLLLQPPPRSLSPSRPLRSTSALLPAHTPSLPPPXTVXSLPPFVLARPPXVPAGTXTPWAVSPPSSRLPPPSLAPTPRRPSTRASLPALSRLPPTSAPPLVPTPLLLSPRPVRRRPXSSTPSPQLR

SEQ ID NO: 317704 - protein, 126 aa, Zea mays
  Clone ID: MRT4577_52822C.1.pep
HSTGGRAPPGRCSAWKPSNRCRVIGEQRDHCSWEAWPDMCILTEEETIGHAFSGRIWGRRLCSAGRDVVGDDDGERGRWGKSEVDAPLGRCRGGCDGCRPRRGSRTRRSCCFTAGITESSAACRHI

SEQ ID NO: 317705 - protein, 62 aa, Zea mays
  Clone ID: MRT4577_52823C.1.pep
LNFKIMEIQTEKKLQEIELPAGLTFLGYFLFISLFPLAGHGHALHCWRIFDRSPCCRTSRGS

SEQ ID NO: 317706 - protein, 207 aa, Zea mays
  unsure (1)..(207): unsure at all Xaa locations
  Clone ID: MRT4577_52824C.1.pep
XLFREHPXFLGPAAPSLEGKLAVVASVMPGLVAAAAEKAIAEWGRPAXDITHLVFATSSSAQLPHIDLRIASLLGLSTTVQRTVIGFHGCSGSSAALRVAKDIAENNRSARVLVACADMLSVMXLPSPQRSSXRYGIIGHAIFGDGAGAVVVGSRPQEPVERPIFEMVSASQATLPGSELAVAAELTNFGMEYRLQFGELAAVVGDN

SEQ ID NO: 317707 - protein, 85 aa, Zea mays
  Clone ID: MRT4577_52825C.1.pep
SSPRRTPEILSATHASLTSASNSPRHHRIRIRCAPFHTLRDGRGRLPLRHRDATLISDPHPRSPLRNPPRSGPMRQPSSPTSRCG

SEQ ID NO: 317708 - protein, 77 aa, Zea mays
  Clone ID: MRT4577_52826C.1.pep
GLQACNLKQEQAEQEREMEQGDEASSVVSKASSTAEQRLTREQHGDAGVAEPEWPSECARSSARVSAHRRRPPHPTG

SEQ ID NO: 317709 - protein, 95 aa, Zea mays
  unsure (1)..(95): unsure at all Xaa locations
  Clone ID: MRT4577_52827C.1.pep
KPLDPPERPVTYLPENACDALAXICGIQDGEGTWLGGMSDTESFVDTLDRWGKIXITGRAKLGGIRVXVIAVDXQTVMLVIPADPSQLDSAERVV

SEQ ID NO: 317710 - protein, 63 aa, Zea mays
  Clone ID: MRT4577_52828C.1.pep
LPENPKLLGGRRLSRHPPRGFRFFPPGPWDPLSPVTFKVYPPPKSLAGVFPGPPSFFGQKSGP

SEQ ID NO: 317711 - protein, 91 aa, Zea mays
  Clone ID: MRT4577_52829C.1.pep
TNGTGPWGANPLTGVGAGGKQRPPLLTWILRLPRGWHFGPPHGVGVACAPHFLCAPGRGRVSPRPRPPAPCRFCREPPPNGGGARRGPPRR

SEQ ID NO: 317712 - protein, 142 aa, Zea mays
  unsure (1)..(142): unsure at all Xaa locations
  Clone ID: MRT4577_5282C.1.pep
KPPPKGHXGAPPPPTPXPGTPPPPPGPPGXPPNHRGPGAPPPPPKPAEGPERPXPVPPHRSXKGAPGKPPRGGPGDTPXQSKGFSPPPWPPPQGLCKPPPPPGKGLDPPPHLGPWGTVPXACGFGDPPPPPPFFLEPPKIPS

SEQ ID NO: 317713 - protein, 176 aa, Zea mays
  Clone ID: MRT4577_52830C.1.pep
ISAHTRRYASFRIGRRSHSTQPASPSDFSPHALFHPTLATVGASAACPRLPSSPLGTPRMRRRTSSASPPRRKTFSPAPPSSPSPAPSPPLGSPSRERFPSLGDSESEAGHLKAAEEGLHEEGERSQAQDSDAELQQPSPSPEVDPLARAVLVTPTTPSAFTSDEDILELARSRDI

SEQ ID NO: 317714 - protein, 148 aa, Zea mays
  unsure (1)..(148): unsure at all Xaa locations
  Clone ID: MRT4577_52831C.1.pep
SHPTFPASASNPSRASEGGKWARLRPPSPSAGAKRHAVHPPRPAHLPSPEQTCSSCGYPAARIHHHNWSGEDIRRSTTGTXRMYHMTHVPRRLHTNYREGTEANPNKSAAAAKYTVKVAMNNHTSYHAAIFLAAIALPEPISPQYHPP

SEQ ID NO: 317715 - protein, 89 aa, Zea mays
  Clone ID: MRT4577_52832C.1.pep
CPITLKSEGDVRDAVHESWVSAFKCISCRMFSLRNLGSVVINEWSPWHRAIVCLGYSLIGDWIGSVSPPHGCQCMECPLSSNVMVRFYM

SEQ ID NO: 317716 - protein, 45 aa, Zea mays
  Clone ID: MRT4577_52833C.1.pep
NSVKFVHPPPASLFLICYKNETKKNKCISIINFKKKKKKRAAATG

SEQ ID NO: 317717 - protein, 197 aa, Zea mays
  unsure (1)..(197): unsure at all Xaa locations
  Clone ID: MRT4577_52834C.1.pep
LQSPRHALFHPTLATVGASAACPRLPSSPLGTPRMRRRTSSASPPRRKTFSPAPPSSPSTRRRRRRRPRCPVRRLSHTRPRRGRGKRASPCAPXPFTQPPSPSPAPSPPLGSPSRERFPSLGDSDSEAGHLKAAEGGLHEEGERSQAQDSDAELQQPSPSPSPEVDPLARAVLVTPTTPSAFTSDEDILELARSRDI

SEQ ID NO: 317718 - protein, 161 aa, Zea mays
  unsure (1)..(161): unsure at all Xaa locations
  Clone ID: MRT4577_52835C.1.pep
MRRRTSSASPPRRKTFSPAPPSSPSTRRRMRRRRPRCPARRLSHTRPRRGRGKRASPCAPXPFTQPPSPSPAPSPPLGSPSRERFPSLGDSESEAGHLKAAEEGLHEEGERSQAQDSDAELQQPSPSPEVDPLGQAVLVTPTTPSAFTSDDILELARSRDI

SEQ ID NO: 317719 - protein, 221 aa, Zea mays
  unsure (1)..(221): unsure at all Xaa locations
  Clone ID: MRT4577_52836C.1.pep
GYPSAGASFRIGRRSHSTQPASPSDFSPHALFHPTLATVGASAACPRLPSSPLGTPRMRRRTSSASPPRRKTFSPAPPSSPSTRRRRRRRRPRCPARRLSHTRPRRGRGKRASPCAPXPFTQPPSPSPAPSPPLGSPSRERFPSLGDSDSEAGHLKAAEGGLHEEGERSQAQDSDAELQQPSPSPSPEVDPLARAVLVTPTTPSAFTSDEDILELARSRDI

SEQ ID NO: 317720 - protein, 42 aa, Zea mays
  Clone ID: MRT4577_52837C.1.pep
LIIGNLVLIKRINRPMTKTIRSPVNLFAAHWYSSFFGYIGTN

SEQ ID NO: 317721 - protein, 197 aa, Zea mays
  Clone ID: MRT4577_52838C.1.pep
FHLAALDGAAERLRLFKADLLDYGSMAAAIAGCDAVFHVACPVLANHTPNPEADLIAPAVTGTMNVLKACSEAKVKRVVMVSSVAAVMVNPSWPEGKPMDEDCWSDVDYCRTTENWYYLSKTLAELQALDYAKRSGLDVVTVCPSLVIGPLLQPTVNASSSVIVDFLKGDNEVKSKIRNFVDVRDVADSLILVYETP

SEQ ID NO: 317722 - protein, 60 aa, Zea mays
  Clone ID: MRT4577_52839C.1.pep
QYPHVHGIVLELYRRSLPAEASCRTSSLELIPSVFICCYRLSVARLSCWLSSRRSSFSSF

SEQ ID NO: 317723 - protein, 60 aa, Zea mays
  Clone ID: MRT4577_5283C.1.pep
KKNFSTLPPPPPPKIKKKNKKKKKKKNKKKKKKKKKKKKKKKKKKKKKKKKKKKKKKKTQ

SEQ ID NO: 317724 - protein, 155 aa, Zea mays
  unsure (1)..(155): unsure at all Xaa locations
  Clone ID: MRT4577_52840C.1.pep
GGATPPNPAAPPGPPPXNGPGAPPPXLGRAPPRAPPGFPLKGPGPSGRGPXPDTNSPPDPPXPGTPPLGPAAGPPGPPPPGLEFPLGRFPPGAXGLGPLGPPSGXVVPSLGPTPPGFGSWLGLPPPFVFPLLGGFCSGGPGGVFPWRFRFPPSWG

SEQ ID NO: 317725 - protein, 240 aa, Zea mays
  unsure (1)..(240): unsure at all Xaa locations
  Clone ID: MRT4577_52841C.1.pep
IGTLEAGRGKGSYLLPSYCLLLSATTSRVHVPAGMWNNGSCLAGGHDDGNDQPNGDGGGQQYEATGGKKQLESSRLKKSSGNKDKEADAAEDDYPNPKYCTNNTSGGSNKDDYNGGSVAGAPYCVCVGVGGYGNSSPCGGGGHSDSGSYGNSCPYDTGGNAPCNNAPAAIWAPQDGARSSLYINTQAVHVYGMPCVSDNDNNNDDHKRTKRGDDGFFGPVVHAVGXHFLDRKFGYDGRDL

SEQ ID NO: 317726 - protein, 197 aa, Zea mays
  Clone ID: MRT4577_52842C.1.pep
MLNSGSCLAGGHDDGNNDQPNGDGGGQKYEGTGGKKQQLESSRLKKSSGNKDKADAAEDDYPNPKYCTNNTSGGTSVAGAPYCVGVGVGVGGGYGNSSPCGGGGDGDSYGNSCPYGTGGNAPYNNAPAAFWAPQDGARSPLYINTQAVHVYGMPCVSNNDNNNDDDKRTKRGDGFFGPVFHAAGHFLDRKFGFDGRD

SEQ ID NO: 317727 - protein, 124 aa, Zea mays
  unsure (1)..(124): unsure at all Xaa locations
  Clone ID: MRT4577_52843C.1.pep
GIRLETNSNYHRHFSLPEKNQTTRRGFIGRAPPXEQLDLEELQPLXTXQPSEDAHRQRQKLTQRTSSWLDNAPAADXDNLFWTTSNTPPVSSLHISAXYVKDTLSLQSRGREFLKLHRLILRGH

SEQ ID NO: 317728 - protein, 27 aa, Zea mays
  Clone ID: MRT4577_52844C.1.pep
VSVLGRCRTGGSDLRSSEAKVFHLDGA

SEQ ID NO: 317729 - protein, 159 aa, Zea mays
  unsure (1)..(159): unsure at all Xaa locations
  Clone ID: MRT4577_52845C.1.pep
PGSTHAVRIRSSASTPPRRWXGXGXNNNRXSGAKGLAPALPPQXRPSGPSPTGRXSTSRVARQGSPSQVLTKPQPLTAGRAGAXTPTAGGAAAREPPTDSSRFPALPAATLRLREGGYRFRXVAAYXWRXXXXXPPPLSPPSPPPPPPPPLFCPAPPSP

SEQ ID NO: 317730 - protein, 121 aa, Zea mays
  Clone ID: MRT4577_52846C.1.pep
CRGFSADLVLKKTPMTPVNEKLDKAKLLPLPPLCPSAIQKPQMNFRTTGGALFVKPPGAQRGMFFYFIKFFTLAFPICAFFYFRPVSRVFLFIFFLFFFFFSFCFFLRKRTLLNPMFFDPP

SEQ ID NO: 317731 - protein, 157 aa, Zea mays
  Clone ID: MRT4577_52847C.1.pep
KDPGHILTTHTTQVDWASHLSTLRGESRHDTHHRREAVLPLPSQHQEVRPSVRPSTESTFRQNVTHKNRAPLDDSAHHPAGVAAATHTTAAVVAASLAAPAGPTTQSSCAPGPSPTAPPRPFWSLLRSSPASGHYPPPFRPHTYAPFAPIGVFHPHP

SEQ ID NO: 317732 - protein, 38 aa, Zea mays
  Clone ID: MRT4577_52848C.1.pep
RTDLLRKNGLKLTLHFHGHFIKLIHLHLYDESGHTTLT

SEQ ID NO: 317733 - protein, 62 aa, Zea mays
  Clone ID: MRT4577_52849C.1.pep
VKNICKHRNKRTIYKSPFHKLSYKLINDVWNFKNRMYETYYCTANSINRMHCTVLPQVQFSL

SEQ ID NO: 317734 - protein, 86 aa, Zea mays
  Clone ID: MRT4577_5284C.1.pep
PRGRKAHGFRSARCIPFGLVAASGARILTLATTTARRRIFLRHLDPSRCCLVSLENQRPLLALGLFIWNSWDRACTFYDCGCKKLI

SEQ ID NO: 317735 - protein, 77 aa, Zea mays
  Clone ID: MRT4577_52850C.1.pep
QYAATIYLRVVQEDYKYEYGFPISCFCINRGSRQVWQLCEPLGLGCPAGWPNNKNIDCCGTSCMDWISLFGGYSDTC

SEQ ID NO: 317736 - protein, 235 aa, Zea mays
  Clone ID: MRT4577_52851C.1.pep
MGGGTKRGGGVVDEPEDKSSKRRKICNVAKEDVLPLAVFSHLPARDAARGVVLSKQWREILTGGDFWANHYQRPSKEVCLAYLDRGHRLPFKFSLYGLEGKHAFYLVAAGDTFPISHGLPVAGTELSYRFFGSCNGLVAFEQRGLSDSSMTCLVANPATSQHLTAQLLDLGTFSWMLAFGYDPKEDKYKVFVQCGSDVHVVPLTLSGTDGSRPVTVLPNVAYDLDNCKTHLLAVH

SEQ ID NO: 317737 - protein, 82 aa, Zea mays
  Clone ID: MRT4577_52852C.1.pep
HLNLDGRGDLLSLLLNHDSGYGVENGDDVDGNGEDLEVGSYLLIVTSVPSTSLILLNLNTVNHCSSYCYHLRLPLHPLLLTT

SEQ ID NO: 317738 - protein, 56 aa, Zea mays
  Clone ID: MRT4577_52853C.1.pep
QPRTIRGVQSLHMSSENLGSPDVIFHQLDIIDACSVMRLGLRSSRLRFGMPIYPVK

SEQ ID NO: 317739 - protein, 70 aa, Zea mays
  Clone ID: MRT4577_52854C.1.pep
MGCLHLSHQVLVVLGGKLALSYLTYGPCVHQPFLVDINSCPVCAIRCDPIIVLSVVGLQHVTAQRNIFIT

SEQ ID NO: 317740 - protein, 77 aa, Zea mays
  Clone ID: MRT4577_52855C.1.pep
RPVLSLPKEQKNSLREASQHIGGESEPILASSTSAPPLTRGESLSFRQKVPDMSIRHRFHQMKAFFRLPYDFSQRFR

SEQ ID NO: 317741 - protein, 76 aa, Zea mays
  Clone ID: MRT4577_52856C.1.pep
DFYVLGRPPVVIECALCWSFYKDLGGLWVVIFVINGFIEWFILGFFLRAPIFCWAWELLCRFVYFLCRNFVKMLQC

SEQ ID NO: 317742 - protein, 51 aa, Zea mays
  Clone ID: MRT4577_52857C.1.pep
SNHFLFKKKNLVPKKKKKKKKKKKKKKKKKKKKKKKKKKKKKKKKKHTPTT

SEQ ID NO: 317743 - protein, 47 aa, Zea mays
  Clone ID: MRT4577_52858C.1.pep
VTSIVPRNVHKLCHALSLRQFLSKLRCDNFHSSTSTSTPTSNKYEKI

SEQ ID NO: 317744 - protein, 207 aa, Zea mays
  unsure (1)..(207): unsure at all Xaa locations
  Clone ID: MRT4577_52859C.1.pep
KNRDSDKIARTPIHLDASASAYQMLSYLLGNITMARNTNLISENNKINNIYEIIDSDFKKYIEXNTVNILSPDMCRRDLXGDIIKNIFMPIVYGKSKFSTAIDLLGKIGSYMVVEDLKTIIKECYNFWESEYKDMRNLMHLVASISWVSGFINKPVIYSTEYWITVQDYIIMEPVKITVKYQTHGMVLIQKKKKKKKKKTLLPCYHC

SEQ ID NO: 317745 - protein, 163 aa, Zea mays
  Clone ID: MRT4577_5285C.1.pep
ARVEPVLENLQRICDGVYLNRVQDRVVVYHAAASDRVGTTTMHKVIGRLDNSAISAIGAKLAFKSNAEVAVEVSTIPLDEVVPDTERVLLIKVDVQGWEYHVLRGASKLLSRRKGEAPYLIYEEDEHLLQASNSSAQEIRAFLTSVGYNHCTRHGNDAHCTKE

SEQ ID NO: 317746 - protein, 82 aa, Zea mays
  Clone ID: MRT4577_52860C.1.pep
CSVLRGSVTRQGPSWWVWLRCWWWCLLLLFLLLLSVRGWLVRGCLLLLLLRSRCLFAEWRMFYGLGAIVLVLRMGTTGFRKT

SEQ ID NO: 317747 - protein, 340 aa, Zea mays
  Clone ID: MRT4577_52861C.1.pep
MSNAADVEAGAQARAAPATTGIKPPPGRYNNMTSNGPYTPPSPFYYDPAAAHGRHHWSWLVPLVVIANVLMFVLVMFYNNCPRSGGDCVGRGFLRRFSFQPLKENPLLGPTAATLQRYGALDWYKVVHGNQAWRLESCTWLHAGLIHLLANMISLIFIGVRLEQQFGFWKVGLVYLVSGFGGSVLSVFFIRKGVSVGASGALFGLLGAMLSELITNWSIYTNRFAAMLNLIIIAAINLALGILPHVDNFAHIGGFATGFLLGFVLLIQPQFGWLEQPFGAKTKSKYKAYQIILLLAALVLLAAGFAVGLVMVFRGENGNDHCSWCHYLTCVPTSSWKCDN

SEQ ID NO: 317748 - protein, 35 aa, Zea mays
  Clone ID: MRT4577_52862C.1.pep
IGPFTYIKGPHKEYGFVLKKKMYCIIKKKKKKKGG

SEQ ID NO: 317749 - protein, 89 aa, Zea mays
  Clone ID: MRT4577_52863C.1.pep
SLRTESMPECVPRLGFFFLDLVYVSRLISSLVVGIRSALVPFRVMYRPFKCWLRATVGRACHAVRRHSRRPPEQTTNSVLRASVSVWIA

SEQ ID NO: 317750 - protein, 66 aa, Zea mays
  Clone ID: MRT4577_52864C.1.pep
GRFFFFFFRVSFVYTTYILLLTLHTKPQTSPKKHYSLPITHTQAKTRHHQLTPVEKTHLSLAGGGT

SEQ ID NO: 317751 - protein, 64 aa, Zea mays
  Clone ID: MRT4577_52865C.1.pep
SIYWLRFISIKKKKKKKKKKKKKKKKKKKKKKKKKKKKKKKTKKKKKKKKKRLALGGNPLRGNF

SEQ ID NO: 317752 - protein, 238 aa, Zea mays
  unsure (1)..(238): unsure at all Xaa locations
  Clone ID: MRT4577_52866C.1.pep
CAALHDGRPRRESLPARHQRQLRPDFSLSQPLSSGPDARRAREFLRWSRAGIMTAHPSCCRAWSLSLSRRSALVRGRRTCFSSDLILPRPCACSARNHSHGELAGVHPLRLLAVEFPSSVASPCAFRLFLARTALSPQLAAPGRALCAHAARSRVPMLAVAGSCSRRNYLPAPCHALAQLGFCRALLSSTPGASPWMPGAAPSXRAHGRSFSLRRARSVILCCDFAPGSFPTRIELPG

SEQ ID NO: 317753 - protein, 68 aa, Zea mays
  Clone ID: MRT4577_52867C.1.pep
GGRASYSRITVCQRSMTSEMSEDISMFWAVTVLTKMLMSSERRHATITGRRRHGCSSLRWLNALTVAL

SEQ ID NO: 317754 - protein, 440 aa, Zea mays
  unsure (1)..(440): unsure at all Xaa locations
  Clone ID: MRT4577_52868C.1.pep
MAIDKVDAKEREKIEAVRKLLCKQAPLSAKQAQYCNDACLERFLRSRGDSVKKAAKHLRTVLSWRESVGADHIMADEFSAELADGVAFVSGHDDDGRPVVVFRIKQDYPKFHSQKSFVRLLVFTLEVAMACMSRFVDQFVVLFDASFFRSASAFLNLLMGTLKIVADYYPGRLHRAFVIDAPSLFSVLWKGVRPFVELAPATAVVCSLDFEDSLEDASFTAYPRTASLRFEXAAVTGKNPGVGSVSSRFSVTPTDNPIKPWYLSTIPTSVGSRSVVPTSSSPSLVGASPLSARSFSFASPATLRSTVATPAPFPRGAGAPLTPSSXPRPRRPRXPQQFPRTPRPSFLQSPSMLFAFRKDGQASRVERERESFLPYLRFYRRPYDEISYRAKMRPPLGGLISIVGDKFRQKPVPQPQPQPLRRHAGLHLHHQHHYQQQQRI

SEQ ID NO: 317755 - protein, 209 aa, Zea mays
  unsure (1)..(209): unsure at all Xaa locations
  Clone ID: MRT4577_52869C.1.pep
MIDESLRGAGFFRSASAFLNLLMGTLKIVADYYPGRLHRAFVIDAPSLFSVLWKGVRPFVELAPATAVVCSLDFEDSLEDASFTAYPRTASLRFEPPPAAVTGKAGVGSASSRFSVTPTDNPVKPWYLCTIPASVXPAPWYPPPAAARRWSGASPLSARSFSFASPAALRSTPFPRGGGAPPTPSSAVTGHKIPPPPQFPRTPRPSFLQ

SEQ ID NO: 317756 - protein, 106 aa, Zea mays
  unsure (1)..(106): unsure at all Xaa locations
  Clone ID: MRT4577_5286C.1.pep
DCITHFSDSCVGDGVSFWCILWGVVEGFAPRPLCSCGCASVVFCFCCLDPYRWVLRFFFSTCLEGGGFLFLGLRGAPGVSGCPAFGDCTGFFVLXXGGXXFDSQTQ

SEQ ID NO: 317757 - protein, 159 aa, Zea mays
  unsure (1)..(159): unsure at all Xaa locations
  Clone ID: MRT4577_52870C.1.pep
LTRRCESLCGAGFFRSASAFLNLLMGTLKIVADYYPGRLHRAFVIDPPSLFSVLWKGVRPFVELAPATAVVCSLDFEDSLEDASFTAYPRTASLRFEPAAVVGKNPGVGSVSSRFSVTPTDNPIKPWYLSTIPTSVGSRSVVPTXSSPSLVGASPLSAR

SEQ ID NO: 317758 - protein, 45 aa, Zea mays
  Clone ID: MRT4577_52871C.1.pep
SCVLCACSGASAVPLLALWSGLLGYLVCESQPLTTERAGQIFIEP

SEQ ID NO: 317759 - protein, 463 aa, Zea mays
  unsure (1)..(463): unsure at all Xaa locations
  Clone ID: MRT4577_52872C.1.pep
MAVDKQADAKEREKIDAVRKLLRKQAPLSIKQAQYCDDACVERFLRWRGESVKKAAKHLRTVLSWRETVGADHIMADEFSAELADGVAFVSGHDDDGRPVVVFRIKQEYPKFRSPKSFVRLLVLTLEVAVACMSRSVHQLVLLFDASFFRSASAFLNLLMGTLKIVADYYPGRLHRAFVIDAPSLFSVLWKGVRPFVELAPATAVVCSLDFEDSLEDASFTAYPRTASLRFEPPPAAVTGKAGVGSASSRFSVTPTDNPVKPWYLCTIPASVGSRSVVPTSSSSPSLVGASPLSARSFSFASPAAXARRRSRAAGAPPRRLPPPSRATRSRRXQFPRTPRPSFLQSPSTLFAFRKDGQQTSRVERERGSFLPYLRFYRRPYDEISYRAMMRPPLGGLIPIVEKFKAQAGAADAASTRWAPPASAAAAPPLPTAAEDLSLVSQSVLHGDPRIFSIQHKGDAILC

SEQ ID NO: 317760 - protein, 349 aa, Zea mays
  Clone ID: MRT4577_52873C.1.pep
MKAKASAAAAEDDAEPKKIRSSRSKHRRRRHSRSSSRSESPPRKRSKKNSKRIPDKKSKRSKGSRGGSLRRRHHSLSHSRSLSSSPSSVARRSSSSCSSSSASERSVSPPPRSRSRDVRRKKGRGRGRERDRKGRKLRRSASSSSISASSGSSRSKSRKRMTVGGTKDRATTTRDKMEKGYTDRRSCRSVMNVDEHVDGDEDRLAIAKVVDNDIDRHKKNLESESSPSKNANTTEEKVPASGGNSDAQDLELILRQKALENFRKFRAAATMGGKTDSGAAGKEASIDDSVHNAGMEVADATHSQSQETSLGARYSAGSPRSQNFGNGANRSWKQDNGAGMSCGGITRIT

SEQ ID NO: 317761 - protein, 145 aa, Zea mays
  Clone ID: MRT4577_52874C.1.pep
QCMPLVCHKLLRMPDGCGPERDHAHILPGARRDLLRPIRSASGGDLRGPHTGVFTVFTRPSSFLFELKRAPQKLFTVFKLPRNALFLAIRFLEALLGTHFFFLKPPRVVHAFSLALCRRGASFEHHAVPYKADSMALESVRVGYV

SEQ ID NO: 317762 - protein, 47 aa, Zea mays
  Clone ID: MRT4577_52875C.1.pep
QYSSHKISKWTKFLLVFLRKFQDCSIVVRKVSASQCPQISTDANIGT

SEQ ID NO: 317763 - protein, 164 aa, Zea mays
  unsure (1)..(164): unsure at all Xaa locations
  Clone ID: MRT4577_52876C.1.pep
MWDSEEHQFESKDDGAEGKTYSKNTGTARMNEFIIIINRTCKVEEGSTXKTGTNVHAXCHFVCIDIYNGKNVEDMVPSSYNCEIPNANRTDDQMIDISEDVFVSLLTSDGKTNDDRKLPNDDTLVAQIMEGLESXKDLGVTVQTAMXDEQICXAHKDDGPNKLP

SEQ ID NO: 317764 - protein, 51 aa, Zea mays
  unsure (1)..(51): unsure at all Xaa locations
  Clone ID: MRT4577_52877C.1.pep
REGGGDDGGCEATGLRAXSRVIARVLEYGFAPAKPGLSAVGFFVNSPXPAP

SEQ ID NO: 317765 - protein, 202 aa, Zea mays
  Clone ID: MRT4577_52878C.1.pep
MVESLKTLLVAPVPHDLLASTELARTVGALGSHGSSRIRSLARDVVRGWRVAVEASFATAVAVKKKLDNLSADQIPLPRAAVDKVHVPSAKMLPAAAEVHNKKPDIPPAKMISTATAAEAHNKRPHVPPAKTLAAAVAEVHNKRPQVPPAKMLSTAEEHKKQHYVPPTKTLPTTSILSNQRKNMSETKNRSSPRARRWRLTN

SEQ ID NO: 317766 - protein, 102 aa, Zea mays
  Clone ID: MRT4577_52879C.1.pep
GPPALSSFPLRDSQWVHLETRAPHFLKGRRPPPLVPQPGPIFSPEKGQKGGMCGPQLFFLLNPIVPLVFFLCPFFLSCFWFNPLFFFFFFFFFFFFFFFFFF

SEQ ID NO: 317767 - protein, 205 aa, Zea mays
  unsure (1)..(205): unsure at all Xaa locations
  Clone ID: MRT4577_5287C.1.pep
MKLKENFWNRRPRLSIEDLNSLAKPFKEEIFQVIENLEVDAAPGPNGFGGDFFKNFWHIIKEDIYKMFKDFHEAEVDMQRLNFGVIMLIPKIRDASSIKQYRPICLLNADFKIFTKVLTNRLSAVAKGLIGGNQTGFLKXKXILEGVVILHEVVHELKSKKKKSLLLKIDFEKAXDKVRWDFLEEVMTSKNLSVLLEEGVAKGHK

SEQ ID NO: 317768 - protein, 75 aa, Zea mays
  Clone ID: MRT4577_52880C.1.pep
HSWAYIHVQYCPRSGYVAHDAMAMPPIARAAMMWAALAVLFILVLIDGSTVALSRRVVLLLNLVQFIACGALSSC

SEQ ID NO: 317769 - protein, 172 aa, Zea mays
  unsure (1)..(172): unsure at all Xaa locations
  Clone ID: MRT4577_52881C.1.pep
GKTGKRPLRGQNPVPGTDGSRAGSKGARKGKRAQKGNGLSRGVGGISKPRGNPGFPRGNRPVSPTRFNGVSPVIGAPRLNPFWFGLESGGELQAENNFPREPALARIWPSLEPSREPQETAHQWEGSAPFXGGRPGPGPNFFFFFFFLKEHFFFFFFFFFFFFFFFYGSLSN

SEQ ID NO: 317770 - protein, 102 aa, Zea mays
  Clone ID: MRT4577_52882C.1.pep
MMASRGTSAVLSRAARMRQKLQSALEASALDIEDVSYQHAGHAAVKDNANETHFNIKVVSPKFEGQNLVKRHRMVYDLLRDELSSGLHAVSIVAKTPKELGS

SEQ ID NO: 317771 - protein, 102 aa, Zea mays; identical to SEQ ID NO: 317770
  Clone ID: MRT4577_52883C.1.pep

SEQ ID NO: 317772 - protein, 34 aa, Zea mays
  Clone ID: MRT4577_52884C.1.pep
NEQWRKCTLKRQEEEPYAGLVVDGAAAITIRPND

SEQ ID NO: 317773 - protein, 123 aa, Zea mays
  unsure (1)..(123): unsure at all Xaa locations
  Clone ID: MRT4577_52885C.1.pep
KALPSSWKEVIELLDILLRWFVLRFCESNTTCLLKVLDFLPELFDILKDQSYMLTEAEAAIFLPCLIEKSGHNIEKVREKMGELIKQMINIYSLPKLIPYIXEGLRSKNNRXKIEMCDIXGYF

SEQ ID NO: 317774 - protein, 137 aa, Zea mays
  Clone ID: MRT4577_52886C.1.pep
DVLHIQDHPRIQSVRGIHTERTTRLQWSFGVLERIRSWRCSRHGAGGGAYGISLVHIFVRTDPAIRMSGILDRLRRGEVVSEIAVEAVLNDVVARRDLRRQMGTRVFSPSPSCLLLGAGYSRASEYFCLALCGEEKK

SEQ ID NO: 317775 - protein, 203 aa, Zea mays
  Clone ID: MRT4577_52887C.1.pep
GRAYNIFTFTAAILDPRIKGELIPETLNSTSNLDDVRNHFVRDYSSTFQAVGNGHGAQDTTEDAGAFAFAEEIIRKRRRVSMTTADDELSQYLAEPPAPISTDALEWWRGHSSRYPRLSLMARDFLAIQGTSLDPEELFTSKGDNIHRQQYCLPLSSMQAIVCIKSWMQSGYQFNFQSTIIDFERLVESATAPDDIDSSGLHS

SEQ ID NO: 317776 - protein, 43 aa, Zea mays
  Clone ID: MRT4577_52888C.1.pep
QQKRLPTPRRSPTTNAHALISTACCMLSCTSGTTTSASPTPSR

SEQ ID NO: 317777 - protein, 230 aa, Zea mays
  unsure (1)..(230): unsure at all Xaa locations
  Clone ID: MRT4577_52889C.1.pep
DRASGGEPHAGPGPEPQPRQPQRSFFSPPPLGVDRDTNFFFKPHPPXLVPXAPQSTSPPPAAPLPHTALMATPAPDPTLCPSPTPEHAPPAHPPPRTESPPPPTHTPPPPPQPRDPRPQVTAPPPQPTPPSHPPNPNPIPPQPTPPXPPQKPPRPTHATHHQPPNGTTPPPNLPRTPSPPTPPPKPPLPILPSLPNPQPSPPPTNLTHPPPPPLQTPPPXPPPPPTTPPP

SEQ ID NO: 317778 - protein, 92 aa, Zea mays
  Clone ID: MRT4577_5288C.1.pep
MNVRRLPPPLDCQLRCGSHRAPISGRQPRRVSAAAGSRRQLQDSISPSGSGIEPHRSQLEGLHEAAPGRHGPLSPCQSPGQAATVWGVEVQW

SEQ ID NO: 317779 - protein, 176 aa, Zea mays
  unsure (1)..(176): unsure at all Xaa locations
  Clone ID: MRT4577_52890C.1.pep
TPPRDRCATGNALKFCLLPTKILWGRTTAEPTPERPPTVSMXVVRASAYADELVKTAKTIASPGRGILAMDESNATCGKRLASIGLENTEANRQAYRTLLVTAPGLGQYISGAILFXEETXTSPXSTAAKIVDILAEQGIVPGXIKVDRALVPLAGSTXSSWCQGLDALASREAAY

SEQ ID NO: 317780 - protein, 131 aa, Zea mays
  unsure (1)..(131): unsure at all Xaa locations
  Clone ID: MRT4577_52891C.1.pep
RISXLDSVASHLGESMRASDSLVLSLKLELEYSKVKRERDDAVKEARDMRXEKELTEPRAYGAMSSEFSLAELEQATQAFSSSLNIGEGGFGSVYKGLLRSTTVAIKILNTESLRAQSQXKQEVKTLLLPC

SEQ ID NO: 317781 - protein, 625 aa, Zea mays
  Clone ID: MRT4577_52892C.1.pep
MGGGQHANIQSTPPMVDQRAGGLAPAAIDIVREEIAGAFREKLGVRNAGGYRALPGKCDRLRGQEGPDWTEDKEIIIDDAWEADGNNKISCRKVVAEKTPDGGETLKVTITTFGTRGASADQGASAGARTTHLGRSDAQVQTVRDYAERFEEFQWTEHQQVRPIGPPHQSKRTEGHTVQLRSNIPAWTPPPPYLPMSYPYTYIPPPYTPNQMWSMPPYPFGMSQNPAWGAPQTYVFNRLAPPVQDQLSATQSGHQAQAQQGCRTTQSQRPTNLVEGHIPTTTERTTKKDIIKIGTTDVVIQEDNEGPMIFGESANTNKIEDKAAIKIADPKFSMPRWCPSRLTRSQKQKLQRLRAKENQEKEAEKTFNDTHPQYPPPQKKWRPKAVEKKQMATKMENKTTIVQHPAGMADSPAGKAGPSAQDVDRPTPESGPSALHQDASDDVSTPMEEDDLLGEDLVDYEASPEHPGKDINVITFSIGCNIIGDDEPVVAQFYFGPKEAAFTKPKESVNHLKPLFVRGYIDGISIAKMLVDGGVAVNLMPYPLYRKLGKQDDELVKTNMTLNDVGPDSSIKARGVTSVELTIGTKTLAAAFFVADVEGNYSLILGRDCIHANQCVPSTLHQMLL

SEQ ID NO: 317782 - protein, 76 aa, Zea mays
  unsure (1)..(76): unsure at all Xaa locations
  Clone ID: MRT4577_52893C.1.pep
VLATASRALIATSYHGAVASMCKWLLCICIFRKKASPQIPPPQEAGARIVRVLLVMCKYSKXKASPAKGIRERYLQ

SEQ ID NO: 317783 - protein, 72 aa, Zea mays
  Clone ID: MRT4577_52895C.1.pep
MAFKKAAIGLSSLLLILVLLLVAPSATAARPTRQLTSDDDDDGTGAAAPAAAPAIAHPAADAPVTADASPLW

SEQ ID NO: 317784 - protein, 113 aa, Zea mays
  Clone ID: MRT4577_52896C.1.pep
SLRSQFHSLRLFPGRTAAASPMQIADPASCASVDTGRCPSARRNAYFFFPWLLGQGESVVWLLRPSLLRWHKWSKKLASHRGVQWRCSRANHCFASQSLCARCFHFKRQEGIS

SEQ ID NO: 317785 - protein, 87 aa, Zea mays
  Clone ID: MRT4577_52897C.1.pep
MRRYGQSLYHPQSPMTRCVNFLCAVLLTLILITGVILFVLWLSLRPHRPKFYLADFSIPVANANRQSGLANLPVRFTVNEHNPNQEI

SEQ ID NO: 317786 - protein, 54 aa, Zea mays
  unsure (1)..(54): unsure at all Xaa locations
  Clone ID: MRT4577_52898C.1.pep
CNPMVRAPMRHGDWLIRDTIVGALLTSPXXPSKGYRPIVGSYPGDSRHSSPTSS

SEQ ID NO: 317787 - protein, 75 aa, Zea mays
  unsure (1)..(75): unsure at all Xaa locations
  Clone ID: MRT4577_52899C.1.pep
YIPDDCVCVEGYYTLKNRITDSMVVSEEGLVKKRTRRPKHVGNEGAIRKRRGSDNEXKKKKKKKKKKYSXVVTTA

SEQ ID NO: 317788 - protein, 161 aa, Zea mays
  Clone ID: MRT4577_5289C.1.pep
VTLLKEQLKIANLEKEEISLKFDKLSAICSSQRREIQELKQALAAAYVTPPAKQFRENSSVEVTPPSKSLDTPPREKIEGTPPELRQGLFTSSPGTPSPDLKTWSAFLEEPKSQAAVKSVHPRSVRTLRASNSNKASSLGQSNISSSTDPFAARGLITGDY

SEQ ID NO: 317789 - protein, 46 aa, Zea mays
  unsure (1)..(46): unsure at all Xaa locations
  Clone ID: MRT4577_528C.1.pep
PCLQALVPGPVALHHIMVSEVEMFMGVLEIXHYCSQDYWHLQHIGF

SEQ ID NO: 317790 - protein, 45 aa, Zea mays
  Clone ID: MRT4577_52900C.1.pep
QRHRIPDYIRGPPMFVPSQHLRADIGVTRTLTFFVVLMAHLSPVS

SEQ ID NO: 317791 - protein, 91 aa, Zea mays
  unsure (1)..(91): unsure at all Xaa locations
  Clone ID: MRT4577_52901C.1.pep
MVNVPNTRRTFCKKCGKHEAHKVTQYKKCKDSLYAQGKRRDDVRQSGYGRQTKPIFRXKSITTKKIVLRLEFVEPNCRSKSMLAIKRCKRF

SEQ ID NO: 317792 - protein, 61 aa, Zea mays
  Clone ID: MRT4577_52902C.1.pep
HKLKLGTRLQPHTIFGGWARIFKHLKTYGLMGSLNPQYFSLIFLPKNFNRGFFINFLQKRV

SEQ ID NO: 317793 - protein, 61 aa, Zea mays
  Clone ID: MRT4577_52903C.1.pep
KKCFSPIQENQESPLPSKKQKMRHDSLKSQSKVVAFKRSCLKEKIKIFGFEKQRKGQRYIF

SEQ ID NO: 317794 - protein, 201 aa, Zea mays
  Clone ID: MRT4577_52904C.1.pep
SGGTACRFRSGIPGSTHASATTMEAFSVRFESASSIEERKEQTRNARAEVLRQAKHNFEKEQRGEERKRLRDEDTWMLPDVHERIEQFSQEHSEKKKKKKDKHSKKVKKEKKKKRKKQKCQKQSESTDSSASSEDEWVEAAPSQISDKEKTWRVKDKRTEEECDSHDIQRDEWMTIDFMSIKTVSSSSLKAGQETVRQVER

SEQ ID NO: 317795 - protein, 57 aa, Zea mays
  Clone ID: MRT4577_52905C.1.pep
SWSVPPLTARGWVLSRKIPPTPLPPPKPPARGPPAPPPPSPLARVSLMGLGWLCVSI

SEQ ID NO: 317796 - protein, 93 aa, Zea mays
  Clone ID: MRT4577_52906C.1.pep
VHSLLIPLLSSQSGGGYCLARSVRAEVRSIVEEGREPREEADHFEGEGRRGSWLRVRGVAWRMWTKPMQEGMWRRSTTPPACAPKVRGTITGE

SEQ ID NO: 317797 - protein, 62 aa, Zea mays
  Clone ID: MRT4577_52907C.1.pep
YLNAYAYDAQIAGLFYWIYLTSAGFQVSLGGYNDKMRALLNAILVQIASFEVKPNRFSALKI

SEQ ID NO: 317798 - protein, 973 aa, Zea mays
  Clone ID: MRT4577_52908C.1.pep
MAAAAVAAAGSSNVEFIRARSDKREYRRVVLANALEILLISDPDTDKAAACMEVEVGSFSDPEGLEGLAHFLEHMLFYASEKYPGEHEYTKYIIEHGGSYNAYTSSETTNFFFDVNVDNFEEALDRFAQFFIKPLMSQDAVLREIKAVDSEHKKNLLSDGWRMYQLQKHFASKDHPYHKFSTGSWETLETKPKARGLDIRLELLKFYKNYSANVMHLVVYGKENLDCIQGLVERMFSDIKNTDQRSLKCPSHPLSEEHLQLLVKALPIVEGDYLRIIWPITPSIQFYKEAPCHYLSHLIGHEGEGSIFHIIKELGWAMNLMAGECSDSNEYSFFSVSMRLTDAGHERMEDIVGLIFKYLHLLKEDGVHEWIFNELAAINEMEFHYQDKVRPINYVMRTVSTMRLFPPEEWLVGAALPSKYASQRINMILNQLIPETVRIFWESKKFEGSTSSAEPWYNTPFSVENVTPSVIQEWIEKAPTEKLHLPKPNIFIPKDLSLKEVHEKVTFPTVLRKSPLSQLWYKPDMLFSTPKVHIIIDFHCPLSSHSPEAVVATELFVDLLVDYLNAYAYDAQIAGLFYSIYVTSAGFQVSLGGYNDKMRVLLNAILVQIVKFEVKPNRFSALKETSVKDYQNFNFRQPYSQASYYVSLILGDKKWPVAEKLEALSKLESDYFAKFVPHLLSKTFLECYVQGNIEPSEAKSIVEEIENTIFTTPNSLFKSMSPSEYLIKRVIMLENDLKCYYQTEGLNQKNENSSVIQYIQVHQDDAILNIKLELFSLIAKQPAFNQLRTVEQLGYITSLSLRSDYGVLALQVVIQSTVKDPSYLDVRVDEFFKMFESKIYELSDKDFKRNVKSLIDSKLEKFKNLWEESHFYWGEIEAGTLKFDRVESEVAMLRELKKEEFIEYFNQYIKVDAPQRRTLSVQVFGGNHLVEFKKAINEADPPKMYRITDIFGFKRSRPLYSSLKGGPGRITMD

SEQ ID NO: 317799 - protein, 977 aa, Zea mays
  unsure (1)..(977): unsure at all Xaa locations
  Clone ID: MRT4577_52909C.1.pep
MATAVAATAAAAGGSNVEFIRARSDKREYRRVVLANALEILLISDPDTDKAAACMEVEVGSFSDPEGLEGLAHFLEHMLFYASEKYPGEHEYTKYITEHGGSYNAYTSSETTNFFFDVNVDNFEEALDRFAQFFIKPLMSQDAVLREIKAVDSEHKKNLLSDGWRMYQLQKHLXASKDHPYHKFSTGSWETLETKPKXRGVDIRLELLKFYKNYSANLMHLVVYGKESLDYIQGLVERMFSDIKNTDQRCFKCPSHPLSEEHLQLLVKALPIEEGDYLRIIWPITPSIQFYKEGPCHYLSHLIGHEGEGSVFHIIKELGWAMNLMAGESTDSNEYSFFSVSIRLTDAGHEHMEDIVGLIFKYLHLLKVDGVHEWIFNELEAINEMEFHYQDKVDPISYVMRTVSTMRLFPPEEWLVGAALPSKYAPQRINMILDQLSPERVRIFWESKKFEGSTSSAEPWYNTPYSVENVAPTMIQQWIKKAPTEKLHLPEPNIFVPKDLSLKEVHEKVTFPTVLRKSPLSQLWYKPDTLFSTPKVHIIIDFHCPLSSHSSEAVVATELFVDLLVDYLNAYAYDAQIAGLFYSIYLTSAGFQVSLGGYNDKMRALLNAILVQIASFEVKPNRFSALKETSVKDYQNFNFRQPYSQASYYVSLILEDKKWPVAEKLEALSKLESDFFAKFVPHLLSKTFLECYVQGNIEPSEAKSVVQEIENTIFNAPNSLFKSMSPSEYLTKRVVMLENELKCYYQTEGLNQKNQNSSVIQYIQVHQDDAILNIKLELFSLIASQPAFNQLRTVEQLGYITSLSLRSDYGVLALQVVIQSTVKDPSYLDGRVDEFFKMFESKIYELSDKDFKRNVKSLIDSKLEKFKNLWEESDFYWGEIQAGTLKFDRVESEVTMLRELKKEEFIEYFDQYIKVDAPQRRTLSVQVFGGNHSAEFKTAIAEADPPKMYRITDIFGFKRSRPLYSSLKGGPGRITMD

SEQ ID NO: 317800 - protein, 99 aa, Zea mays
  Clone ID: MRT4577_5290C.1.pep
GRGLEQLYVILDRVNTTSSWAGTLRISADAALRRRRRGGGFGLARLRGRLVWMDRELGRLQHLQRPLRFPRRYHDSDLLRERRRQVASRDQGRLLRVLR

SEQ ID NO: 317801 - protein, 59 aa, Zea mays
  unsure (1)..(59): unsure at all Xaa locations
  Clone ID: MRT4577_52910C.1.pep
RGRGXEWQRAWGAHPGSAAAEDEAEGGGGHGRGRRPGRRAAACSQTCTKKKGVXRIEKS

SEQ ID NO: 317802 - protein, 331 aa, Zea mays
  Clone ID: MRT4577_52911C.1.pep
GLEVVRKVTTRAQKKIEKLRQLLSGVFSELTNFDEPIRSPLAPTLLLTGVVPQESSIFKSALNPLRLTFKTANGGTSKIIYKKGDDLRQDQLVIQTVSLMDRLLKLENLDLHLTPYRVLATGQDEGMLEFISSSSLAQILSEHRSITSYLQKFHPDEDGPFGITAQCLETFIKSCAGYSVITYILGVGDRHLDNLLLTDDGRLFHVDFAFILGRDPKPFPPPMKLCKEMVEAMGGAESQYYTRFKSYCCEAYNILRKSSSLILNLFKLMERSGIPDISADESGGLKLQEKFRLDLDDEEAIHFFQDLINDSVSALFPQMVETIHRWAQYWR

SEQ ID NO: 317803 - protein, 100 aa, Zea mays
  unsure (1)..(100): unsure at all Xaa locations
  Clone ID: MRT4577_52912C.1.pep
PAPQKRRSXMTRSNHTRFXGTKKASHSRXXRHSTQTPCXPPPHHPIQGTGKLLVLXRHMEKAIIXVLXEHVPYHPVVGPIHLPKLLLSDRHPPPPTXQRA

SEQ ID NO: 317804 - protein, 62 aa, Zea mays
  Clone ID: MRT4577_52913C.1.pep
FLMLKPHFRLVLLYLWDLSGSFRLISSVCCRLSWLSFMTFPPPPFGLIHWYSSPFLFPWVST

SEQ ID NO: 317805 - protein, 70 aa, Zea mays
  unsure (1)..(70): unsure at all Xaa locations
  Clone ID: MRT4577_52914C.1.pep
FLKKALKPTWKNGQINREVPKTFVKKVVDKVTSPVENPPPPKEKIEVXMPYSKEKLNKLVQGYFGKYPKG

SEQ ID NO: 317806 - protein, 121 aa, Zea mays
  Clone ID: MRT4577_52915C.1.pep
VLGGVVEPRPAQQRHGEGHREVDEMLSASARSRQPTETRPCTHLAREERCTVHAASSVHCSASCIARVASFGRGRVDIIWALEEEEASLRSALLCTLSGRQVEPSAYLCRDGLADNHAERD

SEQ ID NO: 317807 - protein, 284 aa, Zea mays
  Clone ID: MRT4577_52916C.1.pep
MLTPSAGIPPPSLSAASSPSTSYSLLYLPRRCRRLPVPRASSSFAPKRSAPVPTTTLPPEAPSTSAAVEAPAPFSVTAPGTYRGGEDPLVSKLRTQLGVIHPLPAPPISRSVVGLFALFFFVGAAFDKLWTLRKRRRAERELKVNGSWPQVPTPSFSLFLEKDLQRKESVEWVNMVLGKLWKVYRTGIENWIVGLLQPVIDNLHKPDYVNRVEIRQFYLGEEPLSVRNVERRTSRRANDLQYQIGIRYAGGARMALALYLKFTKVPVVVPAWVRDFDIDGELWV

SEQ ID NO: 317808 - protein, 96 aa, Zea mays
  unsure (1)..(96): unsure at all Xaa locations
  Clone ID: MRT4577_52918C.1.pep
MAEEKHHHHHLFDHKKDXXDEQLVXPVPGVRPVHGCHGVGRTGHGLELVRLALGGXSGIMXQSVPQRGGHPLAPAHCRSTRSARQRRTXALARPQD

SEQ ID NO: 317809 - protein, 69 aa, Zea mays
  Clone ID: MRT4577_52919C.1.pep
LEPAGNTQYGLTPYPRDSSRSTCAELEVAPHSMSAVRDYKPNRQCLLRHYAADENVLLRQAAPVRQPSS

SEQ ID NO: 317810 - protein, 231 aa, Zea mays
  unsure (1)..(231): unsure at all Xaa locations
  Clone ID: MRT4577_5291C.1.pep
YASASLPPHSRSPDQSSKVQSLASHLPSETYGSGYGRKPQVEESYGSEYGSGFGRKPQIEESYGSGYGRTPQVEESYGSGYGRKPQVEESYGSGYGSRPQGGEEYGSGGGGYGRXRHRRRPXGSSGYGYGRKNEEQSYGGSGYGYEKKASEEDEGAFGSGGYRKPKPYDEETQGSYGYGEEQPKYQSGGYERPSYGGGEGYYGRKKDDDDSDDEKKRRHSKHHHHGHHYDD

SEQ ID NO: 317811 - protein, 151 aa, Zea mays
  unsure (1)..(151): unsure at all Xaa locations
  Clone ID: MRT4577_52920C.1.pep
SLQGLHLRLRDIGQYLQKVLDEDLPVNHAILGNLXDVFNLLPNLSTPKAAPVGGATNGAGSAGAIDNGELARAMSIKTNDQLMAIYLSSLIRAITAFHDLIENKIQNKQQAEDKEAKKDEVKDGDKAEGANGEAKEGDKSKEKPKDEKKKP

SEQ ID NO: 317812 - protein, 119 aa, Zea mays
  unsure (1)..(119): unsure at all Xaa locations
  Clone ID: MRT4577_52921C.1.pep
MSMTKEAFHYMARKNMWDLAYDPVEDTTXTXSLGALPSDCKALNDGIANATKRHQGPPEDRHLRYGRAESFISRPRGDGAXCIHTLVCRLGNTQNWLVGLRALECIHRLTEWGDATSRE

SEQ ID NO: 317813 - protein, 239 aa, Zea mays
  unsure (1)..(239): unsure at all Xaa locations
  Clone ID: MRT4577_52922C.1.pep
MDSTLFIIGVIGNIISVLVFISPIKTFWRIVRGGTTEEFEPAPYVLTLLNALLWLYYGLTKPDGFLVATVNGFGAVMEAIYVVLFIVYAANHATRVKTAKLAAALDIGGFGVVFAATTFAISEFELRIMVIGMICACLNVLMYGSPLASMKTVITTKSVEFMPFFLSFFLFLNRRRLGRFTSVLDXDIFTQASPNGIGFVLGTIQAMVYAIYMNSKASQCSKETAVLASFDGLRPGRSI

SEQ ID NO: 317814 - protein, 36 aa, Zea mays
  Clone ID: MRT4577_52923C.1.pep
EEIRSIVTLCVIGGRTGQDFFLVSCRHGEYFTIVRS

SEQ ID NO: 317815 - protein, 66 aa, Zea mays
  unsure (1)..(66): unsure at all Xaa locations
  Clone ID: MRT4577_52924C.1.pep
HAYAHAFSHAFNHTXGSGSRFHRSKQYKNTYSCMPRTNFFILSPKYNIHCTSFYYSRIAKFWAYTH

SEQ ID NO: 317816 - protein, 206 aa, Zea mays
  unsure (1)..(206): unsure at all Xaa locations
  Clone ID: MRT4577_52925C.1.pep
MRSGWQLPGLGLALGSQPEPIITPPPPPAPAHPDEGEGRRYQTLLLQGYKSPPQHHYTIPSALSPHYCVLGPPRPAMQRWLPALLRRAAPGGGEVRLLATTSLFXDDTKQALKESVRKFAQEAIAQRDADIDASNHFPRDVDLWRLMGDFNLHGLTAPEEYGGKGLGYMHHCIAMEEITRASGAVGVSYGAHSNLWINQLVRNGKP

SEQ ID NO: 317817 - protein, 407 aa, Zea mays
  Clone ID: MRT4577_52926C.1.pep
MQRWLPALLRRAAPGGGAARLFASSSLLFDDTQEQFKESVRKFAQENIAPRAAAIDASNHFPRDVDLWRLMGDFNLHGLTAPEEYGGMGLGYMYHCIAMEEITRASGAVGLSYGAHSNLCINQLVRHGSPEQKLKYLPKLISGEHIGALAMSEPNSGSDVVSMKCKAEKVDGGYVLNGNKMWCTNGPSAQTLVVYAKTDLAAGSKGITAFIIEKGMPGFSTAQKLDKLGMRGSDTCELVFENCFVPRENVLGEEGKGVYVMMSGLDLERLVLAAGPIGLMQACLDVVLPYVRQREQFGRPIGEFQFIQGKMADMYTSLQSSRSFVYSVARDCDNGKVDRKDCAGVILFAAENATQVALQAIQCLGGNGYINEYPTGRLLRDAKLFEIGAGTSEVRRMIIGRELFKED

SEQ ID NO: 317818 - protein, 427 aa, Zea mays
  unsure (1)..(427): unsure at all Xaa locations
  Clone ID: MRT4577_52927C.1.pep
MQRWLPALLRRAAPGGGAARLLATSSLLFDDTQEQFKESVRKFAQEAIAPRAAAIDASNHFPRDVDLWRLMGDFNLHGLTAPEEYGGMGLGYMYHCIAMEEITRASGAVGLSYGAHSNLCINQLVXASSSIHNRDWLSKREHKCRHGNPEQKLKYLPKLISGEHIGALAMSEPNSGSDVVSMKCKAEKVDGGYVLNGNKMWCTNGPSAQTLXIHNRETDLAAGSKGITAFIIEKGMPGFSTAQKLDKLGMRGSDTCELVFENCFVPCENVLGEEGKGVYVMMSGLDLERLVLAAGPIGLMQACLDVVLPYVRQREQFGRPIGEFQFIQGKMADMYTSLQSSRSFVYSVARDCDNGKVDRKDCAGVILFAAENATQVALQAIQCLGGNGYINEYPTGRLLRDAKLFEIGAGTSEVRRMIIGRELFKED

SEQ ID NO: 317819 - protein, 86 aa, Zea mays
  unsure (1)..(86): unsure at all Xaa locations
  Clone ID: MRT4577_52928C.1.pep
CGEHGGEPSSVAFFAKAGLXXVSCSPFRVPFAXLAAAPVLVWGCLLGGRRVACCWWMWWVFKPKVASPPPVLIKATIPSPFFFPVM

SEQ ID NO: 317820 - protein, 50 aa, Zea mays
  Clone ID: MRT4577_52929C.1.pep
QSLIVMIRIDRSAYFLNPKTKNIKLWQQQKFSLTTKFHSDDPQGQAVLLK

SEQ ID NO: 317821 - protein, 160 aa, Zea mays
  unsure (1)..(160): unsure at all Xaa locations
  Clone ID: MRT4577_5292C.1.pep
MERTYIMVKPDXVERGLVGEIIKRFEQRGYQLTALELIHPTKELLEEHYCDLKGKAFFPSLVEYMLSGPVVGMVWXAKDAVKTGRKMLGETNPLASAPGTIRGDFCIEVGRNICXGSDXSVEICLKREIGXLWVPPWDGLTNPPTPPTQPPPPPLPFGIL

SEQ ID NO: 317822 - protein, 63 aa, Zea mays
  Clone ID: MRT4577_52930C.1.pep
ALGFMMDGEYGRLQDFRGCTREMQRAFARRLTRAAECNLPTVDGGMCHSLASPRPGIESVSTY

SEQ ID NO: 317823 - protein, 63 aa, Zea mays
  Clone ID: MRT4577_52931C.1.pep
NSPRKASSPLKARKSSPTLSDSLRNWKTSVCRGGKPPRWFLFIDQPETKPRRLKLPQVPGLPV

SEQ ID NO: 317824 - protein, 83 aa, Zea mays
  Clone ID: MRT4577_52932C.1.pep
MDAHLQTCFLVRYPNCQYISVWDTMEALVAETRIEGKESKTYIEAVAQVLASSKYLQNVLVAAIKRSSNGGDATCVEVEMLVL

SEQ ID NO: 317825 - protein, 122 aa, Zea mays
  Clone ID: MRT4577_52933C.1.pep
HKEVDTGRCESSISHMHSNTVASISSGKGTTIIKRVSPSPVVMRFVHNDPSLGRVLSASKPDTAVLCRERVWLFLSSCSSSENDSLSCIHQLPFSKVAPFGLSRAATIVVSLWQRHITISTG

SEQ ID NO: 317826 - protein, 127 aa, Zea mays
  Clone ID: MRT4577_52934C.1.pep
RVRGALIAYAKRFIPGLSRTGRRVWGGCGTAAAPSSCDVEEQKALLETVIANLPEETIKSTVHTGTVVGATTARVLFGLLRTASILHASEASRDMLERRIAARLPDAAVDDLLIPSYSYLVETLYDV

SEQ ID NO: 317827 - protein, 145 aa, Zea mays
  unsure (1)..(145): unsure at all Xaa locations
  Clone ID: MRT4577_52935C.1.pep
SEDYHLHLAVEHIMLMLGDXLSRVDYMXFAHRHVDDNAHITISCCSXVDESQHSXYGIXYSLTRSGXRALQISDETNGXPLEEMIVDTNLLNFAIDYPAEYPYIAAMGVYXFKRDAMLDLLKXRYAXELHESGSEILPKALPEHN

SEQ ID NO: 317828 - protein, 145 aa, Zea mays
  Clone ID: MRT4577_52936C.1.pep
SSKVFSSNGAHNSAHISICYMSSMGRMIHVRHLSGHQIPVRYAKGCSHVSAYPDYVPEAADDPVEHPSTAVGPVSLERYRHIYGLEHTHNNRIIRAKRKKKPAPLPYSNPTREATRYICLLGRLSPNMFGLQVVYGDNTGRPQFR

SEQ ID NO: 317829 - protein, 49 aa, Zea mays
  Clone ID: MRT4577_52937C.1.pep
MQVEFNASVCRSCNSVRVLRQECWYQVISCRWVQTVHGLTVVIVVSASP

SEQ ID NO: 317830 - protein, 23 aa, Zea mays
  Clone ID: MRT4577_52938C.1.pep
HPLVAATFCRFYYHVIVRLVMLD

SEQ ID NO: 317831 - protein, 93 aa, Zea mays
  Clone ID: MRT4577_52939C.1.pep
HEVKHIYCNMYASADQIADGFPPCQACKYRGHPIELVTPNNAKGLVSINEQLAASDVTDTAVRIEEQTVLFLPTSEDSPNLQGASAVGLIAQW

SEQ ID NO: 317832 - protein, 376 aa, Zea mays
  unsure (1)..(376): unsure at all Xaa locations
  Clone ID: MRT4577_5293C.1.pep
MATAYYERPRGGAVEEADDFDEFDPTPYGGGYDLAVTFGRPLPPSEETCYACSAPSTSYDAPHYAASEPSPYGHHAKPKPNYGFRPQQEQQPSYGSGYGSRPEPAVEEGGGYGSGFGSGYGRKKQEEESYGSGYGRKPQAEESYGSGGYGSXATAGQTRPEESYGSAGYGSANPQAETYGSGYGRKPQVEESYGSEYGSGFGRKPQVEESYGSGYGRTPQVEESYGSGYGRKPQVEESYGSGYGSRPQGGEEYGSGGYGRKAQEETYGSSGYGYGRKNEEQSYGGSGYGYEKKASEEDEGAFGSGGYRKPKPYGEETQGSYGYGEEQPKYQSGGYERPSYGGGEGYYGRKKDDDDSDDEKKRRHSKHHHHGHHYDD

SEQ ID NO: 317833 - protein, 198 aa, Zea mays
  unsure (1)..(198): unsure at all Xaa locations
  Clone ID: MRT4577_52940C.1.pep
WPELHFFLLRCCCALHWLAAPMLHGSRXGFYELKNKKGDFSIKVTNWGAALVSAIVPDGKGNLADVVLGYDTVAEYANGSASFGATVGRVANRIANARFVLDGKTYHLLRNDGNNTIHGGPKGFGKVIWTVKEHVSHGDSPYITFYYHSLDGEQGFPGALDVYVKYQLSRPYDLSIRMNVTARNKXTPVNLANHAYWN

SEQ ID NO: 317834 - protein, 238 aa, Zea mays
  unsure (1)..(238): unsure at all Xaa locations
  Clone ID: MRT4577_52941C.1.pep
MGKGDVATRSKPQKSSAIQNEPSTPANPPTAYPDWSQFQAYYNAAGTGPVTPPAFFXHSSVAPTHQGHPYMWGPQMMPPYGTPPPYATMYAQGTPYQQAPMPPGSYPYGPYPMPSPNGTIQPPTSGAGGTETDKSKNKRKTPLKRSKGSLGSLDVVAVKNNKSAAKPSVSSSNEGSSQSESGSGSSSEGSSTNSKSGSRAKDGSERGQGNDARSKGTRSSAVEPTQPSSGPVVLNPMM

SEQ ID NO: 317835 - protein, 273 aa, Zea mays
  unsure (1)..(273): unsure at all Xaa locations
  Clone ID: MRT4577_52942C.1.pep
MAPPPWPVVALLLCAALAFAARPSSAVDPVGTYCAKNFTGAQTQASIAQVLAALVPRASAAYYATATAGGGGGSATIWGLAQCRGDVPASDCARCVAAAARQAAASCRGQADARVWYDYCFLRYDDADFLGLPDTGYALILINTMNATDPAAFDRAERRLMARVAADAAAXRRAGQGDGQVRLRRXTTIYGLGWCTRDITAADCGLCVAQAVAELPNYCRFRRGCRVLYSSCMARYETYPFFFPVTGAGAGADADASSSHAGEYETVVLTNHK

SEQ ID NO: 317836 - protein, 82 aa, Zea mays
  Clone ID: MRT4577_52943C.1.pep
NESSAPSIGNHDDFLFDISARIANKRPASLGFKSELDRYLDEEMVNMHTKNFNVLDWWKVAGTRYPTLRRIARDIYAIPVTT

SEQ ID NO: 317837 - protein, 68 aa, Zea mays
  Clone ID: MRT4577_52944C.1.pep
PRSGAPPLGNPRPPRAASDPVKRSRWSQRTLMRRRRRNSSRRGPRGQRQRRRECPPRAAGPAAASSRA

SEQ ID NO: 317838 - protein, 156 aa, Zea mays
  unsure (1)..(156): unsure at all Xaa locations
  Clone ID: MRT4577_52945C.1.pep
MMGPFNYPSCKLAIGADGGTETNTFAKNHLTADRETISEPXLAVQVHAVDLTTTCGLITHYWSHTPXQEKFGELKDGYYIHGXQRAIIMLDETSRLTYKNGPTXHTDLCRGXENIPIALCVNKDXMTTRMTGVIQVTSHQKKHLLHYEIIANSRYN

SEQ ID NO: 317839 - protein, 94 aa, Zea mays
  Clone ID: MRT4577_52947C.1.pep
TPNFKTLYIIYLCAPGGGEGHLAASWRGAQAAPSHPASAATLLVQTHHTTGTHCHRRCCRPPAVQAASRAICVSMGLQVPGPTSPQLWSDSSSA

SEQ ID NO: 317840 - protein, 91 aa, Zea mays
  Clone ID: MRT4577_52948C.1.pep
VAHAEPKEQRRSVDLGSSLRARRTSSSLNDEINTLQVENESMYDKLQLAEERFDDGDAKSMHMEREDSDAGDAAEKEPILINRKDAALEQR

SEQ ID NO: 317841 - protein, 40 aa, Zea mays
  unsure (1)..(40): unsure at all Xaa locations
  Clone ID: MRT4577_52949C.1.pep
XXXRKSFSDSILLITERLSGGEGEAFSYINHHLNQPYFFQ

SEQ ID NO: 317842 - protein, 78 aa, Zea mays
  unsure (1)..(78): unsure at all Xaa locations
  Clone ID: MRT4577_5294C.1.pep
VKLYKAVCRDPDLPLAMRXKFRYKLSKLXKNSYMTRLKNRCIFTVRSRAVYKKFRMSRIVFRTLANKGELMGVKKASW

SEQ ID NO: 317843 - protein, 50 aa, Zea mays
  Clone ID: MRT4577_52950C.1.pep
SEHGYHCRHEQERSAPRWHSRCPLALLGQLSASTCVRVIVVKVELLLFLW

SEQ ID NO: 317844 - protein, 110 aa, Zea mays
  Clone ID: MRT4577_52951C.1.pep
MRDSLENGYLTDDGVFCSGLSNSSSGKFFGGNQLSHSTPKKPQEKFDAGVPETSRSYSAAVPAGTSSKRHATRKWKRSLSDPFRSRPHSAPELVSGCKGSPPVPVAPEER

SEQ ID NO: 317845 - protein, 196 aa, Zea mays
  unsure (1)..(196): unsure at all Xaa locations
  Clone ID: MRT4577_52952C.1.pep
FFFFFFFFFFFFFCFFFFFFFFFFFINLCLFKSITRLKQYSQLKHPKVMGGEKKKRTXEKKRNGGGKKTTTKKNGGAPDKPXGGGGGPTGEPGPKGGQGAHEARTTWGGGPPQAGEGQGGRKPTSEKPPLGAKKKKERGTFDGRKKKNAGGKTHTCRKKRGGPXPWGPPQQADPGSPXGGRGPPREKTPNGRGGGG

SEQ ID NO: 317846 - protein, 54 aa, Zea mays
  Clone ID: MRT4577_52953C.1.pep
HCRRRAATTASPSGFIVLRFVAGLFLANFVASQHWMSGIFAPSIIGLANAVTAR

SEQ ID NO: 317847 - protein, 44 aa, Zea mays
  Clone ID: MRT4577_52954C.1.pep
QRNTTPSSQRRGSELNPPQVAGRPDRPTRSYRAGMSDAYLFTTS

SEQ ID NO: 317848 - protein, 141 aa, Zea mays
  unsure (1)..(141): unsure at all Xaa locations
  Clone ID: MRT4577_52955C.1.pep
PNPGRSTHDAPXPRXPNRPDPPRPDSXPRPAPTXPGPPPRRRPSPSAQTAARPTPKXPTTTHPPPXRKPAPAARRAAPPGARKRTTPTAEKNFFFLPPPPREERGTKGGERSHRRQEQAAPDEANPKSPAADAAKGHQPRG

SEQ ID NO: 317849 - protein, 161 aa, Zea mays
  Clone ID: MRT4577_52956C.1.pep
ILGARQAAQGMGAVRSPSSLQPELEPKLALLASPRMFMSPYLVQARRAGALPPHISFAAVVVLCIHALVAQQGNERLSTVVSMCITRCDVGAGEDTVWFSCGIGIQQGLASSVSVAFAIEGPVPLWIFQGVCYIRFLLAATEVSSHKSASTIRLSDVEART

SEQ ID NO: 317850 - protein, 121 aa, Zea mays
  Clone ID: MRT4577_52957C.1.pep
CRKGSAYVEFLHKESAERALSLNGPSFMTRILKVVRRSSHEAAHFYGWPGIGRSSIYGRHGRMAYPRAVHPGGSFRGRAPMKAGARSLQWKREPSGTDSSAGAKTDMSVPFSCEQVLPPAT

SEQ ID NO: 317851 - protein, 47 aa, Zea mays
  Clone ID: MRT4577_52958C.1.pep
PPYPGRINFKRCAGNNGVGGSKIIAPLVSWKGFPLNGHSSRVKGLDL

SEQ ID NO: 317852 - protein, 652 aa, Zea mays
  unsure (1)..(652): unsure at all Xaa locations
  Clone ID: MRT4577_52959C.1.pep
PNRSDEGTPWGKSKDHANEEPRIFLGDDTAVFISWLWGHLSSNMHLYVQPQERTREVKDXSPPNEVARRKKSADVHLISKHQTHSGHTIESSEATSRRRSNREWKGIGRKGNEKFPLRNVLTDILHGEDKRSQKSNEVRPPPSKQQNDRKRERDDETHQTKKDSSSRSMLGDGASRRLLQFAVRDAVKAVQPTSTSAEPASKRLCSVVATTSTEHMRDRRSERSQDYLNXKIRKISRQLEXRRSERTRPMLQVHGAALALRAAAEAAADSAKVRSTGSVFKRLGQGNVVKQPSRSREEKRDYEDFEPVTIADEHDSDQYVNNEESEEESGELTMADRVAGSGMYVDSSSEDDMDRDEGITRYQTSLSHDDTFSPFAEKKTVSAPCSVELETNAIRPSSVNDEEQPVPSTPTASKAVAISVDVNMVEPPSYATPKDVHVVEKPYVAPMNSNAASIATNAKELGHAEVQKDSQRSAPSVPVSYSTAHPMEDADSRTLYVNNVHFAATKDSLSRHFNKFGAVLKVVIVTNAATGQPTGSAYVEFLHKESAERALSLNGTSFMTRILKVVRRSSHEAAHFYGWPGSGRSSIYGRHGRMAYPRAVIPGGSFRGRAPMKAGARSLQWKREPSGTDSSAGAKTDMSVAFSSEQVLPRAT

SEQ ID NO: 317853 - protein, 178 aa, Zea mays
  Clone ID: MRT4577_5295C.1.pep
MIIPKKNRNEICKYLFKEGVLYAKKDYNLAKHPQIDVPNLQVIKLMQSFKSKEYVRETFSWQYYYWYLTNDGIEHLRNYLNLPSEIVPATLKKSAKPPGRPFGSGPPGDRPRGPGRFDGDRPRFGDRDEYRGGPRGAPGDFGGDKSGAPAEFQPSFRRPGFGRGGGSGFGAGPTSSME

SEQ ID NO: 317854 - protein, 37 aa, Zea mays
  Clone ID: MRT4577_52960C.1.pep
AIGAATMARSAAPGPRSTWRSVRPGSRAPAWCTTPPV

SEQ ID NO: 317855 - protein, 77 aa, Zea mays
  Clone ID: MRT4577_52961C.1.pep
PFTCPKYSVGDNQSIQDSYFDIPLQRLEHLREGLFICHVYSCAHSEGALYKRLIANVVPEKNIQYQTSGPRGWSISM

SEQ ID NO: 317856 - protein, 91 aa, Zea mays
  unsure (1)..(91): unsure at all Xaa locations
  Clone ID: MRT4577_52962C.1.pep
KRPLLFGEGFVHSPRCASAFTGPSGALKETRCPLKGAGPHFFVRKGGPNSKEGLPKXRXLGAEFGVPIGVFGPKGALFGIGKKTFVFFKPA

SEQ ID NO: 317857 - protein, 68 aa, Zea mays
  Clone ID: MRT4577_52963C.1.pep
PSFIFSWTQFFSGKKVLVLGGVDVVFMIFIIHYGSIILRSCISNFDHRYLYRYYNKLSRPPSRNPIAL

SEQ ID NO: 317858 - protein, 86 aa, Zea mays
  Clone ID: MRT4577_52964C.1.pep
RTFINVHVGMIGQRSSFCSPWPPLLIVPCLLPGRSVCLARSLRQSAVLFCAGYARCGRGAGASPSVGRGSRSLAWCCVCLMDLLLV

SEQ ID NO: 317859 - protein, 53 aa, Zea mays
  unsure (1)..(53): unsure at all Xaa locations
  Clone ID: MRT4577_52965C.1.pep
LIXKQQLFDTNSAGRTTNNMQSDLTYQCASELIGPLHHDPTVDIITRPSRGLI

SEQ ID NO: 317860 - protein, 136 aa, Zea mays
  Clone ID: MRT4577_52966C.1.pep
SRLLPPLWRRHSDRSSPSATNMRRGYSYSPSPPPRGYRGRARSPSPRDRYDGRGRDLPTSLLVRNLRRDCRPDDLRRPFAQFGRLKDVYIPRDYYTQEPRGFGFVQYFDPNDAADAKYYMDGQVILGREVAVVFAQ

SEQ ID NO: 317861 - protein, 98 aa, Zea mays
  unsure (1)..(98): unsure at all Xaa locations
  Clone ID: MRT4577_52967C.1.pep
AVNKILVSPQYLILSIGAVFTYLKKKKRKKKKKKKKKKKKKKKKKKKKKKKKKKKKKKKKKKKKKKKKKKKXGGAPLKKKKFSPRGWKSKIFFFGHQN

SEQ ID NO: 317862 - protein, 110 aa, Zea mays
  unsure (1)..(110): unsure at all Xaa locations
  Clone ID: MRT4577_52968C.1.pep
TFSRKPKLFGHXRFFQVHAHALALEDLNVPXVSKHPQDVEPHNLIVRSMVYSFPCSCSDGSVNLRMVMPHDVSGYLSPLSFHKFFGAFSXFASRGFDMSKNPFSMQHSGS

SEQ ID NO: 317863 - protein, 115 aa, Zea mays
  unsure (1)..(115): unsure at all Xaa locations
  Clone ID: MRT4577_52969C.1.pep
KVESSSNCRATVATKICFLLMLVALAACAADTTIAHRCXHAIIALLLPAYLPSMIASGCENPVLQYYMLQQAIAASIIPLSPLVLQQSAVLYXVPSLLQTIQAQQLQQLQLPVIN

SEQ ID NO: 317864 - protein, 87 aa, Zea mays
  Clone ID: MRT4577_5296C.1.pep
RQGAIQSVHRSDEQWSLQSPRVYVDSVKDAAASKLKESVIVADIFVNVKHALNPFTSVCGYGGNEQRAVKAEILCDMRESHDVLMRC

SEQ ID NO: 317865 - protein, 134 aa, Zea mays
  unsure (1)..(134): unsure at all Xaa locations
  Clone ID: MRT4577_52970C.1.pep
RLHAMEQQAQLRXXALNDALKQELERLKLVTGEMTNSSETYNMRFQHIPYNSSFFPLSQQNAATHPGTTQLPPPFHPPHPNVPNHQMLSHPNTLPDIMQQESLGRLQGLDIGKGPLVVKSESSSISASESSSTF

SEQ ID NO: 317866 - protein, 33 aa, Zea mays
  Clone ID: MRT4577_52971C.1.pep
LLIYVLVAMVLARFTYIIELRNRGWFAVIVLPP

SEQ ID NO: 317867 - protein, 154 aa, Zea mays
  Clone ID: MRT4577_52972C.1.pep
ISLASAIIYPLHVNPTPALLTPPTRAIVGAGPPLADAIPARPRGHYNASPPPQLLANLPNSSMSRELTPASSRSCLPLPFRIYLTTYTHSRPLLLHHVGWRDLPADRSDFVDDHNKNAISEMLTVRYDGPKTPVRHTKSCMREQRRRTMRCRVH

SEQ ID NO: 317868 - protein, 67 aa, Zea mays
  Clone ID: MRT4577_52973C.1.pep
PANILQGAVFFSPADSYHTHIYCDILNYLIFQNQPPSKFNLLYLTLNSTYCSLTNTNCNKHPCLLHI

SEQ ID NO: 317869 - protein, 194 aa, Zea mays
  unsure (1)..(194): unsure at all Xaa locations
  Clone ID: MRT4577_52974C.1.pep
HWVPRGRPGKPRLQRCRLLSTLTLEHCGRLPPTPAGPPSHPPCLPSRRSPLPLAILLPGRRDPLTSDRSEAVEEPGRARRHLPLPLRGDVDHAVLPTEEREWKFDNKPVKIYHDDHDQDDGENVKNVLMIPTISDVTTAEECREPDAHLDVRKGDVGYRARLVCSAAVGDSHESSLHHTAEEMDSXLHALMNSP

SEQ ID NO: 317870 - protein, 78 aa, Zea mays
  unsure (1)..(78): unsure at all Xaa locations
  Clone ID: MRT4577_52975C.1.pep
TDXXTSLXLNESTDACSIKPATTLISLHSHPIXPQTQPASAXTRISGCSLXXLSVVVRRGWGXCGRXAIXGHTXPXRT

SEQ ID NO: 317871 - protein, 46 aa, Zea mays
  Clone ID: MRT4577_52976C.1.pep
KTNITYTEQISRIFLGYTFVVKCGTNQHIIFYIFMSPKSTFTQYLI

SEQ ID NO: 317872 - protein, 101 aa, Zea mays
  Clone ID: MRT4577_52977C.1.pep
KKNLWGKIDVWLDFFCRKVLVNKNERGQTPFWVFLVFGNQLANGVWDKFWVLKFKREVTVNLMDTVFWDWVPLSEKFGGRILELFRWGCFCYQAGMFLFWV

SEQ ID NO: 317873 - protein, 94 aa, Zea mays
  Clone ID: MRT4577_52978C.1.pep
LLFIFFLTEQTGAFQADEYNIESPSPTLTETVLFTSQNSNTNSYGRTTGTPITQYTIADRRIETALLPRQLTLLADPIVAISTTGRAQQVDTSQ

SEQ ID NO: 317874 - protein, 69 aa, Zea mays
  Clone ID: MRT4577_52979C.1.pep
MPPAPSSLGLGLGLFPATVATQPCLFLDPAPVEREEGERERSCCSRSPPSVLAGLGFDLNLPPPAEMVM

SEQ ID NO: 317875 - protein, 174 aa, Zea mays
  Clone ID: MRT4577_5297C.1.pep
MALETCFRAWALHAAPAGSKDRLLVCSSGGNLVLPSKRVAAAPLSVGRVATRRARHVCQSKNAVDEVLVADEKNWDGMVMACETPVLVEFWAPWCGPCRMIAPVIDELAKDYAGKIMCCKVNTDDSPNVASTYGIRSIPTVLIFKGGEKKESVIGAVPKSTLTTLIDKYIGSSS

SEQ ID NO: 317876 - protein, 88 aa, Zea mays
  Clone ID: MRT4577_52980C.1.pep
MVSYTPIRMAEFKSNYGPKYHAQPNLAGYTAQSAFRIASRLAMYGAPAAVGVMLFANGIPRVQRDILQKIPVLGGFFRKEVHPADNPF

SEQ ID NO: 317877 - protein, 47 aa, Zea mays
  unsure (1)..(47): unsure at all Xaa locations
  Clone ID: MRT4577_52982C.1.pep
FILVFYLMEHDQTXAFSFCTMKLMDERSYNNNIYNGLNMTTNFRDYA

SEQ ID NO: 317878 - protein, 70 aa, Zea mays
  Clone ID: MRT4577_52983C.1.pep
IAAICSWENSFHGIKQQQQHEARSYTLHSDHGSTQADTLSYPFPFDKTRVEVIHPSAMEAAKMVQDETRA

SEQ ID NO: 317879 - protein, 310 aa, Zea mays
  unsure (1)..(310): unsure at all Xaa locations
  Clone ID: MRT4577_52984C.1.pep
MKLNVKTLKGTSFEIEATPEASVGEVKRIIESAQGQNVYPADQLMIIYQGKILKDDTTLEANKVAENSFLVIMLSKPKASSSSGASTASKAPASQSQPATPPAPVASAARSPPSQAPVAASEPAPPSAQPSAVSDTPAPAVTASGDADVYSQAASNLVSGGSLEQTVQQILDMGGGTWERDMVVRALRAAYNNPERAIDYLYSGIPESVEAPPVARAPAPAQQAPNLQAPQAQAAPLAXQCSHLVVXSAGPNANPLNLFPQGIPSGGANAGAGVGAGAGALDALRQLPQFQALLALVQANPQILQPMLQE

SEQ ID NO: 317880 - protein, 56 aa, Zea mays
  Clone ID: MRT4577_52985C.1.pep
YFVVSSTYSKQILSSSSHMSIHHKYNQTVNRNISQYMFYHLSNNTKARVASDLELV

SEQ ID NO: 317881 - protein, 68 aa, Zea mays
  Clone ID: MRT4577_52986C.1.pep
VLNSNLPHPHLYLNPYSLSNPFLPTFTHQPQPSPLHNPSSPINPTLQQPQHSTSHLLHHQLQPLYQLT

SEQ ID NO: 317882 - protein, 101 aa, Zea mays
  Clone ID: MRT4577_52987C.1.pep
MGHSPHPVRLYGGSGTAPDAPRTIHQVSRNPIDRPVCQMTPDPSVRRSEAPTQCLISPLHDRGSPGSCKKGALYAGGDKLAHRIHGRGTVRSCFFFGWAKR

SEQ ID NO: 317883 - protein, 56 aa, Zea mays
  Clone ID: MRT4577_52988C.1.pep
MGRYEIGSHYIPDIGGLDHSIPAATHGQFLPGADDTWVPNPGFEVPNPFMPGAATP

SEQ ID NO: 317884 - protein, 80 aa, Zea mays
  Clone ID: MRT4577_52989C.1.pep
MARWSSSALVAVLVVLAAAVACSAARPVPAQQQQAGEDVKRPDTLHEGTVLIPGMGRYEIGSHYIPERIILLATTRSATY

SEQ ID NO: 317885 - protein, 75 aa, Zea mays
  unsure (1)..(75): unsure at all Xaa locations
  Clone ID: MRT4577_5298C.1.pep
VRMQFLDTARCGGFCQLSDDMRGLSTMHANXCTGLENKVHDLRNVLQDWRNYTAAPMEVQSRGGFGWTKPGKCIR

SEQ ID NO: 317886 - protein, 49 aa, Zea mays
  Clone ID: MRT4577_52990C.1.pep
QQPHPDIGGLDHSIPAATHGQFLPGADDTWVPNPGFEVPNPFMPGAATP

SEQ ID NO: 317887 - protein, 93 aa, Zea mays
  Clone ID: MRT4577_52991C.1.pep
AKLAIRSRPRVASSIIRSGRAAALDDQIDREPPSPARVRVQGVAAPGMKGLGTSKPGLGTQVSSATRADDDHLAMPTYGVGVAAARSRYLILI

SEQ ID NO: 317888 - protein, 84 aa, Zea mays
  Clone ID: MRT4577_52992C.1.pep
SRGWGATRSAATTSRTSAGWTTASPPPPTASSSPAPTTPGCPTPASRSPTPSCPARPLPEHVPALAKVALGRSDRRAPPPALNE

SEQ ID NO: 317889 - protein, 48 aa, Zea mays
  Clone ID: MRT4577_52993C.1.pep
TTPKLKPLIIITNNTRIILRGYYYLYTNFRSFNNISYNLHIEGIQYLF

SEQ ID NO: 317890 - protein, 641 aa, Zea mays
  unsure (1)..(641): unsure at all Xaa locations
  Clone ID: MRT4577_52994C.1.pep
SAFERIPKPSXREFGLMVVYYAKRGDKHHARATFENMRARGIEPNAFVFTXVAGDMRGALSCVEEMKSEGIEMTVVTYSILISGYGKTNDAQSADNLFKEAKTKLDNLNGIIYSNIIHAHCQSGNMDRAEELVREMEEDGIDAPIDVYHSMMHGYTVVQDEKKCLIVFERLKECGFKPTIISYGCLINLYVKVGKVPKAIAISKEMESHGIKHNNKTYSMLINGFIHLHDFANAFSIFEDMIKSGLQPDRAIYNLLVEAFCKMGNMDRAIRIFERMQKERMQPSNRTFRPIIEGFAVAGDMKRAFDTLDLMRRSGCAPTVMTYNALIHGLVRKHQVEKAVSVLDKMSIAGIAPNEHTYTIIMRGYAASGDIGKAFEYFTKIKESGLKLDVYIYETLLRACCKSGRMQSALAVTREMSFQKIPRNTFIYNILIDGWARRGDVWEAADLLKQMKEDGIPPNIHTFTSYINACCKAGDMQRAENVIQEMADVGLKPNVKTFTTLIKGWARVSLPDRALKCFEEMKSAGLKPDEAAYHCLVTSLLSRETVMEGSTYTGIFSVCREMFENDLTVDLSTAVHWSKWLHKIERTGGALTEALQRIFPPDWNSSENXGGFXNSASDGDSESCSDAEFSDNDEDHDVDDL

SEQ ID NO: 317891 - protein, 134 aa, Zea mays
  unsure (1)..(134): unsure at all Xaa locations
  Clone ID: MRT4577_52995C.1.pep
PPPPXXPPPPHPPXPPPPPPPPPRPHPPPPPLPPPPPPPPPXTPPPPXPPARXPPSPPPPPPPPPPPPPPXPPPPPTPATSPPPPPPTPPPPXPPPNPPPPSPPPQVARGKPLXPSGPPSFTPPTHFSLSLSEY

SEQ ID NO: 317892 - protein, 132 aa, Zea mays
  unsure (1)..(132): unsure at all Xaa locations
  Clone ID: MRT4577_52996C.1.pep
FAPPTRFLGAWLAGGFAMSVAWAYVIANEVLSLLVSAGIILSVDSAALGVTVLAWXXNSMLLACWSGYPQPVEIPRERGLYRTLAFVVAGLLWAVVMLPRRGMRVDRTLGVGLLVVYFCFLCINVSELKNAR

SEQ ID NO: 317893 - protein, 118 aa, Zea mays
  unsure (1)..(118): unsure at all Xaa locations
  Clone ID: MRT4577_52997C.1.pep
GEVPVLCASSCSVPLLVSIPATLFXPGCLTVGFPLASLEESLIGRRKMLLTSLVNMSASGVLTXFAPHVWAXAALGCARDMEGSMEHTCTLVLSTGLGGKRRRDTPSMPVGIFFSGGY

SEQ ID NO: 317894 - protein, 634 aa, Zea mays
  unsure (1)..(634): unsure at all Xaa locations
  Clone ID: MRT4577_52998C.1.pep
MIWIAWPTAAAVVSMPSVLSTSGSLRALQRNGGDQIISPIPPAHRSRQTCMAKPSASAAAAALRASLGVAFALLLLLASSRLPRRALSAELSSPSVVANERRGHGACAGVRTPDERYRAIAAGSDGRDRYPRGGGHVDYLYLFYCVLGGDRRPALGYAAMAAWLAVLFYLLADTAAVYFCSSLEGLARLLRLPPAIAGATLLSLGNGAPDALSAVASFFAGDGGEGGGTAAAVGLSGVLGGAMFVSSVVLGVIAIRLGGQEVAVHRASFFRDAAFLFLALVAVAVVVAAGQVTIWAAAGFASLYLVYVLAVAFTPDRWTRRHDAHAVDDPASAAXLGAPQRHGDQXYTDQEARDPLLPDXHRYFNTTPAKQTATXDGSTGNKSVFWTVLRVLELPLNLPRRLTIPDASKERWSKTAAVTAATLAPIFLSLLWSHRATGGPFVTVLLGGLAGLALGLIAFLTTDPFAPPTRFLGAWLAGGFAMSVAWAYVIANEVLSLLVSAGIILSVDSAALGVTVLAWGNSISDLIANVAVASRGGGAQVAVSGCYGGPVFNVLVGLGLSMLLACWSGYPQPVEIPREPGLYRTLAFVVAGLLWAVVMLPRRGMRVDRTLGVGLLVVYFCFLCINVSELKNAR

SEQ ID NO: 317895 - protein, 88 aa, Zea mays
  Clone ID: MRT4577_52999C.1.pep
MAYVGGGAPVAVLRPSASLKSSSTSAAAFLGHSSRLGRTATASPTRRSLKAVAKGEWLPGLPCRAYRDGSLPGDNGFDPLGLADDPEN

SEQ ID NO: 317896 - protein, 334 aa, Zea mays
  Clone ID: MRT4577_5299C.1.pep
MESPISRTNLNCISLADPNVQKSVALLKQACLDSGFFYVVDHGISQEFMDEVFAQSKKFFDLPHSEKMKLLRDEKNRGYTPMLDEILDPENQVNGDYKEGYYIGVEVPADDPEANRPFYGPNQWPSKEVLPKWREVMEQYHREALRVAKSVARIIALALDLDVDFFDRPEMLGESIATLRLLHYEGGQETGKVSDPAKGVYGAGAHSDYGLITLLATDDVVGLQICKDKNAQPQLWEYVAPLKGGFIVNLGDMLERWSNGVFRSTLHRVVLDGRERYSIAYFVEPSHDCVVECLPTCKSESNPPKFPPITCSAYLSQRYKDTHADLKSYDDSKA

SEQ ID NO: 317897 - protein, 80 aa, Zea mays
  Clone ID: MRT4577_529C.1.pep
KLLAGVTIAHGGVLPNINPVLLPKKTAVAAAKEGKEKKSPKKAASAKSPKKFLYAGLKFRQTMWCMFCKMPELGCSLLLN

SEQ ID NO: 317898 - protein, 69 aa, Zea mays
  Clone ID: MRT4577_52C.1.pep
NKALYINPGELKFWPKCNFSFLGVYPFEDVKKDFDPLFKKLVVPVHPFFLGNNKFRWPHPFLGILGPQC

SEQ ID NO: 317899 - protein, 67 aa, Zea mays
  Clone ID: MRT4577_53000C.1.pep
LIYTHYSRKSVFLQDKNYQRPHNVCFPDRPDAFPWTSLFSESYQGFMTGFQHTMGAWERYNYPDSGG

SEQ ID NO: 317900 - protein, 69 aa, Zea mays
  unsure (1)..(69): unsure at all Xaa locations
  Clone ID: MRT4577_53001C.1.pep
DSDKRERVMILAFQGPYGHDRNSGTNAHAFYSEGHATENGILDWPWTAHPVGYSHGRCXGGAQDEATYA

SEQ ID NO: 317901 - protein, 104 aa, Zea mays
  unsure (1)..(104): unsure at all Xaa locations
  Clone ID: MRT4577_53002C.1.pep
QNYRVWKAMPYVIWNXTCYKLYTIGSTAKLLVYLITVYCMSGXAPTRLLSLWSDTDNLEPILGAFIYDTYFGRYTTMVLASMACLLGIIYLNVTVFLPVLHPGD

SEQ ID NO: 317902 - protein, 100 aa, Zea mays
  unsure (1)..(100): unsure at all Xaa locations
  Clone ID: MRT4577_53003C.1.pep
MAHGDSVTTLEDSKEDSEYGYDTKDTFDLQNVADGTGGACHAXLGRVRHDSLIREXMSIAGDLVTMQFXEETSTLWVNDPVLRTRNHLSARXGXPGITGN

SEQ ID NO: 317903 - protein, 70 aa, Zea mays
  unsure (1)..(70): unsure at all Xaa locations
  Clone ID: MRT4577_53004C.1.pep
MIYDARSFANGLDFSDCHGAPLLPLLYITLNMAFNISVLNLVKMSTAVVAXLTSTLAGYAFCFPTSYFNV

SEQ ID NO: 317904 - protein, 141 aa, Zea mays
  unsure (1)..(141): unsure at all Xaa locations
  Clone ID: MRT4577_53005C.1.pep
RLHVPGAAWQTPPSGSPDAHTGTXAARRPHAGIACRYEGPWRTRDRSGPHPGPLHARHMQGPMSPHAGSTHRPWTDXATAPTRDQTKXXRXPHAQPAAXLXXDXXSHXSSXXRXXITPSPNTYVRALSHTCIDPDGRGSGP

SEQ ID NO: 317905 - protein, 139 aa, Zea mays
  Clone ID: MRT4577_53006C.1.pep
GRPLFFFLQTHITLFFVVQFLVIKKTLPSNFIIICNITRHNGTYIQGYSCNILEHPLNDSCFNYANGGMHAKDSSGDKTPVILLGRNHAVSPTWGAMAISSGGSGVRLDFTALCAALGPITKNYIRAVTNTPRTFVPGG

SEQ ID NO: 317906 - protein, 66 aa, Zea mays
  Clone ID: MRT4577_53007C.1.pep
LDACHRDFRLFRAEALNRVPTSTGAAKGVALVLSHLMGKLNGIDLRVPTPNVFVVDLVLNIVETGI

SEQ ID NO: 317907 - protein, 117 aa, Zea mays
  unsure (1)..(117): unsure at all Xaa locations
  Clone ID: MRT4577_53008C.1.pep
RFISFTYSKIVRLYPHQKIKLVFSNIFNGPCFVQLPHPRMVPRYHWSTVTARGSPVMSKEKPSHEETLGRDQLRAANIXREAFFSSKSSAKSSXQSGVTIPTSSGYSWAPPEYVITV

SEQ ID NO: 317908 - protein, 82 aa, Zea mays
  Clone ID: MRT4577_53009C.1.pep
GKGFKGQQVFPPLFWKKKNPLGPKKKTPPSRGFGVFFNKMGPKVFPFEKGELRPPHLFWFGPPLGPPGFYFFFSGLFFFLNF

SEQ ID NO: 317909 - protein, 73 aa, Zea mays
  Clone ID: MRT4577_5300C.1.pep
SMIPATRASEARSPHRSDTQAASESCSSPTSRLSTCQRKVRALMHTMMIYRSVVLRWTRNRHVIISHFSLNLK

SEQ ID NO: 317910 - protein, 76 aa, Zea mays
  Clone ID: MRT4577_53010C.1.pep
QHHSSKRASCSPARWRTDKLEAYYTVCCDMYPHLLEKALVDCGDDLNCVIKRLNELGLESVGAILSGTVREYEQDM

SEQ ID NO: 317911 - protein, 69 aa, Zea mays
  Clone ID: MRT4577_53011C.1.pep
KKNRRGEQFSWIRNPCCTKHGAGEPEEEHRFNNGHKPGLQGKTQTGDIKHDTDEDEPWGLRKTTRSRTG

SEQ ID NO: 317912 - protein, 51 aa, Zea mays
  Clone ID: MRT4577_53012C.1.pep
GGRKGGSPGREPGKRGPYMRSTGDGAIKGGGLPNIGVVELTTDLGVGLVAG

SEQ ID NO: 317913 - protein, 334 aa, Zea mays
  Clone ID: MRT4577_53013C.1.pep
MWSRLKGTELDARERHHQSTTAPSVTTACLPACVSPPGPGSRNPPPTSSDSFPLSSSPVLQPPALCCRPVRLPASSLLGSRGRAMKLRTKRPEWKSLVPLQLSRLSRKSAMRFFLFPKVQSAGQSPDDTPVYLNVYDLTPMNGYIYWAGLGIFHSGIEVHGVEYAFGAHDFPTSGVFEVEPRQCPGFRFRKSIFLGTTCLDPIQVRQFMELQSVNYNGDTYHLITKNCNHFCKDMCYKLTGNKIPKWVNRLARIGAICNCLLPESLKISPVGHDPNSQSEDSEKRRLRNPFSCFSSISSHRQLPSSSPFPPSPVKGGLPRCSSRKSSTASPKNR

SEQ ID NO: 317914 - protein, 142 aa, Zea mays
  unsure (1)..(142): unsure at all Xaa locations
  Clone ID: MRT4577_53014C.1.pep
VSMPHXTNXXREXGSXXSPXHTXXNQEXPXXXSFXHHXXTXXXXXSRXXSXHXXPXAQXAXTEXKGXSQLXTVTQVPKGKXXLPMVXSSIYXXHDXSPXACXXSAXENAVHLXAAELXVLPMRXXCLQXPXXYLSCQPKGSA

SEQ ID NO: 317915 - protein, 89 aa, Zea mays
  Clone ID: MRT4577_53015C.1.pep
MGAVAGPWPGGVGVWDMGHGCTGCAIFLSRNMLPLLSRSGTGMAFADSELFIVLLYAGREVLHFFLDEGLTIRTVFSSPVLTVGAATAA

SEQ ID NO: 317916 - protein, 32 aa, Zea mays
  Clone ID: MRT4577_53016C.1.pep
GVSLGKMLNLIQLVKAMIQHFHPTLRTIIRNL

SEQ ID NO: 317917 - protein, 174 aa, Zea mays
  unsure (1)..(174): unsure at all Xaa locations
  Clone ID: MRT4577_53017C.1.pep
DGGGEGGPPVSGALKDHGNEQCKGGSYLKGAXLYTQAMKSXPRVLTVYSNRAAAXLHLXKISKXLSDAXTTXRLKPQWEKGHFRKGCVFXEMERYEEGIGGFQIVLEXNXQNTEVFRKIKRVFYLDREKKXALDLKNMFSNVDIVKNLELLKTELGTKYGDYKTGQRGFFFNCN

SEQ ID NO: 317918 - protein, 56 aa, Zea mays
  Clone ID: MRT4577_53018C.1.pep
KIVSNYFSIAIKGSTLIRHGDFLHVCTITIFSNLLPWLVEYSANSNMQQLLFFVSR

SEQ ID NO: 317919 - protein, 121 aa, Zea mays
  Clone ID: MRT4577_53019C.1.pep
PGPWPGPPALGQKAVASRPGRPPLSSACRSSEQVGGLATAHPFTGGHLLALALCPLFTEAEKGGVVERRNELHELSSLRQHPSSKAPSHDLFVFAFRAELRTSRRCGLAYMPLYSRPKRLP

SEQ ID NO: 317920 - protein, 49 aa, Zea mays
  Clone ID: MRT4577_5301C.1.pep
PCHFFNNVQRFMTICINLMLHVLRFISLLQICLYQHSDLSNEGTIIILD

SEQ ID NO: 317921 - protein, 69 aa, Zea mays
  Clone ID: MRT4577_53020C.1.pep
TVYILCIRVDQLFPYLYQEHQEQQYHKDTGLTIHHIGPVIPWEFPNAITNFLFSYKSDAWADRVGGRVG

SEQ ID NO: 317922 - protein, 125 aa, Zea mays
  unsure (1)..(125): unsure at all Xaa locations
  Clone ID: MRT4577_53021C.1.pep
SRADKRVSPHVRKAPTPTIIATPRNLERLSAANIFVTLRNGTGLTINVHGSNAXHKDVDGRSSKXVTGWNGLGRFNIIPNTTEPANAVGDMLPVLNGKFTEKSFRVTTVDVSVVDLTVTLEKSAT

SEQ ID NO: 317923 - protein, 120 aa, Zea mays
  Clone ID: MRT4577_53022C.1.pep
IASLKAQLNAAAAKNSALEDRLVHLDGALKECVRQLRRAKDEQDQTVQGALAQQARQWESHKADLELRVVELTARLEAKSERSVAAADCDTGSRLAALEKENSALRTQLLAKTEELELRT

SEQ ID NO: 317924 - protein, 207 aa, Zea mays
  Clone ID: MRT4577_53023C.1.pep
YEQHITVVLSKLKSTEDWVVTVPEGRVEVLTIIERYNTKLCSLTKKFDIKDETYHWTHNYHFNFRLYEKLLCSVFDILEDGQLVEEADEILEITKLTWPILGVTEKLHHVFYAWVLFQKFSQTGEILLLKHASLQIREFRLYHDVKEIELYTNSSICSVDAYGGNKVLSLVDSVLLKINVWCRRQLGNYHAHYRKNNYSNFEATLNL

SEQ ID NO: 317925 - protein, 84 aa, Zea mays
  Clone ID: MRT4577_53024C.1.pep
KNCSPGIFFPQDWVSMPGVIPGAFGGIHFWQIPPLPQIFGKNSVLQFGGGTLGHPWGKAPGPPTNCVALKTCVQARKKGPVFSL

SEQ ID NO: 317926 - protein, 93 aa, Zea mays
  Clone ID: MRT4577_53025C.1.pep
GVVFFFFFSFFLGPKTSNKSTECPATLEREPYPKTPPPRGLIFPKKKTPFFTPSKKFPGTCNNPCSLGFPIPKPKSYKKSPKPAGAPKCNPVF

SEQ ID NO: 317927 - protein, 240 aa, Zea mays
  unsure (1)..(240): unsure at all Xaa locations
  Clone ID: MRT4577_53026C.1.pep
MVIKLSVGAVAVSVCLSLAFFVGHGQPVLADGGGGKKHDVADTVKKEVAMAMKKNPRIGAALVRLLFHDCWVHGCDGSVLLDKTPDGGSTEKNAINNIGLEGFDLIDRIKGKVDKSVSCADIVVLAARDATFILSRGNIAYNVXXGRKDGVRSSAAAADAVLPPSTFNFTQLKANFAARNFTQTELVVLSGAHAVGVARLSSFRDRLDNATATPISARYQKALTEHVEEQKNVQGDPGPY

SEQ ID NO: 317928 - protein, 70 aa, Zea mays
  unsure (1)..(70): unsure at all Xaa locations
  Clone ID: MRT4577_53027C.1.pep
QVAFGVSSPTNNSPRGDGXNTGNFLSGRPSTKGPAGPGGGFSLGYLFGGNLCPGWGAPQSFPPLPAGGYV

SEQ ID NO: 317929 - protein, 125 aa, Zea mays
  Clone ID: MRT4577_53028C.1.pep
GRQCAGNTPYEQSRRNAALAFFFSLFLLPTETWECEYPFLEAYMIQQKTQLSYYLYYPSYYKILRGGAAGTRVACMGTKDGGTATTATCARRIWGSTLNCWYKCTLQSTMLKRILVFNEKNSKKE

SEQ ID NO: 317930 - protein, 96 aa, Zea mays
  Clone ID: MRT4577_53029C.1.pep
HRKCFVYGGGCSYDFCATYSRSDEVVSTYDVLQTAVATEEKLSVHSITLVPPSCVVRRRWHPPVRFAFSYFLPEAVNISCVQRCNMYICYCLKSLN

SEQ ID NO: 317931 - protein, 57 aa, Zea mays
  unsure (1)..(57): unsure at all Xaa locations
  Clone ID: MRT4577_5302C.1.pep
KKGGPPPPREGRGPNGATPEAPPGAGDQTGRAGTQPKPGGKXRPRPHPGEXPXAPPR

SEQ ID NO: 317932 - protein, 37 aa, Zea mays
  Clone ID: MRT4577_53030C.1.pep
TRVRGSWAVRVLGSPPPQVRVRAREVLPGSISWVGGS

SEQ ID NO: 317933 - protein, 127 aa, Zea mays
  Clone ID: MRT4577_53031C.1.pep
SLEFFFFFFFFFFFFFFFFFFFFFFYTNRGFSFFLRAHWLFTICLRKDFKRPSKAPPKNGRKPSFVPGPKKIKTLFFFFRRDFFGLLGYPFEKIFKTPEKTPLLKKTLGLPRGVLFQIPPPYWRGEI

SEQ ID NO: 317934 - protein, 54 aa, Zea mays
  Clone ID: MRT4577_53032C.1.pep
DVRYRSTRWSARTGLMVVSCGMVFSRLKARFTVPVHHSLSNVDEVVSVTCSCVA

SEQ ID NO: 317935 - protein, 62 aa, Zea mays
  Clone ID: MRT4577_53033C.1.pep
IYLKGLNFKIKPTWVHKTRKLQALNFFKGPNFEGLKKKLFLNGNKAHLFPSNQQILHWETIF

SEQ ID NO: 317936 - protein, 107 aa, Zea mays
  unsure (1)..(107): unsure at all Xaa locations
  Clone ID: MRT4577_53034C.1.pep
MTANALHSMCGIGLDTKEFDVDVIIETDRTTGMIVLAVLDVPNAAFKRYLVQSRRHEXKIIVILDLRGSTFDVYLLTISGGVFVVNATIGDTHMGGEDFDYTVVNHF

SEQ ID NO: 317937 - protein, 95 aa, Zea mays
  Clone ID: MRT4577_53035C.1.pep
DAPDLMPMSPTPIHPSCCRGKNTLKIPHVYPLPLLSMFPSLVYCQEHRTGSPSSLLMVLVPLSDLFAFPSLFSPERKSFSSPLLCLALSAVPVTA

SEQ ID NO: 317938 - protein, 669 aa, Zea mays
  Clone ID: MRT4577_53036C.1.pep
MASAGVAGCSGSAGDALFRELWHACAGPLVTVPRQGELVYYFPQGHMEQLEASTDQQLDQHLPLFDLPPKILCKVVNVELRAETDSDEVYAQIMLQPEADQSEPTSPDSEPPEPERCNVYSFCKTLTASDTSTHGGFSVLRRHAEECLPQLDMTQNPPWQELLAKDLHGNDWHFRHIFRGQPRRHLLTTGWSVFVSSKRLVAGDAFIFFRGENGELRVGVRRLMRQLNNMPSSVISSHNMHLGVLATASHAISTGTLFSVFYKPRTSRSEFVVSVNKYLEAKNHKMSVGMRFKMRFEGDESPERRFSGTIIGLGSMPANSTSPWANSDWRSLKVQWDEPSAILRPDRVSPWELEPLDATNPQPPQPHLRNKRARPPALLSIAPELPQVFGFWKSPAEPAQAFSFSRPQQTQELYHSNPSSIFSSSLNVGFSSKNDRSTPINSHLYWTMRQTRTESYSASINKAPTEKKQESATSGCRLFGIEIGSAVSPVATVASVGQDQPPALSVDVESDQLSQPSNANKTDAPVASSERSLNESESRQVRSCTKVIMQGMAVGRAVDLTRLDGYADLHRKLEEMFDIQGELSANLKKWKVIYTDDEDDTMLVGDDPWNEFLRMVKRIYIYSYEEAKSLTRKAKPPVVGDTIKPDPNKLPPESDVIKQQCSVAADYQD

SEQ ID NO: 317939 - protein, 675 aa, Zea mays
  unsure (1)..(675): unsure at all Xaa locations
  Clone ID: MRT4577_53037C.1.pep
AAVWATPAVTTYSGPHHDALFRQLRMACTGCMVMQRRLGELFFVFPQGCFHQRYTATXNGXNEDLRLIELPPMILCKVVNVELRAETDSDEVYAQIMLQPEADQSEPTSPDSEPPEPERCNVYSFCKTLTASDTSTHGGFSVLRRHAEECLPQLDMTQNPPWQELVAKDLHGNEWHFRHIFRGQPRRHLLTTGWSVFVSSKRLVAGDAFIFLRGENGELRVGVRRLMRQLNNMPSSVISSHNMHLGVLATASHAISTGTLFSVFYKPRTSRSEFVVSVNKYLEAKNHKVSVGMRFKMRFEGDESPERRLSGTIIGMGSMPANSTSPWANSDWRSLRVQWDEPSAILRPDRVSPWELEPLDPTNPQPPQPPLRNKRARPPASPSIAPELAPVFGFWKSPAEPAQAFSFSRPQRTQELYHSNPSSIFSSSLNVGFSSKNDRSTPINSHLYWTMRQTRTESYSASINKAPTEKKQESATSGCRLFGIEIGSAVSPVATVASVGQDQPPALSVDVESDQLSQPSHANKTDAPVASSERSPNESESRQVRSCTKVIMQGMAVGRAVDLTRLDGYDDLRRKLEEMFDIPGELSASLKKWKVIYTDDEDDMMLVGDDPWSEFRRMVKRIYIYSYEEAKSLTRKAKPPVVGDTIKPDPNKLPPESDVPHDSNNNAPVAADYQD

SEQ ID NO: 317940 - protein, 210 aa, Zea mays
  unsure (1)..(210): unsure at all Xaa locations
  Clone ID: MRT4577_53038C.1.pep
MAAAAADSDTAAAVGAMSTCAHCQREIPFLNIDLHSVHCARNLQKCQHCGEMIPRKLMDEHYDENHAPINCSLCKETIERESWDLHKGEKCPQRIVACEYCEFELPAVDLHEHQDVCGNRTELCQTCRKYIRLREWTGHEIQCHTNSNGSADTSRAIPEXTTTAAAASATGXRPARPAHASPHKRLLFTIAVTGIAVMIGSILFQRDEGF

SEQ ID NO: 317941 - protein, 78 aa, Zea mays
  Clone ID: MRT4577_53039C.1.pep
LTVAAYLYQVACASCYGMLQNRNSFSCSHALGLCVPSGKARTRSQVDRHELSEPAVCPTAQRRTSFLSPVSNRLCSNI

SEQ ID NO: 317942 - protein, 124 aa, Zea mays
  Clone ID: MRT4577_5303C.1.pep
VPISKRREKRIQVAQGRTPHQINLFDKFSGLPDQNAPATSTGNLQGGVTKSIGADSRIKESHELSQANGNRGCSVNALNSSAARQLVTVPIGLCLPPTDGSEISADSGDISSNGKLSLWSHQSQ

SEQ ID NO: 317943 - protein, 46 aa, Zea mays
  Clone ID: MRT4577_53040C.1.pep
CWFVGAGQLDITTGRRVLSLIITRGSFITPRDKTARGFMDENYNSF

SEQ ID NO: 317944 - protein, 111 aa, Zea mays
  unsure (1)..(111): unsure at all Xaa locations
  Clone ID: MRT4577_53041C.1.pep
CRRLGWATKIELLDNALVYYGEILDYNAITSAGERGRXRRPCAFVTXSSENSMVDAIENINWIELYGRNITADQTQSPGAGRGQELLQGDGGGYRRQQLPLVGLLCDPILG

SEQ ID NO: 317945 - protein, 247 aa, Zea mays
  unsure (1)..(247): unsure at all Xaa locations
  Clone ID: MRT4577_53042C.1.pep
MKATEFPLRAIRHEAPLHSHSAKKEAASHCPVPTAAPGARKASQGGGFAFRRRGAARWAAVAMAAAPRLPVTCSGGGSSSSRILLIVFLAAALLASAANAAVSYDHRSLVINGRRRILISGSIHYPRSAPEMWPGLIQKAKDGGLDVVQTYVFWNGHEPAQGQYYFADRYDLVRFVKLVRQAGLYVHLRVGPYVCAEWNFGGFPVWLKNVPGIMFMTDNGPFXAAVQQDVDKKVAIMKKEGAPPRWA

SEQ ID NO: 317946 - protein, 157 aa, Zea mays
  unsure (1)..(157): unsure at all Xaa locations
  Clone ID: MRT4577_53043C.1.pep
MEPAEKKPPAVSDLGAWGMNVVSSVGLIMANKQLMSSAGYAFSFATTLTGFHFTVTALVGWISKATGYSASKHVPLWELVWFSLVANASITGMNLSLMLNSVGFYQISKLSMIPVVCLMEWVLNSKHYTTKVISAVVVVAAGVGICTXVTDVEVNAK

SEQ ID NO: 317947 - protein, 236 aa, Zea mays
  unsure (1)..(236): unsure at all Xaa locations
  Clone ID: MRT4577_53044C.1.pep
MGESEYRCWEELLPDALGLVFRNLPLQEVLTVVPRVCKSWGRVVAGPYCWQEIDIEEWSQQRHSRPDHLVRMLDLLLRRSSGACRRICVSGLPCDPLFSFIGDHARALRTLEIPRSEISDAVVEAVAPGLPNLTFLDVSSCTKIGARALEAFGRHCRSLAALRRVMHPIDVAGRNACGQHDEARAIARTMPALRHLEVGYMLVTTEAILEVLSRCGXLEFVDLRGCWAVDEALLRE

SEQ ID NO: 317948 - protein, 90 aa, Zea mays
  Clone ID: MRT4577_53045C.1.pep
CDALLLSLCARRCFRSPCSLRLSLAPSFFCTFFCLSSILLCQALLRCFHQTLLWWCLFWFSFCVLVPSFRFLSVVCGLPRSFCFCSSAPR

SEQ ID NO: 317949 - protein, 55 aa, Zea mays
  Clone ID: MRT4577_53046C.1.pep
PRSEDPAYDTSMADLTTSLAVQTPSRQCQVRLAKPTLGRSVVVSVQGNGISFCLL

SEQ ID NO: 317950 - protein, 104 aa, Zea mays
  Clone ID: MRT4577_53047C.1.pep
SRVDPSRPRTHGPSMPAVSLMPLHFVADVPPPPVERDGDEEDPLRRPRRHRRLGHRSAGLHRCRRRGRPNCLRVARRGSRWRWRWRCRWRRRRGALRQQRRARP

SEQ ID NO: 317951 - protein, 104 aa, Zea mays
  unsure (1)..(104): unsure at all Xaa locations
  Clone ID: MRT4577_53048C.1.pep
LFFXXKXXXFVFFGGFPVFRPKKGGLCMAWVLYLKVGETTSYKNTNMGLNHMHDRYIITTGILTFYKTRLLEPLFSAPAWFHGSEATGHYPKLPPFASTGLGQL

SEQ ID NO: 317952 - protein, 63 aa, Zea mays
  Clone ID: MRT4577_53049C.1.pep
SARDLRLVGSWLNNSNDPIGSNYKKNEQYWKAVAAFYNSTTPKNRSRIPKQIKSHFGRIKTCL

SEQ ID NO: 317953 - protein, 53 aa, Zea mays
  Clone ID: MRT4577_5304C.1.pep
NLMHSKKMPLPNLLIFNHILIFSFAQISNITPSICLPNNSLLSIVHRTHPLVL

SEQ ID NO: 317954 - protein, 267 aa, Zea mays
  unsure (1)..(267): unsure at all Xaa locations
  Clone ID: MRT4577_53050C.1.pep
MESLPVPSVQAMVAATGGADVPPRYLRPAEAVTGIVDGEGEAQIPIIDYRRLLLELDRRGEESARLHSACQEWGFFQLVNHSVPADVVEGMKANIQQFFQLPAETKKRFAQERGQLEGYGQLFVVSEDQKLDWADMLYLYTQPPESRNTKFWPDQPVNFRSTLDRYSGAVKEIADSLLATMAENLGLKQEVIADRCVGGVQSVRMNYYPPCAQAEKVVGFSPHSDADLLTLVLQVNHVQXLQXQRNGSWFPVRXVEGALIVNIGGYL

SEQ ID NO: 317955 - protein, 132 aa, Zea mays
  unsure (1)..(132): unsure at all Xaa locations
  Clone ID: MRT4577_53051C.1.pep
MFDSTQKAQYMDGHRERFIRLEESSPRSSVPSEVGGRSTLRSSMPGFGYGPFSALRSFLSGGSGRLKSLRQSLTSGAPKTAFAEDLKSYKRTIFDPQDKLLFRMNWVXFSSCLFAGAGDPLFFFLPIINDSN

SEQ ID NO: 317956 - protein, 50 aa, Zea mays
  unsure (1)..(50): unsure at all Xaa locations
  Clone ID: MRT4577_53052C.1.pep
YYFASLAFHNAAGGFCGIRVLSTPQIPVPFPPXAADYTVLIGDWYKANHT

SEQ ID NO: 317957 - protein, 143 aa, Zea mays
  unsure (1)..(143): unsure at all Xaa locations
  Clone ID: MRT4577_53053C.1.pep
TRRREPEXPNSHKHEEKKPTQAPEAKTLKIEEASKSGDRIFAIPMARKRDENNNAPLSTVKGTEPDGLILNADIAXHYTSVTXGGLREDSAHPXVXYVATPNAQXIRKDTAYRLLSSKHTIPHYYLTIYARVDKLHQVLGELN

SEQ ID NO: 317958 - protein, 92 aa, Zea mays
  Clone ID: MRT4577_53054C.1.pep
PSLQPEGLRPESRDEIPLRGEGCNIPVIPRVLLSANSKNHYFMRIKLSKRHQKLESKNSTNYFVLRLMPKSYHAFKMGKCLNPRTTLIRPFK

SEQ ID NO: 317959 - protein, 109 aa, Zea mays
  Clone ID: MRT4577_53055C.1.pep
VYAGNCKKAGTFFLSSVIKLKKNARTRTMAVRDFEIAQLMSSWVSFLPCREPTNQQCAGFGQGRCPQQDEARRSAPSTYGPIPYLVCFLAVRSYTHGTAALNNIQLQLA

SEQ ID NO: 317960 - protein, 116 aa, Zea mays
  unsure (1)..(116): unsure at all Xaa locations
  Clone ID: MRT4577_53056C.1.pep
MTCAYARTEQMFXASDERINALTHNIMALTHYLXHQALERSLHVXMSDIEXIFRAMDGLPVTILLQQALLQEFLPQWNIQDIVHQVCAETGAMYQDTLPRSYNRSELTXTLGFHGC

SEQ ID NO: 317961 - protein, 45 aa, Zea mays
  Clone ID: MRT4577_53057C.1.pep
SSHHPCLWSQRSMLVHNSAISFHTRHSNHMPLPKKKKKKRPPSAT

SEQ ID NO: 317962 - protein, 69 aa, Zea mays
  Clone ID: MRT4577_53058C.1.pep
SNNLLKILEGLFSSRETSGRAHTCIKEREIKLRRFSYELTEACSSTYDFPCRCCLMLSIRSCSSPEPPQ

SEQ ID NO: 317963 - protein, 77 aa, Zea mays
  Clone ID: MRT4577_53059C.1.pep
KEVGTQYRTGIYSYTAEQDSLAHESLAVKQNEWQAVIVTQVLSASRFFTPQEYHQQYLEKVGQSANKGFTDSISCYG

SEQ ID NO: 317964 - protein, 160 aa, Zea mays
  Clone ID: MRT4577_5305C.1.pep
MESKHTDQANVKAKLSTMHSKVICCKLYISESQNAAVVDAISRIGQKDPEVVLLNKFEDEYYNRVRYTLVSYITNESSTGGAVFSPIRKVLLAMIEAAFSAINLEVHCGTHPRIGVVDDISFHPLNQADTIEDAAQLAKLVASDIGNGLQGVSSDKIFYN

SEQ ID NO: 317965 - protein, 92 aa, Zea mays
  unsure (1)..(92): unsure at all Xaa locations
  Clone ID: MRT4577_53060C.1.pep
AAFLFFFFFFLYKQRACINGGGIGLFNLYKVCVDYLIFGGKQTGSKIAFNTYLATPWXNRWERKRRALAQNLGQLKFSPRGGVSDPCYRVET

SEQ ID NO: 317966 - protein, 45 aa, Zea mays
  Clone ID: MRT4577_53061C.1.pep
NFFSGHCWSSCFLFEHPRAEPHGEGAILLRHFCLSQFTCQAVMWV

SEQ ID NO: 317967 - protein, 34 aa, Zea mays
  Clone ID: MRT4577_53062C.1.pep
IRNSGLAHCIDQETAAYQLPVRNKNCDRQLIVQV

SEQ ID NO: 317968 - protein, 844 aa, Zea mays
  Clone ID: MRT4577_53063C.1.pep
MASFAVSGARLGVVRPGGSARSGGERRSAVDLPSVLFRRKDAFSRTVLSCAGAPGKVLVPGGGSDDLLSSAEPVVDTQPEELQIPEAELTVEKTSSSPTQTTSAVAEASSGVEAEERPELSEVIGVGGTGGTKIDGAGIKAKAPLVEEKPRVIPPPGDGQRIYEIDPMLEGFRGHLDYRYSEYKRLRAAIDQHEGGLDAFSRGYEKLGFTRSAEGITYREWAPGAYSAALVGDFNNWNPNADAMARNEYGVWEIFLPNNADGSPAIPHGSRVKIRMDTPSGVKDSIPAWIKFSVQAPGEIPYNGIYYDPPEEEKYVFKHPQPKRPKSLRIYESHVGMSSPEPKINTYANFRDEVLPRIKKLGYNAVQIMAIQEHSYYASFGYHVTNFFAPSSRFGTPEDLKSLIDKAHELGLLVLMDIVHSHSSNNTLDGLNGFDGTDTHYFHGGPRGHHWMWDSRLFNYGSWEVLRFLLSNARWWLEEYKFDGFRFDGVTSMMYTHHGLQVTFTGNYGEYFGFATDVDAVVYLMLVNDLIRGLYPEAVSIGEDVSGMPTFCIPVQDGGVGFDYRLHMAVPDKWIELLKQSDEYWEMGDIVHTLTNRRWLEKCVTYCESHDQALVGDKTIAFWLMDKDMYDFMALDRPSTPRIDRGIALHKMIRLVTMGLGGEGYLNFMGNEFGHPEWIDFPRGPQSLPNGSVIPGNNNSFDKCRRRFDLGDADYLRYRGMQEFDQAMQHLEGKYEFMTSDHSYVSRKHEEDKVIIFERGDLVFVFNFHWSNSYFDYRVGCFKPGKYKIVLDSDDGLFGGFSRLDHDAEYFTADWPHDNRPCSFSVYAPSRTAVVYAPAGAEDE

SEQ ID NO: 317969 - protein, 799 aa, Zea mays
  Clone ID: MRT4577_53064C.1.pep
MAFAVSGAVLGGAVRAPRLTGGGEGSLVFRHTGLFLTRGARVGCSGTHGAMRAAAAARKAVMVPEGENDGLASRADSAQFQSDELEVPDISEETTCGAGVADAQALNRVRVVPPPSDGQKIFQIDPMLQGYKYHLEYRYSLYRRIRSDIDEHEGGLEAFSRSYEKFGFNRSAEGITYREWAPGAFSAALVGDFNNWDPNADRMSKNEFGVWEIFLPNNADGTSPIPHGSRVKVRMDTPSGIKDSIPAWIKYSVQAPGEIPYDGIYYDPPEEVKYVFRHAQPKRPKSLRIYETHVGMSSPEPKINTYVNFRDEVLPRIKKLGYNAVQIMAIQEHSYYGSFGYHVTNFFAPSSRFGTPEDLKSLIDRAHELGLLVLMDVVHSHASSNTLDGLNGFDGTDTHYFHSGPRGHHWMWDSRLFNYGNWEVLRFLLSNARWWLEEYKFDGFRFDGVTSMMYTHHGLQVTFTGNFNEYFGFATDVDAVVYLMLVNDLIHGLYPEAVTIGEDVSGMPTFALPVHDGGVGFDYRMHMAVADKWIDLLKQSDETWKMGDIVHTLTNRRWLEKCVTYAESHDQALVGDKTIAFWLMDKDMYDFMALDRPSTPTIDRGIALHKMIRLITMGLGGEGYLNFMGNEFGHPEWIDFPRGPQRLPSGKFIPGNNNSYDKCRRRFDLGDADYLRYHGMQEFDQAMQHLEQKYEFMTSDHQYISRKHEEDKVIVFEKGDLVFVFNFHCNNSYFDYRIGCRKPGVYKVVLDSDAGLFGGFSRIHHAAEHFTADCSHDNRPYSFSVYTPSRTCVVYAPVE

SEQ ID NO: 317970 - protein, 102 aa, Zea mays
  Clone ID: MRT4577_53065C.1.pep
DIESFGLISSSPILPILALGELTARQHARCRVPGELHRGRSRGPRHPRQRPARGVGKWICRPEARGVGGRLGCGASTYVADNGSEGGAAPSHGIGFGRHLSI

SEQ ID NO: 317971 - protein, 100 aa, Zea mays
  Clone ID: MRT4577_53066C.1.pep
KACRGPPCIKIVYCFSPLKTPPPPNLDKGHPRVFFQLGRVRVHLKKKEGSPVNPAFKTKNQFFFPVPKLVPNPPGRPKNQEPAPHPGGSSKNPKGGKKKK

SEQ ID NO: 317972 - protein, 66 aa, Zea mays
  Clone ID: MRT4577_53067C.1.pep
DSRAKDYKCQEEAFYGRWSHILLILPLPVSCRNIVSFSFFWVGCHKLQHRPSVNKTCEVSQVIVTA

SEQ ID NO: 317973 - protein, 153 aa, Zea mays
  unsure (1)..(153): unsure at all Xaa locations
  Clone ID: MRT4577_53068C.1.pep
CSVTLLGAGQKKPPPKKKKKSPPPQXTPQPPPPRGGGPXPPPPPHHPTPPPPPPLGGHPPGPXLGVSVWMGRLMPKTLRGGAXPPXPPEPPXGGHSPRSGPTXWVKVAGPPNTGGCSRGPLKLVGTLRQAGPPPPPPFLGSESTNSLKEGGGG

SEQ ID NO: 317974 - protein, 91 aa, Zea mays
  Clone ID: MRT4577_53069C.1.pep
PAGTHTLICHINNGTLTNTVTGNNGLTDPALSSSRGCYIHYSWMRMCTTHCSPSQVVKESKPDHVILTQNVDSIYVPEKANNRKMITSPLH

SEQ ID NO: 317975 - protein, 516 aa, Zea mays
  unsure (1)..(516): unsure at all Xaa locations
  Clone ID: MRT4577_5306C.1.pep
MEKETPPPLHTDQETSVSSEQQRPRPHLSIDIPAASXAGRSPAPXATATQAGTSITPPSTRRGQQTSSNILSTPAPSSSSSKPSSRPPLRSPSFMLRQTVKSLLPLGSFKSSAVKSYEASISKLFGASATKVMARTPSLPLXPCSVVVATSTTSSAEISRAXHMCRSQSLPTTTNMKKAKLLNAANAKSFKRMDSLGGTFRVVPSTPRTPATAVPDDIAPAPPGGPGVDGGEDIPEEEAVCRICMAELSEGSDTLIKLECACKGELALAHTDCAVKWFSIKGTRTCEVCKQDVQNLPVTLLRVQSVQRRDLLNRGGASNTPRYDRYRMWHGTPILVIISILAYFCFLEELLVAHDGIVALAISLPFSCILGLFSSLTTTSMVARRYVWIYAAAQFLLVVFFTHLFYRYLHLQAVISIILATFAGFGVGMTGNSIAIEILRWRARRVAPPTQQARRRRHRRPRAPQHQAPDLPASGSADQTSSQPSAADMGMGIGAGQHHVMATAAGDVENPPVPQA

SEQ ID NO: 317976 - protein, 92 aa, Zea mays
  Clone ID: MRT4577_53070C.1.pep
SEEESRTAGTRKVADLSVLGQARVLYSIQFNNATDDKAREPVTMRPVEEAALVLHGRRVPLAREPQRERAPAARPRSSRKTGSARRDEPRGE

SEQ ID NO: 317977 - protein, 56 aa, Zea mays
  Clone ID: MRT4577_53071C.1.pep
LTKHFTPCNYTTSRMRGKRCKSRLLQCYLYSCNKTSKHPYQESYHLTSNFFPSRTI

SEQ ID NO: 317978 - protein, 257 aa, Zea mays
  unsure (1)..(257): unsure at all Xaa locations
  Clone ID: MRT4577_53072C.1.pep
FLHCDTKNSFKVKVKSLIEILVKKCGLDAVKAVMPEEHMKLLTNIRKINERKMRKAKSSEDGDAMSMASGATRQSRWNHTQMFSDFGSDDESDGPFSTQHTATSRSRTESKASTRLSRRRQGDKKLLDKFIDHSTGDPLDLLDQKTVRLALKSAAGKKRAAPDDDDEKFEVDPEGRIIVREEREKWKKKPAPRDDEEADGKSSVRSQSIKKRKTSGSGWAYTGHEYTSKRASGDLKKKDRXEPYAYWPLDRKLLKPQ

SEQ ID NO: 317979 - protein, 76 aa, Zea mays
  Clone ID: MRT4577_53073C.1.pep
VSTGFESILIELTNQNRLCVTDPTVQQTNCYQPLALMWSILSVDRCPTHVVTCCYRPLLDPASRMEASRAGSGPMQ

SEQ ID NO: 317980 - protein, 84 aa, Zea mays
  Clone ID: MRT4577_53074C.1.pep
STSPRGRKLTAAAVGPCPRLGADLGASPNLGSRCYACNQHGREIVEDLREGFCGHGLFVARGTSTPSNLALTTSSFPSSGMGSS

SEQ ID NO: 317981 - protein, 54 aa, Zea mays
  unsure (1)..(54): unsure at all Xaa locations
  Clone ID: MRT4577_53075C.1.pep
SHLSIMATANAGAPRIFDFHLTTLXPSPLCTHTLSNDHQNLCFQPNIFTKNSNY

SEQ ID NO: 317982 - protein, 75 aa, Zea mays
  unsure (1)..(75): unsure at all Xaa locations
  Clone ID: MRT4577_53076C.1.pep
VHLPVGATAYXASXIXXTTKXTKRRAASTKKTLARAHRYGVVLXLXASFLTSLTXGVSMLVCGAVPAANDDPNSP

SEQ ID NO: 317983 - protein, 59 aa, Zea mays
  Clone ID: MRT4577_53077C.1.pep
FKRSAMSASGNFTRRMGYLTTMGLFFNKFAPLIKKHSHRWLRMVVFIILPEFSGPLDLV

SEQ ID NO: 317984 - protein, 84 aa, Zea mays
  Clone ID: MRT4577_53078C.1.pep
QEKNLEHTLGGKGGGTLKKIFLILKPGGFYMGGITFFKRPGLLKGENFLKKGGGGNPLKVKKKPRWVSSKKGNPLLAKEKLGVS

SEQ ID NO: 317985 - protein, 179 aa, Zea mays
  Clone ID: MRT4577_53079C.1.pep
MHFTTFLTTVVAAGMASATTYNAAAVSSNKNINGSALQASKSGFALKLKNQGAACDRGLKENQVTFSLNKDGELNLYTFQNSQVAYVDRSGMGQGKLGYATIADKGLVIPKNGETKGWKVAANGDLTFDGKGLIACPYDGSYSLWVSAGVNNPGGNKDCQAVTIRAKKDDKAVACQYSV

SEQ ID NO: 317986 - protein, 93 aa, Zea mays
  Clone ID: MRT4577_5307C.1.pep
RPGSLGSSRSSLPPRARPRCPRIARSDGCFRLPADGSVRSVGGNGAAQGFSPVTFRCPDVERRGPAPTTSRRLADRKTAKFQKNITRRGSVPE

SEQ ID NO: 317987 - protein, 640 aa, Zea mays
  unsure (1)..(640): unsure at all Xaa locations
  Clone ID: MRT4577_53080C.1.pep
MLIHLNKLPDFLGLLGAASHNTPPPPKKKIIITQHILCTRYLGGGENTLPMCLKKILIGLFIFYKLWLFLWLFFAFQWLLLVFCRHCISHVEDLVCIFSVKIWLGNIEGLNQCAIGEEVPFVLVAEVAANLSAPVSSISLGIPARSQHEVSLAIGRVSGLLEIWIWNASTNKIESSSAWHAHDQVXRWAIDGNCLFRACRDNSTRCWISHENHLEEFFLHSEFSELRESXCKSSRHLNVXILDXIIFLHMVGFSICMQLSKVSDRCYGLTLSPGEEIIAVVRSLDLNLLNQMYQVRTQKAVVEFIWIGGQFVGIPLDGSIDICSPQSADLSSSNLMWWGSNILWSLKKYENVEKRLVLWDVVAALQELKKTAPAFLETLVHSWASALFAGDSQCVSIXLPSHXSMHDMMPHVSSRKLHLLNIICRKVMLGNHARHGPGAGNNSNDGTTDFWSTLLVASETELRERLVGFTFAAVVKRTACLFNGTSTANCWFPVGVAQMDSWVSMNYEKVHGQLQSIRSKIKELGSRIDGYSDVESCPYCSSPVRFESPDVAICGERHTLSRCRTSMTLCSVAQPVWHCSCCGGTVDKLLPESFFTMPLDAVRDDKGSLDLSAASAPLCPFCGVLLQRSMPAFLLSTSPV

SEQ ID NO: 317988 - protein, 711 aa, Zea mays
  unsure (1)..(711): unsure at all Xaa locations
  Clone ID: MRT4577_53081C.1.pep
RGPGQRKIKPARVGGFIYDGNEVDLDASKDADFSMEPCSKSKKKSLKKTVKPRDEVVAVNGRNSTGNVKASLSSNEQNKSLPLITAKQYACRAAHLSSLVVSWSPVVSLSDRTSCLLRHWCILAVGSKSGNISFWKLYKPEYYTIDAGVVTSDPMLIGVWHAHESWVNAITWQVLSAGSSKSSLLLATGCSDGSVKIWLGNIEGLNQCAIGEEVPFVLVAEVAANLSAPVSSISLGIPARSQHEVSLAIGRVSGLLEIWIWNASTNKIESSSAWHAHDQVVTGLRWAIDGNCLFSCSQDNSTRCWISHENHLEEFFLHSEFSELRESEDLSKVSDRCYGLTLSPGEEIIAVVRSLDLNLLNQMYQVRTQKAVVEFIWIGGQFVGIPLDGSIDICSSQSTDLSSSNLMWWGSNILWSLKKYENVEKRLVLWDVVAVLQELKKTAPAFLETLVHSWASALFAGDSQCVSIDXPSHXSMHDMMPHVSSRKLHLLNIICRKVMLGNHARHGPGAGNNSNDETTDFWSTLLVASETELRERLVGFTFAAVVKRTACLFNGTSTANCWFPVGVAQMDSWVSMNYEKVHGQLQSIRSKIKELGSRIDGYSDVESCPYCSSPVHFESPDVAICGERHTLPRCRASMILCSVAQPLWHCLCCGGTVNKLLPESFFTMPLDTMHDDKGSLDLSAASAPLCPFCGVLLQRSMPAFLLSTSPV

SEQ ID NO: 317989 - protein, 124 aa, Zea mays
  Clone ID: MRT4577_53082C.1.pep
ENASSLPTPIRRTKVAAFPVESLLYQYNSWVSFSLAPSLILRIPMALRKIMCPELVRDLSSLMSKPSRLYFFFEWPGQADPKNREPMASEMGERHTLLRRVYVIDTARVIETQILFLGLGRLPT

SEQ ID NO: 317990 - protein, 631 aa, Zea mays
  unsure (1)..(631): unsure at all Xaa locations
  Clone ID: MRT4577_53083C.1.pep
MAPQYQAATLIASPSYPSAIAWSSDNLVAVASGHIVTILNPSALDGPRGLVGLCRSDPFPIGLVNREAAQQSSEAQLKRPRRAQYCSMDPVDWLDFVAXPFSXDWLIEKCEMVWMDLHSGWHDYFKSRLHGLQGESFPYRHMKRDLDVADDLGRHSLTGRGACRPHSYIGALVPRLEYLVLTTNVSGPLRSLGAMFIVHFLSACLLAVCTMDGHVKLYRSPIWELCDEWVEKNTNTGETEVXDLLMNCKNLFISXPGQRKLKRSRVDGFIYDVNEVDLDASKDADFSIEPCSKSKKKYLKKTVKPRHEVVAVNERNNTGNIKGSLSSNGENKSLPLITAKQYACRAAHLSSLVVSWSPVVSSSDKTSCLLRHWCIIAVGSKSGNLSFWKLPKPEYYTIDAGVVTSDPMLIGVLQAHKSCVSVIAWQVLSAGSSKSSLLLATGCSDGSVKIWLGNIEGLNQCASGEVPFALVAVVATDLSSPVSSISLAIPAQSQHEVSLAIGRVSGSLEIWIWNASSNKIEIFSAWHAHDQVVTGLQWAMDGYCLFSCSQDNSARCWISHENHLEEIFMHSNFPELRESADLSELSDRCYGLTLAPGEQMIAVVRSLDLNLLNQMYQVRTQKAXVVEFILD

SEQ ID NO: 317991 - protein, 155 aa, Zea mays
  unsure (1)..(155): unsure at all Xaa locations
  Clone ID: MRT4577_53084C.1.pep
LARTALSLYSFPASPPAAPLACGSPPPPFLASAQHLSAPRPAPRAASLRNPPQPARQAPPPVPXEMCGVSMFGRIGPTIAQGMAFGTVSAMAHRAVDSVLGPRPLHCETLATEASAAASAAPAINPDACXSSHSTASQDCLNNYGPXISRCQFYL

SEQ ID NO: 317992 - protein, 76 aa, Zea mays
  Clone ID: MRT4577_53085C.1.pep
GFLVALGKKGAPSKTVKKVVFRIFFVLLGPVFFSIENFCEGGLSKKKKKKKKKKKKKKKKKKKKKKKKKLERGPCT

SEQ ID NO: 317993 - protein, 56 aa, Zea mays
  Clone ID: MRT4577_53086C.1.pep
IPKESHSSQIWGRLMSAGGESEVQQCYSVWLSTFCPARSWGRALEPSACPRLMGRL

SEQ ID NO: 317994 - protein, 156 aa, Zea mays
  Clone ID: MRT4577_53087C.1.pep
AVPMSGGPALLRSVLRPVWRGAYGAAARHTCGGRFGRHTRGSRSVARCGARASPPNRPLDSQNAVHTALLTLTTTTCVGAAVIYSQNSSLPSPLPCYQPSQRRGRAATGFFPPGKRCVLADATKGTLGSANPFNPEPLSFIHASDKAKNHSSSMIL

SEQ ID NO: 317995 - protein, 147 aa, Zea mays
  Clone ID: MRT4577_53088C.1.pep
RTTESPRENKNPSASTCFCLNGAYLARRPGLTTTSTRSTRTAARNTPRKRNPHRNGRITRMTPPRPLECWRRDRDGIRIQLQQAGGSRETFRPQEQPPSRQHIFCIIHQKIASRISLLRPYPHKADYVIKTGQGAPKILLTNLKNLL

SEQ ID NO: 317996 - protein, 106 aa, Zea mays
  unsure (1)..(106): unsure at all Xaa locations
  Clone ID: MRT4577_53089C.1.pep
AGPFFLLRFPAGRSARRAGRRNRAVRGLXRERTGPQISDLPARPPARHAXSCRPRPTSALSPPGDRGGGGCXMVLXXFGYGSLIWNPRLDLDDKILDLINGYMRSF

SEQ ID NO: 317997 - protein, 152 aa, Zea mays
  unsure (1)..(152): unsure at all Xaa locations
  Clone ID: MRT4577_5308C.1.pep
FAVYKSKXLPTLKGDFXNTMLWSSPVFFFILFLFGXAWHFFAKKKESLTAWGPDDPFTPTGAQNSSAKEPTFTEPSRRNDDLMDLRRRYAGGSYRSVGANDPSSRAPVDGNYRTTAQDHNNYRGGGSGLDSNGFGNRRDHLFGNNKVLDNES

SEQ ID NO: 317998 - protein, 83 aa, Zea mays
  Clone ID: MRT4577_53090C.1.pep
ETVPEVAAPELALDEAEQFVDRSLFRKVANVQDDRSLAAGVADPVAEYPTKKAVTLKDVGVDTPGIEQGREGLLHKIFKKNHA

SEQ ID NO: 317999 - protein, 54 aa, Zea mays
  Clone ID: MRT4577_53091C.1.pep
PVTHLLWSLHSTEVGWGASPTRQTSRGSPTAGTPPRASSSVLPPPPGGSARSSL

SEQ ID NO: 318000 - protein, 99 aa, Zea mays
  Clone ID: MRT4577_53092C.1.pep
KKLPYQRPLPTEPAMGQQQTQITLARASCMPARFSEAPPRGHVLGLEFWMTSWLARSNHCVGRHRGGADLHHRRCLDSLFIGSIYMRTRALHNIQAVNY

SEQ ID NO: 318001 - protein, 95 aa, Zea mays
  unsure (1)..(95): unsure at all Xaa locations
  Clone ID: MRT4577_53093C.1.pep
MTASDLLPDDAIAHQVLLGAGDGGLVFNASQFAVQSXGLTMTFKNNTGFPLKVILGKLQVQRGVHANKISQEEYLXNAAGEPYSVTLAVLGNLIA

SEQ ID NO: 318002 - protein, 42 aa, Zea mays
  Clone ID: MRT4577_53094C.1.pep
NLLTSNSIITNPIPSITESYIIHTPIHANLYHQTINTSIQHQ

SEQ ID NO: 318003 - protein, 55 aa, Zea mays
  Clone ID: MRT4577_53095C.1.pep
PRVRCTPSHSSLLLQKQLNDLAKNPVDGYSADLVNDCNFLKSHFTIICPFNTNYY

SEQ ID NO: 318004 - protein, 63 aa, Zea mays
  Clone ID: MRT4577_53096C.1.pep
KKKKKKKKKIKNKKKKKKKSRKVKNKKSVHTLTYNIYNNAIPFHESNLLSPSLQRHPPFISLP

SEQ ID NO: 318005 - protein, 75 aa, Zea mays
  Clone ID: MRT4577_53097C.1.pep
AARVSLSHYHLPPALPVAFSSDSYPIRSCLSHGPVRWLPPYLPLTRCRGQDLLQWTSCLRGGTAEALMDAVQTAL

SEQ ID NO: 318006 - protein, 89 aa, Zea mays
  Clone ID: MRT4577_53098C.1.pep
MTEYERNLVRLRMVDEERGRMVERTDRGEKINFDPNGDRLYEMQHIAFSRPCDLPGSVASLPCRCARQRSWEDQRPGSQHAWPSWRSPR

SEQ ID NO: 318007 - protein, 49 aa, Zea mays
  Clone ID: MRT4577_53099C.1.pep
TVSNPLVFGRVKNRHRVAGAIHGYACTFEQILIITCKLVCNTKLTQYVS

SEQ ID NO: 318008 - protein, 111 aa, Zea mays
  unsure (1)..(111): unsure at all Xaa locations
  Clone ID: MRT4577_5309C.1.pep
ENIKPEHKDIYFITGEGIIIVLNAPFLNKPTQKHHYVLPLVHPYEXIVYPNLDSPHKKKKFGHIPKKMNISDNNEEREKQIKHQITPPCDCIKKLSCNKRAHIDTYKKLTK

SEQ ID NO: 318009 - protein, 110 aa, Zea mays
  Clone ID: MRT4577_530C.1.pep
NPRTVWPYTVHAKWAKGKQLRTNNHNKSASNNNDHDRQRQLGAFQFREDRERQCISIARDLRVGHLCSGIHLRSSPRALSLLPRLSLSPSRQSSPLRRVLVCVVFPDPAG

SEQ ID NO: 318010 - protein, 233 aa, Zea mays
  Clone ID: MRT4577_53100C.1.pep
LVSNDLIAVSTWLIQTPLICVCQQIFHTPADREKIKSCLSELGEISASFKKILHSALEHLVASVAPRIRPILDTVATVSYELDDTEYGENEVNDPWVQKLILTVNTNVAWLQPVMTLNNYDSFVHLIIDFIVKRLEVIMMQKRFSQLGGLQLDKEVRSLINHFSEMSQRPVRDKFSRLSQMSTILNFERVSEILDFWGDNAGHLTWLLTPAEVRRVLGLRTDFRPEAIAALRL

SEQ ID NO: 318011 - protein, 44 aa, Zea mays
  Clone ID: MRT4577_53101C.1.pep
TSEVQEAQINIVYEQMIFQSLDEAMATETSNQQLNNAIARGRVG

SEQ ID NO: 318012 - protein, 117 aa, Zea mays
  Clone ID: MRT4577_53102C.1.pep
CIIKPAPRKRKNKWEMAILPLQTPNPEEGGKTWGGSGGVPFQGLGGSHRWMEDSRVQGSLKLGTPPRFCRGQTHYWGGSLENLKGLTRGVRLLLTLSRAFYAIIFKGGGVLLVPGPL

SEQ ID NO: 318013 - protein, 93 aa, Zea mays
  unsure (1)..(93): unsure at all Xaa locations
  Clone ID: MRT4577_53103C.1.pep
QKRFSQLGGLQLDKEVRSLINXFSEMSQRPVRDKFSRLSQMSTILNFERVSEILDFWGDNAGHLTWLLTPAEVRRVLGLRIDFRPEAIAALRL

SEQ ID NO: 318014 - protein, 174 aa, Zea mays
  Clone ID: MRT4577_53104C.1.pep
KSKKERVVLYSNRAQCYLLLQQPSAAISDATRALCLHSPVNRHAKSLWRRAQAYDMLGFAKESLLDTILFINECSQSNDPDLSLKQNKVPDYAERLVKKQMRAAWLFREAALKHGGVRRAGDASDAAFGQEADDSEWETASESDGENGAATGGEADGETGWKNGGRQEDFCEKS

SEQ ID NO: 318015 - protein, 122 aa, Zea mays
  Clone ID: MRT4577_53105C.1.pep
GGPGPHPFFPAPFLLAQRDGQFFFPARKFGTLIPPIVFSGGPLLPPPPLLWIPPLHPPARGAKKKKNPQKKKKTKKKKKKKKKKKKKKKKKKKKKKKKKKKKKKKEIKKVKKKKKKKKKKLV

SEQ ID NO: 318016 - protein, 62 aa, Zea mays
  Clone ID: MRT4577_53106C.1.pep
ERERAPGLRPLHQTSETNKPNQAMHTVLFFQGLDKLTKNMLQTPDEDQHLRGNIEWSQAQLN

SEQ ID NO: 318017 - protein, 109 aa, Zea mays
  Clone ID: MRT4577_53107C.1.pep
IHIWLHRKKQKKNRLLRDVTCKNMKHKQQRILQREKELSVAETIFSKRTSVSCRKGIRVIARKQSGPVAQLFSQKSSWRPPFFHPVSQSASPPVAAPFSQSLSLAGRVG

SEQ ID NO: 318018 - protein, 64 aa, Zea mays
  Clone ID: MRT4577_53108C.1.pep
VQNLLEKPQYDHLPLIEASRLCNMDIISKVQQVICFAFHDSKLLMETCQEAMNLRKIVTLFYLD

SEQ ID NO: 318019 - protein, 193 aa, Zea mays
  Clone ID: MRT4577_53109C.1.pep
PRVRKEVMDLDGSIEDNRYRDQKLRMKKCGLRKLIYLVEGDLNRAPKRVKTACFTTEILDGFDVQRTTGFADTQKRYVDLTRSVIAYYDASFSIVGKASPVCPTYDDFKRKCYDLKKKTVSDIFGCQLMQVPQVTEEAAQAVVELYPTPLLLAKAYSILGGDTSAQEKMLKKKNEMVNAGASRNIFHLIWGDG

SEQ ID NO: 318020 - protein, 95 aa, Zea mays
  Clone ID: MRT4577_5310C.1.pep
GLPIKPPPRRDPVSTAAPPEVGKGKKREGEHRGMLEAKPPSPGSGAAGAAAHIHGHRRWAAPLLASVLLSSLLITASLFFSSSRALLLFFSPLPF

SEQ ID NO: 318021 - protein, 356 aa, Zea mays
  Clone ID: MRT4577_53110C.1.pep
MASSEPIECQVVALRVSIHCQGCKKKVKKVLQNISGVYRCEIDARSNKVVATVSTELDPYMLVAKLRKSGKQAELWPEQPVQQQEQPAPPAESQRQEEPKNNQPAEPGRPSEPAEERGAAADTAEAAAAEPSNPQPSPPEPKPSAGGEAPNPAAQDSKENASADDVGGGDETAAAPAPAPAQQGPSEAKGKAKSKQHTAEMEERQPVDARVTVEYDHRGVGGGYVSRMPPPAVMSYNQVRPSVSASYYAPAPAPAPAPMPMGRPGPSQGYIDEHYTPSYSSSSNNYYSSNRSPAYEPYYYSAPQPAPYSYQYQYQPASSSEDYYYSAPPQRSAFSPPREGYGDMFNDENANSCTVM

SEQ ID NO: 318022 - protein, 85 aa, Zea mays
  Clone ID: MRT4577_53111C.1.pep
YKLFFKLHIYIHYEHTTTVTLDLKILHTNASIVRKSKYCKSAMQITEWPYQYRSIPSGLNIERLIYHKPITKSCRQHLDCIFITL

SEQ ID NO: 318023 - protein, 449 aa, Zea mays
  Clone ID: MRT4577_53112C.1.pep
SSLPPRFTVHDDSRSRRGALDFPLLLLRAPSSPRSHGLIRPDRVPVLVHVCRARNWSSSSACLIPVPAVQPLFLFSSSSSSFCLILLLLSDPSVTVCPVLIQVVALRVSIHCQGCKKKVKKVLQNISGVYRCEIDARSNKVVATVSTELDPYMLVAKLRKSGKQAELWPEQPVQQQEQPAPVPPAESQRQEEPKNNQPAEPGRPSEPAEERGAAADTAEAAAAEPSNPLPSPPEPKPSAGGGEAPNPAAQDSKENASADDVGGGDDTAAAPAPAQQGPSEAKGKAKSKQHTAEMEERQPVDARVTVEYDHRGVGGGYVSRMPPPAVMSYNQVRPSVSASYYAPAPAPAPAPMPMGRPGPSQGYIDEHYTPSYSSSSNNYYSSNRSPAYEPYYYSAPQPAPYSYQYQYQPASSSEDYYYSAPPQRSAFSPPREGYGDMFNDENANSCTVM

SEQ ID NO: 318024 - protein, 150 aa, Zea mays
  unsure (1)..(150): unsure at all Xaa locations
  Clone ID: MRT4577_53113C.1.pep
MTQVVFCLPLIFAKPPSGDGAPKRGGMAPXPPKIRLIXVTNPLKDKRPKQFEILGALPPNKDLHRINKWPNVVRMQRQRRILNQRLEXPPGLNRLTRTLYKTXRTNLLKXLLNXRPDTRLSKDRLXDEAQAWESGKTGASKKPIVGKYGL

SEQ ID NO: 318025 - protein, 99 aa, Zea mays
  Clone ID: MRT4577_53114C.1.pep
FLFQRSSHCFFFFFFFLFDSSSQRSVCVTVCPVLIQVVALRVSIHCQGCKKKVKKVLQNISGVYRCEIDARSNKVVATVSTELDPYMLVAKLRKSGKQA

SEQ ID NO: 318026 - protein, 75 aa, Zea mays
  Clone ID: MRT4577_53115C.1.pep
SFSSVDQPLLMADGITSTTVVALLEEHLVIRHYFMGAVAAMVAGSCDLYGDLLGTGHLVPQLTTAMREAVAPLAS

SEQ ID NO: 318027 - protein, 47 aa, Zea mays
  Clone ID: MRT4577_53116C.1.pep
MTSEVEDPDETGSGGKRSKPASPQPHTPDICEGHGSNRHATGSGEQR

SEQ ID NO: 318028 - protein, 180 aa, Zea mays
  Clone ID: MRT4577_53117C.1.pep
GRGESHFPKSYTREREQRSTLREERGRSRETAEAAAEARSIRSGSSNQVASEDRASHPSIHLSSSTGINPRASVGGARGGPGTGGDFSGVEWRPGLLIGLQGAIFERRFGARNLPWIWFKIWGDRSGSRCKIRFLCLFYSRDRNNEIAKQDKISTFFPWIDLRLGGANKARIERFLGEKA

SEQ ID NO: 318029 - protein, 429 aa, Zea mays
  Clone ID: MRT4577_53118C.1.pep
MMLEGKSYLVSRSVPSSCEPEAEWEYLAHAVLSGKRPAPEDDVEVEDPDETGSGGKRSKPASPQPHTPDICEGHGSNRHATGSGEQRITGSNPMTSIGRDLTLNCLLRLSRSDYGSVASLSRDFRSMVRSGEIYRLRRQNGVAEHWVYFSCNVLEWDAYDPYRERWIQVPKMPPDECFKCSDKESLAVGTELLVFGMARIVFRYSILTNSWSRADPMNSPRCLFGSTSVGGKAFVAGGTDCVGNILSSAEMYDSETHTWTPLPSMNTARKMCSGVFMDGKFYVIGGVANSNRVLTCGEEYDLKRGSWRTIENMSGGLNGVTGAPPLIAVVSNELYAADYGEKDLKKYDKKNNRWITLGKLPERSVSMNGWGLAFRACGDRLIVIGGPRTYTGGTIELNSWIPDERPPVWNLIARRPSGNFVYNCAVMGC

SEQ ID NO: 318030 - protein, 184 aa, Zea mays
  Clone ID: MRT4577_53119C.1.pep
MNVPVVDPYQGEFPETIEEYLHHGTMKCIAFNRKGTLLAAGCSNGSCIIWDFETRGLAKEFRDKDSTAPITSVSWSRYGHRLLASATDKSLTLWDVPTGEKIARITLQQTPLRASLQPGSPTPSICLACPLSSAPLLVDLNTGSTTVLPVSVSENGNPPAPNPRNKFADGTPPFTPTAATFDKH

SEQ ID NO: 318031 - protein, 192 aa, Zea mays
  Clone ID: MRT4577_5311C.1.pep
RPGETLTVTLTASPTASPTHPLGLSLSPGFPKNETLAPPPQWPWTPGVEKQSRRWWPWTCGGEQAPPRRCAASPTCEPTTVHWSALVYSMATKGSHPAEASHLRIGTSAELPRYSSFPPSSTSFHSFLPTMCLIGALEEASLSTVRRFPLPASSPYQVVITSNPLSPLYGGTSSSYDFVNWSNTRNLAIPCY

SEQ ID NO: 318032 - protein, 73 aa, Zea mays
  Clone ID: MRT4577_53120C.1.pep
SNMLADDSKSHIQFCAYVILINVPSKLCEESGYILVWLWDRDSTKPHHCDSFMPAFASLFLENVSLYSSRIWA

SEQ ID NO: 318033 - protein, 98 aa, Zea mays
  unsure (1)..(98): unsure at all Xaa locations
  Clone ID: MRT4577_53121C.1.pep
ASAGRAQRCARRPRRRTARRRXKPGGGYTPPSPKTGSGGYGSPSPPAGAGQGGKGAGRPSNFYYLFTSAAGGRSGGGGGGVTVLLFASALTALVARLQ

SEQ ID NO: 318034 - protein, 100 aa, Zea mays
  unsure (1)..(100): unsure at all Xaa locations
  Clone ID: MRT4577_53122C.1.pep
MVAYRQMESPSRKFLAAPRLATTTISAVVSASAPSTRLAWLESPRNPPQDLTEIKTISHIAHSHGARVLVDNSIMSPVLSRPIXWEADIVXHSATTFIAG

SEQ ID NO: 318035 - protein, 182 aa, Zea mays
  Clone ID: MRT4577_53123C.1.pep
AGRAGLSAVRAHCSGAQESHSRPIAPKSHLTKQASKQTITIVRRPVVGVDRGHRSARPWWADEPRAWRRFCCCCCWAVVSCDGEATTTTAGGQPDDTAVLCVSKCGTCPAVCSPPAPSDSTAPPKPGGGYHAAVAEDRQRRVWLSVAAGGSGTGGQGSRAAQQLLLPLHLRGRRAELRRRWW

SEQ ID NO: 318036 - protein, 140 aa, Zea mays
  Clone ID: MRT4577_53124C.1.pep
SRVHPRVRNRVVSILLGDAVLFAVGVVLVKGYHDKCVVHAVLVGKEGFHEQRTYGIHDGVFSIVPGDAVPAARVGTTNDAYYNQYSEISNAQANCGLHTSGRWDVPCTMFIFVATNTVHTVAAWSGKVVFSTTYITASDT

SEQ ID NO: 318037 - protein, 51 aa, Zea mays
  Clone ID: MRT4577_53125C.1.pep
HTGSAIAFRWPFVSLPVRSHTMRLSLLFARVVGSASSFLQWHGAVPALEPH

SEQ ID NO: 318038 - protein, 61 aa, Zea mays
  Clone ID: MRT4577_53126C.1.pep
FFTCFFCDLWFQTLSFVAWFFDRQEGQIKIQYGFWHFFEEHKWGFFDPGPKSLAWRSYETG

SEQ ID NO: 318039 - protein, 92 aa, Zea mays
  Clone ID: MRT4577_53127C.1.pep
GSTAFSFTPEQIEIATSDVEYCCFFCYLSCSTYYHMFYNALSTYSEVLKSKIMIHLQTQMSSLFSYRYILNRELDAIRHHDHELLYTWTLEH

SEQ ID NO: 318040 - protein, 64 aa, Zea mays
  Clone ID: MRT4577_53128C.1.pep
CLMFSVDNCDQARKRPLNSLQFGIGGEKHFGPATPCNKLTFLVVSHYFPPRSFFDETTCSNWAF

SEQ ID NO: 318041 - protein, 58 aa, Zea mays
  Clone ID: MRT4577_53129C.1.pep
PRVRPFVNERKCRGFRKVHDPQTTTNQNINSCLCPMVIVKDYKLLKLPNNLNKVDLNT

SEQ ID NO: 318042 - protein, 94 aa, Zea mays
  Clone ID: MRT4577_5312C.1.pep
VLTGSKGRQALAFMPLGQLEIFACRSRFNKFGSAVIFPAGTLVSSDQLFKFRSHNKQSNHSHARVGNLDIWLKPSSKFHFNCRAHLAPFRLTNT

SEQ ID NO: 318043 - protein, 80 aa, Zea mays
  Clone ID: MRT4577_53130C.1.pep
VVVSLRPPVGIVGGNVVEVVNKIVEVVHHLLINVASGVCGYGGEEEEQEVRRKKMEGTLLLIPFPLTVSLDDVLQRSARG

SEQ ID NO: 318044 - protein, 63 aa, Zea mays
  Clone ID: MRT4577_53131C.1.pep
MTAIVIRTGSSAARGNSGPFVNMGTDTRRNSNPSFLDDKDAKVVENEHRRTGRIRHSDGDYCR

SEQ ID NO: 318045 - protein, 58 aa, Zea mays
  Clone ID: MRT4577_53132C.1.pep
LTPASAPEGAALSSFLTTKANKQILYLANHSSIVFRTIIYKSVSEHRPQSNQVTVIQH

SEQ ID NO: 318046 - protein, 180 aa, Zea mays
  unsure (1)..(180): unsure at all Xaa locations
  Clone ID: MRT4577_53133C.1.pep
RGPCSRSCILVPKKDGSWRMCVDCRAINNITIRYHHPIPRLDDMLDELSGSKIFSKIDLRSGYHQIKMKLGDEWKTAFKTKFGLYEWLVMPFGLTNTPSTFMRLMNEVLRPFIGKIVVVYFDDILIYNTCLFEHLDHLRGGFDALRVARLFANLNKCTFCIERVLVLGXKKKKKKKKKTK

SEQ ID NO: 318047 - protein, 214 aa, Zea mays
  unsure (1)..(214): unsure at all Xaa locations
  Clone ID: MRT4577_53134C.1.pep
MASYDKAMESYKKAVTTAASLAASAMLVRGVVNELVPYEVRDLLFSGMGYLRSHMSSQHTIIIEETEGWANNQLYDAARAYLATRINTDMQRLRVSRVDETKSMMFSMEEGEEMADVHEGTEFKWRLVCRDNSSASSSNANGRGGSGNFKLKVRSFEMSFHRKHKDKALTSYLPHILAVAKKIKEQNRTLKIYMNEGESWLAIDLHHPSTFXTL

SEQ ID NO: 318048 - protein, 199 aa, Zea mays
  unsure (1)..(199): unsure at all Xaa locations
  Clone ID: MRT4577_53135C.1.pep
LKAYKLLRGIIYIGVVPDVVTGNTLLNGLCKVRNLDGALRLFRELQVKGFPLDEITYGTLIDSLLRAHRYNDALTLFQDILHSGGTPSMPIYNSMMRSLCRMQKLSQAINLWFDHLPRKYNLLAQDEVISSARKKFEEGCLHEAVRELIKIDQEYGSVNSCPYTIWLIGLIQAGRIECPQFFIYLRDQXIDITPACCVH

SEQ ID NO: 318049 - protein, 151 aa, Zea mays
  Clone ID: MRT4577_53136C.1.pep
MSGATATSPNSRWIDRWGSVFWARLDVRCTPDMNCRLSGAPAPACLMTARFWRALNVPAGTRCKPNSLSVFFCIWVIYKEDINMKTCETINFEISGDVHLGSVSLWDGCSTIDFTNFATQGLIPTTSFYKDAKILRRNFVIDLLSYEDNSC

SEQ ID NO: 318050 - protein, 42 aa, Zea mays
  Clone ID: MRT4577_53137C.1.pep
PRVRHACEWHMRQFLTSHLPISINECLSAYGAWMKGTRGKNY

SEQ ID NO: 318051 - protein, 97 aa, Zea mays
  unsure (1)..(97): unsure at all Xaa locations
  Clone ID: MRT4577_53138C.1.pep
SPHPDLPISQIHDPPFLCQTHPXHLTLKPYKPKHRILRHKQITNQSHLPTTQEPRVHLQSTTLLTTPHHKTHTRNSFSFVTTLTPTSRPLISPTNTT

SEQ ID NO: 318052 - protein, 92 aa, Zea mays
  Clone ID: MRT4577_53139C.1.pep
PGLPFCFWRLLPCVWPCWCWSFPCSRVCWWRFFSSVATCRPWLASAAPVPPFVRGACAPWVVLAGVRWPCSAGLPFRLVGSRRVSVCSVGAP

SEQ ID NO: 318053 - protein, 86 aa, Zea mays
  Clone ID: MRT4577_5313C.1.pep
RTRWLHTRALTFVSASVPPSCAQGCLSLPHSLFRSEDDWGERRRRLPTSRAQVVGPAFVSCFLGTSAETNTHQVLMQGFQKINSFT

SEQ ID NO: 318054 - protein, 212 aa, Zea mays
  unsure (1)..(212): unsure at all Xaa locations
  Clone ID: MRT4577_53140C.1.pep
NKIVSWYTIAIRLLEFLXMTYAFCYHFQLEDPLIQLKEDSKWIHVXDFHWRLVIDEHSLGSIILTGFISXLAXLAACPVARNSQLLYFVMLAMYSGQIXMLYTRPLTIXSIMWELKLSPVGLCLCMWGAKSXLYSATEFNVYTPGGSIFLLVGVLGMKLYGSNDXGLDLXERLNSQSVPSSMRWVTVXGFSTAYGVKLPSIPXHTWLSDNHG

SEQ ID NO: 318055 - protein, 81 aa, Zea mays
  Clone ID: MRT4577_53141C.1.pep
GQYFDFVGVEVASGQRAGRTPPGLLQLQAGYLAGEEEILSRTLSKVRTLSGEETAAWFTEFPGPAGRGSVVTAYSSRRTRG

SEQ ID NO: 318056 - protein, 269 aa, Zea mays
  unsure (1)..(269): unsure at all Xaa locations
  Clone ID: MRT4577_53142C.1.pep
MARPFSSPHIPSSSWVTRRPPPWTSSPSFSTTRTSASSITACRPRRRAVAPAASLHLGPGEIAELARNKVLIAATVASAIGQLSKPFTSVKNGGVGAGLDLRTVFRSGGMPSTHSASVVAVATSLGLERXVCRGFADSIFGMSVVFAAIVMYDAQGVRREVGNHAKVLNRFWILKEKAPLEYSEVDMAAPEFVSVSEEASSNASPSLKRGCSTESPRVNGLRGSELTELKQAYVEEDYRLSESVGHTELQVTVGALLGFAVSLAVYATL

SEQ ID NO: 318057 - protein, 102 aa, Zea mays
  unsure (1)..(102): unsure at all Xaa locations
  Clone ID: MRT4577_53143C.1.pep
TDQLSKPVSPENILYYHRIGEYQTEECMYNAVRRFRKVRYDTLRLPNKVVARXADCSVKFGQSXGSSYLLYPDIYTYRRISVQGIIQPCSAAPDDTMATHTV

SEQ ID NO: 318058 - protein, 319 aa, Zea mays
  Clone ID: MRT4577_53144C.1.pep
AIGLLHTACGTPAYVAPEVLLKTGYDGAKADIWSCGVILFVLLAGYLPFNDTNLILVYRKITQSNYKCPPWFSVEARKLLARLLDPNPRTRITISKVTANPWFQKGLCPLTTDKPLDLWETSEVLGKEKACRCRHHQRDDADADADADDEENTRKRKRSKVTVSSPPTVAVRPSSMNAFDIISRSSGLDLSKMFDEEHRSEARFSSRESTPRVRPRVRPRVRTRNLDIKLNKRGRVEMEGGQYCRRGTLVIEAEIFEVAPSVRVVEMRKIGGDSPEFREFYRQELKPSLGDIVWSWQGSDSPPTPLLPPAPRQATNQRP

SEQ ID NO: 318059 - protein, 93 aa, Zea mays
  Clone ID: MRT4577_53145C.1.pep
PAPTPRHRARPSCKPSRATVRFNGDLTRPFLFLPIPLPVSGDNGDVNGFKDRRFSPRLSLSPPSLYKATAEALPLHSPARHPSSRILCLLCVL

SEQ ID NO: 318060 - protein, 105 aa, Zea mays
  Clone ID: MRT4577_53146C.1.pep
KKKGPRKIYIIYIIYIYIYIPIYIYTLLKLFHHPPLPAYQSTPSTLTLNCEGHNKKAPPAPVQKKLPHSQGILHHASVKWAWPPLEWDNFASHQPLSKNKTPPDG

SEQ ID NO: 318061 - protein, 100 aa, Zea mays
  Clone ID: MRT4577_53147C.1.pep
YIFFPHVIISPSSLGMLQGYRPCAPFVYVRSFNPRRPTDRPTAFFFFFRACSWFLFFYLNSPHKLLIICRYVDLYKLINQSTSGRSSIYFFLTSSYPHHH

SEQ ID NO: 318062 - protein, 114 aa, Zea mays
  Clone ID: MRT4577_53148C.1.pep
RHCLFPLLRLRSPLLQIPNQLQRDHVSSIDVYTWDLFVCVGLHPESFHLYFVEWEYRCHEQMLKSARRNVQRHGGHALPRRPHPLGQPWELSLVPNNGDGRSSEKEGRKEAATP

SEQ ID NO: 318063 - protein, 49 aa, Zea mays
  Clone ID: MRT4577_53149C.1.pep
IVRDRINIVINIHMITNAMKMVASLKLLAVYTRSENICVLLQPIHRPFF

SEQ ID NO: 318064 - protein, 96 aa, Zea mays
  Clone ID: MRT4577_5314C.1.pep
IWNRTTSCLPLNCGLGLDKALWLCKPLLILAVQAWIPSLELESSLQLQLCKTEKPQDTGCMVSMAFLEPSTGRERYTVIDTGCMVSMVSKWFQFFL

SEQ ID NO: 318065 - protein, 399 aa, Zea mays
  unsure (1)..(399): unsure at all Xaa locations
  Clone ID: MRT4577_53150C.1.pep
MAVVAAGAEAFDPAAPSPPRAPASRQDVQATIAKAVELRQLRAALLQRGAPNARARAGASRSPAVIRLPPVASPTRSIAADEEYPVFTPAYDDEERVATVALNHICQDNRSRSENWTGVALDHDDAALFDYDGLHAFWRLSPSRPAGDNSQTRRGQPCWFRVPQVGLIAVNDGIILRNHISRILQRHFKGKPYYVDIIDLFNEVEFKTASGQMLDLITTHEGEKDLTKYNLTVHRRIVQYKTAYYSFYLPVACALLLAGENLENFVDVKNILVEMGTYFQVQDDYLDXCFGDPELIGKIGTDIEDYKCSWXLVVQAXLERAAENQKSILFENYGKSDPXCVAKXVKDLYKELNXRVEGVFHEYERESYNKLIADIEAQPSKAVQTVLKSFLHKIYKRDK

SEQ ID NO: 318066 - protein, 113 aa, Zea mays
  unsure (1)..(113): unsure at all Xaa locations
  Clone ID: MRT4577_53151C.1.pep
MFYPHXXKXNXXGDTGGGKQARSXQHTDKRHQPEHXXTNGAEXGARTTTXDNKPNKLQNRDTAGQETPRATTRPHHRGAAGDLFFYATPTRETFNHLASRXKHARQHANATMT

SEQ ID NO: 318067 - protein, 128 aa, Zea mays
  Clone ID: MRT4577_53152C.1.pep
FWAYYNSSDDAALSDYDGLQAFSSSNSDVFFPSSNDHRLRNRGTAYKIHPAFMHSAPSGDRFLPSAGRVGYTSELNLPPATCGNAFRAVTISGTRVPPPSGHSRTKQGGATQNLFWLFPSSRKKAKPP

SEQ ID NO: 318068 - protein, 74 aa, Zea mays
  unsure (1)..(74): unsure at all Xaa locations
  Clone ID: MRT4577_53155C.1.pep
DAWGHYPTXPPRPQPHPGPHPCPCQQPHPSPCQLQGTCGVGSTKILGQCVEFLRHLYNRSEIHYCSPEFQSKLL

SEQ ID NO: 318069 - protein, 40 aa, Zea mays
  Clone ID: MRT4577_53156C.1.pep
HEISMSKNLDHSLSGSNFSSFVPALELDYIGSLFLIVILY

SEQ ID NO: 318070 - protein, 35 aa, Zea mays
  Clone ID: MRT4577_53157C.1.pep
GVIVSAPRLVFHRITGNSYMFHSPCSPGLAHTPTP

SEQ ID NO: 318071 - protein, 55 aa, Zea mays
  Clone ID: MRT4577_53158C.1.pep
IGFADGGIRSILYEGTEHIGTEAHVFRYRSNKYMTQAFGSCLQHISTKEGERTSG

SEQ ID NO: 318072 - protein, 72 aa, Zea mays
  unsure (1)..(72): unsure at all Xaa locations
  Clone ID: MRT4577_53159C.1.pep
GGHALLFWPHXKNAHPTPTKDSACKHPQLQSALNSLNSPAYLTLPKTSTALILFLLQKTNTHMLLITTLRLK

SEQ ID NO: 318073 - protein, 98 aa, Zea mays
  unsure (1)..(98): unsure at all Xaa locations
  Clone ID: MRT4577_5315C.1.pep
ISAILMAKRAHFVREVAAIAVDDDTPGASIMGSYTSFQAVMIRGGGHTYYLHVEQLRPILICNVLSNWRAWMDKGIGCXGVXXXXSPXXYXLSWPIYI

SEQ ID NO: 318074 - protein, 69 aa, Zea mays
  Clone ID: MRT4577_53160C.1.pep
STCRVLIEIPPQSRKWIPLLVWFCSQLSYVGIVFSRSCGRTSLRVAGISFALHNLVWLHACVLRTGSSS

SEQ ID NO: 318075 - protein, 159 aa, Zea mays
  Clone ID: MRT4577_53161C.1.pep
VDAHAIYVRNLPLNATETQLEDEFKKFGTIKQNGIQVRSNKIQGFCYGLGEGEDSISFQSAIEASPVAIGGRQCYVEEKRAPGSRGQFIYKLIPNTYAVSVTIILLSQMNMMIHPGTSMMTHPGTRSSHPSCVGLPEVPSEWYYDSCHNLVRKEKGSSG

SEQ ID NO: 318076 - protein, 80 aa, Zea mays
  unsure (1)..(80): unsure at all Xaa locations
  Clone ID: MRT4577_53162C.1.pep
GGRGTPACHIFRVRAATXGGXRSWRXSLAPLEADEKTKAMVVMARIQLSFSRREPWLGKGGELLRLGTGQEKCSRYRIPA

SEQ ID NO: 318077 - protein, 65 aa, Zea mays
  Clone ID: MRT4577_53163C.1.pep
GNKGVSNQGVFFYIGPCITNSQEGHPACGLNIGLFQEILGSKKWAFCFSRLKKKKKKKKKKKPNP

SEQ ID NO: 318078 - protein, 58 aa, Zea mays
  Clone ID: MRT4577_53164C.1.pep
KKGRLTFRKYRLISKLISCDIITSPFMHISLYFLAFLISFPVMSRGFAREKQSPIYGQ

SEQ ID NO: 318079 - protein, 107 aa, Zea mays
  Clone ID: MRT4577_53165C.1.pep
QRVRHTRRGGCVVSSLCQGGTPSSSSYSAASMELFHGDRVEESWEMRTTRKNGAGNRIPATGVHVMPKIAQSLFVHANRQVGFYVFARVNFSSQFPLLRRLLAEQHP

SEQ ID NO: 318080 - protein, 396 aa, Zea mays
  unsure (1)..(396): unsure at all Xaa locations
  Clone ID: MRT4577_53166C.1.pep
MEIFQLHLMILPSLLTCFFSTLLLTQLMAAGAAEATVKVSTTPIFPEIPLGQARKDFQVLLRVEAPAAVVRPEERVPIDVVAVLDVSGSMNDPAAVPPERRTTTSRLDLLRTAVKFMVDKLEDGDRLSIVAFSDRPVRELSSGLLYMTADGRRNAIRSVDRLEARAGSGTALVPAFEEGVNILDERVGDGRDRLGFIILLTDGEGTTVSALSERRREVIRRALGRYPVHAFGLGAAHDPEVLLHMAQESHGTYSFVDDDSIGEVAGALAVCLGGLSTVAAVDTRVVLKADELNGVRIDRVDAGGYDSSVSCGGTSCEVSVGDXLYAGEAKHFVVHLHVPAALPSSSAKGGYYCDGLGACDRYYHHRHEQHLLAVDYSYRNHPSARAIEGEGHDVYV

SEQ ID NO: 318081 - protein, 126 aa, Zea mays
  unsure (1)..(126): unsure at all Xaa locations
  Clone ID: MRT4577_53167C.1.pep
MDLSYALFXAPGTVLQDGAYEYQNLFDATVDSFYVAMANHGGSGVTLVVSESGWPSAGGVAASPENAAIYNQNLINHVGRGTPRHPGAIETILFSMFNENLKQSGVEQNWGLFYPNMQRVYPIKFN

SEQ ID NO: 318082 - protein, 242 aa, Zea mays
  Clone ID: MRT4577_53168C.1.pep
EGSTFTSTRFELTVAEKNILLEVEPIKLRVRSIFREACDGVRLNPEDEKFILEKVLEHHPEKQSKVSGEIDYLTVNKHQTFQDTRCFFVVSTDGSQADFSYLKCLENFVRKSYTEDADTFCMKYLRPRRRQAPPADVGTASGAPDEVPPSTAAETEQGTPPAPQAEVPQETWGSPAVPLEGGTHIAGPDSTGDAVILGEQHDLTPASPAVAPQVASEPDTTDGTGLLGKAPQADWGPRFDAD

SEQ ID NO: 318083 - protein, 100 aa, Zea mays
  Clone ID: MRT4577_53169C.1.pep
YPEEVVGLEATSWARPAPPAAHPAPPAASASPPALGASGRKLPRNGSVSGGPADCVGLEMAMGKYLPGITTPYTYPRHKNNPTGSPIYTGGYRFTPIPIP

SEQ ID NO: 318084 - protein, 130 aa, Zea mays
  Clone ID: MRT4577_5316C.1.pep
FYDGKLWNLNNYRTDVMQALGAVEGILEHTLSKGTYSPTRQGLYWEKASRLQESLKYMKLTDAQRSGLNQIHTGRFTLRWIPTIYRAKVYVGSQVQLDLTGIFMHGTIHTLKISLIHIFRAHLGQKTHVR

SEQ ID NO: 318085 - protein, 58 aa, Zea mays
  Clone ID: MRT4577_53170C.1.pep
AHASAPESSEDPPQVTEQDRRGQHSPLALAGGEAALSERTSPSPHPHPHVPLQVVLQP

SEQ ID NO: 318086 - protein, 153 aa, Zea mays
  unsure (1)..(153): unsure at all Xaa locations
  Clone ID: MRT4577_53171C.1.pep
EYASDELSGFRGLVLDLSYRPVNVVCWKRAICLEFIGKXQAHVLEYYDQTVSSPSGSFYIPAVLRVPQLLQVVKRRRVKQSLSRKNILYRDDFTCQYCSCGDDLTIDHVIPISRGGKWEWENLVTACARCNSRKGQKTLEQANMNCASPGPLP

SEQ ID NO: 318087 - protein, 93 aa, Zea mays
  unsure (1)..(93): unsure at all Xaa locations
  Clone ID: MRT4577_53172C.1.pep
KPSENAXELALNIANLNPQRTLFFEDSTRNIQAGKRVGLHTVLVGTSQRCKGADYALESIHNLREAVPELWEADIKSEAAYPGKLAVETSVTA

SEQ ID NO: 318088 - protein, 65 aa, Zea mays
  Clone ID: MRT4577_53173C.1.pep
SEKVKPVPYYVQGFLLSQRKSNKKKKEKKKKKKKKKKKKKKKKKKKKKKKKRRSERGTGRATTEP

SEQ ID NO: 318089 - protein, 245 aa, Zea mays
  unsure (1)..(245): unsure at all Xaa locations
  Clone ID: MRT4577_53174C.1.pep
MGAAQLVILFLALATAVGAPPSEVAVGALFTYDSTIGRAAKLAIELAVDDVNSDGKVLPRTQLNLVPQDTNCSGFLGTIEALQLMEKNVVALIGPQSSGIGHVISHVVNELHVPLLSFAATDPTLSASEYPYFIRTTISDYFQMNAIASIVDYYQWKRVTAIFVDDDYGRGGVEALGXDALALKRAKISYKAAIPPNSNTDVINDVLFKANMMESRVMIVHVNPDTGMRIFSVAKNLQMMASGYV

SEQ ID NO: 318090 - protein, 49 aa, Zea mays
  Clone ID: MRT4577_53175C.1.pep
ELGARVFAMDSFSRNAGDKLDRLPFPYNRARQASIPPEVFEIIFGASAL

SEQ ID NO: 318091 - protein, 65 aa, Zea mays
  Clone ID: MRT4577_53176C.1.pep
FHISVIPLLSTLGSTHKYPRLKRSTLLLERGPNDYLETGLNLYFRLMDLPTPLSGRPDMPWAHAE

SEQ ID NO: 318092 - protein, 82 aa, Zea mays
  Clone ID: MRT4577_53177C.1.pep
KRFFSALLYIWLLAAVFISVWGSKVFLFFFGGKGAPFENNPAKVLGPPLKKKKKKKKKKKKKKKKKKKKKKKKKTKKKKKKR

SEQ ID NO: 318093 - protein, 257 aa, Zea mays
  unsure (1)..(257): unsure at all Xaa locations
  Clone ID: MRT4577_53178C.1.pep
MNGGGSGLAPNAAHTADEVFRDYKGRRAGMIKALTTDVERFFKLCDPXEKENLCLYGYPDETWEVTLPAEEVPPEIPEPALGINFARDGMNEKDWLALVAVHSDSWLLSVAFYFGARFGFDRETRRRLFSLINNMPTIFEVVTGAAKKQAKEKTPNSSSKSNRPSSKVQSRAESRSKAKVPQDEEESGDDDEDEEADEHNNTLCGTCGTNDSKDQFWICCDNCEKWYHGKCVKITPARAEHIKQYKCPDCTNKRARA

SEQ ID NO: 318094 - protein, 288 aa, Zea mays
  Clone ID: MRT4577_53179C.1.pep
MNGGGSGLAPNAAHTADEVFRDYKGRRAGMIKALTTDVERFFKLCDPGECARSLWFLAPGCGVIAEEASVVFLLGLRCFEKENLCLYGYPDETWEVTLPAEEVPPEIPEPALGINFARDGMNEKDWLALVAVHSDSWLLSVAFYFGARFGFDRETRRRLFSLINNMPTIFEVVTGAAKKQAKEKTPNSSSKSNRPSSKVQSRAESRSKAKVPQDEEESGDDDEDEEADEHNNTLCGTCGTNDSKDQFWICCDNCEKWYHGKCVKITPARAEHIKQYKCPDCTNKRARA

SEQ ID NO: 318095 - protein, 59 aa, Zea mays
  Clone ID: MRT4577_5317C.1.pep
PPQFPLVLINHRPARGVCPPRLFSPPAGVVNPPSSRRGGGVFITRFLVGNQVTPPFSQN

SEQ ID NO: 318096 - protein, 428 aa, Zea mays
  Clone ID: MRT4577_53180C.1.pep
MYGVGGGFNAPSTAASRRRNPGDEEEDEEDEGGEGRVLEAWERAYADERSWESLQEDESGLLRPVDTKTLVHAQYRRRLLLRSAAAAAARIQKGLIRYLYIVIDLSRAASEMDYRPSRMAVVAKHAEAFIREFFDQNPLSHVGLVTIKDGIAHRLTEIGGSPESQIKALMGKLECSGDSSLQNALDLVHGYLDQVPSYGHKEVLILYSALNTFDPGDITETIAKCKKSKIRCSVIGLAAEIFICKHLCEETGGSYTVALDESHFKELLLEHAPPPPAIAEYAAANLIKMGFPQRGAEELISICSCHKKIKSGAEGYICPRCKVNVCELPTECRTCGLTLVSSPHLARSYHHLFPVPPFDEVTPVPNRIQRGGQICFSCQQSLYNPDGQSNLHVRCPKCNQHFCLDCDIYIHESLHNCPGCESQRSIAS

SEQ ID NO: 318097 - protein, 257 aa, Zea mays
  unsure (1)..(257): unsure at all Xaa locations
  Clone ID: MRT4577_53181C.1.pep
MDGGGSGPAPNAAHTAEEVFRDYKARRAGMIKALTTDVERFFKLCDPEKENLCLYGYPDETWEVTLPAEEVPPEIPEPALGINFARDGMXEKDWLALVAVHSDSWLLSVAFYFGARFGFDREARRRLFSLINNMPTIFEVVTGAVKKQQAKEKTPNSSSKSNKPSSKVQSRAESRSKAKVPKDEEESGDDDGDEEAEEHDNTLCGTCGTNDGKDQFWICCDNCEKWYHGKCVKITPARAEHIKQYKCPDCTNKRVRA

SEQ ID NO: 318098 - protein, 47 aa, Zea mays
  Clone ID: MRT4577_53182C.1.pep
VRNLTFGAANGHSKGKESAPARSPARDRKSRRFTRASSAVPSIVSQT

SEQ ID NO: 318099 - protein, 83 aa, Zea mays
  unsure (1)..(83): unsure at all Xaa locations
  Clone ID: MRT4577_53183C.1.pep
IRSIFGCGAFFRFFATSYQKKKXRSCCICGSKTLSWGPLNLWCQPTHSGQPPCEESPARFFTKKTGPPPWAGKGAPENSFAFS

SEQ ID NO: 318100 - protein, 492 aa, Zea mays
  unsure (1)..(492): unsure at all Xaa locations
  Clone ID: MRT4577_53184C.1.pep
MPTPTTAPPPRSPRSPPARPPAENPNHRLDRRDPRRPERHDPRLHARMPKTPTTAPPPRSIPAAPNAMIPACTSACRKPQPSHPSGRERREPRARFAAAKAEANKRKRLIPFPSHDSQLSAASRHRNLAVTPQIPISATASREDEPPPQPPPAYNIIPIHDVVMQGEHPSLRFPEVRAAVEALAHAADLPPPPLARGWDAFRADLFDWLGATCGFQLDNVRNQREHLVLLLANAQLRAGGTLPTDHPADVLHHSIARDIRRKLLKNYKTWCSYLGKRPHVHVPSGGRRVAQGVGPDTRRDLLYTALYLLIWGEAANLRFMPECLCYIFHYMXALDLNHVIDQSIDIETGRPSVPAVHGVDAFLDKVVKPIYDVLEAEVKFSRNGTKPHSAWRNYDDVNEYFWSRRVFRRLQWPLSPARSFFIKPGNPGRIGKTGFVXQRSFWNVYRSFDRVLVMLILFFQAAMIVAWDGHTPWFSLLYRDIQIRVLSVFITW

SEQ ID NO: 318101 - protein, 68 aa, Zea mays
  Clone ID: MRT4577_53185C.1.pep
GPSRVPALKGKTLRGFFFSSIGQELAPFPRPPPVPSQFWFWQKTGPLGLFFVLPLGPMGFKGGPRGFF

SEQ ID NO: 318102 - protein, 113 aa, Zea mays
  unsure (1)..(113): unsure at all Xaa locations
  Clone ID: MRT4577_53186C.1.pep
PXSPXIPAAPTPDPRLHARCRNPTTAPPPRSIPAAPNAMIPACTSACXKTPAKPSLRPGAGGPRARFAAAKAEANKRKRLIPFPSHDSQLSAASRHRNLAVTPQIPMYSSCSR

SEQ ID NO: 318103 - protein, 55 aa, Zea mays
  Clone ID: MRT4577_53187C.1.pep
MFLTRTEYDRGVNTFSPEGRLFQVEYAIEAIKRRHACQPIPFFKALWHFLMPLRI

SEQ ID NO: 318104 - protein, 61 aa, Zea mays
  Clone ID: MRT4577_53188C.1.pep
FNPGHVNRIGSFVPFLFCNYASIVLAFAVGIGSVIGGRLDSDRNVKELIAFILYCLLEHIT

SEQ ID NO: 318105 - protein, 72 aa, Zea mays
  Clone ID: MRT4577_53189C.1.pep
WTGACVQSSAFKKSSFMVKLLVAFPPPAQISGLESPISLVVPLVSLPPFPLKFARGGWFPLEVSHFYKDFWF

SEQ ID NO: 318106 - protein, 230 aa, Zea mays
  Clone ID: MRT4577_5318C.1.pep
MSPSEPTREESVYMAKLAEQAERYEEMVEFMERVARSAGGAGGGEELSVEERNLLSVAYKNVIGARRASWRIISSIEQKEEGRGNEAHAASIRAYRSKIETELARICDGILALLDSHLVPSAGGAESKVFYLKMKGDYHRYLAEFKSGAERKDAAESTMNAYKAAQDIALADLAPTHPIRLGLALNFSVFYYEILNSPDRACNLAKQVCFFSFYPHFVICFHFETLCDLF

SEQ ID NO: 318107 - protein, 197 aa, Zea mays
  Clone ID: MRT4577_53190C.1.pep
MEETAAAAPAEKASSYRYWVREATGDAAPLPVPRKLDPAANGNGNPPPLGSVWNQAGTWEEKNLNSWANSRIKDLLGSLGSLKFPTGNASVDEVSKCSGDAFQVTVRNKKRVGYNYELSLRFKGEWLVKEENKKIKGHLDIPEFSFGEIDDLEVQVRFSDDKGLASDDKARICKDLKSFMAPIQEKMRVFEEELKGR

SEQ ID NO: 318108 - protein, 93 aa, Zea mays
  Clone ID: MRT4577_53191C.1.pep
TWILLKGRPFFFFFCLRCTGLTVINGHLMTRNAPNQISKGVRYGLARGGQGGTIGVLARGLGYFFPGWIQNGNNIDNSKTIRVPHIPGQGNTT

SEQ ID NO: 318109 - protein, 189 aa, Zea mays
  unsure (1)..(189): unsure at all Xaa locations
  Clone ID: MRT4577_53192C.1.pep
PPSSSDKDVEDAKEDAYITAKRINERFGLEGYEPIIIIDCHVPFYEKAAYYALAECCIVNAVRDGLNLVPYRYTVCRQGSSKLDEALEIASDFPRVSALVVSEFIGCSPSLIGAIRANPWDIDAVAEALNLAITMPVGEKQLRHEKHYRYGSSHFLAYWTRSFXQXQRXTGKDHYSNRCWGIGFGPNFR

SEQ ID NO: 318110 - protein, 257 aa, Zea mays
  Clone ID: MRT4577_53193C.1.pep
MAQTLSNAPSVFTTRKVGAPHTLEHRVYIEKDGVPVSPFHDIPLYANEQQTILNMVVEIPRWTNAKQEISKEETLNPIKQDTKKGKLRFVRNCFPHKGYLWNYGCFPQTWEDPNVTHPETKMNGDNDPLDVCEIGELVAKVGEVKQVKVLGVMALLDEGETDWKIIVIDVNDPLAPRLNDVEDVERHLPGLLRATNEWFRIYKIPDGKPENQFAFSGECKNKKYAMDIVRECAESWEKLITGKTPKGDINLTNTLVP

SEQ ID NO: 318111 - protein, 52 aa, Zea mays
  Clone ID: MRT4577_53194C.1.pep
LFGRTNAPQIWLRYAAAGAVFRLALGSPTSNYPDHFSGYLVHGIKAKTIIYK

SEQ ID NO: 318112 - protein, 118 aa, Zea mays
  Clone ID: MRT4577_53195C.1.pep
RTNLKKRALTAKKNEQAAKGKSKQQTPRDRKKQSGRKKKTGGRQHEQTGQYRPNRESQRKKEPLQKGRNRLAQEERIQLHWAGRGLPWGGRAKDGEGGLRRDKEGSCGEPHFPGGAPP

SEQ ID NO: 318113 - protein, 57 aa, Zea mays
  Clone ID: MRT4577_53196C.1.pep
GVGIISFIGAKMVTGYWVSNLGLKAPLLLDLGGLQRFFKVFIGRGVDRARPFIAGKI

SEQ ID NO: 318114 - protein, 82 aa, Zea mays
  unsure (1)..(82): unsure at all Xaa locations
  Clone ID: MRT4577_53197C.1.pep
SRQWPINDRFHLVNTYIPCVTDHKPKSQLLREKKNCPQEFNKSLSSMRSXCTRSSYLLHDTMHFVPDTLFYSKFLAGLSPSP

SEQ ID NO: 318115 - protein, 64 aa, Zea mays
  Clone ID: MRT4577_53198C.1.pep
SISRSRKRAHALQENPTRIGIRLYLRKMLTCMSMGHTLSVTRPTAPCPSCTHTHTHIFLTAFDK

SEQ ID NO: 318116 - protein, 42 aa, Zea mays
  Clone ID: MRT4577_53199C.1.pep
RVLLYKAVSCPIVKDRWICRSLQASARRVVAGPDRTRGRKRG

SEQ ID NO: 318117 - protein, 85 aa, Zea mays
  unsure (1)..(85): unsure at all Xaa locations
  Clone ID: MRT4577_5319C.1.pep
XXKKKKKKKKKKKKKKKKKKKKKKKKKKKKKKKKNFFVGGNPVPWGRGTPPPFIWEIFPGIGLVLDIFPWKFAKPKNFTICGFRP

SEQ ID NO: 318118 - protein, 82 aa, Zea mays
  Clone ID: MRT4577_53200C.1.pep
LARTRARAGTDMGRPTHAFFFFLLYTFPLEGSKFNPFTLSSAEGATDTPTPPFDGAPIRLALSQPQSLYSPFGTTSDPARGR

SEQ ID NO: 318119 - protein, 101 aa, Zea mays
  Clone ID: MRT4577_53201C.1.pep
HWYLEPAGCICSRCRELCRITRCRTLLSLLGAMDTSPVLILPVLLDSLCNLPSSTRVTLDTSALLPSPSTLSSYRDPSRPHERFGFRQSFVPRDLTNGIHA

SEQ ID NO: 318120 - protein, 60 aa, Zea mays
  Clone ID: MRT4577_53202C.1.pep
ITTLLYMSLMSPVYFVKTLCLPKVHHISFLVSASYVQDKFNILHGYAFICYVWVHLPRKC

SEQ ID NO: 318121 - protein, 218 aa, Zea mays
  Clone ID: MRT4577_53203C.1.pep
GRCGSDTRDSKGKLIDYQGESPDEQALAYAAASYGIVLVERTSGYIVIDVLGDRQRFDILGLHEFDSDRKRMSVIVGCPDKTVKLYVKGADSSVFGITNNSSELDIVRATEAHLHKYSSLGLRTLVVGMRKLSQSEFEEWQLAYENASTAVLGRGNLLRSVAANIEINVNILGATGIEDKLQDGVPEAIESIRQADIKVWILTGDKQETAISIGYSCK

SEQ ID NO: 318122 - protein, 139 aa, Zea mays
  unsure (1)..(139): unsure at all Xaa locations
  Clone ID: MRT4577_53204C.1.pep
KNLSSELVFLDKHIPRRRVPVGKTKVPRFKVSFVLEASXXLYKALGLWLLLSPKKAGLVSVXPPMLYVSSVFHRSVVEVPKKGTEPAAASAVLKMVVGASLGTSTHCFFRADPPLVFLTQKNXAGVVLLGAHVVNPLLV

SEQ ID NO: 318123 - protein, 315 aa, Zea mays
  Clone ID: MRT4577_53205C.1.pep
MRGILSSSSALLRRAGAQLSRTDCSSASASATSPLRRSPLQGRMVEIYGKEAARETTLALHVIGRVGKNGGYCAYIDAENAFNPSFAESIGVDSERLLIAQPDSAENSLSIVNTLVGGSVAVVVVDSVAALIPKCEIEGEIYTNCGDIQSHLMTRALRKIQYTLCRSETLIIFVNQVRTKRTSSNPGIYKEVPCGGNALGFYAAVRMRTSRRELRYSEDEATGVGISVQIIKNKLAPANLKKEAGIDITFGKGICHESEILETASSVGVILKDGCGYWINNEFLAGKVEAEKFLRENAAVADEICNTVRNEFLQR

SEQ ID NO: 318124 - protein, 97 aa, Zea mays
  Clone ID: MRT4577_53206C.1.pep
PSQQEVSIGNGCDDHTVRLVRHDPTCEEADDMLKEASDLLDVTAHHVHMYSQVRMVLSPSSHPLDSMIPNGLPGLRTPLQATGVTWAKTIAGQSGRQ

SEQ ID NO: 318125 - protein, 210 aa, Zea mays
  Clone ID: MRT4577_53207C.1.pep
MRGILSSSSALLRRAGAQLSRTDCSSPSASATSPLRRSPLQNGKRDTFCSLWFKGRSVSTTVDMQLDYESDPPLDDTKAIEKESSLNVAVSQLAIDFDRDSNLCLERFSRARKASVVSTGSLKLDLALGVGGLPKGRMVEIYGKEASGKTTLALHVIKEAQKNGGYCAYIDAENAFNPSFAESIGVDSERLLIAQPDSAENSLSIVNTLV

SEQ ID NO: 318126 - protein, 468 aa, Zea mays
  Clone ID: MRT4577_53208C.1.pep
MQSSVVMLSSTVAAAAMASLRTLPLPVLVPLVASGLVFLATVLRRLLRRQRPVYLLNYSCHLPDAERQVNLEVCEYFGLKCRRYSDDIADFMRLVYSKSGLGQETFAPPFIYSGKFEKTLAFAIQEAEEGLFAVVEQLLAKSDVSPSDISVLVVACSMFSPMPSLASMIMHRFNMRPDVKSYSVAGMGCSAGTVGIDTAARSLRSRRTPGYALVVVTENTSLNWYFGKNKHMLVTNCIFRVGSAAALVTDVPSRRPDAKYELVRTLRTHHGADDAAFNAALQMEDEEGNLGVALTKDLVRVAGAALRRHITTLGPQVLPVSEMLRYAWRVARAYAAGNSKAAAAEVPDFQRAFEHFCIHSGGKAVIDSIARLMGFGPYVVEPARSTLHRFGNTSSSLVFYELAYFEAKRRVRAGDRLWMLAFGTGFKACSNVWRALRDAAPDADNPWNGCVHRYPVPPPPPSKTHKHA

SEQ ID NO: 318127 - protein, 22 aa, Zea mays
  Clone ID: MRT4577_53209C.1.pep
LATRVINTINYDVWRLTKTGFL

SEQ ID NO: 318128 - protein, 46 aa, Zea mays
  Clone ID: MRT4577_5320C.1.pep
TFGEKPGHFFGPKKKKKKKKKKKKKKKKKKKKKKKKKKKKKKKKKK

SEQ ID NO: 318129 - protein, 65 aa, Zea mays
  Clone ID: MRT4577_53210C.1.pep
HRNEVGGVPYTTLHRTMPGAYVQSQPVCTAGSNSEGVQLTQVHVTVTHSNSTSINHYSNYTGKRA

SEQ ID NO: 318130 - protein, 74 aa, Zea mays
  Clone ID: MRT4577_53211C.1.pep
PTRPDLLASSARGETVDLTRHLIRLSNTSIIRMVASTVPGSVTDEAQDVVKDVAELVGAFNVDDYISLVRGWDL

SEQ ID NO: 318131 - protein, 65 aa, Zea mays
  Clone ID: MRT4577_53212C.1.pep
TFAPPFHVELYSKDPPPFKIVVAGDTEVDLMGQTRPMGDRIILPIKGLAPKFNSPSLNPLFRIES

SEQ ID NO: 318132 - protein, 35 aa, Zea mays
  unsure (1)..(35): unsure at all Xaa locations
  Clone ID: MRT4577_53213C.1.pep
FYFIFIXGNQISSVLQLSKVLKHKKTTIHNHVIEN

SEQ ID NO: 318133 - protein, 94 aa, Zea mays
  unsure (1)..(94): unsure at all Xaa locations
  Clone ID: MRT4577_53214C.1.pep
MTRISFLRGDQYAIALALLDEGKVVLGVLACPNLPLSSINNINGNSSGDKVGALFSATIGCXAEVESLDGSPPXKVIAFILINNLKFLTYLLSY

SEQ ID NO: 318134 - protein, 45 aa, Zea mays
  Clone ID: MRT4577_53215C.1.pep
SHTQRSLIRTGVGEHCCSRYGVYCTRQSMVTSLRRLRCVLHEGRV

SEQ ID NO: 318135 - protein, 73 aa, Zea mays
  unsure (1)..(73): unsure at all Xaa locations
  Clone ID: MRT4577_53216C.1.pep
MQALSGAGHIPXHXPPVMPLGTMNPCMQYCMMQQGLASLMACPSLMLQQLFSLPLGVGPXXXPXXITPNXXSP

SEQ ID NO: 318136 - protein, 774 aa, Zea mays
  Clone ID: MRT4577_53217C.1.pep
MRHEGPGLSIRHDAAGSMAGAIFMSNSVTRDQCFQASIFGLPLEYRSFVSHIRKGMPLFLFDYTLRKLYGVFEAASDGGFNINSDALRSVRRSYPSQVRINIIWKCKPLSEDEFFPAIEDNYYRPRKFYFDLSYEQVVRLYELFGNKRVGRPIHDYQKNECLQTNRSSKGIPDKKSLTPDPHSSNQSRLLVPNISEIIRYSTPTSIHTDLPLNVEAYPSTLMPLGTEVNGAKIAPTFSSHSDQIEPFSQSEFFPAASMTDAVSTQVSAPCSETNNQLVGQSHPLPHNYPQNIFSAGFTAQDPIEGSKFVANQLYSLCRDYMHDGLLTSGYGTQNRTYKGMNHLNSTCPPYDPLHPFLPVSNNFDYQAQCDIYSNQGCPDTCNDICAYECECLSEEVVAAEELNQRGISTCPQVLGWDGKAVSAIHQQNMCSTDYFQIFDRDEDSENDQMKHGTHSNASDSSDRENGIVDPRHTQHAVGTENNTKDQCSQPKKGVFSRLSVRKELTSQDATGSTLNQLVSSLVRKTEQWSHNNRPIEDGLIIPLIGEQADCSHAALNLLSELELDKDVSIEPQLPFLNFKRRSEAGKVDANLGKEISGKMKRRKLVRPSLGENNDSTNFGEQLIGNCTQDKNQNHQESENHFDIDLNIPAAPIDDGPVEVNRIAVCPSVVIKVQTEKPYEIDTNKVNSNVMETTEEHDPSSAPTQKVIPDFNMADLNTMDESKLRTILEHTSSLLQALAEVKNGESNNCEQAKSSFEDKKVNMAYSDGATKSECD

SEQ ID NO: 318137 - protein, 51 aa, Zea mays
  Clone ID: MRT4577_53218C.1.pep
RHAPPRPVLVVVLPASATPVCLELRDEPVPAPRPPPSVRPRVSTRVRPRVR

SEQ ID NO: 318138 - protein, 93 aa, Zea mays
  Clone ID: MRT4577_53219C.1.pep
EVLVPFALQKKKVDIVVVGINTGHVVTKRELPLRPSYRMGNASNRASMVMGLIREGAGFAPHEKRITELLKGGKDKRALKLAQKKLGTHKTCL

SEQ ID NO: 318139 - protein, 141 aa, Zea mays
  unsure (1)..(141): unsure at all Xaa locations
  Clone ID: MRT4577_5321C.1.pep
AQRRREGRGTRRKKGRAXGKXXSRHGAKKEXRSHXXGPDAAXKTTRRGGRKHDENDTTTPTNGDKXETXENKNXSPXDRDXGXQDKNRXXXRXDXQNTQGXXGXXDSKDRDXXXEARXEPHRKXNEXEXRXXXXXAXANKQ

SEQ ID NO: 318140 - protein, 587 aa, Zea mays
  Clone ID: MRT4577_53220C.1.pep
MPTASSAHRSLLLCLCLALLSNPVAASPSPRGLRFSAKDIAAVEAALPRHGSRASSSSKTTFFEVDRPLRPPRGSSGPCSTLLLSHSFAFTLTKPPVTAAYSPPPCLSGSDAPPVSLAVLEWRAECRGAQYDRTFGVWLGGAELLRGSTAEPRPGGVVWSVSKDVTRYAALLAAGNATLAVYLGNLIDDTYDGVYHANLTLHLYFRRGVRPSAAAAAADAVVPVSRSLPLNDGLWFVVQNDTDVQSARVSVPRNAYRAVLEVYVSSHDADEFWYMNTPEQNGPFREVTVLLDGAVVGAVWPFPVIYTGGINPLIWRPITSIGSFNMPTYDIELTPFLGSLLDGEEHELGFAVTNAQRSWYVDANLHLWLDPKSSRTSGGLVAYHAPKLAGSIVSRSADGVDGEYAATASRNITATGWVSSSRGNVTTTFAQRLSFSNTNVVSGQGSAQAINQTTDALTAVSGGPAPAQVHQSFPLYIFLGGDGSGTSSQRLMRRVEIGFDETRSRGGGGAGGEGAASTTTSTLRNSQVAAAEVTLRDDAVVGASWRMHQTYEYGASDGGCYLRNVSSVGYDVLFDHRDASCAGTLGR

SEQ ID NO: 318141 - protein, 104 aa, Zea mays
  Clone ID: MRT4577_53221C.1.pep
AEGSGTDIVLNTIIFNSFVFCQVFNEISSREMEKINVLKGMTRNYVFMAVLSSTVIFQFIMVQFLGEFANTTPLTIHQWLASVLLGLAGMPIAAAVKLIPVGSS

SEQ ID NO: 318142 - protein, 90 aa, Zea mays
  Clone ID: MRT4577_53222C.1.pep
QGLELVVSETGWPSGGGGDGATVENAAAYNNNVVRHVGGGTPRRPGKAVETYLFAMFNENGKAEGVEQHFGLFQPDMSEVYHVDFTAASS

SEQ ID NO: 318143 - protein, 65 aa, Zea mays
  Clone ID: MRT4577_53223C.1.pep
KKKKKKKKKKKKKKKKKKKKKKKKKKKKKKLKKKKFCNFSRAPFSNGQKFGIFFSPFPVFLFLGV

SEQ ID NO: 318144 - protein, 667 aa, Zea mays
  unsure (1)..(667): unsure at all Xaa locations
  Clone ID: MRT4577_53224C.1.pep
GIIGPIGLFFAVITFIVLSQGLFSKKSHEQMLLSWSGDDALELLEHFAIAVTIVVVAVPEGLPLAVTLSLAFAMKKMMNDKALVRHLAACETMGSATTICSDKTGTLTTNHMAVVKACICGNIKEVNGSQNASKLRSELPEIVIKTLLESIFNNTGGEVXVINQDGKYQILGTPTETALLEFALSLGGDLKAKRDETKIVKVEPFNSTKKRMSVILELPGGGCRAHCKGASEIVLAACDKFVDETGGVHPLDKITADKLNGIIDSFAGEALRTLCLAYKDMEEGFSNANHIPLQGYTCIGIIGIKDPVRPGVKESVATCRAAGIMVRMVTGDNINTAKAIARECGILTEDGIAIEGPEFREKSLAELLELVPKIQVMARSSPLDKHTLVKHLRTTFNDVVAVTGDGTNDAPALHEADIGLAMGIAGTEVAKESADVIILDDNFSTIVTVAKWGRSVYINIQKFVQFQLTVNVVALLVNFSSACFTGNAPLTAVQLLWVNMIMDTLGALALATEPPNDDLMKREPVGRTGKFITNVMWRNILGQSFYQFFVMWYLQTQGKNFFGLEGSGTDIVLNTIIFNSFVFCQVFNEISSREMEKINVLKGMTRNYVFMAVLSSTVIFQFIMVQFLGEFANTTPLTIHQWLASVLLGLAGMPIAAAVKLIPVGSS

SEQ ID NO: 318145 - protein, 79 aa, Zea mays
  unsure (1)..(79): unsure at all Xaa locations
  Clone ID: MRT4577_53225C.1.pep
GSPTRPVNQGNQSVLPYCSSWVVICAVLLVMKTVSIAMRSFSAXFQIXSTLINGLILITFTAIATILITIPAMTGLDIF

SEQ ID NO: 318146 - protein, 103 aa, Zea mays
  Clone ID: MRT4577_53226C.1.pep
AEIYSFRVPEAASKDKAYLSRRGPDSADSEKKDMKRVHPNTAGLVDDPNESPNLGKDWENDWIVEADAAPRWDSYPPLDEDMIHAERSKDNLKEVYDNMHVRD

SEQ ID NO: 318147 - protein, 213 aa, Zea mays
  unsure (1)..(213): unsure at all Xaa locations
  Clone ID: MRT4577_53227C.1.pep
ACGQHTGKPCEHXVCFITAQQMRNVRMEDFVDHYYSVEKFRQAYCRMVEPLEDKSFWPKVDIASEVGAPLDRRCVGRQRENSIKSSLEGVSGKEASEKGKKMIRRRFKCPNCGELGHRKNSSKCPLNGTKKRKRAPRKNTTKGWFPKEVPTSSQAAPNITPPSDDVPASSEIVLTMPPPPGEDVLASSQIVQPMSPPREVVPTTEPISPPKDA

SEQ ID NO: 318148 - protein, 52 aa, Zea mays
  unsure (1)..(52): unsure at all Xaa locations
  Clone ID: MRT4577_53228C.1.pep
RPFPFHHRHNLGCAHTTIHLPSXPPPXPFHPCHARTXITLLEVEKYIFYVMN

SEQ ID NO: 318149 - protein, 80 aa, Zea mays
  Clone ID: MRT4577_53229C.1.pep
KTVSVAVRLHPEHGYDVTAAPEVVVNMEHGGHDEVLTTVSCLAFASKHGYMIFSFTHMSMLHNADMNHINVVQKIGDFHK

SEQ ID NO: 318150 - protein, 77 aa, Zea mays
  Clone ID: MRT4577_5322C.1.pep
AKTKCQGQRQVHYLVTQTGLVRRPQPYCYEQENLLLTLVNWCCKTFTGCTNSICFSTATCNAFFVASSSTSRGFIRS

SEQ ID NO: 318151 - protein, 81 aa, Zea mays
  unsure (1)..(81): unsure at all Xaa locations
  Clone ID: MRT4577_53230C.1.pep
ASPLGVNASLFQKKAPLFLGLSRSSGLLLPFLPDALTANLGPGKGCXIHLIPKARDPIRAGKXRPRCGLRMPRREARPTGP

SEQ ID NO: 318152 - protein, 758 aa, Zea mays
  unsure (1)..(758): unsure at all Xaa locations
  Clone ID: MRT4577_53231C.1.pep
MRFDLDGLPVHFPYAAIYPEQHAYMGELKRALDARGHALLEMPTGTGKTAALISLITSYSLANPARPLRLIYCTRTVHEMEKTLAELRLLFAHLPPAASRSLLALGLSSRKNLCIHPQASAAAARDSVDTACRRLTASWVREKASSDPDSTPLCEFYETFDRAAAAGDLASFMPPGVYTLADLRALGRERRVCPYFLARQMVKYANVVVYSYQYLLDPKVGRIVSSDMQKECVVVFDEAHNIDNVCXEALSVSIRKQTLEGAERNLRRISQEIDRFKATDANRLRAEYNRLVDGLAQRGNLPISDAWLANPSLPDDILKEAVPGNIRRAEHFLAVLRRLVRFLDGRLETENVENEMPVSFVASIHSQAGIDQKMLRFCYDRLHSLMMTLEITDTDEFMHIQTICDFATLIGTYTRGFSIIIEPYDDRMPDIRDPVIQLSCHDASLAIRPVFDRFETVVITSGTLSPIDLYPRLLNFNPVISRSFTMSLTRDCICPMVLTRGSDQLPVSTKFDMRSDPGVVRNYGRLLLEMASAVPDGIVCFFVSYSYMDGIVNSWHEMGILQDIMQHKLVFIETPDVVETTLALDNYRKACDCGRGAIFFSVARGKVAEGIDFDRHYGRLVIMFGVPFQYTLSRILLARLEYLRETFQIKEGDFLTFDALRQAAQCVGRVIRSKADYGMMIFADKRYSRHDKRSKLPGWILSHLHDAHLNLSTDMALHIAREFLRRMAQPYDKAGSGGKKTLLTEEDLENLAQDGMAM

SEQ ID NO: 318153 - protein, 106 aa, Zea mays
  Clone ID: MRT4577_53232C.1.pep
MQHEEECDTTTGGEGNGRGGEEELEMEGHSLMRMKRRDHLLLTDGAGAGPLAVQTPMEPMEFLSRSWSVSASEISKVLAGGVGGRRSSNFVVDRLSGMLMPETLAL

SEQ ID NO: 318154 - protein, 86 aa, Zea mays
  Clone ID: MRT4577_53233C.1.pep
RKGGRQPSTIRSTGGGHGAKKFWPEMVGVNLEKTQRVILLDKAHPEIVVLPVGTPVTMDFRPHRGWIFVDPVPEAPPLGLEFNLLN

SEQ ID NO: 318155 - protein, 69 aa, Zea mays
  Clone ID: MRT4577_53234C.1.pep
PKGGDKQLGSPYFIWTSKYYIHKTTTKDQLINKRRPAFIRERNKLLQGGLIETKASMPRGEILGFRRRQ

SEQ ID NO: 318156 - protein, 75 aa, Zea mays
  Clone ID: MRT4577_53235C.1.pep
TRKPGGPQRVEGHIQPNFRFNFDDGPKLTSFFELNLAQNYLFGLTPLDIGKLQELQTLLNLSNNNFRRPIPEGAN

SEQ ID NO: 318157 - protein, 74 aa, Zea mays
  Clone ID: MRT4577_53236C.1.pep
IWFHSFTDTLLALSSSVQVNIDQVSLAIQSCSHTCRSSVCPAASVSLVSRSIISVIVPKSVHSLGISRRKYPNI

SEQ ID NO: 318158 - protein, 75 aa, Zea mays
  Clone ID: MRT4577_53237C.1.pep
TCRALGRSRPVGLAILGQRRARPKEVDVVCSITSSKSRPLYENTYIKDIFYFFVHMYLSYSQIYCTYFSFVKLVI

SEQ ID NO: 318159 - protein, 111 aa, Zea mays
  unsure (1)..(111): unsure at all Xaa locations
  Clone ID: MRT4577_53238C.1.pep
QLAPQTLQQHASNNXVNKILXGNKADMNEIKRAVPLQRNKFSNTNMXIQFFETSAXKTSLXNTEYVFFSIPRDIERRLSETDATPEDQTIKIKDEGEADASQAHKSACCRS

SEQ ID NO: 318160 - protein, 90 aa, Zea mays
  Clone ID: MRT4577_53239C.1.pep
PGMPISCRLLWVQKCDQFTQNFNPTVYSSQRLREESSKPSREEQETGKLSIAEPRHSVSSSICRLIMYSSSARYLDAHSSTVLKSASEAF

SEQ ID NO: 318161 - protein, 69 aa, Zea mays
  Clone ID: MRT4577_5323C.1.pep
FIANCLFRIDRFWLPTIFTYSEYWPEIVSQFTPGAHFMSDTDTHTTRIHTYPPFAVWINTAPDTLPLMP

SEQ ID NO: 318162 - protein, 132 aa, Zea mays
  unsure (1)..(132): unsure at all Xaa locations
  Clone ID: MRT4577_53240C.1.pep
GPSIHRRFXNITTLPDIPDPALVSAQHSFSAKFYTMLRCLPLSAYCNLYHNCALASAWRYTRHSSVSPQTFDAAAHAPAGTPTTAPKAAPRMAPLPPPPELSPVTAPAPAVNSATVAAPFPLAFPSAPYIEG

SEQ ID NO: 318163 - protein, 127 aa, Zea mays
  Clone ID: MRT4577_53241C.1.pep
NSRYQDDSSDPRDLARWLDNVEARSPRRDGSIVSTGVGRQSPGHPHESPPPGAPNRRLTTRPDPANYSQTSNDHGKRRTALAAYFPLPYSLLTARVGEHATKLAPTDGRRGRQTQLLKGPRSGTPRS

SEQ ID NO: 318164 - protein, 95 aa, Zea mays
  Clone ID: MRT4577_53242C.1.pep
ATLQQPSGVLGPSHQIINMANPRVEELPDEEIPKAGVEDAGSDSESEAGEEPTIPGGAAVTIHSRNEKKARKAIGKLGLKHVPGITRVTLRRPKN

SEQ ID NO: 318165 - protein, 163 aa, Zea mays
  Clone ID: MRT4577_53243C.1.pep
PPAPWFSARLAGHGGYACLLAVDGSAQATVAPREMVRVPAPGFRFRRADLCSVLAIFSASDLWRRRKLVSHYCLVHASTRSWSRRPNSPTFYYQFDYHRCCVRSRSLSPGRPRRQASPCRSSFFAQQGFILSAVLQVHVLGGLAPPCRVRSSMLSTREDTGSR

SEQ ID NO: 318166 - protein, 270 aa, Zea mays
  unsure (1)..(270): unsure at all Xaa locations
  Clone ID: MRT4577_53244C.1.pep
MDDDAGDASPPPGPAPLAATGAPSLRDMAASPTSSRSVTETVNGSHRFVIQGYSLAKGMGVGKHIASETFTVGGYQWAIYFYPDGKNPEDNSAYVSVFIALASEGTDVRALFELTLQDQSGKGKHKVHSHFDRSLESGPYTLKYRGSMWGYKRFFRRTALETSDFLKDDCLRINCTVGVVVSTIDYSGPHSIQVPDSDIGYHFGSLLDSNEXGVDVILNVSGERFHAHKLVLAARSTVFRSKLFDDESEGDKTRVXESEDLKEIVLDDLE

SEQ ID NO: 318167 - protein, 116 aa, Zea mays
  unsure (1)..(116): unsure at all Xaa locations
  Clone ID: MRT4577_53245C.1.pep
RYSGNQHQQPLSQLRGAYPQQFLPFNQLAAMNSPVYFQQHXLVPFSQLAGVSPAGWVXHPQLLPFCQLAAPXAXKKLQLPPLLPFSQLEXTNLAVFYHQPIIVGALFRFHMSYVQI

SEQ ID NO: 318168 - protein, 52 aa, Zea mays
  Clone ID: MRT4577_53246C.1.pep
HKIKSLFSLRPDLFGGGVQRPNPRFKIPQISIFPYRFEKNFPVHEKGDIPGF

SEQ ID NO: 318169 - protein, 76 aa, Zea mays
  Clone ID: MRT4577_53247C.1.pep
SQMASSAAFAAYWAAVSAPGGAEGCCGVTRLGRYKDDSSDRPSPVAPETGGVLPPPPSFPLTEAVLPTENAFTEAA

SEQ ID NO: 318170 - protein, 180 aa, Zea mays
  Clone ID: MRT4577_53248C.1.pep
MDMFQEDTLSSATSSPASSLCTPSPHPHGSSWVQELSHDQQGLRLISLLYQCAAEVAAGAFDRANLYLEQITQLASLDAPHTLQRLAAVFADALARKLLNLVPGLSRALLPTGPGSPAEAHLVPAARRHLFDVLPFMKLAYLTTNHAVLEAMEGERFVHVVDLSGPAANPVQWIALFHAF

SEQ ID NO: 318171 - protein, 608 aa, Zea mays
  unsure (1)..(608): unsure at all Xaa locations
  Clone ID: MRT4577_53249C.1.pep
SSSANLLTGLQGKSQVVQDELARLGEQMVQSAEGTRAVALELCLVFEDKFLAHITGGEGXGWKIVASFEGKFPDRIKQLPLDRHFDLNNVKRIVLEADGYQPYLISPEKGLRSLIKGVLEMAKEPSRLCVEEVHRVLLDIVNAAANATPGLGRYPPFKREVIAIASNALDAFKSDAKKMVVALVDMERAFVPPQHFIRLVQRRMERQRREDELKNNRSSKKGQDAXLSKMNRASSPQTGSDEAGGNLKXKDKSNKQDNDTKEGPNLQVAGPGGEITAGYLLKKSAKNNEWSKRWFVLNEKSGKLGYTKKQEERHFRGVIVLEECNLEEIEEEEISKSSKDSKKANGQEKGPSLVFKITNRVSYKTVLKAHSAVILKAESMADKIEWIKKIKGVIQSRGGSVKGPTEDGPMRQSRSDGSLDTMARRPADPEEELRWMSQEVRGYVEAVLNSLAANVPKAIVLCQVEKSKEDMLNKLYNSISAQSNAKIEELLQEDHNAKRRREKYQKQSSLLSKLTRQLSIHDNRAASYGNDSSGAEGSPRSPGHSGEDWKSAFDSATNGSVDRSSSQHETRSKSADSRGRRHENGDANSGSRRTPNRLPPAPPNGGRY

SEQ ID NO: 318172 - protein, 74 aa, Zea mays
  Clone ID: MRT4577_5324C.1.pep
ISISLLSHATRHAYTYVEAFATQRCQHQVHAWHPAVCIASSTTSSFIGVTLRSYALVQYGGCSWRYPHEQQGSA

SEQ ID NO: 318173 - protein, 39 aa, Zea mays
  Clone ID: MRT4577_53250C.1.pep
GQNKHNTSFILLGVAYMMKDAQAHIIVGFSHVMSYLVCN

SEQ ID NO: 318174 - protein, 152 aa, Zea mays
  unsure (1)..(152): unsure at all Xaa locations
  Clone ID: MRT4577_53251C.1.pep
MHACKMMAGQNKRNIILMHKYEMGRLLGQGTFAKVYHARNTRTSVSVAIKVIDKGKVVKVGLVDQIKREISAMKLVRHPNIVQLNEVIATKTKIYFVLEYVKGGELLAKVKRGRLKGDVARKYFXQLICALDFCHSRGVYHRDLKXRNLLLD

SEQ ID NO: 318175 - protein, 36 aa, Zea mays
  Clone ID: MRT4577_53253C.1.pep
ARASLFYCYFMVVISHVSRRVDPGVDFKCVGRRQGG

SEQ ID NO: 318176 - protein, 92 aa, Zea mays
  Clone ID: MRT4577_53254C.1.pep
NLRGHFDTHFLNFGTILECMSERMNMHARCMLSCAWLLVGICRTKKRRESGYLEVIGRLVRDAELPNSTGERAIRWPCGGRLLTPRTKATRR

SEQ ID NO: 318177 - protein, 117 aa, Zea mays
  Clone ID: MRT4577_53255C.1.pep
ECHSCVKKEQFLQAFAKQYVEGDKVALRAAMLTSLGGRNLNNLAAKGSRSRISRWYARCTPAAGRSWSPQRRRSIGSGCPPSPSPRCPVLDGTAGSRVAVAEGEELWRRRGRRLVFP

SEQ ID NO: 318178 - protein, 326 aa, Zea mays
  Clone ID: MRT4577_53256C.1.pep
MIRAPRLLAAHAPSPIRHRQSVAPISTIYRRLPWSPRAAFLAAQAPTSPTRLASSSRLGPLLALPMDPAAPEPVPAPATDTDAETNGYEDASEFEDAEAGGEGAGAGTETGTGTGTGTGSGSGTMPAGGVAEMKELPEELAKGVVCLECETSAEAAVSGVGGTCRVYVVGTAHVSQESCDQVKAIINYLKPQAVFLELCMSRVAILTPQNLQVPTMNEMIDMWKKNKMNTFGIIYSWFLAKVASQLEVLPGAEFRVAFEEAMSYGGKVLLGDRPVQITLRRTWGKMSLWHRAKFLYYIIFQSVFLPSPEELNKMLKDMDDVDMLTL

SEQ ID NO: 318179 - protein, 77 aa, Zea mays
  Clone ID: MRT4577_53257C.1.pep
EKQNPPGIVGDFFLTVRLLVLISPEGYGCGGEIFVILNPGAPVIKPPPLFVGNKLLSTCGSFTKKFKCALVPCWGRV

SEQ ID NO: 318180 - protein, 61 aa, Zea mays
  Clone ID: MRT4577_53258C.1.pep
VLSTIFSNIYLLLYTPTAPDFCCSQVDDAIGVAQKVKSTIKSNWEDATPPMKELKFKPLDV

SEQ ID NO: 318181 - protein, 61 aa, Zea mays
  Clone ID: MRT4577_53259C.1.pep
TAILTFAFSGRQSWCSSCREGRSRRRHSVFRQMSKRGKFIKAMTLGDITMFAVTSLNTGET

SEQ ID NO: 318182 - protein, 88 aa, Zea mays
  Clone ID: MRT4577_5325C.1.pep
EFCFISSYKNLDPVQHTYKSSTLKNNYYYINNIKHATPIHVQRPWASFIPATSWPQRCKAVPGKRGRTQESRPQILTQHCRGISRAET

SEQ ID NO: 318183 - protein, 58 aa, Zea mays
  unsure (1)..(58): unsure at all Xaa locations
  Clone ID: MRT4577_53260C.1.pep
GNKIXRCKLGMKIFVVGGFVGHPLWTRGAVKTSILHSLCNGGSGNXXXXPLCIFPFPY

SEQ ID NO: 318184 - protein, 37 aa, Zea mays
  Clone ID: MRT4577_53261C.1.pep
PPPFIPSKCHGFVWSHHKRSENLVRLSQWIGYLVPYR

SEQ ID NO: 318185 - protein, 65 aa, Zea mays
  Clone ID: MRT4577_53262C.1.pep
DRQTLLRLQMVLSVDLCLRGKELLLVVRTLNPTTLNSGTDSSKAPGGPYRNSFGQTSTYHSPASS

SEQ ID NO: 318186 - protein, 59 aa, Zea mays
  Clone ID: MRT4577_53263C.1.pep
ATTDHAFLRKLTYYYLVSKFAIKNMARNSIDHAQKSSQVVPKHTISGSGFFTKSERETD

SEQ ID NO: 318187 - protein, 94 aa, Zea mays
  Clone ID: MRT4577_53264C.1.pep
APQCCVNLSLQLSMSGGVVIGLKFITGGSYLLSKATCNCPHYRKRCAPSRFRSDIPGVCRRSVHACPRMGRMSHVVCVVAPFGKYRCLLSACMS

SEQ ID NO: 318188 - protein, 529 aa, Zea mays
  Clone ID: MRT4577_53265C.1.pep
MKMEAPRSQKKAQRLTRCMAALSRFISRLGEKGLPFYKLLKKVDKFQWTSEAQEDLDALKKFLTTPPVLKPPRQATLTQPAEDLLLYISCTTHVVPDNPETAEVWQMYFDGSLKLQGAGAWILFTAPGGEHLRYALQLLFPASNNAAEYEALIHGLNIATSLGIKKLMVYGDSLVVISQIYKKWDLSNDSMGKYCTAVRKLEDKFEGLEFHHVERDRNTTADVLSKLGSSRTQVPPGVFVQEILHPSISLDRAEECNTLSQPESDSDDWRGSIIKYIKNKEEPDDKNAAECIVRQSAHYTLIGETLYRRGTSGVLMKCILSATGNQLLDEVHAGQCGVHATSRTLVGKVFRSAKAVEFIQDIIFRFGIPNSIITDLGSNFTSSEFFDFCEQKSIQIKYASVAHPRANGQVERANGMILEALRKKVFDKNEKFAGKWIRELPYVVWSLRTQPSRALHGNTPFFMVYGSETVLPADLKFGAPRLIFESITEAEATRLEDVDVLKEERLNTVIQSARYQQTLRRYHDKAIRH

SEQ ID NO: 318189 - protein, 92 aa, Zea mays
  Clone ID: MRT4577_53266C.1.pep
PSYALAPRGEEGSEGPSWPLRSHFHPREGISYYPSSGACPFRFLGVFRIPRMSAWIPRIARPPPPSRGRTLASTCAVRASTSSVRPRFGDME

SEQ ID NO: 318190 - protein, 874 aa, Zea mays
  unsure (1)..(874): unsure at all Xaa locations
  Clone ID: MRT4577_53267C.1.pep
MAVTFQHKIILCPGSIFCFGTISSVADEKGTLHRLADPPERKPSSEVSGKIGARQEKVQPPALLKKITSGKIGAEGPSARRTPLSTSPTKEWTRITRKKKAEGHQADLSAPPPSKENRKKIAVAATPFYPNALFIGRVESPPISDDEPTAPGEEPPQRESRRRRNRRRNIRRHHEAGERDPAQPVSRDEVSEIGETPEEPGKLLGFIVSHRGIEANPEKIEAIMRMEAPRSQKKVQRLTGCMAALSRFISRLGEKGLPFYKLLKKVDNEVLGPSKKKYPQVQKLLYAXSNCTQAPSLLRRPQSHSSHGISDXIFFTTKEPSGXAKWACELGSHDIEFQPRTAIKTQALVDXSYQSGPNNKYQITQKLQKYGECXFDASLKLQGAGAGILFTAPGGEHLRYALQLLFLASNNAAEYEALIHGLNIAISLGIKRLMVYGDSLVVISQINKEWDCSSDSMGKYCTAVRKLEDKFEGSSRTQVPPGVFVQEIPHPSISLNQAEECNTLSQSESDSDDWKRPIIKYIKNEEEPDDKNTTERITRQSAHYTLIGETLYRRGALGVLMKCILSATGKQLLDEVHAGQCGVHAASRTLVGKGLDMIGPFKKAQGGHTHVLVAIDKFTKWIEFKPIASLTLAKAVEFIQDIIFRFGIPNSIITDLGSNFTSSEFFDFCEQKSIQIKYASVAHPRANGQVERANGMLLEALRKKVFDKNEKFAGKWIRELPYVVWSLRTQPSRALHGNTPFFMVYGSEAVLPTDLKFGAPRLIFDDIAEAEATRLEDVDVLEEERLNTVIQSARYQQTLRRYHDKAIRRRSFAVGDLVLRRILTGEGRHKLSPLWEGPFIVAEVTWPGSYRLTQMDGTEIGNSWNIEHLRKFYP

SEQ ID NO: 318191 - protein, 365 aa, Zea mays
  Clone ID: MRT4577_53268C.1.pep
MKCILSATGKQLLDEVHAGQCGGHAASSTLVGKVFRSGFYWPTAKSDAAELVQRCEACQYLSKQQHLPAQQLQTIPITWPFACWGLDMIGPFKKAQGGYTHVLVAIDKFTKWIEFKPIASLTLAKAVEFIQDIIFRFGIPNSIITDLGSNFTSSEFFDFCEQKSIQIKYASVAHPRANGQVERANGMILEALRKKVFDKNEKFAGKWIRELPYVVWSLRTQPSRALHGNTPFFMVYGSEAVLPADLKFGAPRLIFENIAEAEATRLEDVDVLEEERLNTVIQSARYQQTLRRYHDKAIRHRSFAVGDLVLRRILTGEGRHKLSPLWEGPFIVAEVTRPGSYRLTQMDGTKIGNSWNIEHLRKFYP

SEQ ID NO: 318192 - protein, 63 aa, Zea mays
  unsure (1)..(63): unsure at all Xaa locations
  Clone ID: MRT4577_53269C.1.pep
LYFCYANNRNGGILPLSEHNLFAVMMYILSCRFRDGTDGVHXLFGSDEACQGRERSHSHQALP

SEQ ID NO: 318193 - protein, 41 aa, Zea mays
  Clone ID: MRT4577_5326C.1.pep
VRPTPLHPLRLQPTMTTYTAKLHFYCDASFLPPLYVINIIC

SEQ ID NO: 318194 - protein, 79 aa, Zea mays
  Clone ID: MRT4577_53270C.1.pep
SNIIGWAPTKNTFHRIYPVILILDNQNGLKGAPRPHLMEIFPMKQLSQVQQKEEEGPGGGVQQLHILNWAVPKLRGGGK

SEQ ID NO: 318195 - protein, 89 aa, Zea mays
  unsure (1)..(89): unsure at all Xaa locations
  Clone ID: MRT4577_53271C.1.pep
MSAPPPSVVFXCERQSSTSPPSCLVACVAPFYHSIASLLRRTVYGNGPPPGAQLCXRXPCSPPGPFLNLHLVPASFALFRCLRASTSTL

SEQ ID NO: 318196 - protein, 56 aa, Zea mays
  Clone ID: MRT4577_53272C.1.pep
KVTGKEWRKVHNRESASRINCYVAHLFYENGDIILCVLIMLGVSGFPLRDVFEINI

SEQ ID NO: 318197 - protein, 133 aa, Zea mays
  Clone ID: MRT4577_53273C.1.pep
MVRSNLKIVIAAMLVALIATAAMAAPQAKKKPAAPKPIKGKAGQTGVILNQSDFCIFLPPMYGGDIAANEDRAVAFCTKPGLPGANAQNLPAGFIKSAHFLSDPANGYVQVTGRMDGSKYGLSKNDGGGQYDI

SEQ ID NO: 318198 - protein, 78 aa, Zea mays
  Clone ID: MRT4577_53274C.1.pep
ARHWCANPRTLSVCNNKDSHCLLERQQYLMHKIHREPIAHLGLKHWAQIDGAPVGIILTDERNMPFMRLVNIWQFLLH

SEQ ID NO: 318199 - protein, 147 aa, Zea mays
  unsure (1)..(147): unsure at all Xaa locations
  Clone ID: MRT4577_53275C.1.pep
KRNRTHSNKTSQPTTQGGGGPLRCVSTTNPQTPPPKKPPXKPNPPNEPPGEGATQNSPGPAPPPNNPPTTPPPRPPPKPPPPPPPRSPDPPPXTRQAPREPGKPATPRRKGPRTGPREPPTPPRPGGTGKTEEHRNKGPRSRAGPSP

SEQ ID NO: 318200 - protein, 112 aa, Zea mays
  Clone ID: MRT4577_53276C.1.pep
ELTESAAGNKNKFLSTRRFLTQRGSIQPINPHTKWDRGPQANLEGGCMERNLSVFLDSTPVSLHDADGVPPDHVDHNPNGPASIFTRHILSASSSRNDSFPSESLQRDMHHR

SEQ ID NO: 318201 - protein, 126 aa, Zea mays
  unsure (1)..(126): unsure at all Xaa locations
  Clone ID: MRT4577_53277C.1.pep
IPFCLPFPCYNYNTEKAQACLVAFNVVCSYICSRDLGKDHIAFKVWPLVNESEMPKEVDAGSSQSARKGGLVYLKYTYRYRKISMVNLMTNALKLLRQLVMKCWGLIRRLXDEAMTTAFGVREXKS

SEQ ID NO: 318202 - protein, 73 aa, Zea mays
  Clone ID: MRT4577_53278C.1.pep
QRLNLKKSSPYNSLDFSPMKKQTSANYGLIKAVMPTAGEYVYQRSMSQPFLYVKPVEHHALILSKTLTIFKLI

SEQ ID NO: 318203 - protein, 63 aa, Zea mays
  unsure (1)..(63): unsure at all Xaa locations
  Clone ID: MRT4577_53279C.1.pep
LFLEPVASGPSCRKPRVMWNKNTILSAARRAFSYLNFGNGMCTCDRAGSIPDLFLXVVRPRLV

SEQ ID NO: 318204 - protein, 242 aa, Zea mays
  Clone ID: MRT4577_5327C.1.pep
MVTVREETRKGPWTEQEDLQLVCTVRLFGERRWDFIAKVSGLNRTGKSCRLRWVNYLHPGLKRGRMSPHEERLILELHARWGNRWSRIARRLPGRTDNEIKNYWRTHMRKKAQERKRNMSPSSSSSSLTYQSGYPDTPSTIGVEGQELHGGSGCITSILKGTPPDMDGYPMDQIWMEIEAPQMPSEESFVGGNHNVCSSLATPLPPPTVWEYYPDACWKVDDEIKMAPQFQFGYSEGVGPCF

SEQ ID NO: 318205 - protein, 63 aa, Zea mays
  unsure (1)..(63): unsure at all Xaa locations
  Clone ID: MRT4577_53280C.1.pep
GAFVFKGGYFDGXKGVPSGFFFLFPVKCRGGEWKIVXGLRIEGVLRKKMGGLAQKMWEKKLVG

SEQ ID NO: 318206 - protein, 82 aa, Zea mays
  Clone ID: MRT4577_53281C.1.pep
MSVSPPLWPPGLSLFCFPPVFSFYFWADFFFPPVSGLSPFFPQPFFPPFFGKLGPPPVPGPGFPGRPRHVFPGRPICIFPPR

SEQ ID NO: 318207 - protein, 169 aa, Zea mays
  unsure (1)..(169): unsure at all Xaa locations
  Clone ID: MRT4577_53282C.1.pep
RMLQHRARMHWLLCKRFCGTCARSPGLGCRCRRSGCVRSPLVGHTRGVDAVEVXVHSGMPRAARQLPRLSGIAGRQQCGRSHQRRALISVWESARWGTGMRARSWRPSAWYPSAPAARRQRQRALVRTPRSASWASGCAPSATASPGSSWGCQAHADPGLSCSLCCVRL

SEQ ID NO: 318208 - protein, 192 aa, Zea mays
  Clone ID: MRT4577_53283C.1.pep
MSAVNITNVAVLDNPTAFLNPFQFEISYECLVPLDDDLEWKLIYVGSAEDENYDQQLESVLVGPVNVGTYRFVLQADPPDPSKIREEDIIGVTVLLLTCSYMGQEFMRVGYYVNNDYDDEQLREEPPAKVLIDRVQRNILADKPRVTKFPINFHPEPSTGPGQQQQQEPQTTSPENHTGNGEANGSKPEADQ

SEQ ID NO: 318209 - protein, 917 aa, Zea mays
  Clone ID: MRT4577_53284C.1.pep
PRVRLNLTEMKEGRSQVERITADTLEMLKLENSVEHNSFEVIRQCSKEPTTLACTKNEELLQDYVLLRGVSSLRGWPQAAQNCGGDVSNPAAEDLIVAILTALDCLPISNEQSVSCGVMPTVGHLLAHRIAVINQKARALCHKWGGVPKHGTNGEHFHTEESSHTDQLKSPDAGHKTETKRKCVVDEGEPDEESKPEVTTHSDAPLSDPSLTNDNADATEQPAGLTSPNPSNGNATLGDVNNLVRSPTSAGHVGLEDGQSTPNEISSNDAELPINGILRSNSTNAKSGTGQDAPVESTPVAMSVDHNKPGKLFPGSKMGLEDSIISVSSSIKESQPFAAGRSHLEKDTTETLNHLAVVTRDLQDLSEESTSKEDEPTSSSSTDDMDMSGDYILQRCMSSFGGSSKAADTKSTALEGEKSTRMADFDDTDALEVARLVAIEVEREVIDYREPFCSSPDTNSRNADSPDLEGPRQPVAIASELNDNKSSSTEAKSGSSSSHKEDGSGITDGSGPLSRKHTHSVDLGNLDLNENQCAEETDFNPKSILSNSVNLSMPIAVAASRGSSVFPARLHFEGGLGWKGSAATSAFRPAPPRRTPDAEKSLSASSHKTSNILFDLNVADNGSATSGEPLSTAILPASSELPSEVASKAVDVSGGLKLDLNFSCGDEEDAITASNVPSLWNHQQFNGNWSQPSFSSSKQPAARNFDLNDNMSIADVSVRGMDGSSVKTPSRPRDMSDHSAVTIMGKRIVVGQRDDGQQYQHNFLGPSAESRVFARPTQSFAHTPDYSVLSYPSQPAMPFTPAFFAPGGSPYLVDAKGAPVIPPLSGLSLGISHPSFNTRATQPSSNELSYFHPSMDFSYGVSSEGARREAGSYWPMSYQGQTMFVDERMRNVSQDGTSGLVLKRKEPESGWDLYPRR

SEQ ID NO: 318210 - protein, 193 aa, Zea mays
  Clone ID: MRT4577_53285C.1.pep
MSAVNITNVAVLDNPTAFINPFQFEISYECLVPLDDDLEWKLIYVGSAEDENYDQQLESVLVGPVNVGTYRFVLQADPPDPSKIREEDIIGVTVLLLTCSYMGQEFMRVGYYVNNDYGDEQLREEPPAKVLIDRVQRNILADKPRVTKFPINFHPEPSTGTGRQQQQQEPQTASPEKHAGSGEGNGSKPEADQ

SEQ ID NO: 318211 - protein, 164 aa, Zea mays
  Clone ID: MRT4577_53286C.1.pep
MARMGVAILVCVVVLALDVTAGILGIEAQAAQNKTKKVTILFIQCEKPVYRAYQLGLAAAVLLVVAHAVANFLGGCACICSQLEFIKASINRKLAATTIILSWIALIAGFSLLLAGAMSNSKSKTSCGFTHGHTLALGGIMCFVHGGITVAYYVTATAAAHEVP

SEQ ID NO: 318212 - protein, 90 aa, Zea mays
  Clone ID: MRT4577_53287C.1.pep
HKRKQKSNHTTVYHMCENMCHTMVIIYALRVWARKSGCNTCRPACWPPSYSPTSLLRILPSVPLASHLCRRRDPCMFILLWSSVGLTKSI

SEQ ID NO: 318213 - protein, 193 aa, Zea mays
  Clone ID: MRT4577_53288C.1.pep
MSAVNITNVAVLDNPTAFLNPFQFEISYECLVPLDDDLEWKLIYVGSAEDENYDQQLESVLVGPVNVGTYRFVLQADPPDPSKIREEDIIGVTVLLLTCSYMGQEFMRVGYYVNNDYDDEQLREEPPAKVLIDRVQRNILADKPRVTKFPINFHPEPSTGPGQQQQQQEPQTTSPENHTGNGEANGSKPEADQ

SEQ ID NO: 318214 - protein, 71 aa, Zea mays
  Clone ID: MRT4577_53289C.1.pep
PMCWFCETKNRNPPLLCFWKKDTSFFPAPKGWGPSFLGAFYFWISWPVFVSLWNLGLVYQKLVYKIGLSWP

SEQ ID NO: 318215 - protein, 223 aa, Zea mays
  unsure (1)..(223): unsure at all Xaa locations
  Clone ID: MRT4577_5328C.1.pep
MVTVREETRKGPWTEQEDLXTGLNRTGKSCRLRWVNYLHPGLKRGRMSPHEERLILELHARWGNRWSRIARRLPGRTDNEIKNYWRTHMRKKAQERKRNMSPSSSSSSLTYQSGYPDTPSTIGVEGQELHGGSGCITSILKGTPPDMDGYPMDQIWMEIEAPQMPSEESFVGGNHNVCSSLATPLPPPTVWEYYPEACWKVDDEIKMAPQFQFGYSEGVGPCF

SEQ ID NO: 318216 - protein, 37 aa, Zea mays
  Clone ID: MRT4577_53290C.1.pep
LVVHVNWVQMTKFVAIISAQTSILLLEAAIAQLSSLL

SEQ ID NO: 318217 - protein, 255 aa, Zea mays
  unsure (1)..(255): unsure at all Xaa locations
  Clone ID: MRT4577_53291C.1.pep
GKKKKKKKKKKGKKKKKKKKKKIDECDKMLESLDMRRDVQEIFKMTPHDKQVMMFSATLSKEIRPVCKKFMQDPMEIYVDDEAKLTLHGLVQHYIKLSEAEKNRKLNDLLDALDFNQVVIFVKSVSRAAELNKLLCECNFPSIRIHSGMTQEERLTRYKNFKEGHKRILVATDLVGRGIDIERVNIVINYDMPDSADTYLHRVGRXAGRFGTKGLAITFVSSASDSDVLNQVQERFEVDIKELPEQIDTSTYMPS

SEQ ID NO: 318218 - protein, 247 aa, Zea mays
  unsure (1)..(247): unsure at all Xaa locations
  Clone ID: MRT4577_53292C.1.pep
MFLGALFAAVTTSAPAARSLLVYGVPGLVLLWQGGRLLSRLWREPRRLERALRAQGLRGTSYRFLMGDLREFGRLNQEAWARPPLPLGCHDIVPRVTPFLCGNVREHGKTCFSWFGPIPNVTITDPALVRDVLSNKFGHFGKPQFPALTKLLSDGLTSHEGEKWVRHRRILNPAFHLEKLRLMLPTFSACCEELVGRGGGAXLGPDGGSCELDVWPELQALTGDVISRTAFGSSYLERKKIFELQSE

SEQ ID NO: 318219 - protein, 81 aa, Zea mays
  Clone ID: MRT4577_53293C.1.pep
RWFRRRCCSAAATAWALAATWSYLTSSRLYVRSPVPAARLTAGQARRGGMRASPSPSDALSSRSPSVQGLQSLTESETMSC

SEQ ID NO: 318220 - protein, 79 aa, Zea mays
  Clone ID: MRT4577_53294C.1.pep
SSKSFYLDCNCVSSNSLTSVLRPEACVQHPFFFIVQAGGRGHTVAVTTGTQPQTTCLQVFHRTLNNSRAINPSSSSFDT

SEQ ID NO: 318221 - protein, 48 aa, Zea mays
  Clone ID: MRT4577_53295C.1.pep
REDRPNRHAEVSSWCPEREYQDRPMYSYYPLADAHLTVRATGPRSCFM

SEQ ID NO: 318222 - protein, 83 aa, Zea mays
  Clone ID: MRT4577_53296C.1.pep
QRPGARGRTRGRAPPPTYRSGGAFRSSRGALAYLGLGQTANATGRIGPHMHVRKLFLSARRNARLSSERPMRKARTALSYPEQ

SEQ ID NO: 318223 - protein, 137 aa, Zea mays
  unsure (1)..(137): unsure at all Xaa locations
  Clone ID: MRT4577_53297C.1.pep
MARTKHTKRTSTDGTAPRKQLTNKATSKSGTSTAGAKKPNRFHPFTAGLGEIRKYXQKSTEMIMLMMPLQRFQREIGQNFKNDLSFQCFDVSALDEVDEAYLVXLLEDTNLCNIHAKHVNIMPMDIQVMHLMRRKRA

SEQ ID NO: 318224 - protein, 71 aa, Zea mays
  Clone ID: MRT4577_53298C.1.pep
KSKPFFLQFIPFSKKIRFRLLNDLMSFLDSLFSAISHSIGVTRLDAIDHDVELRNVCVLLKHLGVGLPKAS

SEQ ID NO: 318225 - protein, 74 aa, Zea mays
  Clone ID: MRT4577_53299C.1.pep
HRTVFFYSFFYLFRSGHLPIGGEKPLINSHYIKKDTRQHVSHYHKKRTPGLPNFHLGRATFFNPTFSNLVTLKL

SEQ ID NO: 318226 - protein, 262 aa, Zea mays
  Clone ID: MRT4577_5329C.1.pep
LEAGREATKTKWRTLLCTSFLLPPPLLLPNRLDFIKIILKLEPTSRQRKKSKKTGSQPIQGLNRTGKSCRLRWVNYLHPGLKRGRMSPHEERLILELHARWGNRWSRIARRLPGRTDNEIKNYWRTHMRKKAQERKRNMSPSSSSSSLTYQSGYPDTPSTIGVEGQELHGGSGCITSILKGTPPDMDGYPMDQIWMEIEAPQMPSEESFVGGNHNVCSSLATPLPPPTVWEYYPDACWKVDDEIKMATQYQFGYSEGVGPCF

SEQ ID NO: 318227 - protein, 84 aa, Zea mays
  unsure (1)..(84): unsure at all Xaa locations
  Clone ID: MRT4577_532C.1.pep
EPSXLRPPLIFREGFICNTFISNTNQRQRTTSTGTRTQPKQNEIDIDLYPKPKPTLTYTRMQSHSIVIAKPKSNSLAVQLQRWD

SEQ ID NO: 318228 - protein, 54 aa, Zea mays
  unsure (1)..(54): unsure at all Xaa locations
  Clone ID: MRT4577_53300C.1.pep
PPPICLLVIFLRHNDLYHIDTVHGSMGLVDWVSIIQPXPPLRVLGFGEIVKLFR

SEQ ID NO: 318229 - protein, 47 aa, Zea mays
  Clone ID: MRT4577_53301C.1.pep
ITFHNKLNTTVFLFLPTQICYKDGAGSSHVTGSFFFFFSLFFFIQNE

SEQ ID NO: 318230 - protein, 75 aa, Zea mays
  Clone ID: MRT4577_53302C.1.pep
APFERVHTVNESVVPHNNQAKLIPSRPGALVTPCSVPDLWSLIGTTEGTGRHKHERPRRRSRRPDPKHPSSRFPC

SEQ ID NO: 318231 - protein, 328 aa, Zea mays
  Clone ID: MRT4577_53303C.1.pep
MDLASSDLAALGAAELVRVSASIPRAAPRTFALLTACLVFPLSFAVLAHSLFTHPILLRIRGATHSGFAPWLGLFAYQFLYLIVLFTFSLLSTAAAVFTVASLYAGKPASISSSLSALPPILPRLLRTFLWVSLLMLAYHLVFALTVLLLIVVFIPNASESESAPPSLAFVLFLVVVVFVFLGIHVYISALWHLASVISVLEPLCGLAAMAKSKDLLQGRTGTAATLVVSYFAVCGVTSVLFRAAVVKGRAEEGSFGLALPGRLLVGAVLLCVLVCVNLLGLLVQSVFYYACKAFHNQQIDRTALYEHLGGYLGEYVPLKSNIQMENL

SEQ ID NO: 318232 - protein, 326 aa, Zea mays
  Clone ID: MRT4577_53304C.1.pep
MDLASSDLAALGAAELIRVSASIPRAAPRTFALLTACLVFPLSFAVLAHSLFTHPILLRIRGAAHSGFAPWLGLFAYQFIYLIVLFTFSLLSTAAAVFTVASLYTGKPASVSSSLSALRPILPRLLRTFLWVSLLMLAYHLAFALAVLLLIVVFAPNASESAPPSLAFVLFLLLVVLVFLGIHVYISALWHLASVVSVLEPLCGLAAMAKSRQLLQGRTGTAATLVVSYFAVCGATSLLFRAAVVKGRTEEGSFGLALPGRLLVGAVLVCVLVSVNLLGLLVQSVFYYACKAFHSQQIDRTALYEHLGGYLGEYVPLKSNIQMENL

SEQ ID NO: 318233 - protein, 85 aa, Zea mays
  unsure (1)..(85): unsure at all Xaa locations
  Clone ID: MRT4577_53305C.1.pep
RCAEASVTTSNAQLEAFTNKPTHXTFAPLAFKPSAMTTCANHPLLSYYAELLSRAGHNYRKTNMSNDGINAAYVTYCSVNTSTLT

SEQ ID NO: 318234 - protein, 252 aa, Zea mays
  unsure (1)..(252): unsure at all Xaa locations
  Clone ID: MRT4577_53306C.1.pep
MDLASSDLAALGAAELVRVSASIPRAAPRTFALLTACLVFPLTFAVLAHSLFTHPILLRIQRATHSELAQWLRLFAYQFLYLIVLFTVASLYANKPASISSSLXALPPILPRLLRTFLWVSLLMLAYHLVFALTVLLLIVVFIPNASESESAPPSLAFVLFLVVVVFVFLGIHVYIAGLPPLASVIYVLEPLCGLAGIWKRSLLLAPHRHPQSGSSTNMTPARCHSPKMYTWIPRKTKAPARRKRTKARHGG

SEQ ID NO: 318235 - protein, 63 aa, Zea mays
  Clone ID: MRT4577_53307C.1.pep
RGFSPPFPPRGPFLGPPKRGPGPGKLSPKNKFYPDFKVWLTPPKVFNNFFNPLGEVPPGSFPL

SEQ ID NO: 318236 - protein, 281 aa, Zea mays
  Clone ID: MRT4577_53308C.1.pep
AADDDYPERAFAAVRAFNELPAHERAPHYSRAVDGGVNYAINVELHKPPTASGRDTIQILLGPQHASPRTSPDLDPWPALPAPEVARCGRVRATAVARALLRLLSQGLGLRPEALEDASCADGKLMVCHYYPHCPEPERTMGIVPHTDPGVLTVLAQDGVGGLQVKHQDEDGKISWVDVKPVPGALVINVGDLLQIMSNDEYTSVEHRVVMNTREEPRVSIGIFFSPGKRGDSVFYGPLPELVSSENPPKYRNFTMSEFYGTFFSRDLASKALLDNFKLSP

SEQ ID NO: 318237 - protein, 78 aa, Zea mays
  unsure (1)..(78): unsure at all Xaa locations
  Clone ID: MRT4577_53309C.1.pep
VEVLGSAAHLLCGVCVACLPLCLSASLLSCCGSAGHVFPLPPAPVVKTAPPRXLRCVCDRRAHGLGTQGGXRGGCGVG

SEQ ID NO: 318238 - protein, 178 aa, Zea mays
  unsure (1)..(178): unsure at all Xaa locations
  Clone ID: MRT4577_5330C.1.pep
RIQQAIASGILPLSPLFLQQPSAXIVQEMPLVHLVAQNXRAHHLQQLVLATRAAYSQQLQCIPLTHVATMSYGSYSHSRLTFSKICCACCQQXFVSFNVAALSCCDYLHDRXILPFTNACDSHXAALFRRQQFIPVSGRSMCGIGALGPSQHCLPINALAVLTTTADQPKDQQCCGPH

SEQ ID NO: 318239 - protein, 119 aa, Zea mays
  Clone ID: MRT4577_53310C.1.pep
RTRSHAQAWLGVQRRPQPRPTVVRRGYDRSGPSLPPRGSSSSSLKTRTPLPLGSSSPHRPARTAVALCLDLPNPWLGTRMRTQNNHFHPPARCLAVGSRDGRYETNQASEVWTPLNFRS

SEQ ID NO: 318240 - protein, 85 aa, Zea mays
  Clone ID: MRT4577_53311C.1.pep
GGGGFFLLFFFCVFFFFFFFFFFLGGLKQHKAVGKPLGKRNGGLINMPIFWGGGELSIDPLIDSGGYGNPPNHFPIQSYSNWEPA

SEQ ID NO: 318241 - protein, 104 aa, Zea mays
  unsure (1)..(104): unsure at all Xaa locations
  Clone ID: MRT4577_53312C.1.pep
PRLPFRFRFGRHAKASSKKGGETXTSLNRPXWVPRPRAPHYLDRSLVGDYQFDPFGLGKPVEYLQFQLDSLDQNLSNNEAGGIIGTRFESSXVNSTPLQPYSEV

SEQ ID NO: 318242 - protein, 60 aa, Zea mays
  Clone ID: MRT4577_53313C.1.pep
LRGWGEANNHWGVSIGAGFAIMCSIIHLICPIRRVPPKPNLRQYSWHYHIHLWKSNVHPT

SEQ ID NO: 318243 - protein, 58 aa, Zea mays
  Clone ID: MRT4577_53314C.1.pep
AAFYVYIHAEHANELDRFFFIWFLRHLVGYHPEHLPDLETPRMRLVVGDKRAHLACHL

SEQ ID NO: 318244 - protein, 30 aa, Zea mays
  unsure (1)..(30): unsure at all Xaa locations
  Clone ID: MRT4577_53315C.1.pep
LPGVDANDPSVXDLFASLHNPREQEKKEDK

SEQ ID NO: 318245 - protein, 67 aa, Zea mays
  unsure (1)..(67): unsure at all Xaa locations
  Clone ID: MRT4577_53316C.1.pep
AVRCVKRXSEDSSMIQAGLSVSGPHRRALFQSRRGPCAWICRGSSCRCPSSRSTRRTRRCRKEAATR

SEQ ID NO: 318246 - protein, 154 aa, Zea mays
  Clone ID: MRT4577_53317C.1.pep
VSATFWVSCLMLLAYVLRSDALSDTWRGFSADAFKYVLPTVKLATPSAVMVCLEYWAFELLVLIAGLLPNSTVSTCLIAMCSSTEAIAYMITFGFSAAGSTRVSNEIGARNVERAKNAVSVTMKLSVLLAVIFVLLLALGHGLWARLFSGSATI

SEQ ID NO: 318247 - protein, 62 aa, Zea mays
  Clone ID: MRT4577_53318C.1.pep
SRVNGISVYIENYSSLFFGRTGTCFSSVPNAYTWVCATSIVLVLQSSLFWNLDCFGIRIVYV

SEQ ID NO: 318248 - protein, 222 aa, Zea mays
  Clone ID: MRT4577_53319C.1.pep
MILGGLIDGLTGANKSARLKGTVVLMRKNVLDLTDFGATIMDGIGDFFGKGVTCQLISSTLIDHDNGGRGKVGAEAELEQWVTSLPSLTTGESKFGLTFDWEVEKLGVPGAIIVNNHHSSEFLLKTVTLHDVPGRGNLSFVANSWIYPVGSYTYSRVFFANDGDVELQAWWKEAREVGHGDLKDAPWWPRMQAVGELAKACTPSSGSDRRCTRRSTSGSTHT

SEQ ID NO: 318249 - protein, 258 aa, Zea mays
  Clone ID: MRT4577_5331C.1.pep
LGTSRPAGTAQARSNLSSVASTSVLVFASSLKIDKGSNSARALLYLHAGLNRTGKSCRLRWVNYLHPGLKRGRMSPHEERLILELHARWGNRWSRIARRLPGRTDNEIKNYWRTHMRKKAQERKRNMSPSSSSSSLTYQSGYPDTPSTIGVEGQELHGGSGCITSILKGTHPDMDGYPMDQIWMEIEAPEVPSEESFVGGNENVCSSLATPLPPPTVWEYYPEVCWKLDDEIKMAPQFGYIVKELTPASDTIYIGSDY

SEQ ID NO: 318250 - protein, 72 aa, Zea mays
  unsure (1)..(72): unsure at all Xaa locations
  Clone ID: MRT4577_53320C.1.pep
KKEGTIQGSLNQAGTLIPKAPIGWGXDALLYYXELADLLHSGALXIAALVHLVYIKGRKQLLARMAIAQQFE

SEQ ID NO: 318251 - protein, 84 aa, Zea mays
  Clone ID: MRT4577_53321C.1.pep
DFSMINFYRYYYPINDERESRANAIINHNSYHRRIREQHISPSAPRPQRAGRLRGCLRRLTTTPYPKQTSPVSQTASSSTSSSL

SEQ ID NO: 318252 - protein, 47 aa, Zea mays
  Clone ID: MRT4577_53322C.1.pep
IHFLNYSKIRIGYSSPNPSMILYPAVPGLGRSYAIPSTLVSNKLLDT

SEQ ID NO: 318253 - protein, 130 aa, Zea mays
  unsure (1)..(130): unsure at all Xaa locations
  Clone ID: MRT4577_53323C.1.pep
IRLRDTCFWGKKPVXGXTXDPARRRQYEATWSFICGGRYSIDDPLVDPLSMPASEWRKLACSRVAVTSSGLDDFRPRGLAYVAALRDSGWDGETEQYETPGERHVYFLDRPKDPNSVKELAFVTGFLSRE

SEQ ID NO: 318254 - protein, 98 aa, Zea mays
  Clone ID: MRT4577_53324C.1.pep
SSARFAGGGRWGDTLPRYGASARRSVLRSSGRIRVGICRWADGSCRRCRGGGGWRSPRRRRDHRHRPCSGPPALCTCPRPSSVDVGESIAAAASALRP

SEQ ID NO: 318255 - protein, 110 aa, Zea mays
  unsure (1)..(110): unsure at all Xaa locations
  Clone ID: MRT4577_53325C.1.pep
MALSRSMRACLHSGRLALLAILVSGGIVLQILACALYNNWWPMXNSWVNFTKFLTGASIVGSIAIPSILKHAGVIGWGALTMELSSFVVFGVAILWFLQMNGEDEYSGVF

SEQ ID NO: 318256 - protein, 138 aa, Zea mays
  Clone ID: MRT4577_53326C.1.pep
MALSRSMRACLHSGRLALLAILVSGGIVLQILACALYNNWWPMLTVLMYLILPMPLIFFLGSDTSSMMSNGGDGWVNFTKFLTGASIVGSIAIPSILKHAGVIGWGALTMELSSFVVFGVAILWFLQMNGEDEYSGVF

SEQ ID NO: 318257 - protein, 151 aa, Zea mays
  Clone ID: MRT4577_53327C.1.pep
VHLGDGIKFIEDSVAANQSVNGSTRNAFKILILDVDSSDLSSGLSCPPENFVEDPFLLIAKEFLLEGGLFVINLVSRSTSVRETVVSRLKAVFEHLYSLQLEEDINEVLFASPSGRYLEINDISAGASKLQDLLKIPVDVESDIQKLQKLQ

SEQ ID NO: 318258 - protein, 61 aa, Zea mays
  Clone ID: MRT4577_53328C.1.pep
DTACVTVYMALDTAIESGLVSALAYCLARSPYALIYARTCKGSCIAYTDSITVFLIYYDHD

SEQ ID NO: 318259 - protein, 61 aa, Zea mays
  Clone ID: MRT4577_53329C.1.pep
KGPALGSAFEWVSTLLDVGGRVSSHFTSHTLPPSAHHPGSTSTCRKSSPRHRSPTRPRTRG

SEQ ID NO: 318260 - protein, 511 aa, Zea mays
  Clone ID: MRT4577_5332C.1.pep
MKKVFDQTVRDLKREVNKKVLKVPGIEQKILDATSNEPWGPHGSLLADIAQATNNYHEYQMIMHIVWKRVSDTGKNWRHVYKGLIVLDYLVAHGTERVIDDIREHAYQISALADFQYIDSSGRDQGSNVRRKSQSLVSLVNDKERIQEVREKALSTKDKYRSAFAPSGRSPGGYGGGYDNDRYEGSYGSRYDNRNGNGRGDYGYRDDDRYGGPGGTPNREGDRYSRDSNERYGRDYREDEYKGSHSNHEYAEGAGRRSYGQERDSYGDGEAYSSRGRGSNADDPTQDDRPIERKLSNQQISSPPPNYEDVTRDGQDNLHDDRNGGSVPAAVSRVPSPSVPATTVPAVQVNGVHDSTVEDVPAPPTAHAEPNGFDEFDPRGSVPDSSPPVNPASVANSLEMDLFGSDPISSLALVSVPQPTTTSNVEAPANSGFETNSFVGMPPASTGFGEIDASNPFGDPTPFKAVLDESPTLLKHMLTVGSFQPLDRGCNPSNCSNEWFGGKLGNSLWTM

SEQ ID NO: 318261 - protein, 123 aa, Zea mays
  Clone ID: MRT4577_53330C.1.pep
NIGTWRRTVRDRLEEAVPRCLKKLFELPPEEDDEDMRWKLEKRRKLLLLLAILAASLTYQAGLNPPGGFWQENSTGHVVGNPVLNDNYRRRYMAFFYCNATAFVSSLAIIMLLVNRKLSARGI

SEQ ID NO: 318262 - protein, 96 aa, Zea mays
  Clone ID: MRT4577_53331C.1.pep
HRGPEDCEQAGLLCTPSTCEYHGLQAPESGAPITRQRRSRVYTGINCGKGNNDTLPSNLNLKDQNGKPVSVNKIKGEHPYDYLYPDPKTPGCTKKE

SEQ ID NO: 318263 - protein, 243 aa, Zea mays
  unsure (1)..(243): unsure at all Xaa locations
  Clone ID: MRT4577_53332C.1.pep
MAAAAAAADQATNLLQKLSLDAKAEAIDAPAAKEKASGGLGGKLXVWRRLGSHGRLSSGQXPQDYSDASMYYGAYPAAYYCAGWGDYSMYLNQDGVETPTAGAYGDMYCYPQYGHDGQMYGSQQYQYPSSYHQPQNTASKPQYKSKTDKLAPSKDISSTVADPLHAVASAPKATANSVDEVRGLKKTSTPLNPSGNNGSYLNQSSRPAYPWYGGQIYQGKQQKPSSGNPTSTDSILSKVQSKN

SEQ ID NO: 318264 - protein, 68 aa, Zea mays
  Clone ID: MRT4577_53333C.1.pep
VSSSIILTHTAHTHSNMKRHDHGLWTSAIAPKTRRKTRTQREQKSDTLLTCAGQKGPTWSCARSPARS

SEQ ID NO: 318265 - protein, 207 aa, Zea mays
  Clone ID: MRT4577_53334C.1.pep
PRVRVCHAVVQHIRISNIDEEMEIDQIKLVIQWFTMFMHSFLAHIRLQFFKLDALHSTTLAEEELMKEKLKQEVVSGELDQFPDHCVTLPDSNSVIEEFIHFKKQNDDSHVDQKMALDGDQLMDDRPMEITILRSLFSPEACSTLAVRNEPTEAHLRSGGRASSEYVDLPDNNNHCISVGIDYQGGCSASSIPTSHGSINQEFSTGD

SEQ ID NO: 318266 - protein, 214 aa, Zea mays
  unsure (1)..(214): unsure at all Xaa locations
  Clone ID: MRT4577_53335C.1.pep
MSSMQFSSVLPLEGKACVSPVRREGSACERLKVGDSSSIRHDRASRRMCNGGRGPAATGAQCVLTSDASPADTLVLRTSFRRNYADPNEVAAVILGGGTGTQLFPLTSTRATPAVPIGGCYRLIDIPMSNCFNSGINKIFVMTQFNSASLNRHIHRTYLGGGINFTDGSVEVLAATQMPGEAAGWFRGTADAVRKFIWVLXDYYKNKSIEHILI

SEQ ID NO: 318267 - protein, 48 aa, Zea mays
  Clone ID: MRT4577_53336C.1.pep
LYLKKLKKKKNFHHLKARGEALKTTIKRGRSGGSSKGDHYPCLRAYTL

SEQ ID NO: 318268 - protein, 138 aa, Zea mays
  Clone ID: MRT4577_53337C.1.pep
AVLAFSLFGQRGIWGCAIRLVSWGFYRFPSCDVVTRRLLYCSPTRYRGPWALCLHARPSDGVMDICPFRPFDRPAGKLFDGVSLFTFLTVPQFLPFHWPYARHPVTLLPMRPFLPSCFLDFTSVAAFPHHPWCGGSLF

SEQ ID NO: 318269 - protein, 95 aa, Zea mays
  Clone ID: MRT4577_53338C.1.pep
MASLRVVSVLVLVAMAASAGGVAARPLVGGGGAWENRAPLQTSRPFNIAHRGSNGELPEETAAAYARAIDEGADFIEADIEATKDSHLVCFHDTT

SEQ ID NO: 318270 - protein, 188 aa, Zea mays
  unsure (1)..(188): unsure at all Xaa locations
  Clone ID: MRT4577_53339C.1.pep
MTTLLALHYNMIYNKGVXTLPSDALISVPXKLAACLLCSMASPCXIQEIIDAHXLDPDAXSLVTALPISERPPYTLQEAVIRYDNPVWIRDNSAMHLTHMPALYSIAMGVHSYLPATYSPIKHVLYWPRMNRXINELVAACGSCHQSMPDRALYPGLLSPLAVPTHAWXAISHDFFEGLSPSVAYDSI

SEQ ID NO: 318271 - protein, 92 aa, Zea mays
  Clone ID: MRT4577_5333C.1.pep
PLARSLARSLYKSVTQPRPIVISIEPRIRPRPPALPPASTPSTPGLAAAAAPPSAVVLAVAGFVSSPALFGGGGPSLFFSWVPSPVLLPVPL

SEQ ID NO: 318272 - protein, 525 aa, Zea mays
  Clone ID: MRT4577_53340C.1.pep
RPGNLNLEHLPQDYSGSALTLVESLSSLVVLGNLTEFERGVLWLSENLTFDVDARINLFECNIRLLGGLISAHILAKDYSSQFKHGLYQDQLLRLAESLGNRFLPAFETPTGLPYSWINLKYGVMENETTETSTSGCGSLILEMGVLSRLTGDSRYEAAALRALRKLWSMRSSLNLVGTTLDVFTGKWIEYSSGIGAGVDSFYEYLIKAYILFGSDEYWDMFHSAYLAVQKYFRHGPWYHEADMRTGEATHWQLTSLQAFWPGLQTLLGDVTAANLSHREFYNIWQRFGVLPERYLLDYGMLHPTEKYYPLRPEFAESTFYLYQATKDPWYLEVGETIVRSLNYYTKVDGGFASIRDVSTMKLEDHQHSFFLSETCKYLFLLYDDSFLRNQNYIFTTEGHPLPIRSTWHEKFPAAYVPSNWTSVKDEIQPIRASALSSQVCPETIFRRSVGTPWESACHVPDAHASHRCRTDDDCGIEAITCKKRTCSMAGYCGLFFDNGNKSSGFSMIMRTANTSRLLQLRTVA

SEQ ID NO: 318273 - protein, 91 aa, Zea mays
  Clone ID: MRT4577_53341C.1.pep
NNHTQTVPLYRPRTITKLGMGPYTKRQVMLTRTTLFTSGPTLAPPTWMGLLAAITFSGANTSKTRNRPQLTSKQSDYTALGQSHCSSSYYL

SEQ ID NO: 318274 - protein, 347 aa, Zea mays
  Clone ID: MRT4577_53342C.1.pep
MGNSDAASPASAAAARDSKKKRGSRSAAKLKQSKRETRREQFLSRGQGNKDAKSAASPTGAVSGSPILASPHPPLPRRRADSRSRGSDPEDRDEAIAAGLEADGSGLDSPGSDKRQSGDCPQRKGFSGNGGGPSLSSGSSVWSSSRSVSDAEEDTGGPEDESEVFDDWEMAADALYVDDSSCNQSSGPTPTLPQAPTTAEPSHAAKPEPIQSKTRAWAPDDIFRPQSLPSISKQTSFPASIGNRWQDMGMSAAQQGILSLPLSCPICCDDLDLTDSSFCPCPCGFHMCLFCHNRILVEDGRCPGCRKQYNTVSAAEGGGGGGSRATVGTGREMEKRLSRSCSMGPSY

SEQ ID NO: 318275 - protein, 49 aa, Zea mays
  Clone ID: MRT4577_53343C.1.pep
SFVTISKNFYLFIDVYVIFLFFFFFFLFFFFFFFFFFFFFFRTRGSTRA

SEQ ID NO: 318276 - protein, 83 aa, Zea mays
  Clone ID: MRT4577_53344C.1.pep
GRQAYVCTIFLFLFRLPCMLQHVCIACMVLNLYYLFICDYGSVVFECTYEQKLALNKKKKKKKKKKKKKKKKKKGKKKKKFAA

SEQ ID NO: 318277 - protein, 116 aa, Zea mays
  Clone ID: MRT4577_53345C.1.pep
AGRDPSSKQRAVHRPPSFSSLSHVVVLGRSSRRSFYSVSSVSELVTPARRGGHGSLPAKGPAETGTWLHFSPYHPCAARRCSRPPRGGTEHACMNDVALHPPRECTLVQKSSHARA

SEQ ID NO: 318278 - protein, 58 aa, Zea mays
  Clone ID: MRT4577_53346C.1.pep
GEATGYSVSREYVCAIGNPLCVRSVHHHGPFSPSSNALFMLVARLEVPANNARNGGDQ

SEQ ID NO: 318279 - protein, 97 aa, Zea mays
  unsure (1)..(97): unsure at all Xaa locations
  Clone ID: MRT4577_53347C.1.pep
PVAHASSHSSAHSSAFSFAPLTAAEDQYSTIQSYMVQEAIQACILRSLTKILHQPYTILQHPFLMHLYNQRISXNNYYIKFIPTINQVVSANLCAYF

SEQ ID NO: 318280 - protein, 41 aa, Zea mays
  Clone ID: MRT4577_53348C.1.pep
VVVMRQDFPIVIVSVRHVPMLAVGVICEQIITLASVAHAPS

SEQ ID NO: 318281 - protein, 61 aa, Zea mays
  Clone ID: MRT4577_53349C.1.pep
DSSDRGLRISSKAWPEARFSSSFTWISEEAMVMSYKRQAVYSARIELGIRQSSMLESRARL

SEQ ID NO: 318282 - protein, 285 aa, Zea mays
  unsure (1)..(285): unsure at all Xaa locations
  Clone ID: MRT4577_5334C.1.pep
MVTVREETRKGPWTEQEDLQLVCTVRLFGERRWDFIAKVSGLRGGDPQIRXKLKSPALSRKSSYQPLXRLYSCFPSPLLYLHAGLNRTGKSCRLRWVNYLHPGLKRGRMSPHEERLILELHARWGNRWSRIARRLPGRTDNEIKNYWRTHMRKKAQERKRNMSPSSSSSSLTYQSGYPDTPSTIGVEGQELHGGSGCITSILKGTPPDMDGYPMDQIWMEIEAPQMPSEESFVGGNHNVCSSLATPLPPPTVWEYYPDACWKVDDEIKMATQFQFGYSEGVGPCF

SEQ ID NO: 318283 - protein, 212 aa, Zea mays
  unsure (1)..(212): unsure at all Xaa locations
  Clone ID: MRT4577_53350C.1.pep
MASLSLSSPPSLSSAHHNASTRLILRTPNSLKLRTPPHSLPAIRAITLTQDDLKRLAADKAVESVKSGMVLGLGTGSTAAFVVAKLGALLASGQLSDIVGVPTSKRTEEQARSLGIPLSVLDDNPRLDLAIDGADEVDPDLNLVKGRGGALLREKMVEAASDKFVVVVDDTKLVDGLGGSGLXMAVEGVQFCWKYNLDRLQELFREEVWKQN

SEQ ID NO: 318284 - protein, 63 aa, Zea mays
  Clone ID: MRT4577_53351C.1.pep
SLWTDLATTTGHELLDMVASSPVVALTSLHVSDFHGVYSSTIGSSTLEINPALPEAKNLQSWY

SEQ ID NO: 318285 - protein, 82 aa, Zea mays
  unsure (1)..(82): unsure at all Xaa locations
  Clone ID: MRT4577_53352C.1.pep
LAGRWLLGASLERAGRHTAFXFSSVVVDPAKVCVGAIRAQVAPLRMAEAPRALAHFRWSMGCIWVCSHLGPYITLGKSIEGS

SEQ ID NO: 318286 - protein, 106 aa, Zea mays
  Clone ID: MRT4577_53353C.1.pep
RLCPSEAGGGTYSHDTHRSPVGSLSPLPLPAPRLGRQRDIVRPLLCDAARRSMTTRVPSSLLRPAPPRTRNPKRFPSRRPPITMLDGVPPREAGPHVLPHPLLDSA

SEQ ID NO: 318287 - protein, 161 aa, Zea mays
  unsure (1)..(161): unsure at all Xaa locations
  Clone ID: MRT4577_53354C.1.pep
MADSEEHHFXSKADVGEYKIYPHEGGPDRKNGFLGIKNRPCKAVEASTSKTDKHAHAKCHXYVVIYIYTGKKLENIVASSHNCXDFSHVNRTXHQLXDISEDGFVSLLTSDGNSMDDLTPPTDDTLVAHIIDTCERAKDLLVTVQSAMXHGHICALKDVRP

SEQ ID NO: 318288 - protein, 48 aa, Zea mays
  Clone ID: MRT4577_53355C.1.pep
LRVRAFSSLLLITPCGGSLTCGGSKPTRSTSCTSTSPFYAFKQFIPTG

SEQ ID NO: 318289 - protein, 197 aa, Zea mays
  Clone ID: MRT4577_53356C.1.pep
SRLMNSGIHHTAVLQSSLHTSTNCYGSNMLGSRVVAPCFCCRSPCSMQKSGVRSGPTGAETTDTGTRNKMREETPGPKTSTPVRSPPPAHNNHLFINTWPAMRAHPSWQRPPLGCHIFFSLFCCRRTQTFTCCSLPRLFQAAYLIDLLIIIEIDPIIISAETSSIEVKQDCRPRDPAASSHRRLRSAPNRTTTTTTT

SEQ ID NO: 318290 - protein, 250 aa, Zea mays
  Clone ID: MRT4577_53357C.1.pep
IVESIILGNRVVAPCFCCRSPCSMQKSGVRSGPTGAEATHTGTRNKMREENPGPKTSTPVRSPPPARNNHLFIIAWPAMRAHPSWQRPPPLGCHIFFLFFTCCSLPRLFQAAYLIDLLIIIEIDPIIISAETSSIEVEQDCRPRDPAASIYRRLRSAPNRTTTTSRFLQIWIQKQNMRCSTTKTKQQEPCRQGLTDTGSNAGLPNPAIRYEPAQHEANGFPDKSKQSSSPRALGEARSQGGRPSWIWRTR

SEQ ID NO: 318291 - protein, 263 aa, Zea mays
  unsure (1)..(263): unsure at all Xaa locations
  Clone ID: MRT4577_53358C.1.pep
MAVDDAAAAQAAEDQRLAFEAEARRAEDVRRAEETRLCSAPLDEFERAHEALWAQATTVVNVKVLIPVILDQATNTYTKWRGMFITVLGKYALTRHVLEDEAFPSRPAWVQVDCCVLTWIYNTISSDLQXSLMMRQGLARGAWCYLEDEFLGQRESRALLLETXIRNFRQESLSITDYCHQLESMAASLAEFGDPIGGRHMVLTLLRGLDGKFHHMVSILKMHRSFPTFAEAREHLLLEELEIDARPPSPPSALVAAAPLKGN

SEQ ID NO: 318292 - protein, 248 aa, Zea mays
  Clone ID: MRT4577_53359C.1.pep
LRLYLGNRVVAPCFCCRSPCSMQKSGVRSGPTGAEATHTGTRNKMREENPGPKTSTPVRSPPPARNNHLFIIAWPAMRAHPSWQRPPPLGCHIFFLFFTCCSLPRLFQAAYLIDLLIIIEIDPIIISAETSSIEVEQDCRPRDPAASIYRRLRSAPNRTTTTSRFLQIWIQKQNMRCSTTKTKQQEPCRQGLTDTGSNAGLPNPAIRYEPAQHEANGFPDKSKQSSSPRALGEARSQGGRPSWIWRTR

SEQ ID NO: 318293 - protein, 62 aa, Zea mays
  Clone ID: MRT4577_5335C.1.pep
RQHMLLGLVAKHWPPSKVIPRPLRPLTRIDDDRSMDSGVEVLRDVVRVAHVRLPDQRLDELL

SEQ ID NO: 318294 - protein, 154 aa, Zea mays
  Clone ID: MRT4577_53360C.1.pep
ISHRSTNIIEIDPIIISAKTSSIEVEQDCRPRDPAASSHRRLRSAPNRTTTKTTSRFRQIWNQRQNMRCSTTKTKQQEPCRQGLTDTGSNAGSLFSPSPSSIQARKLPNPAIRYEPAQHEANGFPDKSKQSSSPRALGEARSQGRRPSWMWRTR

SEQ ID NO: 318295 - protein, 35 aa, Zea mays; identical to SEQ ID NO: 194930
  Clone ID: MRT4577_53361C.1.pep

SEQ ID NO: 318296 - protein, 207 aa, Zea mays
  unsure (1)..(207): unsure at all Xaa locations
  Clone ID: MRT4577_53362C.1.pep
MAAMGMKKGVLMLALGLAMAVTSSAVVYKVGDASGWTILGNVNYTDWTSKQNFRVGDTIEFTYPPGIHNVLEVNKADYHSCTNSTPIATHTSGDDKIVIKSPGHRFFICGVPGHCAAGQKLSIRVLKTRSSDAPSPAPAARSASAASPSXPAAAPAPIRAAPAPRRRRLRRPRTARPTRRPPPRPRPTPMARGSVQATGPSSLPWHW

SEQ ID NO: 318297 - protein, 213 aa, Zea mays
  Clone ID: MRT4577_53363C.1.pep
MAAIMGVKKGLLVLALGLAMAATSSAVIYKVGDTSGWTILGNVNYTDWTSKKNFRVGDTIEFTYPPGIHNVLEVKKADYDSCTNSTPIATHSSGDDKIVIKSPGHRFFICGVPGHCAAGQKLNVRVLKTRSSDAPSPAPSARSAAGSAAATPSPTTETTGASSASGGSSTPDATTAPAPNANGAGVGAAGHQNVVVVVVAMAVAALASMTMLH

SEQ ID NO: 318298 - protein, 147 aa, Zea mays
  Clone ID: MRT4577_53364C.1.pep
DLASASALGELLCFDLSGNPFASCCAGSYLIAGFGKPALDPVSVSPCLQGSCCFVLVVEHRMFCFWFQIWRNREVVVVRFEADLRRRWLEAAGSLGLQAYSTSMDDVSALIIIGSISIIISRSMRYAAWKRRGKLQHVKKRKKDVTS

SEQ ID NO: 318299 - protein, 261 aa, Zea mays
  Clone ID: MRT4577_53365C.1.pep
KLFEHNYRLYLGNRVVAPCFCCRSPCSMQKSGVRSGPTGAEATDTGTRNKMREENPGPKTSTPVRSPPPAHNNHLFINTWPAMRAHPSWQRPPLGCHIFFSLFCCRRTQTFTCCSLPRLFQAAYLIDLLIIIEIDPIIISAETSSIEVKQDCRPRDPAASSHRRLRSAPNRTTTTSRFRQLWNQKQNMRCSTTKTKQQEPCRQGLTDTGSNAGLPNPAIRYEPAQHEANGFPDKSKQSSSPRALGEARSQGGRPSWIWRTR

SEQ ID NO: 318300 - protein, 137 aa, Zea mays
  Clone ID: MRT4577_53366C.1.pep
LVLCPVDCLRTYCPGLLNTCCFLTVLYILFDNLFLGSSIRPFRISRGTRACVTLEINFMLLFVIDHAAFCYKVPYSIFNLIEGCKIHGVVRELIPVKAMATGNLISVGWELDYLHQIVYIQITLYKQYNLHYGSTIL

SEQ ID NO: 318301 - protein, 34 aa, Zea mays
  Clone ID: MRT4577_53367C.1.pep
CNGLMGRSTPQEPSSLAPEEVNFPPRAEFRASYA

SEQ ID NO: 318302 - protein, 88 aa, Zea mays
  Clone ID: MRT4577_53368C.1.pep
ATRRTYRLLARRAYSRHGLNSSRQLMPVTTARPASTSVRRCGTAARMRRAHRVREGTLDDLTVETCMRHAATGDDGAAGQRHPQGSAA

SEQ ID NO: 318303 - protein, 81 aa, Zea mays
  Clone ID: MRT4577_53369C.1.pep
RNSARASIPLFFPYFATALSWGIYRSCGGLLPPDKHLQIKAACQKPLPRTLTDTIRPRRAWRAGEGALCGFRPHTDHSRQD

SEQ ID NO: 318304 - protein, 130 aa, Zea mays
  unsure (1)..(130): unsure at all Xaa locations
  Clone ID: MRT4577_5336C.1.pep
EAXRDALRDEPTPLPVFSGPCHDVLDASDPWHLHLRLRRQRGHRQGARPRIAASAPAGPYPLRRAARRILSARARLGETLLLDALAVRLLLYESYRLTTSRSSTCLRRASRTSCASRARSATSMETGMHD

SEQ ID NO: 318305 - protein, 84 aa, Zea mays
  Clone ID: MRT4577_53370C.1.pep
WEKGPRGGFFGPGEKGCQGRPLFKWSTRVYGVPINSVFMQSVFLELGGFFGDCVIFRFQARFVVCFEIGIPREGIWFHRFLNPG

SEQ ID NO: 318306 - protein, 384 aa, Zea mays
  unsure (1)..(384): unsure at all Xaa locations
  Clone ID: MRT4577_53371C.1.pep
ITSVLVQLLLLADQFAITVLQFECCKRIMEYLSEDTVCSVLQAVXSIPSCKLLEEVCKRNFATHFDYCTTACTDFVSLDEATFKDILEHGDMTVTSEERVLDVILTWCMGACETFHWTSVDELLRTSTPEQLFGERLSAINTLLPLVRFPLMHLSILKRMERSNLANHIQAFRQLVAEAIEFSHAGQLMPTACECERFQHRRSSYKELQYISDGDSNGVIYYAGTSFGKHQWMNPVLTKNITVVASSPNSRHTDPKALVSKNYQGTCFAGPCVENGKRVSWWMVDIGQEHQLMCNYYTVRQDGSTAFMRSWAFQGSMDGRNWTSLRVHDSDPTVCYPGQFASWPIVGPAALLPFRFFRVALTGPAVGCTWNLCICFLELYGYFH

SEQ ID NO: 318307 - protein, 56 aa, Zea mays
  Clone ID: MRT4577_53372C.1.pep
NKYSQLKKKVVRTIGLRLRWPILYSRKDHVNIISRLFAYYTRTVPLLKLSYTRESI

SEQ ID NO: 318308 - protein, 141 aa, Zea mays
  Clone ID: MRT4577_53373C.1.pep
RTGSDIHVKFVDWLPFIFSSLGMLIINSVEKQRLSADSFSYSGNGVAWKARVVLFLGFAALAGGMAGGVTVFVLKFVVPSVAMPALGMGIENVLSNALVGVSSVVLWISQNMEAEYILFILCKPHESTRNGQQGRADVRAH

SEQ ID NO: 318309 - protein, 100 aa, Zea mays
  Clone ID: MRT4577_53374C.1.pep
SISIYIPSREPAAMSYPVTSQPQCTNTCYQTQLSDWHTGLTDCCNDMPVCLCGTFAPLCLACRISDDFGACCCAPYLPGGLHSLRTGMRERYHIQGSVGH

SEQ ID NO: 318310 - protein, 108 aa, Zea mays
  Clone ID: MRT4577_53375C.1.pep
HHSETLGSSICEGARVRLDPALIAMSRGGEPLEQVMGRAEEEELPKYEPGALQVEGPAAGMPVPLVDAGFLNDYVPTGGIGMHTMRALLESTRVVPPGELHCSQWVEE

SEQ ID NO: 318311 - protein, 51 aa, Zea mays
  Clone ID: MRT4577_53376C.1.pep
RPPSSAPRSASIHHWHLAKVVVVPRKKRNGHFSHCPTLVPSVLDYSLRCNV

SEQ ID NO: 318312 - protein, 86 aa, Zea mays
  Clone ID: MRT4577_53377C.1.pep
AAARPFQPPGRALHAASKPKRRQERPPGETTKPKPPGRTTPAGPETPARHFFKSGRKESTAETKQEQSQKDRAQQAADNDNKDHGQ

SEQ ID NO: 318313 - protein, 115 aa, Zea mays
  unsure (1)..(115): unsure at all Xaa locations
  Clone ID: MRT4577_53378C.1.pep
GSPQWPRPLHFRHPYRLPRVWHFGRRRVSPRPRPPAPCRCCQRASSQRGRGQSGPSSRPGCGXLHPSQQPCRSIPTAMKIYNLXRTVERPSQAPLXSSLRKIRSKPRXXTKPKAD

SEQ ID NO: 318314 - protein, 134 aa, Zea mays
  Clone ID: MRT4577_53379C.1.pep
PRVRPRVRGPVGQLLSLREGDGDLPDDFEFDIHVDVTFANERLRRAYVALQAWRRAMYSDPKNFTGGWVGADVCSYFGVTCVPALDDANTTVVAGIDLNGGDIAGYLPAELGMLTDIAFFHINSNRFCGIIPKS

SEQ ID NO: 318315 - protein, 69 aa, Zea mays
  Clone ID: MRT4577_5337C.1.pep
LQFLGGLKYKFWGFWWFSMGALKKIFGGVGVLYRGTGLKYPRFFFVTTRGNIFFGQKNFLNPHINPFFF

SEQ ID NO: 318316 - protein, 108 aa, Zea mays
  Clone ID: MRT4577_53380C.1.pep
SHKQVLVQCFCMIIGACLLQLRYVFSHLDWMRAILAKQVMYTRAPVFPCLDRLHPWALWCWTYSIVSARCPVCQCTLLAASALWLREGEFASCLSNYALLPLIQCSPF

SEQ ID NO: 318317 - protein, 151 aa, Zea mays
  Clone ID: MRT4577_53381C.1.pep
YFQPSSLIFVTAVFLPYPRRRPGLQKICRAASALGKIPPVLPSRSFPSADRSFSLLYAVPRPPPSLPAGAPWCLLLCSTELLPEASIPCHGASLPLRHSPFSNLPARRQQHPAAQLLTRRPSSLLLPLFARVKPRLCARPVFARQLSPAGA

SEQ ID NO: 318318 - protein, 29 aa, Zea mays
  Clone ID: MRT4577_53382C.1.pep
ILYIQCISGFRAHSWGVVVSAHYHYLFNS

SEQ ID NO: 318319 - protein, 65 aa, Zea mays
  Clone ID: MRT4577_53383C.1.pep
IFGTRQTRTPCIWLLRGFSSDRVPAPVGHQPSPTLSPLLLPFCSAHQLIGYLTYVPVVSCTELNL

SEQ ID NO: 318320 - protein, 45 aa, Zea mays
  unsure (1)..(45): unsure at all Xaa locations
  Clone ID: MRT4577_53384C.1.pep
MAKNYPTVSAEYSXAVDKARRKLRALIAEKSCTPLMLRLTWHYAG

SEQ ID NO: 318321 - protein, 92 aa, Zea mays
  Clone ID: MRT4577_53385C.1.pep
TIFDIDVETAFEEKPWKFPGADISDFFNFGLDEEKWKDFCKQLDQLRLESTMQSRIRVYESGRSEQDYDPDLPPELAAVTGHPDISAAVAIK

SEQ ID NO: 318322 - protein, 83 aa, Zea mays
  Clone ID: MRT4577_53386C.1.pep
PARGSSFPSVYEPASVPQEQMNQARIKIKVVPRAGFFLRKKKTVVRLFCALAPRAVILALTCVRVSHQCSCFRLRLRVGYVQQ

SEQ ID NO: 318323 - protein, 76 aa, Zea mays
  Clone ID: MRT4577_53387C.1.pep
PFLSLVIEEEGGFLFRPYGVHSSLVRAYLIYMCGCLYYYNYDLTVPTCLYLNVRRRTGAVFNTREIPADSYTKNVR

SEQ ID NO: 318324 - protein, 54 aa, Zea mays
  Clone ID: MRT4577_53388C.1.pep
VTAVCYRLGHMYSRGGLYNGWSFMDEMLGSYGKAWRERGLVVHDLACLIKPFTK

SEQ ID NO: 318325 - protein, 176 aa, Zea mays
  Clone ID: MRT4577_53389C.1.pep
YEFGTRLAPEMSKTGKATTSTDVFAFGAFLLEVACGRRPMERDDDLDLPGLVDLVLECWKAGRIVEARDKRIGKCDEADVELVLKLGLLCSHPDPRCRPSMRQAVQMLEGAAPVPETPPKDLASNSRLFYGYSESFDEFATMFPATSEVTSVTTQPSSSHSTGEGQQVSSEQITNV

SEQ ID NO: 318326 - protein, 86 aa, Zea mays
  Clone ID: MRT4577_5338C.1.pep
LSVEGRENRGSPPKSAPVAVLSASLQPVGVPWGCHLRLRSVFPASCGSRWARIGGDSSLESGSATDPSCLIVQLPHHLKSRCEPRM

SEQ ID NO: 318327 - protein, 60 aa, Zea mays
  Clone ID: MRT4577_53390C.1.pep
RSSSWEWTNPHGEHSDGHRRAPTYNIAHKKDRCYYCARSINLILFSYYGLVVNYYKYIHL

SEQ ID NO: 318328 - protein, 81 aa, Zea mays
  Clone ID: MRT4577_53391C.1.pep
KTKPFYTFLNLGCTVSSYKNTTQNFFFTCTPPNFVSFPLHFYAQLIAFPLCILFLDKKLIDLATNLFIPSFTLYHPILFGP

SEQ ID NO: 318329 - protein, 77 aa, Zea mays
  unsure (1)..(77): unsure at all Xaa locations
  Clone ID: MRT4577_53392C.1.pep
SVSWAKISFKKRRLCGFSESDKKEAFGGSIAXLXLLAHLGVEIXWEMVPLERLXXAYPFHTLNLWAGQTCFSSQGYT

SEQ ID NO: 318330 - protein, 72 aa, Zea mays
  Clone ID: MRT4577_53393C.1.pep
ELISRRPPFFFFFFFFFWMFVFDPQFTCKILIRGRRSQNMLKTKGTPIQRNKVRLRNSITNGPGSGQTKNEK

SEQ ID NO: 318331 - protein, 47 aa, Zea mays
  unsure (1)..(47): unsure at all Xaa locations
  Clone ID: MRT4577_53394C.1.pep
EAKXFVLIIXRTERRIVRVFMNFLQQNRPTKSKKTYVYRHKLHYGNQ

SEQ ID NO: 318332 - protein, 82 aa, Zea mays
  Clone ID: MRT4577_53395C.1.pep
PVLLLYGSAGHGLHQKRPGPPKLHALEARTKGDRVDEYTHNDGGAHHSLWGIYCGTYNGLYEDKQSYIITGRKLQQWQAIYT

SEQ ID NO: 318333 - protein, 436 aa, Zea mays
  unsure (1)..(436): unsure at all Xaa locations
  Clone ID: MRT4577_53396C.1.pep
LEAGRAFKRKKEEXCSILSKSPDEYWQEIRAVQSTHEVALANRLKYSLDENDKDDGVNIEVIGDNKIASPSMPPTSVDEPILVGSEEIARVTSLWSGIPVQKLTADETKLLVGLDDELRKRVIGQDDAVVAISRAVKRSRVGLNDPDRPIATLLFCGPTGVGKTELTKALAASYFGSESAMIRLDMSEYMERHAVSKLIGSPPGYMGFGEGGTLTEAVRRTPFTVVLLDEIEKAHPDIFNILLQVFEDGHLTDSQGRRVSFKNTLIVMTSNVGSTSISSGRRSIGFSTQRDTEETTYAAMKSLVMEELKAFFRPELLNRLDEVVVFHPLEKTQMMAILNLILQEVKSRLLALGIGLEVSESMKILISQQGYDRSYGARPLRRAVTQLVEDVISEAILFGQFKPGDTILMGTDATGKPCLSRLNDQTVQLSDTAPTI

SEQ ID NO: 318334 - protein, 58 aa, Zea mays
  Clone ID: MRT4577_53397C.1.pep
FRAKRPGWSRFFFFLLSLLVSPGRERERFTPADGRTKSPPIDCKKGPAARWKGWARRE

SEQ ID NO: 318335 - protein, 132 aa, Zea mays
  unsure (1)..(132): unsure at all Xaa locations
  Clone ID: MRT4577_53398C.1.pep
KHKEERTKNAADRDTPGKGTPRRRGATGTXGKRRASSNAEGXEENRRAHRERRGGGPGRPRQXSXESRXEETQDQKTKDGKPQGEGRKEGGDPPGSKGDKGTREXXGTDKETTTQGQDEPGKRGAKDHEAGA

SEQ ID NO: 318336 - protein, 412 aa, Zea mays
  Clone ID: MRT4577_53399C.1.pep
LAYTYVGYEGVGYPRVRIDERSVHGGAALVLRLLVCVVAARAVSAVADGPLLNGNFEDPPNQSQMSGSVVTGEHAVSYWKTSGHIEFICSGQKQGDMVLTVPDGAHALRLGSGASIQQQISLTRGLYYSLTFSASRTCSQDEMLNVTAAPVSGSPAQTGELPTQTVYTSSGWDSYSWAFRADAGLMSITVTHNCGEEEDPACGPIVDAFAIKTLSQPEASQNNMLRNGDFEEGPYIPPDSQWGVLVPPVDEDDVSPLPGWKIMAYKKSVKYIDSAHFAVPSGARAVELVSGVETALMQEVYTTVEGSWYRLEFSAGDADGCASSYDDGSSSGMKVKAYAGTAETTVDVDFRDAGGSKRGKIEFRATASPTRVVFVSLGYHTKSDNSGTLCGPVVDDVSLVPIPQPYARRLLL

SEQ ID NO: 318337 - protein, 87 aa, Zea mays
  Clone ID: MRT4577_5339C.1.pep
HPGSLEDIVEHHLQAGRTISWSRYYTWTTYDETDSGPRSWAGPAREEEYSFYPRRSIVLVLAGDVTGCGFCVSLWRTRPLLVLGIGS

SEQ ID NO: 318338 - protein, 70 aa, Zea mays
  Clone ID: MRT4577_533C.1.pep
GIYIRTYVRTRRRPAHAVCESIVASFTSRMASTTAGSKYDVAARIIIVQAPSRSEAGNVFACLPRVAQRG

SEQ ID NO: 318339 - protein, 270 aa, Zea mays
  unsure (1)..(270): unsure at all Xaa locations
  Clone ID: MRT4577_53400C.1.pep
GYLEAGEMLNVTAAPVSGSPAQTGELPTQTVYTSSGWDSYSWAFRAEAGLMSITVTHNCGEEEDPACGPIVDAFAIKTLSQPEASQXRSTPLHSNDRLCWWLPCCVVLSSPDLLYIILARPGPGXNMLRNGDFEEGPYIPPDSQWGVLVPPVDEDDVSPLPGWNIMAYKKSVKYIDSGHFAVPRGARAVELVSGVETALLQEVYTTVEGSWYRLEFSAGDADGCASSYDDGSSSGMKVKAYAXTXETTVDVDFRDAGGSKRGKIEFRATA

SEQ ID NO: 318340 - protein, 65 aa, Zea mays
  Clone ID: MRT4577_53401C.1.pep
HTTNPYTHHVLSFTQAPLPQGIGAIQPRVCPQHSIHSLHNLYPHILSRTFLTHSLPSLHTLTDKT

SEQ ID NO: 318341 - protein, 104 aa, Zea mays
  unsure (1)..(104): unsure at all Xaa locations
  Clone ID: MRT4577_53402C.1.pep
EVAVFGCRNPEEIPWGSVGAEYVSEFTDVLNDQEKAAXHLRGGANXVVISALNTVAPMFVVGVIEKEYKADINIVSNAXCTTXCLVPFAKVINDKCRYRLKVLM

SEQ ID NO: 318342 - protein, 736 aa, Zea mays
  Clone ID: MRT4577_53403C.1.pep
MEDEEEVVLVFCFLAGRPGLGSLKPCLSFFGSSITPRPQRAWSPSSRGDDRAAVAAYVPSPVRPFAGDGHDLVIGKVCPELFIMVEGWVFSALLVVFLAFTTPCESFYLPGSYMHTYQQGEVIRAKVNSLTSIETELPFSYYSLPYCRPRDGVKKSAENLGELLMGDQIDNSPYRFRVNVNESLYLCTTTPLDEANVKLLKQRSHDLYQVNMILDNLPVRRFTEQNGITIQWTGYPVGYIPEGTSDVYIINHLKFKVLVHKYEGGEVKVVGTGEGMEVISETDKDANSGYEIVGFEVVPCSVKRDPESILKLNMYDKVDPVNCPVELEKSQLVREKEKITFTYEVEFVNSDIRWPSRWDAYLKMEGSKIHWFSIMNSLMVILFLAGIVFVIFLRTVRRDLTRYEELDKEAQAQMNEELSGWKLVVGDVFREPTSPKLLCVMIGDGVQILGMAIVTIFFAAFGFMSPASRGMLLTGMIVFYMLLGIVSGYAAVRLWRTLKGTSEGWRSVSWSTACFFPGIVFIVLTVLNFMLWTRNSTGALPISLFFGLLSLWFCVSVPLTLLGGFFGTRAEPIEFPVRTNQIPREIPTKKYSLLFILGAGTLPFGTLFIELFFILSSIWLGRFYYVFGFLLVVLLLLIVVCAEVSVVLTYMHLCAEDWRWWWKAFFASGTVALYVFLYSINYLVFDLRSLSGPVSAILYIGYSFVVSLAIMLATGTVGFLTSFSFVHYLFSSVKID

SEQ ID NO: 318343 - protein, 75 aa, Zea mays
  unsure (1)..(75): unsure at all Xaa locations
  Clone ID: MRT4577_53404C.1.pep
TNIQGSVIYHLLDFLGGSLTWQDLKAGTEEDVYXRLVTRSMLTSAHILCRSYTTEFVSYFHYCRSLQFVYMPDYS

SEQ ID NO: 318344 - protein, 56 aa, Zea mays
  Clone ID: MRT4577_53405C.1.pep
CEFPVSRWIDAADGYQMIFFHRLGCGWGGGRRREWTLRRKGGFPARPLESQFALRS

SEQ ID NO: 318345 - protein, 126 aa, Zea mays
  Clone ID: MRT4577_53406C.1.pep
IQLQLTPPAREIGQKRRHAKKGVQRQERKGPRRRPPSVVIRENRKQPSGDATREKPPEESANRHQEVIAPSIHAVQSEKSSTRSNTYSQPSSESIPSHHQRKEGSKRKLTEEDARRLLKTPKYKSE

SEQ ID NO: 318346 - protein, 126 aa, Zea mays
  unsure (1)..(126): unsure at all Xaa locations
  Clone ID: MRT4577_53407C.1.pep
KTHKNKKTKKKKNKTSQKNKKNNTKKTARKKTKKKNTKQPTTNQNRKGQQTDPNKLPFSXKXPARALPVPTSTPTHTQAALPRDMVAPWQPQACAGWSSGPWEIQSCLFXLGKTQXIGIXXXRGVN

SEQ ID NO: 318347 - protein, 75 aa, Zea mays
  Clone ID: MRT4577_53408C.1.pep
PYFETYSMFMSCLCKAGRSEDGLHLIHDMSDCGFIPSTVNFMTVVHGLNVEGKHELAESVLLSKWHLRKQRTISY

SEQ ID NO: 318348 - protein, 126 aa, Zea mays
  Clone ID: MRT4577_53409C.1.pep
IQLQLTPPAREIGQKRRHAKKGVQRQERKGPRRRPPSVVIRENRKQPSGDATREKPPEESANRHQEGIAPSIHAVQSEKSSTRSNTYSQPSSESIPSHHQRKEGSKRKLTEEDARRLLKTPKYKSE

SEQ ID NO: 318349 - protein, 371 aa, Zea mays
  Clone ID: MRT4577_5340C.1.pep
MGSGSELTKCLECSERGRKIPGVMGRDGKLPSPGQNGVDAPVEGSSHDESGTLGDAKCDHTSSDGGNPFAHGEVGSNSKEKPDLPVSGDGTEVANAEMGSNGDSDVVSSDIYMGNEEKKLPAATENKAQGMESEKSNGEEKLPTKTTFSYTDEVKERFNRILKYYIGTHNFHNFTTRTKAEDPAAKRFIISFAADRVVSLDGIDFVRCEVVGQSFMLHQIRKMIGLAVAVMRNCAPESIYDVAFRKDVNLNVPTAPEVGLYLDECMFTSYNKKWKDSHEAVSMEPYSEEAEEFKVKYIFTHIAAMEHKEGAVALWLHSLNHRNYPDFRYMETAEHNAGAEVESIAAGAEPKVGAEVENTEEVQMPSDNLSE

SEQ ID NO: 318350 - protein, 246 aa, Zea mays
  Clone ID: MRT4577_53410C.1.pep
GKHANIAPIRAYYYSKDEKLVVYEYIGRGSFSALLHGIKGVCEKTPLDWNTRMKIILGTARGLEHIHSEGGSRLAHGNIKSTNVLLDGDHNPYVSDYGLSSLTSLPITTSRAVAGYRAQETFESRKFTHKSDVYGFGVLLMETLTGKAPLQSQGQDDAVDLPRWVHSVVREEWTAEVFDVQLMKYPNIEDELVQMLRIAMACTAWSPDRRPTMAQVVRMVEELRHSASGSRALSVGSPKESSPLSA

SEQ ID NO: 318351 - protein, 86 aa, Zea mays
  Clone ID: MRT4577_53411C.1.pep
LMAQGPHGQHKYRKLIKAYKGGDGDRTDHAHKLPYVTWGANKPALRASIQRMQSSYIINERHDMKQTSQTQLPEKALNGSNKPADK

SEQ ID NO: 318352 - protein, 126 aa, Zea mays
  unsure (1)..(126): unsure at all Xaa locations
  Clone ID: MRT4577_53412C.1.pep
LSLSVDQIGVGLCGLLRWLLISSPFFPGGYPKQVVASILILGRCCPLQCFQAVFAKCVFLFHFPPGLVFQLGLPAPDFFKKCIKLFEKFIPLGELFCGLTKHFXXXXXXXXXXKKKKKKKKKKKKK

SEQ ID NO: 318353 - protein, 68 aa, Zea mays
  Clone ID: MRT4577_53413C.1.pep
PPPCWFLSVYRFLFLPFMFSLSSLVSIFGAFVLRWTMMICSYIPSNSEQSYAMLIAQSFRESDAIFCL

SEQ ID NO: 318354 - protein, 55 aa, Zea mays
  Clone ID: MRT4577_53414C.1.pep
NGMDPRVGFFFLLKKKGPLFFFFYDYVFSGVILESANKLGGKIKFGGTTGGPNNY

SEQ ID NO: 318355 - protein, 64 aa, Zea mays
  unsure (1)..(64): unsure at all Xaa locations
  Clone ID: MRT4577_53415C.1.pep
SRMKLPQSKERKLAMVKSSLYIMVSVRLLQLARNNMAPRXVPGPFGVSSSLIVCYXGCSQPPQQ

SEQ ID NO: 318356 - protein, 36 aa, Zea mays
  Clone ID: MRT4577_53416C.1.pep
GEIPASQLANKDINQVTKHSFAMGIACYKNDKRLHH

SEQ ID NO: 318357 - protein, 67 aa, Zea mays
  Clone ID: MRT4577_53417C.1.pep
MGTQSFQYRRLGLKKKKKGKKKSPGPVIEECYAFLFSRHSMPHLNPCVCGRSLLWTDIKVLSPPGVC

SEQ ID NO: 318358 - protein, 55 aa, Zea mays
  Clone ID: MRT4577_53418C.1.pep
IFSASTHHLALSRITEDDISTSISVATTARISGSTIQLLTISPCESLPSKQGERC

SEQ ID NO: 318359 - protein, 55 aa, Zea mays
  unsure (1)..(55): unsure at all Xaa locations
  Clone ID: MRT4577_53419C.1.pep
PGVMKQGFACVPPGMCVSALARPVSYKKALAXKVLYNGNGGGPWVCFMFVNWWFV

SEQ ID NO: 318360 - protein, 71 aa, Zea mays
  Clone ID: MRT4577_5341C.1.pep
FGFAQGPLRTYCGGGGPVNANPKSSFRVRRSSVCPDPSAYSNWDRVPLTESPSLTISVSIRTGPNPRLRFL

SEQ ID NO: 318361 - protein, 47 aa, Zea mays
  unsure (1)..(47): unsure at all Xaa locations
  Clone ID: MRT4577_53420C.1.pep
FXXXCVGKPTSKYVPRINQASTALVTHILHTWLEIYVDQNLMGASYK

SEQ ID NO: 318362 - protein, 73 aa, Zea mays
  unsure (1)..(73): unsure at all Xaa locations
  Clone ID: MRT4577_53421C.1.pep
IKAQVQVLREKIDCPFRCLDGQDPRELIRVYLSNVEPIYRCFFYEKKGRSXRLIXDKLGWASFPGFWVALFHL

SEQ ID NO: 318363 - protein, 54 aa, Zea mays
  Clone ID: MRT4577_53422C.1.pep
FLTYYPFLTNDLHMHTLYLVINILKWMIMRIISNFTDAHLRYIKGTTILCMALF

SEQ ID NO: 318364 - protein, 87 aa, Zea mays
  Clone ID: MRT4577_53423C.1.pep
DAKAGSQLFYEPAELMPERGCEDVSFGYDPAMDYNSQIQSQSATMVEDAHMEDALLSTVDEIKKPEKDKKLRSSQESLDKRRKDASA

SEQ ID NO: 318365 - protein, 63 aa, Zea mays
  Clone ID: MRT4577_53424C.1.pep
YVHLRVSNIGLGFRSLDYIRSDDAIPKPYALMCLDYLYENTRLLHEAQRLLINMPCLILTLRD

SEQ ID NO: 318366 - protein, 49 aa, Zea mays
  Clone ID: MRT4577_53425C.1.pep
VHAKEDCCKATDIPGSPHQHQLETRHHHMLSQKWRLLPSYEKTTASPNI

SEQ ID NO: 318367 - protein, 60 aa, Zea mays
  Clone ID: MRT4577_53426C.1.pep
LFFNTEKEYKQNLQDSDREEITIGQIALLYRKAWRSMNRRRILSYTTSIPTATDSSPRAI

SEQ ID NO: 318368 - protein, 119 aa, Zea mays
  unsure (1)..(119): unsure at all Xaa locations
  Clone ID: MRT4577_53427C.1.pep
TPTPPPGPPATRPPPQPGPLAPGAAPPPRAARPASPAPXPQPPSAPAPVRLPCSSSPTQKVGKKKNPVPPPPPXXCSRGKPPSVSLXXRPXPPAFRPXPXPGRPSRPVVGFCRPGSFFS

SEQ ID NO: 318369 - protein, 75 aa, Zea mays
  unsure (1)..(75): unsure at all Xaa locations
  Clone ID: MRT4577_53428C.1.pep
RHEAPTGGQTRGGSDSPTMGMATAFRQLCDDALHGQPLCRLTHLYYMEXSFLRQIERTILTFTKNVNTPVYKNIP

SEQ ID NO: 318370 - protein, 87 aa, Zea mays
  Clone ID: MRT4577_53429C.1.pep
MSAFQEEETCTQSDAGKDFGHQPFEPSLSDVELLNDLSNKVALEWEELFIDPSKPKKRHKKYKRRHHQKKPKKKREKKEDEAEGDKL

SEQ ID NO: 318371 - protein, 122 aa, Zea mays
  Clone ID: MRT4577_5342C.1.pep
RFKKKALKTKSGPKKKVPPLNKRGPFYLPPLRAPGGWGPNQLGGYPNPKGPIPSPSKVKGFMFWPGKTAPFGWVEKKRIFFWFGWGKISPRPPWRTGGGPLFFWPGATGGAQNLGPQWGLGE

SEQ ID NO: 318372 - protein, 397 aa, Zea mays
  Clone ID: MRT4577_53430C.1.pep
RFAVAVQIQSQATMICVDNSEWMRNGDYPPSRFAAQAHAFAVLSGAKTEANLESTVGLVAMAGKGVSVLVPPTNDFGKVLSGMNGLEIGGEANLTAAIQVAQFALKNRQNKQLRQRIIVFVGSPVIDEKNWLEVIGKNLKKNNVALDVVNFGESDNEKPEKLEALVAAVNSGGNSHIIHIPAGRDLSDALFSSPIILSEDRGSDSAAAARGASGFEFDVDPNVDPELALVLLISMEEERLRQEAAAKKAREESSKTENEGQSSTSNGDIVMADAEPEPNSYTEDKGLHCKDEGQLLEKARKIRIEDYISFEELFDGVTSDTMSAFQEEETCTQSDAGKDFGHQPFEPSLSDVELLNDLSNKVALEWEELFIDPSKGHKVFILPRSMKKDICSLAEVY

SEQ ID NO: 318373 - protein, 134 aa, Zea mays
  Clone ID: MRT4577_53431C.1.pep
MFIAKAPILLSKDIYTYILKKKKKKKKKKKKKKKKKKKKKKNKKKKKKKKKKKKKKKKKKKKKKKKPLFFFFLKTPPAGGAPPSGPGPRKKKKKKGGGPGAKKGPQTPGKGEKKKKNPGLKTAPPQGEKKISGG

SEQ ID NO: 318374 - protein, 70 aa, Zea mays
  Clone ID: MRT4577_53432C.1.pep
QQEGSGPIRQLVGESPLPFLRQPEWLSFYQHVGPNVGTLLQMKQLLPFNRLVLTNPAAFYHQPIIGGALF

SEQ ID NO: 318375 - protein, 39 aa, Zea mays
  Clone ID: MRT4577_53433C.1.pep
CSYNESSGMTRIRISVRDTPSGRRNSSLPHGLTTTLQRS

SEQ ID NO: 318376 - protein, 238 aa, Zea mays
  Clone ID: MRT4577_53434C.1.pep
MRVAPRVLFLVRDAAGYGAALADALRPPPGLTRESSPFELPLGKYGLDGEKACAELLSFSDSSGSPQVTIFVLPDYKPPLAACVVNGVLELISSEATSTERTLIVPYITRSSSYHHGTEHATKASTVLHGAEIGATTDYTHLLVGGTTKPPTSLQIRSEPILCLLEMVRVLKVPTVLLVTSGGQQQGKSSTVSDLEVLQCLGEHLAKHTALEFSKGTVLKRGIEKSRIDQEPWRELYG

SEQ ID NO: 318377 - protein, 121 aa, Zea mays
  Clone ID: MRT4577_53435C.1.pep
KEAEGGSPVSGWTTRCPASWAGSSGRCWTRAPRSPRRPRPRRWNWWGTPPVPWVQLEGKDPPPMADIVANLETAFALCKGNDPAPGTGAFGNSSSRASLSVTSMDRSGALALTEPYGRADG

SEQ ID NO: 318378 - protein, 37 aa, Zea mays
  Clone ID: MRT4577_53436C.1.pep
IRTVPSSVFLVRCFSALLSPVPYFWPVLLSLAEGCIP

SEQ ID NO: 318379 - protein, 184 aa, Zea mays
  unsure (1)..(184): unsure at all Xaa locations
  Clone ID: MRT4577_53437C.1.pep
PGDGASDGCSRSVHPGGFVRSKAASELEDAGQAVGRRRGRLLSLMLFLTEAALGDAAQEPTGNNAEICLLPGDYGPCRALLLRYYYDRYTQSCRQFLYGGCEGNANNFYTWEACDDACWRIEKVPKVCRLQVSVDDQCEGSTEQDFFNLSSMTCEKVFSGGCHRSRIDNRLPDEPTGMXGFRAP

SEQ ID NO: 318380 - protein, 354 aa, Zea mays
  unsure (1)..(354): unsure at all Xaa locations
  Clone ID: MRT4577_53438C.1.pep
RFYGAYRKYGKDWRKXFLCPSRQNRDIKIHLVAGAIRDRTSEMVEALYNINKAYLSLPEGTATAAGLIAMMTDHYNILDGSNSDHESNDSPKASRKPQKRGRARFQSVSKTSDARYADLGQSQPSSSSYGCLSLLTKKCAGDLLVGNRPRAVGKRTPRVPGASIYYRDDRGVTDRRAKTVANNGDDEGAHVAALALAEVFQRGGSPQVSETXPNGDHMFLSPVKSSDRKNADSEMGSSKLHGFHLDADYPEGSLGSREAETGEYCKGSSFLTKNEGSGKPLKKGKKSQKRRKKAAHKTGDQFEDDREACSGTDEGHRSIKIKEDSELESLGWPSSTSNKRSRQLFFGGLLTKEQ

SEQ ID NO: 318381 - protein, 80 aa, Zea mays
  Clone ID: MRT4577_53439C.1.pep
GHQAPPLGGEVLHLLLRSRLHGPQAAVPRPGRNEWLRPGVQHPAVAAHNRNRLLLVLHTCSHDLTLSAAAAVLTVALWSG

SEQ ID NO: 318382 - protein, 227 aa, Zea mays
  unsure (1)..(227): unsure at all Xaa locations
  Clone ID: MRT4577_5343C.1.pep
MMACRRLARDAVAASLRRGAATETTASTPAFFSSSSAAASSCSSGAPVASSPIRHFLARYSSPAFQIQPSAAGLGPSFAARVALGLRPQLSGLNLIKGFGTSTMLAMTLHQGQVTAATKEQPSKAIAGPPQGSLKTKLGSFWPLVRKLQLPVGLTFLIMSGLHSPLSLTLNILLLLYCSRPSRYSIYLFLQELRHREVDQNXAVSKEEYMRTRNIITFFPLDKSNII

SEQ ID NO: 318383 - protein, 227 aa, Zea mays
  Clone ID: MRT4577_53440C.1.pep
MCCYFPLPLTSNKHWQCFLRADLTRYYSTYGHVARLAEEIKKGADSVDGVEATIWQVAETLPEEALAKMRAPARSEEHPVISGKQLVDADGILFGFPARFGMMAAQMKALFDSTGGLWQRQALAGKPAGFFFALGTQGGGQEETALTAVSQLTHHGMVFVPVGYTFGAGMFDMDEVRCCSPYGAGTFAGADGRSRLPSDAELQMAAHQGSYFAAFAKKLKAGAAVVA

SEQ ID NO: 318384 - protein, 71 aa, Zea mays
  unsure (1)..(71): unsure at all Xaa locations
  Clone ID: MRT4577_53441C.1.pep
PPRVLGCWLPRCPPSSCRRPASASVPRRAWRCGWRAWRGXXLCXVXXXVXAXALXXAAVXAXCFGEGGAFW

SEQ ID NO: 318385 - protein, 108 aa, Zea mays
  unsure (1)..(108): unsure at all Xaa locations
  Clone ID: MRT4577_53442C.1.pep
VAPPSSKLSSLSRSQPWRTASIPRTRRELFNRWTFYDVHVNDISLNDYLAVTAAKHATFLPHSAGRYSKKRFRKAHCAIVXALLNSLMMHGRINGYKVMAFPLRKHTL

SEQ ID NO: 318386 - protein, 71 aa, Zea mays
  unsure (1)..(71): unsure at all Xaa locations
  Clone ID: MRT4577_53443C.1.pep
KNDSYILSSLRLYVVWETNSLCWALRMRAALYVAQALDYCSSQWRALXHDLNAYRVVFDVDGNPRLSCFGL

SEQ ID NO: 318387 - protein, 233 aa, Zea mays
  unsure (1)..(233): unsure at all Xaa locations
  Clone ID: MRT4577_53444C.1.pep
VRLQVSVRNSRVDPRVRFNLSNFLDKSGLQGYDMSTFIRRYSRYLNEKAVXYRQVAFDFTKVKRGADGVMRTMNTEKLLKTVPIIQNQMDALLDFNVNSNELTNGVINAAFMLLFKDAIRLFAAYNEGIINLLEKYFDMKKNQCKEGLDIYKKFLTRMTRISEFLKVAEQVGIDRGDIPDLSQAPSSLLDALEQHLASLGGKKIKDSTAASRATTLSXNAVSSLASTGLSLTK

SEQ ID NO: 318388 - protein, 77 aa, Zea mays
  Clone ID: MRT4577_53445C.1.pep
MASSMLSATTVPLQQGGGLSDFYGLRSSEYLLMRGKGTSERSVSASSTRLSTLIQRTEYGIAIYPPDRLLYVLPLIG

SEQ ID NO: 318389 - protein, 100 aa, Zea mays
  Clone ID: MRT4577_53446C.1.pep
KISNPRSQCPLRSRPRERQIRHRVLPLPRSKIPPHMSTRNRQNTQDTARASPNRWRNDQVTLRHLQTTIAEEPEKRTGSRYGEQGEKHGRSRRDGTIFFF

SEQ ID NO: 318390 - protein, 49 aa, Zea mays
  Clone ID: MRT4577_53447C.1.pep
HMWCVYVSVYQRVVSNKFLPCILSSCLFFMSSVMSLSLPEITVPLSFWP

SEQ ID NO: 318391 - protein, 67 aa, Zea mays
  Clone ID: MRT4577_53448C.1.pep
KQEQASLLPTRATPPSRSDRRSGTTTVACHLSPAFGISQRRGRPQELLHDSASVVYASIAERGYESS

SEQ ID NO: 318392 - protein, 50 aa, Zea mays
  Clone ID: MRT4577_53449C.1.pep
IGLDVSKNDQVSEGFVSQIFCPAPSRASHEILLLILNETGTVHPSHFISY

SEQ ID NO: 318393 - protein, 157 aa, Zea mays
  unsure (1)..(157): unsure at all Xaa locations
  Clone ID: MRT4577_5344C.1.pep
SPPLRLPPPSSPDPLPPPPDAVEPPRAPAPKRRECISIHIGXGGIQTGNACWELYCLQHXIQPDGQTNXTRASGGGDDAFNSFFTEKGAGKHGPRARFDDLEPTGIDPVRTSAXRQLFHSXQIICDKEDAAKDFRRAPDKIDTEIEDHCLDRIRKLA

SEQ ID NO: 318394 - protein, 74 aa, Zea mays
  Clone ID: MRT4577_53450C.1.pep
SFSRSPGLEGGGDFFFTGYSLLGDLFVLGGVDAFITFFFVTAAGNHVPLAVFGDLGPAVILAVRTGTYLSLFLP

SEQ ID NO: 318395 - protein, 70 aa, Zea mays
  Clone ID: MRT4577_53451C.1.pep
DASYDGGACPADDRARGARAACKRSIGHVGQLYMSWQDPIILRGREDAWEWSACVCIMYAHGARARHWSS

SEQ ID NO: 318396 - protein, 83 aa, Zea mays
  unsure (1)..(83): unsure at all Xaa locations
  Clone ID: MRT4577_53452C.1.pep
FVLDNKAYLYSITLLNMLTSAGRFFXTRHDQVRFPXIHTHMLETTCQYXYWPIHYSSGKQTXSFXIEPNTTLELMMARNYTYT

SEQ ID NO: 318397 - protein, 125 aa, Zea mays
  unsure (1)..(125): unsure at all Xaa locations
  Clone ID: MRT4577_53453C.1.pep
EAHCVKSNSGGGRFGLGGGGSILWWRPCGRLPRWPPEHRWRWRQGMRGQYIEQEESKAAAILTDFTMTQLSGRWGGNILKFSCHSIRVLPLLIVRQREYYTXFCQRXXXXXXKXKKKKKKKKKRK

SEQ ID NO: 318398 - protein, 88 aa, Zea mays
  Clone ID: MRT4577_53454C.1.pep
SPQNTSQHLSFYNLFSMLAPLFVYFYKWTLHSFLFLFIAYDTFIITLHVTLEPKINVYFARLLALVASLAFLTYLYCNLLLSPLYNCL

SEQ ID NO: 318399 - protein, 29 aa, Zea mays
  Clone ID: MRT4577_53455C.1.pep
FALVKLSNINCEPTSSTMSEDHSNYDSSV

SEQ ID NO: 318400 - protein, 70 aa, Zea mays
  Clone ID: MRT4577_53456C.1.pep
EMLITFIQGTCIPKDSLGIHNWPKQMGLSLSFDKKVKNWNAPIIHLPEPPEVPIGIFLRSHGPYHANFHF

SEQ ID NO: 318401 - protein, 82 aa, Zea mays
  Clone ID: MRT4577_53457C.1.pep
MVQTTAETRDTRGRFKNPPRRSCPQPKLPPTPTRAPHTSGHEHHPRESLKTPAHLPWWPQGAQDPWPKTSGREQTLTHSPAT

SEQ ID NO: 318402 - protein, 183 aa, Zea mays
  unsure (1)..(183): unsure at all Xaa locations
  Clone ID: MRT4577_53458C.1.pep
LGPSRPAGGPSQSPASAPRSRSDGSTYAGEFKCGVKHGLGCYHFRXQRKTCLXNGDRYAGEYFADKIHGFGVYSFANGHSYEGSWHEGKKQGLGTYAFRNGDERAGEWDSGVLKKSLPLSDPAVQRALQAARRAANGAFHLPRVEEQVNGAVMAANRGATAARVAAIKAVQNRVDGKFCFIDV

SEQ ID NO: 318403 - protein, 46 aa, Zea mays
  Clone ID: MRT4577_53459C.1.pep
YAVWAGVHRTTKMESIKRKLLAFCYYTTGTIRLNMFDYMTSAYRQT

SEQ ID NO: 318404 - protein, 138 aa, Zea mays
  Clone ID: MRT4577_5345C.1.pep
MPITSLKKKKKKKKKKKKKKKKKKKKKKKKNAQLKKIQNKTRTMRKKEIPNTGPFDIRPGGPFWKARRGYPKKTLPLFAPLKKTPRGARFLLKKKKKKGPPGPQPPPFAPCKGVQFPPGGIPGNMGSPGEIVFRSLSP

SEQ ID NO: 318405 - protein, 79 aa, Zea mays
  unsure (1)..(79): unsure at all Xaa locations
  Clone ID: MRT4577_53461C.1.pep
MMLKDFAAIQQQQQLALAADENMSNLTSASGDQTSVSSHPLPPPSKKRSLPGNPDPDAEVIALSPRALMATNRXVCEIC

SEQ ID NO: 318406 - protein, 193 aa, Zea mays
  Clone ID: MRT4577_53462C.1.pep
IRHQQGLKAVLESNLQLTKLGIFGAFRITHQGLVDSLRSFSMEADIGIKKLRVANRVTASEVQYVELLSLMKIDKEMPLHKQEPRIFHADRLLPDLHGGYVPDSFVPDLHDEYALDIEKCPLCPNYKLVYDCTSKECKTSGSSICRGCVVCISRCLRCGRCIDSEFEFEETFFLGSICRDCVKYSPHHRKIDV

SEQ ID NO: 318407 - protein, 47 aa, Zea mays
  Clone ID: MRT4577_53463C.1.pep
LLFFRVSHGVIQLESFTEDQGCYRRVTPRVLELVSLRVHIRFVGRVG

SEQ ID NO: 318408 - protein, 127 aa, Zea mays
  Clone ID: MRT4577_53464C.1.pep
PVPKFFLFFLTPKAYSVFMAPFWRVKLCSLKSQNLQKLFFFKALIQKGHFPVGGSKTHLVPRFSHLKLKTCPGIPRVFKWSSFMDWIPFVFQRKCPLKFGATKHKLGSLPLKLGWVPGQVPSSPFFE

SEQ ID NO: 318409 - protein, 82 aa, Zea mays
  Clone ID: MRT4577_53465C.1.pep
FEVAKIRPEYQLWVLNDCVWTDPSLTVFKALELSKQIKSDTKKSDVSQLPTLVLHLIQPVASKNAEFNVLLKLDDLRIVVNL

SEQ ID NO: 318410 - protein, 62 aa, Zea mays
  unsure (1)..(62): unsure at all Xaa locations
  Clone ID: MRT4577_53466C.1.pep
KKKGVNFGSXNSLSAEEVRQGLKTYSKWPTFPQLYYKTELIGGCEIVLEMEKNGKLKSTRAK

SEQ ID NO: 318411 - protein, 174 aa, Zea mays
  Clone ID: MRT4577_53467C.1.pep
FGTRPRPFAQLPDPFVRSHLLSSLATASIISITVPTFSSLRLSLCAHPHAHAERLRLTTPVAAAAVAASTTSPDFPAVGAVLGKPTVLVGSGREDRSRGVHAEGGGAMSSSQVVVLTLLEFWSVRCSSSCSASSSSRRANSESSVGLIIRITPTGTEICRRRPPDCFSWQACLH

SEQ ID NO: 318412 - protein, 310 aa, Zea mays
  unsure (1)..(310): unsure at all Xaa locations
  Clone ID: MRT4577_53468C.1.pep
VVVLTLLEFWSVRCSSSCSASSSSCRASSESSVGLIIRITPTGNARRWCMHDEAAVHYIDMIDQTTLGHRMIKKQFNKTPRAGWQIDXLGTELGFDXLHFARIEXQDKTWQRLYXASRTFGSSSQXIFTNVFPVDYSPPDGFGFEVVDXISCLSRYIMXVNDFVAVAIEQANFTRTNHIMWTMGDDFSYQYAESWFRNMDKLIYHVNKDGRVHALYSTPSIYTDAKHLSNVSWPVKYDGYFPYADSKNSYWTGYYTSRPTFKRYVRVLCGYYLAARQIEFLVGRRSSLGLFTTSLEDPMAIALHHDAVSE

SEQ ID NO: 318413 - protein, 548 aa, Zea mays
  unsure (1)..(548): unsure at all Xaa locations
  Clone ID: MRT4577_53469C.1.pep
MAPALLLLRLLALIATAREACAARAFAAASNATAHGATVVAGKLNVHLVPHSHDDVGWLKTVDQYYVGSNNSIQGACVMNTLDSVVDALARDPARKFVVVEQAFFQRWWAEKIPNIQAVVRKLVDSGQLEFINGGWCMHDEAAVHYIDMIDQTTLGHRMIKKQFNKTPRAGWQIDPFGHSAVQAYLLGAELGFDSLHFARIDYQDKEKRKAGKGLEVIWRGSRTFGSSSQIFTNVFPVXRSPPGCFSWQXLALAWHNKPLQASVGYVITGTLWDQXMPFQNDMLMFDYNVEERVNDFVAAAIEQANFTRTNHIMWTMGDDFSYQYAESWFRNMDKLIYHVNKDGRVHALYSTPSIYTDAKHFSNVSWPVKYDDYFPYADSKNSYWTGYYTSRPTFKRYVRVLSGYYLAARQIEFLVGRSFLGMFTTSLEDPMAIAQHHDAVSGTAKQHTTDDYSKRLALGASKVEKGVNVALTCLLSSNGTCAPSVQKFSQIYLTTLFLLLTIXCPLLNISYCPSTEETVSGAKNLVVVVYNPLGRERSDFIQIPVSA

SEQ ID NO: 318414 - protein, 205 aa, Zea mays
  Clone ID: MRT4577_5346C.1.pep
MPTFFKSHRSQWDETVKRTIFVKYIDHNVTEDILACLFQLFGTVVDCRICGDPTSDDGLRFGFVELQHEDEAIASLDLDGYIISVSPLSVSRSRTAICPINPKFLPQSEAEWETCLRTIYCTNISKNVTSSNLRSFCEAYFGKVCRVRLLDNKERSTNIAFIEFVEVYGAIAALGSGGIYVDGVPIRMCPSKSPIRTHCFGKLSS

SEQ ID NO: 318415 - protein, 217 aa, Zea mays
  Clone ID: MRT4577_53470C.1.pep
MAGGGDKVDYVFKVVLIGDSAVGKSQILARFARNEFSLDSKATIGVEFQTRTLVIEHKSVKAQIWDTAGQERYRAVTSAYYRGALGALLVYDITKRQSFDHIPRWLEELRGHADKNIVIMLVGNKSDLEDERAVSTEDAKEFAEKENLFFLETSALQATNVENAFQTVLTEIFKIHSKKNMAADPRANGAAPSLAGKKVIVPGPAQEIPKSKCCSSM

SEQ ID NO: 318416 - protein, 228 aa, Zea mays
  unsure (1)..(228): unsure at all Xaa locations
  Clone ID: MRT4577_53471C.1.pep
MGSKVGLLRNARRWCMHDEVVVHYINMIDQTTLGHRMIKKQFNKTPRAGXQINPFGHSAVQAYLLGAEICSNVFPVVYSPSNGFGFESLXDDMLMFDYNXLKNELMIFVAAAIEQANFTRTNHIIWTMGDNFSYXYIESWFRNMDKLIYRVNKDGRVHALYSTPSIYTDAKHLSNVSWPVKYADYFPYADSKKSYWTGYYTSRPTFKRYVRVLSGYYLAARQIEFLVG

SEQ ID NO: 318417 - protein, 143 aa, Zea mays
  Clone ID: MRT4577_53472C.1.pep
YRCHSTSHFYLKPHIFDVLSSSLTASHACCFNNCRYRAVTSAYYRGALGALLVYDITKRQSFDHIPRWLEELRGHADKNIVIMLVGNKSDLEDERAVSTEDAKEFAEKENLFFLETSALQATNVENAFQTVLTEIFKIHSKKN

SEQ ID NO: 318418 - protein, 98 aa, Zea mays
  unsure (1)..(98): unsure at all Xaa locations
  Clone ID: MRT4577_53473C.1.pep
MAGGGDKVDYVFKVVLIGDSAVGKSQILARFARNEFSLDSKATIGVEFQTRTLVIEHKSFFAHIWDTAGYERYRAVTSAYYTGALGALLXLDITKLQI

SEQ ID NO: 318419 - protein, 216 aa, Zea mays
  Clone ID: MRT4577_53474C.1.pep
MASGEKVDYVFKVVLIGDSAVGKSQILARFARNEFSLDSKATIGVEFQTRTLVIDHKSVKAQIWDTAGQERYRAVTSAYYRGALGALLVYDITKRQSFDHIPRWLEELRGHADKNIVIMLVGNKSDLEDERAVSTEDAKEFAEKENLFFLETSALQATNVENAFQTVLTEIFKIHSKKNMAADPRANGAAPSLAGKKVIVPGPAQEIPKSKCCSSM

SEQ ID NO: 318420 - protein, 181 aa, Zea mays
  Clone ID: MRT4577_53475C.1.pep
MELWPRWPWKDGDARNKSPQKVLRHFPLIPRLRRMFATAKIYEEAQWHKLKRKEVENELSHPADGKDFDVFLEPLVYELQELWLGVSTFDALSRKDFDLHAAVIWCIHDYPGLSTLSGRVTRGYYACVHCDKDPCSRRIRNKICYIGHRRWLSHDHPWRKKKDYDGQIENRDKPQQFSTTE

SEQ ID NO: 318421 - protein, 108 aa, Zea mays
  unsure (1)..(108): unsure at all Xaa locations
  Clone ID: MRT4577_53476C.1.pep
MALGATRRSTRRWAPRSAAVVRCGLLHVEPWAPTMDSQSMASQFFAVSLFPYLGFLYFMTRSKTAPGLTLFGFXFFLLVFVSATSTCYFSDPPSPYSSFACQCLAKSM

SEQ ID NO: 318422 - protein, 59 aa, Zea mays
  Clone ID: MRT4577_53477C.1.pep
TLRGINLKPMLNMIKPVQYVTFSSDNQTLFSCTLILNTPVELPYFYHFNFLPYIPILIP

SEQ ID NO: 318423 - protein, 84 aa, Zea mays
  Clone ID: MRT4577_53478C.1.pep
GKSLRVALLLVVTQTMFKPGLNRRPTGDSVPGQTNKQTTNPSGGLIFRPKRHFHPGNRKAHFPGAGAKTFDKHAGQQQQQHQQG

SEQ ID NO: 318424 - protein, 99 aa, Zea mays
  unsure (1)..(99): unsure at all Xaa locations
  Clone ID: MRT4577_53479C.1.pep
KVTLPRRFESPVFLPGQSWGLFLAPGGFWGPLWNPGSGIPLFWHQKASGPRGDKNCEKQGRSLFSRKKGRRASSGGAXXLAFFFFFFFFFFFFFFFFFF

SEQ ID NO: 318425 - protein, 62 aa, Zea mays
  unsure (1)..(62): unsure at all Xaa locations
  Clone ID: MRT4577_5347C.1.pep
GFVKDVANIIIYDXEEAMVEAVALYNPVSFAFEVTQDFMMYRTGIYSSTSCHKTPDKXNHAV

SEQ ID NO: 318426 - protein, 86 aa, Zea mays
  Clone ID: MRT4577_53480C.1.pep
MAPWRAGSAAAGLHKEEESLGFAVSTMHQTPACVGVQARASPCQIALMTIPSGELVKVSEPILEYNVLLRLVPAKKIVVNRGRWDE

SEQ ID NO: 318427 - protein, 87 aa, Zea mays
  Clone ID: MRT4577_53481C.1.pep
AFPVGRICRSATRVVLVPSIRDANHDVVFPQPALDMKSQIVSLSNPGIFEANKVKVGCCTVDILKQISGEEISRTAADGQPIDRLSR

SEQ ID NO: 318428 - protein, 55 aa, Zea mays
  Clone ID: MRT4577_53482C.1.pep
VGKQDANCMECTHNEMQTQKTLAEARCLYVIELKAMYISFLITFFILIFYNILLS

SEQ ID NO: 318429 - protein, 120 aa, Zea mays
  Clone ID: MRT4577_53483C.1.pep
RELLRAAAGGGGAGLLLLLLLLPAEVAVGVVPLAVVGHLSHHHLPPPLLLLATRTFAPFFLLQRINAAERGQKLYLHYSGFETRLHRQWRAATAACSGASSPFVFGAGEACWRRGARLQE

SEQ ID NO: 318430 - protein, 33 aa, Zea mays
  Clone ID: MRT4577_53484C.1.pep
SPPPPPPPPPPPPPPPPPPPPPPPPWHPKIQPF

SEQ ID NO: 318431 - protein, 64 aa, Zea mays
  Clone ID: MRT4577_53485C.1.pep
LTQTRLLAPLPPSLLLQREEHQHIKNKLLLQRRRRLQQQKIRPSPTNLIPHLRTILSTTELNDN

SEQ ID NO: 318432 - protein, 163 aa, Zea mays
  unsure (1)..(163): unsure at all Xaa locations
  Clone ID: MRT4577_53486C.1.pep
RSSPRPRHLLCSVAPPSVVAIHRTPCVRCRNGLAPXANPTHLLHTRHATRESLASYAAHPTHVAAVQGHVLPNALDITAVNWVNAVPLTSPTTLGSVVRLTLAKAKEGVEVGQLVEKLAVATQTVGDAXGELGEKDENFSPASKEYQFGAPVRARPMMASGEG

SEQ ID NO: 318433 - protein, 86 aa, Zea mays
  Clone ID: MRT4577_53487C.1.pep
MARLLPSAAAAVIVADVMMADLPNAQAASDSPAADDAPSGTNHTVGRGYERLLDGHSNALFEDYCDWYIRETLYLGDNLIIETNDN

SEQ ID NO: 318434 - protein, 88 aa, Zea mays
  Clone ID: MRT4577_53488C.1.pep
LLARGREHERRNWVRAPQSIPPVHHRKVYGPCLGASLGRRGGARPSSRACATVGEQQSLVELRHRRTSAYHRGQKTSCNNPRGEVMRI

SEQ ID NO: 318435 - protein, 74 aa, Zea mays
  Clone ID: MRT4577_53489C.1.pep
GRPCFFFFWYECLQLVPQPPQDTKAVVPSLHIPCPSPLMGLQRVSNNSPPVPLCFFDTLLLKKSMGQGTPAPPL

SEQ ID NO: 318436 - protein, 66 aa, Zea mays
  Clone ID: MRT4577_5348C.1.pep
VGDFLSLADLKQVSVPLCLVGTPNAIVLEAHPHFKAWWFGLIERPSVQKVPALNKPSALNGCPVKR

SEQ ID NO: 318437 - protein, 239 aa, Zea mays
  unsure (1)..(239): unsure at all Xaa locations
  Clone ID: MRT4577_53490C.1.pep
MRSRLSHCFWLLVALCFLSRRAAAAPRLPVRAVNLGGWLVTEGWILPSLFDGIPNKDLLDGTQLQFKSVTQNGYVAAEKGGGAGLVANRSQASGWETFKLWRINETTFNLKVFGNQFVGVQSDGSVVATATSPGKSETFRLVRNAGQNRMRIMAANRLFLQANKDSTVTADYGQSTSWGDDDPSVFAVTRVTGLQGEYQICNGYGTAKATPILXEHWSTYIVEDDFRFISESGLTAVRI

SEQ ID NO: 318438 - protein, 141 aa, Zea mays
  Clone ID: MRT4577_53491C.1.pep
MATATTKPAAGRGGRRYALLLALWDSEYAKEVYGGYYNVFVAAFGADDVGVGGGEGPAGDRWHCFRVIAGEFPAPEDLASYDGFVVSGSPQDAHGDEPWIRRLCALIQTVHAMRKRVLGVCFGHQVLCRALGGRVGRARNG

SEQ ID NO: 318439 - protein, 77 aa, Zea mays
  Clone ID: MRT4577_53492C.1.pep
RDRCEDGKENSGVEAAVELASNVEGNTDQEDDQEDIGEAVTTSRVCWKGSILDAQDTMLSSLHSPQAREMRAQEESR

SEQ ID NO: 318440 - protein, 94 aa, Zea mays
  Clone ID: MRT4577_53493C.1.pep
IQDRGDVTFVCLRGVRSMGCCWNRSRRRRTPARGGHTLPYLQRLLPGLPCPTPGGRCRACTALLSGARARTVVFYREANAWKNLRKGETVSDPR

SEQ ID NO: 318441 - protein, 49 aa, Zea mays
  Clone ID: MRT4577_53494C.1.pep
NKRHTCISQHQSIHVRTPSPIRKTMKLHSIAAELSCWGRSWRRMPMRCR

SEQ ID NO: 318442 - protein, 542 aa, Zea mays
  Clone ID: MRT4577_53495C.1.pep
MAAPDARPSSAGPPPARSLLLPLLLVLLLAAYSLPADSAARPSSNSNPRPAFTPPLLKRHQLRRPSSSSAELVAGPANASTKPFTAHYFPQLLDHFAFTPNASTVFRHKYLLNDTFWRRPGAGAGDDGPGPLFVYTGNEGDIEWFATNTGFMFDIAPTFGALLVFIEHRFYGESKPFGNDSYRSAETLGYLTSTQALGDFAVVIRGLKRDLGAEAAPVVVFGGSYGGMLASWFRLKYPHVAIGALASSAPILQFDHITPWSSFYDAVSQDFKSESSNCFGVIRAAWDVLDERGATDKGLLDLSKLFRACKTVKYAYSIRNWLWTAFTYTAMVDYPTPANFLENLPAYPVKEMCKTIDAFPAGADVLEKAFAAASLYYNYTGDQTCNKIEDGDDPHGLDGWQWQACTEMIMPMTISNESMFPPSAFSYDDRSDECFQSWGVRPRPHWITTEYGGYKIDKVLKRFGSNIIFSNGMRDPWSRGGVLKNISSSIIALVTEKGAHHLDLRSSTKGDPDWLIEQRRQEVEIIQGWIDQYHQDMAETSS

SEQ ID NO: 318443 - protein, 66 aa, Zea mays
  Clone ID: MRT4577_53496C.1.pep
EIFKGVKIMAPGGLQVTVLGPPPRGGVPTGPVPAPMLYQTKDFPPLFPKKPGQKKIGGTPKGAPKN

SEQ ID NO: 318444 - protein, 52 aa, Zea mays
  unsure (1)..(52): unsure at all Xaa locations
  Clone ID: MRT4577_53497C.1.pep
MAGLDTFLFTFEPQNQGHPDKLCYQVLDAVLDAXLAEDPDRXVACQTCTKTN

SEQ ID NO: 318445 - protein, 121 aa, Zea mays
  Clone ID: MRT4577_53498C.1.pep
ARAEHRCHWKVVTPNTTVAMAFGPLAAQRYGSELTLGEALEGRGDMYRTLLREATAALLNAYYNAPGGPFLYPTTASVMDHMNGALLSSGQRVLLEGARFRRANAGGGGRTRLMCDFTTCS

SEQ ID NO: 318446 - protein, 50 aa, Zea mays
  Clone ID: MRT4577_53499C.1.pep
IDHLGMGQPPLCSPLSVDGSCWFPTTRVMRGLLLWANASAPSFQAPCHGS

SEQ ID NO: 318447 - protein, 163 aa, Zea mays
  unsure (1)..(163): unsure at all Xaa locations
  Clone ID: MRT4577_5349C.1.pep
MLLMATLPSQPSYLHYGSIEQLILVQPTGGLKGPPTENPPTCPGHVGGPWPWLTPPTNPEPSRLPEANRQGPPCPGPPTEQPPPXQTPPPSPPPXPPPPRPTPHPPPPPPPTVTPPPPPXPPPPPNNTNTQNCNPPPPPPPPPPPPPPTPPPPKHTAPPPPPP

SEQ ID NO: 318448 - protein, 60 aa, Zea mays
  Clone ID: MRT4577_534C.1.pep
MLGEELGPDDLPPVVAAPEWYPAFNESILNQFDGLEHADHVLVNSLRDLKPMESDYLKYT

SEQ ID NO: 318449 - protein, 42 aa, Zea mays
  Clone ID: MRT4577_53500C.1.pep
EGGQTCQKKSILTKHTMLPRSMNSCFFVHHLSHPDTQILNHP

SEQ ID NO: 318450 - protein, 483 aa, Zea mays
  Clone ID: MRT4577_53501C.1.pep
AKGYIRREAMQNNMEPSDDNSLSSTMSNDRIGKDCGSTRSIQSKAEDLPFSPSRSVDNGSPKDILCERDTDCKVEPSVGGPVSPRSPALEDKLVDPLCAQEKCNDEDDQGMAMAYKSDLTCKGEYDVNDQYDGGISTRSKQESNEDDKDATEDEISCRSYEQKSKEDNSCNIEDSSKTYEQNSGEDDTSSLVNGSEKYQCMNIKDEDSSPGGEDTCNKYESKVKRDENYVLGAESIRKNCDENNADVIETGSISERHDGLKIEEENEKLQQAFIEDANSQAGSGSSINERTNSGFSRGSSEAGLDEDQSSTGKSGDSSFFAGFLKKGFKDLSLLNKSMDSVKVSINGHPISERALKKAEKKAGPVDPGSYWYDYRAGFWGVMGRECIGIVPPFIREFNYPMARNCAGGDSGVFVNGRELHQRDLDLLVGRGLPRTSGKSYSLEMSGNVIDEDTGKKLRSLGKLAPTIEKLKRGFGMHVPEEFR

SEQ ID NO: 318451 - protein, 81 aa, Zea mays
  unsure (1)..(81): unsure at all Xaa locations
  Clone ID: MRT4577_53502C.1.pep
HGPRLXEVXGFVGSITSAIGTGVYLGWAYTPEPGLQSLCITYYPTKYXALAEPSFAVEIEVLSMGIYKALNLAANTTDTHL

SEQ ID NO: 318452 - protein, 280 aa, Zea mays
  Clone ID: MRT4577_53503C.1.pep
MQRDLSRSLSPPRRRRRSPSPERYRGRRGRRDRSPSRSRSPYRPSYRRRSPFPSPRRRESCSPSPRRRNSPPPSRKRYRRKSSPSVISSPVTASQSSHLGLEENKNAIDTQRLEEEKKRRRKEVELRLIEEDTAKRVEQAIRKKVEESLNCDEIKREIQRRIEEGRKRIHEEVAIQMEKEKESALNEAKLKVEREKKERNELEKKLEEERKKAEEALRKKAMEQQQKELERYQELERLQKEREEAMKRKKMEEEQQRQNQMKLLGKNKSRPKLSFAFGMK

SEQ ID NO: 318453 - protein, 40 aa, Zea mays
  unsure (1)..(40): unsure at all Xaa locations
  Clone ID: MRT4577_53504C.1.pep
PLSDQVPGLLSAQIAQXLTEMFGLQQPNPGPFAGAGGVPH

SEQ ID NO: 318454 - protein, 124 aa, Zea mays
  Clone ID: MRT4577_53505C.1.pep
GNCFCPCFRASRDNGNSLSIVVMILILSLQCSSLSCRRRSPFPSPRRRESCSPSPRRRNSPPPSRKRYRRKSSPSVISSPVTASQSSHLGLVENKNAIDTQRLEKKKKRRLTEGSYCYCSTCYI

SEQ ID NO: 318455 - protein, 172 aa, Zea mays
  Clone ID: MRT4577_53506C.1.pep
YISLTCYINCRRRKEVELRLIEEDTAKRVEQAIRKKVEESLNCDEIKREIQRRIEEGRKRIHEEVAIQMEKEKESALNEAKLKVEREKKERNELEKKLEEERKKAEEALRKEAMEQQQKELERYQELERLQKEREEAMKRKKMEEEQQRQNQMKLLGKNKSRPKLSFAFGMK

SEQ ID NO: 318456 - protein, 67 aa, Zea mays
  Clone ID: MRT4577_53507C.1.pep
PSLWFCTDASVQTQRKRGQKKMWWFLQWRAALLGKSNQSISSAGTNPHGQPDRARNTNTKHRHHPFM

SEQ ID NO: 318457 - protein, 74 aa, Zea mays
  unsure (1)..(74): unsure at all Xaa locations
  Clone ID: MRT4577_53508C.1.pep
PPPRDGDEGARDARGRGDQEARDAAEGADSYHGAPSSXRXRRGEGGKLPWTDDDYISPPASPIAKRLTALLACP

SEQ ID NO: 318458 - protein, 120 aa, Zea mays
  Clone ID: MRT4577_53509C.1.pep
WRHACLVHPDRGSQTACARLPGHRVPGSSIEPTKSKLWADRPTGRAHTHRDRETARAIWVFFGQAHDTSIVQRDKKEEPTELRAPEIALCANNMGFPGNPGTQNLCQSWFSASKTSTETT

SEQ ID NO: 318459 - protein, 85 aa, Zea mays
  Clone ID: MRT4577_5350C.1.pep
NRREFFNFLRVKFWFWGKIGFNPALGGKKTRVFVLPKTPGKKGGFPPKFGLLETKEPENPPKGVSPSFFFGRGFLDTAKKPLKMV

SEQ ID NO: 318460 - protein, 105 aa, Zea mays
  Clone ID: MRT4577_53510C.1.pep
RRGGLDGLEVKSTGSRACTTAGEPTTAPGTTCGCGLSSSSRIEAPPPSLSLLGRGLRAHLLCITTLAMRRRDGEPPPGDEMKAGAGSGDALGAPARDRSAAPLRN

SEQ ID NO: 318461 - protein, 47 aa, Zea mays
  Clone ID: MRT4577_53511C.1.pep
CVSEKSLDLKRAFGLQIRRFSCFFEVYWYIWVKYSVYVCKNVSVGSY

SEQ ID NO: 318462 - protein, 96 aa, Zea mays
  Clone ID: MRT4577_53512C.1.pep
EDPQNNPQFISTVSRRKNHIGYLFENMGLFFYAKKPPFKVGIWTGTLLGTLISNKKPSGLSTRPFHSFQKMETGTPITTWGSGPTVTLFMGEGETF

SEQ ID NO: 318463 - protein, 93 aa, Zea mays
  Clone ID: MRT4577_53513C.1.pep
AGGFTWQSYNEDINSLGDESFATVGLLEQINVTRDNTDYLWYTTYVDIAQDEQFLSNGKNPMLTVMSTGHALHIFVNGHYQGCVWNVEFQKDI

SEQ ID NO: 318464 - protein, 225 aa, Zea mays
  unsure (1)..(225): unsure at all Xaa locations
  Clone ID: MRT4577_53514C.1.pep
MENRHQVAAPARGEVWAEMKKQVRLAAPLAAGFLLQKVIQTISIMFVGRLGELPLASASLATSFASVTGFSLLTGMASSLDTLCGQAFGAARHQLLGVHKQRAMLVVGAASVPVALVWAYTGDILVWFRQDREIAAGAGSYIRCLIPALFLFGQLQCHVRFLQPQNVVVPXVMLSSGATVALHVAVCWLLVRRLGLGADGAALANAVSNLGKLSALALYIRLSPS

SEQ ID NO: 318465 - protein, 60 aa, Zea mays
  unsure (1)..(60): unsure at all Xaa locations
  Clone ID: MRT4577_53515C.1.pep
DATASAYKRRWPWPAIDGLXGTGAGASTIMGAPGPYPYVEXLWQLQCTPLPAAPYYAPSA

SEQ ID NO: 318466 - protein, 104 aa, Zea mays
  Clone ID: MRT4577_53516C.1.pep
GDPLKTEHYFMPLCNRKPCNKGHMLEIPKYHVGISTRMAVGTEAILVPALKIQLGFLMLFHRERKKKAVRGKGPDKMVVLRCPCSVNGDRAARRHKPTLKTCNL

SEQ ID NO: 318467 - protein, 146 aa, Zea mays
  Clone ID: MRT4577_53517C.1.pep
IGFHVQYRHSALSSLSKNPVRGILEWKATDALRHRSPMTRGPRSSGSPFLANRFPPQQTSQAHAHRLTAILVTDFHRNKLRRLRTISQIPSSLDSRLRSIKLGTTLLSLLIFSAAGCAGTEQQLGTNRQHGDQRRRRRRPSSTLSF

SEQ ID NO: 318468 - protein, 98 aa, Zea mays
  Clone ID: MRT4577_53518C.1.pep
WAQRPRLYSVPSLKLPSRTSRQIRPLSVSHVVFFIGRYCRLSAGGCLCGWHPWPNLCVRDPPSRVNLWSHWGRPFVPPVCCFLVVKQKNVFWCLWREP

SEQ ID NO: 318469 - protein, 46 aa, Zea mays
  Clone ID: MRT4577_53519C.1.pep
YGKTLQELQVLFERKQTLALTFWQEPDTRWRFAVPWRFYRRFVFRL

SEQ ID NO: 318470 - protein, 135 aa, Zea mays
  unsure (1)..(135): unsure at all Xaa locations
  Clone ID: MRT4577_5351C.1.pep
DILQEVPWRHLXGEDINAHQLRHVALAHLXSSLRHSRFFPFNQLRGIELCAXVQQQQLPFTHLPDGYRDQWRSFSQLARSNSTANGQYHQRLPSNQLAGVSPATFLTQPQVLPLYQHVAPNAGTLLQLQQLLTFN

SEQ ID NO: 318471 - protein, 87 aa, Zea mays
  unsure (1)..(87): unsure at all Xaa locations
  Clone ID: MRT4577_53520C.1.pep
FLLSFFMFXSLFFLIRSILFFNYFFFFFKIFLYIFFFFFLFFFYFFILFFFIYFLYFFYFFFLFYYIFIFFYFFIFYFIFFIYIFIF

SEQ ID NO: 318472 - protein, 99 aa, Zea mays
  unsure (1)..(99): unsure at all Xaa locations
  Clone ID: MRT4577_53521C.1.pep
IYYATPGSLSSLRAKTPEPYLSDHLIELMTSATLLFSNEYNLVVGPFFRTLLIYRPYNNVTHIDKYLYARTVLALTMKYSTXTCNLLHFYIQLLPRRHG

SEQ ID NO: 318473 - protein, 148 aa, Zea mays
  unsure (1)..(148): unsure at all Xaa locations
  Clone ID: MRT4577_53522C.1.pep
MAPKAAPAKKGDAKAQALKVAKAGKAGAGXMNTKKXRTXATXHQAEXXKKPGDPKXXRXXXTGRAPEKXNRKXXXPXTTEXARKKKEXNNXRXXXXDXKAXDKKKNKAXAXKKXXDXQAKKGNTXXRPEGKKKAXXKXTPDXXAGGQQ

SEQ ID NO: 318474 - protein, 130 aa, Zea mays
  unsure (1)..(130): unsure at all Xaa locations
  Clone ID: MRT4577_53523C.1.pep
ASISGDYDHEAHQFSDSEAGAYDLSSVMAXVPAKKGLSGDYHGKSQSFSCMSEVGCLQHLHNKETPYMKIWTSRSSLALDXXEHHCHTPPSXNSRTSPGTCCTNLRDLTTDKXVLHRPPPVPVNRSGYRH

SEQ ID NO: 318475 - protein, 123 aa, Zea mays
  Clone ID: MRT4577_53524C.1.pep
LNFLPLLSSLYFPPSLPAPPLTFHEHPAPSSPPHPNSPRPSHSPLLCPYRLLIFYLSMIKFFITSLHTTINNLFIIYSRSSPTLSAISHSLFFAIFTTSPPLSSFHIMTTCLFITSSKSLYPI

SEQ ID NO: 318476 - protein, 59 aa, Zea mays
  Clone ID: MRT4577_53525C.1.pep
QSRMRGIKVFKYGELNGSWTRAPVACLSLYLLHCAKSGLVYQLLISISVADAISALRWS

SEQ ID NO: 318477 - protein, 66 aa, Zea mays
  Clone ID: MRT4577_53526C.1.pep
GHLGTWNQESPMPAREAAIIRVQPTPRQPTRVRTGISWRRNYVSPSSMLASSPRRRGVAAGNSENR

SEQ ID NO: 318478 - protein, 59 aa, Zea mays
  unsure (1)..(59): unsure at all Xaa locations
  Clone ID: MRT4577_53527C.1.pep
QASKISVGVRSIFCIVEKXEPNXWKKLVRDDQRAPHFVKVDWDKWVDEDDDGMLCTCIF

SEQ ID NO: 318479 - protein, 108 aa, Zea mays
  unsure (1)..(108): unsure at all Xaa locations
  Clone ID: MRT4577_53528C.1.pep
AIIAAGSLPPQTWARTQQLAVVATAVVALVLLAGAVTSEAAIICGGGGVFFLPCFXYARGXGSGPSAGCCGGVXSLNNGGLATGDRXAGCGCLLNAAAGVWGLFAGDA

SEQ ID NO: 318480 - protein, 124 aa, Zea mays
  unsure (1)..(124): unsure at all Xaa locations
  Clone ID: MRT4577_53529C.1.pep
RLQLPAPTFPELPTRPTPPYHYNISDSTFQHHIXKNQWRLXFIIYITSHSNLSPLIIHARTDFTSQIYDLIPHLLHKXPSYDQXQRDYYITSSSEANNHSSFVGNITAHMXTQQSYNFNDSFSY

SEQ ID NO: 318481 - protein, 185 aa, Zea mays
  Clone ID: MRT4577_5352C.1.pep
YLPSPSLPPLPRLRLAPAPSASLARPGAAPRSLFTPTAPTRSPTTSHLCLHSISTRGRAESGGACPGSQAPAPRHGSVNSLARRDQARVNSYSAAGLARARCHRLDLAMTRRRAEAATAPSLLQLLLALHCGVLFLQCSAASAMGADGSCQTHLSRDSSHLNLGGLVSCKSCIWTITCSLVQFQN

SEQ ID NO: 318482 - protein, 102 aa, Zea mays
  unsure (1)..(102): unsure at all Xaa locations
  Clone ID: MRT4577_53530C.1.pep
FAGRLLADGPVLLAVPPCTAGRDNPRARHRSEDTCHLKSKLVPEISSVRSRTGTTGGGAWRMMCCVRERSRLSSSSQLWVXGPXSPYNGXYLFICAELLLYX

SEQ ID NO: 318483 - protein, 43 aa, Zea mays
  unsure (1)..(43): unsure at all Xaa locations
  Clone ID: MRT4577_53531C.1.pep
LSRARMFSMVKSRCQCVGKPHKVASTSDVTRAMRAMLVLQENX

SEQ ID NO: 318484 - protein, 66 aa, Zea mays
  Clone ID: MRT4577_53532C.1.pep
ACCWFFFSEGNNHLSVYSPWLLTSHLLFITTRHPVSSVHTGTVAQGTGCGSPKAGDNDKRVVGNYA

SEQ ID NO: 318485 - protein, 51 aa, Zea mays
  Clone ID: MRT4577_53533C.1.pep
PAGRSHTPACPPTSPFPSSSPQRRGLSAPPFCDYRTVYYAILRGLELYSLV

SEQ ID NO: 318486 - protein, 165 aa, Zea mays
  Clone ID: MRT4577_53534C.1.pep
MSSVFSGDETAPFFGFLGAAAALVFSCMGAAYGTAKSGVGVASMGVMRPELVMKSIVPVVMAGVLGIYGLIIAVIISTGINPKAKPYYLFDGYAHLSSGLACGLAGLAAGMAIGIVGDAGVRANAQQPKLFVGMILTLIFAEALALYGLIVGIILSSRAGQSRAD

SEQ ID NO: 318487 - protein, 165 aa, Zea mays; identical to SEQ ID NO: 312258
  Clone ID: MRT4577_53535C.1.pep

SEQ ID NO: 318488 - protein, 165 aa, Zea mays; identical to SEQ ID NO: 312258
  Clone ID: MRT4577_53536C.1.pep

SEQ ID NO: 318489 - protein, 203 aa, Zea mays
  Clone ID: MRT4577_53537C.1.pep
MNPEYDYLFKLLLIGDSGVGKSCLLLRFADDSYLDSYISTIGVDFKIRTVEQDGKTIKLQIWDTAGQERFRTITSSYYRGAHGIIIVYDVTDQESFNNVKQWLNEIDRYASDNVNKLLVGNKSDLTANKVVATETAKAFADEMGIPFMETSAKNATNVEQAFMAMAASIKDRMASQPAAANARPATVQIRGQPVNQKTSCCSS

SEQ ID NO: 318490 - protein, 95 aa, Zea mays
  Clone ID: MRT4577_53538C.1.pep
KLYISRQQGMSTGTKKAHIQRVRNNAAGHNIHHKEANRSTMTKEPQTSTGASATLIIGNLESEPETGTTPTSRNKATQEGSTASAPQMPTFHGPL

SEQ ID NO: 318491 - protein, 222 aa, Zea mays
  Clone ID: MRT4577_53539C.1.pep
MKIWVSACSIKDRIRLPAHPPPLFLPLRPSDAAARRPSEAGNPPPRGRDRNRKPEAKMSSVFSGDETAPFFGFLGAAAALVFSCMGAAYGTAKSGVGVASMGVMRPELVMKSIVPVVMAGVLGIYGLIIAVIISTGINPKAKPYYLFDGYAHLSSGLACGLAGLAAGMAIGIVGDAGVRANAQQPKLFVGMILILIFAEALALYGLIVGIILSSRAGQSRAD

SEQ ID NO: 318492 - protein, 78 aa, Zea mays
  Clone ID: MRT4577_5353C.1.pep
TPDGRLWSVVNEPVSSCSTGVMVGWCYHALQVSCCSVHEFSCKLCWGHLAPGCAVILPLVKYSYLGYILRYCRYLNTK

SEQ ID NO: 318493 - protein, 203 aa, Zea mays
  Clone ID: MRT4577_53540C.1.pep
MNPEYDYLFKLLLIGDSGVGKSCLLLRFADDSYLDSYISTIGVDFKIRTVEQDGKTIKLQIWDTAGQERFRTITSSYYRGAHGIIIVYDVTDQESFNNVKQWLNEIDRYASDNVNKLLVGNKSDLTANKVVATETAKAFADEMGIPFMETSAKNAINVEQAFMAMAASIKDRMASQPAAANARPATVQIRGQPVNQKTSCCSS

SEQ ID NO: 318494 - protein, 179 aa, Zea mays
  Clone ID: MRT4577_53541C.1.pep
PAGLRRSVTAVPSTSNPARRILPPRPKLKGATRSKDYGETRELVLTCNQAIQSPDDPTAISPFKSFPARLPHGSVEQERGRQGLKGPRGPIYTLLVSPIEPNLSDHAHGVCGNTIAGMTLATRSPPPPVGNGLALHGDRNRRAAWARNKVRLLRGSLSRRGSRVAISVAIGAIRLRRQP

SEQ ID NO: 318495 - protein, 186 aa, Zea mays
  unsure (1)..(186): unsure at all Xaa locations
  Clone ID: MRT4577_53542C.1.pep
TEQGNPPLRGTQRSRKPETKMSSVFSGDETAPFFGFLGAAAALVFSCMGAAYGTAKSGVGVASMGVMRPELVMKSIVPVVMAGVLGIYGLIIAVIISTGINPKAKPYYLFDGYAHLSSGLACGLAGLXPAGMAIGIVGDAGVRANAQQPKLFVGMILILIFAEALALYGLIVGIILSSRAGQSRAD

SEQ ID NO: 318496 - protein, 204 aa, Zea mays
  unsure (1)..(204): unsure at all Xaa locations
  Clone ID: MRT4577_53543C.1.pep
MNPEYDYLFKLLLIGDSGVGKSCLLLRFADDSYLDSYISTIGVDFKIRTVXEQDGKTIKLQIWDTAGQERFRTITSSYYRGAHGIIIVYDVTDQESFNNVKQWLNEIDRYASDNVNKLLVGNKSDLTANKVVATETAKAFADEMGIPFMETSAKNAINVEQAFMAMAASIKDRMASQPAAANARPATVQIRGQPVNQKTSCCSS

SEQ ID NO: 318497 - protein, 108 aa, Zea mays
  Clone ID: MRT4577_53544C.1.pep
PEQKAWGVNQNFPKGGPPPPGNQVSGEQLTPLGPKKNPGGAPPGGDGVNSGRKGQAVKNWQNPRRWGPGGGFWSGNYFFGKTGRGQTGSPGPRPLKKAPPLPDPPGEG

SEQ ID NO: 318498 - protein, 146 aa, Zea mays
  Clone ID: MRT4577_53545C.1.pep
HTMARCYIDRYGYRRCRSSAWNNWVRWVVLVVVVVGFLLLFVLCSCLTARRRRKAGRKPFYGTGWAARPGLYNNQNNNQYNAQPYYANQPAPPYDAATNNNNNGYYGGGANQNYYGQQNGVELQQPQPSYGGGGYAPPPGPPPAKA

SEQ ID NO: 318499 - protein, 60 aa, Zea mays
  Clone ID: MRT4577_53546C.1.pep
FILCASECHSTYGPHWSGTVNKVLFSSSCSSLRIVRWGVNVPDNNKVSLLFQTKLQYVLY

SEQ ID NO: 318500 - protein, 72 aa, Zea mays
  Clone ID: MRT4577_53547C.1.pep
TWAVAGAGGGPRRLPGSVLGDAAALGRRRVVVAVEPALLRPGVDVVGRHQHRRENLTADRPQREPRKPNESR

SEQ ID NO: 318501 - protein, 229 aa, Zea mays
  unsure (1)..(229): unsure at all Xaa locations
  Clone ID: MRT4577_53548C.1.pep
SAGIPSSTSRSFALCCSLPLALRSASSASSGRSRPPSVPRRPSXSPSSHPQLCTCARCAPRSSTVSSLPTPRSPIRSVSHLANTGASHPRXAAARGAPRGRLQSRPSSRARRGPSLPRPSSRPSAPSSSSPTSTRPIQSAAXRSGHPSRSTVKAAASSSARVPSSSCARGTPSTSSVKDRSRPARYLFFSIHPSPSAVAFLRIAHFTFPPLYRIRTLSFFEQKKKKKSG

SEQ ID NO: 318502 - protein, 73 aa, Zea mays
  Clone ID: MRT4577_53549C.1.pep
IQSLIFSIMPPQSNLVWLLHIETTLSILDVTAHIRSHIFTRIASVVVLFSRRGVPGETTPRTAKQRERPQRRC

SEQ ID NO: 318503 - protein, 98 aa, Zea mays
  Clone ID: MRT4577_5354C.1.pep
IRPSYSGCSIGLSVWIISVCFPCTLKTVMFVWQTAFWDPPLGLDKHLWRRFFFSCPPSIYIIHGTPSGAVNVSPTFRTGSKFCELSCPVICTAPFFSG

SEQ ID NO: 318504 - protein, 54 aa, Zea mays
  Clone ID: MRT4577_53550C.1.pep
SHASAQCLLCEQRYAFEFGIKLTVVFFFPSPLSLSPVIGNRTSTFPYSISSRSR

SEQ ID NO: 318505 - protein, 166 aa, Zea mays
  unsure (1)..(166): unsure at all Xaa locations
  Clone ID: MRT4577_53551C.1.pep
LMLRGMDFSNKTAIFLASGKIXKAEKNMASLLEMFPLLQTKETLASEEELAPFKMAAVDYSICAQSEVFVTTQGGNFPHFLMGHRRYLYGGHSKTIKPDKRRLAVLLDNPRIGWKALKRHLLNMRAHSDAKGIEMKRPNESIYTFPCPDCMCRLNRTEHSKSKQSR

SEQ ID NO: 318506 - protein, 109 aa, Zea mays
  Clone ID: MRT4577_53552C.1.pep
KKRKYELGLLSANTKLSSSKTVRRVRVRGGNVKWRALRLDTGNYSWRSVAGTRMTRMLNVVYNASNIDLVRTHTLVMSAIAQVDTPPFKQWYLTHSGADIGTKKKTPAA

SEQ ID NO: 318507 - protein, 46 aa, Zea mays
  Clone ID: MRT4577_53553C.1.pep
RLLFFLYIIGKHKRLFSDFDTSFRFAMPSIYNMCFWKNLRSTLKPN

SEQ ID NO: 318508 - protein, 64 aa, Zea mays
  Clone ID: MRT4577_53554C.1.pep
LGENHRDPKLNPPPPFCFCRGFPPGGGFKLGPQKTCPHLCSNPALTCDGSRGQRGGGHPSLTPG

SEQ ID NO: 318509 - protein, 71 aa, Zea mays
  unsure (1)..(71): unsure at all Xaa locations
  Clone ID: MRT4577_53555C.1.pep
RSSSPEGCRWSYRPCRRRXPPAPLKKNLAAACRLSARALPPPFDKGFSSEPSSQRVSIVVHARSRDQLALV

SEQ ID NO: 318510 - protein, 105 aa, Zea mays
  Clone ID: MRT4577_53556C.1.pep
PKNGKSMKIKKGCKTKKLLTLIKSHFFQPMFKCPTRFVHKITPHQMCLVVEALKSFLLGPNFFVTIKTHCNKTPIFSQYAHLNIRYMVPPQKKKKQKKKKKKKKK

SEQ ID NO: 318511 - protein, 83 aa, Zea mays
  Clone ID: MRT4577_53557C.1.pep
KTPGPRKNLVLIFKGGRGGETSPKKKGGGKKVGGGGEKFLGVCQKIKTCKQRGGKKKGGTFGPSPLASLGGFFRGKPKKPFGP

SEQ ID NO: 318512 - protein, 84 aa, Zea mays
  Clone ID: MRT4577_53558C.1.pep
TTFSPLSRFHFPSLSRSFFTGSFSIDSSFSRTALSILLYNFISCPKVPVHILYLGNMLVVFLRTFGRRRPPTFLFMICILIFFD

SEQ ID NO: 318513 - protein, 51 aa, Zea mays
  Clone ID: MRT4577_53559C.1.pep
SVQSIPSAYSPPPTYGPHMAATGKLRRCPCVGDCSGDHLRLLRPGACMPAT

SEQ ID NO: 318514 - protein, 84 aa, Zea mays
  Clone ID: MRT4577_5355C.1.pep
VSLNTFVANFIPRTLAYVSEGFMHNARKREMLKTCAIRKKEKKQCYPCSTQDSYGQASWAFSSLHTKLYLAPINRESVLCINSP

SEQ ID NO: 318515 - protein, 67 aa, Zea mays
  Clone ID: MRT4577_53560C.1.pep
WQLLITDARSTHRLTHNVSVRLHVPSGSDLMVTEVTFVLHLSVLSSIHTIILLKITIRYFDYTILLA

SEQ ID NO: 318516 - protein, 148 aa, Zea mays
  Clone ID: MRT4577_53561C.1.pep
PGKNSTKKEKKKKKKKKKKKKKKKKKKKIPLPTEIPTSTSTSHGGWAQTHQGWAPRVYYQEGDYCSEEGRSGAPAGFGRHGGGVQKHVVKEKFEEVNTVSRAGANPPHHHGPHGGHGFGGGETRVKKDINTCTGEFHEGRESFLPRVN

SEQ ID NO: 318517 - protein, 57 aa, Zea mays
  Clone ID: MRT4577_53562C.1.pep
RLEQYLDHTVVPILLSGLATVAKVRPEQPIEYLAQYLLDNKYKYDNNQENSSINGNQ

SEQ ID NO: 318518 - protein, 74 aa, Zea mays
  Clone ID: MRT4577_53563C.1.pep
AWHFWVSEAVSMVVDLHLLLGIRSYFLPALTQIVLLKLKCCLYIPLVTDTILLQFPSTLQIRYRLGSWLAKPAV

SEQ ID NO: 318519 - protein, 106 aa, Zea mays
  Clone ID: MRT4577_53564C.1.pep
VVYSSASGSRTGALGPLERQFELKRNQIRERTRDIQKIIKLTNEAHLTALHLHGVEYAHPDLVELHDATPSIDLNAEDANGMTALAAGEAATALSDERPGNQADRL

SEQ ID NO: 318520 - protein, 83 aa, Zea mays
  Clone ID: MRT4577_53565C.1.pep
ASQCLQDVKHAAHQLDRQLHRAVHVDVPIVQRDAMLQDHLTIHELILGDGDSLFDKEADHHIVNRSRLVHHKGQNVTIKPTRK

SEQ ID NO: 318521 - protein, 113 aa, Zea mays
  unsure (1)..(113): unsure at all Xaa locations
  Clone ID: MRT4577_53566C.1.pep
EKRVRPTRTVESKISTDLYYGKTTNLQLGDSYEQERLTTIICRYYRGAHGIINVXDITDQDSCHKDNQWTNENELNACENDNNIIVMNTYDQDQNILISYKAXNVIADDIGIL

SEQ ID NO: 318522 - protein, 59 aa, Zea mays
  Clone ID: MRT4577_53567C.1.pep
NPPRLRLGTKITWIKTVVYPHWILEDRAGGVFFGTGPLTFNRSVTLFFLFQKKNRFFFF

SEQ ID NO: 318523 - protein, 99 aa, Zea mays
  Clone ID: MRT4577_53568C.1.pep
DKSNINRQLEVYTSGGDPESVAGEYGRHSLYKMLGYFSLVGLLRLHSLLGDYYQAIKVLENIELNKKSMYSRVPECQVTTYYYVGFAYLMMRRYQDAIR

SEQ ID NO: 318524 - protein, 137 aa, Zea mays
  unsure (1)..(137): unsure at all Xaa locations
  Clone ID: MRT4577_53569C.1.pep
MAASLQAAATLMQPAKIGGRAPFASLPSRPSSQLACRAFGDYAGAARITCSLHDSASMCVDAAKLAGFALSTSDVLVSIASAXGTPKRMTYEKIHIPTDMEVIVMGTLEPVTDRPRKRVGANGTARHVPDEEAANGV

SEQ ID NO: 318525 - protein, 674 aa, Zea mays
  unsure (1)..(674): unsure at all Xaa locations
  Clone ID: MRT4577_5356C.1.pep
MTRHCAEAAAATAPSLLRLLLALHCGVLFLQCSAASAMGGDVSALMAFKRAIIEDPHSVLSDWTDADGNACDWRGVICSAPQGSVISLKLSNSSLKGFIAPELGRLSFLQELYLDHNLLFGTIPKLIGSLKNLRVLDLSVNRLTGPIPSELGGLSSVSIVNFHSNGLTGNIPSELGKLQNLVELXVDRNRLKGSIPGSNTASFSPASNIGSTAHNGLCPSSRLYVADFSYNFLVGKIPSCLKYLPRSSFQGNCFQDEYSVQQRPLQICTSGSTGQQGVIYGSKHPGHKHEKMEQPIWLLALEIATGVLLVVFVITGIVTASRSCKLKPSIRISSWNRSKSWSDEITVLIDSDMLKSLPKLSRQELEVACEDFSNIIGSTPETVVYKGTMKDGPEVSVISLCAFEGHWTSHHELFYQNKVIDLARLNHENIAKFLGYCRESDPFSRMLVFEYAPNGTLFEHLHYGEGGQFSWLRRMKIAIGIAQGLRYLHTELQPPFAISELNSNSVYVTEDFTPKLVDFECWKMMFSRHSISRDEKARGHLNSKSSFPGHGDSAADRQADDIQANTFAFGVILLEIISGRLPYCKDKGYLVDWASKYLQQAEEIGKLVDPELGSVRSEDLAVLCSVVSRCIDPDPSKRPSMQIITGVLENGIDLSAAAILKESSLAWAELALAL

SEQ ID NO: 318526 - protein, 82 aa, Zea mays
  unsure (1)..(82): unsure at all Xaa locations
  Clone ID: MRT4577_53570C.1.pep
RKGNCLGGGLVRGYFVFVKVGKMGMFWRGKMLGIDRVFIVILVVKXRFSGLRFVLKNWLVIXFVCLGKKKLEVLGGXRGXDG

SEQ ID NO: 318527 - protein, 76 aa, Zea mays
  unsure (1)..(76): unsure at all Xaa locations
  Clone ID: MRT4577_53571C.1.pep
DLKKGGKGGYLKRGGXGDFGRXDPDFNWEVVKPLKGEKRFFEKGGFFVLKKNFGLVWSGLGGLGLKKFFKGPNCDF

SEQ ID NO: 318528 - protein, 79 aa, Zea mays
  Clone ID: MRT4577_53572C.1.pep
NGTKSWLCLPNNAIGFANCCPPGTCDGICIELQLCFSGGPLPQIEKKSSFIGPPPYLLKGPSLVWEPQSKYWGATPLPV

SEQ ID NO: 318529 - protein, 259 aa, Zea mays
  unsure (1)..(259): unsure at all Xaa locations
  Clone ID: MRT4577_53573C.1.pep
RPGRDGAGGGGRRRARQGXGGRKHLSSIANYVLHQCSLTLHRSVDDLVADFESGLKNAALDNYSRRLVEYCSLQALQSLTSPDLGDTLHEGSLGRFTFDMMLAWETPTPSDQQITMESISKEREDRKEPLGANEAVMGDDTSLFYSDMMPLLVNEDPTVGEDAYVXWFGSVFPLACDVVNARFTFEALTATTANRLHYPAYDKFLKXMDKSFNFLQSLPTPTGVEFAEDEFILHTEGTAGTQRVVRHIGTAAWPGQLIL

SEQ ID NO: 318530 - protein, 83 aa, Zea mays
  Clone ID: MRT4577_53574C.1.pep
MASKRLLLAALCVVAAALLAVRSESHGLEDFASSDATPEMQTFFKPEAAALPEALDASSMPAAVAYVVRGRRSREVQLGGSSP

SEQ ID NO: 318531 - protein, 67 aa, Zea mays
  Clone ID: MRT4577_53575C.1.pep
MASKRLLLAALLAVRGARQAQQGGAARRLLPVSTPQRPGPLYRQAVIAIRIWLSASSSSAICVWLLG

SEQ ID NO: 318532 - protein, 146 aa, Zea mays
  unsure (1)..(146): unsure at all Xaa locations
  Clone ID: MRT4577_53576C.1.pep
MASKRLLLAALCVVAAALLAVRSESHGLEDFASSDATPEMQTFFKPEAAALPEALDASSMPAATMAAKPEATSIPTTTTGTTAAAAAGTSAAAGTTAASPPRRSVSVAAGVACGVAAVAVVGIAAAVXAYVVRGRRSREVQLGSSP

SEQ ID NO: 318533 - protein, 109 aa, Zea mays
  Clone ID: MRT4577_53577C.1.pep
MILGLGGCCGAAAAAAAVSPAAVGKQLGGHLEASERQQKKRGPSDEQKMNKGGEQGAAVAAGGGKERSKTKGSSQGSPDRCASVPLPLSPRLALNSSTHLGVMCVFVIL

SEQ ID NO: 318534 - protein, 98 aa, Zea mays
  Clone ID: MRT4577_53578C.1.pep
NYRLGIRARQRGHHRRTFIAVSCRDPSWCVLLWLLYLMLRVYAGCCSARDLTPPTAVLVPGWVAHWTPQGECSRRITAGAGVVVTVWSFFFLRSPFIR

SEQ ID NO: 318535 - protein, 52 aa, Zea mays
  Clone ID: MRT4577_53579C.1.pep
MCKDGYLHLAAMFGHRSRCQHWPLIVEVPPHTNGARNISPPCVLCPFSERNK

SEQ ID NO: 318536 - protein, 59 aa, Zea mays
  Clone ID: MRT4577_5357C.1.pep
CFFRIPCETGSPVCADIWSSVGIGSLIYGPFPNVLSPTTRNACCRLYEKPYVFVDPTAV

SEQ ID NO: 318537 - protein, 56 aa, Zea mays
  Clone ID: MRT4577_53580C.1.pep
QNRNPIHRGHTGKHFKGPPRDTPTNTVPDKLNPNSQRVQNQHGSSVQGHRSHLFSA

SEQ ID NO: 318538 - protein, 272 aa, Zea mays
  unsure (1)..(272): unsure at all Xaa locations
  Clone ID: MRT4577_53581C.1.pep
LAAGRRIIGPTSTWPVARCPCARXFALRVVQSRWFVVYASIIVMAASGSTYIFALYSKVLRSKLGYNQETLNKLSFFKDLGTNVGIISGLVQQVAPTWLVLLIGAGMNLAGYLMIYLALTGRTAPPPVWLMCFYICFGANALTFSNTGALVACVKNFPESRGIVIGLLKSFVGLSGAIYTQLYLAIYGDDAASLVLLVAWLPAAFNIFTVYTIRVLPYARRRDGGKPYNTPFYPLLVLSLALXSYLLVMIVVGEXVQFSHAAYVVTSTGLLI

SEQ ID NO: 318539 - protein, 81 aa, Zea mays
  Clone ID: MRT4577_53582C.1.pep
AASSTTGKLVGGTFPNRSKSRLDCPTAPIYSPCNLISAVKTPRASIPCAIHLLQSSVATLPPLIITVLYFSFRAFPNTFSS

SEQ ID NO: 318540 - protein, 68 aa, Zea mays
  unsure (1)..(68): unsure at all Xaa locations
  Clone ID: MRT4577_53583C.1.pep
VNKGHMNANYARTIVMPPTRRAPKINQKYNPHRPVLTTLLHQILNAXKNSNKDTPXXPLSLGAPFDTT

SEQ ID NO: 318541 - protein, 35 aa, Zea mays
  Clone ID: MRT4577_53584C.1.pep
EPMRRAPKSIRLHSLGLLPVVRGGYLVAIRREIGF

SEQ ID NO: 318542 - protein, 368 aa, Zea mays
  Clone ID: MRT4577_53585C.1.pep
MSGASAKTELGTGDKSASSGRTHSRESTHKHKEESSSSIKSQRKGDKKKMNKVVYYKTDSSSPSTSGSESASVTSKRHERKKYSKMPLRYPRISKHTPLLSVPLGKPPMLEGDEVTKITKRETIEGELGRFMLHQGEEPQAMYNRLKTLVNQVRNLGSTKWDDHEMVKEVIGKFVIFELMIKGSKKIIEQGASSTPDAQPVAFKATEEKKVDSITSRVPIDASKLDNEEMTLIIKSFRQILKQKRGKDYKPRSKKVCYKCGKPNHFIAKYPLSSDSDRDNDKKGKRREKKRYYKKKGGNAHVCREWNSDESSTDSSSDEDAANITVTKGLLFSNVGHKCLMAKDDKRKKVKSKSSTKYVRAPRGGVNR

SEQ ID NO: 318543 - protein, 738 aa, Zea mays
  unsure (1)..(738): unsure at all Xaa locations
  Clone ID: MRT4577_53586C.1.pep
MSGASAKREIETGDKSASSGRTHSRESAHKHKEESSSSIKSQRKGDKKKKMKKVVYYETDSSSPSTSGSESASITSKRHERKKYSKMPLRYPRISKRTPLLSVPLGKPPMFDGEDYSMWSDKMRHHLTSLHKSIWDIVEYGAQVPKEGDKDYDSEEVEQIQHFNSQATTILLASLSREEYNKVQGLKSAKEIWDVLKTAHEGDEVTKITKRETIEGELGRFMLHQGEEPQAMYNRLKTLVNQVRNLGSTKWDDHEMVKVIFRSLVFLNPTQVQLICDDPRYKLMSPKEVIGKFMSFELMIKGSKKIIEQGASSTPDVQPVAFKATEEKKEDSAPSRVPIDTSKLDNEEMALIIKSFRQILKQRRGKDYKPRSKKVCYKXKGKRREKKRYYKKKGGDAHVXREWDSDESSTDSSSDEDAANIAVTKGLLFSNVGHKCLMAKDGKKKKVKSRSSTKYATSSDEANSSDDEEDLLTLFINLNMQQKEKLNELISAIHDKDELLDSQEDFLIKENKKHVKVKNVYALVVEKCEKLTSELSTCHDVISNLRNENAKLIAKVENLNVCDDSLVCLRNNNASLITKIDKLNASLSSLKIENEKLIAKAKDLNVCNVSISNLRDENAILHAKIVELNSCKPSTSTVEHVTICTRCRDINVDAIHDHLALIKKQNDHIAQLSAKIDEHDLENEKFKFARSMLYSGRRSGIKDGIGFQQGGCWRLVLKCYESRTRQHKMLNIKSPSSS

SEQ ID NO: 318544 - protein, 326 aa, Zea mays
  unsure (1)..(326): unsure at all Xaa locations
  Clone ID: MRT4577_53587C.1.pep
RYYKKKGGDAHVCREWDSDESSIDSSSDEDAANIVVTKGLLFPNVSHKCLMAKDDKKKKVKSKSSTKYATSSDEASSSVDEDNLLTLFANLNIQXKEKLNESISAIHGKDGLLDTQEDFLIKENKKHVKVKNAYALEVEKCEKLSSELSTCHDVISNLRDENAKLISKVENLNVCDDSLVSLRNDNASLITKIDKLNASLSSLKXRNEKLIAKAKDLNVCNVYISNLKDENAILHAKIVELKTCKPSTSTVEHVTICTRCRDINVDAIHDHLALIKKQNDHIAQHSAKIDEHDSENEKLKFARSMLYSGRRPCIRMTLLPQGAMSS

SEQ ID NO: 318545 - protein, 550 aa, Zea mays
  unsure (1)..(550): unsure at all Xaa locations
  Clone ID: MRT4577_53588C.1.pep
MSGAFAKREIETGDKSASSGRTHSRESAHKHKEESSSSIKSQRKGDKKKKMKKVVYYETDSSSPSTSGSESASATSKRHERKKYSKMPLRYPRISKCTPLLSVPLGKPPMLEGEDYSMWSDKMRHHLTSLHKSIWDVVEYGAQVPKKGDKDYDSEEVEQIQHFNSQATTILLASLSREEYNKVQGLKSAKEIWDVLKTTHEGDEVTKITKRETIEGELGHFMLHQGEEPQAMYNRLKTLVNQVRNLGRTKWDDHEMVKVILRSLVFLNPTQVQMIRGDPRYTLMSPEEVIGKFVSFELMIKGSKQIIERGATSTPEVQPVAFKATEEKKEESTSSRLPIDASKLDNEEMALIIKSFRQILKQRKGRDYKPRSKKVCYKCGKPGHFIAKCPLSSDSDRDNDKKGKRREKKRYYKKKGGDAHVCREWDSDESLKGKCALGPFLSILVIXGLLFPNVGHKCLMAKDGKRKKVKSRSSTKYETSSDEDDASNEEDNLRVLFANLNMEQKEKLNELISEIHEKDDLMDSQEDFLIKGNYXHVKNKKAYALKSTCR

SEQ ID NO: 318546 - protein, 47 aa, Zea mays
  Clone ID: MRT4577_53589C.1.pep
HVYSILSAPWLAVPPNSSWPHLLFKVRAFLSSRVSISNVTSTVRRKL

SEQ ID NO: 318547 - protein, 37 aa, Zea mays
  unsure (1)..(37): unsure at all Xaa locations
  Clone ID: MRT4577_5358C.1.pep
SLGQVEENLSKHRVHEVXSCVQACNSLSFIFRWTGLT

SEQ ID NO: 318548 - protein, 57 aa, Zea mays
  unsure (1)..(57): unsure at all Xaa locations
  Clone ID: MRT4577_53590C.1.pep
NVLKRVFVIGFPIIVFGTKISPQPGIGPSIPKAGVAMYSSIKAKFXEEKRKKGACLL

SEQ ID NO: 318549 - protein, 79 aa, Zea mays
  Clone ID: MRT4577_53591C.1.pep
GSPQQQSNGEQSDFFPPYLATKQPLKYRGTKPSIMKIATFSLTARASWVYWGGSPRAYLQIWPEAKDLTRWNPAFIYQS

SEQ ID NO: 318550 - protein, 295 aa, Zea mays
  Clone ID: MRT4577_53592C.1.pep
MSVQDAINLFESKQKDQNPDSQNKKAGLFATKSVLRRWSAGMGDSLNENSEGKVSDSTSESKSNNIASETEKVEAEMKAELGNIPNFFVTPEAEDLTFHANSHEIRVSETESAVCSNVCAEQAKPGLEESSDRAMASAEWNRQKEAELNQMLLKMMEVMPGKFAGANATATGLSSTNQQKAVSHGQHTEKRDTKVRTEKGTRRPAKEPSTKPLKETAGKNKPAMTSKSGSSTERRISPVPQRARRNSSPPVLPKEVASKTPPVRKSSPKPSPAPASVPTTRSSWSGGSLTKATTT

SEQ ID NO: 318551 - protein, 104 aa, Zea mays
  unsure (1)..(104): unsure at all Xaa locations
  Clone ID: MRT4577_53593C.1.pep
LXXXXXXXXXXXXXXXXXXXXXXXXXXXXXXXXXXXXXXXXXXXXXXXXXXLIVPLNNLXXXXXXXXXXXXXXXXXXSSNLSYKSSIKRLIIMLPLHSQNTAAI

SEQ ID NO: 318552 - protein, 118 aa, Zea mays
  unsure (1)..(118): unsure at all Xaa locations
  Clone ID: MRT4577_53594C.1.pep
LKQTGRDTHELARRNNLSIPDVPTKLIILARESRLGLELSHIPVQRLMPETLNSCTSTHEYMQKLPFFDKHSSKXNKNPLTPGKVLHYVLLLYVLNXKGHLQLLSYKKHHPFPQVSGS

SEQ ID NO: 318553 - protein, 57 aa, Zea mays
  Clone ID: MRT4577_53595C.1.pep
SSCKFIILGNITEFTVFSRTLQNLQLPGRIKTQMSTTKSEQRLYRTTRPISSFCARA

SEQ ID NO: 318554 - protein, 40 aa, Zea mays
  Clone ID: MRT4577_53596C.1.pep
IEKRICKKILWIEGGESQYSLDQCLQKNSARSKVRHRIRI

SEQ ID NO: 318555 - protein, 80 aa, Zea mays
  Clone ID: MRT4577_53597C.1.pep
MMNAINLKKLCNSIFFLDKKKKKKKKKKKKKKKKKKKKKKKKKKKKKKKKKKKKGGAVLKDQSLLPRACNVIVFFLGHLN

SEQ ID NO: 318556 - protein, 62 aa, Zea mays
  Clone ID: MRT4577_53598C.1.pep
IIGVSWSWFLQAFLWGPYLVEMWNPWCGCFPEKMPLKFGFCCGIPKLCFWDLPAGPVLNLGK

SEQ ID NO: 318557 - protein, 496 aa, Zea mays
  unsure (1)..(496): unsure at all Xaa locations
  Clone ID: MRT4577_53599C.1.pep
VSAFRESKSDDRRFYIFSPTKTLHLKTDSKVDRVAWIEALILARSVYSLGSLSGRATFVQSDVSISTARLRDRMHQEGLNESLIQDCEQIVLSEFSSYRKQLKCRYEDYLSLFGSCRHNFEXLHSVLHTYLCRKVKMXITQGTLTRNDFSSSRHGKGSEYSTTESDEHEFEKHDGGELICEDESAFFDSIDYFTESDNRSSTMLSGKEVVDSQTHDSSNNIQAQIRRRSRLPDPIEKEKGISLWSIIKDSVGKDLTRVCLPVYFNEPLSSLQKCFEDLEYSYLLDQAYQHGKVGDSLMRILKVAAFAASGYASSVARPCKPFNPLLGETYEADYPDRGIRFFAEKVSHHPMLIACHCEGKGWKFWGDSNLKSKFWGQSIQVEPVGILTLEFEDGEIFQWNKVTTTIHNLILGKLYCSHHGTMHIKGNRQYSCKLKFKEPSLLDRNPHLVQGFVEDNNGNKASFLIGMWDESIYCSNSDTSKVKSADXNESASLLWE

SEQ ID NO: 318558 - protein, 34 aa, Zea mays
  Clone ID: MRT4577_5359C.1.pep
RAGDCDGLYYDCSYCLSAHLSWVMRHDLDIIRGQ

SEQ ID NO: 318559 - protein, 72 aa, Zea mays
  Clone ID: MRT4577_535C.1.pep
DQVTHSTLVFTDPSDKMPVKQLCYAIQTQTNQSHTEREVVKLFANTSSTSCTTCKILQQETISPQGGRTSTN

SEQ ID NO: 318560 - protein, 121 aa, Zea mays
  Clone ID: MRT4577_53600C.1.pep
HLTPSYLSYEQTRLDNKRRTPIRIRSVPMSTGNAAESDAAWARHAGEHERAAACARQPPACAPTRARTAASSSRCPTSPRDSTRMPIALSTGPSVVVTQPCVHYSAIRERTERRIIASAYL

SEQ ID NO: 318561 - protein, 105 aa, Zea mays
  Clone ID: MRT4577_53601C.1.pep
MLLLVLLLLLVLLLLLASALLLLVQATIQSFQVTGLTWHRATQWTLHQRLYTLPTSRDPFMPRVDQNLKHYQGESVLTERYSGKRPEPPRVSQGHHHSQDNNIVS

SEQ ID NO: 318562 - protein, 82 aa, Zea mays
  Clone ID: MRT4577_53602C.1.pep
ASGHHLLYYYGILSPSRGHPEAPFKIGGRAPFASLPSRPSSQLACRAFGVYSSAVIITCSLHDVASMFVYSSNLASFALSTF

SEQ ID NO: 318563 - protein, 43 aa, Zea mays
  Clone ID: MRT4577_53603C.1.pep
PPPETLTPPLMQAREYLAQAPLSRLDPPVARGQGRTSRCVSAD

SEQ ID NO: 318564 - protein, 131 aa, Zea mays
  unsure (1)..(131): unsure at all Xaa locations
  Clone ID: MRT4577_53604C.1.pep
PPPRTKTTTGQGPPGNSGGAKAAAEEKHRSPTGGPARATSNEPPENAPAPHGENHDPKATTDRETGRTRGGGNETTPPRSHAXDATENTNGKEPDGRNTTGNQAQPRGAGGGRGDHSGGRRARRPRRPAPG

SEQ ID NO: 318565 - protein, 117 aa, Zea mays
  Clone ID: MRT4577_53605C.1.pep
LHHSFVVAPSTPCAVCVRLYKMRSSSRGCMGAKLLTRTKGDSSCVASPRRRPRRLIGTTRSGGSSFGGRTNTKTMARAPAGTTASCCRRVCNKARHSLERREIEDALLPPALVLVAR

SEQ ID NO: 318566 - protein, 75 aa, Zea mays
  Clone ID: MRT4577_53606C.1.pep
IGLTLKKLFEEGVVKRRDLFITSKLWCAQISGDIPIFMSHASHFGKTHTKSRFQVEFGLQCIYTYNLVFLCDFFV

SEQ ID NO: 318567 - protein, 91 aa, Zea mays
  Clone ID: MRT4577_53607C.1.pep
PNSTLLTRTPGRAPESRARPGRGPKFPYGRAISKLGGRMGKSAPWGKMLSADQSRHYTTLKQKGERPGGLMGEPSQINCAGVSARLPIGKP

SEQ ID NO: 318568 - protein, 156 aa, Zea mays
  Clone ID: MRT4577_53608C.1.pep
MADVEMDVDVEAGSPPPPARNESDMQTHTKATAVRSIEGWIIIVTNVHEEADEETLQDLFGEYGEIKNMHLNLDRRSGYVKGYALIEFTTLEEARAAIDGAHNQKLLEQTISVDFAFVRPPPGKPGRGRGAGGRNRGRSRSHSPEGKDERAGNERD

SEQ ID NO: 318569 - protein, 99 aa, Zea mays
  Clone ID: MRT4577_53609C.1.pep
GPPRVNPEGPKKNKAGKSGIPPKRGSRPPDKEMETPPREGEMGKINPRGGGPQGKRKFFKNSPLRVVPAKGKNFFFFFFFFFFFFFFFFFFFFFFFFFL

SEQ ID NO: 318570 - protein, 85 aa, Zea mays
  Clone ID: MRT4577_5360C.1.pep
STWSLKLAGRFLRVHIRVHICSAAIDPRHQLSLAMPRHGHDDRFRSVGHLHSSTGCTGTRRLSSCAGMVTDERQRVDSVLDWKTA

SEQ ID NO: 318571 - protein, 78 aa, Zea mays
  Clone ID: MRT4577_53610C.1.pep
CVPPPQGGRGPCEQCPEWPIEMKRKKFCSQKKKKKKKKKKRKKKKKRKKPKRKKKKRKKKGLTSGPRDHARGGEITAE

SEQ ID NO: 318572 - protein, 50 aa, Zea mays
  Clone ID: MRT4577_53611C.1.pep
GANTSFIKQITTSPLLFTSKLLAACLKSQTYFTCYELAKIWHICLSISST

SEQ ID NO: 318573 - protein, 138 aa, Zea mays
  Clone ID: MRT4577_53612C.1.pep
VAGATSGNAKAELRPDAYRPVMPQTAVLRSAQAGPGASPGRPTPAQRSSMPPPRAIVRATPHAPVQCPGHLDGSAQSWYLSGSTTSTSTKGRIYHKTYGCQMNISDMEIVLSIMKNEVIRVCHLYMTFGCKWIMIIVE

SEQ ID NO: 318574 - protein, 42 aa, Zea mays
  Clone ID: MRT4577_53613C.1.pep
TGFRPQQHARYSCSTPPPRTRTPRPSDSGRSENGSRTGSTIG

SEQ ID NO: 318575 - protein, 70 aa, Zea mays
  Clone ID: MRT4577_53614C.1.pep
GMTMVLAMNWHDRKIALKYIGDLQFDASVFIIVNKIIMFVKLLCLDSTIIQFNCQYFLAYDRYELMQFNV

SEQ ID NO: 318576 - protein, 128 aa, Zea mays
  Clone ID: MRT4577_53615C.1.pep
ASPRRLPPCYAPNRRAEVRPGRARSFSRQTHPRPTELHASAQGHCPSYAPRSCPVPWPLRWFCSVMVFLVSGSTTSTSTKGRIYHKTYGCQMNISDMEIVLSIMKNEVIRVCHLYMTFGCKWIMIIVE

SEQ ID NO: 318577 - protein, 81 aa, Zea mays
  unsure (1)..(81): unsure at all Xaa locations
  Clone ID: MRT4577_53616C.1.pep
IYFFFPKKVRFYSDFCPTEVYEPCIYICIAVSSAIIFIVGASALIVIDAFVTTAIVLYALGVRDQMAILEHASAHASTXAW

SEQ ID NO: 318578 - protein, 128 aa, Zea mays
  Clone ID: MRT4577_53617C.1.pep
ASPIRLPPCYAPNRRAEVRPGRARSFSRQTHPRPTELHASAQGHCPSYAPRSCPVPWPLRWFCSVMVFLVSGSTTSTSTKGRIYHKTYGCQMNISDMEIVLSIMKNEAIRVCHLYMTFGCKWIMIIVE

SEQ ID NO: 318579 - protein, 164 aa, Zea mays
  Clone ID: MRT4577_53618C.1.pep
IRHEGLAHQPWNLRTVAPTRQAGSDDAAEAAERAPAPTPEVKKQASSVALSKQEIADDFTAIRGTRPPRWPKKRPRTVQRQLDLLYLGLWLADVAPGSYKIEERVQKTTIGGVTIDGLLAAAARFSIGLAFVLIGFFTTQCAPDVFWNQLLAIPLAQLPAYVEV

SEQ ID NO: 318580 - protein, 119 aa, Zea mays
  Clone ID: MRT4577_53619C.1.pep
LSLRLGGGPPRGGLRGGKRFLWFLWEPLHLWWPQGHAFRPPNALVPPRVRVIWRPLSVSRFFSLLAGPPGVSGASCYFSGCCGSPGPAAGLTFVYPVPRGGVILLSARNSGCGVLFVKK

SEQ ID NO: 318581 - protein, 279 aa, Zea mays
  unsure (1)..(279): unsure at all Xaa locations
  Clone ID: MRT4577_5361C.1.pep
LEAGRGIDTNGGPTGRFXPGLTTVDVIAKLLGFDDLVPPFSEASGQQLLRGANFASAAAGIREETGQQLGARISFSGQVQNYQAAVQEVVSILGDDEAAAAAHLGRCVFTVGMGSNDYLNNYFMPALYSTGSRYTPERYADALAEQYAGALRAMYRYGARKVALVGVGQVGCSPNELAQRSSDGVACVEQINGAVRMFNRRLVGLVDSFNRILPGAHFTYVNVYGIFEDIIKSPGAHGLKVTNAGCCGVGRNNGQVTCLPFQTPCGNRHEYLFWDAFHP

SEQ ID NO: 318582 - protein, 61 aa, Zea mays
  Clone ID: MRT4577_53620C.1.pep
RASRARENLGPNLFPRGLGGNPFFCFHPSPSSFLCFARPVGQNWAGPKKKKAFFSFYSPKK

SEQ ID NO: 318583 - protein, 57 aa, Zea mays
  Clone ID: MRT4577_53621C.1.pep
GRGQNLWPTGSCKFQMGGVFMDKKQTGGYLLFAFWKGSQFKQVEVTPPPLKILSPVL

SEQ ID NO: 318584 - protein, 40 aa, Zea mays
  Clone ID: MRT4577_53622C.1.pep
DRRRLVDAGSALRNDVFRSLVHLIYSIDEEDAIVFDKIVC

SEQ ID NO: 318585 - protein, 66 aa, Zea mays
  Clone ID: MRT4577_53623C.1.pep
TGSQLCTLLAVLVDIADAGAAEGYANSSLFLLYQLCMESGLVWLKTDLSAEKWAALTDTAAELETR

SEQ ID NO: 318586 - protein, 103 aa, Zea mays
  unsure (1)..(103): unsure at all Xaa locations
  Clone ID: MRT4577_53624C.1.pep
VAALGESXAAGGXGDSDAIVLHVGGMTCGGCADKVKRILESQPEVAAATVDVEKATAIVWTTPEAKATKDWQKQLAEKLANHLTSCGFQSHLQDEGEAEQTDA

SEQ ID NO: 318587 - protein, 181 aa, Zea mays
  unsure (1)..(181): unsure at all Xaa locations
  Clone ID: MRT4577_53625C.1.pep
MEAVVATTTTRVSFPLLPTAGRPLLPPVLARPRRGFASVSATSTSGAGGGGGRSSAGGCGGDGGGDDSGAGAAAAAAAVAALGESXAAGGXGDSDAIVLHVGGMTCGGCADKVKRILESQPEVAAATVDVEKATAIVWTTPEAKATKDWQKQLAEKLANHLTSCGFQSHLQDEGEAEKTDA

SEQ ID NO: 318588 - protein, 168 aa, Zea mays
  unsure (1)..(168): unsure at all Xaa locations
  Clone ID: MRT4577_53626C.1.pep
SRPADLDLPQRPPREALPACAAVVVSFKQQWKPWWPRRQRGCPSLCCPPRGGPCSRRSWRGPAAAVAALGESXAAGGXGDSDAIVLHVGGMTCGGCADKVKRILESQPEVAAATVDVEKATAIVWTTPEAKATKDWQKQLAEKLANHLTSCGFQSHLQDEGEAEQTDA

SEQ ID NO: 318589 - protein, 199 aa, Zea mays
  unsure (1)..(199): unsure at all Xaa locations
  Clone ID: MRT4577_53627C.1.pep
MADMNQETIQQKIQLARRDAEALKDRIKRKKDELADTTLRDVARDRVEALPRLTMKTKRTLKGHLAKIYAMHWSTDRRHLVSASQDGKLIIWDAYTTNKVHAIPLRSSWVMTCAYSPSGNYVACGGLDNICSIYNLSAREGPTRVARELSGHSGYLSCCRFISDKRILTSSGDMTCVLWDLETGSKVHEFADHXFGDVM

SEQ ID NO: 318590 - protein, 136 aa, Zea mays
  unsure (1)..(136): unsure at all Xaa locations
  Clone ID: MRT4577_53628C.1.pep
GGLSCLGLRSSSXLALRSNPDGGSSVDHLGNVRDLSHPLNLGDNIALLVLVVTAVVVSVRVGMGLGNSRSGEEGGSKSKRLHVDIWIVCCCCCFRVLLFNQRVAVAVVRLVCRRKGISTRWIARQRKDGFDSVPQE

SEQ ID NO: 318591 - protein, 107 aa, Zea mays
  unsure (1)..(107): unsure at all Xaa locations
  Clone ID: MRT4577_53629C.1.pep
GDQLSGGGGXQGGAKPGAKGGAGGNGEPGTKPEKTGTGSKKGKAGGDKKGSKQKGRGERTGAKLKEGNRKGQGKKKKGQGGGKGGXGEGGQKRLHPEKRRGAKGENP

SEQ ID NO: 318592 - protein, 57 aa, Zea mays
  Clone ID: MRT4577_5362C.1.pep
SSESTSIPTGFWKTSAMFAPSSTDKHAHVELVYISHKCSNSIKSKVLLLLFLLSRQV

SEQ ID NO: 318593 - protein, 101 aa, Zea mays
  unsure (1)..(101): unsure at all Xaa locations
  Clone ID: MRT4577_53630C.1.pep
GGARNSGLGLANSTRLSGSSSRPTASLTQTRTTMTHCSRTTGCSTASGRTWTRSRHSCAWCSAALWRAAVASRCPSGXPXTPPQCLPXALKVPLQCPPALS

SEQ ID NO: 318594 - protein, 98 aa, Zea mays
  Clone ID: MRT4577_53631C.1.pep
LNRLTWPFPTKSHKPKETLYQGVHVNPPLGGSWREGAGRDHPPKKLACLPPPLGHKVPGGGNLGLSGTKIVFGQDRFGGFPNREGIGPGLLGGGPTDP

SEQ ID NO: 318595 - protein, 101 aa, Zea mays
  Clone ID: MRT4577_53632C.1.pep
PWPRGHCNPCEHTLRCTSVALHNRSTVVPQSFPMMRVVKPLDEDPRNTCRGRPSCTEHLEEEVEVEVEEESAPQSEVSPTERAPEGLSEGALAGFTAIAIS

SEQ ID NO: 318596 - protein, 55 aa, Zea mays
  Clone ID: MRT4577_53633C.1.pep
LRLGGSGTRSVSPAGARRGRRRSSAGVARPARRRRRCRHQQARRRRPRRGCPRVR

SEQ ID NO: 318597 - protein, 65 aa, Zea mays
  Clone ID: MRT4577_53634C.1.pep
TSTASYHGLIKHRRYNRITRLQHIWQFRTELNFCSAAAGPRADCLRSTAHAIGTMDLTFVTSAIA

SEQ ID NO: 318598 - protein, 88 aa, Zea mays
  Clone ID: MRT4577_53635C.1.pep
GGPGSCYFCPSFGLNWVYGPKSRFRYMVPPFWWFLGAPSAESILCPSRVFFVVKGPFSCPSLFFGALVLNFVFSNPNLLYGNQKAFTP

SEQ ID NO: 318599 - protein, 236 aa, Zea mays
  unsure (1)..(236): unsure at all Xaa locations
  Clone ID: MRT4577_53636C.1.pep
LSTRGRLIRGPPHHPHDYYQAQTNDIPNPRGPHPPPPYPSPARPPTPQLPDRRAPHPPRARHPRPXTLPRYSPQQPPPAGEPXPRLLSPTSGPASLTSHPATPTISARPRAQRPAPKPSPXAAPLPWQPDPYPPPQHPVHSSNPPEGSSRPTPGEPPPPGPPPQSVSTHPPTPPPHTSPRRPPPPXXPPPAPPTPTPNPPPHPPTPQPKPPPTPPPQHPPPPPTPDPPPPLTPPPL

SEQ ID NO: 318600 - protein, 45 aa, Zea mays
  Clone ID: MRT4577_53637C.1.pep
LHTMRTFLFWMGDDTLAVQQKLILGTVKITTQSLPGSCGETRGSS

SEQ ID NO: 318601 - protein, 95 aa, Zea mays
  unsure (1)..(95): unsure at all Xaa locations
  Clone ID: MRT4577_53638C.1.pep
SFHMLLGLSASAATVAILPQCSQAPIDRFVAAYLXPAESPVCENPILQPYRIQQAIAAGILPLXRLFLQHPRVLLQHLPLAHSLAQXIXAQQLQQ

SEQ ID NO: 318602 - protein, 121 aa, Zea mays
  Clone ID: MRT4577_53639C.1.pep
ACVCWAGLAGSTFAFGVFWPLVVSFLFVFNRRSVGVACCCRSCGCGCDCYLLVSDRWLRLLASAGVSFTASGVFGGSRSAAASGAWCQVRASCTSPGPLCALSCPCRRRRVMCRLPLLLPY

SEQ ID NO: 318603 - protein, 237 aa, Zea mays
  Clone ID: MRT4577_5363C.1.pep
NSGWTEWHASILTKRNAVENVYQWACGRPTSMQDRGRDSDDEDFRDRDYDVAALASNLSQAFKYGIYPSEDVDEAQASQERDDEDVYFDDEAAEVVINSLRLGDAPDSGSLFTNSNWFAFDEDKALNDGPEASLSANLESPSPNVDDDDMDEVILGDPIDDTKGSDSLLATSDRDLNEGSGQTVLSNGPVDKLENDIRPSTPDVKESPAECVEWTEEDAEPGEASENTAVPSTQVGT

SEQ ID NO: 318604 - protein, 45 aa, Zea mays
  Clone ID: MRT4577_53640C.1.pep
PLLFPPLRYRPQEQHHRERLIFSVAAHLQHIYSCWIKESYQLMLM

SEQ ID NO: 318605 - protein, 127 aa, Zea mays
  unsure (1)..(127): unsure at all Xaa locations
  Clone ID: MRT4577_53641C.1.pep
MGHRVLLLLSLASGVVVAADVDEEDPLIRXVAPGGDDXDLELNEESXHFLSFVQRLGKSYKDADEHAYRMSVFKANLRRARRNQLLDPLPRHRVPKFSDLEPADVRRNDLGLRKPRRALLKEICYAT

SEQ ID NO: 318606 - protein, 52 aa, Zea mays
  Clone ID: MRT4577_53642C.1.pep
HNFINTSEHVSTSPNPHEHRLYPLCTDLTYRHQRKGHCCSERLPLVIALATS

SEQ ID NO: 318607 - protein, 47 aa, Zea mays
  Clone ID: MRT4577_53643C.1.pep
TFSISISIPILMRTTFTYIKHHTYKSYTSFQNQYIYHFHLKTFFTNH

SEQ ID NO: 318608 - protein, 63 aa, Zea mays
  unsure (1)..(63): unsure at all Xaa locations
  Clone ID: MRT4577_53644C.1.pep
SAVGLPVRVVCVAXAXACFVRLRFVRLFVFSPPRXSPRXPFWCLVRLLXGPPASSPXRVAPPS

SEQ ID NO: 318609 - protein, 66 aa, Zea mays
  Clone ID: MRT4577_53645C.1.pep
LLPFNQLIVSISDGYVQQRHQLLNPLAVANPLVVTFLQQQQQLLPCDQFFLMIRAVQQPIVGGAIL

SEQ ID NO: 318610 - protein, 144 aa, Zea mays
  Clone ID: MRT4577_53646C.1.pep
RRGLVPSRSSVSTSRGHLAASMLVPCMKLLFLLRVRGLGRGPPIGKPLRGRVVRAHPPQPSRHWCTHVHPNSSQSVIIRVRGDRLRTRTATRHEKACAVRSAYVVGASRRHPARQRPAKTPGVGRRPPRCAPRQREKESALVPN

SEQ ID NO: 318611 - protein, 41 aa, Zea mays
  Clone ID: MRT4577_53647C.1.pep
ASKAFRHLFQSSSLRCYVGQVHSSFSTRIFPAVRGQCRASV

SEQ ID NO: 318612 - protein, 74 aa, Zea mays
  unsure (1)..(74): unsure at all Xaa locations
  Clone ID: MRT4577_53648C.1.pep
QEDYHHNIHXFXHSNXVAIXARAQHCLFNYTDTPLITVYIFYENNNIYHLXPSIIKYFLAGGFIKKQPHFSDNI

SEQ ID NO: 318613 - protein, 133 aa, Zea mays
  Clone ID: MRT4577_53649C.1.pep
DQAAPRLFSNPTPKSQSSFPPLALLGKANLFRFALIRPSALLAAAASFGKAPLLPSAALAYSHLAVNARTWLAITGNLPSRSSVGGVRQGFIYCHPKRFQLQLVGGALVARGFESVLLEFLGPLVPAAPLSFR

SEQ ID NO: 318614 - protein, 103 aa, Zea mays
  unsure (1)..(103): unsure at all Xaa locations
  Clone ID: MRT4577_5364C.1.pep
SPPFLGLWVEFFRLRCRPPATPPWFXYFQSLGQQCFHPFWQVEPPLRFPAVLGLVLQSFLQQPPQSVLVPGLLAAHIPSPLTGMCGLHHPVSCPSAAVVGVPP

SEQ ID NO: 318615 - protein, 112 aa, Zea mays
  Clone ID: MRT4577_53650C.1.pep
IAKPKPAVPGTRSLSYLPHRCGPQSLSIPTMAYSIPSLPNTYSFHFSLFVAILPVELSLQGCYFPPVMTVTLLLILRHCYWGGLGRTRKGHWPRSSRRLRVARKGGVLYKVI

SEQ ID NO: 318616 - protein, 127 aa, Zea mays
  unsure (1)..(127): unsure at all Xaa locations
  Clone ID: MRT4577_53651C.1.pep
ATXXPTSAQAXXXXXXPPXPXPXXXAGGGGPXXQPXXXQQANKKSTPPXXPXXXQQAXARXQQXPPGQGXAQNXRAQQRQQPGPANXAADAQQQQXRPXNQPAAGNPAAXGQQQQPPGSQPXAAHPQ

SEQ ID NO: 318617 - protein, 82 aa, Zea mays
  Clone ID: MRT4577_53652C.1.pep
ISRAFNCIYKSFVLAHLTNFEEDKSCRIKQLISSNKVLPCRDPTLVLGPISLPFLGSRCHKLIKLLRLAQQYFNLGLLDRPG

SEQ ID NO: 318618 - protein, 56 aa, Zea mays
  unsure (1)..(56): unsure at all Xaa locations
  Clone ID: MRT4577_53653C.1.pep
LVDSFEYSHRHDAYYHNLKPQNILVDELDKLNVSDFRLSTLXEWQKHDRLLHTTCR

SEQ ID NO: 318619 - protein, 72 aa, Zea mays
  Clone ID: MRT4577_53654C.1.pep
EGGEDDARREGEEDSRYDIVIANERHKAKKTRRTTFREESRGHKAERARRRTSARECRSATRESRGCEEMNR

SEQ ID NO: 318620 - protein, 272 aa, Zea mays
  Clone ID: MRT4577_53655C.1.pep
LFSAVVSCYSHLLNPIKKHYHFFSPLGMTFRHMLYPAYKSNRTPTPDTVVQGMQYLKASIKAMSIKVIEVPGVEADDVIGTLAINSVSAGYKVRIVSPDKDFFQILSPSLRLLRIAPRGSGMVSFGVEDFVKRYGPLKPSQFVDVVALSGDKADNIPGVEGIGDINAVKLISKFGSLDNLLKSVDEVEDERIKQALISHSEQAILCKNLATLRSDLPHYMVPFKTADLVFKKPQDDGEKFIKLLRALEAYAEGSSVNPIIRRAAYLWNKLKS

SEQ ID NO: 318621 - protein, 149 aa, Zea mays
  Clone ID: MRT4577_53656C.1.pep
MEAAPSARAFSPSSSPSAGARPSLPLAGLASRSRRARVLAAPPPPRAVASSRAPLVVSSPPPPEDSGTHNPAHAKVDRSGRFCSPRAARELALMISYAACLEGTDVVRLFDRRISARRGQDSYPQRLFFVHLFQGSARRFAWLNTSLHQ

SEQ ID NO: 318622 - protein, 63 aa, Zea mays
  unsure (1)..(63): unsure at all Xaa locations
  Clone ID: MRT4577_53657C.1.pep
XRGRGSLSPARLGPINAFAPTGTMSCSIQPFVTVGWVSCSLSHGPPLEIRDPRSLHDCHCPLC

SEQ ID NO: 318623 - protein, 92 aa, Zea mays
  Clone ID: MRT4577_53658C.1.pep
MFFKYRLSRELLVAVASGWDKHVVIIDKIIPQAWKDEPVARILELCILHIAMAEMTSKGTPHKVVINEAVDLAKRFVKVGAPRGINGCLRTF

SEQ ID NO: 318624 - protein, 157 aa, Zea mays
  unsure (1)..(157): unsure at all Xaa locations
  Clone ID: MRT4577_53659C.1.pep
TSQNEXDSANEADVLSAPPKLVYNNFVLRXFSSRPIPLKASGIDTLFWYMIKFHFLFNIXTTLIHYRLSRELLVAVASGWDKHVEIIDKIIPQAWKDEPVARILELCILHIAMAEMTSKGTPHKVVINEAVDLAKRFCDGGAPXRVINGMPFEHLVK

SEQ ID NO: 318625 - protein, 106 aa, Zea mays
  Clone ID: MRT4577_5365C.1.pep
VDDLQLPVFGHRVVSPPTAYTVCPLVVVRESSPSHGRSWGVPVHRGPVYSYSGSRLSPRGLLGCSRSLTLACLQPVFELSVTRAPGVNDRRTAAVRLPCVRLKRLC

SEQ ID NO: 318626 - protein, 34 aa, Zea mays
  Clone ID: MRT4577_53660C.1.pep
PAAQHVWRIHLVTHTYMLIKQNIARFIHEQRGCP

SEQ ID NO: 318627 - protein, 262 aa, Zea mays
  unsure (1)..(262): unsure at all Xaa locations
  Clone ID: MRT4577_53661C.1.pep
CLLLXGPASXRARAXPAPPXPRAVASXXAPLVXXSPPPPAASGTTAPAHAKVXXXGRFCSPRXARELALLISYAACLEGTDVVXLFDRRXSARREPGFVFDKACLLSYNHMSFGGGPLXVGTEEEAEKLTSQNEKDSANEADVLSAPPXLVYNNFVLRLSRELLVAVASGWDKHVEIIDKIIPQAWKDEPVARILELCILHIAMAEMTSKGTPHKVVINEAVDLAKRFCDGGAPRVINGCLRTFVKDHVDVAGTSQGAESKL

SEQ ID NO: 318628 - protein, 55 aa, Zea mays
  Clone ID: MRT4577_53662C.1.pep
SIGVLGAGSAEWAPRLGPDPRWGGGGEREIQGFSERERDRSWVSRDRGRAQQRRR

SEQ ID NO: 318629 - protein, 71 aa, Zea mays
  Clone ID: MRT4577_53663C.1.pep
NLGTGFFKIPHFYTSPQIILANGPNRAPWGGFFLIQPGMEKGKNLPRKSLLNIWIYPLEQQTVFFCPTGEL

SEQ ID NO: 318630 - protein, 283 aa, Zea mays
  unsure (1)..(283): unsure at all Xaa locations
  Clone ID: MRT4577_53664C.1.pep
MEAAPSARAFSPSSSPSAGARPSLPLAGLASRSRRARVLAAPPPPRAVASSRAPLVVSSPPPPEDSGTHNPAHAKVDRSGRFCSPRAARELALMISYAACLEGTDVVRLFDRRISARRXAGFQACLLSYNHMSFGGGPLEVGTEEEAEKLASQNDKDSANEADVLSAPPKLVYNNYVLRLSRELLVAVASGWDKHVVIIDKIIPQAWKDEPVARILELCILHIAMAEMASKGTPHKVVINEAVDLAKRFCDGGAPRVINGCLRTFVKDHVDVAGTSQEAKSKS

SEQ ID NO: 318631 - protein, 116 aa, Zea mays
  Clone ID: MRT4577_53665C.1.pep
FFENELILVLAPFSTKPKWERPNPKNSEDGGGAAITGGAPERGNRRGKSHPTDPLNIEPVPKGLDGTKLKPLQKQGAALNEHKRNREGPEGHGLAHQTNKDWEHRGHPQEPRGVPC

SEQ ID NO: 318632 - protein, 95 aa, Zea mays
  unsure (1)..(95): unsure at all Xaa locations
  Clone ID: MRT4577_53666C.1.pep
PLYTSREWQCAYPGTHHLPITSEASEHGGXPEDENRHAGDLGNVTAGADGVANINGTDSQIPLTGPNSIIGKTVGVHADPADLAKGGHKLXSKST

SEQ ID NO: 318633 - protein, 265 aa, Zea mays
  Clone ID: MRT4577_53667C.1.pep
KYERYRWLETRGVDEETLVQTLPKDLRRDIKRHLCLGLVKRVPLFENMDERLLDAICERLRPALYTENEFILREGDPVDEMHFILHGCLESVTTDGGRSGFFNKVQLKEGSFCGDELLTWALDPKSAANFPVSSRTVQALTEVEAFALCAEELKFVASQFRRLHSRQVQHTFRFYSQQWRTWAACFIQAAWRRYYKRKMAEQRRKEEEAASRPSSSHPSLGATIYASRFAANAMRGVHRLRSKAVPTIVRLPKPPEPDFGVDDAD

SEQ ID NO: 318634 - protein, 205 aa, Zea mays
  unsure (1)..(205): unsure at all Xaa locations
  Clone ID: MRT4577_53668C.1.pep
RFLFDCEDEFVTACKEMLEKYDIEDNQXLAYLFSRKEKWALTYGRDAFYVDMKSVQQKESLTSELKKHLSLECDLLNFFEQFERLLCDRQSTEMEAEPRDHFVKFDSLNSTMDCTCKTFELIGIPCRHMLEVLDMRNIKDLPTQXTVKRWRKDAKSGSSNGGYSFSXDGEPDSSHIKHYNFLCRIFNIAAARAATLVNHCIYGNS

SEQ ID NO: 318635 - protein, 73 aa, Zea mays
  Clone ID: MRT4577_53669C.1.pep
WCTCYTSPSLESGVSEGGGGGRTSIPTHESWDGQVHAQGKTFGTISYMIQNLRSLHTTAYSLRPFRICPNLDT

SEQ ID NO: 318636 - protein, 40 aa, Zea mays
  Clone ID: MRT4577_5366C.1.pep
LFLGNTCRNEGTIVEYFSYVIKRMDPQTMGGCKAGFIKEI

SEQ ID NO: 318637 - protein, 476 aa, Zea mays
  unsure (1)..(476): unsure at all Xaa locations
  Clone ID: MRT4577_53670C.1.pep
AVKSDDDXELSYFLWAHSKSIMDFFHFGDVVCFDSGYALQGYDMPLALSVNHHHKQTIIFGAAIIHDESKEAFQWLLDTFKMAMNGTHPKTLLIDRSVALNEAVTAHRYCVWQIYQNALQQLSQAFHGSKTLDCNFKRCLFDCEDEFVTACKEMLEKYDLEDNQXLAYLFSRKEKWALAYGRDAFYADMKSVQQKESLTSELKKHLSLECDLLNFFEQFERLLCDRRSAEMEADVNANQSTKKPPSMRMLRQAANAYTPSAFKMFEREFELYMDCMLYICGEMSTIFEYRISVEDKSRDHFVKFDSLNSMMNCTCKTFEFIGIPCRHMLKVLDMRNIKDLPAQYIMKRWRKDAKSGSSNGGCAFLFDGDPDFSHIKRYNFLCRMFSVAAARAATSDESFAYMENQSNILMDQIEQVIQTRPPDIADLIGANCDRTQNPVDNIVAEGIQSHTNFLNGSTDGSLTFPFTLGAGTLDYR

SEQ ID NO: 318638 - protein, 174 aa, Zea mays
  unsure (1)..(174): unsure at all Xaa locations
  Clone ID: MRT4577_53671C.1.pep
TRCHKPSALPLGSLLLLVYRPSPPHARKPGRRHINYAAFVSTRTKGVQDDDYYTKLISXSFSXINVLNVLDNTLAFSELLXCCPGSLQYLMGXILLTDTLCHKTKDSKPIXDTINEGGLLTCLKANKGIIXAKETYKETTRRAITTLVKRCAKXYYQAGALYVKWPAGNNIVDT

SEQ ID NO: 318639 - protein, 66 aa, Zea mays
  Clone ID: MRT4577_53672C.1.pep
GKGASRRPAAARRPGGLSQWHGPLGRERPNVGWGRPPTKAPVANLDSYLKAFNHNSAHRNFAPLAF

SEQ ID NO: 318640 - protein, 221 aa, Zea mays
  unsure (1)..(221): unsure at all Xaa locations
  Clone ID: MRT4577_53673C.1.pep
MVKICCIGAGYVGGPTMAVIAVKCPAIEVVVVDISKPRIDAWNSDKLPIYEPGLDEVVKACRGKNLFFSTDVEKHVAEADIIFVSVNTPTKTRGLGAGKAADLTYWESAARMIADVSKSDKIVVEKSTVPVKTAEAIEKILTHNSKGINYQILSNPEFLAEGTAIEDLFKPDRVLIGGRKTXEGRKAVQALKXVYAHXVXPEXNIITTNLWSAELSKLAAH

SEQ ID NO: 318641 - protein, 76 aa, Zea mays
  Clone ID: MRT4577_53674C.1.pep
GCRTDGDMSDAEAKSDSVWLIEVTIGEHYDVFWTILSGLIRVHSKGFRVCSRVLHYRRVRSSSFMSSTCCRGSICT

SEQ ID NO: 318642 - protein, 127 aa, Zea mays
  unsure (1)..(127): unsure at all Xaa locations
  Clone ID: MRT4577_53675C.1.pep
MKGLIGALALLALAASAGSSTSRGXGCQTPSLHIPSSHYMPPPLYLSPQHKPHAWQYPTQPPNVSPGQQHXSCSGSSDGSPILRHSXEFLTHHCSPYRDSIQLATXPALHNYSCHQIKQAEPLYQYQ

SEQ ID NO: 318643 - protein, 44 aa, Zea mays
  Clone ID: MRT4577_53676C.1.pep
SLMSRTISRRLYALRITERNMGICCTPYLILMFKRKKNVGFSLK

SEQ ID NO: 318644 - protein, 50 aa, Zea mays
  unsure (1)..(50): unsure at all Xaa locations
  Clone ID: MRT4577_53677C.1.pep
VAVADQNTTPFREPSFCXHQXSXFVLXXFLPRXXXHXXAGKQVLXSXXXR

SEQ ID NO: 318645 - protein, 65 aa, Zea mays
  Clone ID: MRT4577_53678C.1.pep
GLGCPRRPPETSTRRRRWRRSSCAPSWASLDLEANRVPLPGGPPPRRRQTRKGLKKGYTYISGVR

SEQ ID NO: 318646 - protein, 104 aa, Zea mays
  Clone ID: MRT4577_53679C.1.pep
AIISCFFFCGGFFFWFGPGLGCFWDRAGVAFLWVSFRSAFFYFCFLKKKIPPPPPKKKKPTKKKKKKKRKKKKKKKKKKKKKKKKKKKKKKKKKKKKKKKKKPP

SEQ ID NO: 318647 - protein, 84 aa, Zea mays
  Clone ID: MRT4577_5367C.1.pep
HYPYIAFATSPTGVVFFFFFSPSPCSFSGARDPAANTAEADKLHKKPLIAENGRTSFTYNAMRASTSRARSSGRKPISTPLCRP

SEQ ID NO: 318648 - protein, 75 aa, Zea mays
  Clone ID: MRT4577_53680C.1.pep
ASPGGKFIAKMMEQKAGFLQVYAPVDFCKSLRHPKPFIWKHFLVKGVPGKNANQNGAFSKEKNLQRLICPVSTVV

SEQ ID NO: 318649 - protein, 156 aa, Zea mays
  unsure (1)..(156): unsure at all Xaa locations
  Clone ID: MRT4577_53681C.1.pep
ARDGRRGLGAAPXAGPAAPQQAYALTARSVDRMMLDGWAAAAPAAXGGAASSVAXVIPAPATTPGAAESASRSSSELTTAECSASISSASDPGAAPVADHQLLASEENNYTASAVQQGEVPLSAIESWLLEDAGAGEQKLAHDGPLLDAALHSFGF

SEQ ID NO: 318650 - protein, 75 aa, Zea mays
  Clone ID: MRT4577_53682C.1.pep
LSYRHSRRPFPARRRPSTASSASHPAHVYSRRRFSESERGNDTFARDLWDAFEGFPFGSRNTQHSVPLGPAEPPR

SEQ ID NO: 318651 - protein, 103 aa, Zea mays
  Clone ID: MRT4577_53683C.1.pep
TVWKYTSFFASIDVKDYSLPGGVEEKRHELVMGIINFIRQYTWGKPLKTWVKTSGILGGPKNVLPTVIFPKQYKKRFRKTMSAYFFVVPNQWLPPVVIPSKQT

SEQ ID NO: 318652 - protein, 70 aa, Zea mays
  Clone ID: MRT4577_53684C.1.pep
PSCDNIYFLFEAINWLLSCRHTEKKQLRRNYYIQKKTMLVRAQGHLSMKTCNNRKEKGSVPFRNQFYDRV

SEQ ID NO: 318653 - protein, 52 aa, Zea mays
  Clone ID: MRT4577_53685C.1.pep
ILVHATGVNLFLASGIACSSLWWSHMNAGYPIAHHMALFWVIFQTVENKNVR

SEQ ID NO: 318654 - protein, 39 aa, Zea mays
  Clone ID: MRT4577_53686C.1.pep
KTTSRLDHHEGASRTHQLRRPLRPTSPSLLPGLYAGHTA

SEQ ID NO: 318655 - protein, 150 aa, Zea mays
  Clone ID: MRT4577_53687C.1.pep
LFAQFPLVSRSGKIRRLVAEAKDAKLARLSLHGTPGGAPAFELAAKFCYGVHVDVTVANVAMLRCAAHYLQITDDFSDKSLELRAEAFLRDAVLPSIASSVAVLRSCEALLPAAEDVGLVPRLIAAVATNVCKEQLTSGLSQLGQCAQLK

SEQ ID NO: 318656 - protein, 168 aa, Zea mays
  Clone ID: MRT4577_53688C.1.pep
KKDFPKRAKKFGQKRGTLKPGLKIGTEKNSILQKFWGDLQKKALIFGTPCGQGLKAFFPFLGPGFKKIPPLVKTSPTPLEYFEGGGGPFAKFLGGPAFFCPLEFFGGPTPVFLKGGCPPGKMGKNPTFTLPTTNLVVSPTLPRSLGNNFIPQFWVKGGQKGFGTNLKP

SEQ ID NO: 318657 - protein, 97 aa, Zea mays
  Clone ID: MRT4577_53689C.1.pep
PTRKLKHFIGDIDCQTTPTDLSHCIKRLKGQTNKMENQTAPGPNRDSRSNSPKATAQGERHPPRGGLPASKPAAVAGGKQQAGVWAPPFPPWPASAR

SEQ ID NO: 318658 - protein, 280 aa, Zea mays
  Clone ID: MRT4577_5368C.1.pep
MDQIMDFPVDPIMAAKAYKYKAEILINEYLLADSYVLYTSVLAGLLMCKLSYDFTHIISSVYFKGYASLAKMKKIEWNNRGMSTVHAIFITMMSVYLVFLSDLFSDQLEGPVTFRSSHLSNLTLGVSVGYFIADLAMIFWFYPSLGGMEYVFHHILCLVCAVYSMLSGEGQLYAYMFLISETTTPGINLRWFLDVAGKKNSKAYIANGVAMFVTWLMVRIVLFVYLFYHILTNYDQVKQMDTFACVLISVAPTILFTMNIIWFSKIVKGLKKTLAKRHTE

SEQ ID NO: 318659 - protein, 161 aa, Zea mays
  Clone ID: MRT4577_53690C.1.pep
REGFPFRKEGGEVIIGGFLVGPLGALVGTPPPRGPGLVAPPKGRPRDLKKWGGLFPQTGVCEIQILKEFWARVALQVLPGECPRAFPIFFPPLIFLLGGPRGLGGDFSIKKRGGGPSGFLGGPGFGPPPVGAFFRLSGVFFIWKKLVKKKSPPKVGGVVCC

SEQ ID NO: 318660 - protein, 199 aa, Zea mays
  unsure (1)..(199): unsure at all Xaa locations
  Clone ID: MRT4577_53691C.1.pep
SIQGYHFTSDLKILDLPTYDMIVGMDWLSTHSPMVVHWADKWLSLSTSGISVKLFGVQASQTHGALVXLCSLDTLPASEQELVKELPTDLQLLLDKYSSVFXLPTSLPPVRDCDHQIPLLPGANPMQMCPYRYAPSFKSEIEKXVNEMLDSDIIQHSKSPFASSVIVVKKKDGTHRFCVDYHHLNALMAKAKFXVPIID

SEQ ID NO: 318661 - protein, 63 aa, Zea mays
  Clone ID: MRT4577_53692C.1.pep
IPHKLIIYLNKILLCFTINRPNTNKDLDSFTYGRPSVQAGSESTTLATLHQTNTKQMERRRRR

SEQ ID NO: 318662 - protein, 501 aa, Zea mays
  Clone ID: MRT4577_53693C.1.pep
TQRPVKSKHGRAAPAAARLPLPPGPRGWPVLGNLPQVGAKPHHTMCAMAREYGPLFRLRFGSAEVVVAASARVAAQFLRAHDANFSNRPPNSGAEHVAYNYQDLVFAPYGSRWRALRKLCALHLFSAKALDDLRGVREGEVALMVRELARQGERGRAAVALGQVANVCATNTLARATVGRRVFAVDGGEGAREFKEMVVELMQLAGVFNVGDFVPALAWLDPQGVVGRMKRLHRRYDDMMNGIIRERKAAEEGKDLLSVLLARMREQQPLAEGDDTRFNETDIKALLLNLFTAGTDTTSSTVEWALAELIRHPDVLRKAQQELDAVVGRDRLVSESDLPRLTYLTAVIKETFRLHPSTPLSLPRVAAEECEVDGFRIPAGTTLLVNVWAIARDPEAWPEPLEFRPARFLPGGSHAGVDVKGSDFELIPFGAGRRICAGLSWGLRMVTLMTATLVHALDWDLADGMTADKLDMEEAYGLTLQRAVPLMVRPAPRLLPSAYAE

SEQ ID NO: 318663 - protein, 158 aa, Zea mays
  Clone ID: MRT4577_53694C.1.pep
GTPRARPGRLHPSTPLSLPRVAAEECEVDGFRIPAGTTLLVNVWAIARDPEAWPEPLEFRPARFLPGGSHAGVDVKGSDFELIPFGAGRRICAGLSWGLRMVTLMTATLVHALDWDLADGMTADKLDMEEAYGLTLQRAVPLMVRPAPRLLPSAYAEE

SEQ ID NO: 318664 - protein, 217 aa, Zea mays
  unsure (1)..(217): unsure at all Xaa locations
  Clone ID: MRT4577_53695C.1.pep
MDVPLPLLLGSVAVSLVVWCLLLRRGGAGKGKLPLPPGPRGWPVLGNLPQVGAKPHHTMCAMAREYGPLFRLRFGSAEVVVAAVARVAAQFLRAHDANFSNRPPNSGAEHVAYNYQDLVFAPXXSPRWRALRKLCALHLFSAKALDDLRGVREGEVALMVRELARQGERGRAAVALGQVANVCATNTLGRATVGRRVFRVDGGEGAREFREKVVELM

SEQ ID NO: 318665 - protein, 158 aa, Zea mays
  Clone ID: MRT4577_53696C.1.pep
MAATPNLRSTNLAFHVLHLPTLPFYHDYSIYQMLEGRKGEKLLLPHYHQSLGHMVATEVVPEFFPSDGFRVGMGGEASELAPKAEVVVAAAALVASLLESDQLPGLLESASGTFAQWSSGVAVANAAAGLPPLGVPAVLAEASHLCAYSHTSVEITHI

SEQ ID NO: 318666 - protein, 81 aa, Zea mays
  Clone ID: MRT4577_53697C.1.pep
IPSTSFTKLPSLISITKPPIYRYSTYTNNLFTLHRKYILKITHLLKHFSSSIPHSNTYITRIQCLIPSYPHHKQLALLSYF

SEQ ID NO: 318667 - protein, 60 aa, Zea mays
  Clone ID: MRT4577_53698C.1.pep
HSEHNSKNNPQTPHNYPTISHASRHRRPSNTTLPRAPRPAPEPEPDDTPATLTMDPSVHQ

SEQ ID NO: 318668 - protein, 53 aa, Zea mays
  Clone ID: MRT4577_53699C.1.pep
ASSCGMSGRAMPPQVRQCKASCAMYGLSMPRGRQRRASCRPGEPARAEFRAYV

SEQ ID NO: 318669 - protein, 119 aa, Zea mays
  unsure (1)..(119): unsure at all Xaa locations
  Clone ID: MRT4577_5369C.1.pep
EKGGGPPQRGRGGAPPPPRPLFFLKTHPGRGALWLNGKKKKXPSHKQGGSQQPPLYSLVRDPPVSGRGDPPPAPPKKKGGPKRGLLPFCPXKSGPVREGGPPPPWPPRGCGCGPPLAPL

SEQ ID NO: 318670 - protein, 107 aa, Zea mays
  Clone ID: MRT4577_536C.1.pep
TIGSLTRSFRVLSTTSFLSRVLKNRGPATVRWWPRGGISFLPSTRLIPPPGPKNAQCCEMFSRPILLPLISPLGCVACQASVGSSVFRLMSNCCNFVCTLYELLRTF

SEQ ID NO: 318671 - protein, 339 aa, Zea mays
  Clone ID: MRT4577_53700C.1.pep
MQDAARWALSQYCSLFSRVADGLDLKYYPRHSTDSVGGVIVSPVGEGNPKLNSMVNLAAVLNTELDHVFDELGKMFENRRRGARRAQPEQQVPQEEAAPQQHLPLPPLMTIEQMFLMQTQAVQAIGHTLAAMQQVQQQPPPPQPQVQVQMPQVPRDKRAEFMRGHPPDFAHSTDPMDAEDWLRTMERELHTAQCNDHEKVLNGPRQLRGAAQSWWESYLATHANLEAITWEEFRNNFRRYHVPEGLMIVRKKEFLALKQGPLSTSEYRDKFLQLSRYAPEDVNTDAKRQYRFLRGLVDPLHYQLMNHTFPTFQHLIDRAILTERKRREMEDRKHKIGGP

SEQ ID NO: 318672 - protein, 63 aa, Zea mays
  unsure (1)..(63): unsure at all Xaa locations
  Clone ID: MRT4577_53701C.1.pep
FXRLSSPPPERRTLSMSTSVLRSCCRTIALSKVSALPSPPSVARSVIVCINCLEPRFPYVGKT

SEQ ID NO: 318673 - protein, 71 aa, Zea mays
  unsure (1)..(71): unsure at all Xaa locations
  Clone ID: MRT4577_53702C.1.pep
ARGQQLPVALPXRTDAQGQTGLVERLARRSSSEDAGGVQPPGGGGAGTAVAAGSRTPSPKTKASQLVARFL

SEQ ID NO: 318674 - protein, 49 aa, Zea mays
  Clone ID: MRT4577_53703C.1.pep
GGEGKTYIHFQLSIAARIETNILLVYNYEKTTKTTTDNDNINRQTNWTL

SEQ ID NO: 318675 - protein, 139 aa, Zea mays
  Clone ID: MRT4577_53704C.1.pep
MAAEKEGAVVTKGHDEGMKAAAALLEEFGLPPGLLPLEDVTEVGFVRATGYFWLAQRKKVEHRFRKIGKQVSYDVEIAGYVRPRGIRRLKGVKAKELMLWPPVNEMAVDDDPPTAGKIHFKSLAGVTKTFPVDAFAAGQ

SEQ ID NO: 318676 - protein, 59 aa, Zea mays
  Clone ID: MRT4577_53705C.1.pep
YYIHYSWLVFLQSGHGHGLYIYIWGKPKQRGLEIILMVLATTCMRRHYYSFQQKHKQVA

SEQ ID NO: 318677 - protein, 80 aa, Zea mays
  unsure (1)..(80): unsure at all Xaa locations
  Clone ID: MRT4577_53706C.1.pep
MTERXSKSXESQAKPTGAPLLVSPAPXPTLXGRSRXPKGPCXIALQARPEPHAPAAGPPSKPPLPQRDGVLXXPXAGRRR

SEQ ID NO: 318678 - protein, 79 aa, Zea mays
  unsure (1)..(79): unsure at all Xaa locations
  Clone ID: MRT4577_53707C.1.pep
GWWFFFFFFFFFFFFWNLKPVCSIHHSSNFNRGMGHMKSREREAXGSGGGGEAQDGGPLGPVRGGGGRGATXTRTRPPG

SEQ ID NO: 318679 - protein, 222 aa, Zea mays
  unsure (1)..(222): unsure at all Xaa locations
  Clone ID: MRT4577_53708C.1.pep
GSGPEFPGRPTRPGNYCVLQMDQSYKPDENEVRTLFGLRLSQKRNNGVVDKSLFSNIVTKNKDLPESALRDLIXXATVAVKYTQSNSVCYAKDGQVIGIGAGQQSRIHCTRLAGDKANSWWLRHHPRVLSMKFKAGVKRAEISNAIDQYVTGTIGEGEDLVKWEALFEEVPELLTEAEKKEWVDKLSGVSVSSDAFFPFRDNVDRAKRXXVAYIVAPSGSTA

SEQ ID NO: 318680 - protein, 76 aa, Zea mays
  Clone ID: MRT4577_53709C.1.pep
HPTPLSAPPMTPSTVVLASISPLPEKPIFFINFPILALVDNIRHSSNLYSLSSMKTEAFPVTRSPQVLSVPVVQDS

SEQ ID NO: 318681 - protein, 54 aa, Zea mays
  Clone ID: MRT4577_53710C.1.pep
LERKRCYEGQLNPCMFSFSLTSAASNKEKGGSLGTKTNAEKTTTNRPKGMTKNL

SEQ ID NO: 318682 - protein, 75 aa, Zea mays
  Clone ID: MRT4577_53711C.1.pep
LQDRRIIYYSKNDHLNKTALYIKPCTLYGARTRHPYHLELRILHTYNPTFLKINIMPPHYIITGNSTPTFSNPPK

SEQ ID NO: 318683 - protein, 70 aa, Zea mays
  Clone ID: MRT4577_53712C.1.pep
KFDIYKHTILSLLLLSFTQLKLSIMCGFFPFLFFFNNEENISDVTRFLDSIEFGVLLYLKTNYSIRHQNL

SEQ ID NO: 318684 - protein, 69 aa, Zea mays
  unsure (1)..(69): unsure at all Xaa locations
  Clone ID: MRT4577_53713C.1.pep
DSNQXTAXCATASSQKDXDSGAAXALLPNNAMTNLKVMRSSPDDRRVFFXGGWGEGGPETGRTPRTATG

SEQ ID NO: 318685 - protein, 284 aa, Zea mays
  unsure (1)..(284): unsure at all Xaa locations
  Clone ID: MRT4577_53714C.1.pep
MALLPSRSYTRILQLKTNHFIESRKGQATSTAQHSTSTPSVLGRRGEGNPGPGRVVGRGSAAEEMEEREKLVCLAKLAEQAERYDDMVEFMKNLARMDVDMSAEERHLFSVGFKNTIGAKRASWRIICSHEQKVAADRQTGVMIDAYKKKVEEELRKXKGDYYRYLAEFSTGTEKKAASDQSLMAYQHAMVVASSELSPAHQIRLGLALNLSVFFYEIMNSHERACQVAKQAFDEALTEINSGEGGYKDSTLMMQLLKDNLALWTSELTGGEASKGNDDVDMEG

SEQ ID NO: 318686 - protein, 179 aa, Zea mays
  Clone ID: MRT4577_53715C.1.pep
ATSSPSAPLSILFFLSSPSPWPRRLVFRKGTRALAPVRRSPRRGVRSAALPVHPPPKPPPVPVQQHAPSSSPGAFSVNQTRPAVPHPCDSRSAGPSVTSASSPSLRPYPSSPHPPSYALSAWPPHPGVLRFWGASLCPLRSAPPESGPAERTTTQIGSCPSLPALQSLRRRIRRLICSI

SEQ ID NO: 318687 - protein, 198 aa, Zea mays
  unsure (1)..(198): unsure at all Xaa locations
  Clone ID: MRT4577_53716C.1.pep
FADDVVIFLKPATSDMXFIMDVLHLFGXASGLKNNVQKTSDFPIRCEDXYLMVIQGLLPCNILSLIGLPIXLQRWKANLITRASRRVXLXFVLIGMLIYFAMTTDIXPPWVFKAIXDKIRQKFLWRRRKDAKGGHCLVAWERVCHPLELGGLGISSLLKLSWALRMRWLWLXKTESNKPWADLPIQVLAKASAFFSIV

SEQ ID NO: 318688 - protein, 330 aa, Zea mays
  Clone ID: MRT4577_53717C.1.pep
MLGRISHYGLQHMVSPPGALTCSPNPANSARGETEPSGPKSRKGQATSTAQHSTSTPSVLGRRGEGNPGPGRVVGRGSAAEEMEEREKLVCLAKLAEQAERYDDMVEFMKNLARMDVDMSAEERHLFSVGFKNTIGAKRASWRIICSHEQKVAADRQTGVMIDAYKKKVEEELRKVCNEVLSVIAIHCLPLASTGENIVFFYKMKGDYYRYLAEFSTGTEKKAASDQSLMAYQHAMVVASSELSPAHQIRLGLALNLSVFFYEIMNSHERACQVAKQAFDEALTEINSGEGVYKDSTLMMQLLKDNLALWTSELTGGEASKGNDDVDMEG

SEQ ID NO: 318689 - protein, 226 aa, Zea mays
  unsure (1)..(226): unsure at all Xaa locations
  Clone ID: MRT4577_53718C.1.pep
LNRAGQLTXAYNFINEMPITPDAAVWGALLNGCRIHRHVELGELAAKYVLALEPNDAGYHVLLCDLYADACLWDKLARVRKTMREKGLDHDSGCSWVEVKGVIHAFLTDDESHPQIREINAVLEGIYERMKASGCAPVESHCPEDEVLKDDIFCGHSERLAVAFGLINTTPGTSISVTKNQDTCQSCHRILKMISNIVRRDIIVRDSKQLHHFKDGSCSCRDEGFG

SEQ ID NO: 318690 - protein, 69 aa, Zea mays
  Clone ID: MRT4577_53719C.1.pep
GGRAKEPFVAFKGGIILGPPEGTLGTSPFFSGGIAPLKVTPWKAHLFLLIGGRVFFHFWTGPFGLFPSY

SEQ ID NO: 318691 - protein, 181 aa, Zea mays
  Clone ID: MRT4577_5371C.1.pep
MAYGKRSRQKAEEMVWLPDGADVARFLLLFSGHQHYHGDGMAASAPERVFECKTCNRQFPSFQALGGHRASHKKPRLSDGVDAAAAEPPKPKVHGCSICGLEFAIGQALGGHMRRHRAADQTDGGSLGTGLTPKYDSGKTAASPAELVLDLNAVPELEEEQDHAKLELSIEPVAVVDFHAR

SEQ ID NO: 318692 - protein, 64 aa, Zea mays
  Clone ID: MRT4577_53720C.1.pep
ECFCDRAGVVVHQKMGPSFLTQKTEMGGVFLKKNCKTLYGQPSLVEHLGSVFGLPPWPIKQCWE

SEQ ID NO: 318693 - protein, 108 aa, Zea mays
  unsure (1)..(108): unsure at all Xaa locations
  Clone ID: MRT4577_53721C.1.pep
PGSXRAFVAWLPSTGRTGARLTNKLIGLLSEAISKPLSSQHRSXKVEKRTDQWIDLCPARLSSRCCRWCLAXSVVKVLTRDACCNSTWICAMPRAARIAWVLPSLHML

SEQ ID NO: 318694 - protein, 128 aa, Zea mays
  Clone ID: MRT4577_53722C.1.pep
MQIFVKTLTGKTITLEVESSDTIDNVKQKIQDKEGIPPDQQRLIFAGKQLEDGRTLSDYNIQKESTLHLVLRLRGGIIEPSLKALASKYNCEKMICRKCYARLPPRATNCRKRKCGHTNQLRPKKKLK

SEQ ID NO: 318695 - protein, 61 aa, Zea mays
  Clone ID: MRT4577_53723C.1.pep
GRMTNHLIFPYIERKGYRRTVSIKTLFGGGLQLGGGGAKTQQATGGGRGEQNFFPSADTDY

SEQ ID NO: 318696 - protein, 90 aa, Zea mays
  Clone ID: MRT4577_53724C.1.pep
ARVTKSLEPFKTARPCIICFYILFSLLCSFHFFYSFNFSFFFLFFFFFFFYFFFLVPETVLPCALIKDKFLYSNMSLRLQKLPRVRSRNA

SEQ ID NO: 318697 - protein, 114 aa, Zea mays
  Clone ID: MRT4577_53725C.1.pep
LCYKIIRYITRRYISNIYKLSSNQLSGMKPATVALLILMNMMCTIGYFDHASFLGTKAQETTLLANSYGNNEETGSTKGTNLRRKLVVTEHQWSPRDICCNTMSSNSCKQQYNC

SEQ ID NO: 318698 - protein, 205 aa, Zea mays
  unsure (1)..(205): unsure at all Xaa locations
  Clone ID: MRT4577_53726C.1.pep
FFCIARVTRAFVPPPPPPXPPPRPRRPIPPSPPLSSHGDSPLPVXIDPXPSPMKKXPPPXPPXNDPGSGXPAAPRCWWRAPIPPPPPRDLEPPLPLPPAPXPALPTPPPPPFSPPPPPRPPPPPPPPHPPPPPXPPSSTPPLIPPPHPRVPQPSPPKXPPPPTPPPPAHPAPTPPPXPPPPPPSPPPPPPPPSLHPRPPPPPQPP

SEQ ID NO: 318699 - protein, 49 aa, Zea mays
  unsure (1)..(49): unsure at all Xaa locations
  Clone ID: MRT4577_53727C.1.pep
PTRTRXPGRTRGKNLKGGGEIMGCDHIYYTTSNAIVFNILYYIIKTGTF

SEQ ID NO: 318700 - protein, 61 aa, Zea mays
  Clone ID: MRT4577_53728C.1.pep
QSMLPQMCLVSHPIVGLMSRLWLLFLAYHGSRVVISFPFSQESLPKSSSYSMQDAFVPHIE

SEQ ID NO: 318701 - protein, 197 aa, Zea mays
  unsure (1)..(197): unsure at all Xaa locations
  Clone ID: MRT4577_53729C.1.pep
MNRRKRLPTDRQKTLFMLMKKQQQKEKETGREAGDNGSSRLASLGPKELEAFPVHDGRARLVVLSLGNPHLLEAAGIHETTYNSIMKCDVDIRKDLYGNIVLSGGTTMFPGIADRMSKEITALAPSSMKIKVVAPPERKXALAPSSMKIKVVAPPERKYSVWIGGSILASLSTFQQMWIAKAEYDESGPSIVHXKCF

SEQ ID NO: 318702 - protein, 100 aa, Zea mays
  unsure (1)..(100): unsure at all Xaa locations
  Clone ID: MRT4577_5372C.1.pep
GSCARFDNYNALHINIDRYWVDDKDTWYGAQTGAVPYDYGWAGGSKNVNLPPLLGMXSXANHALGKDRTSCHWCXQILVVNHPVCYEHLATVMITDMNYY

SEQ ID NO: 318703 - protein, 106 aa, Zea mays
  Clone ID: MRT4577_53730C.1.pep
RRINLGSIRFLKFGDFKKRGKLILFWGEYKKNIIFKERVSKIGLFKKGGPFYFYFFYFLFNFFFFFLLIYKKNFFFFFFIFFFFFFFIGCKQVQAIYIFMRSYSLF

SEQ ID NO: 318704 - protein, 87 aa, Zea mays
  Clone ID: MRT4577_53731C.1.pep
FSIVFYLIQAVKGLSLESAQIKHSICYPVASEALYFTRILSLHVLFLANNVPRMNVCALYHQEIFLCFSNERPVTFFSRNWCGVVRR

SEQ ID NO: 318705 - protein, 112 aa, Zea mays
  Clone ID: MRT4577_53732C.1.pep
RPGAPDRSLVHRATSMVEPRSLGNFIIKFTGLSTVTGRWCTGPSPTAIFQWARTGQRLANVASSPKVHQTGPVPVSYGNRPIISQTQGMWIWFSGASNQSGAPTGNQFLTSF

SEQ ID NO: 318706 - protein, 179 aa, Zea mays
  unsure (1)..(179): unsure at all Xaa locations
  Clone ID: MRT4577_53733C.1.pep
MAASLQAGATLKQAAKXIGARAPFASLTTRPSSQLACRAFGVDAGAAKITCCLQDVVSRCMDAGKLAGFALATSTLLVXGASAEDTPKMLTYDEIQSXTYMEVKGTDARNQCPTIDGGEESLTSKAGKCQTRKLRLQPTGFTVKGDGTSKNAQQELQSTKLKTRLTYTLNENEGTVEGD

SEQ ID NO: 318707 - protein, 102 aa, Zea mays
  Clone ID: MRT4577_53734C.1.pep
RPGPCYRPGPARDVRPRCAGFRRPRRGPQRQRREGRRRRRAVMIFAMTFANAILLGRARCAAVATNGVLLTSSAMGGGYNSHRSALYLRGERTADSRLEGGE

SEQ ID NO: 318708 - protein, 58 aa, Zea mays
  Clone ID: MRT4577_53735C.1.pep
GRATVLSEQGLSGAGKAGLRRGDGGASTSGLDRRPVTADSEETKRLSGTAQCRWWGPG

SEQ ID NO: 318709 - protein, 117 aa, Zea mays
  Clone ID: MRT4577_53736C.1.pep
EVCICPRESMVGDERSTQKERIRQSHSRSRRAEPPHSAPPRRAATPSRAPVSSLRLPRCRQRRRRRHWVRGPRPRTWARRRSWASSRRGPEQGQKRPSSSSSCPWRKTTASSSWRAL

SEQ ID NO: 318710 - protein, 157 aa, Zea mays
  Clone ID: MRT4577_53737C.1.pep
LPKAHLLRASARRGQARPCCRPGHPTVHVRCATGHQGGPRSQNSNGQFPTALVTWLGHRTVRCAPDCPVCHRTDGLHQRSCLVVGAINTPTTPPFIASKFSTSQPPTRARHSILDTPKEIKSSPIPHKALVTRESDLPCVLLSSCAWIAFFLSHFFL

SEQ ID NO: 318711 - protein, 84 aa, Zea mays
  Clone ID: MRT4577_53738C.1.pep
LPFYFNAPRSRNSTYRIHPTHFVIANSCCICGSLSFFSSCRGFLLSLNDHRGEHRRDLSFGRTKVLSLPLTGTKLFLINCVPQS

SEQ ID NO: 318712 - protein, 38 aa, Zea mays
  unsure (1)..(38): unsure at all Xaa locations
  Clone ID: MRT4577_53739C.1.pep
FLXXCVNTNSGGDILKQTSELLLLSNREMDYSTVNCLN

SEQ ID NO: 318713 - protein, 69 aa, Zea mays
  Clone ID: MRT4577_5373C.1.pep
KGFLVLAAGRRILRYGWHDNDHMRSWLEFLSPSSRVNITGPSLGDDGSCIWTDGTKIWDDSLARGRGYG

SEQ ID NO: 318714 - protein, 145 aa, Zea mays
  Clone ID: MRT4577_53740C.1.pep
QAMLLKSGFNVLVAVPLYGVWPNSSGLEDHGRFLAWIRILPPHCYMAFHLSLDCSTCDWREEVAGGAQWWRGSLHATPLVGTGRLRDGSVYRWPKESATGTKHKDQGQMMGTLQPQGVRKRRFLLPLLASVSLFSLIVRTAGRVG

SEQ ID NO: 318715 - protein, 147 aa, Zea mays
  Clone ID: MRT4577_53741C.1.pep
GTHRGLPGLDTARPQAEEAFRPGTPWGRFLSLLPAAPSCSRSQLLPGTALPASALRKSASLAFYGVRKDYGLLQAIKRVKCQLTIYRKLRTNQQTGLKADSDSKVKGGAQPKQTLTYKGAGRRRCGYCCQICAMIFHMDIILCPAFM

SEQ ID NO: 318716 - protein, 471 aa, Zea mays
  unsure (1)..(471): unsure at all Xaa locations
  Clone ID: MRT4577_53742C.1.pep
MGSLPLLAACCSLLLTVAAPARDSTTSVCASQIGDFPHRNSSGLHLTLHHPQSPCSPAPLPSDLPFSTVLTHDDARVAHLASRLAASDPPSRRPTSLRKQKKAAGGASGGHHLDDDSLASVPLSPGTSVGVGNYVTQLGLGTPSTSYAMVVDTGSSLTWLQCSPCVVSCHRQVGPLFDPRASSTYTSVXARASQCDELQAATLNPSACSASNVCIYQASYGDXSFSVGYLSTDTVSFGSTSYPSFYYGCGQDNEGLFGRSAGLIGLARNKLSLLYQLAPSLGYSFSYCLPTAASTGYLSIGPYNTGHYYSYTPMASSSLDASLYFITLSGMSVGGSPLAVSPSEYRSLPTIIDSGTVITRLPTAVHTALSKAVAQAMAGAQRAPAFSILDTCFEGQASQLRVPTVAMAFAGGASMKLTTRNVLIDVDDSTTCLAFAPTDSTAIIGNTQQQTFSVIYDVAQSRIGFSAGGCS

SEQ ID NO: 318717 - protein, 100 aa, Zea mays
  Clone ID: MRT4577_53743C.1.pep
FANPQKRGCCRPCYRFRAVFSSNPNKVVSPILNPFPKTRGAPFLVFIEKRKWAPPPYLCDWGPFGSFNSNPRGPYVNWTPPVGPPLKMAGKVSPHPGVFP

SEQ ID NO: 318718 - protein, 57 aa, Zea mays
  Clone ID: MRT4577_53744C.1.pep
RSGQTILQQADVLRVTWNEPMRLSRHHALTIRITKCAACIASDPMAHVLPSYQTLSV

SEQ ID NO: 318719 - protein, 77 aa, Zea mays
  unsure (1)..(77): unsure at all Xaa locations
  Clone ID: MRT4577_53745C.1.pep
CTHMKYSNGGIXNGGGGAGXKNLFVASLIFXRDAEAGFINANTPVAKVKPSDLXKAEEHTYTLSVXNAEATYPWCTE

SEQ ID NO: 318720 - protein, 112 aa, Zea mays
  Clone ID: MRT4577_53746C.1.pep
GPFSFLIWGQENPGLNWSLVVLWGGGICFEPISLLVLTQKGGTCFFHFQQQQKTAFGSHPPTKNAPFSGGKGSMGGRCLFISAWAGDNFGLKTSPGPNSRKEKSLEMALGVG

SEQ ID NO: 318721 - protein, 55 aa, Zea mays
  Clone ID: MRT4577_53747C.1.pep
VDNYRPPRHPHQTREGRQDKSHARRRKHLRSLLKCEAALHFSLISNPKPAFSQHG

SEQ ID NO: 318722 - protein, 128 aa, Zea mays
  Clone ID: MRT4577_53748C.1.pep
SKSSRQTTARDFVKHYNGRVEKLIEVFKTGVSSVALTSDIWSGKAKEDYISVVAHFVNPNWELEKRLLGLRPIEDDHTGKNIAERVSLVVDEYGLTDKIFAITLDNASSNKTAMSYLIPLFSSYLGIP

SEQ ID NO: 318723 - protein, 115 aa, Zea mays
  Clone ID: MRT4577_53749C.1.pep
KRRKSNEKGKEKKEEDMTEKEAPRSFLARLPPLDRSADIGNEEKKRSCVTHQIQSSQSLLIQYEIRLPPLPSLLFHTVPSNLFLVELMGGEKQQNLQGSTENDRASCADGERFCG

SEQ ID NO: 318724 - protein, 110 aa, Zea mays
  unsure (1)..(110): unsure at all Xaa locations
  Clone ID: MRT4577_5374C.1.pep
KGIDPPGPKTHRRNKNKNKKKXKKKKKSKKGKRPRPRLKQETGKKKKRKRKGPKTKRKRKEPRGQSPKRQKPERDERXKGRGKKKKRAEXSRRQRDKHKNNWQKRGGATG

SEQ ID NO: 318725 - protein, 59 aa, Zea mays
  Clone ID: MRT4577_53750C.1.pep
AFGHPFYLKICIFAHFNPIGWVKEIVAWILLAWERILNHVLMSILTIGHLSTLVAVMKF

SEQ ID NO: 318726 - protein, 79 aa, Zea mays
  unsure (1)..(79): unsure at all Xaa locations
  Clone ID: MRT4577_53751C.1.pep
RSCASSXHFQCPLTDLEEEGERERTVVLPSPSCPPPSSPSLFHCFSAVFMHGTQKVDLLVTVATFHGKLRSSGHRNMNI

SEQ ID NO: 318727 - protein, 46 aa, Zea mays
  Clone ID: MRT4577_53752C.1.pep
PLLSWCPRHCAYDTFITLSTHEYFQKNHFFSLLKDTCYKMKSSKGK

SEQ ID NO: 318728 - protein, 150 aa, Zea mays
  unsure (1)..(150): unsure at all Xaa locations
  Clone ID: MRT4577_53753C.1.pep
ATKDPQVTTGPRGPPPKKQTRDPGGNGTKKKGGGAGKAPKKGPGSPTQTWGRETQDPVGGGEKKGPARGGTPAGTPRGTTPKTRGGGPRAPNRGPKLGEPRGKPXPGGKMVKXNTATQGTPRKKKRKSRGGQKRGPPRGPGGGITARLKG

SEQ ID NO: 318729 - protein, 76 aa, Zea mays
  Clone ID: MRT4577_53754C.1.pep
WHGGRGTPSSAAAAPPAAAPPNLIVMKTSGLRPRRAEIPMRALSAPGRRSQSSLSVSSSGMAPVTDLSAGGGDLSR

SEQ ID NO: 318730 - protein, 79 aa, Zea mays
  Clone ID: MRT4577_53755C.1.pep
LDFVYPSEGIHRRWDNGFRITATAATWDQAAFILSIPKRKHADETQETLRTSAFPSQHVKDKWGKNLYLASICYGRTVS

SEQ ID NO: 318731 - protein, 330 aa, Zea mays
  Clone ID: MRT4577_53756C.1.pep
MDPPKPPSSVASSSGPETPNPHAFTCELPHSIYALAFSPVAPVLASGSFLEDLHNRVSLLSFDPVRPSAASFRALPALSFDHPYPPTKLQFNPRAAAPSLLASSADTLRIWHTPLDDLSDTAPAPELRSVLDNRKASSEFCAPLTSFDWNEVEPRRIGTASIDTTCTVWDIDRGVVETQLIAHDKAVHDIAWGEAGVFASVSADGSVRVFDLRDKEHSTIVYESPRPDTPLLRLAWNRSDLRYMAALLMDSSAVVVLDIRAPGVPVAELHRHRACANAVAWAPQATRHLCSAGDDGQALIWELPETAAAVPAEGIDPVLVYDAGAEINQL

SEQ ID NO: 318732 - protein, 81 aa, Zea mays
  Clone ID: MRT4577_53757C.1.pep
SSLVGGRPLLCLGGHIQNPVGLNTANEYTALHTLMTQIHHAGSHNPIQEACKRLRPISISMLYAMWPLGYKHRTGTPYQRL

SEQ ID NO: 318733 - protein, 85 aa, Zea mays
  Clone ID: MRT4577_53758C.1.pep
RKVLLYCREKKSARVQTTLRFLPKKKKKKKKKKKKKKKKKKKKKKKKKRTKKKKKKKWGGRFKEPKFTSPGLQKKNFFIGAPKLN

SEQ ID NO: 318734 - protein, 56 aa, Zea mays
  Clone ID: MRT4577_53759C.1.pep
IFFLTGFNRIQGMGGRRLFLRFFFNFTGSCRRRKGARRGPKRGRQAGTRPQRRSWG

SEQ ID NO: 318735 - protein, 54 aa, Zea mays
  Clone ID: MRT4577_5375C.1.pep
SKQIHWMSLTTFLESTEATNLGSNQQINKCFKQGHLLHVRWKNLMPKSTTVGTW

SEQ ID NO: 318736 - protein, 58 aa, Zea mays
  Clone ID: MRT4577_53760C.1.pep
KWECHLRLIRRLWCLGHQFIIPSRPQQGAERGSSLPLTSHSTQCGRETHQYISSRIPS

SEQ ID NO: 318737 - protein, 72 aa, Zea mays
  Clone ID: MRT4577_53761C.1.pep
FIRGVLHERCLQEKFPSLPPSFLLHVLVLPFARSPPSAFLKVSPTNEEPPPHPFYLAFWPVLIFAPPLSCFS

SEQ ID NO: 318738 - protein, 223 aa, Zea mays
  unsure (1)..(223): unsure at all Xaa locations
  Clone ID: MRT4577_53762C.1.pep
MHLYQIAFFSVLLDICAGVPVQDSPRERLLKGLGIPDNYRGVTGGKKIPFTPGDRDPYDSPVDSVGDKLDPLPWRNGLGASVLGPWNEARSRQNPDLVRPPSTDHGNLANMRWSFADSHIRIEEGGWTRQTTIRELPTSIELAGVNMRLGEGVYRELHWHKEAEWAYVLDGEVRVTALDYEGGNFIDDLKKGDLWYFPSGVPHSXQGLXPNGTEFLLIFXDDG

SEQ ID NO: 318739 - protein, 76 aa, Zea mays
  Clone ID: MRT4577_53763C.1.pep
LARLCIPGARTARFHCTCRQVHVLGSHEPAIPVPSSCARGTPWPACGVTTSLDWQTILKPLQPVPNNCWPSATRET

SEQ ID NO: 318740 - protein, 84 aa, Zea mays
  Clone ID: MRT4577_53764C.1.pep
MRLMFLKVVYSARRKKLKATGGRQPDGAPRLKVTGERRADGGRWARFLKVVPVPRSCDAGTIRARLDTERAQLSVVLPKPKGSS

SEQ ID NO: 318741 - protein, 54 aa, Zea mays
  Clone ID: MRT4577_53765C.1.pep
YGAQTCFLFLYPSHVREKMKKFFSLAVRDRGNLVRLARAHSFTSFHRDSYSSVV

SEQ ID NO: 318742 - protein, 78 aa, Zea mays
  Clone ID: MRT4577_53766C.1.pep
CFWNQERRSPLHSRRHPPWPRLFLEMTTTMKKKQQQQLLLLLSLMFLVAVTAAAVAADPHPQQVVLRLLSSSPRHHPN

SEQ ID NO: 318743 - protein, 101 aa, Zea mays
  Clone ID: MRT4577_53767C.1.pep
AQRKRCLIHGASATPFFCVNQEFKNVLFDTGPPDPTFGRYQQEVDGFSIAFVRVTLQEQVVLLLEVRTFKREHLHNGIYVQLSCGCAGNNQRIPSLEGSPS

SEQ ID NO: 318744 - protein, 83 aa, Zea mays
  unsure (1)..(83): unsure at all Xaa locations
  Clone ID: MRT4577_53768C.1.pep
MTMNENEPVAGWLAGWLAWHAXEFAAFLTGANLIMEYVLSNAAVVRSFTAYLGKAVGVDAPSKWRIPVPGLPQGFNQVGPCVL

SEQ ID NO: 318745 - protein, 80 aa, Zea mays
  Clone ID: MRT4577_53769C.1.pep
HETFIERLVILILYERPFLHAGQKGKLQENYLNLVWILTGLFTRFLKKNLIMPGPDLWSGGNSGFLGPPLTPGQCRPSPP

SEQ ID NO: 318746 - protein, 98 aa, Zea mays
  Clone ID: MRT4577_5376C.1.pep
GRSLPWIDCRRRWRPVLASSEIPSPAAAIWAAHHHHVVVKHPPSLDHIANVVGCCCKEQVSEELSFAFGSRPSRSNRPGLRAFKTDEVIHIFLIHHLR

SEQ ID NO: 318747 - protein, 69 aa, Zea mays
  Clone ID: MRT4577_53770C.1.pep
TWFFSYRTNSMPLLFTGACMCIEMLHVRFQCRSATLWTKKLITTSMGGLWPLHYSSHEYIPIHHYLFGK

SEQ ID NO: 318748 - protein, 190 aa, Zea mays
  Clone ID: MRT4577_53771C.1.pep
RRPPRPWPTSSPPSSARTTPPQTRGRRRRGGASTSAAPSGSASSRPWATGPSRSPSAPRPGGARARTTRATRASSSTWPAPGGASVRKRVYFGFRDGGGGWLVEADDAAPTPAPDFLSRCCLCDKRLDGLDIYMYRGEKAFCSSECRCQQMLLDDRAAKCGSSEALIRSGDYSVSPHSAPMAFSPSVAAA

SEQ ID NO: 318749 - protein, 560 aa, Zea mays
  Clone ID: MRT4577_53772C.1.pep
MLVSEMNDSAVEAAPIEEDHAQDMSEGEDGEFAEEISEDEDGEFAASDLNDEDGDEMDNTQRQPSHMHVHASESIEEPVHRQSQLSNAEEGMETGIAHVDAYMVEPLAENNVFSETRYEMEAPQNGAETPVVDLYRDAEEQPLAENNDCSEAENEMNKSEFETGVGNLDRDEQEQLLAENNNGSEVRYDMEAPQSEVETGVGSLNRDGEEQLLTVTDGYSELRHETGTPQTEVETVIDDISRDEQELPAWYKIFDLNVIETPLGCEVSEISCGHPADGLCDSVPDLVGLVNQQANNDTSEIQGQDGHAGANQVLEDESDLNSYDLNNEADEDAQDDTLENQVQDENVEDNHLLEDGHDLTRYVVNNEAGEHAHDNHLMKNAEILLNHSMVARISENCHMNNEKMLLKQNVDEQQMENEQMLIDQVTSVQVLDIHHVHDEQLLVGHAADDHHQMEPNPMAFSLGVHDLDNYYLSSKQILLYNDVGGIHHLKDVQIILDEAADGQARVHNMGHGRTIPGIDLEDDYAQVSAIRNTGECLESASDTSHEYTDNVLQEHMCSQD

SEQ ID NO: 318750 - protein, 210 aa, Zea mays
  unsure (1)..(210): unsure at all Xaa locations
  Clone ID: MRT4577_53773C.1.pep
EDAQDDTLENQVQDENVEDNHLLEDGHDLTRYDVNNEAGEHAHDNHLVKNAEILLNHIMVACISDNCHMNNEKMLLKQNVDEQQMENEQMLIDQVTSVQVLDSHHVHDEQLLVGHAADDHHQMEPNPMAFSLGVHDLDNYYLSSKQILLYNDAGGIHHLKDGQIXLDEAADGQARVHNMGHGRTIPGIDLEDDYAQVSAIRNTGECLESA

SEQ ID NO: 318751 - protein, 125 aa, Zea mays
  Clone ID: MRT4577_53774C.1.pep
TLGWFMCLFMCLFMCLFMCLGVPINPGTRRLALVDTLNSLVRLPGACTKIRIARNDISIAWKPDSTRPRPKLGRIPKTVEPGYVPDALRHRRNTWRSRRPSPLPSLVAIRAYHSNRAFLRATIAP

SEQ ID NO: 318752 - protein, 93 aa, Zea mays
  unsure (1)..(93): unsure at all Xaa locations
  Clone ID: MRT4577_53775C.1.pep
GNQYNTMGPRFTXVNPTESFDPQKMIHQAAYSSDQRLALSRTGFPNSPTSRRGGTAPNYQGISFYVGGPITYPTCAVFQGQTLPGVLPTDRRN

SEQ ID NO: 318753 - protein, 82 aa, Zea mays
  Clone ID: MRT4577_53776C.1.pep
HRTPPNPPKNKTPHTKTLLKHNHRLFKQLSWQPTNFTILLNLNHTTQNNKSSTLKQEDKAPPPTYPSIVTLPNPTVSHNTYT

SEQ ID NO: 318754 - protein, 72 aa, Zea mays
  Clone ID: MRT4577_53777C.1.pep
ARAIVSMYRPKSGCQLTVRSPAADGLVQTGVGVGVQDVAAEPISAPNSAVVRNIRPLNVAVGPTTADYVSIE

SEQ ID NO: 318755 - protein, 48 aa, Zea mays
  Clone ID: MRT4577_53778C.1.pep
IQASSKYCGAGREPARQKRGQTQSNTVKFMQKSSTLSRNPHNNNNVPL

SEQ ID NO: 318756 - protein, 69 aa, Zea mays
  Clone ID: MRT4577_5377C.1.pep
RTSESDGMVLFQETFESALNLQSNSKVFVKNLGNKAVYIRWYRNRSQPPSRFITMVIPASLLVSVARRG

SEQ ID NO: 318757 - protein, 186 aa, Zea mays
  Clone ID: MRT4577_53780C.1.pep
MVRYGATSIDGAKSARARGSYLRVSFKNTRETAQAVNGWKLERALTYLGNVLEHKEAVPMRRYAGSTGRTAQGKAFGVSKARWPVKSAEILIGLLKNAEANADTKGLDTSNLIIKHIQVNQAPKQRRRTYRAHGRINPYMSNPSHIELILTEGAEVVQKGPQTLERRLNSRQRGRAVRKAITASEE

SEQ ID NO: 318758 - protein, 119 aa, Zea mays
  Clone ID: MRT4577_53781C.1.pep
PEQALLATTLELEAAREELRRKEQSIAKLAGLVREVARERDDARDQLQSLRLLAAQAAAAAPPLVAGRVTDSDGSLASSPADPFFDPVTSADRRCKLSPATPPAPPPKPVQQRHCQPGA

SEQ ID NO: 318759 - protein, 67 aa, Zea mays
  unsure (1)..(67): unsure at all Xaa locations
  Clone ID: MRT4577_53782C.1.pep
MAGRHRYPLPPSFXRXAAAAAGSRLFSXXLXXLXPHHRLDDYRYSLRLFPHHHIDDFRDPSRLLPGH

SEQ ID NO: 318760 - protein, 50 aa, Zea mays
  Clone ID: MRT4577_53783C.1.pep
RPGMIIRSLGVKKGGHGRSFKPAAWGHFGRDAPAFRWEVVHPLKSHNPFA

SEQ ID NO: 318761 - protein, 219 aa, Zea mays
  Clone ID: MRT4577_53784C.1.pep
LWHQGNELEDLSTDQVEIDADPSSTNAEESTVKQGDEISELPGKGASVLYCVLPERCSGSVASTSSRQDQDSVDLPSEGAGELYCLLPPRNGHSVRSIGDSKRSNASQKDDKPANPSLEGDGDLYCRLPRTGRPGRNSGGSNRSAGIRSAVRRSSSFSSDIHLSSETSPIKKDGSVSMTATERSSSAVSTEAEDSPKYTARTAETPSSSPMALRRMVEG

SEQ ID NO: 318762 - protein, 55 aa, Zea mays
  Clone ID: MRT4577_53785C.1.pep
SRVHTFFWSLYQDHTQIIVLCLKGLSNPFYHFIRDYTSAYIRTRAQHGGRLFYSY

SEQ ID NO: 318763 - protein, 45 aa, Zea mays
  Clone ID: MRT4577_53786C.1.pep
TRFIELGGLLRSSSLTRVSHAGLEGFAYFRTVSACHLKFSCGFNT

SEQ ID NO: 318764 - protein, 108 aa, Zea mays
  unsure (1)..(108): unsure at all Xaa locations
  Clone ID: MRT4577_53787C.1.pep
PGGSPXXRPPVRXXRXARPXXAXXXXARPPLPRGXGLGPXGXSXPCRRRRCLRPSGAXAXVRPPLXXWLXXPPCXXXPPPPAXXXPVGWFPSSPRLLSAPLVLVLVPG

SEQ ID NO: 318765 - protein, 307 aa, Zea mays
  unsure (1)..(307): unsure at all Xaa locations
  Clone ID: MRT4577_53788C.1.pep
MVRKPIHADDAGAKSTEASKERKGLWSPEEDERLFTHITYHGVSTWSSVAQLAGKIQFLQTDRDSRYRILFXIDRTAQRGMINLFLNVQCTGLRRSGKSCRLRWLNYLRPDLKKEPISKREEETIISLQQSLGNRWSTIAARMPGRTDNEIKNYWNSRIRKRLNAAASRAAGCDGGDSAAEPSGAVAAGGKEDSANAATAVTAQPTPIPARFPVFGCQLPDGAGGGISSPGSGSGKSPQSSTTASMPQNEGDESEASDGGGGDSDMVHFLSFDDLDYPGDLLIDVPGAMDAWESQLCYANPMMSSLC

SEQ ID NO: 318766 - protein, 106 aa, Zea mays
  Clone ID: MRT4577_53789C.1.pep
TQTTREGIFKYAIPQTATLAAKTHDNETHTDTNSKGSGYRNTSTDKTMPSSRTINTTKTHELPQPPQGGKHSYFAGDSVHGSREETIHNDGQQPGPVRKSYLMHKS

SEQ ID NO: 318767 - protein, 222 aa, Zea mays
  Clone ID: MRT4577_5378C.1.pep
SIPSSSIQQRKPYFWLVWFLMEGTRSKPFWFSMVTYVLWLIEMPWFWGHATSENGEIAQMYLSGWSVPIHDGGLTGNKLSNPDVLVITLPFLYLVLVPVIVLTYGLFAEKATVFLQHRRRVVYSLDSTNVHAESPRLLPVAPRASLMKFADKMVSMVIQFCGSWTRRALLLACLITAAIHLKLCSKLMSAYGTVPVALSPPLTWIPLLLLGGAAYCTVLHAD

SEQ ID NO: 318768 - protein, 32 aa, Zea mays
  Clone ID: MRT4577_53790C.1.pep
LMDKLKMSSDVSFVSFVQRVQFYKHSSDFSHN

SEQ ID NO: 318769 - protein, 95 aa, Zea mays
  Clone ID: MRT4577_53791C.1.pep
AQVFQGPSNIMNPEMYGENYSEFEDIYLYGICMLEMDIGECHYRGCERSAETCENIPEGDRQLAIFKANVAKKWSGIQRCLAAISDERLGGDLWP

SEQ ID NO: 318770 - protein, 72 aa, Zea mays
  unsure (1)..(72): unsure at all Xaa locations
  Clone ID: MRT4577_53792C.1.pep
RLNEGQVPPSDVVEVVVSPPYVFLPVVKSQLRQEFHVAAHNCWVKKGGAFTXLIHSYMLSNLFDSWLFLLHS

SEQ ID NO: 318771 - protein, 97 aa, Zea mays
  unsure (1)..(97): unsure at all Xaa locations
  Clone ID: MRT4577_53793C.1.pep
RLSLRPVVLGAFCFSVAGVSAPCSFGVLIDPIGLLSSCLLGRLVLVAWPSQLHLESVFPPRSRSSPPSLSIPGSRRSLRLRVXGXRSRASARFFRTG

SEQ ID NO: 318772 - protein, 60 aa, Zea mays
  unsure (1)..(60): unsure at all Xaa locations
  Clone ID: MRT4577_53794C.1.pep
LLSHFQKFGQVIDIYIPSNSEKAFVQXSRRDDAEAALKAXPDAVMGNRFIKXLWWXNRDR

SEQ ID NO: 318773 - protein, 100 aa, Zea mays
  Clone ID: MRT4577_53795C.1.pep
RPREAPRDQQEQQPQPRPGPRPGRGQSPRAHRPAAGFSTRGFSGPPRRSGSGPRQWPLVAIRGLMAPQRVGGPSLDPRAKSLRLNPGWNCKSGRTKEKSV

SEQ ID NO: 318774 - protein, 75 aa, Zea mays
  Clone ID: MRT4577_53796C.1.pep
LARQVLVPYEIVLRSPSAWIKLRWRTINGSFIGRIRSLLGRHDNGAMMYATWTSMIPSLVDIYKIESRFSAHHEP

SEQ ID NO: 318775 - protein, 142 aa, Zea mays
  unsure (1)..(142): unsure at all Xaa locations
  Clone ID: MRT4577_53797C.1.pep
PGRFGGPFLVPXCPGSSFLGPRGRGGSPXCGXAVALPAGGRGXAAALRGGPSXXAASSPGXXPLGVPPGPPAPGXVLGVFGXVPPSGPALGAXAPSXVXLPGVWPPPLPFVVGVGPSAPFGRGGVVPLPALPGCWFFSRLGF

SEQ ID NO: 318776 - protein, 132 aa, Zea mays
  unsure (1)..(132): unsure at all Xaa locations
  Clone ID: MRT4577_53798C.1.pep
KRKKIYKKRGVKKCXLYFCSSPRFLPLHPAFAWTPRSKALGLFPPLFCSSFRKQNQRARSHTTPHWLLQPAGHPKNLAMSSKSISMSRSSRLSTAGGGSMAATNPDTTFWCSACPRHLGALNRPKEATWVEP

SEQ ID NO: 318777 - protein, 244 aa, Zea mays
  unsure (1)..(244): unsure at all Xaa locations
  Clone ID: MRT4577_53799C.1.pep
MAAKIFSLLMFLALSACATTATIFPQCSQAPIAALLPPYLPPVSASVCENPILQPYRLQQAIASSILPLSPLFQQPSALLNELSLVXSLVQSIRAQQLEQLVLHVINQVALANLAPYSQQQQFLPFNQLAALNPVAYLQQQQLLPFSQLVAAYTQQHQVLPFNQLAALNPAAYLQQQLLPPFGPLANASPATFLTQQQLLPFYPQVVANAATLLQLQHLLPLIQLALTNPAXSYQQHIIGGCPL

SEQ ID NO: 318778 - protein, 59 aa, Zea mays
  Clone ID: MRT4577_5379C.1.pep
CVLMLGSQMLLPYGQGEGRREPSNQSGSQHQGIDFCARESCIGATQDALGGISLFISHV

SEQ ID NO: 318779 - protein, 153 aa, Zea mays
  Clone ID: MRT4577_537C.1.pep
MKKFQLYKEITLCSSPLLSVEATGLRKIVASLEEKINAEITLSMQHKGHAMGKGQPHLVSLAHVRRWSSRVQKPREAGGGSLPRRGRTEEREALEPRASEHGSRRGSSEGRKGASVSTGRKREAADSSKLMHDDEAPHDNSGMEERRNFAREE

SEQ ID NO: 318780 - protein, 58 aa, Zea mays
  Clone ID: MRT4577_53800C.1.pep
LELRTYFRYWSVALLQMDFIFKHCILINFVYSRVLKYRALNVLPSFAIIWSRHLLALL

SEQ ID NO: 318781 - protein, 662 aa, Zea mays
  unsure (1)..(662): unsure at all Xaa locations
  Clone ID: MRT4577_53801C.1.pep
WPKGTFPFHFCYTSMSFGLKNVGATYQRAIQTCXSRPLGKRVEAYVDVVVIKTENSENFIEDLQLVFNSLRRYRWKLNHEKCVFGVPAGKLLGFIVSHRGIEANPEKIEAIMRMEAPRSQKKVQRLTGCMVALSRSISRLGEKGLPFYKLLKKVDKFQWTSEAQEALDTLKKFLTTPPVLKPPRQATPTQPAEDLLLYISCTTHVVSTALVVERAEEGHAYPVQHPVYIISEVLGPSKKKYPQVQKLLYAVLLTARKLRHYFDDHKVIVVTGFPIGDILHNKEAFGRIAKWVCELGAHDIEFRPHTAIKTQALVDFVSEWTEQQVPDNPETIEVWYIKNEEEPDDRNAAERIARQSAHYTLIGETLYRRGASGVLMKCILSATGKQLLDEKAQGGYTHVLVAIDKFTKWIEFKLIASLTSAKAVEFIQDIIFRFGMPNSIITDLGSNFTSSEFFDFCERKSIQIKYASVAHPRANGQVERANGMILEALRKKVFDKNEKFAGKWIRELLYVVWSLRTQSSRALHGNTPFFMVYGSEAVLPADLKFGAPRLIFENIAEAEATRLEDVDILEEERLNTMIQLARYQQTLRRYHDKAIRHRSFAVGDLVLRRILTGEGRHKLSPLWEGPFIIAEVTRPGSYRLTQMDGTEIGNSWNIEHLRKFYP

SEQ ID NO: 318782 - protein, 211 aa, Zea mays
  unsure (1)..(211): unsure at all Xaa locations
  Clone ID: MRT4577_53802C.1.pep
KXYLSKSLFIIXXFXXNXYNTXLFSXXSXTKIKXYMTHXNXXNSSTTXXIIKXKTISIIXPKILPIXXFPXYLTLYNTSNTTXYSHSXYLHXYNNLSSYHNTLLQXXLSXLQKAYPHTQIIYTXFYTQITHIIQXPHNFXLKYNLKIXYNTXXXXQYXYNNKXXYXIXKXNTYTSPSNYLIXXXIHLTXXXYXSITSXXXKSPYYNPPIQH

SEQ ID NO: 318783 - protein, 129 aa, Zea mays
  unsure (1)..(129): unsure at all Xaa locations
  Clone ID: MRT4577_53803C.1.pep
WLVARPRVLAAGALSWGFVGGAVVPGGFAVGACGLXCAPSGPLGLGLVRXPGXVVWLFVPPRVFFLGLVRFXVGXXXGLPPPVGGGGXXCPGRSCFXGLXCCCAFSPCPWLGGRVXVLAGGLPRVVVSG

SEQ ID NO: 318784 - protein, 125 aa, Zea mays
  unsure (1)..(125): unsure at all Xaa locations
  Clone ID: MRT4577_53804C.1.pep
PXPFFFFFFFFFFFFGFFFLGGHAGPKIRVGLGFFPHKRTAIYLNPNIFYRKITPIWAENTQICPTLGTQMLPLARPEELFSSLGQFEHGLVPDLFQRRRLLSSDRREELVQIERQRVELLAPRV

SEQ ID NO: 318785 - protein, 86 aa, Zea mays
  Clone ID: MRT4577_53805C.1.pep
FSAICLPPVVLLYFVPYLDHGWTIILNKDVTIGQFALSRSYIWKKAELTHAVFCLVISLIFYPIMYLMPYPSIVDSSHTGYHLSSM

SEQ ID NO: 318786 - protein, 74 aa, Zea mays
  unsure (1)..(74): unsure at all Xaa locations
  Clone ID: MRT4577_53806C.1.pep
ASPAHAQPHVHGSESLSSSAAKMVSLKLRKRLAARVLECGKGCVWLAPLAGSRLPVGVSRPXVRPPPRSPPGAA

SEQ ID NO: 318787 - protein, 58 aa, Zea mays
  Clone ID: MRT4577_53807C.1.pep
LNYHLLLFMLLRVRTRHMTTFIFLAINLPYIRMNLINGLPVAKPYNITIDRGPLLAFL

SEQ ID NO: 318788 - protein, 125 aa, Zea mays
  Clone ID: MRT4577_53808C.1.pep
MPTQLPSRSTFPSHHLSPLSPSLSLSHSLFLRGRHSCSVHSHHMRRRGRLPAALWLVVVTLAALVARPACAAWCIARSEASDKALQSALDYACGPARGADCAPIQASGLCYLPNTLAAHASYAFN

SEQ ID NO: 318789 - protein, 138 aa, Zea mays
  unsure (1)..(138): unsure at all Xaa locations
  Clone ID: MRT4577_53809C.1.pep
MATEDAAVALCPLDSXPAXFSASHTHHVPMDIKAPTDYKVANEKNLSTEKISSPLPLYCXMIVEGIVALYERNEPSSTDIHRYTHEKYGDXLPTISFRHDLTEQMINLAAASXLTKDYNSFSLSLTRLHAQGQHDIGS

SEQ ID NO: 318790 - protein, 46 aa, Zea mays
  Clone ID: MRT4577_5380C.1.pep
NRSSILDAKAGITLNDHLVKLVSWNDNKWGYSNRVDDLIRHMFKTQ

SEQ ID NO: 318791 - protein, 83 aa, Zea mays
  Clone ID: MRT4577_53810C.1.pep
WIQVSYVLDTEDFSSRLPKRRKILRSGTVSDSLSDFNSICCKSAPLQYVPIQSIRSLVLQTVIIIVSKPGDIAETPAALLLQP

SEQ ID NO: 318792 - protein, 139 aa, Zea mays
  unsure (1)..(139): unsure at all Xaa locations
  Clone ID: MRT4577_53811C.1.pep
GEFFGIFVCKHFCKPAQGLLFPVFAPKGRADDGSLDLIFVHGNGRLKLFCFFVAQQLWGDFLLPPVENVQKKKIKVWPVGSTPRGWGVPGELFYXKARVXRQGSLLPTQGRVFGQDPGAFNKLGVVRLAPHPCGLREIG

SEQ ID NO: 318793 - protein, 108 aa, Zea mays
  Clone ID: MRT4577_53812C.1.pep
MIPTIQQSCAEEAIRMLNGSQVGGQKVRLSWGRSPQNRQASQHDANNQYNGNSYYGYQQPGYEGYGYGASSAQDPSMQNYYGYSGCGNYEQQQPTQEQQLQQPPPPQQ

SEQ ID NO: 318794 - protein, 188 aa, Zea mays
  Clone ID: MRT4577_53813C.1.pep
PVTRLGAYQSSQGNCSENDPNNTTVFVGGLDSNVDEEYLREIFTPYGEISYVKIPVGKHCGFVQFTSRSCAEEAIQMLNGSQIGGQKVRLSWGRSTQNRQASQHDANSQYNGNSYYGYQQPGYEGYGYGASSAQDPSMQNYYGYSGCGNYEQQQPTQEQQLQQPPPPQHVGHGQSPLLKSYYLSIVQI

SEQ ID NO: 318795 - protein, 172 aa, Zea mays
  Clone ID: MRT4577_53814C.1.pep
MVCLAIAGAYQSSQGNSSENDPNNTTVFVGGLDSNVNEEYLRQIFALYGEISYVKIPVGKHCGFVQFTSRSCAEEAIRMLNGSQVGGQKVRLSWGRSPQNRQASQHDANNQYNGNSYYGYQQPGYEGYGYGASSAQDPSIQNYYGYSGCGNYEQQQPTQEQQLQQPPPPQQQ

SEQ ID NO: 318796 - protein, 78 aa, Zea mays
  unsure (1)..(78): unsure at all Xaa locations
  Clone ID: MRT4577_53815C.1.pep
AALNSPAYVQQQQLLPFSQLAAVSPAAFLTQQQFXSFYLARCPLTVGTPRDRLQQXXLPFQPILLLTNPSXFYQQPHN

SEQ ID NO: 318797 - protein, 127 aa, Zea mays
  unsure (1)..(127): unsure at all Xaa locations
  Clone ID: MRT4577_53817C.1.pep
RGNFGFNQALQRWGGVVHVSINLKLGLPFSIYSMENPITARRGYPVLAEGGCPRDTGGVPSQELRPCRRGHPVAGLGGLRDDGTAPGHRALGPLAPLGLGTGEPCAHLRKEASPARPMGAGVAAPXP

SEQ ID NO: 318798 - protein, 67 aa, Zea mays
  Clone ID: MRT4577_53818C.1.pep
ARIGYASEHLSRVLDSRILEVLGRRRASTGTSSSASYPSSLLFLPLVRRGRCDLGLMPMRASIGHSY

SEQ ID NO: 318799 - protein, 55 aa, Zea mays
  Clone ID: MRT4577_53819C.1.pep
ELGLNVKQKTKNRTKKKNRKKKKKKKKKKKKKKKKKKKKKKKKNKYKKLIIFSSS

SEQ ID NO: 318800 - protein, 97 aa, Zea mays
  Clone ID: MRT4577_5381C.1.pep
PRGPPRGRGSLNFAFFLHQQQFPFSQVPVPFLTQPQLLPFYQPVGPNGGPLFQLQQLLPFNHLVLANPAVFFPHPLMGGALSFRFFLGYGSKKKFFI

SEQ ID NO: 318801 - protein, 47 aa, Zea mays
  Clone ID: MRT4577_53820C.1.pep
ELPTRPTHPLLISYTTFQNRRSSPKLRYLCASYAHHPVQLLHLNPTT

SEQ ID NO: 318802 - protein, 54 aa, Zea mays
  unsure (1)..(54): unsure at all Xaa locations
  Clone ID: MRT4577_53821C.1.pep
CSNILLGLGTPLSCPYVFYIPIHCVVFFFPNLLFVRVNISTXFFLSGGGDESXI

SEQ ID NO: 318803 - protein, 150 aa, Zea mays
  unsure (1)..(150): unsure at all Xaa locations
  Clone ID: MRT4577_53822C.1.pep
KKAQWVLLKPIKGFFGAWDKKIKLFXKGFQIRGGKMWXSQVQNTFNQMGPPPTELECFQKLQKQEHFLCLNRIQNLXKKLVNQXALKRTLQNRYGEVVFGFQRIQEQVEEPKRHLKVQKAVETQSPPQEKENAASNHSSVEERDERKEIF

SEQ ID NO: 318804 - protein, 74 aa, Zea mays
  Clone ID: MRT4577_53823C.1.pep
FYTYYKRDECLNEYHYIKRCTCLSSGDGALAGVRCTSSDTGGVELIFICLVCTTTFLLFFRNSPTRLAYALPEK

SEQ ID NO: 318805 - protein, 91 aa, Zea mays
  unsure (1)..(91): unsure at all Xaa locations
  Clone ID: MRT4577_53824C.1.pep
MVYPTPQAILKNPHVILISNKSGTGKXPGILGFQXCKSIFLTFNTXPTDSLEGTYIDKKCSFTGTRSIRGRIIARTCSSANMNRTIIVRKN

SEQ ID NO: 318806 - protein, 147 aa, Zea mays
  Clone ID: MRT4577_53825C.1.pep
SLRRCFLFLPAAAMASGDNSKQRSEEEWRAVLSPEQFRIIRQKGTELPGTGEYNKFYGDGVYNCAGCGTPLYKSTTKFDSGCGWPAFFEGLPGAINRTPDPDGRRTEITCAACGGHLGHVFKGEGFKTPTDERHCVNSVSIKFSPSS

SEQ ID NO: 318807 - protein, 141 aa, Zea mays
  Clone ID: MRT4577_53826C.1.pep
MASGSNNKQRSEEEWRVVLSPEQFRILRLKGTELTLMSRLPGTGEYNKFYGDGVYNCAGCGTPLYKSATKFDSGCGWPAFFEGLPGAINRTPDPDGRRVEITCAACGGHLGHVFKGEGFKTPTDERHCVNSVSIKFSPGSS

SEQ ID NO: 318808 - protein, 135 aa, Zea mays
  Clone ID: MRT4577_53827C.1.pep
MASGNNNKQRSEEEWRVVLSPEQFRILRLKGTELPGTGEYNKFYGDGVYNCAGCGTPLYKSATKFDSGCGWPAFFEGLPGAINRTPDPDGRRVEITCAACGGHLGHVFKGEGFKTPTDERHCVNSVSIKFSPGSS

SEQ ID NO: 318809 - protein, 48 aa, Zea mays
  unsure (1)..(48): unsure at all Xaa locations
  Clone ID: MRT4577_53828C.1.pep
IFSKKKSEVFVFYHTLKNQVPLNFTCPAVSGGFKDFFFXSGQIFFLKC

SEQ ID NO: 318810 - protein, 79 aa, Zea mays
  Clone ID: MRT4577_53829C.1.pep
VPNSRVNTPGPAVFSSPKKNPPWMVALTPRPGVHKNAGAHPPVINSQPGELFPAPWRGTPQFGLKHYHFPPPPFFPPLG

SEQ ID NO: 318811 - protein, 140 aa, Zea mays
  Clone ID: MRT4577_5382C.1.pep
GAPNPQPYIMGLGGSFGGLRGGGGGLLKLLGPLLDRGKETNLGIQGNVFLNNLHTWASHQQVGYIRGHMLKTLALCLTGPYAGAAAPPKSKMQAVFSKGSEGPCTAPRTWAVPWAWAFPGATPNAGFGPKPRGPNLLSPI

SEQ ID NO: 318812 - protein, 65 aa, Zea mays
  Clone ID: MRT4577_53830C.1.pep
TSKIRLWGEQKKKGSSTGFYLKPSDLGEKGKKLGTIFFQHPREGSSGIGEGVPRTEAWGFPFSPT

SEQ ID NO: 318813 - protein, 103 aa, Zea mays
  Clone ID: MRT4577_53831C.1.pep
MNPAQANKVDVSKLTEEERKLFRMYGKLPDRKDLLGHRLKERKYFDSGDYELTKAGKEPLATIGSEHPSPDTIPHSNPVSQPGASPVKESPLAETGSDEKAKE

SEQ ID NO: 318814 - protein, 77 aa, Zea mays
  Clone ID: MRT4577_53832C.1.pep
FRWNLNWVGGLNQLLQILTCNPTFSYNTFFFHWYILKLLVFFYILTQTGRFESNFFPRINPSPHAFFRPYSGFLIPC

SEQ ID NO: 318815 - protein, 600 aa, Zea mays
  Clone ID: MRT4577_53833C.1.pep
AEDSKQQHTKAPSFWRLAELSFAEYFYALLGSAGAACFGSFNPLLAYTISLIVVAYYKIGVRDVHAEVNKYCSFIVGMGIITVLANFLQHFYFGIMGEKMTERVRRMMFSAILRNEVGWFDDEENSADILSMRLANDATFVRAAFSNRLSIFIQDTSAILVALLLGMLLQWRVALVALATLPILIISAVAQKMWLSGFSRGIQEMHRKASLVLEDAVRNIYTVVAFCAGNKIMELYRLQLGNILKKSFIHGMGIGFAFGFSQFLLFACNALLLWYTAAAVKDGHLSLVTAVKEYIVFSFATFALVEPFGLAPYILKRRKSLTSVFEIIDRVPKIDPDDASGLKPPNVYGSIEFRSVEFCYPTRPEMMVLSNFSLRVSGGQTVAVVGVSGSGKSTIISLIERFYDPTAGQVLLDGRDLKLFNLRWLRSHMGLVPQDPVIFSTTIRENIIYARHNATESEMKEAARIANAHHFISSLPHGYDTHVGMRGVDLTPGQKQRIAIARVVLKNAPILLLDEASSAIESESSRVVQEALDTLIMGNKTTILIAHRAAMMKHVDSIVVLNGGRIVEQGSHDSLVQLNGLYVKLMQPHFSKGFRQRRLI

SEQ ID NO: 318816 - protein, 67 aa, Zea mays
  Clone ID: MRT4577_53834C.1.pep
HVQSLMVAVDKEVLVLRSYSLGPMWLAVDAEQQQEQPPKATTDMDQDESESGGGEAAAAFCLDANLL

SEQ ID NO: 318817 - protein, 70 aa, Zea mays
  Clone ID: MRT4577_53835C.1.pep
PTRPRKQRLLANPSMKQAMLFPQPAQAGDAFHQILNGLARKLPHGDNVFLKPGERVLNWTAGPPGDLKPW

SEQ ID NO: 318818 - protein, 81 aa, Zea mays
  Clone ID: MRT4577_53836C.1.pep
GILTKIHEVALCKDKRGRCAAPPHREIAVQAPCTHTDLNHPPGLVAAQIPVPVWPYLAAHHSRLRHVCTTQPLRVAFQQYL

SEQ ID NO: 318819 - protein, 70 aa, Zea mays
  Clone ID: MRT4577_53837C.1.pep
KVNRKEWKTLILKNAKKQSQLSYDTVWKLGILGVLETPLRTSVKKRNTLSILQFSNETKDISILSNTVVL

SEQ ID NO: 318820 - protein, 43 aa, Zea mays
  Clone ID: MRT4577_53838C.1.pep
YVGSTGGVFSEPMYGGHKYQYLWCSYDVYHKLTLSKISSFWYF

SEQ ID NO: 318821 - protein, 105 aa, Zea mays
  Clone ID: MRT4577_53839C.1.pep
ILLFRSGEHDCTFMAPQCDAVERSLPVRRHSRWGNIRRRRRKMGWKWWGRAAWSGDGRCEERGGESNRDSSRGSNCSSSDLVQRCSQCLIGVMNVSQQNCQWIFL

SEQ ID NO: 318822 - protein, 584 aa, Zea mays
  Clone ID: MRT4577_5383C.1.pep
MSSTPPAVASPASEQTKSKKKKHKSKDLPATDPPSLAEAEEKTDGYLIKPQSLVPSLDTSTWPLLLKNYDRLNVRTGHYTPLPSGHSPLKRPLAEHLRYGVINLDKPSNPSSHEVVAWIKRILRAEKTGHSGTLDPKVTGNLIVCIDRATRLVKSQQGAGKEYVCVARFHAAVPDTARVARALEALTGAVFQRPPLISAVKRQLRVRTIYESKLLEHDPERHLAVFWISCEAGTYVRTLCVHLGLLLGVGAHMQELRRVRSGILGEQDNMVTMHDVMDAMWSLDNYKDESYLRRVVMPLEVLLTSYKRLVVKDSAVNAICYGAKLMIPGLLRFENDIETGEEVVLMTTKGEAIAIGIAEMTTAVMATCDHGAVAKIKRVVMDRDTYPRKWGLGPVALKKKKMVAEGLLDKHGKPNEKTPAEWLRNVVLPTGGDVSIASIAAAPEPEKVKVEQDAVAGEKVKEKKKKRQKDENNGDDASVPAKKIKVEEDAEVVEVEGDKSEKKKKKKKEKVESESADAAEAKEVEKADDAAGETGSEKKKKKKSKEGSAAAADAESAEHVDGAGVEKSKKKREKKKESVETEQA

SEQ ID NO: 318823 - protein, 144 aa, Zea mays
  unsure (1)..(144): unsure at all Xaa locations
  Clone ID: MRT4577_53840C.1.pep
VDESEMNDFDXFDILVHXSLANGPQVTKPLLETSIRGFLAEISASNYSYVGLFQHXLTIMNAGXVTIFITYIRXHKAXIPEYCGGIISVKASLXSDTRELAYQSVLKGKIRVNTISLXDPLEYRSAKAIAFIXNMIEYSYVNAP

SEQ ID NO: 318824 - protein, 242 aa, Zea mays
  Clone ID: MRT4577_53841C.1.pep
MEAIKDTVNSALEKLHIGGAAQGTPAKEPSEAEFNELKAKYQKAGQDQVFAFYDKLSTAEKASLYEQLKNFNPEYINEITERALHPAQTEATENKLEPLPENATSSVLDSSQGDLDQWYNSGLEFIANNQVAVVLMAGGQGTRLGSSAPKGCFDIGLPSQKSLFQLQGERIRKAEMPAAKKHGKENVTIPWYVMTSGPTRGPTAEFFEKHNYFGLKKENVVIFEQGVLPCISNEGKILLESK

SEQ ID NO: 318825 - protein, 89 aa, Zea mays
  Clone ID: MRT4577_53842C.1.pep
SPSLDLGSPNTSPTVLPPSFPSLTGQRVPGVSSLRYVVYYGPHHSRQSPSLDRTEYLRSIECIRESDDSLEFDDGRSRSSVVNNHCSPR

SEQ ID NO: 318826 - protein, 118 aa, Zea mays
  Clone ID: MRT4577_53843C.1.pep
MPLSAASSILLLLHALVSLTLLLGDMTSTTPAAAVPAAVDVNTTAFTMHDSAASASPHGAENLEMYYCFLTCGGGELADKVAAGAMGTTASASAVQLQGNALPFELCGTQQVKALLHH

SEQ ID NO: 318827 - protein, 93 aa, Zea mays
  Clone ID: MRT4577_53844C.1.pep
EHLFSVLLCVVLEVHQHRQGNDISVVFLSTGDIQVQRLVRVPLGLHQRRLPEDARAGCVHERHAQCPELDQWQSPDLHLLAMVHVIIQQCEPV

SEQ ID NO: 318828 - protein, 65 aa, Zea mays
  unsure (1)..(65): unsure at all Xaa locations
  Clone ID: MRT4577_53845C.1.pep
PRVRPRXRGRVGSLAXCQYLKQGPMSQAPPPSFQTQWEPRKFQGNPTYAIKGPRTRGFWFWTKNG

SEQ ID NO: 318829 - protein, 62 aa, Zea mays
  Clone ID: MRT4577_53846C.1.pep
SLATVPREPAMSHTRHTTPLAESRIYTCEVREMVPAMRIASRHDVLLASASGSTTVSRSSPT

SEQ ID NO: 318830 - protein, 96 aa, Zea mays
  unsure (1)..(96): unsure at all Xaa locations
  Clone ID: MRT4577_53847C.1.pep
GGKKTTTCFEEQFTSSGVLFLDKELGGLIPFHAFTWGGGGGKXXXPQILGKPPGFFLFLGPLFLVYKIFFLGQRLGPIFPPEFPARSLWGSHFSFF

SEQ ID NO: 318831 - protein, 89 aa, Zea mays
  Clone ID: MRT4577_53848C.1.pep
PHALHNTYGARHMDSIARNKNYIKKSEQNRLLDDPALAYFRPCPMIQLLGGADMSLARGWGRKPTRRRRRPCRRRHGRAGARRPRRQAQ

SEQ ID NO: 318832 - protein, 133 aa, Zea mays
  unsure (1)..(133): unsure at all Xaa locations
  Clone ID: MRT4577_53849C.1.pep
KQKRKXKQATQTPSVKSEPGQQIPIKDLQEVLSVNVSAEKEAYAADPIKHIEAAAFSNTKDIASPLEKKASQPTSSKKKKTVTLQSELVGNASKVKQITRTFQVADGELSYVVQMATITTSLQPHLRALLKRI

SEQ ID NO: 318833 - protein, 43 aa, Zea mays
  unsure (1)..(43): unsure at all Xaa locations
  Clone ID: MRT4577_5384C.1.pep
EQYFFFFISIXHSREGLTLTLPAMFILDTLLLNHCLLITQLAS

SEQ ID NO: 318834 - protein, 52 aa, Zea mays
  Clone ID: MRT4577_53850C.1.pep
TFPFRSTSQCPVRSLWTTPGNVFYSAWDSLGRGKILDGCLCCILSSRSCVRY

SEQ ID NO: 318835 - protein, 149 aa, Zea mays
  Clone ID: MRT4577_53851C.1.pep
MAAVLTRPTPGTVQCFGRKKTAVAVAYTKPGRGLIKVNGAPIELIRPEMLRLKAFEPIMLAGRSRFKDIDMRIRVRGGGKTSQIYAIRQAVAKALVAYYQKYVDEAAKKEVKDIFARYDRTLLVADPRRCEPKKFGGRGARARFQKSYR

SEQ ID NO: 318836 - protein, 48 aa, Zea mays
  Clone ID: MRT4577_53852C.1.pep
AQLRKHLLPGPRCSPPLPLPVWWFREYGKKVRARMGNADGRRGDAWGR

SEQ ID NO: 318837 - protein, 64 aa, Zea mays
  Clone ID: MRT4577_53853C.1.pep
NALCMATPSFRLTHKVPLCIPQQTETMCGRLLDCTSGESGPASLIRQAGARETRRRPEAREAGG

SEQ ID NO: 318838 - protein, 62 aa, Zea mays
  Clone ID: MRT4577_53854C.1.pep
KTPLLKTLLTFPCDPPPTRIFFMALYKGVPVPFLMSPRPRWFPPPPYGPSKCFRPPKTPFSP

SEQ ID NO: 318839 - protein, 121 aa, Zea mays
  Clone ID: MRT4577_53855C.1.pep
DCYIFSLRVRVAGVDSSNEQRALEGPRMDHQNSSSSIDPLIQANTGSNASSSLSFMRASTGAALTKRMEGRCCRGNISGFSSPTAHLSGLQPLDLQHEDHPSHHVNVEGPLLHIAFSPAKL

SEQ ID NO: 318840 - protein, 123 aa, Zea mays
  Clone ID: MRT4577_53856C.1.pep
AGVDSSNEQRALEGPRMDHQNSSSSIDPLIQANTGSNASSSLSFMRGILPKYFSSEWSFAQFHLPEVTRYIVAFGAQNTVMMVGLDGSFYRCSFDQANGGQMLQREHFRFLKSDSPPFRTAAA

SEQ ID NO: 318841 - protein, 418 aa, Zea mays
  unsure (1)..(418): unsure at all Xaa locations
  Clone ID: MRT4577_53857C.1.pep
MSSHVSTSRGLHPPGKLGTLDSPGAWQPPAPMAQPEAGRGDDQEVRLLSVAWNQDCGCFAAGTSNGFRIFNCEPFKETFRRDLKSGGFAIVEMLFRCNVLALVGGGSNVLYPPNKVMIWDDLLSRCIGEFAXFRSDVRAVKLAKDYIVIVLERKIFVYNFTDLKLLYQIDTLSNPNGLCCLSHHSNTSVLACPGLHQGHVRVEHFGLQMVKTIPAHDSHISCMSLTMDGLLLATASTKGTLIRIFNTMDGTRLQEVRRGLDKAEIYSIALSPNVQWLAVSSDKGTVHIFSLRVRVAGVDSSNEQRTLEGPRMDHQNSSSSIDPLIQANTGSNASSSLSFMRGILPKYFSSEWSFAQFHLPEVTRYIVAFGAQNTVMMVGLDGSFYRCSFDQANGGQMLQREHFRFLKSDSPPFRTAAA

SEQ ID NO: 318842 - protein, 160 aa, Zea mays
  unsure (1)..(160): unsure at all Xaa locations
  Clone ID: MRT4577_53858C.1.pep
MCAPDPSTQNQSASACYLSLRVMTSDNMAHVLHVMSTCLDKMSNSISCDHILVETHHAYLIPYVFLKQIPRLPLSSVSPSKXFPTLATRIQSLDSQDHQTQATVQFHLSTDLCMYCARSYSAIYDNQIQQNIHMTHIFLVSLLNNNCHNVRCLYVQSTIP

SEQ ID NO: 318843 - protein, 54 aa, Zea mays
  Clone ID: MRT4577_53859C.1.pep
HLFQIHKAYGSTNHLPSAHTCFNQLDLPEYTSKEQLQERLLLAIHEANEGFGFG

SEQ ID NO: 318844 - protein, 583 aa, Zea mays
  unsure (1)..(583): unsure at all Xaa locations
  Clone ID: MRT4577_5385C.1.pep
MSSPPPAVASPASEQAKSKKKKHKSKNDTXVAADPPSLAEAEEKTDGYLIKPQSLVPSLDTSTWPLLLKNYDRLNVRTGHYTPLPSGHSPLKRPLAEHLRYGIINLDKPSNPSSHEVVAWIKRILRVEKTGHSGTLDPKVTGNLIVCIDRATRLVKSQQGAGKEYVCVARFHAAVPDTARVARALEALTGAVFQRPPLISAVKRQLRVRTIYESKLLEHDPERHLAVFWISCEAGTYVRTLCVHLGLLLGCGAHMQELRRVRSGILGEQDNMVTMHDVMDAMWSLDNYKDESYLRRVVMPXLEVLLTSYKRLVVKDSAVNAICYGAKLMIPGLLRFENDIETGEEVVLMTTKGEAIAIGIAEMTTAVMATCDHGAVSKIKRVVMDRDTYPRKWGLGPVALKKKKLVAEGLLDKHGKPNEKTPTEWLRNVVLPTGGDVSIASIAAAPEPEKVKVEPDTAVTEEVKEKKKKRQKDDAEDTDASVPAKKIKVEEATEAVEGEKSEKKKKKKKDKGESEPAEVVEGKEEVATGDEKGSEKKKKKKKSKEASDAAKPESAQIGDGTGTEKSEKKKEKKKKSRDTEEAQ

SEQ ID NO: 318845 - protein, 105 aa, Zea mays
  Clone ID: MRT4577_53860C.1.pep
GQLCIAKGELQMASDSFKIVLDEDENNFPALLGQASVYFLMGEAEQQHKKSLEHYRNSLDLYKKALRVYCNCPAAVRLGIAFCRYKLGQVEKARQAFQRVLKLDP

SEQ ID NO: 318846 - protein, 114 aa, Zea mays
  Clone ID: MRT4577_53861C.1.pep
TTLRRGYTAELGRNLAQKYPNPVSRHGLDTCWRRSSSRPREEVAVGREVVINAGTAAEWSGSRAACRDFHHRRPRRGTTDSRRRLSERRRARGLLPTRRPPVSQRRQPARAPRP

SEQ ID NO: 318847 - protein, 277 aa, Zea mays
  Clone ID: MRT4577_53862C.1.pep
MSGDHAKREIVTGDKPASPERTHSRESSHKHKEESSSSIKSHRRGNKKKKMKKVVYYQTDSSSPSTSGSDSSSTTSKHHECKKYSKMPLRYPRISKRTPLLSVPLGKPPYFDGEDYSMWSDKMRHHLTSLHKSIWDIVEYGAQVPKVGDKDYDSDEVDQIRHFNSQATTILLALLCREEYNKGVLKTAHEGDEVTKITKRETIEGELGRFVLNQGEEPQAIYNQLKTLVNQVRNLRSTKWDDHEMVKVILRSLVFRNPTQVQLIRGDPRYKLMSLEE

SEQ ID NO: 318848 - protein, 49 aa, Zea mays
  Clone ID: MRT4577_53863C.1.pep
ICFFFSRCTAAKQMRTRYHPCREGFGSHHSLPASPTLISWTKKKTNSYS

SEQ ID NO: 318849 - protein, 569 aa, Zea mays
  unsure (1)..(569): unsure at all Xaa locations
  Clone ID: MRT4577_53864C.1.pep
MSGDHAKREIVTGDKPTSSGRTLSRESGHKQKEESYSSNKTHRRGDKKKMKKVVYYETDSSSPSTSGSDSSSTTSKRHERKKYSKMPLRYPRISKRTPLLFVPLSKPPYFDGEDYSMWIDKMRHHLTSLHKSIWDIVEYGAQVPKKGDKDYDSDEADQIQNFNSQATTILLASLCREEYNKCATSGSTKWDDHEMVKVILRSLVFCNPTQVQLIRGDPRYKLMSPEEVIGKFVSFELMVKGSKHIVNLEQGATSTPEVQLVAFKATEEEKKESTPSRIPIDASKLDNEEMTLIIKSFRQILKQRRGKDYKPRTKRVCYKCGKPGNFNLITIISSFRDRNYDKRGMKEKKKXYKRQGGVTHVCCEWESHESSTDSSSDENAPKIAGNMGLLFPNVGHTCFMTKDGKTKTVQTRTTPKYTTACDDGNPSDGDDGALTLFANLSAPRQGGLSGQSGASRRDARRCDTGAPFHIKAGTEVTRITLATRRLGDKIDSRSDMSCIARPALCNLRPPAARLRPRLVSGNSSSSILASLSTTQAILHANLRTPYQSLTSRKTKEKNLTCKARNSHIS

SEQ ID NO: 318850 - protein, 84 aa, Zea mays
  unsure (1)..(84): unsure at all Xaa locations
  Clone ID: MRT4577_53865C.1.pep
QGGPGSPRGRGRRXTAGGREGRTRAPLRRRHPRQRARRCQKARRFQGDAPIMQRPSPSARRGGLGFRRAERWERPCETPAGLEV

SEQ ID NO: 318851 - protein, 64 aa, Zea mays
  Clone ID: MRT4577_53866C.1.pep
YEFDKECTEVSVDICIIIQYKKKKKKKKKKKKKKKKKKKKKKKKKKKKKKKKKKKKKKGAPPPL

SEQ ID NO: 318852 - protein, 62 aa, Zea mays
  Clone ID: MRT4577_53867C.1.pep
RLRFRSGIPGSTHASVYSVMGYKVVSYVVGITDYSICCGGLAQEPVLKERRDSPFPPGISPF

SEQ ID NO: 318853 - protein, 128 aa, Zea mays
  Clone ID: MRT4577_53868C.1.pep
MASEVWLSPASRLPSLSNAPPRLRSKPATTTASLLSPCPRPARALPVLRVRRRRRLRATEQQGQVQEQDDEVVDRNILPYCSVVMLNEDEQKLLEASLAYTSGNPIMSDAEFDELKLRLKTDGSVIVK

SEQ ID NO: 318854 - protein, 58 aa, Zea mays
  unsure (1)..(58): unsure at all Xaa locations
  Clone ID: MRT4577_53869C.1.pep
DPCVPTWTHQQEETFYQHAMPNAVTVLQLRQXLLTYNQLALTNATVFYQQPNIGGALF

SEQ ID NO: 318855 - protein, 56 aa, Zea mays
  Clone ID: MRT4577_5386C.1.pep
VFQIRVLSAMCYNKSFVILGIPPVIISSRKNEYSRKWSIEHLKFAGQRTRRSSRFF

SEQ ID NO: 318856 - protein, 69 aa, Zea mays
  Clone ID: MRT4577_53870C.1.pep
MSITCCLPVVECVYCLACARWVWQRCLHSGGYDSETWGVASAEELEPVPRLCWIILSIYEDDLENPQWA

SEQ ID NO: 318857 - protein, 209 aa, Zea mays
  unsure (1)..(209): unsure at all Xaa locations
  Clone ID: MRT4577_53871C.1.pep
MASEPPRCGYRRRLASHPSPTHHLASAPSLPLQPPPXSPCPRPRPARALPVLRVRRRRRXFVPPSSKVQEQDDEVVDRNILPYCSIDRKQKKTLGEMEQEFLQALQAFYYDQKAIMSNEEFDNLKEELMWEGSSVVMLNEDEQKLLEASMAYASGNPIMSDAEFDELKLKLKTDGIVIVKEGPRCSLRSHKVYSDLNVDYIKMFLLNVP

SEQ ID NO: 318858 - protein, 47 aa, Zea mays
  Clone ID: MRT4577_53872C.1.pep
DESKLKLHQVGYRVLWSDLIIASSHADMSDHNQEKRILILPAEQDQP

SEQ ID NO: 318859 - protein, 83 aa, Zea mays
  unsure (1)..(83): unsure at all Xaa locations
  Clone ID: MRT4577_53873C.1.pep
QPFYSTNLSHHTPNKKLHYGLPPFYDLKERSTPQKXXKVPKSKGAAQGKPTKDRAAPSHIFDQARTKHEHLPALERAPMAPTP

SEQ ID NO: 318860 - protein, 58 aa, Zea mays
  Clone ID: MRT4577_53874C.1.pep
ASRRPLSYSFMDFSRQVPAGTIGVVSAQSSKLTNLSYYASIGGPPSPSDVCRRVCIMT

SEQ ID NO: 318861 - protein, 248 aa, Zea mays
  Clone ID: MRT4577_53875C.1.pep
MAHGSPYQCLSLSLYFFLADFAACRSKRRHGSCSFSRWIRSKLRTCFSCLCCWCHCLPKPNAPSCFSCSCCTCRDTQCCTPICRCSKTPSCSPGCCTCSLPSCSCKTPPGCGHCRPQCSSCCSSGCSCADCPCSCSCPPCCSCPGCFSCEGCSAGCLGALNRCLGGLSSCCSGMRPSCCKCQSSCCEGGSSCRDTGTGACCRGSCLGAPASSCPECSCGCVCSCSRCKGGCRCPSCGSNPCCPGGCLC

SEQ ID NO: 318862 - protein, 195 aa, Zea mays
  unsure (1)..(195): unsure at all Xaa locations
  Clone ID: MRT4577_53876C.1.pep
MRIRTMLLSSTAFAGKAVNVSPSSAFGYDRVTMHKMAFIAKAAKALASLCYGPDRVLYLLLVDVESPSYLIXECSGDYGXDTDAXTWYSETLDKNIDLYVIHSRCFMLTXFGCNFLELIVRNPSSWAEVVXIGRLPHLELVXGLCYLAYSRLFLLQSFLAIWTWQYTIMGGRLVYRIVGNTLLEVVXHIYPGVTL

SEQ ID NO: 318863 - protein, 130 aa, Zea mays
  Clone ID: MRT4577_53877C.1.pep
HVTSYTCCTLPRLFKSAHLLDLIIIEIHPIIISAADSSSRSRRRLQPSSLQTRSERNPNSLAISLALEPVPIQLVIHADLLYLPCSDPRPPSSIQAVRRRIRHSDLSPRNMKQTDLSLNRNKVAHRGRAR

SEQ ID NO: 318864 - protein, 117 aa, Zea mays
  unsure (1)..(117): unsure at all Xaa locations
  Clone ID: MRT4577_53878C.1.pep
DRKPRKDQCTQGHGTPRGRRTRGQKNNXPCDLHPQDTKISSFITVACHASAPTMAKASIACHVLYMLHLTSPLQVGASLRSNNYRNSSNNYQRSRFIIPIPPPSSAIIASDALRTEP

SEQ ID NO: 318865 - protein, 57 aa, Zea mays
  Clone ID: MRT4577_53879C.1.pep
LVTSRALGELLCFDLATNQFASCCAGLDLNAGFFVLRLESSWEAVDLSTGGTTNPRV

SEQ ID NO: 318866 - protein, 64 aa, Zea mays
  Clone ID: MRT4577_5387C.1.pep
KKGSTRACATANDKAHQPIYPLRKTPKCSVECQHEFRCLLQHRLSSSSRYAEPHINVLQFRDYL

SEQ ID NO: 318867 - protein, 119 aa, Zea mays
  Clone ID: MRT4577_53880C.1.pep
AEIANHAKTNAHRDTEHHEGGEPGAKKTIPRAISTPQDTKISSFITVACHASAPTMAKASIACHVLYMLHLTSPLQVGASLRSNNYRNSSNNYQRSRFIIPIPPPSSAIIASDALRTEP

SEQ ID NO: 318868 - protein, 94 aa, Zea mays
  Clone ID: MRT4577_53881C.1.pep
QTARIATLKHSHSDSPTHCHPELTSQLNPAMRSTSFLQCAEAHTWPQRPTSLFADERLDSLLYRLWPHSPSIVMLFVRRHMRDHRTLPLRTRDV

SEQ ID NO: 318869 - protein, 225 aa, Zea mays
  Clone ID: MRT4577_53882C.1.pep
ESPRGEFLKPRSLLRVRCRNPKRVGELRSQTTQRPMHIGTRNTTREENPGPKNNPPCDLHPQDTKISSFITVACHASAPTMAKASIACHVLYMLHLTSPLQVGASLRSNNYRNSSNNYQRSRFIIPSGAGQRRSRSHRRLQPSSLQTRSERNPNSLAISLALEPVPIQLVIHADLLYLPCSDPQPPSSIQAVRRRIRHSDLSLRNMKQTDLSLNRNKVAHRGRAR

SEQ ID NO: 318870 - protein, 48 aa, Zea mays
  Clone ID: MRT4577_53883C.1.pep
PPYFIPRSLGHTTLLILGAKEWLPTKKPQAHKAWVPFLFQAHQPQGGG

SEQ ID NO: 318871 - protein, 199 aa, Zea mays
  Clone ID: MRT4577_53884C.1.pep
ENPKSVGERRSQTSKRPMHIGTRNTTREENPGPKNNPPCDLHPQDTKISSFITVACHASAPTMAKASIACHVLYMLHLTSPLQVGASLRSNNYRNSSNNYQRSRFIIPSGAGQRRSRSHRRLQPSSLQTRSERNPNSLAISLALEHADLLYLPCSDPQPPSSIQAVRRRIRHSDLSLRNMKQTDLSLNRNKVAHRGRAR

SEQ ID NO: 318872 - protein, 79 aa, Zea mays
  Clone ID: MRT4577_53885C.1.pep
MALVCGLRVLLLLALARALSLSGVHILLFPGFRLWLGLWVRVVVVRGQAGAALRSRSSSSSQSASPRRMILCRASGCLC

SEQ ID NO: 318873 - protein, 62 aa, Zea mays
  unsure (1)..(62): unsure at all Xaa locations
  Clone ID: MRT4577_53886C.1.pep
TKDTLISLRHVPYVRLTSSTLAPGTGSWFLKRWVTSTSTLCGGVRGXFFPPLPVLWRRPSAL

SEQ ID NO: 318874 - protein, 119 aa, Zea mays
  Clone ID: MRT4577_53887C.1.pep
MGYRGDDDYDYLFKGGLIGDSGVGKSNLFSGFTRNEFSLESKSTIGVEFATRRIHVNNKVVKAQIWDTAGQERNRVITSANYRGEVGALVVYNVTRNVTFKNVERWMRELRDHTDANIG

SEQ ID NO: 318875 - protein, 289 aa, Zea mays
  unsure (1)..(289): unsure at all Xaa locations
  Clone ID: MRT4577_53888C.1.pep
MATGSASAIASFSVAAAAAAALRVRRPXSRLRLGPLAXPQQGALVSLKPCASLAPQAPLWRAESDAAGGGAGAGDVMGLLLRERIVFLGNEIEDFLADAVVSQLLLLDAIDPDSDIRLFVNSPGGSLSATMAIYDVMQLVRADVSTIGMGIAGSTASIILGGGTKGKRFAMPNTRIMIHQPVGGASEHALXDVEVQAKEILTNKRNVIRIVSCFTGRTPEQVEKDIDRDRYMGPLEAVDYGLIDGVIDGDSIIPLEPVPERVKPKYNYEELYKDPQKFLTPDVPDDEIY

SEQ ID NO: 318876 - protein, 48 aa, Zea mays
  Clone ID: MRT4577_53889C.1.pep
VRKKKKKKKKKKKKKKKKKKKKKKKRRQNIKKKKINLIEKTKKKKSRS

SEQ ID NO: 318877 - protein, 106 aa, Zea mays
  Clone ID: MRT4577_5388C.1.pep
MAEEKKHHHLFHRHKDGGEEEASAGGEVDYDKKEKHHKHLGQLGGLGAIAAGAYAIHEKHKAKKDPENAHGHKVKEEVAAVAALGAAGFAFHEHHQKKDAKKQGQS

SEQ ID NO: 318878 - protein, 124 aa, Zea mays
  Clone ID: MRT4577_53890C.1.pep
MTAKMFSILMLLALSTSVANPTIFPQYSHSPISVLLPPYLPSMTSTDFENPSLQPYILQQSIATCILPLSPLISQHFTTLSLMQSLVQTITAHQLQQLDLPLISQLIYTNLSPYSQQHQFTSFN

SEQ ID NO: 318879 - protein, 66 aa, Zea mays
  unsure (1)..(66): unsure at all Xaa locations
  Clone ID: MRT4577_53891C.1.pep
PGAVADAPQRKRRHGGRFVRVVLVSELRVHCFRYSSFAERRTHXGGEPANRGGRNRPPSPLGGRAA

SEQ ID NO: 318880 - protein, 73 aa, Zea mays
  unsure (1)..(73): unsure at all Xaa locations
  Clone ID: MRT4577_53892C.1.pep
PDGCVSHQVGSGCSWKVMNKLNLRQIKHGRLGMLAILGYFSQGLGSGVGPFQNQXDXVSYSVEKNVLASFKFQ

SEQ ID NO: 318881 - protein, 73 aa, Zea mays
  Clone ID: MRT4577_53893C.1.pep
EDNVPVFVVALNPRKKSSGATCSIGRVGSFPVKFSCPWHVQKTPASWLSAQDLTGPQFFLFPVGRQELYMYIW

SEQ ID NO: 318882 - protein, 116 aa, Zea mays
  unsure (1)..(116): unsure at all Xaa locations
  Clone ID: MRT4577_53894C.1.pep
DTRRHAPGQRAGQEARLYERAETKLTSASGTVEPDVYSTPCPVAERTXIAEVMQTKQMANPTTAAGLLRALYHDCSCSDRDAEVLIECTQDKKSDHDAEINHSLHGDAFEARVRAK

SEQ ID NO: 318883 - protein, 37 aa, Zea mays
  Clone ID: MRT4577_53895C.1.pep
WDTSGQEDYDRLRPLSYPDTDVILMCLSIDSPDSLEN

SEQ ID NO: 318884 - protein, 101 aa, Zea mays
  unsure (1)..(101): unsure at all Xaa locations
  Clone ID: MRT4577_53896C.1.pep
XRKSRGGPHASVIMKATQRHFIFCLFAKKSANGGMANLAEILNTLPPSLGVVPCRLRRIDRGLQSKASYLTMQMEKLGLNFAGRARFGGFLGSLFDRQEVR

SEQ ID NO: 318885 - protein, 206 aa, Zea mays
  unsure (1)..(206): unsure at all Xaa locations
  Clone ID: MRT4577_53897C.1.pep
MSKVQCESAKDAISRIXTDAFDKNTKITETGXLRIGLKXYDPQKDKRFGASVKLPHIPRPNMMECMLGDAHHVEDAEKMGLDYMDVEALDKVNKNQKLVERLVKKYHAFLASEAILEQIPRLLGTGLNKAGNVXLTLSTHHESLQLKVNVTNGSVKFQLKKVLCMCGAVGHLEMEENHIQQNIQMSVNFLSSLLNKKCXNARCLYV

SEQ ID NO: 318886 - protein, 68 aa, Zea mays
  Clone ID: MRT4577_53898C.1.pep
YEQRFYNYSSNKAINTGHFALHRILVHSQNRYLPDPATQLCFLKIKHNEDELRTSKEQHNMISNDELK

SEQ ID NO: 318887 - protein, 340 aa, Zea mays
  Clone ID: MRT4577_53899C.1.pep
MDMAHERSDASSEEEVMAGELRRGPWTVEEDLQLVNYVDAHGEGRWNSLARSAGLKRTGKSCRLRWLNYLRPDLRRGNITPQEQLLILELHSRWGNRWSKIAQHLPGRTDNEIKNYWRTRVQKHAKQLKCDVNSQQFKDVMRYLWMPRLVERIQAAAANNNASGAGVPPAGAAADDTPLSSSWQHGGGADDDGGLYASPELPTDACWPPADCYYYPAAADHQLLNNPAAAAVFPDLSSTTAGSSSPSSDSGAGTAQPWPAPLGGGAEWLTTGACCDASSAAAAAVVLGGQQQQSCLVGETSWASSELPELGVADFEIGSFDVESIWSMDDSLWFTQAQGV

SEQ ID NO: 318888 - protein, 54 aa, Zea mays
  unsure (1)..(54): unsure at all Xaa locations
  Clone ID: MRT4577_5389C.1.pep
RXGXXGADHTRPKAGVQELRKVWPVLRGQRLAELIWKRRPAELGQVRNPGPVFL

SEQ ID NO: 318889 - protein, 156 aa, Zea mays
  Clone ID: MRT4577_538C.1.pep
TQKGLKGKRGEAWKKKMGGDKKKKFPQPTKGDFPGEKKIPNQTGSGGARQKIKPKGGLKKRGNKPAGRQKGGGKNPTRLKKGGKNNPGANPNQGGTVDFFNRGPIGKALNPKNISPAPNLEKDSQPRKGGGGVLLPKVNKGMGRFLSKGVFPRGLE

SEQ ID NO: 318890 - protein, 67 aa, Zea mays
  Clone ID: MRT4577_53900C.1.pep
KRNVSQLGLLSKKKKKKKKKKKKKKKKKKKKKKKKKKKKKKKKKKKKKKKKKKKKKKKKKSQHQKYY

SEQ ID NO: 318891 - protein, 331 aa, Zea mays
  Clone ID: MRT4577_53901C.1.pep
MDMAHERSDASSEEEVMAGELRRGPWTVEEDLQLVNYVDAHGEGRWNSLARSAGLKRTGKSCRLRWLNYLRPDLRRGNITPQEQLLILELHSRWGNRWSKIAQHLPGRTDNEIKNYWRTRVQKHAKQLKCDVNSQQFKDVMRYLWMPRLVERIQNAAAMAGTPQQHKAGAADTPLSSPSSWQPGGGGGLYASPDLPTDACWPPADCYYYPAAADHQLLNNPAAAAVVPDLSSTTAGSASPSSDSGAGTAQPWPAPMGGAEWLTTAACDASSAAAAVLLGGQQQQSCLVGETSWASSELPELGVADFEIGSFDVESIWSMDDSLWFTQAQGV

SEQ ID NO: 318892 - protein, 241 aa, Zea mays
  Clone ID: MRT4577_53902C.1.pep
MSAMVETHPPTPTAAADVVSILRGADPARLLATSGIAPTPELLQHLRPALPTLPDSAIPALARWAGAATAVSLLASRRLFAAAWRFLLFQPAAASPPPPLAAFAPLLRRYARIGRTDSAVRTFRFLQRHPGRYAVESDVTPSAEALSPLILTIDALCKEGHPRAAALLVAQIRREDDGWAPDVRIYNILLNGWSRARRLDKAEKLWAAMRDEGVRPTVVTYGTFIDAHCVMRRPDHAMALL

SEQ ID NO: 318893 - protein, 270 aa, Zea mays
  Clone ID: MRT4577_53903C.1.pep
MSTNLGGASCFGFGLTQLQPAAVRLRLPPARAADTSSSQSPARLTAVLEQVDQLLSQGNDMAALSLVRSTQGGDGGLRAFGAARQVYFGGGVRNLVLDTIGHYLSQKYHNRVIQHEAGHFLIAYLLGVLPKGYTITSLDTLMNQGSLNVQAGAAFVDYEFLEEINTGKLSATMVNKFSCIALAGVAAEYLLYGRAEGGLADINKLDGLLKGLGFTQKKADSQVRWAVLNTVLILRRHEKARSQLAEAMSTGKSVGSCIQVIEECISTDDI

SEQ ID NO: 318894 - protein, 122 aa, Zea mays
  Clone ID: MRT4577_53904C.1.pep
CQPLATTVSLDPEAALAGVKEPRAPRSLLARARANLAFQSVWAELNGAMGDLGTYIPIVLSLALARHLDLGTTLVFTGIYNAVTELIYGVPMPVQPMKAIADTELSDSSVGVPQIMASNILT

SEQ ID NO: 318895 - protein, 172 aa, Zea mays
  unsure (1)..(172): unsure at all Xaa locations
  Clone ID: MRT4577_53905C.1.pep
KGHPFFKTVKKNREKKPPKRGKSTETPNGKGNRKKKKLGKRRHPKNVPQTKPFLIKKGGAQGKKKGKKKKTVKKPPQKNPQTXKELKRLKGAPTLNRXKKKREKKPPRVKKRPPRKFKKPEKKKGRALGNFPKLKGPNEGTLNLGGKEKKPNMAKNLAPGEKPFGPPKNGGK

SEQ ID NO: 318896 - protein, 34 aa, Zea mays
  Clone ID: MRT4577_53906C.1.pep
TNIIHCAEEYKQYEGNGGLWFLAPCASYNLRVPG

SEQ ID NO: 318897 - protein, 118 aa, Zea mays
  Clone ID: MRT4577_53907C.1.pep
VRLFTPMTARPVDSDELLAVGGGQGAIAPYSVKGGLGYGTLSGALMGGGYTRPAARMDLPPALDRLPCRRSATRTVGDRLACIRNATGTLYRQSSSNGGAWQVNLRRLLLKRARSPWR

SEQ ID NO: 318898 - protein, 1665 aa, Zea mays
  unsure (1)..(1665): unsure at all Xaa locations
  Clone ID: MRT4577_53908C.1.pep
MDPKGKGMVVNNNEKESIFNEPKDDKPTDSGSGHKRKDGKKKKTRRIKEIVYYDSDESSSSQKDDDDYEKKKTVNSNFSFDYSRIPQSTNAHLLSIPLGKPPHFDGEDYRFWSHKMRSHLFSLHPSIWEIVESGMHFDSTDSPMFINEQIHKNAQATTVLLASLCRDEYHKVSGLDNAKQIWDTLKISHEGNDVTMLTKMELVEGELGRFAMIRGEEPTQTYTKMTPEEILGKFVSGRMMIKEARYVDDALNGPINEPQPLALKATRSKETLPSKVAQIEAAGLNDEEMALIIKRFKTTLKGRKGQPSKTKTKGKRSCFKCGKLGHFIVNCPDNDSDQDQGNKREKKKNYKKAKGEAHLGKEWDSDCSSSDSDNEGLVATAFNKSSLFPNERHTCLMAREKKVCTRNTTYASSSEDESSDEDEIDYSCLFKGLDRTKVDKINELIDALNDKNKLLEKQEDLLYEEHDKFIEAQKSHALEVKRNEMLSCELSSCHETISNLRSINDDLNAKLEIASKSTSCVENDVICNRCKDFDIDACSEHIASIAKLNDEIASLNAQLKTSKSEFDKLKFARDAYTIGRHPSIKDGLGFKREVKNLTSHKASISTKEKGKAPMARNAKKNHAFMYHDRKFSRNVHDDRSCNAYNAFDSHAMFASSSSYMHGRNVFRRNVVHHMHRRNVPRKVNEPSTIYHACDASFAICRKDRKDPTRDGYLSPKPKFALQVYASGGSSWIIDSGCTNHMTGEKKMFTSYVKNKNSQDSIIFGDGNQGKXESLGYNLLSXRSDGSLAFKGVLDGKLYLVDFAKEEAGLDACLIAKTSMGWLWHRRLAHVGMKNLHKLLKGEHVIGLTNVQFEKDRPCAACQAGKQVGGAHHNKNVMTTSRPLELLHMDLFEPVAYLSIGGSKYGLVIVDDFSRFTWVFFLQDKSETQGTLKRFLRRAQNEFELKVKKIRSDNGSEFKNLQVEEYLEEEGIKHEFSAPYTPQQNGVVERKNRTLIDMARMMLGEFKTPERFWSKAVNTACHAINRVYLHRLLKKTSYELLTGNKPNVSYFRVFGSKCYILVKKGRNSKFAPKAVEGFLLGYDSNTKAYRVFNKSSGLVEVSSDVVFDETNGSPREQVVDLDDVDEEDVPTATIRTMAIGEVRPQEQKEQDQPSSSTMVHPPTQDDEQIHQQEVCDQGGAQDDHVMEEEAQPAPPTQVRAMIQRDHPVDQILGDISKGVTTRSRLVNFCEHYSFVSSIEPFRVEEALLDPDWVLAMQEELNNFKRNEVWTLVPRPKQNVVGTKWVFRNKQDEHGVVTRNKARLVAKGYAQVAGLDFEETFAPVARLESIRILLAYAAHHSFRLFQMDVKSAFLNGPIKEEVYVEQPPGFEDERYPDHVCKLSKALYGLKQVKQLKDGTFISQMKYTQDLLKRFGMKDAKPANTPMGTDGHTDLNKGGKSVDQKAYRSMIPLAYRPCASRPDIMLSVCMCARFQSDPKECHLVAVKRILRYLVATPCFGLWYPKGSTFDLIGYSDSDYAGCKVDRKSTSGTCQFLGRSLVSWNSKKQTSVALSTAEAEYVAAGQCCAQLLWMRQTLRDFGYNLSKVPLLCDNESAIRMAENPVEHSRTKHIDIRHHFLRDHQQKGDIEVFHVSTENQLADIFTKPLDEKTFCRLRSELNVLDSQNLD

SEQ ID NO: 318899 - protein, 1618 aa, Zea mays
  unsure (1)..(1618): unsure at all Xaa locations
  Clone ID: MRT4577_53909C.1.pep
MDPKGKGMVVNNNEKESIFNESKDDKPTDSGSGHKRKDRKKKKTRRIKEIVDYDSDESSSSQKDDDDYEKKKTVNSNFSFDYSRIPQSTNAHLVSIPLGKPPHFDGEDYGFWSHKMRSHLFSLHPSIWEIVESGMHFDSTDSPMFINEQIHKNAQATTVLLASLCRDEYHKVSGLDNAKQIWDTLKISHEGNDVTMLTKMELVEGELGRFATIRGEEPTQTYNRLKTLVNKIRSYGSTRWTDHDVVRLMLRYFTVLDPHLVNNIRENPRYTKMTPEEILGKFVSGRMMIKEARYVDDTLNGPINEPQPLALKATRSKDTLPSKVAQIEAAGLNDEEMALIIKRFKTALKGRKGQPSKTKTKGKRSCFKCGKLGHFIANCPDNDSDQDQGNKREKKKNYKKAKGEAHLGKEWDSDCSSSDSDNEGLAATAFNKSSLFPNERHTCLMAREKKVCTRNTTYASSSEDESSDEDEIDYSCLFKGLDRTKVDKINELIDALNDKNRLLEKQEDMLYEEHDKFVEAQKSHALEVKRNEMLSCELSSCHETISNLRSINDDLNAKLEIASKSTSCVENDVICNRCKDFDIDACSEHIASIAKLNDEIASLNAQLKTSKSKFDKLKFARDAYTIGRHPSIKDGLGFKREVKNLTSHKASISTKEKGKAPMASNAKKNHAFMYHDRKFSRNVHDDRSCNAYNAFDSHAMFASSSSYMHGRNVFRRNVVHHMPRRNVGSTPRKVNEPSTIYHACDASFAICRKDRKVYASGGSSWIIDSGCTNHMTGEKKMFTSYVKNKDTQDSIIFGDGNQGKXESLGYNLLSXRSDGSLAFKGVLDGKLYLVDFAKEEAGLDACLIAKTSMGWMWHRRLAHVGMKNLHKLLKGEHVIGLTNVQFEKDRPCAACQAGKQVGGAHHSKNVMTTSRPLELLHMDLFGPVAYLSIGGSKYGLVIVDDFSRFTWVFFLQDKSETQGTLKRFLRRAQNEFELKVKKIRSDNGSEFKNLQVEEFFEEEGIKHEFSTPYTPQQNGVVERKNRTLIDMARMMLEEFKTPERFWSEAVNTACHAINRVYLHRLLKKTSYELLTGNKPNVSYFRVFGSKCYILVKKGRNSKFAPKAVEGFLLGYDSNTKAYRVFNKSSGLVEVSSDVVFDETNGSPREQVVDLDDVDEEDVPTAAIRTMAIGEVRPQEQKEQDQPSSSTMVHPPTQDDEQIHQQEACDQGGAQDDHVMEEEAQPAPPTQVRAMIQRDHPVEQILGDISKGVTTRSRLVNFCEHYSFVSSIEPFRVEEALLDPDWVLAMQEELNNFKRNEVWTLVPRPKQNVVGTKLFQMDVKSAFLNGPIKEEVYVEQPPGFEDERYPDHVCKLSKALYGLKQAPRAWYECLRDFLIANAFKVGKADPTLFTKTCDGDLFVCQIYVDDIIFGSTNKKSCEEFSRVMTQKFEMSMMGELNYFLGFQVKQLKDGTFISQTKYTQVLLKRFGMKDAKPAKTPMGTDGHTDLNKGGKSVDQKAYRSMIGSLLYLCASRPDIVLSVCMCARFQSDPKECHLVAVKRILRYLVATPCFGLWYPNGSTFDLIGYSDSDYAGCKVDRKSTSGTCQFLGRSLVSWNSKKQTSVALFTAEAEYVAAG

SEQ ID NO: 318900 - protein, 126 aa, Zea mays
  Clone ID: MRT4577_5390C.1.pep
WRMVSQDNSSKGSIYVPRSMLSTHKEEPEDDKSPRLDSSSVEDAQIVSSASNFQSQDFMLERFQQSVASSPDSSSSNPSNSNTGDSMPVYSDINLLKSLSFDALKQSDLNSWTPKSPLKSNVNNDL

SEQ ID NO: 318901 - protein, 158 aa, Zea mays
  unsure (1)..(158): unsure at all Xaa locations
  Clone ID: MRT4577_53910C.1.pep
VVSPPPDPFAPTPTCSTPCTRVAXPIEHYVLLKARQEAETXDAVEEMVYSLEALATLEPDLIYMHTGPVLRLQYPAXEAXLGPXKLLHTRYTTKEEMPFYTAHPAXHVDTVQEHVLANALDMIADDWINDGPVELSEGLGSDERLTLAKVKEGVEVTH

SEQ ID NO: 318902 - protein, 1671 aa, Zea mays
  Clone ID: MRT4577_53911C.1.pep
MDPKGKGIVINDKEKESFVNDLKDDKTTDSGSGHRRKDGKKKKTRRIKEIVYYDDSDESTSSHKENDNNDYDKRKTVNSNFSFDYSRIPQSANAHLLSIPLGKPPHFDGEDYGFWSHKMRSHLFSLHPSIWEIVESGMHFDSSDSPMFINEQIHKNAQATTVLLASLCRDEYHKVSGLDNAKQIWDTLKISHEGNDVTLLTKMELVEGELGRFAMIRGEEPTQTYNRLKTLINKIRSYESMRWTDHDVVRLMLRSFTVLDPHLVNNIRENPRYTKMSPEEVLGKFVSGRMMIKEARYVDDALNGPINEPQPLALKATRSKEALPSKVAQIEAAGLNDEEMALIIKRFKTALKGRKGQPSKTKAKEKRSCFKCGKLGHFIANCPDNDSDQDQGNKREKKKNYKKAKGEAHLGKEWDSDCSSSDSDNEGLAATAFNKLSLFPNERHTCLMAREKKVCTRDSTYASSSEDESSDEDEIDYSCLFKGLDRTKVDKVNELIDALNDKNRLLEKQEDLLYEEHDKFIEAQKSHALEVKRNEMLSCELSSCHETISNLRSINDDLNAKLEIASKSTSCVENDVICNRCKDFDINACSEHIASIAKLNDEIASLNAQLKIRKSEFDKLKFARDAYTIGRHPSIKDGLGFKREVKNLTSHKASISTKEKGKAPMASNAKKNHAFMYHDRKFSRNVHDDRSCNAYNAFDSHAMFASSSSYMHGRNVFRRNVVHHMPRRNVVNTPRKVNEPSTIYHVLNASFAICRKDRKIIARKLGAKCKGDKTCIWVPKEIVTNLVGPNKSWVYASGGSSWIIDSGCTNHMTGEKEMFTSYVKNKDSQDSIIFGDGNQGKVKGLGKIAISNEHSISNVFLVESLGYNLLSVSQLCNMGYNCLFTNVDVSVFRRCDGSLAFKGVLDGKLYLVDFAKEEAGLDACLIAKTSMGWLWHRRLAHVGMKNLHKLLKGEHVIGLTNVQFEKDRPCAACQAGKQVGGAHHSKNVMTTSRPLELLHMDLFGPVAYLSIGGSKYGLVIVDDFSRFTWVFFLQDKSETQGTLKRFLRRAQNEFELKVKKIRSDNGSEFKNLQVEEFLEKEGIKHEFSAPYTPQQNGVVERKNRTLIDMARTMLGEFKTPECFWSEAVNTACHAINRVYLHCLLKKTSYELLTGNKPNVSYFRVFGSKCYILVKKGRNSKFAPKAVEGFLLGYDSNTKAYRVFNKSSGLVEVSSDVVFDETNGSPREQVVDLDDVDEEDVPTAAIRTMAIGKVLAMQEELNNFKRNEVWTLVPRPKQNVVGTKWVFRNKQDEHEVVTRNKARLVAKGYAQVAGLDFEETFAPVARLESIRILLAYAAHHSFRLFQMDVKSAFLNGPIKEEVYVEQPPSFEDERYPDHVCKLSKALYGLKQAPRAWYECLRDFLIANAFKVGKADPTLFTNTCDGDLFVCQIYVDDIIFGSTNKKSCEEFSRVMTQKFEMSMMGELNYFLGFQVKQLKDDTFISQTKYTQDLLKRFGMKDAKPAKTPMGTDGHTDLNKGDSDYAGCKVDRKSTSGTCQFLGRFLVSWNSKKQTSVALSTAEAEYVAAGQCCAQLLWMRQTLRDFGYNLSKVPLLCDNESAIRMAENPVEHSRTKHIDIRHHFLRDHQQKGDIEVFHVSTENQLADIFTKPLDEKTFCRMRSELNVLDSRNLD

SEQ ID NO: 318903 - protein, 109 aa, Zea mays
  Clone ID: MRT4577_53912C.1.pep
VISCAYAFELAWSVVLMIPSWTCRRTNSFLNVGENLRYFCSSFMPLEVGQGAAQMWRAIVVWEYQATCGVVGGLRSAALDLGVDTLVLLSSVCQINWATQWVDRSYSDR

SEQ ID NO: 318904 - protein, 1502 aa, Zea mays
  Clone ID: MRT4577_53913C.1.pep
MDPKGKGIVINDKEKESLVNEPKDDKPTDSGSGHKRKDGKKKKTRRIKEIVYYDSDESSSSQKDDDDYEKKKTVNSNFSFDYSRIPQSTNAHLLSIPLGKPPHFDGEDYGFWSHKMRSHLFSLHPSIWEIVENGMHFDSSDSPMFINEQIHKNAQATTVLLASLCRDEYHKVSGLGNAKQIWDTLKISHEGNDVTMLTKMELVEGELGRFAMIRGEEPTQTYNRLKTLVNKIRSYGSTRWTDHDVVRLMLRSFTVLDPHLVNNIRENPRYTKMTPEEILGKFVSGRMMIKEARYVDDALNGPINEPQPLALKATRSKEALPIKVAQIEAAGLNDEEMALIIKRFKTALKGRKGQPSKIKTKGKRSCFKCGKLGHFIANCPDNDSDQDQGIKREKKKNYKKAKGEAHLGKEWDSDCSSSDFDNEGLAATAFNKSSLFPNERHTCLMAREKKVCTQNSTYASSSEDESSDEDEIDYSCLFKGLDRTKVDKINELIDALNDKNRLLEKQEDLLYEEHDKFVEAQKSHALEVKRNEMLSCELSSCHETISSLRSINDDLNAKLETASKSTSCVKIVETCNRCKDIDIDACSEHIASIAKLNDEVASLNAQLKTSKSEFDKLKFARDAYTIGRHPSIKDGLGFKREVKNLTSHKASISIKEKGKAPMVSNAKKNHAFMYHDRKFSRNVHDDRSCNAYNAFDFHAMFASSSSYMHASGGSSWIIDSGCTNHMTGEKKMFTSYVKNKDSQDSIIFGDGNQGKDKSETQGTLKRFLRRAQNEFELKRKNRTLIDMARTMLGEFKTPECFWSEAVNTACHAINRVYLHRLLKKTSYELLTGNKPNVSYFRVFGSKCYILVKKGRNSKFAPKVVEGFLLGYDSNTKAYRVFNKSSGLVEASSDVVFDETNGSPREQVVDLDDVDEEDVPTAAIRTMEIGEVRPREQNERDQPSSSTMVHPPTQDDEQVHQQEACDQGGAQDDHVMEEEAQPAPPTQVRAMIQRNHPVDQILGDISKGVTTRSRLVNFCEHYSFVSSIEPFRVEEALLDPDWVLAMQEELNNFKRNEVWTLVPRPKQNVVGTKWVFRNKQDEHGVVTRNKARLVAKGYAQVAGLDFEETFAPVARLESIRILLAYAAHHSFRLYQMDVESAFLNGPIKEEVYVEQPPGFEDERYPDHVCKLSKALYGLKQAPRAWYECLRDFLIANAFKVGKADPTLFTKTCNGDLFVCQIYVDDIIFGSTNKKSCEEFSRVMTQKFEMSMMGELNYFLGFQVKQLKDGTFISQTKYTQDLLKRFGMKDAKPAKTPMGTDGHTDLNKGGKSVDQKAYRSMIGSLLYLCASRPDIMLSVCMCARFQSDPKECHLVAVKRILRYLVATPYFGLWYPKGSTFDLIGYLDSDYAGCKAEYVAAGQCCAQLLWMRQTLRDFGYNLSKVPLLCDNESAIRMAENPVEHSRTKHIDIRHHFLRDHQQKGDIEVFHVSSENQLADIFTKPLDEKTFCRLRSELNVAPKILF

SEQ ID NO: 318905 - protein, 538 aa, Zea mays
  unsure (1)..(538): unsure at all Xaa locations
  Clone ID: MRT4577_53914C.1.pep
VSLEWTLEKVLVHKPLIDASLVQFEGYWWLFASDFTRYGVEKNADLEMWXYSNSPLGPWTEHKKNPIYKSDKSLGARNGGRLFIFEGSLYRPGQDCSGTYGRRVKLHKVEKLSKEEYKEVPVNLGIDEPKKGRNAWNGMRYHHMDAQQLASGGWIAVMDGDRVPSGDSTRRSLIGYLAFLLASALVVFVGFMKGAISCYVPPSLWVPLTRRTELSRIFYVHRFNQKVRRYSSSISRYISAAKTKLSEKTWSNVLFFCVVALFGAINVCIAVHFLCGGNGAEEAYTYQGQHSQFTMITMTYEARLWNLKVFIEHYSRCESVREIVVVWNKGNPPSSDAFDSTVPVRIRVEETNSLNNRFRVDPLIKTRAVLELDDDIMMTCTDLEKGFRVWREHPERMVGFYPRMIDGNPMQYRNERYARGKNGYNLILTGAAFMDREFAFKTYWSEKAREGRDYVHKNFNCEDLLMNFLYANASSTRTVEYVHPAWAIDTSKLSSVAISRDTQKHYDIRTDCLAKFSSIYGPLPQKWEFGMREDHWDK

SEQ ID NO: 318906 - protein, 1364 aa, Zea mays
  Clone ID: MRT4577_53915C.1.pep
MDPKGKGIVINDKEKESFVNEPKNDKPTDSGSGHKRKDGKKKKTRRIKEIVYYDDSDESTSSQKDDDNDYRKTVNSNFSFDYSRIPHSSNSHLLSIPLGKPPHFDGEDYRFWSHKMRSHLFSLHPSIWEIVENGMKFDSSDSPMLINEQIHRNAQATTVLLASLCREEYNKVSGLDNAKQIWDTLKISHEGNDITMLTKMELVEGELGRFAMIRGEEPTQTYNRLKTLINKIRSYGSTRWTDHDAVRLMLRSFTVLDPHLVNNIRENPRYTTMTPEEVLGKFVSGRMMIKEARYVDDALNGPINEPQPLALKATRSKEMLPSKVAQIEAAGLNDEEMALIIKRFKTALKGRKGQPSKTKTKGKRSCFKCGKLGHFIANCPDNDSDQDQGNKREKKKNYKKAKGEAHLGKEWDSDCSSSDSDNEGLAATAFNKSSLFPNERHTCLMAREKKVYASGGSSWIIDSGCTNHMTGEKKMFTSYVKNKDSQDSIIFGDGNQGKVKGLVESLGYNLLSVSQLCNMGYNCLFTNIDVSVFRRSDGSLAFKGVLDGKLYLVEFAKEETGLDACLIAKTSMGWLWHRRLAHVGMKNLHKLLKGEHVIGLTNVQFEKDRPCAACQAGKQVGGAHHSKNVMTTSRPLELLHMDLFGPVTYLSIGGSKYGLVIVDDFSRFTWVFFLQDKSETQGTLKRFLRRAQNEFELKVKKIRSDNGSEFKNLQVEEFLEEEGIKHEFSAPYTPQQNGVVERKNRTLIDMARTMLGEFKTPECFWSEAVNTACHTINRVYLHRLLKKTLYELLTGNKPNVSYFRVFGSKCYILVKKGRKSKFAPKAVEGFLLGYDSNTKAYRVFNKSSGLVEVSSDVVFDETNGSPREQVVDCDDVDEEDVPTAAIHTMAIGDVRPQEQKEQDQPYSSTMVLPPTQDDEQVHQQEACDQGGAQDDHVMEEEAQPAPPTQVRAMIQRDHPVDQILGDISKGVTTRSRLVNFCEHYSFVSSIEPFRVEEALLDPDWVLAMQEELNNFKCNEVWTLVPRPKQNVVGTKLFQMDVKNAFLNGPIKEEVYVEQLPGFEDERYPDHVCKLSKALYGLKQAPRAWYECLRDFLIANAFKVGKADPTLFTKTCDGDLFVCQIYVDDIIFGSTNKKSCEEFSRVMTQKFEMSMMGELNYFLGFQVKQLKDGTFISQTKYTQDLLKQFGMKDAKPAKTPMGTDGHTDLNKGDSDYAGCKVDRKSTSGTCQFLGRSLVSWNSKKQTSVALSTAEAEYVAAGQCCAQLLWMRQTLRDFGYNLSKVPLLCDNESAIRMAENPVEHSRTKHIDIRHHFLRDHQQKGDIEVFHVSTENQLADIFTKPLDEKTFCRLRSELNVLDSRNLD

SEQ ID NO: 318907 - protein, 279 aa, Zea mays
  unsure (1)..(279): unsure at all Xaa locations
  Clone ID: MRT4577_53916C.1.pep
MNVKSAFLNGPIKEEVYVEXPPGFEDERNPDHVXVGKADPTLFTKTCDGDLFVCQIYVDDIIFGSTNKKSCEEFSRVMTQKFEMSMMGKLNYFLGFQVKQLKDGTFISQTKYTQDSLKRFRMKDAKPAKTPMGTDGHTDLNKGDSDYAGCKVDRKSTSGTCQFLGRSLAEYVAAGKCCAQLLWMRQILRDFGYNLSKVPLLCDNESAIRMAENPVEHSRTKHIDIRHHFLRDHQQKGDIEVFHVSTENQLADIFTKPLDEKTFCRLRSELNVLDSRNLD

SEQ ID NO: 318908 - protein, 837 aa, Zea mays
  Clone ID: MRT4577_53917C.1.pep
MDPKGKGMVVNNNEKESIFNEPKDDKPIDSGSSHKRKDGKKKKTRRIKEIKDDDDYEKKKTINSNFSFDYSRIPHSTNAHLLSIPLGKPPHFDREDYGFWSHKMRSHLFSLHPSIWEIVENGMHFDSSDSPMFINEQIHKNAQATTVLLASLCRDEYHKVSGLDNAKQIWDTLKISHEGNDVTMLTKMELVEGELRRFAMIRGEEPTQTYNRLKTLVNKIRSYGSTRWTDHDVVRLMLRSFTVLDPHLVNNIRENPRYTKMTPEEILGKFVSGRMMIKEARYVDDALNGPINEPQPLALKATRSKETLPSKVAQIEAAGLNDEEMALIIKRFKTALKGRKGQPSKTKTKGKRSCFKCGKLGHFIANCPDNDSDQDQGNKREKKKNYKKAKGEAHLGKEWDSDCSSSDSDNEGLAATAFNKSSFFPNEHHTCLMAREKKVYASGGSNWIIDSRCTNHMTGEKKMFTSYVKNKDSQDSIIFGDGNQGKDKSETQETLKHFLRRAQNEFELKVKKIRSDNGSEFKNLQVEEYLEEEGIKHEFSAPYTPQQNGVVERKNRTLIDMARTKLGEFKTPERFWSEAVNTACHAINRVYLHRLLKKTSYELLTGYDSNTKAYRVFNKSSGLVEVSSDVVFDETNGSPREQVVDLDDVDEEDVPTAAIRTMAIGEVRPQEQKEQDQPSSSTMVHPPTQDDEQVHQQEACDQGGSQDDHVMEEETHPAPPTQVRAMIQRDHPVDQILGDISKGVTTQSRLVNFCEHYSFVSSIEPFRVEEALLDPDWVLAMQEELNNFKRNEVWTLVPRPKQNVVGTKWVFVGVLGPTAHPGLPLKVFLGVGRCRQL

SEQ ID NO: 318909 - protein, 159 aa, Zea mays
  Clone ID: MRT4577_53918C.1.pep
MPTNGPGFTKLHDRASDSNYAGCKVDRKSTSGTCQFLGRSLVSWSSKKQTSGAAGQCCAQLLWMRQTLKDFGYNLSKVPLLCDNESAIRMADNPVEHSRTKHIDIQHHFLRDHQQKGDIEVFYVSTENQLADIFTKPLDESTFCRLRSELNVLDSRNLD

SEQ ID NO: 318910 - protein, 117 aa, Zea mays
  Clone ID: MRT4577_53919C.1.pep
LFFFFFFVSLFFRLLFPSRETPSPHPLGDLFEKKSGKRSWGAHLTRLGALSVLGCSRPSFLEPWVGADLQFHSLAGGRDSPWFIGLRAQKGAVSYCVTDSPVCGFVPAAGGFCPTLF

SEQ ID NO: 318911 - protein, 77 aa, Zea mays
  unsure (1)..(77): unsure at all Xaa locations
  Clone ID: MRT4577_5391C.1.pep
RPIGASLSLKTQPRALWVHGRFMHRARRISCHELRRNLFVLLHSHIYDRLFFPPLAXVXPLYYLIMVQRVFQKQYEY

SEQ ID NO: 318912 - protein, 161 aa, Zea mays
  unsure (1)..(161): unsure at all Xaa locations
  Clone ID: MRT4577_53920C.1.pep
PGRPSVFLSSPRRSGGCASPSKRPAEPPVSRSWALPWLPSVPVPARRPELGPAVSSPLAFSGGRGAGXXXLLLRAHSVLPALAHGVNHSSPSVVPCRAMLDLQPSSTVNAASCRPRAPDAISAFSSISRTPFSSRCRAAGRAPDPHPSFACVHRAQPACAQ

SEQ ID NO: 318913 - protein, 758 aa, Zea mays
  Clone ID: MRT4577_53921C.1.pep
ATISFLRRAQNEFELKVKKIRSDNGSEFKNLQVEEFLEEEGIKHEFSAPYTPQQNGVVERKNRTLIDMARTMLGEFKTPERFWSEAVNTACHAINMVYLHRLLKKTSYELLTGNKPNVSYFRVFGSRCYILVKKGRNSKFAPKAVEGFLLGYDSNTKAYRVFNKSSGLVEVSSDVVFDETNGSPREQVVDLDDVDEDVPTVAIRTMAIGDVRPQEQDEQDQPSSSTMVHPPTQDDEQVHQQEACDQGGAQDDHVMEEETQPTPPTQVRAVIQRDHPVDQILGDISKGVTTRSRLVNFCEHYSFVSSIEPFRVEDALLDPDWVLAMQEELNNFKRNEVWTLVPRPKQNVVGTKLFQMDVKSAFLNGPIKEEVYVEQPPGFEDERYPDHVCKLSKALYGLKQAPRAWYECLRDFLIANAFKVGKADPTLFTKTCDGDLFVCQIYVDDIIFGSTNKKYCEEFSRVMTQKFEMSMMGELNYFLGFQVKQLKDGTFISQTKYTQDLLKRFGMKDAKPAKTPMGTDGHTDLNKGGKSVDQKAYRSMIGSLLYLCASRPDIMLSVCMCARFQSDPKECHLVAVKRILRYLVATPCFGLWYPKGSTFDLIGYSDSDYAGCKVDRKSTSGTCQFLGRSLVSWNSKKQTSVALSTAEAEYVAAGQCCAQLLWMRQTLRDFGYNLSKVPLLCDNESAIRMAENPVEHSRTKHIDIRHHFLRDHQQKGDIEVFHVSTENQLADIFTKPLDEKTFCRLRSELNVLDSRNLD

SEQ ID NO: 318914 - protein, 37 aa, Zea mays
  Clone ID: MRT4577_53922C.1.pep
WKFDHGFICFIYVLFCKPTHVRCKKFVCSLMFKCYTK

SEQ ID NO: 318915 - protein, 136 aa, Zea mays
  Clone ID: MRT4577_53923C.1.pep
TRSAHMLAGGSSYLATMSHRSFYRSRRSLSPHPPEVLPRRWTLALLAPSSSRSHTGPTIVCRRGSRWRCSSTTRRSLVTANSTSRSSPTCPHAPLCSTSSGAAAAWTWSRAVVPRCPSSNRGTSWSSPTLATLGLF

SEQ ID NO: 318916 - protein, 82 aa, Zea mays
  unsure (1)..(82): unsure at all Xaa locations
  Clone ID: MRT4577_53924C.1.pep
PGKKKKKKKTSLPHNXASLSLGAHASSSNFFPPFRNSQKALRLLLHLGPFTYTQFMFKRCDALGAXPWVAIFNCARFATPRR

SEQ ID NO: 318917 - protein, 76 aa, Zea mays
  Clone ID: MRT4577_53925C.1.pep
GTACRFRSGIPGSTHASGLSIKPWLSSRTCGDQVGLKLNNPPASYFPSAGIKGVHRHALFWFLSRTKSAAAHIICK

SEQ ID NO: 318918 - protein, 131 aa, Zea mays
  Clone ID: MRT4577_53926C.1.pep
MTPPAAPTMAAGDAVHVGRRRHVLLFPLPYQGHINPMFRLAGLLHARGFAVTVFHTQLNAPDPARHPEYRFVPVPNGSPVPVAIEDVVAHILELGRACEAAFRDRLASVLEEYSRDTVACLVADAHLLPIF

SEQ ID NO: 318919 - protein, 85 aa, Zea mays
  Clone ID: MRT4577_53927C.1.pep
FFFWEKKKKIKLELKQVWLNLLGPLTMFFKRYDITTPFHNKEYLATLILGLKKGLKNFRPKKCGELLYNFITQPYKMGGDHYPGG

SEQ ID NO: 318920 - protein, 147 aa, Zea mays
  Clone ID: MRT4577_53928C.1.pep
MSEEQSGNKKRVFKKFTYRGVDLENLLDLNTEQFAQLVHARARRRFTKRGLKKKHTNLLRKLRAAKKEAPAGDKPEVIKTHLRDMIIVPEMIGSQIGVYNGKTFNGVEVKPEMIGHYLGEFSITYKPVKHGRPGIGATHSSRFIPLK

SEQ ID NO: 318921 - protein, 55 aa, Zea mays
  Clone ID: MRT4577_53929C.1.pep
DMQFLAQVPSEGVPCQLQFLELSQTLLICTIVSSFTSNIFAMDYFFCTLLKHYAP

SEQ ID NO: 318922 - protein, 51 aa, Zea mays
  unsure (1)..(51): unsure at all Xaa locations
  Clone ID: MRT4577_5392C.1.pep
DGVLNWGERGNYMGEIIFGGLKDEIKFWKKKKILGVGFNRNDEXVMGFNDF

SEQ ID NO: 318923 - protein, 60 aa, Zea mays
  unsure (1)..(60): unsure at all Xaa locations
  Clone ID: MRT4577_53930C.1.pep
SRXSPPAQQQXPPNHQQFAATPATLAQPHQLLPFGHLALTNPAASDQQHISGGAPLQIAY

SEQ ID NO: 318924 - protein, 83 aa, Zea mays
  Clone ID: MRT4577_53931C.1.pep
KNPVFLGLRKREPRLFGLCKNPKGPQRGGDEANFIPQVSLRKKLFCSVPGGILFFLKTLEAPRMWVFPLPNGSVAPKSILVTP

SEQ ID NO: 318925 - protein, 97 aa, Zea mays
  unsure (1)..(97): unsure at all Xaa locations
  Clone ID: MRT4577_53932C.1.pep
AAIMRIGLREMRAFSKLLFPSVRDNTFFESCGVADLITTCRTYLHHCQLXSNRWILKSECSMTVGGRNRRVAEAFARNGGKKVCFALNYTKWVAAVA

SEQ ID NO: 318926 - protein, 57 aa, Zea mays
  Clone ID: MRT4577_53933C.1.pep
NKNPTFQKPIIGIIIHTFKFLNYLTYPTMLTFFYHKSMILPQFYKFTDMLIFTLSQI

SEQ ID NO: 318927 - protein, 104 aa, Zea mays
  Clone ID: MRT4577_53934C.1.pep
PERDRLKVRDRASGRNLREAHQQAPAGRLSSSAGENGRQKPSRAPPHNIERCSHKHSRKLVGLGSWRLRLDGPRTGPAPGLQGQPTLRPRVPDAWRTRGTVGDR

SEQ ID NO: 318928 - protein, 60 aa, Zea mays
  Clone ID: MRT4577_53935C.1.pep
NFKQWSYKPKQTINLAADYAYDKPTHHSNICYSLQTTVAFPMNCERTYNTWCRLASSTNC

SEQ ID NO: 318929 - protein, 74 aa, Zea mays
  Clone ID: MRT4577_53936C.1.pep
LTELGKTAHNILDLTNVAKPYSADSAKQPHHNDIIHINKYIIHINKSHMIWWGQVKCHSVHNTGRIMYIHNPIL

SEQ ID NO: 318930 - protein, 108 aa, Zea mays
  Clone ID: MRT4577_53937C.1.pep
LHALRPPPGTPARPHPPNPIATLLNPVSSQEREEVVAERALHCVYAEAVAMAEENHVVAGAGQKLYWSRQTRATAVQRLRFAAHCCLHALTCTLPKKRDENNHTLWDS

SEQ ID NO: 318931 - protein, 50 aa, Zea mays
  Clone ID: MRT4577_53938C.1.pep
RERVSLGEVKVIHVPSSLQFADIFTKGLSSSLFKEFRSNLQIKPATDSTG

SEQ ID NO: 318932 - protein, 47 aa, Zea mays
  Clone ID: MRT4577_53939C.1.pep
TDDQIAWAPEMDPCSNGSHLITYREREYACRHRSGETSHVNQGAQRQ

SEQ ID NO: 318933 - protein, 102 aa, Zea mays
  Clone ID: MRT4577_5393C.1.pep
TAANRAGQSAAGRKRADRRIVQKGKSKKIQQQSSAQNPSARQVCGSGRKGLAPMVVSLKQTMSGNNEDGIMEYSMGSQEANCGNSFLREYVGKRHFSNEEAS

SEQ ID NO: 318934 - protein, 43 aa, Zea mays
  Clone ID: MRT4577_53940C.1.pep
HNESQHTERFALRNHVVARAFMNCAVDRREGVKYQRSIETRPA

SEQ ID NO: 318935 - protein, 60 aa, Zea mays
  Clone ID: MRT4577_53941C.1.pep
GFGGSEALAHCMITSSPYNKGLRWANEKCWGHHVQPLVYRLLGVGKIDHGQHLIHSSLWG

SEQ ID NO: 318936 - protein, 242 aa, Zea mays
  unsure (1)..(242): unsure at all Xaa locations
  Clone ID: MRT4577_53942C.1.pep
MGSLLSSLLGKPEPPPPMVLVPPLFDYPPIAARTRMSVPAYELMFGKLPLGNLFEDYFDNAGTVSSRIMLKPLEDPHVDLVANVSAAGDKASGTEVKGDALFRWQKYLYDPHTFVDVQVSTSEPMLKLRSCAYFPEYRLGAFGTIPLLMGNRLSSEDYAVLGVRYGSENLSIGASFVPLPESAEVPYGAWLVGRKGSLCAGAQYKPLSGNKHPMPYTDPXKNWNYAISYGVGLTSPLSPSFI

SEQ ID NO: 318937 - protein, 74 aa, Zea mays
  unsure (1)..(74): unsure at all Xaa locations
  Clone ID: MRT4577_53943C.1.pep
LGRDYKIILDAETHRXRRESLRAYSTXDAIPSPMDGMNCTELDGRNIIAYDAQIRGLRRGSGGAYSGPRPDRGG

SEQ ID NO: 318938 - protein, 160 aa, Zea mays
  Clone ID: MRT4577_53944C.1.pep
MSASRFIKCVTVGDGAVGKTCMLISYTSNTFPTDYVPTVFDNFSANVVVDGSTVNLGLWDTAGQEDYNRLRPLSYRGADVFLLAFSLISKASYENVAKKWIPELRHYAPGVPIILVGTKLDLRDDKQFFSDHPGAVPITTAQGEELKKLIGAAAYIECSS

SEQ ID NO: 318939 - protein, 43 aa, Zea mays
  Clone ID: MRT4577_53945C.1.pep
EAGRPLLWGVGTTDTLTVENAPNMVYGMQSPRFRKAPPLLLHK

SEQ ID NO: 318940 - protein, 186 aa, Zea mays
  unsure (1)..(186): unsure at all Xaa locations
  Clone ID: MRT4577_53946C.1.pep
MTSQQSPPPPAAKSQRPPAPTTVTALDDDLLREIFLRLPSLPTLVCAALSCRTFFHAVRSSPAFRRSFREARPPPLLGLFFDPDGPSIPAFAPLRRRSDPDLAAVVRGADFFLTRLPDDDDDDDALPEWVIQDCRDGYVLLEHGSLEQYAVYNPLTRAPGSXIPQPPDKIFDDGNGVASLSWGLNP

SEQ ID NO: 318941 - protein, 64 aa, Zea mays
  Clone ID: MRT4577_53947C.1.pep
TQHGCLAAAICFISQPRVRAHLDEIACTQPHHAVNSQSPTAIVAESLHSIARSCSQHTADRAIS

SEQ ID NO: 318942 - protein, 330 aa, Zea mays
  unsure (1)..(330): unsure at all Xaa locations
  Clone ID: MRT4577_53948C.1.pep
MARNETAAAAAPGVDFHLPDEILAVIPTDPYEQLDVARKITSMAIASRVSRLEADAARLRRDLADRDRAEADLRACLADSDARLATALDENAKLAKERDSLAATVKKLTRNLAKLEAFKKQLMKSLSEDNLLQLXKPVKITTXDLTARVPFWKDEVSSSNTSSDASSRSTITESVHDGGYQFSITPYMPPKLTPGSTTMISSSSGSPRAYSTGPPSPKFLSGPTSPAKARSEGQLAFSSWQGSSSHQYSAPTSPPQRRSFTGRPRIDGKEFFRQARTRLSYEQFGAFLANIKEFNAQKQSREDTLSKAEEIFGTEHNDLYISFQNMLNRN

SEQ ID NO: 318943 - protein, 176 aa, Zea mays
  Clone ID: MRT4577_53949C.1.pep
SSSSNTSSDASSRSTITESVHYGGYQFLITPYMPPKLTPGSTTMISSSSGSPRAYSTGPPSPNFFSGPTSPTKARSEGQLTFSSWQGSSSHQCSAPTSPQRHSFTGRPRIDGKEFFRQARARLSYEQFGAFLANIKEFNAQKQSREDTLSKAEEIFGTEHRDLYISFQNMLSRNQS

SEQ ID NO: 318944 - protein, 118 aa, Zea mays
  unsure (1)..(118): unsure at all Xaa locations
  Clone ID: MRT4577_5394C.1.pep
FAKAISGADYGAVSYRSKCHNFPQLLKDSCHSRFYSVENADIPDLTFEHVQGLNAFLDISDXKRNHDSSIPALKGDSLDSQPQDFNFPKKNTFAACGGQPQKTKGFSPXAQKISTKTS

SEQ ID NO: 318945 - protein, 61 aa, Zea mays
  unsure (1)..(61): unsure at all Xaa locations
  Clone ID: MRT4577_53950C.1.pep
STRRSKGSIGHAFTVGIXTGDENETSFXPLLGHEISVLVELILGHLRYPSRRPRPPGFSGP

SEQ ID NO: 318946 - protein, 214 aa, Zea mays
  Clone ID: MRT4577_53951C.1.pep
MSSPKLQKSLPCLSSLFSGATQNVLRFPSPDPARGGQELPMIRTATVRARLLLSRSYVAQAQAASRWPLVRWKASHLGSVRSFYQMDITRQYKNKSLTARGCHSSPESQELAMKSCVPCNSKDLGPMSEDSAKKLLEQVNGWELITEGGVLKLHRTWKVKNFVKGLEFFQLVAAIAEEEGHHPDLHLVGWNNVKIDVWTHSVAMEKPNVEDTSP

SEQ ID NO: 318947 - protein, 102 aa, Zea mays
  Clone ID: MRT4577_53952C.1.pep
MGEGRAGDGLIKLFGKTIPVPETAAVGEAAKVRLVSLLPPPNISLSQAQPTFELERTVGVSACLDIASDQGNQNFFSHLLGLGSIVRGSWFFCCPVAPSGFM

SEQ ID NO: 318948 - protein, 230 aa, Zea mays
  Clone ID: MRT4577_53954C.1.pep
MSSPKLQKSLPCLSSLFSGATQNVLRFPSPDPARGGQELPMIRTATVRARLLLSRSYVAQAQAASRWPLVRWKASHLGSVRSFYQMDITRQYKNKSLTARGCHSSPESQELAMKSCVPCNSKDLGPMSEDSAKKLLEQVNGWELITEGGVLKLHRTWKVKNFVKGLEFFQLVAAIAEEEGHHPDLHLVGWNNVKIDVWTHSVRGLTSNDFILAAKINHLTLDGIIRKKAK

SEQ ID NO: 318949 - protein, 68 aa, Zea mays
  Clone ID: MRT4577_53955C.1.pep
NSKDFSITLQKNINFYPHDIMFYHKLMTLRHATVLSHSFLQSLNPTHLNTLLLYILYSRYIYSNCHPL

SEQ ID NO: 318950 - protein, 331 aa, Zea mays
  unsure (1)..(331): unsure at all Xaa locations
  Clone ID: MRT4577_53956C.1.pep
MKTTSSHGLHAASASLCTPYLLLLPLGLLAVLLALPSLGSSYARSQGLGVLCRSAAAGTDGGGGGDYSSSVASGAGDEKKAAVAETPPPPRPELSLLVGVLTVPGRRERRDILRTAYALQPAAPAARVDVRFVFCSVTDPVEAALVAVEARRHGDVLVLDCAENMNDGKTHAYLSSVPRLFASAPYDYVMKTDDDTYLRVAALVAELRXGPRDDVYLGYGFPVGDDPMPFMHGMGYVVSWDVARWVSANGDILRHNDTHGPEDLLVGKWLNIGGRGRNRYDLKPRMYDLNWFMDNFRPDTIAVHMLKDNRRWAATFTYFNVTAGIHTNSLP

SEQ ID NO: 318951 - protein, 103 aa, Zea mays
  Clone ID: MRT4577_53957C.1.pep
IVRYTYDLVSPDTPLIHLLTKKKRFQPSMHEHIPGGPSRILKLQHALRCPYSGLAATTHARPVRPRPSLCAAFGTMQGHDRTPPSLLPGTSHGQASPWDGVAV

SEQ ID NO: 318952 - protein, 144 aa, Zea mays
  unsure (1)..(144): unsure at all Xaa locations
  Clone ID: MRT4577_53958C.1.pep
MDVCLLRYSVVLDPSSIPSAVTRAXFSLPLWPQPLGPNAHDLSLAYDPTSLTKLDPPLVPPESANHGGVLVNEDIDGDEIRVARRFSLRNDDVGQLANNVGTSQMPMVSCAASIAYEAHLAALVAELPPTPVLEILSREMRQRS

SEQ ID NO: 318953 - protein, 120 aa, Zea mays
  unsure (1)..(120): unsure at all Xaa locations
  Clone ID: MRT4577_53959C.1.pep
IFPANQNRSIGPKKGLPFNXIRGAQRKRNYLDRASFILRWGVSQMGVIGQQKVVENGQPPGPVNFQKNKCRSKINLLFCKIPHHLVPTDISLPLEKVGAPLYPQCNFYGANKKMVPFFLA

SEQ ID NO: 318954 - protein, 82 aa, Zea mays
  Clone ID: MRT4577_5395C.1.pep
KIGGLLLGIAQYKNPPFFKSPPPYLEGVPLILHKGLDLKTWGNATNKMGLYIERVPAYEGGEAIYVCLNFRECNPELILGVA

SEQ ID NO: 318955 - protein, 38 aa, Zea mays
  Clone ID: MRT4577_53960C.1.pep
FGPLVFTVISFPRSFSNPFYEPLYFQSLLWVNYICPPI

SEQ ID NO: 318956 - protein, 103 aa, Zea mays
  unsure (1)..(103): unsure at all Xaa locations
  Clone ID: MRT4577_53961C.1.pep
TAEAAEAAASAAHTMDGPGQLFFFEIXRLKQGLERQIEQSXLTLXQFQEKGINLCKKKEHVIKERDAAFQEAHMWRIELVKSTEQSLFHETTFFPAEEKAIIS

SEQ ID NO: 318957 - protein, 77 aa, Zea mays
  Clone ID: MRT4577_53962C.1.pep
AVLFHNTASPLAPMIQLFLSTLRVVSNNMQDCNHDFLLQLQLLSPAALSANVISPVRTHHCYLGQLVNKIVFNMDFS

SEQ ID NO: 318958 - protein, 45 aa, Zea mays
  Clone ID: MRT4577_53963C.1.pep
IIQIWAFKYYLVSMQLMEMEMEVKTCELIYISHGNTWVGVEYLVC

SEQ ID NO: 318959 - protein, 68 aa, Zea mays
  unsure (1)..(68): unsure at all Xaa locations
  Clone ID: MRT4577_53964C.1.pep
HIKAMSTVQXGMPHKCYHGKTGRVYNVTQHADGIAVNXQLKCKILATIINVRIEHITQSKSRDSFMSR

SEQ ID NO: 318960 - protein, 89 aa, Zea mays
  Clone ID: MRT4577_53965C.1.pep
MAGAAKASWMVAMSVGAVEALKDQAGLCRWNYALRSIHRTAKARANVRGGVSQGARQLPASAAVAEKRRAEKTEEGLRTVMYLSCWGPN

SEQ ID NO: 318961 - protein, 217 aa, Zea mays
  Clone ID: MRT4577_53966C.1.pep
MEIFQVTTMILQHPLLTYFFSALLLTQLLTAPTAAAETTVKVSTTPIFPEIPQGQARKDFQVLVRVEAPARPEARIPIDVVAVLDVSGSMNDPAAAPTERTRTTSRLDLLKTAAKFMVAKLEDGDRLSIVAFSDRPVRELSSGLLYMTADGRRNAIRSLDQLEARGGTALVPAFEEAVKVLDGRQGDGGDRLGFIVLLTDGAEDASGSFTLSERPAR

SEQ ID NO: 318962 - protein, 43 aa, Zea mays
  Clone ID: MRT4577_53967C.1.pep
NMMRFECKETLIDVHNKFLPQYLSQKKGHLTNSGQNYIISNYN

SEQ ID NO: 318963 - protein, 65 aa, Zea mays
  Clone ID: MRT4577_53968C.1.pep
VPFMIGHLDVKILLNYIVGWNKGGMFLGLMQHLGVLVVRDGLRDSVDRIEADITPAPWRSGWSEK

SEQ ID NO: 318964 - protein, 139 aa, Zea mays
  Clone ID: MRT4577_53969C.1.pep
SSQLNLIRSPFPLWQRLINCYPASCSVFPHSHHSLFCLSDSPPHKDHYHSHVHPRHRLASLIDDEKKLGDCQFDLWKQSYVTHAPLCTASSSAAAGWTWSRAAAPRMSRAFDDYYIKDCGVISAPEVSRGGPITMTTRH

SEQ ID NO: 318965 - protein, 111 aa, Zea mays
  Clone ID: MRT4577_5396C.1.pep
KKKKFYLRENKGTGPGGRPGNPRGPSKRNAGHPPRQVGPGGDKNGQSAPRETEGPGLFKGKLNGKGANHRWGPGSKFQGPQKRKGLGLKKKPPHPKPRKKKWGVENYGPKL

SEQ ID NO: 318966 - protein, 42 aa, Zea mays
  Clone ID: MRT4577_53970C.1.pep
ALVVFASFGWYFLLCRKRGSPACYLAPLLIIYRCTDDLSKIF

SEQ ID NO: 318967 - protein, 91 aa, Zea mays
  unsure (1)..(91): unsure at all Xaa locations
  Clone ID: MRT4577_53971C.1.pep
PHHPALIPASTHSFEATYIVVSSCCYGASYATKMGSLHMLVGPSACVANATIFPHCSHASIAGPLTSYLLSRIASVXENPTVYIYWLLQEN

SEQ ID NO: 318968 - protein, 130 aa, Zea mays
  Clone ID: MRT4577_53972C.1.pep
AVMAGTEDSSDGPSTPSSHDKQSPPAGTPNIIVAAKGKGKVAVEAKGKGAANVKGKAPMQHSSSSEHEDGDDDDDDFIRPRKRKKDQGHSISDAEDKGHFSTMRCSPSAVYDLIEPMSENYKQRLTNMGV

SEQ ID NO: 318969 - protein, 69 aa, Zea mays
  Clone ID: MRT4577_53973C.1.pep
EALKTHMNAASLTQEAVGHVWNISRHIMGLLKVDTLMSWSKTSLRHCFYARLSTNSCTWSVWMRIECQH

SEQ ID NO: 318970 - protein, 185 aa, Zea mays
  unsure (1)..(185): unsure at all Xaa locations
  Clone ID: MRT4577_53974C.1.pep
LAPPVQVMAGTEDSSDGPSTPSSHDKQSPPAGTPNIIVAAKGKGKVAVEAKGKGAANVKGKAPMQHSSSSEHEDGDDDDDDFIRPRKREKDQGHSISDAEDKGHFSTMRCSPSAVYDLIEPMSENYKQRLTNMGFGEFLRFYNRSLEDRSLGMFLMKNVKNDPLRIEFFWEGFXHHSRSSAPDLW

SEQ ID NO: 318971 - protein, 77 aa, Zea mays
  Clone ID: MRT4577_53975C.1.pep
IKRGAIPDKLRPPLRSPPFYSNPKERPPGESTMTGGGRPNRPDQRDLGELSAVSDLDHLGGGTLAADPWADPWADPW

SEQ ID NO: 318972 - protein, 76 aa, Zea mays
  Clone ID: MRT4577_53976C.1.pep
VVHYRSFYRRLLVTSKCRITLYIVRLTLFMVVHLVRLLLLRTAAASARLGGLRLRRRPRVDDGVQGPPAAPPGRSL

SEQ ID NO: 318973 - protein, 81 aa, Zea mays
  Clone ID: MRT4577_53977C.1.pep
LKDTRTRKVCLLVCKLNLLRTRTHAPEGPSSQMRLMGNQTGGKPEFTCPLWPWALRYTYFTLPTANKVKCEKTKVTDGPLN

SEQ ID NO: 318974 - protein, 158 aa, Zea mays
  unsure (1)..(158): unsure at all Xaa locations
  Clone ID: MRT4577_53978C.1.pep
RXPTRTXXGXNAXARKRXXAARXANTEKNGXXAXQTXRNNXXAXTGRATTAXTXXXXXSXXXGXTXPAPXXXXPXPKAPRXGDGSKAGEXXAAKXXAXXXXXRXAXXGNGQAXRRDAHASXXRGGXPPGPGDEAREEXAXXXARTXNRGSXAGXXGPR

SEQ ID NO: 318975 - protein, 114 aa, Zea mays
  Clone ID: MRT4577_53979C.1.pep
LIEILFLSGSYLRLRIDPNFERTNRAFYPPDRSLNSSSFFFLFSPLLPDPFALPILEKKLESLFGGCIVPILKLSFFLILPSFSSVPLVVVLFESTTLLHSFFSFRANDDLLSR

SEQ ID NO: 318976 - protein, 53 aa, Zea mays
  Clone ID: MRT4577_5397C.1.pep
AAGLYFRGQRIWQAAMDDLMAQGMRYANQVFTLNFPYSSGTHFSLAFQRSFSC

SEQ ID NO: 318977 - protein, 142 aa, Zea mays
  unsure (1)..(142): unsure at all Xaa locations
  Clone ID: MRT4577_53980C.1.pep
MAHGVVLLLSLASVAEVVVDGDMNEPLIREVVPGVRCTXLELNXEYHFLSFKQRIVEFYKDADEHEYRLCVFKDILRREARQQMLHSTTEQXITNLSDLTXTEFHRSYVDLRKSRXRALLRELXESWHQATVLPTDXLIDDY

SEQ ID NO: 318978 - protein, 116 aa, Zea mays
  unsure (1)..(116): unsure at all Xaa locations
  Clone ID: MRT4577_53981C.1.pep
KLFFQAPKGTAPLFLGLSFWGPPPSSFSGPPLSFLLGPXRGSRQSRAQFSFNGPKGREPLKPPLLLVFPFKRVRAPPFFCPGLAPPFFGFAWGPSEPVGGFLPFSDPCPFPLQVFF

SEQ ID NO: 318979 - protein, 104 aa, Zea mays
  Clone ID: MRT4577_53982C.1.pep
MEEVEQQLTKKQIEEFREAFSLFDKDGDGTITTKELGTVMRSLGQSPTEEELQEMVDEVDADGSGAIDLQEFLTLLARQMREASGADEDELREAFHVFDQDQNG

SEQ ID NO: 318980 - protein, 118 aa, Zea mays
  Clone ID: MRT4577_53983C.1.pep
NAVQGRFFPLLHVPPRRRRSRSICTTGTRLRWWRRGRWLWPRMERACWAPWRGAGAGRSIFSAPFGVEKGTCEGHVKRLQAAAEKRGQGLRGDHSRLLPRAFDLYFFFFLVFQSNPIR

SEQ ID NO: 318981 - protein, 226 aa, Zea mays
  unsure (1)..(226): unsure at all Xaa locations
  Clone ID: MRT4577_53984C.1.pep
PSSMSARXXSREREXLWNGTRVAAAPGGSXXPRPLAPLPGLRAEGPDADAVPAAGCRASASAGLQDSGMAAAGAHESPLPRARSGSAGRRRTRGVPRLRSPLPSYGCCLPPSSCIPPAAPHSPPPTRNSTSARRPIWEIKEGRWGMEVRVWKWMRAWRRSGVAGLEKGKPSRERVGSFRTCPPDADAEASSPAPAPHRTTGERERERKCKLETGKERERRTAPGSA

SEQ ID NO: 318982 - protein, 128 aa, Zea mays
  Clone ID: MRT4577_53985C.1.pep
GRAPPHQTLPQTHSPAPPHPSTAISASDPAPVHSHRSSSEIERGKLRSERFLSRVAGKVHSTSTLSSSSVLPRSVFFLEQTARDPWPFRSRASDLLFLLRFGSSSSSVLLVVRLVAKRGSFSTPPLRK

SEQ ID NO: 318983 - protein, 79 aa, Zea mays
  unsure (1)..(79): unsure at all Xaa locations
  Clone ID: MRT4577_53986C.1.pep
DNAENRIPNGMSADKDVAKGNMGKKNVKKSVXRXKIYIFRVLNQVLPDIVMSSKAMWIMNSYINDFYEKFAPEAAKFSR

SEQ ID NO: 318984 - protein, 120 aa, Zea mays
  Clone ID: MRT4577_53987C.1.pep
TPADPSPARPRPSTASSASHPAPVHSHRSSSEIERGKLRSERFLSRVAGKVHSTSTLSSSSVLPGSVFFLEQTARDPWPFRSRASDLLFLLRFGSSSSSVLVVVRLVAKRGSFSTPPLRK

SEQ ID NO: 318985 - protein, 123 aa, Zea mays
  Clone ID: MRT4577_53988C.1.pep
PAPPTLPQTHPSPSVPASSASHPAPVHSHHSSSEIERGKLRSERFLSRVAGKVHSTSTLSSSSVLPGSVFFLEQTARDPWPFRSRASDLLFLLRFGSSSSSVLLLVVRLVAKRGSFSTPPLRK

SEQ ID NO: 318986 - protein, 124 aa, Zea mays
  Clone ID: MRT4577_53989C.1.pep
RGPLHASVDAKLQTLCQNIAASKKGAKKHASASAAAAAATSSSAPTSNCSSSPSSDDASSSCCLESAAESSCPSPSPSASPESSTVPEMQQLDFSEAPWDEAAGFALTKYPSYEIDWDSLLAAN

SEQ ID NO: 318987 - protein, 69 aa, Zea mays
  Clone ID: MRT4577_5398C.1.pep
LLPKKNKNYMIQPSSSPLLKDSIISLSSPSPSSSPKISINPLPLQNHHHHQCTLGHLQCHPNWGYHRHH

SEQ ID NO: 318988 - protein, 78 aa, Zea mays
  Clone ID: MRT4577_53990C.1.pep
PRLWSSCRTVKKLTRMADQRLCDSTTGVACASDAVCVTICMRRAGQNYVYGHCYKEPSGGRSCLSTVRCDPLSVAAPL

SEQ ID NO: 318989 - protein, 107 aa, Zea mays
  Clone ID: MRT4577_53991C.1.pep
SPQRAPWGATVPSPSGALREACLLFFPKPSSRWAVVPPPRGFVPKVGPPPPGSGAPPIPFLARLFFSPLFSYPGRDHQCRSRGLPPPLGFPRLGFFPLGLGAAVSVQ

SEQ ID NO: 318990 - protein, 228 aa, Zea mays
  unsure (1)..(228): unsure at all Xaa locations
  Clone ID: MRT4577_53992C.1.pep
PLVAVLLPPSRRRRLLLRRELPVRRGRRGGPAEPFPDGVPRGRPXKLYRGVRQRHWGKWVAEIRLPRNRTRLWLGTFDTAEEAALAYDQAAYRLRGDAARLNFPDNAASRGPLHASVDAKLQSLCQSIAASKKGAKKPASAAAAASSSAPTSNCCSSPSSDDATSSCLESATESSCPSRSPSPSASPGPTVPEMQQLDFSEAPWDEAAGFALTKYPSYEIDWDSLLAN

SEQ ID NO: 318991 - protein, 71 aa, Zea mays
  Clone ID: MRT4577_53993C.1.pep
NSKQISSWHSLHKSQKTCRVTTRPMRSEEDQQGVRQQSTMGEAEPPRPRSGEPSKTLAPRRRPSASASQCR

SEQ ID NO: 318992 - protein, 70 aa, Zea mays
  Clone ID: MRT4577_53994C.1.pep
KKKNHLSLKHKCFSGQSESEITIVQHPGRYSCDVVRNTQDPHNSKQTLGQRPHYFLHQKANSYTSTLISQ

SEQ ID NO: 318993 - protein, 39 aa, Zea mays
  Clone ID: MRT4577_53995C.1.pep
NQIFIMTRNFLLVHPLSLYNSSVSYAGQYTDTTYIYMWY

SEQ ID NO: 318994 - protein, 64 aa, Zea mays
  Clone ID: MRT4577_53996C.1.pep
FLVIKLKGIGHGISKAEVDAQDIATKRIAEQMGCACYIGYLRHLDSCIYQDGEHISSSLGGMTK

SEQ ID NO: 318995 - protein, 138 aa, Zea mays
  unsure (1)..(138): unsure at all Xaa locations
  Clone ID: MRT4577_53997C.1.pep
ANARSGGAVTDESMLKFWELQAKRLDRYLTMQRDDKFKGIVVDQGRDRATSYKDFTNSLPENDXRYATYDFDSVTGKNVQKSRIFYILWSPCYAKAKSKMLYARSNQEIESGLNGIQVELQATDASEISLDEIKDRAR

SEQ ID NO: 318996 - protein, 34 aa, Zea mays
  unsure (1)..(34): unsure at all Xaa locations
  Clone ID: MRT4577_53998C.1.pep
ATELINLGXLSTPINSRGFGGIGWISISNKLKSF

SEQ ID NO: 318997 - protein, 67 aa, Zea mays
  Clone ID: MRT4577_53999C.1.pep
DEVFGASMGGPGAPEVLWGLAIPVEGGPSKAPSPSPVGFPPPACEGLVPARPVTRCLSRQSKPRWIL

SEQ ID NO: 318998 - protein, 69 aa, Zea mays
  Clone ID: MRT4577_5399C.1.pep
QPRAPNLDLWLPWGLKKKHPKNIFRGRGIPGWNPWKKPLANNPQVNIWGQKIIAQIFPSPNHKRFVPFF

SEQ ID NO: 318999 - protein, 46 aa, Zea mays
  Clone ID: MRT4577_539C.1.pep
AKTAPPPRKSDRRRGAQPGRQGAQGPQYAEEPVEWKGIQIRKKDVS

SEQ ID NO: 319000 - protein, 148 aa, Zea mays
  Clone ID: MRT4577_53C.1.pep
RGSTQASRMTLPTAEEMPVTEFVDADPHGCTQSAADPNVGAPSVADPNGGAACVANVDEEEEEDEVPLTRKNSRQFIASGESSGVPSPALSALIGLQELSLANFDQTLEDMVPEDLLPEPVDDGVMDVCADVLDAGLMSSRPSSTLER

SEQ ID NO: 319001 - protein, 40 aa, Zea mays
  unsure (1)..(40): unsure at all Xaa locations
  Clone ID: MRT4577_54000C.1.pep
RGGRRRRHDQXRIQLRRQVLIHGHLCKPLLMSPRVLPSVR

SEQ ID NO: 319002 - protein, 225 aa, Zea mays
  Clone ID: MRT4577_54001C.1.pep
MPPKKITAPGAALQPMDTNQETLYLREARSQKRKATSPTLQEEELDQEIRDMEIIHQQVQRKKEKMARLADLQRKIDESTEEKLKDMLVTSFPGFQTKPVTAQALFQCTQDHEEYLQAYVRRFLRLRAQAPIVPKEIVIEAMIKGIRPGPTSQYFARKPPQTLEKLLQKMDEYIRADNDFRQRREEAYRFSEMTRGFGGRIHPRHVRSIHSSSQNDDKGSQLQRP

SEQ ID NO: 319003 - protein, 54 aa, Zea mays
  Clone ID: MRT4577_54002C.1.pep
LAPMCAATRLRRMLHQTLQLQSWQLQTPAVAAETVHVDHYTAAATCWRLGLDNR

SEQ ID NO: 319004 - protein, 63 aa, Zea mays
  Clone ID: MRT4577_54003C.1.pep
VEKCLFYAKMDKSTVHDAGGAGGTTKIPRAQHQVQDFFNGKELCKNINPEEADTYGAGCQAAV

SEQ ID NO: 319005 - protein, 238 aa, Zea mays
  Clone ID: MRT4577_54004C.1.pep
MPTGAATSLLGLNPPHPSCSSLRVLPPTAAATASFAPPFLRRSRPSAAAAIHASTLVSDSAFPTSPTPPPRAPAPPEPPSTVVHAGRSKKKKNPQGGGGRIEGSGDVRREAKAKARIRSRRMGENAFFRRKRRAAATGQADAFTDAELEMIGMGYDRAVRFMDGPDDPRLRHPHDWYKYGRYGPYNWRGIVVGPPIRGRFSDDRVSLMEQVHDHEEWDRIEQFDMCNQFTHRLNELSD

SEQ ID NO: 319006 - protein, 160 aa, Zea mays
  Clone ID: MRT4577_54005C.1.pep
MASVNSWTLEIASPVAPQRLFRAAVMDWHTLAPKVASHVVASAQPVEGDGGVGSVRQFNFTSVMPFSFMKERLEFLDADKCECKNTLIEGGGIGVAIETATSHIKVEPAAGGGSVVKVKSTYKLLPGVEVKDEIAKAKGSVTAIFKGAEAYLVAIPDAYN

SEQ ID NO: 319007 - protein, 77 aa, Zea mays
  Clone ID: MRT4577_54006C.1.pep
ARAKKTPSNGVLCKLAYFKSRKPCSRFCIQKPCPCFCFISKKRHVSHMYSLPLRQGPKVLFLFFLKKHEGLEAPSGN

SEQ ID NO: 319008 - protein, 175 aa, Zea mays
  Clone ID: MRT4577_54007C.1.pep
YITVLSVKAVSVASQWLELLQQDIRGRLAALKRSRKRVRNALQTELPHLISTEFSSSQENEPSIAHSSEAGPTGKTVSEEHAARWRSLFLQMERTLQEEGRHLEIRLKEVQGMLQNCDKGLQQVTCEAPLLGPMAELWKLKNPEISESEWAVQAAAASIYSTCNLVMKTENVPCF

SEQ ID NO: 319009 - protein, 189 aa, Zea mays
  unsure (1)..(189): unsure at all Xaa locations
  Clone ID: MRT4577_54008C.1.pep
MASVNSWTLEIASPVAPQRLFRAAVMDWHTLAPKVASHVVASAQPVEGDGGVGSVRQFNFTSGKCPAQTSMLSLSPDRSNSXARRRAVALAVMPFSFMKERLEFLDADKCECKNTLIEGGGIGVAIETATSHIKVEPAAGGGSVVKVESPYKLLPGVEVKDEIAKAKESVTPIFKGAEAYLVANPDAYN

SEQ ID NO: 319010 - protein, 329 aa, Zea mays
  Clone ID: MRT4577_54009C.1.pep
MSSTTSPASGVSGEAPPPRIVEDCLGLVQLMSDGTVKRAPACLASADDAAPVGCKDVVYDEARNLSLRMYVPSSSRAGNGGAEKLPVLVYFHGGGFIVGSFASPEFHAACARLAAALPAVVLSADYRLAPEHRLPAALQDADALFSWLGAQEQQADPWLADAADLGRVFVSGDSAGANIAHHAAAAPGRRLAGCVLLWPFFGGERRTRSEAACPGDAFLTLPLYDQMWRLALPAGATRDHPAANPEAGELPPLLVAAGDRDMLIDRIREYVARARARAAAAGNRRVDLVEFPGAGHGFAILEPDGEDAGELVRVVRRFVHGGDAAGPPP

SEQ ID NO: 319011 - protein, 106 aa, Zea mays
  unsure (1)..(106): unsure at all Xaa locations
  Clone ID: MRT4577_5400C.1.pep
SGGVSGFGAVRLAMLFTXLRELLQMLEGGHSVWICEWASVFXSGGWSGLGCPVRFQSTSSGSHLWPRVRVCYGTPFLRNRTSDAGKLXLNQPGTMVELXAIVGEHL

SEQ ID NO: 319012 - protein, 56 aa, Zea mays
  Clone ID: MRT4577_54010C.1.pep
AYDTMSVQLTNSPAHSVTGILAYEGQWDGQHHAALTTSHHVRQPSQHVIALNSTWF

SEQ ID NO: 319013 - protein, 60 aa, Zea mays
  Clone ID: MRT4577_54011C.1.pep
SARGKAVSNLLIVYLHSWSRSASPWHPLSASIMVGHGRVCWCLSRGYPLFLLLLCHGSCH

SEQ ID NO: 319014 - protein, 45 aa, Zea mays
  Clone ID: MRT4577_54012C.1.pep
NNSSHFVQAIPGASHKLQFGIDLTFKEACLANSIINLLCNDTLSS

SEQ ID NO: 319015 - protein, 165 aa, Zea mays
  Clone ID: MRT4577_54013C.1.pep
GKGYLFFLKNGVKKPKPLFGPLWLPFKGQPSPGEFFFKKKGPPKDFNIGLKARPKSPLTNWVLGNPSLGKTNQKFSRVWQPFLPKLAGFFFYPNPGGMKKRATFFGKRVGNRNLGVPNKTKGGGDHPRGKNLGYGNLWPPPLPRGGKFQNSPWLKGGEPLGKKKI

SEQ ID NO: 319016 - protein, 72 aa, Zea mays
  Clone ID: MRT4577_54014C.1.pep
DLPPRGRVIKLQSPPPPLVAVSIGLPGFIQRIYKFGVVCGSSWYPRYCLCYGTTVVDPAPASRGSRQLVSRT

SEQ ID NO: 319017 - protein, 102 aa, Zea mays
  Clone ID: MRT4577_54015C.1.pep
AGLSWMSCACWKRRTRLLKCGTDAGSQVQKERGLVVPCAAPSMFSRLARPIWWVVVNHWVGSFASQVGNEPHGMQEHEWNACRHGWYACVRWVDALILHLER

SEQ ID NO: 319018 - protein, 87 aa, Zea mays
  unsure (1)..(87): unsure at all Xaa locations
  Clone ID: MRT4577_54016C.1.pep
SVRGSCGASSVCSPFLGXCFEWLMHXCRPDWTPYGWAQLQALXQLSWHHIKLGESLHRYQPTYCVALLSFLQKQPEGELAGLVAWPR

SEQ ID NO: 319019 - protein, 98 aa, Zea mays
  unsure (1)..(98): unsure at all Xaa locations
  Clone ID: MRT4577_54017C.1.pep
PSTPAPFPXKVSSTTTDSFPTFSALQHIIHSIHTFTPLNXFVSITLTTFIITIATLPFIFNHLNTTTNLIAINSNIEIIKDQINTIYPKSIQYAQAKI

SEQ ID NO: 319020 - protein, 105 aa, Zea mays
  Clone ID: MRT4577_54018C.1.pep
GEQQALAGIITERDYLRKIIVQGRSSKSTKVGDIMTEENKLITVTPETKVLRAMQLMTDNRIRHIPVIKDKGMIGMVSIGDVVRAVVHEHREELQRLNAYIQGGY

SEQ ID NO: 319021 - protein, 70 aa, Zea mays
  Clone ID: MRT4577_54019C.1.pep
ELYELFCMYDCSLLDINPLSETVDNNLEAANAKLNFDDNAAFIQKDIFSLGDTTHDYPSEAAAVKANLYY

SEQ ID NO: 319022 - protein, 131 aa, Zea mays
  Clone ID: MRT4577_5401C.1.pep
MDPHRLTGPAASDADDADDWDNDDFVIPSFSVEESDIGDWEASRATDPQPPPKPSKDTENIYLGPHGAPPSRAKKAEDTWATAGYREKNNKAREAEQKAFGTGRNSKGGNTGEFHRHNGGSHGKDPYKRSA

SEQ ID NO: 319023 - protein, 131 aa, Zea mays
  unsure (1)..(131): unsure at all Xaa locations
  Clone ID: MRT4577_54020C.1.pep
KRKTITQGQGSSSICRRYVPPQGTPARPGGGQLSYQRPALHIPQATPHTRQAAPTGTPTRPTGQGTTTVTTCFKCGEVGHYANACPKRNPNTPARSNXLKQXQQTLATGQGSNNARVNQISADATVDDDDI

SEQ ID NO: 319024 - protein, 265 aa, Zea mays
  unsure (1)..(265): unsure at all Xaa locations
  Clone ID: MRT4577_54021C.1.pep
MMESKAAIILAAAVLAVLFAPAXVRRAAPPAPAPMSLPPTPAPAPAPHYVDLAELLSVAGPFHTFLNYLEKSNVIETFQGQANNTKVGITVFVPKDSAFSALKQSTFSNLTADQLKTLLLYHALPKFYSLAEFKNLSSLNPVNTFAGSPYTLNLTDDMGSIYVQSMWSRPKIASSVYATRPVAVYALNKVLLPMQLFSKDPPLAPVPAPAPEPGASDAPGPAAGKAGGLTGGKGDSTSAARDTGAVGVASSLLLAAAAGCLILQW

SEQ ID NO: 319025 - protein, 598 aa, Zea mays
  Clone ID: MRT4577_54022C.1.pep
MVSGAGHGGYGGGDDGQAVDFRGNPADKSRTGGWLGAGLILGTELAERVCVMGISMNLVTYLVGELHLSNSKSATVVTNFMGTLNLLALVGGFLADAKLGRYLTIAISATIAATGVSLLTVDTTVPSMRPPACLDARGPRAHECVPARGGQLALLYAALYTVAAGAGGLKANVSGFGSDQFDGRDPREERAMVFFFNRFYFCVSLGSLFAVTVLVYVQDNVGRGWGYGVSAVAMALAVAVLVAGTPRYRYRRPQGSPLTAVGRVLAAAWRKRRLPLPADAAELHGFAAAKVAHTDRLRWLDKAAIVEAELAGKQRASAAAASTVTEVEEVKMVAKLLPIWFTCILFWTVYSQMTTFSVEQATRMDRHLRPGSGAGAGGFAVPAGSFSVFLFLSILLFTSLNERLLVPLAARLTGRPQGLTSLQRVGAGLALSVAAMAVSALVERKRRDAANGPDHVAVSAFWLVPQYFLVGAGEAFAYVGQLEFFIREAPERMKSMSTGLFLVTLSMGFFLSSFLVFAVDAATAGAWIRNNLDRGRLDLFYWMLALLGVANFAVFVVFARRHQYKATSLPASVAPDGTGHKEMDDFVAVTEAVEGVDV

SEQ ID NO: 319026 - protein, 46 aa, Zea mays
  Clone ID: MRT4577_54023C.1.pep
GGVVFFFFFFLFFLILTFANLLLSKLINTIFTYHLCSVKWGRNIEK

SEQ ID NO: 319027 - protein, 178 aa, Zea mays
  Clone ID: MRT4577_54024C.1.pep
LRFFFFFFFFFFFFFLIFIYVGVFGSYTIGNQMGAPTKGSHGAARHRKGKEPKKPRRDTGGGQNKRTNTGQAPGGKQRGQNRRKTGAQNGTDSRRAARKKHPKQWPPGGHHKGARGGQHKTPPDNTRPGAGGGPPKKSRKTPEPTGTKHPPKPGRQGTGRTRPGGAEKPRKPGGPPPP

SEQ ID NO: 319028 - protein, 57 aa, Zea mays
  Clone ID: MRT4577_54025C.1.pep
EASLRVVSISPPQYLWSSATAWRMWLFAKKWAVPSKLTLVKNGCLQVGRPHGSRARG

SEQ ID NO: 319029 - protein, 170 aa, Zea mays
  Clone ID: MRT4577_54026C.1.pep
PARKSPFSLRTLSSLSSPAARAQVHSFLSASRAGLPVLPAAKFSSQAPPCGSHHMGAHLPTPWRHLLLRGSELAPVFLLAQPSSADSRWPPTSISAPWTCAPDPHVPAPPHLLDGRRHPQRSLLQHVSMAVKSLPWSSTSLRSDVGHRTALLVLNLADAIFLVHVLALGH

SEQ ID NO: 319030 - protein, 79 aa, Zea mays
  Clone ID: MRT4577_54027C.1.pep
PPSSFQLPKGKPPPPWARSPGGSVNHGSYKPPMGLGRLGPPPYGGCQRISCSCHKSGQCWFKKEPVFLCVGPPQNYAKS

SEQ ID NO: 319031 - protein, 80 aa, Zea mays
  unsure (1)..(80): unsure at all Xaa locations
  Clone ID: MRT4577_54028C.1.pep
PDTVTILPQCSHAPIASLLPPYLSPAVSSVCENPILXPYKIQQAIAACILPSSPLILQQSSALLQHLPLVHLLAQNIQAQ

SEQ ID NO: 319032 - protein, 36 aa, Zea mays
  Clone ID: MRT4577_5402C.1.pep
HWPCDITTAIYEEIYLSTSVLGLEHVADRTRAVETG

SEQ ID NO: 319033 - protein, 74 aa, Zea mays
  Clone ID: MRT4577_54030C.1.pep
RACQSWQHASELIIATTTNTARGPQAENDGTLRARRKGQQDANWQSRARELRRGRREQRNMDATGNWTQSEQRK

SEQ ID NO: 319034 - protein, 50 aa, Zea mays
  Clone ID: MRT4577_54031C.1.pep
ILKKKLLLGFFGSRKKNIFWFKKKRSKVKSYCCKKNPLHFFEPKSPKVFF

SEQ ID NO: 319035 - protein, 61 aa, Zea mays
  Clone ID: MRT4577_54032C.1.pep
RKITKIPQSMVTIVLAHNHSNATSPHSSTMVLVYNHSNATSIHSSKYDDTAPLRQQLNHQN

SEQ ID NO: 319036 - protein, 68 aa, Zea mays
  Clone ID: MRT4577_54033C.1.pep
KSEVFNNPLPHIQYIQSTRIQKLTPLQHQPRLETYTLIQHGPGALHHDLHQHIHRHLRPLNGRPPASL

SEQ ID NO: 319037 - protein, 72 aa, Zea mays
  unsure (1)..(72): unsure at all Xaa locations
  Clone ID: MRT4577_54034C.1.pep
SAPLLFFCSLSFDRGFKEKNNXFIPAPRCMKYSTFCYAPINPNNKKKETASFGDMADSSIFTFPRIHVREPY

SEQ ID NO: 319038 - protein, 99 aa, Zea mays
  Clone ID: MRT4577_54035C.1.pep
FNNFSFVQYYDKNGARLATNVRAAGNGGDTRPTSLHGHPSSYPNKTPYPKKYSFTNYTPPLTIHQSDTSTNSCQPYCNEYDLSPSPLNGVAVALRRTRG

SEQ ID NO: 319039 - protein, 100 aa, Zea mays
  Clone ID: MRT4577_54036C.1.pep
VSILAGFRDHSLYKGHQVFLYKRAQIFVADLWGAFKGQNYGEFHDINSITIFADYIVPAVLRELGVLKYGSNLSCSIDSNSEIVPGSEEEVEIRACSIYA

SEQ ID NO: 319040 - protein, 55 aa, Zea mays
  Clone ID: MRT4577_54037C.1.pep
AAAFAQRVGRLERPTARDLAMVPRGVRRPRWRRGPAARSTATWACIACPLSGYYP

SEQ ID NO: 319041 - protein, 92 aa, Zea mays
  Clone ID: MRT4577_54038C.1.pep
IGYLEAGRDIVLLPLISNRCSRVGGQLASSACRGHSSSLRRYSYPVNNAPHVRRRNHLAPLLGGPKNDITHISCLGIAAHLHQVTTCPARSP

SEQ ID NO: 319042 - protein, 30 aa, Zea mays
  Clone ID: MRT4577_54039C.1.pep
QQKRHGSLRPYFTQHPLTATISNSDNSSNT

SEQ ID NO: 319043 - protein, 67 aa, Zea mays
  Clone ID: MRT4577_5403C.1.pep
ICISSSYITRSIMSASSASCSSFANRSTDALIRTDMLAPTAFTVCSCPLYQALSVTEALGRSINKVK

SEQ ID NO: 319044 - protein, 81 aa, Zea mays
  Clone ID: MRT4577_54040C.1.pep
PRFNILKTPSRKMNLMGGIDLKKIPKKINGAPETKPKPVCTKAGMFPPPKKRVPVTQKDFKMAVAKVIKKNPEKNMSLPKL

SEQ ID NO: 319045 - protein, 121 aa, Zea mays
  unsure (1)..(121): unsure at all Xaa locations
  Clone ID: MRT4577_54041C.1.pep
MARDNPRSXDELMGPTNQRIMPKVNGIFPGEGANFPYQGFIGLGPKEVIQXCPTIKGFFNPVLPPKKKVPNFGFYKELKLRTSSLTFAFPMANLSLWASRTPAGVGWKFARDGNPNFLGNN

SEQ ID NO: 319046 - protein, 36 aa, Zea mays
  Clone ID: MRT4577_54042C.1.pep
PYNLFEDFFLVRQIFLPCIFCFKMMKDSYDDVLGII

SEQ ID NO: 319047 - protein, 96 aa, Zea mays
  Clone ID: MRT4577_54043C.1.pep
LQTRTGRSCSIVASNNEFTVVVQIPHLSIVVHRLVFVTSVIALTFHQDVAISFVNIPFIEIVVAGRASSLCSCGSLPWYLSCICGTSRFTRVQRGQ

SEQ ID NO: 319048 - protein, 68 aa, Zea mays
  Clone ID: MRT4577_54044C.1.pep
GAMAGSPSLSRAEKEVNSLIHQVGDDYGLKVSVGLPQETAQAIPAAKDKEKVAEDALFPPLAELKAPG

SEQ ID NO: 319049 - protein, 102 aa, Zea mays
  unsure (1)..(102): unsure at all Xaa locations
  Clone ID: MRT4577_54045C.1.pep
SFLVPPPFFFFFFLSLLSFFLFCFFFLFFVXPASFLLCXLSXXRRXLXXALRSSLGLXXAXLXVXXXXSLXLFCVAGLLFSLSXSSPPACVLXSAXSSAAGS

SEQ ID NO: 319050 - protein, 84 aa, Zea mays
  Clone ID: MRT4577_54046C.1.pep
AKREPTTTTFFSCGWSAETCPKFPFTRNRQRRKKSLKQETRLPTYYHTMSLWMGSERERERERMFHTDPLQSYARPCECPHASS

SEQ ID NO: 319051 - protein, 136 aa, Zea mays
  Clone ID: MRT4577_54047C.1.pep
NVAIPHGAAKGEDEEASLQGCRSRRRIPRRCSTVSAYGCTADGMQRRMGRQGAVWGEEGRRRWKGRFPSMDGRRRGWKVPMVRHRFRRPTVPTQIPSSVDFGEDFFQRRFLPWARLGLRQGSYRSHQVRVDLGEDV

SEQ ID NO: 319052 - protein, 51 aa, Zea mays
  Clone ID: MRT4577_54048C.1.pep
AGLSRYHLRALFEFREQLIFLQERQVHTSTFFFQMKHMTLNLKDYLLSSET

SEQ ID NO: 319053 - protein, 111 aa, Zea mays
  unsure (1)..(111): unsure at all Xaa locations
  Clone ID: MRT4577_54049C.1.pep
PGKRRSPKPKKIKPKPKKVKXLYLLPLYXVKXAAGKVTRLPKECPHTECGSGVFMPEHVAHHYCGKCVLTYVYIPEGVIACPIMLYPSTFEAFRWWLPVIVSRLGLRTLKL

SEQ ID NO: 319054 - protein, 126 aa, Zea mays
  Clone ID: MRT4577_5404C.1.pep
MSSMMNALSNWLVNPRRNPLARLHMNAVSSRLRKYGLRYDDLYDPYFDLDIKEALGRLPREVVDARIQRLKRAMDLSMKHQYLPEDLQAQQVPFRGYLSDMLALVKKESAEREALGALPLYQRTLP

SEQ ID NO: 319055 - protein, 75 aa, Zea mays
  Clone ID: MRT4577_54050C.1.pep
MLLRVCCMQMYRTVKNTERPAASSDLADGFENGSAGEICDDNSLDLHGAGRPESAAARHGRLAACNDHGSSTGAH

SEQ ID NO: 319056 - protein, 164 aa, Zea mays
  Clone ID: MRT4577_54051C.1.pep
SAQPRSCVRPLAPQPLTPALGPCNSSCSPWLTRRISRVPASSPSPLQATEFHSAHPWLLAVTASASLRDLGRSLPWHGSLPLPWPHELPLPCAQLQQDTDSRMDGRVLSSPATPAPCPALGFELAHSCARRSCRYCTVAVAVELALLFASPFVELIQHSLRRGC

SEQ ID NO: 319057 - protein, 85 aa, Zea mays
  unsure (1)..(85): unsure at all Xaa locations
  Clone ID: MRT4577_54052C.1.pep
IVGKYGTRYGASLRKQIKKMEGYHYSKYFLEFWGKFTMKRKAVGIWGXCMDXGKVKXAGGAYTMNTASAVTGRSTIRRPKEQTEA

SEQ ID NO: 319058 - protein, 95 aa, Zea mays
  unsure (1)..(95): unsure at all Xaa locations
  Clone ID: MRT4577_54053C.1.pep
IRKYYNNAKLLIRKLPLQRLFVSSSHLDLKKDLRVQSARRCVALEEXAEAYLCXIFEDTYLCVFHGAXVAIMPHDIQLARRIRGERAYPSSPGIC

SEQ ID NO: 319059 - protein, 191 aa, Zea mays
  Clone ID: MRT4577_54054C.1.pep
SSAQPRSSVRPLSPQPLTPALGPCNSSCSPWLTRRISRVPASSPSPLQATEFHSAHPWRLAVTASASLRDLPKSLTWHGSLPLPWPHELNALPGRAELPQSLSHVLSFNKTRIPGWMAAFCLPQPRLLPAQRSASSSPIAARGVLVDTVPLPLLWSSPYSSRRRSSSSSNTRFVVAVRRLFILLSQLLCHG

SEQ ID NO: 319060 - protein, 48 aa, Zea mays
  Clone ID: MRT4577_54055C.1.pep
FPFMVDQTAGNLNIWQAHVHCWAAFIALPYKVLIIPPYNELVGDLFIE

SEQ ID NO: 319061 - protein, 222 aa, Zea mays
  Clone ID: MRT4577_54056C.1.pep
ALRLLPSLPCDPPPETPLTLDSIVELGAFKGHSLRHHWKMGPQKVETMRRPRPERGERRIDAAIDHLAQYGFAKPQIRKVINDLLQLYGRDGWVFLEEGSYSIVLKVLEEQAQQDQTQEAAAAEEALPQNGMEVSRVNGEAPNEPPSTLELQASPSSSPLLPVPPAKGPPCARTPCYGWISEESESESESEDGEMLSDVTGPVIFAKKDIPNPVGTLPSRRK

SEQ ID NO: 319062 - protein, 109 aa, Zea mays
  unsure (1)..(109): unsure at all Xaa locations
  Clone ID: MRT4577_54057C.1.pep
MAPSCLASPGATLCRPRRPRCRVACSAADACGSTPGGGGGAIPFCXXXXTXAERGAXXPATAASXRXXPXXTEPNRGERAXXGNTXGQANGGDDKPXEXRGXEXTNEKT

SEQ ID NO: 319063 - protein, 89 aa, Zea mays
  Clone ID: MRT4577_54058C.1.pep
RPTRANVNTTTVTNQLDVYTTIIFLGARVDFDMALARTILNNAINARAQTLDNPVLAATLKTDPKLHSMISTFAADSAVSCESNRLDVA

SEQ ID NO: 319064 - protein, 218 aa, Zea mays
  Clone ID: MRT4577_54059C.1.pep
FKMPTIVSVDLECSRCRAKIEKVLNRIQEKGEFCIDDIDLDEKSNKVKVTGPFDPDKLADKLCCKACKIIKQIEIVEPPPPPPEKPKKEEPAPPPPKKKEEPAPPPPAKVEPPPKEKPPPPAPKEEPKPAPAPAPPPKVVEVPYPWPYPCPYPYPAWPSDCCCHHGHGGCHCCSCGKAPEAPAPPPMPQYVPQPYPCGGGGGYRIVCEEDPSYACAIM

SEQ ID NO: 319065 - protein, 143 aa, Zea mays
  Clone ID: MRT4577_5405C.1.pep
MSSMMNALSNWLVNPRRNPLARLHMHAVSSRLRKYGLRYDDLYDPYFDLDIKEALGRLPREVVDARIQRLKRAMDLSMKHQYLPEDLQAQQVPFRGYLSDMLALVRIFLLHSIGISYAFELESLHSPFFNACKGPNLHDMNYA

SEQ ID NO: 319066 - protein, 83 aa, Zea mays
  unsure (1)..(83): unsure at all Xaa locations
  Clone ID: MRT4577_54060C.1.pep
YIXSKHVILDQLIYCFNKHHLINQHACVHTFICTKTVAQHSQRDIKLKKSVCFSLTHTPHNTYVWQPARPPLLLFNHHHKLDR

SEQ ID NO: 319067 - protein, 224 aa, Zea mays
  unsure (1)..(224): unsure at all Xaa locations
  Clone ID: MRT4577_54061C.1.pep
DMVAFSCCNYDGGSTENNAMENARERSWRGKFHRPGRVINPEANRXNGRCPLTPLEVGMMLRGMGFDNTTSLYVASGKIYNAEKYMTPLRRLFPFLQTKHALVTPEELAQFKXPFSLIIPVLKQILEXXPPLIXVGMHQEMXARYXXXKLAFLXTLXXHSSRLAALXDYTXRLXXXECFVMXQGSNFXXXFXMGXXRYMYGXXCKANKXDKRXLVQLFDNPNIR

SEQ ID NO: 319068 - protein, 149 aa, Zea mays
  unsure (1)..(149): unsure at all Xaa locations
  Clone ID: MRT4577_54062C.1.pep
YVAAQALGSSLXPQGGGRRFFTCGACTGALXVLLGXLRLRPPWWGACAVCEAYXTAXWTAEFXNLCDWDAHLLSRAPGRTVHVHVLGNVLTANPATVDHMRGGRFXNYRKGAPFSGILADFLGRGIFNVGGDSWLFXRKLAAGELASPG

SEQ ID NO: 319069 - protein, 46 aa, Zea mays
  Clone ID: MRT4577_54063C.1.pep
VTLSTITEHWLDYIQRISISRYTKKCLSGYTRQRLLIDPTLVLLRS

SEQ ID NO: 319070 - protein, 140 aa, Zea mays
  unsure (1)..(140): unsure at all Xaa locations
  Clone ID: MRT4577_54064C.1.pep
IEILATVLQDRWRANRQCRRRLFGPCFRRVVVLASWPWSRAQRRPRDHGPPAARRRIAGLHARTYGRPGGRGPLCARILMSASATWGAGGMWLKGEAEPPAPAPRVXRVRWREAQRSAGPCAPVRRPGQPELDSNGRPLS

SEQ ID NO: 319071 - protein, 163 aa, Zea mays
  Clone ID: MRT4577_54065C.1.pep
FRPGSPRPPAGAGAPGGKLYHPPWQKKKRPFGQNHCQKSRPPPKFSLGNNPPGGPPRGAQGPPLKFPSQGGFFPWPAPGGSKRNKPWHVGSVLVCFSPKFFSKWVPRSKALCFLKGIPAPPKKVSPFLKPGTSRFFFGSQPKNPPRLEFLYWVFLIINNRAVF

SEQ ID NO: 319072 - protein, 37 aa, Zea mays
  Clone ID: MRT4577_54066C.1.pep
FKVRISNPLDMPGLTRGPRSHFVAPARHLKKPKFPPG

SEQ ID NO: 319073 - protein, 57 aa, Zea mays
  Clone ID: MRT4577_54067C.1.pep
LPKSSCGQLRPSVSHLDFYSPQGLVSPAVSSNHVASSIVSVLTPLGIDVIPEAFSRP

SEQ ID NO: 319074 - protein, 102 aa, Zea mays
  Clone ID: MRT4577_54068C.1.pep
DVPSCCMCACSCTVQSHRLCLWPLGIYRLFLSCHLSISRICCAGLVLCHDFPSFFGNGLRALPGSVCCLRATRVSAYSSDFLPYPAFLFRLTFLECLPWLGS

SEQ ID NO: 319075 - protein, 202 aa, Zea mays
  unsure (1)..(202): unsure at all Xaa locations
  Clone ID: MRT4577_54069C.1.pep
MAAAAAGATRRAASSLASRCLLSRPAASPAAVPSALRRADGARGLLPGLLQRFGTAAAAEEPISPSVQVGETQLLINGKFVDAASGKTFPTLDPRTGEVIARVSEGDAEXVDRAVVAARKAFDEGPWPKMTAYERSRILLRFADLIEKHNDEIAALETWDNGKPYEQLPHIEVPMLARLMRYYAGWTDKIHGLIVPADGSYL

SEQ ID NO: 319076 - protein, 110 aa, Zea mays
  Clone ID: MRT4577_5406C.1.pep
RQSSRLPTCKGRKLNEATCTPPMQTPGTDRPYILNTPPRSNPDPRQLGHTTAKHKDATRYILIIRVPGGHRATHQCSADKEDNGTHAPYPQVSLGASTIGRTMSKDLYMT

SEQ ID NO: 319077 - protein, 102 aa, Zea mays
  Clone ID: MRT4577_54070C.1.pep
WVWEHSSLFGLIQWKPGSLMGLGALESVFLVRLVLIGNGFYYFYSVSVSLNCSYSSLNSKSALIRSDYSMYQLLNIFIPFLFSLSNPYKCTYWLVQVVTAAV

SEQ ID NO: 319078 - protein, 75 aa, Zea mays
  Clone ID: MRT4577_54071C.1.pep
YTVTIVHIYPTFGGGGIPPTGIQHKTALPHYQSGQIEPSFSGGRAWSKALFRANWHEDNRTPIQGAAHLSSHRTR

SEQ ID NO: 319079 - protein, 78 aa, Zea mays
  Clone ID: MRT4577_54072C.1.pep
RTKPIGANRARQRHRSINPNIGGTGAQHQPLIACGGGQTSASCPATAGNMATASAAGICFCGFTKRLQQLLWREAAPY

SEQ ID NO: 319080 - protein, 115 aa, Zea mays
  Clone ID: MRT4577_54073C.1.pep
MDSSIENKINRAPAAKVGGMRVAAPDHPVPVVRKEHERKKADSEEESNEDERELEKTDRFEHEQQTRMAAAERQAKMQQNQPKHEPINNFRQNQNIQVNQPILHTHSKSGAAAQN

SEQ ID NO: 319081 - protein, 81 aa, Zea mays
  Clone ID: MRT4577_54074C.1.pep
DSNSLKGREPNGTLEKGEFYEKNVAPNQAGGKNPEGFPLWFRDIPFWREGNPTIGRYIGYDQRKWRAGIFCTSGNGNCLPP

SEQ ID NO: 319082 - protein, 105 aa, Zea mays
  unsure (1)..(105): unsure at all Xaa locations
  Clone ID: MRT4577_54075C.1.pep
GVAWSPPPRARARTRTPWTSAGCSPSPPXPLRAAAGAXPPPRRSGSPPPRPHPAYSSAPRPAPPGRAHHSSSSPPCPAXAAPSPPAYASLPXSRTSSPARPGTPA

SEQ ID NO: 319083 - protein, 52 aa, Zea mays
  Clone ID: MRT4577_54076C.1.pep
SQSHEPPVAGSPPACTPIKLLGSFFIHSATLSVSPAVSFGDTYVSSRTRGDR

SEQ ID NO: 319084 - protein, 36 aa, Zea mays
  Clone ID: MRT4577_54077C.1.pep
FHHPCSSARCSLALASQQRAHHLSPRHDDDGRLVES

SEQ ID NO: 319085 - protein, 110 aa, Zea mays
  Clone ID: MRT4577_54078C.1.pep
MRVGAPIGRPGVSLLGSGGDIGGELGRKNNFPRESPLPFDPPRGGPSREPQRTAPKGGKMPPGGGGAGGKKKKKKKKKKKKKKKKKKKKKKKKKIKKNKKKKKKKKKKAC

SEQ ID NO: 319086 - protein, 55 aa, Zea mays
  Clone ID: MRT4577_54079C.1.pep
PIRIYISSIMVSSVPAVIISKSSTMTCVEKALPLIYVYPSGYVETRSQMLSYEVG

SEQ ID NO: 319087 - protein, 110 aa, Zea mays
  unsure (1)..(110): unsure at all Xaa locations
  Clone ID: MRT4577_5407C.1.pep
PPFLRTIPFFTPNSQLHPTWRTLAGGALPESDNPTSKGSLFQVNDQSRCGSCCSLSTIPTVESINHIVTXNLISLSEQDLVYCDTSYNQGCNGGLMDYAFESIINNGGIY

SEQ ID NO: 319088 - protein, 54 aa, Zea mays
  Clone ID: MRT4577_54080C.1.pep
PIHTTTLSTLTSHLRISLNHYTTMTGFQSPHQLTLPNPHPPPPNHPPSPPNPPI

SEQ ID NO: 319089 - protein, 37 aa, Zea mays
  Clone ID: MRT4577_54081C.1.pep
RSTMGTMAKSRHYYPPTDKVARRDGTLSSIPSSCPIP

SEQ ID NO: 319090 - protein, 180 aa, Zea mays
  unsure (1)..(180): unsure at all Xaa locations
  Clone ID: MRT4577_54082C.1.pep
MSSCDDDHASLLRSHAGASSPSCPSPRGSAGHQHHADVEADEATVTASPRLASGGGGVRGLLRNLERRMSARGSGPGRRQHQHXALSAARSLRGDRVAVSAAAGESGGGXDDDELGDGAPPEWALLLIGCLLGLATGICVAAFNRGGHVIHEWAWAGTPNEGAAWLRLQKLADTWHRILL

SEQ ID NO: 319091 - protein, 195 aa, Zea mays
  unsure (1)..(195): unsure at all Xaa locations
  Clone ID: MRT4577_54083C.1.pep
MPPPPPPPPPPPNPLPLPNPKPNPLPNPPPPPPPPPPPPPPRPPXPLPNPAPMPCPLPPPRPSPPPRPPPLPNPAPMPCPLPPPRPPPPPAPXTTAAPAPSPPLXPSPPPXPDLPNLPLISPPPVPTPVHFQFDPASLRLSSLPTGQTSSSWAPIAVGDGETNAPRIDTSFLPETRRPLHFDLPSFRPQAPPPPL

SEQ ID NO: 319092 - protein, 97 aa, Zea mays
  unsure (1)..(97): unsure at all Xaa locations
  Clone ID: MRT4577_54084C.1.pep
DALRRALEAVKAAVDAQAEVGRALKAGGGASKADVDSADEALKALKVEAGAAARRLKQAVGAVAVGAARXRXMRQAVVNTLERKLIYIPSLKIYXGV

SEQ ID NO: 319093 - protein, 47 aa, Zea mays
  Clone ID: MRT4577_54085C.1.pep
MREPRSALGAPVEPVSTACTDRLSGALSALGLTAVLLVELGSGQVLV

SEQ ID NO: 319094 - protein, 74 aa, Zea mays
  Clone ID: MRT4577_54086C.1.pep
VLQGQHCLFSFFLIAQVFNISLFLALCIKPFDTEASVLGMFLRHVCVQAKLFSRRFGRRLTSSILCNVHEAHST

SEQ ID NO: 319095 - protein, 40 aa, Zea mays
  unsure (1)..(40): unsure at all Xaa locations
  Clone ID: MRT4577_54087C.1.pep
IDEFEETTIHDVKIIXEEIRRKQAHAAHEAYEQDDYIQTT

SEQ ID NO: 319096 - protein, 83 aa, Zea mays
  unsure (1)..(83): unsure at all Xaa locations
  Clone ID: MRT4577_54088C.1.pep
LFWGSGTGWAPAQAVXAWLSERPRYDYWTNSCYGGSMCGHYTQIMWRSTRRVGCAMVACYGGRGTFITCNYDPPGNYVGLRPY

SEQ ID NO: 319097 - protein, 85 aa, Zea mays
  Clone ID: MRT4577_54089C.1.pep
SVFFYSFGRNQKTFRPKKSAPSGSKGAQLRKHIDATLGSGNLREAVRLPPGEDINEWLAVNTVDFFNQVNMLYGTLTEFCTPESC

SEQ ID NO: 319098 - protein, 65 aa, Zea mays
  Clone ID: MRT4577_5408C.1.pep
HTMGLIELVLARISLYLKHMYQLLPLAEYWNLHHRLFNRASIGRRCSSMNSTHESPCFFTVYRRP

SEQ ID NO: 319099 - protein, 69 aa, Zea mays
  Clone ID: MRT4577_54090C.1.pep
WIIRVPRLVIMRILTLLVREPSLPYGRSTRWAFCLGLEPGDAPQIAGPEGGGASSRSIRRQPGQLQLGE

SEQ ID NO: 319100 - protein, 215 aa, Zea mays
  Clone ID: MRT4577_54091C.1.pep
MSLFGLGRNQKTFRPKKSAPSGSKGAQLRKHIDATLGSGNLREAVRLPPGEDINEWLAVNTVDFFNQVNMLYGTLTEFCTPESCPTMTAGPKYEYRWADGVQIKKPIEVSAPKYVEYLMDWIEGQLDDESIFPQKLGTPFPPNFKEVVKTIFKRLFRVYAHTYHSHFQKIVSLKEEAHLNTCFKHFILFTNEFGLIDKKELAPLQELIESIIVPY

SEQ ID NO: 319101 - protein, 215 aa, Zea mays
  Clone ID: MRT4577_54092C.1.pep
MSLFGLGRNQKTFRPKKSAPSGSKGAQLRKHIDATLGSGNLREAVRLPPGEDINEWLAVNTVDFFNQVNMLYGTLTEFCTPESCPTMTAGPKYEYRWADGVQIKKPIEVSAPKYMEYLMDWIEGQLDDESIFPQKLGTPFPPNFKEVVKTIFKRLFRVYAHIYHSHFQKIVSLKEEAHLNTCFKHFILFTNEFGLIDKKELAPLQELIESIIVPY

SEQ ID NO: 319102 - protein, 188 aa, Zea mays
  unsure (1)..(188): unsure at all Xaa locations
  Clone ID: MRT4577_54093C.1.pep
PGKQTRSTYIARQPGYSWEPIVMMAXSATAGCPFQGLKFTDRLTIDRRSYISLGNVSNGGRIRDMQVWPDYSNKKLQTLDDLTSLGTDDLLNHVDYLLVNGWIPCLEFSKDGFXYRKNSSFTCYYYRRYWTMXKLPMIDCNXDATQVYKXLQEAIKSYPDAFHRVIGFDNIKQTQCVSLIVYKPPGSD

SEQ ID NO: 319103 - protein, 55 aa, Zea mays
  Clone ID: MRT4577_54094C.1.pep
HSDVQRIVTSLPMAMNVLSIWERDRLTVRRILAVFDFGAEEEKEHIIHRGSYLNM

SEQ ID NO: 319104 - protein, 159 aa, Zea mays
  Clone ID: MRT4577_54095C.1.pep
MGGGWPRPGGALAAPRFLLRALLLCSLLAQPHPSRAFFFFGGVRTSAHVPQHRGGGREEKVPMTVVVPDYSPRPAPLGLSPSAAPAPAPAPVLGSDGDEDGTPRLPSERRGTGAPSSTGHSATAQEPAAATSADFISSSPAVPLPAGVTESATALPMTT

SEQ ID NO: 319105 - protein, 78 aa, Zea mays
  Clone ID: MRT4577_54096C.1.pep
LISFGFRIGLIRNTIIPIHICTLWLHDLLQMWNWHAPRNSDLISFGFRIGLIRRLIIPIHICTFLPPYFKTKAIGIPR

SEQ ID NO: 319106 - protein, 32 aa, Zea mays
  Clone ID: MRT4577_54097C.1.pep
FIHLIAKKFYISITIVSASNGESFVLSMIVTA

SEQ ID NO: 319107 - protein, 184 aa, Zea mays
  Clone ID: MRT4577_54098C.1.pep
MEISFEAWEGVQRHGQDLADRLAQGFTGLLQVPPQFPWPPSPHKRMPFDIDLPVVPFGAGGPLGVPGKDFPFPAAAVSSVIDIGGRLGQAGAELGASVGGAVQHAVRRLPVPFRNGQIRRRKLPPPLPQPPADSVGEGAVGLFVERAAVDRCPLEAAAAAAAATTGSAAASSVSGPVSGEDLDE

SEQ ID NO: 319108 - protein, 79 aa, Zea mays
  Clone ID: MRT4577_54099C.1.pep
LAAAPFVADIRRPASQPYPPLRLQNYEMSASGDLHRRPDRAVFIWSGHAAAAATPPADVDAAAATSIRDTATTTRQLPP

SEQ ID NO: 319109 - protein, 111 aa, Zea mays
  Clone ID: MRT4577_5409C.1.pep
SSVSTAPPHDGNLPAHSRPQPSNEHVGSRVLQLTNRTGSRIKQQHHIKSSSGITEHNESSRAGPPPPPSGDCNLSPFGAADSRIWALPVPKKICSGSYAWSAPWADAWAYE

SEQ ID NO: 319110 - protein, 96 aa, Zea mays
  Clone ID: MRT4577_540C.1.pep
CGLTASRRVGVARFRRRGGSFPLPTEFFFFLLGFMCSDAHPNLFRTKLKGFCLLLLVETPLLLSQRMPIEIRTSVACIIICYWATNIFVKGNKKQG

SEQ ID NO: 319111 - protein, 68 aa, Zea mays
  Clone ID: MRT4577_54100C.1.pep
TNTGALITALFNNGLSCGACFKVRCDSVGGGSHSCLPCSFVVTATNFCPPNNALSFDYSCWCNPSFAH

SEQ ID NO: 319112 - protein, 129 aa, Zea mays
  Clone ID: MRT4577_54101C.1.pep
ARGKKKKKKKKKKKKKKKKKKKKKKKKKKKKKKKKKKKKKKTPPGRPPKRANSPKFPPPGGPPDHPFRGPNPPFGGPFTIPRPAVYHRRPGKTPGVPHLNPLATHPPFPSGGKTKKPPPEPPFPTLAPP

SEQ ID NO: 319113 - protein, 62 aa, Zea mays
  Clone ID: MRT4577_54102C.1.pep
FFFFQIKNALLCMPFSGTAYQKGRLFFVQTAAGQVNTVLRKRTNIRQKSCWGALPYIYNPPC

SEQ ID NO: 319114 - protein, 58 aa, Zea mays
  Clone ID: MRT4577_54103C.1.pep
FSYADAQLLANLKGFGYPLNGTFFLVFKLVNWSKPLIPPFFFEPWAEPWANPWPNAWR

SEQ ID NO: 319115 - protein, 164 aa, Zea mays
  unsure (1)..(164): unsure at all Xaa locations
  Clone ID: MRT4577_54104C.1.pep
NPVSYSEQHLIESNRLVVLCIVADPPPPPMQQVIXXLTQLVMVDPSXTYNRLQLLIXTGPTAAANEPACLRQQLLPXVAPTVAERSXAHCAEYLQQFTTCNXQVTVSNSGADLPQRLLPTNPLWGGNPLDAVLLLEQQXMPYNHVCGMNPVLKCNHTFFGGAIF

SEQ ID NO: 319116 - protein, 62 aa, Zea mays
  Clone ID: MRT4577_54105C.1.pep
MNAKMIYRNWSLVSLTAVIWGCFAIARLDCIFLLGGKEKFNGYMCHECERLKLQDKDEVGQS

SEQ ID NO: 319117 - protein, 108 aa, Zea mays
  unsure (1)..(108): unsure at all Xaa locations
  Clone ID: MRT4577_54106C.1.pep
GYRVRRTRSVLVDGKKWFQILLPFSQLATAGRASFLTQQQLLPFYQQVAANPATLLQLQQVLPFVQLAWTNPAASYQQHXVGGAFFEIANKMYFNNKVFWMMSAANHK

SEQ ID NO: 319118 - protein, 246 aa, Zea mays
  unsure (1)..(246): unsure at all Xaa locations
  Clone ID: MRT4577_54107C.1.pep
MTSQLQSTLLLLPLFAAAALGRGGDASTAPSLEFHHRFSAPLRRWVEARGRALPGGWPAPGSAAYVAALAGHDRHRAVSAAGGSSSDAPPLTFAEGNATLKVSNLGFLHYALVTVGTPGQTFMVALDTGSDLFWLPCQCDGCTPPATAASGSATFYIPGMSSTSKAVPCNSNFCDLQKECSTALQCPYKMVYVSAGTSSSGFLVEDVLYLSTENAHPQILKAQISLXCGQTQXGSFLDAAAPNGLF

SEQ ID NO: 319119 - protein, 82 aa, Zea mays
  Clone ID: MRT4577_54108C.1.pep
MGRRWVRTEVYPLFAGTDVDACMCRCQIFRNIAGYPEDMMDTAGRATRVLENHEEGRRYAMHGLRIFMHDKTSCIMPEGNRF

SEQ ID NO: 319120 - protein, 183 aa, Zea mays
  Clone ID: MRT4577_54109C.1.pep
FPPIFTLANPFRIFPMATTDLYTGQLSFSSSSSSDQELMKALEPFIRSASSPTFSTTSPFSYSSYSYPYSSVLPQDSYYLPATSSYTALPPPPLAPTATSFSQLPPLPQSSSSYSSPASSSCPTSSVDAASGLALNHLDPAQIHQIHSQLLAQRRQQQQRDQLAAAFLGPQAQPMKHAGAPPL

SEQ ID NO: 319121 - protein, 64 aa, Zea mays
  unsure (1)..(64): unsure at all Xaa locations
  Clone ID: MRT4577_5410C.1.pep
MSRFWNPGSDNPSTXLXDYEEEGXXFLPSSXSVSSSGFGYPSLKRQRQLLPVYKYRKAILYLVE

SEQ ID NO: 319122 - protein, 54 aa, Zea mays
  Clone ID: MRT4577_54110C.1.pep
MVRQHGEAWSTMFEEVGDDRVQSENSPLKLSNGDGDTSGIVSGLLVAEGSGCGG

SEQ ID NO: 319123 - protein, 204 aa, Zea mays
  unsure (1)..(204): unsure at all Xaa locations
  Clone ID: MRT4577_54111C.1.pep
MDTPQTENLQSETPELVGAAKEEEHGNHTVSDDGSILPVINGVVNGSEAVTKESQKTLTSKEPEASGIKNMLPGDLNILVQSSECTPNCQSHESFATSDPQPAVPTLVEGGKENNREQFDAQIHGQSNDTEVACDSTTATCEAVPGHAKTELDVKSDSLENSEPLPLSIQEYEPIYQGEEHILGTTNMVYENQEPVYEGGGXSC

SEQ ID NO: 319124 - protein, 94 aa, Zea mays
  unsure (1)..(94): unsure at all Xaa locations
  Clone ID: MRT4577_54112C.1.pep
MLLDTTAPLQQGGGLSEFSGLRSMTXMTMRWKATSDDFMSADIIRTYAVGTSGAPRRXPTEAKLTAAMNGIGRIGRIXLRCWHGREDALPVGDI

SEQ ID NO: 319125 - protein, 199 aa, Zea mays
  Clone ID: MRT4577_54113C.1.pep
FDRGYQCATTSTWICRCKFFSLFLKAMEAVEEANRAAVESCKKLVAVLSLSGGDAFRPMPVAAETDEAVARFGKVVAVLSGRLGHARARVGKRSPAPPVVDASCLLDHPSLAVAPRHTPNGGHLLLSATTPPLPPLPPHLLPPASMAMRSAAVPMTMRSQEAAPAPAVLLVPPCASNVTLTPAKKVDRSMFLETPLLEL

SEQ ID NO: 319126 - protein, 62 aa, Zea mays
  Clone ID: MRT4577_54114C.1.pep
NPGEPFNFPSQFDGNQGGSRPPPGGPSKGQTPPHGGPVQGDPGPPPNWGKPGQNPLPGGKWA

SEQ ID NO: 319127 - protein, 47 aa, Zea mays
  Clone ID: MRT4577_54115C.1.pep
SSDEGHEGHTFMIAVYVNKRRIIWNVRDNMNNYTTLSTHFYFIIMEK

SEQ ID NO: 319128 - protein, 46 aa, Zea mays
  Clone ID: MRT4577_54116C.1.pep
GDRILDYRPLGQVRQGYLGYQRWHPCLEQVDIRFCRLYVCEPLGAR

SEQ ID NO: 319129 - protein, 90 aa, Zea mays
  Clone ID: MRT4577_54117C.1.pep
LVCMLGVVENAVIHRCSLDRNKLTGATNVYTFYLAWRSPGLLLALGPSVGGPDYICCLRLTLHTLVGRVDSHAVSPRSEVTMKALRTEHS

SEQ ID NO: 319130 - protein, 212 aa, Zea mays
  Clone ID: MRT4577_54118C.1.pep
MVPSLFEKSRQHNYYFWLYYSKLSGGFVHTSVLQVFRENPSPIITSERVTNGVNFEQGKKFSNHRETLEGSIPENDLNLSDSDVGQPGRHDQLTASPRVRPGDGAGDGFVTSIRGLFNTQRRKAKAFVIRTMRGEGHNDEYQDEWSESDGEYPFARQLTITKAKKLIRRKFRPRVQKNPGLSMQDSLPSSPRETTPYQSDSSRSSYEDFHEQ

SEQ ID NO: 319131 - protein, 51 aa, Zea mays
  Clone ID: MRT4577_54119C.1.pep
LGTFNMLLRSLFTKTLLAFREWLDEVTSHAATHRQMLECCVGLDNTDSYHR

SEQ ID NO: 319132 - protein, 48 aa, Zea mays
  Clone ID: MRT4577_5411C.1.pep
LAASPLAKGNILGTFLWKGSRHLKYHVRITSIKLFRHWPGPMPSTLNA

SEQ ID NO: 319133 - protein, 38 aa, Zea mays
  Clone ID: MRT4577_54120C.1.pep
DDVTVKGFHGSEINQPQTPKTLNLAGMELRKEGGFGGT

SEQ ID NO: 319134 - protein, 67 aa, Zea mays
  unsure (1)..(67): unsure at all Xaa locations
  Clone ID: MRT4577_54121C.1.pep
PLPINQLTRSNSXANPQQRQQSLNPLAVANPXVAAFQQQQQSPPHNRFSSTPPATTRQQPIVGGAIV

SEQ ID NO: 319135 - protein, 316 aa, Zea mays
  Clone ID: MRT4577_54122C.1.pep
MAAAIDMYKYCNTSAHLIASSSPSDQELAKALEPFITSASSPYHRYSLAPDSYMPTPSSYTTSPLPTPTSSPFSQLPPLYSSPYAASTASGVAGPMGLNQLGPAQIQQIQAQLMFQHQQQRGLHAAFLGPRAQPMKQSGSPPAQSKLYRGVRQRHWGKWVAEIRLPKNRTRLWLGTFDTAEGAALAYDEAAFRLRGDTARLNFPSLRRGGGARLAGPLHASVDAKLTAICQSLAGSKNSSSSDESAASLPDSPKCSASTEGDEDSASAGSPPSPTQAPPVPEMAKLDFTEAPWDETEAFHLRKYPSWEIDWDSILS

SEQ ID NO: 319136 - protein, 60 aa, Zea mays
  Clone ID: MRT4577_54123C.1.pep
EEESGSAGSPPPPPPPTLAPPVPVPEMAKLDFTEAPWDETEAFHLRKYPSWEIDWDSILS

SEQ ID NO: 319137 - protein, 194 aa, Zea mays
  unsure (1)..(194): unsure at all Xaa locations
  Clone ID: MRT4577_54124C.1.pep
MAAAIDMYKYYNAHQIASSSPSDEELAKALEPFITSASSSSPYHRYSSSPSMSQDSYMPTPSYTSFATSPLPTPAATTSSSTPFSQLPPLYSSPYAAPSMVGQMGLNQLGPAQIQQIQAQXHVPAAAAXQQQRGLHAAFLGPRAQPMKQSGSPPLAPAQSKLYRGVRQRHWGKWVAEIRXPKNRTRLWLGTFDT

SEQ ID NO: 319138 - protein, 341 aa, Zea mays
  unsure (1)..(341): unsure at all Xaa locations
  Clone ID: MRT4577_54125C.1.pep
MAAAIDMYKYYNTSAHQIASSSSPSDQELAKALEPFITSASSSSSSSPYHGYSSSPSMSQDSYMPTPSYTSYATSPLPTPAAASSQLPPLYSSPYAAPCMTGQMGLNQLGPAQIQQIQAQFMFQQQQQQRGLHAAFLGPRAQPMKQSGXAAAAGAGXPAQSKLYRGVRQRHWGKWVAEIRLPKNRTRLWLGTFDTAEDAALAYDKAAFRLRGDTARLNFPALRRGGAHLAGPLHASVDAKLTAICQSLSESKSKSGSSGDESAASPPDSPKCSASTTEGEGEEESGSAGSPPPPPPPTLAPPVPVPEMAKLDFTEAPWDETEAFHLRKYPSWEIDWDSILS

SEQ ID NO: 319139 - protein, 749 aa, Zea mays
  Clone ID: MRT4577_54126C.1.pep
MMVGSSRHQLLQRKGKSVADKGAAAATTVAAEKVVVAVRAATREISKTAIIWALTHVVQPGGSIILLVVIPAHSSGRKFWGFPLFAGDCASGHKSMLDQKCDLSELCSQMLKKIDVYDIDKINVRYKLVSGSPSGVVAAECKQAQASWVVLDKDLKHEEKRCVEELQCNIFVMKRSQPKVLRLNLVGSPDKESKATCVVPPVLDGSTSKIATDVKEARSSIRGPVVTPNSSPDLETPFGSTEAGTSSVSSSDPGTSPFSASETNGSLKKEVQQTKDKIQHSDANISDSDSETLSPPANFSLQPWMSDILQGSASSRSLGKVPRKNRTATADVLLEKFSKLDLLNEINAMRSRSDLNFRGDVRDVVLLARNAPPGPPPLCSICQHKAPVFGKPPRWFSYAELELATGGFSQANFLAEGGFGSVHRGVLPDGQAIAVKQHKLASSQGDVEFCSEVEVLSCAQHRNVVMLIGFCVEDRRRLLVYEYICNRSLDSHLYGHNRETLEWTARQKIAVGAARGLRYLHEECRVGCIIHRDMRPNNILVTHDFEPLVGDFGLARWQPDGDMGVETRVIGTFGYLAPEYAQSGQITEKADVYSFGVVLVELVTGRKAVDINRPKGQQLLTEWARPFLEEYAIDELIDPRLGERYSENEVYCMLHAANLCIRRDPHSRPRMSHVLRILEGDMVVESGGSVTGSSDSGSRSWRMLNEQQHCQEYSSPAQQESQRAGEGKRSYSALRASWDRDKQSISNRY

SEQ ID NO: 319140 - protein, 74 aa, Zea mays
  unsure (1)..(74): unsure at all Xaa locations
  Clone ID: MRT4577_54127C.1.pep
GRVGARKIRFPTTGTEGLLMGILDEGTXLTHXLLRANVTTLLKLREESSNVLGKLQMLYYIPMHAPFTESSQRA

SEQ ID NO: 319141 - protein, 237 aa, Zea mays
  unsure (1)..(237): unsure at all Xaa locations
  Clone ID: MRT4577_54128C.1.pep
MAGQMGLNQLGPAQIQQIQAQFMFQQQQQQQRGLHAAFLGPRAQPMKQSGSPSPPPPLAPAQSKLYRGVRQRHWGKWVAEIRLPKNRTRLWLGTFDTVEDAALAYDKAVFRLRGDTVRLNFPVLRRGGAHLAGPLHASVDAKLTGICQSLAESXSNGGSSGDESAGSPPDSPKCSASASTEGEEESGSAGSPPSPTLAPPVPEMAKLDFTEAPWDETETFHLRKYPSWEIDWDSILS

SEQ ID NO: 319142 - protein, 743 aa, Zea mays
  unsure (1)..(743): unsure at all Xaa locations
  Clone ID: MRT4577_54129C.1.pep
MMVGSSQQQLLQRKGKPVAGKGAASMTVKAEKVVVAVRAATREISKTAVIWALTHVVQPGGSIILLVVIPAQSSGRKFWGFPLFAGDCASGHKSMVDQKCDLSELCSQMLKKLDVYDIDMINVMYKLVSGSPSGVVAAECKQAQASWVVLDKDLKHEEKRCVEELQCNIVVMKRSQPKVLRLNLVGSPDKESKATCAVPPVLDCSSGKTATDVKEARSSIRGPAVTPNSSPDLDTPFRSTEAGTSSVSSSDPGASPFSASEINGSLKKEVLATKDKIQHSDVNISDSDSETLSPPANFSFQPWMSDILQGSASSRSLGKVPRKTRTATADVLLEKISKLDLLNEISAMRSRSDLNFRGDVRDAVSLARNAPPGPPPLCSICQHKAPVFGKPPRWFSYAELELATGGFSQANFLAEGGFGSVHQGVLPDGQAIAVKQHKLASSQGDVEFCSEVEVLSCAQHRNVVMLIGFCVEDRRRLLVYEYICNRSLDSHLYGRNRETLEWTARHKIAVGAARGLRYLHEECRVGCIIHRDMRPNNILVTHDFEPLVGDFGLARWQPDGDMGVETRVIGTFGYLAPEYAQSGQITEKADVYSFGVVLVELVTGRKAVDINRPKGQQLLTEWARPFLEEYAIDELIDPRLGARYSENEVHCMLHAANLCIRRDPHSRPRMSHVLRILEGDMVVESGSVNGSSDSGSRSWRLLSEQQHYCQEYXSPAQQESRRAGEGKRSYXADRDKQSISNRY

SEQ ID NO: 319143 - protein, 124 aa, Zea mays
  unsure (1)..(124): unsure at all Xaa locations
  Clone ID: MRT4577_5412C.1.pep
MAAPPRATAVLAWGSGEDGQLGMGXRARAPAVDXEKDWAHCVEALGSYAVTAVVAGSRNSLAICEDGRLFTWGWNQRGTXTESSPGPVHALTXLKIVQAADXGWVCXALAVERQCGYAYXWGGK

SEQ ID NO: 319144 - protein, 155 aa, Zea mays
  unsure (1)..(155): unsure at all Xaa locations
  Clone ID: MRT4577_54130C.1.pep
MCITRTEXHRGENTYSPEGLLFQVLDAIXGHQLGXTAIAXKTKDGAHLLRGKRXTSPLVEPSMKKKXLQIDEHIAXAXMTGLIYDATTLVIHALVXTTNNRFXLXESMTYESXTQAFSHLALERRQRDDTSMTRSFTVSLLISAHDDNGPSLSLH

SEQ ID NO: 319145 - protein, 59 aa, Zea mays
  Clone ID: MRT4577_54132C.1.pep
GLIGHPRRRRITICTQPQRLSAVNKHANGAPPVDSPRPGRTHASFRLFHFHPTSNSQAI

SEQ ID NO: 319146 - protein, 106 aa, Zea mays
  unsure (1)..(106): unsure at all Xaa locations
  Clone ID: MRT4577_54133C.1.pep
FFFXXXXXXXXSTVLPYHQTRNTELFNLSDGIASARRKRARANVRRGLISPTPPIRRTKSSTALTRTAWNSGEGRGLRWTDVYWTNLPRFTKPARICRARSLGFVD

SEQ ID NO: 319147 - protein, 65 aa, Zea mays
  Clone ID: MRT4577_54134C.1.pep
KTHTYRNLSGQSHLFTPEPFPQSTSVAPAYTQWRIFLTVSRHKWSECTHQGCNKHTACSASEQRT

SEQ ID NO: 319148 - protein, 178 aa, Zea mays
  unsure (1)..(178): unsure at all Xaa locations
  Clone ID: MRT4577_54135C.1.pep
RPGSFPAASAYAPAPAHAPLLAAPLLYISSRADSAGKNPVGTWGLTXVAGADQEIYDHXEREKRGQRRAIEXILANDNLNSFTVMVCAXTELTNKYCEGLHDARYYGRNHTVDEIENLCRSXALAAFHLDAVNXCANKHIYWASDKNLIVYTYLVNQNHRIMEDNLSLGRNMTNENYE

SEQ ID NO: 319149 - protein, 123 aa, Zea mays
  unsure (1)..(123): unsure at all Xaa locations
  Clone ID: MRT4577_54136C.1.pep
LYEADSRSFHDLAEHDVSVFFANITAGSMSAPLFNTRSFKIAYVPNGKGYAEIVCSHRQSQDGESERERYKRRWSDVEHVESAVEHYMASLXSHIYRARLIDRTAYVAIMRKSVDKIIDTCSE

SEQ ID NO: 319150 - protein, 49 aa, Zea mays
  Clone ID: MRT4577_54137C.1.pep
RLREAPADLGWDGMGGRASLPTANMLMMGATPARCLTPGHHHKHYYSSP

SEQ ID NO: 319151 - protein, 70 aa, Zea mays
  Clone ID: MRT4577_54138C.1.pep
AGPAPESPGLTHAPVRPRPLVRLLMSHCSTMTPPAPRSVASLQALLPRPYSRHAHQAPIAPLLPPYPSPA

SEQ ID NO: 319152 - protein, 82 aa, Zea mays
  unsure (1)..(82): unsure at all Xaa locations
  Clone ID: MRT4577_54139C.1.pep
LTLSITERSLILPILMLLALSAWDANATIXAQYSQATIAALVNQYIPSMTDSVCENXSFKHRRXQLVITTRSLPISHLCLKH

SEQ ID NO: 319153 - protein, 69 aa, Zea mays
  Clone ID: MRT4577_5413C.1.pep
VAISACRVKVMRTVSTHRRLNKVCLGWKKLCGPVTVEQFPTEPLIASYCVVLWFAPVIQSSLASRQRVG

SEQ ID NO: 319154 - protein, 72 aa, Zea mays
  unsure (1)..(72): unsure at all Xaa locations
  Clone ID: MRT4577_54140C.1.pep
ELSQATPFSLVRALLYSASQTPYSLSQEPLLTTHSQPLLPLVRPFFLLTASQPASPSXXSPALLLSQPVQPF

SEQ ID NO: 319155 - protein, 76 aa, Zea mays
  Clone ID: MRT4577_54141C.1.pep
RTRVRPTRALEHCFAHLAHISLLHMHDGAAGDGRGARTGDTPCHDQAYMQKPLLARPCSLRSTSYIHVALAREGAV

SEQ ID NO: 319156 - protein, 86 aa, Zea mays
  Clone ID: MRT4577_54142C.1.pep
SFTLETTRTHTNKTGFQQIHWSWEPLLGQVALLSTGPQGCQLLHEPFFWEQVLGPLALAFQPNTQQRAHKRHKLGTPARAFPNQGG

SEQ ID NO: 319157 - protein, 155 aa, Zea mays
  Clone ID: MRT4577_54143C.1.pep
YPSILLKICGGRMRFILHSHLFPEGARLLGSYRTCLWCLADGFFIPCLNGLSSAASVVGFTWVFVCCIPSFKRVCSPAYSFFSPFVVSSVLDCRIWAGCFLLWIRLSFVVAEGAPFLLGMLVKFTRKNRFFVKKKTKKKKKKKKKKSLYLPERPL

SEQ ID NO: 319158 - protein, 246 aa, Zea mays
  Clone ID: MRT4577_54144C.1.pep
PAHCHDFCGNCTSPSSPQLSDMPLSNEELGEHVASLERLLQGNPAGQTAALTDYVHKLAAFATSGNRVPIEKTLQLFGTAVGGRKRWQAPFRDSGLLAFALRGLTAARDDELIAKQCLRVIGNSVADNDTNRELAVRDIQAIISYLQSAELRLTTLAVLFNLCNDFDPAKAAAATLRLDATITTFLVLDRIPEAALDYATDLLSWTTSNLNDAQFKDEVSLETFKSLLNVALQFDEDHYLEYIAIL

SEQ ID NO: 319159 - protein, 98 aa, Zea mays
  Clone ID: MRT4577_54145C.1.pep
IWVSMVSFPLRNLLVRAGVKVQDLLPKVGIVTGETGGKVGPFGLAYPGHKAGFPIRFPPTGALTPVGASWIGKIRKGGDLWAPPQGPFSLNHVVYAKS

SEQ ID NO: 319160 - protein, 152 aa, Zea mays
  unsure (1)..(152): unsure at all Xaa locations
  Clone ID: MRT4577_54146C.1.pep
PALNSLLFQGLLSPMVGGTPPPKIVGXNPLKLKKGLKGFQGPLPKARSLLGDFXSPPGLNPGVGPLCPVGTPLGFGVYPLPPFKGRWFGFNERPSFPKGPAPNKPFALNGCPVHPGKEKTQFVLGWLPGPGRVFFYQKLGPLGGPACLVPNP

SEQ ID NO: 319161 - protein, 103 aa, Zea mays
  Clone ID: MRT4577_54147C.1.pep
RAFSFRPPPKINWGRQFKDPLGLSPQTNKLGTIYTRSPYPNSLTPLHAHTPAKTLPAREGLETCPPHRQSFGRGKTSWPTTRGATLDFYHSRPDAYRRRHYRH

SEQ ID NO: 319162 - protein, 132 aa, Zea mays
  Clone ID: MRT4577_54148C.1.pep
EAPQNKGQRKRRGQPGKKNNKTQTQEYINGGEPNARAPEPLPEPEGKQHRPSSAVHPNYIARDVPKQKDISPTQEKTIQEPALGAYKTPAKAPEKEKEDREKREDEKTKEKDKDHKMKKEKDHQEKPEKDKE

SEQ ID NO: 319163 - protein, 95 aa, Zea mays
  Clone ID: MRT4577_54149C.1.pep
TLKLTNTEAEQRRNGRERRCGLLHQQLPTATSRKWWPGGCVIRRHAPTMSRVNGRTHTRRGPSCEETAPCRCGSSVAGGIGRQLATGSLVYNFFA

SEQ ID NO: 319164 - protein, 70 aa, Zea mays
  Clone ID: MRT4577_5414C.1.pep
MGDTANEIKLLSGNSHPMLTRLVADRLGIEPAKTLSLNYSNQETSVTIGESVRDEDVFILQSTAPGDIND

SEQ ID NO: 319165 - protein, 83 aa, Zea mays
  Clone ID: MRT4577_54150C.1.pep
MGADRFPSAAEGGLGGEALYCAVILWLSVTSWIIFTWAGDGGRRRRGGGRSRGSPAFVAAPGLCDGTGPECSGGYGICGTCLD

SEQ ID NO: 319166 - protein, 117 aa, Zea mays
  unsure (1)..(117): unsure at all Xaa locations
  Clone ID: MRT4577_54151C.1.pep
AAAGVPMLTWPLVFDQFIEERLVTXVLGIGERVWSGARSTRYEERELVPAEAVARAVARFLEPGGPGEAARGRARDLAVKAHAAVAEGGSSSRDLHRLIDDLVEARAATSSCNADSE

SEQ ID NO: 319167 - protein, 87 aa, Zea mays
  unsure (1)..(87): unsure at all Xaa locations
  Clone ID: MRT4577_54152C.1.pep
MEKDLNELQILIEAHFENRKNAXSXLISLIDRIEKRRAXRAEQQRIRNEREKDRRNRLAEDRARREEYDNRRIADDEARKKKALSNM

SEQ ID NO: 319168 - protein, 68 aa, Zea mays
  Clone ID: MRT4577_54153C.1.pep
PELKGRVKRRVRSRVRARVSKEEGHSNVQRNGHHTCHTCDDALKRSSRRCLLPHHRRQIQTRPSHDID

SEQ ID NO: 319169 - protein, 346 aa, Zea mays
  Clone ID: MRT4577_54154C.1.pep
MASSASSTLPLPTLSLAVILLALCARGGEARPPPPLHGVRPLAFDEGYTQIFGSANLALLRDGRRVRLTLDESTGAGFASQDVFLHGFFSAAIKLPADYAAGVVVAFYLSNGDVYEKTHDELDFEFLGNVRGREWRVQTNVYGNGSTDAGREERYDLPFDPTDDFHHYSILWTSDRIIFYVDETPIREVVRTAAMGAAFPSKPMSLYATIWDGSAWATLGGRYRVNYKYAPFVAEFADLAIQGCAVDPAADHAVASCGAGLGLGLGPGPLAVSAEQRSAMAAFRRAHTSYSYCHDRRRYPVALSECGAGAGLLPGRMFGPDGMKQHRRHRGAARGHRGGAQDDDVM

SEQ ID NO: 319170 - protein, 111 aa, Zea mays
  Clone ID: MRT4577_54155C.1.pep
HSGASFLYAICYCYPLFLHYVPLVHELVIGSSVCGSPPSGRGGGWRRRRSPPLGACGGGLPASSIGWSAPVCASITRSRRREELLLPPPSAPELRRERGAASDRCGGIESR

SEQ ID NO: 319171 - protein, 52 aa, Zea mays
  Clone ID: MRT4577_54156C.1.pep
GPKQNPNRFTFPQIEFTVFIPMDLPHLPPTFYISLPQEICKKLPHVPSLKTR

SEQ ID NO: 319172 - protein, 73 aa, Zea mays
  Clone ID: MRT4577_54157C.1.pep
LGRCRACPLLQKLMNTSVHACLSDVPSDTSTALCAACFLHDFSFLFLPSWASIVSCFILPFAFVQIHAASFTL

SEQ ID NO: 319173 - protein, 101 aa, Zea mays
  Clone ID: MRT4577_54158C.1.pep
LGRCRACPLLQKLMNTSVHACLSDVPSDTSTALCAACFLHDFSFLFLPSWASIVSCFILLHDLDRSSISFLMYFFEVLIFMLTHLLSSKSTPHPLHYKHKH

SEQ ID NO: 319174 - protein, 72 aa, Zea mays
  Clone ID: MRT4577_54159C.1.pep
DLGALRVPPNYGSRHYPRVVGEPLLLSDDHWYVAEKILVFLELFYDSTCVLSGVYYPTSSLMMHHIIHIAKH

SEQ ID NO: 319175 - protein, 74 aa, Zea mays
  Clone ID: MRT4577_5415C.1.pep
WRGKDTAWLQLHHPLLAYIEQRYSRRLLFWASTTRGVPYCEQTADLSYKPLRNYDDRGLCVNRRYALFRTLLMI

SEQ ID NO: 319176 - protein, 141 aa, Zea mays
  Clone ID: MRT4577_54160C.1.pep
MDESGEASVGSFRIGPSTLLGRGVAFRVLLFSSLWRLRARAYAAISRVRSAALPVAASWLHLRNSHGVLLMAVLLALFLRKLSAARSRAALARRRRQHEKAMLHAGTYEVWARAAKVLDKMSEQVHEADFYDVELIRNRLD

SEQ ID NO: 319177 - protein, 163 aa, Zea mays
  Clone ID: MRT4577_54161C.1.pep
FFSFIFVACIIQSPRSTSTVSSHRTSPPSSTSAVTTPRGSSSPVRSRRSQQQDQPRTRRWGTGDPDGVAFLLANDRALVVDDLIATRVQLSNLSEMDDEALDQGDGGWIKEMEEVAATATTSRSIMPFRAIQKGKPLSVSLASRRSPPLSSRTPGARRGHKRV

SEQ ID NO: 319178 - protein, 150 aa, Zea mays
  unsure (1)..(150): unsure at all Xaa locations
  Clone ID: MRT4577_54162C.1.pep
DPGQIVKLAPAMTRIVRFFATTEWHDLYPSAEVGAXEHRTSAHCPLLMQGHSPVNFYRGFRFESFWPQLEGFNEVVHQAWNSTVNTDDAILRLHVKMTRTARALRTWRRNTVGNFKVRMAIIQIILTLLEKAQEIRQLSSEELXFRRTLK

SEQ ID NO: 319179 - protein, 64 aa, Zea mays
  Clone ID: MRT4577_54163C.1.pep
VSFFFPPSVMYQMGLILLYLSNTGHVHLYSDFLLVHFVSLPGGSATHWTSRPSNVPVVRLERNH

SEQ ID NO: 319180 - protein, 40 aa, Zea mays
  Clone ID: MRT4577_54164C.1.pep
MVRALLRIINHTRCGGYSHINRYTCHFHTPQSLRFISSLY

SEQ ID NO: 319181 - protein, 135 aa, Zea mays
  unsure (1)..(135): unsure at all Xaa locations
  Clone ID: MRT4577_54165C.1.pep
MPKMFGFSRRRMKLGRLKGHLHDHFHGPRSPSRTTKRSSHPNAEDPLATSVSGRADDLAWRCSSDTFDLNGRDFESSENWAVLSTEGDKPAPRFDHAAAMVGSKMVVVXXGDSGSSLLDDTKILSLDKLTGICCS

SEQ ID NO: 319182 - protein, 694 aa, Zea mays
  unsure (1)..(694): unsure at all Xaa locations
  Clone ID: MRT4577_54166C.1.pep
MPKMFGFSRRRMKLGRLKGHLHDHFHGPRSPSRTTKRSSSHHNAEDPLATSVSGRADDLAWRCSSDTFDLNGRDFESSENWAVLSTEGDKPAPRFDHAAAMVGSKMVVFGGDSGQSLLDDTKILSLDKLTWDSVAPKVRPPLNGRSLKLRPCRGHCLVSWGKNVILVGGKSDQPYDKISVWTFNTESELWSHMEAKGDIPVSRSGHTVIRAGPVLILFGGEDAKGKKLHDLHMFDLKSLTWLPLNYKGAGPSPRSNHVAALYDDRVLLIFGGQSKSKTLNDIHALDFETMVWSRVKTHGHHPSPRAGCCGALCGTKWYIAGGGSKKKRHPETWVFDVLESRWSVCVVPPSSSITTKKGFSMVPLYYRDKIVLVAFGGNKKEPSDKVEVLVVLQNEHCFSWRSAPEVEPLLYDESPPGSRELADHLSSCAPPYPTSSAARSGLAATAENSCGRKPLPDSLLRTSNLGGSSLRRQFRQEEECSSLAQKLQKPIDDDRYKDAADECSEHQPPSATNPKPRNDARRSSPEVXSTLKRGGXGRSSSDMNNHQDARVAALVRRNVALEEQLSAALASKDEAEKNLSLVIDSKDGLEKRLAEKDREVEALREKATGLELAQEEANSLSNTVHADNVRLEREVAFLKAVMDETQKELHSTRGVLAGERARAFQLQVEVFHLKQRLQTMEGRSPAAPRKPQNT

SEQ ID NO: 319183 - protein, 106 aa, Zea mays
  Clone ID: MRT4577_54167C.1.pep
VRAFLPINQLGKRGRTARKLRGVKPGVFQSKGSKTTAQKIGFRGHNKKKIEWQARGRKIGSLKTAAPIYKIVIFIFFFFFTISFFFFFFFLIYIFFFFPRVRGRVG

SEQ ID NO: 319184 - protein, 197 aa, Zea mays
  Clone ID: MRT4577_54168C.1.pep
MAVSDSLAHPGLAIVVMGVSGCGKSTVAAMLAEALGCSFIEADDYHSEANKAKMSAGVPLSDADRAPWLESVRDAIRGRLDGGEDVAVSCSALRLGYRDVLRAADRAYEPGRYAACRVRFVCLRAPAEVLAERVLRRSVEGEHFMPASLLRSQLDLLRVDPAEGVAEADATARPDDIVRDTVALFRDELAVSSGVPA

SEQ ID NO: 319185 - protein, 98 aa, Zea mays
  unsure (1)..(98): unsure at all Xaa locations
  Clone ID: MRT4577_54169C.1.pep
MAEPSRXNGNXNSVAGTVKETIGNVLGSADWQKAGKEQHAKGEAEIKSAETKGYAEGTKDQVSGKFDNVVGSITGDKSKEMSGKAQEEKGKAQKEINS

SEQ ID NO: 319186 - protein, 79 aa, Zea mays
  unsure (1)..(79): unsure at all Xaa locations
  Clone ID: MRT4577_5416C.1.pep
MAAPPRATAVLAWGSGEDGQLGMGGNEEKDWAHCVEALGSYAVTVVVAGSRNSLDKKXDGRLFTWGWNQRGTLGHPSKT

SEQ ID NO: 319187 - protein, 55 aa, Zea mays
  Clone ID: MRT4577_54170C.1.pep
CVFLTFVDGMVLCIEIVIGHSCSHDSYFVLTEYKHLGLLKKKKKRAAATPVECQF

SEQ ID NO: 319188 - protein, 81 aa, Zea mays
  Clone ID: MRT4577_54171C.1.pep
RRELMAARLPAYPVRMRQYGTRHQRESERVDLRAAVDERQKGTAGFNAEIHPSRQQQTIPAGATVRYAVRDIHALLCLFGF

SEQ ID NO: 319189 - protein, 323 aa, Zea mays
  Clone ID: MRT4577_54172C.1.pep
MSRDHAKREIMTGDKPASSGKTLSRESDNKYKEESSSSIKSHQRGDKKKRKNKVVYYETDSLSPSTSGTDSSTTSKRHEHKKYKVYNKVQGLKNAKEIWDVLKTAHEGDKVTKITKRETIEAEFGRFVLNKGEEPQVMYNRLKTMVNQVRNLGSTKWDDHEMVKVILRSLVFCNPTQLQLIRGDPRYKQMSPEEVIGKFVSFELMIKDSKHIVNLEQGATSTPEVQPVAFKATEEKKEESTLSRLPIDTSKLDNEEMALIIKSFRQILKQRRGKDYKPHSKRVCYRCGKSGHFIAKCPYSSESDRDEDKKGKKKYYKKKGGEA

SEQ ID NO: 319190 - protein, 89 aa, Zea mays
  unsure (1)..(89): unsure at all Xaa locations
  Clone ID: MRT4577_54173C.1.pep
MADHGNQPTWLNKLAVQMHLNSIISEGERVXNICPSVXNXERRLGTRNYMTHSLSGPSMSVCTGINVPARQTPVCANAPGEKGCKNLMI

SEQ ID NO: 319191 - protein, 88 aa, Zea mays
  Clone ID: MRT4577_54174C.1.pep
FKETPNLNEASSQCCVPRSPSKLPNQKNLHPAAGPRGWGPALAGSSCARRPSRAQAHPAPPLQNTAHAYLNHPGCGVCLNHAGALRDA

SEQ ID NO: 319192 - protein, 82 aa, Zea mays
  Clone ID: MRT4577_54175C.1.pep
LALPMFRPLQATHSSTRSLLERHSPDSTATGARRVDCVCSSCRVYLIEAHASLTWSRRMRRSAAATNAEQSQCHRWLPFESS

SEQ ID NO: 319193 - protein, 114 aa, Zea mays
  unsure (1)..(114): unsure at all Xaa locations
  Clone ID: MRT4577_54176C.1.pep
MMVATPPKVPPGKNITGTYGKDCVDAKDTWXAKATGCLLADDNGXHCTIQLHVNKPPFNRMGACCNIPIFXDALSCGSCFEIQCNNTGDCSGKTVAVHITNMNYEPIAAHHFDL

SEQ ID NO: 319194 - protein, 84 aa, Zea mays
  Clone ID: MRT4577_54177C.1.pep
SYSSVVCGSRDRRNASAVQEQWPKKRMITDHSNMCHQCHRNDSVRPVRSQDCVGRNRQYRYCVKCIRRCDPHLSEDDLANNCPV

SEQ ID NO: 319195 - protein, 197 aa, Zea mays
  Clone ID: MRT4577_54178C.1.pep
MSVPEAGQSAGRDEQEMDNYEQHQTRVLMALMQGLCAARYRKADNTPCLVDQGLYLGSVGAALNNEALKSLNITHILVVARSLNPAFPAEFTYKKIEVLDSPDTDLGKHFGECFTFIDEGICTGGNVLVHCFAGRSRSVTVVLAYLMKKHQMSLQSAMSLVRSKRPQIAPNAGFISQLVNFEKSLQVEQGQRTLQSN

SEQ ID NO: 319196 - protein, 41 aa, Zea mays
  Clone ID: MRT4577_54179C.1.pep
VLEGLFPCIIQSLCLSSKKKKNLKFKKKMKKQNPIQITPYP

SEQ ID NO: 319197 - protein, 83 aa, Zea mays
  Clone ID: MRT4577_5417C.1.pep
GSMAPLAHHSWVLKPLVSPPSLSGAPSVSNIPVRDLYNKALVAPWVTHIRPLARFLFSQGNLTPQTWSMLKTLNPLIKQSIDY

SEQ ID NO: 319198 - protein, 100 aa, Zea mays
  Clone ID: MRT4577_54180C.1.pep
MYTAPSSPDANILGKKTGFRVERGEFRFSFMQNLKCYITKPLLEMLSFDHRPCPYAGLGGVEIFEKRKTVLGPSLFHYYQESAVTNLYEALDNRDGILSR

SEQ ID NO: 319199 - protein, 138 aa, Zea mays
  unsure (1)..(138): unsure at all Xaa locations
  Clone ID: MRT4577_54181C.1.pep
LPGYPGQKGSHLPNKKTKSWVQHKSKGATEGFFGLAHRTVRCATGHVRCTRGLQLRTARLREFLEGTPLKFXDSVRCSKGGRPQELASLGFSLQPLRYNSPDCPVCTGLSGVHRTVRCICGATATSGANSYLQRIYCA

SEQ ID NO: 319200 - protein, 94 aa, Zea mays
  Clone ID: MRT4577_54182C.1.pep
HTCGLLPDAGGPHNDPGLGPALVTASANMEERRLSPRLLATLLLLLLLATLLADETSDADATCLTQGASKAAAPRAASDAQEQLLLSRTLVISS

SEQ ID NO: 319201 - protein, 113 aa, Zea mays
  Clone ID: MRT4577_54183C.1.pep
GYLEAGRAGLVLRHYPQLFLRRPFRKLSGNEPLGTGRWPCKSDRDRIARLLLQASASLIITAAARRTRGGPAVVSTDIAYHGYHAAPVHAGSAPAAVSREGPQTDLRRESNIS

SEQ ID NO: 319202 - protein, 48 aa, Zea mays
  Clone ID: MRT4577_54184C.1.pep
ELETATERYLHVRPQPLAGEDPPAYQARLLQKLTEEVPLGQSIPRRRK

SEQ ID NO: 319203 - protein, 47 aa, Zea mays
  Clone ID: MRT4577_54185C.1.pep
RTSNSQKGVKQSGYGTCNMWSVLTGKGRYQLILQCMDQYWPVEPTDI

SEQ ID NO: 319204 - protein, 48 aa, Zea mays
  Clone ID: MRT4577_54186C.1.pep
MEEEEGGVTSPLLLRQGQEKVYHPGCPGCANDRRKELQEGLPYKEFLY

SEQ ID NO: 319205 - protein, 323 aa, Zea mays
  unsure (1)..(323): unsure at all Xaa locations
  Clone ID: MRT4577_54187C.1.pep
AVSRGRTGTEDDCNPMDTISTNXTRGMPEYTVEIPQGTIVNDRVDKIASLVLLGMASSKANAWAGPEHWKYRKAKDLEAAPTSSGDSEITNKIKKRTKDKPDIGFTKALDNELPNIFAAPKNPKTLLFPANRAICSNKLPEDCHYRPESLVKLFLLPDVLCLAKRRKSLDAPVDNNDDFIPSEPWEDDNFCNDHIDEGHVCSDVEEPVNLINKPRQVNKIDIQYDKVSKQVDVHALKEVLWNHIHASAETGQEREEPGPPLRLSQVLHDLPSSSPDAVATDISPHLYFICLLHLANEHNLKLCDRPMLDEIDIYMPPTSPLVK

SEQ ID NO: 319206 - protein, 160 aa, Zea mays
  unsure (1)..(160): unsure at all Xaa locations
  Clone ID: MRT4577_54188C.1.pep
MRYEGGLFLALNLLYFTVDNACGRCPTPTPPEEPPPPTPATPPPSTRATWPLNPLGVGTGADALRLPKGXAGQVPDQPCCILLKGLADFEAAVLLCHGIKGNWFGRSSSXPIKFRDLCKYWVNCVPRGYLSHSNSFRQFTHSSGVHARDFICTPPACHEC

SEQ ID NO: 319207 - protein, 93 aa, Zea mays
  Clone ID: MRT4577_54189C.1.pep
TCRQNSGPLSASTHFTTSQDDIAHLTTTLGSNLTIHPRRVRHQTATVQRTTHLANSVTIARTTSTGTCRIPIWAWTHHSTCGRSTSPCILWRA

SEQ ID NO: 319208 - protein, 100 aa, Zea mays
  Clone ID: MRT4577_5418C.1.pep
EPPAEQARRRASSPWSLQPDRRVLPQGAHPERRRFRLAFNQTITSALPVYYANSYLSFRAPLPIGYSPPCSADCLIPWTRYGFYVLHPKNAMFPLYVTKS

SEQ ID NO: 319209 - protein, 184 aa, Zea mays
  Clone ID: MRT4577_54190C.1.pep
ESPCPSSCSRGVRVRVRVRAPVPSGFWPLSRALAAGSWRVVQFSLVVLGNSICRRPILARCSRARAGSLLRAAVLCGGRQTRRAAAVAILVMLRRSPNSSCLQSDLAPRVRLRLAPHPSAPCGHVESPPLPSPKNLRPVFSPLSTRTAPSSCCCCSRSSCRYRQPPISGLRQRISFPLSRFYRA

SEQ ID NO: 319210 - protein, 119 aa, Zea mays
  Clone ID: MRT4577_54191C.1.pep
RHGTPRTTTLEREAHLRTLHTKKATQVPDYRALAGSAAEEPYKGHTKKNWRTIGEQIGAEKLKKIGEQSESRSEQRNYTLASPIHWGLGDGFQREQEPLAARPYRTERGEMKSAVEGQI

SEQ ID NO: 319211 - protein, 62 aa, Zea mays
  Clone ID: MRT4577_54192C.1.pep
FIAEGQNSDMGVVDLPAEKPRGIPFPKEVTTGGGVPGVKCAIQTPNREKVPLFFAAMEAFTQ

SEQ ID NO: 319212 - protein, 125 aa, Zea mays
  Clone ID: MRT4577_54193C.1.pep
RSEYGKEYEFAAPVKLLEKHLHAMAQSVDEQLVVVSQVLVSDINIGYEEIVNTQVVAFNGKPVKNLKGLAGMVENCEDEYMKFNLDYDQIVVLDTKTAKEATLDILTTHCIPSAMSDDLKTEERN

SEQ ID NO: 319213 - protein, 124 aa, Zea mays
  Clone ID: MRT4577_54194C.1.pep
FFFFFFVLSSFFFVLVVLSFCTIYIYNTGCIDTIKSVYIFLHGCQNFAGGDNGGGCPRTTAMLHNARPDAGTQTQLHLSYILLSGNSITIYTSPSLFFLFWNEQIPLHSIMCIYQLNPPPPTLV

SEQ ID NO: 319214 - protein, 74 aa, Zea mays
  Clone ID: MRT4577_54195C.1.pep
GMVFFLGAPLEDPFYWVFFLFFLVAFWLFPRPFETQFLRLFGWFETTPILWVWEGLNMIQCELGRKKNKKFAPI

SEQ ID NO: 319215 - protein, 150 aa, Zea mays
  Clone ID: MRT4577_54196C.1.pep
TTVTSTVPTPTSSISDDYDRRRRRQYPDRLYIPAKSTSSPPDRCSSLHSWITAGQMIYYSPSDLLSDVLQSLLPTQVHVWPKWLPLLQNNTTYNPPKTHTTTCATHRSMETLANTSIRIVSYAAEQLSYVKAAPLRQYKHSISHLITGAY

SEQ ID NO: 319216 - protein, 87 aa, Zea mays
  Clone ID: MRT4577_54197C.1.pep
KQHSLPPTPPMKLPIIGHLHLIDSHPHDSFHDLHTKNSHNELKLKHGVTEHTIWLSTPKDADDALRTHKHMMTTNPKKPIVDNIRNN

SEQ ID NO: 319217 - protein, 197 aa, Zea mays
  Clone ID: MRT4577_54198C.1.pep
MNQLSLLHHLHRLSPGRGHGLTAASPTVVRAGLSSCEPPTPQQHAKRLLAIAPHESIAAAREEESHLRQELAAAGNNNEAGGGRTRTCALPTWALIGGITVGVTVALALSAGPGPALALGPEGPLVEEFWDNMRRYALYVVTVSTGVAYTVLQPIVELLKNPVTALLIVAVIAGSGFLVSQVLNAMVGNSDFIYRYE

SEQ ID NO: 319218 - protein, 52 aa, Zea mays
  Clone ID: MRT4577_54199C.1.pep
KKRGVPPWCVENWGCGPWLYFFKQKFKKLCGTGDNLSIKKTLNESTNSLLQT

SEQ ID NO: 319219 - protein, 47 aa, Zea mays
  Clone ID: MRT4577_5419C.1.pep
QLLDVLAEHMLEHLELARNWNPIHDVCLSSIDSEGISKNYINCACVV

SEQ ID NO: 319220 - protein, 77 aa, Zea mays
  Clone ID: MRT4577_541C.1.pep
SYLPLSPCWRSRPGAWGRIQVRCLGWCRPSRRLKPLAGVPGGAIAHSSASLYRDAFSGRRQLLGCESKSTVDQGVWL

SEQ ID NO: 319221 - protein, 43 aa, Zea mays
  Clone ID: MRT4577_54200C.1.pep
QKKKVNGIFSLLKKYSGTSATIQWPHELNLELIIYGSITYTYK

SEQ ID NO: 319222 - protein, 52 aa, Zea mays
  Clone ID: MRT4577_54201C.1.pep
ELTFPCPYGRSTKKKKKKKKKKKKKKKKKKKKKKKKKKKKKKKKKKKKGRPF

SEQ ID NO: 319223 - protein, 57 aa, Zea mays
  Clone ID: MRT4577_54202C.1.pep
RYLRCSCGHIIPHLPSKQKNKFIPAAPSTLSPEYYFCPFHPLVTTFALLPLPSTAPI

SEQ ID NO: 319224 - protein, 142 aa, Zea mays
  Clone ID: MRT4577_54203C.1.pep
RARECRGVETLAARACFQRRERPAHKPQKISGSKTPPSHHKGLGAQQARGVAQSHPTRSADPVWEPARRRYIHCLSNQQTLWDLLVGSPLPSGLSFSNNNNEYKNAFLSPITLTPSITDSIKPSTSKPDASRVVDGEMFLFG

SEQ ID NO: 319225 - protein, 192 aa, Zea mays
  Clone ID: MRT4577_54204C.1.pep
MAPTTCLRIPFLPARGRSANVNAPPSWLPRRLSLKSSATNGPFTSADVMGADWKGLKVAYQGCAGAYSEAAAKKAYPNCEAVPCEHFDTAFQAVQNWVVDRAVLPLENSLGGSIHRNYDLLVQHSLHIVGEVRLEVHHCLLANPGVKIENLKSVMSHPQALAQCEHTLTGLGIEHREAVDDTAGAAKIGAEH

SEQ ID NO: 319226 - protein, 398 aa, Zea mays
  Clone ID: MRT4577_54205C.1.pep
MAPTTCLRIPFLPARGRSANVNAPPSWLPRRLSLKSSATNGDNSLPNPISTSPTSPPWLTVADGVESVDVNGLRRPPAPVSAPTIPGDRGPRWLPRPFTSADVMGADWKGLKVAYQGCAGAYSEAAAKKAYPNCEAVPCEHFDTAFQAVQNWVVDRAVLPLENSLGGSIHRNYDLLVQHSLHIVGEVCVEVHHCLLANPGVKIENLKRVMSHPQALAQCEHTLTGLGIEHREAVDDTAGAAKIVAEHMVQDTGAIASSLAAKLYGLDVLAENIQDGKNNVTRFMMLARKPNILRNDRPFKTSIVFSLEEGHGQLFRALGVFAQRKINLTKIESRPHKERPLRVSDDCSSLLKNFDYLFYVDLEASMADPKIQNALGNLKEFATFLRVLGSYPTNVNEP

SEQ ID NO: 319227 - protein, 63 aa, Zea mays
  Clone ID: MRT4577_54206C.1.pep
QVAGGLCDNLLTCVVRAWAFSKPVCVATSMTTFMWVNPFPACHLAVLRDLGMSVVLPVNGVMV

SEQ ID NO: 319228 - protein, 155 aa, Zea mays
  unsure (1)..(155): unsure at all Xaa locations
  Clone ID: MRT4577_54207C.1.pep
HRHTYLRFLRKSVYTSPYHDAIHFHDSVKILWGTIXRRFRTSRIRKSGESRRMHQDEQCGPSSSHDKSDGMCIPDPLNDRRVQTVHMHCLLSELSXDVVWNYLDTIXNYDDKRKENAKVAYERTLRFAKLXRLXGDNAAEENSISQLQILAPIKY

SEQ ID NO: 319229 - protein, 72 aa, Zea mays
  Clone ID: MRT4577_54208C.1.pep
RIAVPIRNSRHASRVHNTRRWRRSAFGRATRHVRFVSAPLWEHPIHDSLPFALLCDSMQYIDPSPNIQRLYK

SEQ ID NO: 319230 - protein, 87 aa, Zea mays
  Clone ID: MRT4577_54209C.1.pep
MKSRTLVASLVVQALTGLYGVGKGPAGAKKQCWCSQCTNWYGVWTCDDMLTKCASTCKNCVRDSTDKGATKYRCQNYLLENCGCKIH

SEQ ID NO: 319231 - protein, 103 aa, Zea mays
  unsure (1)..(103): unsure at all Xaa locations
  Clone ID: MRT4577_5420C.1.pep
YLGTLLTYTGPQNHLIHPPFLFGYPYKYKTSPNNVANTSNFYDLTLXYXSSLAPYYLYGSLFRNYIFDPFGLSKPVEYLHFELDSLDHNLSKNDARLIISTRF

SEQ ID NO: 319232 - protein, 91 aa, Zea mays
  Clone ID: MRT4577_54210C.1.pep
KNGDCLIISCDRNQPTVAVSSTILPFQPKAETSDARITTLEVIIFAITIPGDEPNAQMSESLQQFQFLFAIELGDRWGTYGSKSVTLGLWI

SEQ ID NO: 319233 - protein, 41 aa, Zea mays
  Clone ID: MRT4577_54211C.1.pep
VDACADAWAESEHSGDNSHFTPAFIGLHVLCMLRSDHRWAV

SEQ ID NO: 319234 - protein, 104 aa, Zea mays
  Clone ID: MRT4577_54212C.1.pep
GDMPYRGTPNVEGGGANPGGGSPPGGNPNLFNHQPTLKKLPAFFWKPNQRSFPTPHQRGRDNPTLVCRGGGLGGKGGWPLLGGPSPHRFDGSSNHQGGGGAVYI

SEQ ID NO: 319235 - protein, 119 aa, Zea mays
  Clone ID: MRT4577_54213C.1.pep
PCQGSSEKKLRHRKLAAQGRESSRARAVQRAPAASAGAQCSGHGRVGARDGAEQRRKPRCADWASSGRGWRREEQGAWACGEPGTRHTMGAARPVELELSTGRDLCARPAEQEGEREEE

SEQ ID NO: 319236 - protein, 53 aa, Zea mays
  Clone ID: MRT4577_54214C.1.pep
NFVVFSYVVLYLLHLLRYLIEKLNKGYCYSYDSYAIMNRFKDTAFVSWWGNCS

SEQ ID NO: 319237 - protein, 66 aa, Zea mays
  Clone ID: MRT4577_54215C.1.pep
RTGPVRVQWSKFQTRWLGDVVADVAMLGGALDRFDDSDKTAPHQFDKGLVTHQTDNIQGLVHTQKL

SEQ ID NO: 319238 - protein, 61 aa, Zea mays
  Clone ID: MRT4577_54216C.1.pep
IRKHSSPRCGSESLGTVLCKSFKNTGKAMPANAATGLSTSNASVPSSPMTGPEITSSANCL

SEQ ID NO: 319239 - protein, 125 aa, Zea mays
  Clone ID: MRT4577_54217C.1.pep
QLAFVSSRDIGWHSSVGKLALVGNMAIFFQPVDYSTRSTPLFGVVIPREGIKFSILKTEIDMCSRSKFGAPYFNHHGPLLCIALHRIASHPISICFILLLLEFLPGCLSASVTNCFVFSLQANKN

SEQ ID NO: 319240 - protein, 105 aa, Zea mays
  Clone ID: MRT4577_54218C.1.pep
TSGTWWKTRGAPQNNRGADHPFFTGGCLREEAPNFRSSQLLGLLWGERPPPAAAYKPRPLGGLRAVTLLLLSPFFPPLLGVPRLPFAPCSPFFPWGALKGGPPWG

SEQ ID NO: 319241 - protein, 44 aa, Zea mays
  Clone ID: MRT4577_54219C.1.pep
PLMVDLQIETPPCGARFIPANGGESFLLNQEACISLILGLLTCF

SEQ ID NO: 319242 - protein, 75 aa, Zea mays
  Clone ID: MRT4577_5421C.1.pep
MCPSGCDCAHVPVMLGLAFWVLVLCVRQWLFLCLYVGGGFCFCICFGLGLAWLALVLFSVVLLVFPFTSTTKKNI

SEQ ID NO: 319243 - protein, 66 aa, Zea mays
  unsure (1)..(66): unsure at all Xaa locations
  Clone ID: MRT4577_54220C.1.pep
QLRQAEPKDRYQAILGLVLQSILQQEPXSGQIAVLMAAQIAHQLTADCGLQQPTLCPYAAAGCVPH

SEQ ID NO: 319244 - protein, 41 aa, Zea mays
  Clone ID: MRT4577_54221C.1.pep
FFFFFFFFFFWLGFFFFFFFFLRKKDLWDRVKPLNGFFFLF

SEQ ID NO: 319245 - protein, 91 aa, Zea mays
  unsure (1)..(91): unsure at all Xaa locations
  Clone ID: MRT4577_54222C.1.pep
RLRRSADTRDKCXTASETVYRTDRASANNTMCHKRCWKCWHAGCTICRCNYIAHDLNLYCWHDYMQTIKESANLSQLETDHEKTSHAGSLH

SEQ ID NO: 319246 - protein, 66 aa, Zea mays
  Clone ID: MRT4577_54223C.1.pep
VVSQRSHVNHSESARSIVHGKVIVLSMIARHAPPQWSALCTLLRRPAAASPVKAAQMLGCTPSGHL

SEQ ID NO: 319247 - protein, 623 aa, Zea mays
  unsure (1)..(623): unsure at all Xaa locations
  Clone ID: MRT4577_54224C.1.pep
MKSPLRRFRGFALHHHHHHRERKDHRPPSAKLDELVYAAQEMEDMRNCYDSLLSAAAATTNSVYEFAEAMGEMGTCLLEKAALNYDDDESGKVLMKLGKAQFELQKFVDDYRTNIINTITNPSESLLKELQVVEEMKDQCDQKRVEYEAMRAAYGEKGGRLRHXKNESFSLGQLQTSFLEYQEEAALFIFRLKSLKQGQFLSILTQAARHHASQLSFFRKGLKHLEALEPCVKAVAEKQHIDYHFSGLDNNSDIDDYSSYQDNHSDGSELSFNYEINDRDKDLPTFRSPMDMDQAHPVSSPRPLKEQQENAEEIKATLGVPHMKPEIGTQSAPIFAENVPDPSMRFRKMNLLTRTVHSYKLPTPADDKNPASVIANKSPHSDQPESKSHVAVNLWHSSPLAKDFMPNSMHSGPVKMPSSNEGVSLAYSYSTTDFKKVKREAFSGPIPSKVGLSTPLISATDRKPSGKRPSYVLPTRPPGPGWQSSVPPKATPRVTSLPTTTPRISELHELPRPPANAGLVGYSGPLVSRRPMPTAVSTTRVSPPSHTASPLPRPPAAMTRSYSIPSNSQRTPIITVNKLLEARHSRESSEVSSPPVTPISLADVSRRPTTEAAXDKKRIKESL

SEQ ID NO: 319248 - protein, 212 aa, Zea mays
  unsure (1)..(212): unsure at all Xaa locations
  Clone ID: MRT4577_54225C.1.pep
MAVAAAFLSSSLLPTTPGSHLTPFTLRSRLRLFTRRAVVVNAAAATLREVCSGRVPDHVLQRAEEIGYVVPTEMQEQSLPLLLSGQDCILHAXGSGKTLAYLLSIFSTIDFSRSSVQALVVVPTRELGMQVTKVARLLAAKACTVMALLDGGTLKRQKSWVKAEPPAIIVATVASLCQMVERRAFSLQSMRVLVIDEVDFIFGSSKQVSSLR

SEQ ID NO: 319249 - protein, 73 aa, Zea mays
  unsure (1)..(73): unsure at all Xaa locations
  Clone ID: MRT4577_54226C.1.pep
KLPFQGVVREFAQDFKGVLGFQSHPVLALXQEPPEASLVGLFEDPNLWAIPAKGVPFLPKDFQFAPGIRGEGG

SEQ ID NO: 319250 - protein, 38 aa, Zea mays
  Clone ID: MRT4577_54227C.1.pep
EVIFCGSILFYCYPTSHASIMFYCYSTSSHVSCSSHLS

SEQ ID NO: 319251 - protein, 229 aa, Zea mays
  unsure (1)..(229): unsure at all Xaa locations
  Clone ID: MRT4577_54228C.1.pep
GAFFFFFFSFFFFLFFFFFFFFFFFFFFFFFLGFFFFFLGAKARAGVGKPKKPKNPPXGFPQGFPPKPKKXKPEGPNXGGKKQKLVPKGKKTFSXGRPRPKKGNPSGKPIGGKKAQEGGQPXAPGKKKGXWDPKRGGLGKPRPVKEPGALGPDKRGKAKKKTGPKKGPPQRGGSFPXGLGAPPGXPQSPPNQGKRKGEGPKTPQKPGFAWNRQGPTKKGQGMALKKNPG

SEQ ID NO: 319252 - protein, 239 aa, Zea mays
  unsure (1)..(239): unsure at all Xaa locations
  Clone ID: MRT4577_54229C.1.pep
STFRFATILDDKCYTHCIXSIVQAWFRELPSGVLDSIPPEQVMQCQSEEDCARVAKCLPPTEAALLDWAVNLMADVVQEEQINKMSDRNVAMVFAPNMTQMADPLTALMYAVQVMNFLKMLIQKTLEDREESNLEDASLPQKDPSDENGHQNPSLPVNPQPEETSGRPSFVSEEPIVYSPTHSAEDKPPVEGDSIASVVHTSDVRSSVEGSASCSQPALVASSAIADASCATAANLLPS

SEQ ID NO: 319253 - protein, 63 aa, Zea mays
  Clone ID: MRT4577_5422C.1.pep
VEIIYPPHPSVAQIRDSFVFCSLSSFSILFPYSCFGLSRVTTRWRRCWSAALGSLINYRRGFA

SEQ ID NO: 319254 - protein, 74 aa, Zea mays
  Clone ID: MRT4577_54230C.1.pep
GFKKKRVCSLRVNFFSTFEEGGFFFKKGVVFRNFFFFYKNTGGFFLKKKVKNVCPHNQDIVCCDKLLINTQTEQ

SEQ ID NO: 319255 - protein, 123 aa, Zea mays
  unsure (1)..(123): unsure at all Xaa locations
  Clone ID: MRT4577_54231C.1.pep
MGNKGPVPTQESTNDDAEAPSSTSAASNTKSKTDVEREQLFEGSSDDDXHTPRKRSTQEILTKYKFKGDAAAAAAHAKQKLMERQEKLARITEQSAELESEAENFAALAQQIRKNTETWWWKR

SEQ ID NO: 319256 - protein, 103 aa, Zea mays
  Clone ID: MRT4577_54232C.1.pep
RTVLHCRTGSVALVHEDVSVAHERLVAERTHVHLVPPRLAQRLRLEEEVAVHGRRHACVSCCVAGIYMLSIRRKLSRCMRCAALLDSRATLERGQEGGKRARP

SEQ ID NO: 319257 - protein, 104 aa, Zea mays
  Clone ID: MRT4577_54233C.1.pep
EQDSDNSVRCYPLDVEREQLFEGSSDDDAAHTPRKRSTQEILTKYKFKGDAAAAAAHAKQKLMERQEKLARITEQSAELESEAENFAALAQQIRKNTETWWWKR

SEQ ID NO: 319258 - protein, 89 aa, Zea mays
  Clone ID: MRT4577_54234C.1.pep
CPNLPPLPSLSPCPVAGTTKSKVKKYKMKAPSSMKFRFRTMKDGQVRRWRAGKRHNAHLKSKEAKRRLRKPALVHLAYAKVIKKLNFCG

SEQ ID NO: 319259 - protein, 67 aa, Zea mays
  Clone ID: MRT4577_54235C.1.pep
RLTQETKRAYGLILLGHSSNGDTATILLLCSQTSNSSLVPPNHLPSVSSKPENPIVQAPTSQQAKRN

SEQ ID NO: 319260 - protein, 114 aa, Zea mays
  unsure (1)..(114): unsure at all Xaa locations
  Clone ID: MRT4577_54236C.1.pep
GWVFLKXPAANHKIAGPQFSVGGARKNTSIPPARHAGTIKLLGDKKNPAQGMTPENPPGAREDPKLSLRGGYKDWGQYRQKWVPGGNYVRMQNPKKNLGRKFKVKNPGGPQGGT

SEQ ID NO: 319261 - protein, 163 aa, Zea mays
  Clone ID: MRT4577_54237C.1.pep
MRRWWCAAGGLARCVLSSSTSAIASHARPLPAPLMPKSPSFTVPFSLSCRRHHSLQGFFHLVIASSFRPPSAHHQQVRHYAKKERSRAPLTPTKSKVKKYKMKAPSSMKFRFRTMKDGQVRRWRAGKRHNAHLKSKEAKRRLRKPALVHLAYAKVIKKLNFCG

SEQ ID NO: 319262 - protein, 94 aa, Zea mays
  Clone ID: MRT4577_54238C.1.pep
MAIQLRVFYLVPLLLASYVQTTPRLEKMKMDCYKDVKGTIYNYEALSLNGKERIPFKQYAGKHVLFVNVATYCGLTIQYPELNALQDDLKQFGL

SEQ ID NO: 319263 - protein, 107 aa, Zea mays
  Clone ID: MRT4577_54239C.1.pep
PPVIWGRLLTFRGGAPPGFGCVFKGGFQLKGFLGEPSGAIFHRVRILDQRFFGPCPPPFCFKKVGRNLLLAPGVAPWAPLGPGFGLKKKKKNPLEENNTKNQWKKAQ

SEQ ID NO: 319264 - protein, 82 aa, Zea mays
  unsure (1)..(82): unsure at all Xaa locations
  Clone ID: MRT4577_5423C.1.pep
RYNDASLHKQRIMTVLXTRYGVKANEHTGPTLMCTLGVPNAIYKQSEGEFAEEYEIAXLFXLLTVHQLNAQQFGKIMLFVKD

SEQ ID NO: 319265 - protein, 133 aa, Zea mays
  unsure (1)..(133): unsure at all Xaa locations
  Clone ID: MRT4577_54240C.1.pep
WDPRGRPXRTTCSISISTVAQPGATLRLSMASVTARAPVAALRPSASLKSSSSSVVVFLGHSRRFGRTATATARRRRLSASAKADCLSALTSPSYVDLRVPCDEDFEYLSHVLAPHNEFFFFSPPPPTKWLLM

SEQ ID NO: 319266 - protein, 266 aa, Zea mays
  unsure (1)..(266): unsure at all Xaa locations
  Clone ID: MRT4577_54241C.1.pep
VRLQVPVRNSRVDHASGHYDRSKSLKQNINLSAPIMSRFDLFFILVDECNEVTDYAIARRIVDLHSRIEESIDRVYSLDDIRRYLLFARQFKPKISKESEDFIVEQYKRLRQRDGSGVTKSSWRITVRQLESMIRLSESMARMHCCDEVQPKHVKEAFRLLNKSIIRVETPDVNLDQEEEIQMETDEGQGGVNGHADSPAPVNRFNGSSEDASQETVSKPSLRLGFAEYCRISNLIVLHLRKMEEEEDEXALKRSELVNWYLKXIE

SEQ ID NO: 319267 - protein, 129 aa, Zea mays
  Clone ID: MRT4577_54242C.1.pep
MAAAAAAGAGGVAAGVAGSPCGACKFLRRRCVAECVFAPYFSSDQGAARFAAIHKVFGASNAAKLLAHLPLADRCEAVVTITYEAQSRLRDPVYGCVAQIFALQQQVRRLVPFFFFFFFFHLPPCRSLL

SEQ ID NO: 319268 - protein, 53 aa, Zea mays
  Clone ID: MRT4577_54243C.1.pep
IQKQVQWIQQPQVGVELDVLKVWIQQPQVVVEHDVLKVERFMYHPNMKLHSAV

SEQ ID NO: 319269 - protein, 72 aa, Zea mays
  unsure (1)..(72): unsure at all Xaa locations
  Clone ID: MRT4577_54244C.1.pep
PLLLFFFFFFSKXGRKQKPQGRNPIAHICRGRAKCPLFNLYFRRTGLSPPAHPRVTRSGKLILGERTSWPPI

SEQ ID NO: 319270 - protein, 54 aa, Zea mays
  Clone ID: MRT4577_54245C.1.pep
MMSNHLGLFASPFYNNLLLVLRIWWPLLNQLTLKISKIKTNKPKWINQKLSTFT

SEQ ID NO: 319271 - protein, 68 aa, Zea mays
  unsure (1)..(68): unsure at all Xaa locations
  Clone ID: MRT4577_54246C.1.pep
TDQKLRLCDICGAFQSXYDNDRRLADHFGGKXHLGYMLIREKQGELQVNCLHAQARNTSKVLEIYDTD

SEQ ID NO: 319272 - protein, 80 aa, Zea mays
  unsure (1)..(80): unsure at all Xaa locations
  Clone ID: MRT4577_54247C.1.pep
SSGYEMCVFCVCKTHRFSFKRNLRVFSAKNTRVFFGQKLPMCCIDSPYKFYFVFLQDLMRLFKLLIKVRQKKKKKKKQXN

SEQ ID NO: 319273 - protein, 44 aa, Zea mays
  unsure (1)..(44): unsure at all Xaa locations
  Clone ID: MRT4577_54248C.1.pep
MDKIKRPKRKKKKKKKKKKKKKKKKKKKXKKKKKKRPPLLKNQS

SEQ ID NO: 319274 - protein, 36 aa, Zea mays
  Clone ID: MRT4577_54249C.1.pep
PREGMKPFQEKKNVTPLQDRLIFPNRFHGQHLSKTV

SEQ ID NO: 319275 - protein, 59 aa, Zea mays
  Clone ID: MRT4577_5424C.1.pep
RGVPFANQAGPLFGKAIGSGLFGNTPTGQKGIFCQAIKLGNPKVFPRPDVGKPRPIKLN

SEQ ID NO: 319276 - protein, 101 aa, Zea mays
  unsure (1)..(101): unsure at all Xaa locations
  Clone ID: MRT4577_54250C.1.pep
RFLTCNRDNKNKENAADQXGERXATSNEDXTNSLPENDCRYSIYDIYFVTAEEVQKSMIFYILRSPCYAKVKTHMPYACSNQKFKSGLNGIQVELQATDAS

SEQ ID NO: 319277 - protein, 74 aa, Zea mays
  unsure (1)..(74): unsure at all Xaa locations
  Clone ID: MRT4577_54251C.1.pep
MSQAQFSLFQAQRKHVVLEDNQAYAMKEPGTGGYGYGTKNDKNKDXDTIASDFIKLKHKARALQKSTTMYQPST

SEQ ID NO: 319278 - protein, 127 aa, Zea mays
  Clone ID: MRT4577_54252C.1.pep
GNPEPATTVWGLWDSDVEGPGMNSRNHIMFGTVSAWLYKSYLGLTPAPADKARGLTGGFDHFYIGPDASIVNVLNMTSASGSTTTPRGVVSIDWSVGGGSMCDVQSEGSVLTLSCGADTITGFSLLS

SEQ ID NO: 319279 - protein, 124 aa, Zea mays
  Clone ID: MRT4577_54253C.1.pep
KPALTIPVMVMARMGNLLKAKILKALGVNYLDKSKVLTPADNPNKINKNNFRFPLVCGCRNLGKALPRLPKGPPIIRTKGEAGTGNFFKAVRNLRSVMGNFRPLRILDNNKVFAYAKRMAGPYN

SEQ ID NO: 319280 - protein, 121 aa, Zea mays
  Clone ID: MRT4577_54254C.1.pep
TGRSPTCEIRGCLFPFEFTCPRRLRPFFPPRNLVSPAPKKKKRFFWGLIGMPPNPPLPREVFGGFPPTLGLGPPFYIFEGKKWPKKDPGGASLGEIFSPLVLIIIVAPLKKKKKIKKPPRN

SEQ ID NO: 319281 - protein, 319 aa, Zea mays
  Clone ID: MRT4577_54255C.1.pep
LASGSCDGTIRVWEVETGRCLKVWDVGGDVRHIAWNPSPDRPILAAVVGHDLLLINAEVGSEEMQTMVKDLLKVDEMALQDDTDDKKPAVRWLKHEKLDGITLVHQKAVSNVEWHYKGDYFTTVVPTGDTRAVLLHQLTKKHSHHPFRKMPGLPVAATFHPSQKMFFVATKKFVQIYDLQKAQLVKKLESGLREISSISIHPGGDNVIVGSRDGKLCWFDTDLSTRPYKTLKIHSKDVTSVAFHRKYPLFASSSEDCTAYVCHGMVYSDLNQNPLIVPLEILRGHSSSDGRGVLDCKFHPKQPWLFTAGADSVIRLYCD

SEQ ID NO: 319282 - protein, 77 aa, Zea mays
  Clone ID: MRT4577_54256C.1.pep
YCSCTARPCPFPLVMASISTRPYRQQSAKASEGARTSEKSQGEIKWPKKEQEYICHRLLNLALRPKPDAYSLCSCSF

SEQ ID NO: 319283 - protein, 54 aa, Zea mays
  Clone ID: MRT4577_54257C.1.pep
YFLTIIKPPCLCPRTQEGFFICLCDQTLHDHNRAGVSVHHCSVLTPYRLSNNHE

SEQ ID NO: 319284 - protein, 75 aa, Zea mays
  Clone ID: MRT4577_54258C.1.pep
RCRTAPALKESDGPGLVTTKNAGDAITRLQPVSGPTRDSSQIVVTGGIGHRADGEARVQERRHTTRAILGSAQGN

SEQ ID NO: 319285 - protein, 79 aa, Zea mays
  unsure (1)..(79): unsure at all Xaa locations
  Clone ID: MRT4577_54259C.1.pep
SLDPTRKRXXKVAGLGEPARETARMNDAGMGAIIKEPIDDNTWTPSVTTIQSRILFKQAERRGLENTLIPAGNKANQQT

SEQ ID NO: 319286 - protein, 150 aa, Zea mays
  unsure (1)..(150): unsure at all Xaa locations
  Clone ID: MRT4577_5425C.1.pep
MNLRHSASVTDPICHSAADTTAKSRTLTETDELNTVLRTYDAPNDMRLSVYVKWPHMPSSTMNVGLLVDAQRDYEGKKMXLDYTNGVGLQNPYKILRLVERLANRYHAXLALKAIMNPMPRFLGTGLNMVRGVPTLHTHQESLNYMVNET

SEQ ID NO: 319287 - protein, 76 aa, Zea mays
  Clone ID: MRT4577_54260C.1.pep
MPILPRFPQPMALPRAGGIFRSPPSCASFGSSPLSSPWEPWVSLSILCGGGSIPRVFVAQNGVPNPVFCCENDPCR

SEQ ID NO: 319288 - protein, 39 aa, Zea mays
  Clone ID: MRT4577_54261C.1.pep
GRQIVVFNLCPQAIQRGSSISNGAMLALLGTGFDLDMSF

SEQ ID NO: 319289 - protein, 70 aa, Zea mays
  unsure (1)..(70): unsure at all Xaa locations
  Clone ID: MRT4577_54262C.1.pep
QKQRIAIARALVRQPHILLLDEATSALDTESEKAVQEALDKAREGRTCIVIAHRLSXIQXADLIVGVQNG

SEQ ID NO: 319290 - protein, 452 aa, Zea mays
  Clone ID: MRT4577_54263C.1.pep
MASAAVLRNAGSRRLFSYPTLRAAAIYVPSALPDAPAAAAAPAQPPPMAGTIWARSMATFTRTKPHVNVGTIGHVDHGKTTLTAAITKVLAEAGKAKAVAFDEIDKAPEEKARGITIATAHVEYETAKRHYAHVDCPGHADYVKNMITGAAQMDGGILVVSAPDGPMPQTKEHILLARQVGVPSLVCFLNKVDAVDDPELLELVEMELRELLSFYKFPGDEIPIIRGSALSALQGNNDEIGKNAILKLMDAVDEYIPDPVRQLDKPFLMPIEDVFSIQGRGTVVTGRVEQGTIKTGEDVEILGLAQTGPLKTTVTGVEMFKKILDHGEAGDNVGLLLRGLKRGDVERGQVVCKPGSLKTCKKFEAEIYVLTKDEGGRHTAFVTNYSPQFYFRTADVTGRVELLGEMKMVLPGDNVTANFELISPVPLEPGQRFAIREGGRTVGAGVVSKVLS

SEQ ID NO: 319291 - protein, 299 aa, Zea mays
  unsure (1)..(299): unsure at all Xaa locations
  Clone ID: MRT4577_54264C.1.pep
MASTVVLRNACSRRLFCYSTLRAAAILGPAAPPDAPAAASAQPPPMAGTLWARSMATFTRTKPHVNVGTIGHVDHGKTTLTAAITKVLAEAGKAKAVAFDEIDKAPEERARGITIATAHVEYETAKRHYAHVDCPGHADYVKNMITGAAQMDGGILVVSAPDGPMPQTKEHILLALLVRLLTTVGLLLRGLKRGDVEHVHAVXPPDSLKTCKKFEAEIYVLTKDEGGRHTAFVTNYSPQFYFRTADVTGRVDLLGEMNMVLPGDNVTANFELISPVPLEPGNDYILNFFQQYRTIDQVF

SEQ ID NO: 319292 - protein, 494 aa, Zea mays
  Clone ID: MRT4577_54265C.1.pep
MAAAVAPPLCTWLVAACLSAACGDGEKENERRHRGGGVGGFFGSRRRLGSGRRGVGRSGMAMSVALHPERTAVENKKPDMKQRRVVVTGMGVVTPLGHDPDEFYNNLLRGISGISEIEAFDCSHYPTRIAGEIKSFSTDGWVAPKLAKRMDKFMQYLITAGKKALENAGITEEVMNELEKSRCGVLIGSAMGGMKVFSDAIEALRVSYKKMNPFCVPFATTNMGSAILAMDLGWMGPNYSISTACATSNFCILNAANHIRKGEADVMLCGGSDAPIIPIGLGGFVACRALSQRNSDPAKASRPWDVDRDGFVMGEGSGVLVLEELEHAKQRGAEIYAEFLGGSFTCDAYHMTEPHPEGKGVILCIENALADSGVTKEDINYINAHATSTQMGDLKEFEALNRCFGQNPQLRVNSTKSMTGHLLGAAGGIEAVAAIQAIRTGWVHPNLNLDNPEKTVDVRMLVGPQKERCDVKVALSNSFGFGGHNSSILFAPFK

SEQ ID NO: 319293 - protein, 44 aa, Zea mays
  Clone ID: MRT4577_54266C.1.pep
TCINMMRCMPHLFNSIWVEMKYLKLPLSMNFADCKTCYICTNAF

SEQ ID NO: 319294 - protein, 126 aa, Zea mays
  Clone ID: MRT4577_54267C.1.pep
VFFRHRFSQCHQDTSSERSSTSTPCCGGVSGNPLTLDLEGAVGHMHHILGRRRVSSSERAAACIVCKSSGFSQWCPFLCPWSFPHAVLPCWSAFFAPDSRELPALKFIPVAIHASVLSLIASRCNT

SEQ ID NO: 319295 - protein, 201 aa, Zea mays
  unsure (1)..(201): unsure at all Xaa locations
  Clone ID: MRT4577_54268C.1.pep
MGKKRVLISYGIDVDAVCGWLGSYGGQDSTSDISRGLFAGTVGTQRLLKLFKKYDIKTTWFIPGHSLETFPEDMAAVRDAGHEIGLHGYSHENPVDMSIEQQRDVLDKTYRMLTEFAGKPPRGSVAPWWETSREGCELLLSYGIEYDHGMSHHDCQPYYLRTGDSWTKIDYKKKAQDWNEPLVAGQDTGLREIPAXWYLDD

SEQ ID NO: 319296 - protein, 85 aa, Zea mays
  Clone ID: MRT4577_54269C.1.pep
HHRRGTNKATNISRLTYVASVVLTLLLTTGPTSAIIADVIASSDNLISCKVLRNFDKYYCPEAISPGKPFNYYTRGFYPIISCHR

SEQ ID NO: 319297 - protein, 83 aa, Zea mays
  Clone ID: MRT4577_5426C.1.pep
AGRAVWSCRGCQWLARGSRPPSATGACRPAPSSSSCRVTSPPYDRSSHRPPTGACAPDCVARYPSKVVAVDRCDLSVGGRTEN

SEQ ID NO: 319298 - protein, 72 aa, Zea mays
  Clone ID: MRT4577_54270C.1.pep
MVAMAAVQKQQQQRRDAEAELNLPPGFRFHPTDEELVAHYLCARAAERRPPVSIIAEVDLYRFDPCDLPERA

SEQ ID NO: 319299 - protein, 410 aa, Zea mays
  Clone ID: MRT4577_54271C.1.pep
MSAPAATPKQGKCCEYTLDGSVDMKGRPAVKGKSGGWLAGALILVNQGLATLAFFGVNVNLVLFLTRVLGQSNGDAANNVSKWTGTVYMFSLIGAFLSDSYWGRYKTCAIFQAIFVLGLALLSVSSHLYLIRPDGCGMEHAPCGPHSGKELGIFYIALYMIAFGNGGYQPNIATLGADQFDEEDPAEAHSKVSFFSYFYLALNLGSLFSNTFLSYLEDKGSWALGFWASTAAAATALLLFLSGTLRYRYFQPGGNPIGRIGQVAIAACRNWKAGVSTEVVSLYEGDEKADAGGRKLLHTQGFSFLDRAAHADTDSKLGARDPWKLCSVTQVEEVKSILRLLPIWLCTILYSVVFTQMASLFVVQGAAMRRTTPFSGFSVPPSSMSAFDILTVAATIFLYRRTICPFLARL

SEQ ID NO: 319300 - protein, 44 aa, Zea mays
  Clone ID: MRT4577_54272C.1.pep
ATCNRESWFLFLLTCASMYALLLVCRSSSMIRAISPGPGSTGSA

SEQ ID NO: 319301 - protein, 119 aa, Zea mays
  Clone ID: MRT4577_54273C.1.pep
LGTSRPAGVLSRVRICHRLYPCCAAVGASSRFAVASPPAGPMYERLAAAASRSSLSFSTGCIEPKSVSLSTSGTCNNNGDQTENEPPALGPYSPDIRFINHVLVAGCLVYYSEITKPIS

SEQ ID NO: 319302 - protein, 112 aa, Zea mays
  unsure (1)..(112): unsure at all Xaa locations
  Clone ID: MRT4577_54274C.1.pep
GSGDVTYSLRSLPLSYHFSGHEDPVVLGKFFSYSSLLPFDIRPPLVLDIASKAIPRLISLGKRKSAGSFLSRYASSAEGGAQESRHRGVPPKADPDGCGKMLSRPPXDPNRP

SEQ ID NO: 319303 - protein, 73 aa, Zea mays
  Clone ID: MRT4577_54275C.1.pep
LLLLLGIEQPPEQRPNQGTAETPLPRCAGRPPATAHRSKGREESAPCQLAAAARCSREAPHREGMGIVDIRKR

SEQ ID NO: 319304 - protein, 96 aa, Zea mays
  unsure (1)..(96): unsure at all Xaa locations
  Clone ID: MRT4577_54276C.1.pep
KPPKKGQKGXKKRKKRAKRAGKKNKTTEGETPNPPAKKPPNKGGPNANPDGKTGGKTMGKGPSGKTPAGKKGMCRKAIKQGNPRDFPNPKGEKDGQ

SEQ ID NO: 319305 - protein, 123 aa, Zea mays
  unsure (1)..(123): unsure at all Xaa locations
  Clone ID: MRT4577_54277C.1.pep
NFQKNNPQNTPIKISQPVAPQNTQRNFGLKICGEKKLKKKFFTKKXKTKXKKIIKKFSKKQKXKKKKKKKKKKKKKKKKKKKKKKKIKKKKKKKKKKKNKKKKKKKKKKIKKKKKKKKKKSCT

SEQ ID NO: 319306 - protein, 77 aa, Zea mays
  unsure (1)..(77): unsure at all Xaa locations
  Clone ID: MRT4577_54278C.1.pep
VLSPRPEGKGIQTKENNKVAIPLMCHVHSRTWMDLFYRPVTPDVYYLMNVRNDINPMLGNDETGDXFGTSHGHTGHA

SEQ ID NO: 319307 - protein, 116 aa, Zea mays
  unsure (1)..(116): unsure at all Xaa locations
  Clone ID: MRT4577_54279C.1.pep
KGPYAKGVGTGAPVYLAAVLENLPPXVLELPGKSSRDNKKTRIIPPHVLLAIRKNKKLWKLFGGVTIAPGGVLPKKNPFFFPKKTAEKGSNGGNKKAKLPKKAPKSPKKAKTSCPE

SEQ ID NO: 319308 - protein, 63 aa, Zea mays
  Clone ID: MRT4577_5427C.1.pep
VNAGGESFTFDQLALSAPLVENTVLLRGPKNVRKSVRHFGEAPARSFVQFLFFVNDRASFFFL

SEQ ID NO: 319309 - protein, 99 aa, Zea mays
  unsure (1)..(99): unsure at all Xaa locations
  Clone ID: MRT4577_54280C.1.pep
FSQLSVAYLQLFLPFSQLSALNCPAYLQQQQLLPFSQLAGVSPATFLTHPQLLPFYQHVAPNDGTXLLLLQQLLPFNQLALTNPTAFYQXQSIIGGSLQ

SEQ ID NO: 319310 - protein, 225 aa, Zea mays
  unsure (1)..(225): unsure at all Xaa locations
  Clone ID: MRT4577_54281C.1.pep
QLPLGTPLLPPGFSPPRISRTPAPPPHASGFRAPPAAASAPASTATXSAPFSGFSDQIGSVTPPXRPPSQLEPRAPPSLXPPSPPNQTRVGLAREQAPPXPQPLSNMSTPXPPRCRASPAXAPSQXRGPWPPEARAPPAXPDPSTPSPSRRRPASSXSHPAPAPPXPPHRSSTPRVLRSPRDPPVSRPPPRHPHLAEDLHKVPSSARATHRPRPAALLFERFNRL

SEQ ID NO: 319311 - protein, 230 aa, Zea mays
  unsure (1)..(230): unsure at all Xaa locations
  Clone ID: MRT4577_54282C.1.pep
SLDTILFDPEEKIRLDWRKRFNIIGGVARGLXYLHEESQKKIIHRDMKASNVLLDEDMNPKIGDFGLARLFGQDQTRDVTKHIVGTFGYMSPEYVMRGQFSTKSDVFSFGILVIEIITGRRNIGHYFFDEQNEDIISLVWRHWTEGTIVEMIDDSLGRNYSESEVLKCVNIGLLCLQHSPMDRPTMSDVMVMLNGDDTSSIPSAARPTFFLDRSTPYSYNSCTITHMSPR

SEQ ID NO: 319312 - protein, 42 aa, Zea mays
  Clone ID: MRT4577_54284C.1.pep
LGIALQGIQVSDINFSGVDDAHYVLAVPPVLSYRCCSADVHM

SEQ ID NO: 319313 - protein, 78 aa, Zea mays
  Clone ID: MRT4577_54285C.1.pep
CNVGRVGRDRDDHELCVRGEHVVLAHLVVQRQVAVQVAEQEPPHLYELQSLVTGPHQRRDAERYVMQRHRRVESPDAW

SEQ ID NO: 319314 - protein, 531 aa, Zea mays
  Clone ID: MRT4577_54286C.1.pep
MVAPTLLAFLPLPLLLLAAFSSASASAHPNFFRPIVPLRLQALRQQQQRRRASSDAKLVAAAADGTNSTAQPFTTHYFPQELDHFTFTPNASMLFRQKYLVNDTFWRRPRRGGGAGPLFVYTGNEGDIEWFATNTGFMFDIAPKFGALLVFIEHRFYGESLPFGDDSYSSAETEGYLTSTQALADFAILITSLKRNLSAETAPVVVFGGSYGGMLASWFRLKYPHVAIGALASSAPILQFDRITPWNSFSDAVSQDYKSESLNCFSVIKAAWDVLDERGSTDAGLLELSRLFRACKSVKHADSIAGWLQTAFTYTAMVDYPTPANFLMDLPAYPVKEMCKIIDGFPAGADILEKVFAAANLYYNYTGDQSCNQIESDSDDSSSSLGLSGWGWQACTEMIMPMSTSNASMFPPSSFSYEDTSNACFQSTGVRPRPHWITTEYGGYRIDKVLKRFGSNIIFSNGMRDPWSRGGVLKNISSSIVALVTEKGAHHLDLRFATDEDPDWVTEQRRQEVEIIEGWIDQYHRDMAQVS

SEQ ID NO: 319315 - protein, 162 aa, Zea mays
  unsure (1)..(162): unsure at all Xaa locations
  Clone ID: MRT4577_54287C.1.pep
GWQACTEMIMPMSTSNASMFPPSSFSYEDTSNACFQSTGVRPRPHWITTEYGGYVSVVFRVSVVYVQALHWKLXQRIDKVLKRFGSNIIFSNGMRDPWSRGGVLKNISSSIVALVTEKGAHHLDLRFATDEDPDWVTEQRRQEVEIIEGWIDQYHRDMAQVS

SEQ ID NO: 319316 - protein, 116 aa, Zea mays
  Clone ID: MRT4577_54288C.1.pep
LVAPPPQWLPLRPRSPTEFWPRAKNRGPSLAKGRRNRHPRKTAGFKRLSKSPRKPKGRFKAANRRGGPKNYVQYVLSVMGLPCLSESLPCFESRPSLFGSPPRRGVWVPPFVFMPD

SEQ ID NO: 319317 - protein, 130 aa, Zea mays
  Clone ID: MRT4577_54289C.1.pep
LASTSDSVILFMGLSQEQESEGKDRTTLLLPGNQQSLITAVANAAKRPVILVLLTGGPVDITFAQANPKIGAILWAGYPGQAGGLAIAKVLFGEKNPSGRLPVTWYPEEFTKVPMTDMRMRSAGSYPGRS

SEQ ID NO: 319318 - protein, 40 aa, Zea mays
  Clone ID: MRT4577_5428C.1.pep
SVCFWYGSDGSCVLKGCLRTIYRWKIVYSKNRGKINITWI

SEQ ID NO: 319319 - protein, 130 aa, Zea mays
  Clone ID: MRT4577_54290C.1.pep
LVGGRPCGLVCLPRTECFTVYLGVEGPNADAACRGERTAILLMRRDGKMQRGPKHSMRGWDKMPLYSITLETLVLTDFDAALTTRTFAEVTYGRRLVEKGTCIEVSTPMLINKMVDHEVVHVISIGDQEI

SEQ ID NO: 319320 - protein, 88 aa, Zea mays
  Clone ID: MRT4577_54291C.1.pep
PPRVRANLLLLGLFQSLRSWSVSSGCLGSRPGYPIVYSVTGIVPGGTQNTWRPLRAQYLQRTSTASLAPTCDHRLLARCRAYIPRSFL

SEQ ID NO: 319321 - protein, 102 aa, Zea mays
  Clone ID: MRT4577_54292C.1.pep
FKPFGGQMILNSFFPRSYYLHPLKKQTLPTFEPTFNISPFTPKTLNNTNTINQHLLTKIKLTYTSRFKSCAIRLEAPYPDVTILNHTSQVIDTPNNVACQLH

SEQ ID NO: 319322 - protein, 126 aa, Zea mays
  unsure (1)..(126): unsure at all Xaa locations
  Clone ID: MRT4577_54293C.1.pep
PSRRRRRRRRGGRGAPAXEKKQPNPQRENKEQKRXPNTXXRESGDRXTRAGEGXEQXXGQTPXXXKARXTXRPXGTRRNEKNAXXXTARGDKATQPXESGPXXKEHERXKRNXXDTGXXGGGXQEH

SEQ ID NO: 319323 - protein, 142 aa, Zea mays
  Clone ID: MRT4577_54294C.1.pep
MIRFILLQNRQGKTRLAKNYVPLEDSEKHKVEYEVHRLGVNRDPKFTNFVEFAGRAVIYRRYAGLFFSICVDITDNELAYLECIHLFVEILDHFFSNVCELDLVFNFHKVYLILDEFILAGELQETSKKAIIERMGELEKLE

SEQ ID NO: 319324 - protein, 142 aa, Zea mays
  Clone ID: MRT4577_54295C.1.pep
MIRFILLQNRQGKTRLAKYYVPLEDSEKHKVEYEVHRLVVNRDPKFTNFVEFRTHKVIYRRYAGLFFSICVDITDNELAYLECIHLFVEILDHFFSNVCELDLVFNFHKVYLILDEFILAGELQETSKKAIIERMGELEKLE

SEQ ID NO: 319325 - protein, 136 aa, Zea mays
  unsure (1)..(136): unsure at all Xaa locations
  Clone ID: MRT4577_54296C.1.pep
MAEAHAEAMDGSTWEDMMRRILPPGTPIPEAPPNLDYSIALEYDGPPVPYELPRVDPVEIPAIPTAEPVSGSQVLGGLPVAPVVQPIRLPVSRIARCADPVAAQAAGSSESVLXHQEFSDDDEEGDDSRSQSHGSA

SEQ ID NO: 319326 - protein, 82 aa, Zea mays
  unsure (1)..(82): unsure at all Xaa locations
  Clone ID: MRT4577_54297C.1.pep
GMGVPXXRILRIMSSQVLPSMASACASAISDLSPPFVYLPWLLCLSTTTTCLAYVVMATELTAEDESCPSQLRPQSLTFLVL

SEQ ID NO: 319327 - protein, 112 aa, Zea mays
  Clone ID: MRT4577_54298C.1.pep
PLTSLVSLSPERHIDLLLCAARRCTAQTGEEVKRLGLGWRWERPSAASSYAAVWLQKLVLSVSAQAKVVAGSDAPATRPELGSWAGSGIAPILRRTASLSQLPLVLICGIAV

SEQ ID NO: 319328 - protein, 65 aa, Zea mays
  Clone ID: MRT4577_54299C.1.pep
FIEVLILLSSAAIHSTVAHQLYEQLLLLSPSPVPTGLDYRCSTSSGHGFASTGRSGCRDPCKQPR

SEQ ID NO: 319329 - protein, 87 aa, Zea mays
  Clone ID: MRT4577_5429C.1.pep
QLGPNGNHQRPGHRHCLLYMPSVAMWDYSGNTNYLLEYNHTIVKQLHISYEECTTNAGYTMFSSRPTILPTCITFFGDNYKQNQNIL

SEQ ID NO: 319330 - protein, 78 aa, Zea mays
  Clone ID: MRT4577_542C.1.pep
CLLLAHGLPVWKFAYPLRLIVLFSLFRNCWVRNYGDLFGIPPCEIRTKVGICSFCALLALNLPFLGPFTISFISHFRQ

SEQ ID NO: 319331 - protein, 64 aa, Zea mays
  Clone ID: MRT4577_54300C.1.pep
IAHYSLVLAGEMCSSLDSSHALSIRSPPVHLLIALSSPTNLSTVLTQSPKMEMMNHGLTTRESE

SEQ ID NO: 319332 - protein, 106 aa, Zea mays
  Clone ID: MRT4577_54301C.1.pep
YAFTTTLGLPFCINQIKQEKNIHNVHVMFFFSCSTSIRLGLLLLEHKSNMSSNCFTIYYLIFINVHWNLIGLILGQLYVGLWTKTLSIYHILAYVFCSFLVDALFS

SEQ ID NO: 319333 - protein, 170 aa, Zea mays
  unsure (1)..(170): unsure at all Xaa locations
  Clone ID: MRT4577_54303C.1.pep
MKSRSSARGEPRRFGNVALLALMLCSLVALSLIRARFSPIGNTAVAETIKVEDPKPVVVSKPAVAAEAGDGTDEATAVAVEEDKDEEAQPKDEEVQPKTEHAVDATVRPAKAAVDVDASKPVCYETSRRSDTCEAAGDVRLVWXNQTIYVDTLEREWKTRTYCRKHDTYA

SEQ ID NO: 319334 - protein, 160 aa, Zea mays
  Clone ID: MRT4577_54304C.1.pep
GGKLPALFHLPSPPTVRRRKQTSEHEHAFFASHPTGGTGGEGAASRRAQSDLGRQKENSGEQFLSASPFPPDRFGFVLRRLVRRPNPHQSIRRGIEQARRGSQAVFPACLFFSSACSCRGLPLRPIWTRQIIIFLLAYIPNLDIKTSFIQKPVFWKGISQ

SEQ ID NO: 319335 - protein, 73 aa, Zea mays
  Clone ID: MRT4577_54305C.1.pep
KCRVFLAQKSSRYFGHVEHIYPVFVWPNITPCFLGVCELISPWWVGPKKPPVFCASIHLKEQKKKKKKRAKKI

SEQ ID NO: 319336 - protein, 68 aa, Zea mays
  Clone ID: MRT4577_54306C.1.pep
LGGGILALGLFWGLVCPRPLCRGGECVWFCQACMFKGDPNKGILKIWQGGEHSPGFPKSPINKGVFVC

SEQ ID NO: 319337 - protein, 135 aa, Zea mays
  Clone ID: MRT4577_54307C.1.pep
IPDPTARVRPLVLTNYLLLSSCTRYLYTATQKGFISTMATYLFLLIRPSKSSSATPFFMSLKPVLITLPCAPADNKQPLSISYSVYSNANDHAFNISPIPLVHSNIHPTSTPLWEINEYGNEIMLTFFNLSDSTT

SEQ ID NO: 319338 - protein, 124 aa, Zea mays
  unsure (1)..(124): unsure at all Xaa locations
  Clone ID: MRT4577_54308C.1.pep
RQRGAVSSMPDLRYTSHARASALTLCCSRSSPVRRSGGAFDDRAPALSVEVHAFVRLGRRSMGSVKXQAGADMSVQHARSAYLWGRRAGTSDAERGSNTSGRSLYHLVWGRTYATTPDCVACRT

SEQ ID NO: 319339 - protein, 59 aa, Zea mays
  Clone ID: MRT4577_54309C.1.pep
KRPYNLLSPRVSLMSPPTAPYGIWSESPILEFSDRIAGGPGRCRLSSRSVVRGSIVYVR

SEQ ID NO: 319340 - protein, 87 aa, Zea mays
  Clone ID: MRT4577_5430C.1.pep
IGLPCLKNDLMIYLPFMLPIPYMIIWFVIPFVSTSYANHSINNTLYMILLIQYIPRVYLIIYLNFKILNARLVLTTSAWLKAEYNLF

SEQ ID NO: 319341 - protein, 59 aa, Zea mays
  Clone ID: MRT4577_54310C.1.pep
GADAAQWVELLHLLAARPEGPPHLRLTAVHEHRDVLTQTAVALTKEAERLDVPFQFNPV

SEQ ID NO: 319342 - protein, 155 aa, Zea mays
  unsure (1)..(155): unsure at all Xaa locations
  Clone ID: MRT4577_54311C.1.pep
LPQRCAQPPRAPPGQRAQPPXPPPPPPPRPAAHRPXGAGTPPPPPPPKRPCPGQGPPRATKPLSPPRTPPSRAPPVPPRPSSGRETSPPPRASSLPLFPVSQSNPPIPPDACLXTPVKASLXPPXPSITPTXTSXLPPHPSPVKWSSPPPPNVSV

SEQ ID NO: 319343 - protein, 79 aa, Zea mays
  unsure (1)..(79): unsure at all Xaa locations
  Clone ID: MRT4577_54312C.1.pep
MVSLAGSQIITTFYLMFVISGXATDNRAIGELAGLAVGATILLXRLFAXPAXVAXXNXXXXVXPRLASGEYTXLATSSP

SEQ ID NO: 319344 - protein, 92 aa, Zea mays
  Clone ID: MRT4577_54313C.1.pep
PRARPGIVNPHRFLSLSLPPSCGHVRIGAGFVYKAPPTRALQSLLPPSSAPQSAPSGPLASQASPSLPPSLPQSHLHLSSWRALDGVAAPGQ

SEQ ID NO: 319345 - protein, 62 aa, Zea mays
  Clone ID: MRT4577_54314C.1.pep
MLKQGGKGKPLKAPKGHKKEYHQTDLSFFQKKKDEEKALEELKGKAQKGAIGGSGLKKNGKK

SEQ ID NO: 319346 - protein, 353 aa, Zea mays
  Clone ID: MRT4577_54315C.1.pep
MVHSLKMANRWKRYIKVPCVQFAFSDDIVLSESIERAVNVIADSVCSVLLDTIIKGDPRIQAAKVIWVESDAASWVKHTRKVSKGESALEIIVEKDDAVSNGDAWRTAIDACLPVLNLIDTRRSIPYGIQQVRELIGISCAFDQVVQRLSTTVKMVNKGVLKDHLILVANSMTCTGNLIGFNIAGYKATFRSLKVQVPFTESTLFTPMKCFEKAAEKCDSDSLGCVVSSSGRVGHAAVGTGSSFQILWNENQLKSNKEYGDGLYDFLALVRTDQEKTDYMFLDDVDYLVEENAADDTCLSPEPDGTLGKPTFEDNFEEQNIQKGSSWEIGITTNSSWEQNASAVNDSGDWGGW

SEQ ID NO: 319347 - protein, 62 aa, Zea mays
  unsure (1)..(62): unsure at all Xaa locations
  Clone ID: MRT4577_54316C.1.pep
DANQFAEGVFFXDKIKELESLCNPIIAKMYQGGGXKMGGVGGMDEDAPPGRGGPGPKIEEVD

SEQ ID NO: 319348 - protein, 58 aa, Zea mays
  Clone ID: MRT4577_54317C.1.pep
NDERVHPLIIYTQLAFVLDPFFYAASMSFHFNRKSLFYFLFISNYIDIMHRQSVVLSK

SEQ ID NO: 319349 - protein, 113 aa, Zea mays
  Clone ID: MRT4577_54318C.1.pep
SLNFLKNGRKSVPVSVQASLFVLLGDVFFSPCLFIHSSHPFLPFFFARFATLFVLTCFPSLPPLMSPLVPLPNLPRLFPPFPPLFSGPHRNFFCPPPPIFLNHPLQQCTPTLY

SEQ ID NO: 319350 - protein, 82 aa, Zea mays
  Clone ID: MRT4577_54319C.1.pep
KCPLFPKTKKVPQMVLFARVPGRHSFKLMPPWSHFRAPPTCVNQFHPKIWKILHIRNVTIFYQPVLFAIKPMLYDCKLPVSL

SEQ ID NO: 319351 - protein, 49 aa, Zea mays
  Clone ID: MRT4577_5431C.1.pep
LTQRSTLNTTLSINTWITHEIGSGIMTACSTSPEQLKLYPHNSTPGRPC

SEQ ID NO: 319352 - protein, 71 aa, Zea mays
  Clone ID: MRT4577_54320C.1.pep
MLCSLSHNFPVWVLSRKKKLLPFCLEVSVCTHCLDVKYLNGFDWGFSASHTLEYLSQPCFFRKGEKEKKNQ

SEQ ID NO: 319353 - protein, 43 aa, Zea mays
  Clone ID: MRT4577_54321C.1.pep
MAGAGLRAKAAGALALALVLALAGANSEGDALSELHRSLKDRV

SEQ ID NO: 319354 - protein, 120 aa, Zea mays
  unsure (1)..(120): unsure at all Xaa locations
  Clone ID: MRT4577_54322C.1.pep
LKAQRPGETACTGLLHNAGAHHFDDCARFMAYHLTEYRRYCNINNILLTLNLQHAMNTLLMPPNTQSSLHDLIDHYMYNDTAPPXTSSTHISXYHYINQIDQQQYLKMLEPTNFIHEFLT

SEQ ID NO: 319355 - protein, 73 aa, Zea mays
  Clone ID: MRT4577_54323C.1.pep
FLFLSPKVTLLATCRLGTQAIHDIQAEGEMDRGRAQALLGSLRQHGRAWRRIQGESCDTHLLYLCSCLLYKLY

SEQ ID NO: 319356 - protein, 110 aa, Zea mays
  Clone ID: MRT4577_54324C.1.pep
MMIRRGSSKISSPLALLCLLLLLLLLQVIVCSSSNCAAAARLLPGAGPLPPLRAAAPSGGDEHSAGSETTKGAAEACEEGNDDKDECVQRRLLLDAHLDYIYTQHKGNKP

SEQ ID NO: 319357 - protein, 112 aa, Zea mays
  Clone ID: MRT4577_54325C.1.pep
MMIRRGSSKISSPLALLCLLLLLLLLVIVCSSSNCAAAARLLPGAGPLPPLRAAAPSGGDEHSAASEVTTQDTTKGAAEACEEGNENDECVQRRLLLDAHLDYIYTQHKGKP

SEQ ID NO: 319358 - protein, 222 aa, Zea mays
  Clone ID: MRT4577_54326C.1.pep
MAAAAEVVLLDFWVSPFGQRCRIALAEKGVAYEYREQDLLDKGELLLRSNPIHKKIPVLLHAGRPVCESLVILQYIDEAWPDVAPLLPKDDPYARAQARFWADYIDKKIYDSQTRLWKFEGEAREQAKKDLVEVLETLEGELADKPFFGGGALGFVDVALVPFTSWFLAYEKLGGFSVQEHCPRIVAWAARCRERESVAKAMSDPAKVLEFVQFLQSKFGAK

SEQ ID NO: 319359 - protein, 67 aa, Zea mays
  Clone ID: MRT4577_54327C.1.pep
KTNLHLEKAENTPNFCAPTNLPTPYQMKTHLLPSGPLTQVANQNQRNHRKQKIHPSIIAQTTTIFCP

SEQ ID NO: 319360 - protein, 222 aa, Zea mays
  Clone ID: MRT4577_54328C.1.pep
MAAAAEVVLLDFWVSPFGQRCRIALAEKGVAYEYREQDLLDKGELLLRSNPIHKKIPVLLHAGRPVCESLVILQYIDEAWPDVAPLLPKDDPYARAQARFWADYIDKKIYDSQTRLWKFEGEAREQAKKDLVEVLETLEGELADKPFFGGGALGFVDVALVPFTSWFLAYEKLGGFSIQEHCPRIVAWAARCRERESVAKALSDPAKVLEFVQFLQSKFGAK

SEQ ID NO: 319361 - protein, 126 aa, Zea mays
  Clone ID: MRT4577_54329C.1.pep
VVISEIGDGRDGFSSGEETMYSAETRESRNIPSPKEKKTGIVGRSQSLVNRSKWDSPKSVESSRGFPSKSQTFIPLRKPHLQAASISQKSQDYFSPTVSSNMKKRNLSQTPMKPRQRAQVTSKWIT

SEQ ID NO: 319362 - protein, 136 aa, Zea mays
  Clone ID: MRT4577_5432C.1.pep
VRSPLSATLPQVGGRILVTWYIVWSFPETQSHVLVASLVLSWSITEVIRYSFFGLKEAFGITPFWLLWLRYSTFTLLYPIGLISEVGLIFVAMPHMKGRSFYICAALTSLYIPGFPYLYRYMLAQRKKVLSKAKTA

SEQ ID NO: 319363 - protein, 184 aa, Zea mays
  unsure (1)..(184): unsure at all Xaa locations
  Clone ID: MRT4577_54330C.1.pep
MAAAAEVVLLDFWVSPFGQRCRIALAEKGVAYEYREQDLLDKGELLLRSNPIHKKIPVLLHAGRPVCESLVILQYIDEAWXDVAPLLPKDDPYARAQARFWADYIDKKIYDXARLGFVDVALVPFTSWFLAYEKLGGFSIQEHCPRIVAWAARCRERESVAKALSDPAKVLEFVQFLQSKFGAK

SEQ ID NO: 319364 - protein, 110 aa, Zea mays
  Clone ID: MRT4577_54331C.1.pep
ENPKAPKGGPTYRTPLRGPRNPPQTLPCLKAKFPVDPHYWGGHPPTKRGGNLCMKKYRDPPYREAAKGAPPFRERTQSTGNPGRSGQLGSAKGASSTKGWGGCPNPLASR

SEQ ID NO: 319365 - protein, 97 aa, Zea mays
  Clone ID: MRT4577_54332C.1.pep
GKTPNRGGKKDAFLPTLTFTTGKTKGGSTWDIHFFLHNGNGNHDFWTMVHFQKKYYYLPPFFFPFFLKKNNSDALFTPLGSKLQSMNKMVHFPKQVF

SEQ ID NO: 319366 - protein, 106 aa, Zea mays
  unsure (1)..(106): unsure at all Xaa locations
  Clone ID: MRT4577_54333C.1.pep
PGKIITLEAESSDTIDNVKXKIQHKGGHPPVTQKRFIFAGKXLDDGRTLHDYNVQKESHLHLELQLLRGIHKGKNKNCTTPNKIXHSRTXAKLCMLQFYTVLDFIC

SEQ ID NO: 319367 - protein, 239 aa, Zea mays
  Clone ID: MRT4577_54334C.1.pep
INGINVFDHIEVFGGSNNLSGDTLRVMPLDIFGTRRQGRSTSIYNLLGRASDHGVLDHPLLEEPSSTTNFSHQGHPENLVEMAFSDRNHESSSSRLDAIFRSLRSGRIGHRFNMWLDDGPQRIGSAAPAVPEGIEELLISHLRRPTPQPDGQRTPVGGAQENDQPNHGSDAEAREVAPAQQNENSESTLNPLDLSECAGPAPPDSDALQRDVSNASELATEMQCERSDAITRDVEAVGP

SEQ ID NO: 319368 - protein, 87 aa, Zea mays
  Clone ID: MRT4577_54335C.1.pep
MAGAAEDARALFRAGVCAALEAWPALPIAVENGFGGVHSHEKAKWLGGAVEDSFMRNADLELDEVEDFLGELLTNEFDTVVEDGSLP

SEQ ID NO: 319369 - protein, 67 aa, Zea mays
  Clone ID: MRT4577_54336C.1.pep
QNHSTLIHSTPNYTNSSFQIHRLAHYSTHLLVVMLKTNRHKPQKATVVTTIPQTIKTKAKLPKIIPT

SEQ ID NO: 319370 - protein, 88 aa, Zea mays
  Clone ID: MRT4577_54337C.1.pep
LEPHSTGARLEMFRTISVRDHLDRPLLNADLLRLHTLDYARDLLTHCSRLIELDYQCNRQYICIEYYGLNVMVKILRIGIDIGHLRYI

SEQ ID NO: 319371 - protein, 150 aa, Zea mays
  Clone ID: MRT4577_54338C.1.pep
TGRLSAGYLNDPESTKNTIDKDGWLHTGDIGYVDDDDEIFIVDRLKEIIKYKGAIVPLEAGRALLITHPEIKDAAVVSMNDDLAGEIPVAFIVRTEGSQVTEDEIKQFVAKEVVFYKKIHKVFFTESIPKNPSGKILRKDLRARLAAGVH

SEQ ID NO: 319372 - protein, 221 aa, Zea mays
  Clone ID: MRT4577_54339C.1.pep
CLRITSVRFHQGYGMTEAGPVLAMCLAFAKEPFEVKSGSCGTVVRNAELKIVDPDTSASLGRNQPGEICIRGEQIMKGYLNDPEATKNTIDKDGWLHTGDIGYVDDDDEIFIVDRLKEIIKYKGFQVPPAELEALLITHPEIKDAAVVSMKDDLAGEIPVAFIIRSEGSEVPEDEIKQFVAKEVVFYKKIPKVFFTESIPKNPSGKILRKDLRARLAAGVH

SEQ ID NO: 319373 - protein, 1099 aa, Zea mays
  unsure (1)..(1099): unsure at all Xaa locations
  Clone ID: MRT4577_5433C.1.pep
MEVDPSPSSRSPRPPPPPLAAMPSYFDPESSGRREEYRRYRKRLSSSNVSPLLGRSLSKTSGPRLLYDGESIPRQPNAGLLLEDIKQEAADYSNIESLDGLRLFGSPKRTSLDGGSASDAAYSSGRQAVRQTLKPVKLEDDMYVPHEGETPSTMFATLLDSGIQGLMHFPDVIQQFERTCRNASESIRSAATGKLRVGVXKLMQQNALLLLDXAASWSLLWHIYGKEHEELSGELLVPPITSHLGSCRFVAAQFTAQLCLLLILWLEGLASEALDLEKKVRGRHVGSYLPSSGVWHRTQRYLKRNNADSTIVKHVDFDAPTREGAQLLPDDKKQDELLLEDIWTLLRAGRLEEASDLCRSAGQAWRVATLCPFGGINMFPSLNALHKNGKYRTLQAMELESGVGRQWRLWKWASYCASEKIAEQDGGRYEMAVYALQCSNLKRVLPICTDWESACWAMARSWLDVQVDLELSQYQTSRPEKQLDDDMNGAQSSVGPESWPYHVLDQQPHDLTALLQKLHSSDLVHETVSRACREQHRQVQMNLMSGNISHLLDLLWSWLSPAEENHNNTARPLDDPEMIRFGAHIVLVLRHLFSDGMDDELDEKLVTVGDLIINMYVRYLFSEDQEELVGIYASQLQHDLCITLFVEMMELRLNSSLHTMYKLFLSAVEYLPFSSDNVSKACFEEIIERVLSRSRQTKPTKYDGDFSDVAHQHHLQSLQKAMVIQWLCFTPPSSIPDFQMISGKLLIRALTHSNTLFREFSLISMRRVPELPAGPHKLLAILAEPLKQKENLISREDPEVSDNLPEFEDWHEYYSLDATYRSWLKIEMMNAAVSPEMLSAEEKGQAVAAAKETLNLACSLLRRDGRPWLYAVESSPFESPDVIFLELHASAMLCLPSGECMLPDATSCTALTSALYSTVSEDDVLHRLLKVDVQVSSRDPCCIEVALRCLAAEGDGYGLHEANDGGLLAAVMAAGFKGELSRFQPGVSMAISRLDAWYSDRSGSVESTAAYIIRGLCRRCCLPETILRSMQACIALSAAGDDLDYSLDKCDELVELVGSAESGMMHLFSQQQLQEFLIFEREYLICTMEFEEDRLPCDG

SEQ ID NO: 319374 - protein, 111 aa, Zea mays
  Clone ID: MRT4577_54340C.1.pep
AVASVVVTEACAVDKVRGFAAERGVPVVAVDGAFDGCLELRALVDAAEPLAADEEVGPDDVVALPYSSGTTGMPKGVMLTHSTTSSLLKYRFGFSPYTCCATLVTRLRGRV

SEQ ID NO: 319375 - protein, 614 aa, Zea mays
  unsure (1)..(614): unsure at all Xaa locations
  Clone ID: MRT4577_54341C.1.pep
MNRPFCPPATRPAPARSHRTSHRLLPSFLYYHPTSCPAQRYLPDIRQASPSGSEQRSEMGSVDAAIAVPVPAAEEKAVEEKAVVFRSKLPDIEIDSSMALHTYCFGKMGEVAERACLVDGLTGASYTYAEVESLSRRAASGLRAMGVGKGDVVMSLLRNCPEFAFTFLGAARLGAATTTANPFYTPHEVHRQAEAAGARLIVTEACAVEKVREFAAERGIPVVTVDGRFDGCVEFAELIAAEELEADADIHPDDVVALXPYSSGTTGLPKGVMLTHRSLITSVAQQVDGENPNLYFRKDDVVLCLLPLFHIYSLNSVLLAGLRAGSTIVIMRKFDLGALVDLVRRYVITIAPFVPPIVVEIAKSPRVTAGDLASIRMVMSGAAPMGKELQDAFMAKIPNAVLGQGYGMTEAGPVLAMCLAFAKEPYPVKSGSCGTVVRNAELKIVDPDTGAALGRNQPGEICIRGEQIMKGYLNDPESTKNTIDKDGWLHTGDIGYVDDDDEIFIVDRLKEIIKYKGFQVPPAELEALLITHPEIKDAAVVSMNDDLAGEIPVAFIVRTEGSQVTEDEIKQFVAKEVVFYKKIHKVFFTESIPKNPSGKILRKDLRARLAAGVH

SEQ ID NO: 319376 - protein, 57 aa, Zea mays
  unsure (1)..(57): unsure at all Xaa locations
  Clone ID: MRT4577_54342C.1.pep
GFGNXLVPLIIGAPDMAFPRINNISFXLYLPSXLXLLASXIVEXGAGXGXTVXPPLA

SEQ ID NO: 319377 - protein, 558 aa, Zea mays
  Clone ID: MRT4577_54343C.1.pep
MGSVAEDSTAAAAAAASVVFRSKLPDIEIPRNLSLQAYCFERLPEVSSRPCLIDGQTGAVHTYAEVDRLSRSAAAALRGLGVGRGDVVMALLRNCPEFALVFLGAARLGAATTTANPFYTPHEIHRQAAAAGARVVVTEACAVDKVRGFAAERGVPVVAVDGAFDGCLELRALVDAAEPLAADEEVGPDDVVALPYSSGTTGMPKGVMLTHRSLVTSVAQQVDGENPNLYFSKDDVVLCVLPLFHIYSLNSVLLAGLRAGCAIVIMRKFEIGALVELVRAHGVTVAPFVPPIVVEIAKSPRVGAADLASIRMVMSGAAPMGKDLQDAFMAKIPNAVLGQGYGMTEAGPVLAMCLAFAKEPFEVKSGSCGTVVRNAELKIVDPDTSASLGRNQPGEICIRGEQIMKGYLNDPEATKNTIDKDGWLHTGDIGYVDDDDEIFIVDRLKEIIKYKGFQVPPAELEALLITHPEIKDAAVVSMKDEVAGEVPVAFIIRSEGSEISENEIKQFVAKEVVFYKRINRVFFTDSIPKNPSGKILRKDLRARLAAGIPSSDNTQSKS

SEQ ID NO: 319378 - protein, 80 aa, Zea mays
  Clone ID: MRT4577_54344C.1.pep
GPPKNLFDPIVAPVKKKAWACPPNFVPGKKAHRVWYATSFFFGSERGDPPEIIKPPKSIFFFFFPFHCKGNLKKKVGVVP

SEQ ID NO: 319379 - protein, 121 aa, Zea mays
  Clone ID: MRT4577_54345C.1.pep
NFRKLKTTFPENFQTELLEILHENQIKHVKEFSKCYNKSIHILFSRSDHKQYPESVVFKVERPCCQRVHKTVPWAKKKRQNFQSRFPFYIILNSYFCVCLIMYEGLSHMVYNLIYTCMILQ

SEQ ID NO: 319380 - protein, 67 aa, Zea mays
  Clone ID: MRT4577_54346C.1.pep
RRSITIDGPGGCMIVVLHWDQTTRCRQPLSVLSATTLSSIKATIYIGPCCSFATTTITIHALSSCLM

SEQ ID NO: 319381 - protein, 94 aa, Zea mays
  unsure (1)..(94): unsure at all Xaa locations
  Clone ID: MRT4577_54347C.1.pep
MEAADEENTLLXSPSHSEXVGWKYASAGSVDINKQAVLKNTTGRWRACKPVLGAGFXARMRFSAFYEKRGNNLPTVLHEKKVDAKNKISVWTGE

SEQ ID NO: 319382 - protein, 94 aa, Zea mays
  Clone ID: MRT4577_54348C.1.pep
RFACNEFLNGWSFIMGFLNIFPLSAGNFFSDVYHVELSDPFHCSYFTKLLKPTLLVMHLEHFFKSSVLKLLMLLPLTTMTRTTVIVVIKKNKQQ

SEQ ID NO: 319383 - protein, 66 aa, Zea mays
  Clone ID: MRT4577_54349C.1.pep
RSAAWREARVSCLTAGRSAPWSRTVHACAGAAEVAGGTWISLPGGTPSVRKDPRRCLVSACRPRFL

SEQ ID NO: 319384 - protein, 34 aa, Zea mays
  Clone ID: MRT4577_5434C.1.pep
LKCVCLVIELSQYNLHAHVCGNVFLQKKKKKKSP

SEQ ID NO: 319385 - protein, 101 aa, Zea mays
  Clone ID: MRT4577_54350C.1.pep
ACEKAKPMNIQAYLDSHRRKIQVLTVAAGMVGSVTPLKAKGSSNVEFVEAMNRNRLENVVEAVKDVSRNASKAKDIIDQCDNSVSWILLFPQISFTTLLTQ

SEQ ID NO: 319386 - protein, 55 aa, Zea mays
  Clone ID: MRT4577_54351C.1.pep
TRYSGGLVTGASGYRECDHARQKAPDAVSKFLAKNKQQAKETYFSLWGAKNVMLY

SEQ ID NO: 319387 - protein, 81 aa, Zea mays
  Clone ID: MRT4577_54352C.1.pep
PEARLSCRLPCPAPRPGVDAGSFTSCWRVWISSRRNPYAPSGNKLHSDRRAITLTWSWNTTPLISHTACGLNHVVDDASRG

SEQ ID NO: 319388 - protein, 94 aa, Zea mays
  Clone ID: MRT4577_54353C.1.pep
FILYPKSTTTSIHTKIHSYNHKTPGSHKPNSLMKGVQRKRYDFACRGTSHSRKKFSRKKPEPMCAGTCKAYAAAAVVVEITKAPSCGASSGAAT

SEQ ID NO: 319389 - protein, 253 aa, Zea mays
  Clone ID: MRT4577_54354C.1.pep
MGVVVEREEWALSSFAYPLLSAAALAAVLLLPYLSPRTAPHATGPSSPFDVGAAPFLRFRRAFLVLFSLASVVEGIHSVFGEDEFVRCRLGREQTTARLASTTAAALFPGSISGVISDKIGPRRACILYWVLQLAVGVVKSFSALRCSWINNFILAFASSVFYFCFETWLVLEHEKQDQKQDVLFDTFWLMTFFESVSLVGSQEITNVLVSDDDSRFLLPYAFAATLSVVGILYIRNASTCQHASGISYKNHF

SEQ ID NO: 319390 - protein, 483 aa, Zea mays
  unsure (1)..(483): unsure at all Xaa locations
  Clone ID: MRT4577_54355C.1.pep
MGVVVEREEWALSSFAYPLLSAAALAAVLLLPYLSPRTAPHATGPSSPFDVGAAPFLRFRRAFLVLFSLASVGQWLKXPFRVWXMSSCGVGLAESRRXRLASTTAAALFPGAISGVISDKIGPRRACILYWVLQLAVGVVKSFSALRCSWINNFILAFASSVFSFCFETWLVLEHEKVSVFLETHMCYYCVVYVVXSFXLILNFQQDQKQDLLFDTFWLMTFFESVSLVGSQEITNVLVSDDDSRFLLPYAFAATLSVVGILYIRNASSTCQHASAIGSYQKSFLAHVLRDKRVLILVLAQASIHFAVSAFWFLWAPTIVADGRYAQLSVIYPCFLASRMLGSAXSMVLRSHSPLXRNEDSLTIAYVGAGLALSIAAYDYQEIAPLVIVFCIFHACVGFILPSLARLRTMYLPNELRGGMMSFSMSLANAATFVFLIQGSAHHRRVANSTILSLASYGLLGAGGCVHMLRRWRKHTRLNARSL

SEQ ID NO: 319391 - protein, 124 aa, Zea mays
  Clone ID: MRT4577_54356C.1.pep
TPPANSPSEARALELPSRMTSPWCLSAPPAALGFSASASTLARVPVPGSRRRRWNALVVCAAPDEEKITKRSPLDFPIVILVPFNLPSLHLILAACPGRIGGGFSFGSGKLTKNRFRDWCRQNQ

SEQ ID NO: 319392 - protein, 105 aa, Zea mays
  Clone ID: MRT4577_54357C.1.pep
TPIFYFKEKPICDTYPKVCKHMGHHLNHSGPSLSSLKSRVSLTKLFLFHLLNCNNRNPKKLEQSKTPRIYCTVGSLNISSLAEVIMTPLKLTRAKQLQYNINRQN

SEQ ID NO: 319393 - protein, 92 aa, Zea mays
  Clone ID: MRT4577_54358C.1.pep
TVDRMRLCLKIQSGIPRFQFYERLAAHKMFSVGHASENAPLVNNSTRRMFMEGARFKAHPWPGINLWTPGLYLCPVDGRKPLLYKNNPAVYL

SEQ ID NO: 319394 - protein, 48 aa, Zea mays
  Clone ID: MRT4577_54359C.1.pep
FLIPFASATHAMSWWLTKASYDQLQLHLDSRCLAPVLKNLPCPAIILS

SEQ ID NO: 319395 - protein, 60 aa, Zea mays
  Clone ID: MRT4577_5435C.1.pep
NLYIISLSISNTLFREFSLISMRRVPELPAGPHKLLAILAEPLKQKKKKKKKSTLRCYHC

SEQ ID NO: 319396 - protein, 92 aa, Zea mays
  unsure (1)..(92): unsure at all Xaa locations
  Clone ID: MRT4577_54360C.1.pep
KRFFYAPPQKQLGAKLCGRVLKPQGKKLSKGGEEIPGLNQPFLNWEKKFVLLYPSFANKRPLAKIPFLPFFNLPPFLKNKTPPPSGKKXIPK

SEQ ID NO: 319397 - protein, 54 aa, Zea mays
  Clone ID: MRT4577_54361C.1.pep
CSISSKKKKKKKKKKKKKKKKKKKKKKKKKKKKKKKKKKGKKKKKKKGLRPAPP

SEQ ID NO: 319398 - protein, 57 aa, Zea mays
  Clone ID: MRT4577_54362C.1.pep
GVRGRVGPPLLGSLFWSLYIGPHSDCVLTSGLIFVGINQMGGKLASPVGFFRAKFPV

SEQ ID NO: 319399 - protein, 87 aa, Zea mays
  unsure (1)..(87): unsure at all Xaa locations
  Clone ID: MRT4577_54363C.1.pep
PRGNFPKLIIGPRPHMGPPRLKSIKPGKGFMSKFFGHPYNPGATFLEDVVIPPQTGAAPPEPPLPPFSLWETPXPPCLCKALIPPPQ

SEQ ID NO: 319400 - protein, 47 aa, Zea mays
  Clone ID: MRT4577_54364C.1.pep
CSSFCRSIMHGMAIVLCLYVYVISMLIMSSRISINVCMVWIMVKGEY

SEQ ID NO: 319401 - protein, 55 aa, Zea mays
  Clone ID: MRT4577_54365C.1.pep
CDIVFVFHAAGTEKTRHCFRNRSEQSACKHMELNYHMNTVIFSHESKKNQEHFSL

SEQ ID NO: 319402 - protein, 114 aa, Zea mays
  unsure (1)..(114): unsure at all Xaa locations
  Clone ID: MRT4577_54366C.1.pep
PTIPRIEKTEATEEERKEKAEGTPKKTTARGARHXKAKTEKGKKKEEKEIIGTRSRATSNLPAKEGHTSAKHNGKEQIPSDRTNPMEGRKLGENAPTRTTTSKEKTRKDTKARR

SEQ ID NO: 319403 - protein, 289 aa, Zea mays
  Clone ID: MRT4577_54367C.1.pep
SAGEDSPAGILERSDGQIPVEDDSQPEPDYDANVPGGSAQTRDYYMDTSSRRRRSLDRSSSVRRSFEVTDPKPVPVPVPVPVPVTAPAAIVNGKESPAMGSSEFYHFHHAEDLFDHRFSTNSLVEDFSASLDAAFHGPAKKPPRWRKAWSLWGLIHRRAAGRRDGASDAADRAFSEPWPDLRVRGYNGRMQRCNSNASARSSFSSNSGGLGSSRRSYLDAHGKRRREECAALERNRSARHSPGNADNGLLRFYLTPIRSASGRRTGVLPVKGGRQLRSQSFARTMLGLY

SEQ ID NO: 319404 - protein, 57 aa, Zea mays
  Clone ID: MRT4577_54368C.1.pep
ERMREFADKQGWSIQRNEDGALDRLYDEIGVKRQVLNPWMHNHKNQLAYQVRLRDRY

SEQ ID NO: 319405 - protein, 173 aa, Zea mays
  Clone ID: MRT4577_54369C.1.pep
MGEWDPRGRPGPSPHTGCDPPPSLQAANPSRPQRRIADLPAMTFKRRNGGRNKHGRGHVKYIRCSNCAKCCPKDKAIKRFLVRNIVEQAAVRDVQEACVHDGYVLPKLYAKVHHCVSCAIHAHIVRVRSRENRRNREPPQRFRRRDDGPRPGQGPPRPGAAATAAPPAAAPRA

SEQ ID NO: 319406 - protein, 75 aa, Zea mays
  Clone ID: MRT4577_5436C.1.pep
PTRPREDPEVSDNLPEFEDWHEYYSLDATYRSWLKIEMMNAAVSPEMLSAEEKGQAVAAAKETLNLACSLLRSKS

SEQ ID NO: 319407 - protein, 166 aa, Zea mays
  unsure (1)..(166): unsure at all Xaa locations
  Clone ID: MRT4577_54370C.1.pep
MLPQTFKRRNGGRNKHGRGHVKYIRCSNCAKCCPKDKAIKRFLVRNIVEQAAVRDVQEACVHDGIIVALISCIIXRMIYLXLSRETXLNIFICTGYVLPKLYAKVHHCVSCAIHAHIVRVRSRENRKNREPPQRFRRRDDGPRPGQGPPRPGAAATAAPPAAAPRA

SEQ ID NO: 319408 - protein, 64 aa, Zea mays
  Clone ID: MRT4577_54371C.1.pep
SRSSQVIGNKWDVYLDLLQADYSEGDALDALELFRYCCRRMLMTHVDLIEKLLNYNTLEKTETS

SEQ ID NO: 319409 - protein, 81 aa, Zea mays
  Clone ID: MRT4577_54372C.1.pep
LHSEPTLSLTWPLAQDLRRSHATLHLMLWEQRAVAKKSPQRYAPGSINLHNRDGQTSDRPSPPGPEHNCPMRPTQTCPSTR

SEQ ID NO: 319410 - protein, 112 aa, Zea mays
  unsure (1)..(112): unsure at all Xaa locations
  Clone ID: MRT4577_54373C.1.pep
RLRVRGNFAGEGFIKAFVEAYPHIKCTVLAPPKNIVDKPADGVKINYVQGDMLSFIPPAQTXCIKLGLHHLTDEERVKVLAQCXKAIYXPKDGXGKLIIGDILIDHFGPMLE

SEQ ID NO: 319411 - protein, 85 aa, Zea mays
  unsure (1)..(85): unsure at all Xaa locations
  Clone ID: MRT4577_54374C.1.pep
WGSWGGVGALPAVVGWWIGGVAGLGFHAPGAPLVRGSREGGVLWVPARFWGRWLLLRPWRGLNSRIMARFFLVXNVGKXLCFPCC

SEQ ID NO: 319412 - protein, 165 aa, Zea mays
  unsure (1)..(165): unsure at all Xaa locations
  Clone ID: MRT4577_54375C.1.pep
CFLHPLRGGGGXTTKHPPGGPXRRPRRSPSPHPAAPPSPSLLAGILSDLSXRSXAPXPGFVGGSFXXXTTXXPXXLXSXXAXXSXSPXPPPPXXXXXIXXXXXXTXLXLXXPPXXXIXFPFLXLXXXSXISFLQXXHXXSIXKLXPXLXSLPXXLXPSYXXXXIF

SEQ ID NO: 319413 - protein, 80 aa, Zea mays
  unsure (1)..(80): unsure at all Xaa locations
  Clone ID: MRT4577_54376C.1.pep
YRVYICXKKKKKKKKKKNKKKLNKKKKKKKKKKKKXKYKKKIKKKKNGGGRFKGTKLNTPGMQDKSFFMGAPKLNTRAAV

SEQ ID NO: 319414 - protein, 95 aa, Zea mays
  Clone ID: MRT4577_54377C.1.pep
DPHRALDNTIRHRRQEHELITHQAPIVSVGIGRNAGTEGYGLRAIFHSGLSMRQFCLIPSKSCYDAFIIMLVNGDVNRNMLLLSGTPRFLAELLC

SEQ ID NO: 319415 - protein, 55 aa, Zea mays
  Clone ID: MRT4577_54378C.1.pep
EPTIASRHLLLLLLTALLPTAATADPDPQQNYCVPYTHLCLRRSVNLSLLPFHPC

SEQ ID NO: 319416 - protein, 96 aa, Zea mays
  unsure (1)..(96): unsure at all Xaa locations
  Clone ID: MRT4577_54379C.1.pep
RVRRSSGHVLAIXFIFERNPTTVRNYRIWVRYQSRTGYHNMYKEYRDTTLNGAIKQMYNEMDSRHRVKSPCIQIISTVTVHFKLCKRDNTKQFHNT

SEQ ID NO: 319417 - protein, 88 aa, Zea mays
  Clone ID: MRT4577_5437C.1.pep
FLASGAVKVAGPCARAEELVRSEPRPDLFSAAKVARPRAGASTLGAVAGPCPLGSGARSCLRGGSGGAFPRSHVWCACSSSTPAYSFS

SEQ ID NO: 319418 - protein, 41 aa, Zea mays
  Clone ID: MRT4577_54380C.1.pep
DYQLTALAGHFIRQPRDQVAQCRRSIFLCLDHLRVPVSLLC

SEQ ID NO: 319419 - protein, 135 aa, Zea mays
  unsure (1)..(135): unsure at all Xaa locations
  Clone ID: MRT4577_54381C.1.pep
MYPHRWVADIRGALCPGSYIISPLMXDLMEGFSLKQNDADQLVWRLTRTDSYSSKXAYNTFFLSSIRFAPWKRIWKSWAPLCCKLSIWLAVXRTVXNADRITKRGLXHPAACPFXDEEEKTTQHLLIPCVFAWKI

SEQ ID NO: 319420 - protein, 165 aa, Zea mays
  Clone ID: MRT4577_54382C.1.pep
LVHLAQTSGNAILWTMPCPSFAISVIITSVLYCNLFKKLPWQTPNQGAVHRQLCDIFCQLEIVFYGKYNIYNQDPLVSHDAIKNKFTTFPWNPGASKVLHRLGGKPKLKGRGMSHILCCRTRHNVTHLMLSDHTQENGKQPHRERRANVCTRRPEWCKCVAGCGT

SEQ ID NO: 319421 - protein, 153 aa, Zea mays
  Clone ID: MRT4577_54383C.1.pep
RTQRARASTPSRPRASPTSRPRRTSSTPGRAPPPTPTSSRSSSATSAPPAATATSSSATTTSGRRAPAPPGTCPRPPKSSALSATRSPARCSACRTSAAPGGPSSSTTWAYSPRPTAGSGAGRPTDSPSPSSPSMSPAPASSGFSRRKGSGRR

SEQ ID NO: 319422 - protein, 88 aa, Zea mays
  Clone ID: MRT4577_54384C.1.pep
IKSIIVITTVHTNKNAGVRTEKKREEKTKQNKSGSKEQRSDEEGGGGSGPLDNLEGVDSRGNGKYGEGDGGAEAGGGAGRGGGRRGLG

SEQ ID NO: 319423 - protein, 219 aa, Zea mays
  unsure (1)..(219): unsure at all Xaa locations
  Clone ID: MRT4577_54385C.1.pep
MRSFALLALVGPLAVSAASGSGHSTRYWDCCKPSCSWSGKAKVSAPALTCDKKDNPITNLNAVNGCESGGSAFACTNYSPWAVNDDLAYGFTATKLAGGTEASWCCACYALTFTTGPVKGKKMIVQSTNTGGDLGDNHFDLMMPRGGVGIFDGCTSEFGKPLGGAQYGGISSRTQCDSFPELLXKDGCHXXRFDWFKNADXPDFXTFEQVQCPKELLAI

SEQ ID NO: 319424 - protein, 88 aa, Zea mays
  unsure (1)..(88): unsure at all Xaa locations
  Clone ID: MRT4577_54386C.1.pep
YLRPRAPYRIFSSPSSLPHPSPHRRGHAAANLRPRLATHPATSEETNHQTRLSPIPKPAPGFRSHPSSPISVPARPIHPTPPPPAXPR

SEQ ID NO: 319425 - protein, 97 aa, Zea mays
  Clone ID: MRT4577_54387C.1.pep
GTKPLLWAAFFKGGMKNFFPPPPQKFWERPLGFLEAPQITRWGGRANFFFFFPREAFLGGLIAPPKGGGKSFFVSPNRGGNFTGWPQKKKKKKKHIP

SEQ ID NO: 319426 - protein, 82 aa, Zea mays
  Clone ID: MRT4577_54388C.1.pep
PPLSLFPKKKKSCRAKILSTPPEKDTKKGGSVGVVPLGSGPKSEGTPPPLRRHLGEFSRNHNRKKPPTKGFFGHPPRFFLYP

SEQ ID NO: 319427 - protein, 64 aa, Zea mays
  Clone ID: MRT4577_54389C.1.pep
WWPRDQLFMFPRFSGCLVWRQLDWLVVRVRRYTPLWLDIPLFWFLGAVEESGGVIISLEPNSEL

SEQ ID NO: 319428 - protein, 165 aa, Zea mays
  Clone ID: MRT4577_5438C.1.pep
MEVDPSPSSRSPRPPPPPLAAMPSYFDPESSGRREEYRRYRKRLSSSNVSPLLGRSLSKTSGPRLLYDGESIPRQPNAGLLLEDIKQEAADYSNIESLDGLRLFGSPKRTSLDGGSASDAAYSSGRQAVRQTLKPVKLEDDMYVPHEGETPSTMFATLLDSGIQG

SEQ ID NO: 319429 - protein, 39 aa, Zea mays
  Clone ID: MRT4577_54390C.1.pep
HSQYVEWDVFFCCCLLNKDSLSVLRWGYSEMTVLAYSSF

SEQ ID NO: 319430 - protein, 85 aa, Zea mays
  Clone ID: MRT4577_54391C.1.pep
MVLQNDIDLINPPAELEKLKHKMKRLEQTPNSFFRDVKCQGCFSITTGLSHSQTDVGCPGCQTGLCQPTVGKARLTEGCSFRRKG

SEQ ID NO: 319431 - protein, 114 aa, Zea mays
  unsure (1)..(114): unsure at all Xaa locations
  Clone ID: MRT4577_54392C.1.pep
MGLHADQKRIIFDWAQIEDGRTLADYNIQNEISILLVLCITGRMQXILRMTLTFXTIALWGELFYAVDNVKAXIHHNDCIHADLIQVILSDTDIEDCRTLADYNIQNESTLHLV

SEQ ID NO: 319432 - protein, 306 aa, Zea mays
  Clone ID: MRT4577_54393C.1.pep
FHYSPMITLSVNLPPPVLDFNTHATQDWVKREAVEVFHTMDLLHTEVYDALNNLEKSIITDDDSTKTSIHRQIVEMKDLLNVERNEYEVLLLPVIMGSSHSFKPNIDILELNRVRRSLLLDAHTWDRRLCGIDSLEADSHISRTDPFNLEKTQGINEGRSDLLQTVRKHGGTYEEPCPQHSSESPRKSLLSTEGHLNDKKYVMVETDLPVGLVDGDAGLDLIFNKLNTCEEGRCLSKYPSKTGPVERLPSLASILADKIDMAWSGFGELDYNLPHGLSKANENTSLNLFGNPSYKKATGPVRIHSF

SEQ ID NO: 319433 - protein, 94 aa, Zea mays
  Clone ID: MRT4577_54394C.1.pep
TRCWKSTCSTPINLCFRAYWLLRRGHAMALLGARRDGRHTHLQRGARVCCACLRAVEKRGQSGSEPSARILQLLLENGIRVNELTRTEVALVVP

SEQ ID NO: 319434 - protein, 109 aa, Zea mays
  unsure (1)..(109): unsure at all Xaa locations
  Clone ID: MRT4577_54395C.1.pep
CQPSRACRSMFILERMKVSFRCDPNVGLPTYGSRGFSMIPKAALDLPSASLWAVSVQPCIRPALVGHAYGRYCRVCKRSRRVYRDRGRPGASAHGKQKGXXERGEGGGG

SEQ ID NO: 319435 - protein, 178 aa, Zea mays
  Clone ID: MRT4577_54396C.1.pep
MTTQGGNRSTTTLVAAVAVVLAVAAASSLAGVASAEKAGGFVVTGRVYCDPCRAGFETNVSRSVAGATVEVVCRHFGASKETLKAEATTDDSGWYKLEIDQDHQEEICEVVLARSPDPGCAEIEEFRDRARVPLTSNNGIKQQGVRYANPIAFFRKDPLKECGALLEKYDLKDASETP

SEQ ID NO: 319436 - protein, 84 aa, Zea mays
  Clone ID: MRT4577_54397C.1.pep
VPTPKPYSILFGKAGFPPFKSVGWLLLAPHKGVFFSELNAPRLKKGAPFFLGGCFFCPHLSPYFFRGVLFWARFPLGLVKWTNR

SEQ ID NO: 319437 - protein, 141 aa, Zea mays
  Clone ID: MRT4577_54398C.1.pep
TDFTLTISSLQPVALASCQRRHTCPPPITFGQGTKVEIKRTVAAPSVFIFPPSDEQLKSGTASVVCLLNNFYPREAKVQWKVDNALQSGNSQESVTEQDSKDSTYSLSSTLTLSKADYEKHRLYACRVTHQGLSSPVTKSF

SEQ ID NO: 319438 - protein, 159 aa, Zea mays
  unsure (1)..(159): unsure at all Xaa locations
  Clone ID: MRT4577_54399C.1.pep
GGEKGGKSQGGGRESPPKNRGPFEGKPHPPRGKHPARGGAXTPAXGGTKGKKNGAGPPGKKPGSGKGVPAPTIKKGGPRGVSPTXRGKPAPQXSKTTPPKRGRGPPKKAPPTPPRGEKKTNPPPLISPPGEKTKNFFFFFFFFFFFFFFFFFFFLFFFF

SEQ ID NO: 319439 - protein, 51 aa, Zea mays
  Clone ID: MRT4577_5439C.1.pep
KRWNALLLRNDIALIKLTEHVELSDTIQVTCLPEKDSLLSKDYPCYVTGWG

SEQ ID NO: 319440 - protein, 52 aa, Zea mays
  Clone ID: MRT4577_543C.1.pep
FSRVDMLCAFVSESLFPPQKRNAGDPPRPRPDSPRGTPAPLQVPVQKCQGRP

SEQ ID NO: 319441 - protein, 49 aa, Zea mays
  unsure (1)..(49): unsure at all Xaa locations
  Clone ID: MRT4577_54400C.1.pep
RIVFSIILMLFSPNXEFPAKIKAPKVWKKKRDXFKKKVRQCVPKFQEML

SEQ ID NO: 319442 - protein, 68 aa, Zea mays
  Clone ID: MRT4577_54401C.1.pep
GVREKKKKKKKKKKKKKKKKKKKKKKKKKKKKKKKKYKKKKRGGRFYKDPIFLFVGGGDILIFFLGGL

SEQ ID NO: 319443 - protein, 206 aa, Zea mays
  Clone ID: MRT4577_54402C.1.pep
SSAPWEILRQRPYLDVSPLCGQAVRRLQGSLWVLHPFPFAYSNLAGPLCDCVQPRAIDHCSQQRRASLTLTPNTTRTCTRAPHRSARQTLPRQRLAKLSDPSSSLVESQACTPSTPCSPRFVVIVHYLRPHRLPHRFSRPTGHRARRVFLRADSHVPFTPSASRVVEKITLSMDQSPTGVISWRLVITLKTCGKLFLLGTCSQMLS

SEQ ID NO: 319444 - protein, 84 aa, Zea mays
  Clone ID: MRT4577_54403C.1.pep
SNKNRRVCPLKPPRRSLHWLVGPPPAPVRSCTSAPHRASRALIYRQPSFVKSLQNPQSKQSSHRRAYALALDRPTFGLDSIGPP

SEQ ID NO: 319445 - protein, 40 aa, Zea mays
  Clone ID: MRT4577_54404C.1.pep
GPSPYSVRPRRNPARPTTPADAVTSASATPATRDHMIRLP

SEQ ID NO: 319446 - protein, 98 aa, Zea mays
  Clone ID: MRT4577_54405C.1.pep
RPGKKKSSHVTLSCLQNPLDTVPGTMVASYFHLMKLGSLGNPSPTPLPGGFSLVLAPAGIPVGAPSVSFRLQQHRRAALSTVFSPEPSTTDPNSAALP

SEQ ID NO: 319447 - protein, 164 aa, Zea mays
  Clone ID: MRT4577_54406C.1.pep
AAFFFFFFLGWDFFYYFFFIFFFFGKAWNQKTKFQRINQGEGIQTKENGLKSEHRGKKKKGGGEEKWGPGQKPKGAGQRTQLGLLKGGLKPEKKKPKGDAKKQEAVKGGGEPKNKRGGVKWGAKRAAGPLPARGAEQRQNLGKREVGGLAHPEKRNLGKPLEAA

SEQ ID NO: 319448 - protein, 89 aa, Zea mays
  Clone ID: MRT4577_54407C.1.pep
QGRSTLARPSASACPCPRPGAAAGAGGSGKEFEDLLPVMFDRLGVAGLLSELRVGFRLLAVRERGAITPDSLRRGASSALGVAGMAHAN

SEQ ID NO: 319449 - protein, 117 aa, Zea mays
  unsure (1)..(117): unsure at all Xaa locations
  Clone ID: MRT4577_54408C.1.pep
DQKLKDCIACSTNCSAYLSYESTAFTHSLTIRPISDSTSXPLRGLLFYPHRGPLQPRTSXQSAVLCRSAQRXARQRQRWGPCRCTALGTTASAALALPTDPAIDTSQPSTEAPRRAA

SEQ ID NO: 319450 - protein, 67 aa, Zea mays
  Clone ID: MRT4577_54409C.1.pep
VGLIDRKENLALGERICMQPSAVWSKEYSGIFSINMYPSSKNESLRYSPCIFRISIDSKWVLPYHHS

SEQ ID NO: 319451 - protein, 320 aa, Zea mays
  Clone ID: MRT4577_5440C.1.pep
MTFYTNMDLNASPVPDDDEQQPYDDSVEVGYAQTEHVESAVATLRREREERRKRLKREQQDDGSRLHSQQIRNDYAPQPKRHSRIKEAPQGWLDCPAFGEPIDKIIPSKVPLDETFNESVPPGKRYSSKQLVNKQRKAGREIGLVIDLTNTTRYYSPAEWTKQGTKYAKIACKGRDAVPDNESVNKFVYEAMMFLDRQKQSKNPKYILVHCTHGHNRTGFMIIHYLMRTHVSCVAEAISIFAQRRPPGIYKRDYIEALYSFYHEVPDNMMIACPPTPEWKRPDDLDLNGEAKQDDDDDNGDPGPLHNESEDKVITNDDVL

SEQ ID NO: 319452 - protein, 120 aa, Zea mays
  Clone ID: MRT4577_54410C.1.pep
RYIDRIKLLVVAPLEPPVLLLALEIPVTRVILRILVTARDPKRRPGCPRCTAETKVRRRIPDTTAVVPSPDGHENLTRHPASARLSGEVDSGAGGQFLPPPHSLSEPVRCLAGDTMTWKG

SEQ ID NO: 319453 - protein, 43 aa, Zea mays
  unsure (1)..(43): unsure at all Xaa locations
  Clone ID: MRT4577_54411C.1.pep
KLANPGVFVSVPLAWSWPFGALVSLWRGPCRXLXCLPASESWV

SEQ ID NO: 319454 - protein, 23 aa, Zea mays
  Clone ID: MRT4577_54412C.1.pep
LSKKLLMELTSKLLTNLLKIVNS

SEQ ID NO: 319455 - protein, 241 aa, Zea mays
  unsure (1)..(241): unsure at all Xaa locations
  Clone ID: MRT4577_54413C.1.pep
MATNENLPPNVIKQLAKELKNLDESPPEGINVIVNDDDFTTIFADIEGPAGTPYENGVFRMKLLLSRDFPQSPPKATSGEICVNTLKKDWNPGLGLRHVLLVVRCLLIEPFPESALNEQXAXKMLLENYEEYARHARLYTGIHALKPKNTSKTGAISESTTALNVDKSSTASSKNTPSMPPAVSSSTASRAFGTSLQDQNPTVSDPAVGAAAARKKDGPMASKVPVDKKKLDARKKSLKRL

SEQ ID NO: 319456 - protein, 252 aa, Zea mays
  Clone ID: MRT4577_54414C.1.pep
MATNENLPPNVIKQLAKELKNLDESPPEGINVIVNDDDFTTIFADIEGPAGTPYENGVFRMKLLLSRDFPQSPPKGFFLTKIFHPNIATSGEICVNTLKKDWNPGLGLRHVLLVVRCLLIEPFPESALNEQAGKMLLENYEEYARHARLYTGIHALKPKNTSKTGAISESTTALNVDKSSTASSKNTPSMPPAVSTSSASRAFGTSLQDQNPTVSDPAVGAAAARKKDGPMASKVPVDKKRLDARKKSLKRL

SEQ ID NO: 319457 - protein, 75 aa, Zea mays
  Clone ID: MRT4577_54415C.1.pep
CFFFSYSRDQLYPFTIIAEANSTAQHLVDFTEAEEDLVSRMHRLVGNRWEIIAGRIPGRTAEEVEMFWSKKYQER

SEQ ID NO: 319458 - protein, 83 aa, Zea mays
  Clone ID: MRT4577_54416C.1.pep
RGAPSLASCTGSVVSYRYSDSISIRAGLSFGLSAPQLLMNILPECLSRNTKFSIRICESEAVWDSLSEISCAVWRALGPPTSC

SEQ ID NO: 319459 - protein, 80 aa, Zea mays
  Clone ID: MRT4577_54417C.1.pep
KPASTEDVAAINKDTRGYANPGTHPLMGYNEDTSGPKSLKETDVYNARKQISELLTLYLTNIPVDILDEIIMDGTSLRLP

SEQ ID NO: 319460 - protein, 135 aa, Zea mays
  Clone ID: MRT4577_54418C.1.pep
SAMAPILSLSGHWVVPCRRKSTTHTCYHTLGESGTDHSMTARLDLQPACSIRHLPTSFTPVDISRLKVCRRPSTVPWHTEHYYATTLDDPDTHDIGDCAAGTTANHGSAIKPTDVIIHRQTMLDRGQTYGYSMCT

SEQ ID NO: 319461 - protein, 170 aa, Zea mays
  unsure (1)..(170): unsure at all Xaa locations
  Clone ID: MRT4577_54419C.1.pep
IRHEDFGLCPLQVQSHLQPWVTEKSDINIVVVGHVDSRKCSTTXHLIYKLGRFDKRVIRKXFENDAAEMNNRTFNXTWLLASSRLYLERRITIDIXLWXFETTTYYCTXIIDAPEHRDFIKIMITGTFQADCAGLIIDSTTGGCEAGLSKDGPTREHALLAFTLGMKQMI

SEQ ID NO: 319462 - protein, 77 aa, Zea mays
  Clone ID: MRT4577_5441C.1.pep
CIQIHIRIEGHSMTYIYDVVSSFGLAPCAEGGGPRGPPLSPREVQRSGPLTPRRRARRRVTKTGGEAGVEQGEGSAG

SEQ ID NO: 319463 - protein, 74 aa, Zea mays
  Clone ID: MRT4577_54420C.1.pep
LRTWCAIATKFLLCNNSSSETLAPESGLTTSQSQDHTTSIPRPRALPNCVLLLAVQQCVCSARYSDLRGQARLP

SEQ ID NO: 319464 - protein, 91 aa, Zea mays
  unsure (1)..(91): unsure at all Xaa locations
  Clone ID: MRT4577_54421C.1.pep
PREEWPPEVFDVKMVPWRPSPEEEMVALPQVPMGXVPTVXDARRTPXXVVRMVEEIGPAHGGRPTTEERERVRPPSEEDRLGGTLPPPXTP

SEQ ID NO: 319465 - protein, 199 aa, Zea mays
  unsure (1)..(199): unsure at all Xaa locations
  Clone ID: MRT4577_54422C.1.pep
SFSCRYAAEIPIVRSSDRLIVRPIVYGSRYRSPDRSIVCPRSIQIDRFPASLLSSFRTCSSFVHTELCEERLFTVTIYRYFXYRLPLLFLPLXFLPFTVTXLPLLXLPLLFTVTIXPLLXYRYFLPFTVTFYRYFLPFTITFYRYFLPLLFTVTFYRYFLPLLFTVTFYRLPLLFTVNFYRYFLPLLFTVTIHRYYSSI

SEQ ID NO: 319466 - protein, 71 aa, Zea mays
  Clone ID: MRT4577_54423C.1.pep
RCIAQLMCNGSGWLKLPFAWLRQCKVSGFQGLGLWGSSAFGWPWPLPLPLPPTKGLLSFSARHQKSCKGFS

SEQ ID NO: 319467 - protein, 79 aa, Zea mays
  unsure (1)..(79): unsure at all Xaa locations
  Clone ID: MRT4577_54424C.1.pep
SATPASRAPGGSVVRALTAPSSPRGYVGASTTRQSRVIVSTGXGTSGEGAGEEDRERGTRAEEEQGVEVILGVITCFLY

SEQ ID NO: 319468 - protein, 69 aa, Zea mays
  Clone ID: MRT4577_54425C.1.pep
RRNTNKGFRYHLKLDPKLHNLHIEWNASSYTIDEILSSIQQPQEASLNRYLTIAYPFNHHSISTSATIL

SEQ ID NO: 319469 - protein, 343 aa, Zea mays
  unsure (1)..(343): unsure at all Xaa locations
  Clone ID: MRT4577_54426C.1.pep
MAFHRTMARCLWAGKNAAARGAGAAIPKPPAPHPPAPRSLPAVDDCPTLAFLRPRPTAVGYATATVPLPAHCFPALPVGDHLFRRLQLDGLIPPVSTAARPPELVGVTVEQARKVARAAEMEVARARLRSNAQSVVSGSEFAALCVDIAGGVEGGRRLARALDESGGVIVLGEAVFLCPDMVAKAIGSILPVKQQRCRXAASRRRERXRKRELEAMEAQRAAIDAAAAAQVRRELWCGLGLLATQTLGFMRLTFWELSWDVMEPVCFYATSLYFMSGYAFFMRTATEPSFEGFFRSRFASRQRRLMRARGFDVDRYNALXEGPGAGARSLADPDACRHVSHAQ

SEQ ID NO: 319470 - protein, 42 aa, Zea mays
  Clone ID: MRT4577_54427C.1.pep
PVNFRQYGLKQSENQCKGCPQDPHRPLVSQDPGPRLRIQQYY

SEQ ID NO: 319471 - protein, 92 aa, Zea mays
  Clone ID: MRT4577_54428C.1.pep
SEDRIGFLSCREMPEHKEGKNLRVPSPCCAVATWIPLSLSVRALNILADHHARWPSGRYLGSCVQLASPLATPRSVLAASLGGIVGVADCWG

SEQ ID NO: 319472 - protein, 97 aa, Zea mays
  Clone ID: MRT4577_54429C.1.pep
IFYNIFFFKKKGVDYWHPVCLDGWLPAKVWHREQLASSFSLPKLDVSWAAKVWPANILAQARQLRRALSKLDRMQILGVYSTTTSKRPMYRLESSSL

SEQ ID NO: 319473 - protein, 682 aa, Zea mays
  Clone ID: MRT4577_5442C.1.pep
MTFSMDMDLNASPVPDDDEQQPYNEPVEAEYAQEEHVESAVATLRREREERRKRLKREQQDDGSRLHSQQIRVDYAPQPKRHSRIKEAPQGWLDCPAFGEPIDKIIPSKVPLDETFNESVPPGKRYSSKQLVNKQRKAGREIGLVIDLTNTTRYYSPAEWTKQGTKYAKIACKGRDAVPDNESVNKFVYEAMIFLDRQKHSKNPNILVHCTHGHNRTGFMIIHYLMRTHVSCVAEAINMFAQRRPPGIYKRDYIEALYSFYHEVPENMMIACPPTPEWKRPDDLDLNGEAKQDDDDDNGDPEPPRNESEDKIITNDDVLGDEVPYDQQEALRVLCYKLLEMPLIRGHSQFPGSHPVSLNSENLQLLRQRYYYATWKADGTRYMMLIMRDGCFLIDRNFCFRRVQMRFPHKSLEGLHDMTLIDGEMIIDTVPDSGLKRRYLAYDLMALGAVSKTKLPFSERWKMLEDEIIRPRYYEKNKFESGSKSNPLYKYDMELFSVRRKDFWLLSTVKKVLKVFIPSLCHDADGLIFQGWDDPYVTRTHEGLLKWKYPEMNSVDFLFELTNDNRQLVFLYERGKKKLMDGARIAFTDDVDPSSIAGRIVECSWNKEEQCWSCMRIRSDKSTPNDINTYRKVMRSITDNITEEKLLEEIDEISLLPMYADRMQQAHTKMAQQQRRRLPPQC

SEQ ID NO: 319474 - protein, 58 aa, Zea mays
  Clone ID: MRT4577_54430C.1.pep
RSRAGPFFFFFFFFFFLSVFGFYDCFISEESGFCFLLTTMHLMQPLLKQNQNLGIGNF

SEQ ID NO: 319475 - protein, 37 aa, Zea mays
  Clone ID: MRT4577_54431C.1.pep
RSRRCKSKSEGSSLLDLSLGSFPNVVSLVLSFGCWFL

SEQ ID NO: 319476 - protein, 82 aa, Zea mays
  unsure (1)..(82): unsure at all Xaa locations
  Clone ID: MRT4577_54432C.1.pep
FVGSRAXWATXEHSHDKVFSTYDDVLKSNIMTNWETKRPRAFSVITFSSDEGTPKGFYSMKGQELDARYITANESQSREAAC

SEQ ID NO: 319477 - protein, 55 aa, Zea mays
  Clone ID: MRT4577_54433C.1.pep
IDREHEAYQRRKLKRHTWGSVSPLLDHETQSHAPLYISRMCTLQYRTRAGPTTYS

SEQ ID NO: 319478 - protein, 51 aa, Zea mays
  unsure (1)..(51): unsure at all Xaa locations
  Clone ID: MRT4577_54434C.1.pep
MPAHKTFRIKNKLAKKMRQNRSIPYWIRMRTDYTIEYXAKRRRXRRTKLGF

SEQ ID NO: 319479 - protein, 71 aa, Zea mays
  Clone ID: MRT4577_54435C.1.pep
ETRNEALFVPSMPCHKRSRSLFYNPPRWAGLAPSLLLGGNYVTTHTIAGGECFRFHFNTRGSARPRCALLG

SEQ ID NO: 319480 - protein, 117 aa, Zea mays
  Clone ID: MRT4577_54436C.1.pep
GSSAPMSTEKRHLDQIELLALRLLLNHLIFTRDPSRRPLPDVEAPSPCGGTAVLPTNGAPRRTRPTTQQHSNYGGNRGSRAPEVRGGAVPGHGGRPILPLSPISRVPRQLHALFPGR

SEQ ID NO: 319481 - protein, 73 aa, Zea mays
  Clone ID: MRT4577_54437C.1.pep
VAARVSITPRSQLVRTQEAPLLPRRGTRAPSSPARVHFSVPWCGGGGVFFFLALYRGLTAVSILRSRMVQEAT

SEQ ID NO: 319482 - protein, 315 aa, Zea mays
  Clone ID: MRT4577_54438C.1.pep
MAMVAAAEGSGRRDAEAELNLPPGFRFHPTDEELVVYYLCRKVARQQVPVPIIAEVDLYKFDPWDLPEKALFGRKEWYFFTPRDRKYPNGSRPNRTAGKGYWKATGADKSIVPMGSTRAAGIKKALVFYSGKAPRGVKTDWIMHEYRVAQADHTLGKKGSHKLDEWVLCRLYNKRNNWDKVKVEEQELEAAPRRQHHLQSAEDSMSNSFQTHDSDIDNVFELQNCYGNNMVQGQAMTPRNDIGVVTVKEDNDWFTDMNLDDLQASYNMAHTVNPNPAQTANLVAGQGHGYLQGYGYLQYMNSPSMKMWQTILPPF

SEQ ID NO: 319483 - protein, 230 aa, Zea mays
  Clone ID: MRT4577_54439C.1.pep
KYPNGSRPNRTAGKGYWKATGADKSIVPMGSTRAAGIKKALVFYSGKASRGVKTDWIMHEYRVAQADHTLGKKGSHKLDEWVLCRLYNKRNNWDKVKVEEQELEAAPRRQHHRQSAEDSMSDSFQTHDLDIDNASELHNCYGNNMVQGQAMTARNDIGVVTVKEDNDWFTDMNLDDLQASYNMAHTVNPIPAQTANLVTGQGHGYLQGYGYLQYMNSPSMKMWQTILPPF

SEQ ID NO: 319484 - protein, 40 aa, Zea mays
  unsure (1)..(40): unsure at all Xaa locations
  Clone ID: MRT4577_5443C.1.pep
ATASEAHQSVQSQSTSSSRYXRKGAXTFLLRGVMCTSGRA

SEQ ID NO: 319485 - protein, 73 aa, Zea mays
  Clone ID: MRT4577_54440C.1.pep
MLEAPLFLSLSLFAVRRSGPQSNLHLAEMARKFLCVGNWKCIGTTDPVEKIAKTLNEGQVPPSHVAEAVVSPP

SEQ ID NO: 319486 - protein, 686 aa, Zea mays
  Clone ID: MRT4577_54441C.1.pep
MAQGAGRDPEELFEELWRACAGPLVELPQTNERVFYFLQGHLEQLQEPTDPALLAEQIKMFQVPNKILCKVVNVELKAETETDEMYAQITLQPEPDQVDLPQLPEPPLQETSRPVVHSFCKILTPSDTSTHGGFSVLRRHANECLPALDMSMPTPTQELITKDLHGSEWRFKHIYRGQPRRHLLTTGWSTFVTSKKLIAGDAFVYLRSETGQQRVGVRRLVQKQSTMPASVISSQSMHLGVLASASHAIRTHSIFLVYYRPRLSQSQYIVRLNKYLESSKIGFDVGMRFKMSFEGDDVPIKKFSGTVVDKGDLSPQWQGSEWKTLKVKWDEATNLNGPERVSSWEIEPFDASAPAITMPVQPSMKNKRPRETAEGLDIHALEPAQEFWLSGRPEQHEKTSVSSSEPKHQVAWTSERAGYSAMSSSICQNSAVTGSWFKGFNSSGSHPSLPEISQKLFQVTSNDARVPPWPGLSAYHADEPSSKLSCNTALCSYQTEEVAPRFSNAVEEEKKEPGMFRLFGVNLINHARSSATADKASVGAGEASARAAGSFEDSAQLSRVTKDHTHMVNGSPREIQSHQSCSGRSRIKVQMHGNDVCRAVDLGNLDGYEQLMGEVGVMFEIKDLGSKEKEEWKVTFTNDENETMEVGAVPWQEFCQMVRKIVIHSIGDRGHMEACPCLGQDGKRDY

SEQ ID NO: 319487 - protein, 56 aa, Zea mays
  Clone ID: MRT4577_54442C.1.pep
KLSSYTTCRCRGLPGIIPPYYWLMLFGTISYIHPFHSIHYIHVNPRTLTRIRGPSP

SEQ ID NO: 319488 - protein, 49 aa, Zea mays
  Clone ID: MRT4577_54443C.1.pep
HEPTAALSYVAKANGLPQAEVITDTHTSLQPRDTTTCAYKVKLVCAPCS

SEQ ID NO: 319489 - protein, 48 aa, Zea mays
  Clone ID: MRT4577_54444C.1.pep
DRALAHKHVLWWAPSMIACWLNALGFVIACGLHGGVWCSRTIVAVPGA

SEQ ID NO: 319490 - protein, 204 aa, Zea mays
  unsure (1)..(204): unsure at all Xaa locations
  Clone ID: MRT4577_54445C.1.pep
SSASAPWPRTPRPSPPPPTPTPTPDSDWEFAFAPPPLSXRATPRRRSPSPPPRGRRPAAPGACATSWRQATAPAATARKSSPSCNPAPAPAPPQRRSRPAASAPTPRPRRPCRSRRARRRRRPAPPRWTWPPRTGSSTASPAPPRSPGTGRGSRSSSXPPLXAPASSASSPPRTRSAARTTPTSLLPSLISLASRRRRGDHLRR

SEQ ID NO: 319491 - protein, 59 aa, Zea mays
  Clone ID: MRT4577_54446C.1.pep
PAVFGASFPVILFLYPPRIIHTQTRLMSGQSAARAKNANPVALRSEPRATERCCCDDVY

SEQ ID NO: 319492 - protein, 92 aa, Zea mays
  Clone ID: MRT4577_54447C.1.pep
GYEKEQRSRVLRVRLLFTPWLHCPINMPVAGGRSFLDTPHFVNHSLSIPRTVTPVFMFRRSAGLVSMSSVNARVGSCIWSRNSPMWHAQATG

SEQ ID NO: 319493 - protein, 197 aa, Zea mays
  Clone ID: MRT4577_54448C.1.pep
MDYHLHTVSAPSSHQFQETKGKHGKSQEITSRKACYLCGREGHYFRNYLEKSSLPDTSEIKLSQSLDMEYEQKCVETFINIVKNNKRYRKTFGYMSSPPQPQAKAPKNMDTQTEESSQTQLYEIQTPNHPSFPIGQAKLTRKELNARGACFYCKNEEHIIHECPKKRLDRLKKKTVKQDPNNNPEDQPVISTMMKIG

SEQ ID NO: 319494 - protein, 96 aa, Zea mays
  Clone ID: MRT4577_54449C.1.pep
EQRGTKREPKGRLPPVFLLDLQNNLDPTPNSDFLPDLQNNSDHEEEGSPHVIIAEPHLLTWQLRLHVANPTSTRNPDAEKQKHQPEATSRPRQTQT

SEQ ID NO: 319495 - protein, 121 aa, Zea mays
  unsure (1)..(121): unsure at all Xaa locations
  Clone ID: MRT4577_5444C.1.pep
VWHYWTDDGLGYYEFLQLAEDLVSVPIWIFNNVVSHNDEIDTVAIALFVKNVLVSIYFARGSANSTCGFVRVXMVHTEPFSVKYVAIGNEDCGTSSYCMQTLYWEYRGAMLHSTTISFSYS

SEQ ID NO: 319496 - protein, 100 aa, Zea mays
  Clone ID: MRT4577_54450C.1.pep
TSGPYRPCLDPCAFTSPTSLLTMNRSLPTNCSSRDALADAALPVKTPQSCGPSPRRPPPTDLTGASLSSALVGRNRPAKEQLEDTQLSDVCLPRHPVRPA

SEQ ID NO: 319497 - protein, 264 aa, Zea mays
  unsure (1)..(264): unsure at all Xaa locations
  Clone ID: MRT4577_54451C.1.pep
VLAEECCSADLLEWIGPDVSACVFGRLDHPADLVRAAAVSRTWRRCVVESGLSKSLCLRLCPEVATVAAAAEVARSPPSTAAHESGHERDYRIYSNLAGAYVSDSAAKPSAECILDCIGASSTDDFPAETMENTLDEEEIINFRPSYWSSGGADDPEAPESLTYRLNSDICIVDEIRVRPYQAFFQDGDPIYSSKVVRFRMGHYKLPRGSETFVMDDYENKMVNADEKYMWTYTSPEFPMLQXNELQSFKLPRPVLCIGGVVMI

SEQ ID NO: 319498 - protein, 155 aa, Zea mays
  unsure (1)..(155): unsure at all Xaa locations
  Clone ID: MRT4577_54452C.1.pep
VMPAQMWNTACEERCRAITSAVYRCAVXALGDYHVSLHVTFXELIXRWMRXLTDHTXDAYMMIMLAGNKVNIRYTDGXRDEDVKAFVQRENAFFMETXPVXAMNVHGAFIKELTQIYQFVSXKALNIGDDLAALTRGHTVCGGCKDDVSAVEKPA

SEQ ID NO: 319499 - protein, 67 aa, Zea mays
  Clone ID: MRT4577_54453C.1.pep
AFYVDEVLNRAGFLLNRVCFVHAELLDSCRGSYPGLPPSALPSTARSLSVSLLRHVLYPVSSVLSSC

SEQ ID NO: 319500 - protein, 243 aa, Zea mays
  unsure (1)..(243): unsure at all Xaa locations
  Clone ID: MRT4577_54454C.1.pep
LEAGRFDTETREWHGLPPLPLPRYAPATQLWRGRLHVMGGGKEDRHEPGLEHWSLAVKDGKALENEWRAEVPIPRGGPHRACIVANDKLFVIGGQEGDFMAKPGSPIFKCVRRHEVVYGDVYMLDDGAKWKELSPMPKPDSHIEFAWVVVNNSIVIVGGTTEKHPITKKMILVGEVFRFDLEALTWSVIGRMPFRIKTSLSRYXTERGGGLCFTSGQRDHGPDNPAPKKVVGSXTMWRTRLHL

SEQ ID NO: 319501 - protein, 42 aa, Zea mays
  Clone ID: MRT4577_54455C.1.pep
GGGPHLIWALFEYRTYRVLFLLTSRITVLCLMEWDRYSRFPT

SEQ ID NO: 319502 - protein, 119 aa, Zea mays
  Clone ID: MRT4577_54456C.1.pep
VWSSVLLSCALAHVSMHSASAMHYALPLSRGMQGLVRSLAAGPDDDDVAPAVLYPLPRSTLRHAAVACPLGGRRLYYCRVVWQTMRHVPCRSGNQCCQQADEDDGRAVRRAAAADDDAA

SEQ ID NO: 319503 - protein, 36 aa, Zea mays
  Clone ID: MRT4577_54457C.1.pep
NWSRSRCAPRPSKCLRVAAAPCTRTTTASHGSAPTG

SEQ ID NO: 319504 - protein, 74 aa, Zea mays
  Clone ID: MRT4577_54458C.1.pep
RNNNSPLVVNVFITTTNNNTFFFFFFFTFLAAAKVLINFSFALALTLLTITRANKVMKLQQLLFNLRLICLRHP

SEQ ID NO: 319505 - protein, 52 aa, Zea mays
  Clone ID: MRT4577_54459C.1.pep
LILTSPTFNNTFKHIHSSFTKLTSPQTPRPHSSNTSNKPKPSNNPLYNNHTH

SEQ ID NO: 319506 - protein, 118 aa, Zea mays
  unsure (1)..(118): unsure at all Xaa locations
  Clone ID: MRT4577_5445C.1.pep
RLTNAGEEGRXNRAQXKGAGXXXKXXTHHXEGPAXXRSLDFXKRXGVXGGXXTDXXHDPGRGTPIAKVTXXHPFRYKHQKEXFXEGEGMYTGQFVYCXXXANLWMGNVVALRGIPEGA

SEQ ID NO: 319507 - protein, 64 aa, Zea mays
  Clone ID: MRT4577_54460C.1.pep
RFSTLFTSRYGCNIDGAFFARNSWWETPRSEDSIRCLGSPSIVQRKEGGASRARSSPPFPLVPN

SEQ ID NO: 319508 - protein, 53 aa, Zea mays
  Clone ID: MRT4577_54461C.1.pep
DVLLLDYTLVFLTAARHCHERITWNVILCSLHTIACTSLSLIDIPGIYYRNEV

SEQ ID NO: 319509 - protein, 68 aa, Zea mays
  Clone ID: MRT4577_54462C.1.pep
FLPFTLISQILTFIQSLILINFQKSILYFSIIIELFFPKLSSTLNLFHTFLSLSIPYSHIIQTSFFLF

SEQ ID NO: 319510 - protein, 119 aa, Zea mays
  Clone ID: MRT4577_54463C.1.pep
LEAGRDCVVFVSTAFSSRVRNHGSTVSHRRAPPPRPLPPRRRCTAVSSQSQYMMTPSPNQPPPWPSVDDYVLSDPTVHAEGVTAMATEEEVIPVEQHQHGYRTPPSVCLIGSTTTITSG

SEQ ID NO: 319511 - protein, 141 aa, Zea mays
  unsure (1)..(141): unsure at all Xaa locations
  Clone ID: MRT4577_54464C.1.pep
RLLALVVSSLDFELRSFLAGSDEDVAAAGSRWPLTALPCFVAFWCCLLAFACFWASPLCALAAGSPAVQVCLCLVRLVLGSPRPCFPPGRLFFVRWGCFRLFLCGFGRAFAAGVGGFPPSFLLLHFVVXLFXXFYXGVATA

SEQ ID NO: 319512 - protein, 74 aa, Zea mays
  unsure (1)..(74): unsure at all Xaa locations
  Clone ID: MRT4577_54465C.1.pep
RPGSLASVRGRPRVPLWRLSXAPYPSPSHWATSLPTCMRRLGGLPTPYLTRAKSAHQFAWIFKLRKMTRWTENS

SEQ ID NO: 319513 - protein, 156 aa, Zea mays
  Clone ID: MRT4577_54466C.1.pep
LVLDREPRLVASPVNPLLFLTSPSSSCPHRRPWACSTGSPRPRPWPPTIAPFPRRPHGLPVAGSCPPLTWSTPTLQLLGELSKEIDLLSNGTYFEEAVKPGKWLNPTDWRRRAQCRSRSRPHEANSKARMATTVAMMTSTTSSPWTPKARFPFKDW

SEQ ID NO: 319514 - protein, 82 aa, Zea mays
  Clone ID: MRT4577_54467C.1.pep
NPGPWVKLSTPKLGPGQIPLLTKNYFKGGGKGTIPKAKDQKGPQPAKGNREMPTGWKTWGGNPWPKKGTPGKFMATAHRMGG

SEQ ID NO: 319515 - protein, 47 aa, Zea mays
  Clone ID: MRT4577_54468C.1.pep
GRAHCCALALSITLKHRCLSWSKVRTALATAGSAQGGNQFCRPSQVR

SEQ ID NO: 319516 - protein, 46 aa, Zea mays
  unsure (1)..(46): unsure at all Xaa locations
  Clone ID: MRT4577_54469C.1.pep
PIFMELYFXXKKKKKKKKKKKKKKKNKKTKKKKKKKKKKYSALLPL

SEQ ID NO: 319517 - protein, 85 aa, Zea mays
  Clone ID: MRT4577_5446C.1.pep
VSMSGASTAIAVQVVIPHTYGALRILGQTLDLICCIALSGWSFIILALLCQIDSISRGRCAHSHHGQMDWSGHVLTMINTRPPGR

SEQ ID NO: 319518 - protein, 110 aa, Zea mays
  unsure (1)..(110): unsure at all Xaa locations
  Clone ID: MRT4577_54470C.1.pep
MGRSGLRDKLYAIGTIKGYKMSKWKQXETVKSLXIDGVDTNXDTSWYDELRIENIYTVKTNSRTTRYRCIXVRALCXHGNLDRGSSKFKSKLPPEYMGRIGRVLMYFSRI

SEQ ID NO: 319519 - protein, 233 aa, Zea mays
  unsure (1)..(233): unsure at all Xaa locations
  Clone ID: MRT4577_54471C.1.pep
MASPLLSCIFLCFYLSTVHGAGEDSFVTVPSSSFEPESVCSGEFVKPEQNGSTVYVPLVHRHGPCAPAPSLSTDTRSFADIFRRSRARPSYIVRGKKVSVPAHLGTSVMSLEYVVRVSFGTPAVPQVVVIDTGSDVSWLQCKPCSSGQCFPQKDPLYDPSHSSTYSAVPCASDVCKKLAADAYGSGCTSGKQCGFAISYADGTSTVGAYXQDKLTLAPGAIVQXFYFRCGMAS

SEQ ID NO: 319520 - protein, 105 aa, Zea mays
  unsure (1)..(105): unsure at all Xaa locations
  Clone ID: MRT4577_54472C.1.pep
MAGQAMREVQANGATDAGGAMVGEISPLNEALRRDSXAPAAFLXAAPTPDVSGKITXKDLCVNEELEPGKTQTVLDDVTGNAEAESLTALKGASEGGESTRLDDH

SEQ ID NO: 319521 - protein, 72 aa, Zea mays
  Clone ID: MRT4577_54473C.1.pep
TKPLRTLPRGHSETRSEPLFEELGLTHFLGHNVSNIVYDKADNMQIYHCTKVDTCNDSQKDHINGMIDLHTT

SEQ ID NO: 319522 - protein, 68 aa, Zea mays
  Clone ID: MRT4577_54474C.1.pep
FLCVKVSLFFFFSEARRLALFISPMNSFFLTMIFQFSYRCSLFSNSSSLLMRSVASDVLFLLSLCLTL

SEQ ID NO: 319523 - protein, 89 aa, Zea mays
  unsure (1)..(89): unsure at all Xaa locations
  Clone ID: MRT4577_54475C.1.pep
ITLYNLPNNILNNLPLLTLSLNHTSXSXFQSLHHYLFFNIYIQLLLFPFNSSLTITLYYLSFQFHTHYXIYFQFLINISLYPYTLHTNI

SEQ ID NO: 319524 - protein, 243 aa, Zea mays
  unsure (1)..(243): unsure at all Xaa locations
  Clone ID: MRT4577_54476C.1.pep
GGTPAGSGPEFPGRPTRPGTQNKGFGFGTGFGTTTGTGTGLGTGLGTGLGFGGFNTQQQQQQQQTSLGGLFSQPTQAPAQSTQLINTASALSAPTLLGDERDAILAKWNQLQAFWGTGKGYFNNNIPPVEFTQENPFCRFKAVGYSCMPNNKDEDGLVVLIFNKKETDIRSQQQQLVESLHKVLGGNQTLTVNVEGIKTLPDDQTEVVIYVVERSPXGTSRRVPSDTLYAHFEQANIKAQLQQ

SEQ ID NO: 319525 - protein, 111 aa, Zea mays
  unsure (1)..(111): unsure at all Xaa locations
  Clone ID: MRT4577_54477C.1.pep
KRGVQVPPFXFSPRDREPKKRGGNRFKGFFSKNPGKFPQLGLKPPGEKNPVFPKSMVGGPPVFIKGLTPKTGPPPNQRTPFKKKGPGFFATFGPLPGKFFFFLGRTGGGNF

SEQ ID NO: 319526 - protein, 55 aa, Zea mays
  Clone ID: MRT4577_54478C.1.pep
RTAVGRTASFTCHRSQEAPFVSVCCGALLYILQWRSFYSNVLLVSPLRRIMNLQQ

SEQ ID NO: 319527 - protein, 72 aa, Zea mays
  Clone ID: MRT4577_54479C.1.pep
PKSRLGPLGFFPWPGASPRPVNHLFFPPPRPVFFQFGKLVGPWSQKKKKKKKKKKKKKKKKKKKKKKKKKKK

SEQ ID NO: 319528 - protein, 59 aa, Zea mays
  Clone ID: MRT4577_5447C.1.pep
GYVPESLPALAGRRRRSARREARHSHGGSPVETLPWLAIEDKVILIFLNCMNDLKGHVM

SEQ ID NO: 319529 - protein, 55 aa, Zea mays
  Clone ID: MRT4577_54480C.1.pep
GINARVASCCTGLALSFPGAPQTLIQSCLTFGTFSYIIEKLNKQQPALGAPACDR

SEQ ID NO: 319530 - protein, 265 aa, Zea mays
  unsure (1)..(265): unsure at all Xaa locations
  Clone ID: MRT4577_54481C.1.pep
MRMAVRPARDRSSTQDTHAREHEQGHEAAAAMARGGGDRSREDDPFSDGGTTETDSDESSPRGVGARGPGSTSNPILTRLAVSRNPSPLAAATAAPGVCLLRFAWESAAGSLVGAVVGYGKGLVMMKGIKGSFADAASSAKIFAVLAGVQSLVACSLRKLRGKDDGXILFLGINAGVAGCCTGLALSFPGAPQTLIQSCLTFGTFSYIIEKLNKQQPALALLPATGVMDPKAGQSVLPPFTLPPLDTMDEFSKFQNFLSSKFRGN

SEQ ID NO: 319531 - protein, 287 aa, Zea mays
  Clone ID: MRT4577_54482C.1.pep
MEPSPAQAGASDRDRSPPPPPPPPSQSSTAATISSPLAVVCSFWKDFDLEKERSGLDEQGLKIAENQETSQKNRRKLAENTRDFKKASSDEKLSLLNSLLKSYQEEVDNLTKRAKFGENAFLNIYQKLYEAPDPYPALASMTDQDQKLSELETENRKMKLELEEYRAEAAHLKNQQATIRRLEERNRQLEQQMEEKVREMVEMKQRSMAEDSQKTLEALKDRERSLQDQLRQATESVKNMQKLHESAQSQLFELRTQSEEDRAAKEVEVSLLMDEVERAQARLVSLE

SEQ ID NO: 319532 - protein, 615 aa, Zea mays
  Clone ID: MRT4577_54483C.1.pep
MAPSKLRQALGAVKDQTSIGLAKVGSGGSLEADLDVAIVKATRHSESFPADERHIREIVTLTRLSRVYVGSCVSSLSRRLGRTRSWAVALKTLVIVHRLLAEGDPAFEQEVFYATRRGTRMLNMSDFCDSSRADAWDFSAFVRTFAAYLDDCLECRMQGKQQGGGGAAPRGGGRPLHEEMYASPGNRFACGIAAFNGRQEDAADAEAQRTVALVARDPPTREMTVDQLLVKANQLHHLLDRFIACRPVGAAKANRVVGVSLYPLIKESVQLYCELTEVTATLIEQFAEMETADCERVHALFCGLAKQMEELETFYAWCKVACVCRQSDVPEVVEAVTQKKLELMDEFIRDRHAADSQQRLSPPDPEPMASPEPAPVEEDNDDMNATKALPAPEEPAAAAAQEESTAGKAEPDASLIVADDPVEEEADFLNLSADAMSGQEHGRQLELALFDGNAAPEGSVFQGSSADWETELVHSASALANQRAQLGGGLSMLVLDGMYNHAAAATNAQTTFSGSASSVALRPPPGPHMLALPAPPGGGSAVAGADPFAASALVPPPTYVQMSDMQTKRQLLTQEQQMWRQYGKNGMQQGALAMPNQNQQLLPHVGHNYAGYRTT

SEQ ID NO: 319533 - protein, 86 aa, Zea mays
  Clone ID: MRT4577_54484C.1.pep
PPFGKPPPPGGFLGVFFPEKNFFFLGFTFKRGLKKRNFFLKVLKPPGGREILLFGPVFLKSLFEVVLKKGLRKFSIFFLQGFKGFF

SEQ ID NO: 319534 - protein, 67 aa, Zea mays
  Clone ID: MRT4577_54485C.1.pep
QDSADDRPSMSEVVAMLGSEGVTMPEPRQPAYYNVRISSLAVSSDSFAESSCRMISNITLTDHEEGR

SEQ ID NO: 319535 - protein, 93 aa, Zea mays
  Clone ID: MRT4577_54486C.1.pep
PHYFYFFFFSALFFISGWFLSFFSRKKKNFVSYSQGPRILILILFQNNFHSQRGTIFPFLPRVKGNLFSSSPHKTKGVGCSFKNPGPWGTPRG

SEQ ID NO: 319536 - protein, 96 aa, Zea mays
  unsure (1)..(96): unsure at all Xaa locations
  Clone ID: MRT4577_54487C.1.pep
LFTDYTASNIYVINKHHSIRIVLYSERRIDQITRVVLGVVIGVVPARVLFRRRRRVAPRSERRRRMAQPPLEHEGVLRRAMATMRRHCDCGSERXK

SEQ ID NO: 319537 - protein, 91 aa, Zea mays
  unsure (1)..(91): unsure at all Xaa locations
  Clone ID: MRT4577_54488C.1.pep
RVDFGCGSXSLLYWXXEPPRTHRERAALCDKRREGARGKNSSKGAPTDPHTAWVTSGNNVIHCLALHDSLCVVGDLVFLFLRLWLEAHMGA

SEQ ID NO: 319538 - protein, 1201 aa, Zea mays
  Clone ID: MRT4577_54489C.1.pep
KELQGRQQQRSSTFAPRQPPAPAKASSSSGVRTSTSSTVPSGVAAKPATTTSSTGRSSDIKCHRCQGLGHIQRDCPSKRAYIATGDGGYVSASDVEDEDTVGANIAETYDGDEEVLGTTATETYKALIMQRALSTTASDDDNRQLRNLFNMFLIVKDCRVHTIIDGGSCNNLVNVEGKKIVLLPMTPTEIVHFEHEKKTNAKQKGVLNSENQQPIKLKTPTLLATKSDLDELHASLGLCYALVCKNAFYSIDDTSIVLPPAIANLLQEYMDVFPSEIPPGLPPVRGIEHKIDLIPGASLPNRAAYRTNPEETKEIQRQVQDLLDRGYIRESLSPCSVPILLVPKKDGTWRMCVDCRAINNITIRYRYPIPRLDDMLDELSGSIVFSIIDLRSGYHQIRMSLGDEWKTAFKTKFSLYEWLVMSFGLTNAPSTSMRLMNEVLRAFIGKFVVGIEMDEAKIVAITSWPLPTTVTQVQSFLGLAGFYRRFVRDFSTIAAPLHELTKNGVSFRWGPSQQQAFDALKSKLTQAPLLQLPDFDKTFELGEAHGDGLMGHFGVKKTEDVLFTHFYWPRMRRDVERYVSRCTTCNKAKSRLNPHGLYLPLPVPRAPWEDISMDFVLGLPRTKRGSDSVFVIVDRFSKMTHFIPCQKTDNASHIADLFFTEIVRLHGVPNTIVSDRDAKFLSHFWRTLWFKLGTKLLFSTTCHPQTDGQTEVVNHTLSTMLRAILKDNLRLWEECLPHIEFAYNRSIHSTTKLSPFMVVYGFNPRALIDLLPLPPSEIVNLDATQRSEFILELHETTKLQIEKMNEKYCIAANKGRKEMKLEPGDLVWVHLRKDRFPDLRKSKLMPRAAGPYKVLAKINDNAYTLELPPDFGVSSTFNISDLKPYMGDEDEAESRKTPIQEEEDDEDITSIYTMNGPITRSPARQLNLQVPWRGPTRTWERDKPSWRGHSCVTGDNQRSRGVVIARNRSLGALDHQRRDLHSIKLSYLTEDRAASTISVPRWGASVVDSLDSQRGATSCLAMVAPPPSPAARKATGQTQMLFFRHGGKTSSIPPPSGGLMATIIAVARWRKEYHVVVAVKGHELETPETEQRPGLKRLLETTHLELDGKLFVNTQQSPTWRANYRRFDPGGSLDRRRGRSEPKVGRGGDSSEVEIEAEPWAQARRRPSSEVEVEAEPWGRVRRRPSSEVEAGAEPWGRARR

SEQ ID NO: 319539 - protein, 107 aa, Zea mays
  Clone ID: MRT4577_5448C.1.pep
MSGVITKFAVTSMVMWMAPVAIMYGFYYQVFPGVSQMSSSAQTLASGFLAVISVNLVIGFYIFMAMKETPHQEPQPDPTFLEKAKASINQPTSFQVSDDSKGKGKVE

SEQ ID NO: 319540 - protein, 1478 aa, Zea mays
  Clone ID: MRT4577_54490C.1.pep
MDVLMIRYLGEDQQGLGKGQGVEEEQQGRPQQNRYSFAITPTLVGQSHWSPFATCSAGPKNQMDKDKGPKLNDDECVSQMELKEMMRAMTEGFKKYQDSASTSYEQLDRRVAELVTRMDVLEARPPPPTPAPAHSPVDDDDDDDDVYAPLRQRLARNRQGMGGNGRRRHHNPEPDHDPFAKIKFSIPPFMGSYDAEAYLDWEMTVEQKFNSHLVPEQHRGDMSVQEYYQELQKEKELQGRQQRRSSTFAPRQPPAPAKASSSSGVRTSTSSTVPSGVAAKPATTTSSTGRSSDIKCHRCQGLGHIQRDCPSKRAYIATGDGGYVSAYDVEDEDTVGANIAETYDGDEEVLGTTATETYKALIVQRALSTTASDDDNRQRHNLFNMFLIVKDCRVHTIIDGGSCNNLVNVEVVKKLGLTTREHPHHYHIQWFNNNGKFKVTKTTRVHFSIGSYHDFADFDVVTMDACSLLLGRPWEFDTDAIHHGRSNKYTFMHKGKKIVLLPMTPTEIVHFEHEKKTNPKQKGVLNSENQQPIKLKTPTLLATKSDLDELHASLGLCYALVCKNAFYSIDDTSIVLPPAIANLLQEYMDVFPSEIPPGLPPVRGIEHKIDLIPGASLPNRAAYRTNPEETKEIQRQVQDLLDRGYIRESLSPCSVPVLLVPKKDGTWRMCVDCRAINNITIRYRYPIPRLDDMLDELSGSIVFSKIDLHSGYHQIRMSLGDEWKTAFKTKFGLYEWLVMPFGLTNAPSTFMRLMNEVLRAFIGKFVVVYFDDILIYSKSHDDHIEHLRAVFDVLRDARLFGNLEKCTFSTDRVSFLGYVVTSQGIEMDEAKIVAITSWPLPTTVTQVQSFLGLAGFYMRFVRDFSTIAAPLHELTKNGVSFHWGPSQQQAFDALKSKLTQAPLLQLPDFDKTFELECDASGIGIGGVLIQGGKPVAFFSEKLNGPTLNYSTYDKELYALVRVLQTWQHYLWSKEFVIHSDHESLKYLKGQSNLNKRHAKWIEFIESFPYIIKHKKGKDNVIADALSRRYTMLSQLNHKIFGLETIKELYAADLDFKDAFENCREGRTWQKFMLREGLLYRANKLCVPASSVRLLLLQEAHGGGLMGHFGVKKTEDVLFTHFYWPRMRRDVERYVSRCTTCNKAKSRLNPHGLYLPLPVPRAPWEDISMDFVLRLPRTKRGSDSVFVIVDRFSKMAHFIPCHKTDNASHIADLFFTEIVRLHGVPNTIVSDRDAKFLSHFWRTLWCKLGTKLLFSTTCHPQTDGKTEVVNHTLSTMLRAILKDNLRLWEECLPHIEFAYNRSIHSTTKLSPFMVVYGFNPRAPIDLLPLPPSEIVNLDATQRSEFILKLHETTKLQIEKMNEKYRIASNKGRKEMKLEPGDLVWVHLRKDRFPDLRKSKLMPRATGPYKVLAKINDNAYTLELPPDIGVSPTFNISDLKPYMGDEDETESRTTPIQEEEEDEDITSIHTMNGPITRSRA

SEQ ID NO: 319541 - protein, 615 aa, Zea mays
  Clone ID: MRT4577_54491C.1.pep
MTGPKNQMDKDKGLKLNDDECVSQLELKEMMHAMTEAFKKYQDSAATFYEQLDRRVAELVTHMDVLEAHTPPPTLAPAHSPMDDDDDDDDVYAPLRQRLTRNRQGMGGRHVGTGILPRASERKRIAGSSTAEEQHFRATPATGASQGVILFERTDVHIFLHQHHTQHRTFGITGTRQQQVLGAFGASDVEDEDTVGANIAETYDGDEEVLGTTVTETYKALIVQRALSATASDDDNRQCYNLFNMFLIVKDCRVHTIIDGGSCNNLVNVEVVKKLSLTTRQHPHPYHIQWFNNNGKFKVTKTARVHFSIGSYHDFADFDVWVKVCVDKLKTIRRGLNVLKKYGLDPVPKIEKKDAQVRLSGSWVLIRQLCSEYLSVCSTLRVMLQWVGMFSKIKLDGGSVKGLDGFNIGKDVPLPGACGPNNLGGSATIWMLALFYWDVLGSLILMLFIMGKKIVLLPMTPTEMVHFEHEKKTNAKQKGVLNSENQQPIKLKTPTLLATKSDLDELHASVGLCYALVCKNVFYSIDDTSIALPPAIANLLQEYMDVFPSEIPPGLPPELPPDFRLNLLVRSTLVNCVSELTLEAMDVLMIRYLGEDQQGLGKGQGVEEEQQGRPQ

SEQ ID NO: 319542 - protein, 674 aa, Zea mays
  unsure (1)..(674): unsure at all Xaa locations
  Clone ID: MRT4577_54492C.1.pep
MLVGQSHRSLFATCSAGPKNQMDKDKGLKLNNTECVSQLELKEMMRAMTEAFKKYQDSAATSYEDLDRRVAELVTRMDVLEAHPPPPTPAPAHSPVDDDDDDDDVYAPLRQRLARNRQGMGGNGRRRHHNPKLDHDPFAKIKFSIPPFMGSYDAEAYLDWEMTVEQKFNSHLVPEQHRVRQATSEFRDFAIIWWNELVNTRAAPQTWNALKEEMRSRFVPXSYRCDIXKKLQRLDQGDMSVQEYYQELQKXKRILGSSTAEEQHFRATPATGASQGXSSSSGIRTSTSSSTSGTRSTAPSASXDTTTASXVPSGVAAKPATTTSSTGRSSDIKCHRCXGLGHIQQDCPSKRAYITTGDGGYVSAPDVEDEDTVGANIAETYDGDEEVLGTIAIETYKALIVQRALSATASDDDNRQHHNLFNMFLIIKDCRVHTIIDGGSCNNLVNVEVTKTARVHFSIGSYHDFADFDVVSMDACSLLLGRPWEFDTDAIHHGRSNKYTFMHKGMKIVLLPMTPTKMVHFEHEKKTNAKQKGVLNSKNQQPIKLKTPTLLAIKSDLDELHASIGLCYASVCKNVFYSIDDTSIALPPAIANLLQEYMDVFPSKIPPRLPPELPSDFWVSSTFNISDLKPYMGDEDEIESRMTPIQEEKDDEDITSIHTMNGPITRSRARQLNL

SEQ ID NO: 319543 - protein, 73 aa, Zea mays
  unsure (1)..(73): unsure at all Xaa locations
  Clone ID: MRT4577_54493C.1.pep
YXTQPSWXVVDPQLREELKISISEXVLPAYRSFVGRFHGQLEGGRGSARYIKYNPDDLENQVSEFFEGRKPNA

SEQ ID NO: 319544 - protein, 120 aa, Zea mays
  Clone ID: MRT4577_54494C.1.pep
TSKMHPDSDCNGLDMVGKITRLSNQPKWFHPNMHLESMGIVETSQCSDSVWCCDTVCWAVYRVESPLGASPGVTHALILYLFSSHHHIRFGFFLSLDLSRTVVVDRFVRPQLVSLIIHPQ

SEQ ID NO: 319545 - protein, 101 aa, Zea mays
  Clone ID: MRT4577_54495C.1.pep
VRLTNRWVASSPLLLRQRSPTILMLILWLTISTLLPFMTLRPRIINPPRLKGIPKSIIHYSIMPSSTYRLEHESELGLNGHCDRHDIQQHILFKIPLHSTS

SEQ ID NO: 319546 - protein, 165 aa, Zea mays
  Clone ID: MRT4577_54496C.1.pep
MTNSSTGRSSNIKCHRCQGLGHIQRDCPSKRAYIATGDGGYVSASYVEDEDTVGANIAETYDGDEEVLGTTATETYKALIVQRALSATASDDDNRQCHNLFNMFLIVKDCRVHTIIDGGSCNNLVNIEVVKKLGLTTRQHPHPYHIQWFNNNGTLERTIKDLGKA

SEQ ID NO: 319547 - protein, 132 aa, Zea mays
  unsure (1)..(132): unsure at all Xaa locations
  Clone ID: MRT4577_54497C.1.pep
MDSISGATWGMANRGTRSGAGSGPRGKKSGTRSVKARLKLTIWRMGRYLNKDRDTQCVHTGRXIYLGVHLEYMALEALALDELATLDNKNIIVNARQVLLCIRSDEXLFRMLTRITMYQRGVLHNMNCELTD

SEQ ID NO: 319548 - protein, 1873 aa, Zea mays
  Clone ID: MRT4577_54498C.1.pep
MASQGERRSIVHDTSNHARACDLVPITNQGHRQRIMHETSTSTMSFTMPTSNLGVPIHDVPSHRNANLARQYRPPRNIGVPVQCRFFSDEYVAALKASYPMRSNHGTPDYTCQMCGALFWYGERTRGNVRNRAIQYYNCCKGGKVYLPPYEERPEPLKSLARFDGDARTKKFIANIRQYNCLFAFTSMGANIDNAVNDGSGPPLFKICGQVHHRIGSLLPQEGSTPQFLQLYIYDTVNEVENRLRCLNPTKETIQNIDPLIVQELIKMLDEHNPFAKKFRMARDKLSDYEDEDFIIRIVGAREGDPVQYNLPTTDELAMLVCGDISLETFKRDIIIQKHNRDLKRISSLHPAYMALQYPLLFPFGERGFQIGVPYVGMENAERSARSHMTMQDFFSYRFHYKKNEPNPFLCYELLSSQAKVDARAAIDESRLQYILQNQNNLWTESIQGISDAVGRGCIDGEEMGLRVVLPASHIGGRRYMFQNYHDGLAICRVYGPPDFFVTFACNPNWPEILESLFEPGQKASDRSDIIARVFHLKLDDLLGDIRSGDIFGRQVAVLYTIEFQKRGLPHVHVIFWVSTDTSQPTPALIDSVITAEIPDPQQDPLGYALVAEHMIHGPCGPNHMNAPCMKNGICSKGYPKDFREETTIDANGFTVYRRRNNGRFIAKGGVRFDNRSVVPTNLLLLKRFQAHINVEWCNKSIFIKYLFKYVTKGLDRSKIFLRRVQAGEDVPYNEQTDAKDEVKEYLDSRYICDKDACWRVFGFEIHRHYPAMERMHVHLPNQNHITYNSTSNMAQILSKPFLRRTMLTEWFACNSNNSNARDLTYCEFPSKWRWDEKTRSWRPRLARESKIGRLYYVHPSAGERYYLRMLLLTVKGACSYESLRTFNNTVYPSFKEACQARGLLGDDNEWLQAFEEAATWATAPQLRQLFVTMLLYCQISNEHSFFEKIWKLMADDIGYNIQRALSCPKFQMADNELRDELLERLTILFNKSGGNIHEFNLPQKVHGTQQQEFNRLIEEETSYDRENLHNESQSLFSQLNADQLSAFNTIVESVLSGRPVASLLLPDGRTAHSRFKIPCDLDSNSTCNIKKGTMLADLIKRTSLVIWDEAFMAHRMTFEALDRSFSDILSSESSNSENMPFGGKVIVLGGDARQILPVIEGGTRSQVVGAAITNSYLWHSITVLYLTQNMRLSSTALSIDAKKEVESFSKWILAIGEGKVPAKARENETEKCWIKLPPEILLMPIKDNLSCIVQTAYPNIETMYNNVEYLKERAILAPTNEVVDVVNNYMVSTLPGDTKEYLSCDSIAKGPNMHASYDMLYPIEFLNSINGNNFPSHSLILKKGTPIMLLRNINQSQGLCNGTRLIITTLGDLVIEAEIMTGKHKGNSVVIPRISLTLKNPRNMFVLERRQYPIKVCYAMTINKSQGQSLSEVVVYLKNPVFTHGQLMVVKTLTELSLQDKDVTVQVEVNRRWEFRGIGDDGPVLHVDMILTDATGNAIYAEVPAKLLEQKGSLLQLNKVYYIRRFRVANAKSQYKVIDAPLMIYFTVYSIIEVCRDPPSTFPLYVYNLIPYEAIDANGPKSKDFHGSVYLSGGAACHWYFNPSINGAQPYYQRIHNENVTIKLPPLTNEQAAFVNPPETQHKDLKELLESEPLTLPEEGFKCTVTITRVLDDQPWWYKACNTCPNKPSMRSSVSSCPTCGSTDAILRKRTPNQVSHSFTWKRPIFAINQIEHSNASVNSNKTSIENKTGNFTLYDIVQPIYIHFSRGSIVHGNKMMGLCDDESSVEGQQFNKRMADHWGRAGRQAANARCLVRTAIAGAAGEDHAQAQPHRQDRDRPVEQPNRCRTPTHEQEEEEDDESSSAAASLLAECC

SEQ ID NO: 319549 - protein, 106 aa, Zea mays
  unsure (1)..(106): unsure at all Xaa locations
  Clone ID: MRT4577_54499C.1.pep
IANILQPNQQGGTYVQGPNNMELETHKLQVKTLWKEFTGTTSQLRCWDTFFGGQKMRRELGADAQIKDLCGGDGPETLNNGPTDGINPLRLGLLGFPNEIGPXXGN

SEQ ID NO: 319550 - protein, 75 aa, Zea mays
  Clone ID: MRT4577_5449C.1.pep
KLNTDKIIMSHNLIALRLMRQSSGALCSEQLTLIRPCKLSAFHWGNLPPLLHCIIRQHSRKRRFACSALFRCLSL

SEQ ID NO: 319551 - protein, 82 aa, Zea mays
  unsure (1)..(82): unsure at all Xaa locations
  Clone ID: MRT4577_544C.1.pep
FFAGKTKLEEWAAXPKPDYXNIXXRRAHFXHLVXSXXXAVXSVXXHGFHFKLHXWYHGVYCDRSWCXLLVVPSYNGVSFRSK

SEQ ID NO: 319552 - protein, 83 aa, Zea mays
  Clone ID: MRT4577_54500C.1.pep
WRRPALVTDAPLIVVYTRPQTVCKRAHRWGGAHPTNPDPLSHCQSLRFLAATRLAHHSFTRSSPRIHISGPTSSRDRVDPATG

SEQ ID NO: 319553 - protein, 80 aa, Zea mays
  Clone ID: MRT4577_54501C.1.pep
GLMVEMAKTFGPAVSSPNNQQEINQCYNEITMNDFKTYVSKGLGAFYLAEFLVPFILYVPASASLCALCRSPIVILQPCV

SEQ ID NO: 319554 - protein, 311 aa, Zea mays
  unsure (1)..(311): unsure at all Xaa locations
  Clone ID: MRT4577_54502C.1.pep
MTTPAAEAVSRRLGAAVRGLSGAWYGRHMASAERAIRARLPLVDLVLEVRDARAPASSSFEPLLRRRGPLEPDRRAVVLLNKADLADPSETEGWVAYIKRQRRCSCVAVNSHSRESIKEVLKVVQARMREIKHGDSNCTGTALLVGIPNVGKSAIVNAMHQIGXRIAAAEKGKLKHAIVSSHPGETRDIRGYKVASHPNIYVLDTPGVLSPRFADDGSGPRLALTGAIKDSLLEDYDTVQFLLAIVNSGKEYRKWEKLNKAGDTFSCGNTVTSRGHNSKEQYASDHTQDSVVKAVRQVLFETISSFNGDLG

SEQ ID NO: 319555 - protein, 98 aa, Zea mays
  unsure (1)..(98): unsure at all Xaa locations
  Clone ID: MRT4577_54503C.1.pep
RFLFYVGNNCTEGPLKVWLANHTDNDPWRTLIANAYFXLFMDLGNIXLXNATLAYTGXLNIFXFTVTESCXITMTNLKTAFFLNIIVHNITTYTTVTF

SEQ ID NO: 319556 - protein, 271 aa, Zea mays
  unsure (1)..(271): unsure at all Xaa locations
  Clone ID: MRT4577_54504C.1.pep
RMREIKHGDSNCTGTALLVGIPNVGKSAIVNAIHQIGRIAAAEKGKLKHAIVSSHPGETRDIRGYKIASHPNIYVLDTPGVLSPRFADDGSGPRLALTGISYFTSKFMASLNYMLXGAIKDSLLEDYDTAQLLLAIVNSGKEYRKWEKLNKAGDSFSCGNTITPRGHNSKEQYASDHTQDSVVKAVRQVLFETISSFNGDLGQVDELRRLIGHQLVNLQQVFKVLTEPSENICKPIATKLVNLYRTGRLGRYTLEHVPDVRQEVVAELPTA

SEQ ID NO: 319557 - protein, 88 aa, Zea mays
  Clone ID: MRT4577_54505C.1.pep
CWCVFCVGQFSADAFFYQPSVPIFIAPCNWSPHCRKWWSSWGRRGVLGGSLGAAHGAAPALAPLGSVCFLLLFVRFFELRAVIMFLQP

SEQ ID NO: 319558 - protein, 67 aa, Zea mays
  Clone ID: MRT4577_54506C.1.pep
LHDKDKLACNQICVGEEIFMQLSGQRKTNESRGMVQSGERIEGPSRIPENKEYLEVSVANATRKGRQ

SEQ ID NO: 319559 - protein, 122 aa, Zea mays
  unsure (1)..(122): unsure at all Xaa locations
  Clone ID: MRT4577_54507C.1.pep
MARTQCAVAVAQEDGVLLLATEGTTSXAAITCRQVXSSDIAPWLSYTRGTGSVPSSSCCRGFMNLKSAAXTALNRRAAXAALKNAPRGARGLNAGNIGYMRFKCRRTIPYIISTSTNWFRAN

SEQ ID NO: 319560 - protein, 75 aa, Zea mays
  Clone ID: MRT4577_54508C.1.pep
KPGGFLLKTGGNHFTISSVPTEITALTQNANCGPSPKTQSVPHQKSRKKKKLKNNPNRGKKNQNALKFSHPPMGQ

SEQ ID NO: 319561 - protein, 53 aa, Zea mays
  Clone ID: MRT4577_54509C.1.pep
RCGGVNVALEFSQTGVNGVSLKFFPLELVKIGDLARVGGTLLSAAFGGGPSSN

SEQ ID NO: 319562 - protein, 76 aa, Zea mays
  Clone ID: MRT4577_5450C.1.pep
IHSYCYALSRYIVNATHLKKPKCLIVYNGGSTDLLYIQIKSSRNKCMYFAIGTLLWFSTMLVIQPVQLCNSIRNSS

SEQ ID NO: 319563 - protein, 71 aa, Zea mays
  Clone ID: MRT4577_54511C.1.pep
VITYSHMWCRSLFVESIQTSKSNVIPDMELANLLCSALCSSFHVQLFLVTTFCFEIHRLYSDCKPDLFLSK

SEQ ID NO: 319564 - protein, 91 aa, Zea mays
  Clone ID: MRT4577_54512C.1.pep
SIHQPSAISCCRTLLSPLCFVPYYEQQVLVVISQLVVVSPSVILVQRLLLLFCWARVGVNHRRLFTHCNNSLLFRYACITKPYRCLSAMPS

SEQ ID NO: 319565 - protein, 43 aa, Zea mays
  Clone ID: MRT4577_54513C.1.pep
RKPPPPTCEALWEHLRPSQMVLAHVGYHICCALSHIPTLRLVA

SEQ ID NO: 319566 - protein, 77 aa, Zea mays
  Clone ID: MRT4577_54514C.1.pep
VGRRPSEASSSSRRERRRHMRKVTPPPPPAGTWLKKKRTGVLGVPQPLSTAPHVRSDTSHHGQKTTRPKKRKKKPPP

SEQ ID NO: 319567 - protein, 82 aa, Zea mays
  unsure (1)..(82): unsure at all Xaa locations
  Clone ID: MRT4577_54515C.1.pep
SAKRERRNGDTWTEEKHRXVVVKITXLRKWDTQRNPSCFVHSITDELEASHSQKYFIHQSNMSRRNRRSSLINMDNVESMYL

SEQ ID NO: 319568 - protein, 82 aa, Zea mays
  unsure (1)..(82): unsure at all Xaa locations
  Clone ID: MRT4577_54516C.1.pep
TGSRAIVLWIXICSXFQATRIEKTKXQPAVYKGCRIYLGRQSKFYYGAKGQRTLILNRIPLRLFLLRWNGCQLLRRGISSRK

SEQ ID NO: 319569 - protein, 124 aa, Zea mays
  unsure (1)..(124): unsure at all Xaa locations
  Clone ID: MRT4577_54517C.1.pep
RLAHSLQTVGGADTVTAGMPLKRCVDIGRVALLNYGVDYRRLVVIVYVVDQNRPLVDARDMGRCQENXNLISLTDIKIDIKRVSKKTALINAMDEADVKTKWENSLWGTNLIVHTRKASINDFD

SEQ ID NO: 319570 - protein, 60 aa, Zea mays
  Clone ID: MRT4577_54518C.1.pep
DTRASWTECLALVLRLPVLTETCIGSIMAGWTVPARDGSRIYALLRERYAITVVRVKGLD

SEQ ID NO: 319571 - protein, 63 aa, Zea mays
  Clone ID: MRT4577_54519C.1.pep
STGRQEAGILPHRGRARGTPVNVLLRVPERLNSSMTLVYRYRAVSPSLPGAGKLILLSSKGTG

SEQ ID NO: 319572 - protein, 107 aa, Zea mays
  Clone ID: MRT4577_5451C.1.pep
MSGVITKFAVTSMVMWMAPVAIMYGFYYQVFPGVSQMSSSAQTLASGFLAVISVNLVIGFYIFMAMKETPHQEPQPDPTFLEKAKASINQPTSSRVSDDSKGKGKVE

SEQ ID NO: 319573 - protein, 79 aa, Zea mays
  Clone ID: MRT4577_54520C.1.pep
MGISSMPEPRDSLLGYLVYNAVVSIAALAGLVRAALVFLDLQAAQLPGAPLPGARVILFLGRRAPRLCAASSVWTSVCA

SEQ ID NO: 319574 - protein, 79 aa, Zea mays
  unsure (1)..(79): unsure at all Xaa locations
  Clone ID: MRT4577_54521C.1.pep
GALGCTPDFRNHPLPCTAVLHPPQQHTFLHTSSIPSKSTPVTLSPSIELLXHPPISTYSLHAINQLPHDVNLLLFFAHS

SEQ ID NO: 319575 - protein, 51 aa, Zea mays
  Clone ID: MRT4577_54522C.1.pep
QLEHVINAAAGRASRGWRRRRRGIRRWGAGPPRRRPGCCPPVPGWCCRPSP

SEQ ID NO: 319576 - protein, 168 aa, Zea mays
  Clone ID: MRT4577_54523C.1.pep
RSTGVSSAGRGTWAPAPRTAPAGRPSGTAPPGPGPGPGRGPTPRDGPRRRRPRPLPRPRAAARPAGPGTPAPPAPAPPAPRSTPPRCTPGTPAGCPAAPACSRSPSPGELGRVRFGGSDPWTGLQFPIISGRPARGLAAGWMDGWTDRHRQGEEGERPGRGSAPAGLE

SEQ ID NO: 319577 - protein, 219 aa, Zea mays
  unsure (1)..(219): unsure at all Xaa locations
  Clone ID: MRT4577_54524C.1.pep
MGAGQPQNTKRERESNSNSTTTAPILLFSFCYAHTEGHTELAAHSRGARRPPRPXTRAPGSGAPASRRRGGARXPRRTPWTPAPRTAPAGRPSGTAPPGPGRGPTPRDGRRPRPRPRPRAAARPAGPGTPAPPAPAPPAPRSTPPRCTPGTPAGCPAAPACSRSPSPGELGRVRRFGGSDPWTGLQFPIISGWPARGLAAGWMDGWTDRHTQAEEGARP

SEQ ID NO: 319578 - protein, 809 aa, Zea mays
  Clone ID: MRT4577_54525C.1.pep
MEPAVATAGEGQRFKRIPRQAWSGNLELGPLNHPTVSKVTWHYALCLHMCWTRIIKLNESLDHWPHLNELVQCYKADFVKDDCKYGHYESVASPSFQNQIFEGPDTDIETELQLCNARHSKSEDATEDDTPSTSGRQIYETESSGSSSKVHCSLSPLPAYEAAFDWENERSLIFGQRVPESIPAISNSGLKITVKVLSLSFQAGLVEPFSGTICLYNRDRRERLSEDFYFHMLPTDMQVDQGSLDRRGVFSLDAPSPSVCLLIQLEKAATEEGGVTPSVYSRKEPGALQEIWWSWWSRSLGAPENRGARSEALSKVYWSRFFEATANAFGGPIQALGGLIFPGLQAEEDDTPCPKPPNSAPLWRPFFLSKESPFLFYQSHQGPNGVYQLPLQDTQSYLDTSLIAMLSITFNVMDGSLIQNDSTARPSGVEMKMIRGCPVPRAGPNIYLSLQVHLAEKEKQKLQVWSRIMPYKESFAWAMIPLFESNRAGGLSDAASPSSPLAPSLSGSSSQDSIVDPISKLALDGKVNHYSSGSSVIVEISNLNKVKESYIEDSLQDPKRKVHKPVKGVLRLEVEKLHDDHNDVDNASEGGSMANDLNDAGDINNGRSNRSSFDGIHSSVNSIAIAKKDAHHNGHTSNAENVDNFQAFDFRVLTRSEPFSQLFHCLYVYPLTVSLSRKRNLFVRVELRKDDSDIRKPPLEVIIGYSVLPLSTHIQLLSDVSLPILRELVPHYLQESGKERMDYLEDGKTVFRLRLRLCSSLFPINERIRDFFVEYDRHTLHTSPPWGSELLEVAAFRAMVNILTRLEIR

SEQ ID NO: 319579 - protein, 59 aa, Zea mays
  unsure (1)..(59): unsure at all Xaa locations
  Clone ID: MRT4577_54526C.1.pep
IQXFSXXWSPXXEXXCCXSHSWNHIVAVAXXLXERAKEGQGGQKIRDAWVXPGNSGTGT

SEQ ID NO: 319580 - protein, 100 aa, Zea mays
  Clone ID: MRT4577_54527C.1.pep
CFSASPFSAARARPLCLRCRPWSCLVFLFAFWFLVPFCFSPPWSSAWFLSVSWWLPWRPPSLFSAGGASAVLSINPPRPLLFGCHRNVGRPGFSGPVRRR

SEQ ID NO: 319581 - protein, 167 aa, Zea mays
  Clone ID: MRT4577_54528C.1.pep
RNQELPTCCIGGTGSVHGIHSRRQTISNHLTITTHDLHLQQQQELHSLDTTYKLPLLLTECLTRLSPFCQFYHGQTVSRGLVISRTDRRSHLAAAAAHGRRWLLRAAGSAGRHWTTRLGSMCLWTAGCSALPPRPSARDLVAPVTEQAASAASFHRRRSSPLRSAQY

SEQ ID NO: 319582 - protein, 243 aa, Zea mays
  unsure (1)..(243): unsure at all Xaa locations
  Clone ID: MRT4577_54529C.1.pep
MASETETFAFQAEINQLLSLIINTFYSNKEIFLRELISNXIHLVPDKATNTLSIIDSGIGMTKSDLVNNLGTIARSGTKEFMEALAAGADVSMIGQFGVGFYSAYLVADRVVVTTKHNDDEQYVWESQAGGSFTVTRDTSGEQLGRGTKITLFLKDDQLEYLEERRLKDLVKKHSEFISYPISLWTEKTTEKEISDDEDEEEKKDAEEGKVEDVDEKGREXXKKKKIREVSHEWSLVNKQKPI

SEQ ID NO: 319583 - protein, 143 aa, Zea mays
  Clone ID: MRT4577_5452C.1.pep
WTHVYLKECDGVVPRLVSERVDPSELASVLQGNKVVDAFVSVETFDYYQSAGIRLVANRLDVHAPARRPSYRCPNSAGRLFGPCHGTNLARSKHGPARSVTGPGRHGPFSGLGMGRYGSPRALARPGPINGSARRRLVYLCKY

SEQ ID NO: 319584 - protein, 220 aa, Zea mays
  Clone ID: MRT4577_54530C.1.pep
GAPVHSGGAGEPGTKKKRGRPRKYGPDGSMSLALVPASMAGEPAPAALGASGPFSRLGPKAPNTAPSASPDGAKKRGRPQGSTNKKHVAALAALGPAGAGFTPHLIFVKAGEDVSAKIMSFSQHGTRAVCILSANGAISNVTLRQSATSGGTVTYEGRFEILSLSGSFLLSENGGQRSRTGGLSVSLAGPDGRVLGGCVAGLLTAASPVQVCCRPLDPAG

SEQ ID NO: 319585 - protein, 225 aa, Zea mays
  unsure (1)..(225): unsure at all Xaa locations
  Clone ID: MRT4577_54531C.1.pep
MATETETFAFQAEINQLLSLIINTFYSNKEIFLRELISNSSDXVRPVKSKSGCILVCXVWAVTCAMVXYTLRLILFLTLDLALLLGAVFCATSXALDKIRFESLTDKSKLDAQPELFIHIVPDKASNTLSIIDSGIGMTKSDLVNNLGTIARSGTKEFMEALAAGADVSMIGQFGVGFYSAYLVAERVVVTTKHNDDEQYVWESQXXGSFTVTRDTSGEQLARGT

SEQ ID NO: 319586 - protein, 60 aa, Zea mays
  Clone ID: MRT4577_54532C.1.pep
LISFIDVMDPIYLLFLHNSFCIRRDVAIQCFSSGVCNERFVENHIKALVLMLCSVLVGCI

SEQ ID NO: 319587 - protein, 244 aa, Zea mays
  Clone ID: MRT4577_54534C.1.pep
MATPVWFITGSSNGLGLLLSLRVLKAGHRVIATVRDTTRSADAVRQIEEAGGKIVTIDLTESKASITKKVQDAEKVYGRIDFLVNNAGYSVLGGIEFFTEAEAEHQIQTNLFGPLYTIQAALPGMRGQGSGTIINISSIAGQDAQPSCGIYSASKFALEGLSESLSKEVKEFGINVLLVEPGAFRTNFLEACVKSNISGEKAYQGTVLEATLQKFDKAAGKQAGDPSKGVDIIFEVATGEGAAG

SEQ ID NO: 319588 - protein, 146 aa, Zea mays
  Clone ID: MRT4577_54535C.1.pep
YTCCCLLHHATVRLSASPLLAIAPPRIAQLLVCKAQKQDAAADQRDVWRRAELALLDGVTVVAGANVDPASAAYGKADNVLTEPKESTEYIAYMGDSFKLLIPFKCNLNKEREFPRHVLRYDDNLDANSNVSVIIQPTFNKIIADY

SEQ ID NO: 319589 - protein, 76 aa, Zea mays
  Clone ID: MRT4577_54536C.1.pep
MAGIRPIIHDWEPVVVPKTAATAAANNDDNAVNAARRSGAAIETMNKYNAGPNTAASIGTSLNTKHPDHQTESFAH

SEQ ID NO: 319590 - protein, 68 aa, Zea mays
  Clone ID: MRT4577_54537C.1.pep
LPHVMMQLWKRVLLVPELHKQTFVNADDLLNGHPVTTAPQGSRDTDKHIHWLVRKLAIEQKTPSTKVL

SEQ ID NO: 319591 - protein, 62 aa, Zea mays
  Clone ID: MRT4577_54538C.1.pep
MAGGTVAHATLNGPIVVKEIFNGLTLGLIAGGISKIHHCYQHMKAICFYDMLDKGQIVVGQE

SEQ ID NO: 319592 - protein, 56 aa, Zea mays
  Clone ID: MRT4577_54539C.1.pep
MGHSSVWDSHPKNYGPLSLVCLVCANPYGLIRKYGLMCCMQCFRSNSKDIVFIKYR

SEQ ID NO: 319593 - protein, 92 aa, Zea mays
  Clone ID: MRT4577_5453C.1.pep
HVWMASIRSAWALARACFQSSISTASSRPRTFLTTTATSTLASSPWLICLPAVSSTASVFRCSNALYPLLDSAPFGTILQGSSSAPLGHRRR

SEQ ID NO: 319594 - protein, 130 aa, Zea mays
  unsure (1)..(130): unsure at all Xaa locations
  Clone ID: MRT4577_54540C.1.pep
RNPRIFGEKFNVDEAPKTCLNSSTFASXWNYLTXXILRDXENXRKDGMEXXEPNWSCLLNEENSPGXRKLTHVEEIQNLTLKRQLKALQHNGTSALSAEKSKRLNTILNKMSTIYSTGKVLDPNTQECLT

SEQ ID NO: 319595 - protein, 224 aa, Zea mays
  Clone ID: MRT4577_54541C.1.pep
SAPSPPSPSPSPPPSPSPSRLVPQLLVALLQRRRFDATLRVSPTFPGFSPHSIAAALAAIPRFLLPGSPRHLCPQRPFPSASHPSNRRLAAALTLAFLSWSHAHAHPHPVPLSEAPLRAAALALTRAHALSPLFRLLRAHASVVSTAALTDVIRVLGEEGLPRHALAAFHRMRQLHCAPDAQCYNTLIAALCQNGRFSDALFLLDQMERPGARCKPDTYTYTVL

SEQ ID NO: 319596 - protein, 174 aa, Zea mays
  Clone ID: MRT4577_54542C.1.pep
MLYLLTLTLQLGDCYEVTDFLAKHRIFEDLPPDFSKKIVPTLKFRNGTVAHFTRVFGDALAAIGDTMVILGLPKGPLISSGLKAYRFSYTDLSDISKVMALLCPEEQKFSMQKDTKAWNDTCGNLSIARIQDNEMVSRIETHLSDESITFWEEFESFQVFMHDQKDSRVIILFL

SEQ ID NO: 319597 - protein, 72 aa, Zea mays
  Clone ID: MRT4577_54543C.1.pep
SYTSPSRFFFPCPCFSPWGLPFSPSNNWFHPPRWVCLTLPCGGGNPLSGGPFKKKGLASPPLWGPPTGKCFL

SEQ ID NO: 319598 - protein, 127 aa, Zea mays
  Clone ID: MRT4577_54544C.1.pep
KKKRKRGGGCKKRKRTGPPPSPGNKQHTENETNSRATSTGYPGGKQETSAQTPSDTRKERGGIRRTSAHTGGASTAKGTGSPRGRPGRTNRGPGRGRRRNRGPPPPRWPGGPSKGTRELQAPRARGA

SEQ ID NO: 319599 - protein, 57 aa, Zea mays
  Clone ID: MRT4577_54545C.1.pep
VGAFIIQNGQLHAKREAMHLFVSCIIITMRYKSCMFVLFEHYRENILFLYSNPLSEL

SEQ ID NO: 319600 - protein, 63 aa, Zea mays
  Clone ID: MRT4577_54546C.1.pep
IRLELYPPTLFNPPALSFTGGVEDDQRVGQPERHAATRTLLTLPSGSTTNGRDLITEMRDENY

SEQ ID NO: 319601 - protein, 54 aa, Zea mays
  Clone ID: MRT4577_54547C.1.pep
YLNLNLGSFRVIEHVICYVYFCLQVYSSHLPCALMSQEVPRSVTSTVHFWDTLW

SEQ ID NO: 319602 - protein, 52 aa, Zea mays
  Clone ID: MRT4577_54548C.1.pep
FLWPNSFLRPDSFLGNSRKGRCNLPRRLGIGIQIMLTSPSFYCEKSFGQHRQ

SEQ ID NO: 319603 - protein, 84 aa, Zea mays
  Clone ID: MRT4577_54549C.1.pep
LQGDFWNRWGCSTIKPKNFNVREKKTRTTNNAINPLLEHSNQSKAKKKNQGVIILREECLGRKSQVEKIFNNLYIQHCLLFYRK

SEQ ID NO: 319604 - protein, 143 aa, Zea mays
  Clone ID: MRT4577_5454C.1.pep
NKGKGPRSKFTGPQKSHVGKKKAFFWLNRGKNQPPPPPPQKKKKKRENLLITKTPPKTRARVVFSNHKKLTPPPPGEEPKNGLMEGGKTPTGAKYPFGKKTHPRLGGPKEAMGPGPIKKKKGGHPKNTFAPTIPPKALPQTNI

SEQ ID NO: 319605 - protein, 59 aa, Zea mays
  Clone ID: MRT4577_54550C.1.pep
GSMAGNSSIVEGSNAGGQRAVIQQRGRTASSEATTQLELRTKLESSLSCSWPTATEFTG

SEQ ID NO: 319606 - protein, 77 aa, Zea mays
  unsure (1)..(77): unsure at all Xaa locations
  Clone ID: MRT4577_54551C.1.pep
CPLSRSSSADPLVRSKMQIFGKTITXXKTITLEVERSESIDNEKGQMQDKDGIPPDQQRFIWGGRXIEDGCTIGEDS

SEQ ID NO: 319607 - protein, 54 aa, Zea mays
  Clone ID: MRT4577_54552C.1.pep
GHKKGNPIATIEPQWRPKYFAFLCLLVFLQGVVNPPFFLKGYQALLVSFFPQNF

SEQ ID NO: 319608 - protein, 79 aa, Zea mays
  Clone ID: MRT4577_54553C.1.pep
MPRLTIGDSVPNLELDSTHGKIRIHYYYGDGYTIIFSHPADCSLVCTTEMAAMAGHAKEFQTRAVKLLCILCDDVESHR

SEQ ID NO: 319609 - protein, 329 aa, Zea mays
  unsure (1)..(329): unsure at all Xaa locations
  Clone ID: MRT4577_54554C.1.pep
ISVAIAGKSYYDVLQVPXGASEDQIKRSYRKLALKYHPDKNPDNEEGTRRFAEINNAYEVLTDQEKKKIYDRYGEEGLKQFQGGRGSGGGMNIQDIFSSFFGGGGGGMEEEEQQILKGDEVIVELDASLEDLYMGGSLKVWREKNVIKPAPGKRRCNCRNEVYHRQIGPGMYQQMTEQVCDQCPNVKFVREGEFLTVDIEKGMKDGQEVLFFEEGEPKIDGEPGDLKFRIRTALHSHFKREGNDLHATVTISLLQALVGFEKTIKHLDNHLVEIGTKGITKPKEIRKFKGEGMPLYQSNKKGDLYVTFEVLFPKTLTADQKAKLKDVLV

SEQ ID NO: 319610 - protein, 66 aa, Zea mays
  unsure (1)..(66): unsure at all Xaa locations
  Clone ID: MRT4577_54555C.1.pep
PPGSSSGPSPPSPAGTAGGPRACSPRAPPPPPAAPKXPTSVTPPPPARRPPLPRRSFFFTPTPAPT

SEQ ID NO: 319611 - protein, 301 aa, Zea mays
  unsure (1)..(301): unsure at all Xaa locations
  Clone ID: MRT4577_54556C.1.pep
GKLDPVVGRQDQIERVTQILGKRTKNNPCLXGEPGVGKTPIAEGLAQRIANWDVPKTIEGKXKXVITLDMGLLVAGTKYRGEFEERLKKLMDEIKQNEDIILFIDEVHTLIGAGAAEXCIGATTLDEYRKHIEKDPSLERRFQPVKVPEPTVDETIQILRGLRERYELHHKLRYTDDALIAAAQLSYQYISDRFLPDKAIDLIDEAGSRVRLRHAQLPDEAKELDKELRQITKQKNEAVCGQDFEKVYCYLVQRRQRRSAPTSLATPIWLIPSIMLFPFEINILLPILPFVSSSCFLFYNL

SEQ ID NO: 319612 - protein, 47 aa, Zea mays
  unsure (1)..(47): unsure at all Xaa locations
  Clone ID: MRT4577_54557C.1.pep
PAGAASRYGAQCPRLGRLDAQLRARMASGXLHRSASLCLRTGDGTHG

SEQ ID NO: 319613 - protein, 136 aa, Zea mays
  Clone ID: MRT4577_54558C.1.pep
CIGATTLDEYRKHIEKDPALERRFQPVKVPEPTMDETIQILRGLRERYELHHKLRYTDDALIAAAQLSYQYISDRFLPDKAIDLIDEAGSRVRLRHAQLPDEAKELDKELRQISKQKNEAVRGQDFEKVYCCLAQR

SEQ ID NO: 319614 - protein, 166 aa, Zea mays
  Clone ID: MRT4577_54559C.1.pep
MGFLAFWSVSPVGSAAEQVTWTGLLVAGTKYRGEFECTGATTLDGYRKHIEKDPALERRFQPVKVPEPTVDETIQILRGLHERYELHHKLRYTDDALIAAAQLSYQYISDRFLPDKAIDLIDEAGSRVRLRHAQLPDEAKELDKELRQISKQKNKAVRGQDFEKNL

SEQ ID NO: 319615 - protein, 88 aa, Zea mays
  Clone ID: MRT4577_5455C.1.pep
MAALRPLVKPKIVKKRTKKFIRHQSDRYVKIKRNWRKPRGIDNRVRRRFKGQILMPNIGYGSNKKTKHMLPSGFRKFLVHNVKELEVL

SEQ ID NO: 319616 - protein, 74 aa, Zea mays
  Clone ID: MRT4577_54560C.1.pep
KIFAKVGDFFKAPGNLALKNKAAPTGGTKLKGFVAPLQFDSLQVEIAKLPHDVEEFAKQFPPIGFEKEALKSKN

SEQ ID NO: 319617 - protein, 163 aa, Zea mays
  Clone ID: MRT4577_54561C.1.pep
MPLVCCQASYLQEINGLRPRGLFFLIMCIGATTLDEYRKHIEKDPALERRFQPVKVPEPTMDETIQILRGLRERYELHHKLRYTDDALIAAAQLSYQYISDRFLPDKAIDLIDEAGSRVRLRHAQLPDEAKELDKELRQISKQKNEAVRGQDFEKVYCCLAQR

SEQ ID NO: 319618 - protein, 38 aa, Zea mays
  Clone ID: MRT4577_54562C.1.pep
IAPRQNSPSRATTPKLTTGVHWVAKKRMEVLGRPDAWV

SEQ ID NO: 319619 - protein, 233 aa, Zea mays
  unsure (1)..(233): unsure at all Xaa locations
  Clone ID: MRT4577_54563C.1.pep
MGFLAFWSVSPVRSAAGQVTWTGLLVAGTKYRGEFEVRLKKLMEEIKQNEDIILFIDXVHTLIGAGAAEGVIDAANILKPAFCNXQNNHIAGDFICXCIGATTLDEYRKHIEKDPALERRFQPVKVPEPTMDETIQILRGLRERYELHHKLRYTDDALIAAAQLSYQYISDRFLPDKAIDLIDEAGSRVRLRHAQLPDEAKELDKELRQISKQKNEAVRGQDFEKVYCCLAQR

SEQ ID NO: 319620 - protein, 260 aa, Zea mays
  Clone ID: MRT4577_54564C.1.pep
PRVRPRVRKVITLVLGLLVAGTKYRGEFEERLKKLMEEIKQNEDIILFIDEVHTLIGAGAAEGAIDAANILKPALARGELQCIGATTLDEYRKHIEKDPALERRFQPVKVPEPTVDETIQILRGLRERYELHHKLRYTDDALIAAAQLSYQYISDRFLPDKAIDLIDEAGSRVRLRHAQFPDEAKELDKELRQITKQKNEAVRGQDFEKAGELRDREMELKAQITAIIDKSKEMIKAETESGEVGPLVTEADIQHIVSSW

SEQ ID NO: 319621 - protein, 617 aa, Zea mays
  unsure (1)..(617): unsure at all Xaa locations
  Clone ID: MRT4577_54565C.1.pep
MGFLAFWSVSPVRSAAGQVTWTGLLVAGTKYRGEFEVRLKKLMEEIKQNEDIILFIDXVHTLIGAGAAEGVIDAANILKPAFCNXQNNHIAGDFICXCIGATTLDEYRKHIEKDPALERRFQPVKVPEPTMDETIQILRGLRERYELHHKLRYTDDALIAAAQLSYQYISDRFLPDKAIDLIDEAGSRVRLRHAQLPDEAKELDKELRQISKQKNEAVRGQDFEKAGELRDREMELKAQITAIIDKSKEMIKAETESGEVGPLVTEADIQHIVSSWTGIPVEKVSSDESDRLLKMEETLHTRIIGQDEAVKAISRAIRRARVGLKNPNRPIASFIFSGPTGVGKSELAKALAAYYFGSEEAMIRLDMSEFMERHTVSKLIGSPPGYVGYTEGGQLTEAVRRRPYTVVLFDEIEKAHPDVFNMMLQILEDGRLTDSKGRTVDFKNTLLIMTSNVGSSVIEKGGRKIGFDLDYDEKDTSYNRIKSLVTEELKQYFRPEFLNRLDEMIVFRQLTKLEVKEIADIMLKEVFDRLKAKDINLQVTEKFRDRVVDEGYNPSYGARPLRRAIMRLLEDSLAEKMLAGEVKEGDSAIVDVDSDGKVIVLNGGSGVAEPLEPALST

SEQ ID NO: 319622 - protein, 95 aa, Zea mays
  Clone ID: MRT4577_54566C.1.pep
RAPCFFFFLAHSLNHSLICSILLASSPIRVCALRVACEIHERTLFLFLPWFSFTLCMGCTVRACTCCTSSVLSPLRSLGYSCPLRASPEESVQHS

SEQ ID NO: 319623 - protein, 66 aa, Zea mays
  Clone ID: MRT4577_54567C.1.pep
CGRSSRGRTPLLRGGVLEQGVGAGRFLFMGGGVSFKALWSLGQADLDEFSVPFCVVAIFQLLENPP

SEQ ID NO: 319624 - protein, 126 aa, Zea mays
  unsure (1)..(126): unsure at all Xaa locations
  Clone ID: MRT4577_54568C.1.pep
MEGVLPKYFHSEWSVAQFRLQEGEHYIVAFGHEKNTAAVGGMDGXITWNITFALYNNKRCSXSKYFFFPPNGXSFYRCRFDPINGGEMLQLDCYRFLKPVDQPRLLVRRNATYCEDYPQSIHAHLP

SEQ ID NO: 319625 - protein, 142 aa, Zea mays
  Clone ID: MRT4577_54569C.1.pep
PRVRPASAAAWAGMHERKAEMARFADAFIALPGGYGTLEEVLEVITWAQLGIHKKPVGLVNVDGFYDPLLSFIDMAVKEGFIKEDARRIVVSAPTAKELVLKLEEYVPEYEVGLVWEDQMPAAELESPGSPPPRLWTSAALL

SEQ ID NO: 319626 - protein, 55 aa, Zea mays
  Clone ID: MRT4577_5456C.1.pep
LCHHPVPRVSQVTLSAKRINVSTGSQLTIQHHLSSDKSIAITAAGRLHAAPQVKS

SEQ ID NO: 319627 - protein, 153 aa, Zea mays
  Clone ID: MRT4577_54570C.1.pep
VIPRSLMPREVTGEPVGEVRAVSGMHERKAEMARFADAFIALPGGYGTLEEVLEVITWAQLGIHRKPVGLVNVDGFYDPLLSFIDMAVNEGFIKEDARRIVVSAPTAKELVLKLEEYVPEYEVGLVWEDQMPAAELESPGSPPPRLWTSAALL

SEQ ID NO: 319628 - protein, 48 aa, Zea mays
  unsure (1)..(48): unsure at all Xaa locations
  Clone ID: MRT4577_54571C.1.pep
HSQINTTLIXSTIQHNTLNSHKFSYQSSLLFHTTTYLSLHKSFKQTSL

SEQ ID NO: 319629 - protein, 92 aa, Zea mays
  Clone ID: MRT4577_54572C.1.pep
TISMFVVPLSVLVAWIMGVLMDLDFNLLETGCLFLAILVTAFTLQDGSSHYLTGLLLVLGCIGIYLCSLDYRHHGNVSNDDQLGVACDPWRI

SEQ ID NO: 319630 - protein, 61 aa, Zea mays
  Clone ID: MRT4577_54573C.1.pep
GQTECPALTRSYHRRATTVAARLDDQEKKLNLSDLPTTTSGSFPQTVELRMARREYQAKKI

SEQ ID NO: 319631 - protein, 54 aa, Zea mays
  unsure (1)..(54): unsure at all Xaa locations
  Clone ID: MRT4577_54574C.1.pep
RGKMSTKKVDEQMMNVEKEKSSYLVEWMRKNVESXSLCDIRLRGVYMDSRLIGY

SEQ ID NO: 319632 - protein, 80 aa, Zea mays
  Clone ID: MRT4577_54575C.1.pep
RKPYVSCDSTKDTRQLRFEVHISHTTQTQKYTPALINIIMPYCASRHVPDSKSSAWTGASNYKLTQTRCGKLRFTWLKLL

SEQ ID NO: 319633 - protein, 71 aa, Zea mays
  Clone ID: MRT4577_54576C.1.pep
RFRAGRARTICFCGDDRAAVVAYVPSPVRPFAGDGHDLEIGKDCPELHIMEEGWVYPALTVVILAFTTPCQ

SEQ ID NO: 319634 - protein, 64 aa, Zea mays
  Clone ID: MRT4577_54577C.1.pep
TRGARYSWWKQRQSRWHQCTGCTRGIHRGRAVPRPSCGTRGGGGGGYHVLWIINRDRSGITGLN

SEQ ID NO: 319635 - protein, 85 aa, Zea mays
  Clone ID: MRT4577_54578C.1.pep
MEPVEPQQQVELNRLNASSRPGTNGGSARTEREEEVDDCPIEEVRLTVPITDYPALPALTFRTWFLGLLSCALLAFSNQFFGYRQ

SEQ ID NO: 319636 - protein, 59 aa, Zea mays
  Clone ID: MRT4577_54579C.1.pep
LSTKKRYYRHTLNINAGVMLLFPIFNLFYNFSVVLEKFFRDTSIFVIYIVTLTSPRVSI

SEQ ID NO: 319637 - protein, 61 aa, Zea mays
  Clone ID: MRT4577_5457C.1.pep
KNATYDHALTLRVTVSLKEQTLGYSTRQTLLSLPMRMMTIAFFLKMTKTNDTYSLCKNHEF

SEQ ID NO: 319638 - protein, 40 aa, Zea mays
  Clone ID: MRT4577_54580C.1.pep
QSLDLSDRQDLNTCLRPKPGIYTIVSLSLKLYQHKKLGRR

SEQ ID NO: 319639 - protein, 179 aa, Zea mays
  Clone ID: MRT4577_54581C.1.pep
QALSDDEKGSPRSTLVVVGHTDAAESPRATTEKAKGRRPPPARGHGGSAAPHFMSSTVCSRQRRCAGGYHSVGNGKPRLTAVSVNRYPPPAAELSGSQNAAARASRSASVALSSGVHKLRCLRVNKSDQVNVISNSSVDSTAASAPPPRRRESCFGSRPVLQRAAAPLHLHRRRMSSLT

SEQ ID NO: 319640 - protein, 76 aa, Zea mays
  Clone ID: MRT4577_54582C.1.pep
KKKVYSLLVGKKGGNKNFLSPQPLGVFQKKNGVGGKISGHKGKYYSFYGTGPMSKQGVITSWFFLKKKTVLLRIFA

SEQ ID NO: 319641 - protein, 64 aa, Zea mays
  unsure (1)..(64): unsure at all Xaa locations
  Clone ID: MRT4577_54583C.1.pep
SRHRCLLCRCASETSSLALPHSRWGGLVIWQNRPQGWCLKKKILGFGEFNILSDGWVRPXXPGP

SEQ ID NO: 319642 - protein, 121 aa, Zea mays
  unsure (1)..(121): unsure at all Xaa locations
  Clone ID: MRT4577_54584C.1.pep
NARDDPIPTRPNQLQFANAVTYKYPISMHAIAIXGXAAVHQLATCATWPCDGTGASAVSGASAVSPTEAGNNVDGDCRGEVNVGGGLGATAICVILGAGGDAHGGSGSRGLVMMPGGTTRL

SEQ ID NO: 319643 - protein, 310 aa, Zea mays
  Clone ID: MRT4577_54585C.1.pep
MAGSLHLPVVDLALPDLRAAAESIRQACVEHGFFYVTNHGVDRGLLEAVFAESKRFFDLPMEDKMALLRGANHRGYTPPYAEKLDASSQFVGDLKESFYIGPLDDGDMHNDVNQWPSEERLPSWKETMKLYFAAVLDTGTRILSLVALGLDLDADFFHKIGALKCPSTFLRLLHYPGEVHESDSGNYGASAHSDYGMITLLVTDGTPGLQICREKDRNPQLWEDVHHIDGALIINIGDLLERWTNCAFRSTLHRVVAIGKERYSVAFFLDPNPDTLVQCLESCCSEACPPRFPPIKSWDYIAGRLNSTYK

SEQ ID NO: 319644 - protein, 356 aa, Zea mays
  Clone ID: MRT4577_54586C.1.pep
LLVFTHAGHKLAVSDGMDLRVLIAYRYLFGSAFLGPLAYFVERKNRTKLTWRVVFLSFACGLSGGTMAQNLYIAGMKFTSATFASATTNLLPACTFVIALVFRYEKFAIRSLSSQAKVAGTLLGVGGAMLLTFYKGVDITPWHSNLNLVATLTQHHHHHTTTTTTNYAMGSLLCVCSCFFYALWIVVQAKLSNEYPFHYSSTALMCIMTTLQSSIFALCFDRDASQWRLKFDIRLLSCAYSGIFASGVALVIMAWCVQQRGPLFVSVFSPLMLLIVAVLSSLLLGEKLHLGTAMGAVLIVMGLYAVLWGKGREAAAEAARVSVNDHPTTSNSNSSEEDDDKKRHVSVPMPPAPNSV

SEQ ID NO: 319645 - protein, 86 aa, Zea mays
  Clone ID: MRT4577_54587C.1.pep
YGYEVVYPAHANNPSAHMRDHCSVMSTNVKGIRALPALTGGLACHMTQLTDTDSLIHPKWLQILTRPLTEDTLTRLQMTPQQRGVK

SEQ ID NO: 319646 - protein, 201 aa, Zea mays
  Clone ID: MRT4577_54588C.1.pep
HAALAVVAAGNGGGGTSAGQDSCVTAAPAGRGARSKRSSRAPAAAAWHSLVSRPPSQPSPSSSSCSSSDFPSSSNRPARGRKSPGPGGDAVAGSDGGVRRCTHCASEKTPQWRTGPLGPKTLCNACGVRFKSGRLVPEYRPAASPTFVLTQHSNSHRKVMELRRQKELILIRGSHRDAAAAAGAGSAGPRPELMFRDYGVC

SEQ ID NO: 319647 - protein, 99 aa, Zea mays
  Clone ID: MRT4577_54589C.1.pep
SFPLELSIILAFVTILSRSCNSLAIASAFIVITLELCLRLEDLLQRGRLPSRTEAPCNSHYYARNKWLVMFLRTLERGRPPTKRFVLYFIKQDISVKIS

SEQ ID NO: 319648 - protein, 142 aa, Zea mays
  Clone ID: MRT4577_5458C.1.pep
DMRWIRTDVIVSQAAAEGPHRKVVITSQAFARTGSNPARARCGIRASGRTGRVLGDGPCGVDNRGQIAEEAEDKADPELTPTMGIEEGRDRRQDNIEDYVESERSCDPHIGLFYPLLSLTSCGSVDLSIISVSARQIYQELW

SEQ ID NO: 319649 - protein, 78 aa, Zea mays
  Clone ID: MRT4577_54590C.1.pep
YVRLQCGFGLPLRPFVHPICGPWVLAGWFVCPVGPLCCLCGPLVGRVGPRCGFQPVIFLQPPPHIKGRPPAYGSSTRN

SEQ ID NO: 319650 - protein, 148 aa, Zea mays
  unsure (1)..(148): unsure at all Xaa locations
  Clone ID: MRT4577_54591C.1.pep
PQREVYCFCKPQRDGGEGRQSQHRHPRQTYLDQQPMGESEGHHLSSASIRPHEGAAWAQSSGFPQLTPYEMTNIIKDLHEHEVVATSGHXLGATKAMVIQREPGAAIRGKKGSGGLPGNTTRQALAIGNDNEPMTPGQSNMAAERLSD

SEQ ID NO: 319651 - protein, 85 aa, Zea mays
  Clone ID: MRT4577_54592C.1.pep
RDLVISQLWLFGHLTVTTHVLNFLGRLSYWSSDIKYIHTIILWLPILIETITSLLSEKEIGLNIWSRRRNFYKFTLYPQEELSHP

SEQ ID NO: 319652 - protein, 62 aa, Zea mays
  Clone ID: MRT4577_54593C.1.pep
GRGFFFFFFVITIHEMCNLIHDLMVTIIHCARFRNMSCELFKSHRKKATNQHRTNRIENKLY

SEQ ID NO: 319653 - protein, 132 aa, Zea mays
  unsure (1)..(132): unsure at all Xaa locations
  Clone ID: MRT4577_54594C.1.pep
RKNNXXXGNQXRNGKAKEQPTKEPNNRNNNHAGGGRRFFFXKXXXTXPXAKDSAGXLSTXTKTKKHNAPAKLSHKSVIHNEFSMMAKAVXKNQVSDNYYRPDLTKPVLARLSSECRNLQGLESGVKMSNRQT

SEQ ID NO: 319654 - protein, 77 aa, Zea mays
  Clone ID: MRT4577_54595C.1.pep
LPPDCAQGVISSVPLGYAAHWSAALQHGAERQLRQLTRSLARLHQETGKKIVLCLEMEPDCVLENTDQAIAFQYWQA

SEQ ID NO: 319655 - protein, 118 aa, Zea mays
  Clone ID: MRT4577_54596C.1.pep
GGPLSPPFRGQFARGGFWQTIFPLLEKGAQPKGAPPRGKNLNFSQKNPQRKKAKTPELKTLPKNVPPPKRGPQRDPLLGGGAQVKRVIPIFPPHLGPGFLKRFRPRPHFTGGEFLGGG

SEQ ID NO: 319656 - protein, 102 aa, Zea mays
  unsure (1)..(102): unsure at all Xaa locations
  Clone ID: MRT4577_54597C.1.pep
MAAAGSVQGHGARFAAACGVLSRYVKAAAVAXRRRWSCXAAGTVGVLPLMPGADLSTQEEREAGAGPGPSPSPSAQLTISYGGRVVVLDDVPADKAAEVVRL

SEQ ID NO: 319657 - protein, 85 aa, Zea mays
  Clone ID: MRT4577_54598C.1.pep
VGSAYLFNLCKCLFSLRIRAVSGYWLKPDHVTFISVLTAYSHTQGKLRSNYDTSMQRTKAAGWSLKMSTTVVLLICWAEMLSFPV

SEQ ID NO: 319658 - protein, 67 aa, Zea mays
  unsure (1)..(67): unsure at all Xaa locations
  Clone ID: MRT4577_54599C.1.pep
KMVIVLVVCLALSAASAXAMHMPCPCAGLKELYGSVRRADTMMGAXRLYPYSEYVKQMQSTPLVAVP

SEQ ID NO: 319659 - protein, 92 aa, Zea mays
  Clone ID: MRT4577_5459C.1.pep
TMVEAADAPWVSYPGAIDFRFFGGGAKGGARPVPVRRLRPDHTGFGLVHRRAGWWLKVWKFRFPFFGFRRMQLRVLMEDHFVTGLVGRFQRV

SEQ ID NO: 319660 - protein, 88 aa, Zea mays
  unsure (1)..(88): unsure at all Xaa locations
  Clone ID: MRT4577_545C.1.pep
RPTTRMPTPITSSSTTLTITSINKWKSSFTTSCLAYSPTRPSTSSRPMPCLKRLSTTRSVARPFPRYLRTQXTRPFAWLVMRKILSLN

SEQ ID NO: 319661 - protein, 61 aa, Zea mays
  Clone ID: MRT4577_54600C.1.pep
KIKSSHQNKIQKKYLCYSFTESKFIAPSFPTLSTGKTLTQPNSMALHYIPTSSDTLVATRP

SEQ ID NO: 319662 - protein, 42 aa, Zea mays
  Clone ID: MRT4577_54601C.1.pep
HSFKSNTVGELSHIFVTWLVGVVAILLNSFSHCRYCICNPNA

SEQ ID NO: 319663 - protein, 75 aa, Zea mays
  Clone ID: MRT4577_54602C.1.pep
LEYLFFPLDLQITLVFNLLFSLIYCLYSRPYYFYCTLLYYLTYYRNRVQSIRKVHRYLVPYFLLGIPRCRFSALG

SEQ ID NO: 319664 - protein, 169 aa, Zea mays
  Clone ID: MRT4577_54603C.1.pep
MTACKQTASTGAAATYEADSKSAAKSDGAEERKPSTKCRKGKKAKGKLAVKSNVAEKPKTHDLSDVTRGLAVMSIATEKPLDEQLAQHALFTYQNYFWMDNFKGVYDKPSVDAIKRKAAENWKSFSDSDKAPYVAIARVNRILIAEAYEFKKTLKLTLVMTDKMMNLKM

SEQ ID NO: 319665 - protein, 340 aa, Zea mays
  Clone ID: MRT4577_54604C.1.pep
MAPPPHRHLLLLLLLLPLVLLAGTPASADDLVSELQSLRARSPSGVIHLTDTSVTRFLSAPSARRPYSVLVFFDAASLHSKPDLHLPQLRTEFALLSASFLAHNPDSGDLFFADIEFAESQHSFHQFGVNSLPHIRLIRSDHATLSGSEQMDQSHFARLADSMAEFIESRTGLEVGPIVRPPLLSRNQIILLGILFLISIPFMIKRIIDGETLLHDPRVWMAGALFVYFFSVSGGMYGIIRHTPMFLTDRADPNKLVFFYQGSGMQLGAEGFTVGFLYTLVGLMIAVVTHLLVKVESLQTQRLAMLAVMVVGWWAVRKVIYLDNWKTGYSIHTFFPSSWR

SEQ ID NO: 319666 - protein, 52 aa, Zea mays
  unsure (1)..(52): unsure at all Xaa locations
  Clone ID: MRT4577_54605C.1.pep
MHLDSPVPVRLIESLGLFRASTNVLNLVFKCFKRSYLTRELAPXKKKPKPQK

SEQ ID NO: 319667 - protein, 70 aa, Zea mays
  Clone ID: MRT4577_54606C.1.pep
KMSTPENRLLHKSCPLLSGEANRPLSPHLLLKNPQLSVIFFISHGIFGVALEFPIKSVPFPTNLTLMFGF

SEQ ID NO: 319668 - protein, 70 aa, Zea mays
  Clone ID: MRT4577_54607C.1.pep
LLTHKKFLMQKRTTPLQLKQHCLPKDTWKLRRMTIISTTGYCRNSSAYQAQVHSYVDIEVGISNGDAESA

SEQ ID NO: 319669 - protein, 63 aa, Zea mays
  Clone ID: MRT4577_54608C.1.pep
IRLEVQGHGPASFIIVVDWQTDSGYMKATVDMSSIVAWDLDKEQFLSTIESSADTGIFSLPTF

SEQ ID NO: 319670 - protein, 41 aa, Zea mays
  Clone ID: MRT4577_54609C.1.pep
GKKLVGKKKKKKKKKKKKKKKKKKNKKKKKKKKKPARAAAR

SEQ ID NO: 319671 - protein, 123 aa, Zea mays
  Clone ID: MRT4577_5460C.1.pep
DTGRPPTREAGGHIVPCKSSLLLPSTIYDFRGAVAGVYISLQKRRSRWARVQVSTGADCMNILVMGGTRIIGVLLYRLLDKEGHQVTSFTRGKGTHNSCSATGVLRGVLRLFLQGSALERRQG

SEQ ID NO: 319672 - protein, 109 aa, Zea mays
  Clone ID: MRT4577_54610C.1.pep
GREGVPAPTFVNLAGAHPLPSRTRRRPSPTLPRAPTVARPLVFLAHSPSPPPHPHALEASCRTRSDGGDEVEVYDLLNLRKTAETAGTSSLLPRQLLADFSFVVCEYLI

SEQ ID NO: 319673 - protein, 39 aa, Zea mays
  Clone ID: MRT4577_54611C.1.pep
KKIKAKLLATLFKSHKCPHLTIIFRGLKPSQANIICFFL

SEQ ID NO: 319674 - protein, 101 aa, Zea mays
  Clone ID: MRT4577_54612C.1.pep
GREGVPAPTFVNLAGAHPLPSRTRRRPSPTLPRAPTVARPLVFLAHSPSPPPHPHALEASCRTRSDGGDEVEVYDLLNLRKTAETAGTSSLLPRQLLADFS

SEQ ID NO: 319675 - protein, 97 aa, Zea mays
  unsure (1)..(97): unsure at all Xaa locations
  Clone ID: MRT4577_54613C.1.pep
MASSAAYPDADENLEAIITRIEQKSRKIETLLKQSKPVEALKTALEGSPLKTRDERCKXGLDMSANWIVVHRALMAIRDVDGMFNSLDPEYYDILMK

SEQ ID NO: 319676 - protein, 129 aa, Zea mays
  unsure (1)..(129): unsure at all Xaa locations
  Clone ID: MRT4577_54614C.1.pep
RPGXKYLFGEPRSRPDPRGRTAISSPASRGREGVPAPTFVNLAAARPLPSRTRRRPSPTLPRAPTVARPLVFLALSPSPPPHPHALEASCGTRSDGGDEVEVCDLLNLRKTAETAGTSSLLPRQLLLGY

SEQ ID NO: 319677 - protein, 132 aa, Zea mays
  Clone ID: MRT4577_54615C.1.pep
ARSRPDPRGRTAISSPASRGREGVPAPTFVNLAAARPLPSRTRRRPSPTLPRAPTVARPLVFLALSPSPPPHPHALEASCGTRSDGGDEVEVCDLLNLRKTAETAGTSSLLPRQLLLVIHKGFSSTSGRQKN

SEQ ID NO: 319678 - protein, 104 aa, Zea mays
  unsure (1)..(104): unsure at all Xaa locations
  Clone ID: MRT4577_54616C.1.pep
HASAQIGNPEFKNRFXQLRTVGSLHTTDMPDVIPLYPSGLLGYANALDLLAVDSKKSPYVKHDFSYGRDYHNLQGILHTVAGWNGKDGEFKLQVHRNVALVNKS

SEQ ID NO: 319679 - protein, 207 aa, Zea mays
  Clone ID: MRT4577_54617C.1.pep
PINPSTPVLHGHAEVTAALPRSPVVPYRIAFFAGLAVVSSPLAFRLQLLVRQNQAGVNMLHHSNSRNQRNRGSRIKTLLQATLLSGVVFWLLYQARKQKAGSYSDSNVQMVVDNSDVTTKPEEGDVDHHSDTFDHNEKTVETVFDKDSTNLHEDDKRNTESSEAEGQVNSGDSNTEANNNKNEDETTSLVEGRKHDTESNSAAESKK

SEQ ID NO: 319680 - protein, 440 aa, Zea mays
  Clone ID: MRT4577_54618C.1.pep
MLHHSNSRNQRNRGSRIKTLLQATLLSGVVFWLLYQVKHSYDKKNEYLDDAEDQLTHNDRSIFQARKQKAGSYSDSNVQMVVDNSDVTTKPEEGDVDHHSDTFDHNEKTVETVFDKDSTNLHEDDKRNTESSEAEGQVNSGDSNTEANNNKNEDETTSLVEGRKHDTESNSAAESKSEVNSTGDELSQNNHAQEENTREASGMSHDEVAHGDESTSASGTWNGSDGEGEKKEAVDTQTGSETLPDDAKTEATDDRGTNSLSDETGNIPSVHTDNSQNDASENQGDATSTTSDSSEHGISEAVHIETGLEHGSATTSSVTGSGDDRDNSSDSSSAGKNTETLSGDDKGMETGTTTEASYSKEENSENSSVSTEAENSRGDSSIGVNGSSETSTNGEQVDPKTETSTSTSNVHNESQGADGSSGSNNSIGNGPEQTGKTERQ

SEQ ID NO: 319681 - protein, 140 aa, Zea mays
  unsure (1)..(140): unsure at all Xaa locations
  Clone ID: MRT4577_54619C.1.pep
PLGFLGRGGRGTFFPKGPKAPFGSLFPPALXPRGVWGWENPIFXPLRAPRGIGGGILPFTPLVPQKLIALLPGVPWGPFLAKKFGGQPPPKLGVGNLGGFFKKKGFFPFNPIAGWDLGFFLEQPPFPFSPVFGALPQEFF

SEQ ID NO: 319682 - protein, 162 aa, Zea mays
  Clone ID: MRT4577_5461C.1.pep
LASITHDRVAAHRRNGAPRHRHRRGQEALPLGARRCLPCARGGGQGRQDGGVYPPRERTESRSTTGTVLEGQRCSAASNPLARRAAPSGAYPPRERTESRSTAGTVLEEQRCSAASNPLARRAAPSALASSRIRCYSNAYFARVGGISLAEMNDLAGADGTE

SEQ ID NO: 319683 - protein, 205 aa, Zea mays
  unsure (1)..(205): unsure at all Xaa locations
  Clone ID: MRT4577_54620C.1.pep
KMAQECSHQLPITTKDEEIFRSXCTFLQSGFLSFTSASAFWSVSPFRRHSTISSSNTSFKSKRLSLSPSLIAMLLPHTSWNMLRGGEGGLGGLPPEELGTLVLEAEGGRGGRGGLPPAELGPLVLEMEGGRGGRGGLPPSEPRRKRDMVSSPFRSAAAAVAAEGSRSPASGGPWTSSSVISDCGAREGGSAETAAAALDSCLVPN

SEQ ID NO: 319684 - protein, 37 aa, Zea mays
  Clone ID: MRT4577_54621C.1.pep
LLSSFTSGPTGAPSRSQNIFAGSTPSITNLRTLFGGT

SEQ ID NO: 319685 - protein, 95 aa, Zea mays
  Clone ID: MRT4577_54622C.1.pep
IRHEALTPSPSPALPSSTVSLIHPSLPSSYAPLPNASAAELRQATRFVPPPLPTPPLSIGRESPHRPQLVRPSTTSPPGTHTSGEIMMSELLVGG

SEQ ID NO: 319686 - protein, 62 aa, Zea mays
  Clone ID: MRT4577_54623C.1.pep
NDALVISSRGEFNHYTGPLRWPLAMCTGQVRLSHIGTGNCRHPAGQLNCRVLLHESMPLHWL

SEQ ID NO: 319687 - protein, 80 aa, Zea mays
  Clone ID: MRT4577_54624C.1.pep
RQGRGSRAGGSPFNNPAGGAPPCTAPCILCEPLGLGLGGAPPPPQKKRSFFPLTGRQKQLPRGRDCRYYRGSPPPQLLFA

SEQ ID NO: 319688 - protein, 43 aa, Zea mays
  Clone ID: MRT4577_54625C.1.pep
PSRLCPRLFLQVHASSITRLIQFFPYPGDGLSPCFQNFKKKKL

SEQ ID NO: 319689 - protein, 155 aa, Zea mays
  Clone ID: MRT4577_54626C.1.pep
MLRPAPDPAEALELFTASARHSTGGGGGASCSYMLELMHAARPCGDMVHVFDLLHNQVVKTNVCSFATICGGVRVEGGLRSPPVALPAMREAEMSLNAYTYNGLIYLPFKCGFDAEAMADYKAMVDDVLLAGVMTYFVLMVAFGKKRVVHTALWL

SEQ ID NO: 319690 - protein, 55 aa, Zea mays
  Clone ID: MRT4577_54627C.1.pep
FESCPLGGPPFGAISACSRGGGGGLGGLSGGLCGLIGGWFSRHWPGFYNGGTGKT

SEQ ID NO: 319691 - protein, 99 aa, Zea mays
  Clone ID: MRT4577_54628C.1.pep
HACLDRKALWKSQQKPATAALGVGGAKSRHRPHPESSPAVASRMITARLRPREEERRGKKKELAPVLSRQVVRDGSWMPASGTVRFVTPMDGAVVPSPW

SEQ ID NO: 319692 - protein, 175 aa, Zea mays
  unsure (1)..(175): unsure at all Xaa locations
  Clone ID: MRT4577_54629C.1.pep
LCVRAPGSCPRPAPCATRDRDGRDAEQPRAXGPEAQAPKQDAAPCPFPCXRPRPRSQQPPGRAPPRASRAMRVPSPCTPTWPSSPAPSSTHDRSPTRPEPLDAKTPSRRPLPRSALRPTPPARSARPXPAPLSRDPPTPTDAPGSRAPCPXCAASPKTDRRPRTPKHRDVRSSPA

SEQ ID NO: 319693 - protein, 96 aa, Zea mays
  unsure (1)..(96): unsure at all Xaa locations
  Clone ID: MRT4577_5462C.1.pep
MGFIMDFAVNLFLRLLVVPVKRVQVRRVPVCGVKERCERSKAAWSLPPGPYRFWTLVRLYLXFSWVSLILAFRPSFPFDYPLSALSGLFLLFSSPF

SEQ ID NO: 319694 - protein, 250 aa, Zea mays
  unsure (1)..(250): unsure at all Xaa locations
  Clone ID: MRT4577_54630C.1.pep
GDQLRIRSRSNEKTRLRAIGEHQRRNERPSLKQDYARQSLARARRGNSTATPWRRARSRGFTTLEKNSAQRPWVGTRGRRAGDXLGQRSTGSGQGTPANRGTRAGSWAWRAGEEKPRXCVVARRAGANRERGAGIQARGELHGRAEGTGRARQXSTTRRGRGWRPWASAGEKHLLPPSSTGAGIGVAVRRPPTISVEERWASSRARLWRSEVPGASSAGGGCAQGPGEREPRALRERSWEGAEGDRRAEE

SEQ ID NO: 319695 - protein, 277 aa, Zea mays
  unsure (1)..(277): unsure at all Xaa locations
  Clone ID: MRT4577_54631C.1.pep
TPRAGGSLPESPAKLKLPRDLKNHLFFLFPPRAYRRXLPAMESVGVAPAPAAVAVAEQKMKLLEPRKEPLASAAAAAAKAPCKWAMKKKLVGGDAGYVLEDVPHLTDYMPELPTYPNPLQDNPAYSVVKQYFVNTDDTVTQKIVVRKNSARGTHFRRAGPRQRVYFQPDDVNAAIVTCGGLCPGLNTVIRELVCGLYDMYGVTSVVGIEGGYKGFYSRNTVTLTPKSVNDIHKRGGTILGTSRGGHDTAKIVDSLQDRGINQVYIIXGGDGTQQGAS

SEQ ID NO: 319696 - protein, 213 aa, Zea mays
  Clone ID: MRT4577_54632C.1.pep
MRPPCPAVALPTLLSRLRACRSASHALQCHALLLTSGHLAASPLRLSNLLLLALASVPSAAALADVVFARLPPPAARDPFAWNTAIRLHAPARPRAALLYFARMRRCGVQPDAYTFPAVLKACGCAPGCRAGLLVHAEAVRRGLAADLFTVNALISFYCRILDFRSGRKVFDEAGGVSRDLVSWNSMVAGYVGCGEMGLAQEMFDEMPQKDAF

SEQ ID NO: 319697 - protein, 81 aa, Zea mays
  Clone ID: MRT4577_54633C.1.pep
SFCKHSSRRTIILYCTTAYDQMIVQSIGSTALTTPGKVSRARTLKIPRTSPAREPCTTSTVRRATSDVSVQHRAVELKSSQ

SEQ ID NO: 319698 - protein, 213 aa, Zea mays
  unsure (1)..(213): unsure at all Xaa locations
  Clone ID: MRT4577_54634C.1.pep
MSQSRLLSLRVLDESSSEDDDEVIIAASQIVQSASQRKPGGSVLGRVYIYRDREAGHARLYQDYFAEHPTYGPRVFRRRFRMHRPLFLRIVNAVEQHDDYFQLKRNAAHQKGLSCLQKATAVFRMLTYGVPADATDEYVRIGESTTLKSLRRFVKAVIDVFEXEYLRTPNDNDTARLLALGEERGFPGMLGSLDCMHWRWKNCPSAYQGQYSG

SEQ ID NO: 319699 - protein, 50 aa, Zea mays
  Clone ID: MRT4577_54635C.1.pep
LDRERPPFYHYFAKKLYGSLSKRPRKVHSRPCYSHPKRQTNIVDGRNRGG

SEQ ID NO: 319700 - protein, 61 aa, Zea mays
  Clone ID: MRT4577_54636C.1.pep
KKVFGVLFSLSSFDPPPPFRGAKILSTVCTNRWAVGPFYAPKTLFRKKKTSSPLFLLFPPY

SEQ ID NO: 319701 - protein, 134 aa, Zea mays
  Clone ID: MRT4577_54637C.1.pep
MYHFAWLLFLLHTCEDLCVMLAAMQTTCSLLARKRTMHYIWIEIKKKKKKNSGAEARSSWGAFRAPASSGAPSISLKLQEEERERRMDFVTEKYALEVEEIRVDHETMEMLAVLGMVDLPGVERQAEVSNDPAY

SEQ ID NO: 319702 - protein, 60 aa, Zea mays
  Clone ID: MRT4577_54638C.1.pep
PTTARHNLEFDENKQHDTETAEWICTDETYHWSKRKHQAHKLAPRQQQRKVESFFNWTGS

SEQ ID NO: 319703 - protein, 176 aa, Zea mays
  Clone ID: MRT4577_54639C.1.pep
RDPIRHCICFASRSQIISTPGCPSLSPGSSLVSACLLILSIKFWIDVWSSFIVPWASFSASFSVFGRGGGIKKKTSSRPSALLRSCCCGASCCLRLLLSLRSPRLRLCSFPVLLSVVLLCFVLCPLPWCAAVGLSGSPRGGGGCFLPSRRSSGRVPGPPSPPLLLVLRLPCWENAV

SEQ ID NO: 319704 - protein, 465 aa, Zea mays
  Clone ID: MRT4577_5463C.1.pep
MQQTTHLVFLPLVQGSLGSSVVISSAGCFNTMIMASAFYKFGYLSCKLSAAGACKQPTATAAASGGNGVHALATITRSNWRCRNMATTASGTTTMAVAGRRREKKDDVVEGEDEWRSYLAPERLEMLRQMEPWVEEHVLPLLKPVEASWQPSDLLPDPATLGSDGFHAACLELRAAAAGVPDDLLVCLVANMITEEALPSYPSGLNRLEVVRDATGADATAWARWIRGWSAEENRHGDVLNRYMHLSGRFHMREVERTVQRLIRDGVIVHAPASPFHGFVYVAFQERATAIAHGNTARLVGARGAGDAALARICGTVAADEKRHEAAYTRVVGKFFEADPDAAVRAMAYMMRRRIDMPTVLINDGRHSSGDFYARFVAIAQQAGTYTVSDYRAILEHFIRQWGVEELAAGLTGEGRRARDYLCALPHKIKRMEEKAHDRAVKAQKKPTPIPINWIFDRTIPVILP

SEQ ID NO: 319705 - protein, 77 aa, Zea mays
  Clone ID: MRT4577_54640C.1.pep
QGGVRVFCPDASSLSDHLQMEPIGQYTTLYMGGGCNIVPVIKPCSCNRMNLSLDHASIWAPCQSRIETPDMATYRGR

SEQ ID NO: 319706 - protein, 747 aa, Zea mays
  unsure (1)..(747): unsure at all Xaa locations
  Clone ID: MRT4577_54641C.1.pep
MAVRATVSRFPATPEALESCAVQWGVAVTPFAAADEHGQPPTTGAGGDRVPRCEHCWAYLSSHCDLERWGWTCALCGTLNGFDDEAERRFQRPDVCPELKSSFVDLEILVDEAEGGGDGVQALPVYVAAVDLACSEEFLELVKSALLAALEALVPGSLFGLMTFSHKIGLYDVQGPIPLVKNVFIPPDLEEDGLWXVALEDAMPLLCFLAPVVTCKDQIAAVLETLRPTSSWERGVASGQEEDTVLLGGRGFGTAMSALIGYLSSEYGSTFALARVFAFLSGAPDYGAGVLDTRRYGEQYASKGVDADLALLPEQIPFYRDLAAVAVQSGVCIDIFAVTDEYTDLASLKFLSIESGGSLFLYASTDDSTVPQDIYRLLSRPYAFGCVLRLRTSSDFEPGNSYGHFFPDPQYENVQHIICCDSFATYAYDFEFAHNDGFSRHTDPAVVQIAFQYSVIEPVKETSGDGSQPSASYKFSLKRRLRIRTLQYRPTNNISEIYDSVDPEVVLHILVHKVILESLDKGVREGRHQVHAWLSLLAARYNQALSSDVRPLSSIDIDFSQCPQLQTIPQLVFALLRSPLLRLHEEGVHPDYRIYLQCLFSALEPSSVAKAIYPVLISYSSPDKQAFPRHTLSHAALIMSESPIFLLDTFTNLIVYYSSTADPSVPFPPPHDCLLRKTINGLKQDRCITPKLTFIHGGKDDSTLFESYLIEEQDVDGSGLTTGSGFVAFRESVRNVAGEIIQEEIGS

SEQ ID NO: 319707 - protein, 529 aa, Zea mays
  unsure (1)..(529): unsure at all Xaa locations
  Clone ID: MRT4577_54642C.1.pep
MAVRATVSRFPATPEALESCAVKWGVAVTPFAAADEHGQPPTTGAGGDRVPRCEHCWAYLSSHCDLERWGWTCALCGTLNGFDDEAERRFQRPDVCPELKSSFVDLEILVDEAEGGGDGVQALPVYVAAVDLACSEEFLELVKSALLAALEALVPGSLFGLMTFSHKIGLYDVQGPIPLVKNVFIPPDLEEDGLPVALEDAMPLLCFLAPVDTCKDQIAAVLETLRPTSSWERGVASGQEEDTVLLGGRGFGTAMSALIEYLSSEYGSTFALXVNTLSISHEISGAIQAISFITRKMLYLCKQPSNQYLYAXFLMFLVIWRAARVFAFLSGAPDYGAGVLDTRRYGEQYASKGVDADLALLPEQIPFYRDLAAVAVQSGVCIDIFAVTDEYTDLASLKFLSIESGGSLFLYASTDDSTVPQDMYACLNEYFMCSIQKIITAKFPNKYEWSFLPFXTPTDRYRLLSRPYAFGCVLRLRTSSDFEPGNSYGHFFPDPQYENVQDIICCDSFGTLVYDFEFAHNDGFSRYII

SEQ ID NO: 319708 - protein, 133 aa, Zea mays
  unsure (1)..(133): unsure at all Xaa locations
  Clone ID: MRT4577_54643C.1.pep
LISYSSPDKQAFPRHTLSRAALIMSESPIFLLDTFTNLIVYYSSTADPSFPFPPPRDCLLRXQPINKLKQDRCITPKLTFIHGGEDDSTLFESYLIEEQDVDGSGFTTGSGFVAFRESVRNVAGEIIQEEIGS

SEQ ID NO: 319709 - protein, 67 aa, Zea mays
  Clone ID: MRT4577_54644C.1.pep
MNDYHDQKFTRYVPTNKILESVRDIWLCVDEMEDLCIIFKPFRYTEGCSSRVQGSLNQTCFTGRSGD

SEQ ID NO: 319710 - protein, 80 aa, Zea mays
  Clone ID: MRT4577_54645C.1.pep
FIVLLSVHFLWSTKLVTDPADTSSSSNASRYQHTQSKVVLMSTLNTPNLNPDALSSLRGFNSSQVNPAVLSALNVRNRES

SEQ ID NO: 319711 - protein, 101 aa, Zea mays
  Clone ID: MRT4577_54646C.1.pep
CGINRGGASCPLPSAQNKCLLKVSFAGFGLYFPGQPSWKYSYRVNDALTRFADQLTAPAPNLFFCLLKKQIINSFVAPRVQLPANLNLVGQILFIFFPPGL

SEQ ID NO: 319712 - protein, 176 aa, Zea mays
  Clone ID: MRT4577_54647C.1.pep
MTMSSSSINKQEGPKLFSSRILSRDRSSVANASFRVYYSLGAGTVPFLWESKPGTPKSSSTPASGASTVPPISPPPSYQQKPVSQSNANKAKFRRGGGQQPLLGLPEVVDHRLPEPERQETVAAAVANGSPAATLPWRRRRRRAAVAAFHHVLLNSDVCAARPGRTRGLAVALRRC

SEQ ID NO: 319713 - protein, 127 aa, Zea mays
  unsure (1)..(127): unsure at all Xaa locations
  Clone ID: MRT4577_54648C.1.pep
FAFRGLLLDTSRHYLPVDVIKQVIDSMSFAKLXXNVFHWHIIDEQSFPLEVPTYPNLWKGSYSKWERYTAEDAHDIVKXIDVPGHAESWGNGYPKLWPSSNCTEPLDVSSDLTFEVFXGILSDMRKI

SEQ ID NO: 319714 - protein, 87 aa, Zea mays
  Clone ID: MRT4577_54649C.1.pep
MALSSSRRAPLRPILRGFTPTRALARWAFEFPSPRGGGGWSPGGAWRRGAAGRLAGVASEVRELGGDAYEGSVAAERGRGRACACRR

SEQ ID NO: 319715 - protein, 99 aa, Zea mays
  Clone ID: MRT4577_5464C.1.pep
QLEAFFEQQGTELSFFFWKGEGKFPKKKKPQKKRGGGKPKGIFLPLFYIPFYWRINPSGGQRERLRGFFPPQATGGGGAPNPWPMVFLFFSPPSSSFGS

SEQ ID NO: 319716 - protein, 220 aa, Zea mays
  unsure (1)..(220): unsure at all Xaa locations
  Clone ID: MRT4577_54650C.1.pep
MASCPLFLLVPRPPPPLVGADRCPGSAGCSDLPTSCRPHPGRRHGYPFRCNSSSSSSAPRERPPRQRPGGRGDAIDPVGFLTKLGVSDRAFAQFLRDRHKALKDRRWELCSRFIDLKEASSGFELLGMHRHRQHRIDFMEWAPGARYCSLIGDFNQWSPTENCAREGHLGHDDFGYWFIILDDXLKRGQEQDEYFFQEYNYVDDYXXGDNGIDADEICVR

SEQ ID NO: 319717 - protein, 145 aa, Zea mays
  unsure (1)..(145): unsure at all Xaa locations
  Clone ID: MRT4577_54651C.1.pep
VHNWLGPGVCPKVVAKGFRCIMSNQGVWYLDHLDXPWEDVYSGEPLAGISDREQQKLVLGGEVCMWGETADTSDVLQTIWPRAAAAAERLWSQLEAISAQDVETTVLSRLHRFRCLLNHRGVAAAPVTNYYARRPPVGPGSCFVQ

SEQ ID NO: 319718 - protein, 79 aa, Zea mays
  Clone ID: MRT4577_54652C.1.pep
GNNIGRHTKYTYLHDIEFYCVQFGTYLSSFSFLIQSPVLNSCIKNTVMNAHKIPSLMNTSHNTLGEMKLYQILVILFAS

SEQ ID NO: 319719 - protein, 547 aa, Zea mays
  unsure (1)..(547): unsure at all Xaa locations
  Clone ID: MRT4577_54653C.1.pep
MPPNRPAYLLSALLLAAAAAAAVGARRHASPAANATFAGEPVYLWPLPKSVSSGSRTLTVDPDLALDPQGPGGRSPAVAEAFQRYRGLVFAXVGARGAXAGRARYDVTRLTVVVASANDTLALGVDESYAIYVAAAGGVDSIVGGAIIEANTIYGAIRGLETFSQLCVFNYDTKNVEVHNAPWHIQDEPRFAFRGLLLDTSRHYLPVDVIKQVIDSMSFAKLNVLHWHIIHEQSFPLEVPTYPNLWNGSYSKWEGYTVXDAHDIVNYAKKRGINVMAEIDVPGHAESWGNGYPKLWPSPICTEPLDVSSDFTFEVIFGILSDMRKIFPFGLFHLGGDEVYTGCWNTTPHVRQWMDERKMTTKDAYKYFVLKAQELAIKLNWTPVNWEETFNSFEENLNPLTVVHNWLGPGVCPKVVAKGFRCIMSNQGVWYLDHLDVPWEDVYSGEPLAGISDREQQKLVLGGEVCMWGETADTSDVLQTIWPRAAAAAERLWSQLEAISAQDVETTVLSRLHRFRCLLNHRGVAAAPVTNYYARRPPVGPGSCFVQ

SEQ ID NO: 319720 - protein, 46 aa, Zea mays
  Clone ID: MRT4577_54654C.1.pep
YVLLYSVRRHYCCPRGQRLALVSLVTANYALRRNDLNGQDHCGPFS

SEQ ID NO: 319721 - protein, 91 aa, Zea mays
  Clone ID: MRT4577_54655C.1.pep
QGIYAFVTLVDGVPYSDDLRKSLVTTVRSQIGAFAAPDKIHWAPGLPKTRSGKIMRRILRKIASRQLDELGDTSTLADPGVVDQLIALSDS

SEQ ID NO: 319722 - protein, 232 aa, Zea mays
  Clone ID: MRT4577_54656C.1.pep
MSPRPPSLVVLPLLLPLLLAAVSHATANAAGASAPPPVPTPWPEQFHAVVFTNLTESGGRLQLIDLYYDWPRGRNLNLIRDQLSSDPLYDVEWTNGTSYFFDSGSCRTMRFPVGILPPDWLAAGAVYLGREHVDGFDCHLWTKVDFVWYYEEVATGRPVRWNFFNGMQQHVMSFEVGGVLEDSKWQAPPRCFNGGNAVDGVHGEEAGSVDVMDSMIRFAGAPAAAVAASFDQ

SEQ ID NO: 319723 - protein, 179 aa, Zea mays
  Clone ID: MRT4577_54657C.1.pep
MIKTWLRNNQVAQPQPPAPHQPQPEEMSTDASGSSFGCSDSMGRNSMVAAGGSSQSLALSMSTGSHLPMVVPSGAASGAASESTSSENKRASGAMDSPGSAVEAVPRKSIDTFGQRTSIYRGVTRHRWTGRYEAHLWDNSCRREGQSRKGRQGNETYIHNNHCLYRHRKNIYGLYNLSY

SEQ ID NO: 319724 - protein, 237 aa, Zea mays
  Clone ID: MRT4577_54658C.1.pep
MSPPPPPSLVVLPLFLLLAAVSHATANAAGAGAPPPVPTPWPEQFHAVVFTNLTESGGRLQLTDLYYDWPRGRNLNLIRDQLSSDPLYDVEWTNGTSYFFDSGSCRTMRFPVGILPPDWLAAGAVYLGREHVDGFDCHLWTKVDFVWYYEEVATGRPVRWNFFNGMQQHVMSFEVGGVLEDSKWQAPARCFSGGNADTVNVAADGVHGEEAGSVDVMDSMIRFAGAPAAAVAASFDQ

SEQ ID NO: 319725 - protein, 92 aa, Zea mays
  Clone ID: MRT4577_54659C.1.pep
RLSHMHTIHINRPISKTLRLTNTRILTLRPRLNTHSMLNSVNRRPNTTNITMSTTLSSMIKRIIISNNTDHNARRSKWSSNRNHHQGQNRNH

SEQ ID NO: 319726 - protein, 37 aa, Zea mays
  Clone ID: MRT4577_5465C.1.pep
YSTRKLSNPSLVNRPLCKYIGLIHHRCIGRVVVMSVV

SEQ ID NO: 319727 - protein, 238 aa, Zea mays
  Clone ID: MRT4577_54660C.1.pep
MSPRPPSLVVLPLLLPLLLAAVSHATANAAGASAPPPVPTPWPEQFHAVVFTNLTESGGRLQLIDLYYDWPRGRNLNLIRDQLSSDPLYDVEWTNGTSYFFDSGSCRTMRFPVGILPPDWLAAGAVYLGREHVDGFDCHLWTKVDFVWYYEEVATGRPVRWNFFNGMQQHVMSFEVGGVLEDSKWQAPARCFSGGNADAVNVAADGVHGEEAGSVDVMDSMIRFAGAPAAAVAASFDQ

SEQ ID NO: 319728 - protein, 229 aa, Zea mays
  Clone ID: MRT4577_54661C.1.pep
MSPPPPSLVVLPLLLPLFLAAVSHATANAAGAGAPPPVPTPWPEQFHAVVFTNLTESGGRLQLIDLYYDWPRGRNLNLIRDQLSSDPLYDVEWTNGTSYFFDSGSCRTMRFPVGILPPDWLAAGAVYLGREHVDGFDCHLWTKVDFVWYYEEVATGRPVRWNFFNGSIHSIYTFFRLMMEHRGFLAIRTRLGCFDLTNACDFVLQFVGMQSKFLGTLPSFVLLMQHYNG

SEQ ID NO: 319729 - protein, 71 aa, Zea mays
  Clone ID: MRT4577_54662C.1.pep
MPFNSTFLTESRTNKIDIFLQRLALYRAFGHIISNAPVPAVITEAHKAKSAFWTTSKSQSAFLVNLFPILT

SEQ ID NO: 319730 - protein, 97 aa, Zea mays
  Clone ID: MRT4577_54663C.1.pep
QIPIFFKGGGAQTPFTHTGHPLRAGINKKKTPNLTNKKKGGARDLQKIHPSSGPQNTWGRPVHPSFKHKLRTTPGGPRFNAWHNTQGWALNSREGGG

SEQ ID NO: 319731 - protein, 132 aa, Zea mays
  unsure (1)..(132): unsure at all Xaa locations
  Clone ID: MRT4577_54664C.1.pep
VQKTQGEKVVVAEKKNWAGLVMGSKPPVLVXFWAPWCGPSRIFAPVIHELAKDYAGKIRCCKVNRDDSPKGGSPWGIRSIPPVFFFKGGEKKERVLGPVPKSPLPPLIEKYMGGLWACQAGRHRGLNTYGYL

SEQ ID NO: 319732 - protein, 157 aa, Zea mays
  Clone ID: MRT4577_54665C.1.pep
VRLHVGYVLSLFLLRSVHQVHSHRTSGFRGRLACFTVSWYIYVTFTRLMLSGHAWRGPADTILKSPGEECVEVGRSWLSGHSLSRPWCRGQRWCRWRITAPYGSIGTPSPAGWSPPRRSSSSAPLDASHRHVLLPHASYLVRQRGREIKWVCRGTAG

SEQ ID NO: 319733 - protein, 65 aa, Zea mays
  Clone ID: MRT4577_54666C.1.pep
VPFYSTTYSFNKSPLTQLSVLFKKNKLPGNTLPLPIFLSFQHFSLLCPFLLTYNPRKYLFFPHFL

SEQ ID NO: 319734 - protein, 55 aa, Zea mays
  Clone ID: MRT4577_54667C.1.pep
AKSKIETAIKNKMQQESQKKAELLDNEKPAAVVAPITTGYTVRISNYGWDQSDKF

SEQ ID NO: 319735 - protein, 58 aa, Zea mays
  Clone ID: MRT4577_54668C.1.pep
KGEWCMQGLLSSTVAVEGRKPPSGLAYARQCFFGIAPHSLSQSESDSLLKIPSDDDSN

SEQ ID NO: 319736 - protein, 126 aa, Zea mays
  Clone ID: MRT4577_54669C.1.pep
WITIQMFLHNSFEPLINFSSKMNRNRAISKYDPILKFYSVKFGAHYHPYICRIIMLTLAELRYRSTQQYRYIPSFYNMNQSGSFYLSLPWNESRHAYNKQSRECTHKATSFIPNYLQDYGRILHNK

SEQ ID NO: 319737 - protein, 95 aa, Zea mays
  Clone ID: MRT4577_5466C.1.pep
HMKHLALAYVHSQLGCTRPSRGVHVREPSTPPFSSGPRWTAVLHTRRPTCLSECSTTRSSCSTGGTRYSGHGDRQVSERTALHLSVSSHVGYQSL

SEQ ID NO: 319738 - protein, 74 aa, Zea mays
  unsure (1)..(74): unsure at all Xaa locations
  Clone ID: MRT4577_54670C.1.pep
LETXXVDRWWSAHSHSIYIRSRLRNSLTASHWRFLAQNVVGLEKGGSLHSEKISARTHWWTSGCQMGYFLDTSE

SEQ ID NO: 319739 - protein, 167 aa, Zea mays
  Clone ID: MRT4577_54671C.1.pep
MGPTPPHTDDTRVAQLPLPGGAEDYVRDSIHASLGLPVSDRSLRLKLLASEEQRHRLQDHVFSLEEDLRAAQRRIDLLKAEAAMNAAGLRRCVEEKEAVAAAYADLSDKSSKECRLYERDLERAMESCDDLARENDDLRARLTQNTDLAALLLHGQELHKEKEILED

SEQ ID NO: 319740 - protein, 472 aa, Zea mays
  Clone ID: MRT4577_54672C.1.pep
MWYLCVFYHRLLDYRRPEVESLAELFAGPGARESVEWRMPENHHVDSPFHLVRLPGDERLAAQVANRSLLVKGVYELWGYGTTYEELEKSVREYPDERKLPFLVPESSFKIVIDSFGKVISSQEQNEIIQSLTYIPFKGRVNLKKPDHRFFVMETDDYGSNNGLPPVVKRSIFFGREVGAADRHLLPTYQLKSRKYIGPTAMDAEMAFLMANQGLASPGKLVYDPFVGTGSILVAAAHFGAMTMGADIDIRVVRDGRGPDCNVWSNFEQYKLPEPLCLLRADNNLPPWRPGLKEMFDAIICDPPYGVRAGGRKSGGRKLIKGVKGPYTVPDEKRDNHIPSTAPYSLAECVHDLLHLAARMVVMGGRLVFFYPVLRGEDGTANPQFPEHPCFKLITSSEQILSFRYSRVLLTMVKVAPYTEEIEKLAAERHREFRENHQKWMEEGNLHSAVFEPAQDGKPDRDSKPKYRGKYV

SEQ ID NO: 319741 - protein, 47 aa, Zea mays
  Clone ID: MRT4577_54673C.1.pep
ALRVDTVRWLWDDVAILQIKARCWGAGATPEFWAGATRVPALPIESV

SEQ ID NO: 319742 - protein, 372 aa, Zea mays
  unsure (1)..(372): unsure at all Xaa locations
  Clone ID: MRT4577_54674C.1.pep
SEKDKWIELVQEIACSSSVKRPKDVLPTCVILCNALNRNQRAEREAAAAALSEFIHHIEKEPTLLEQMVEEMCQHVSDDSPTVRSLCLRGLVQAPESHMLKYIQQVLGVILALLEDPNESVQLTAVQCLLNVLNLSEQDAVGPILINLLVRLRNLQVSMNTKMRSNAFAAYGALSAYGVGLQRTAFIEQIHATLPRLILHLHDDDLSVRLACRNTFQLLATLMEVEGLSVLLRKQFFASDVPYNFKSFFRGLTSXLRRLFLIKYIKPSXQAVMELNADENDISANQLWSIILRLAFVYSHRIKHPXYASKELAMMVSIMSPTPHAIVRASASSALGILMKKXNMLSSPVSRYDRADSSRNSQSGDSNPKTPS

SEQ ID NO: 319743 - protein, 64 aa, Zea mays
  Clone ID: MRT4577_54675C.1.pep
MERNNFGRLARKALKGFFSIFSKHFFFLLYRARFSSQRVIVSLSCWQQKNKPELCSCDKNTPSC

SEQ ID NO: 319744 - protein, 65 aa, Zea mays
  Clone ID: MRT4577_54676C.1.pep
SLQPRSLCFFLQLLLLGTELTVPYAMVIYLCFCQYIANNSLLHLEEERVVMWYKQGPSLGFGLFL

SEQ ID NO: 319745 - protein, 73 aa, Zea mays
  Clone ID: MRT4577_54677C.1.pep
SSDLAHFILFHHIFGPPKRNTNVYPGVKIYTFKKCGVQMDFLKPMPEKNYLKEDPAPVRIFEVFVRGTKAGSR

SEQ ID NO: 319746 - protein, 84 aa, Zea mays
  unsure (1)..(84): unsure at all Xaa locations
  Clone ID: MRT4577_54678C.1.pep
KKKINKKRKIKKXKDKKDKKKINNEKKEKXKXKKNKIKDKKKKIKMRXKNKEKKKKKKKKKEKYKXKFRERKKKERRREKNGGG

SEQ ID NO: 319747 - protein, 55 aa, Zea mays
  Clone ID: MRT4577_54679C.1.pep
IFSLTTTTVFFYCRAFMEAHLPAFKEKNPHLEVVTELVRGQHPNLKGIYNSFNWL

SEQ ID NO: 319748 - protein, 144 aa, Zea mays
  Clone ID: MRT4577_5467C.1.pep
PLLVASAEESPWRRVCLPVPVAVRRHPFQRLSMKSRKWSSMSSCVVLGSYHRQRRRQDHVHSRLAGLMRASAACWGPPPPAPPWPWGSASPEWPSRHISTLVWWCMHECTYDCLDRAESVVRYGRSGYVIKADPRKIFHVCGGV

SEQ ID NO: 319749 - protein, 109 aa, Zea mays
  unsure (1)..(109): unsure at all Xaa locations
  Clone ID: MRT4577_54680C.1.pep
PDPKQFAEEAKGGGELCHXPLPNLIGYCCXGDERLLFFELMLNDHLSKHLFLWENHTXEWDMVLIVWWXIADRLDFCRSKGRPLYYDLIVFRGLFGEEGNHHLFCLWTD

SEQ ID NO: 319750 - protein, 314 aa, Zea mays
  Clone ID: MRT4577_54681C.1.pep
MARPCDLPPVRQAAALLLACALALLAVQLRPCRAQQQQQPPSPGYYPSGMFRPLGFSEAYRTLWGAQHQTLSPDGKSLTLWMDSSSGSGFKSARAYRNGYFGASVRVQPGYTAGVNTAFYLSNSEEYPGHHDEIDMELLGTVPGEPYTLQTNVYVRGSGDGTIVGREMRFHLWFDPTADFHHYAIIWNPDQILFLVDDVPVRRYERKAEATFPDREMWAYGSIWDASDWATDGGRYRADYRYQPFVSRFAGLRVGGCAADASADCQPVPASPAAPGTAAISAQQEAAMRWAQRNSMVYYYCLDSTRDRALYPEC

SEQ ID NO: 319751 - protein, 76 aa, Zea mays
  Clone ID: MRT4577_54682C.1.pep
TPNCLGCWTIRQQQMLTCPRTSYHCATPLYLVAIPLPIPEPMNPSANASSPLWQPDGQGPMSSNSNTASLLEQLAP

SEQ ID NO: 319752 - protein, 270 aa, Zea mays
  unsure (1)..(270): unsure at all Xaa locations
  Clone ID: MRT4577_54683C.1.pep
MARPCDLPPVRQAAALLLACALALLAVQLRPCRAQQQQQPPSPGYYPSGMFRPLGFSEAYRTLWGAQHQTLSPDGKSLTLWMDSSSGSGFKSARAYRNGYFGASVRVQPGYTAGVNTAFYLSNSEEYPGHHDEIDMELLGTVPGEPYTLQTNVYVRGSGDGTIVGREMRFHLWFDPTADFHHYAIIWNPDQILXLVSVSLPPAPCAPLAGCLPARSLTSHAMSCACVXFLVDDVPVRRYERKAEATFPDREMWAYGSIWDASDWATDGGR

SEQ ID NO: 319753 - protein, 71 aa, Zea mays
  Clone ID: MRT4577_54684C.1.pep
GAVHLEVTVERGRVLRRLGGGWIRHGGTAGVIPRDTGRPVLTSGHSLEPHQGAGLGRLPQGLARYAVHSED

SEQ ID NO: 319754 - protein, 476 aa, Zea mays
  Clone ID: MRT4577_54685C.1.pep
MGSLHALRAPTPLVGSTRIGFSSGLRFCSDRVLRGLTPIGAMKSYRLSELSDTEVSSLKARPRINFSSIFGTVNPIVEDVRVGGDAAVKHYTEKFDKVMLDDVVVCVSDLPDAELDPAVKEAFDVAYDNIYAFHVSQKIPEKTVENMKGVRCKRITRCIGSVGLYVPGGTAVLPSTALMLAVPAQIAGCKTIVLATPPSRDGSICKEVLYCAKKAGVTHILKAGGAQAISAMAWGTASCPKAEKIFGPGNQYVTAAKMILQNSEAMVSIDMPAGPSEVLVIADKYANPVHVAADLLSQAEHGPDSQVVLVVAGDGVDLGAIEAEVSKQCNALPRGEFASKALSHSFTVFAKDMVEAISFSNLYAPEHLIINVKDAEQWEEFIENAGSVFLGQWTPESVGDYASGTNHVLPTYGYARMYSGVSLNSFLKYITVQSLTEEGLRKLGPYVAKMAEVEGLEAHKRAVTLRLQEVEANVTV

SEQ ID NO: 319755 - protein, 86 aa, Zea mays
  Clone ID: MRT4577_54686C.1.pep
FSPPQGFFLPPLFKIVQCFGIFVGSFFVRAKVFWVFCKPQSSPPLGVSARGGPPTFCLLGFEAPLPDQSGGPFAFTGLQKKGRVSP

SEQ ID NO: 319756 - protein, 477 aa, Zea mays
  unsure (1)..(477): unsure at all Xaa locations
  Clone ID: MRT4577_54687C.1.pep
MGSLHALRAPTPLVGSTRIGFSSGLRFCSNRVLRGLTPIGAMKSYRLSELSDTEVSGLKARPRLHFSSIFGTVNPIVEDXGVRRGSSNLSPSTXKFDKXSLDDVVVCVSDLPDAELDPAVKEAFDVAYDNIYAFHVSQKIPEKTVENMKGVRCKRITRCIGSVGLYVPGGTAVLPSTALMLAVPAQIAGCKTIVLATPPSRDGSICKEVLYCAKKAGVTHILKAGGAQAISAMAWGTASCPKAEKIFGPGNQYVTAAKMILQNSEAMVSIDMPAGPSEVLVIADKYANPVHVAADLLSQAEHGPDSQVVLVVAGDGVDLGAIEAEVSKQCNALPRGEFASKALSHSFTVFAKDMVEAISFSNLYAPEHLIINVKDAEQWEEFIENAGSVFLGQWTPESVGDYASGTNHVLPTYGYARMYSGVSLNSFLKYITVQSLTEEGLRKLGPYVAKMAEVEGLEAHKRAVTLRLQEVEANVTV

SEQ ID NO: 319757 - protein, 136 aa, Zea mays
  unsure (1)..(136): unsure at all Xaa locations
  Clone ID: MRT4577_54688C.1.pep
MANDYREQVQYDGMEDLDRMPCMTGNHDIHAQLQAAATPLEFQATLETKFASYDSYCNLFHYILNSEGPVDLEVPNYYWAWDVIDEFIYQFNSFCSYRQRVAQKSDIEEEIALLRENPNTWXCYSFLNVCTRSYSA

SEQ ID NO: 319758 - protein, 54 aa, Zea mays
  Clone ID: MRT4577_54689C.1.pep
VKRKECKLGHTVGAPGFHTGSIRAPMLWPIVNGLPIRTGGSPARDGPELKSGSP

SEQ ID NO: 319759 - protein, 102 aa, Zea mays
  Clone ID: MRT4577_5468C.1.pep
VGLYGVTEAELGLGSIFHHRRAVHRLAKQQFVSGNNKIAPLVASQAFLGVIAGRSVCLVPYTSNKGPPWGPSNVCPPLGKNVLLAHGLLLGKSFPRVVKNNG

SEQ ID NO: 319760 - protein, 104 aa, Zea mays
  unsure (1)..(104): unsure at all Xaa locations
  Clone ID: MRT4577_54690C.1.pep
MALQNDIDLLNPSADLEKLKHKNKRLEQTPRYFLMDGKCQGCFSITTVFSHSHTVVVCSVCQTVLXQPTGRKAWLTEGCCFAGRETKPVGVFKFCSMPDTSAMN

SEQ ID NO: 319761 - protein, 332 aa, Zea mays
  unsure (1)..(332): unsure at all Xaa locations
  Clone ID: MRT4577_54691C.1.pep
MPPLLTSSSVPALPLAAWSRYRLRVAASNAASAPDGAGATARCTSTGGFPSFLPGAVERIRDGAAIRLAKRIERVPVQTSFSGSAISSSCVRPLKQQQDGDPVVLLHGFDSSVLEWRYTYPLLEEAGLEAWAVDILGWGFSDLETRPPCDVASKREHFYQFWKSYIKRPMVLVGPSLGAAVAIDFSVNXPEAVSKLIFIGASVYSEGPKDMTRMPKFVSYAGVFILKSLPLRFLATRLAFKKLQMNSXDWVQVKHKCLILWGEDDGIISSKLAYRLHQELPDAILRQVRQCGHIPHVEKPREAAKHVLEFLARNTSNKSDQSPSEPSVVVNR

SEQ ID NO: 319762 - protein, 268 aa, Zea mays
  unsure (1)..(268): unsure at all Xaa locations
  Clone ID: MRT4577_54692C.1.pep
RYTYPLLEEAGLEAWAVDILGWGFSDLGXPSCTPCDLKXPPCDVASKREHFYQFWKSYIKRPMVLVGPSLGAAVAIDFSVNYPEAVSKLIFIGASVYSEGPKDMTRMPKFVSYAGVFILKSLPLRFLATRVAFKKTPNEFFDWVQIGRLHCLLPWWEDATVDFMIRGGYNVINQIKQVKHKCLILWGEDDGIISSKLAYRLHQELPDAILRQVRQCGHIPHVEKPREAAKHVLEFLARNTSNKSEQSPSESSDKSDQSPSEPSVVVNR

SEQ ID NO: 319763 - protein, 110 aa, Zea mays
  unsure (1)..(110): unsure at all Xaa locations
  Clone ID: MRT4577_54693C.1.pep
KGAPPPPKKDIIAVALEKIATPENFFHKGGHFRPPALPRMGRFLAPRQDGGGFLSLGGGXNRLKGFSNPWGFRPPDKFFGKESLSPPPKEMGALPPPQKNQFAGFLGPPW

SEQ ID NO: 319764 - protein, 94 aa, Zea mays
  Clone ID: MRT4577_54694C.1.pep
PAGDSARRPDHRPSELCPHADRASNTPFVLRSTDTAHTGSIEGIMSRCLRRDYDHEGSESRAQIRHVLIQVTKASSALYCSYTAMRTDASTARG

SEQ ID NO: 319765 - protein, 74 aa, Zea mays
  Clone ID: MRT4577_54695C.1.pep
FTLLTSFLFRRRPPFFLGGFINGLARNQQHAPETLQLPREPTENNNDKLRNHENRTYHQVHAYLCGEMCKAPNI

SEQ ID NO: 319766 - protein, 220 aa, Zea mays
  Clone ID: MRT4577_54696C.1.pep
AAQLRYMMSHYFGTPPSKEVIQDLYYALRTKGGLTPKEEETLLACNLLPGVYFIVGSVLGTFAMLLGSHKGLKLLGRPPNSPLRSLTVYGYGFIVGKACANETWHQLPELLLDREEGRMKTELAKMWRLRHTYVDSTFVERTKEVEASNSDDVARSISRETITNTTPFGEMMEDSLACILGSPGCNMESNNPPEKTANVLTRSDLRARRRGRRHHRHADD

SEQ ID NO: 319767 - protein, 97 aa, Zea mays
  Clone ID: MRT4577_54697C.1.pep
AIILVPHLARFAGSLPETSELQFPIFFSFFPKSFSEEFSPNPVHFFGSGLTGFFVANEAGGDPRSVLRLEDKGRFDPQGGGDAPGLQFTSWCLFHRG

SEQ ID NO: 319768 - protein, 257 aa, Zea mays
  Clone ID: MRT4577_54698C.1.pep
MAAQLRYMISHYFGTPPSKEVIQDLYYALRTKGGLTPKEEETLLACNLLPGVYFIVGSVLGTFAMLLGSHKGLKLLGRPPNSPLRSLTVYGYGFIVGKACANETWHQLPELLLDREEGRMKTELAKIILNKHSDDIYLVEVVRRHFFVEHLFDDLHQGQPLFRWRLRHTYVDSTFVERTKEVEASNSDDVARSISRETITNTTPFGEMMEDSLACILGSPGCNMESNNPPEKTANVLTRSDLRARRRGRRHHRHADD

SEQ ID NO: 319769 - protein, 99 aa, Zea mays
  Clone ID: MRT4577_54699C.1.pep
MARARDAALHLLLLAAGGLLLLAVVSQATVVPPSVPAGAPEDPRCRALAPRRGALAVYPSDMEQLQFLFNAKFVEAEWFLHAALGRGVDFLDRNLFRGG

SEQ ID NO: 319770 - protein, 115 aa, Zea mays
  Clone ID: MRT4577_5469C.1.pep
VAIYQSKVSLFRKSGPDVPPGYDPAQVADAKPKTKAAKRNERRKEKRQQVAVLCLVLVLVSPWIARETVRFSWIGLVIIGVCLLSVHWRTNNGVVLVMEGGIVPFVSRALVSHTQ

SEQ ID NO: 319771 - protein, 54 aa, Zea mays
  Clone ID: MRT4577_546C.1.pep
QSKKKKKKKKKKKKKKKKKKKKKKKKKKKKKKKKKKKEKKFKKSKNKKKRGGPF

SEQ ID NO: 319772 - protein, 36 aa, Zea mays
  Clone ID: MRT4577_54700C.1.pep
HPSIQNQMYLYHYTVKLLTISTIDNWYVIRDTIFIL

SEQ ID NO: 319773 - protein, 52 aa, Zea mays
  Clone ID: MRT4577_54701C.1.pep
RCLKWRRPCSVMAPKFYAMSENNLHVVFLELSCTQPNTLLVTDLGINGVPTF

SEQ ID NO: 319774 - protein, 148 aa, Zea mays
  Clone ID: MRT4577_54702C.1.pep
MSRRFATYGGVAALGGVTYYLYNAGGDPKLAEKKAEHDAATAARKLRGDYPGQDKEAKKAGEEGYEAVRASAQQYADQAKAEAKKAEQKFDAYSADAKKQYEEAKARAERELHAAGKQVNAAANKFDAVVEDKAAKTSSWFGGLFGGK

SEQ ID NO: 319775 - protein, 56 aa, Zea mays
  Clone ID: MRT4577_54703C.1.pep
IIGFRLSDKTNLFSQTLPVNKHNSLCMLSSHYACFNQFVHLVRNVHVSNQVAHSRA

SEQ ID NO: 319776 - protein, 122 aa, Zea mays
  unsure (1)..(122): unsure at all Xaa locations
  Clone ID: MRT4577_54704C.1.pep
ACGSGPEFPGRPTRPDSKNLIKXIKYALVWGLSVKHNPQKVGKDHTLEDEDVIQIVKKXEVLLPSAGXATAVFLMTKYLPQXPSVFGSLWIGIQGLIWRLIKLKHHNFFLSGDRVLCISGWL

SEQ ID NO: 319777 - protein, 52 aa, Zea mays
  Clone ID: MRT4577_54705C.1.pep
GCRDDRSRCARLDGHPFYPGTRGSATQGPAGKIFQVRNAKFKSAFLSMIDPR

SEQ ID NO: 319778 - protein, 53 aa, Zea mays
  Clone ID: MRT4577_54706C.1.pep
LDINPCIIKHISSEKLQPFTQNIHYFNTKKTSFYHIQYVIKHSAAQQKTRQKF

SEQ ID NO: 319779 - protein, 87 aa, Zea mays
  Clone ID: MRT4577_54707C.1.pep
LQPSPPFYLTKLKEMMIFLATYVVGPPPSAVHFYLRYLSCPFPVLHFDFTWPPSPFPTLLYHLLSFLFPPSLSYVIYISPFSFFYLL

SEQ ID NO: 319780 - protein, 51 aa, Zea mays
  Clone ID: MRT4577_54708C.1.pep
NELQLKIIRRENFQKGHRGGKKLDSASLKNGGGGAPFRGLTPRELGGGTKA

SEQ ID NO: 319781 - protein, 83 aa, Zea mays
  Clone ID: MRT4577_54709C.1.pep
NLQYKFVFLFLTSSLLRFIKGKPQIHPTFSQIIDINFGMDSRSYAGRLLCRQNSAQMKEEGKYCLLLAPDSFLRASNPGLEVP

SEQ ID NO: 319782 - protein, 131 aa, Zea mays
  Clone ID: MRT4577_5470C.1.pep
DLDSINLNPSIFFFCSFILSFNSWNLSIRSSYELLLKVLGYEFLPWSLPSLALFLNLFLAYERGPRKYYVGYEIKTTIDSHELKVNTSVALAKSKGFVSPPACSIVLSSDKLSSCRRPFKAERKSTGPRIS

SEQ ID NO: 319783 - protein, 67 aa, Zea mays
  unsure (1)..(67): unsure at all Xaa locations
  Clone ID: MRT4577_54710C.1.pep
YRGGTHAFWSILCYACMLRITDRKVWFLGQFFVPGKIGEPFLGPVSHFKKTRLXFFLFCEKKKXWXG

SEQ ID NO: 319784 - protein, 52 aa, Zea mays
  Clone ID: MRT4577_54711C.1.pep
SQFYYKGVGSLFFIVYSKNPKHRPQKTKITLDVRIQTHNEQHKASQAHIEKG

SEQ ID NO: 319785 - protein, 53 aa, Zea mays
  Clone ID: MRT4577_54712C.1.pep
LCLRYDRLRAIIHGTLLNSDSALGTGWYACQVPVPEYRWFTPRDRSSMGFYCS

SEQ ID NO: 319786 - protein, 228 aa, Zea mays
  Clone ID: MRT4577_54713C.1.pep
MSSSPVKIIGHSVSPFSHRVEAALRLKGVPYELIQEDLSNKSELLLAKNPVHKKVPVLLHADRAICESLVIVEYVDETFDGPSLLPADPHDRATARFWADFMDRKLLKPFWLAHWTEGDAQKAQVEEAKQKLALMEAQLDGRRFFGGDTVGYVDIAACVLAPWLSVVEEVTGVAVVDEGEFPALRRWSREYSSCEALKQCVPDRDQLVAFYTERKEAYKVFANAWLQQ

SEQ ID NO: 319787 - protein, 70 aa, Zea mays
  Clone ID: MRT4577_54714C.1.pep
GPRIRARGVPSPHVIKAAGAAAWESASHEGALAAENTRTICLHSRETALHADAIHKGGGQVIPSAQRSTC

SEQ ID NO: 319788 - protein, 135 aa, Zea mays
  unsure (1)..(135): unsure at all Xaa locations
  Clone ID: MRT4577_54715C.1.pep
LSLAHKITLSSSSTPPAPLXPSPHSPRRLAAGSPSPPRAGAEPPWRPTPSPFSSPLGALPXARKSLPPPFLGAGSSPPRCPAPXPDPIRPVPARPEFLAPSPAIPSLSWISSSLPPPWPPTILPPCPWCAGRLVL

SEQ ID NO: 319789 - protein, 47 aa, Zea mays
  Clone ID: MRT4577_54716C.1.pep
RHHDSNRVRFHLGNSQRETRRNLSPQPLETLEHNPKMREYWLGYTAN

SEQ ID NO: 319790 - protein, 349 aa, Zea mays
  unsure (1)..(349): unsure at all Xaa locations
  Clone ID: MRT4577_54717C.1.pep
TWFIAGPGWTHASRRAHPARVRVPLSASRLPPPPQRGARGGGALAVLVSIPAAGVPVPLLPLAVARASRXRAPEPEPRVKSRVASAPPPPPETPSGWNQNEGDRRRKLRXGRPLVECTGDRSVEEQPEHAGXSLVEGKALKMSSTVPKSSNIFWHDCPVGKTDRQKLLKQKGCVVWITGLSGSGKSTLACTLGRELHTRGKLAYVLDGDNLRHGLNKDLGFKAEDRAENIRRVGEVAKLFADAGLVCIASLISPYRRDRESCRALLSDSSFIEVFLNMSLELCEARDPKGLYKLARAGKIKGFTGIDDPYEAPLNCEIEIKEVDGVCPPPAEMAGQVVTYLEEKGFLHE

SEQ ID NO: 319791 - protein, 49 aa, Zea mays
  Clone ID: MRT4577_54718C.1.pep
MTRCGSNCVCGSGCKCGSGCGECKMYPDMVEQVTTIITNQTLIMAVAPS

SEQ ID NO: 319792 - protein, 46 aa, Zea mays
  Clone ID: MRT4577_54719C.1.pep
YVRTDAQTLSSYRIQPLWRLRCHSALLLIHDMVGKHLYTCVSISVC

SEQ ID NO: 319793 - protein, 182 aa, Zea mays
  Clone ID: MRT4577_5471C.1.pep
YDVLRTAASSWIASSAYWLAEHPFIVLSRWSPTHLWFSTWAFLLGSLAAYVALCLALDVALALAAQRLRRRLAVPLGPVPAAHALLMAGASSAIFAGTLLSAVAEIRDTRWSWRGRSRSTPLRWLLCFPPGTRSSGRVFFWSYAYYLSRYLHAARGVLAVLHKRRNAPPRVFTHATSVAMAF

SEQ ID NO: 319794 - protein, 59 aa, Zea mays
  Clone ID: MRT4577_54720C.1.pep
YIFWAMINIHTQFGLITTPRKLWVEKNFDPILAYSLTRGKCSLGIIILQWVINTHTKTS

SEQ ID NO: 319795 - protein, 111 aa, Zea mays
  Clone ID: MRT4577_54721C.1.pep
RRTRPRLARSGRAAQGEQGPRGGRATAPLRAGSGRSLRRTRPLPVRHRLQPEPRSRRAQPLRRSASSARTRSRWPSNARSRAMGGAIQPWSTSRAVAHTSVLAEPPNRERG

SEQ ID NO: 319796 - protein, 88 aa, Zea mays
  unsure (1)..(88): unsure at all Xaa locations
  Clone ID: MRT4577_54722C.1.pep
HDEPKFHGKLRKTXNQIXRLIXXKXLHNXXWEHMLSDYRSHIISHQHPLVTQRSPHASPTHDTQPSYPCMFLSEINSRAHEYTIQHPL

SEQ ID NO: 319797 - protein, 56 aa, Zea mays
  unsure (1)..(56): unsure at all Xaa locations
  Clone ID: MRT4577_54723C.1.pep
YTFFPFFLPFFFLSLFFLFFFFFFFFTSQSILLTTLLSKDTLFYPKVCLISLNXTF

SEQ ID NO: 319798 - protein, 54 aa, Zea mays
  Clone ID: MRT4577_54724C.1.pep
RHESPGHKLRPPQTVSFCFVVFIYFPLFFSFPLFFFFFFFFFFSFFFLMVYMSK

SEQ ID NO: 319799 - protein, 64 aa, Zea mays
  Clone ID: MRT4577_54725C.1.pep
LSSLECTRLHVLCCLFVASTSIVYLCVDVDGSVFMCKKKVCDAFPETVQSIWEDQKKEKTKNIP

SEQ ID NO: 319800 - protein, 70 aa, Zea mays
  Clone ID: MRT4577_54726C.1.pep
MSSTGGDKGAKKFWPKGVGFTLKKPKRGFLWDKPDADFFGLPAGTPGTMIFRPNRVRIFFNTVGEEPHIG

SEQ ID NO: 319801 - protein, 102 aa, Zea mays
  Clone ID: MRT4577_54727C.1.pep
SSLVCGRPFFFFFFFSFFFFFVFFLSRKNETLEFQTLRLKKGVLINLHLKTSENCPALATVTPQRRKRPGPYFVNKYTPNGFQMGVQANNSFLLAGQFIPTC

SEQ ID NO: 319802 - protein, 79 aa, Zea mays
  Clone ID: MRT4577_54728C.1.pep
RLGATTPSLSSGTNVMTQPLLVNNTYCSYHTRYYRYDNSKQRSTCIFLFIHTTRHELSEESVRGVKAEMCCCLLPTRPD

SEQ ID NO: 319803 - protein, 65 aa, Zea mays
  Clone ID: MRT4577_54729C.1.pep
CQWRGAACAPAIISGSPPTASCCSNLRAQEPCFCQYARNPAYSSYINSPNARRTLTSCGIAVPSC

SEQ ID NO: 319804 - protein, 49 aa, Zea mays
  unsure (1)..(49): unsure at all Xaa locations
  Clone ID: MRT4577_5472C.1.pep
SNLRLIGSKVRDTFGRYGDSSNCMXIVDRITLHISTYRSNSSCKDRSTM

SEQ ID NO: 319805 - protein, 99 aa, Zea mays
  Clone ID: MRT4577_54730C.1.pep
MRPCVRPGLTVETGLPPSSLLRGTALYSLVTAPKSALCTVSRAEPIGACRHPRPLLRSDQRVTRNRVDSSRCGWTYKGCPEDDKGSGEMKKKGAHVLAG

SEQ ID NO: 319806 - protein, 229 aa, Zea mays
  Clone ID: MRT4577_54731C.1.pep
VPAKATQRASPTLISAARRLLATALLDDPNNQFFALLSQSCIPLHPFPTLYNALLSDNAGPHSHHRSFIEIMDNMDNDTKLLHDRYYARGDDVMLPEVPYDQFRAGSQFFVLTRRHAIMVVRDMRLWKKFKLPCLIERRDSCYPEEHYFPTLLDMQDPEGCTKYTLTRVNWTDSVAGHPHMYEPGEVSASLIRELRKSNTTHPYMFARKFSPECLEPLMEIVDSVILRD

SEQ ID NO: 319807 - protein, 122 aa, Zea mays
  unsure (1)..(122): unsure at all Xaa locations
  Clone ID: MRT4577_54732C.1.pep
MARAVAMLVALALVLALIVAASAGGVAAQDCSAEQLEACAPEIISGSTTTMSCCSNLRAQEPCFCHYARNPXYSRYINSPIARRTLTSCCIAVPSCYGTSSCLVVWMNKKMHVDLCLLVSYL

SEQ ID NO: 319808 - protein, 131 aa, Zea mays
  Clone ID: MRT4577_54733C.1.pep
SFSDQQDFCWGVPNIRGGDTNITPQTTSACTCLPKFDVTPEKNRGAMATEEMEHNDSGPVFDHTPTPHDDTLKGTTNSGSDPPLTEQECIRSLWDLICSKDIYQSRVVIDYRDYSSNCMDFYESFSEGKCL

SEQ ID NO: 319809 - protein, 76 aa, Zea mays
  Clone ID: MRT4577_54734C.1.pep
NPHWCPYAKGSPHEGQEPWSSNSVESRGPSPRASGAPLLAPLGCFPLSPLSSFHPKCRGPRSLQYTVAAVTQTRLS

SEQ ID NO: 319810 - protein, 136 aa, Zea mays
  unsure (1)..(136): unsure at all Xaa locations
  Clone ID: MRT4577_54735C.1.pep
MLPEVPYDQFRAGSQXFVLTRRHAIMVVRDMRLXKKFKLPCLIERRDSCYPEEHYFPTLLDMQDPEGCTKYTLTRVNWTDSVAGHPHMYEPGEVSASLIRELRKSNTTHPYMFARKFSPECLEPLMEIVDSVILRD

SEQ ID NO: 319811 - protein, 96 aa, Zea mays
  Clone ID: MRT4577_54736C.1.pep
MARAVAMLVALALALALIVAASAGGAAAQQCSAAQLAACAPAIISGSPPTASCCSNLRAQEPCFCQYARNPAYSSYINSPNARRTLTSCGIAVPSC

SEQ ID NO: 319812 - protein, 120 aa, Zea mays
  unsure (1)..(120): unsure at all Xaa locations
  Clone ID: MRT4577_54737C.1.pep
SHLKSIPPXXLQXSXXSTGVXVAXQXPCTXXVXXLSMQAXIGXXIXXPLKDTSGPSLNILIKLMAVESLVFAXXLMRMLREGHVXXXXXXXXXXXXXXXXXXXXXFXXXLXHXXITXYXX

SEQ ID NO: 319813 - protein, 978 aa, Zea mays
  Clone ID: MRT4577_54738C.1.pep
MSVAVGKRVLDTGWLAARSTEVALTGVQLTTTHPPAADPAPAAPWMSAAVPGTVLGTLLKNKLIPDPFYGLNNQAIIDIADAGREYYTFWFFTTFQCALSGNQHATLNFRGINYSAEMYLNGHKEVLPKGMFRRHNIDITDILHPDGNNLLAVLVHPPDHPGKIPPQGGQGGDHEIGKDVATQYVEGWDWMCPIRDRNTGIWDEVSISISGPVNITDPHLVSTFHDDFKRSYLHCTLQLENKSSWIADCTLKIQVSTELEGNICLVEHLQSYAITVPPQSDIEYTIPSLFFYKPNLWWPNGMGKQSLYNIEISVDVKGFGESDSWSHYFGFRKIESTIDDSTGGRIFKVNGEPIFIRGGNWILSDGLLRLTKKRYMTDIKFHADMNFNMLRCWGGGLAERPDFYHFCDVYGLMVWQEFWITGDVDGRGIPVSNPNGPLDHDLFLLCARDTVKLLRNHASLALWVGGNEQVPPVDINKALKNDLKLHPMFVSYQTSKSEVIYLSEESTDPSKYLDGTRVYVQGSMWDGFANGKGDFTDGPYEIQYPESFFKDSFYKYGFNPEVGSVGVPVAATIRATMPPVGWSIPILKKRIDGYIEEVPNPIWDYHKYIPYSKPGKVHDQIELYGAPKDLDDFCEKAQLVNYVQYRALLEGWTSFMWTKFTGVLIWKTQNPWTGLRGQFYDHLQDQTAGFYGCRCAAQPIHVQLNLATYFVEVVNTTADELKDMAVEISVWDLDGACPYYKVTEKIVIPPKKVKQIIEMKYPKMKDAKPVYFLLLKLFRLSDNGTISRNFYWLHLPGQDYKSLEQYQQKKIPLKIDSDVSVSGTRHKVRMTVENISKKSVADSTRSVSAMDLGDASGSHSTRKETTRKGNGSDGLWRKIRSGLGVARPSDNRRTLEVNGTDSGVAFFLHFSVHTSESSTDGEEYNDTRILPVHYSDNYFSLTPGENMAVDISFEAPQGSSPRVVLRGWNHHLDHAVMI

SEQ ID NO: 319814 - protein, 126 aa, Zea mays
  Clone ID: MRT4577_54739C.1.pep
VPVRVTRMARHVRALMHRFPDTMSAAAVGVQSPASLADLVGHLIERVGLLGVISGRFSLHGLLGVSSSLGFSGCRFCFCLASGRLRLRHLPIQQPASPGPAPRGGPSVPQLESASLGKTTKSADAW

SEQ ID NO: 319815 - protein, 85 aa, Zea mays
  Clone ID: MRT4577_5473C.1.pep
NFIVHIRLHTSPNSCNYAQSGIQSSHGYMPSCLVNCHPYSHLNSLLYQCECEGVHAYTNVSARISHIRSNLRIMPRSGQHFSRCI

SEQ ID NO: 319816 - protein, 76 aa, Zea mays
  unsure (1)..(76): unsure at all Xaa locations
  Clone ID: MRT4577_54740C.1.pep
VLLPSLQPXTLTLSXXRLGXRRAALLGCPGLVRVXRRRAXGXFLXMRXSMXNYYDDYDDXDEMXXTMIWXILLXXW

SEQ ID NO: 319817 - protein, 181 aa, Zea mays
  unsure (1)..(181): unsure at all Xaa locations
  Clone ID: MRT4577_54741C.1.pep
XXXXXXXXXXXXXXXXXKXXXXSXXXRXXXXSXXSKXXXXAXXXXXXXXRXXXKXXXXXXXXXXXXXXXXXXXXXXXXXXXXXKXXXXXLXPXXAXXXAXAXKNEHXLTXXXXEXXXPXPXVXXXXXWXLQXVGPHGGQTXLHLEGXXVLPVRVFTKICILKRRCRRVDLGEIWLCVCARA

SEQ ID NO: 319818 - protein, 109 aa, Zea mays
  unsure (1)..(109): unsure at all Xaa locations
  Clone ID: MRT4577_54742C.1.pep
RVGGRVGGYPAFGLVNKVTGXAIKHSLGQIHPVRLVPYNPEYVDKLVLWTESRHIGHGFRCVRMENNIYLNMDGIXHDDKDHCEDQDVYTVELXXWAKGDNHRWKILPW

SEQ ID NO: 319819 - protein, 32 aa, Zea mays
  Clone ID: MRT4577_54743C.1.pep
STPRVRIKAWSPIQFYLDFALPKLIEEARIKI

SEQ ID NO: 319820 - protein, 126 aa, Zea mays
  Clone ID: MRT4577_54744C.1.pep
RAGTRGRTRGRTQFLTRERTRHPRGEGPRRTRSGPQPTTESANKQKTRGEQQRPRRKHHATPDHTDAPHQTETHADDESQPTPEKPATATASEQHGHHGTGRNRRTNTHTHKNERRNRTPTNERRK

SEQ ID NO: 319821 - protein, 71 aa, Zea mays
  Clone ID: MRT4577_54745C.1.pep
HDFFHMYTVGPPLHTPDRLLKRRILVSSSRASSLSRPRFLPPLTQFHDMHGDGDILLGTIVIGDPGRIFGN

SEQ ID NO: 319822 - protein, 87 aa, Zea mays
  Clone ID: MRT4577_54746C.1.pep
ILERGRGWSYTAHRDRSGFPLRKRSRGLRQALNCGSFVVSPPSNLDDRKWAFGRWCDFSVFARAKRKAVYPGLTASEVKYAFPELFA

SEQ ID NO: 319823 - protein, 122 aa, Zea mays
  Clone ID: MRT4577_54747C.1.pep
TSSKSSTAASSYVLLHSAMPQFSHLRAPPGACDVHLDRACLCTGSFVSIALPSACTAALARGFSRSGHLARLLSSLHSARPLEFPSFLFDHKKESKKIKRNLGAMAGRLEPSILRPSPLNCP

SEQ ID NO: 319824 - protein, 115 aa, Zea mays
  Clone ID: MRT4577_54748C.1.pep
MSRSNRKSSSKGLDLKLNLSLPARGDSSNRVMADEESSPSSCLSSENEHGLQWSNSPEATSMVLAACPRCFIYVMLPQDDPRCPQCKSPVLLDFLQDSGNNNNNTNSNSRKSRRG

SEQ ID NO: 319825 - protein, 49 aa, Zea mays
  Clone ID: MRT4577_54749C.1.pep
FLAASSLVPSSGRRLFFFFWFFFGAPWSKGARAQSLLKNRAQIRFENLA

SEQ ID NO: 319826 - protein, 67 aa, Zea mays
  Clone ID: MRT4577_5474C.1.pep
KKRDPRDQFCYLKLNYLFTHSRKKGRTFFSHAKCTTSAHKKTHPAKCSETSHTLTTLPTTFTTRFIY

SEQ ID NO: 319827 - protein, 105 aa, Zea mays
  Clone ID: MRT4577_54750C.1.pep
QHALLWGIVPPKTRIRRPTTSRHRYKIGRWGGSFFSFVSPGNAYVFYCGGKNGPCSPPCLYRQFFIRVRVMTATPVWTSANGLGDFLFFSGASGLVASTMRPSWI

SEQ ID NO: 319828 - protein, 136 aa, Zea mays
  unsure (1)..(136): unsure at all Xaa locations
  Clone ID: MRT4577_54751C.1.pep
MDDLPGDEGRSQTHPSDRNWPSHLEQKFQSLPLTKQERNFDSAYSSLDSREVGHSLQAAQTLWSSGSLSGPIPNGFYSIIPEKRLKEHFDTIPSPDDLYSLGIEGFKAEIILVDIGRDKXLSALKQVCTALGKGLN

SEQ ID NO: 319829 - protein, 66 aa, Zea mays
  Clone ID: MRT4577_54752C.1.pep
ESRGPLPLAAFRSRFFLVWIGWVCAPLFSHPRSCVRLAIRSWCLRLSSIFVLYGPLFIWEVGHDGK

SEQ ID NO: 319830 - protein, 256 aa, Zea mays
  Clone ID: MRT4577_54753C.1.pep
GVPIAFLNVQTEALLTKISGETASSTVNSGSLADLPNLANASLYGFEDYHGVDIGVVKAVRVWYTAAAGEMPVEIILEEGDARLGFAISRTQEGFIYVSSVVENDVERQAPSTRSGLRDLYREAKRASKLLVISRVSGQKVLPWMVSTSGAVRCFDTVSLSQKLSLHRHALQPILLHVLMWDGMSDGAPTRPSREPCPLPLPLPSPEFAELPRQNLYACVEQRVQTEGDPGVMHERDTAGDASFRFHNFSLPSNWV

SEQ ID NO: 319831 - protein, 787 aa, Zea mays
  unsure (1)..(787): unsure at all Xaa locations
  Clone ID: MRT4577_54754C.1.pep
MDDLPGDEGRSQTHPSDRNWPSHLEQKFQSLPLTKQERNFDSAYSSLDSREVGHSLQAAQTLWSSGSLSGPIPNGFYSIIPEKRLKEHFDTIPSPDDLYSLGIEGFKAEIILVDIERDKKLSALKQLCTALVKGLNSNPAAMIKKIAGLVFDFYNRPNPHLSPARTSSEDLSNLLENRGVQLLGQIRHGSCRPKAILFKVLADSVGIDSKLLVGIPNEEPHGYDNSSKHMSVVVILKSAEFLVDLMRFPGQLVPFSSKAVVTSHMSATGESDSADYDSCDSPLEPNSPLCAQRQEQDDGNRSFKVLSLRNIMLKSTNSMEGKMSCSSHSEPNVANAFCGRSRDKVVDEHQRTASSSPEHPLSRVRGRSMLGDKQYGGAVAVSRSDGASTSNTHRARRSTNITPEISDDIVRAVRAMSESMRQNRLSREQKDGSLGSSNDSMKHEPAGDSNDDEASTRRPSALEGLRRQFNSQKAVSLPSSPNRSGILGLRSPSDYTEADLMATWNEVLQSSPFLNKPLLPYEEWCIEFSEITVGIRVGVGFFGEVFRGLWNGTDVAIKVFLEQDLTTENMKDFCNEISILSRLRHPNVILFLGACMKPPHLSLVTEYMEVGSLYSLIHSKTQKTKLHWKRRVKMLXAVXRGLMCMHRLKIVHRDLKSANCLVNKYWTVKICDFGLSRVMSNSAMNDNSSAGTPEWMAPELIRNEPFTEKCDIFSFGVIMWELCTLCRPWEGIPPVQIVYSVANDGARLEIPDGPLGSLIADCWAEPERRPCCQEILTRLLDCEYTLC

SEQ ID NO: 319832 - protein, 80 aa, Zea mays
  Clone ID: MRT4577_54755C.1.pep
EKISIFERQILSIMSSQIRKPVQAPGQQTFQQSGGQAPSSNMSQQHQTSQGLQQHDSHTNQMPQASLPSMNTGVPTSGAP

SEQ ID NO: 319833 - protein, 74 aa, Zea mays
  Clone ID: MRT4577_54756C.1.pep
PSLIRAVAIPRDKIHPGPSASAGSKAGTPWTFGPACRDLESLVRVVVYPSTTMAAELLRPAVWWHWYVQVLRSS

SEQ ID NO: 319834 - protein, 52 aa, Zea mays
  unsure (1)..(52): unsure at all Xaa locations
  Clone ID: MRT4577_54757C.1.pep
PGKKKKKKKKKKKKIRKKKKKKKKKKKKKKKKMTKKKKKRLLKNXKNLHHCL

SEQ ID NO: 319835 - protein, 79 aa, Zea mays
  Clone ID: MRT4577_54758C.1.pep
RALLVHIAYPSLWRPKERTHAPLHIEAILRRINHPFWQPGYQPGVLIDQTLQFYERMAYYVNPECSLFTEERDRINLIP

SEQ ID NO: 319836 - protein, 75 aa, Zea mays
  Clone ID: MRT4577_54759C.1.pep
LVRYLSNTCPWLPLSNRAQTFYKFLPLLDESVMRMRLISNSWASLSTSFTSNPPYTICSSMIFLCSGKRESTDNL

SEQ ID NO: 319837 - protein, 499 aa, Zea mays
  Clone ID: MRT4577_5475C.1.pep
ESKAYFDLHKNEDWLKDKYHPSNLLSVIERRNERCKVIAKDFFLDLQNGTLDLGPGITAGAASKLGGSDGNSEDDMDNDKRRKHGKDSSKATDSLSGAPKAHPVSSESRRVQADIEQTLALVRKLDAEKGIDGNVLSSGDHDKSDVDKSHIGSMGPIVIIRGLTTVKGLEGVELLDTILTYLWRIHGVDYYGTSESHEAKGLRHVRVDSKTSSTSDVSSADWEKKLDTFWQERLNGQDQLVILTAKDKIDAAAAEVLEPLVRKIRDEKYGWKYGCGAKGCTKLFHAPEFVHKHLKLKHPDLVLESTSKVREDLYFQNYMNDPNAPGGTPVMQQSAPDRGRRRPSMDSRLKFDRGSNKEHDKAERDGVRYGRGDHSPSRDGPDDQMFDGFRGRPSNAPFVAEFPAPPILMPVPGAGPLGPFVPAPPEIAMHMLREQGPPPPFEPNGAPHGNAGMLGPMMGGPAPIIAMPPNFRHDPRRLRSYNDLDAPDEEVTVLDYRSL

SEQ ID NO: 319838 - protein, 48 aa, Zea mays
  Clone ID: MRT4577_54760C.1.pep
AISTGSSYPYPHGLQAMQPHADPCSLADADSPTSHAYDLCYYLRGVEF

SEQ ID NO: 319839 - protein, 65 aa, Zea mays
  Clone ID: MRT4577_54761C.1.pep
CVQPWEKKIWVMNVVNVDAPDTLSVIFERGLLGIYHDWCESFSAYPRSKRSVASTTSLSGFFTSF

SEQ ID NO: 319840 - protein, 113 aa, Zea mays
  Clone ID: MRT4577_54763C.1.pep
PLLVKGVTGRPSRPAASSPIVLVGVPPLSYHRRLLRDRGKALGAVRAVSHALGLALTGAAHGDGPAGIDAGDAGDPGPARGSCCSGAPSTRAIVVLCGRPFVEHGRGSWEKRS

SEQ ID NO: 319841 - protein, 76 aa, Zea mays
  unsure (1)..(76): unsure at all Xaa locations
  Clone ID: MRT4577_54764C.1.pep
LGTVCLVVLHQLXRRXGKAPLPPXPQALPIVGNMGMMDQLTHRGLAALAETYXXLXHLXLVRLHAFGXDTSCSRWC

SEQ ID NO: 319842 - protein, 91 aa, Zea mays
  Clone ID: MRT4577_54765C.1.pep
KICCHSITSIFNSGVGVAVNKCNQAQMSNCNLSDAIQHGQPAKTTVALVNSQTYALNPSLNKKTIESSATVLAARSESTATVLAPTSACEP

SEQ ID NO: 319843 - protein, 122 aa, Zea mays
  unsure (1)..(122): unsure at all Xaa locations
  Clone ID: MRT4577_54766C.1.pep
GIQGPEQAKQLKKPAEEELLSXKAPYWKKPKADKLVLSGKSSXKEYVKVKRGKKKGKNSVXTYKIYIFKVLNHVHPDIGIYSKVISIMNSLINDIFEKLDAEAVKLARYNKKPTITLLEIHT

SEQ ID NO: 319844 - protein, 51 aa, Zea mays
  Clone ID: MRT4577_54767C.1.pep
LILQSTNFPNPHVTMVPFLPNVGIVTLKSTKGFQLVKFFGFKQKKKKKDQE

SEQ ID NO: 319845 - protein, 73 aa, Zea mays
  unsure (1)..(73): unsure at all Xaa locations
  Clone ID: MRT4577_54768C.1.pep
DKADNRAPTGLILAGTKXLANQGEPDAVLRSNKGTAGIAWVKTGXSLIADINVEPRTPVQCHRMYKGESEDQL

SEQ ID NO: 319846 - protein, 107 aa, Zea mays
  Clone ID: MRT4577_54769C.1.pep
SAQVLEVEVEAFVCSLSPAFLSIAPNTQGPNNYNPLDAFASFAPPASELTIPCSPEERAPNACDIVTMAATSYLASFSRASPAPAAASACLCNVHAWPPALRPRPRR

SEQ ID NO: 319847 - protein, 123 aa, Zea mays
  Clone ID: MRT4577_5476C.1.pep
PFCLRAVLVLPPLWLASTLVLASCCSTYCLLRACAGFSCCSPEPCRLFGCFCSRALRPLAFFRGCFSWSLGAPPLVGGFVGPARGFAPPPFPPDNPGGRGPFSGPPLVGPPRLWGFLLALRCL

SEQ ID NO: 319848 - protein, 227 aa, Zea mays
  unsure (1)..(227): unsure at all Xaa locations
  Clone ID: MRT4577_54770C.1.pep
IGTSSRPGKKRKCHNPPPDSPPQPHXPPSAGHPLGSPPPSXPLPHSSLHRQSRPPQQPPRPPIPXPPPSMPSRPRPATPPPPPPPAGHPLRSPLSSGAAAPCAASPSXPRPHHPTRSPQPPRPPRPXAPPAMPSNAPPSPPLSSPRLPTPXSPAPPPQCGARVPRPPRPAPRRAHGVQPPPTGRAPGLLFLPLPPPRVRPRILPPRWTSPARRYPWRARSLHPHCAH

SEQ ID NO: 319849 - protein, 160 aa, Zea mays
  Clone ID: MRT4577_54771C.1.pep
KIFGGNSRLGCYALAVTIFSLGIFRDYLYNEALADQPTHPALLSPVIKYSAIPLFLTGNVLVVTSMWALGVTGTYLGDYFGILMDEPVTTFPFSVSSSPMYHGSTMSFLATAIWYGKPAGIFLSGLVAVAYSIACKWEDPFTAMIYRKRDEERSRGKKGQ

SEQ ID NO: 319850 - protein, 71 aa, Zea mays
  Clone ID: MRT4577_54772C.1.pep
VWSINLSDMCFFSPHVIIALTYRHELGMNSNFIRPDLIVGSCLQVLVASFFRQKYRSLPLSDYLHSCAEST

SEQ ID NO: 319851 - protein, 84 aa, Zea mays
  Clone ID: MRT4577_54773C.1.pep
PWSSISMAGGLRSVIASDSWRWMYCTRYATITHIARRTWFGMHALLLALNRVWSLHRGLQFSETRGSRQLSGSGSISEKLGVHA

SEQ ID NO: 319852 - protein, 62 aa, Zea mays
  Clone ID: MRT4577_54774C.1.pep
SHKHMMNLGWGTVPASRSGIAEVYANGARMALPHNQGRGSLQALLELSLDGCLAGDQGKSMS

SEQ ID NO: 319853 - protein, 35 aa, Zea mays
  Clone ID: MRT4577_54775C.1.pep
SFKPPVSMTDTMNLYPPSVASGYVLKMPVSRPKKG

SEQ ID NO: 319854 - protein, 53 aa, Zea mays
  Clone ID: MRT4577_54776C.1.pep
TSHYRHTYGFYSQPPKDQLFLKRNGPLVYDSRHTLSTNGHCNRSFSALASFIH

SEQ ID NO: 319855 - protein, 50 aa, Zea mays
  Clone ID: MRT4577_54777C.1.pep
KGGNVGRRYPTGGVWLRYGVKRGRLLVLCAGTGHSRNEVIPKARGLLFYV

SEQ ID NO: 319856 - protein, 103 aa, Zea mays
  unsure (1)..(103): unsure at all Xaa locations
  Clone ID: MRT4577_54778C.1.pep
PASTLSFFIIQITIQEDLLHTKDGSLLILLXLSSITSTSTIFLQLSQATITSLLPPFLQPPYFSSFFNPFLQPFINQHSITTPFLPLSPFFLQQSSDLLHFLP

SEQ ID NO: 319857 - protein, 237 aa, Zea mays
  Clone ID: MRT4577_54779C.1.pep
FQGRPTRPPTNPVDFFDLVIDELNKPDPIMNENIALDLLFLLLFASHETTSMGLTAILKFLTDNPKALQELTEEHEKIVETRVDPDSDITWEEYKSMRFTSHVIHESLRLANIAPVVFRQANQDVYIKGYTIPEGSKIMICPSAAHLNSKVYEDPTAFNPWRWKDTPEPVGGSKDFMAFGGGLRLCVGADFAKLQMAMFIHCLVTKYSWKPISKGTMVFYPGLRFPEGFHIQLLAKA

SEQ ID NO: 319858 - protein, 74 aa, Zea mays
  Clone ID: MRT4577_5477C.1.pep
ELMGQTDALRSQLLSSSALDLLGSGVILVAGGGALPYHAADDGQAAAPLEPEYDSYVSNKTNREIRGGSAIVGK

SEQ ID NO: 319859 - protein, 122 aa, Zea mays
  Clone ID: MRT4577_54780C.1.pep
GPPLGGFFKNKGVLEFPFFLLLSNPLFFPKLGGESPYKNLGTIFGKPGLIPKGPKKIPKPPSQKKKKKRGQKGPPFFPQGGPPSKWKRGKPGSKFFFKIKKKKIFFLILAQTENFLVYPRKF

SEQ ID NO: 319860 - protein, 84 aa, Zea mays
  Clone ID: MRT4577_54781C.1.pep
PPIREQKQDDPDQAQARTLPRRLASYFHPCALRILCSNKQDEPCRYPVRGLYLTELHLLMMLAPHIHLGTNCCYSHRYCYGSNC

SEQ ID NO: 319861 - protein, 230 aa, Zea mays
  unsure (1)..(230): unsure at all Xaa locations
  Clone ID: MRT4577_54783C.1.pep
MGNCCRSPAAAAREDVKSSHFPASAGGKKKPHQQARNGGPGSGEKKRLSVLGEEGCDVGAGGIEEKYALDRELGRGEFGVTYLCMDRGTRELLACKSISKRKLRTPVDVEDVRREVAIMRHLPRSPSIVSLREACEDDGAVHLVMELCEGGELFDRIVARGHYTERAAAAVRAPSVEVVQLCHRHGVMHRDLKPENFLFANKKGDSXLKXIDXGLXIFFRPGEKVSKIVG

SEQ ID NO: 319862 - protein, 122 aa, Zea mays
  unsure (1)..(122): unsure at all Xaa locations
  Clone ID: MRT4577_54784C.1.pep
MNLFMRVCTLPIRIHFLKDSGFRALADLQHPFDDLCCVEGISKXSDQLRKARSSNGTGESIXSIQKRQFFSXIILGFSILLXLVSDLGAVSPFFRDXLLAPVLHFVSADREERRLRGKRIVP

SEQ ID NO: 319863 - protein, 76 aa, Zea mays
  unsure (1)..(76): unsure at all Xaa locations
  Clone ID: MRT4577_54785C.1.pep
QGFKLGKYTPWIKKNKGLXKLARKVPTNRLLKFXRVLKAQQRIHMPVFIAQRVLDETRWXHYQETVMILNLMPYRA

SEQ ID NO: 319864 - protein, 126 aa, Zea mays
  unsure (1)..(126): unsure at all Xaa locations
  Clone ID: MRT4577_54786C.1.pep
DIDNAGGGFATAECEHKPDGMANGLTIDINLRSTYSCFCLXYFTVVENISNYHGNRTTXFYTATASTLISLSDXAAINQAAMNPNNTVFYAKRLISMRSSDASAQSDIKLWPFKAIPEPWEKPMIV

SEQ ID NO: 319865 - protein, 89 aa, Zea mays
  unsure (1)..(89): unsure at all Xaa locations
  Clone ID: MRT4577_54787C.1.pep
LWTYPFYVDIFXFLFIIFFFLFFFNXLIIFFFIFYHLFFIIYFICAFIFLNLXIFKFLYXFILLYFSYFLFYFIFFIYSLFIYXIFFYF

SEQ ID NO: 319866 - protein, 123 aa, Zea mays
  Clone ID: MRT4577_54788C.1.pep
ELEPLSSALSDASLASAPLPGALMMQAAFLSLARVWPFGKPGEGGGRGRRGREAAAQEDRGGGGGRRRYGRGGGRHWVGGDSPVLGRRTGGGCGGVEERIEAARRGKRKAEASERTYAATPGR

SEQ ID NO: 319867 - protein, 181 aa, Zea mays
  Clone ID: MRT4577_54789C.1.pep
MSPTCLGRSPSDQPCQAPRRPLSVVLSTVWSAVSKPSRPLAHAPASDAPTAQTPCPRLTVPSAQPRSRGATDRGGALATPSPTSHGPPSFPLPRSQGPKFGNAPSPPTIVLDLAIACMISAADLESARSTTMIWKVPCQTIPTQIPQIVHPSSLKRSQLPDCYNHPTATEILRSHSSRLEY

SEQ ID NO: 319868 - protein, 99 aa, Zea mays
  unsure (1)..(99): unsure at all Xaa locations
  Clone ID: MRT4577_5478C.1.pep
GTAASSGNAVCGPLRPRGNGGGGCGRRRWSRGADHSGLGXTRWPELSGAGQGQGARRPAQGAASGVGGAGPRRXGPGGAGQGRGGGGAGQGRGSGVVHR

SEQ ID NO: 319869 - protein, 116 aa, Zea mays
  unsure (1)..(116): unsure at all Xaa locations
  Clone ID: MRT4577_54790C.1.pep
GGPTRAGATNSETAXXASARIDGKETPEGQRXKADLPSXKKEEXKGEGEDGNXXXISGQRSREKEDKDDKXHRXERSSGQXXRRXRXPENAKXEQGKAGPENGXXTGTXPKAEEKK

SEQ ID NO: 319870 - protein, 96 aa, Zea mays
  unsure (1)..(96): unsure at all Xaa locations
  Clone ID: MRT4577_54791C.1.pep
XFFFFXNGPILGVFCVQANRNPGGFTFPLFLFQPHPIQSTNLARSNTGFNGPFDRTHQYRPAHWGDHLAYTKKMACSTLGETGSNHYDHGCGSHQT

SEQ ID NO: 319871 - protein, 98 aa, Zea mays
  unsure (1)..(98): unsure at all Xaa locations
  Clone ID: MRT4577_54792C.1.pep
LTSPSTHHQTLPPASFFHIYQLLFRTASPVLQHPRSDLFLVPGPAGSSVTMNGTGDPERNQAIEDYKKTLLDLREWEAKLKSLRMEIXDSQKEYDITE

SEQ ID NO: 319872 - protein, 95 aa, Zea mays
  Clone ID: MRT4577_54793C.1.pep
KTNPANGSLKPGGGGFYPPPGMLNSGGPGAPPFCSPVPPPGSKVWINVFWKKHFRPPPGFQKKKKKKKKKKKKKKKNPKKKKKKKKKKGRAVRCV

SEQ ID NO: 319873 - protein, 34 aa, Zea mays
  Clone ID: MRT4577_54794C.1.pep
FNLGRPNRKLTPRKPADVNLEPQKRPPAIQNQSE

SEQ ID NO: 319874 - protein, 476 aa, Zea mays
  unsure (1)..(476): unsure at all Xaa locations
  Clone ID: MRT4577_54795C.1.pep
MVEIGSRVRGFLRNRWLVFVAAMWMQSCAGVGYLFGSLSPVIKASLGYNQRQVAGLGVAKDLGDSVGFLAGTLCSVLPLWAALLVGAAQNLVGYGWVWLAVTRRVPVPPLWAMCILIFIGNNGETYFNTAALVSCVQNFPKSRGPIVGILKGFAGLSGAILTQIYAIVHSPDDAALIFMVAVGPTMVVIASMFIVRPVGGHRQVRPSDGTSFTFVYSVCLLLASYLMGVMLLEDLVDLSQSVTVVLTVILIIFLLVPIVIPVLLSFFSDDDETLYALLLPSPRKEEASASTSSEEQQEVILSEVEDEKPKDVDLLPASERQKRIAELQTRLFQAAADGAVRVKRRKGPRRGEDFTLMQALIKADFWLLFLSLLLGSGSGLTVIDNLGQMSQSLGYEETHIFVSMISIWNFLGRIGGGYFSEIIVKDYAYPRAIALGIAQILMAIGHFNFAMAWPGXMYVGTLLVGXGYGAHWAIVP

SEQ ID NO: 319875 - protein, 111 aa, Zea mays
  unsure (1)..(111): unsure at all Xaa locations
  Clone ID: MRT4577_54796C.1.pep
PPPFSAVVPNLSKLDFPNKEKFFRDLKEMGFRQVVFTKEILRQNNSNLEQSFDYLFGANKWDPLPPKLEKMGFFSPKINKELLSKNXGSLHPPFMGLLSREKKAKLKSCAI

SEQ ID NO: 319876 - protein, 126 aa, Zea mays
  Clone ID: MRT4577_54797C.1.pep
AGRSGEGKLSLGHRPFSAPPYPPLIPRTKPRSLPPARRSSHLHHHLAGHTRLSHEPQPTGTGRLSSSVHPSQGMASSFAVATVPSLNKVNMLGCRPGPQSASETVIYITRCTLSIQFTLVCIHDNW

SEQ ID NO: 319877 - protein, 117 aa, Zea mays; identical to SEQ ID NO: 203251
  Clone ID: MRT4577_54798C.1.pep

SEQ ID NO: 319878 - protein, 117 aa, Zea mays
  Clone ID: MRT4577_54799C.1.pep
MASSFAVATVPSLAAPAAKKRSGGVTYVEGMNAYSGLKGLNKVNMLGVRKTADYSFAKVVASLSPAGRKRRGGAFGAQMNDAAEIFRIAATMNGLVLVGVAVGFVLLRVEAAVEESE

SEQ ID NO: 319879 - protein, 101 aa, Zea mays
  Clone ID: MRT4577_5479C.1.pep
SPPRAPGATGGRFWTLSGVTAKLHETHDYHPPLLGAPAELPRRQPERALQRGQPQRAAQGPEHERERRQGRPRSWPTRADAARRISPGQTYALLIKEHITR

SEQ ID NO: 319880 - protein, 54 aa, Zea mays
  Clone ID: MRT4577_547C.1.pep
PWEALYLASGEGAGSSIPSLCLPGRPIRPALPFHESIDLYYSTNILPLPKPSLF

SEQ ID NO: 319881 - protein, 66 aa, Zea mays
  Clone ID: MRT4577_54800C.1.pep
GPRAPRPSGSCPPLRTWQSCPRGIGIRPWKPLKFPFLGGKAHIPFPGPPIFFRARVQNKAQRRLRI

SEQ ID NO: 319882 - protein, 117 aa, Zea mays; identical to SEQ ID NO: 203251
  Clone ID: MRT4577_54801C.1.pep

SEQ ID NO: 319883 - protein, 155 aa, Zea mays
  unsure (1)..(155): unsure at all Xaa locations
  Clone ID: MRT4577_54802C.1.pep
AWTVTLHELRQTRGRPGRALLVLKSSAASFTLLLAAWPASSSASCCWPPGRRAPQRDQEEDKKRYSEEEGLIAAFKSVGDTLSNATEKVATGDTDVPDDLFXSLINLSGFEQTHISLYFNYLVAHPHIARAFNKLSFDHKLIWARNFVSEKFLGV

SEQ ID NO: 319884 - protein, 73 aa, Zea mays
  Clone ID: MRT4577_54803C.1.pep
PPPGSGSEARGGSRARLCSRVMVDARPPARMACFCRLLQRCWCVIQWHASAGLYGSILQRFPALENGSKRAFL

SEQ ID NO: 319885 - protein, 116 aa, Zea mays
  Clone ID: MRT4577_54804C.1.pep
PPLGGPSKAVFPCPRGPTGDSPKSRKLKLFFSTPPFYSIRTRGCCPLSRPGVGFFQVPGPLGGPTPLVVRVLFINRLLCSETPLSRGFSPPSPAFYFNPRPREGPKSGGPVSFQGF

SEQ ID NO: 319886 - protein, 117 aa, Zea mays
  Clone ID: MRT4577_54805C.1.pep
MALLFAVATVPSLWAPAAKKRSGGVAYVEGMNAYSGLKGLNKVNMLGVRKTPDYSFAKVVASLSPPGRKRRGGAFGAQMNPPPDIFRIGPPMNGLVLVGVPVGFVLFRVEAPVEESE

SEQ ID NO: 319887 - protein, 117 aa, Zea mays
  unsure (1)..(117): unsure at all Xaa locations
  Clone ID: MRT4577_54806C.1.pep
AGRAGDLAPPSPCCWPASSSAWKKTKKRYSEEEGLIAAFKSVGDTLSNATEKVATGDXQMIFFDSLINLSGFEQTHISLYFNYLVAHPHIARAFNKLPFDHKLIWARNFVSEKFLGV

SEQ ID NO: 319888 - protein, 117 aa, Zea mays; identical to SEQ ID NO: 203251
  Clone ID: MRT4577_54807C.1.pep

SEQ ID NO: 319889 - protein, 126 aa, Zea mays
  unsure (1)..(126): unsure at all Xaa locations
  Clone ID: MRT4577_54808C.1.pep
KRDTHCYNTVYLCIYLACDDNATTSSTSKXQEEDXXRYSEEEGLIAAFKSVGDTLSNATEKVATGDXQMIXXDSLINLSGFEQTHISLYFNYLVGHPHIARAFNKLPFDHKLIWARNFVSEKFLGV

SEQ ID NO: 319890 - protein, 80 aa, Zea mays
  Clone ID: MRT4577_54809C.1.pep
MASFAVATAPSLAAPAAKRRPAAGVTYVEGMKAYSGLKGLNKVTMLGVRKTADYSFAKVVASLSLAGRKRRGGAFGAQMR

SEQ ID NO: 319891 - protein, 83 aa, Zea mays
  Clone ID: MRT4577_5480C.1.pep
TMKLTRCARAQRHRSPPQPAPSAAPDPLYRLIAETESKPGSDIFRERGVEANLDERRDQEEGGDGGRWRGDAVSRVLAGLEGP

SEQ ID NO: 319892 - protein, 115 aa, Zea mays
  unsure (1)..(115): unsure at all Xaa locations
  Clone ID: MRT4577_54810C.1.pep
RRLLHPAAGRLAGELLSVEEDKKRYSEEEGLIAAFKSVGDTLSNATEKVATGDTDVPDDLFXSLINLSGFEQTHISLYFNYLVAHPHIARAFNKLSFDHKLIWARNFVSEKFLGV

SEQ ID NO: 319893 - protein, 117 aa, Zea mays; identical to SEQ ID NO: 319878
  Clone ID: MRT4577_54811C.1.pep

SEQ ID NO: 319894 - protein, 44 aa, Zea mays
  unsure (1)..(44): unsure at all Xaa locations
  Clone ID: MRT4577_54812C.1.pep
RRHRCQTASPCAAESREHWVXELAGICQYAAGSREQVRRAAAPK

SEQ ID NO: 319895 - protein, 117 aa, Zea mays; identical to SEQ ID NO: 203251
  Clone ID: MRT4577_54813C.1.pep

SEQ ID NO: 319896 - protein, 229 aa, Zea mays
  unsure (1)..(229): unsure at all Xaa locations
  Clone ID: MRT4577_54814C.1.pep
DPRGLXGKKKKKKKKKKKKKKKKKKPKKKKKGRVSFFSLSSPPFLFAGRAFPWGSDGVRPELPGSPRPGVSQFLPAMATTPGIFLRTRRCLAELLPLPSWGPAPCALLLVFTRGSFLLACALLRLGPAMELARNTRRFAYLGSPLRKPRRRAGSLLTLSCIAHPNPWSTGCPTVTFLVALWVSSLCLDVQAPNLSFNVLRRLGTLASFGPVLPSRDTSCELSLISPGYS

SEQ ID NO: 319897 - protein, 80 aa, Zea mays
  Clone ID: MRT4577_54815C.1.pep
QKKNSNLKVYCSLVCYNSLLNNFALGNLKLFLTNQSFLIVSLSLTASSSGSLYFLNLLMHPIYSGLLRKTLDGEPIHSSS

SEQ ID NO: 319898 - protein, 94 aa, Zea mays
  unsure (1)..(94): unsure at all Xaa locations
  Clone ID: MRT4577_54816C.1.pep
KTDLHFQSSSVTSLHEADVAYLVGLYYYTNLXSINTMRVIMMPKDIHLVRPITGERVYATEQIGQHLWNRLFFEASTSGRFRPNEWYTIHERLK

SEQ ID NO: 319899 - protein, 63 aa, Zea mays
  Clone ID: MRT4577_54817C.1.pep
SALFLFFFFNQTINRICYTIVATLTIYNIHYSLTIVSFLLTFSKKNSHIFTLNTLKWNILNAF

SEQ ID NO: 319900 - protein, 52 aa, Zea mays
  unsure (1)..(52): unsure at all Xaa locations
  Clone ID: MRT4577_54818C.1.pep
MGRKKKKYKKKKKKKKKXKKKNKKKKKKKNKKKKKKKKGGRLKKTKLIFWFN

SEQ ID NO: 319901 - protein, 136 aa, Zea mays
  Clone ID: MRT4577_54819C.1.pep
DPGGRGGYGAYSYGGRECRARDGQRSALVPQRLLPPKTARLDERADKGDGACRVSRRRESTTRLGGGGTSFQRQSQHTVRCNNHELNAPIGYKKHLEEFEPFNKNEVLFEDYCNSMLKDGTWTGHMELQAAMHSQF

SEQ ID NO: 319902 - protein, 74 aa, Zea mays
  Clone ID: MRT4577_5481C.1.pep
MVYGGFKTVFFYRTKKKKKGRPPTSELVDPGINSGPVPAGVPAFPIVSRIRAWRNHGHSCFLCEIGIRSQFHTT

SEQ ID NO: 319903 - protein, 275 aa, Zea mays
  Clone ID: MRT4577_54820C.1.pep
EPIRIQCLITISQLNGQVNVPQIITDPAHIFLLLPFLLLLSSPYVQAQQRITLGSSLTTQGPNSFWLSPSGDFAFGFRSIEGNTSSYLLAVWFNKISDKTVAWYAKTADPDPALVQVSSGSCLELTSSGALSLQDPTGKEVWNPEVVSATYASMLDTGNFVLAAADGSSKWGTFDNPADTILLTQVLTPETKLHSRTIATDYSNGRFHLNLQNNGVFFYATAVQSDPQHEYNWSMPGNATNLVFNATGMIYITLDNGTQVKITSGKTSSIADYYH

SEQ ID NO: 319904 - protein, 148 aa, Zea mays
  unsure (1)..(148): unsure at all Xaa locations
  Clone ID: MRT4577_54821C.1.pep
QTIRLKRQTEGNRKAHRSRKQRFFGANLVTKPDQDRGVSESLPCNRGGYFYGSTAENDSYQQSXLSSSRHGHCTGCLHDWSVPQCCSHGEXVTLHLLENNXRQPLRYDKFRHHCLXSARXIGTGQSEQMNSLHRFWSYYLRDNFYEDI

SEQ ID NO: 319905 - protein, 60 aa, Zea mays
  Clone ID: MRT4577_54822C.1.pep
ADQLLATVVDLVTLCGGIHTGDGMISAHAGNMDDIHKTERLGLYSDRRWYPTTHCQPQDV

SEQ ID NO: 319906 - protein, 306 aa, Zea mays
  unsure (1)..(306): unsure at all Xaa locations
  Clone ID: MRT4577_54823C.1.pep
ALNSARAGHFRHCWADWYKPEMAIAITEFRALCGXQGFPEILRGVPLQPNVRDYTPPFNEFEVXLVLEDDGVSEVKSTLQSAFAKLMTASKDMVSEAVAKLISRLNTESKIRTLTDKEQLLLSLERQYQDDVGVLAALFFNYVKLSPGEALYIGANEPHAYLSGECIECMATSDNVVRAGLTPKYRDVQTLCSMLTYKQAFPEILRGVPVQPHVRRYTPPFNEFEVDRCLVPPGGSLVVVPPVPGPSIFLVMTGAGEIQLDSASDGEKADEGDVFFVPAYTEVKISACGPESLQLYRAGVNSRFFS

SEQ ID NO: 319907 - protein, 49 aa, Zea mays
  Clone ID: MRT4577_54824C.1.pep
NTLVLLYKKKGDLKNPHYVKDLKPSFLLLRNRTTLRPIQPSRALLMLLG

SEQ ID NO: 319908 - protein, 118 aa, Zea mays
  Clone ID: MRT4577_54825C.1.pep
MTASKKGPEKGIFRKRILLSEGNGPRALLLIRGSKAGPLEGFDSRPRARRVRDDPGYVRYMAEARATLLRYPRTFLRPAGTICNGIPPEGGAEPSDPIEWVWVQQITRRYFWSAPLGH

SEQ ID NO: 319909 - protein, 52 aa, Zea mays
  Clone ID: MRT4577_54826C.1.pep
GGIPNRGWGEFFKFFYLGVDMGTNPEQKLFRWYIARKAKRCGLRLNFYPSME

SEQ ID NO: 319910 - protein, 172 aa, Zea mays
  unsure (1)..(172): unsure at all Xaa locations
  Clone ID: MRT4577_54827C.1.pep
LVTNINKCSLXPIRCVEQDLGAAQDLFPCNVVDFPCKYLGLPLSIKKLPRSVFLELIDKVADKLPGWKAALINPAGRTTLVKSVLSAAHIYYFIALQCPKWVVKEPLLGLGFTFQQPIPHIFIDRPGIRREKTSLGSCRSGTDYCSSRKIKKRQCGISIIIFLGQYLTGTLL

SEQ ID NO: 319911 - protein, 43 aa, Zea mays
  Clone ID: MRT4577_54828C.1.pep
ANHRLQAPFSLRITNESGRKLVANRVIPANWAPNNFYRSIIQY

SEQ ID NO: 319912 - protein, 663 aa, Zea mays
  Clone ID: MRT4577_54829C.1.pep
MAKDKKSVDSALAGFYEAMERTNVEKITDEMLVGLSRDSSDSESFDVESENEDVEDRPWRPSHIVFGKSTVKQGQIEAMKGKYFHDISIMRAGGESTIPLPEVDEVMMVEVLKTFEIYLHQLTLEALIKVRVFIWAMRSQGLERDAKCFCIHELSYQTKEIGKEQYHNNFGWYNFVHHSDVRDLVQEHIAYKVWPLVNDREMLKETAAGSSEGCLERIAAVLNTERMEIVEHAEAIPLASKTIPIVAVEASVDPVVETEAKSSKAEEHPKLLSPPTMTGLSKLTTATTMTPRKRRMTSVLDAILKSTKMLTPVTTEASDDKIENVREVVAASASPIHVEAGPLGAKPVELAKESPSEKPTSPIPDAPSQEEPIAEVQHYAKDLKYPRGSLVYRGNNEDDFLYCLPDIKEINICREMMDNMGYTKLELGLSAMTKDQLADSLAYNSLKVGLHRSVVQGLEKKLDEVTKNFNVEQTKREISDMERLRVQKNVEELRQAKEECYKVAMECCNNLKISFAKVGAFSSGQNFICGVPDGVIRWISGEAEAFDEILSDRGDFYAFAVWSKGGREIADEAIRKNEKESHTALEEARKAKEVVEHERLIASELASGELKQPPSTTAQATTFVMSPKKAIAPGAALHHWTPTKKGFLWEKSKTRKERPSAQD

SEQ ID NO: 319913 - protein, 57 aa, Zea mays
  Clone ID: MRT4577_5482C.1.pep
CGHVLHASLLLKVFCSESRDEIILRGEGCNTPGVYILLDNEYGIKHVISVNETDTKI

SEQ ID NO: 319914 - protein, 69 aa, Zea mays
  Clone ID: MRT4577_54830C.1.pep
AHSYTNSSISTLAMTSRALLKAFRNPKYNTWALSTLIIVNPHSKKKVIPPVIVLQLKPRRHKDRVYMYF

SEQ ID NO: 319915 - protein, 70 aa, Zea mays
  Clone ID: MRT4577_54831C.1.pep
HEVFRRVVYLGFVWRLASLYRELPIVVESLHTTQSKALMGSADALGSHADEIRVRPDKAPMSALMATYEL

SEQ ID NO: 319916 - protein, 95 aa, Zea mays
  Clone ID: MRT4577_54832C.1.pep
MLVFVEASATNPSLVLDIDLTFDGHNLDISDHTITLLLTSYIGTMRTLLNMLDDYGICDDARTRRIALLQQYEVDSKNLRADSLPLGFSVSRDYS

SEQ ID NO: 319917 - protein, 54 aa, Zea mays
  Clone ID: MRT4577_54833C.1.pep
AFINRDDDEGNKIGNMKPLGRQYTFLRYKIRKVNFVIFVVDSVAVLYSIDDSSK

SEQ ID NO: 319918 - protein, 83 aa, Zea mays
  unsure (1)..(83): unsure at all Xaa locations
  Clone ID: MRT4577_54834C.1.pep
MAAKILSLLALLALFASATNAFIIPQCSLAPSFIITQLLSPVTSMGFXHPAEQAYRLQQAIAASVLLSTISQVXQQILGHILQ

SEQ ID NO: 319919 - protein, 95 aa, Zea mays
  Clone ID: MRT4577_54835C.1.pep
GSKVLVGIKHCGGEHHHGLLRLRPGAWASNNGRHRWVPAGDPPAAAGRGQEAARIGLFRRCNRCFPQRASISLVLASVLRPVCLAVTTCTAVWGG

SEQ ID NO: 319920 - protein, 68 aa, Zea mays
  Clone ID: MRT4577_54836C.1.pep
PARKPYFLFTRRRLQPIPRGRTIRPPARGGRGGRGGRFQSGAEGGHGRTEPPANRTSAHDENPERDTH

SEQ ID NO: 319921 - protein, 60 aa, Zea mays
  unsure (1)..(60): unsure at all Xaa locations
  Clone ID: MRT4577_54837C.1.pep
SSDTIVNVKXTKIQAKEGIPRDQKRLIFAGKQLEDARTLADYTFQKESPLHMVLRLRGGQ

SEQ ID NO: 319922 - protein, 113 aa, Zea mays
  Clone ID: MRT4577_54838C.1.pep
AVMAAAAAAHVLMFPDRDDGHLNRLLHFYTELLRAGVHDTVLQTDDNLRRLGTGDDEAPVGLARLRCLSMPAATQTGPAHRRRARTTDGVTDHQGRGLQTGTVHVGDPGRQTL

SEQ ID NO: 319923 - protein, 141 aa, Zea mays
  unsure (1)..(141): unsure at all Xaa locations
  Clone ID: MRT4577_54839C.1.pep
VERLRFESFDFQNTIIGGLCYCLTMSDANACAMKMPXDCXALQGLYCSGSSLTTMMYVADMXKHTRXLTQPXCTSLNCDXYYALCGHTSAMYYTLXNSAASXHMKMIDVQSXTQHHXMIMQVERAXAADSSKLYDPYMMQH

SEQ ID NO: 319924 - protein, 74 aa, Zea mays
  Clone ID: MRT4577_5483C.1.pep
TTPIMILQKHQCQPSGVLNLLGSFPKPSGLTEGVKDQAPQHDEDGFLVGVHSLKPELHDLNKTTPCEPPLRRIF

SEQ ID NO: 319925 - protein, 132 aa, Zea mays
  unsure (1)..(132): unsure at all Xaa locations
  Clone ID: MRT4577_54840C.1.pep
VSFPVSRVARAIPLSFFLFAFLSSFPVCSPVCSSSLSPCSAFFAVALLCHTPLFSVFLRPRLCLFLLGACVAGVAFSLLFLPVLLPRRRSLLFRSLPLLCAVWGLPLCRPGVALLVVPSPSPARPRLFLXCA

SEQ ID NO: 319926 - protein, 98 aa, Zea mays
  unsure (1)..(98): unsure at all Xaa locations
  Clone ID: MRT4577_54841C.1.pep
LKHIWSRXRHLADEPTSELHRKERSLHVENRALQRELPARQMAVXDRXKPQQQVQRDQQTQVQVQTSYXSDYYMMRQDQHGLSPAQNICISAVSIGER

SEQ ID NO: 319927 - protein, 178 aa, Zea mays
  unsure (1)..(178): unsure at all Xaa locations
  Clone ID: MRT4577_54842C.1.pep
PHPPPPRXRPPPGGGGPTPLRGGGAGEGSRGGGGPPPRTAPHXERGGVAPPARFEWGDRAGVFPPPPACKNPPPPEXGPPPPQGRQVGPPKGGAQAGPPRVWGILQDSPPPPGGHPPGGRXPPLTGGGVVSRGGGPPGGPQTKGGPPWGFPQFFPGGAKPTAPKTFFFWGPWGPLLPF

SEQ ID NO: 319928 - protein, 60 aa, Zea mays
  Clone ID: MRT4577_54843C.1.pep
AHCTDIYIYVHTTLWNYEESASLCLARLGRRCRRLSLAGGSQTGRAWRLGPLLVLRGPLA

SEQ ID NO: 319929 - protein, 138 aa, Zea mays
  Clone ID: MRT4577_54844C.1.pep
MTVEKVDAGLSDFDAHFDRLFASPDAASDGKVKLLLFLADRKPGSSLSWCPDCNVAEPVIYERLEALEGKDAVLLRAYVGDKPTWRDPAHPWRVDPRFGLKGVPTLIRWEDGAAAARLGDDEAHLKDKVDALLCAGGN

SEQ ID NO: 319930 - protein, 104 aa, Zea mays
  Clone ID: MRT4577_54845C.1.pep
SFVRGHWGGLVGGRAGSLGYGSSGNGLDAGGNVCYVFNMYFQAQNQVEGSWYLQGLAVPTGQNPSTDACNLTIQITAVAAGGRRAAAMTAVVLTVVITAVDVTA

SEQ ID NO: 319931 - protein, 113 aa, Zea mays
  unsure (1)..(113): unsure at all Xaa locations
  Clone ID: MRT4577_54846C.1.pep
TIEDGNNNGIVVLVTSQNEGAVTGGRAFIQAVGDQIRDATVSENRPFLATDEKYNEAILNTGNRLAAAIDGXPDTGGPSFKENNRXESTFESTEETEEKRGQFKLVVGGLLVI

SEQ ID NO: 319932 - protein, 92 aa, Zea mays
  Clone ID: MRT4577_54847C.1.pep
KPPKIHPHKPAVLGCSGSDPSADKRMISVSAISTSSLIPNSPLFIPAAYRHEEEFSPYWHYLVNTTAWFLYHWFLQHQHHDAAFSSADSELD

SEQ ID NO: 319933 - protein, 90 aa, Zea mays
  Clone ID: MRT4577_54848C.1.pep
GVCPWVRPGVEIRVVAIYSRNKFTSRSPQDSQFSTPACSTTSWSCLCIKPTGAGSPTNRAFSGPVGAFFRTSYPLRQGPKTEEKFLFAFQ

SEQ ID NO: 319934 - protein, 109 aa, Zea mays
  unsure (1)..(109): unsure at all Xaa locations
  Clone ID: MRT4577_54849C.1.pep
AAVQAYRLLQAIAXSVLQRRIAQLQHQAVAHLTIQTIASQQQQQCLPALXSKCAMVPLLTXLQRVLIGYNXLARANVVSNQQQQQLQQFRTALSQLAMVNPAVYLQQQQ

SEQ ID NO: 319935 - protein, 113 aa, Zea mays
  unsure (1)..(113): unsure at all Xaa locations
  Clone ID: MRT4577_5484C.1.pep
VPPLYSRFFPRVLRRGWNPKEDEGVLNLLVDMPGLGKEHXVMVWAEQNILVLKGXGQKEDIQDEASPASRYRCRIELAPEVYRIDKINAEINNGMLTAVRPNVKEQLLKDVFT

SEQ ID NO: 319936 - protein, 53 aa, Zea mays
  Clone ID: MRT4577_54850C.1.pep
LSLTFWFWWELSTNKSLVHLCLSCTDTSRFRPTSSTLLYPFYISREERVIHVC

SEQ ID NO: 319937 - protein, 46 aa, Zea mays
  unsure (1)..(46): unsure at all Xaa locations
  Clone ID: MRT4577_54851C.1.pep
HWYVXQGMEEGQFSQAREDLAALEKDYEEVGVQFHQGKDDPQGFQY

SEQ ID NO: 319938 - protein, 125 aa, Zea mays
  Clone ID: MRT4577_54852C.1.pep
CLMFLVITVVWSRSVALAALFTAGFGSVELTYLSACLAKVPHGGWLPLLLSLGTLLAMSTWHYGTKRKREHEAQSKVRLDRFLGLSAGMGLVRVPGVGFVYAGSAAAGGGVPPVFAHFVTNFPGV

SEQ ID NO: 319939 - protein, 82 aa, Zea mays
  Clone ID: MRT4577_54853C.1.pep
KVTKIQKIVSYSWRLPYSLLLAVLADWRLVSEHPITEGDLAFLQMVFVKTNPHVHGSSSNIFRWVSQHISKAWPTKYLVYDI

SEQ ID NO: 319940 - protein, 92 aa, Zea mays
  Clone ID: MRT4577_54854C.1.pep
IHLSGNLTDTLVQPTALSNHLCPTQHCHWHIHTAARYISKMERALQASSRAHIEFGSSLPLTRVDFESADGSITYTNVRADILHSLRCQPKP

SEQ ID NO: 319941 - protein, 119 aa, Zea mays
  unsure (1)..(119): unsure at all Xaa locations
  Clone ID: MRT4577_54855C.1.pep
GPPRPPPGRPWSDQPVRNAVPXRDQRGERPPMGPSPPGTPPARGGPRPPPMGRPETXTGPGPPPRGPPAXPPPPKPSPEEXLTGRWKDQPAPPPXYPQELGPHSSRRKGAGTAWTRAPP

SEQ ID NO: 319942 - protein, 82 aa, Zea mays
  unsure (1)..(82): unsure at all Xaa locations
  Clone ID: MRT4577_54856C.1.pep
WMPYHGIALIIHVRFTHSSSVYVDIVVLRVGXYRPLYAAPIVGRALIEVATASVLMVCIICGHTCLTTHMCLLVPILSVYHC

SEQ ID NO: 319943 - protein, 72 aa, Zea mays
  Clone ID: MRT4577_54857C.1.pep
FPLFYPLVFWPIFPGPLSFRFRPWFLASFKKNKGPQPVFFLKPVIPSQFFPFSIFLGNIGGVKAGKNPVTGL

SEQ ID NO: 319944 - protein, 87 aa, Zea mays
  Clone ID: MRT4577_54858C.1.pep
VTTPNPVPSPTSRRTQLSCDPSVDVARPHSAVAVAVVAAVLLLAAAATTLEAAITCGQVSFVIAPCLFYARGTGSVPSASCCSGFRN

SEQ ID NO: 319945 - protein, 33 aa, Zea mays
  Clone ID: MRT4577_54859C.1.pep
VFHLVIQCILVLGKILHHPVNNWVVVIIYAFAT

SEQ ID NO: 319946 - protein, 114 aa, Zea mays; identical to SEQ ID NO: 226435
  Clone ID: MRT4577_5485C.1.pep

SEQ ID NO: 319947 - protein, 336 aa, Zea mays
  unsure (1)..(336): unsure at all Xaa locations
  Clone ID: MRT4577_54860C.1.pep
MPILRQIFRLLRRPGVAISHDPLRRLSSTSRPLLSFMASAPPYWSPQPLARRSFPLMMVPDLPVRRVSRFPPGSRSMTSGTTLQDMNTIAGKHDASSNIVDISGCDENGRSATNRRSALVASDAEEDDDVLDLGILPKSTHRDGSLYRNTHLWKRDYNVDDPSETRLPDPTDCDIRNGECIRHLPNRVLQIFSLKLAELTVDLGPVELYGYIAVRDYLDTLRNYVVNISRDDPIIVKQGSLIDMAGPKRGIDLISTILVEYDMRIKVGEEERDDYQLIDGVTDIDDLXPWNCALKNRIQGDCGAXDLTIARVDDAVMAXIFEVFVLEVQSSFDLWL

SEQ ID NO: 319948 - protein, 349 aa, Zea mays
  Clone ID: MRT4577_54861C.1.pep
MMGGYENGESTGAAALADGGVILGVDGGTTNTVCVCLPAAMTPPESPATVPVLARTVAGCSNRNSVGENAALETLEQVMTQALALANTDRSAVRAVCLAVSGVNHPSDQLRMLEWIRDLFPDNAKIYVENDAVAALASGTMGKLHGCVLIAGTGCIAYGVTEDGKVARAAGAGPVLGDWGSGYGIAAQALTAVIKAYDGRGPQTRLTRDILEKLDLSSPDEIIGWTYADPSWARIAALVPVVVSSAEDGDEVANKILHDSVQELADTVIAVVQRLRLCGEDGKDMFPLVLVGGVLEGNKKWDISGEVIKCISKVFPGTDPIWPEVEPAIGAALLAWSHHHKGLKLENGS

SEQ ID NO: 319949 - protein, 78 aa, Zea mays
  Clone ID: MRT4577_54862C.1.pep
AGAGSPPMPFLILGILLPSRRSSLFLSWRPRRPTTGDRLRRVLRRGRVSTRRRSAGLVRFHCVSDCVRLSRGQDDATT

SEQ ID NO: 319950 - protein, 110 aa, Zea mays
  Clone ID: MRT4577_54863C.1.pep
GGAPFWGFHKRVLKGFGTTLGGVKKIKNVLGVKDGVFPWVPPNFAGLWFPNKWGHQAFFLQGLEKLGFPFGGAGAASACFVKFLGVCPGSRFDPWGIFPNFCWGGRFPSP

SEQ ID NO: 319951 - protein, 84 aa, Zea mays
  unsure (1)..(84): unsure at all Xaa locations
  Clone ID: MRT4577_54864C.1.pep
IAPCDPNAKELANREYTPCKASKEWVWKXQADVMMNGAFFSESGGLNERKYVRFEFLVAXPVRFVGQVTCFVGPLTCIVGQLCY

SEQ ID NO: 319952 - protein, 99 aa, Zea mays
  unsure (1)..(99): unsure at all Xaa locations
  Clone ID: MRT4577_54865C.1.pep
LVGLDWSGPXINCKSYMGSLLCTLHAIMVASLIQSSVKLVQAVMLCSACVVQWPYIVRTYAKVVLECVILNALYDLISHITLTAQVRHLCPVCLLAVCN

SEQ ID NO: 319953 - protein, 72 aa, Zea mays
  Clone ID: MRT4577_54866C.1.pep
GRGSIVDWELSSFICGQCNSLVSCLTSNICPWIDASTIHSVLNADSHFIIQMATIYHIHGLRIPYAKPYDPS

SEQ ID NO: 319954 - protein, 96 aa, Zea mays
  Clone ID: MRT4577_54867C.1.pep
MKSSTLVAILVLQTVMVMGILSQAAAKDNFPKCCDNCNSWSGYQFCDDVGPRCRRGCANCQVVQTSPVKTFRCGDGRPVYDGHDTPTPCPPPCKKH

SEQ ID NO: 319955 - protein, 81 aa, Zea mays
  Clone ID: MRT4577_54868C.1.pep
YPRLFFIPALLLAFQLPTGDYLNAITAPDYMIQPEFNVQKFLFPSRGITCSKISLLRRTKRFMQPNNLDKKLKTVVPNDPQ

SEQ ID NO: 319956 - protein, 86 aa, Zea mays
  Clone ID: MRT4577_54869C.1.pep
MEHRALLLGVALAFLLASGSQGLNHEGWLLLALKSQMNDTLHHLDNWDARDLTPCIWKGVSCSSTPNPVVASLDLSNMNLTGTVAP

SEQ ID NO: 319957 - protein, 45 aa, Zea mays
  Clone ID: MRT4577_5486C.1.pep
VLTLEIGVVSVILPVLEVVRADVVGERTSRWSPRAGKARSLTADS

SEQ ID NO: 319958 - protein, 48 aa, Zea mays
  Clone ID: MRT4577_54870C.1.pep
LQSLCEHICLHIAGKCHTSISRTLPDYCTLLIHISIVKIHIQCDSGYH

SEQ ID NO: 319959 - protein, 54 aa, Zea mays
  Clone ID: MRT4577_54871C.1.pep
FRQRNRLIHLELSCKMVHMSYQECVLLLIHNTVKMLLLLSFEAHSVAKEYRNNL

SEQ ID NO: 319960 - protein, 50 aa, Zea mays
  Clone ID: MRT4577_54872C.1.pep
KITFKATSLFSFHNDRVKHSIIQNQNKNLGGLDWFCAYKLDITHHTKTDL

SEQ ID NO: 319961 - protein, 683 aa, Zea mays
  Clone ID: MRT4577_54873C.1.pep
MTRGLGAAPVSSCLALGAAAVVLLVAAALPSPASGVDVTAVLSVFPNFADFARLLASTPVASELSGRSSLTLLAVPNANLPQSPSAFVASAGADIADVLRYHVLLEYLSPSDLARLSPSGKLVTTLFQTTGRAPSDFGAVNLTVGGNSTVVVRSPAPSLGSNATVLGAVTAVPYNLSVLAVGGLIIPSGFDLAASESRPPPPVNITRVLTDARGFNVAASMLQASGVASEFEADEHGAGITVFVPTDDAFAGLPATDRLQSLPAERKAVVLRFHVLHSYYPLGSLESSTASATSSTLIDAWGERFVALDRGSLRHPQWQEVAEVVSSRDSYSKAPKSDVQCKNRIDTLKKKYKVEKAKHDSDWRYFDRLDDLLAPVLLKPNSSSSSAAAAAAAAAAARSAGPMVPPRINFPQRTRTPLHSSAGAKWRMPSPLLQPSASSDSSDGFPPSAVANGKRQRVEEPAAAAADNGAESSVSRAQGLRELAQAIRRLGEVYERVESAKRDQELRMERERLDSARQLEEQRVQFSTSMPRSSRITRTAQAPPGAMTTAATRTRKLRRMRKTKRKRASDCSPLQQWNGIVQASITRTVFDQNPVAVFAVSKVLLPKEMFGRGDSGNTAMAPPSVAMAPRDAGSEKTPQTRLSSPPDLHSEDSESSASLLTAKGTWWCIGLMYLQLHLLLSLV

SEQ ID NO: 319962 - protein, 61 aa, Zea mays
  Clone ID: MRT4577_54874C.1.pep
FPLPPLFSWGFFFIFPGVPKSRGKTGLPRPGTPCVTHPSHYGAYTMCKKARCLSRAKHCFC

SEQ ID NO: 319963 - protein, 430 aa, Zea mays
  Clone ID: MRT4577_54875C.1.pep
MGRGLGAAPVSPRLASLGAAALALLVAAALPSPAAGVNATAVLSAFPNFADFARLLASTPVASELAGRSSLTLLAVPNANLPQSPSAFVAGAAAGADIADVLRYHVLLEYLSPSDLARLPPSGKLVTTLFQTTGRAPSDFGAVNLTVGPNSTVVVRSPAPSPGSSATVLGAVTAVPYNLSVLAVGGLIVPSGFDLAASESRPPPPVNITRVLTDARGFYVAASMLQASGVASEFEADERGAGITVFVPTDDAFAGLPTTDRLQSLPAERKAVVLRFHVLHSYYPLGSLESIVNPVQPTLATEHTEAGHFTLNITRVNGSIAIDTGIVQASITRTVFDQNPVAVFAVSKVLLPKEMFSRGDSGSTAMVPPSVAMAPGDAGTEQTPQTRLSSPPDLHGEDSESSAALATAKGTSWWCVGLMYLQLHLLLSLV

SEQ ID NO: 319964 - protein, 72 aa, Zea mays
  Clone ID: MRT4577_54876C.1.pep
GFEIFLLPERGGGEKLILPHNTMGVGVTHRFAPPQNQLVAAAVGFSLRCALVKGFCFSSLSPVMSVVSHPVL

SEQ ID NO: 319965 - protein, 57 aa, Zea mays
  unsure (1)..(57): unsure at all Xaa locations
  Clone ID: MRT4577_54877C.1.pep
PXRNSPYLSSLSSSTYNLHQTGFLIYRERLLFIFHSYFSFLLITHNLPLFIVLYSNT

SEQ ID NO: 319966 - protein, 54 aa, Zea mays
  Clone ID: MRT4577_54878C.1.pep
IVSSFLLLQKKCCKDSSGTCIYVHVQCVLELESMGQRVHVFKVAINIAVILHSK

SEQ ID NO: 319967 - protein, 156 aa, Zea mays
  unsure (1)..(156): unsure at all Xaa locations
  Clone ID: MRT4577_54879C.1.pep
TRRQQDPAGSVRPPVPRRIVRPSGRHLQWRPLDQRSPAPRISSGRDSGSTSRYIRSPPGRACRPLPPGGRQEFGPGVGGSRRRSPAPGVRRRXRRQXPTPRRDAPPERLQGPSWWPPPPGGPVPPAPPGTVGSAPPASSLSPPPRAHAWPASRLAR

SEQ ID NO: 319968 - protein, 105 aa, Zea mays
  unsure (1)..(105): unsure at all Xaa locations
  Clone ID: MRT4577_5487C.1.pep
MGAKIWGLLLLLGGFASAATATILPQCSHAAISRLLPLHHTRTVSSVXRKPQFXPYRMDQAFSAGILPLSPLFLXQQSLFLLQELPLXVHLLVHIIMVHQLQQLV

SEQ ID NO: 319969 - protein, 241 aa, Zea mays
  Clone ID: MRT4577_54880C.1.pep
MASRAAAAAVVVLALVCAAQSSLSAATAGGLSPDFHAVTCPPLEQIVAFHVGEAFKNDSGVAPALIRILFHDCFPQGCDGSVLIEGPGTEQDEIPNKTLRRVALDLIDRIRMRVHSACSRTVSCADITVLATRESLVLAGGPRFEVALGRRDSFFPASPVQVGLLPAPFHPVDKLIKSFGDRGLNVTDLVSLSGAHTFGVAHCGAFDDRFKNVFDTNPAIDPKFATGLRNKCAKDTPGGTL

SEQ ID NO: 319970 - protein, 72 aa, Zea mays
  Clone ID: MRT4577_54881C.1.pep
PRVRPRVRKKKKKKKKKKKKKKKKKRREKKKQAPNKKSNINKKKKKGGGPLKGPKLTPRAWRRYTFFLGPPK

SEQ ID NO: 319971 - protein, 44 aa, Zea mays
  Clone ID: MRT4577_54882C.1.pep
HIILDRNTQRSHGFSLVTFSTEEAMQNAIEGMNGKELDGRNITV

SEQ ID NO: 319972 - protein, 95 aa, Zea mays
  Clone ID: MRT4577_54883C.1.pep
RCRKSRSPLKDPHPRPYAMAIWKLAWNDHQGHSLHCTASHHRSHQQLHPRRHQYRPSPAMIPESSQTSYERVSFTLELLVLEEYPMSAAKIRILR

SEQ ID NO: 319973 - protein, 67 aa, Zea mays
  Clone ID: MRT4577_54884C.1.pep
PSSSVVCLHVQYPQRACWLLAICHNASSFRVNGSAVAYRSLKKNLGRPPTNKTRRPGYIIPSRLLHA

SEQ ID NO: 319974 - protein, 91 aa, Zea mays
  Clone ID: MRT4577_54885C.1.pep
GEPVLEDLARREEEEAGATGVRAAVGARRLEQELGSREAAEELSDGEKDGAPDAAQQPVSVAAPDGRIARIGSEARIVSDDEGGDGSYVDT

SEQ ID NO: 319975 - protein, 78 aa, Zea mays
  Clone ID: MRT4577_54886C.1.pep
KYPASPGKKTTRGSLTNRLTLEHKPSHIHFERGIFLAGNKPGGGAHTHKNITLWGGNPKRTIDCPLLQTHKIVLYGGG

SEQ ID NO: 319976 - protein, 53 aa, Zea mays
  Clone ID: MRT4577_54887C.1.pep
HDGGQRLHQAVPRCAPRPRTPSVRGRRPRPRLDVDVLGRPLPDGVPDQVPVAC

SEQ ID NO: 319977 - protein, 152 aa, Zea mays
  Clone ID: MRT4577_54888C.1.pep
GLQPRSAPPEIAAAVQPPARDTRRPLHQCAKTSSSYLPTSNPNPKPPRERATKQNKQPPPDTATLRPHRHSHSSAKLVHGLPHRGHDEGLYRARATMTAVFKSIFGWDPTSLHTSLAMALMYNMSLVASSHPIDPTRARPNSTRPPPLFSVA

SEQ ID NO: 319978 - protein, 52 aa, Zea mays
  Clone ID: MRT4577_54889C.1.pep
QVDCFVFLILCEFINVPEAFTYTSLAFIISIISAFLSDEKNYKVLSVFIATM

SEQ ID NO: 319979 - protein, 80 aa, Zea mays
  Clone ID: MRT4577_5488C.1.pep
CGSFLAGGVGSGSAGADFGVKVVDQRVRPAGREADGAHVARLFRVVVGACRSHREGDGAAKGGPHGDRWSVGASCDACFA

SEQ ID NO: 319980 - protein, 118 aa, Zea mays
  Clone ID: MRT4577_54890C.1.pep
WGALRRALVSGYGRPGRGDARLAMHQRSVESLSIAGGPSCTYCYLWHVTPLNSCGCRGPPYKGTFQHKAPRREVSQTIYDLLRQHVLRVMALSLRLWHHSHAHQRSSRSTLWSTAMWH

SEQ ID NO: 319981 - protein, 104 aa, Zea mays
  Clone ID: MRT4577_54891C.1.pep
ERSLDPSFLPRSARPWPGDQASRTRHCWPRWAPAANRGAELATQADVVACRDPAHVRACHREAAEAPNAFRVPALDPSTPCPTFSGRTDGLLRKAHEEECYVIT

SEQ ID NO: 319982 - protein, 77 aa, Zea mays
  Clone ID: MRT4577_54892C.1.pep
GGGSVRLREPSTDPIGSRSCSLCQELHWQNICPQECSTSVIRLHSNEPCHLFFISNTPLLVALMPNVIYDKACLNIL

SEQ ID NO: 319983 - protein, 77 aa, Zea mays
  unsure (1)..(77): unsure at all Xaa locations
  Clone ID: MRT4577_54893C.1.pep
MKLVLVGLAFIALESSGSCTQTGGXCRCGQQQRXRQKHHPQQHHSQKPQHQPPPPHDQXEXHQPQQVFMASPKHEAQ

SEQ ID NO: 319984 - protein, 105 aa, Zea mays
  unsure (1)..(105): unsure at all Xaa locations
  Clone ID: MRT4577_54894C.1.pep
PPPXXPPGXXNLLPXGXXVXPXRAEAAVLLXRPPPXLAARGASXSAPAQRGAPXXPPQRDXRXXRRRPVXHRDXXQHPEPPRXHRDXRHHSXLXXXNRXVFLSEP

SEQ ID NO: 319985 - protein, 47 aa, Zea mays
  Clone ID: MRT4577_54895C.1.pep
SVILDVALLTVIQCTLSHIPVGSINPIDFLGMSQKLLVSLRTLSIKI

SEQ ID NO: 319986 - protein, 83 aa, Zea mays
  Clone ID: MRT4577_54896C.1.pep
RRERGKLAAAWRRAEAERVCLSFTGLAHDARPSAGSSRVADISEGFGIMKHLGETGFYHASEHGCKHAKLMRNLTTLCNWWRT

SEQ ID NO: 319987 - protein, 28 aa, Zea mays
  Clone ID: MRT4577_54897C.1.pep
GHSFGLECGRVPFKKKPYCINNKVLFNC

SEQ ID NO: 319988 - protein, 118 aa, Zea mays
  Clone ID: MRT4577_54898C.1.pep
SDSCLQISVAVRYSVRPAQPGYPDSSVLLDECHRAVAREYCSSWASCRLLMLRGIWTRPRLGTLRISLLLMFLCEFHINPDAAVVCPPLFSRVSVISWIASGGLFCKVRRSSGLWSLT

SEQ ID NO: 319989 - protein, 187 aa, Zea mays
  Clone ID: MRT4577_54899C.1.pep
MQSGQQQARRKNAQVLDGSDIRELVESKEAFAKFVENKFRHLDADGDGRLSLTELQPAVADIGAAIGLPARGSSAQADHIYSEVLNEFTHGKQDSVSKPEFQHVLSDILLGMAAGLKRDPIMILRMDGEDLNEFVESTAYEAEAVAIFSQIESGNASLRQCLPAALRQLTVDHGMPPASDSLYGEGH

SEQ ID NO: 319990 - protein, 127 aa, Zea mays
  unsure (1)..(127): unsure at all Xaa locations
  Clone ID: MRT4577_5489C.1.pep
KSMRILLYLHSFSQSLDYFQTISNCRYNRCAHAHNPSFQVHHQTPQHLPQQPHQSQMEAGRRDQPWNLVVEVCLAPIRSRFRFDVLMQKLSLSWRRRGAHALGGEGGEKREGLAGVFFIPXRPARRS

SEQ ID NO: 319991 - protein, 86 aa, Zea mays
  Clone ID: MRT4577_548C.1.pep
KRGPTNYFIRDKLGYPEQTTFKKIEHNSWVYLSIHIGPAWFETSIWSCPKTKKGGLFTFLVSTILAPHLFATYWWHFKDRQKTTHP

SEQ ID NO: 319992 - protein, 134 aa, Zea mays
  unsure (1)..(134): unsure at all Xaa locations
  Clone ID: MRT4577_54900C.1.pep
ADLDACLIAKTNMGWLXHRRLAHVGMKNLPKLVKRGHVLGLTDVCFEKDRPCTTCLVGKXVGPSHPSKIVMTTSRPLELLDMDFFGSVAYLSIGGSKYGLVIVDDYSRFSWVFFLQDKSETQKTLKRFLRWAQN

SEQ ID NO: 319993 - protein, 124 aa, Zea mays
  Clone ID: MRT4577_54901C.1.pep
GAPPVRGGAASGGAAAARDRRRRARAGRRRAEGLAPPLHHAPRGAPPPPPRPPPGARAGAAPRGAPPRARARAPPGAPPPPPPTPRPAPPPPRPAPAPPPPRALRGGRVGGRWVRQLAMTRLIK

SEQ ID NO: 319994 - protein, 46 aa, Zea mays
  unsure (1)..(46): unsure at all Xaa locations
  Clone ID: MRT4577_54902C.1.pep
LLAMTPICVGSKLNXSPSTSXPTKYLTTTTEGHLKNHYIYTIILTI

SEQ ID NO: 319995 - protein, 105 aa, Zea mays
  Clone ID: MRT4577_54903C.1.pep
VVTGVDIVMNHHLQETSFTKEAYKKYIKDYMKSLKGKLEEQKPERVKPFMTGAAEQIKHILANFNNYQFFIGENMNPDGMVALLDYREDGVTPFMIFFKDGLEME

SEQ ID NO: 319996 - protein, 86 aa, Zea mays
  Clone ID: MRT4577_54904C.1.pep
GLPRWTRCQWFTGPIRAIYREVNRLVLLRVTNQDKRGLLNNGAATAPEATVVTQAPGGSTDALMAGRCESAYVQGSGVWTIQAHGP

SEQ ID NO: 319997 - protein, 69 aa, Zea mays
  Clone ID: MRT4577_54905C.1.pep
KRSCDPCAIEFNVYLLLAGYLVARHHARNKHMLDVRIGRPGVLGSCELYRMLSHIVFKGFTHTICSFGP

SEQ ID NO: 319998 - protein, 268 aa, Zea mays
  unsure (1)..(268): unsure at all Xaa locations
  Clone ID: MRT4577_54906C.1.pep
MEATPISMKPPAPPPVTLEPIELSTHAVGLTELERSSMNQLAIAPDPKRQRVEEAADGNGCKHCACKKSRCLKLYCPCFAGGGYCSDKCGCQPCFNKEAFSETVQTTRKVLLSRQKRMSMKINRRPEANAEPMEDAHHSSSSTPPRRGCNCKKSSCLKKYCDCYQXILFSGSLLSRRDKITKLIVVDXGGTGCSLFCRCDDCQNPFGKNDGIIADDNPTPSQGLEQRRARVPAGGIPVAGAAPLVALFTEGTQRQGDGRLPTALELEP

SEQ ID NO: 319999 - protein, 356 aa, Zea mays
  Clone ID: MRT4577_54907C.1.pep
MEATPISMKPPAPPPVTLEPIELSTHAVGLTELERSSMNQLAIAPDPKRQRVEEAADGNGCKHCACKKSRCLKLYCPCFAGGGYCSDKCGCQPCFNKEAFSETVQTTRKVLLSRQKRMSMKINRRPEANAEPMEDAHHSSSSTPPRRGCNCKKSSCLKKYCDCYQDGTGCSLFCRCDDCQNPFGKNDGIIADDSKRYLYTGADLDHSEGEHDFVVERSPRLQSPMSKESSFHQTPPHLRASSRDAHVFPQAVSQWQALPRSWHCSNKRNGNDRAMDDSSANGNYKSSSHDWQMSKLEDGYSISRCVQILNGMVELSQVEKSVAPDVFLLPGNREIFVSLGGDVRAMWLKRKIQHLA

SEQ ID NO: 320000 - protein, 364 aa, Zea mays
  Clone ID: MRT4577_54908C.1.pep
MEATPISMKPPSPAPAAPPPATLEPGDLPTHAFGGTELEPSSMNQLAIAPDPKRPRVEEAADGNGCKHCACKKSRCLKLYCPCFSGGGYCSDKCGCQPCFNKEAFAETVHTTRKVLLSRQKRMSMKINRRPEANTEPMEDAHHSSSSTPPKRGCNCKKSSCLKKYCDCYQDGTGCSLFCRCDDCQNPFGKNEGIMADDSKRYLYTGADLDHSEGEHDFVVERSPRLQSPISKESSFHQTPFISARPHLRASSRDAHVFPHAISQWQALPRSWHCSNKRNSSDRAMDDSANYKNSNHDYWQVPKHEDSYSISKCVQILNGMAELSQVEKSVAPDVFLQPGNREIFVSLSGDVRAMWLKRKIQHLA

SEQ ID NO: 320001 - protein, 187 aa, Zea mays
  Clone ID: MRT4577_54909C.1.pep
MDAEAARRKQVAPPQEKRKRGRLELRRIQDRTSRQVRFSKRRSGLFKKAHELSVLCDAEVAMVVFSPAGRLYHYASLGTSIEKTFCRYWDLANTDIDLNIEARDSRDNYNTQFPENGQPAEGSLSDLLIMMDQWSMEENLNGLSMAGIAGLEEALTVALAVIRNKLAMKVTGCGGPKPEAHTLFQRR

SEQ ID NO: 320002 - protein, 83 aa, Zea mays
  Clone ID: MRT4577_5490C.1.pep
EYNIQKEGSPPPWGPYLRWSESHGEFNTPMCLGRLGPPPQLEVVKEYPVWVKNRVSVGLKMDRFFCVWGLPPIMTNHEKVLCF

SEQ ID NO: 320003 - protein, 50 aa, Zea mays
  Clone ID: MRT4577_54910C.1.pep
PPVLVWTHEICSWMVAVETELKMVLPFHPRSINAPYPVDVSKLCFLVHNL

SEQ ID NO: 320004 - protein, 165 aa, Zea mays
  Clone ID: MRT4577_54911C.1.pep
PSSSAGLPHAPLARPLQIPNPTHRPPHHRRLSSPPAAPAPDRGGTHNGRLVVTARRGAPRALPDRPPLSRRRDGVGSAGGGRYPRDRYPARPEDHHSFRRVSDDPTLTSLDLIDSGAVRKSHWPGETASDRSASLHLSRCWTPSSSCQLSTVLRPRRGWTSATAA

SEQ ID NO: 320005 - protein, 231 aa, Zea mays
  unsure (1)..(231): unsure at all Xaa locations
  Clone ID: MRT4577_54912C.1.pep
IHIAQELGEIPNPIPNGSMASTPEIYSLPESQTQDLSRCTDQMLISILREHRASELDAVHHLWQDINALSGEVDQMDSWCLLRQNVCSQVVEALKTVLGTWLPKKMVSIRNTSQGNSPNSPKFVGTKTTMEFKHTDGSKAVVGMTRYNLLTTREDGDGLNLDEDLALCHVFPLXGKAKGTRNRNGKRSRSGHEVDPHEPITHAGVERLHQMMSDSQRIHYRXGHGWSSALG

SEQ ID NO: 320006 - protein, 248 aa, Zea mays
  Clone ID: MRT4577_54913C.1.pep
MGFDVIEALAIASLFWRRSGQTNAKMDMRRSFGAAPTDFRVPFTITVAVLRRRLPSSSSQLEDHHADQPCEDFIQDEKRVVYNTMNPSMQLGYLFPNMKEFRIAMRQYAIKHEFELGIDVTSTTRYVGYYKGGDYPWRIYAREEKKGLPTSMVVVLNDVHTCTSSGRRKTTTPTSGWVAFHAKPMLMKKPQILDVNMILEIDIFLCNNQMMKLNRTWQHVITLNPNLATKTRRTNIGVHEFDNTYDIC

SEQ ID NO: 320007 - protein, 270 aa, Zea mays
  Clone ID: MRT4577_54914C.1.pep
MSSSFTRNTFSIPAGAEGHERIVMWSYIPKASLSPSDAASPVIIMANGLALPRSAGLPHIAARFANAGYTVLLFDFRHLGDSTGQPRQLVSQARQLEDYMTVIRFVTDSDSNAQVFCRKNIPASEVVLWGWSNSGGHVAKLATQADKLPISAVITLDPLCDGWANLRHHMWHNPLGMARIGHWILGDFLLSFLPVLNKQTTLVVPAFGPGGMLSSEAEHGFQMMSSSSATESSAAQEGRVHEELENHGIGKGPSVVNEIARYFECSCSDA

SEQ ID NO: 320008 - protein, 61 aa, Zea mays
  Clone ID: MRT4577_54915C.1.pep
GSCHGAAYNPRRKAVVSSRQDGSSRSQVKVSHVVMVSATVQPYPERPAMKPVSGPHSARVK

SEQ ID NO: 320009 - protein, 130 aa, Zea mays
  unsure (1)..(130): unsure at all Xaa locations
  Clone ID: MRT4577_54916C.1.pep
MVPKYNGVYLHDKIKHLTHDVQSXDTVXNVMVXAFHVXYLATPSLFXSTYGXAPTSHYKNAHFFDICINTXSAPTYLLEHFFKTDATDCSSXREYQLDGLCDSAVNNLTMVAMSMLTKEVHRRNPNFNAG

SEQ ID NO: 320010 - protein, 39 aa, Zea mays
  Clone ID: MRT4577_54917C.1.pep
PASVFNLSDAMSHLHCRMLEYVSVDPLSSPPAWILTYVW

SEQ ID NO: 320011 - protein, 71 aa, Zea mays
  Clone ID: MRT4577_54918C.1.pep
HDQQPEGERDGCVAIQSRHDRRSERGHARQRKTWPEELILIRRSMPSLTRTEEKRATYLTSTMATTARAIP

SEQ ID NO: 320012 - protein, 49 aa, Zea mays
  Clone ID: MRT4577_54919C.1.pep
STVKVGGRCMVCSVLMVHWTLLVATYRYRCSGSQSKYWYLVIVCRSYVG

SEQ ID NO: 320013 - protein, 43 aa, Zea mays
  unsure (1)..(43): unsure at all Xaa locations
  Clone ID: MRT4577_5491C.1.pep
SXPMATAEVQTPXNXIYRHRINHFHPLNLFNISPRGCPQLQSL

SEQ ID NO: 320014 - protein, 97 aa, Zea mays
  unsure (1)..(97): unsure at all Xaa locations
  Clone ID: MRT4577_54920C.1.pep
WSRLFQQGLTPSPRAVHTGARLGENWDIYGGGNNKKGVSETLVLNMSTLTWSVVITLERHVPLATEGMTLVHINYTGYDYIVSFXGYTGRYNNAVYT

SEQ ID NO: 320015 - protein, 116 aa, Zea mays
  Clone ID: MRT4577_54921C.1.pep
MDFFNQAKAVRMRNVHDKYLTADEDEETVTQDRNGSDKRARWIVEPVRGSFEVIRLRSCYGNYLTASNERFLLGATGRKVVLSKPARLDSSVEWEPVREGSKMKLKTRYGNLLRAN

SEQ ID NO: 320016 - protein, 111 aa, Zea mays
  unsure (1)..(111): unsure at all Xaa locations
  Clone ID: MRT4577_54922C.1.pep
KIQQHDKQKPDKTGTKKRKKKNRNLTRGAVPRGAPCGSPSHXXPGGGGFFSPPLALSFCALLFSVPLLSTSLLGNPLGPPPYSLCPAFPFPRLWLSRGAPHLSPFSTFFAS

SEQ ID NO: 320017 - protein, 54 aa, Zea mays
  Clone ID: MRT4577_54923C.1.pep
GRTFSDSIILGHFPSGMPRTNISIEVNKSTSRTKNERIDSTPFTYIYCTALHSH

SEQ ID NO: 320018 - protein, 47 aa, Zea mays
  Clone ID: MRT4577_54924C.1.pep
SLSSSIHGACLFTRYLGRQMIWRTSFLETDACAMCLLQVCNSRSSRG

SEQ ID NO: 320019 - protein, 52 aa, Zea mays
  Clone ID: MRT4577_54925C.1.pep
TRTLLQACFRNPRGIDAPSDGALCFGVACSQYHHQGRLRLSAAEVLTMHLPK

SEQ ID NO: 320020 - protein, 71 aa, Zea mays
  Clone ID: MRT4577_54926C.1.pep
KRTRGRGDHMTIQLFFNTLQQVLDPLTHHGNYKQTANDAKGPLIRSRGPLHFGPKKGGGRKKYRLQKKTLL

SEQ ID NO: 320021 - protein, 212 aa, Zea mays
  Clone ID: MRT4577_54927C.1.pep
MGSSRPAGGCPYPPNWFAKHSSLVPMETTLPMVRGNGRLLPLSLLLLAAADFTTVHGQGQQPEGPYYSRSFNPSMAIVIVVLIAAFFFLGFFSVYVRHCYGDGSSGYSASPAPGGAAARSRRQQRGLDSAVLESFPTMAYADVKAHKAGKGALECAVCLSEFDDDETLRLLPKCSHVFHPDCIDTWLASHVTCPVCREASRLIAVDAEERPD

SEQ ID NO: 320022 - protein, 248 aa, Zea mays
  unsure (1)..(248): unsure at all Xaa locations
  Clone ID: MRT4577_54928C.1.pep
MAAAAARSGSRRLFSISALVPPKPPSPPPKADPFASLFVPGLSKRTVADGLRGAFAKSGEVVHGSLLTNLPASSVKKSRWYMINANRSGPLTVRKEYRKVLPSFIRPSASYSTQASEKRPKQERTDLTTVEDPFNAPTYNIPEKPVTFVEGASYSVVILAGLGVAALAGYAVFKELIFEPKEYKIFGKALARVQSDSQVTAKIGYPITGYGTESRNRAARQRIQNRVWTDXDGVEHVEVGFHIRGPHG

SEQ ID NO: 320023 - protein, 172 aa, Zea mays
  Clone ID: MRT4577_54929C.1.pep
MRPALFFLRSDEVDGCRESPGVGASGAGASAAWLRSSPCGSRGGGVCSSESGSCGGAKRVRSEKRSSSSGGGTDEAASASWRAADGSSGTAAGTGTESSAGAGAGAGAGTEVFGGGGLWREEDHALEERAAVFGPPHLCRPGTPSPPPDQSVALADGSGRVTTTKAGGGVTC

SEQ ID NO: 320024 - protein, 49 aa, Zea mays
  Clone ID: MRT4577_5492C.1.pep
SEDFTKPKHKGIASQIEIENPSLVKTKNVKVKDIDVCGTLGACFLCSQT

SEQ ID NO: 320025 - protein, 57 aa, Zea mays
  Clone ID: MRT4577_54930C.1.pep
KNPTVTVQFFKASVNMLLFGYDIRWYPNTISIGSGARRCGFLFLSLTTCVQACRTCL

SEQ ID NO: 320026 - protein, 58 aa, Zea mays
  Clone ID: MRT4577_54931C.1.pep
VEMLGRAGEVEEAERLVAGMEARPDRVIFAALLAACRVHGRVDVAERVAGLMRRYAVA

SEQ ID NO: 320027 - protein, 97 aa, Zea mays
  unsure (1)..(97): unsure at all Xaa locations
  Clone ID: MRT4577_54932C.1.pep
FWQRLFLKLVDPIENRCKNAQVKAXPLKDFFKGIVGPKNVAKSFSPPEKNAVANEGKKTYQWLRGGSQLQKSLPKNVGPVLWSCEIQKKEKKLGSFC

SEQ ID NO: 320028 - protein, 58 aa, Zea mays
  Clone ID: MRT4577_54933C.1.pep
MDVCLYLHGHGVYQSCTQSVNGVSWMHVVASRVRRYEPMCALVSDYSIYVAMSCQCVL

SEQ ID NO: 320029 - protein, 60 aa, Zea mays
  Clone ID: MRT4577_54934C.1.pep
GAASGSPPRAHRLGGETGSGRVRFGEVVRCGAKRMAAGLALGCVGNSQESPLLGSFPPAG

SEQ ID NO: 320030 - protein, 60 aa, Zea mays
  Clone ID: MRT4577_54935C.1.pep
PVTEFAKFVQNNIPSPISEDGTWPPQLAKTKHRTCHGTGAFDRPPFAQRKHRVPDTDPLA

SEQ ID NO: 320031 - protein, 67 aa, Zea mays
  Clone ID: MRT4577_54936C.1.pep
PPWKVSGPSHKTSGSCWSSQKGGKKGPPRPQGVQGCLQKKIMRSGPCFNKTKFSPSQILFGVVPVIV

SEQ ID NO: 320032 - protein, 64 aa, Zea mays
  Clone ID: MRT4577_54937C.1.pep
SHKSAAALDRGGDILTEGGHTLVHNAELLTAPARANLHCHDTNDRDHTDLHAKRTNDKQKDAPE

SEQ ID NO: 320033 - protein, 225 aa, Zea mays
  Clone ID: MRT4577_54938C.1.pep
MPMEQASRHCDKDTLKMAMLKHEETFRQQVHELHRLYRIQKLLMRDLTRELKLKSQRSLPTTSPNGSCAEYSRGALGMCAYERLYAALGRGGHVAAAATPTPTPRTALGLDVVAPVVEYVRSAEEEDDDDRAEETDEDAELELTLAVGGGGAKKRYDEYPSGGESLSSSSTESDVLTVSGREWRRARGTPYHKMRPATGLDVVQVEDDVGVPPPLLFHWLSLKMA

SEQ ID NO: 320034 - protein, 103 aa, Zea mays
  Clone ID: MRT4577_54939C.1.pep
RLKMGRGGELFLRLPPKEMVYIASPQGGPGSSTPIKAVPPFQITKLGPISGVQIKVGKFFGKWIGRCWKNSPKFVNKWVVCYSIKKKDGLLVFFLKKKKKKKK

SEQ ID NO: 320035 - protein, 57 aa, Zea mays
  Clone ID: MRT4577_5493C.1.pep
LKVKILRVEPFMGQIEVLPSSQAGILRKPFHIVDHRVFCFEKSLTTPSSTVVLVLPA

SEQ ID NO: 320036 - protein, 54 aa, Zea mays
  unsure (1)..(54): unsure at all Xaa locations
  Clone ID: MRT4577_54940C.1.pep
SSFDKTNWVMRGDKIEGLRLLPTNLXYTTGSTAXNSXXXFKASAYNLFFFFSSP

SEQ ID NO: 320037 - protein, 65 aa, Zea mays
  Clone ID: MRT4577_54941C.1.pep
EHYPFYAINAQTITYRPIYFCYNAHERTPSWNKFFLRQFLALGSRVVFQGSHRVKLYNCFVGLGD

SEQ ID NO: 320038 - protein, 49 aa, Zea mays
  Clone ID: MRT4577_54942C.1.pep
MAPPNGQAVLFFRNRCGCPVVKLKGWGAPKTKGGNKKGTQGLFNDRGVR

SEQ ID NO: 320039 - protein, 95 aa, Zea mays
  unsure (1)..(95): unsure at all Xaa locations
  Clone ID: MRT4577_54943C.1.pep
AIALMIAPGYTAEVAPTXARGLLTYFPEVVNNLGILLGYVSNFVFARLPIHLSWRAMYLVSAQPTVFLGVAVLAMPETPRWLVMRGRIDDTRRVL

SEQ ID NO: 320040 - protein, 60 aa, Zea mays
  Clone ID: MRT4577_54944C.1.pep
IFVSLKKSIFCVGLSGTASLSKIRVCAFVSVDQLCDSDTFSVSAKSRNEKSSDLVIKLPL

SEQ ID NO: 320041 - protein, 45 aa, Zea mays
  Clone ID: MRT4577_54945C.1.pep
SYSYLPSQQLRILNLKWYAPFNSSLTTPSILFTLILSFPLFHSIP

SEQ ID NO: 320042 - protein, 415 aa, Zea mays
  Clone ID: MRT4577_54946C.1.pep
MEEAAPAAGRAEERKQRQRLSLAALPESSLLKLDDICRKADIVLVAARSYGLTGLVRVSVKEHCVIESKPDHFLDDLRLHNPWTELKQFAKSIDINDKDPVVHKHTPYIVVLVRLAEKWADAHDGNMPSTRQEKKEFKDLIRAHMLNVDEENYKEAVDSSYKVSVTPGISNEIHQIIDDDSAEVNSSSEDFWILVAALKEFISKEGNGELPLEGTIPDMTSLTEYYVSLQKIYQAKAEFDCLALEHHVKEILKQIGRDPDSISRAYIKTFCKNSRKLRICRYRSFKEEFSSPIVSEIQRYFSDEDCSYAMNFYILLRAVDRLAANYSRLPGIFDSEIDEDIPRLKTVAASVLSEMGLNGASLSQDLVTEMCRFGGAEIHPVAAFIGGVASQEVIKVSIDRPNLPWPVFLRRRGCR

SEQ ID NO: 320043 - protein, 237 aa, Zea mays
  unsure (1)..(237): unsure at all Xaa locations
  Clone ID: MRT4577_54947C.1.pep
MAAAAAVVAEPKTKYDRQLRIWGDQGQTALEKASICLLNCGPTGTEALKNLVLGGIGSVTVVDGSKVEASDLGNNFMLDEGCLGQPRAKSICSFLQELNDAVKAKFVEEFPTHLIDTNPSFFSQFTVVIATQLQESSLLKIDCKSXLADIVLVAARSYGLTGLVRVSVKEHCVIESKPDHFLDDLRLHNPWTELXQFAKSIDINXXDPGVHKHTPYIVVLVRLAEXWADAHDGTCLH

SEQ ID NO: 320044 - protein, 89 aa, Zea mays
  Clone ID: MRT4577_54948C.1.pep
KEEPKLKNKKNKTCVLRHKKTQDNSSFAFQDSLIILGACTLWNHRNKCIFGGCNPSMSLTLRAADEKRRRWEVAGAKGLAHLVAPLVEP

SEQ ID NO: 320045 - protein, 84 aa, Zea mays
  Clone ID: MRT4577_54949C.1.pep
MAAAASALVAEPKTKYDRQLRIWGDQGQTALEKASICLLNCGPTGTEALKSLVLGGIGSVIVVDGSKVEASDLGNNFMCNFFAM

SEQ ID NO: 320046 - protein, 455 aa, Zea mays
  unsure (1)..(455): unsure at all Xaa locations
  Clone ID: MRT4577_5494C.1.pep
MRIEEVQSTSKKQRIATHTHIKGLGLDANGMAIALAAGFVGQAAAREAAGLAVDMIRQKKMAGRAVLLAGPPATGKTALALGIAQELGSKVPFCPMVGSEVYSSEVKKTEVLMENFRRAIGLRIKENKEVYEGEVTELSPEEAESTTGGYAKSISHVIISLKTVKGTKQLKLDSSIYDALIKEKVAVGDVIYIEANSGAVKRVGRCDSFATEYDLEAEEYVPIPKGEVHKKKEIVQDVTLHDLDAANAQPQGGQDILSLMGQMMKPRKTEITEKLRQEINKVVNRYIDEGIAELVPGVLFIDEVHMLDIECFSYLNRALESPLSPIVILATNRGICNVRGTDMTSPHGIPVDLLDRLVIIRTETYGPTEMIQIXSARAQVEEIDMDEESLAYLGEIGQQTSLRHAIQLISPASVVSKTNGREKICKADLEEVSGLYLDAKSSARLLQEQQERYIT

SEQ ID NO: 320047 - protein, 83 aa, Zea mays
  Clone ID: MRT4577_54950C.1.pep
MAAAAAVVAEPKTKYDRQLRIWGDQGQTALEKASICLLNCGPTGTEALKNLVLGGIGSVTVVDGSKVEASDLGNNFMCNFFAM

SEQ ID NO: 320048 - protein, 54 aa, Zea mays
  Clone ID: MRT4577_54951C.1.pep
PFVFFWGDLKIILFVHKSWTRSPQCRLCCVKQSDQKVMMHMLGHNPSEKKHKFD

SEQ ID NO: 320049 - protein, 48 aa, Zea mays
  Clone ID: MRT4577_54952C.1.pep
NAKIFSCWVYMFFAMKVIIMLFLLILQLGSTVIRLKTKDGVVLAIEKL

SEQ ID NO: 320050 - protein, 201 aa, Zea mays
  Clone ID: MRT4577_54953C.1.pep
SGPEFPRRPTRPQAKAEFDCLALEHHVKEILKQIGRDPDSISRAYIKTFCKNSRKLRICRYRSFKEEFSSPIVSEIQRYFSDEDCSYAMNFYILLRAVDRLAANYSRLPGIFDSEIDEDIPRLKTVAASVLSEMGLNGASLSQDLVTEMCRFGGAEIHPVAAFIGGVASQEVIKLVTKQFVPLGGTFIFNGIDLKSQVLVL

SEQ ID NO: 320051 - protein, 43 aa, Zea mays
  Clone ID: MRT4577_54954C.1.pep
KNCNVLLTRKVMRSFCFTELANFLYAGEVKRRPSNTQRAQAVV

SEQ ID NO: 320052 - protein, 377 aa, Zea mays
  unsure (1)..(377): unsure at all Xaa locations
  Clone ID: MRT4577_54955C.1.pep
QKHFGKIPYLFIVVQEHCVIESKPDHFLDDLRLHNPWTELKQFAKSIDINDKDPVVHKHTPYIVILVRLAEKWADAHDGNLPSTRQEKKEFKDLIRAHMLNVDEENYKEAVDSSYKVSVTPGINNEIRQIIDDDSAEVNSSSSDFWILVAALKEFIAKEGNGELPLEGTIPDMTSLTEYYXVSLQKIYQAKAEFDCLALEHHVKEILKRIGRDPDSISRAYIKTFCKNSRKLRVSRYRSFEEEFSSPFVPEIQRYFTDEDYSYATNFYILLRAVDRLAANYSRLPGIFDSEIDEDIPRLKTVAASVASEMGLNGASLSEDLITEMCRFGGAEIHPVAAFVGGVASQEVIKLVTKQFVPLPGTFIFNGIDLKSQVLML

SEQ ID NO: 320053 - protein, 529 aa, Zea mays
  Clone ID: MRT4577_54956C.1.pep
MAATGVVAEPKTKYDRQLRIWGDQGQAALEKASICLLNCGPTGTEALKNLVLGGIGSVTVVDGSKVEASDLGNNFLLDEGCLGQPRAKSICSFLQELNDAVKAKFVEESPAHLIDTNPSFFSQFTVVIATQLPESFLLKLDYICRKADIVLVAARSYGLTGLVRVSVKEHCVIESKPDHFLDDLRLHNPWTELKQFAKSIDINDKDPVVHKHTPYIVILVRLAEKWADAHDGNLPSTRQEKKEFKDLIRAHMLNVDEENYKEAVDSSYKVSVTPGISNEIRQIIDDDSAEVNSSSSDFWILVAALKEFIAKEGNGELPLEGTIPDMTSLTEYYVSLQKIYQAKAEFDCLALEHHVKEILKRIGRDPDSISRAYIKTFCKNSRKLRVSRYRSFEEEFSSPFVAEIQRYFTDEDYSYATNFYILLRAVDRLAANYSRLPGIFDSEIDEDIPRLKTVAASVASEMGLNGASLSEDLITEMCRFGGAEIHPVAAFVGGVASQEVIKLVTKQFVPLPGTFIFNGIDLKSQVLML

SEQ ID NO: 320054 - protein, 55 aa, Zea mays
  Clone ID: MRT4577_54957C.1.pep
ARTDKYTSYVFIVYNANRITQCLATLAKGIHDNFGIGDGLITTVHAITGTHTTVY

SEQ ID NO: 320055 - protein, 53 aa, Zea mays
  Clone ID: MRT4577_54958C.1.pep
GTVPAAPAAAPRASSRRPCARARSSSAGGQQQKGTSHGRERDDAARREGNEGH

SEQ ID NO: 320056 - protein, 143 aa, Zea mays
  unsure (1)..(143): unsure at all Xaa locations
  Clone ID: MRT4577_54959C.1.pep
MSRRRSRRTAPRPTPRAAPEKNPPQPARLDPPPAPVRDGGGSLLGRIESTVAQRMRVDTGRAMAHKPGDAILSPRTIHHXRLLASQTAAADSVTLVINDDACSIHXSKAIQDCLIDYVNXISRCLFYLYMLNECQRTPSVYLN

SEQ ID NO: 320057 - protein, 88 aa, Zea mays
  Clone ID: MRT4577_5495C.1.pep
MILVGSAGAGQSSVGHLYRSSEPAKPTMAPAVSARRAEKPYGAKTDAGKHDAAGGTNQSNSYHKADGQNTGKLHTDRPVYNVHAGAGG

SEQ ID NO: 320058 - protein, 82 aa, Zea mays
  Clone ID: MRT4577_54960C.1.pep
ELPGNAARDNKKTCIISRHVLLGIRKKKELGKLLGGVTIAPGGVLPKINPVFLPKKTAEKGSSGGSKEAKLPKKAPKSPKKA

SEQ ID NO: 320059 - protein, 99 aa, Zea mays
  Clone ID: MRT4577_54961C.1.pep
GTNKHAHRASSLGENPLLWVMLHTTGGRGTLLIPQHIYSQHQLQQQWPNHHTVRHTYSRMKIGVRGQKSELTELQDQRGLSHLIHLNVIGLQSIATPTP

SEQ ID NO: 320060 - protein, 62 aa, Zea mays
  Clone ID: MRT4577_54962C.1.pep
MTIMLQSLYPTSGILQVVSFLLIICAKARIIDNLLLLISKLKCKSPTSIQNLHAHFQGEVTL

SEQ ID NO: 320061 - protein, 78 aa, Zea mays
  Clone ID: MRT4577_54963C.1.pep
SVNWVMKAYQTHTKLLTSTYLFFLLAQPLCFLQLFGYLLRFPGTPGNSLSAGQIRAKEVPIGIGFFLLEHFPCCCGDR

SEQ ID NO: 320062 - protein, 120 aa, Zea mays
  unsure (1)..(120): unsure at all Xaa locations
  Clone ID: MRT4577_54964C.1.pep
PDHRALAVACVAQARERLGDGKVVPPQFPLVVFDCEGGVSVXTCAAAAYGQPPSPSGGGRYKIDVALWEELGLEELVLRDSKPLHVSYSILGAGCDGLAVAMPAGAAGELLVAATVPKPK

SEQ ID NO: 320063 - protein, 80 aa, Zea mays
  Clone ID: MRT4577_54965C.1.pep
KKGKHRGPGFKKGFQKVLIFQTQIQKKPRKENLPHPLIRGGENNKREKTPGVRGAPKNWAPKNFLKKAFFGFWGGGQMAF

SEQ ID NO: 320064 - protein, 113 aa, Zea mays
  Clone ID: MRT4577_54966C.1.pep
GENFFLHKGSQPPRVPLKTGYQFTAHLIDPYSTHYTGIWAGDTKAQKSLVLAACPGIPIPPHGVTGHFLAGLGGDILPFMKSPVAPNRLKKKGFLKSPIFLPGGQSNIKSRAP

SEQ ID NO: 320065 - protein, 132 aa, Zea mays
  Clone ID: MRT4577_54967C.1.pep
GTHAGRPGYGSAERSQSSRFPCRKPQGHIKDSNIDSIHSPHYPPAFPAASRVFLAAAVRNRAAAGVFRLTVYRAPGVGLGDFPWQRAGSRGRGIGSWSPASDELLAELAKSRRSPHPFPWAVHVAPLSPKSQ

SEQ ID NO: 320066 - protein, 68 aa, Zea mays
  Clone ID: MRT4577_54968C.1.pep
KFLFFREREISQTVLKVFYPPPHKVFLENLNLEMLTPFLGGAFPGIFFGFLKPFFFPFFFNPFLPIFS

SEQ ID NO: 320067 - protein, 78 aa, Zea mays
  Clone ID: MRT4577_54969C.1.pep
ADTMIAALSYIDSTLLMRGYETSGVLSANLDEKLTHFDCLLEITLANLEPQKDTSVNALYAQTILLTDVTVMIVLPSM

SEQ ID NO: 320068 - protein, 525 aa, Zea mays
  unsure (1)..(525): unsure at all Xaa locations
  Clone ID: MRT4577_5496C.1.pep
MRIEEVQSTSKKQRIATHTHIKGLGLDVAARSCAPPRPVFFSRVLASVCLRTSSSLFSLLRFLIMGAEQANGMAIALAAGFVGQAAAREAAGLAVDMIRQKKMAGRAVLLAGPPATGKTALALGIAQELGSKVPFCPMVGSEVYSSEVKKTEVLMENFRRAIGLRIKENKEVYEGEVTELSPEEAESTTGGYAKSISHVIISLKTVKGTKQLKLDSSIYDALIKEKVAVGDVIYIEANSGAVKRVGRCDSFATEYDLEAEEYVPIPKGEVHKKKEIVQDVTLHDLDAANAQPQGGQDILSLMGQMMKPRKTEITEKLRQEINKVVNRYIDEGIAELVPGVLFIDEVHMLDIECFSYLNRALESPLSPIVILATNRGICNVRGTDMTSPHGIPVDLLDRLVIIRTETYGPTEMIQXLLIWGVISICCFSCAEFSLIFVCCPLQILAIRAQVEEIDMDEESLAYLGEIGQQTSLRHAIQLISPASVVSKTNGREKICKADLEEVSGLYLDAKSSARLLQEQQERYIT

SEQ ID NO: 320069 - protein, 72 aa, Zea mays
  Clone ID: MRT4577_54970C.1.pep
HASGRAPMAPSFLFCVVPSFMRVAFVVKFGHRYFFLMMARNFDPILMSIYVDVAVFIHCFRVLNFYYKINSM

SEQ ID NO: 320070 - protein, 44 aa, Zea mays
  unsure (1)..(44): unsure at all Xaa locations
  Clone ID: MRT4577_54971C.1.pep
IHQTARPFFFXTKXRRTGWVQLTNQRGTTRIKTMNSLTPKKRTP

SEQ ID NO: 320071 - protein, 113 aa, Zea mays
  unsure (1)..(113): unsure at all Xaa locations
  Clone ID: MRT4577_54972C.1.pep
MRSCQGQGNRAERVDARERGSRARMELVLWRGEAGGRDGRRPGWREVNKIDIQYDKVSKQVDVHAXLKEVLWNHIHAFAETGQEREEPGPPLRLSHVLHDLSSSIPDAVATDF

SEQ ID NO: 320072 - protein, 50 aa, Zea mays
  Clone ID: MRT4577_54973C.1.pep
PLTPPAPVAGVEVQWPVFSGFRLALLGEEGEKFLQEFGFEIREIYELIPR

SEQ ID NO: 320073 - protein, 141 aa, Zea mays
  Clone ID: MRT4577_54974C.1.pep
RRRLLSSLSIPFAPPHLLRAPPLPGFPVPSASLVCVFPRRSLLRVADLLAAVAVAEQDEEELQSRVHAAASSPRRSEEEDVLFHGFKRRRRFSYQISGHHVSIDVAELHGFLVSFSGGRWCTIWPGVTCASSTTDEAHVVG

SEQ ID NO: 320074 - protein, 78 aa, Zea mays
  Clone ID: MRT4577_54975C.1.pep
KFLRGNAGGSECMSAIAGSYGYIAPEYAYTLKVDEKRTGARRRSSSSSRKGHTTRRRSRIFLVSRSAVARVGRTDGTW

SEQ ID NO: 320075 - protein, 1036 aa, Zea mays
  unsure (1)..(1036): unsure at all Xaa locations
  Clone ID: MRT4577_54976C.1.pep
MAMAPSTAAASTLLPVLLLIATATQCTAADSFSSPNAAALLNLSAAVADPSGYLSTHWTPDTAVCSWPRVSCDATDTRVISLDLSGLNLSGPIPAAALSSFPYLQSLNLSNNILNSTAFPDEIIASLKSLRVLDLYNNNLTGSLPAALPNLTDLVHVHLGGNFFSGSIPRSYGQWSRIRYLALSGNELTGEIPEELGNLTTLRELYLGYYNNFTGGIPPELGRLRALVRLDMANCGISEEIPPELANLTSLDTLFLQINALSGRLPTEIGAMGSLKSLDLSNNLFVGEIPASFASLKNLTLLNLFRNRLAGEIPEFIGDLPNLEVLQLWENNFTGGXIPTNLGVAATRLRIVDVSTNKLTGXVLPSELCAGQRLETFIALGNSLFGDVPDGLAGCPSLTRIRLGENFLNGTIPAKLFTLXNLTQVEXLHNNXLLSGELRLDXGKVSSSIRELSPVNNRLTGQVPTGIGGLLGLQKLLLAGNMLSGELPPEVGKLQQLSKADLSGNLLSGAVPPAIGRCRLLTFLDISSNKLSGSIPPELGSLRILNYLNVSHNALQGEIPPAIAGMQSLTAVDFSYNNLSGEVPSTGQFGYFNATSFAGNAGLCGAFLSPCRSVGVATSALGSLSSTSKLLLVLGLLALSVVFAGAAVLKARSLKRSAEARAWRLTAFQRLDFAVDDVLDCLKEENVIGKGGSGIVYKGAMPGGALVGVKRLPAIGRAGAAHDDYGFSAEIQTLGRIRHRHIVRLLGFAANRETNLLVYEYMPNGSLGEVLHGKKGGHLQWATRFKIAVEAAKGLCYLHHDCSPPILHRDVKSNNILLDADFEAHVADFGLAKFLRGNAGGSECMSAIAGSYGYIAPAFRRVCRFNGSSLGIVGCDLMWPRFLCPPSPEYAYTLKVDEKSDVYSFGVVLLELIAGRKPVGEFGDGVDIVHWVRTVTGSSKEGVMKIADPRLSTVPLYELTHVFYVAMLCVAEQSVERPTMREVVQILADMPGSTSTSIDVPLVIEPKEEDGGPEKKQQQQQEGPHDSPPQQDLLSI

SEQ ID NO: 320076 - protein, 426 aa, Zea mays
  unsure (1)..(426): unsure at all Xaa locations
  Clone ID: MRT4577_54977C.1.pep
LSFHIEQVFRGGGGRLQNXGLLDMLRVVKIDLKGRHQTDSDDEDDGRVDIEDDXKLXNGRMERGVGYFFIVTDGLDENTDDDSTDEDDLDQDDFNKTVPNETKGGGKTETTKDGDDSDDSDGMDDDAMFRIDPYIARIFKERNLPGSDTKQSQLMRFKLRVLTLLDIYLQRNPGKVLVLEVYSFLMQAFVKSHGADGTEQFRQRISGILQRRVFKGNEYPKGDAVEFGKLESLLEKALRLTSRSRYNTVASVAQNATFWILKIINSKHCSEQELARVVDLFRSILSDYDRKKSRLKLGFVKQVAKRNPWIGQKLFGFVLQRAENTKAQYRRNQLLELAEFILKSWADGTSEMFLNHLSQLCGLIQAALSAVAENKSRRKEVRNFCTGILQTVLKLGLKDQFQKALSPETYSLCEAKLGAAFTAFKK

SEQ ID NO: 320077 - protein, 150 aa, Zea mays
  unsure (1)..(150): unsure at all Xaa locations
  Clone ID: MRT4577_54978C.1.pep
SVRTCRTLLPFSSLXPQVXGCPIWRGSXSYFTATVPPHPSMSSYSCPRRPSPSXXLXXPVLXFHAPXLRPSTXSILPFLEIPRLLYTHPXAVHLPVSPNPFPSPXXCPPLYPRDRNPRRXFFXFVPKSRLXCPFLEVAXGSRFLXSSXRR

SEQ ID NO: 320078 - protein, 69 aa, Zea mays
  Clone ID: MRT4577_54979C.1.pep
ETGLQTSELHLLIPHANPLPVSILPPLPKGTSQHIPNCSRVQVLCHLQEPDGTFQSEPPLRKWNISSVS

SEQ ID NO: 320079 - protein, 69 aa, Zea mays
  Clone ID: MRT4577_5497C.1.pep
RNFWDLLMGRGFCYRLGGYPRGPLQADIACMETDMVIPLKNGVFLVNGGKKGVFSPKKSKKNPPDKKKN

SEQ ID NO: 320080 - protein, 110 aa, Zea mays
  unsure (1)..(110): unsure at all Xaa locations
  Clone ID: MRT4577_54980C.1.pep
TWNLKKGPPHFFPFFFFFFFFFFFFFCFFLFFFXXXXXXKIKNGIPAWTTDRPIKKQQRRILRHSISQGHSPAVHGPCILSLAIRQDRNSRAIHPLFQTLIRISNRERVA

SEQ ID NO: 320081 - protein, 52 aa, Zea mays
  Clone ID: MRT4577_54981C.1.pep
PISHRACSPAHCPAPPPIDEEETMSRSPPGGCLIASLNVGRQNLQTHRLACA

SEQ ID NO: 320082 - protein, 93 aa, Zea mays
  Clone ID: MRT4577_54982C.1.pep
LQYIRSKLVIRAYSCRVCMHSMIHQRNVRTSASQSVYMLAYRLPPTHPSVHIRCVIALHMYALQWDGTWRASSSYITVLHHLPLPLLEVEAVV

SEQ ID NO: 320083 - protein, 110 aa, Zea mays
  Clone ID: MRT4577_54983C.1.pep
MADKILSLLTLHGLSASSATATIFQKCSQAPIAYIFPPYLSPVMCWVCENPILHPYRIQQAITAGILHLSPLFLEHSSILLHITPLAHVSSQNTKAQQLQPPALANLAAY

SEQ ID NO: 320084 - protein, 52 aa, Zea mays
  Clone ID: MRT4577_54984C.1.pep
FIRSIYKSNSLARLRIAIHINRVRKLLEHHVNSFTQSVIWRSGITEGLEGIK

SEQ ID NO: 320085 - protein, 112 aa, Zea mays
  Clone ID: MRT4577_54985C.1.pep
GICIHVYLNDSEFSNKLPVCIILQGINTIARIRRDFPIRWVLWLLFFYWGTIGIRMGGGHTYQAIRRHASRPAKVYEGVPNPTKLAETTSPQRLNQSVGTSSRHWKRGTFRR

SEQ ID NO: 320086 - protein, 82 aa, Zea mays
  Clone ID: MRT4577_54986C.1.pep
TSIDEGAASTLSSDMEELTSTASLGLAIQKLQPAGSSQSTATAEMQRGWIQRLYLPPRRRRRSEEPRSRPERSAVARRLSVR

SEQ ID NO: 320087 - protein, 123 aa, Zea mays
  Clone ID: MRT4577_54987C.1.pep
WWAWSWSSRRAGPRLADLAVLSLRCRAGPGGRALVARSVTWARWCRPPSPRSARPAGSRPPSPSPPPPCSPAPSSPAWLAAGSCRAWRRRRRRWRRLRSAAAFLLVVWCGGSPRALGGECRAR

SEQ ID NO: 320088 - protein, 196 aa, Zea mays
  Clone ID: MRT4577_54988C.1.pep
MANPRHAVDVSSSMSELTVEAAPSSIEAQVPQQANGGVVAAAELDDVWEDVSGSPQHADTLDREWIHRQSQFQKMGYRDGVTEGQKDSAQEGFNVGFRQSVNVGYKWGLVRGVGSALASLPDSLKEKLVPDVQHRGKLQDLHRSVQEISADDAVQMFHESICQSNRPSDGSGSHVTSTSDGATESNRMKSLSRTLC

SEQ ID NO: 320089 - protein, 215 aa, Zea mays
  Clone ID: MRT4577_54989C.1.pep
LANPREPVAISSSMSELRVEAAPSSIEVQVPKQANGGDVAAAELDDVWEDVSGSPRHADTLDREWIHRQSQFQKMGYRDGVTEGQKDSAQEGFNVGFRQSVNVGYKWGLVRGVGSALASLPDSLKEKLVPDVQRRGKLQDLHRSVQEISADDAVQMFHESICQSNRPSDGSGSHVTSTSDGATESNRMKSLSKDLVLLLRECSDIKVSEELASDS

SEQ ID NO: 320090 - protein, 31 aa, Zea mays
  Clone ID: MRT4577_5498C.1.pep
GGTNKGINKIVFSPGGIIEYLTQGQFKPGLL

SEQ ID NO: 320091 - protein, 89 aa, Zea mays; identical to SEQ ID NO: 291558
  Clone ID: MRT4577_54990C.1.pep

SEQ ID NO: 320092 - protein, 93 aa, Zea mays
  Clone ID: MRT4577_54991C.1.pep
GAPQGEFFYAGVPFPPRGFSKNWGPGGSNGTRPLIFKEPFPQGVLAGPVPPKKWGEIVCFLGPPFFFNKGWVDPGPPARVFKNAPPKLFWGFP

SEQ ID NO: 320093 - protein, 107 aa, Zea mays
  unsure (1)..(107): unsure at all Xaa locations
  Clone ID: MRT4577_54992C.1.pep
PTDRTLAQGLTGDSTYLVVEHDKTXGTYGINAVCTHLGCVVPWNGAGNTFTCPCHGSDYITHGKVVRGPAPLSPALIHADVDDGXVLCVPWVETDVRTGDDPWRKAL

SEQ ID NO: 320094 - protein, 91 aa, Zea mays
  Clone ID: MRT4577_54993C.1.pep
SPPSKISPTPYYPPSLPTLHPSTSSLFRPAPSHPLHSSPCSSHPPSSKTSPSISSSSYHTLPYPPVPFLNISNFHLLCPYYSLTSKIYITL

SEQ ID NO: 320095 - protein, 42 aa, Zea mays
  Clone ID: MRT4577_54994C.1.pep
SGRRGVPGPAPVSVSVSFELRRAVFMLYHPIMPVPHVWSLSV

SEQ ID NO: 320096 - protein, 86 aa, Zea mays
  Clone ID: MRT4577_54995C.1.pep
PRPAGSDNRIHSLFERALADDKLQKSVLLWRCYLAYEAEIVCNSSAARRVFFRAIHACPWDNADMFDVGVVLSPLQPSPKRCSVVN

SEQ ID NO: 320097 - protein, 90 aa, Zea mays
  Clone ID: MRT4577_54996C.1.pep
MSSSAAKKGASLVAATSMAAVEALKDQAGLCRWDYALRSLYHRAVPASLSSSSQHAGSGSAAAVGRAARPRRSEEEKLHKAYHIVCWGPN

SEQ ID NO: 320098 - protein, 131 aa, Zea mays
  Clone ID: MRT4577_54997C.1.pep
MGSFLSSLWTPPPLAGDDPDSAVVAVHSKPAWDKHWEEHRNASKLMVIDFSASWCGPCRFIEPAFKEMASRFADALFVKIDVDELAEVAKTFRVEAMPTFVLVKGGQEVSRVVGAKKDELDRKIKTFISST

SEQ ID NO: 320099 - protein, 120 aa, Zea mays
  unsure (1)..(120): unsure at all Xaa locations
  Clone ID: MRT4577_54998C.1.pep
FPASSIRYKGLVLGLKFLYSGQASVAAPKXRPLPGGGARGCLHTRCGAAVDLALDTFAAARSFGVKQLALLVQKQLESMVKEASVDNLMKVLMASRKFKMQELGPTCSNLVARSGFSADL

SEQ ID NO: 320100 - protein, 123 aa, Zea mays
  Clone ID: MRT4577_54999C.1.pep
ALILSAERGRSQNHHFSCQKFLVHSGSLITGALFPLILKAPLKPRGPEPPPPQVRAGGQPFIPPPKGPVLGAPTVHQGPKKLTVPIGAIKTGALGQGPTLATGAPPNGFPPPPPKTKRGGWGS

SEQ ID NO: 320101 - protein, 142 aa, Zea mays
  Clone ID: MRT4577_5499C.1.pep
PKAGANFPLSTRTVRAISEVEAFALRADELKFVAGQFRRLHSKQLQQTFRFYSQQWRTWASCFIQAAWRRYLKRKAAEQRRREEEMEADSSGVSTSRFKTTLLVSRFAKNAMRGVQRQRSVRADSLIMLPRPQEPDFGSMDY

SEQ ID NO: 320102 - protein, 60 aa, Zea mays
  unsure (1)..(60): unsure at all Xaa locations
  Clone ID: MRT4577_549C.1.pep
SRPGPVSSTVYAYGGCRELATLLRLRVRAXXGELALLARSHAAFPHGATHAGPRAPXRTA

SEQ ID NO: 320103 - protein, 165 aa, Zea mays
  unsure (1)..(165): unsure at all Xaa locations
  Clone ID: MRT4577_54C.1.pep
LLKERVPPVADTTFYRSLINVLXYLTFCRPDIAYAVQQVCLHMHTPREPRLTTLKRIQRYLRGSYYMLLLRSSPTPELVVYNDVDRAACPDTRRSTFGYVVFLGANCVCWAVKWHPVISPSNVETEYRAVANGVAEASWMRQLLHELHXPPXCATLVYCDNVSAV

SEQ ID NO: 320104 - protein, 213 aa, Zea mays
  Clone ID: MRT4577_55000C.1.pep
MPRSSSSPGSGSKRILGRAMAAILALPLTPIIKAKLGLLLFKKRASSAAGRRRCYKPFRHYNYAYVGEYQFSPSRSPLLPAPPPGVTTWRRAAARRRRGRARMVLASLFCGGGGADELDVAVLDGLARRTDGRAERDQLVVLAPALEWARGRDDGAYACSNSNHDDEEEVDVAVVDYGEEGDVEVDDCAERFIERFYQEMRLQRQRSLVQRLL

SEQ ID NO: 320105 - protein, 47 aa, Zea mays
  Clone ID: MRT4577_55001C.1.pep
CQCVPSNYISLLWTYAGFQNRPLCSVVRGLYLYVPCNFCMFVCVALD

SEQ ID NO: 320106 - protein, 69 aa, Zea mays
  Clone ID: MRT4577_55002C.1.pep
PRPINRPGENDPGKHGLDRWPPFYYFYFPPQRKRVGPLTWVLVGGFRFLNPARPYKELNRMMGASTPTY

SEQ ID NO: 320107 - protein, 96 aa, Zea mays
  Clone ID: MRT4577_55003C.1.pep
CVSDAGVRKMTAPVRVMKRGLENLTSLDLSCNPEITDAGIGYLFSFRKLNCLDISGTGLKDIKTVKHKLQTHIGLVHSKVPLKEFDHSNCKTEGWA

SEQ ID NO: 320108 - protein, 67 aa, Zea mays
  Clone ID: MRT4577_55004C.1.pep
IYWLLAAERQYTEMPHTRFGGYILGARIKRSHLSQRPVIKRKISYKRHKGKSAMERLKYYCLTIKKT

SEQ ID NO: 320109 - protein, 187 aa, Zea mays
  unsure (1)..(187): unsure at all Xaa locations
  Clone ID: MRT4577_55005C.1.pep
MSGAVLVAIAASIGNLLQGWDNATIAGAVLYIKKEFSLETQPLIEGLIVAMSLIGATVITTFSGAVADAVGRRPLLIASSVLYFVSGLVMLWAPNVYVLLLARLIDGFGIGLAVTLVPLYISETAPTDIRGLLNTLPQFSGSXGGMFLSYCMVFTMSLMPQPDXRVMALGVLSIPSLMTFALTVFYL

SEQ ID NO: 320110 - protein, 91 aa, Zea mays
  unsure (1)..(91): unsure at all Xaa locations
  Clone ID: MRT4577_55006C.1.pep
STLPSQKRREGVIYKRVLKMGGMGASGTCRDWYHGTYLGEDGAVKAIRTQHFNKNGWNQFTQXVYILRETQHKKDLRXISACTKTPQMCII

SEQ ID NO: 320111 - protein, 144 aa, Zea mays
  unsure (1)..(144): unsure at all Xaa locations
  Clone ID: MRT4577_55007C.1.pep
KKKKANRGWVFILTYSCFQPHNSFILSPNFISLTVFLQLSDCENPDFSQLISLLALPLFSIWLFSELANTHRPFHLFHILNGXWDTPCSDALSPXGFXVTRYFTFTLSNFLMPXPLGFFLSFFATXSGFPLXALNLKFPFGFHF

SEQ ID NO: 320112 - protein, 252 aa, Zea mays
  Clone ID: MRT4577_55008C.1.pep
PLIKSRTIASPKKPSKSFSPSSGPKRSFDSAVWLMDRRKAPQDKFRPLLSSVPCTTFGVGKGDNVHSSMLSHNSSLTTSSNLSSDHGVTFSPCMGNEQGPSDIAGDCEATPTYSLSATQSSPKSPSTEKNAESNMEDLNMERSRIVETSGNVASGSKAGLTKMATCTRCEKLFNAIKDDGEIDLCEECGLVDEVLFVNPKIETVEEHQKDHKTRISKPCVALEAHITPDHGEDTKKSFLDSQLVNDEPADCL

SEQ ID NO: 320113 - protein, 90 aa, Zea mays
  Clone ID: MRT4577_55009C.1.pep
GIPGSSHASEQVRQAEPDFRYQATLGWAVQSILQQQPQSAQIAVLIAAHIGQQLTAMYDLQQLTLCPYPAAGHILHCRNYLLYYNAWLAC

SEQ ID NO: 320114 - protein, 92 aa, Zea mays
  Clone ID: MRT4577_5500C.1.pep
NPFFQVGPLGVLVAPFPGYPWGLFLQKKPAGFFFKGVLFCRFFLNIFFFVLPPTFFFFFPPPLWFFFFPFVPKFFFPLGGSPPLNHAALKVV

SEQ ID NO: 320115 - protein, 57 aa, Zea mays
  Clone ID: MRT4577_55010C.1.pep
PKAPSPRPTNRRRRLTHSLPSVPLVVPYLGSDPSGIGGHLFHTVSPLYSPSLSARPL

SEQ ID NO: 320116 - protein, 55 aa, Zea mays
  Clone ID: MRT4577_55011C.1.pep
LLIALFLQKHAWRPSRTSRRPPRYSRRAWTSCTLTAPRTPTLRSSTYGASPPSSG

SEQ ID NO: 320117 - protein, 113 aa, Zea mays
  Clone ID: MRT4577_55012C.1.pep
MARPTRALLLPLLLLVLALAALARASGSGDVPASSLSWDLGVVGAGEDEEFGFPGGDSVARRVLQGGGYLSYGALRRDNVPCSVRGASYYNCRPGGQANPYSRGCTAITRCRG

SEQ ID NO: 320118 - protein, 46 aa, Zea mays
  Clone ID: MRT4577_55013C.1.pep
VSVDHVFSSRCSVPISTKGVIGGSLDLCNTVFVSILTHLIKKNHIT

SEQ ID NO: 320119 - protein, 183 aa, Zea mays
  Clone ID: MRT4577_55014C.1.pep
MVGRLSDPCAADRSSSMEEMSGRILFTQSASSKAAISWPSGAHSMEKRARSPKELSPKKGILKRSTRGCKGICMCLDCCTFRLHADRAFEFSRKQMREADDIISNLLKEVDSLRSLLEKHAGQPESTQAARRQACRVQEVARNRCQQMFADLNSHCRIPGPRVRFAEYVEEKAASSPRRSSRR

SEQ ID NO: 320120 - protein, 53 aa, Zea mays
  Clone ID: MRT4577_55016C.1.pep
RAPNHLVRTLMDETCLGIASSLIRMPDFASICEDLELCAEEPSYLGPPPCNPD

SEQ ID NO: 320121 - protein, 75 aa, Zea mays
  unsure (1)..(75): unsure at all Xaa locations
  Clone ID: MRT4577_55017C.1.pep
KAPFVRVRHFPGLCRRLHXGSNLLPLPPHAPSAHAFVALSGAIKKAPPPPPRRGRHLVLQSGGRTGTTMNVPHAS

SEQ ID NO: 320122 - protein, 42 aa, Zea mays
  Clone ID: MRT4577_55018C.1.pep
QQARAHTIRNFNCYCKITRLQIPRVSYAAREKWGLSPSADFD

SEQ ID NO: 320123 - protein, 121 aa, Zea mays
  Clone ID: MRT4577_55019C.1.pep
MDRFSLVVETGLRSSELRRFMRYAADRRVQDLHVETRKSIKKNENLNFHLPLSSPALVRLSLRRINISNMYYRGAQPFRALEVIQLYLVCINVCFAKMRGAVPQPAHSRPARLRHQLRRSK

SEQ ID NO: 320124 - protein, 36 aa, Zea mays
  Clone ID: MRT4577_5501C.1.pep
MIIPKKNRNEICKDLFKEGVLYAKKDYNLAKHPQID

SEQ ID NO: 320125 - protein, 124 aa, Zea mays
  Clone ID: MRT4577_55020C.1.pep
KHSLTGRILGEHIHTLHLPWEPKIVKQGALSKQKLAFASLYVNITSGACWISITTMAVTAGSPTCTGAPSGGAGAAAGANRSGGALPLLGRLGQLSSQGHRLGGGLSVADALPLRGQGGRPYGA

SEQ ID NO: 320126 - protein, 369 aa, Zea mays
  Clone ID: MRT4577_55021C.1.pep
MTELPRDNEHKIVNINKEGHMLTQLTMADTSDVRIEDPLSILNSRTDDHHALELRDKELLVSELQNTLDQKSKQLGETEIKLSAMMDEVNSLKKELEQTRGLLDESQMNCAHLENCLHEAREEARTNKCSADRRAVEYDALRSSALRIHGLFERLNNCITAPGMTGFAESLRSLALSLASSVKKDEADTTVQFQQCIKILADKVYLLTRQSAELLERYSAMQAVHGDITKELDLKKVLIKNLYNKLQQEKQASKEKISFGRFEVHELAVFFRNPAGHYEAINRNCSNYYLSEESVALFTEQHSQHPVYIIGQIVHIERRVARPDQMGGAPRPDSSGGHRSPASMLNPYNLPGGCEYFVVTVAMLPDAAS

SEQ ID NO: 320127 - protein, 76 aa, Zea mays
  unsure (1)..(76): unsure at all Xaa locations
  Clone ID: MRT4577_55022C.1.pep
XXIGLFCGXXTYXSQSGXWLQXXSSCXXGXWGLFXDPKXFRXXGLSMXXPSSXLGXXIXXXSPPPPPPWPKKGNRA

SEQ ID NO: 320128 - protein, 233 aa, Zea mays
  unsure (1)..(233): unsure at all Xaa locations
  Clone ID: MRT4577_55023C.1.pep
SNGGATWNGPAKDDASXDNGAXGYQGDGYQPPFSAMITGGSXTIFQDGKGCVTCYQVKCTGHESCSGSPRTEVMTDLSPESTXHEEAVHFKLMETQMRDMEKSGQIEXLRNAGRLQVQYTRVACNWNGLDIAFRVDAGSNANYLAMAIEYESGDGDLRAVELKQSGAAAWAPMQRSWGAVWQYKSGSTNLQAPLSVRLTSGSGRXLVASNVIPAGWQPGRTYRSVVNFGGNHA

SEQ ID NO: 320129 - protein, 186 aa, Zea mays
  unsure (1)..(186): unsure at all Xaa locations
  Clone ID: MRT4577_55024C.1.pep
HVPPPTRISCIRHPPPGSNYGGRISYASTMEAASPCFNYSSGPPSARALPPRVPPATTVSWLSPAQRWCISCSQIQARAPTPSTTGSRARRWATALPTARGSSPQCRRGSGPVSYTPPSNTSLRPSFIEPAAALPSYSCPCSSIDVPAVIHCTANILSPXDLQLGEVSNYSWRRSRPAACRVCRCR

SEQ ID NO: 320130 - protein, 50 aa, Zea mays
  Clone ID: MRT4577_55025C.1.pep
SLACTSSGFIVNCDCINACILTPPEYFLQEESGSAEAAWGITAYLGCKPS

SEQ ID NO: 320131 - protein, 151 aa, Zea mays
  Clone ID: MRT4577_55026C.1.pep
MPGVGAGPSGQAPAEGIAMANAGASQELRGGGNQGTRRSSRAGESFRLMEGGALDWALYGGGVRLRGRKSSAQRKLGAGQFERRPSRGQGAARTEVGKSSACRRSVRPWMSRAGAGDARAQERNSATIGEGGRALDPSQGDEARPASRYPM

SEQ ID NO: 320132 - protein, 90 aa, Zea mays
  Clone ID: MRT4577_55027C.1.pep
DNRRANIQTDRDNRTTAKKTRSDQGTNKPHPFMAVPPSSLKSTRTLDRRPTEKQTFGKRKPKPNHSANDYIRHTSQGPGTARTPPEKATL

SEQ ID NO: 320133 - protein, 100 aa, Zea mays
  unsure (1)..(100): unsure at all Xaa locations
  Clone ID: MRT4577_55028C.1.pep
HTHTTSFSPKTRGDRRCKKQNGKTXTGKXITXEAEPXDTXDNXKAKNQDKEGNPPDQQRHNTAGGGXEDGRTXXDDNNQKESTHHXEHRHRGGKQEEEKT

SEQ ID NO: 320134 - protein, 82 aa, Zea mays
  Clone ID: MRT4577_55029C.1.pep
MGRIVKKGWYPQFVRTNSSLYLGAQLSYLGHSVLFLAGLVAPATLMTMVMQGDVLVRIRIDEEIGNLLYLVGIAHVDVLNDY

SEQ ID NO: 320135 - protein, 78 aa, Zea mays
  unsure (1)..(78): unsure at all Xaa locations
  Clone ID: MRT4577_5502C.1.pep
SHQRCLRYVEKXQXXFXPPLPXGXPKTRGPNRQPGRFLPLYHXFVCLPTNSSAPIYSRLPFGGAIFNLGPPQKKHFRG

SEQ ID NO: 320136 - protein, 75 aa, Zea mays
  Clone ID: MRT4577_55030C.1.pep
NVLYPRFKTKLENMFFQRVKIRFHRLSFPQHFHFTFGRTVASVSSQYGKYDRIALPIMSSPKTVSSSLPIVYQNH

SEQ ID NO: 320137 - protein, 95 aa, Zea mays
  Clone ID: MRT4577_55031C.1.pep
SPYGFGKFPKFPPPQNPYFLSGVPLWQNMGENRPRFVFSKLIRGVPPQVFVFTRLKLWPVLDPFSQPIFFLFPQKPGCDAPWGGPLLGPQNYCIS

SEQ ID NO: 320138 - protein, 40 aa, Zea mays
  Clone ID: MRT4577_55032C.1.pep
NLRTAHPGVLGEPVTHKMKQLYCIKRLKIPVSHLQSGGEN

SEQ ID NO: 320139 - protein, 104 aa, Zea mays
  Clone ID: MRT4577_55033C.1.pep
KKKNPSRRRRQFPARRHLNGRILTGAPHQPACLLSSPAPGSLRAADVDEMVLRTDGRWHHHAEARMQHLSVGGEKAALGGHYKLMENGGRNLSRLITEVPKGPY

SEQ ID NO: 320140 - protein, 48 aa, Zea mays
  Clone ID: MRT4577_55034C.1.pep
GRVGKKKKKIKKKKKKKKRKRKNKKKKKKKKKKKKKKKKKKKKKGAPF

SEQ ID NO: 320141 - protein, 93 aa, Zea mays
  Clone ID: MRT4577_55035C.1.pep
KKNTKNKDSFLPDSYPLGRFSADEELASHCAFCTSNIIHYGRSSSSSFTSARYYLHRLYTAVRHLSIMLYILDNSLTFITFLILKNTNNYILL

SEQ ID NO: 320142 - protein, 72 aa, Zea mays
  Clone ID: MRT4577_55036C.1.pep
RNGPPSAPSTGRSYHGGCSLGCICWLWSERASSGQPWLPFPSCRVTGLLNRPTGISVDSIPLSLFYVVFLVK

SEQ ID NO: 320143 - protein, 78 aa, Zea mays
  Clone ID: MRT4577_55037C.1.pep
MFLCIIAVPFAIHVLMVQLLARFAGIHRRGLAHWGVCVTCSSVSWLIGWTVQFIPEPDRPTRQMLAASINPTSRIIPL

SEQ ID NO: 320144 - protein, 59 aa, Zea mays
  Clone ID: MRT4577_55038C.1.pep
ALLNSRPPLIFFFLYQNQRRVLSHRAATSQGYNQTMPSAQHKTKVLVTYTAHPLTNKQF

SEQ ID NO: 320145 - protein, 82 aa, Zea mays
  unsure (1)..(82): unsure at all Xaa locations
  Clone ID: MRT4577_55039C.1.pep
STTPRASTTYRRYYSMYCHVVTLADKTKNCTLSITXTEAKISHVPETLSKQMLGKMDAPPKPDVPVITPEELAKADGILFAF

SEQ ID NO: 320146 - protein, 123 aa, Zea mays
  unsure (1)..(123): unsure at all Xaa locations
  Clone ID: MRT4577_5503C.1.pep
RWRWRAPRXRFLPGGSRXGXAGVXXRAXLARRXCGRXGSCRRRPPLXRAVRRWAGCXRXXRXAGGAGPRPRRPPPXAPWXGRRSPPPWGPVAXARPPAVPPPXPAPCAGVGSXAXFAPSFXCV

SEQ ID NO: 320147 - protein, 53 aa, Zea mays
  Clone ID: MRT4577_55040C.1.pep
KAFTAGFNLATSKKSGICLERQTFFLYRSLPFGVNTFLLPVVHKQPKWVTSRG

SEQ ID NO: 320148 - protein, 90 aa, Zea mays
  Clone ID: MRT4577_55041C.1.pep
EDLEQRPELQSISSLLDYFIHELSFRNNFEFVQAVLKLFLKIHGETIRRHSMLQSKVKKLLEVQSLVWQKIDKIFQGARCMVTFLSNSQF

SEQ ID NO: 320149 - protein, 103 aa, Zea mays
  Clone ID: MRT4577_55042C.1.pep
EVERLLHLPPYTFFFIHAHAEDGSPRTGRASSDPPSPSPCTLRTALLRPTDLLNPPNKAAYLDLASHAYDPAEADPLKFLHSSSENDDYSQWITASQRSLLEV

SEQ ID NO: 320150 - protein, 290 aa, Zea mays
  Clone ID: MRT4577_55043C.1.pep
KERGRERTAGSVSFPPLPSSSPSFQFASASALSTGAPLLQLWRPAERPLFRNLAESCPCSFPSMAVLVLHLKLHPGICLKPLSPRRQFPASTQPASGSDRALLGRRSSSTALSFPSSSPMAAPPATSSSAAQLPGARVPAPLHAARLQTEEQSTPGACSRPAARVWPWWSACWLSCHVETCGGEQGVLPFISCSAPSLLLFLSLGFVCDLCSNFVCSSSPWSSSAPHGARPQARSLCSRPAKVPCAHALVSIRCCARVLAGHLQLSHGAREASLLAACRSFFSVVVRAKL

SEQ ID NO: 320151 - protein, 247 aa, Zea mays
  unsure (1)..(247): unsure at all Xaa locations
  Clone ID: MRT4577_55044C.1.pep
GRTRRNPTPDPVAREPRPRRRPHPXSENAVLKAAWYGSELLGIAASLLRPAPSSPQEGDAGGGGDAEGEAAAVAGALDLDHAGVAEAIKADFARSYFVTGNLTLRAYEEDCEFADPAGSFRGLRRFKRNCTNFGSLLEKSNMKLTKWEDLEDKSXGTGVSAVSCRSPGGLFCQQPGIRNTTSMLNRGRCAGTSKIGTFQRWRSFGRFSGRADGSGRSVKACSGRCFMFQTKMHVRVRTRYVKVHSEE

SEQ ID NO: 320152 - protein, 137 aa, Zea mays
  Clone ID: MRT4577_55045C.1.pep
GIPVDHACARAADVPATELGFVAEAYRQVAEGRRILRWAHAYGYFLDPERDVTKRGLFDDLQNQANRWLECLHASAELERKELFGSGGEAAPVDGEAFRAYRQKVANLTGVTRKFIGNLVRAFETDLSEVVAVIPAN

SEQ ID NO: 320153 - protein, 84 aa, Zea mays
  Clone ID: MRT4577_55046C.1.pep
GFGDDQNPYTESVDLLEDLVIQYITEITYKAMEVGKTGRVTVEDIMYLMKKDPRKYTRVKELLLMNEELKKARKAFDEVKYAAL

SEQ ID NO: 320154 - protein, 166 aa, Zea mays
  unsure (1)..(166): unsure at all Xaa locations
  Clone ID: MRT4577_55047C.1.pep
RWRGPWTWTTGVAEAIKADFARSYFVTGNLTLRAYEEDCEFADPAGSFRGLRRLKRNCTNFGSLLEKSNMKLTKWEDLEDKSXGTGVSAVSCRSPGGLFCQQPGTRNTISMLNRGRCAGTSKTGTFQRWRSFGRFSGRVVGSGRSAKACRGALFYAPNQNACTCTY

SEQ ID NO: 320155 - protein, 82 aa, Zea mays
  Clone ID: MRT4577_55048C.1.pep
HCASSSMKKKGTAPNPVAEAIASVVHATVDTGTVPALAPSSTTFVCGASCTSRTLLGSVSVTGATSPSRMMIRNIRIATTHY

SEQ ID NO: 320156 - protein, 70 aa, Zea mays
  Clone ID: MRT4577_55049C.1.pep
HKPHTSCFFFLLPLSVFCFGTPTLPDPQMIYLDNNNNKQTEPKEQSLFNPFWNPSTQRPRSSWLPNDGGL

SEQ ID NO: 320157 - protein, 66 aa, Zea mays
  Clone ID: MRT4577_5504C.1.pep
HNFGSTNIITGFWEPKAVSHNRRDGFFFPGEKQAGTKADGGPFQYPLFKQKPPQALDDPPFFLAGF

SEQ ID NO: 320158 - protein, 55 aa, Zea mays
  Clone ID: MRT4577_55050C.1.pep
GSPRTAFEKETDSCRLMWSCRKRHRRRRDGGLSSTSRSRAIASRSVRSESRLLGE

SEQ ID NO: 320159 - protein, 107 aa, Zea mays
  Clone ID: MRT4577_55051C.1.pep
KVPPPPRKSFKKSPPPPPKERVLSPPPKKGCPLWDSFFFYGPPRVNPTVLSPKAFFLAPLFFFKNPKSFFFAPPFFKFGVLNFGASAQNPGCFSPLEKIKGVKKAPP

SEQ ID NO: 320160 - protein, 41 aa, Zea mays
  Clone ID: MRT4577_55052C.1.pep
NDQTKVCNLREEQQVAHGVPGVDERVETNLHKLVSNDADHD

SEQ ID NO: 320161 - protein, 75 aa, Zea mays
  Clone ID: MRT4577_55053C.1.pep
ASAGRRLGTADLNPTPVAGLIHSTVCTSEGEDNRVLAPLLLLVCYVRVGVGATVLHNKYECLVPACNPLLPRLGS

SEQ ID NO: 320162 - protein, 77 aa, Zea mays
  Clone ID: MRT4577_55054C.1.pep
MAPSSLRPPRHHPSPLVVLAIAVLLVLRTADGLPEAGGGGGGGGLYREILRDETVQRLKELGKVRQALQPVHSFVPA

SEQ ID NO: 320163 - protein, 235 aa, Zea mays
  unsure (1)..(235): unsure at all Xaa locations
  Clone ID: MRT4577_55055C.1.pep
KQEYIYAFAHDYGFSNRXIFGCNCKKFSSLLVKRLIIRMYQQNFLINSVNYPNQDRLLDHXNYFYSEFYSQILSEGLAIVVEIPLSLGQLSCPEEKEIPNFQNLQSIHSIFPFLEDKFLHLHYLSHIKIPYPIHLEILVQLLEYRIQDVPSLHLLRFFLHYYSNWNSFITSMKSIFLLKKENKKLFRFLYNSYVSEYEFFLLFLHKQSSCLRLTSSGTFLERIIFSGKMEHFGVM

SEQ ID NO: 320164 - protein, 47 aa, Zea mays
  Clone ID: MRT4577_55056C.1.pep
LDGLPEAGGGGGDGLYREILRDETVQRLKELGKVRQALQPVHSFVPA

SEQ ID NO: 320165 - protein, 210 aa, Zea mays
  unsure (1)..(210): unsure at all Xaa locations
  Clone ID: MRT4577_55057C.1.pep
TFFTSSLLLLVLTGASSIRKAPATGSGGLSGSRSGAGESGARGTCIASGPPRVARSPPSPAAAPAXWWLPRRRPPRQIRTNPRARRSRRRSTSPTPPPRXNSRSNKPVSSSAPGRPLRRRSTPRRPQPPRRQRQHPPPRPRCGASPCRSRGSPSSTRRPXAPRASSPSSPAARRGPTPERRKSVSSVPEXPRTRXRRDDGRRRSPRRRTR

SEQ ID NO: 320166 - protein, 67 aa, Zea mays
  Clone ID: MRT4577_55058C.1.pep
MFFLIFGMSHTFFFKQPKSTPSYFKYKKGHDTKMGDGLTLTSGTNHVGQKKKMGAGGKCFQTKAELS

SEQ ID NO: 320167 - protein, 148 aa, Zea mays
  unsure (1)..(148): unsure at all Xaa locations
  Clone ID: MRT4577_55059C.1.pep
RPVFRHRPPACGSFGDTQGLFVQTYDDAXDRVSFKXQGSTYGFGDSYFYMPXQSLVTVESSTRTQTANIDLCLWSDQNAMYGNSSDQKQGYNFXQNPLSWLNQPFTHVEQAQVVKIHAPVDLFDLDKTNRRRDSMIAWWHIYTTRTIT

SEQ ID NO: 320168 - protein, 88 aa, Zea mays
  Clone ID: MRT4577_5505C.1.pep
SVTVSITRSSRRTDDSDMKRVKAAGSISGLGALMCCRTAYLRTLTCDLTACTASCILFCSSRAEPKRSPRPSGETRLGVVGTWEWSGG

SEQ ID NO: 320169 - protein, 45 aa, Zea mays
  Clone ID: MRT4577_55060C.1.pep
MLASLLLVCSLPLLVALLELLLPPRLLCSVVRGDRSRSSSALLRG

SEQ ID NO: 320170 - protein, 99 aa, Zea mays
  Clone ID: MRT4577_55061C.1.pep
GASVRARISQNSGCPKCYPGTKGQWADISYPNVPLSGRSSDTCSPIPIMFPRCVGKNIHGIIRRTFQDTASWCTGLNHPVSTVGRSTPHVAPTGEEPYH

SEQ ID NO: 320171 - protein, 105 aa, Zea mays
  Clone ID: MRT4577_55062C.1.pep
MDRLPSTRSMRKYASEAGGLRAARQGPHGRSLTARTEHRMSTTALRTKSKWAASLLARVPFVPMRPVLSNLKEVLLETNLATLFPAVPLDMTDQCAHFGHVWMIT

SEQ ID NO: 320172 - protein, 130 aa, Zea mays
  unsure (1)..(130): unsure at all Xaa locations
  Clone ID: MRT4577_55063C.1.pep
DWSHTLQSIKSVVGNAVMLGEIINYVQSLQXQVEFMSMKLATVNPQVDLNSLPNVLPKDVHQSCGPPHFSLETSDASLSYLSQPHHGSPLGCMDNQSCMHPLDTTFCLAINPQYHFLNGVSDASSQLQLI

SEQ ID NO: 320173 - protein, 131 aa, Zea mays
  Clone ID: MRT4577_55064C.1.pep
IIKRTKNHPWRKSQLGKRHLDQIILLALRLLLNHLFFSFNELLLSYFYLLVTRILSHRLFGFVSGWVSFFARDGGTSGGLRNWPPLRLPRRAQPGPPHSARQVDSRRPSFKVRTPASHENGGTARGALSYS

SEQ ID NO: 320174 - protein, 70 aa, Zea mays
  Clone ID: MRT4577_55065C.1.pep
RWGYHNRVDTTKLMENPNKSINRTTEKIQNMANTPYSSWSDYSSRSDLPKTTAISNICCKLMKRAFLTAL

SEQ ID NO: 320175 - protein, 116 aa, Zea mays
  unsure (1)..(116): unsure at all Xaa locations
  Clone ID: MRT4577_55066C.1.pep
QARQRATRQAHTGETTKATEHQAIPKQKQPKKAHHHHATGAHDERTPQENREAITRTSXRTHKQTDEPKNDTTPTEPGHKSPLPXRTHPHAMQNTAHPHGENATATAEAAARTKKT

SEQ ID NO: 320176 - protein, 82 aa, Zea mays
  Clone ID: MRT4577_55067C.1.pep
MVTFFFKNFWNTTQGSGSPPKRPWSPPSFPILEREMRPFLNDPPRAPPPEFTYINVCVVVSSIISLKQFFFFQGPAPFLFSN

SEQ ID NO: 320177 - protein, 174 aa, Zea mays
  unsure (1)..(174): unsure at all Xaa locations
  Clone ID: MRT4577_55068C.1.pep
PSFPPPKGGLSKPVVSFCVLPFQRCPALTGQKVFCLYPVSLFXAACSGRKTXAAAASPDFSPKGMQLQQSKQLQQWRLGATRTRPGLGGGXRPVRLWAPSPAPGEKKEKPPPPPGPMAGRSNELGVGQRVQLDEQGLFFPKKKKKKKKKKKKKILNPKQNPPGFLEXPRKKTRA

SEQ ID NO: 320178 - protein, 120 aa, Zea mays
  Clone ID: MRT4577_55069C.1.pep
HRHIAPMIVISRRRMPQLLRTLHHMSVNRELLRHLIVHTHRTILMRIITNKCSRISTRLLPGPTRLVNSPKLIRHTLSTPITSSRRTRQTTILKQILRPNRLHNTQHTTRRRQNHRNTST

SEQ ID NO: 320179 - protein, 55 aa, Zea mays
  Clone ID: MRT4577_5506C.1.pep
GRGRRGHVGRIAPTLTTGRLRYYCRYKGLAPNAAVYRECISSCRGRHTHGRKLPS

SEQ ID NO: 320180 - protein, 86 aa, Zea mays
  Clone ID: MRT4577_55070C.1.pep
PKKSVLGLIIKSHGKDKQINKPLRLTLDNKMLNPCGKTGTNNGKATTKAYVICHHKDNCLKRNNKVKICKKQSIFFLRGNKGPFLC

SEQ ID NO: 320181 - protein, 188 aa, Zea mays
  Clone ID: MRT4577_55071C.1.pep
GPEHGGGGRGRPTQEAPFFFRAGRPPPTDFFFPGGAKLGWLAELPSPRAGGGRSFFFCPCGGEKNTLAGDQKAPFLRPGVGSFIQAAGLVCFPKGGRSVRPIFFLLVRSFGTPAWLFSFSCRFVWWEGLGAPFSFPPPPPPSLPPPCFHPPLGRAGWPAGPGRAFLAGPPRPKKKKKNKKKKIIKKKR

SEQ ID NO: 320182 - protein, 84 aa, Zea mays
  unsure (1)..(84): unsure at all Xaa locations
  Clone ID: MRT4577_55072C.1.pep
GAVPLLASVVCVLVSVSAGFWWPVGVFRRPVGVRXGXSVXLAVRFPPPLRCLXLXWACPPXXGSLSLVRCRRCALFPRFLXGCL

SEQ ID NO: 320183 - protein, 222 aa, Zea mays
  unsure (1)..(222): unsure at all Xaa locations
  Clone ID: MRT4577_55073C.1.pep
MRSRLFHYSLLLVLCFLSRSSAAMAAPRLPVRAVNLGGWLVTEGWILPSLFDGIPNNDLLDGTQLQFKSVTQNAYVAAENGGGAGLVANRPQASGWETFKLWRINEVTFNFKVFGNQFVGVKSDGSLVATAASPGRPETFRLVRSPGDQYRMRIMAPNGLFLQANKDASLTADYGQSTSWGDDDPSVFAVTRVXGLQGEYQICNGYGTAKATPIPRNHWSPY

SEQ ID NO: 320184 - protein, 111 aa, Zea mays
  Clone ID: MRT4577_55074C.1.pep
LRVHTLNEPPELLNKLNDHGTVDLGELVVTGDIVSDLADWWGVLVNLHKLLFYTYGLSEKDVETLGSITGLEYLCIHLFDAPDDPHELKAPLERAMDAHPNRPRLVWVDED

SEQ ID NO: 320185 - protein, 309 aa, Zea mays
  Clone ID: MRT4577_55075C.1.pep
LGIRLEDDIHVGFDDIGGLDMIIEELKESVIYPLTMPHLYQHAASLLSAPSGVLLYGPPGCGKTMLAKALAKESGASFINLHISTLTEKWYGDSNKIVRAVFSLARKMQPAIVFIDEIDAVLGTRRSGEHEASGMVKAEFMTLWDGLTSSNSSGIPAQIVVLGATNRIHDIDEAILRRMPKKFPITLPALEQRRRILQLILKDAKVDAEHFDLDHVSRLTAGMSGSDIKEACRDAAMAPVREYMRQHGRDGSKRPVDPADFRGIRTDDFLKHSTDQYMIEVLQQRQRGSNILANDVLAEIDETFVEPQD

SEQ ID NO: 320186 - protein, 55 aa, Zea mays
  unsure (1)..(55): unsure at all Xaa locations
  Clone ID: MRT4577_55076C.1.pep
MAAQLAVAFLALLSSCALLPAFLPEAERLAILRFGPDWDETXLPMAAGGGAVAAT

SEQ ID NO: 320187 - protein, 71 aa, Zea mays
  Clone ID: MRT4577_55077C.1.pep
DAHMEKQIIQFEKAPILALKIDWGKVYHCSLGVEEVANITEERQLVKQELWSERPDLALIIECQTNLFHVR

SEQ ID NO: 320188 - protein, 87 aa, Zea mays
  Clone ID: MRT4577_55078C.1.pep
SSYYTLLFTPPKRGVFLEKILVISRKDRGETPNAPPLVFYLPPKTNNVRLGQTPPQLAGTPFLNFKYPNLHLKLFTVHQPWPGFESH

SEQ ID NO: 320189 - protein, 217 aa, Zea mays
  Clone ID: MRT4577_55079C.1.pep
HWVPRGRPGLADGLITSPDIPGGRIPASSSSHACRRFPLQPMSISLPAQTWPPLRAPSPMAAVPCSQLPHLPHGRAPSPATGARQAHLPWRPAQFPAPSSITAHLWSLQLISLAVELSACAPGSCTLASLIFPGSGHSWPPLLHLESRSPSSVGCALPAAARACRPAYSSSPRPPAPSSPSHGVTTAVTSPTEEPSNAGPRRGSRLRRPSTRLREFV

SEQ ID NO: 320190 - protein, 93 aa, Zea mays
  unsure (1)..(93): unsure at all Xaa locations
  Clone ID: MRT4577_5507C.1.pep
TKTIGLMPLIFPGXKDSQKKPVWGEDPENCPSHATSELFPLSLQKNKRFFLVFKKNWNKKVSFKAFFPPPPAXKALPDPLDLYAPKFFQNFSP

SEQ ID NO: 320191 - protein, 76 aa, Zea mays
  Clone ID: MRT4577_55080C.1.pep
CKKTKRRFFFFCTWLTDSSASFLTEHNLYLFFLAQVVPSIFLSSSSSHTHWSLSWIQPQELPRLESSKIEHPLPPP

SEQ ID NO: 320192 - protein, 152 aa, Zea mays
  Clone ID: MRT4577_55081C.1.pep
HVGSSVGRRTLTIAADPVLPRAPVPLPPSAGRPKARAALRASLPAVRGPRHPAALLWLPPARPLLRCWLGSCLLPGYQPDACTFHFCRSISYLGLQITTGARDYISCRIQRHIGLYQPCRDNYSRDRRRCMHVRQGLYRSTRRYTLRSQLTL

SEQ ID NO: 320193 - protein, 135 aa, Zea mays
  Clone ID: MRT4577_55082C.1.pep
LSESRPANHHTPGDGCHNPTINAAIQPSVDSNPLACPDRAPCLQIDSAMTRTKPEAGRVPEPTPTQTSLVLLRVVSTMVLIICHEHRKNYADDIQPRHDGRTSLRAGGTALTLSRTRCYSRGGTRSATKCTGTAM

SEQ ID NO: 320194 - protein, 218 aa, Zea mays
  Clone ID: MRT4577_55083C.1.pep
MTRITAPPPPSSPPGSPPPIRHSPAPATPPSRRRGRHSPSPSLALTPSSASTSSRPKPRPAPKRAYSPAQWVPLNSHPVFSRRDGDGGGGDAAWDAAASRLYAWDPSACSVHRIGVRTRDPDAENGEVDVTVESAVPSELLTPESDLGYMVTHISLNTDGSSLLLVGSHNLNIMYVHERISEDGDTIICRTAPIASQILPSDSDGIKGLQASWHPFSN

SEQ ID NO: 320195 - protein, 80 aa, Zea mays
  Clone ID: MRT4577_55084C.1.pep
DSNQENQSRQPINGTQFLIVISHMCCKPKVVISFSHLNILITIAPIKKKTKFMVSNIQKYQIKCNRSNPLQKQLAYLFHL

SEQ ID NO: 320196 - protein, 176 aa, Zea mays
  Clone ID: MRT4577_55085C.1.pep
AQEVMKARDLAYASRPRLRMAERLLYGRDMAFAPYGERWRQARRVSVLHLLSHRRVLSFRRAREQEAAAMVARVSRARAAVNLNAALISYSSGIISRAALGVADVRTYGLDGGGGGAGEKLTKLFDDFEALLGTVTVGELLPWLAWVDTLTGLHAKAARTSAEMDAFLERVIADHR

SEQ ID NO: 320197 - protein, 215 aa, Zea mays
  unsure (1)..(215): unsure at all Xaa locations
  Clone ID: MRT4577_55086C.1.pep
ICWASDGNLGNNSERSPRISHRWIQCDGCGVQPIVGPRYKSNVKEDYDLCDTCFRRMGSEVEYTRIDKPILPHKLSRDPNLCRKIHSRASMKSKREKLESRFILDVTVLDGTLMSPSSPFTKIWRMHNNGSIMWPLGTQLIWVGGDQFALQTSVPLEIPLNGFPVDQEMDVAVDFVAPARPGRYISYWRLASPSGXXFGQRVWVHIPGGRSIFCQ

SEQ ID NO: 320198 - protein, 190 aa, Zea mays
  Clone ID: MRT4577_55087C.1.pep
CAPLGTQLIWVGGDQFALQTSVPLEIPLNGFPVDQEMDVAVDFVAPARPGRYISYWRLASPSGQKFGQRVWVHIQVEDPSFVSDNKTAAVNLNQPQESNITNTSSLPQESNMTNTSNLIDVNMEPANQVLDEHVYGTRMELLEPSIYREAAEPKKSPSAFSAAPPYPMVDVPSSSENASCFCAKRYCTCT

SEQ ID NO: 320199 - protein, 63 aa, Zea mays
  Clone ID: MRT4577_55088C.1.pep
LDYLLTSEVMLKGLNRVSWERVDVSFKKSRQRIFAHSTIQVKTYFLNSDGADVINHMIDHFVY

SEQ ID NO: 320200 - protein, 196 aa, Zea mays
  unsure (1)..(196): unsure at all Xaa locations
  Clone ID: MRT4577_55089C.1.pep
MLQVSWLQSHEESTYLTDSVSVMHWQIPLLRGSNKLEKMAYRLSWIAGRSGKHLFLKDTEDEKPPLLLQMVTDYGGLHFMSALRSFKRRVAYSNVCNDCILILINASSXTSHKPFDLSIXSNYQXTITMALTDKLVIXAGGHHQFVVNTSFLXEVMLKGLNRVSWEKXVDVSFKKSRQRIFAHSTIQVKNYFDSDS

SEQ ID NO: 320201 - protein, 85 aa, Zea mays
  Clone ID: MRT4577_5508C.1.pep
NNSILLSNTHLLNYVHTQAQNTYHFGSWNTKRTTLNIPSRSSINSHANSVSNLLKQIPKAWNADSGNRYTMGNMFLPTLANCRIT

SEQ ID NO: 320202 - protein, 213 aa, Zea mays
  Clone ID: MRT4577_55090C.1.pep
RACGGILGSLPPHDHAAASSPRPPGAPGTAGSGKQRLRWTSDLHNRFVDAIAQLGGPDRATPKGVLTVMGVPGITIYHVKSHLQKYRLAKYIPDSPAEGSKDEKKDSSDSLSNTDSAPGLQINEALKMQMEVQKRLHEQLEVQRQLQLRIEAQGRYLQMIIEEQQKLGGSIKASEDQKLSDSPSLDDYPESMQPSPKKPRIDALSPDSERDTT

SEQ ID NO: 320203 - protein, 385 aa, Zea mays
  Clone ID: MRT4577_55091C.1.pep
MASGDGDGGDGKKQSRRQLWAACLPRPGCFTVSAADEGPSAHGAGQGESKPKPTHLVVTVNGIVGSAENWRFAAKHFIRKHPEDVVVHCSGCNSAARTFDGVDVMGRRLADEVASIVDSRPELCKISFVAHSLGGLIARYAIALLYESETQKDSHEKFENHAVDYSSNQHSIGKIAGLEPINFITFATPHLGTRSHKQIPLLRGSNKLEKMAYRLSWIAGRSGKHLFLKDTEDEKPPLLLQMVTDYGGLHFMSALRSFKRRVAYSNVCNDFIVGWRTSSIRRQHELPEPRSFINNNRYPHIVYVEGPKIEDVDFLDAMIYEAKTTSEMEEVMLKGLNRVSWERVDVSFKKSRQRIFAHSTIQVKTYFLNSDGADVINHMIDHFVY

SEQ ID NO: 320204 - protein, 112 aa, Zea mays
  Clone ID: MRT4577_55092C.1.pep
VFDGWKHPIIPQGGLVLKQRFFNTTSWLDSLTDSCKRISFPPPRHRLHCRPLRRPPACSFPRRPGARGASENSPCSMLFPSFHCANARLAFIRSTLASVSLNPFAALGVVGD

SEQ ID NO: 320205 - protein, 175 aa, Zea mays
  Clone ID: MRT4577_55093C.1.pep
HASAHASAHASEDLKVPVHAGNGEFLMDLSVGTPALPYAAIVDTGSDLVWTQCKPCVECFNQTTPVFDPAASSTYAALPCSSALCADLPTSTCASSSSSSSSPCGYTYTYGDASSTQGVLATETFTLARQKVPGVAFGCGDTNEGDGFTQGAGLVGLGRGPLSLVFQLGIDRFSY

SEQ ID NO: 320206 - protein, 257 aa, Zea mays
  Clone ID: MRT4577_55094C.1.pep
MMYHAKNFSVPFAPQRAQDNEHASNIGGIGGPNISNPANPVGSGKQRLRWTSDLHNRFVDAIAQLGGPDRATPKGVLTVMGVPGITIYHVKSHLQKYRLAKYIPDSPAEGSKDEKKDSSDSLSNTDSAPGLQINEALKMQMEVQKRLHEQLEVQRQLQLRIEAQGRYLQMIIEEQQKLGGSIKASEDQKLSDSPPSLDDYPESMQPSPKKPRIDALSPDSERDTTQPEFESHLIGPWDHGIAFPVEEFKAGPAMSKS

SEQ ID NO: 320207 - protein, 201 aa, Zea mays
  unsure (1)..(201): unsure at all Xaa locations
  Clone ID: MRT4577_55095C.1.pep
LAGKKKKKKKKKKKKKKKKKKKKKKKKKKKNPLTSEAGLKKLEETLLTRSYIIGYQASRDNWVVNPWFWVAPSPKFINVPGGLNHIDALGRLTEITAKAQGXKVKSXRSSXAPTPNVVEPQAPFVEEDNNNNVDLFGDETKNKKKAVKKRAELAKVFGKKKKSGKSSVLFDGNPWNNKTDLANLEEPVRSVQMEGLFWGPS

SEQ ID NO: 320208 - protein, 64 aa, Zea mays
  Clone ID: MRT4577_55096C.1.pep
MGAHWLACRQPLERDAYLNLQKDMSIVNPSVCYNLGHVVRGAQFCWPPSKITARSSSVVNHGGC

SEQ ID NO: 320209 - protein, 589 aa, Zea mays
  Clone ID: MRT4577_55097C.1.pep
MAAASTPARSSAHLSQPVRVVLRVRPFLSSEAASATAPCVSLLGCHPGGGVTVQLKDQHTSRSEQYKLDAFFRQEDSVSQIFDQEVRAVIPSIFEGINATVFAYGATGSGKTYTMQGTEDFPGLIPLAASTILALCTGTWCSVEISYYEVYMERCYDLLEPKAKEIMALDDKDGNMQLKGLSWVPVRSMEEFQELYSIGVQRRKVAHTGLNDVSSRSHAVLSLRVSSTDVVKGKLNLIDLAGSEDNKRTLNEGIRLQESSKINQSLFALSNVISALNKNEHRIPYRQSKLTRLLRDSLGGGSRTVMIACLNPAEYQESANTVSLAARSCHIENFTSSSKQETPKLKIDMEAKLRAWLESKGKTKSIQRMDGLFSPIASKTPLSVSHMKQPTSSRIPCRVKAMDQDGGKIKKILFDPVVHVPTENIPREHRQTEVNTPKKVVLPSVTPCNEKHEASLRKALSPISSNMVPVEQQIPDNGNCPVLLEPQTPIEKRNIVEETPGATPLERFNALGSNLKEALVQQYLDLLNVANKEELQQLKGIGARRAEYILELREDSPKPFKTLEDLGNIGLSSKQIRDILKKTATGIFK

SEQ ID NO: 320210 - protein, 69 aa, Zea mays
  Clone ID: MRT4577_55098C.1.pep
QPPLFSYYCRTLGIRIALPMEVSVGYVQTISIGVKQTFVQLMPHLAYHIYIVPGSISYCILINPMQDTH

SEQ ID NO: 320211 - protein, 69 aa, Zea mays
  Clone ID: MRT4577_55099C.1.pep
AFVVKLVTHVGFYLCTIIIFKTIVKQDRFEHKRGAFKKKSNLGDNCLLNKPGGVEVSPDNYRLGYKNST

SEQ ID NO: 320212 - protein, 48 aa, Zea mays
  Clone ID: MRT4577_5509C.1.pep
PTRPPCNCYIPPAVVTRTDSYYIGRRSISSTSNMAIMINRLVTEVPNK

SEQ ID NO: 320213 - protein, 86 aa, Zea mays
  Clone ID: MRT4577_550C.1.pep
RLVFIYSGWVSPPLRLASLCVCRLGAELCGLACSRLVYGYCRYGVRFLLCCLLRCLSFLGSLVPAHVINMQLLTADLFGNLSKSVN

SEQ ID NO: 320214 - protein, 142 aa, Zea mays
  unsure (1)..(142): unsure at all Xaa locations
  Clone ID: MRT4577_55100C.1.pep
MRERISIHIGQAGIQVGNACWELYCLEHGIQPDGQMTGDKTVGGGDDAFNTFFSETGAGKNDPRAVFVDLEPTVIDEVRTGVYRQLFHHEHIMSGGEDAHHXCARGLYTLGGESGALCVERMRDVPDQRCAVEVFVVFHGVG

SEQ ID NO: 320215 - protein, 128 aa, Zea mays
  Clone ID: MRT4577_55101C.1.pep
FEAGKTGEVSKPPHKGGTPLTLIKGRGVTQTLMDNNKKRPRGGLWLPIHSQGGIRPRKLLSGGPQQAKDGPGAWVLDQGGSSTGSRQGPRGGRTPTGRGGSRPPRPRRNPGSPPRRANLGPPPFFLFW

SEQ ID NO: 320216 - protein, 65 aa, Zea mays
  unsure (1)..(65): unsure at all Xaa locations
  Clone ID: MRT4577_55102C.1.pep
QGFQLESSGRYEHEQRTLMVEKQRMESEEAQRRIFKAQPAMKEDPFPHPEKEPXPLSEVEQFVLH

SEQ ID NO: 320217 - protein, 48 aa, Zea mays
  Clone ID: MRT4577_55103C.1.pep
YLHKVLIIELLIWVSYHDRTRIVSLECDCFPGSGIDSALSFFIFFFYV

SEQ ID NO: 320218 - protein, 111 aa, Zea mays
  Clone ID: MRT4577_55104C.1.pep
KVKVILGHNATQEKSRKHKISTQRSLRREKTNIRGGPMSDLFPINKPALTTPLTNRKTRGERGLKNWPPRGERLSPFRPPRGYFLSPLEPEKVDCLLPPWLERVGEKPSRW

SEQ ID NO: 320219 - protein, 277 aa, Zea mays
  unsure (1)..(277): unsure at all Xaa locations
  Clone ID: MRT4577_55105C.1.pep
MADKQEHQQQPHGHHFLVVAYGMQSHVNPGRALAHRLARLSRIDGRPILATLSVPVAAQRRLFPLPTTMVDKEVCSDGVISYVPHSDGFDDGASAPKTAEDWARRRRATAASLSAVVARFAAAGTPVTCIVLTMVGPAMVDVARDHGIPFAVYWIQPAAVLAAEYHYFHGYDDDDPARAREVSLPGLRRPLPVRDFPSFLVDTTGSVLAKVITEMFRELFESMDRWRPKVLVNTLEELEAGVLAGMRRHWTWXAVGPMLGASADDARIHLVEHDDDV

SEQ ID NO: 320220 - protein, 66 aa, Zea mays
  Clone ID: MRT4577_55106C.1.pep
KHCLFLLIFLEQHASYLHLHLMLKITLQFSSLHFLFLTHNLDLPFNLALISNVKTLSLSLHRSYFT

SEQ ID NO: 320221 - protein, 102 aa, Zea mays
  Clone ID: MRT4577_55107C.1.pep
KGVHAMQVRYPHKSTPICVRKNTNINWATTDLDRKLNDRNDAAKQRPSTSQSSPRSPDDATQCDAITAESRLDSFHLRPPRHEKAAGSKKSSSNGTHPERTA

SEQ ID NO: 320222 - protein, 166 aa, Zea mays
  unsure (1)..(166): unsure at all Xaa locations
  Clone ID: MRT4577_55108C.1.pep
KKKKRGTQVKKERKGAGRKGAPRRSTHEAGGARAXKXDXXAXETNXANRTAXAGDDTXXXAEAPDXPXNXFPSGDDXDGXQAGTKXXXRTKKGTTTXAXXXDRGENXTAXXRASXGXXXXXQTXRKXXEXXXXXXGTXXGXXXXXQXXXRNXGTKXXXXEXXNKRR

SEQ ID NO: 320223 - protein, 43 aa, Zea mays
  Clone ID: MRT4577_55109C.1.pep
TPQSIGGACNFLHRFKSITYIMITRNISLGEKTNTIRPRTRTT

SEQ ID NO: 320224 - protein, 59 aa, Zea mays
  Clone ID: MRT4577_5510C.1.pep
FFSIPVPAFAASGCNPVIAAPCSWTPFPSPFPYCSCLIDWVFTLYVCHFTNLYFDLFIN

SEQ ID NO: 320225 - protein, 215 aa, Zea mays
  Clone ID: MRT4577_55110C.1.pep
SLPPDPLSSAPLSPRDLPRAKARSQQTQGHRRLCAYAVAVLRSCPPPPGDMAKAFYAVGFWIRETGQALDRLGCRLQGNYFFHEQISRHRTLMNIFDKAPHVHKEAFVAPSASLIGDVEVGQGSSIWYGCVLRGHSAVLQGCTVEDEAFVGMGATLLDGVVVEKHGMVAAGALVRQNTRIPCGEVWGGNPAKFLRKLTDEEIAFIAESAANYSNL

SEQ ID NO: 320226 - protein, 157 aa, Zea mays
  Clone ID: MRT4577_55111C.1.pep
MAKAFYAVGFWIRETGQALDRLGCRLQGNYFFHEQISGHRTLMNIFDKAPHVHKEAFVAPSASLIGDVEVGQGSSIWYGCVLRGDANNVQVGSGTNIQDNSVVHVAKSNLTGKVFPTIIGDNVTVGHSAVLQGCTVEDEAFVGMGATLLDGVVVEKH

SEQ ID NO: 320227 - protein, 81 aa, Zea mays
  Clone ID: MRT4577_55112C.1.pep
WNLRVQNLDTWYLGQEVYINVVNPEDSSTTLPENAIFCGALSSLQKEQLHRFQYSKAAPVPQWGGTISLLILLACFALWSL

SEQ ID NO: 320228 - protein, 78 aa, Zea mays
  Clone ID: MRT4577_55113C.1.pep
PDGDTVNGDTYKDIVLYTDACICGQIYLPAEVNAGKKLDRLMGESTEARLWRQSRQLPSAPYVRRTTSVDGSTTQAIT

SEQ ID NO: 320229 - protein, 120 aa, Zea mays
  Clone ID: MRT4577_55114C.1.pep
LIGWFYFHVSSKTLGFYVALKARELIPVYHLPWSSFRRFLASRCRHEHDGACTCDDDDDDGSASSGQSRRSPSVLEPLSRYAHAEVRSEAAGQFQLLFTDAASQQRRSGGRGNGRTAHSS

SEQ ID NO: 320230 - protein, 148 aa, Zea mays
  unsure (1)..(148): unsure at all Xaa locations
  Clone ID: MRT4577_55115C.1.pep
VVQENLLGYLQHLQFILFNHQVGVNLAMFLQALNLLPFITLVASRYAFLLILXILPFYVQAVANIVAFFIQQHWLTFYPPVVGNINAFLQQHHLIPFYPQNVANSVAFFXHHRLLPFRQDALPPPTPLLHRPPIGGAIFLDFSMLLCS

SEQ ID NO: 320231 - protein, 94 aa, Zea mays
  Clone ID: MRT4577_55116C.1.pep
NTLEYSDVRFSTMWNLPLFESYDPAQVLKEVLECKKGEPGFFIRIIGFSNNRRVQYKSFMAFKPTRFAEAYIRSWSIQWCLCEVPTGYRQCPFK

SEQ ID NO: 320232 - protein, 85 aa, Zea mays
  Clone ID: MRT4577_55117C.1.pep
VHVSVSTKHASSNKCSVWGTCPAETGSHLHYQQSHSLFSARRSQFTLHRSPCQSLLHTYLSTYDTHTHTQRDTPVAVAFWSAKSR

SEQ ID NO: 320233 - protein, 68 aa, Zea mays
  Clone ID: MRT4577_55118C.1.pep
SSSCYITRCGRICSTAVPSKAQTFVWSWARYVCAHLMAISELGAEGQELCSYHHVPYPLLLIPVPVSL

SEQ ID NO: 320234 - protein, 65 aa, Zea mays
  unsure (1)..(65): unsure at all Xaa locations
  Clone ID: MRT4577_55119C.1.pep
VGSAPEPVPRPALPEGPPCPAHAFVXXPLSLPARYPYRMASKGSIQPLSDLSTRETTQTLFRAVP

SEQ ID NO: 320235 - protein, 62 aa, Zea mays
  Clone ID: MRT4577_5511C.1.pep
VASHSFLWGLNQTFNFFLLIFSIMHFNHFISFLKKHCLYISPKRNNRIKTIIIILQLQYPIS

SEQ ID NO: 320236 - protein, 60 aa, Zea mays
  Clone ID: MRT4577_55120C.1.pep
VPKLENIFDLQKSAKLVEHPMLGRIEPLQVLLQSPSLVRHQLARCAGTHGHLGRAHPKNT

SEQ ID NO: 320237 - protein, 146 aa, Zea mays
  unsure (1)..(146): unsure at all Xaa locations
  Clone ID: MRT4577_55121C.1.pep
MRECIAIDIRRSAIQVGNACXELYCLEHAIQVDGQMPGDQTMGGGDDALNTFCSETGDVDHVPRDVCEEFEATAIDEVRSGSYSQLFHPEQLVTEKDDVANNFACGDYTNGKEIVXDLSFDQFTKLVDNXCTGLQRLLDSNTVGGG

SEQ ID NO: 320238 - protein, 106 aa, Zea mays
  Clone ID: MRT4577_55122C.1.pep
CLFQRYTSCTIDTMINSDKHTGQICTCSENSVPLSGIPESQADAQIDTDTGHRQTDVDSTADGLSMSDGDNSCIAKESETGTSASSISNEGPQDNATSRKKFRKLF

SEQ ID NO: 320239 - protein, 59 aa, Zea mays
  Clone ID: MRT4577_55123C.1.pep
AVLVTNYGIRNNRGRGRLRLVHHPPAGLCAHGKLALGSLRAVVNFKPIRCFAGSNSVWL

SEQ ID NO: 320240 - protein, 155 aa, Zea mays
  unsure (1)..(155): unsure at all Xaa locations
  Clone ID: MRT4577_55124C.1.pep
MAAALLRRALHLRRVLPSPAVTAAASQRLIPAFSTTPTPTPTTSQQNAATTTIDLSSDESRRRLLNRLVYRSKQRGFLELDLVLGTWVEQHVHAMDEANIRALLQVLDLENPDLWKWLTSQEQPPEDLNSNPXQPWVRGWDDIKKGKDGPKYGNQ

SEQ ID NO: 320241 - protein, 214 aa, Zea mays
  Clone ID: MRT4577_55125C.1.pep
MWRGTAGPAGIHICSRASPYHSAPLSRQAAAQATMVAALLRRALHLRRVLPSPAVTAAASQRLIPAFSTTPTPTPTTSQQNAATTTIDLSSDESRRRLLNRLVYRSKQRGFLELDLVLGTWVEQHVHAMDEANIRALLQVLDLENPDLWKWLTSQEQPPEDLNSNPVFAAIKSKVTDNLTKHASPETRSTPGQPWVRGWDDIKKGKDGPKYGNQ

SEQ ID NO: 320242 - protein, 229 aa, Zea mays
  unsure (1)..(229): unsure at all Xaa locations
  Clone ID: MRT4577_55126C.1.pep
FGTTLVLCFKLLFGPXAAIFLSAVVILSCFTNVPQLQLSLSYTGELDSSYVAPAPVPKCDIFRGEWVPDPAPPQDTNETCDFIQEHQNCVLYGRPDMEFLKWRWKPDGCDLPRFDPHRFLQVVANKSVAFVGDSLARNHMQSLFCLLAKVEKPKDVSVTDRADPNMILYYEGYNFTMYLFWSPFLVRSEEDVAGVFKLYLDEPDSRWLSVASRLDYVLLSGANWFTRQS

SEQ ID NO: 320243 - protein, 517 aa, Zea mays
  unsure (1)..(517): unsure at all Xaa locations
  Clone ID: MRT4577_55127C.1.pep
MENPAPPTNPAXPRRRRRGSCXDFQQSVRLKYVKLGYHYLITHGMYLLLTPLMVLVAVYLSTLSPRDVADLWAHLRLNLISVLACSTLLVFLGTAYFLTRPRPVYLVDFACYKPXPERRCTRDTFMRCSRLTGCFTDASLEFQRKILERSGLGEDTYLPPAVTRVPPNPSMDEARAEAREVMFGAVDELLAKTGVKPKDIGILVVNCSLFNPTPSLSAMVVNHYKLRGNVVSYNLGGMGCSAGLLSVDLAKDLLQTHPGSYALVISTENITLNWYSGNDRSKLVSNCLFRMGGAAVLLSNRRSDRRRAKYELVHTVRTHKGADDRCFGCVTQEEDGEGLVGVSLSRDLMAVAGDALKTNITTLGPLVLPLSEQLLFMATLVAKKLLKMKKVKPYIPDFKLAFEHFCIHAGGRAVLDELESNLALTDWHMEPSRMTLHRFGNTSSSSLWYELAYSEAKGRIRRRHRVWQIAFGSGFKCNSAVWRALRSVNPAEETNPWMDEIDRFPVDVPKVSKVSSD

SEQ ID NO: 320244 - protein, 50 aa, Zea mays
  Clone ID: MRT4577_55128C.1.pep
LISTVISVWACKMGCTNIQILNLSTNLILRFISERGLLREGLTPFHPLSI

SEQ ID NO: 320245 - protein, 51 aa, Zea mays
  Clone ID: MRT4577_55129C.1.pep
NREIVFGVDSLWCLFYLKNKGVFSFSRPWFFPLFFKVKLLNLGWPLFWGFG

SEQ ID NO: 320246 - protein, 214 aa, Zea mays
  unsure (1)..(214): unsure at all Xaa locations
  Clone ID: MRT4577_5512C.1.pep
GAWAAAWAAAWADAWADAWAAAWARQLMAAANLANNQSNTELMGTKQEASASATNQTPGVGAIGNNALEHATPLNSYHNMLRSSSANPVLLQQEAXSVFKGPTAMHSGIQLEAARSFRGPNQVQLQHPAAIQHQQPMPQQSNFQGFGGVNPQYQHHVLNQLLQEVKNNNHVKAQQLPPDAPKASGGLAPGVAIPNVAAAGEKGGKAYIVAWRFR

SEQ ID NO: 320247 - protein, 63 aa, Zea mays
  Clone ID: MRT4577_55130C.1.pep
MTSLDMTNILNLTCICLNSVLCPTSSFFTILPYAYGIFHPIANVMPVIPAIFFLLAFVSTKVL

SEQ ID NO: 320248 - protein, 37 aa, Zea mays
  unsure (1)..(37): unsure at all Xaa locations
  Clone ID: MRT4577_55131C.1.pep
XXLSFTALEQWXSSLYDLVCVSWAEAETHLVNVMASN

SEQ ID NO: 320249 - protein, 61 aa, Zea mays
  Clone ID: MRT4577_55132C.1.pep
VLFGHCHFIISDKLVYDRGQAAFQYDIRHVVLPTEPMNPNGLVSISCQYHLSSSALRQHKR

SEQ ID NO: 320250 - protein, 71 aa, Zea mays
  Clone ID: MRT4577_55133C.1.pep
APLNVCLKKPTWMFTFRLGHRLGAERGPSTGYIFACLINDHGTQTYELHKPFFPWALWFGHMPNHTTLPVV

SEQ ID NO: 320251 - protein, 98 aa, Zea mays
  Clone ID: MRT4577_55134C.1.pep
LPDAGLELGVRARRIDWRVPGSVHATGSGFYTYSSGGNHTWGLTNNPPVGEKLASTASWLGLTNIRPNTPALGWGLHDWWGLPEKGTVTWFITSAGNT

SEQ ID NO: 320252 - protein, 163 aa, Zea mays
  Clone ID: MRT4577_55135C.1.pep
LEEVDPDLVNAGKQTVTFVPGASTFDSSESFGMIRGGHVDVSILGALQVSAAGDLANFMIPGKLFKGMGGAMDLVANPEATKVIVATEHLCKDGSSKIVQQCSLPLTGARCVSTIITDLCVFQVDREKGTLTLTELAPGVTVDEVKSKTDATFAVADEIVTME

SEQ ID NO: 320253 - protein, 119 aa, Zea mays
  Clone ID: MRT4577_55136C.1.pep
MIERCTNLDWYKGPTLLGGLRPPYTGRKRTLDKLFRLPLHNDVKIMTLEKGNGSTVNVCIHPSKVMGTKLKLDKDRKALLDLKARGRAVDKANGKFTADDLATAVGGAADTGASFHDID

SEQ ID NO: 320254 - protein, 561 aa, Zea mays
  unsure (1)..(561): unsure at all Xaa locations
  Clone ID: MRT4577_55138C.1.pep
MGSTEKQEPEASPEIIFRSKLPDIAITNTLPLHRYCFERLPEVGERPCLIDGGTGAVLTYAEVDRLTRRLAAALRRAPLGLGRGSVAMNLMLNSAEFVLSFFAASRVGAAVTTANPMSTPHEIAGQIAASGATVVFTESMAADKLPAMGDKLTVVLIDARRDGCLHFWDDVMASVPDEEAGGGEQDLDFDPDDVVALPYSSGTTGLPKGVMLTHRSLSTSVAQQVDGDNPNIGLTAADVVLCSLPMFHIYSLNTILMCGLRVGAAIVVVRRFDLRRMMELVERHRITVAPLVPPIVVAVAKSDEAAAHDLSSVRMVLSGAAPMGKDIEDAFVAKLPGAVLGQGYGMTEAGPVLSMCLAFAKEPFRVKSGAXGTVVRNAELKIVDPDTGRSLARNLPGEICIRGQQIMKGYLNNPEATRNSIDAGGWLHTGDVGFVDDDDEIFIVDRLNGSSKYKGLQVAPAELEALLITHPGIADAAVVGKQVEPEIGEIPVAFVARAKGCDDGLTEDDVKQFVAKEVVYYKKVREVVFVDRIPKAPSGKILRKELRKRLQLQHQHLQQAV

SEQ ID NO: 320255 - protein, 58 aa, Zea mays
  Clone ID: MRT4577_55139C.1.pep
PQILSEPSDRHTMPWIAPIRTNMTQLNPNHLSLDLRSRLVLAMGAATRSSPPTSESMV

SEQ ID NO: 320256 - protein, 217 aa, Zea mays
  Clone ID: MRT4577_5513C.1.pep
HWYLEAAGSSPHGAGCELRVRLRPSLLWLCLSSITTPSLHARIWSSLGLQLACTPAAVLFLFVFSAGRASPLGNGARPSRLDLLQLLHPLFLGARQGPLLHLLSRLNSHGRLYARARRTPQHMLPARPPRRAAPSPWRPCELLLPRPVSSSSLAGCRRCFSDLVSTLNRCSTPYRQFSSSFLGYNLVSFCESCASCVRVEPKDFKEKEALVLRPVNE

SEQ ID NO: 320257 - protein, 97 aa, Zea mays
  unsure (1)..(97): unsure at all Xaa locations
  Clone ID: MRT4577_55140C.1.pep
CCVINVVLADTVENVVVSDLVVDSPCCLLTGHYGXTAPMDRIINAQAFTDSGIXGXMSSHXAMAINPXNPIVTELPKLAHADISDKPVWDHVMLLFH

SEQ ID NO: 320258 - protein, 78 aa, Zea mays
  Clone ID: MRT4577_55141C.1.pep
TMIPKVSTGVTIKNIFPPSEKWIKPSVREKCCCVTTLFPVPDFNISKTAALIFPGGRYELVTVPQEQSCPLGPCFYVK

SEQ ID NO: 320259 - protein, 79 aa, Zea mays
  unsure (1)..(79): unsure at all Xaa locations
  Clone ID: MRT4577_55142C.1.pep
DKSILNKLLDASDSGITYLCLRTVGXGPNKKYPYEQPFEKKNKSLLFLIKKKLLALNQPNISLESCNFYIERHSPRPRT

SEQ ID NO: 320260 - protein, 102 aa, Zea mays
  unsure (1)..(102): unsure at all Xaa locations
  Clone ID: MRT4577_55143C.1.pep
PPRVKASSQWILHSIAHGAHLGGGTCFYVTSHLRTNDLPALQVXLLRHLNSGIFGTRSDGHTLPSEVTHAVMLLRINTLLQGYSGIRFEILEAITKLLNTGV

SEQ ID NO: 320261 - protein, 166 aa, Zea mays
  unsure (1)..(166): unsure at all Xaa locations
  Clone ID: MRT4577_55144C.1.pep
DKLTDAQLKGNILTLLVDGHDTTTAGLTWLVKFLGENPDVLDKLXEPLCPCPSGSGGFHLKLYVWLQEEHLEIKESLNGSSRLRWSDVNNMPYTNKVMNETLRRATILPWYSRKAAQDFSIDGQWQRRPHRTGGQTATWTDAVESLTRRVRDQEGDVGEPSCRIPA

SEQ ID NO: 320262 - protein, 189 aa, Zea mays
  unsure (1)..(189): unsure at all Xaa locations
  Clone ID: MRT4577_55145C.1.pep
AYCTKNSXRRASTGXELMAAXSSTSHRRXLCLAACRLXLRASAAASAQRTGTSXCTPWAXIPHNXPAPEARRVLRXQAGTCGCRGRRLLVRPSVKRRCXCRELAXDIPAXYCRCTXLSILMVGAIPPGPDAQLEGRLEDLPACPREVHRGFVCTLVTEAECNLATISGVAECPWILCGGSMRSQLLPRA

SEQ ID NO: 320263 - protein, 65 aa, Zea mays
  Clone ID: MRT4577_55146C.1.pep
LFKISVSKLRHLMLTTTSYSTTSHLPHTTTPSTTPSSPTTNSSNPISFSIIILTNPSSSTLITFS

SEQ ID NO: 320264 - protein, 450 aa, Zea mays
  Clone ID: MRT4577_55147C.1.pep
MVAMVTTHIILLLQHLYQMLLVEGDTIMPIDPTQGAFIADTLSPNSFLFGPRPEWFRSSEGTGSFPSPAASPQPSRGVPGSYDQNNFPMASRMSSPHQKPFYGLRSTTDSYGRGFSHGGMFPQASNYGGSVTSFGLNGRSLISTEKGRRRGRGNALICSCNGPLDFLNEQSRGPRATKPKKQPEVDSKDEVPTTGVGRELYNKPDFVMEYTNARFFIIKSYSEDNVHKSVKYGVWASTTNGNKKLDSAYREAKEKGEHCPIFLLFSVNASAQFCGVAEMIGPVDFEKSVDYWQQDKWTGQFPVKWHIVKDVPNNLFRHIILENNDNKPVTNSRDTQEVKLEQGMEMLKIFKNHDDDASILDDFEFYEEREKALQENKARLHQQHLPSSIVIEPKKPLTAPSDLVGHITKSFAEAVRLGEAKTVSHLTEKVSGGDPSIPVKHVEVKQSGLS

SEQ ID NO: 320265 - protein, 207 aa, Zea mays
  Clone ID: MRT4577_55148C.1.pep
MDKQEPVANGEQTIGLAEKPKELPVASKDEKATVPPILVDSNAFNLPSEGQTQAGTSNMDGGHNGAHNFYASQAQPFYYQGSGSENPTQAWDTYPPYMSVEGLEVGPPVVYNEDPSLMFHGGYGYDPYYSPIATPVPNAVSGGGQLYSPQQFFSAPYYQQSVPPDMQYLSSPTPISQGDTIMPIDPTQGAFIADTLSPNKLPVWPKT

SEQ ID NO: 320266 - protein, 34 aa, Zea mays
  Clone ID: MRT4577_55149C.1.pep
GRKDLQATNHRAPLDLTHEYITSKFTQLRLIYAH

SEQ ID NO: 320267 - protein, 43 aa, Zea mays
  Clone ID: MRT4577_5514C.1.pep
AGARKTTQKILSFWYKKTIWTQHTNYWGIEMIPLYNEKINCWK

SEQ ID NO: 320268 - protein, 148 aa, Zea mays
  Clone ID: MRT4577_55150C.1.pep
FPCWPPRGPWFLPPVLGGGPLGQDGFFSGPAPPYFFGAGNHHKINWGLKGQPKFFALLGAGYKGGPKSPGFVFSPKGFSPQVRFLKRRAFPFAIFLGCFPGPVVPPGVPYWFLGYPSYFKWWGGGRFSPFWAALRDQLTRCFGGFFEG

SEQ ID NO: 320269 - protein, 69 aa, Zea mays
  unsure (1)..(69): unsure at all Xaa locations
  Clone ID: MRT4577_55151C.1.pep
SGXQXXAAXXAVXXTXXSWXXTHXAPXIXPVXXTQXFXRVTRAXXALXCLRACXRPHSLAXAQXPVDXI

SEQ ID NO: 320270 - protein, 113 aa, Zea mays
  unsure (1)..(113): unsure at all Xaa locations
  Clone ID: MRT4577_55152C.1.pep
LLRGVGALAAQALRAHGPRGVAATRSMASGGGXPTDEEQATGLEREIMIAAQRGLDPCNMLPPQAASGTKEDPSLVPSVSIKRIVGCICEEDNCTVIWFWLHQGEXQRCPTVD

SEQ ID NO: 320271 - protein, 75 aa, Zea mays
  unsure (1)..(75): unsure at all Xaa locations
  Clone ID: MRT4577_55153C.1.pep
TKDAFYNPHTNDGPKTLEAHLAGKTYVGGEXITKDDIKGFAAEPAKPGAEFPNAARWYKNSFTRNSPKKPGMGDA

SEQ ID NO: 320272 - protein, 98 aa, Zea mays
  unsure (1)..(98): unsure at all Xaa locations
  Clone ID: MRT4577_55154C.1.pep
QQPXARGQEXXXAXXXAQNXKAQQRQQXXXGNPXAXXXQQEERAXNQXXAXNXXXXGQQQXPXXXXXXAHPQXXXPXNQRAATNPXXERQQRRRPPXS

SEQ ID NO: 320273 - protein, 96 aa, Zea mays
  Clone ID: MRT4577_55155C.1.pep
PGSGPPAPVPRGFPPRAGEGVFFFPFPPAPLGPCKFPSPKTGKAWGNLKIYGISFWCQSVKRKGVKLFFLFVVIRAVLPFPPYPFPPLGLVVVLNS

SEQ ID NO: 320274 - protein, 129 aa, Zea mays
  Clone ID: MRT4577_55156C.1.pep
MSIFEYNGSAVVAMVGKNCFAIASDRRLGVQLQTIATDFQRVFKVHDKLYIGLSGLATDAQTLYQRLVFRHKLYQLREERDMKPETFASLVSALLYEKRFGPYFCQPVIAGLGDDNVPFICTMDCLGAK

SEQ ID NO: 320275 - protein, 75 aa, Zea mays
  Clone ID: MRT4577_55157C.1.pep
IKHFTHGFFAQRLFLGNRPAQRLPFFFFCGNTIPPDIFFWRTRRLFCSRTFSPCPLNNPTSPSIVKKKPPVIFFS

SEQ ID NO: 320276 - protein, 84 aa, Zea mays
  Clone ID: MRT4577_55158C.1.pep
KKKRGGPPKKKKKTFFFPKDKAPQKKGGGGANFLGSLIRRGKKNPFSFWAQAGKFFFFFKTQFLWGHQKGPRVLPDFGRKELFK

SEQ ID NO: 320277 - protein, 136 aa, Zea mays
  unsure (1)..(136): unsure at all Xaa locations
  Clone ID: MRT4577_55159C.1.pep
SVLNSRSAQALSFSVCAAPALTTVAMTGGGGASIRMRAQSTYSVXLIRPQGQVXLQVPSVVYIMLYTEEEGIGLPYSXRSGSCSSCAGKVVSGSGVQSAQRYLDSDQIPPVWVLTCVAYPTSPVVIKTHKQDDLIS

SEQ ID NO: 320278 - protein, 208 aa, Zea mays
  Clone ID: MRT4577_5515C.1.pep
MSLGQSRQILLSYLVHMHSRLRSLGQGQVHVGPITWEVLPHTLFTKTLENYLFVCQIYVDDIIFGSTNESTCEEFSRIMTQKFEMSMMGELKYFLGFQVKQLQEGTFIIQTKYIQDILNKFGMKDAKPIKTPMGTNGHLDLDTGGKSVDQKVYRSMIGSLLYLCASRPDIMLSVCMCARFQADPKEAHLRAVKRILRYLVYTPKFGLW

SEQ ID NO: 320279 - protein, 66 aa, Zea mays
  Clone ID: MRT4577_55160C.1.pep
QIVYIGDVVVIDVPSSVFSFVLTLERASDRPIRRVGYLYRMLYRHFRLWMTSLGLRVYLSPQFPQR

SEQ ID NO: 320280 - protein, 84 aa, Zea mays
  Clone ID: MRT4577_55161C.1.pep
KGETSQGNKFGNAGALPKALLYNPAGLNLYRLPQKKSITGKRAGQKVGTSKTGGPKFIRCFLCLIHLSPLRTIFPLFFFFFFAF

SEQ ID NO: 320281 - protein, 132 aa, Zea mays
  Clone ID: MRT4577_55162C.1.pep
MTFKRRNGGRNKHGRGHVKYIRCSNCAKCCPKDKAIKRFLVRNIVEQAAVRDVQEACVHDGYVLPKLYAKVHHCVSCAIHAHIVRVRSRENRRNREPPQRFRRRDDGPRPGQGPPRPGGAAPAAAPAAAPRT

SEQ ID NO: 320282 - protein, 152 aa, Zea mays
  Clone ID: MRT4577_55163C.1.pep
MPFRAPYPSPRQRRLRAPPAMTFKRRNGGRNKHGRGHVKYIRCSNCAKCCPKDKAIKRFLVRNIVEQAAVRDVQEACVHDGYVLPKLYAKVHHCVSCAIHAHIVRVRSRENRRNREPPQRFRRRDDGPRPGQGPPRPGGAAPAAAPAAAPRT

SEQ ID NO: 320283 - protein, 132 aa, Zea mays
  Clone ID: MRT4577_55164C.1.pep
MTFKRRNGGRNKHGRGHVKYIRCSNCAKCCPKDKAIKRFLVRNIVEQAAVRDVQEACVHDGYVLPKLYAKVHHCVSCAIHAHIVRVRSRENRRNREPPQRFRRRDDGPRPGQGPPRPGGAAPAAAAAAAPRT

SEQ ID NO: 320284 - protein, 235 aa, Zea mays
  Clone ID: MRT4577_55165C.1.pep
SNEVDILPVLLSGKRGEERTPLDWETRWKIALGAARGVAHVHAENNGRFVHGNIKASNVFVNRDGYGCISDLGLAQLANPIAARSRSLGYCAPEVADTRKASQASDVYSLGVLVLELLTGRSPVQVSGGRGSEVVHLVRWVQSVVREEWTAEVFDGALLRVPDIEEEMVEMLQIAMACVSRTPDRRPKVADVVRTVEEVRRSGTGTRPPSPPATAADADQSEMESSSSAAAAAAQ

SEQ ID NO: 320285 - protein, 67 aa, Zea mays
  Clone ID: MRT4577_55166C.1.pep
GYHKAKGPGPTDLIKFASRTCRSLFCRVTTVQHVFLRASQRTNLRCWDASSDFIKGLGHPSGNVQGN

SEQ ID NO: 320286 - protein, 152 aa, Zea mays
  unsure (1)..(152): unsure at all Xaa locations
  Clone ID: MRT4577_55167C.1.pep
LTFGKSKIHGFGVFAKVAHKAGNLMVEYLGEIVKPPFSNTKKRQIYNSLVGAGTYLFRINNKRVLNAIRVESLARLINNXCKPNCFXRAITIFGNKHIIIFAKRDINPWEKLTYNYRFFSSDKQLPCFWGFPKCRGVFNDFKAKKHPVKIQV

SEQ ID NO: 320287 - protein, 54 aa, Zea mays
  Clone ID: MRT4577_55168C.1.pep
NSSRRSVSNKTNKPLISSDGCHTSLFNRYIFENFSSPGFLSLRHTSQYLIAFLL

SEQ ID NO: 320288 - protein, 146 aa, Zea mays
  Clone ID: MRT4577_55169C.1.pep
ACNDNCPKSFSTLSRGCGRERMDSNSCLVDYVCICARTHRKPQPDPGVDTGNALRAWDRAPGRGWTRHDPARRQTHAGRGAHVRAHAVANWHLPNARAWCRRPNDVGERRSTSLTSACGWGLHARCAGQAFLQNSFSRFVGPLNTY

SEQ ID NO: 320289 - protein, 93 aa, Zea mays
  Clone ID: MRT4577_5516C.1.pep
EKLGIENIGPPFFFRFFFILSLLQIYSLVPDGWLDEPAFEHLTNALFLNEPKWHAVAGAFPGRAARPTALTRVFFVSEANAAGTAFVPVGSRR

SEQ ID NO: 320290 - protein, 84 aa, Zea mays
  Clone ID: MRT4577_55170C.1.pep
DTSVDSCMTSFAMAMTPFGSECNMSLAAYLQSRPLARVRTAGLGPSTWPLPTCRTARSCRPRATTTAASPACLLSIRTGGWTGG

SEQ ID NO: 320291 - protein, 193 aa, Zea mays
  Clone ID: MRT4577_55171C.1.pep
KNCSPNIETYSKMIKAFLRGRRVADALQMFDDMLIQGVLPNTGMITSFINPLCTFGPPHAALMIYKKSRKAGCVISLKAYKLLLERLAKFGKSGIVLDIWEEMQECGYQPDKEIYEFIVNGLCNVGKVDAAVSVVEESLRNGFCLGRVVYSKLNNKLLEMDKVETAYNLFKKVKHARALTNSRNYCRANGWHF

SEQ ID NO: 320292 - protein, 288 aa, Zea mays
  Clone ID: MRT4577_55172C.1.pep
ELVLVARLQHKNLVRLIGVCLEEDEKLLVYEYMPNRSLDTILFDSQKSKELDWWKRLEIVSGVARGLQYLHEESQLKIVHRDLKPSNVLLDSAYTPKISDFGLAKLFHMDQSQGATSHIAGTYGYMAPEYAMHGQYSVKSDVFSFGVLILEMVTGRKNSNSDQSVDLLSLVWEHWSSGTIQELLDPFLMSHRAPPDQMAKLVNIGLLCVQDSPADRPLMSSVNVMLSSDTISLQAPSRPTFCIQETEDHSRPYSDAYKRALKLQSSTDRAAMSRTRLRSRSLNQDKHA

SEQ ID NO: 320293 - protein, 100 aa, Zea mays
  Clone ID: MRT4577_55173C.1.pep
QTIFLIWDLFKFSLKNSITPLCTTTSHYFHPIQIFPYAHVTHNRYRHHTKNQTTTYPPQLLSHPYKHTFSPDPTILTKPKPLYSLHMVHLIRDLYSLIPA

SEQ ID NO: 320294 - protein, 101 aa, Zea mays
  unsure (1)..(101): unsure at all Xaa locations
  Clone ID: MRT4577_55174C.1.pep
PQKGPPGVGPPRGGGQLGVPLSGAPGPVDPPPPPGXRANNAXQGLLGLCGGGGHPQGGQPHARGFPPGGVFPGHPQGEVGQPGHPHGGGRFPTRNQNPQGV

SEQ ID NO: 320295 - protein, 51 aa, Zea mays
  unsure (1)..(51): unsure at all Xaa locations
  Clone ID: MRT4577_55175C.1.pep
LLPTLSCICLCCXLFCVRLTLVVACTSQFCCRCSYWLSLPRVLSFCPCCWR

SEQ ID NO: 320296 - protein, 126 aa, Zea mays
  Clone ID: MRT4577_55176C.1.pep
SRPAGPTLANSFRGDPEQETQQRDGSRLAACATMMSRSSPPPPSLPAGSGGFFTRYTKLRQVLADHIAHCAPGNPVDSVRRHLSRAYPWKNHPFCLIDQITAVLWPVQQFQSMMSQISCDHSLYCE

SEQ ID NO: 320297 - protein, 196 aa, Zea mays
  Clone ID: MRT4577_55177C.1.pep
MEVVGGVSLRPSPAPARIRTTLPPVDVGGRFLLRRVAGRQPARRALVVEARGGRGWSERQMQQQRRAPLLPKIEDDGNPRFVIFIRTANVYFWYPLNIITGGTTAKIMLAAKDNFLGKYIYKDTLARNLAAVIYKEKGNIRSALTTSNVIELPKKDELKTVVDKVKDFFGDVTAGAKESFAQITGSGCQQGGRGSR

SEQ ID NO: 320298 - protein, 249 aa, Zea mays
  Clone ID: MRT4577_55178C.1.pep
MEVVGGVSLRPSPAPARIRTTLPPVDVGGRFLLRRVAGRQPARRALVVEARGGRGWSERQMQQQRRAPLLPKIEDDGNPRFVIFIRTANVYFWYPLNIITGGTTAKIMLAAKDNFLGKYIYKDTLARNLAAVIYKDEDEIIDTAKEQYRVLKTENEFRYGYKVVEKGNIRSALTTSNVIELPKKDELKTVVDKVKDFFGDVTAGAKESFAQITGSAVSKEEEEADSKEKFRSKRRKKQRKSKEGLKTEK

SEQ ID NO: 320299 - protein, 52 aa, Zea mays
  Clone ID: MRT4577_55179C.1.pep
AVLACNLEGLNFSELTGHNIFRIVGHLATASKCVSRREISHYRDLDLLLHKG

SEQ ID NO: 320300 - protein, 106 aa, Zea mays
  Clone ID: MRT4577_5517C.1.pep
EVPCVFFSHSLLVSLRGLLTSQRVFNHILHFILHAPISFFYSTPTGIILNKSSNYQTFLHFEISNILSSSFSSIITISWHHSSYFIFYHSQLFYLYSPTSNFLFSI

SEQ ID NO: 320301 - protein, 100 aa, Zea mays
  Clone ID: MRT4577_55180C.1.pep
LLAAQCRYQSCLLAATLAVWKQCNCKHHPWMVSICIIIFTFCCSNTCQLASTTLMYGRTINVIDSPRLLDMSIASDNACKNTVKMDEHGYRWHTSRLNGY

SEQ ID NO: 320302 - protein, 551 aa, Zea mays
  Clone ID: MRT4577_55181C.1.pep
MSGDHAKREIVTDGNKSASSERTHSRESDHKHKEESSSSIKSQRRGDKKKKMKKVVYYETDSSSPSTSGSDSSSTTSKRHERKKYSKMSLRYSRISKRTPLLSVPLGKPPSFDVRNLGSTKWDDHEMVKVILRSLVFRNPTQVQLIHGDPRYKLMSPKEVIGKFVSFELMIKGSKQIINLEQGGTSTPEVQPVAFKATGEKKEESTSSRLPIDASKLDNEEMALIIKSFCQILKERKGKDYKPRSKKVCYKCGKSGHFIAKCPFSSDRSDDKRGKKKEKKRYYKKKGGDAHVCQEWDSDVGSTDSSDEDAANIAVNKGLLFPNVGHKCLMAKDGKKKKVERLNACIDSIVNLKNDNASLIAKIDKLNESISSLKIESDSLISKARDLNVCNDSISCLRNENATLHAKIEELKSCKPSTSTVTHVSICTRCRDINVDAIHDHLALIKEQNDHIAQLTTKINEHEIQNEKFKFARSMLYNGRRPGIKDGIGFQQGSNVKLNAPTRLSNYVKGKAIMAQDNEGYILYPDGYPEHKIRRIHARKSHSVSHHDFMY

SEQ ID NO: 320303 - protein, 84 aa, Zea mays
  Clone ID: MRT4577_55182C.1.pep
QAQAGMNYNLGDQPHHFLPQSGGPNPQKRKMQFPLPLGNTGPNHFYKTLTTTTNNDQSHPMTTLLNLRGFLPPEPNLKTADGHL

SEQ ID NO: 320304 - protein, 131 aa, Zea mays
  unsure (1)..(131): unsure at all Xaa locations
  Clone ID: MRT4577_55183C.1.pep
FGTRRDRLIRFEPGGGGGSAAGRGEPTRSDYRSGYDEVAAAAEPAAALGGGARRGRRRAAPRGQTGLCPTAAARGRGRPPPPPSGSCSTRSAASSRSSSASASRVSSSSCSXSXPRSTAXXPPPPRPRSFA

SEQ ID NO: 320305 - protein, 587 aa, Zea mays
  unsure (1)..(587): unsure at all Xaa locations
  Clone ID: MRT4577_55184C.1.pep
MAGAVSVSAHRRQWRYTWEALTHLPLLRLYLLPRPALSFRIPSDLRADLRLQGSLLHLSFSLPGDGAAVALRVPVPRVLVDPSAPVECRAAAAGDHLELRLALVLPVDHPVVAAAFPPPAGAEPPASLALRDDLKGLSTGDVHLYCKNCSSRLTKQPLRKIMEMPSVDWVDVSDNWFGGCCTSFGGAGEKLVSQFIRAYGRLEGTSLLDATSITVETDDLETDLVSQVACSALSRHFVAIKEDIFNVSVEKDHTTGKIKLKNSEEQANITATHAQPPIILEEGPSVSCSETNGVTQTNQPGISQTEADTDAYFEKSENDCCVEKVGKSKKEVXVAGRSMPXCCVNGYSEKAEDNPSQLSLVNEKKQNMLEIKRDYKLTKTISLGSSFIVKASNLLNDFEWVELLCGQCSSPLGSYPSQCSLGPADGRLRLFKCYTSTEIPVTGSHDVFRGHTLERVFVNLLLEVAEDEISFRTLVRDLKTKRPMLQLVLLSSKAWLSSGCCYENDIDGSHGTTDLQPSVKLLYSDYSNASEADLRIVEAWASKYRAEELYMMKRQIDELTECLSSGMDNFPVSCSSLEGMRLSSLRR

SEQ ID NO: 320306 - protein, 68 aa, Zea mays
  Clone ID: MRT4577_55185C.1.pep
PTRPRTRGLTLGQTRRYNRVGYIHTLVRIKAPYPACPRSYGSRYHHPQLVSRHELIKATCIHASCMHA

SEQ ID NO: 320307 - protein, 110 aa, Zea mays
  Clone ID: MRT4577_55186C.1.pep
SVSTLDLPFPLGAGLQTRCPRFVPLPVPGAGGQHRLGSRILWLPARGGRRRCGRRWSPLHCWTTCRWWSSEPVQRFTMHSLWTDYYQRTCSGRCRCTQLAIDNILALKEV

SEQ ID NO: 320308 - protein, 130 aa, Zea mays
  Clone ID: MRT4577_55187C.1.pep
TKRLKHTCWWVDTNVQTTCNFNRRFFSKRNLCFPNLAYPQVIIWDKGPPRVVKKGLLGGMPPPVTPGLEKGLDQILRDNPGTDQIFGGQGGAEFREETLDRLYPAPEFCKHPVKRGILLSLERRDSPPGL

SEQ ID NO: 320309 - protein, 88 aa, Zea mays
  Clone ID: MRT4577_55188C.1.pep
KGKGKQTDGCGDGDNGSGKGDKGKGKGKGVKSADGLGTSTYVKTRNVLRRKHGQINEAYKKLLDGWLNNGDKIPSAEFSKVVQKYTEC

SEQ ID NO: 320310 - protein, 113 aa, Zea mays
  unsure (1)..(113): unsure at all Xaa locations
  Clone ID: MRT4577_55189C.1.pep
PGDPXXAXXSPXRPGXXAATPGPXRXSSRXTAPQGRXXSVNQGRPXQEVSXXQQQGAPGAXAGERRGAGPGGPSLLAAGWCPARAXPRRDGPGVQRPVHVRSGALLLLLVPDG

SEQ ID NO: 320311 - protein, 183 aa, Zea mays
  unsure (1)..(183): unsure at all Xaa locations
  Clone ID: MRT4577_5518C.1.pep
FFFLDPASAVXALDHSDAESEFLRKIAKIATAEIVTSKEFNVDWQRAAACLLVAIGSHDPDLMILEIFLHFSGPTSALPAMLQILADFASSEAXVHPTVEGRAFACFTYPMKCARWPTACFCEXFKCWCHAAWHYLGDAPSELPLDNDVMSFMNSAFELLIKVWTGSRDLKVMXSSVEALGEM

SEQ ID NO: 320312 - protein, 149 aa, Zea mays
  unsure (1)..(149): unsure at all Xaa locations
  Clone ID: MRT4577_55190C.1.pep
AKKSPVTGPPPPKQGGATNAGGGGPPKTRGKYFKPKPGGXPREQGAQRVSPPQPIMGAPNKNPPGGKDFPTPKKPPGRGXRHHGPPGPRXPGXPQIEDAHGGPGGGKPNRGXFKTPERGPPPGKPAQIQQGGHSSQELGPPGKTKKNPW

SEQ ID NO: 320313 - protein, 107 aa, Zea mays
  unsure (1)..(107): unsure at all Xaa locations
  Clone ID: MRT4577_55191C.1.pep
MAISRLSVLVAALACCCLVRLAQCGGGGQNYTSMFSFGDSLTDTGNLLVSSPLSFNIVGHFPYGMTYFHRPTGRCSDGRLVVDFLAQAFGLPLLQPYLSRXKDVRQG

SEQ ID NO: 320314 - protein, 78 aa, Zea mays
  Clone ID: MRT4577_55192C.1.pep
MATTTRSCANSATVLHGIRHRLRADGPAAILGIGTANPKNCVPQDQFADWYLDVTKSEHLAELKAKTKKICENILLLL

SEQ ID NO: 320315 - protein, 159 aa, Zea mays
  unsure (1)..(159): unsure at all Xaa locations
  Clone ID: MRT4577_55193C.1.pep
MYRFLISWHARTQRARAELPPPLXPPPMPPPEPPPPPKPPPAPPPKPPPLPPPKPPPAPPPKPPPLPPPKPPPLPPPNPPPAPPPKPPPLPPPKPPPLPPPNPPPAPPPAPPPPPIPPPKPPPLPPPNPPPTPLPAPPPRPPPAPAPPPAPPPAPPPTX

SEQ ID NO: 320316 - protein, 103 aa, Zea mays
  unsure (1)..(103): unsure at all Xaa locations
  Clone ID: MRT4577_55194C.1.pep
RRPTRTRTPXLILSXVXLTSHPLRLSPLLLHPKPXVNSNPHLLSSPRPRRRLSEVFICASPATIIHYVGHHPIMSSAAVNGLSRSDRCIIPHIITYPFQTLNT

SEQ ID NO: 320317 - protein, 60 aa, Zea mays
  Clone ID: MRT4577_55195C.1.pep
NSIPVGAFLLFCLFVLHCILDTVLYATPVLKFTSLIKQEEATSQITRWAYVSGSCHPTVG

SEQ ID NO: 320318 - protein, 61 aa, Zea mays
  Clone ID: MRT4577_55196C.1.pep
QSQLSSFYSPLNVCNDQCHESLYSPYSCRQSSSLYNCICCSTAARHHVVCNHCSDKCFMLH

SEQ ID NO: 320319 - protein, 252 aa, Zea mays
  Clone ID: MRT4577_55197C.1.pep
MWCQSCKEGYDEEDAGTCKECYEEASETEEELKREIDDLRSRLLFLRLPSPTLDAASAPNCDLLLHAIPSTGAGGERDAGRTPDTPAVPAHRVILASRSPVFRAMLENEMEESRSGVIKIYDVSYDILRAFVHYMYTAEALLDEQMASDLLVLAEKYEVKHLKAYCEKFITSKVNDDNAITHYAFAHRHSAKQLLEASLSVLMANMSTLSDREEYKELVEKDPRLVVEIYEAYLNRQVNTAAGKDTNCSNRK

SEQ ID NO: 320320 - protein, 69 aa, Zea mays
  Clone ID: MRT4577_55198C.1.pep
LSRVRHRQSLQACAIPFSLLSPRRGAEGGGGPFCCCSCFPALQDVISRASAERRTLLSLLMSDYQGRDG

SEQ ID NO: 320321 - protein, 241 aa, Zea mays
  unsure (1)..(241): unsure at all Xaa locations
  Clone ID: MRT4577_55199C.1.pep
VLVMVMKCTDVYVMNVGDSRAVLARRPEPDLKNVLGKASQDLQQXSKVEIMRELEAHDMDGLQAVQLTPEHSTAVQEEVTRIKGQHLNDRNAIVNGRVKGKINVTRAFGVAYLKQPKWNSRLLEAFKINYVGTDPYVTCAPSLCHHRIGSQDKFLVLSSDGLYQFFTNKEVVDQVEALTAAEPDGDPAQHLVGELVNRAARKAGMETRQLLDIPRGARRHYHDDVSIIVISFEGRIWRSSV

SEQ ID NO: 320322 - protein, 74 aa, Zea mays
  Clone ID: MRT4577_5519C.1.pep
NIHSRTHRNTNTHESTHMDYKSRNKNTNMHESHTWITNRATKMPLCMGVSGLRVFSTCVRRFLLNIMPGGCLTP

SEQ ID NO: 320323 - protein, 186 aa, Zea mays
  unsure (1)..(186): unsure at all Xaa locations
  Clone ID: MRT4577_551C.1.pep
VLHDXIRIHEWQAIRDSNLFDAEGKERRVSACLRLSYLNLPXNLKQCFTICSLFPKGPKIDKERLIDQWIAHDMFASADAVDYLEYTGYECFSSLVQMSFLXMWKKXYGRVTCKMHDLVHDLAHSILKDEILVTRFPERWERGTGTRNTVRLLKQHGTLRGIQLIHVHSMRGTCSQRFRNAVRERL

SEQ ID NO: 320324 - protein, 145 aa, Zea mays
  Clone ID: MRT4577_55200C.1.pep
MLFHQSAQVFLRLTSAETDARIEKHKKHPGRRGNPGDMHHHRIHYDKYHPGYYEKGGMRYFHKLPNKFYCPAGNIERLWSMEPTDKAAEGGDDKVPQIDVTQLGYFKVLGKGVLPPKPIVVKAKLISKVDEKNINAAGGGGVLTA

SEQ ID NO: 320325 - protein, 104 aa, Zea mays
  Clone ID: MRT4577_55201C.1.pep
DMTGVVVDIGDGAPQIVPVVNGYVIGSSIKSFPFSGSDVTQFVSQLLQEFKKHDRKPDKYIKHWSAVKPKTGVPYTIDIGYERFLGPEVYSYFCIKIAILFLCS

SEQ ID NO: 320326 - protein, 117 aa, Zea mays
  Clone ID: MRT4577_55202C.1.pep
SSPCIGSEQGEGQRAPRLLPRRGGGSGGWRGRRGRCARVGSEPACQKVTPVVSEGREGGGGRLRLRRGGKGEVPEIEVVVEGRCGRRRERDGVHCAVPGSRGGARVHRWSPMMERED

SEQ ID NO: 320327 - protein, 120 aa, Zea mays
  Clone ID: MRT4577_55203C.1.pep
SLAATLEFWANHQQARARGGSSISKLKPKKATTHAGSSSGNNYIDVYHTKFEAKSARDGSWYLVEEFLTEKFCESGDLQVLVRFPGFGVEEAEWIDVRTCTLRQRSVPYKATECADVHIW

SEQ ID NO: 320328 - protein, 138 aa, Zea mays
  Clone ID: MRT4577_55204C.1.pep
PGSCMITATGELRCYQESNIWSSRGARWRGSVERTSQMRSHCQYTYDSGITKVRQVLMADVYVHQACRIRVVRHHTSMRSYRQALRVLVEVMDVRGILSWQQSVRSTVPSSSSSIAIHMLRLGSLKSLLGAGRISGVW

SEQ ID NO: 320329 - protein, 435 aa, Zea mays
  Clone ID: MRT4577_55205C.1.pep
MDATARPAIVIDNGTGYSKLGFSGNSEPSFTLPTVVAANESFLDQTELLSSANWIAQYNAGIMADLDFFIGDEALSRLRSSGLYTLRRPIRHGQVHDWDTMERFWQQCIFNYLRCNPEEHYFLLTDSPVSTPESRECTGEIMFETFNVPGLYISVQSVLSLSAGYAYLKSISDDDSDTGSDMTGVVVDIGDGAPQIVPVVNGYVIGSSIKSFPFSGSDVTQFVSQLLQERGELLPPEDSLDISRKVKEMYCYTCSDIVKEFKKHDRKPDKYIKHWSAVKPKTGVPYTIDIGYERFLGPEIFFNPEIYSADFSTPLPELIDNCVQSAPIDTRRALYKNIVLSGGSTMFKDFHKRLQTDIKKIVDDRVAATNARHRVEVRPIEVNVVAHPIQSYAVWFGGSLAASNPDFFEFCHTKEDYEEHGASICRTSPVFKGMY

SEQ ID NO: 320330 - protein, 129 aa, Zea mays
  Clone ID: MRT4577_55206C.1.pep
FVQRVRKGTNGGVTIDGLLAAAAAGFSIGLAFVLIGFFTTQCAPDVFWNQLLAIPLATAAGLCGSLIDSFLGATVQYSGFCSVRKKVVGVDGPTVTRISGMNILDNNGVNVVSVFLTTALTAVACPYIF

SEQ ID NO: 320331 - protein, 83 aa, Zea mays
  Clone ID: MRT4577_55207C.1.pep
EVRFVYGNLGPNGLCHPVWGFFPARIIFWLENAKDGGGQRLFCHPKTVGCFLGLVQFAQRVEVPFQAAFSIWPPPPIFGCIPD

SEQ ID NO: 320332 - protein, 50 aa, Zea mays
  unsure (1)..(50): unsure at all Xaa locations
  Clone ID: MRT4577_55208C.1.pep
QXXGSXRALTPXLSWLXNGRVGCCCWVNKXRRGFNAXXVGVEMERNLXWG

SEQ ID NO: 320333 - protein, 66 aa, Zea mays
  unsure (1)..(66): unsure at all Xaa locations
  Clone ID: MRT4577_55209C.1.pep
TEHYKLSSHNKAKNASFXHGANFSITGATSLYTDLFRKRGLGKTVWKSCSLLTQIQWLLIPQAIAL

SEQ ID NO: 320334 - protein, 63 aa, Zea mays
  Clone ID: MRT4577_5520C.1.pep
RRGGQNTPLPQKFLLVYPKVGGLFKTPNLELFDPPPLYAPQFRSMRAPLMERRKIGLIMGPRE

SEQ ID NO: 320335 - protein, 243 aa, Zea mays
  Clone ID: MRT4577_55210C.1.pep
MMSSSSDAAAALELQESGWEELRREARKLEGDLDVKLSSYARLAARSSSSASGAASPTADRSSWKSMEFEIQSLLGKLQDVNDAMSRCAASSATTTSVSQKLARHRDILHEFTQEFRRTRGNLSSMREHADLLNSVRDDITESRASGGMSPRVHLLRERASIHGSINQIDEVIGQAQSTRVALNNQRAMFGDIQGKVKQLGEKFPVIRGLLGAIKRKKSKDTIILSAVIAACTIFLIIYWLSK

SEQ ID NO: 320336 - protein, 73 aa, Zea mays
  Clone ID: MRT4577_55211C.1.pep
RSGTHPPAMVRACVSGPVWLLPSSRVASPVGNSSGMHHPLLARQGMNVRSKFQLPLGSIVWSKKKKKKKKKRS

SEQ ID NO: 320337 - protein, 193 aa, Zea mays
  Clone ID: MRT4577_55212C.1.pep
MVHVNFYRNYGKTFKKPRRPYEKERLDAELKLVGEYGLRCKRELWRVQYALSRIRNAARELLTLDEKNPRRIFEGEALLRRMNRYGLLGEGQNKLDYVLALTVENFLQRRLQTIVFKNGMAKSIHHARVLIRQRHIRVGRQLVNIPSFMVRVESEKHIDFSLTSPLGGGPAGRVKRKNQKKASGGGDAEEDEE

SEQ ID NO: 320338 - protein, 107 aa, Zea mays
  Clone ID: MRT4577_55213C.1.pep
RSADCNLPGQAPIVSEQTRRSEASEHGNHAASSRFNPIRHSSIKPIRSEPAHHLKNKTTRFEQTNNRARFTVARSYQTPYLETAGVGMLRCRREARRTRRFLDRGNI

SEQ ID NO: 320339 - protein, 142 aa, Zea mays
  Clone ID: MRT4577_55214C.1.pep
VHASARLGERDQQEWLSGERFLTGCKRRESTFLTRRERFRREFLRRVVPWEKGSLSWQNFPYYVNDNARLLLSECVASHLRHKSVTSEYGSRLESSGGRILLQSSPGTELYRERFVRALAHELQVPLLVLDSSVLAPYDSGE

SEQ ID NO: 320340 - protein, 222 aa, Zea mays
  Clone ID: MRT4577_55215C.1.pep
MAAKPAETTGSNKAESSFSSSMAVAADVYKGELTPLQRHVAFFDRNKDGVIYPAETYQGFRAIGAGVTLSAFSSVFINGLLGPKTIPENEKAPAFKLPIYVKNIQKGKHGSDSGVYDANGRFVAEKFEEIFKKHAHTRPDALTGKELKELLKANREPNDFKGCMFGKIYCRLGGFTEWKMLYSLCKDEKGFLHKDTVRAVYDGSLFEMLERERNAKESTKTK

SEQ ID NO: 320341 - protein, 111 aa, Zea mays
  Clone ID: MRT4577_55216C.1.pep
VRLNISLTPQESWTDLPFRMEYDLLLSYKSLDWYTLNICTPIMEVMAFLDMMYMKISTNTLSTYMMSICKMCEGRLLGIHCQYEMAIVFSFLSWSVDSEIFIRCVNVDCSV

SEQ ID NO: 320342 - protein, 60 aa, Zea mays
  unsure (1)..(60): unsure at all Xaa locations
  Clone ID: MRT4577_55217C.1.pep
MVVSKMNKDAQMRAAINQKLIETGERERLKELLRARLIECXWRDQLKAHCKEVIKEKGLE

SEQ ID NO: 320343 - protein, 68 aa, Zea mays
  Clone ID: MRT4577_55218C.1.pep
KNRGKQTLKKKFEPSHVSGMTITRVFGGYDRWPTRTPYPGNERSTLLIFKHGYDNGKSSACTKLSKGG

SEQ ID NO: 320344 - protein, 130 aa, Zea mays
  Clone ID: MRT4577_55219C.1.pep
RPKFRPLLTFLTTFFYCPPLWNLFKPVWAVLGLPPPRFFWSNFPLPGTRFPWLPLTFFFFFRSVWAFLFPGNRFFFFFPPLFVPLVSHPPFIFPRSSPPPFFFFLPPPFGPLFRFAPPHPLPLIFFWGGS

SEQ ID NO: 320345 - protein, 82 aa, Zea mays
  Clone ID: MRT4577_5521C.1.pep
MTGGYAPKHGSWQQGWRGHIGRPEKRGTTYTLAANRQRLFPNFWHTAIFNTFRRFRHQVLYVARPFIVAYTLMDWAAERNDT

SEQ ID NO: 320346 - protein, 82 aa, Zea mays
  unsure (1)..(82): unsure at all Xaa locations
  Clone ID: MRT4577_55220C.1.pep
VFGQKVDDDVKTETPPYALGEEKKGLLDKIKEKRSXGSNKKPEAAVEPGPSVHAPAPALHAENVSSPDGKEKKGLLGKMMDK

SEQ ID NO: 320347 - protein, 207 aa, Zea mays
  Clone ID: MRT4577_55221C.1.pep
GEGATATTYRVVMGGNDASDAAAEEARGEVVVVKRLRRRDGASRDDERRRRELTREMGTWRHANVVGLRAFYASTEELLLVFDYMPNGSLHSLLHENRGPARVPLGWQTRLKLAQDAAHGLAYLHGVSGGNLSHRHLTSSNILVDGSGNARVSDFALLQLLAPAPPGEALQKQDVHGFGVILLEILTGRQAGEYGSADLPRWAHTVA

SEQ ID NO: 320348 - protein, 53 aa, Zea mays
  Clone ID: MRT4577_55222C.1.pep
GAHFKTLGRSQIILRKLTTTPYSSGHLPLFSYQTTNNTLAKNPFSPQPVLISL

SEQ ID NO: 320349 - protein, 157 aa, Zea mays
  unsure (1)..(157): unsure at all Xaa locations
  Clone ID: MRT4577_55223C.1.pep
VWFCGFLGFGRLAVXXXGLQLALAACVFXRLVXQLRPLSLAPLPVLTLASLLLLLFLPSLCRLDVVXPVACLPLRVLASHPLALAAVAAFRLRRLLRQFLPALSLLALVFPAVFLLLLQLLSSSPLVVGFAPSFLRHRLLALFVPALXTQLAVVSPA

SEQ ID NO: 320350 - protein, 111 aa, Zea mays
  Clone ID: MRT4577_55224C.1.pep
GPHLFFFLTVYIRTKAQKVRNWAGAVQGDTKRDPHKKPAGSQTPGAPATRSPSKNNFQIWPATKGDRGQRPLGRPLFWGAEICSYGGSGRRRVWFTPPLLHPTRGACLRGC

SEQ ID NO: 320351 - protein, 143 aa, Zea mays
  unsure (1)..(143): unsure at all Xaa locations
  Clone ID: MRT4577_55225C.1.pep
QSGSNPVEAKSPGRSLAPCRRRRLRAPRLLSVTSLKWVMSSSSGPHFQVKIEDTIFHYSTFMSKLKMTDMRRHSVDVPLSRTLVQLKRLRSLAGSSDKLQWASSHLLPTTWCGRLLLAMXWLWSSAGRHIITRLKRRGRGSRA

SEQ ID NO: 320352 - protein, 88 aa, Zea mays
  unsure (1)..(88): unsure at all Xaa locations
  Clone ID: MRT4577_55226C.1.pep
PLAYLLQSAEEPDRHHEGVARCPRSPGSRASATSRIQRRLRCSHRAVITAAGIAPRTCTRAFTXPARGTDAHVRRIADIIYTPLAIST

SEQ ID NO: 320353 - protein, 137 aa, Zea mays
  Clone ID: MRT4577_55227C.1.pep
SSYRTRLPPGPPTTQGVDPTCTGARRARSEERAVDWLSPASLPSSGGPSMCSYATIRILTKPTPKQETSLPAERAVYRYGTRTSSRSYTRHPPLQLTRTANVHVSPTLPKGPRQRRNNPLNSGRESVGSCRVSGLES

SEQ ID NO: 320354 - protein, 214 aa, Zea mays
  Clone ID: MRT4577_55228C.1.pep
SPPQLLQHITTHVPCRLQHMFPANSVESQRSALRDSGVAHRGEEEVAEIADVRARWIRTGHGATDNALFNRIGACGARRGARRRLRRSQRKQQINARDIGLVGLSATQICGREQTHARGRKPTLEDTSGAPTPVESRPLPEAASTRRWSSTGVYSTGHAAQRSPGHGAGSQLAGVWTWEISTGMEMIGMEMRRDLVVDVLGGREGPMKNVAPAG

SEQ ID NO: 320355 - protein, 126 aa, Zea mays
  Clone ID: MRT4577_55229C.1.pep
EHVAIVKKHTKRFNRHQSDRFMRVDPSWRKPKGIDNRVRRRFKGQAAMPKIGYGSNKKTRHLMPSGHKAFVVNNVNDVELLLMHNTTFAAEIAHAVSARKRIDIIARAKQLGVKVTNDQARVKTES

SEQ ID NO: 320356 - protein, 250 aa, Zea mays
  unsure (1)..(250): unsure at all Xaa locations
  Clone ID: MRT4577_5522C.1.pep
MISSEKLCLGADGNRLSHPDAGYLDSVCADLSDLGLPSDMGHDLREEKTESLVKIGDSHPCPIGRDDVCLDDMFDDIFGDWPLTGDPILWDDIRSENSDDYVVPDSDEGDRFADVKTNCPGRNIPRQLAKKMDSAWLRSIAEQNEKYDARCQEILSQNEDADLPPVPLDVFPEATGLCVERGCCYHIEYMTHDTSTTNSDLGYSGPELMLQIFXSLRLSSFSASYSYPINVYGVFAGSDVLEPLRNMSSP

SEQ ID NO: 320357 - protein, 145 aa, Zea mays
  unsure (1)..(145): unsure at all Xaa locations
  Clone ID: MRT4577_55230C.1.pep
MRIAGFLSTICAAALVVAEQRTAQIYVQAVQSSPSLPQPLAEIAYDAASLISTEVVSYEAPELPETASLVRIGIYDPKSEKWIAGTTAASTENFDRGYAPTLLLSVDESXDVRSVTLKGIRVDAGQTRDFGPXAIVIADXEGSQP

SEQ ID NO: 320358 - protein, 55 aa, Zea mays
  Clone ID: MRT4577_55231C.1.pep
HPLTRPVVLVHAVTQPGSERVVRAPAPLSACGDRIPGSTLAESEFLILIPASEPW

SEQ ID NO: 320359 - protein, 104 aa, Zea mays
  Clone ID: MRT4577_55232C.1.pep
RLQLNHGIGLIVIGLLDIRLLMHLSILWLIYRPSSTAQSHALDGGKDHDPHATSYAVTNTHSNMDPVVQISISQLHDITALKANQGYRKRHVSHEKISDETAIA

SEQ ID NO: 320360 - protein, 716 aa, Zea mays
  Clone ID: MRT4577_55233C.1.pep
MFGSRVQDEVEMQRRPNNRIFPDERQNQSKSLYQTTRADRFGANRIDLKNPEKLKVLNESNKPWHQRILDPGSNIVLRWNRVYLVACLFALFIDPFFYYLPLIRQNGNGSSCVAKDQGLSIRITVLRSLADLFYMLNIAIKFHTAYVDPKSRVLGKGELVVDIKKIQRRYIRTDFFVDILAAVPLPQVTVWLIMPAIKSSDYNIRNTTFALVIVIQYVIRMYLIIPLSNQIIKAVGVVAKSAWGGAAYNLLLYMLASHITGAIYYLLSIERQITCWDQQCVAEYNDTHCNFSFISCENNGSNDYSVWANKTKVFANCDATNSSISFNYGMFSSALSKGAVSSPFLEKYFFCLWWGLLQLSSSGNPLVTSAFITENAFAIAIGAISLILFAQLIGKMQTYLQSISKRLEEWRLRQRDMDEWMRHHQLPSHLQERVRRFVQVKWLATRGVEEESILQALPADIRRDVQRHLCLDLVRRVPFFSEMDNQLLDAICERLVSFLCPENTYISREGDPVNEMLFIIRGKLESSTTNGGRSNFFNSIILRPGDFAGEELLTWALLPKTNVHFPLSTRTVRSHTEVEAFALRAEDLKFVANQFRRLHSKKLQHTFRFYSHHWRTWAACFIQAAWRQHQRRKLAESLSRWESYSWWSAEDHPTGDKPRQEGTSSGGGGGTRTIAEGAIAHMHKLASASRRFRTEDIAIRRLQKPDEPDFSADHFD

SEQ ID NO: 320361 - protein, 90 aa, Zea mays
  Clone ID: MRT4577_55234C.1.pep
TYLQSISKRLEEWRLRQRDMDEWMRHHQLPSHLQERVRRFVQVKWLATRGVEEESILQALPADIRRDVQRHLCLDLVRRVPFFSEMDNQL

SEQ ID NO: 320362 - protein, 79 aa, Zea mays
  Clone ID: MRT4577_55235C.1.pep
SCPRCWQGISTFAPWHFPHLFRCFHQVFVGFTRSKIWRRVVCMSVAVRELLGSSWPPINIGCFGWGPSFTPSRVENEYI

SEQ ID NO: 320363 - protein, 131 aa, Zea mays
  Clone ID: MRT4577_55236C.1.pep
HLSADHSSPADACRSDLDSDTVGLQRLYRAGDYCIIINMYTILYYYVPTDKHPSNVNASSTIYLVRCIYIYVPDHSPIVNASCTLIYYHFAFLTLSFRYATPEEEGQQGRPAAGGCCGCAAAVAPLARRHL

SEQ ID NO: 320364 - protein, 61 aa, Zea mays
  unsure (1)..(61): unsure at all Xaa locations
  Clone ID: MRT4577_55237C.1.pep
PGGSXFLSSSIHQQLVEIALDEPGALVENHPSCRKNXEGQKVLPNGQSWRHQMLLLCXLLK

SEQ ID NO: 320365 - protein, 80 aa, Zea mays
  unsure (1)..(80): unsure at all Xaa locations
  Clone ID: MRT4577_55238C.1.pep
RAGVRAXFSXSYHVHYGLLPXHRXSXXLGGVGXPXFSTTKSFXAFKXPXSLPVGGPRVFCRSCQQRMVRWLPPVCSMSRG

SEQ ID NO: 320366 - protein, 154 aa, Zea mays
  unsure (1)..(154): unsure at all Xaa locations
  Clone ID: MRT4577_55239C.1.pep
MCEGPLXGIDLGPTYSRVCMFLHDRDGIIANDHRNRTTSXYQACIDSEGVDGEDTENYLDMNPIDTVLRRPLXVDRRFTDSTVDTEDKLWTFEDVDGPGDDPMINGQYXGEERYLAAXQISCMIXILMRAIGEAFPGSTVKNAGVAVPAYLSDS

SEQ ID NO: 320367 - protein, 68 aa, Zea mays
  unsure (1)..(68): unsure at all Xaa locations
  Clone ID: MRT4577_5523C.1.pep
IVWKKPFLNLECMVSASPFDMTQELAVYLGVFLFSPTFPMVELPEKRNKFLEWDPMVPCSXPSXFXXX

SEQ ID NO: 320368 - protein, 360 aa, Zea mays
  Clone ID: MRT4577_55240C.1.pep
MASGDAAAPVVQTVVLKVAIHCHGCKKKVRKVLRGIEGVQDVTVDASQHKVTVTGTVDADTLIKRLYKSGKKGVPWQCHPPAKNSEPAPEAPPAPQPAGDGGKDAAAAAAVAAADKKSEEAVKEPQGESSEEEEKKKKKPEQEQEDGAAEKKQPEAESSKEVEKVEAKTDGGDSEGAETKQSKGAAAEPAKEAPAAAGAANDEDEAKKSDKAKDAGTAEPAAVTTERSLPLAPAPAPKHAYEHEYRPPYYAAPAQPVLSYHAAQRSSSVSHFAPQAQPAYSTQQAHPHQAYYSAQQPQPHPQPGKQWSPSYLYMPYPHAAAPEPYYQQDYYGPPGMHASPMHDSSYRIFDDENPNSCSVM

SEQ ID NO: 320369 - protein, 357 aa, Zea mays
  Clone ID: MRT4577_55241C.1.pep
MASGDAAAPVVQTVVLKVAIHCHGCKKKVRKVLRGIEGVQDVTVDASQHKVTVTGTVDADTLIKRLYKSGKKGVPWQCHPPAKNSEPAPEAPPAPQPAGDGGKDAAAAAAVAAADKKSEEAVKEPQGESSEEEKKKKSEQEQEDGAAEKKQPEAESSKEVEKVVEAKTDGGDSEGAETKQSKGAAAEPAKEAPAAAGAANDEDEAKKSDKAKDAGTAEPASVTAGRSLPLAPAPAPKHAYEHDYRPPYYAAPAQPVLSYHAAQRSSSVSHFAPQAQPAYSTQQAHPHQAYYSAQQPQPQQGKQWSPSYLYMPYPHAAAPEPYYQQDYYGPPGMHASPMHAGSYRIFDDENPNSCSVM

SEQ ID NO: 320370 - protein, 73 aa, Zea mays
  unsure (1)..(73): unsure at all Xaa locations
  Clone ID: MRT4577_55242C.1.pep
MATAAAAPTSVAPSPAPXANDSRKAVVPVDASELEKLVLAVAYNSVDRAVIARILRGSRYRVTAVESATRVLE

SEQ ID NO: 320371 - protein, 188 aa, Zea mays
  Clone ID: MRT4577_55243C.1.pep
PRVRFVGLAEMVGCVDFNKTVDHWQQDKWTGCFPVKWHIVKDVPNSLLKHIILENNENKPVTNSRDTHEVKLEQGLQVLKVFKDHVCKTSILDDFGFYDNREKMMQYRKAKQQQSLKKVIDVKVPNATDADTSLVGTVSTELTNVEADVLNKELSLDKAVEKNEEKGNDVAPQDLKSPAEKSASPNGC

SEQ ID NO: 320372 - protein, 235 aa, Zea mays
  Clone ID: MRT4577_55244C.1.pep
MASGAAAAPVVQTVVLKVAIHCHGCKKKVRKVLRGIEGVQDVTVDASQHKVTVTGTVDADTLIKRLYKSGKKGVPWKCHPPAKNSEPAPEAPPAPQPAGDGGKDAAAAAAAVAAADKKSEEAVKEPQGESSEEEKKKKKPGQEQEDGAAEKKQPEAESSKEVEKVEAKTDGGDSEGAETKQSKGAAAEPAKEAPAAAGAANDEDEAKKSDKAKDAGTAEPAAVTTEKSLPLAPAP

SEQ ID NO: 320373 - protein, 37 aa, Zea mays
  Clone ID: MRT4577_55245C.1.pep
FFRSLQTVVLKVAIHCHGCKKKVRKVLRGIEGACLAV

SEQ ID NO: 320374 - protein, 68 aa, Zea mays
  Clone ID: MRT4577_55246C.1.pep
PQNLTVFFKNMKKIWKTYPKPLFWGVSTTKKEVSLLHLNNFGGSLPPLEGVHGKHTKSLLVTLLKAWS

SEQ ID NO: 320375 - protein, 126 aa, Zea mays
  Clone ID: MRT4577_55247C.1.pep
WGKPTRRDGPLCLLGKAKRQGVMGSSRMHHHKETHPAVREILEVNRKPGGRICTPCATLGKKITFGPFQGHRRPTAMQNWTTPWDRTWNLIRSLYLGKKHSPRAQIWGPWGQNPFKEFLHAGGPNI

SEQ ID NO: 320376 - protein, 38 aa, Zea mays
  unsure (1)..(38): unsure at all Xaa locations
  Clone ID: MRT4577_55248C.1.pep
EVKQIKYEIAVFLHVCPEKSPRRSPPAGRCCYTSARXY

SEQ ID NO: 320377 - protein, 346 aa, Zea mays
  Clone ID: MRT4577_55249C.1.pep
STPLGLCLLQASGYYTSLLSEGTNPQDYDDLVDLYPEEQPQRVEVNTYAPSARPNHKRSKNFSDVEDELLVSAWLNISLDPIIGYNQTRSSYWTRIYDYFHANKTFSSTRSQNSIMHRWTSIQEGVNRFTGCLAQVERRRQSGATMQDKLTQACALYKSEDKQHKAFPYMHCWNKLRTQRKWEMKLEELAVGKSSNKKQKMNSNETSPPHLPSATETSEPTTPNETVTTRPPGKKKAKAAAFQAEKKGYTETLNKLFEKKKETDEFKEMKKDERFRLALAVEQERAANEKLNMQLRSKELELRQQEVEQHKKREEERIMTLDLSVMPADQKQYYMRLRSKILSENA

SEQ ID NO: 320378 - protein, 53 aa, Zea mays
  Clone ID: MRT4577_5524C.1.pep
RTGILKRAVSQHPSPERVPGSSQGYSNRIHRQITFPPIKHPPPPFLCIIVKEN

SEQ ID NO: 320379 - protein, 48 aa, Zea mays
  unsure (1)..(48): unsure at all Xaa locations
  Clone ID: MRT4577_55250C.1.pep
GRFFFFFFRSRAWLIIRKCPHHYNPAGGHVNLXLGATRQIMHXERLGS

SEQ ID NO: 320380 - protein, 135 aa, Zea mays
  Clone ID: MRT4577_55251C.1.pep
AGRTQTAHQTPRSSRLLPPQHSLIHVTSFPHCPSLFPRRSGLSLTADADLCHQRTVDHHPPPFCCVPRSDLTLPLCRNISGACAQHHAPDARLLLASSTPGHGSLKYSPFRPSIPGVGAPFLLCSLGIRWDARAM

SEQ ID NO: 320381 - protein, 37 aa, Zea mays
  Clone ID: MRT4577_55252C.1.pep
LLPLRVFSPLKPKLRAFIAGGGVVHFASPWRLHPLSR

SEQ ID NO: 320382 - protein, 96 aa, Zea mays
  unsure (1)..(96): unsure at all Xaa locations
  Clone ID: MRT4577_55253C.1.pep
VYVFFFDPNFCPSHIIHLIHFCLLHTSTAITRKAGEEKQKYSNSRMNEHMQARARKGLDVALRSHELIILLSSXDRPLLTVWSRSPTLLYRSSDSP

SEQ ID NO: 320383 - protein, 67 aa, Zea mays
  Clone ID: MRT4577_55254C.1.pep
FGSRAEPQVIFRTPAYPSHHVMAKWGQYRHTASICYGRTASSGLVCCPPTRQEHALMSLYWDKSYDA

SEQ ID NO: 320384 - protein, 94 aa, Zea mays
  unsure (1)..(94): unsure at all Xaa locations
  Clone ID: MRT4577_55255C.1.pep
VKVDQPRLLDLIWGANYLNIKGLFDMTCQTVAHMIKGKTPKEIPQTLNIKNACTREXEKDIRRQKQWSLRVSKCWILLIPNFSGVYYYVNFMLS

SEQ ID NO: 320385 - protein, 68 aa, Zea mays
  Clone ID: MRT4577_55256C.1.pep
AGVPRFHRTQCGFPSVFAVGFFQATQTVRICVCVCVYFCVLITYVGKCNGRVLACKVLFENFSICPNT

SEQ ID NO: 320386 - protein, 87 aa, Zea mays
  Clone ID: MRT4577_55257C.1.pep
CHQGPLALLRLDLLLTDLISEIPQLLHSSGQALCTTRRPNAPGSARDGGVNRGGTAGMSRGIGSVGGVKGGGRRKGAEWRRKGANEF

SEQ ID NO: 320387 - protein, 63 aa, Zea mays
  Clone ID: MRT4577_55258C.1.pep
MAGKGDGPGIGIDLGRTYSCVGVWKDDRVEIMGGGEGNRTTPSDENLTDWERLKGDGVESEGG

SEQ ID NO: 320388 - protein, 43 aa, Zea mays
  Clone ID: MRT4577_55259C.1.pep
HCQFHQHGFFTKTYCLKILPGLKLWGGWPKKAVYSSTRLNPFS

SEQ ID NO: 320389 - protein, 50 aa, Zea mays
  Clone ID: MRT4577_5525C.1.pep
LLELPAKLSNPEYDGGRLRLCTVFVRMLSGILGPHLLGASFFVCQHDESF

SEQ ID NO: 320390 - protein, 74 aa, Zea mays
  Clone ID: MRT4577_55260C.1.pep
IIFFIGAIYTTHYSACHLLYPTHIYSLPKGIWLYLYLHTRPFNIRGGGGGSSFLLAELRGQGPGGPCTQSSTPR

SEQ ID NO: 320391 - protein, 56 aa, Zea mays
  Clone ID: MRT4577_55261C.1.pep
VVQITLSINSVHNTSCCKHRHHSSTFTFVQVPNYPRLQSRKTLQFNEIHIYEAVVT

SEQ ID NO: 320392 - protein, 88 aa, Zea mays
  unsure (1)..(88): unsure at all Xaa locations
  Clone ID: MRT4577_55262C.1.pep
MERYKLIRKIGDGTCGNVFMASNVETNEIVAVKKMKRKFCHWEECISLREVKALQKLFHPNIVKLREXTMENHELFFIFEHMECNLYD

SEQ ID NO: 320393 - protein, 116 aa, Zea mays
  unsure (1)..(116): unsure at all Xaa locations
  Clone ID: MRT4577_55263C.1.pep
MERYKLIRKIGDGTCGNVFMASNVETNEIVAVKKMKRKFCHWEECISLREVKALQKLFHPNIVKLKEVTMENHELFFIFEHMECNLYDVIRERQVAFPEGXIKNFMVQILQGLAYM

SEQ ID NO: 320394 - protein, 425 aa, Zea mays
  unsure (1)..(425): unsure at all Xaa locations
  Clone ID: MRT4577_55264C.1.pep
MERYKLIRKIGDGTCGNVFMASNVETXKIVAVKKMKRKFCHWXEECISLREVKALQKLFHPNIVXLKEVTMENHELFFIFEHMECNLYDVIRERQVAFPERDIRNFMVQILQGLAYMHNNGYFHRDLKPENLLVTNGIIKIADFGLAREISSNPPYTDYVSTRWYRAPEVLLQSSVYTPAIDMWAVGAILAELFTLSPLFPGESETDQLYKICTVLGTPDCTIWPEGMNLPRSCSFKFFQNPPRNLWELIPNASSEAIDLIQQLCSWDPRRRPTAEQALQHPFFNVCNWVPRPVHDAYHTKTNGPKAEPRLELNLWDFSTEPDDCVLDLTLSLKPSFSGTDLGKHVPRRTEEEILLYPGFENTPVKSGFWPLVPSDRPVGDVPAIPSWQQAYMVDSQGAFSGSPFLQSNLLENRSLAPIRQVNFF

SEQ ID NO: 320395 - protein, 120 aa, Zea mays
  Clone ID: MRT4577_55265C.1.pep
LMVNDNLGDISHKFNVPLPDKVFQINARDKALNLPSRMPDLPNYELREHLYSFKTASALGISYGALSSNWNLTSDDKVYISEIVKYKDIFDGNLTIRYGIGMRVFYQLKILNTEAKVSSL

SEQ ID NO: 320396 - protein, 160 aa, Zea mays
  unsure (1)..(160): unsure at all Xaa locations
  Clone ID: MRT4577_55266C.1.pep
EKPGHETDIAGSRRTHLKKXXESTLRHLLTACSKQDFVDIFSKFSGAEQELLFQLYTRVVVNLHQTIEEEFDEQCHETQVGPILDTVEELVEEQSLDPLFSDKTDVMAIAYDLTTSKKNEIQKLTVLLQRAEEQNRQKEARISMLKKQTQDLSGTADRIE

SEQ ID NO: 320397 - protein, 90 aa, Zea mays
  Clone ID: MRT4577_55267C.1.pep
PGGGTSAATTVVRRGNEFSDPAAAAGAQGPRDAHRLCRRLKSRPPGLGSSSVTLICSAFMSARKPCTNSAYFPFPQESDWNRIQLLFVHN

SEQ ID NO: 320398 - protein, 59 aa, Zea mays
  Clone ID: MRT4577_55268C.1.pep
QLASHPVHQCLEIGEERRDSQIVRDKLMIGRKVATRSSPTGTSSRWSTPIGISSRWSTP

SEQ ID NO: 320399 - protein, 108 aa, Zea mays
  Clone ID: MRT4577_55269C.1.pep
KLRRSEGSHSAVRVNNQTFSMFQTRGSDSNSISYYKPPYFPKELSPNVKPHIGHFVYIIPRDYKYMGRPPVLLKPTWHLLTASLRYFLFSSNAKGTFIMEILFTIQNK

SEQ ID NO: 320400 - protein, 255 aa, Zea mays
  Clone ID: MRT4577_5526C.1.pep
VSKLVEVAIIDFHGDQELPGEKVYHINMTSNSGINPLVINLDQEGGGPNLRAIELAMLFAKTLRLGSNQQGKLLDAFKHCYFRRGISQESPQSWLKVPPNFSDLEALLEEMAEEDKEAEKLRLKLSTMFEYGIFNKTQPPYERLTRWNLAKLPPQLQAIAGDALASQLMSHHRLLGESTLRTVLFIDEAKELGHSKALDRIAADGRKYGLGLWVASQSSRHISKDVLTNTFTKLILPVDSSELPLTARTFRFSEE

SEQ ID NO: 320401 - protein, 147 aa, Zea mays
  unsure (1)..(147): unsure at all Xaa locations
  Clone ID: MRT4577_55270C.1.pep
FIFFXGITNDFTRFFFFSRFFFFFFFFFFFFLIFLFFLKGPNTRGGVLIFYNTLRALFLRTKKLKKKVKSRLNPIKTLQTRGINLNPGGRPKNFLKILGKKKKISPFIFWKSPKIFEAPLLWVFFLPPKEICWGPLFVEKKFSFKAF

SEQ ID NO: 320402 - protein, 95 aa, Zea mays
  Clone ID: MRT4577_55271C.1.pep
KSPRAGPLKKQGFMGKTTSARKRFSNSRSKNLKLEFLKNLGGQLFVFMEQNWAPNKTRGLASQDPFSFWGAPPPPEAFFGVFFFPLPGSPPPRGL

SEQ ID NO: 320403 - protein, 44 aa, Zea mays
  Clone ID: MRT4577_55272C.1.pep
RSLGFGYASPGAGGSKPALRLMTAYTMDDAKLSTYLQTTRPDGL

SEQ ID NO: 320404 - protein, 110 aa, Zea mays
  Clone ID: MRT4577_55273C.1.pep
MLGTLSQSYKDKLPPNFRKLLNVQLKKLVAGGKLTKVKNSYKLSSATKPKAAPKKTKTGVKKPKAAAKPKAKSPAKPKPAAKKAPVAKKAAPAKKAAAPARKAPSRKAKK

SEQ ID NO: 320405 - protein, 40 aa, Zea mays
  unsure (1)..(40): unsure at all Xaa locations
  Clone ID: MRT4577_55274C.1.pep
MLALISXLLDWFRSLFWKDHIELTLVGLQYSGYTTFVDVI

SEQ ID NO: 320406 - protein, 46 aa, Zea mays
  Clone ID: MRT4577_55275C.1.pep
TYVQFTWYPTYMNSTFRWAEQTQAHDIIDPCYDLTQMIELHALLTI

SEQ ID NO: 320407 - protein, 220 aa, Zea mays
  Clone ID: MRT4577_55276C.1.pep
TTTRNMDMERTRRRKLNERLYALRSVVPNITKMDKASIVRDAIAHIEHLQEQERRLLAEISVLQSSDDGTAAAAAVKTEDAAATGGAAYDVDSVPWRKKPRAVPLPSVYFTDNPTSSISSSPPVRILEVQVSQAGERVAVVSLWCSRGRDAVGKICLALEPLRLRVVTATITARGDTVFHTLFVETGETGGARLKEAILAALARFNVLANADQVVHELLG

SEQ ID NO: 320408 - protein, 87 aa, Zea mays
  Clone ID: MRT4577_55277C.1.pep
FCFFLFFDETNSQARITLHDSQQEMESGSLYRPFRDCLQLIYIYNIPLFQGRMSIISSMERTLAPGLCLSKRKEPGADAVDTLDSEA

SEQ ID NO: 320409 - protein, 108 aa, Zea mays
  Clone ID: MRT4577_55278C.1.pep
AIRMPMLRVSNFVDASSSLSDGQGAGVSYAIMVLVLPAPVPTTKNHRTRGPRGEGGAREWSRQELEIVEVAADQLAVALSHAAVLKEWQLTRHKLAERQRVLVQARHD

SEQ ID NO: 320410 - protein, 52 aa, Zea mays
  Clone ID: MRT4577_55279C.1.pep
VNWSNWDLNGIKLNFCEGIFLKKKKRGGRFRGTMFSSPCMLRFNFFYGVPKI

SEQ ID NO: 320411 - protein, 590 aa, Zea mays
  Clone ID: MRT4577_5527C.1.pep
FPTKVVSIGPKHDCASTSKVTGKEASAAWIANRVKPMLIKEPGLGAREMQYRLEDQFTVTLSYNKVWEGRKLALKELHGTWEDSFKLLWNWKAAVEATCPGSLIEIDCKKVKGQMHFSKMFVALRPCVNGFLMGCRPYLGVDSTHLTGKYLGQLASATAIDGHNWMYPVAYAIFDKETNLNWKWFMTLLKRAIGTPPGLTIHTDACKGLAYGVSQVFGDAAEHRECFRHLMANFRRKYNGEVLKYMWPCAWACTHERHQVLMDKISETCPNAVAYLRYDHPHLWTRAKFNKICKVDYVNNNISECFNNWIKNVKELPAVDLMDMLRVMIMEKIATRQSIANKMQGHILPSVVNDLHEKSRNLRYTITKSGYMKGEVSGASRDGVAWRYGVNLVTQACSCGQWDVTGKPCTHAIAFITSQRNLRIEDYVGECYSVQRFKDAYQFEVYPMGDRLQWPKLDPGFEMRPPKLEGRPAGRPRKKRIKSAGEPGKRGPYQCKRCFQYGHIEKGCKNPVVEPHEDLPDNHLQRKTKKGTKKRKKSEPEQTSTSLVQISPSSSGPMTRRRVAMSPTCSSPSASKQGEAPASSKRRLII

SEQ ID NO: 320412 - protein, 62 aa, Zea mays
  Clone ID: MRT4577_55280C.1.pep
FLRANFNIQQSQRNHLHPLPSGLLNKRLLCAELLLRNQQNGLSPPPVLAPILLSMLKGCHFN

SEQ ID NO: 320413 - protein, 186 aa, Zea mays
  unsure (1)..(186): unsure at all Xaa locations
  Clone ID: MRT4577_55281C.1.pep
RVDPASSTFIKKKKTGGERRKKKKKKKEKKKKKKKKKKKKKKKKKKKKKKRGGRFKGSNFFFPSFQRKSGGGGELNSNSLPPFLKRWDWKNPGFPKLNSFEAHPLFANWDNPXKAPTIPPSKQGGRLIANCFFPFIAPLIPAVLGFPPSVPVTFPRAFAPENFLFCLSFFATLHVFPPKALKGGLP

SEQ ID NO: 320414 - protein, 363 aa, Zea mays
  unsure (1)..(363): unsure at all Xaa locations
  Clone ID: MRT4577_55282C.1.pep
MTPAVRVGNPRAPGPGAAVVEDEEEAAVAWRELRGKAAELAAAGEERAILARRIEAALQVRREALRQAEELDELTRMVDLQQARLEAAVVGRRRALEAVERGKERLQEQIDRVLPLSRSLTAAHHRVQEAKEALSGDKFRLKDLQRLLRTRQQCMVSQVAGLYPVRVFHDLPRHAENPCADTNGEHVTLPEENRTFSGGDGTXYPPLSNLQKHVAGXFGWDIMKHKMKQKSYRNKVLQRSAAVLGYAAHAVLLIACYLDVPLRYPLRFGGSRSYVSDRLPSADTASSAALASTRNTESELTEYPLFLECQDDDSTSASYAIYLLHKDTEQLLNYVGAESCGRHVFGNLRELLRIVQSDKFVYR

SEQ ID NO: 320415 - protein, 156 aa, Zea mays
  Clone ID: MRT4577_55283C.1.pep
MARNIGFPKLELGLSAMSNDDLVDSLAYNSLKGLILSIALRAQKNVEDESCQIALRNLRSEVIRLSNEALEKDKILLSLVDKVKVSEVKLTAQSATHTTEVEDLQKKLAEANENFELAKAKQEISEWTSARLEKNVKELRKSKERCYEKSLDCAKK

SEQ ID NO: 320416 - protein, 94 aa, Zea mays
  Clone ID: MRT4577_55284C.1.pep
MSMFFGAKPRISSEQKIAQAEAEIDMVSDMYSRLVKSCTAKCIDTSYREADLNKGESVCLDRCVSKFFEVNVKVSEKMQGEAQGKQGGGMFGGM

SEQ ID NO: 320417 - protein, 106 aa, Zea mays
  Clone ID: MRT4577_55285C.1.pep
DRAFNLLCSRIVVFACTMDDDLKHLRVSFSGVRQGGETVPLPSQRRTSSRRGSRISVLASDAAEEYDAAYAATVAAVAYAIAAREERLSASQESTPYAAADRLARG

SEQ ID NO: 320418 - protein, 116 aa, Zea mays
  unsure (1)..(116): unsure at all Xaa locations
  Clone ID: MRT4577_55286C.1.pep
MEAAAVGDGAPAGRSHQGAKRARGGAVKGSETEVAAWGQPPPLPPPPGPGAGSRISRVGASGGKDRHSKVYTTKGIRDGRVRLSAPTAIQFYDLXDRLGFDQPSKAIEWVINAGAF

SEQ ID NO: 320419 - protein, 82 aa, Zea mays
  Clone ID: MRT4577_55287C.1.pep
MQFSTLTTVFALVAAAVAAPHSSGGNNPVCSAQNNQVCCDGILNCPIQVLGSNCNGNSYCCKTDAPVGSFINVALLNCVKFL

SEQ ID NO: 320420 - protein, 84 aa, Zea mays
  Clone ID: MRT4577_55288C.1.pep
MGFPLLAFVAARGLMQVFNLSAPLNLRLPLARHLPEAFAVLFGVLASHAAWLSDALARGAAWRHTGNRGGVDEYVRYAMLSISD

SEQ ID NO: 320421 - protein, 275 aa, Zea mays
  unsure (1)..(275): unsure at all Xaa locations
  Clone ID: MRT4577_55289C.1.pep
MATPTPMPGSEGTLVAVMPRSPSPTPAEAGTSATETPVLIFLYFHKAIRAELEALHGAAVLLATERTGDVAALAERCRFFFSIYKHHCDAEDAVIFPALDIRVKNVAGTYSLEHKGESDLFSQLFDLLELDIQNDDALRRELASCTGAIQTCLSQHMSKEEEQVFPLLTKKFSCEEQADLVWQFLCNIPVNMVAEFLPWLSTSVTSDEHQDIRDCLCKVVPDEXSPTGCIHMDGGESSKRSGRELXTESNGSQADRHPIDDILYWHNAIRMELHD

SEQ ID NO: 320422 - protein, 70 aa, Zea mays
  unsure (1)..(70): unsure at all Xaa locations
  Clone ID: MRT4577_5528C.1.pep
PSDRPGIPRDAAEHSLDIWAGARLVRQPXRLDHQGRVGLAIAGPDPPSGARKGEPLCVEIEPLGVEIFLI

SEQ ID NO: 320423 - protein, 70 aa, Zea mays
  Clone ID: MRT4577_55290C.1.pep
IASSRPFFFFLGQAPLCNQAGRSVTCIANWWVDANKWMIQIQYWYMMLLPVLRMLSDVWLDEEAYTDSLL

SEQ ID NO: 320424 - protein, 47 aa, Zea mays
  Clone ID: MRT4577_55291C.1.pep
ESMCSLLRYFYFANCNGQRHLSDRSLEKNRESISGNKELIPPTRKIR

SEQ ID NO: 320425 - protein, 84 aa, Zea mays; identical to SEQ ID NO: 320420
  Clone ID: MRT4577_55292C.1.pep

SEQ ID NO: 320426 - protein, 79 aa, Zea mays
  unsure (1)..(79): unsure at all Xaa locations
  Clone ID: MRT4577_55293C.1.pep
MLHIKDFRIVMPMSMXEYDIWLIYTIMKMEQQNTNSKEGVQVLQHAPFHEDANLGKVHFTFKVYHLQSNIPSWMKGFSP

SEQ ID NO: 320427 - protein, 90 aa, Zea mays
  Clone ID: MRT4577_55294C.1.pep
SASIARESPHPPSSAQSLERRRIDSETDPSRLLPRTHRGVSSRCSVRRLQLRRRRVNDTAVLSRISHLNDFTRLLASSPRAGDFDRAAAA

SEQ ID NO: 320428 - protein, 134 aa, Zea mays
  Clone ID: MRT4577_55295C.1.pep
RPVREALCKEGTTQSHHYSSVVAISCRQYKVLSFSFKTAYYSELSSHRNTFSDHTNLHILPQLCKFSSHDGGARSIDHELAYLCCTGLYKIHTTSTKLPHIHQWKHESWHLGKFYLALWVVLGFRHRGELGPSG

SEQ ID NO: 320429 - protein, 147 aa, Zea mays
  unsure (1)..(147): unsure at all Xaa locations
  Clone ID: MRT4577_55296C.1.pep
ARVCENTGVQAYRLQQAMATSNIPLSPLFGQQSSALSLQQPLVQTIRAQHLDQLWLPRSNQLGVTNKHPYSAEQQFLXFKQLSTLNSAAYLQEQLLPFTQLATGYSQQQQLLTFNQLAALNTAAYLQHQILLPYSQLAAVDRAFFLT

SEQ ID NO: 320430 - protein, 221 aa, Zea mays
  Clone ID: MRT4577_55298C.1.pep
MASHQDKASYQAGETKARTEEKTGQAVGATKDTAQHAKDRAADAAGHAAGKGQDAKEATKQKASDTGSYLGKKTDEAKHKAGETTEATKHKAGETTEAAKQKAGETTEAAKQKAGETTETTKQKAGETTEAARQKAADAMEAAKQKAAEAGQYAKDTAVSGKDKSGGVIQQATEQVKSAAAGRKDAVMSTLGMGGDNKQGDANTNTNTNTTKDSSTITRDH

SEQ ID NO: 320431 - protein, 57 aa, Zea mays
  Clone ID: MRT4577_55299C.1.pep
MASHQDKASYQAGETKARTEEKTGQAVGATKDTAQHDKQGDANTNTNKDSSTITRDH

SEQ ID NO: 320432 - protein, 160 aa, Zea mays
  unsure (1)..(160): unsure at all Xaa locations
  Clone ID: MRT4577_5529C.1.pep
MARTSGPPGPPEPGRHDAPMLLRVHVIEARGLPAIYLNGSSDPYVRLQLGRRRPRETTVVKRSLSPVWDEEFGFLVGDVAEDLVVCVLNEDRFLGXEFLGRVRVPLTAIMETDDLSLGTRWYQLQPRSGVKFRKKRRGTPYLHPIFPLACHGNQCLICVI

SEQ ID NO: 320433 - protein, 119 aa, Zea mays
  unsure (1)..(119): unsure at all Xaa locations
  Clone ID: MRT4577_552C.1.pep
FTGSRFWSRRCSSFRSLNLSCLSRPASRFSSLVVYGISWRSHITAGELGLVNKKAGVARAPCVXGCXRECFRSGALCLLSAPSGGLAAAVVSRGSAARVRARSLGARGPRALARASSRK

SEQ ID NO: 320434 - protein, 70 aa, Zea mays
  Clone ID: MRT4577_55300C.1.pep
MAAFRLSACVLGSRFQATEQVKSAAAGAKDAVMSTLGMGGDDKQGDANTNTNTNTNTNTNKDTSTITRDH

SEQ ID NO: 320435 - protein, 63 aa, Zea mays
  Clone ID: MRT4577_55301C.1.pep
HSLSYDAALELSLEHFGSPQVRIASRASAGCSSSIVSKSCLSSRHRSGTSLSSVCICQLRSVS

SEQ ID NO: 320436 - protein, 141 aa, Zea mays
  unsure (1)..(141): unsure at all Xaa locations
  Clone ID: MRT4577_55303C.1.pep
KYKQTVGRGTQGRQEPKADPKDKGGGGGTTLGGNPSTRAAGPRGPRRETKIGGKMDKAVPRGKLVAGHNSPKKTGRKHKGESPGCPKRGRKNKNGSGLTGRFSARKPAVPAPSRNWPTRGKGXYAFWGVFXLLLHWLXGLG

SEQ ID NO: 320437 - protein, 53 aa, Zea mays
  unsure (1)..(53): unsure at all Xaa locations
  Clone ID: MRT4577_55305C.1.pep
GTTRVRPXKKKKKKKKKKKKKKKKKKKKKKKKKKKKKKKKKKKKKKKKGGLSF

SEQ ID NO: 320438 - protein, 59 aa, Zea mays
  unsure (1)..(59): unsure at all Xaa locations
  Clone ID: MRT4577_55306C.1.pep
NVNDGASLXKKKKKKPXKKKKKKKKKKKKXXXXKKKKKKKKKXKKKKKKKXKKKKGGPF

SEQ ID NO: 320439 - protein, 91 aa, Zea mays
  unsure (1)..(91): unsure at all Xaa locations
  Clone ID: MRT4577_55307C.1.pep
GXGXGGLRGRRGCXGVAAVGRAXXRRLPAGRRAXAXXAGVXXRXLVPPPVAXAVPVRGPFAAAXXVGFXXGCRSAFXCPPXXLVVALXVCL

SEQ ID NO: 320440 - protein, 27 aa, Zea mays
  Clone ID: MRT4577_55308C.1.pep
LLSISMCHKVIPLCLMYGPMMHPFRLV

SEQ ID NO: 320441 - protein, 135 aa, Zea mays
  unsure (1)..(135): unsure at all Xaa locations
  Clone ID: MRT4577_55309C.1.pep
RVKQGHYADMLGYGIQGDQRLLACEFSAIGSVHEMWDGRKWVAGAQPGPAVDRMQTGKSAVDAADGLEYVHERGEPSIGHXDIPPRNIVLSEDYTGKSGYLNLTRQSTDMAARVHATRGRGTFRYDAPESAMTGQ

SEQ ID NO: 320442 - protein, 69 aa, Zea mays
  Clone ID: MRT4577_5530C.1.pep
LELIDAQGRQSSCQQYSIYSMHSQKKDASSGYLVETNDLKFRLPAARHGRRPLLTCEQPRTIIVGMMSS

SEQ ID NO: 320443 - protein, 109 aa, Zea mays
  Clone ID: MRT4577_55310C.1.pep
LYTLEFSKGSYHLSCLHTMQFTDYTCLSDIYIYTILKAPVLTVVPRHLFTNNLSQLFQINLLHAYRWPNGGPAWARRQRAITLAQACHAGLLTVSGQPVRPSAHLIKST

SEQ ID NO: 320444 - protein, 50 aa, Zea mays
  Clone ID: MRT4577_55311C.1.pep
AFCFLDQMFSVYSGTFLEVFRHKLEFCHAEGYSCIPRDCCFFVVAHLWLQ

SEQ ID NO: 320445 - protein, 664 aa, Zea mays
  Clone ID: MRT4577_55312C.1.pep
MGHSASRPTACAGAGEALPSRFARFRRRLRNRLRRGAGDDSVSSKALAADEFAGIARVRIAKADMQFKDKFFACLSLGDRTYRTETSDNTHRPVWDSEKKVIVETNGPHIARISVFETNRFSKNTLVGYCEVNLFEMLTKDLEEHSEDLRLLDPSSPNTTVGSISISCHIEDPVETEQSFARRVLAIVDYDEDGTLSLSEFSDLMKAFGNKLAVAKIEELFRQADTNSDGIVDIDELAALLAAQQEEEPLISNCPVCGEDLGKYDNINDMIHMTLCFDEGTGNQIMTGGFLTDKQASYGWMFKLSEWAHFSTYDVGLHSGSTASHILVFDRRTKRIVEEVIDGKIVLSMRALYQSKVGLTLINTGVKDLLKNLSEKQGKKMNSLESAKDIPKFLELFKDQINMDEIKDPVESFKTFNEFFIRGLKPGARPIAHGDQNSIATCAADSRLMAFSSVDESTRLWIKGRKFSIEGLLGTSAHSNALSNGSLVIFRLAPQDYHRFHVPVSGTVEKFVEIPGCLYTVNPIAVNSKYCNVFTENKRVVSMISTSEFGKVAFVAIGATMVGSITFLKKEGDYVRKGDEFGYFSFGGSTVICVFEKDAIQFDADLVANSERSLETLVSVGMTLGISTRNKEMQVPESFARMPHITVNCVQVNSSVYLTSNCPW

SEQ ID NO: 320446 - protein, 126 aa, Zea mays
  Clone ID: MRT4577_55313C.1.pep
AEDPRVRPRVRQDTIADVVLSPEEMEMYVDLHPFTNTSPYTVVETMSLAKALVLFREVGLRHLLVVPKACDRSPVVGILTRHDFMPEHILELHPVLLRSRWKRLRWQRGAMAKYFRSLIVWVANSG

SEQ ID NO: 320447 - protein, 673 aa, Zea mays
  unsure (1)..(673): unsure at all Xaa locations
  Clone ID: MRT4577_55314C.1.pep
QTYPSEDTFQGSWVHGQMQGHGTYTWANGNTYVGAMKDGVMSGKEILTWNNGDSFEGNWLDGAMHGYGIYTWKDSGYYVGTWTRGVKDGKGTFYPKCRGIPVTDIDDLRNRGVLPGAESQTHGSRILHSASSDMADMVASRNQDSVGISSVRSLNFEKTRSTNVLLERRWSLGVAIEKFLGRETNESSAIERCENKADSNLPILEREYMQGVLISEVVVDASFSPWGKRVSRRTQKIVKDKKKPGQTTXRGRQPEXSVNKMRRRTRYTVGKITPIQRREVRASDYGSRASFWMNFPKNGSRLTPSHHADNFKWKDYCPMVFRNLREMFKIDAADYMVSICGSDALRELSSPGKSGSVFFLSQDDRFMIKTLRKSEVQVLLRMLPEYYHHVRTYENTLITKFFGLHRVKPSSSQKFRFVVMGNMFCTELRIHRRFDLKGSSLGRSTDKVKIDENTTLKDLDLNYSFYLEPSWRQTLLAQIETDSKFLKQHAIMDYSLLLGVHFRAPQSLRTQASFHQAILPDRLAVLSEEGALEEDVLNSPEGLVLVQRASDQNDVVIGSHIRGARLRSSSASFEEVDLLLPGTARLQIQLGVNMPARAKQTVEDDDSEDNGQVYDVVLYLGIIDILQEYSIRKKIEHAYKCIQYNSLSISVVEPSLYSERFLKFIQTIFPENS

SEQ ID NO: 320448 - protein, 74 aa, Zea mays
  Clone ID: MRT4577_55315C.1.pep
DFSKKAMQMGSSKSSLRLSCRCIAQSCRASVASVRFVKSAVPLFRHVDDRVVYAAADDLDQKHVHSQSAVVVLV

SEQ ID NO: 320449 - protein, 69 aa, Zea mays
  Clone ID: MRT4577_55316C.1.pep
RCLMAAWAHSLNLSFMSSCRLASREWDRLLGRNIRREGVQKSAGGCVSVPGTQNKTRASVRPVSPGACR

SEQ ID NO: 320450 - protein, 70 aa, Zea mays
  Clone ID: MRT4577_55317C.1.pep
DTYNPAVCQPNLSHLPASTREPTVMEASTAISLLLTGVNTTGRGRSCFLLGQRSEPNTEVLHSYAWQPNC

SEQ ID NO: 320451 - protein, 71 aa, Zea mays
  Clone ID: MRT4577_55318C.1.pep
MDSSAPQTAPTGNVSGRRRSSGFMPAFASLSEQKRAGDANAARRASMSDQQAKGGLFSQFFHNNFGKNAAK

SEQ ID NO: 320452 - protein, 125 aa, Zea mays
  Clone ID: MRT4577_55319C.1.pep
AFPYLKKKKKKKKKKKKKKKKKKKKKKKKKKKKKKKKKKKKKKKKPWGGNQKRGKFGKIQKKGGGVKIALKGPNSPKRGRNKNKGAGVKKRGKGKKRGVKKIKVLEKNPFLKRGEKRKKAKTKAL

SEQ ID NO: 320453 - protein, 83 aa, Zea mays
  Clone ID: MRT4577_5531C.1.pep
CLENYFSPFGSTIFPQLQKRIIWFVLQVFQEGRAYLMPTLFPRAYSPYIYSYFVALYDAIPRNCFVFVWVTYPIIIKCLFGLS

SEQ ID NO: 320454 - protein, 551 aa, Zea mays
  Clone ID: MRT4577_55320C.1.pep
MGADEQPSPTRKRDREEGEDLSDGGAAEKRPRAEVASLLGLATYEDEEEDEAARGHTNGRHAVEPELEDDEDDDDEDDDVRRAPERRPRQVELRRDCPYLDTVNRQVLDFDFEKFCSISLSNLNVYACLVCGKYFQGRGLKSHAYTHSLEAGHHVFINLQTEKAYCLPDGYEINDPSLEDIRHVLNPRFTKEQVLNLDKNKQWSRALDGSNYLPGMVGLNNIKETDFVNVTIQSLMRVTPLRNFFLIPENYQHSKSPLVHRFGELTRKIWHARNFKGQVSPHEFLQAVMKASDKKFQIGVQSDPVEFMTWLLNTLHAKLKSSKKKNRSIIHDCFQGELEVVKEVHRKHIMEKREDGGELNGEAGSVVGTADGIVTETSKVPFLMLGLDLPPPPLFKDAMEKNIIPQVPLFNILKKFDGETVTEVVRPSIARMRYRVTRLPKYLILHMRRFTKNNFFVEKNPTLVNFPVKNLELKDYIPLPKPKENHKLRSKYDLIANIVHDGKPGEGCYRVFVQRKSEEAWYEMQDLHVTETLPQMVALSETYMQIYEQHE

SEQ ID NO: 320455 - protein, 52 aa, Zea mays
  Clone ID: MRT4577_55321C.1.pep
NASYSGRQDQIEGVSECIIMGIPMQLGTGILKVRQRLDHVPEFKYQPDPILS

SEQ ID NO: 320456 - protein, 76 aa, Zea mays
  Clone ID: MRT4577_55322C.1.pep
AHTTASSCSLHRDYSTLSAGLLAEERPLTALIPFLRETTMMKTRCYLPWLMICLRSFGVWAVDKMIMRCYHLCETL

SEQ ID NO: 320457 - protein, 44 aa, Zea mays
  Clone ID: MRT4577_55323C.1.pep
KKKKKKKKKKKKKKKKKKKKRKKKKKRKKKKNPKKKKKKKGRPF

SEQ ID NO: 320458 - protein, 56 aa, Zea mays
  Clone ID: MRT4577_55324C.1.pep
NGGNCGHSFVVGARVVSVDLRYTGEHDGDREVELNQDAGDLGYGNGHRCRTHCLTG

SEQ ID NO: 320459 - protein, 104 aa, Zea mays
  Clone ID: MRT4577_55325C.1.pep
MHGRTAMAVACLLCMTALLLVQDVQSRRLLWTEQEKKQTHGGLVGNHGAADRRSTSLQEPCSGATGGGGTGSADKQGELPCDDDTSKWTELHTDYIYTQDFKHP

SEQ ID NO: 320460 - protein, 53 aa, Zea mays
  Clone ID: MRT4577_55327C.1.pep
LLVTTKRRNYRAGPVLDIASKDIYQDKYRTSRHTSRHDFSRVCLNHASVQQFL

SEQ ID NO: 320461 - protein, 61 aa, Zea mays
  Clone ID: MRT4577_55328C.1.pep
KKKKKKKKKKKKKKKKKKKKRKKKKKKKKKKKKKKKKKKKGGAFLKIPSFPPLACAVLFFF

SEQ ID NO: 320462 - protein, 77 aa, Zea mays
  Clone ID: MRT4577_55329C.1.pep
LSQRMARGGPNDGREGGRGALRLRRSHRSHMLYGGRRIQGQGETDEISVVSQACLLPFLVQQLKRGGDDDLLDVEVT

SEQ ID NO: 320463 - protein, 129 aa, Zea mays
  unsure (1)..(129): unsure at all Xaa locations
  Clone ID: MRT4577_5532C.1.pep
SGFEEARVLXALDKKLFPQVWXETMLLVNQHATDERIPLEELLSKXYHNDMELTTWTLKKKXLPETGFQLVQKYAXQIQKWGWIISGGSNLFESFKKNMNILKRQGRLGTLGAVPCFFGGKLTGKDLME

SEQ ID NO: 320464 - protein, 193 aa, Zea mays
  Clone ID: MRT4577_55330C.1.pep
MSSNTEGPKSHARRDLLLKIQSDAQTCWEESKVFEAEPGNGPPGPGEKFFGNFPYPYMNGLLHLGHAFSLSKLEFGAAYHRLRGSNVLLPFAFHCTGMPIKASADKLAREIQQYGNPPVFPAAEDDSSAEVADDSQADQAALAPGQFKSKKSKAAAKTGMQKFQWEIMKGFDLSDEEIAKFQDPSHWLTYFPP

SEQ ID NO: 320465 - protein, 55 aa, Zea mays
  Clone ID: MRT4577_55331C.1.pep
IILAWKEQDICDIISFCIFCGSYIYKSYPALLYHTSLNCTLLVNCIKSKFYVCGL

SEQ ID NO: 320466 - protein, 231 aa, Zea mays
  Clone ID: MRT4577_55332C.1.pep
MANAPRTLAVLALGLALLCAAAGPAAVQNCGCQPNFCCSKFGYCGTTDDYCGGGANVANVVTDAFFNGIKNQAGSGCEGKNFYTRSAFLSAVNKYPGFAHGGAEVEGKREIAAFFAHVTHETGHFCYISEINKSNAYCDASNRQWPCAAGQKYYGRGPLQISWNYNYGPAGRDIGFNVHRLMPQGFGATIRAINGALECNGNNPAQMNARVGYYKQYCQQLRVDPGPNLTC

SEQ ID NO: 320467 - protein, 98 aa, Zea mays
  Clone ID: MRT4577_55333C.1.pep
RGRERWLCLVRQRWRSAKAAGRRRKQQERFHGGARGRERWLCLVRQRWRSAKAAGRRQQQQAHNNGGLDPCKAHSKVDFPRLLTRARNWRTGYHCPRI

SEQ ID NO: 320468 - protein, 278 aa, Zea mays
  unsure (1)..(278): unsure at all Xaa locations
  Clone ID: MRT4577_55334C.1.pep
MANAPRTLAVLALGLALLCAAAGPAAAQNCGCQPNFCCSKFGYCGTTDDYCGDGCQSGPCRSGGGGGGGGSGGANVANVVTDAFFNGIKNQAGSGCEGKNFYTRSAFLSAVNKYPGFAHGGTEVEGKREIAAFFAHVTHETGHFCYISEINKSNAYCDASNRQWPCAAGQKYYGRGPLQISWNYNYGPAGRDIGFNGLADPNRVAQDAVIAFKTALWFWMNXNVHRVMPQGFGATIRAINGALECNGNNPAQMNARVGYYKQYCQQLRVDPGXPNLTC

SEQ ID NO: 320469 - protein, 85 aa, Zea mays
  Clone ID: MRT4577_55335C.1.pep
EHKNFFTRTKPSWGKKNQKPNSFKKKFPKFPGGFFFPKPTKISGGRNPRVDPPDLKKPPANLKMEGKSYFQTQGLKKIFPKNPIS

SEQ ID NO: 320470 - protein, 279 aa, Zea mays
  Clone ID: MRT4577_55336C.1.pep
MANAPRILALGLLALLCAAAGPAAAQNCGCQPNFCCSKFGYCGTTDAYCGDGCQSGPCRSGGGGGGGGGGGGGSGGANVANVVSDAFFNGIKNQAGSGCEGKNFYTRSAFLSAVNKYPGFAHGGTEVEGKREIAAFFAHVTHETGHFCYISEINKSNAYCDASNRQWPCAAGQKYYGRGPLQISWNYNYGPAGRDIGFNGLADPNRVAQDAVIAFKTALWFWMNNVHRVMPQGFGATIRAINGALECNGNNPAQMNARVGYYKQYCQQLRVDPGPNLTC

SEQ ID NO: 320471 - protein, 81 aa, Zea mays
  Clone ID: MRT4577_55337C.1.pep
FVWKRVNPKNFNIFTGGVPPGLIFGKGNWIVPFEKLSTLRINPPICMFFNPSLKRKIWAKGYPFFVKQKRPQLGKFLISQK

SEQ ID NO: 320472 - protein, 191 aa, Zea mays
  Clone ID: MRT4577_55338C.1.pep
MANAPRILALGLLALLCAAAGPAAAQNCGCQPNFCCSKFGYCGTTDAYCGDGCQSGPCRSGGGGGGGGGSGGANVANVVTDAFFNGIKNQAGSGCEGKNFYTRSAFLSAVNAYPGFAHGGTEVEGKREIAAFFAHVTHETGHFCYISEINKNNAYCDASNRQWPCAAGQKYYRRGPLQISWNYNYGPAGRD

SEQ ID NO: 320473 - protein, 109 aa, Zea mays
  Clone ID: MRT4577_55339C.1.pep
QSSRPCLASMHHVVAHGSPDANHHGNGNRYSGGVIPFSKRGRHGDGHRADHCVSECGCDGWGVDDRRRERHHGSQLASDRCIYLRTYARPRASCQSNSPADGPADAWLG

SEQ ID NO: 320474 - protein, 137 aa, Zea mays
  Clone ID: MRT4577_5533C.1.pep
QKSLHANTSGRIRDRRWSLCSDPVFDIYDMEVFSVLPIYSKLVKAGLKIWVYSGDVDGRVPVIGSRYWVEALGLPIKSQWQPWYLKDQVAGRYVEYEGLTMATVRGAGHAVPQDKPAEALVLIKAFLSGTQLPAKNN

SEQ ID NO: 320475 - protein, 115 aa, Zea mays
  unsure (1)..(115): unsure at all Xaa locations
  Clone ID: MRT4577_55340C.1.pep
XQEGALLLQSGESSNSEVIXXXPFSRXXTAVPGPYPTXQPSXSTTXXPXXYQSAMSXXXTNRLEARXTXTSMQLXPXPXXSPLSXHXXSTTXXINNTRVXGTTXCPXVPHHPSRH

SEQ ID NO: 320476 - protein, 266 aa, Zea mays
  Clone ID: MRT4577_55341C.1.pep
MAIAPRIMAVLALGLALLCAAAAQNCGCQAGYCCSKFGYCGTTDEYCGDGCQSGPCRSGGGSSGGGNVAGVVTDAFFNSIKNQAGNGCEGKNFYTRSAFLSAADAYKGFGGRSVQGKREIAAFFAHITHETGHFCYISEINKNNAYCDSSNRQWPCAAGQKYYGRGPLQISWNYNYGPAGRDIGFDGLRNPDRVAQDAVVAFKTALWFWTNNVHGVMSQGFGATIRAINGALECNGKNTAQMNARVGYYRQYCQQLGVDPGPNLTC

SEQ ID NO: 320477 - protein, 279 aa, Zea mays
  unsure (1)..(279): unsure at all Xaa locations
  Clone ID: MRT4577_55342C.1.pep
MANAPRILALGLLLALLCAAAGPAAAQNCGCQPNFCCSKFGYCGTTDDYCGDGCQSGPCRSGGGGGGGGGGGSGGANVANVVSDAFFNGIKNQAGSGCEGKNFYTRSAFLSAVNKYPGFAHGGTEVEGKREIAAFFAHVTHETGHFCYISEINKSNAYCDASNRQWPCAAGQKYYGRGPLQISWNYNYGPAGRDIGFNGLADPNRVAQDAVIAFKTALWFWMNNVHRLMPQGFGATIRAINGALECNGXNNPAQMNARVGYYKQYCQQLRVDPGPNLTC

SEQ ID NO: 320478 - protein, 255 aa, Zea mays
  Clone ID: MRT4577_55343C.1.pep
MEQRPGLKRLLETTHLELDGKLLVNTQQAPTWRANCRCFDPRGSLDRRVKLSLRAPAQMGWREMEHKGGGETVARVILCQRGRARRRLLLRPRPGSSEDAIPPKVEVEAEPWGRARRRPPSEAEAGAEPWGRARRRLPPEAEAQGRARRSFLLLLRLGSAAVSLTLAGGTAVGEGRAALFSCQACAMGIGDFGGLEPWTLSGCLVGGWGVCGLNTWAYFSDPKSEFRSMHKSHKAHNKFNFGPNGYFGYHDLLPD

SEQ ID NO: 320479 - protein, 256 aa, Zea mays
  unsure (1)..(256): unsure at all Xaa locations
  Clone ID: MRT4577_55344C.1.pep
MANAPRILALGLLALLCAAAGPAAAQNCGCQPNFCCSKFGYCGGGGGGGGSGGANVANVVTDAFFNGIKNQAGSGCEGKNFYTRSAFLSAVNAYPGFAHGGTEVEGKREIAASFAHVTHETGHFCYISEINKNNAYCDASNRQWPCAAGQKYYGRGPLQISWNYNYGPAGRDIGFNGLADPNRVAQDAVIAFKTALWFWMNNVHRXMPQGFGATIRAINGALECNGNNPAQMNARVGYYKQYCQQLRVDPGPNLTC

SEQ ID NO: 320480 - protein, 280 aa, Zea mays
  Clone ID: MRT4577_55345C.1.pep
MANAPRILALGLLALLCAAAGPAAAQNCGCQPNFCCSKFGYCGTTDAYCGDGCQSGPCRSGGGGGGGGGGGGGGSGGANVANVVTDAFFNGIKNQAGSGCEGKNFYTRSAFLSAVNAYPGFAHGGTEVEGKREIAAFFAHVTHETGHFCYISEINKSNAYCDASNRQWPCAAGQKYYGRGPLQISWNYNYGPAGRDIGFNGLADPNRVAQDAVIAFKTALWFWMNNVHRVMPQGFGATIRAINGALECNGNNPAQMNARVGYYKQYCQQLRVDPGPNLTC

SEQ ID NO: 320481 - protein, 79 aa, Zea mays
  Clone ID: MRT4577_55346C.1.pep
LRKNSPGPQARLKFGGLPATGLNKPKQRRGSSHGNKKEGEKGPQNKGGDQRPHLKVEPWGGPRTRYFIGGGNLSPGKTS

SEQ ID NO: 320482 - protein, 96 aa, Zea mays
  unsure (1)..(96): unsure at all Xaa locations
  Clone ID: MRT4577_55347C.1.pep
GGASLFVNNNRLSGEVPPAVAPSVLDGRIPPLXGQHNFLGAFPVPPSGPLPDSPALCLSYKCMDLPMGSPAHGCPPLGGPPKARPPEQCRSPPGDG

SEQ ID NO: 320483 - protein, 72 aa, Zea mays
  Clone ID: MRT4577_55348C.1.pep
MGPIRMLPFCAVVMIVQASARDIHRFVIQDGPIMYRDITPHFKIPLASMRKDTNSGMLWTLAFYDRVLVRVL

SEQ ID NO: 320484 - protein, 157 aa, Zea mays
  Clone ID: MRT4577_55349C.1.pep
EITRVRLKEMDLPDSILPLEGNVSIPADLKEDVEAVQISGGPAGLEAELQQLRDLNRVNQELLVQTEEMLQKEASEDAQFRTQFGSRWTRPQSSTLTKNIQDRLNLFAGNLKKAAASDALIERDVKESYPLMSILDRRPIESALPSISRPIMSLDGN

SEQ ID NO: 320485 - protein, 145 aa, Zea mays
  unsure (1)..(145): unsure at all Xaa locations
  Clone ID: MRT4577_5534C.1.pep
GTAGAQAKRAGEAPGTTGPGPKPAPRNATPTNKQTRGGAGGAAAXKGSXDXXERKAQKSXGEEHXGEXNXEAXXXDXXAAEXDKEERPEXXXXXXXXEGKXXXEXGXGXGRXXXEXXKTXGQGXAXXXXERXXKKXGXXXEHXGN

SEQ ID NO: 320486 - protein, 222 aa, Zea mays
  unsure (1)..(222): unsure at all Xaa locations
  Clone ID: MRT4577_55350C.1.pep
SPSPSSPAPSSCSSASPMPXGYQISCGATSDKVAGNVTWVADGAFIHAGKVAELDSPGVMPMLSSLRYFPPDASSAAKYCYAVPAAMHARYLVRTTYYYGGFDGGGAPPVFDQIIDGTRWSAVDTAGGYARGLATYYEAVVEAAGKELSVCLARSAATAPGRSPFISALEVVPLEESVYSAVNFTAYALSTVARHSFGHNGSIIGYPDDRFNRYWEPYSDGG

SEQ ID NO: 320487 - protein, 187 aa, Zea mays
  Clone ID: MRT4577_55351C.1.pep
KIGPIKQNTKNGRTNVAAKPEPGGGATKRDKKGQEKITKKNILKGRRIKRSLGRILLRRPLWGQTLTGEALLFLEPLDKKPVGLKILKLILGKHLFRENDFTTLNFKGKGGNNQGGLKGLDHLLAINEKKTPACRGKVNRHQILVDKMEHLNNEEGPLGKPPPWILNFWTTTEMVTNRFNITQLKKK

SEQ ID NO: 320488 - protein, 153 aa, Zea mays
  Clone ID: MRT4577_55352C.1.pep
VWFFFFFFFFFFVFFFFFFFFFTLEFPYRFPKGTQRAPKRGKRKEKKNKGGGGKKKKSLTKNKPKQKTNQKQKRKKKRKPKRAQTKNNPAGLTERLTDPKQGGKPSLNNWQKNNQRPLGKKGAKGAPRRSTKTGKRPSPLTAPPRKSSKKGAT

SEQ ID NO: 320489 - protein, 75 aa, Zea mays
  Clone ID: MRT4577_55353C.1.pep
EHQRMRAVGCYTKLNFGTEPFNGYPNGGQFFPKGRGSIGGWGGGESLKWRAFITSLGGGPKPSPFHLSNACFFCR

SEQ ID NO: 320490 - protein, 97 aa, Zea mays
  Clone ID: MRT4577_55354C.1.pep
CDVPLPDRMSPLGSRGLVTCSLLTGCAHLGPPGVPTRASCSPAPAPANHPPPFPEPVPPPFGLLLRLRHQPVGWPACPRPSYWCVPIRFACPPSQES

SEQ ID NO: 320491 - protein, 64 aa, Zea mays
  Clone ID: MRT4577_55355C.1.pep
CKLLKRTKASAQERVNMPASNCTVYPYTEQNNSGKCVHSITSSGVQYFVVVSIELSGYEYVEIP

SEQ ID NO: 320492 - protein, 53 aa, Zea mays
  unsure (1)..(53): unsure at all Xaa locations
  Clone ID: MRT4577_55356C.1.pep
CPXLWXXLIXXXXPDTXGPXXPXWXXXXGXXXXXVLXXXXXRIPXCXRALXXX

SEQ ID NO: 320493 - protein, 83 aa, Zea mays
  Clone ID: MRT4577_55357C.1.pep
KILQASPKHYASSTMSFFLHIRVLHKKSSKRRQNINASSTIDFFLHIRADKVVFLQNLFCALAQFYFFEAFSEGQHCIPLLCH

SEQ ID NO: 320494 - protein, 30 aa, Zea mays
  Clone ID: MRT4577_55358C.1.pep
NLETPCFYPVLSFSLICCSVLYPHALDSRV

SEQ ID NO: 320495 - protein, 64 aa, Zea mays
  Clone ID: MRT4577_55359C.1.pep
MGVRRRLRPRQVSSTAMLCSSMVFGIGEGVRPWMDGCWERHVCLWFHVALHRQVEMMSWRCTLR

SEQ ID NO: 320496 - protein, 75 aa, Zea mays
  Clone ID: MRT4577_5535C.1.pep
FFSLGAFFSLAAFLARGLLGPSEPAGSFLGASVRRSLATSPSSVDTSFHYSSRHPPPALLFLSLSPATLPCVRTL

SEQ ID NO: 320497 - protein, 119 aa, Zea mays
  Clone ID: MRT4577_55360C.1.pep
TKLNPGPFSVFFPAPWAQSNSRPFFFFVPGPGTPPNVFVFCPPPGTKGPSPGSAPGGPPKNPPPQNGNPGSPPLSNGQLPPPPGEGPLNPPPGKTFTPSGAGGFFLGQTFAFAFPLFSV

SEQ ID NO: 320498 - protein, 100 aa, Zea mays
  Clone ID: MRT4577_55361C.1.pep
TIKKLMDREIACFCWPLLGKKEGGFWAWKKPGKGLSPHFREAQVPFERSEPNFCPGHNPYIGLLGPPGDLTHIYFCLVQWIFPLPGIQFLTRRHQIFPFP

SEQ ID NO: 320499 - protein, 273 aa, Zea mays
  unsure (1)..(273): unsure at all Xaa locations
  Clone ID: MRT4577_55362C.1.pep
PRGRPIQRTDHNHLKLKANHQTPGHGARAHFRCRAQDPXFLGARRALANAAAKPAPRRALVVAAAAAAKKSWIPAIKSDAEIVNPPWLDGSLPGDFGFDPLGLGKDPAFLKWYREAELIHGRWAMAAVLGIFVGQAWSGIPWFEAGADPSAIAPFSFGSLLGTQLLLMGWVESKRWVDFFNPDSQAVEWATPWSRTAENFANFTGEQGYPGGKFFDPLGLAGTVKDGVYIPDVDKLERLKLAEIKHARIAMLAMLAFYFEAGQGKTPLGALGL

SEQ ID NO: 320500 - protein, 62 aa, Zea mays
  Clone ID: MRT4577_55363C.1.pep
IVYLLSSKDKKKLGHHISKECTWLLDLLEIRVAQKIAQLHLITAHCNVVVLTTLWKATPRAE

SEQ ID NO: 320501 - protein, 70 aa, Zea mays
  Clone ID: MRT4577_55364C.1.pep
MYHVMYSMDRFHCIKKKKKKKKKKKKKKKKKKKKKKKKKKKKKKKKKKKKKKKKKKKKKKKKRAPRAGAL

SEQ ID NO: 320502 - protein, 61 aa, Zea mays
  Clone ID: MRT4577_55365C.1.pep
VELGYTQLRCSDLLGEQVVVFLFLLLEALFAILLASSHSRCNSIKGSTMSSTRATVSLVIH

SEQ ID NO: 320503 - protein, 263 aa, Zea mays
  unsure (1)..(263): unsure at all Xaa locations
  Clone ID: MRT4577_55366C.1.pep
PQPPKLKANHQTPGHGARAHLRCRAQDPXFLGARRALANAAAKPAPRRALVVAAAAAAKKSWIPAIKSDAEIVNPPWLDGSLPGDFGFDPLGLGKDPAFLKWYREAELIHGRWAMAAVLGIFVGQAWSGIPWFEAGADPSAIAPFSFGSLLGTQLLLMGWVESKRWVDFFNPDSQAVEWATPWSRTAENFANFTGEQGYPGGKFFDPLGLAGTVKDGVYIPDVDKLERLKLAEIKHARIAMLAMLAFYFEAGQGKTPLGALGL

SEQ ID NO: 320504 - protein, 263 aa, Zea mays
  unsure (1)..(263): unsure at all Xaa locations
  Clone ID: MRT4577_55367C.1.pep
PLKAKHTPGHGARVHLRHRARCRAQDPXFLGARRALANAAAPKPAPRRALLAVAAAAAKKSWIPAFKSDAEFINPPWLDGSLPGDFGFDPLGLGKDPAFLKWYREAELIHGRWAMAAVLGIFVGQAWSGIPWFEAGADPGAIAPFSFGSLLGTQLLLMGWVESKRWVDFFNPDSQSVEWATPWSRTAENFANFTGDQGYPGGKFFDPLGLAGTVKDGVYVPDVEKLERLKLAEIKHARIAMLAMLVFYFEAGQGKTPLGALGL

SEQ ID NO: 320505 - protein, 39 aa, Zea mays
  Clone ID: MRT4577_55368C.1.pep
LVDRLYQTILFFFYPLKILAFRTLEELYRVNTTDRRLLF

SEQ ID NO: 320506 - protein, 70 aa, Zea mays
  Clone ID: MRT4577_55369C.1.pep
CNLMPLNMMHLHEHMQLLLIIVTTTTTTTTRPNEQNDLQRPSKEVSETLRHTMPMLIQQLTLRIHQLQHQ

SEQ ID NO: 320507 - protein, 96 aa, Zea mays
  Clone ID: MRT4577_5536C.1.pep
PNSGGFVFYPLGQLVFWTFDWFMGFTGASIGIWVLFTKLQGFSQGTCFKHLFFRGGVLFDGGRIVFFGGGPQGFFFPSLVAAFFLNGGGGNCHLGL

SEQ ID NO: 320508 - protein, 315 aa, Zea mays
  unsure (1)..(315): unsure at all Xaa locations
  Clone ID: MRT4577_55370C.1.pep
FGATNNGGQTRRHGVRSRSGGGAXASSMVLSLLLVGVGVSRAQLQVGFYSDYCPDAEDTVTAAVQDAAGNDPTILPALLRLQFHDCFVKGCDASVLIRSASNDAEVDNGKNQGLRGQNVVDAAKAQLEDQCPGVVSCADIIALAARDAVAMTGGPSFDVPTGRRDGLTSNIRDADVLPDAGDSISVLRSRFAASGLDDRDLVLLTAAHTVGTTACFFVKDRLYSYPLPSGGRGPDPSIPASFLAELEDRCPPGNFNTRLALDRGSESDFDDSILRNIRSGLAVIASDAALANSNATRALVDAYLGPWAGSFEQDF

SEQ ID NO: 320509 - protein, 47 aa, Zea mays
  Clone ID: MRT4577_55371C.1.pep
LVHLVECQATVADAPALAEIQMVLMILPLSHELVLLALVRGPDLPSR

SEQ ID NO: 320510 - protein, 58 aa, Zea mays
  Clone ID: MRT4577_55372C.1.pep
KPQKRAKGSGKKNTIFQKSVTMGQTKVASKPIKFCLPKIFFSKKWAFFLVHGQLCPQN

SEQ ID NO: 320511 - protein, 74 aa, Zea mays
  Clone ID: MRT4577_55373C.1.pep
QRAPCGEGVISKIYNKKTSTYNPTLHSFSEDISSRFVCTPLQTANNALLTKDVTTIAEICYWLPECLIIMLSKL

SEQ ID NO: 320512 - protein, 201 aa, Zea mays
  Clone ID: MRT4577_55374C.1.pep
MESDAEEEAAATPAAAATPGAGRLKGNPELTVDADMREMAKTAAWSVSSCKAGNGVAALRDDNLDTYWQSDGAQPHLVNIQFQKKVQLQLVVLYVDFKLDESYTPSKISIRAGDGFHNLKEIRTVELAKPVGWVHISLSGIDPRETFIHTFMLQIAVLSNHLNGRDTHVRQIKIYGPRPNPVPHQPFHFTSREFITYSTIR

SEQ ID NO: 320513 - protein, 65 aa, Zea mays
  Clone ID: MRT4577_55375C.1.pep
LVSTTLSYRNLKIKDDYLKIRMMEICLFETPLLHDKICYDNLEDNDETSTPIVALYHHHGRLPLD

SEQ ID NO: 320514 - protein, 199 aa, Zea mays
  unsure (1)..(199): unsure at all Xaa locations
  Clone ID: MRT4577_55376C.1.pep
MAPDPCGDLVVTPKTAAKDEASCSVPTPPKVTPDEVRAVARKFADQPIQETEPDVWAVLTAISKKARLRPQGMNILLSADEHCLGRSVEERFRIFAQQISGMHCKIYRDTVLGELNRHEPVPVFLKDTSSXAHSSTGKGSRKIHPRSSLIMATLYHYXPPHDDNSFVFVYREVNTISRVENGAPILKGSQWRVVLEVRG

SEQ ID NO: 320515 - protein, 25 aa, Zea mays
  Clone ID: MRT4577_55377C.1.pep
LIYQITSSQFIKKIHKSTFIRFSII

SEQ ID NO: 320516 - protein, 76 aa, Zea mays
  Clone ID: MRT4577_55378C.1.pep
RQSSLSLACSMTAMFKSKDLVSLRNTMKTQLFRVSFESLHRAARIICVVVVVDVLSLKERTSCFLGCFLVRLHFIL

SEQ ID NO: 320517 - protein, 56 aa, Zea mays
  Clone ID: MRT4577_55379C.1.pep
SPQKYPGGATSWAIPGAGFENVPLRNIVSRKVHRFSCRAFFGSRGLAGLGVRVGSL

SEQ ID NO: 320518 - protein, 62 aa, Zea mays
  Clone ID: MRT4577_5537C.1.pep
HKATTQTTSRYNRWRQVYILQSAPQIKCHHPNNELHFKPGTHICTCQHKKNGKITTCWAAYC

SEQ ID NO: 320519 - protein, 64 aa, Zea mays
  Clone ID: MRT4577_55380C.1.pep
CRVITFRNEITTLILKKKNKKKKKKKKKKKKKKKKKKKKKKKKQKKQKKKKKKKKNKKKTKKKI

SEQ ID NO: 320520 - protein, 61 aa, Zea mays
  Clone ID: MRT4577_55381C.1.pep
LKLPQGGRCFPMFQTLLPWLVVKWDEKVPLHLERIRPSKAVGNLSFRFSKKLSAFWWPLDG

SEQ ID NO: 320521 - protein, 92 aa, Zea mays
  Clone ID: MRT4577_55382C.1.pep
YHVIDIKDEGASYFNGTLLMILTPTDELWPNQERLNADRISVDCRAAMSQEQICALNDSWPQVTSLPCNTVSQNLNLNKKCINDCYRDIHLA

SEQ ID NO: 320522 - protein, 121 aa, Zea mays
  Clone ID: MRT4577_55383C.1.pep
HASAHASGSCVLLPTQSLGVGEGGSERRWRRCRRRGSGRATSYQRSSPPLEGRDPLAALAVTDEALDAGLLMIARWFRSGGWTPYKPAPHQDGTADQEWTPSPTPMTDASASHLLQAQTSP

SEQ ID NO: 320523 - protein, 41 aa, Zea mays
  Clone ID: MRT4577_55384C.1.pep
PHKFRFLQYCCVTRLSRSQVTWHQVRAQRRGRNARGLVWSA

SEQ ID NO: 320524 - protein, 64 aa, Zea mays
  Clone ID: MRT4577_55385C.1.pep
NGIKEAKSWPAHHFLPHSNGLSSGKNNLVLGWASRQNTRGKVYLVGRETKTHLCNLMLFQTKCY

SEQ ID NO: 320525 - protein, 74 aa, Zea mays
  Clone ID: MRT4577_55386C.1.pep
TCLTWWRHHVQADKIRQITLGRAMVYKWIYGPLFIESWIVNMPSHGYHTTYLKNEAGYLLNRSTLFLHGKILRT

SEQ ID NO: 320526 - protein, 125 aa, Zea mays
  unsure (1)..(125): unsure at all Xaa locations
  Clone ID: MRT4577_55387C.1.pep
ADAWGHSRRSQHIAAPSARPGRGLGGADSVIPCPPVAHGVGRPISTRQPTARSPTPSSARGARPPSPAPRRLGSRPGSLRRAGXGXXVSVDAAPRMAPRLTDPSDCGGWQPRRGFHPAWRFTSRH

SEQ ID NO: 320527 - protein, 45 aa, Zea mays
  Clone ID: MRT4577_55388C.1.pep
RRRGLLCDTGPGRCAPAGHHATVPGHHRPKQLRQRRGRRRAGQGV

SEQ ID NO: 320528 - protein, 127 aa, Zea mays
  unsure (1)..(127): unsure at all Xaa locations
  Clone ID: MRT4577_55389C.1.pep
GEXKKGXXAXXIXMSFSSSHXNRLHPLXXDLNNPKAAAXLLXVLLXQTQXAPFLARKPLLFGTDXXHGALWKFFFFFXXVGMGRDGTKTXFHFENXQKRRKRXNLXLXXIELRTXITXXYXXTXXNX

SEQ ID NO: 320529 - protein, 123 aa, Zea mays
  unsure (1)..(123): unsure at all Xaa locations
  Clone ID: MRT4577_5538C.1.pep
LELGLETEQKPEAGYWNVXARAXDTCTSAPARLHCHTDGSSLCPGCYARAHXPGXRHARIXIHEGCEHSHGCGTWHADXAALCAACDVDIHXVNPLARRHERLPVAPLFCALADTPQPFPSPD

SEQ ID NO: 320530 - protein, 141 aa, Zea mays
  Clone ID: MRT4577_55390C.1.pep
MAPRVADKTPLPLATGLKLGVGGGMGLGPHYRGVRKRPWGRYAAEIRDPAKKSRVWLGTYDTAEEAAKAYDVAAREFRGAKAKTNFPFPLAVAVAGGAGSPSSDSTTVESSCGGSGCGVEAPAVQAAMPLTPALDLDLFHR

SEQ ID NO: 320531 - protein, 67 aa, Zea mays
  Clone ID: MRT4577_55391C.1.pep
PNRWRTNYALDDGKGIESSAASTAPMRTMSYMVVLVDVCRYKVLANSSCDGITKLRCYNHSSNRLDS

SEQ ID NO: 320532 - protein, 67 aa, Zea mays
  Clone ID: MRT4577_55392C.1.pep
VEFGKLCLVGFSLNSVSDVEKKNLRVPPSSLFLHGFTLLTVAGHRSICLIYQKGLLPHCTIFTRTLF

SEQ ID NO: 320533 - protein, 134 aa, Zea mays
  Clone ID: MRT4577_55393C.1.pep
RPPRRFAPGSRRPRQVVSASPKGTPACSVRSTPPTAKRFSPPVRCFCPAVYSKRKSAASPISWIHPPARSIDRPPPRGVWSYHLSPFGQSLVLPKNNKRRRPPPSTWSSVSFPLCPLTWKICRHVCIRNVPCPP

SEQ ID NO: 320534 - protein, 61 aa, Zea mays
  unsure (1)..(61): unsure at all Xaa locations
  Clone ID: MRT4577_55394C.1.pep
DDVXFPQXVRLARFENDSTISLIPXDGSYXDLVIYSLSTQVRPLISIVAQIEKHSRSLIEL

SEQ ID NO: 320535 - protein, 80 aa, Zea mays
  unsure (1)..(80): unsure at all Xaa locations
  Clone ID: MRT4577_55395C.1.pep
PELQTASXVPSSKPNVSTTNRAKRKYVPTVSNTNRGILKTSEKSSSDSAEPRRTTSDSAEPRRSNRRIQPTSRGRTQAHG

SEQ ID NO: 320536 - protein, 600 aa, Zea mays
  unsure (1)..(600): unsure at all Xaa locations
  Clone ID: MRT4577_55396C.1.pep
GYWKSASARNKSGSGNDNPVTETLDVDAPANFNKSGRKRGRKPKYDQALPNSEPSSSCKELQSYGIHSGVGHGVVEDVPITVSPNGNNVTSPINIIWNGIEKGSAVEVLSDKGGFGVAWFSAKVIDINGNNVFVNYDNHNXDLGLMKKXVPLRQXGDKPLRARXAHPATLSKFKTRKRLRETAGSCLWVIGDHVDAWVNNSCWREGVISQNYETDETKYDVHFSVGGGGESLVVDAWSLRPSRVWKDGQWVEWSHARERKSKSNKGDSPPEKRQRIDLLQTGGNLSVLGEVGGSSKDNNINNAKNPEELKPLSLSQGEIVFNIGKSVVENKSDSLAFRRPGLQKEGSKVVYGVPKHGKKKKFMEVSKHYDAGQSDKISEGNSSNRFVKHLMPQLPRPRENASKVDPIRGRRVGETRSRLPKPTKSHNVGASSVPGKDSLPMQMHVPNSGVSERSSSFAGSSTSTSNNEKPTSENNNPVLGVGLRTEVSSGPELQTASTVPSSKPNVSTTNRAKRKYVPTVSNTNRGILKTSEKSSSDSAEPRRTTSDSAEPRRSNRRIQPTSRLLEGLQSSLVISKVPGEKVPRSNYKSASSRGRTQAHG

SEQ ID NO: 320537 - protein, 118 aa, Zea mays
  Clone ID: MRT4577_55397C.1.pep
ANVKTRCLATKTVQQKESDGSGTVRLFDVEYYGHHICKKDVVNHPCVVDTAHYYSVPIANQNQSSSSPTFVHNDVYGIQEESFENLFMVPSIPEYLTDFTDIEMAGALELGYLRDDLF

SEQ ID NO: 320538 - protein, 81 aa, Zea mays
  unsure (1)..(81): unsure at all Xaa locations
  Clone ID: MRT4577_55398C.1.pep
FFFLALXSRFGAFSXSVAXGLLXSVVVSLRAVSCRCVFFFALXAPWLCLGLLFVFVVGXXFGGPCVGPLFFXXXXXXXPPP

SEQ ID NO: 320539 - protein, 115 aa, Zea mays
  unsure (1)..(115): unsure at all Xaa locations
  Clone ID: MRT4577_55399C.1.pep
LGIASRGSGVAVSSGLLLLVGALGATRGRGATFTITNNWGSTGGPGATPGGGGTQFDPGKTGTGDVPGGTQSGRGGGRTGGSFNGGRGSCQTGDCXGALSCTLSGKPPMTLAEFT

SEQ ID NO: 320540 - protein, 103 aa, Zea mays
  Clone ID: MRT4577_5539C.1.pep
RAGHALPSTPVSLAGFVGNEVDMEVQQASGDDRRSIRMMRNRESALRSRARKRAYVENLEKEVRRLVDDNLKLKKQCKELKREVAALVLPTKSSLRRTSSTQF

SEQ ID NO: 320541 - protein, 126 aa, Zea mays
  unsure (1)..(126): unsure at all Xaa locations
  Clone ID: MRT4577_553C.1.pep
GGTRTGSSRRRRKAFATVAEFPGEGGGLSLGKLFILLFSNKEMRVLMVGLDAAGKTTILYKLKLGEIVTTIPTIGFNGETVXYNNIIFTVXIVCGQDKIMALWRDYFXNTQGLIFFGYKNHRERVV

SEQ ID NO: 320542 - protein, 246 aa, Zea mays
  Clone ID: MRT4577_55400C.1.pep
MHKTAQARFTGRTAAFSGPTAESQLPCSSMASTVRGREGPASPVRHWPRSKRSDAENTGEAQRRHQGRRPPRRRPKVTVPTISLPSASWRTHGRSAICRLIPRPTTAEADPQPTEPTEVMYRTRADDFLGRCKSIVYQNNNGLCPLLTICNVLLLKNVISLNPDAEEVSQKRLLSLVAERLIDPNIAGQHVNGSIRRSWMRGDLDVESFEGSHLVLVATGSDSFEVVSYKNVNCLKQDSLDKRIIE

SEQ ID NO: 320543 - protein, 41 aa, Zea mays
  unsure (1)..(41): unsure at all Xaa locations
  Clone ID: MRT4577_55401C.1.pep
LLVRDLVLLIIKLFRVVIYWPSDSLADRLILDLALVXRLPA

SEQ ID NO: 320544 - protein, 54 aa, Zea mays
  Clone ID: MRT4577_55402C.1.pep
SPTILQLSPSICAPVSLVIPRPTSASYPFPLCLNHNSLFQHNNIHLIFSSSALL

SEQ ID NO: 320545 - protein, 621 aa, Zea mays
  Clone ID: MRT4577_55403C.1.pep
PGLALNCKGSVPIYLVAKRILSLDVGLLIAGAKERGELESRVTNIIREVREAGDVILFIDEVHNLIGSGTVGKSKGSGLDIGNLLKPALARGELQCIAATTLDEHRMHFEKDKALARRFQPVLVDEPSQEDAVKILLGLREKYEAYHKCKFTLEAINAAVYLSARYIPDRQLPDKAIDLIDEAGSRARMESFNRKKEGQSSILLKSPDEYWQEIRAAQAMHEVVLSNKEKYSPNENAEESGSSNVEAPRRDNIESTSTSSLSADEPVVVGTEEIARVASLWSGIPVQQLTADDKKLLVGLDDELRKRVIGQDDAVVAISRAVKRSRVGLNDPDRPIATLLFCGPTGVGKTELTKALAASYFGSESAMLRLDMSEYMERHTVSKLIGSPPGYIGYGETGTLTEAVRRKPFTVVLLDEIEKAHPDIFNILLQIFEDGHLTDSQGRRVSFKNTLIVMTSNVGSTSISKGRQSIGFLKEDTESGSYFAMKSLVMEELKAFFRPELLNRIDEMVVFRPLEKTQMLAILDIILKEVKGRLLALGIGLEVSDAMKDLICQEGYDKSYGARPLRRAVTHIIEDVISEAILFGEFKPGDTILMDIDAEGKPCMGHLDQQIVQVSDPTRAI

SEQ ID NO: 320546 - protein, 98 aa, Zea mays
  Clone ID: MRT4577_55404C.1.pep
FLLLFVWEVAKFHPISQRRGLPDMDGGRDKLEQGGYGHCFMFVTLKDLYPSLFPYYHGIIAFNIILYINYSYRGGVDSEGCPVICRCRCSLSSSLLDS

SEQ ID NO: 320547 - protein, 131 aa, Zea mays
  unsure (1)..(131): unsure at all Xaa locations
  Clone ID: MRT4577_55405C.1.pep
GGEPXLXAVAVSXMPCGHCRQFLQEIRGAASIRILVTSDAAEGXAPEWRTVASLLLRPFGPNDLLPGDVPLVLEAHDNALGDPVANGLARSDLDARLRQAAEAAARAAHAPYSKCPSGFAVADGXGRIYAG

SEQ ID NO: 320548 - protein, 365 aa, Zea mays
  unsure (1)..(365): unsure at all Xaa locations
  Clone ID: MRT4577_55406C.1.pep
ACEKLWQRAWRRARGGGERLHRAGVPREKLPFYISRDVYEASIDFFLPDPRITSAYALQVQLHADEETYRSMGKEHALVISNHRSDIDWLIGWILAQRSGCLGSTLAVMKKSSKFLPVIGWSMWFAEYLFLERSWAKDEKTLKWGLQRLKDFPRPFWLALFVEGTRFTPAKLLAAQEYAASQGLPAPRNVLIPRTKGFVSAVSIMRDFVPAIYDTTVIVPKDSPQPTMLRILKGQSSVIHVRMKRHAMSEMPKSDDXVSKWCKDIFVTKDALLDKHLATGTFDEEIRPIGRPVKSLLVTLFWSCLLLFGAIEFFKWTQLLSTWRGVAFTAAGMALVTGVMHVFVMFSQAERSSSAKAARNRVKKE

SEQ ID NO: 320549 - protein, 374 aa, Zea mays
  Clone ID: MRT4577_55407C.1.pep
MAIPLVLVVLPLGLLFLLSGLIVNAIQAVLFVTIRPFSKSFYRRINRFLAELLWLQLVWVVDWWAGVKVQLHADEETYRSMGKEHALIISNHRSDIDWLIGWILAQRSGCLGSTLAVMKKSSKFLPVIGWSMWFAEYLFLERSWAKDEKTLKWGLQRLKDFPRPFWLALFVEGTRFTPAKLLAAQEYAASQGLPAPRNVLIPRTKGFVSAVSIMRDFVPAIYDTTVIVPKDSPQPTMLRILKGQSSVIHVRMKRHAMSEMPKSDEDVSKWCKDIFVAKDALLDKHLATGTFDEEIRPIGRPVKSLLVTLFWSCLLLFGAIEFFKWTQLLSTWRGVAFTAAGMALVTGVMHVFIMFSQAERSSSARAARNRVKKE

SEQ ID NO: 320550 - protein, 374 aa, Zea mays
  Clone ID: MRT4577_55408C.1.pep
MAIPLVLVVLPLGLLFLLSGLIVNTIQAILFVTIRPFSKSLYRRINRFLAELLWLQLVWVVDWWAGVKVQLHADEETYRSMGKEHALVISNHRSDIDWLIGWILAQRSGCLGSTLAVMKKSSKFLPVIGWSMWFAEYLFLERSWAKDEKTLKWGLQRLKDFPRPFWLALFVEGTRFTPAKLLAAQEYAASQGLPAPRNVLIPRTKGFVSAVSIMRDFVPAIYDTTVIVPKDSPQPTMLRILKGQSSVIHVRMKRHAMSEMPKSDDDVSKWCKDIFVAKDALLDKHLATGTFDEEIRPIGRPVKSLLVTLFWSCLLLFGAIEFFKWTQLLSTWRGVAFTAAGMALVTGVMHVFIMFSQAERSSSAKAARNRVKKE

SEQ ID NO: 320551 - protein, 127 aa, Zea mays
  Clone ID: MRT4577_55409C.1.pep
PPLPPGDKKRPRQLGGFLGDAPVGKKRGVGAPGFGPKAQEPAPGWGPRRWVPPLKAPGNWGKKKRWWGFLGPRGRGPLGTPCFSWWPPATISQCEGFCLKNVTCYLGVVFLPPPPCLFLPGPFWLWS

SEQ ID NO: 320552 - protein, 132 aa, Zea mays
  unsure (1)..(132): unsure at all Xaa locations
  Clone ID: MRT4577_5540C.1.pep
PRAPFFFFPCQNPLFGRKAFVFCPVPERDGFCKSDQVPGAPQGCPPQKKSFPPRVWGPSRGLRVPHRWAVFPTPGGGAIFPPPDLVGEXXFPSPLPPPLASYKKIFDLKKGPKFGGPLLFFCGKKWAPCSGP

SEQ ID NO: 320553 - protein, 106 aa, Zea mays
  Clone ID: MRT4577_55410C.1.pep
SDSCWHDYIIYITTHTLNYNCIAITPLFLGLKVRERFPLGKGITPPPTGPKGTRFGSNPCTLKLGFKNINWVLGKSEHTPRLKTRSGLTPKERKVATSIICASWAF

SEQ ID NO: 320554 - protein, 131 aa, Zea mays
  Clone ID: MRT4577_55411C.1.pep
MVAAKKHVPIVKKRTAQFKRHQSDRFDRVGESWRKPKGIDNCVRRRFKGQAVMPKIGYGSNKKTRHMMPSGHKAFLVNNTRDLDLLLMHNKTYAAEIAHAVSAKNRISIVSRAKELGVKVTNGKAKLSTEA

SEQ ID NO: 320555 - protein, 131 aa, Zea mays
  Clone ID: MRT4577_55412C.1.pep
RGRGGRGNGGHQNGRGNGQTGATTSQHGRGNGQTNDRAHCYAFPGRSEAEASDAVITGNLLVCDCMASVLFDPRSTFSYISSSFDNGLNLHCEFLDMPIRVSTPVGESVVAEKVYRSCVVNFVGSNTYVDL

SEQ ID NO: 320556 - protein, 124 aa, Zea mays
  Clone ID: MRT4577_55413C.1.pep
NNFFSFYFFLVRFFFGWFRPSPNIFCGRIPFVYQSKRRHQLSSHQETRKRSPLIGGGPKPTPKNFVFGIHPKTNSKGGPPQNVFRGGGRPVCKKKVAKGQQNLHMKKGLGGRPQPLEKGKKPCF

SEQ ID NO: 320557 - protein, 291 aa, Zea mays
  unsure (1)..(291): unsure at all Xaa locations
  Clone ID: MRT4577_55414C.1.pep
SRPAGPGSSRRRCSLAHPTPPAVSSSPPRTRRNLLSSRTWGQLRVRGRPRGLGPQGRPPLAHLKQFVGRWKRSSRAACSDLNETLIYSDLKVETASPLRNARRKGRPKTESKDNASVKPCSAGSCEKNNLEEQTESLDNIDATEMDWEEGHVEHIEDSVELRETMTVEFNDIPSSTKKKSVRRPSAEEKELAELVHKVHLLCLIARGRVVDKACYDTLIQASVLSLVPCHLLWSLVDVPNLKAVNLRSLVSWFHRTFCVTAQSTDRXSFESNLAFTISDHVGTAEEICALS

SEQ ID NO: 320558 - protein, 109 aa, Zea mays
  Clone ID: MRT4577_55415C.1.pep
GLRSRRPYWTSDGVGGKGKTLFISLPSCLSLEQAWNVPGSKGISWLGRGEHGPRGLVMMLVVLGVHLGETLLIALEVSELGSGAPGTGDPRHDIRPLNCARDWPAAYAQ

SEQ ID NO: 320559 - protein, 101 aa, Zea mays
  unsure (1)..(101): unsure at all Xaa locations
  Clone ID: MRT4577_55416C.1.pep
MGAFIFKHTCGYIIGEGFFYRLVYHIXQDYMRKNXKDITGNPXRASGRLMTACYRPKRTLSFNVQSTIDIDSLYEGFDFYTTNNPARIEEFNMDLFPKCME

SEQ ID NO: 320560 - protein, 249 aa, Zea mays
  unsure (1)..(249): unsure at all Xaa locations
  Clone ID: MRT4577_55417C.1.pep
MRRTRSQSASGVNPPPAAGPSAEVAGRRRASPAANGKSPATKVETASPLRDARRKGRPKTESKDNASVKPCSAGSCEKNNLEEQTESLDNIDATEMDWEEGHVEHIEDSVELRETMTVEFNDIPSSTKKKSVRRPSAEEKELAELVHKVHLLCLIARGRVVDKACYDTLIQASVLSLVPCHLLWSLVDVPNLKAVNLRSLVSWVHRTFCVTAQSTDRGSFESNLAFTIQXHVGTAEEFXALSVAYSGHS

SEQ ID NO: 320561 - protein, 266 aa, Zea mays
  unsure (1)..(266): unsure at all Xaa locations
  Clone ID: MRT4577_55418C.1.pep
PARPAGPGILFCSSICPRHSSLLSSSSFICCRVSTREMEPQEGRKGIPSLLSSQGECIATNITQLIGWTPLIELRNITEKDSIGARLIGKIEPYQPLSSVKDRSALRLIEDAEEKGLITPGITTLLGVTSGNLGIGVAFIAAQKGYKFIALMPAKLSLDKQILMRYLGVEVVLVDAVQHGFKALLDRVEQMKKDVEDVYVLDQFTNPANPDAHFRWTGPEIWKDTAGKVDIFIAASXSGGTITGXVGRYLKTKNPSXKFICVEPAE

SEQ ID NO: 320562 - protein, 231 aa, Zea mays
  unsure (1)..(231): unsure at all Xaa locations
  Clone ID: MRT4577_55419C.1.pep
MAQPAELSREENVYMAKLAEQAERYEEMVEFMEKVAKTVDSEELTVEERNLLSVAYKNVIGARRASWRIISSIEQKEESRGNEDRVTLIKDYRGKIEVELTKICDGILKLLDSHLVPSSTAPESKVFYLKMKGDYYRYLAEFKSGTERKDAAENTMVAYKAAQEIALKELPPTHPIRLXLALNFSVFYYEILNSPDRACDLAKQAFDEASRXLDSLSEESXQDSTXIMQLC

SEQ ID NO: 320563 - protein, 51 aa, Zea mays
  Clone ID: MRT4577_5541C.1.pep
SVLYPAFHMTSCTTEGELYLKCRRNDVSAEEISAYTRLVYTLHQGWESDET

SEQ ID NO: 320564 - protein, 301 aa, Zea mays
  unsure (1)..(301): unsure at all Xaa locations
  Clone ID: MRT4577_55420C.1.pep
MTAAAAAARAARRHFSSRLQTTTSRLLHASDSQAAARETSGSFIHPAAVVHPDAAIGQAVSIGPFCTVGPSARVGDTCQLHAGSHVMGHTELGEGCIVQTXGDECFLHIGRNNEIREYCSVHRSSKSCDCTVIGDNNLIMGSSHIAHDCKIGNNNIFANNTLFAGHVIVEDWTHTAGAVVVHQFCHIGSYSFLGGGSVVAQDVPRYMMVAGDRAELRGLNIEGLRRNGFSDQKVRRLRKAYQRVFMPTITSKSSFEDRLAELEQEVELSESPAVSCMVESIRMSFVQGHRGICKFRSWNSS

SEQ ID NO: 320565 - protein, 324 aa, Zea mays
  Clone ID: MRT4577_55421C.1.pep
MTAAAAAARAARRHFSSRLQTTTSRLLHASDSQAAARETSGSFIHPAAVVHPDAAIGQAVSIGPFCTVGPSARVGDTCQLHAGSHVMGHTELGEGCIVQTGAIVGADIPGRTIIGENNVIGHYAVVGAKCQDLKYKTGDECFLHIGRNNEIREYCSVHRSSKSCDCTVIGDNNLIMGSSHIAHDCKIGNNNIFANNTLFAGHVIVEDWTHTAGAVVVHQFCHIGSYSFLGGSSVVAQDVPRYMMVAGDRAELRGLNIEGLRRNGFSDQEVRRLRKAYQRVFMPTITSKSSFEDRLAELEQEVELSESPAVSCMVESIRMFVVQG

SEQ ID NO: 320566 - protein, 198 aa, Zea mays
  unsure (1)..(198): unsure at all Xaa locations
  Clone ID: MRT4577_55422C.1.pep
MPSLQLLQLTDHGRGLLASRRRTLAVVSGAVLAGGALAYARSSQSRRRRRRPEASRSGGAGALAANGDGFSQNGAGGGLAAADQRRSGLKSLHFLASILLKKMGPSGTRYLLCLVLTSVLRTAVGHRLARVQGFLFKAAFLRRIPTFTRLXIIENLTLCFLQSTLYQTSXYLTGSLXSLRFKKILTDIAHADYXENMG

SEQ ID NO: 320567 - protein, 58 aa, Zea mays
  Clone ID: MRT4577_55423C.1.pep
LISLLYIKTRPLLHSIGKIPSPVKHNGHISRGPLEQWHGHAINATRNMGESTLKSSAH

SEQ ID NO: 320568 - protein, 119 aa, Zea mays
  unsure (1)..(119): unsure at all Xaa locations
  Clone ID: MRT4577_55424C.1.pep
MEPPHTEEAAAAAAGGAEGGSASPGTGLEGPMLRLGLDGGXGGGGRGAGGWGXADTWLPERPGEADCGYYLRTGACGFGERCRYNHPRDRGGTEFGGGAKNGAAQYFPERQGQPVCEVH

SEQ ID NO: 320569 - protein, 38 aa, Zea mays
  unsure (1)..(38): unsure at all Xaa locations
  Clone ID: MRT4577_55425C.1.pep
WGKKSWAKLETIMRSRELVVRNLXRCLTGEAIPARRLE

SEQ ID NO: 320570 - protein, 111 aa, Zea mays
  Clone ID: MRT4577_55426C.1.pep
RTPGCSCSVSSKYSNSLLPILLRGQWRLPTLSPHHASLLLCLHGLHDCIALLYQLGNLTLSLNLTRYANFRLISSLPAGTLLSVSLRNASSGSSGKTPYAALSHSMAWSHR

SEQ ID NO: 320571 - protein, 42 aa, Zea mays
  Clone ID: MRT4577_55427C.1.pep
VDSMMVAHRTRVLPRLWQVGRGFARRRAREVEPHLLLVPRRP

SEQ ID NO: 320572 - protein, 168 aa, Zea mays
  Clone ID: MRT4577_55428C.1.pep
IRHEAQVIEKVTVSDWMDTVTDAEHVPASVFLGPEFLRHKLYQLSPPEDYTLSQSLARVSSYYVPDLQSQTPLTAATTVRRLPCQTGWTPYTDAEHVPASVFLGPELLRHKLDQLSPPEDYMLSQSLARVGLLPRAPNALSWSCHYMVKRPSTCSVGDNEAESTKLHA

SEQ ID NO: 320573 - protein, 49 aa, Zea mays
  unsure (1)..(49): unsure at all Xaa locations
  Clone ID: MRT4577_55429C.1.pep
CXKKKKKKKKKKKKKKKKKKKKKKKKKKKKKKKKKKFKKERVFPSRGGF

SEQ ID NO: 320574 - protein, 93 aa, Zea mays
  Clone ID: MRT4577_5542C.1.pep
TLGFWGGPTLGFFFFFSKTHFPLLWGFGGPPQQGPGPFGGVLFWVIPRPPLPLNWWVKKGGRVTSKSFSSLVNKGVGQKGGWGSKFPFGQKRS

SEQ ID NO: 320575 - protein, 36 aa, Zea mays
  Clone ID: MRT4577_55430C.1.pep
SSLSWLVTTPVSRRALSYYAESPVDTYACDHVQIQQ

SEQ ID NO: 320576 - protein, 100 aa, Zea mays
  Clone ID: MRT4577_55431C.1.pep
LKAYLPLVFNSNSEILRFSLVMLGSNLHSPFFCLNLYLNIYALEITYWRNKFNHFWSLWLMILLISMLDTSHAECTIVENTVFHIVYGSLITLLNLDCST

SEQ ID NO: 320577 - protein, 333 aa, Zea mays
  Clone ID: MRT4577_55432C.1.pep
MDSCFHVLIQALLHCAPSSPPPLPATNCQGLCSGGTASRSDPLTSAMGNLCCCVQVDQSTVAIREQFGKFDSVLEPGCHCMPWFAGKRVAGQLTLRLQQLDVRCETKTKDNVFVNVVASIQYRALADKASDAFYKLSNTRSQIQAYVFDVIRASVPKLHLDDAFEQKDEIARAVEEELEKAMSAYGFEIVQTLIVDIEPDEHVKRAMNEINAAARLRAAANEKAEAEKIVQIKRAEGEAEAKYLSGLGIARQRQAIVDGLRDSVLGFSVNVPGTTAKDVMDMVLITQYFDTMKEIGASSKASSVFIPHGPGAVRDIATQIRDGLLQGSSVAKH

SEQ ID NO: 320578 - protein, 371 aa, Zea mays
  Clone ID: MRT4577_55433C.1.pep
MPLHALVRRQACSWATHTQAAATGCALRDRRGGGVDSCTVLLRLLLPCLPPTAKVPSKCRYLPCLTNNAIRVLQPGQVLFFHSAMGNLCCCVQVDQSTVAIREQFGKFDSVLEPGCHCMPWFAGKRVAGHLTLRLQQLDVRCETKTKDNVFVNVVASIQYRALADKASDAFYKLSNTRSQIQAYVFDVIRASVPKLHLDDAFEQKDEIARAVEEELEKAMSAYGFEIVQTLIVDIEPDEHVKRAMNEINAAARLRAAANEKAEAEKIVQIKRAEGEAEAKYLSGLGIARQRQAIVDGLRDSVLGFSVNVPGTTAKDVMDMVLITQYFDTMKEIGASSKASSVFIPHGPGAVRDIATQIRDGLLQGSSVAKH

SEQ ID NO: 320579 - protein, 57 aa, Zea mays
  unsure (1)..(57): unsure at all Xaa locations
  Clone ID: MRT4577_55434C.1.pep
QDEIFQKFNLDTEWAVRXISRITNDEDIAIESNVVVKQLLGLQINAEKYYFGLRKTL

SEQ ID NO: 320580 - protein, 287 aa, Zea mays
  Clone ID: MRT4577_55435C.1.pep
MGNLCCCVQVDQSTVAIREQFGKFDSVLEPGCHCMPWFAGKRVAGQLTLRLQQLDVRCETKTKDNVFVNVVASIQYRALADKASDAFYKLSNTRSQIQAYVFDVIRASVPKLHLDDAFEQKDEIARAVEEELEKAMSAYGFEIVQTLIVDIEPDEHVKRAMNEINAAARLRAAANEKAEAEKIVQIKRAEGEAEAKYLSGLGIARQRQAIVDGLRDSVLGFSVNVPGTTAKDVMDMVLITQYFDTMKEIGASSKASSVFIPHGPGAVRDIATQIRDGLLQGSSVAKH

SEQ ID NO: 320581 - protein, 45 aa, Zea mays
  Clone ID: MRT4577_55436C.1.pep
LIRYGCQTLTSSVIDQAFDNMLSQILGAPRSTLCIEVCEGLIMPK

SEQ ID NO: 320582 - protein, 195 aa, Zea mays
  Clone ID: MRT4577_55437C.1.pep
MRMRKAPELLKKAATVFRSKTDTLRTKLFILASLRRKIATVRAISRRIHALVSSSDRENQARLEYGDDRALVLQKVAAGIQQAPADTNTDCEQDGVVDLSEVAMFVEDDHDYYPDWTHSLFDDEYYDDDKDDDDGEEGHRDDDLGALDALDEPSVIDIIRSNRKVEGLEFVMEDEIDQACDMFIKRFRKRDDRSF

SEQ ID NO: 320583 - protein, 88 aa, Zea mays
  Clone ID: MRT4577_55438C.1.pep
ASSRGRSGILAAGGGAGRLVARRGRRVGHSCSSWRGAGAEMRRRRPRGRKDGARREEERQCGRHSHATRTRCCSAAAMEIGEERKRGC

SEQ ID NO: 320584 - protein, 74 aa, Zea mays
  Clone ID: MRT4577_55439C.1.pep
VRPWSSFVGWRAASLRRHRRGATCVHARGPHAMLSTSRVSVWCWQTCGCFCWCPPILLFIPPGVSACWAEKYRG

SEQ ID NO: 320585 - protein, 69 aa, Zea mays
  Clone ID: MRT4577_5543C.1.pep
ASECRHGIWPRRLPIQCTRGGVLGGLSVACAWFSQLGLGAGAARELRLVHPRLSLQCVRFSARPALTIA

SEQ ID NO: 320586 - protein, 147 aa, Zea mays
  Clone ID: MRT4577_55440C.1.pep
MTTVPGSLVWELVKKNNCFLIKQFGNSNAKVQFSKEPNNLYNVHSYKFSGLANSKTVAVQPSAGEDKAVVLSTTKTKKQNTPAKLQHKTLMRKEFRKMAKSVKNQVCDNYYRPDLTKPALARLSAVYRSLQVSKSGIKKKNRQPTKL

SEQ ID NO: 320587 - protein, 78 aa, Zea mays
  Clone ID: MRT4577_55441C.1.pep
TFQLVSPCWDPQCVSRVSLCSFSAFAMYRHIASGSMLPPPSSYSMCDSTYIATCHLQCGRSRLRLLAVQCGSGSLVCL

SEQ ID NO: 320588 - protein, 277 aa, Zea mays
  unsure (1)..(277): unsure at all Xaa locations
  Clone ID: MRT4577_55442C.1.pep
PRFGGQANGHDGGLDRGDFRSHRRRVQPRRPPARPRTRRLSLLVVLCXGERQALFSRIAPVYDHLNDVLSLGQHRTWKRICVSWSRAKMGDRVLDLCCGSGDLAFLLSQKVGLDGEVMAVDFSSQQLQTAAGRQEQRWKLCYKNIKWIEGDALDLPFTDCYFDAVTVGYGLRNVVDKPKAMQEIYRVLKPGSRASILDFNKSSSLFTASLQSWAIDNVVVPLASGYGLTEEYKYLKSSISQYLTGEELEKLAKEAGFCAAKHYELGGGLMGNLVATR

SEQ ID NO: 320589 - protein, 75 aa, Zea mays
  Clone ID: MRT4577_55443C.1.pep
VPFVSVRRQGAFSGRRSTRLPGRTSRWLNLATNFLAEPRQLTGRPSMNRPAAILGCSVCAAKRGPAGSPAGVRVP

SEQ ID NO: 320590 - protein, 64 aa, Zea mays
  Clone ID: MRT4577_55444C.1.pep
RPAARNKEKKRERGSDVQPTAGSPWQPSRTAAGESSLTAYRNERDSVKMAISLAAGRKRIQKIA

SEQ ID NO: 320591 - protein, 68 aa, Zea mays
  unsure (1)..(68): unsure at all Xaa locations
  Clone ID: MRT4577_55445C.1.pep
GSTHGPRGLIFGGRRNFXXPFKTFFTAAAFTPAPKKSRKKKIPVIGCNCTPSFLQLWQMVGVCGKMFV

SEQ ID NO: 320592 - protein, 88 aa, Zea mays
  unsure (1)..(88): unsure at all Xaa locations
  Clone ID: MRT4577_55446C.1.pep
LETLVLCYFSRLRQPGGRRRQPPRQREREEXAGKXXGPAXGXXXGTTXXXXXXXQHDXXEXXGSGRXNRTFFSXXAFTDSERQIGXAD

SEQ ID NO: 320593 - protein, 57 aa, Zea mays
  Clone ID: MRT4577_55447C.1.pep
MEKKRKKKKKKKKKKKKKKKKKKKKKKKKKKKKKKKNKKTQKKKKGIYFKITKIKVH

SEQ ID NO: 320594 - protein, 92 aa, Zea mays
  Clone ID: MRT4577_55448C.1.pep
VSCCVCVCVPFVAGNLPSSICSVNVTVEVGECSGLLNVFDACHGWCPPVTLRRVPHRCGCGRWQCPVLAMTMLMLTIKTRASNYSLGMNSLF

SEQ ID NO: 320595 - protein, 110 aa, Zea mays
  Clone ID: MRT4577_55449C.1.pep
MRAVPHGVALFLFLLLDHKQVGTIDAKMGVSMPMHALIMENGKHERDKENENDDKSTENEESPCLSWSVQVKGFCFNRDRCAEVSMNESFAGGECNRHVTMRKCYCKKPC

SEQ ID NO: 320596 - protein, 78 aa, Zea mays
  unsure (1)..(78): unsure at all Xaa locations
  Clone ID: MRT4577_5544C.1.pep
GRSEAIQEIMSYVEEDLVSTDFTGDNMWRMFDAKAEIALNDHFINLVSWYNNEWSYINHVINLILHXLFKTPKHTDIF

SEQ ID NO: 320597 - protein, 381 aa, Zea mays
  Clone ID: MRT4577_55450C.1.pep
MSCFSHFFKRKRGPQQQDDPSDNYFTGSENITRFSYRELVRATSNFDQGNKIGEGGYGPVYKGTLKDGTVIAVKVLSLHSRQGAKEFLNELLAISDVTHENLVKLYGCCVEGNHRILVYNYLENNSLAHTLLDSRHSNIQFNWRTRVNICIGVAQGLAFLHGSVSPHIVHRDIKASNILLDKDMTPKISDFGLAKLLPPDVSHVSTRVAGTLGYLAPEYAIRGHVTRKADVYSYGVLLIEIVSGRCNTDTKLPYDDQILLEKTWRYYGRGNLEKIIDSSLGDDLDVDEACRFLKIGLLCTQDGTKRRPGMSAVVAMLRGEADVDTETISKPDVIRDFGDLKLRSRATSSTLLTSIMARSSPLSSEETTRTSITFTEISERD

SEQ ID NO: 320598 - protein, 81 aa, Zea mays
  Clone ID: MRT4577_55451C.1.pep
SSFFFFFFFFFFFFFFFFFFFFFFFFFFLAKTPAQILGQRFTGFTQKLKQHNGFCFLSFKGRGGIPPPNFPPKIQGNVYPT

SEQ ID NO: 320599 - protein, 98 aa, Zea mays
  Clone ID: MRT4577_55452C.1.pep
GKTGCGTVNKRNCTSDKCIPKKVIRYKDYFILRGWGQEQPESHTVTLRHKKLNKCMHNKTKQKNTLLILPIHRISKSTCTRMLLLISINSFNDQRMSI

SEQ ID NO: 320600 - protein, 162 aa, Zea mays
  unsure (1)..(162): unsure at all Xaa locations
  Clone ID: MRT4577_55453C.1.pep
MSCFSHFFKRKRGPQQQDDPSDNYFTGSENITRFSYRELVRATSNFDQGNKIGEGGYGPVYKXSTAIFNLMKDXMXLVVFETFLTYNFREHXRMGQLLPXXVLSLHSRQGAKEFLNELLAISDVTHENLVKLYGXCVEXNHRILVYNYLENNSLAKKKKKRP

SEQ ID NO: 320601 - protein, 70 aa, Zea mays
  Clone ID: MRT4577_55454C.1.pep
PNKANPLKKEKKGVYKWKVKRGGGLIPNFCRVFKGPLRLELRKKVLGPPGRVALPPRGLKLKKINCLHTP

SEQ ID NO: 320602 - protein, 99 aa, Zea mays
  unsure (1)..(99): unsure at all Xaa locations
  Clone ID: MRT4577_55455C.1.pep
MAPKGLFFSRAPSGSFKESKDLGSNGQGFFVWFFLGXFXWFSGFPPPFGLVFFGPPHNCPPSLKGFSQWFEPFPPPKKPPQKIFSPPFKLGAPLCGGRP

SEQ ID NO: 320603 - protein, 46 aa, Zea mays
  Clone ID: MRT4577_55456C.1.pep
PRRTVTLDEFHMPRPKAAELLINTKACGVCHYKLHVLKGELPFYTP

SEQ ID NO: 320604 - protein, 151 aa, Zea mays
  Clone ID: MRT4577_55457C.1.pep
MSSKRKTREPKEENVTLGPAVREGEHVFGVAHIFASFNDTFIHVTDLSGRETLVRITGGMKVKADRDESSPYAAMLASQDVATRCKELGITALHIKLRATEGNKTKTPGPGAQSALRALARSGMKIGRIEDVTPVPTDSTRRKGGRRGRRL

SEQ ID NO: 320605 - protein, 136 aa, Zea mays
  Clone ID: MRT4577_55458C.1.pep
LGGVAITSKVDVYSFGLVLLEIVSGRRNSPEAYSSDDNYHIEYFPVRAIGKLHGGDVRSLVDPQLHGDFDLEEVERVCKVACWCIQDNELHRPTMGEVVRVLEGQQEIDMPPMPRLLAAITQGTGTVTEGSSASSM

SEQ ID NO: 320606 - protein, 62 aa, Zea mays
  Clone ID: MRT4577_55459C.1.pep
MEVGSSYTSYHIYHEIFHTFIFLSHLSRLHVNSSSTFSLTIPPSTLLLPNLPSTKTSFFSPP

SEQ ID NO: 320607 - protein, 67 aa, Zea mays
  Clone ID: MRT4577_5545C.1.pep
SLLTDHPPILNVSQLNQARRFLVWIYHGSLQMLQTKTHQYMLPMDHHSSRNIVIPLSMNKILACQCL

SEQ ID NO: 320608 - protein, 134 aa, Zea mays
  unsure (1)..(134): unsure at all Xaa locations
  Clone ID: MRT4577_55460C.1.pep
TNRLQYLERSSHCCSSSRLAQLAGLPASTNTKRFNITTMATQKNRNRYYYNWSKEWFGAGIFXPNPHXVTINAFKKISXRKAMTTADNSALLSYAEELXMTISSLENLSLLSKAXDLSLLSLCDTTSLTSTSVL

SEQ ID NO: 320609 - protein, 109 aa, Zea mays
  Clone ID: MRT4577_55461C.1.pep
AVPAGCSVPFRVKWSQYRLLTELRQLTVFAEAELGRRALADQSRTTVRIVAEFAIAMTMNDDDLCFRTEIRWLETAHAFIFINSWALYSYGPIVFSMHACGAPPSPSFV

SEQ ID NO: 320610 - protein, 102 aa, Zea mays
  Clone ID: MRT4577_55462C.1.pep
TEAKKQISERWSMVTCNEMSQVQLSRRKCTLGEMLSIKEAKEDEATTGMFYVSSNQSCGLENEPTTRSTNVTTSRKNGDNGERSSKLPRSKSVPVISSTSDN

SEQ ID NO: 320611 - protein, 93 aa, Zea mays
  Clone ID: MRT4577_55463C.1.pep
SSSFLTFPVLYSFLVSSIFISFIIPLPSILSPLIFNLLTPFTIFFLIFITIISFSPYHIFLSFSSINLYTYSHFLNFNIYYDLTPTFLSSPLL

SEQ ID NO: 320612 - protein, 70 aa, Zea mays
  Clone ID: MRT4577_55464C.1.pep
RTVLCPGAWNNYYGGSGRMPPLCWSVRGSIFRPVINNALFHLRCWFYPVPPPRFIKVVSPAIKTGAVFFG

SEQ ID NO: 320613 - protein, 35 aa, Zea mays
  Clone ID: MRT4577_55465C.1.pep
SLTISHSYHYSEISRGENRRHSDMSCHMYIATIIV

SEQ ID NO: 320614 - protein, 72 aa, Zea mays
  unsure (1)..(72): unsure at all Xaa locations
  Clone ID: MRT4577_55466C.1.pep
GSRFSFACFRCNCFFLGSPNFNXWARGVPRLDWVNPGVPQLNWLGGDAVFAGWRYCQGARLDGPCQHLCSLN

SEQ ID NO: 320615 - protein, 58 aa, Zea mays
  Clone ID: MRT4577_55467C.1.pep
PRGGGRPSFKAGPRFFFGGGGPQKKRGGAPPGGKKPGTFGRGGFPGLSPPWGTSLFFF

SEQ ID NO: 320616 - protein, 272 aa, Zea mays
  unsure (1)..(272): unsure at all Xaa locations
  Clone ID: MRT4577_55468C.1.pep
MTSAFHPQSDGQTEAANKVIVMYLRCFTGDRPKQWLRWLPWAEYVYNTTYQSSLQDTPFKVYGRDPPSIRYYESGETRVAAVAKTMAAREELLADVRYRMEQAQAVQKKFYDWLHRPLSRGKLKPRFVELYRITECINEAAVRLALPLRAKLHDVFHVGFLKKFIGDPPEVPSPLPSMLHGAVTPEPEHVVRFRSARGVRQVLIHWKGQSAASATWEDVADFRDKFPQFQLEDELDVEXGRDVMYGQTYRRHRDIRRAXERAARTTQEGATV

SEQ ID NO: 320617 - protein, 73 aa, Zea mays
  Clone ID: MRT4577_55469C.1.pep
PKWSYFSHLWGCVHPFCYMVGPSMHPSKGTIDVSSGSVFYLNFVLTLDRASWYLVQQIGTNPSVEPLNVLANL

SEQ ID NO: 320618 - protein, 61 aa, Zea mays
  Clone ID: MRT4577_5546C.1.pep
LRLSIVLLCYVLLSVPTATCKGPTGKNSWEKKTKENKWCDASISENLYGIRQQYSFMTIGK

SEQ ID NO: 320619 - protein, 246 aa, Zea mays
  unsure (1)..(246): unsure at all Xaa locations
  Clone ID: MRT4577_55470C.1.pep
WAEYVYNTTYQSSLQDTPFKVYGRDPPSIRYYESGETRVAAVAKTMAAREELLADVRYRMEQAQAVQKKFYDWLHRPVSYAVGDLVLXLPQLSRGKLKPRFVELYRITECINEAAVRLALPLRAKLHDVFHVGFLKKFIGDPPEVPSPLPSMLHGAVTPEPEHVVRFRSARGVRQVLIHWKGQSAASATWEDVADFRDKFPQFQLEDELDVEXGRDVMYGQTYRRHRDIRRAXERAARTTQEGATV

SEQ ID NO: 320620 - protein, 118 aa, Zea mays
  unsure (1)..(118): unsure at all Xaa locations
  Clone ID: MRT4577_55471C.1.pep
GLRVFCSPQISSGEPYPGLGRGDRSARPAPPPAPPLPLARSLFLRSXSPAAASAAPASAKVAFRIVRVLGFXLEGXRXXVXXLSXQGGIRSLANAELIEPACHRLEDMEASSAECEVH

SEQ ID NO: 320621 - protein, 68 aa, Zea mays
  Clone ID: MRT4577_55472C.1.pep
NPGPPKWEEGIHLVFTPQFFQSVGPASRPWFKPPPPPTNIVIKKSASPFRNNLSQHGKKPMPWTNKIQ

SEQ ID NO: 320622 - protein, 53 aa, Zea mays
  Clone ID: MRT4577_55473C.1.pep
FLQGPPFLLMDPFRWPRISQRSAPCVRRPLSFPRGRPINRARSTERTAAGTGN

SEQ ID NO: 320623 - protein, 88 aa, Zea mays
  unsure (1)..(88): unsure at all Xaa locations
  Clone ID: MRT4577_55474C.1.pep
PEQLDHNNKTSYLKREVDAKADMRAPQKPIKXSYGXDGNLSASRCNVIPGVPSEINSHIKQENLSVDKETSETALEVKNETNGPTDAT

SEQ ID NO: 320624 - protein, 86 aa, Zea mays
  Clone ID: MRT4577_55475C.1.pep
TPESRGGPHPSGENPAHTIMGLISGHNSAVKGGQNNLAGYFPNRPTTIRKNIPLKEAGPAKEMRKFLKNPWPTLFKLLPTKFQFIK

SEQ ID NO: 320625 - protein, 45 aa, Zea mays
  Clone ID: MRT4577_55476C.1.pep
SWKQTQTSSSSSSSSSSSSSSSSSSISSSSSSPSWSSGGGDERGR

SEQ ID NO: 320626 - protein, 216 aa, Zea mays
  Clone ID: MRT4577_55477C.1.pep
HRSRHPPILGSDQWRPPTQSISNSPRPGRCCPNSTTGSARLIPSGRPASASSKRKLRTLLEIWRRSPRRSATGWWRSWRRPRRVWISGSACLRRGPSFASLRSSRLPTPSSCGVLTSTCRSTVSSPPLTRFVPRSRNWGSTGSQDRVPSDGADARGTATQPEPSSHRPRSSPPPEVHDGDDDDEEIDDDDDDDDDDDDDDDDDDDVCRRELRNFFT

SEQ ID NO: 320627 - protein, 46 aa, Zea mays
  Clone ID: MRT4577_55478C.1.pep
IISFFNIKSTRSCISSFVNWVRSKEVYLALVLLHILTRFSSGRRQK

SEQ ID NO: 320628 - protein, 102 aa, Zea mays
  Clone ID: MRT4577_55479C.1.pep
RQAQGNTQQYAVGYVYQVPCQRLSVNSVLVFLRCQSVSLDYEIFVCVRWLSFLLYNSNRFCASHTQDVLPCFGSERLANRQCQALFTVDSVGSRRVRQTVLV

SEQ ID NO: 320629 - protein, 80 aa, Zea mays
  Clone ID: MRT4577_5547C.1.pep
NLGEKKTKGAPLFQSPLGRPNKNGRGLYNPLGLGNGGPVQFFSIFFKTRPPNGPLGGLGLKPQKGFSQIFFFRKKNKTRL

SEQ ID NO: 320630 - protein, 88 aa, Zea mays
  unsure (1)..(88): unsure at all Xaa locations
  Clone ID: MRT4577_55480C.1.pep
KXGPTXTRQHPRQRIHAFFPNQSTPHRAVYFKHFFSPPTTLTTTPATKMRSPHHLLTETHSSIQKVTARILSIKKDSAPNSELPELVT

SEQ ID NO: 320631 - protein, 43 aa, Zea mays
  Clone ID: MRT4577_55481C.1.pep
KGKLDAKTRSLKLAFTGPILTLQFYKFVIAPSKKLSLLFANLS

SEQ ID NO: 320632 - protein, 198 aa, Zea mays
  unsure (1)..(198): unsure at all Xaa locations
  Clone ID: MRT4577_55482C.1.pep
CCSLRTATKPAXXRCPLCLXGGXXLXACGLRGXRNXKXXRAXRLARNXXRRQGANAARSLVPXXYAGGGRGRAAXVRTRFXATFLGKGRDPRIAVPXXVRRVTRGXXRXXVEPQVKLXTTSLQSSPRDPXXRXSXXRXIHXXLKNXXQAXRNPSXKLPTXXPXXRXVSXAATINLHTTEXCSNLXGTLSASYPGXRGT

SEQ ID NO: 320633 - protein, 201 aa, Zea mays
  Clone ID: MRT4577_55483C.1.pep
KPCTAAVWFRLRAPPQLAGGTSLGRGYRPCLASSGVPKSKVLSVSCPMKSYRLSDLSDAEVSGLKARPRIDFTSIFSTVNPIVEDVRVRGDAAVKDYTEKFDKVTLDNAVVRVSDLPDAELDPAVKEAFDVAYDNIYAFHVSQKSPEKTVENMKGVRCKRITRCIGSVGLYVPGGTAVLPSTALMLAVPAQIAGCKTVVLA

SEQ ID NO: 320634 - protein, 84 aa, Zea mays
  Clone ID: MRT4577_55484C.1.pep
QSDVYTRIKTSTVWDGNTAIHAMKVAVKNYIGNLGLYIFVHDIHAPLTAQTGVIFANVFELFLSVVIHSLINNWGRARAGTGDH

SEQ ID NO: 320635 - protein, 230 aa, Zea mays
  unsure (1)..(230): unsure at all Xaa locations
  Clone ID: MRT4577_55485C.1.pep
MGSLRAPPQLAGGTSLGRGYRPCLASSGVPKSKVLGVSCAMKSYRLSDLSDAEVSGLKARPRIDFTSIFSTVNPIVEDVRARGDAAVKDYTEKFDKVTLDNAVVRVSDLPDAELDPAVKEAFDVAYDNIYAFHVSQKSPGKTVENMKGVKCKRTTRCIGSVGLYVPGGTAVLPSTALMLAVPAQIAGCKTVVLATPPSRDGSXXCREVLYCAKKXAGVTHILKAGGAQAI

SEQ ID NO: 320636 - protein, 27 aa, Zea mays
  Clone ID: MRT4577_55486C.1.pep
LHRKDIWPYSLISQRFIKLLEHLGSPV

SEQ ID NO: 320637 - protein, 93 aa, Zea mays
  unsure (1)..(93): unsure at all Xaa locations
  Clone ID: MRT4577_55487C.1.pep
TAPKGPQLRDLDRGXDAPDSPPGRXKDILEMPKESPKQEPYLVPDEAHRMRNXNREPHIPKKEKEIPHRRQTLMYTATWPKEDRRIADELLVH

SEQ ID NO: 320638 - protein, 92 aa, Zea mays
  Clone ID: MRT4577_55488C.1.pep
RRPAFLPLLFLCIWQTTGYKSSHHYLLIGRILAFSFFFSGFFFWGSFFFLLPVVSLWLIAAKVFAGTGLKIFPKTRHLQNWGKTLHLPRFED

SEQ ID NO: 320639 - protein, 156 aa, Zea mays
  unsure (1)..(156): unsure at all Xaa locations
  Clone ID: MRT4577_55489C.1.pep
EELLWLHVHSTRLVQNGEQNIRRAGPDALGVLCISNPKVKDVDTLSTVRHDAXHDVDKGAIIXIGXLIGAGTHNARIAGMLSNLSRYYYKEAAHLMSGKNAQGLGHLREGLTTISSYHPDRLVLCPMALVGLVTRLHASLDMKHTMLGKYHYILYI

SEQ ID NO: 320640 - protein, 49 aa, Zea mays
  Clone ID: MRT4577_5548C.1.pep
RYWWKEKEMSELSVHQSHQLVWARAHHLVYDYCVDTDRFPVQPPECAGR

SEQ ID NO: 320641 - protein, 694 aa, Zea mays
  Clone ID: MRT4577_55490C.1.pep
MSSLRRALRSTASAPQSRSQASCAPGLGLTGEAELEDRRCSGDTKRSAAGATSAEMTDGHHFNNILLGGRGGTNPGQFKVHSGGLAWKRQGGGKTIEIDKADVTAVTWMKVPRAYQLGVRIKAGLFYRFIGFREQDVSNLTNFIQKNMGVTPDEKQLSVSGQNWGGIDIDGNMLTFMVGSKQAFEVSLPDVAQTQMQGKTDVLLELHVDDTTGANEKDSLMDLSFHVPTSNTQFVGDESRPPAHILWETILKFADVGSSEEPVVTFEGIAILTPRGRYSVELHLSFLRLQGQANDFKIQYSSIVRLFLLPKSNNPHTFVVITLDPPIRKGQTLYPHIVIQFETEAVVERDLALSKELLVEKYKDRLEESYKGLIHEVFTKVLRGLSGAKVTRPGSFRSCQDGYAVKSSLKAEDGLLYPLEKGFFFLPKPPTLILHEEIEFVEFERHGAGGASISSHYFDLLVKLKNDQEHLFRNIQRNEYHNLFNFINGKNIKIMNLGGDGQGASGVVTDVLRDTDDDAVDPHLERIKNQAGDEESDEEDEDFVADKDDSGSPTDDSGDEESDASDSGGEKEKSSKKEASSSKPVQKRKHKARDDEGQEKKKPKKKKDPNAPKRAMTPFMYFSMAERGNMKSSNPDLPTTEIAKKLGEMWQKMSGEEKQPYIQQAQVDKKRYEKESAVYRGEATVDVDSGNESD

SEQ ID NO: 320642 - protein, 47 aa, Zea mays
  unsure (1)..(47): unsure at all Xaa locations
  Clone ID: MRT4577_55491C.1.pep
KKKKKKKKKKKKKKKNIKKKKNKKKXKIFFKKKKKKKKIFFFPGGPF

SEQ ID NO: 320643 - protein, 63 aa, Zea mays
  Clone ID: MRT4577_55492C.1.pep
MASPSASGEKKTTILVARKGRLRQRYHGEFRLVAGCVPLPCGRRRPDAVGHGVHAQQGPPRLP

SEQ ID NO: 320644 - protein, 93 aa, Zea mays
  unsure (1)..(93): unsure at all Xaa locations
  Clone ID: MRT4577_55493C.1.pep
DPVVHALYDCKSEVIGPGFFRFKAEIXFREAAMSKDDTELLRVMANYGEDVVEALGYEVDRLESEIQKLVPGIKHVDIEAHNPEGLALRAEVL

SEQ ID NO: 320645 - protein, 330 aa, Zea mays
  unsure (1)..(330): unsure at all Xaa locations
  Clone ID: MRT4577_55494C.1.pep
SYGRLGPSRPAGLLSASDAAGLFSLRGGWRRRALPPAASRPPGAVTDAAPVRLTVSRKYSLRVAKGKKKAHFDDEHSHRAVNMALWCNFLVFSLKFGVWXSTSSHVMLAELVHSIADFANQALLAYGLSSSRRAPDALHPYGYSKERFVWSLISAVGIFCLGSXLAFQSCPIGSITVGDLLGMVAIFLIQRNRHALIGRAIDDHDMQRVLEFLKSDPVVDALYDCKSEVIGPGFFRFKAEIDFNGVVLVQNYLERTGRGSWAKQFREAAMSKDDTELLRVMANYGEDVVEALGYEVDRLESEIQKLVPGIKHVDIEAHNPEGLALRAEVL

SEQ ID NO: 320646 - protein, 286 aa, Zea mays
  Clone ID: MRT4577_55495C.1.pep
AEYVARIRSVGIFCLGSGATIVHGVQNLWNSHPPENIHWAALVIGGSFLIEGASLLVAIKAVRKGAEAEGMSIWDYIWRGHDPTSVAVMTEDGAAVTGLAIAAASLVAVQMTGNAMYDPIGSIIVGNLLGMVAIFLIQRNRHALIGRAIDDHDMQRVLEFLKSDPVVDALYDCKSEVIGPGFFRFKAEIDFNGVVLVQNYLERTGRGSWAKQFREAAMSKDDTELLRVMANYGEDVVEALGYEVDRLESEIKKLVPGIKHVDIEAHNPEGLTLRAESVVAAEVHCI

SEQ ID NO: 320647 - protein, 79 aa, Zea mays
  Clone ID: MRT4577_55496C.1.pep
RIDRLPLPGRIHWSSSPMAMRHQFGASVLLHLLVLAGAGAMVTADQESDRIRELRATANVGSRDSATNATRRGPPFYCS

SEQ ID NO: 320648 - protein, 127 aa, Zea mays
  unsure (1)..(127): unsure at all Xaa locations
  Clone ID: MRT4577_55497C.1.pep
TATTTTKHTXTAAPRTADATAAGTRRSDAAATPRLGKTKKAAPGPESXWGTNKRATKAAQATDQNNERKDEQNMKKAAGRARHARGHAHQRGRDGQVQRARPCMEPTNAAFKKKKAAVLNRREKQEQ

SEQ ID NO: 320649 - protein, 95 aa, Zea mays
  Clone ID: MRT4577_55498C.1.pep
LRYIRALRRRSIISKTSSSSPRYQHYARRKCIHEMVKGHARPQAKRYHRGLAVGYPGERAQRHDTTIPVQIVRANTEEDVLRHCTESRAHTSTYY

SEQ ID NO: 320650 - protein, 228 aa, Zea mays
  unsure (1)..(228): unsure at all Xaa locations
  Clone ID: MRT4577_55499C.1.pep
MAAVKTLNPKAEVARAQAALAVNISAARGLQDVLRTNLGPKGTMKMLVSGAGDIKLTKDGNVLLHEMQIQHPTASLIAKVATAQDDITGDGTTSNVLIIGELLKQADLYISEGLHPRIITEGFEAAKEKALQFLEQVKVSKEMDRETLIDVARTSLRTKVHAELADVLTEAVVDSILAIRKKDEPIDLFMVEIMEMKHXSETDTSLIRGLGXDHGARHPDMKKRVGNA

SEQ ID NO: 320651 - protein, 145 aa, Zea mays
  unsure (1)..(145): unsure at all Xaa locations
  Clone ID: MRT4577_5549C.1.pep
TLPNIYLSTLPTKLLTLGSRVALSVCATYAYVIPQXSLALTDITLQSLLPVTSTVFDHLHVHAXTLQHPLAPSSLTXPITHFQHQSLTHANINIITTAQQQQQLLVPTLLHLDVLNPYFYLQQHALRLIALAMANVTAXYQQQLQ

SEQ ID NO: 320652 - protein, 95 aa, Zea mays
  Clone ID: MRT4577_554C.1.pep
LNFFSCTQPPLTSVFSQMEQHNNLLSAVAIYKGALPCLLWRHVSHGPEACSAASLAPPAASGEGARRTAAAGGIGGWTRAVRPVGFRRSVRADFS

SEQ ID NO: 320653 - protein, 58 aa, Zea mays
  Clone ID: MRT4577_55500C.1.pep
LFLLTKCSLANICQESFACIFLCGSILKRSITQLLVIYYILLVRLRLTVMLLWGVFVF

SEQ ID NO: 320654 - protein, 95 aa, Zea mays
  Clone ID: MRT4577_55501C.1.pep
PESVRADLTSNVKWNAMQPNLHELLQKSSCSRSQHGGCSKNKGLGSKWTGQVHITVFMARQIGLKAERLHHEGFAPGQLGSSLINASRLEGYFQK

SEQ ID NO: 320655 - protein, 104 aa, Zea mays
  unsure (1)..(104): unsure at all Xaa locations
  Clone ID: MRT4577_55502C.1.pep
GKTLKGXFLGNSKPRXDLAKVVXMFLKKELELEKFFPPRGPFLGINPGFGLMVKGESLPCLLRMGGLRFFSSLVLLQGRDFAHQMGLKNLRGPRPPACVGPRSH

SEQ ID NO: 320656 - protein, 74 aa, Zea mays
  Clone ID: MRT4577_55503C.1.pep
RFLENYGGSLWVWLLLCLAFEYSFCLARLFLRGYINWFVIFFQRMVSRYGVFLFLLGEDAFFSLHVCKRKEAVL

SEQ ID NO: 320657 - protein, 78 aa, Zea mays
  Clone ID: MRT4577_55504C.1.pep
CNAPAPIYTIFALYHHAYCCTDRTDTPIVRNFNRSRAIADRALGDIDSRRRRQGRCGCGCERSSAGGSSVLAVLLSFA

SEQ ID NO: 320658 - protein, 85 aa, Zea mays
  Clone ID: MRT4577_55505C.1.pep
LWSDRVSGVMLGMVVGRFYEGVRDGGAADAVVAPPLGMVDTRACPEEEVMREREEGQSPGVVHVPVDTVASRRWHRQQCVVRCWL

SEQ ID NO: 320659 - protein, 61 aa, Zea mays
  Clone ID: MRT4577_55506C.1.pep
AKHNSHVSPSGLRCVSERLGLLHMTTQATLKALTRHLVMREACKPRALHHVRPRDKEYTHA

SEQ ID NO: 320660 - protein, 147 aa, Zea mays
  Clone ID: MRT4577_55507C.1.pep
LSVRAADAVLARAAGVARGAPARVRPGPGRWVDVPVLARDELLVVVGEEMEIMSNAVFRAPTHRVVTSGRERMSLVLFYQPEPHKDLQPAEELVSEDRPAIYRRLKAKTFGDGFWDAFALGERTIDFLNIKVDDKEHGGGLVTSAPA

SEQ ID NO: 320661 - protein, 372 aa, Zea mays
  unsure (1)..(372): unsure at all Xaa locations
  Clone ID: MRT4577_55508C.1.pep
MVHQAQGQMVQEVAAAGLPALPSRYVLREEDRPTGDVAAPELAFPTVDVNXLADPGDVEEASKLRSALESWGLFKVTGHGMPVSLLDGIRDAGLEFFHLPAAEKLKHANRDDAGEFQPEGYGIDRVDTDGQVLDWCDRLYLTVQPEEERRMQFWPARPASLVGLLHEYALGSEQVARRVLRAMARVLGFGEGFFLGHVGEKGGTYARFTYYPPCPRPDLVYGLKPHTDNSVVTVLLLDRDVGGLQVLLRGPGPGRWVDVPVLARDELLVVVGEEMEIMSNAVFRAPTHRVVTSGRERMSLVLFYQPEPHKDLQPAEELVSEDRPAIYRRLKAKTFGDGFWDAFALGERTIDFLNIKVDDKEHGGGLVTSAPA

SEQ ID NO: 320662 - protein, 286 aa, Zea mays
  Clone ID: MRT4577_55509C.1.pep
DSVIPQGPPFSDTTATAVVEYLGSDTDPTTPPTLPPRPEVNDTATAFRFLSNLTALVRPGQPTVPLSVDTRMFVTVGLGVSDCQPTQLLCNRSATVFSSSMNNASFVLPAPGKPSMLQAHYDGGDTAGVYTRDFPDRPPLVFDYTADASDTAALQYTAKSTRVRTLRFNETVEMVLQNTRLIARESHPMHLHGFNFYVLAQGFGNYDEATATPRFSPGNPQERNTVAVPTGGWAVIRFLANNPGMWFMHCHFDNHLDLGLAMVFEVPDGPTPETSVPPPPADLPQC

SEQ ID NO: 320663 - protein, 35 aa, Zea mays
  Clone ID: MRT4577_5550C.1.pep
FWVAAAPGIVSHHMKEPACPSLHASLMGLIGLQFS

SEQ ID NO: 320664 - protein, 105 aa, Zea mays
  unsure (1)..(105): unsure at all Xaa locations
  Clone ID: MRT4577_55510C.1.pep
GRLLPPPSFSFLSEHITXREQRLTRCMGSNYIXTTADEGLFHVPYSHSTSATPTIFSAAAAYPHNFHRIFSSTYYVGHIHCSCCWCSXHHHPLQNKESLLIFRLQ

SEQ ID NO: 320665 - protein, 70 aa, Zea mays
  Clone ID: MRT4577_55511C.1.pep
KLFKVFPIPPARHEHVLSPWDMLRMQTIHQPWNEAPNLRRPRCDGSMESAQKRFFLSHEAVQLAKVSARG

SEQ ID NO: 320666 - protein, 377 aa, Zea mays
  unsure (1)..(377): unsure at all Xaa locations
  Clone ID: MRT4577_55512C.1.pep
LFPAASHASLLXLLPRPPRXGHLVRGTLRPHTSSLRLRRPPXQPGAAAGVAXGIPDEWGERSPPDNPEPPAQPDPPIDKDEWGRDDSADGNSRPIVVDEWGEPGVPEPEPPSAADPPSPSADDDWGKEPEAPAPAPAPAAEEDEQEVKREELKRCLVDTVYGSDLGFRASTEVRGEVVELVTQLEAVNPTTAPVESPDLLDGNWILIYTAYSELLPILAAGATPLVKVKQISQEIDSKIMTIVNASTLTTPFASFSFSATASFEVQSPSRIEVQFKEGSFQPPTISSSVDLPQQVDIFGQKISLGPVQQALNPLQQAFASIAGSISGQPPLKVPIPGNNRARSWLLTTYLDKDLRISRGDGGLFILAKEGSPLLDQL

SEQ ID NO: 320667 - protein, 433 aa, Zea mays
  unsure (1)..(433): unsure at all Xaa locations
  Clone ID: MRT4577_55513C.1.pep
MDPKGKGIMINNKETLNIDEPKASLCRDEYSKVSGLDSAKQRRDTLKISHEGNDATMITKMELVKGELERFDMKRGEEPTETYNMLKTLVNKIQSYGSTRWMDHDVVHLMLRSFIVIDPHLVNLIRENPGECMMVKDARYVDDIANIPLPLYEPQPIALKATTSTETLPSKVAQVEAVRLNEDEMALVINHFKTALKGRKDYSNKSKXKGKCSCFKCGXQEKKGKKEKKKFYRKTKGEAHISKEWNSDFSSSDSNDKGLVASTFDKSSLFPNEHHTCLMAEEKKECDDDVDYSNLFKGLDLSKVDKINELIDALNEKNRLLEKQEDLLYEEHDKVVEVEMYLALEINKNEMFAFELSSCHSSITSIKSLNDDLNARIEKVNVASSSIQHVSIRVNCKGHDFNVYSDHASTIAKLNDEIAQLNVQLKTYKSLER

SEQ ID NO: 320668 - protein, 134 aa, Zea mays
  unsure (1)..(134): unsure at all Xaa locations
  Clone ID: MRT4577_55514C.1.pep
GTLQSALDACRLLXDMMDNGCTPNAVTYGTVVNGLCVSGLYDKAEAYLVDMVGKGLVPHFSVFHSVIRGCCTVGKVEEAAQIMSRMLDLGVVPHVESWSSVIRCVCKDEDCIEAELLQIVGRQRGSNMISDRVP

SEQ ID NO: 320669 - protein, 72 aa, Zea mays
  Clone ID: MRT4577_55515C.1.pep
YHTDRGTHYTTGEQVQTLATRKTNHPEAYQNRVKRDQNRSRQPERGLTNLPKSHKRHHVAGILKEQQCEGRA

SEQ ID NO: 320670 - protein, 133 aa, Zea mays
  Clone ID: MRT4577_55516C.1.pep
QDDKFRELARRVTEVLEFRSAAGLIFCHPIMTTTEFWMSHECLLVPYEQALTHEEFFPSIYYDCSAYFLWVGKCTRQLDGGRSGSEIGALDAGVGIVGTGLGLIRLGIGAVAGLITSGLGTVSSGQGNFSIYV

SEQ ID NO: 320671 - protein, 89 aa, Zea mays
  unsure (1)..(89): unsure at all Xaa locations
  Clone ID: MRT4577_55517C.1.pep
ASTECGGGGVSAKTSGAEVVGLSVEDXAKRVILKDKTDAXIVVLPDGSVVTADYRPNRVRIFVDIVLHTPHIELRLYNVAAIAFPCRGT

SEQ ID NO: 320672 - protein, 38 aa, Zea mays
  Clone ID: MRT4577_55518C.1.pep
SASCVQRLDDSLNMQFTLVIALCYVLHRCENQEIHVHV

SEQ ID NO: 320673 - protein, 122 aa, Zea mays
  unsure (1)..(122): unsure at all Xaa locations
  Clone ID: MRT4577_55519C.1.pep
MRTPGGRALQCHIGQRGIQVGNAGWELDCLDDDIXDDGYMXGDKTIGGGKDAFNTFFNDMGAGKHAPRGVFADLKPTEMEEERTGTYRQFCHPXQLFRGKEDELNNFARGNYTIAKEIRDLC

SEQ ID NO: 320674 - protein, 355 aa, Zea mays
  Clone ID: MRT4577_5551C.1.pep
MSFMLMKPNQEAMASVVVVDLVAVLVGDLVTVLVAGVVVVDLVKDLGAGMVAADSVADVVVGMAALLGAGVAAATKFDDVVQPSWANDHVVYDGDLLKLRLDSSSGGGFVSRTKFLYGKASADLKLVPGDSAGVVTAFYLSSAGDKHNEFDFEFLGNVTGEPYLVQTNLYIDGVGNREQRIDLWFDPTADFHTYAVLWNPSQVVFMVDDTPIRVYENATLHQGHGHGHHRHGGAAAEANGTNTTTTTLAAAPAPFPGPQPMAVYSSIWNADDWATQGGRVKTDWSHAPFEATLGGATGCDLVGLRLDCNCGGAPVATALFPDGEANVQDHVWRRLPRRHGDPNSGIGRAIRPSGD

SEQ ID NO: 320675 - protein, 51 aa, Zea mays
  Clone ID: MRT4577_55520C.1.pep
LVFKMLSPILLKILVIHLKCVLWLICLDQAILSVLWLENGLFSDIKFLLLF

SEQ ID NO: 320676 - protein, 128 aa, Zea mays
  Clone ID: MRT4577_55521C.1.pep
LGTSRPAGAAFPHLVALCADYYTLPSDDLVVPSGHGVIPYPRDRCSLHDCVMTTPLDRTAALDHCDVSSGLREGALVAPRPFRQSRGATSGTVLMGRPAYPRSPPQQTPGKGTRPLLSTGTDACPLPL

SEQ ID NO: 320677 - protein, 55 aa, Zea mays
  Clone ID: MRT4577_55522C.1.pep
GHHMPPMLDDVSGLNFPCLLNFLLSKILQTLLVSIQRFMLPPCRRWLLTVAACYL

SEQ ID NO: 320678 - protein, 945 aa, Zea mays
  unsure (1)..(945): unsure at all Xaa locations
  Clone ID: MRT4577_55523C.1.pep
MHLKLWKPLSHCAALLLDKKXSAEDAAGRGGRGVRRRXRLQESKLREALEEASEDGSLAKSRDAALLDGGDGGAEEGSVGRSRSLARLHAQRDFLRATALAAERAFQSPDALPVLEEALAKFLVMYPNYASASDVDRLRADEYPHLDKVCLDYCGFGLFSYLQSCNPADSSAAFTLSEITANLSNHALYGAAEKGTAEHDIKNRIMDYLNIPESEYCLVFTVSRGSAFRLLAECYPFGTNKRLLTMFDHESQSVNWMTQVARDKGAKAYSAWFKWPTLKICTTELRKLISTKKRRRKDSATGLFVFPVQSRVTGAKYSYQWMALAQQNHWHVLLDAGALGPKDMDSLGLSLFRPDFIITSFYRVFGADPTGFGCLLIKKSVMACLQSPSGGTGAGLVRIVPVFPQYLSDSVDGFDGVLDGLEDDNIIPIEEGSASNSHHAPQLPAFSGAYSSAQVREVIESEMDQDSSDRDGASTIYEESESVSVGEVMKSPVFSEDESSENSFWVDLGQSPLGSDHSEQSSKGKLGSPLPASWFSGRKSAKKASPKVPSKLSRSPIHDNHVMSFDAAVRSVSQEPGPEKGDPDEDNSHINIKNTPISEIEEDNKDAKVNKRFVKFSCANDTAEGEGNATSVFGSCTARENGSTSEICSESQGETKDSAIRRENEGDFRLLGRREAYNGRFNGGRFFGVEESERVPSMGHNVSFTLDDSKLCRNADAGETSGYGMADDDDDDDDAYSDYDEAQDGRKEPEIVCRHLDHVNMLGLSKTTLRLRYLINWLVTSLLQLRLPDSGDGEGAAAAAAPPLVYIYGPKIKYDRGAAVAFNVKDCGSGTSLINPETVQKLAEKEGLSLGVGFLSHIRLTDSQRHGAADVGLSSSSSPAAASGRREKKSTRKNAVVGTEVVTASLGFLTNFEDVYRLWAFVAKFLDSSFLEQERLSSIPEDAER

SEQ ID NO: 320679 - protein, 501 aa, Zea mays
  Clone ID: MRT4577_55524C.1.pep
NSHHAPHLPAFSGAYSSAQVREVIESEMDQDSSDRDGASTIYEESESVSVGEVMKSPVFSEDESSENSFWVDLGQSPLGSDHSEQSSKGKLGSPLPASWFSGRKSAKKASPKVPSKLSRSPIHDNHVMSFDAAVRSVSQEPGPEKGDPDEDNSHINIKNTPISEIEEDNKDAKVNKRFVKFSCADDTAEGEGCATSVFGSCTTRENGSTSEIFSESQAETKDSAIRRENEGDFRLLGRREAYNGRFNGGRFFGVEESERVPSMGHNVSFTLDDSKLCRNADAGETSGYGMADDDDDDDDAYSDYDEALDGRKEPEIICKHLDHVNMLGLSKTTLRLRYLINWLVTSLLQLRLPDSGDGEGVPLVYIYGPKIKYDRGAAVAFNIKDCNTGTSLINPETVQKLAEKEGLSLGVGFLSHIRLIDNQKHGAVDVGLSSSLPAANGRREKKNSKNAIIGTEVVTASLGFLTNFEDVYRLWAFAAKFLDSSFLEQERLSSIPEDTER

SEQ ID NO: 320680 - protein, 97 aa, Zea mays
  Clone ID: MRT4577_55525C.1.pep
APSPPEVLPQHHIIIFPWGCTYQLDNSNKENTVSCAPFGRTLCPANYPFFVRCTGPFFFGSSHLFFFFQVLHLAFPTNGVIFTLLVPKTNNEKRASK

SEQ ID NO: 320681 - protein, 148 aa, Zea mays
  unsure (1)..(148): unsure at all Xaa locations
  Clone ID: MRT4577_55526C.1.pep
FATMARMLLAGAPSAGAPSAGAATSTTAMDGSPRQQRRRRVASIGGGGYRAPAAVGRLGFPCRASNRPCTSVGSACKAQHRLPSPSLLRHXLGRSLGPMSASPCANGLTYKLAHLALPYTFTFIFLXFSSKFARKTFQSEKKKKKFAA

SEQ ID NO: 320682 - protein, 192 aa, Zea mays
  Clone ID: MRT4577_55527C.1.pep
TRKFCSDDPLSTSSQTSYCPQSCKRMRPEDHSNQLHGTMGKLSSASAFSDGLNTNKVSAMNPRIGTLADVQLLMALEKSKASQQMFEFDYVTSQNNMIHERTGLALQNIADKGFIALPNKQFPSFAAQNIPLPGSTVNQLGESNTLRNGVHQIQPWEITYRLHDSRDNFSLPGNTQFSNGTVNPSSENYISE

SEQ ID NO: 320683 - protein, 36 aa, Zea mays
  Clone ID: MRT4577_55528C.1.pep
MLSWSSWSRSGVGQPVRLWPSYGILAAGERETENGP

SEQ ID NO: 320684 - protein, 86 aa, Zea mays
  Clone ID: MRT4577_55529C.1.pep
SSQHVCRRVHPCDRRLSFTSSPPYAPAVSQRAGSRPLSQASVSCSLRHCDRWLRGAGGASSPWRSPPRGVPARWSPPHRRVIRNAE

SEQ ID NO: 320685 - protein, 109 aa, Zea mays
  Clone ID: MRT4577_5552C.1.pep
KTNWIPKCIFARTMVDRAFFFFPSYQVSCSWTLSPFCSKTIPKCLAVLFVPFGKVKWDIGIFLVSKKNFVVAKGVALGFPGAPPPLFDIYPGFRAWENQSFWLFFDVAP

SEQ ID NO: 320686 - protein, 130 aa, Zea mays
  Clone ID: MRT4577_55530C.1.pep
NELILFLGAIKLTRRRHLDQLVLFIIRRLLLDHLLFTFNELLLSSLHLLNTRIGTRSAGDLVAAEMVPCSTESPARNPRSTGGWFPDSSACMALTQLGDQPRPVLQTSDGSTTRGNGGGYRRTKLHTAAM

SEQ ID NO: 320687 - protein, 133 aa, Zea mays
  Clone ID: MRT4577_55531C.1.pep
MADPKDLNDVPSGSDTRPTIHNLLATERKEFEDYIKKLDKEGSFYSPKGPKNHWSSIWKALVAICPRVHRTLHNATATDRLIGCFSASGGTGLSAGGTRLSGALVDRWLRLMCQLAVGQLAHRTVWRSARTVQ

SEQ ID NO: 320688 - protein, 145 aa, Zea mays
  Clone ID: MRT4577_55532C.1.pep
KDSPLAADMSTAILQLSESGQLQSIHDEWFTQPSCATNDESNVGATRLGLGSFWGLFLICALICLFAVVVFFIRVCWQYKQYSNSEDADESNEPGADGAGKRQRKLSRLGSFQEILKFFDMKEEEVMKSSMKRRPGEKDNHAAGF

SEQ ID NO: 320689 - protein, 54 aa, Zea mays
  Clone ID: MRT4577_55533C.1.pep
RGGNGSERTKAKSGQFFSTNSRGTRVGSVGLRVASSFKRGQPLAPPHNDPPISL

SEQ ID NO: 320690 - protein, 90 aa, Zea mays
  Clone ID: MRT4577_55534C.1.pep
RRRRRPRQLRRRRQPRPGRDAVHRLQLEVRHAALCATFHRAVLVACLLATTHRRRRRATDPPAVRLCLCSPTYNVSFTSIGVGSESVAAE

SEQ ID NO: 320691 - protein, 43 aa, Zea mays
  Clone ID: MRT4577_55535C.1.pep
KEIFTLKGGALHSTPNYIMGRRSALSSYRIQVLLIHTSLHMGY

SEQ ID NO: 320692 - protein, 99 aa, Zea mays
  Clone ID: MRT4577_55536C.1.pep
HADYCVQKKEQQSTDSMITHPFHRREYIPDVISFPHLMNDLHINKKGQPLSNCSLKAYFLSKLVLYSTEQNSDLQSLITGAKRLKSLSSISIINLETTT

SEQ ID NO: 320693 - protein, 148 aa, Zea mays
  unsure (1)..(148): unsure at all Xaa locations
  Clone ID: MRT4577_55537C.1.pep
LRAPMGTSCILWPGGSVWPXHPFFSKDTTLFXGGGRHXPPXXXNPPRRRIMASALRAFLNSPHPLVTLSDLSAYGAGGAILRDHESSNYFRALSALARAPPRRRKQPEIVWQLPGVERLQQYWWPGIAGTVIPAPVAVLSNKELVSEA

SEQ ID NO: 320694 - protein, 117 aa, Zea mays
  Clone ID: MRT4577_55538C.1.pep
MRLLLEEARKLPRWQQAATTTAAPTNVQYAGCVGGGGFEMVDRRLELWSKMKRDVQLLVSVQEQAAADEEEQHLAAVFQEASLAAIDRAMHRDIYLAAVYASKQTRCHSVGCQQVKD

SEQ ID NO: 320695 - protein, 69 aa, Zea mays
  Clone ID: MRT4577_55539C.1.pep
ANNNSSMSIVHYTLRTRPTEAAVYCTTHTKLGFKLSSSSPRRAVLHAHRMPSPLDSDDIVPAQPPITGS

SEQ ID NO: 320696 - protein, 42 aa, Zea mays
  Clone ID: MRT4577_5553C.1.pep
IFKVYMLLTLCCLNGMFTLADQGLSIQNRGLSIKSTLKAYPC

SEQ ID NO: 320697 - protein, 78 aa, Zea mays
  Clone ID: MRT4577_55540C.1.pep
CLLSVPLVHILYVRDRIISSKRGHTSSSVWSVLMRALPPHRCVFSPSNCFTSVGDLTPSSSKAHIAPNVSVEHLLLVK

SEQ ID NO: 320698 - protein, 62 aa, Zea mays
  Clone ID: MRT4577_55541C.1.pep
CLQTCTGQYTLLDLQTLCTVTGPRDDTPTRIFRCTITWRLIPPGLIRLTYDGLHSSIRYISM

SEQ ID NO: 320699 - protein, 59 aa, Zea mays
  Clone ID: MRT4577_55542C.1.pep
RDFFKKYKEVFFIGIGFKKGLKIQTVQLCFCYLGGSEKQESFFLIFGEGGSKYYWFFNF

SEQ ID NO: 320700 - protein, 49 aa, Zea mays
  Clone ID: MRT4577_55543C.1.pep
LRLERSPTPFYNPGPALGRKASLPIASGHNTGTQTWTLVALCVHKHPML

SEQ ID NO: 320701 - protein, 52 aa, Zea mays
  unsure (1)..(52): unsure at all Xaa locations
  Clone ID: MRT4577_55544C.1.pep
MEDPNKTXSDVVKLLTSWLPRRSNPXNVSRDFWMPDHSCRVCYDCDSQFTIF

SEQ ID NO: 320702 - protein, 103 aa, Zea mays
  unsure (1)..(103): unsure at all Xaa locations
  Clone ID: MRT4577_55545C.1.pep
VGCWVSGXFXLFVXCPAVLSAGFPGVXXXASSLXFAXPXGCSVEFCXVCXXXSALPPSFCCVLLXFSLFGCXXPPLTGIFKFGSSTRCQISISLWDGEKKNIK

SEQ ID NO: 320703 - protein, 65 aa, Zea mays
  Clone ID: MRT4577_55546C.1.pep
FALVLDNFCYMLERNTSSTMRKQNFEGSFVLSCEQDHSVRMPLIESGTCCESALPKIFLYCFLHF

SEQ ID NO: 320704 - protein, 152 aa, Zea mays
  unsure (1)..(152): unsure at all Xaa locations
  Clone ID: MRT4577_55547C.1.pep
MWCMYGRANAISSSSLPYXRTPPICVKTSTTVAEEMITXAVENDQMACIWEYLLRDLYGIPLVSRETGNEILRMLNGHGXMATIIPEDLYFLMKRALENMNHLWKNWNDQDCLLILFLVESMIQRLARYYSGTXKLCPNWKYXSTTASTLWS

SEQ ID NO: 320705 - protein, 95 aa, Zea mays
  unsure (1)..(95): unsure at all Xaa locations
  Clone ID: MRT4577_55548C.1.pep
NYSYNLHXTIKDENTAFQLPVDDTNNIEDVIYAFINSLDDNQLVEADEFEDXMNELXSLCNPIIAKMNRDAGEHMXXGAGGMDEDAPAGSGGPGP

SEQ ID NO: 320706 - protein, 99 aa, Zea mays
  Clone ID: MRT4577_55549C.1.pep
DCLQRMPPRSPSPITVAGVGATVPLYPVHRVPPPPPLPSRFLLSPAKWMATLRRRSVSLPLPSQTRARARNTPRKTPEAIRGRPYRRRRRQKKKKKRGG

SEQ ID NO: 320707 - protein, 147 aa, Zea mays
  unsure (1)..(147): unsure at all Xaa locations
  Clone ID: MRT4577_5554C.1.pep
VFKHNQLFNELASINVHISRGNKESVFSVAXISKDGRAFNDQLFFSAVNILWKIGGDPKIIQYFVHRXVGAKIAASEAMESEAILGAIPDGFLDTIQYALMKDPVTLPSSKVTVARPVIIRHELSRSSHPINRSRLAQYMMIPSEEL

SEQ ID NO: 320708 - protein, 60 aa, Zea mays
  Clone ID: MRT4577_55550C.1.pep
NLMPPPELKSSHRLPHDHNVSFLDKSSNMIILLSKLFLASNGLHRLSVYSASPLKFTFGV

SEQ ID NO: 320709 - protein, 83 aa, Zea mays
  unsure (1)..(83): unsure at all Xaa locations
  Clone ID: MRT4577_55551C.1.pep
PPPPPPPPPPPPPTPPHQHTPPXPPPPXPPPPPPPRPYPPPPKTNPHALPHSSPPPXPPKPQTDKLPTNPKPXGPGPPRSYPP

SEQ ID NO: 320710 - protein, 50 aa, Zea mays
  Clone ID: MRT4577_55552C.1.pep
RQDGSVFFSKVKKGLAAFIFPHHHRKYSAALLNESSYKGQMNRLYLYYIK

SEQ ID NO: 320711 - protein, 47 aa, Zea mays
  Clone ID: MRT4577_55553C.1.pep
VCCRLCVCVLSKSSMIHNFSINPCCKSCYWPTDCNDVYHITQALTRH

SEQ ID NO: 320712 - protein, 46 aa, Zea mays
  Clone ID: MRT4577_55554C.1.pep
LQGHAAFSVFFEMMRGTANRIKVDQTSGKRGTEQKPSQRSGQTDSL

SEQ ID NO: 320713 - protein, 65 aa, Zea mays
  Clone ID: MRT4577_55555C.1.pep
DIECLPFLSMTDSTRLILTIYVFSIITSIIMISLCNIYHMLCSNKISAGIHIVASSWKGSSTKCF

SEQ ID NO: 320714 - protein, 119 aa, Zea mays
  Clone ID: MRT4577_55556C.1.pep
AASSLAFPNPSISCAARPRAGYLSPDCGDPATRAVRVSQGPGRQGMDAAGVYTLGTQCQCFFHAVAAWMRRFPRDRCSCDRVCWKCLQMTVGFGYLRLEERPSISLSLHSANFGLVRPT

SEQ ID NO: 320715 - protein, 332 aa, Zea mays
  Clone ID: MRT4577_55557C.1.pep
MKKCPSELELEAFLRGREDATAAAAAAAVAEQKPAHDVAALAPFGAGGVFPSSDLSAFSFADSNTLNGTGNIHNHLWSHNHNVRHPAVSTTIESQSSICAAAAASPTSATNLYLKESQALGGTSGSDSDSDSLLDIEGGPCEQSTNPQDVKRMRRMVSNRESARRSRKRKQAHLADLETQVDQLRGENASLFKQLTDANQQFTTAVTDNRILKSDVEALRVKVKLAEDMVARGALSCGLGSLGLSPALNPRQACRGPDVLSVSGLDFPGADDACFTGLSPAEQLQLQSSPLQSIAASLESLDNRMASEVTSCGGPGVDVWPWDHHSNGGLSK

SEQ ID NO: 320716 - protein, 78 aa, Zea mays
  Clone ID: MRT4577_55558C.1.pep
FFIDFFFFLGVFYFLLFFFKQKKPGHYFILRENYRDGEKIPHCKGLWGGGCPWKPRYRKGGEHTLKGKRYYGGGQPNA

SEQ ID NO: 320717 - protein, 76 aa, Zea mays
  Clone ID: MRT4577_55559C.1.pep
QRKLVISLTQLPHGQVVLITVKGSKSSTALAVAVPSSAQCPQSSRSALPPSRLLSSPACPSSSYLPQGSSSPVGRR

SEQ ID NO: 320718 - protein, 86 aa, Zea mays
  Clone ID: MRT4577_5555C.1.pep
CMHVCTIMCQNDEPSTLYICTLNQVGEAYVYGKLTDESCTAYARLTCWTQSQGHHTQTWRRRTVLFPAAGSQPEIVPAPGWGNHSV

SEQ ID NO: 320719 - protein, 78 aa, Zea mays
  unsure (1)..(78): unsure at all Xaa locations
  Clone ID: MRT4577_55560C.1.pep
RYTAIRQQQAFSHCNIPXSPLPSQQSSSLSFPHPFLHTITSQQLQHLELPAIYQVSLANLSTYSEQQQXFLTFTQLAT

SEQ ID NO: 320720 - protein, 55 aa, Zea mays
  Clone ID: MRT4577_55561C.1.pep
NHGALQRGWKPAYQLMLQHIPSQLRITKGRTDAFPQWGARIGNGPRLVPGNKTPP

SEQ ID NO: 320721 - protein, 223 aa, Zea mays
  unsure (1)..(223): unsure at all Xaa locations
  Clone ID: MRT4577_55562C.1.pep
MRFWSLTIAATSLLSQASAINVEHVADTYDFIIVGGGTAGLAVASRISVGLPNSTVLVIEAGPDGRQEPGIYIPGRKGSTLGGKYDWNLTTTPQSNANNRTFAQNRGKVLGGSSALNLMTWDRTSIAELNAWEKLGNKGWNWNTLYPAMLKAETFLPSPEYGTEGVGKTGPXNANQPHLPQASVFLDTCSEXLGLVTNRESLNGHPVGVSTQPNNVSPNYTRS

SEQ ID NO: 320722 - protein, 51 aa, Zea mays
  Clone ID: MRT4577_55563C.1.pep
RYQRTVFAFQLYLNGHQRYVYEFFSRVAKDRDALFIVHRNSRRSRGVVIAH

SEQ ID NO: 320723 - protein, 84 aa, Zea mays
  Clone ID: MRT4577_55564C.1.pep
SPLQYVHSPDRPKYLGPFSEQTPSYLTGEFPGDYGWDTAALSDDPDTIAGNRGLKEIQSWRAMVAAVSKVVPDNVGDNSATSPP

SEQ ID NO: 320724 - protein, 80 aa, Zea mays
  Clone ID: MRT4577_55565C.1.pep
REKVSFFSSKGSPPGGSTWVRSPPSGSRGAAFSLKWGHHIGPPPAPIALTVRVRGQLKVLRMATFSEGRQGGRPSFFICS

SEQ ID NO: 320725 - protein, 204 aa, Zea mays
  Clone ID: MRT4577_55566C.1.pep
WLGSKFLPSQAWRPCRSPRDPLLKPGVPAPRDRACQAWRRRGRCPRDPLPSTCQAWHRPGRCHARRTRRDEILDPPRHPPPPRHGRPRRPRAPLPEVGMVRTTIAGVTTAARFQELVDWMEEWKAAFRDNSKWTETVNLGLGSLALIMSGLLPFAIDGDLGFGKPSLVLPVRHGRLGSASVMGGALPHGDMSWFFGGTRMWLRL

SEQ ID NO: 320726 - protein, 91 aa, Zea mays
  Clone ID: MRT4577_55567C.1.pep
TLLPALARVQRQRHRASRSGLGPARGAGLLTAAQRRGEAGGPPEGDRTPAPNVGRGAGACDGHRSAREDERGEREARQWRGRASCEVISTR

SEQ ID NO: 320727 - protein, 114 aa, Zea mays
  unsure (1)..(114): unsure at all Xaa locations
  Clone ID: MRT4577_55568C.1.pep
MRALLVALPLLDLPGSAXTPRHTXGGCRCQAQAAVHAPPAHHPPPPIQLPPPEHIPPGEQLPPKKDPPSLAQGPPTXDMTNSPCHYPIXAGLPHAQSQPHTGPCQNGDPIPRPK

SEQ ID NO: 320728 - protein, 35 aa, Zea mays
  Clone ID: MRT4577_55569C.1.pep
THIASTNTATRTHYTESNMVIGYLRRIRKYLFLNA

SEQ ID NO: 320729 - protein, 73 aa, Zea mays
  unsure (1)..(73): unsure at all Xaa locations
  Clone ID: MRT4577_5556C.1.pep
FQTNLVPYPRIHLMLPSYAPVISAEKAYHEQLSVADNTHSAFEPSYMMAKCDPVHGNDMVCXSLHRGDVAPKA

SEQ ID NO: 320730 - protein, 78 aa, Zea mays
  unsure (1)..(78): unsure at all Xaa locations
  Clone ID: MRT4577_55570C.1.pep
SLWTRLSHMHKGTENALYSSTYVCQHEKFLRNIFYVSLNCWPSKNVGHSDLDSKDNIRICLNAIELIIEYSXEKXLVN

SEQ ID NO: 320731 - protein, 80 aa, Zea mays
  Clone ID: MRT4577_55571C.1.pep
SHPTGRLETRSQLQLPVSSLLLFFSESSERRLSDYYTIEYPFPLPSCICTKKSSEFPNQHLVRPIHQLHNTSLHEYSTLA

SEQ ID NO: 320732 - protein, 90 aa, Zea mays
  unsure (1)..(90): unsure at all Xaa locations
  Clone ID: MRT4577_55572C.1.pep
IPVLVEKPEKCFILCIVKKKSFVPAGLSNGQFVYVVRKRILFRTEKALFLFVKYSLFSKTALKSSFFXRSKXVEGFLCMTCSGESPLGVL

SEQ ID NO: 320733 - protein, 168 aa, Zea mays
  unsure (1)..(168): unsure at all Xaa locations
  Clone ID: MRT4577_55573C.1.pep
MMRDILHIHGWQXGNQIDAKFCDVVCNEHGIDPTGRYTENSDLQVERDNVYYDEASCXRFVPRAVLMDLESETMDSDQTGPYGQIFRPDNFVFGESGAGNNXAKGHYTEGAQLIDSALDVARKETENCDCLQGFQECHSLGGGTGSCMGTLMISKIMEEYPDPMMLTF

SEQ ID NO: 320734 - protein, 143 aa, Zea mays
  unsure (1)..(143): unsure at all Xaa locations
  Clone ID: MRT4577_55574C.1.pep
RQSFPMLQXEMCCQTFKLPRXALCIGGIVKIELLGRLQKQSTDDKYYICVCHVQVMGRSLSPDLMIDISDPADYSNLKYLPGAGNLRPEDLLSSDAKEDSSDWRSLVSRYRQMRQLAMVYMLLGPVQFADEEDEAEADMLHLL

SEQ ID NO: 320735 - protein, 141 aa, Zea mays
  unsure (1)..(141): unsure at all Xaa locations
  Clone ID: MRT4577_55575C.1.pep
MREILHIQGGQCGNQIGANIWEVACDEHGIDPTGRHTGNSDLQLEGVNVYYNEALCXRFDPRAVLMDLEPVTMDSVRTVPYGQSLRPDNFVXGLSGAGHNWARGHYTEGAELIDSVLDVERKEADNCDCLLGFQVCRSLGG

SEQ ID NO: 320736 - protein, 351 aa, Zea mays
  Clone ID: MRT4577_55576C.1.pep
MAGRTEEARRSGERETVCVTGAGGYIASWLVKLLLSRGYAVHATVRDPRDPKNAHLGQLEWAAENLRLFKADVLDSDALAAAVSGCRGVFHVACPVPTDRVLDPESEVLAPAVQGTLNILQACSANNIQKVVVVSSTAAVHFDPNWPPHRPKDEDCWSDINFCKKNEDWYMVAKVIAEKTALEYGERNGLNVVTVCPTMALGPLLRPMLNVSHEFLMYIIKGGPTMMKNIPWHIVDVRDVADALLMVYKKEESTGRYICAPNCISAKDLVNMLKRDYPNYNYVNCDNDMVLNSIVTPLMSEKLKNLGWKPMKTLEETLLDSVECYKKMGLLKDAEGCPCRLPHLFHMAIEK

SEQ ID NO: 320737 - protein, 201 aa, Zea mays
  unsure (1)..(201): unsure at all Xaa locations
  Clone ID: MRT4577_55577C.1.pep
MREILHIQGGQCGNQIGAKFWEVVCDEHGIDPTGRYTGNSERGGERVYFYYNEASCGRFVPRAVLMDLEPGTMDSVRTGPYGQIFRPDNFVFGQCGAGNNWAKGHYTEGAELIDSVLDVVRKEAENCDCLQGFQVCHSLGGGTGSGMGTLLISKIREEYPDRMMLTFSVFPXSPKVSDTXMSPYHATXLFCPQLLENADEC

SEQ ID NO: 320738 - protein, 251 aa, Zea mays
  Clone ID: MRT4577_55578C.1.pep
GIAWIPLSAVENQNLIKAPSDARLTSWYQGFCLLDAIDFLQLPSRDVSKPLIIPICDVIKSQSTGQLAAYGKLETGAIQIGSKVLVLPSGQEATVKAIERDSNSCTVARAGDNVAICLQGIDGKQLIPGGVLCHPGFPVPVANHLELKVLVLDITTPILVGSQVEFHIHHVKEAARVTKIVALLDKTGKPSKSAPRFLKSKQNSVIQVTLDGAVCVQEFSKSRALGRAYLRSAGRTIAVGVVNRIIGQDQN

SEQ ID NO: 320739 - protein, 209 aa, Zea mays
  unsure (1)..(209): unsure at all Xaa locations
  Clone ID: MRT4577_55579C.1.pep
MSECCKQGSFHKDTAVGSETKLADRDVYVTGXTSPRXVAILLVPDIFGWRLNNTRCLADKYAKGVGARVYVPDFFDGEAVPTEVMSDPKLREKFDIMAFLGKYHPREASWPKVEAVVEAIRSTQKGVKKVGAIGFCWGAPSCLYLGSTRAKKSAHVDAIGFAHPSVSETSDFEHLDAPSLFLCAEHDEMLPDEERNAAIDVTKELTREK

SEQ ID NO: 320740 - protein, 115 aa, Zea mays
  Clone ID: MRT4577_5557C.1.pep
YHIAAAYPGREFIPHRYGNGGPLHLQSAEATQQASHGCFFSLAGAGCFLVLYYCQCMMLTPQPLPLNANDSVFFPAIALSDVSGAHEGALHHRVFFSCTAPGLLHMDVPNGAACT

SEQ ID NO: 320741 - protein, 68 aa, Zea mays
  Clone ID: MRT4577_55580C.1.pep
APPRVFFFFFFFFFFFFFFFFFFFFFFFFFNNTKNFWGKVLSKEPLGGLYGGEKGGGQKQANFEPHFF

SEQ ID NO: 320742 - protein, 60 aa, Zea mays
  Clone ID: MRT4577_55581C.1.pep
IKGVMSKNPEIFLITPNYHLIKIKKIPGDTLEYQNFMDQSMCPALIEIVWAPNFNLPNKK

SEQ ID NO: 320743 - protein, 478 aa, Zea mays
  Clone ID: MRT4577_55582C.1.pep
MASKRKKQSTVAAIIPPIDPNSQLPFAEGFPEDLLSRLYMILRGRVSNAGAPVAYSAWNLPPLRPFSEFVSNPPARNGSLGHRVRPSPEDIEALIAPLRVFLRMRDVVLSLLARVSSDSTRTEPMAITTGQEFGEEVETQKPEGACPKRPHRVNLPTAPIEEKRKKRRLQRLSCLDQDDGPSVPVPDDVPAEAIPEGIGCMIDEDEEVEEEVPLIRKNSRHYRGSEGGSDIPSPALSALVSLQELSMSDFDQVLEEVIPEDMLSEPPEDDIPAICSEVTRVVSRASSTLEGSLPCKDADLSHLTPMEVAEGPSALEVANAEDLASKSGAGSYPALEGVAGSDPVLVGSANYNLAPEAVLSDISQRCSDLEEKYSQSQADLAQTSAFLDGARSLDSSLNDQLDSEKMAREEEKRALVASRDNLDRLYRDASNSLTFLERSHRFTMSDLDHHRNELQASQDEVLRLGRLLSTKDSTIKDL

SEQ ID NO: 320744 - protein, 126 aa, Zea mays
  unsure (1)..(126): unsure at all Xaa locations
  Clone ID: MRT4577_55583C.1.pep
AIKTGHFYWSKTIPFFFIRSDSSRRPHEGPPTGQNTPDGVTGAWGYTNTTLTGQIKANRSKEGNLFVQQQQSPKLKKTPGWRPGPNKTLFACWHGDACLGVHNLXVLGRNNKILGQGRGHLWDGPP

SEQ ID NO: 320745 - protein, 74 aa, Zea mays
  Clone ID: MRT4577_55584C.1.pep
LARHVQQDRVPVHGQVLALKGEPRRLESLHRGHLVAEEASRRLLAEVGSHGEGTGCGLGLWLWRASGELEPTVL

SEQ ID NO: 320746 - protein, 98 aa, Zea mays
  Clone ID: MRT4577_55585C.1.pep
RLIHNFYLSLRFARGEEPISRPDKNRQRRHTKASSINPIRSNREKKERVRGHGQPNPFDPTHACIDLEYYGRRRRLTGDQRRRSRRGSRRWSTADFCI

SEQ ID NO: 320747 - protein, 74 aa, Zea mays
  unsure (1)..(74): unsure at all Xaa locations
  Clone ID: MRT4577_55586C.1.pep
VNLSDGTLSATRKQADSAHEEASAWRRXYDVTVNDARTALQRAAIAQVHTDKKLHACVDALTVELANRVSVKVE

SEQ ID NO: 320748 - protein, 30 aa, Zea mays
  Clone ID: MRT4577_55587C.1.pep
WKRYLSKLASNIQICILGECAEIEQSNIGT

SEQ ID NO: 320749 - protein, 110 aa, Zea mays
  Clone ID: MRT4577_55588C.1.pep
VANAICFTHFLAPLAKGIHCNFCILEGSMTTDHAITYTHNTIDGPSVHYLIARSAANFNIIPNSTAASKTIGMDLPELNRNLTGISFRHPTTNLSYVYLTLTIENVSSYQ

SEQ ID NO: 320750 - protein, 106 aa, Zea mays
  Clone ID: MRT4577_55589C.1.pep
MGARRRGQLRLMCSFGGRIVPRPTDKSLCYLGGETRIVAVDRHASLTESKYGGSVLMFNDLTCPSCRGYDKKGSPHVEATTRRGAIMQLYSNNYFNSEPDAVGRRR

SEQ ID NO: 320751 - protein, 70 aa, Zea mays
  unsure (1)..(70): unsure at all Xaa locations
  Clone ID: MRT4577_5558C.1.pep
VFVLPCSRGGWXLVCVGCASSLGCGVCLSSCGGALFVPWCXGXLCCXGGXGRVLHVPRPLVFXALEXXXG

SEQ ID NO: 320752 - protein, 64 aa, Zea mays
  Clone ID: MRT4577_55590C.1.pep
MGARRRGQLRLMCSFGGRIVPRPTDKSLCYLGGETRIVAVDRHASLTESKYGGSVLMFNDLTCP

SEQ ID NO: 320753 - protein, 64 aa, Zea mays; identical to SEQ ID NO: 320752
  Clone ID: MRT4577_55591C.1.pep

SEQ ID NO: 320754 - protein, 110 aa, Zea mays
  unsure (1)..(110): unsure at all Xaa locations
  Clone ID: MRT4577_55592C.1.pep
GTVHKTNSGEVARLCVDIYKKGHRLFRWIKGKSKAPDEERPAIIKSGSSFFFSLFFSYGAQPGAADQEGGRGGLQGAPPETAPAGDXDQRRRRGLASPPLSVVCSPCRQR

SEQ ID NO: 320755 - protein, 65 aa, Zea mays
  Clone ID: MRT4577_55593C.1.pep
KQGKKSFNSLNRRGGGSFILDSRKNQPKHSKIRKGLHSFKGEGLFWNHLTPLLGGFGKTFIWFPS

SEQ ID NO: 320756 - protein, 76 aa, Zea mays
  Clone ID: MRT4577_55594C.1.pep
LVGHGQFVIFSPLFHDLEFLYLPSPCGNVLLLGFISMKRKTLLARSLFLFMSILFPPMYDRMVVFICVTQTLIMLH

SEQ ID NO: 320757 - protein, 57 aa, Zea mays
  Clone ID: MRT4577_55595C.1.pep
ALVVATPYSDVVLTRPPTASADACVNFYSEGGWLTCLIRGRLNVHVEWMLLQPQCRW

SEQ ID NO: 320758 - protein, 51 aa, Zea mays
  Clone ID: MRT4577_55596C.1.pep
GVLRIWCPEGLISTPVGGEAQEPGGDIEEWCSKSVEAGYVSLTKCIAEIQV

SEQ ID NO: 320759 - protein, 106 aa, Zea mays
  unsure (1)..(106): unsure at all Xaa locations
  Clone ID: MRT4577_55597C.1.pep
DKRAKKKDNKXVDTYEXIYISRXVNQMQQGTGIXSCKAMSHYEXFNNDILYKIPLXSAKMALNNKKQTISCREXIQTTVSLVLSAELTKHAVXXGTKTVNKFTKAK

SEQ ID NO: 320760 - protein, 34 aa, Zea mays
  Clone ID: MRT4577_55598C.1.pep
GLQTLIDESSTRSIDIVLVIKREFSCARANVRAR

SEQ ID NO: 320761 - protein, 117 aa, Zea mays
  Clone ID: MRT4577_55599C.1.pep
IPFRPTLPTKTSPNLLLLFPSSHLSSFEALLKIHQEILSPSQTNYHKKSTSSINLSTFPFPNLSATSSTVTNLLSSPIYSQRHSYPTPFSLLKPYNLIGYSSYNFILHILNTLLFHH

SEQ ID NO: 320762 - protein, 160 aa, Zea mays
  Clone ID: MRT4577_5559C.1.pep
THLTYIPLSRRTQQHNSRALLRQDEQEARRLGLQGGGFGAAGSDVRPGDWYCSCGAHNFASRSSCFKCSAYKEEAAVNSGAGGFDGDMSRSRGYGFGSGAAGAGAGAARTTNRPGWKSGDWICTRSGCNEHNFASRMECFRCNAPRDSGSAAMTYENYLH

SEQ ID NO: 320763 - protein, 90 aa, Zea mays
  Clone ID: MRT4577_555C.1.pep
PLSQTRHLPRPRWRRSDATALVSERSQGRGRRDAASSQEEGEIRRLGGARGTKNMAFVPYLRGMFDSLYLSTDAYSYKSRKPILLEIKGS

SEQ ID NO: 320764 - protein, 562 aa, Zea mays
  Clone ID: MRT4577_55600C.1.pep
MAGRDSLPEGSLFLGLDSSTQSLKATVLNNELTIVASEIVNFDSELPHYKTEGGVYRDPADDRHIFSPTIMWVEALDVLLEKLKPKINFGKVVAVSGSGQQHGSVYWKKGSHAVLSSLDASKSLLSQLKDAFSTMNSPLWMDSSTTKQCREIENAVGGALELAKLTGSRAYERFTGPQIRKIYQTAPDVYEDTERISLVSSFMASILVGSYASIDETDGAGMNLMDIKQRTWSKSALEATAPGLEAKLGNLAPAYSAAGRIAPYFVERFQFDKNCLVIQWSGDNPNSLAGLTLNTPGDLAISLGTSDTVFGITTEAKPSLEGHVFPNPVEPNGYMVMLCYKNGSLTREDVRNRCADKSWDVFNSYLEKTPPLNGGKLGFYYKDHEILPPLPVGFHRYTVENLNDVSSDALLEREVEEFDPPSEVRAIIEGQMLSMRGHAERFGMPNPPKRIIATGGASSNESILKSVAQIFGCPVFTVQRPDSASLGAALRAAHGWLCNAQGSFVPISCLYQGNLEKTSLGSKLAVPAGDKEQDRELLQKYTILMRKRMEIERRLVEKIGRS

SEQ ID NO: 320765 - protein, 161 aa, Zea mays
  Clone ID: MRT4577_55601C.1.pep
RSVLDRWLGRVVEVSRWCHDLTPPPELGRSHDNFSPKWRNHRNSALHRGLACRHLHRRMSRKMLSIARSLLGTRSSSRSSSRGEDSVFQGTGSTMRRRRALAEHFPPHDDVEIEEPVVDDHARDDDEDDGGDDAGDDACVYSAGMDSGLVVIPQLGLELSS

SEQ ID NO: 320766 - protein, 346 aa, Zea mays
  unsure (1)..(346): unsure at all Xaa locations
  Clone ID: MRT4577_55602C.1.pep
MPVKSMQTVIYLDPSQQIYIGSSVAMVLHYAAGLADAHVGAPVRDAVIAVPPYFGQAERRALTQAAQLAGINVLSLINEHAGAALQYGIDKDFSNASRHVIFYDMGAGSTYAALVYYSAYNAKEFGKTVSVNQFQVKDVRWNSELGGVQMEMRLVNYFAAQFNKQLGDRVDIRQSPKAMAKLKKQVKRTKEILSANTAAPISVESLYNDVDFRSTITREKFEELCEDLWEQALTPVKEXLKLMKIDDIYAVELIGGATRVPKLQAKLQEFLGRRGLDKHLDADEAIVLGASLHAANLSDGIKLNRKLGMIDGSTYAFVLEIDGLDYVKDESIDQILVPKKKKKNGD

SEQ ID NO: 320767 - protein, 136 aa, Zea mays
  Clone ID: MRT4577_55603C.1.pep
MATSDNVVRAGLTPKYRDVQTLCSMLTYKQGFPEILRGVPVQPHVRRYTPPFNEFEVDWCLVPPGGLVVISPVPGPSIFLVITGEGEIQLDFMSDGEKAEEGDVFFVPAYTEVKISACGPESVQLYRAGVNSRFFS

SEQ ID NO: 320768 - protein, 121 aa, Zea mays
  unsure (1)..(121): unsure at all Xaa locations
  Clone ID: MRT4577_55604C.1.pep
DTYHQMTTNLGLQARLASQALFFXTPTGDWSGXQXPXLLLXTEGLQPQLNATFLARYANXPLPNTKAHRCGRADALSLYRIMLRFHLDLLNHQIRYALTAGPWDNLLLNKTVCNTKTNYGP

SEQ ID NO: 320769 - protein, 153 aa, Zea mays
  unsure (1)..(153): unsure at all Xaa locations
  Clone ID: MRT4577_55605C.1.pep
IFNLWLCGPRVTGNAPNAGVEPCAISAPGTNGVIGLRRALTLAQLNTDLTEVTHRAYFIIEINGQPLWRHDMGLAGKTAPKTVQTFRAVYPGKKGDDKIDRDLHYMGSQTHSLMHTFMLEGGDFTLXDGRIGESIYGLNSADEIFXIRHTGAG

SEQ ID NO: 320770 - protein, 94 aa, Zea mays
  Clone ID: MRT4577_55606C.1.pep
AIIIVSACEGCCCVNEGPSGRGCGVVMRRVSRLSFCASIMDGWRHTLSRLVINHSLGLQGHRGHHHAHGRSLNEHVHDFLGARHHLRREMLLLR

SEQ ID NO: 320771 - protein, 58 aa, Zea mays
  Clone ID: MRT4577_55607C.1.pep
RCICGCSFIKPQNKMFLLEKTIAQCIIIHHLHTAITVEGRFLHISCQYQYGTLNIVNA

SEQ ID NO: 320772 - protein, 62 aa, Zea mays
  Clone ID: MRT4577_55608C.1.pep
HSPARRCCGTMQPWAQGAPATYDTPSHSTRATEADVSARRCRRILRTRVLDRPPLRSKLNED

SEQ ID NO: 320773 - protein, 82 aa, Zea mays
  Clone ID: MRT4577_55609C.1.pep
KSAAQSQHSVGQISSGPSPLRMDRGQASFSWADLAMIRSATGGSGGESPLQGAGKETKGCSASNKDSRNQRSLEKLVWHYKQ

SEQ ID NO: 320774 - protein, 174 aa, Zea mays
  Clone ID: MRT4577_5560C.1.pep
MNRKPGDWDCRACQHLNFSRRDICQRCSEPRGVADRGGGGGGGDYASFGGRGGSSFGGGFGAAGSDVRPGDWYCSCGAHNFASRSSCFKCSAYKEEAAVNSGAGGFDGDMSRSRGYGFGSGAAGAGAGAARTTNRPGWKSGDWICTRSGCNEHNFASRMECFRCNAPRDSGTEV

SEQ ID NO: 320775 - protein, 118 aa, Zea mays
  unsure (1)..(118): unsure at all Xaa locations
  Clone ID: MRT4577_55610C.1.pep
PXSTHAVRPRRPPTPSRPTPXESXERXVEEGETXRITSPGLRRXPHMAXXPRHRSRLVVYPPSRPCREREGXRETERARGGGKAAAVDLHAPSRLAPTTCTGGVAGARRPHTWIFRVE

SEQ ID NO: 320776 - protein, 81 aa, Zea mays
  Clone ID: MRT4577_55611C.1.pep
PCMAHIRPRILCWRTVCRSVLSSMVNPGRCTHRSGRLSTRGSPQFSSRGGGRPACSRIGRTWAGMCTFQLELQYMSSLSCS

SEQ ID NO: 320777 - protein, 52 aa, Zea mays
  Clone ID: MRT4577_55612C.1.pep
TRAYQCKSITDDWFSSLSNVFMMIELLNLKYCNKITYTDLGHLYSLYDLTNL

SEQ ID NO: 320778 - protein, 77 aa, Zea mays
  Clone ID: MRT4577_55613C.1.pep
FLFWGFFFNMLLKILWDYNLQFLRPIPLKARPPFSWAPQKFRLHFLFKNSKSQEGLLGGAYFCQFVPGPFVVAPFFS

SEQ ID NO: 320779 - protein, 139 aa, Zea mays
  unsure (1)..(139): unsure at all Xaa locations
  Clone ID: MRT4577_55614C.1.pep
RGSPSPASAASPPRPPQGWPPPRAPARAPQLPPSRPARVPLALPLAVPLAPPPRGPXRSSGAPRPPXPRPPGXPSPPRPLPSPKRGPRRPHRPPRPTTGPPPAPRHRRPPPPAPRPXLAPPPPPAPRPPSPPPRRLPPT

SEQ ID NO: 320780 - protein, 129 aa, Zea mays
  Clone ID: MRT4577_55615C.1.pep
NGIQLCGYSAMGASGTAWANNSVMDSPVLKQIAHARGKTVAQVCIRWVYEQGDCVIVKSFNQSRMRENLHIFDWELTDDDHRKISELPESRGNYDFLIHESGPYKTAQELWDGEITAGQSNQTPLVSDD

SEQ ID NO: 320781 - protein, 120 aa, Zea mays
  Clone ID: MRT4577_55616C.1.pep
IQSKPHVILFACTYKLLLPVYVVPVFESTDDIQMTLVLSKKNIPCVRESTVELLTHKAMCLMTLQLKKRHPLGIPRVLTATSTRKTIITGETKPFSSDGFSTSIIFCSCRFLSYGQTTGN

SEQ ID NO: 320782 - protein, 92 aa, Zea mays
  Clone ID: MRT4577_55617C.1.pep
SATPPPSSPLASALASPAAAAAIDGGCKKASSPPLLASFYKQQLNLQWMMRIMYAMQSNLYCVCITASKISQPRPKGRQERYLLLVVKPPRA

SEQ ID NO: 320783 - protein, 252 aa, Zea mays
  Clone ID: MRT4577_55618C.1.pep
MDGDKVKESAPDCASGAAEPTKKQDKRKRAYAEFDVVDKKSVSAEWQQEMDALYKYYKEVSGHQLNPEELSCTTNDSIIACLLEESSLSCAKLTDGIYKRMKLQYGVTESSVRTSVLNIGRRSSYGISAMDVNGLEDESDSSLWCWETEDLALLPLHLRSSLSIRRTARKLIHKRILVLSGKLATKDASNACSNQNSLMENAGEALDLDEIRSIIESKHKNDDDIKTEAQDFQAIRKAVKKQQMMVGHIQTE

SEQ ID NO: 320784 - protein, 92 aa, Zea mays
  unsure (1)..(92): unsure at all Xaa locations
  Clone ID: MRT4577_55619C.1.pep
ALHVPKAPGFXQMLKEGAKHFSGLEEAVYRNIQACKELAQTTRTAYGPNGMXKMVINHLEKLFVTNDAATILRELEVQHPAAKMIVLASHMQ

SEQ ID NO: 320785 - protein, 69 aa, Zea mays
  unsure (1)..(69): unsure at all Xaa locations
  Clone ID: MRT4577_5561C.1.pep
KAPPRGIPTEAQPPTTPHRTSPGHQRPCASRPMRPTNRPEPRWEMNNMWRGSQRGRTHYSAKISCCDXP

SEQ ID NO: 320786 - protein, 196 aa, Zea mays
  Clone ID: MRT4577_55620C.1.pep
MASSSASGAGVEGGVGEGPTTLDELYQINVVPAELHFKFRKELQGLRVGLNLEFYNLEVNDFEAKIVLKPLDYERKWKFQYKPISGDIQLLSKKIPVTKFLNLQVGIGHNFQLNATGWKWKLSTCLGGDGVSQIRNKSKLSLFPGFDLRIGWKAEYVLPEIHGAVGTGEPAFSMNYGRLHASIDRVEAIVTQSDQY

SEQ ID NO: 320787 - protein, 379 aa, Zea mays
  unsure (1)..(379): unsure at all Xaa locations
  Clone ID: MRT4577_55621C.1.pep
MSAIVPPKPLPFLTTLTTRFSLACLPTRRFTQTRCSSAGHRGPAVAATPRPGGVCRVHSPLRSLLLASAAASARTAAAAEDMSDPELRLVLELATDEELMEVEEILYGTSYFSPLLKSIARRPNSDGVVILDDIEERDHFISKLESRFLYLAADARFVIRGWRPSYRDVLLRVRKKIGVQCSSKLCTADLEAEIFLHLVNEYSSHQKDRLSFPWDKRKSPNNISSLGANKWKMLTDVVWRIGTKGMESTFLKGGSALTMKTIYESLANRLTGKLLKEAXNXKIKKELVKQGGRLAAVNLESRAGLLAARQGLVRAASRYVGLRSVVTFLGPILWGTLLADIVIQMLGTDYARIVQAVYAFAQIRLTRTSYVESDGEGPE

SEQ ID NO: 320788 - protein, 53 aa, Zea mays
  Clone ID: MRT4577_55622C.1.pep
ASVGSGESPRQVPLPPAWVVLCSDRELGCSGSSGSLAVHAMRVMDGIAMWCAT

SEQ ID NO: 320789 - protein, 77 aa, Zea mays
  unsure (1)..(77): unsure at all Xaa locations
  Clone ID: MRT4577_55623C.1.pep
IKIKKKTNKIKKNKLTYTKQCGEIKYSGVKPKIQFTDSQIYNLKELGKPKTLRCLPLXXLPFLFPAVCEINIFFWPP

SEQ ID NO: 320790 - protein, 105 aa, Zea mays
  Clone ID: MRT4577_55624C.1.pep
AETIDLYLLSYCRANTNDTRRVRVVVLALLSLAVSATSTHTNRSCGCQPPPPAHVQPPAHVPPPAHLPPPAHVQPPVQVPPPVQVPPPVHVHAPVHVPAPPCQYP

SEQ ID NO: 320791 - protein, 194 aa, Zea mays
  Clone ID: MRT4577_55625C.1.pep
AGQRQASLPASSLPLYSTHQRRRPRPGLHHQRQAARITAPHRTELLTSLLRPPSYLCMSSSCTPSFSAAWSCFSADQTPHRSVSVLLYTSTPSHSHGTSSRPQSPAPEHPRPSLLLLFPWPLAEMLFPAPRRCSHRKLSVLVVYSTQVLSTSSISCSGLPVPQRLPGICKMETNQLEKGDLQNFMDEEENEVEE

SEQ ID NO: 320792 - protein, 95 aa, Zea mays
  Clone ID: MRT4577_55626C.1.pep
GRIFGVKAPLWGMENFQTGALEKYFLGVWGVGYAKRPHECPVSPSVLGGEAAVFSLGGGGGFYGGFYKGVFSRGRRGGRKKKGGVFLGPQEIVKE

SEQ ID NO: 320793 - protein, 78 aa, Zea mays
  Clone ID: MRT4577_55627C.1.pep
SSVIFGSSSEPILPCWKVEDEDERLGVLTWSKRYFLLLVIALAAILDCYSISRLEDQGHAFRVESERWVRRRPGGRVD

SEQ ID NO: 320794 - protein, 57 aa, Zea mays
  Clone ID: MRT4577_55628C.1.pep
YPTMVNSGRYASRIDLSCCEDIAMSTLFIIQVCPRPPHLEHIMFPVPPQPRTRGSTQ

SEQ ID NO: 320795 - protein, 72 aa, Zea mays
  Clone ID: MRT4577_55629C.1.pep
GPRGFSQVFGGFGENQSAATEPVSTHNVYIENTTLWTSKLSTLERTTHLCGQPIFRTSAKTSSTRALTMNLG

SEQ ID NO: 320796 - protein, 182 aa, Zea mays
  Clone ID: MRT4577_5562C.1.pep
MNRKPGDWDCRACQHLNFSRRDICQRCSEPRGVADRGGGGGGGDYASFGGRGGSSFGGGFGAAGSDVRPGDWYCSCGAHNFASRSSCFKCSAYKEEAAVNSGAGGFDGDMSRSRGYGFGSGAAGAGAGAARTTNRPGWKSGDWICTRSGCNEHNFASRMECFRCNAPRDSGSAAMTYENYLH

SEQ ID NO: 320797 - protein, 190 aa, Zea mays
  unsure (1)..(190): unsure at all Xaa locations
  Clone ID: MRT4577_55630C.1.pep
RSRRTAAARAASTARGRWRAWRGPAWRAWAAGSGPGPCCWSPPAPXIPQEYLGTLLRPCFVEVXTGXLLGGDGVAAAAAAIXAAVAALDGGVLXGXGGWFNKILXLVPERPMSVGGSPRYGVYETDFGLGRPAKVELVSIDKTPGTVSLAEARDAGVEVGVVLQEAEMARFGSCFADALEVLCDSVTELN

SEQ ID NO: 320798 - protein, 70 aa, Zea mays
  Clone ID: MRT4577_55631C.1.pep
GVCLNYGDRSYRTLPEQITGPEWAGPRHCGGLYVAHRSNQHPPRYVHHGRLTPQLAVHQQVLGQKRKGPA

SEQ ID NO: 320799 - protein, 65 aa, Zea mays
  Clone ID: MRT4577_55632C.1.pep
LAYSARPHRGVAIEWGGYSTITPVDISSYTKHVCLQRALLSPTPLTHAYYYWDPERYRLPVVNIS

SEQ ID NO: 320800 - protein, 218 aa, Zea mays
  unsure (1)..(218): unsure at all Xaa locations
  Clone ID: MRT4577_55633C.1.pep
MARDSSPPESPLSSTYESEIDEDGGHDYDESTLRPSKRQRPEAGSTTSSAVVPDAEPEAVPEPDPLEGMSDVSSDTSGDIPSSPINARLDEEDFQEQVTKCDWDGCPAGDQGNMDKLVEHIHNSHIENRQKKYTCEWMSCSRKGLPHASGYALKAHMRSHTREKPFYWXLPECDRSFTRSDALAKHMRTRHETEALXPSXPXPKSMQSGLRAGEPDQD

SEQ ID NO: 320801 - protein, 49 aa, Zea mays
  Clone ID: MRT4577_55634C.1.pep
IRCDQFLAVLDFGLANAMPDSHTHFTSSNFACTLCYIAPEYYQTVNFTA

SEQ ID NO: 320802 - protein, 44 aa, Zea mays
  Clone ID: MRT4577_55635C.1.pep
HAHQVVCSVLQELLAVLARAFGHAVAGIGLADRLGLPRVRLRVL

SEQ ID NO: 320803 - protein, 87 aa, Zea mays
  Clone ID: MRT4577_55636C.1.pep
NLLLERNCTSFPIIRILRLVHALKQNNADSISYLPIDEKDQKSYCFTRVFPKHKYYNLKSFQSRKHIFFITWNSINYAPTFKKADIW

SEQ ID NO: 320804 - protein, 72 aa, Zea mays
  Clone ID: MRT4577_55637C.1.pep
RVTKGDDTLSKLERLPTRREGIFVMPIERINILSTYYYDIDLESCEAEKSILRRRLSESASEVERWRRKCFA

SEQ ID NO: 320805 - protein, 229 aa, Zea mays
  Clone ID: MRT4577_55638C.1.pep
MAVLLRRAAALLVVAAVCADGASTFYSSDPNLGSARVVFQTNFGDIEFGFFPHVAPKTVEHIFKLVRLGCYNTNHFFRVDKGFVAQVADVMSGRTAPMNEEQKKEAEKTIVGEFSSVKHVRGILSMGRHSDPDSAGSSFSILLGNSPHLDGQYAVFGRVTKGDDTLTKLERLPTRREGIFVMPIERINILSTYYYDIDLESCEAEKSILRRRLSESASEVERWRRKCFA

SEQ ID NO: 320806 - protein, 54 aa, Zea mays
  Clone ID: MRT4577_55639C.1.pep
SLVLRSNASHSSYIRRSTSLKQTRYSKPLKGLLRNRIRISRTLVRALQQGCRAS

SEQ ID NO: 320807 - protein, 187 aa, Zea mays
  Clone ID: MRT4577_5563C.1.pep
MNRKPGDWDCRACQHLNFSRRDICQRCSEPRGVADRGGGGGGGDYASFGGRGGSSFGGGFGAAGSDVRPGDWYCSCGAHNFASRSSCFKCSAYKEEAAVNSGAGGFDSDMSRSRGYGFGSGAAGAGAGAARTTNRPGWKSGDWICTRCVLLNLNPFHLSDYMFHGRAAWVFTVSMNPCACFVVVHKV

SEQ ID NO: 320808 - protein, 66 aa, Zea mays
  Clone ID: MRT4577_55640C.1.pep
RPPHHADNTRPLCGPPTSRATLCMCVGSRQALHIFLSYRWPMLILTRVQGLRLHHHVFLSRLLTTN

SEQ ID NO: 320809 - protein, 100 aa, Zea mays
  Clone ID: MRT4577_55641C.1.pep
IVGDVGNHPDNSYNQSALPIVDPLMVKNVQGQILREAGPIKGITKSAFSRIFLSIVKFTGGAPVRPWKCEAVSGGALDVHPSPCTDLTSTFGTSFCTNSL

SEQ ID NO: 320810 - protein, 62 aa, Zea mays
  Clone ID: MRT4577_55642C.1.pep
IIHSSAGNGIHHAAIKRRSSTSTEIHHTSPCVQLKPVTVATYAYIAALIFPRQPSVLAGGDD

SEQ ID NO: 320811 - protein, 171 aa, Zea mays
  unsure (1)..(171): unsure at all Xaa locations
  Clone ID: MRT4577_55643C.1.pep
GGNGKGAQXPTPFSRGVGDLLNQGGPQVFPPEKGPLGPPLLFWVGPPLGPPGFSLFGFGLEIWGEWEGKKIFPRDTLFPCFPPTWVPSWDPQERPPSGVKFPLGGGGPGEKKKKKKKKKKKKKKKKKKKKKKGGGGCTRQWCPHTDMCFLEIINILIEIYLDKKKKKKXKA

SEQ ID NO: 320812 - protein, 55 aa, Zea mays
  Clone ID: MRT4577_55644C.1.pep
FWDLNLCGLWENLLAGVFEACQMGIGWLFPGKGKLVAGPPFGKGPLLLNWPTLTN

SEQ ID NO: 320813 - protein, 90 aa, Zea mays
  Clone ID: MRT4577_55645C.1.pep
WVFVYFNWVFSHFPIVSDGKDPTYRKESCNKLRAKNHAYEWRHTPPKQRNRKAILACIKAVFTVEAGKNFLLGARKKKIPTPHSKAGGLE

SEQ ID NO: 320814 - protein, 84 aa, Zea mays
  Clone ID: MRT4577_55646C.1.pep
LSTLPSHPGVALFHRLGQGRQNLRDAVVTVGSLLFTNSVARTIMRGRTWCLLTCRSASTEAFYSVANAMCSLTPMRTVRSASRT

SEQ ID NO: 320815 - protein, 57 aa, Zea mays
  Clone ID: MRT4577_55647C.1.pep
IGWPKIQTSSGLGVKQFNPSQGNNGANFTSKNRGNPGEIFFTKTPMGPESPFQRNLV

SEQ ID NO: 320816 - protein, 109 aa, Zea mays
  Clone ID: MRT4577_55648C.1.pep
MICAISGEVPDEPVVSKRSGLLFERRLIERYIEDHGKCPVTKEELSMDDIVLVKTNKVVRPRPLQAASIPGLLGIFQNEWDALMLSNFALEQQLHTARQELSHALYQHD

SEQ ID NO: 320817 - protein, 125 aa, Zea mays
  Clone ID: MRT4577_55649C.1.pep
APKFLSLVTRRMQAFKTYWTNILLLISLILRGTFSHDSNSSTFGDCCPSVLILMPDFSTYRCAPVLYLNQMPLQNSSSSSSHPLYLQNEMLTPGYPLAAVKNQSPVVHIPTKRNPVLMQEGQGIM

SEQ ID NO: 320818 - protein, 73 aa, Zea mays
  Clone ID: MRT4577_5564C.1.pep
SSLAKGDAPGPFVLSSYRLPLSSPEIPATEGLSRAEVSSAPGSARSRSLRLTSLLSSTSTPCPYASSSSVPFA

SEQ ID NO: 320819 - protein, 61 aa, Zea mays
  Clone ID: MRT4577_55650C.1.pep
KFFPSMDRLKRIGVIYVPGSPAGNLFYSKGSCFLRFLLNWALCFEVFIYRRFFFFRRCFPG

SEQ ID NO: 320820 - protein, 108 aa, Zea mays
  Clone ID: MRT4577_55651C.1.pep
HEFLAAYLLLVAGGNTTPSNEDIKKLLASVGAEADAARLDSLLKALEGKTVAEVIAEGSTKLASVSAGPVAAAGAAATGAAAQDAPAAEEKAEEKEESDDDMGFGLFD

SEQ ID NO: 320821 - protein, 148 aa, Zea mays
  Clone ID: MRT4577_55652C.1.pep
MGGCCCCCCSARASDSDRAPVRIYHRQNPEEHAPLSSAFDGPSPTSAIVAVDTNLDTSSLDTYRAPPAPLPYDVCFTVSENPDVEKSGIKIKTDGQQAPKVDEFESCEKGAPEDKADEEDVCPICLEGLFLLTTGSSTLYIIIPWLEL

SEQ ID NO: 320822 - protein, 166 aa, Zea mays
  unsure (1)..(166): unsure at all Xaa locations
  Clone ID: MRT4577_55653C.1.pep
MPPKFDPNQEINIIVRAVGGEMPATAALAPKVGPLGLNAKKIGEDIQKATKDWKGLKVTCKLTVKNRVATVLVTPSVASRVIKALKEAPRDRKKVKNIKHNGNVTFAEILKIGKEAQAKSMAKSMKGCVLEVXGXTAVSVGCTVDGEHPTKIQEAVAAGKLKVPEK

SEQ ID NO: 320823 - protein, 60 aa, Zea mays
  Clone ID: MRT4577_55654C.1.pep
GFFRLRCHGCLGGAFLFGALPRSVPCSPSPADCEVLLLNKRAKGHGSVILACVVVVRPKF

SEQ ID NO: 320824 - protein, 71 aa, Zea mays
  Clone ID: MRT4577_55655C.1.pep
LHCIACMAPWMRRPQDIRCELGAICLICSFVLSFFLLLNQSTTSFYHYLLLLATTCMHLLLLLASCYYVYY

SEQ ID NO: 320825 - protein, 414 aa, Zea mays
  Clone ID: MRT4577_55656C.1.pep
MVTGKKRTFVLYPSLGVGHLIPMVELAKHLLRHGHGALIAVVNPPDTDAVSAAAVERLAAANPAIAFRLLPVPAYFFFASAAGDLAVFLNLPYLYPTLPSFRDMGEAPVRCPGMPPVRAMDMPLTVQDRDSDRTKVRMYQFRRIPEGKGVLVNSFAWLEPRALRALGDGVCVPGRPTPRVFCVGPLVNDGSSTAGGGGRHECLAWLDAQPKRSVVFLCFGSKGAFPAAQLQEIAHGLESSGHRFLWAVRSPPEEPDTDLGKLLPEGFLDRNRDRGMVVKDWVPQAEVVRHEAVGAFVTHCGWNSTLEAIMSGLPMICWPLYAEQGLNKVFMVEEWRIGVELRGYEKFVKAEELEAKVRLVMEAEEGRILRERLAVAREKALGATKEGGSSEVAFTEFFGDLDKTRSPSVNGECD

SEQ ID NO: 320826 - protein, 223 aa, Zea mays
  Clone ID: MRT4577_55657C.1.pep
MELGDQDQLDGWPFDEHGRPQTAVLWFQLGCADDHDADFSSVLECTAYWAGGCGVAWPREGGARRSRARGLAVHERMSGAAAADSDRLPFMSVCPDGAHMKHLRHFRRPEAAAYCRATICCHFGRHGQHQNPSTVAVLPSAWRAGAATVSPDFSAIWPALYTQPANQPCGAYTNVSEPRDCGREVFRRSDLRRGWVRVLPCLACVLGRSRRLCRGSSDRVGQF

SEQ ID NO: 320827 - protein, 473 aa, Zea mays
  Clone ID: MRT4577_55658C.1.pep
MVTGKKRTFVLYPSLGVGHLTPMVELAKHLLRHGHGALIAVVNPPDTDAVSAAAVERLAAVNPAIAFRLLPVPASPDAGADWVKRDLDTLRLANPVLRDFLLRSQPTAAADALILDMFCVDALDVAAELGVPAYFFFASAAGDLAMFLNLPYLYPTLPSFRDMGEAPVRCPGMPPVRAMDMPLTVQDRDSDRTKVRMYQFRRIPEGRGVLVNSFAWLEPRALRALGDGVCVPGRPTPRVFCVGPLVNDGSSTAGGGGRHECLAWLDAQPKRSVVFLCFGSKGSFPAAQLEEIAHGLESSGHRFLWAVRSPPEEPDTDLGKLLPEGFLDRNRDRGMVVKDWVPQAEVVRHEAVRAFVTHCGWNSTLEAIMSGLPMICWPLYAEQGLNKVFMVEEWRIGVELRGYEKFVKAEELEAKVRLVMEAEEGRILRERLAVAREKALGATKEGGSSEVAFAEFFGDLDKSSSPSVNGECD

SEQ ID NO: 320828 - protein, 66 aa, Zea mays
  Clone ID: MRT4577_55659C.1.pep
SFNTLGLGFGLGEVQIFFLKGSPWGRSFYFVGSGLGVPTSLPPQRLFLFGGVRPLSLFLVFSGVPF

SEQ ID NO: 320829 - protein, 33 aa, Zea mays
  Clone ID: MRT4577_5565C.1.pep
VASVEVWMGVRIRHAGLNVAIEGGLNLRWRLGD

SEQ ID NO: 320830 - protein, 103 aa, Zea mays
  Clone ID: MRT4577_55660C.1.pep
IFKRRKAQRDKDAWLHASACAAVSHASACAAASGCVWDWEAARVGDCNRRGSASRSSGPFMQGRWRLEEACRERRGGSRERRGGSLGSAAAAQRDRPGGTRVH

SEQ ID NO: 320831 - protein, 54 aa, Zea mays
  Clone ID: MRT4577_55661C.1.pep
SAPSKRPRSDGSIGLTLSQAPTTGLCRCLNSFIDRSRSFAALLTEQQVYREEAG

SEQ ID NO: 320832 - protein, 74 aa, Zea mays
  Clone ID: MRT4577_55662C.1.pep
QGSGHDGPYGFDSLRLGTNVLVSPGVNWLLLGSPVSKDLPLTFYPVDRVPLPYDLFGSYQPTPVPAPVSATAKS

SEQ ID NO: 320833 - protein, 123 aa, Zea mays
  unsure (1)..(123): unsure at all Xaa locations
  Clone ID: MRT4577_55663C.1.pep
YEAEEYWHDARKDPATHSIDGGISLNDIAEFDGGATTEERSSLEKHRSDEGVKIAVSQNFGSMNEKVAIAPTSSFENQEGLQQPREVLPNAKLSKNNDQENSDVHDIQVVATXCDSKGHKFGS

SEQ ID NO: 320834 - protein, 93 aa, Zea mays
  Clone ID: MRT4577_55664C.1.pep
IEREDHLFAAFQYFDKDGSGYITADELQQACDEFGIEDIRLEDMIGEVDQDNDGRIDYNEFVAMMQKPTAGYGKKGHRYNLSIGFRDALKANS

SEQ ID NO: 320835 - protein, 120 aa, Zea mays
  Clone ID: MRT4577_55665C.1.pep
MEISFEAWEGVQRHGQDLADRLAQGFTGLLQAPPQFPWPPAATPHKRMPFDIDLPVVPFGAGVPKKDLPFPAAAAAVSSVIDIGGRLGQAGAELGASVGGDVQHAVRHRPVPFRNAQIRS

SEQ ID NO: 320836 - protein, 61 aa, Zea mays
  unsure (1)..(61): unsure at all Xaa locations
  Clone ID: MRT4577_55666C.1.pep
NKNPSRTKFHSWAIRSYRCTCVSSLSLSCIPLFETKIRYGIYYRHEVLSSFIFVCVXXKGN

SEQ ID NO: 320837 - protein, 55 aa, Zea mays
  unsure (1)..(55): unsure at all Xaa locations
  Clone ID: MRT4577_55667C.1.pep
VKVIKTVRLSMFSMFGFLVRAIVTRQGPLXNLADLIAGAVISSAWAYATNLVPGK

SEQ ID NO: 320838 - protein, 92 aa, Zea mays
  Clone ID: MRT4577_55668C.1.pep
VQVQVQALEAELRRAGQENRLLIDMLRAVVAKYAELQGQVNGMAAPVSTAGNIADAADAYRQFSASIDDSGCAYGSSYMKRTIRNDCLNTEP

SEQ ID NO: 320839 - protein, 105 aa, Zea mays
  unsure (1)..(105): unsure at all Xaa locations
  Clone ID: MRT4577_55669C.1.pep
AVRVVSAEFLPTVVAXKYGYPNFPRIGGPSTFVIYGYKACKNMGTFSALFRMDMFIWPKCHGLFLSVALPNIFQGPAFINVAQGFPGFIVLNLPGGGFSFIEKEV

SEQ ID NO: 320840 - protein, 182 aa, Zea mays
  Clone ID: MRT4577_5566C.1.pep
MNRKPGDWDCRACQHLNFSRRDICQRCSEPRGVADRGGGGGGGGDYASFGGRGGSSFGGGFGAAGSDVRPGDWYCSCGAHNFASRSSCFKCSAYKEEAAVNSGAGGFDGDMSRSRGYGFGSGAAGAGAGAARTTNRPGWKSGDWICTRSGCNEHNFASRMECFRCNAPRDSGSAAMTYENYL

SEQ ID NO: 320841 - protein, 115 aa, Zea mays
  Clone ID: MRT4577_55670C.1.pep
GKYTEPRVSIARFYVPHETDVPSVKFSPWQYGGSFSQCFSVAKTPHAYGLCVKHFQAWLCWFVVPSGVSLPLWFCGLPPFFPLMLQFFRKWCSPCFVGIPPPPPKFFLTVVLLYL

SEQ ID NO: 320842 - protein, 339 aa, Zea mays
  Clone ID: MRT4577_55671C.1.pep
GTLEVRRGPGAGRTNPSFDRPTAQQTMAGVSASIPCVVLNTGHAMPVLGFGTGSSSTPEDLPATILHAVRLGYRHIDTASMYGTEGAVGAAVSDAVAAGAVTSRADLFITSKLVMKDAHPDRVLPAIRESLARLGLDYLDLFLVHWPVAADENNKPVPFDMEGVWHAMEECHRIGLARSVGVSNFSAAKMSRLLAFAAVPPAVNQVEVNVGWRQEKVREACAKNGVVVTAFSPLGAIGTAWGSNAVMESGALEDIAARRGKTIAQVALRWLHEQGVCFVARSFNKERLKQNMELFDWELSVDDKEKIMGIPQRRACRAEFFLSPDGPYKTLEELWDGEI

SEQ ID NO: 320843 - protein, 46 aa, Zea mays
  Clone ID: MRT4577_55672C.1.pep
FCYSSFRTLGRATLQGGEGHHSLQSHYYINFHRLCNAYSLPTSLPS

SEQ ID NO: 320844 - protein, 36 aa, Zea mays
  Clone ID: MRT4577_55673C.1.pep
SIWVVHCRKDCPDSCSRIKPQHGQGPTQVLGYVSNY

SEQ ID NO: 320845 - protein, 57 aa, Zea mays
  Clone ID: MRT4577_55674C.1.pep
PGQLVRHIFLDPILGGTGADAIAHGHHVMSRTAPSGQLVITKEDKRWSWRLVEAMEE

SEQ ID NO: 320846 - protein, 37 aa, Zea mays
  Clone ID: MRT4577_55675C.1.pep
RVASCLVRVSVPYSKTLCITSSTSSHQSSKYVSWTEY

SEQ ID NO: 320847 - protein, 133 aa, Zea mays
  unsure (1)..(133): unsure at all Xaa locations
  Clone ID: MRT4577_55676C.1.pep
MFSVKVLASGTWADVTRVLMCLYEKEAHXIMIRGDAYLGTKRMPQYLKLQIEGEALTYYDEILTISDSTGILRHMSHTYANQGNLYLIGTGALDRAYIEQXLQTEAHSFYAPNADMVYRLDFLPATLPMQNDN

SEQ ID NO: 320848 - protein, 92 aa, Zea mays
  Clone ID: MRT4577_55677C.1.pep
SLPTYMRHTRSPSIRKRANNDNVIHTMGARHLLIDSMQLATDPTLCTGIHQNMLHDNRRHSCYTSDNVSGMILTTTESNARSITMNRSSIER

SEQ ID NO: 320849 - protein, 111 aa, Zea mays
  Clone ID: MRT4577_55678C.1.pep
CFVSSHVPNVTAVIRCYGCCRNKGDNGKMLVAYCLLDPVWIDLLFFFFIDFLLCCLCYFLIYFYFIFCFFIFCFLFFSFFFLFFLFNNQNSYYDAIYYWSIPHNDNVCRLT

SEQ ID NO: 320850 - protein, 219 aa, Zea mays
  unsure (1)..(219): unsure at all Xaa locations
  Clone ID: MRT4577_55679C.1.pep
MVVKVGINGFGRIGRIVFRNAIEHNDVDIVAVNDPFIEPHYAAYMLKYDSTHGQFKGDIKVDGNNLTVNGKTIRFHMEKDPANIPWSETGAYYVVESTGVFTTTEKAKAHLKGGAKKVVISAPSADAPMFVMGVNHETYKPDIEVLSNASCTTNCLAPLAKVIHDKYTIIEGLMTTIHSYTATQKVVDGPSAKTXRVGRTAAQNIIPSSTGAAKAXXQV

SEQ ID NO: 320851 - protein, 56 aa, Zea mays
  Clone ID: MRT4577_5567C.1.pep
RNVSQIVSPNRPCMLRPAERWRAGGTPTMMHQHYHSQCVVVRHTTSDLVDVQITRY

SEQ ID NO: 320852 - protein, 51 aa, Zea mays
  Clone ID: MRT4577_55680C.1.pep
GYMTTTTARECREKTRHAVHVLKVPTNTKTTQWFHCFSLWTNMDDTQIQNV

SEQ ID NO: 320853 - protein, 146 aa, Zea mays
  Clone ID: MRT4577_55681C.1.pep
ASRRLRRALSADKAWLAQCRRLVPYQADLLAWHAATAGYCLAICRLLHSDAPLLGLWAHHNPELGNLIAAVPGFLSVVAGRAIPQELSPRLRWAPVFELLADTHCHPALLSPSPSHPPIAKPAQPSCNPTPTSSFFKRTLPGIRLL

SEQ ID NO: 320854 - protein, 60 aa, Zea mays
  Clone ID: MRT4577_55682C.1.pep
SSKGVVATRPPQEAFEFIRSCLLRLCGGGLFAFSLDLAFDVLGGFVLRAHVVRAGVCSWC

SEQ ID NO: 320855 - protein, 50 aa, Zea mays
  Clone ID: MRT4577_55683C.1.pep
QGVRNLALLPSFCSRFSSSFKTWCILTRNQAIFPSRKELDHRKSSFARFF

SEQ ID NO: 320856 - protein, 70 aa, Zea mays
  Clone ID: MRT4577_55684C.1.pep
GRLTIKVMFNLYARKPSRSRCRALSAVCVCACPCPHPGHSSWNKNDRTESLYFGEWALCRGLRIIWTLSS

SEQ ID NO: 320857 - protein, 435 aa, Zea mays
  Clone ID: MRT4577_55685C.1.pep
MPPKKASTTGAATLQPLDPNQDVISLREARSQKRKAISPTPPEDDLDQEIQKMEMLHQQVQRKKEKMARLADLQKQIDEASEELRHLTQDDQNQRPPRRELHQEGFYNEDDWYEDFHHGNFAFDDTSPLSTELQATPWPQSYKPPQLPMYDDHSDPKQFLMSYEATISSYGGNTAVMAKSFVMVVRSVAQTWYSSLRPGTITSWQKLKDMLITSFQVPNEIVIEAMIKGLRPGPSAQYFARKPPQTLEKLLQKMDEYIRADNDFRQRREEALRFSEMTRGFGGRFYPRHVRSIHNSTQNDDKGSQQQRSQYSSQASGQQQALGQQQSSFRPPAPRGRGARGFGGRFGDQPRKIYCLFCGEGKGHTTRMCHVTIQKQKELAEAAAQQSQLKQVMHTASYHSPYIPEYVGNHPAASVASASQPQASWQQLPPPPPIQ

SEQ ID NO: 320858 - protein, 461 aa, Zea mays
  Clone ID: MRT4577_55686C.1.pep
MPPKKASTTGAATLQPLDPNQDVISLREARSQKRKAISPTPPEDDLDQEIQKMEMLHQQVQRKKEKMARLADLQKQIDEASEELRHLTQDDQNQRPPRRELHQEGFYNEDDWYEDFHHGNFAFDDTSPLSTELQATPWPQSYKPPQLPMYDDHSDPKQFLMSYEATISSYGGNTAVMAKSFVMVVRSVAQTWYSSLRPGTITSWQKLKDMLITSFQGFQTKPVTAQALFQCTQDRQEAQAPTVPNEIVIEAMIKGLRPGPSAQYFARKPPQTLEKLLQKMDEYIRADNDFRQRREEALRFSEMTRGFGGRFYPRHVRSIHNSTQNDDKGSQQQRSQYSSQASGQQQALGQQQSSFRPPAPRGRGARGFGGRFGDQPRKIYCLFCGEGKGHTTRMCHVTIQKQKELAEAAAQQSQLKQVMHTASYHSPYIPEYVGNHPAASVASASQPQASWQQLPPPPPIQ

SEQ ID NO: 320859 - protein, 143 aa, Zea mays
  Clone ID: MRT4577_55687C.1.pep
GREPAAQTPFIPWRTPTPRPCARPLLVPAPGYKTSPCRAPLGRRPTATYPRHGHRATAATMGENGISGACEYFNSTLLCEWVWSGRFAGELLTRLRLDWAYGTTESRWICRWCLSRLAEPPHVMGCRRCYTIHGYEVYPVHDH

SEQ ID NO: 320860 - protein, 46 aa, Zea mays
  Clone ID: MRT4577_55688C.1.pep
KLSHGRGAHTHTHTPCNLHCAFRRFTCSAVGCYTCSARSARCGEMK

SEQ ID NO: 320861 - protein, 113 aa, Zea mays
  Clone ID: MRT4577_55689C.1.pep
VPSAPFYQLHPYLTYKPTTRSKQAPQTDHASPNDQARPNNQSQNLTLPPHTPFLPPFAIPTTSIQGKSNTKGKPKRNRDPNTHSTPERPPSPSKSRTLLLTQNRPTATRRRTS

SEQ ID NO: 320862 - protein, 83 aa, Zea mays
  Clone ID: MRT4577_5568C.1.pep
KNGNDDRHRRGRVEDARMSSTRQLPGDRPPRCAPWIRLLHALLHHGFLLRLRARLGDSILHHTRKSQLEWRRLQTLAPYTMLP

SEQ ID NO: 320863 - protein, 71 aa, Zea mays
  unsure (1)..(71): unsure at all Xaa locations
  Clone ID: MRT4577_55690C.1.pep
GEKNPIKKRVFPILKQAKLPIAPPKTNPVKKFXNFFAVNKKGANGLLKPPPLKGPLGRCVFSGVYSRNALH

SEQ ID NO: 320864 - protein, 47 aa, Zea mays
  Clone ID: MRT4577_55691C.1.pep
TLHPMRVRLSGSTHPCGDPDERCRTLSPLFPAAIPAAYNPSRAQAAP

SEQ ID NO: 320865 - protein, 34 aa, Zea mays
  Clone ID: MRT4577_55692C.1.pep
SRYSCISRRRRLLGPALYYRAARLSSFRYQLCCC

SEQ ID NO: 320866 - protein, 77 aa, Zea mays
  Clone ID: MRT4577_55693C.1.pep
ASYTEKREERKLLKLGADPFRLNGPSFGGLGERFKAKRVLLARRGKHKRNGKHTKAQEGLALCSCLLLVTHLPSCPW

SEQ ID NO: 320867 - protein, 41 aa, Zea mays
  Clone ID: MRT4577_55694C.1.pep
KIDEKRLGFVQLKQKPYIKRGTRRQGGKTGYRERGPLGAHS

SEQ ID NO: 320868 - protein, 57 aa, Zea mays
  Clone ID: MRT4577_55695C.1.pep
PSPLMVSVCTFWIPSRFPFIRIAVPATEQTAVLRNADGGRSDPPGSSPLRQSSCPRR

SEQ ID NO: 320869 - protein, 131 aa, Zea mays
  unsure (1)..(131): unsure at all Xaa locations
  Clone ID: MRT4577_55696C.1.pep
TSARPLACSHRPAPRHSSDGSAACSPTPRTPPXHPPDHPNSKPPAPPAXPPWATPPTPPPTGTPAPTLAPRRPPASPTTAPLRRPSXSVPLPRPCSPPLPGVGPALPVPPAPADAPSLRVPPGGAGHLPGP

SEQ ID NO: 320870 - protein, 138 aa, Zea mays
  unsure (1)..(138): unsure at all Xaa locations
  Clone ID: MRT4577_55697C.1.pep
MRVMLVALGLLALAVSATYTHTSGGXGCQPPPTGHLPSPGHLPPAGHLPPLMXFPPPVHLAPPIQVTPSVHAPPPIHMPTTPCQYPTQPTRAKAYPQTHPCPCQQPHTSPCQLNGTCGVVSTPILDQSVQFLRHNCRP

SEQ ID NO: 320871 - protein, 86 aa, Zea mays
  Clone ID: MRT4577_55698C.1.pep
KILRKKYQKNHIKTLKKLNIFNYTKGNAISPKRTPKRPPRKSCRPDYINHERQLHETYSEPSCFSLSSIKLKGGLRITYLPYNKRD

SEQ ID NO: 320872 - protein, 108 aa, Zea mays
  Clone ID: MRT4577_55699C.1.pep
MISFLVLGPPWRGLVSTPSLLEQGPSFAFYVPLVVLISISLVLQIGVGVLLIFLVKYDLNNPDKHAKLDFLNNLATGLVFIIVVVNIFITAFGVQKPLMDMAPQQYDT

SEQ ID NO: 320873 - protein, 143 aa, Zea mays
  Clone ID: MRT4577_5569C.1.pep
MATKIFTLRMRLALTTCVANATIFPKCSHAPIASIVTPYLASTIASICENPPLQPYMLQQAIAARNIPLSPLWFQQSTALSLVQSLVQTIRAQQLQQLVLPMINQLSLANLPPYSKHQQFFPFNQLFTLNPAAYLQDQLLPFT

SEQ ID NO: 320874 - protein, 116 aa, Zea mays
  unsure (1)..(116): unsure at all Xaa locations
  Clone ID: MRT4577_556C.1.pep
GTSRPAGIPSVRRHHIAAHELHVRSKRELYTQPPNSKIAAGATLNPVRSQESEDHPGAWNLESQYEAKLLPGLIYRMKQPKIVLLIFVSGKIVLTRAKVRDETXAFEIIYPVLVKS

SEQ ID NO: 320875 - protein, 66 aa, Zea mays
  Clone ID: MRT4577_55700C.1.pep
LFSEQGLLLHPKVICHRHIGRSSVFGFVTYGSARVVNNALSNLDGIVLHVFLILVLVAMSHPMRHF

SEQ ID NO: 320876 - protein, 63 aa, Zea mays
  unsure (1)..(63): unsure at all Xaa locations
  Clone ID: MRT4577_55701C.1.pep
GTXTGPLHLKGWVGPQKQRPQNPFLLFSAMATNLLQGCMDGFTSSSGFTIFTIMNLLRIIIYY

SEQ ID NO: 320877 - protein, 54 aa, Zea mays
  Clone ID: MRT4577_55702C.1.pep
APNKSSLELHTSGLGPFYNRQMSLRTYPVTTSTNGFAKETCIHTCRLTRLSQKH

SEQ ID NO: 320878 - protein, 65 aa, Zea mays
  unsure (1)..(65): unsure at all Xaa locations
  Clone ID: MRT4577_55703C.1.pep
AWNIDNLQFQLLKPRLRWFRVPVKFTKLLEFIRLMNPARGGLFGFCLSXFVVXWGSXGEIKKVVV

SEQ ID NO: 320879 - protein, 60 aa, Zea mays
  Clone ID: MRT4577_55704C.1.pep
RKRVLINSSYSGLKMLKTFSNLCPQITEIPYHQVKQNFSSLNQKSFPPYIFLALLPTPFP

SEQ ID NO: 320880 - protein, 154 aa, Zea mays
  Clone ID: MRT4577_55705C.1.pep
MEHHIIQQVGEHEREEEEDGMGTEAAFEGVHNHDTFRYKHKKRSKVWEEYKPIFLNGKVQFAECLYCHSRMSCKDSNGTSHLWRHQKICPGKRDVVFRRLKDSYFPCVLVNQSEPVTPGDSVNQIISETLDDISSVIPNRFKSKVVERVFTYLC

SEQ ID NO: 320881 - protein, 70 aa, Zea mays
  Clone ID: MRT4577_55706C.1.pep
FLLLPLVCYHSQILQRTLSIDPVGSLILPHEVRFNPCQTSLGSISSFAGYHLVGKATNPDSYKCPTLIEA

SEQ ID NO: 320882 - protein, 72 aa, Zea mays
  Clone ID: MRT4577_55707C.1.pep
TLFHHITTVLMGDLPQEDDRRIARSRTHQRPPQSLLLHILLLHNSLEGLLQTIFYSLTQECLQSWPERRFGA

SEQ ID NO: 320883 - protein, 92 aa, Zea mays
  Clone ID: MRT4577_55708C.1.pep
QSHYTLTLHENKHKHIHNYCLVITNGFLVGVVPSTFAPGPPAFCLLANCQSAESNPFLCCFIKLGFGRRPNFWKYSACSGVKVERSMEGAAG

SEQ ID NO: 320884 - protein, 65 aa, Zea mays
  Clone ID: MRT4577_55709C.1.pep
LLFESYIRLKTAPVYLCLDQGNVILLAYVDYHQCMVNIYVLFYTRSSLLDKYLSCLATRFGRSMS

SEQ ID NO: 320885 - protein, 51 aa, Zea mays
  Clone ID: MRT4577_5570C.1.pep
NFFQLVWGMLSFQCPAPRSPCYGSSLFINVRLSFSQVLPLASSKRPIVPVF

SEQ ID NO: 320886 - protein, 82 aa, Zea mays
  unsure (1)..(82): unsure at all Xaa locations
  Clone ID: MRT4577_55710C.1.pep
QPIAQLQHLSLAHLNLQTXIASQQQQQFLPSVSQLAEENHGAYLQHALGGYMPCAIGXLSVALEWARLQQFMSALSQLAMGN

SEQ ID NO: 320887 - protein, 46 aa, Zea mays
  Clone ID: MRT4577_55711C.1.pep
NSCRFLILRSRLVGWSVNRISGSDDCCTHIQPSLFSISTYESAHAS

SEQ ID NO: 320888 - protein, 77 aa, Zea mays
  Clone ID: MRT4577_55712C.1.pep
GFAQNILVIQGHPWARLLLVQLLTWRQNSGLNISSTAGMDLTGGYYYSGDNVKFGFPMAVTATLMLRGLVELGRRFG

SEQ ID NO: 320889 - protein, 61 aa, Zea mays
  unsure (1)..(61): unsure at all Xaa locations
  Clone ID: MRT4577_55713C.1.pep
HPHSXDLRGHASKDYIYSFICSPTLRFIRICSFEFGLYGQTTWRKRGPLRLNRGGIVFLQY

SEQ ID NO: 320890 - protein, 50 aa, Zea mays
  Clone ID: MRT4577_55714C.1.pep
QAALSFVLFFFFLFLTDTHSNCYFYGLKNTYLLLNMRTILHIWSGTLKPC

SEQ ID NO: 320891 - protein, 67 aa, Zea mays
  Clone ID: MRT4577_55715C.1.pep
LIPKLIKHQHSIDIILPGCCPSCRRLDNDGALHELDPVAPYERAKRVLFGQLCVLGLQLDLERFFLP

SEQ ID NO: 320892 - protein, 371 aa, Zea mays
  unsure (1)..(371): unsure at all Xaa locations
  Clone ID: MRT4577_55716C.1.pep
LLSSRPASSCHVSQSPISPSLKHKPHPSHPASPRHPWPPPPPSTCARSVPSPSPPRGHAXPPPPRPXPSPLPNRPTPTALPLQRPPPPPPXPCPPPSPSPPVGXPPPGPPPQWSAQGHPPPPPRGYGPPPPQHQHVPPPPPRGYGPPPRGYGPPPPPPPPHGHVPPPPPPRHGHGPPPPGQHVLPPLLPHGHGPPPPGQHMPPPHGHGPPPPGQRVPPPPPPHGHGPPPPGQHLPPPPPPHGHGPPPPHQQAPPPPDPVAGPGELMGLCREGRVKDAVELLSKGARTDLDTFYELAATCSNPKLLEELRKVHDFFLRSPFRGDLRVNNMLLAMYAKCAAMPHARRTFDNMPDRDMDSWHIMIDGYSGNGLG

SEQ ID NO: 320893 - protein, 57 aa, Zea mays
  Clone ID: MRT4577_55717C.1.pep
SRLILSIELGAFFVPFSVFSCPVRLNRCWYRDHIYLAGLTVESLYSGDLNFLAIPIH

SEQ ID NO: 320894 - protein, 107 aa, Zea mays
  unsure (1)..(107): unsure at all Xaa locations
  Clone ID: MRT4577_55718C.1.pep
QAAITLLVSPNLVPSMASICENPIXNPIRXQHAITTGIIXPLSPLRCANNHTSLSTVNSXVHLLAXNMRAQKLQQLELXNLLAYAKXQQAVSFNQLAAIKSASYLPQ

SEQ ID NO: 320895 - protein, 75 aa, Zea mays
  Clone ID: MRT4577_55719C.1.pep
LWRECSRFKSEYVSFRQDIRQVSSLFPQAESQVSILYTSYSAAIGHPRGADSSMHPLICRADGHVSSFLTLLTCS

SEQ ID NO: 320896 - protein, 78 aa, Zea mays
  Clone ID: MRT4577_5571C.1.pep
KFQHSAGPRDRRLRDLCSVLWGVGVVASSEDDSDVGERRTVPDAAAMMPVVTEVLGDYWKTNERAMAGVSLEKGLSLL

SEQ ID NO: 320897 - protein, 135 aa, Zea mays
  Clone ID: MRT4577_55720C.1.pep
PQKGVPQGSPQKTAQKFPVQGFFKVGNFTPLMAPRFPLGGGFKKVPPGGAHALSPPGKKGEAFKAPQGGPQERVQTGQNRGFFSQPPFLGPGPPPKGYFCCPFVGSGTPLTFFFLGLGLVWVSEKIFFKTRPLWV

SEQ ID NO: 320898 - protein, 97 aa, Zea mays
  Clone ID: MRT4577_55721C.1.pep
PVFSTVNTSSTLKVVRRNALKVVSTSGWHGANVWAVLSGACYPRPHLARCQVSLDANLAEWPHGRPRDVGSSRAVQSSSSSSHLAHAQGILHRRRRT

SEQ ID NO: 320899 - protein, 62 aa, Zea mays
  Clone ID: MRT4577_55722C.1.pep
ESLYGACGPMSNPTMDPDELFETVSQALNSSIARAPLSGWGGYVLIVPPPEVRGHVFKTRMG

SEQ ID NO: 320900 - protein, 536 aa, Zea mays
  Clone ID: MRT4577_55723C.1.pep
MVGGFLRRGHSLDRLLSRRRRAVSPSPSFSSSSSTPSSPRGSSVRSGMMAEDDDDAPTTVAAPPLQRRVLSRSHGSRATPGRSQDLPPVPSRTVRDSGPPSDLDLMKDKFAKLLLGEDMSGTGKGVSSALALSNAITNLAASIFGEQRRLEPMSAERRARWNKEIDWLLSVADHIVEFAPSQQVSEDGTNIEVMGTQQRGDLLVNIPALRKLDAMLLEYLDSFGEAQEFWYVAKDADGGEDDDDSTCDKWWIPTVRVPAEGLSDASRKWLQHQKDLVGQVLKAAMAINADVIAEMEIPEEYIESLPKNGRSILGDSMYKIITDDVFDPNELLQSVDLSTEHKIVDLKDRIEASVVIWHRKISNKLSWGPAGVSLEKREEFEERAQTALLILKHRFPGIPQSALDISKIQYNTDVGYAILESYSRTLESLAFAVLSRIEDVLHADAVACDPKRTKSRRRPSLECDAAAEAEAEAETAHHSGSVHWQDHQDAEDDGGEKHPDGNGRKLKKLHRVATKKFLHTQKIDGVAGGLKSFAHR

SEQ ID NO: 320901 - protein, 69 aa, Zea mays
  unsure (1)..(69): unsure at all Xaa locations
  Clone ID: MRT4577_55724C.1.pep
RFLRPTTPVPSARFSLRPSASPVCANAQWCILPYSMLKRRATGGKQKAWRKKHSMSLVAHPANTNFVKX

SEQ ID NO: 320902 - protein, 208 aa, Zea mays
  unsure (1)..(208): unsure at all Xaa locations
  Clone ID: MRT4577_55725C.1.pep
MVVDTVSASTSIIAPHLFDHRSRGAGASHHHLRRTFHVVACRPLPTAFAGRRLVARVTRQPSSRLADWPVRALAMGVTKEVRASPRRXSGDPRGWXDMGDVGVTSPTPSWPPRNRADDPKLHNPLLRLERMGCGWLGVIFEWXEGVIVEDDAELERQAWLTLAQXEEGKSPPPAFVLRRVLGMKNEQAISEVLFVSPFEDMCRDFRCM

SEQ ID NO: 320903 - protein, 76 aa, Zea mays
  Clone ID: MRT4577_55726C.1.pep
QGVAFHSTKSSFQPHRDYLAEWESPSRRERLRYKVELSTSSGLYLAEWESPSCRERLRDAAASPLKQCGPSLHRFR

SEQ ID NO: 320904 - protein, 174 aa, Zea mays
  unsure (1)..(174): unsure at all Xaa locations
  Clone ID: MRT4577_55727C.1.pep
MVVDTVSASTSIIAPHLFDHRSRGAGASHHHLRRTFHVVACRHLPTAFAGRRLVARVTRQPSSRLADWPVRALAMGVTKEVRASPRRXPGDPRGWXDMGDVGVTSPTPSWPPRNRADDPKLHNPLLRLERMGCGWLGVIFEWEGVIVEDDAELESRAWLTLAQEEGXKSPPSAF

SEQ ID NO: 320905 - protein, 258 aa, Zea mays
  unsure (1)..(258): unsure at all Xaa locations
  Clone ID: MRT4577_55728C.1.pep
FWTDKXLHGHCIQELNPAVFASIPRKVTKTILVNDALPNLSWVQDVQGALCFLXQFLDLTEILEGFLLKPNVQDRHVWRYSSSGDYSSKSAYAAMFCGSVFFKQAGRIWKTWAPSKCRFFLWLVAHNKCWTTVRLAKRGLTQSLLCPLCDQHDESINHLLVGCSFARLFWFELFRTFGLQGFIPGHDIEDFDLWWCSNSAWLDGLSKKGFDSLVALGAWMLWKHRNGVVFNGSSPSLVVVVQLAGEEALLWSLAGAKG

SEQ ID NO: 320906 - protein, 147 aa, Zea mays
  Clone ID: MRT4577_55729C.1.pep
MIPSCTTRCSASSAWAARTIASSIADWGSCAGMNIDFYVLKNSMQERNAMDDSGSLEEMSESCRSFFGRLNESLLVWGSKLPVESRACYSKMVEELCALLVDTPSETLNLPMGCLLMMLNAPVPDESRSSYLQDALSVFTEILCSDP

SEQ ID NO: 320907 - protein, 100 aa, Zea mays
  Clone ID: MRT4577_5572C.1.pep
CEIDLDTPLWTSALVSRLPDTGQEHDRPPAPGTPYSRGLQCTIHIQTQSSQSSPLRPNHQTNQTPALQPKMDKMIPSASVRWIPPQWIRNYIKITYCTHG

SEQ ID NO: 320908 - protein, 55 aa, Zea mays
  Clone ID: MRT4577_55730C.1.pep
CPFYQIVQTGSGGCYPRWRAACLAYLGMVTTFSSHGIPYLAINIDSLYILILYCD

SEQ ID NO: 320909 - protein, 74 aa, Zea mays
  Clone ID: MRT4577_55731C.1.pep
RIFVKKKKIKKKKKKKKKKIKKKKKKKKKKKKKKKKKKKKKKKKKKKKKKKKKKKKKRGPPFKKTKFNYPVIPT

SEQ ID NO: 320910 - protein, 57 aa, Zea mays
  Clone ID: MRT4577_55732C.1.pep
QRNCLLVYICIVMNLGFSIFDLIKNSSKFMTIHTHIVCVYIYTRYVPVRCYESYKFE

SEQ ID NO: 320911 - protein, 254 aa, Zea mays
  Clone ID: MRT4577_55733C.1.pep
MQGSARTEQPAAGCSRRTTMGFLLAVAVLLSACARECSGTTDSQDTSVLRALMDQWQNAPPTWGQSDDPCGESPWEGVTCGGDKVISIKLSTMGIQGSLAADIGQLSDLQSMDLSFNNELGGVLTPTIGNLKQLTTLILSGCSFHGTIPDELGSLPKLSYMALNSNQFSGKIPASLGNLSSLYWFDIADNQLSGPLPVSTDGGMGLDKLIKTRHFHFNKNQLSGPIPDALFSPEMALIHLLFDGNRFTGDIPDS

SEQ ID NO: 320912 - protein, 60 aa, Zea mays
  unsure (1)..(60): unsure at all Xaa locations
  Clone ID: MRT4577_55734C.1.pep
GPFRNSLVFPTALGPELQEGXGHFKGLFPFYPVRWLPSPTGRVDVIIRGRGGTRSRGPCR

SEQ ID NO: 320913 - protein, 84 aa, Zea mays
  Clone ID: MRT4577_55735C.1.pep
ATTRTATRPTLFGKAIIIDTGLGDRSESGATSAEKPAPARVLYCGVCGLPGVYCELGPDFQRWKPWLRALAPGVYPDDLVADRS

SEQ ID NO: 320914 - protein, 163 aa, Zea mays
  Clone ID: MRT4577_55736C.1.pep
MSTRRPQFSQQVLIDTTPLPSDIPAVKEVGASSAPLLSASFFIGARCRDYNDDYMQCKNENPGRGEFECLKEGRRVTRCATSVIKDINTHCLAEFRKHWECLDDRNHQLWQCRPAEWKLNKCVFDNMKLEKKVPDQPTNSTPVHLRPVQTFADVRIGPGDGKP

SEQ ID NO: 320915 - protein, 231 aa, Zea mays
  unsure (1)..(231): unsure at all Xaa locations
  Clone ID: MRT4577_55737C.1.pep
MAASTGSTKVDAVVQNIKAETPEKKSGLALYSRFALAGAVCCSVTHGGLTPVDVVKTRIQLDPATYNRGLIGGFRQVVKNEGAGALLTGVGPTFAGYFLQGALKFGGYEFFKQQWIDALGYETASKNRTAVYLASSATAEFFADIALCPLEATRIRLVSEPTYASGLVSGFGKIVKNEGFGALYXAGFGPILFKQIPYTMXKFVVFEKVSEAVFRTFPKKTLXDGMQTVAN

SEQ ID NO: 320916 - protein, 129 aa, Zea mays
  Clone ID: MRT4577_55738C.1.pep
VYVGGLDPNVSEDELRKAFAKYGDLASVKIPFGKQCGFVQFVNRVDAEEALQGLNGSTIGKQAIRLSWGRSPTSKQSRGDYGHRRNGNGMYYGTPFYGGYGYASPVAHPNMYAAAYGAYPYYGNQQLVS

SEQ ID NO: 320917 - protein, 88 aa, Zea mays
  Clone ID: MRT4577_55739C.1.pep
MAATASTADASAPEGEGAVDFKDLHQQSKALDKLTDHVEDRQLDFIPVQYAMAALASSKEADWNSIRLMDKELASVKINPADVEIISS

SEQ ID NO: 320918 - protein, 44 aa, Zea mays
  Clone ID: MRT4577_5573C.1.pep
LHQLHSPLQQNQQFQSYISLLPLQSLLQATLHSLQYHQTHPHLL

SEQ ID NO: 320919 - protein, 79 aa, Zea mays
  Clone ID: MRT4577_55740C.1.pep
RSNLLFAESPRTPTRSGEDWRSAFDSASNGPVAGSTNSQSRSKSADGRSRRYENGDVSSGANSGSRRTPNRLPPAPPKY

SEQ ID NO: 320920 - protein, 127 aa, Zea mays
  unsure (1)..(127): unsure at all Xaa locations
  Clone ID: MRT4577_55741C.1.pep
ARAVAGAHRLCSGLGPVGTRRLSSSTISPARHRRPRPMLTRPTTTTSNAPRXLLSWAAAAPXEASGTARDSATHARSSKHASTAARDHRLLMPGPARVAAVRARRPAGKLNEQAGARGYGGDVWIEL

SEQ ID NO: 320921 - protein, 74 aa, Zea mays
  Clone ID: MRT4577_55742C.1.pep
SYPKLGKGLVFFGFNFKAKPENPEPIKKHNLFTLDQKLGNASKLVNQGARGGRLAKVDMGNNHKGEMGLFFTHD

SEQ ID NO: 320922 - protein, 42 aa, Zea mays
  Clone ID: MRT4577_55743C.1.pep
YVVVNPRKLPHYFHVWDDQKYTHGHNSVCEVLINQRDPPSCG

SEQ ID NO: 320923 - protein, 99 aa, Zea mays
  Clone ID: MRT4577_55744C.1.pep
IYLLHSLSVRRLFFDHLFFSFNELLLSNFYLLGTRILNDLLVWINLAEPSDYSGYNHNKIGWTKPSLGQESRLLGRGWRGDRRLYALQSRASGASKGTS

SEQ ID NO: 320924 - protein, 144 aa, Zea mays
  unsure (1)..(144): unsure at all Xaa locations
  Clone ID: MRT4577_55745C.1.pep
FXXXXXXXXXXXXXXXQCRRRHQQQQQEQVMAMAPAAATRARAIGGSGPSHFISTSSFLGPPPNPIRLPRRAGANRAVLLGAGRRDAWGADGGSSPSSEGGRLVDEDMATLRRRIREARAESSEEDGILDADDAGIPLPPTGWT

SEQ ID NO: 320925 - protein, 56 aa, Zea mays
  unsure (1)..(56): unsure at all Xaa locations
  Clone ID: MRT4577_55746C.1.pep
LKSSYSSSVTSSAISEERGALERTXTLERGPXSSRVGGVTTXRLPWGYTRPERAPG

SEQ ID NO: 320926 - protein, 56 aa, Zea mays
  Clone ID: MRT4577_55747C.1.pep
NSGRDQLFTGDRIFAMYLCSIGHTDYLLHCVNICSCRGHLLVSFYPYQCNSRAYVV

SEQ ID NO: 320927 - protein, 78 aa, Zea mays
  unsure (1)..(78): unsure at all Xaa locations
  Clone ID: MRT4577_55748C.1.pep
MEYGQXGQRGHGATGHVDQYGNPVGGVEHGTGGMRHGTGTTAAWPAGEHGALHGGRQSSCRESTDADLHRRQSVSCGD

SEQ ID NO: 320928 - protein, 38 aa, Zea mays
  Clone ID: MRT4577_55749C.1.pep
SCIRCGIRPLSPLCTSPNPMRVLPGVSSMVCHLLSFFL

SEQ ID NO: 320929 - protein, 70 aa, Zea mays
  unsure (1)..(70): unsure at all Xaa locations
  Clone ID: MRT4577_5574C.1.pep
HKGYTTSVVSLLPINNGISNGQFGRNYVDILLTEGGSLTICLMPKILGVTGLRHQFSCLXLPEIDRDDTD

SEQ ID NO: 320930 - protein, 81 aa, Zea mays
  Clone ID: MRT4577_55750C.1.pep
PTGGDYCLYCLGSNVPSKFFVPATVFTVFPVRASTWTSLVSVDPARFPLLPVAWNLIVFLFPGILIDLPHSVGAFEGFYLS

SEQ ID NO: 320931 - protein, 1135 aa, Zea mays
  Clone ID: MRT4577_55751C.1.pep
MLGTDFNDFIYLPSVGAAGGILVAWRRHLGFTGQKRLDNYSVSVQFCNSRGNEWWLTCVYGPQGGNEKILFLQEIREIRAECLGPWMLAGDFNLIYKDSDRNNSNYDRAMMGRFRRLIEDMTLKEIPLHGRQYTWSNQRNVPVLVKLDRVFCSVDWEFLFPNVLLQSTASQDSDHCPLILGLRDNKSGKRRFHFESFWTKLEGFQDIVLATWNSIESATCPFKSLEMKLQGVAKSLQAWSEKQVGHVRSQLALAKEILHMLEIAQDGRVLSPAERWLKFRLKKQALLLSSCKRSIARLRARISWLKDGDANTKLFHLHARHRKRKNFVACLVEGEQILTSHEEKAECVDHFYTMLLGNSTDRERAIELEALGMPNFDLTVLEAPISEQEVWDAIKCLPSDKAPGPDGFTGRFYKVCWTIIKADIMAAISAVWGRKFANFGRLNTAYITLIPKKDGADNIKDFRPISLVHSFAKLVTKILANRLASKLNEMVSPNQSAFIKGRFIQDNLMLVQQTSRMLHQQNKASLLLKLDITKAFDSVSWPFLIEVMKKLGFGQIWRDLICGLLDTSSTRILLNGFPGRHIKHRRGLRQGDPLSPMLFILVMDVLGYMFSKAENDGLLQQLSSSKKLHRVSMYADDVVLFLCPTPTDIDLTLSILHLFGDASGLHNNVQKSNVYPIRCSEEVLLEVQSLLPCEISTFPCRYLGLPLSLHKLTRQQFQPFVDKIADQLPNWKADLMTRAGRRVQVQHVLTSMIVYLAMAVDIPQWGLDAIDKIRRGFLWRGRKEAKGGHCLVAWGKVCRPLKLGGLGISSFPELCWALRLRWLWLQKTDHSRPWSGLQIQIPKKARAFFSEVVTTEVGNGINTKFWKDKWLNGKRIADLFPRLIGAIPKRLINCRTVQEAIVSAKWISDIRGALSVGVLTDYIQLWELISGIELQPEVEDRHIFSIAPNGVYSAKSAYEGLFLGSVSFGHYKRIWKSWALPKCRFFLWLVAHKRCWTADRLAKRGLNHPDKCLLCDQEEETIDHLLVQCSFSREFWYLLLRKFGLHSLAPQPTANSFLDWWEVVEGAVIGLTKKGLNSLIILGAWTLWNHRNNCIFDGCNPSLSLSLRAADEERRKWEVAGAKGLVHLAAPVIEA

SEQ ID NO: 320932 - protein, 104 aa, Zea mays
  Clone ID: MRT4577_55752C.1.pep
IYLSGNSLTGNIPGWLLRRNKIADISFNNFTMGSSGPSQCLQGSVNLVESYSAEVNRLNSIHPCLKRNFPCVASNGQYHSSLHINCGDKEATINGTTYEADTTP

SEQ ID NO: 320933 - protein, 69 aa, Zea mays
  unsure (1)..(69): unsure at all Xaa locations
  Clone ID: MRT4577_55753C.1.pep
RDGTEYSRIQLVVQYFQSIEGFTQPEIIRXQPGAQISVLTRLMGFIGLASTPDPFNAVIAYKNFKPIYE

SEQ ID NO: 320934 - protein, 116 aa, Zea mays
  Clone ID: MRT4577_55754C.1.pep
GRKKARCLVLTGAGPNFHKRGGEIRQKGGVPKGGAYFRGKSPKEGITLAGFREGSLKKTGENFLFLDDNAGLGLGKHGKEGPIFPLLGPGGHFPNAPREQTQGSAKRKIFLNTMGA

SEQ ID NO: 320935 - protein, 73 aa, Zea mays
  Clone ID: MRT4577_55755C.1.pep
ICSRLYGAPKFIFGTSEYTTSINIWSAGCVPVELLLGQPLFPGESAVDQLVEIIKVVGTPTREEIRCMNLNSV

SEQ ID NO: 320936 - protein, 131 aa, Zea mays
  unsure (1)..(131): unsure at all Xaa locations
  Clone ID: MRT4577_55756C.1.pep
TTATDGKDRRQNPGKPEQFRNNEEFRGLXLNQQSSPGTRXWHFLGTLASLACAVLAAATGRAAVLLVXPFSGYGMAWYSHFFVEGNRPATFGHPVWSFLCDLRMFLLILTGRIDAELARLRVRPAASAQHD

SEQ ID NO: 320937 - protein, 64 aa, Zea mays
  Clone ID: MRT4577_55757C.1.pep
GEYSTLKVPELKKLLAEKSLPQTGNKADLIARLQENDKQSETEAKPAQKKEDESSYMDEEVASP

SEQ ID NO: 320938 - protein, 58 aa, Zea mays
  Clone ID: MRT4577_55758C.1.pep
LVPGGVSEVNCWRALARPGLASFDINLGGWIRFCVVGRHMLLYIHVDMFISVCIQAVC

SEQ ID NO: 320939 - protein, 159 aa, Zea mays
  Clone ID: MRT4577_55759C.1.pep
EDSPLLHRSFQFTPASIARVKAAAAAAALEGRACTTFEALAGFVWSARTRALGMRASRPSKLLFAVDGRPRFSPPLPEGYFGNAIVLTSAACPAQELERSLPRSVRLLRGAAVAVTDAYMRYEGDYFEATRARPTMASTLLITAWSRLPLHAADYLWGP

SEQ ID NO: 320940 - protein, 51 aa, Zea mays
  Clone ID: MRT4577_5575C.1.pep
LEHLLHSHLIFAGEELNVYWVTSQYNYHNALTHGYIPGTNIDTLSSTNNLP

SEQ ID NO: 320941 - protein, 115 aa, Zea mays
  unsure (1)..(115): unsure at all Xaa locations
  Clone ID: MRT4577_55760C.1.pep
MPPYTVVYFPVRGRCAALRMLLADQGQSWKEEVVTVETWQEGSLKASCLYGQLPKFQDGDLTLYQSNTXILRHLGRTLGLYGKDQQEAALVDMVNDGVEDLRCKYVSLIYTNYEA

SEQ ID NO: 320942 - protein, 79 aa, Zea mays
  unsure (1)..(79): unsure at all Xaa locations
  Clone ID: MRT4577_55761C.1.pep
HRLHKYAQLSLLHRAFHLHLLSPERGHGLXAAVIRVRLPSSQHTPPCARXLMEMDASVTCQRIIGTYIIFSKQKXKKAA

SEQ ID NO: 320943 - protein, 66 aa, Zea mays
  Clone ID: MRT4577_55762C.1.pep
KGKKILEKKNKKLKKNLRKTNRVYPYTPKNGGVNTVEKTKEEREKGGSNKTPGHLMKTPPNEPPCK

SEQ ID NO: 320944 - protein, 84 aa, Zea mays
  Clone ID: MRT4577_55763C.1.pep
VRRSSRRVGNPTPQAAQDEPALSSPPRLPPASPLSRINGDGCKCDVSANHWHLYHFFETLAMVLMMELYTCIDGIRSCTQVCLP

SEQ ID NO: 320945 - protein, 196 aa, Zea mays
  Clone ID: MRT4577_55764C.1.pep
MNQLSLLHRAFHLHLLSPERGHGLTAAVIRVRLPSSQHTPRQHAKRLLAVAPHESIAAATEESSRPRQELAAAGNKNDGGGGGGRTCALPTWALIGGITAGVAVALALSAGAGPALALGPEGPLVEEFWDNMRRYALYVVTVSTGVAYTVLQPIVELLKNPITALLIVAVLAGSGFLVSQVLNAMVGNSDFIYMYE

SEQ ID NO: 320946 - protein, 48 aa, Zea mays
  Clone ID: MRT4577_55765C.1.pep
HFIFAYGCTVNELNKITAGLSNTDHLQPNPLTLLLAKQPHYWFHVVLA

SEQ ID NO: 320947 - protein, 121 aa, Zea mays
  Clone ID: MRT4577_55766C.1.pep
KARRRRRLSRRPRVTAGGRRRRPGVPAAHGSPPCLTPPPNSPLHAPAVREAEVRLMATAGLRLLEERAQEAILASCRDVLRASGFRFEDAWAKVIPGSDEGVYAWVAANYALGRLGGDPNK

SEQ ID NO: 320948 - protein, 125 aa, Zea mays
  Clone ID: MRT4577_55767C.1.pep
NLSISWVLCQRLACMLAVIFSRTSSINSIRSYVLPAPLPAAAEPWANVDFLLRLITVTNGCHPRICRRRLSACTRTHSLISVEPKCDGCRRDERMTGEGKGPRRAGGWHAASVFSATTLIWEPRT

SEQ ID NO: 320949 - protein, 68 aa, Zea mays
  Clone ID: MRT4577_55768C.1.pep
AFALALNSDVHWWSSSGVVLDGGVVPFSIHGIPLGPSLGLVTHILAVFVLFPPYPYLCCTHHKFWSLV

SEQ ID NO: 320950 - protein, 511 aa, Zea mays
  unsure (1)..(511): unsure at all Xaa locations
  Clone ID: MRT4577_55769C.1.pep
MPDPTTKLPSPRPRRRRRLFSLCLGTALLALIVSALVHVVAQPPGPAPASARFSVIIDGGSTGTRAHVFAAGPDGRPDLARSTVMRVSPGLSSFAADPARAGESLKPLLDFARDKIGGAAREAEVRLMATAGLRLLEERAQEAILASCRDVLRASGFRFEDAWAKVIPGSDEGVYAWVAANYALGRLGGDPNKTVGIIELGGASAQLTFVSDEVLPPKLSYNYTFGETTYTLYTNSFLNFGQNAAQDSFHEMLRSRGSFKNGTLADPCAPRGYSRNEEMMLRMSGASRSTLENQYVNNGTGNFTECISSSQLLLQKGKXVPHVSHINAEKCQYQQCHLGSTFVPELRGYFLGTENFYFTSKFFGLKKSSSLSDFMFAGEQFCNQHLSSLRKKHPNRSDEDFSRYCFSMAYIVALLHDSLGVPLDDKRIEYSNQVGDIQVEWALGAFITLMQNASLKPLHTAVESTHSNRPLFAVLGMFLLCGVLFVSRWRKPKTKIIYDLEKGRYIITRIS

SEQ ID NO: 320951 - protein, 154 aa, Zea mays
  Clone ID: MRT4577_5576C.1.pep
MDPEAVRKSLEPTATVEKITGSTPARLHFYDPFVLSGVSIEAAEHGRLLCSFVVTPRLASPAGYLRSGVTATLADQLGSAVFFCSGLPSSGVSLEISVSFVDAAAVGEEIEVEGKLLRAGKSVGVVSVDFRKKKTGKLMAQARHTKYLVASSRL

SEQ ID NO: 320952 - protein, 333 aa, Zea mays
  Clone ID: MRT4577_55770C.1.pep
MASPPRNVGTRTTSNPEIPEFLVGPAGRPVPAVGLGTASFPFVEENVRTAVLAALELGYRHLDTASLYRSERAVGDAVAEAARRGIVASREEVFVTTKMWCSQCHPDLVLPSLKESLQNLQMDYVDLYLVHWPIAAKPGKPQFPFKREDIMPMDLIGVWRAMEECHRLGLARMIGVSNFTTKKLQELLAIAKIPPSVNQVEMNPIWQQKRLAEFCKDKGIHLTAYSPLAGQSTSKVNPVMQSEVLQEVAKARGKSVAQISLRWIYEQGASVVVKSFGRDRLKENVEIFDWELTNEDRRKISQIPQHKRVTVLGILSPDGVSSVDLAELDIVEM

SEQ ID NO: 320953 - protein, 81 aa, Zea mays
  Clone ID: MRT4577_55771C.1.pep
LYIRLEHQTRNAYIMADIMGAMVITEDELDSSSLTSAVDEIFGDEKLMADMSQKALTAARPNASADIIRHICSLIGSTYPS

SEQ ID NO: 320954 - protein, 137 aa, Zea mays
  unsure (1)..(137): unsure at all Xaa locations
  Clone ID: MRT4577_55772C.1.pep
CAPSPPPSSRATYSAPRHACVVLVGAAVVSRPKEEAWSEXTCPVCLADFXAGEVVWVLPECMRYFHSDCIDTWMRGSSSCPMCRSETTPTPKPRTASVRPLLELSVSSRGDPRRDVSRATTGRVGGRVGGRDGRTRG

SEQ ID NO: 320955 - protein, 57 aa, Zea mays
  unsure (1)..(57): unsure at all Xaa locations
  Clone ID: MRT4577_55773C.1.pep
HITAXQIEHVLIFQNIIGLHCITSLNLDIHSFYIYPSNITDSIFSPPPSQIMTNHPS

SEQ ID NO: 320956 - protein, 52 aa, Zea mays
  unsure (1)..(52): unsure at all Xaa locations
  Clone ID: MRT4577_55774C.1.pep
VLSEGFRVLXGEPPSRGHLYRALCPCCLSRGKGGGGDQGRAVAPQLGLVPAG

SEQ ID NO: 320957 - protein, 89 aa, Zea mays
  Clone ID: MRT4577_55775C.1.pep
IKNFFFFFFFFFFSCFFFFFFFKTATHIFSHYIYQSKLRSIRIHKIRFRENKAYICKSTSSSSINCTGPSSMYTMASCLICLYRHPADT

SEQ ID NO: 320958 - protein, 388 aa, Zea mays
  Clone ID: MRT4577_55776C.1.pep
MRPMETEDSVGWDFLDWLGPDISTTIFQLLDDPADLARVAAVSRSWRRFVAVNKFSKHLCRQICPEAASFTRAVVVARLPPPPPPAAHAACESSQVAECRARDGEHAAYSYLAGALVSGKPATDLVMRCVGASSTDNFPDETIENTLVPHDMVNFRPSYWSSGGEDDPDVPESLTYTLASDLCVIEEIRIRPFEATFQHGHPIYSSKAVRIRLGHSKLDPGRETFVSDEDENLTAIADENYMWTYTSPEFPMLQENVLQTFKLPRPALCIGGIVKIELLGRIQKQFTDDKYYICVCHVQVTGRSLSPDLMIDLSDPAGYSNLKYLPGAGNLRPEDLISIDAKDSPDWRSLVSRYRQMRQLAMVYMLLGPVQFLWMKTKLTCRCRLCFP

SEQ ID NO: 320959 - protein, 60 aa, Zea mays
  Clone ID: MRT4577_55777C.1.pep
DICSFPHISLVIQSRAIDKSFLGTPPHVQRIFVPRLAPLKPPIKKRPIAYNKNFDPPRAE

SEQ ID NO: 320960 - protein, 68 aa, Zea mays
  Clone ID: MRT4577_55778C.1.pep
IAKKIKIFNYNSSFTQFHYITTIFPYSITYTVKPITETTTSSIAISSSLIKKNILIFFLIRQPCYKSI

SEQ ID NO: 320961 - protein, 123 aa, Zea mays
  unsure (1)..(123): unsure at all Xaa locations
  Clone ID: MRT4577_55779C.1.pep
PTRAPTRPLVDTQGKVSTDARSPVADPTSYQSLVGALQYLVFTHLDIVYAVQQVCLHMHXPQEPHLTATKRILRYLQGTTDFGLLLRRPTTTDLVVYTDPYWGGCPNTRRTTFCFVVFLGDNL

SEQ ID NO: 320962 - protein, 127 aa, Zea mays
  Clone ID: MRT4577_5577C.1.pep
KKIVFFFGVGTKKKMLGGPFLNLPDSKTIRGGKFLGLKYKTFPTPMGSQVFKKKKPGPNQTENLKLLQLGPGPKERNRIPGVRGTKFPLDGAKQIISPPGKFGGKGNHPNYLIGGGAPFWVHPPFSP

SEQ ID NO: 320963 - protein, 63 aa, Zea mays
  Clone ID: MRT4577_55780C.1.pep
NFDTHFVSRIMDNLRPAATKILFLTCACWAFCGRNTSCYSCTTATWSKWQFYTVAPTNYFNWL

SEQ ID NO: 320964 - protein, 135 aa, Zea mays
  unsure (1)..(135): unsure at all Xaa locations
  Clone ID: MRT4577_55781C.1.pep
GNCVLARVLHCRVALVPLHRAGRAFPSAWAAVGKGDRHGPFRSSVICVKGFLLRVYYNGLWWWSPRPVGVDLRSNXFRFASPFLVVRRRLLASFRLAPLDRPPNNFCFLSFFFSSFLFFFFSCFLFFRTRGRTRG

SEQ ID NO: 320965 - protein, 96 aa, Zea mays
  Clone ID: MRT4577_55782C.1.pep
MAPAKKGGEKKKGRSAINEVVTREYTINIHKRIHGVGFKKRAPRALKEIRKFAMKEMGTPDVRIDTRLNKAVWAKGIRNVPYRIRVRLSRKRNEDE

SEQ ID NO: 320966 - protein, 95 aa, Zea mays
  Clone ID: MRT4577_55783C.1.pep
GSAFLLLYLLSVSIHFLGPQTGPFPNFEWPKVFHFMILAHPTPEHKIIFACLETSPSYKLFGVKTPPWKNDYFLFYEPHGGVKNPKTAPLEGNLP

SEQ ID NO: 320967 - protein, 67 aa, Zea mays
  Clone ID: MRT4577_55784C.1.pep
PQKNKKRGSPLPKKKGWFWVVNPTPRGKIAIFHPVTGFVEKDLGLPPGAPSRKKVNNWFRSSGVTPG

SEQ ID NO: 320968 - protein, 70 aa, Zea mays
  Clone ID: MRT4577_55785C.1.pep
RTSPVISTSTASTSMLIYIARLPSLCLCRPRCELRICSVSQASVLIPCMHVQCARTFAQKIPPCVLRIKK

SEQ ID NO: 320969 - protein, 76 aa, Zea mays
  Clone ID: MRT4577_55786C.1.pep
SSLVPSTSSMVPGSASASGLRLRGSAGTGNGSLSEVLTMVDRVREVLPHIPDELIIEDLMRTTNINATVNNLLLMQ

SEQ ID NO: 320970 - protein, 62 aa, Zea mays
  unsure (1)..(62): unsure at all Xaa locations
  Clone ID: MRT4577_55787C.1.pep
ARGPIRAGAGAGATXPATYRFLPLNRPIGRSXSWPSCSALVEGWSSXXXTRXPXDIKLLCLT

SEQ ID NO: 320971 - protein, 55 aa, Zea mays
  Clone ID: MRT4577_55788C.1.pep
AQQLSRSMEQGLPERPALMAAPKAERAPGSIGSQSRCASAGGLMRVRRSHVQGLR

SEQ ID NO: 320972 - protein, 426 aa, Zea mays
  Clone ID: MRT4577_55789C.1.pep
MPPHATKDPVAAPAAATAAALSRALAAARPFLRGEEAEVDPALPGLAAVLRGAGAGECWHKHGTFLAHLLDVHRILRLWGAPDAVARCGLYHSAYSNSYVNLAIFQPDTGRAHVAAVVGGPAERLVHLFCVVPRQQLVHDDLLFHYSDQDLADDLASSEESVRDARRGVFDDAQPWRRKIQRLLPADGITVKHIRTGEDVSLSRRIAATFLLMTIADFSDQLFDWQDRLFDNSNGRLEFSGNTWTSLWPGTGKPGLWVTSSSRMAALYTLIVREEEIHITQRARDTHGRDEDMDLVIPPVFNGCTRLLNAEDQKVARDLYWEAVCGEEASDWLKVEQLLQQSIAKNPFVGEPHLVLAQVYLNMERYGEAQMQAEEGLRLLLEWGSSWDKRMPWEGWVSWGRAMLTKATDKDWPHTSFGILSLGLVK

SEQ ID NO: 320973 - protein, 74 aa, Zea mays
  unsure (1)..(74): unsure at all Xaa locations
  Clone ID: MRT4577_5578C.1.pep
MALPQLFCKEDVYMRTSLLRXLQRYHEMVHVLEKVAKTVDSVELSDEERNLLHGAYQNVSGARLASLRMIFSIQ

SEQ ID NO: 320974 - protein, 62 aa, Zea mays
  Clone ID: MRT4577_55790C.1.pep
WYACGTGPTTRSNPRPRYSGSVSYCCFFSALFLFLACCSGSSHLLIRAYTPRKNYKVVAGLL

SEQ ID NO: 320975 - protein, 328 aa, Zea mays
  unsure (1)..(328): unsure at all Xaa locations
  Clone ID: MRT4577_55791C.1.pep
DLKSYFGQGSSGSGPNTRASGVCNEPEIQVQVQENNSEEIPIVQEENAHIPDANGEDVDGINHLNLDHIISNLGLHIPINSFAPNIRDEVRRAFIAKGPTQQLVIIFLSHDKRSFQKHWFRQHSCLEYSVEXNKAYCFYCYLFKHDRMDDKFXQDAFTKVSFSQWRNVYTVFSKHVGGPNSIHNVAATTFHDFCNQRSSVSHKVSNYSKDALVKYETRLETFLSIVCLLTLQTXSFRGHDETSTSLNKGNFLEFLDWYKKGMXEVRRALDELCPKNAKMTSGTIQKELANCCAEEVTHAIKEEXGGLIFHVLVDESRDISIKEQNKKT

SEQ ID NO: 320976 - protein, 184 aa, Zea mays
  Clone ID: MRT4577_55792C.1.pep
PTRPPTRPRTRGKKKKKKKKKKKKKKKKKKKKKKKKKKKRRRGVPCFRFPGLLPSCLLACFFFVSGPRKSRAVPLVFPSWCLANPLPSSLFLWLCPPFPFPPFAYLPGGPRPSPFPPFHSLNGDGPPPCHSPLRAWGLGAPRPVTFPFACALVPVLPLFSLSFVPHWAPFPLVALNLFLPSRFR

SEQ ID NO: 320977 - protein, 82 aa, Zea mays
  unsure (1)..(82): unsure at all Xaa locations
  Clone ID: MRT4577_55793C.1.pep
PIRPKSMNNKLQLLMKSXKYTLGYXTVVKTLRNFKVKLIIIANICPSLMKSEIEYYTMLAKVSVHHFHXGNNVDLGTVCCKF

SEQ ID NO: 320978 - protein, 41 aa, Zea mays
  Clone ID: MRT4577_55794C.1.pep
MASEAKDVGILTMIIYFLPNCVIQERLPSQEVLHVVLGTRL

SEQ ID NO: 320979 - protein, 97 aa, Zea mays
  unsure (1)..(97): unsure at all Xaa locations
  Clone ID: MRT4577_55795C.1.pep
PRVREELIRNRLEELRRRREDGSLRDVVFCMRGDLVRNMGNMCNPELHKGRLEVPKPIKEYIEEVSTQLRMVCESDTDELLLXKXLAFVQETRHAFG

SEQ ID NO: 320980 - protein, 155 aa, Zea mays
  unsure (1)..(155): unsure at all Xaa locations
  Clone ID: MRT4577_55796C.1.pep
YNFLQGSIFSTISVSSIVPTVEPFVSILKPVKSAYVLSTKIRCHLDNNDASTSDSKENAFDWGRIWKMDVLNKVKMFVWRMAHNALQVKRNIVMRGGDLDTLCPMCSRFDEDPNHLFFKCKXREGWQLLNMEDKRIILGLAWPLYFSKGFFIFLG

SEQ ID NO: 320981 - protein, 182 aa, Zea mays
  unsure (1)..(182): unsure at all Xaa locations
  Clone ID: MRT4577_55797C.1.pep
MPKRPYEGRVGKKVKRRRRHLYVVMKDEDGRCGIHKFDLSTNLLDDGHPVVEVLPPALNHFDSPSRGFFVAFGTKIMVFHSKSDKIGPPFFDVSTHNMXQGPRTRSRLSQPIXXLPVCDKLVALDGNHSELLYLPPLEGKWLRCKLPNLSFNLQDIISHAVHPDGGTIFVSFKSYSSTATFS

SEQ ID NO: 320982 - protein, 115 aa, Zea mays
  Clone ID: MRT4577_55798C.1.pep
GIFGSTHPSGGGVRPASSCTGGAPSLDDSSPSTLGRVAVVDITYDGVAAHALRDLHSPADDAEGAFLAPAPEGDAHPRHGREPLLGPGRARALIHPHRLQPRPTLTIELILDLEL

SEQ ID NO: 320983 - protein, 59 aa, Zea mays
  Clone ID: MRT4577_55799C.1.pep
QDDKYFDNVFYQRDHSDNGEQKLTKDTCIATCHTGIHVSLYMLPEYITMLIVEAITHLF

SEQ ID NO: 320984 - protein, 137 aa, Zea mays
  unsure (1)..(137): unsure at all Xaa locations
  Clone ID: MRT4577_5579C.1.pep
MGRTILTARNSSDDKASRKRLVTNVPXKSAPGHCXLNKPHRXFRPDTVMLREIRKNQKSTNLLILKLSIXQLLCEIDQNFKTDLRFQSSGCAALKXESEIYLDGLFKDTNLCCIHVKSDTIMAKDIHFARRIPGYKT

SEQ ID NO: 320985 - protein, 93 aa, Zea mays
  unsure (1)..(93): unsure at all Xaa locations
  Clone ID: MRT4577_557C.1.pep
MAPTISTLLALIALYPNPTTTIITPXYSLPTTSILTPFLPSNTSIPFXHPLLQPYRLQHTISPSVIQQPTSHMQQQYLSHLTIQTTLTIHQQH

SEQ ID NO: 320986 - protein, 332 aa, Zea mays
  Clone ID: MRT4577_55800C.1.pep
MTDGARVETAPRLAQWRVDPLPCYTYRKSLPFLIGLWNWCISVERNNKQTCVKLFAENTSSLKNGSSAPIASFIAKLIVSLPPNQQTIVPPGIFDKQLKYDGFVWTIDSTVTGRFVIEIEFLDLKVADPSGGEPASIWASRQVKQCSDSTALSSLARMLHEDVLTDITINAADGSVGAHRAVLATRSPVFRSMFSHDLREKELSTVDITDMSLDACRAFLSYIYGDVRGGEEFLANRLALLRAADKYDIGDLREACHESLLEDIDARNVLERLQTAHLYRLPRLKGGCLRFLVDFRKVYEMHDDDLNAFLQTADRELVAEVFHGVLAAWSGR

SEQ ID NO: 320987 - protein, 63 aa, Zea mays
  unsure (1)..(63): unsure at all Xaa locations
  Clone ID: MRT4577_55801C.1.pep
QTRXHLRSTKLXPXEXGHXSSLFIGYHSKXXYXXXSKDTXXXGTTPSQNKXQXLVPKFXKQVE

SEQ ID NO: 320988 - protein, 104 aa, Zea mays
  Clone ID: MRT4577_55802C.1.pep
VPFAIVDMFSLSDECCSDIWFFFCQTPINIFSLYCMNCDVQKHKDISKVEKDIVLRPSMAPRCTSSASPRPSASVAPLETLQDHRPPRQALEVSDLLSDIFGYT

SEQ ID NO: 320989 - protein, 62 aa, Zea mays
  Clone ID: MRT4577_55803C.1.pep
MGKVHGSLARAGKVRGQTPKVAKQDKKKQPRGRAHKRIQYNRRFVTAVVGFGKKRGPNSSEK

SEQ ID NO: 320990 - protein, 44 aa, Zea mays
  Clone ID: MRT4577_55804C.1.pep
NHHWLQKPTPDLKGLVSQVYFNRVHHKLIIPCLREALLALFSIN

SEQ ID NO: 320991 - protein, 63 aa, Zea mays
  Clone ID: MRT4577_55805C.1.pep
SLTDLRCSFVRLCLIVRRFKKKKKKKKKKKKKKKKKKDKKKKKKKKKKNKQKKKKKKKGAHLK

SEQ ID NO: 320992 - protein, 257 aa, Zea mays
  Clone ID: MRT4577_55806C.1.pep
MSLSPADGAAYWLRWQVLVCGALIALPTVAAAALLPRLRRAAPPLRAADLWVPCWARLHPGWLLAYRAVALAAAVALLARLVVARGITVFYFYTQWTFLLVTIYFAFATAISAHGCLVYSRKSLRKADESRGLLNADVENRDVSISGERKTDETNMMVSYYEQTVNERRAGFWGRCMEIIYQDNARDTDLESSHRHLDVEARYSQRRRIGGPRLREPVVEVYDIEEFLGRRPMLMASAKLKRWSAAPLPSITILVEL

SEQ ID NO: 320993 - protein, 94 aa, Zea mays
  Clone ID: MRT4577_55807C.1.pep
FGSSLYCMNFYVQKHKDISKVVKDIVLRCVLMFSLHSRRTFYLKLNLSCKLVSKLIEYCDAWYFCSSHPLRQGHQWRRAAPIQLRRGHQHRSPP

SEQ ID NO: 320994 - protein, 145 aa, Zea mays
  Clone ID: MRT4577_55808C.1.pep
FPYSCTERTSTACQAPPLNATANSWGRLAPPSSPATRAARNWCPATGIAKKPHRFRPGTVPLREIRKYQKSTELLIRKLPFQRLVREIAQDFKTDLRFQILSPSAPLQEAAKKHLTDAFEDTNICPIPRQRDTIMPTDPPPRAAH

SEQ ID NO: 320995 - protein, 185 aa, Zea mays
  unsure (1)..(185): unsure at all Xaa locations
  Clone ID: MRT4577_55809C.1.pep
ESMRSLKVAFQNAANHEMSFHIMRLPKSNSLLDLIEDLKSKVEISCNDAEFRFFGVYLHKICKVYQPCXLIDSVNDHGPLYIEEVPEDEKNAGPHDRLVHVYHFEYNHHIQYFGEPFFFLIRDGEALSDMKVRIQKRLQVPDEQFLKWKFAHVTFSKPEYLQDSDIKQRPVYGGWEQHLGLEHTG

SEQ ID NO: 320996 - protein, 107 aa, Zea mays
  unsure (1)..(107): unsure at all Xaa locations
  Clone ID: MRT4577_5580C.1.pep
KVGYNPDKITFKTRDWFEGDLMRVGSTNLEWCRGRTLLRALDLINEPKRPSYKPLCISLQDVYKIGGIGTVPVRPLXTNVIEPGLVATFGPTGLTTEVKCAEMHHEG

SEQ ID NO: 320997 - protein, 285 aa, Zea mays
  unsure (1)..(285): unsure at all Xaa locations
  Clone ID: MRT4577_55810C.1.pep
HTGDWKIDESPVDGKKFDRQALEELSKEGVTLMMSDSTNVLSPGRSISESVVAGSLLRHISEAKGRVITTQFASNIHRIGSIKAAADLTGRKMVFVGMSLRTYLEAAFKDGKAPLDPSTLXIKVEDMDAYAPKDLLVVTTGSQGEPRAALNLASYGGSHALKLSKEDVLLYSAKVIPGNETRVMKMMNRLTDLGPKIIMGKDSGLHTSGHAYREELEEVLRIVKPQHFLPVHGELLFLKEHELLGRSTGIRHTTVIKNGEMLGVSHLRNRRVLSNGFVSLGKEDL

SEQ ID NO: 320998 - protein, 80 aa, Zea mays
  Clone ID: MRT4577_55811C.1.pep
SLEKGLHMCAKPTLSSVKVYFLTEQGPPPFVEANPKPPLKPFRGTPDLGVKTSPQILGGGVLFFRPTKKVAGGQALPGGH

SEQ ID NO: 320999 - protein, 128 aa, Zea mays
  unsure (1)..(128): unsure at all Xaa locations
  Clone ID: MRT4577_55812C.1.pep
PPPPGAFIMPSPPEPDFPAPSPCPATPPPELPEPAPPTELEPPPLTAPPPLLPSPPPPTTLPPIPLPLPPSISLTRPXLLGRGLSSSPFTGPXPPPELIEPAPPTELEPPPLTAPPPILPSPPPPQTT

SEQ ID NO: 321000 - protein, 164 aa, Zea mays
  unsure (1)..(164): unsure at all Xaa locations
  Clone ID: MRT4577_55813C.1.pep
MVHSTIIVACWIDGVLALTLGWHGQSIRSLEQVVRDGAHLRQRGAVATVAQAPAPALAGPLAPTPSGSRCARARDDIRAAVERDADGNPRMGAYVMILHVHDWFVNGCHGSVLLDQKLLFIXEDGCVXNGYSLMGYKVIYIIKTKLERKCPYTRGCEDLLAIAT

SEQ ID NO: 321001 - protein, 229 aa, Zea mays
  unsure (1)..(229): unsure at all Xaa locations
  Clone ID: MRT4577_55814C.1.pep
TPRGIGPEFPGRPTRPGEENGAAGAADAGAMEEEEAASEDENGDDQGFQEGEDELGDEEEGAGDENGHGEQQSQPPAAAAQQQPSQQRGXGKEAAGKSSGPTSLFAVTVAPPGARQGQQQAGGDGKTEQKGGDKKRGVKRPREDHGRGYFEYIEENKYSRAKSPQPPVEEEDEHFDDTVXVCLDTYNXDLHXKISRDRLSASSLTWXSXAXLWAXGRAXYGVXKGXVCF

SEQ ID NO: 321002 - protein, 43 aa, Zea mays
  unsure (1)..(43): unsure at all Xaa locations
  Clone ID: MRT4577_55815C.1.pep
KCPRXIHMTMVAVATKCVPXFFFSWRVFPIAAGNQISSLRNHY

SEQ ID NO: 321003 - protein, 83 aa, Zea mays
  unsure (1)..(83): unsure at all Xaa locations
  Clone ID: MRT4577_55816C.1.pep
CRFWFRFGFFGLIHASAHSFAHSSCGQISSYISCCCATFXSADPLLLTNGLGFPTSYAGLASKSTVSXPDDAITVKDAPAQVR

SEQ ID NO: 321004 - protein, 95 aa, Zea mays
  Clone ID: MRT4577_55817C.1.pep
GLIASLTRHFLNQTYKPLIRGHLDGYIISNILLQAQLLPWLTYIITLIQLHTPYYQTLLAHNITIPLHPIQLSILTISLHILQLSKIQSTSTTIL

SEQ ID NO: 321005 - protein, 93 aa, Zea mays
  Clone ID: MRT4577_55818C.1.pep
GPPQNKPPPTGFTQNFFLNSGPLLPPQGTYEPPFLYPPFNPEHPGCPPCGRGAPPNYFVDLWDPSPPPNFFFQGKGDHKKKQPGGVKTENKKQ

SEQ ID NO: 321006 - protein, 178 aa, Zea mays
  unsure (1)..(178): unsure at all Xaa locations
  Clone ID: MRT4577_55819C.1.pep
NLLASTLANINPVAHAAXVIPNLTRMDRGEAWPLFGHFTGVVANMAQALDGERLALAGALGFTLPTLAQHYSRSYHVPLGPLEDIARAIDARGAGPLGPARLAHRYVLEDVPFGLVFQERLARLLGIDCPLLSACITLLEAVYAESFRDRNDLLAALLPDGMSAEALVAACRSACAAS

SEQ ID NO: 321007 - protein, 68 aa, Zea mays
  Clone ID: MRT4577_5581C.1.pep
KNTRAGYLKQLDLSTPTHGWWCWTCQELYCKCPPDELNGTKRVQRRLSRIKLQLSGRNRGEDDKASGN

SEQ ID NO: 321008 - protein, 46 aa, Zea mays
  unsure (1)..(46): unsure at all Xaa locations
  Clone ID: MRT4577_55820C.1.pep
NVVFFFEXNAQVTYSFVDLHDLHYWVGGGDYFXXFXIYFXICSSVG

SEQ ID NO: 321009 - protein, 53 aa, Zea mays
  Clone ID: MRT4577_55821C.1.pep
IFRDSCGWTILFRNTNVLGKGVLCRWIRACVAWGLHTCFNNWVHPPSGWAESI

SEQ ID NO: 321010 - protein, 81 aa, Zea mays
  Clone ID: MRT4577_55822C.1.pep
MMGSNRLTPMAPHGCFPAYLPVPFPVWPSTWVHPFEEVKGGETCHHQIHKPIPVIPKEPVNVDELVGMSHLSIGEAQVRDR

SEQ ID NO: 321011 - protein, 91 aa, Zea mays
  unsure (1)..(91): unsure at all Xaa locations
  Clone ID: MRT4577_55823C.1.pep
HTLFWGLFYPLQLFIKLQSEFGEGAISERGGDAKDNNRXFTETVELXIGLKIYDPHKDKRFTGSVKMPYIPRPKMKVRMLGDAQLIEEADK

SEQ ID NO: 321012 - protein, 82 aa, Zea mays
  Clone ID: MRT4577_55824C.1.pep
SSLLVGLRVKLIMVFFRRLILARTVSVVVWFLLDSTHGVSRSLRLSIHGRRYLDRESFGVVNRVIVTAAVHPYMITALHFVS

SEQ ID NO: 321013 - protein, 67 aa, Zea mays
  Clone ID: MRT4577_55825C.1.pep
RLVLRRRYPPALPTLLPPQNKFCGGDGAFLLPGEAPSVPHSAGVPRLNAGPCAGGAARVFQGQRVPG

SEQ ID NO: 321014 - protein, 87 aa, Zea mays
  unsure (1)..(87): unsure at all Xaa locations
  Clone ID: MRT4577_55826C.1.pep
YKLFFCTCPGGQSCRLKKKKKKKKKKKKKTWQPFFQRAHTNGGGGGXNFLFRATKQRWGRGKILSPVLPKPYTTAKGIIPSHFRVRP

SEQ ID NO: 321015 - protein, 227 aa, Zea mays
  unsure (1)..(227): unsure at all Xaa locations
  Clone ID: MRT4577_55827C.1.pep
GLTYGHVAKLAEEMKKGAASVEGVEVKVWQVPEILSEEVLGKMGAPPKTDAPVITPQELAEAXGVLFGFPTRFGMMAAXIKAFFDATGGLWREQSLAGKPAGLFFSTGSQGGGQETTPXSSSPFFYNILPLAAPTDRIAEAVGNVSPWRXLTAVTQLTHHGMVFVPVGYTFGAKIFDMESVHGGSPYGAGTFAGDGSRWPTELELEHAFHQGNYFAGIAKRLKGGSA

SEQ ID NO: 321016 - protein, 60 aa, Zea mays
  Clone ID: MRT4577_55828C.1.pep
ASISSRDRSIIIKCLNKLMSHSLNTIFYMSRQFSKLTPRMLLTSSAASILPSPTRVADPL

SEQ ID NO: 321017 - protein, 123 aa, Zea mays
  unsure (1)..(123): unsure at all Xaa locations
  Clone ID: MRT4577_55829C.1.pep
MSSLSVRAPPTDPSKTGIAMLYSQEHHLESKALAEASNTYPQLAGTIRYNGFIVIDSHPCSVAEASTSMTGTHGHSRCRISSIYIXNGNXLDYIRPSSHNCYIPNVNWTEYQLIDISEDGLVS

SEQ ID NO: 321018 - protein, 100 aa, Zea mays
  Clone ID: MRT4577_5582C.1.pep
SDITICPGTKESSMQLIKKHVHSRIDKRLSINELEGVHESFEVHVFLHEHLLGGLQRELVHQLVDDAEHWHVSAVAVQGEHMSCGIKARKNVGRYRMVMF

SEQ ID NO: 321019 - protein, 204 aa, Zea mays
  Clone ID: MRT4577_55830C.1.pep
MAVKVYVVFYSTYGHVAKLAEEMKKGAASVEGVEVKVWQVPEILSEEVLGKMGAPPKTDAPVITPQELAEADGVLFGFPTRFGMMAAQMKAFFDATGGLWREQSLAGKPAGLFFSTGSQGGGQETTPLTAVTQLTHHGMVFVPVGYTFGAKIFDMESVHGGSPYGAGTFAGDGSRWPTELELEHAFHQGKYFAGIAKRLKGGSA

SEQ ID NO: 321020 - protein, 128 aa, Zea mays
  unsure (1)..(128): unsure at all Xaa locations
  Clone ID: MRT4577_55831C.1.pep
MAVKVYVVFYSTYGHVAKLAEEIKKGAASVEGVEVKVWQVPEILSEEVLGKMGAPPKPDAPIITPQELAEAXDGILFGFPTRFGMMAAQMKAFFDATGGLWREQSLAGKPAGLFFSTSSQGGGQETTP

SEQ ID NO: 321021 - protein, 110 aa, Zea mays
  Clone ID: MRT4577_55832C.1.pep
SFRYLTMYPSGTGIDGDKEILSLYLHMAKPNGDASLQNSGVLVEVSLSIKDKVTSNRKTMTGRCQLQATEGEGWGWSNFMATKSVKDWYLVKGSCLIEADVAILGSSKMN

SEQ ID NO: 321022 - protein, 58 aa, Zea mays
  Clone ID: MRT4577_55833C.1.pep
MRRFFLFKTFMARNHSVQCNALRLARPTRILRLTIHIKWYHLDTDAPSGGHYTGSELT

SEQ ID NO: 321023 - protein, 78 aa, Zea mays
  Clone ID: MRT4577_55834C.1.pep
AGQLVLPLVNQVALANLFPYFQQQQFFPFNPLFPLNPALQPPLVGGALPRFHMGGTRPWGPHTGMCFLKIIHFFIIFL

SEQ ID NO: 321024 - protein, 70 aa, Zea mays
  Clone ID: MRT4577_55835C.1.pep
YVFPCFAHECGGFYRGFPPRAPGVHPLAGVSWPLKGFCIYASSQIGCLVLRLCSVQDLSDFRQKKKKKII

SEQ ID NO: 321025 - protein, 55 aa, Zea mays
  Clone ID: MRT4577_55836C.1.pep
PCRVWIAHLVMLHLLWNSSRYIRPRVFPNLEAGLFFLYNYISPAKPVAYDYFRSY

SEQ ID NO: 321026 - protein, 88 aa, Zea mays
  Clone ID: MRT4577_55837C.1.pep
QGVTPGPIGMRRMRPSGGGEAIARCSGAVVGVHLGPGLEVDVDTQDNVLSGSLDRRQRELAHRRHCLGVCCPHYTGRCRMARLDSDRT

SEQ ID NO: 321027 - protein, 111 aa, Zea mays
  Clone ID: MRT4577_55838C.1.pep
MASRVKEDERHEKILRGLLKLPANKRCINCNNLGPQYACTNFWTFVCTNCSGAHREFTHRVKSVSMAKFTAQEVTALQEGGNEVTCICFFFSTFPINPMSSIQHGIDFEGE

SEQ ID NO: 321028 - protein, 651 aa, Zea mays
  Clone ID: MRT4577_55839C.1.pep
MQLNKILVLIHFCRSARVDSSQNSRETLFRFPDPVVPMRCECDYANAGKSLIRSDDPEWFFLAPKDRKYPNGSRSNRATVAGYWKATGPDRNIKSKGDKSKQFTIGKKKTLVFHRGRAPKGERTGWIMHEYRTTEPQFESGKQGGYVLYRLFWKPEEKTERSSPKEMDRSGNSPTTIRSSRDNQEANEEANTPLNKKSLESALHDPIELPNSAETPAGPRKMCLADRNDNLVATAPVVSHIPFQGHAAGVAKVDPSAAASAHFVNPQNGNDDCNNFMSDFTPILPHENAFFTGTQQGAFGFDGNGIMNHPDALDAFLNQTLVDTDEHSSTTSKVQYDSDIPTEFANHWNMQDEHQDWWEKLDFEPYEPTLLPYDTTDLDVLSVDSGADSFNDLFNVTGITLRPQRLDSTVQPDCVFPDQGTALRRLKLQVVECGESITKDESEDEVSCVESPNYFDESVEFAAEKGVASYGDGADSTGIVIRSRYPAPSSSSESSFTQQGTAMRRLRLQLGLNEGTCPSSGDSSSCIVDESESQQKAEIEEDASTNLAGSVDNLPGNSHDDEQKDIPEHGVKSVLRLRKTSAESLKDVKQEDCLEPDGRAPMQRVGFQSSIIWLVLSVAVLLLLYCGVWMSMICILVRCFAHMGSWHQPDV

SEQ ID NO: 321029 - protein, 82 aa, Zea mays
  Clone ID: MRT4577_5583C.1.pep
AARQGLTEINHGRRQFVPSWEILEAGRQHRQVAGRRSGRRKAEGGADYVDASRYRDEAVVDTGEEGRFAASCWLPHASRHAS

SEQ ID NO: 321030 - protein, 233 aa, Zea mays
  Clone ID: MRT4577_55840C.1.pep
MASLQNLVCSVSKQLAVPNCAAATKLNRAPPSAVAASSNQGSLDDTKVTKRRLALLGAGALATGLLRTSSAAFAEEVPKNYKSYVDAKDGYSYLYPAEWRDFDFLGHDSAFKDRNLALQCVRVGFIPTEKTDIRDLGPMDEAIFNLVNNVYAAPNQIPSIYDMQERTVDGKNYWTFEYDLEAPGYGVSAFATVAIGNGRYYTLIVTANERRWSRLRNRLKVVADSFKISDLTA

SEQ ID NO: 321031 - protein, 149 aa, Zea mays
  Clone ID: MRT4577_55841C.1.pep
HRCTHDPGIPKKPIPSPRQIAALVLSHPSSTLTAASARSLSASLLAAGPASAFPIPTPVGRRRHQTPVAPRPTRAPLLPRSPPPPRALARPLPVHGRPRARPRRAPAPPTSAHELHPRALAAPRAGLYPEHVPHPVRAVCDVRAAARPR

SEQ ID NO: 321032 - protein, 182 aa, Zea mays
  Clone ID: MRT4577_55842C.1.pep
HLSACIEVTKRRLALLGAGALATGLLRTSSAAFAEEVPKNYKSYVDAKDGYSYLYPAEWRDFDFLGHDSAFKDRNLALQCVRVGFIPTEKTDIRDLGPMDEAIFNLVNNVYAAPNQIPSIYDMQERYYLIECQHVAVLSARISPLGASNTFTCEPKSSCRTQDPRRPTYSDVKVPVSMEVLV

SEQ ID NO: 321033 - protein, 138 aa, Zea mays
  unsure (1)..(138): unsure at all Xaa locations
  Clone ID: MRT4577_55843C.1.pep
LSLAAGTTMHVDFVMPKDGNLTACLESYKPTTTKAVMHYWFDMVITKXRDEAAREMEAMVKEHGINIFKVLMEYKGXSLMGTDDLLLQGLXKCKSFGALAMFHAKNGDASAAGQQRKIDLGITAPEGHALLWPSNLEG

SEQ ID NO: 321034 - protein, 45 aa, Zea mays
  Clone ID: MRT4577_55844C.1.pep
TRFGFGPKKKKKKKKKKKKKKKKKKKKKKKKKKKKKKIKKKKKKR

SEQ ID NO: 321035 - protein, 232 aa, Zea mays
  Clone ID: MRT4577_55845C.1.pep
MAPKRRRADQGSSVPAPPPPLRKAKLQPVVIFAHGAGAPSSSDWMVHWKKMVQDALNAVAVVTFDYPYMSGGKRRAPPKAEKLVDHHLGIVKDAADKYQGHPLILMGKSMGSRVSCMVASSTEVDVSAVVCLGYPLKGVNGAVRDETLLQLKVPTMFVQGSKDALCPLDKLLSTQKKMTCKNELHIIDGGDHSFKVGKKYLESKGLNQYDLEMEAVTKISQFFQDSFTESCT

SEQ ID NO: 321036 - protein, 109 aa, Zea mays
  unsure (1)..(109): unsure at all Xaa locations
  Clone ID: MRT4577_55846C.1.pep
MARIVLFEXSGXAPLHRLRAGRGAIAAPSPPALSAAPRRRPAFAFIHRDWALRXFAPTRLAFGGVEEDKPSAAPGHEEGAENRFIITQNAIISYPPTDFACWLYKCTWG

SEQ ID NO: 321037 - protein, 46 aa, Zea mays
  Clone ID: MRT4577_55847C.1.pep
AGLHETKAQRTVVEQSTLARKLLLVAGAFIINQPIEWAPVVWNQML

SEQ ID NO: 321038 - protein, 89 aa, Zea mays
  unsure (1)..(89): unsure at all Xaa locations
  Clone ID: MRT4577_55848C.1.pep
KHPKIFTRSFFNKRSCRYNNPSTFILHYXDSYNXLLSASLSSILLFHSIPHNPTLLYSTIXXFXHIYHLIRSKSLLSFFLHFLINSIQV

SEQ ID NO: 321039 - protein, 66 aa, Zea mays
  Clone ID: MRT4577_55849C.1.pep
KSWKLKYIVTSSDENATLFRLGTSDSLLHQIQEKIKWADTMSDVNKKHQKEFEDRVEEAKKSIKVS

SEQ ID NO: 321040 - protein, 38 aa, Zea mays
  Clone ID: MRT4577_5584C.1.pep
QHVGDGRTYCGSTEVSTCVTSSTHSRSQRQHDRQRYRT

SEQ ID NO: 321041 - protein, 52 aa, Zea mays
  Clone ID: MRT4577_55850C.1.pep
SRPSLQITAMAPKILVILVGLVLFSPAALAAFHVIDMLANKSTYIQLPEASA

SEQ ID NO: 321042 - protein, 92 aa, Zea mays
  Clone ID: MRT4577_55851C.1.pep
SRFFVSMSVFGTKDRGSVIHIRKKRTHLPLGKHVVKTARGIQILEVTIARIEQAHKQPQVFCSLRNKSDNEYFENLGCPGRLELPILYDYVG

SEQ ID NO: 321043 - protein, 91 aa, Zea mays
  unsure (1)..(91): unsure at all Xaa locations
  Clone ID: MRT4577_55852C.1.pep
FPFYRPLWRPLPFISDIFKLDKMINPXQCFLKCFWKQNILLPPPFLSPQSGRPVFMLIWIPQLYFFSGIPHPIINPNWPPPLFWGFFHSFF

SEQ ID NO: 321044 - protein, 51 aa, Zea mays
  Clone ID: MRT4577_55854C.1.pep
SVMYIRFSLPFLQAQTCQFRLIGVSNVGGRSTYPAIILYRYFQSIEIFFSC

SEQ ID NO: 321045 - protein, 100 aa, Zea mays
  unsure (1)..(100): unsure at all Xaa locations
  Clone ID: MRT4577_55855C.1.pep
YFRANYVSFIAILLILVCCNMQCDSCSFLNMKDLMQSAFYVERRDIINLFFCVXGGDLAILDMKCNKYELYCFCSSRKRLNFYISGLFFFILFQDVYFDD

SEQ ID NO: 321046 - protein, 135 aa, Zea mays
  unsure (1)..(135): unsure at all Xaa locations
  Clone ID: MRT4577_55856C.1.pep
IDLEREIGGMGTGSALATATMNIIKWHGGTTSIFLDVGATASQGQVVXTFKIPASEDRAMPILVTVAGGNMKCNAIASGIVNTPKQVNLKVLVVFRLAAANLGQGMRILRERGMTLTNAEDLEAAAEKTAKATVK

SEQ ID NO: 321047 - protein, 132 aa, Zea mays
  Clone ID: MRT4577_55857C.1.pep
IYRCGPIRITSSLLHPKSVGQTTTVAAKARSGQGVPATRSSSSNGILGSTVGLGDSRCFLEVRVAGSEEINHGGDRSPSPDVGGLRCIAVWASSASLIKREDTCHLKSKLLPGISSARRRTCGSGGATRRGV

SEQ ID NO: 321048 - protein, 121 aa, Zea mays
  Clone ID: MRT4577_55858C.1.pep
AGQAGTLCALPPRVPLACLVLVLQCQVVVSFSGGDRQGIRRHSPPVSPCSNCAAESLSTTPHKLSNLKHLISRRKSELERFPQHGGPHCHQTYTVNTRNVDRTIQDVVLLPQSIECRTLDD

SEQ ID NO: 321049 - protein, 451 aa, Zea mays
  unsure (1)..(451): unsure at all Xaa locations
  Clone ID: MRT4577_55859C.1.pep
MAAAAPRLLLAVAGLLTLAVLAAAXLAVSGGGAAXLQDPAELLRLAKEPAFADWMVGVRRRIHENPELGYEEFQTSELVRRELDAMGIPYKHPFAVTGVVATVGTGGPPFVALRADMDALPLQESVEWEHKSKVPGKMHGCGHDAHVAMLLGSAKILQEHRDELKGTVVLVFQPAEEGGGGAKKMIEDRAVENIDAIFGLHIADSVPIGVLASRPGPIMAGSGFFEAVISGKGGHAALPHHTIDPILAASNVIVSLQQLVSREADPLDSQVVTVGKFQGGGAFNVIPDSVTIGGTFRAFLKESFNQLKQRIEEVIVSQASVQRCSAAVDFLSKDRPFFPPTINSPELHDFFVNVAGEMVGSRNVRDRQPLMGAEDFAFYAEAVSSTYYYFVGMYNETRGPQAPHHSPYFTINEDALPYGAAGQAALAARYLLERQQPAAATADKAETHDEL

SEQ ID NO: 321050 - protein, 116 aa, Zea mays
  Clone ID: MRT4577_5585C.1.pep
RGCPIRRNGTFPYSFQEYCLQPLYCQYSQLTIMPCYHTANSFARCFQYGSCDHQRWDLPHHDLHRQLCYRDHAESPTEVTLLKADDTTANAHVEQLHAKLLKATTSQSALIEIIQL

SEQ ID NO: 321051 - protein, 363 aa, Zea mays
  unsure (1)..(363): unsure at all Xaa locations
  Clone ID: MRT4577_55860C.1.pep
MAAATPRLLLAVAGLTLAVXLAVSGGGAAXLQDPAELLRLAKEPAFADWMVGVRRRIHENPELGYEEFQTSELVRRELHAMGIPYRHPFAVTGVVATVGTGGPPFVALRADMDALPLQESVEWEHKSKVPGKMHGCGHDAHVAMLLGSAKILQEHRDELKGTVVLVFQPAEEGGGGAKKMIEDRAVENIDAIFGLHIADSVPIGVLASRPGPIMAGSGFFEAVISGKGGHAALPHHTIDPILAASNVIVSLQQLVSREADPLDSQVVTVGKFQGGGAFNVIPDSVTIGGTFRAFLKESFNQLKQRIEECGLSCRGDCEWTSVSYSVSHVXVIVSQASVQRFIAAVDFLNKDRPFFPPTINRPE

SEQ ID NO: 321052 - protein, 58 aa, Zea mays
  Clone ID: MRT4577_55861C.1.pep
SPAVPMDSKIAVYSGTVSATEKEKFKEQPSSLGCLTTGETQDKSGNHPHAHSLKCQTE

SEQ ID NO: 321053 - protein, 108 aa, Zea mays
  unsure (1)..(108): unsure at all Xaa locations
  Clone ID: MRT4577_55862C.1.pep
FSDEASLNYFFYGFSLLQPDKKEIVGMHEQAFAWKIMQLDDECVAXYVTECFQGHTLLHKALTEASEVLCNKGVYGRXSAQLLATFCDHILKRGCREKLTDGTIEDAL

SEQ ID NO: 321054 - protein, 76 aa, Zea mays
  Clone ID: MRT4577_55863C.1.pep
LERPPYSTSLVFFITQDTKSTGRALSLIRAEPKLKRILTPVYEGCPPINIGAWHYYRDTWIKGGEGCRECGYCLKH

SEQ ID NO: 321055 - protein, 122 aa, Zea mays
  Clone ID: MRT4577_55864C.1.pep
LEAAARTLFWSNSTYVGSTTTSCSSPVCLYIGLYVLSQHISIRTQNTGQVHQNAAGSRSGSRSAVVVVVVIVAVGLCHPSPCAAAPIARRGVNRTRGGGNAAALDEVVASRRHRHYCWCHPS

SEQ ID NO: 321056 - protein, 53 aa, Zea mays
  unsure (1)..(53): unsure at all Xaa locations
  Clone ID: MRT4577_55865C.1.pep
EAEASTKPDGWLDDEPEETDDPEASNPXDWDNEEDGEWESARRLPNPQDDEVG

SEQ ID NO: 321057 - protein, 78 aa, Zea mays
  Clone ID: MRT4577_55866C.1.pep
EIFLPPHRGWSSNPLVYPSCVTRVIANMHVFGPCTMGSPMFESRCIFIALPYIDLVKFSFEYWLRPLRSAQTYRPEGA

SEQ ID NO: 321058 - protein, 104 aa, Zea mays
  Clone ID: MRT4577_55867C.1.pep
TLNRVFAMLCKPVNSGICINSPLHCYQENLQICFASATPYFASPIYTSCNLYEWLLLCATVNKCKDMGKTLQFGWKSFIQKSFASMLLCRYVTMISSLNLCFSP

SEQ ID NO: 321059 - protein, 91 aa, Zea mays
  Clone ID: MRT4577_55868C.1.pep
LGPRQPVGLPQGRAVALLRLAAQTVGLGRRRRPVIAHRRRRSICNSRWLRTAPSFCKLGGIKPQILFPWFPNLHLRKERETKMEWGGCTKF

SEQ ID NO: 321060 - protein, 41 aa, Zea mays
  Clone ID: MRT4577_55869C.1.pep
RRGYQHFTVCVGGLACVNQMGCSFLFFLSFFSVYVSNVCTI

SEQ ID NO: 321061 - protein, 93 aa, Zea mays
  Clone ID: MRT4577_5586C.1.pep
MAEGRGELSDGVEKGLEQRMGELDWGARGSGAKADARKGDAAALATGEDAAGWRSEQGMDAVARAGGEGLGIRVERMVALLLGGGRLEDPGQP

SEQ ID NO: 321062 - protein, 141 aa, Zea mays
  Clone ID: MRT4577_55870C.1.pep
PINSVSPRLSPSLSLPMNGFGDLGPHDPHLLGTPAPRSRATPQDPAHPRHKKTQGAWYMYGVTSRGTHEPSSQDVCTRYYNSGDEVASSSPCLGAFCGRMQRTTRRQLRPTTRTTSLSRQGARRRLLPARGDSRINASPSR

SEQ ID NO: 321063 - protein, 102 aa, Zea mays
  Clone ID: MRT4577_55871C.1.pep
VWRTRGMNRSPCFFLGEIFPPIYEVSHRVAVMLKVTLPLLGWFSRIELPPPPMFHVCPIAPRIGLLNPEVKICVFVWGPKKKKKKKKKKKKKKKKKKKKQPR

SEQ ID NO: 321064 - protein, 119 aa, Zea mays
  Clone ID: MRT4577_55872C.1.pep
LVGLGHRVASHALWSYAPQSAAVEVRAKWDAQEPRPINSVHGLGICHHLDDYRACSPPRKHLNAESALHFLHGAVMAFLEAVAPRGRLAGDSACNDGYHQHPRKHGEEGPDSRYESKVC

SEQ ID NO: 321065 - protein, 86 aa, Zea mays
  Clone ID: MRT4577_55873C.1.pep
RPRQDPFKRIEYACGGRPPQLHLHAHQCISINSLCPSKLIHLFLRRHCRSLVKAVSSFYHLRLKDTYIFKILCLALHYIVIFSFDL

SEQ ID NO: 321066 - protein, 223 aa, Zea mays
  Clone ID: MRT4577_55874C.1.pep
MAPRNALPAASAVANGMVMEPRFRGVRKRPWGRFAAEIRDPARKARVWLGTFDTAEAAARAYDAAALHFRGPKAKTNFPVAFAALPPPPPPKKPAAVTVSPSSSSTVESSSSSSSRDSPATPPRAASPSQQAPSLDLSLGGTPAMVAAQPFLFLDPRLAVTVAVPAPVPYRPTAVAAGANKHAAASCREEEQSDTGSSSSVVDASPAVGVGFDLNMPPPAEVA

SEQ ID NO: 321067 - protein, 221 aa, Zea mays
  Clone ID: MRT4577_55875C.1.pep
MAPKNALPAASGMTLEPRYRGVRKRPWGRYAAEIRDPARKARVWLGTFDTAEAAARAYDAAALHFRGPKAKTNFPVAFATATATDTRALPLPLRLPLPPPPPKKLSVSPSGSTVESSSRDSPAAPAPAPSLDLSLGMPPMVAAQPFLFLDPRLAVTVAVAAPVPRRPTAAAAGAGASKQAAYSCCREDEQSDTGSSSSVVDASPAVGVGFDLNMPPPGEVA

SEQ ID NO: 321068 - protein, 127 aa, Zea mays
  Clone ID: MRT4577_55876C.1.pep
SICARSSNHFSSLNAYYLRLCTRSCPYASRTIPSAYQQPPVGRRCASPLHLPACQRACRSDWIASPVVQRTPAPRTHVSSRSSPLTSLSVVAQATASYSVAKLRPRLISSVTRTRAIASMNMPLLAT

SEQ ID NO: 321069 - protein, 159 aa, Zea mays
  unsure (1)..(159): unsure at all Xaa locations
  Clone ID: MRT4577_55877C.1.pep
MVHVSFYRNYGKTFKKPRRPYEKERLDAELKLVGEYGLRCKRELCRVQYALSRIRNAARELLTLDEKNPAVSLRRRLQTIVFKNGMAKSIHHXRVLIRQRHIRVGRQLVNIPSFMVRVDSEKHIDFSLTSPLGGGEPGRVKRKNQKKASGGGGDDEEEE

SEQ ID NO: 321070 - protein, 72 aa, Zea mays
  Clone ID: MRT4577_55878C.1.pep
VMQYLPIARKCISWYACDGLKLTRSVHSLQLILVVYLGPTSWLVCRLPPRLHSTCPFFIMLLIFDRCHDSVN

SEQ ID NO: 321071 - protein, 110 aa, Zea mays
  Clone ID: MRT4577_55879C.1.pep
MMIERSAAMALLLALLLVLLLATGGQADADEPATSQQRAVPAEQAPAPAPKGYETLREEPAPTGGHRHREIKIGACFPISDGGSSAFSCYQRCTSKGYAGGRCDTLPSGF

SEQ ID NO: 321072 - protein, 101 aa, Zea mays
  unsure (1)..(101): unsure at all Xaa locations
  Clone ID: MRT4577_5587C.1.pep
PTRPEGSEPHAATLFTAFICICCVVIGNLDLITPTITMFFLLCYAGVNLSCFLLDLLDAPSWRPRWKFHHWSLSLVGALFCVXVWFLILLPFYFVLSQSSA

SEQ ID NO: 321073 - protein, 183 aa, Zea mays
  Clone ID: MRT4577_55880C.1.pep
MVHVSFYRNYGKTFKKPRRPYEKERLDAELKLVGEYGLRCKRELCRVQYALSRIRNAARELLTLDEKNPAVSLRGEALLRRMNRYGLLSEGQNKLDYMLALTVENFLQRRLQTIVFKNGMAKSIHHAVGRQLVNIPSFMVKLDSEKHIDFSLTSPLGGGEPGRVKRKNQKKASGGGGDDEEEE

SEQ ID NO: 321074 - protein, 101 aa, Zea mays
  Clone ID: MRT4577_55881C.1.pep
IHFCLLSVFITPVDKFRACLAWLQSKTPRRSWSEHAKPPNSRVVNSMEFLELQYIFWSTLLLLRKLQKNQLSHGVWSYLPPPAPGYENQFKLWSRAAPPRV

SEQ ID NO: 321075 - protein, 193 aa, Zea mays
  Clone ID: MRT4577_55882C.1.pep
MVHVNFYRNYGKTFKKPRRPYEKERLDAELKLVGEYGLRCKRELWRVQYALSRIRNAARELLTLDEKNPRRIFEGEALLRRMNRYGLLGEGQNKLDYVLALTVENFLQRRLQTIVFKNGMAKSIHHARVLIRQRHIRVGRQLVNIPSFMVRVDSEKHIDFSLTSPLGGGEPGRVKRKNQKKASGGGGDDEEEE

SEQ ID NO: 321076 - protein, 61 aa, Zea mays
  Clone ID: MRT4577_55883C.1.pep
FGSFKENPCVTPYLPRPHKRIIEIQIHALDAKHDMISRESSAYNLRASIMHAYATPYSRIT

SEQ ID NO: 321077 - protein, 145 aa, Zea mays
  unsure (1)..(145): unsure at all Xaa locations
  Clone ID: MRT4577_55884C.1.pep
LRRPIFQLGLGPALFPFSHWRPGQVPDWGTGINTRTQGGFGTYPYPCFPGPPISRGLLAPAAAGASPKKKKPVVKKKNPPPVKNQGAAGRKKAVPVARSWGGSGRKPPPALAQERPKKDRPAHQPPXGLARPAQPFEGWAGPARP

SEQ ID NO: 321078 - protein, 129 aa, Zea mays
  unsure (1)..(129): unsure at all Xaa locations
  Clone ID: MRT4577_55885C.1.pep
MLLLWKDKKTTAGEISDTTVIRCLSDSSDNHLLTLISHVLIXALDTLILGYIATTFIXKRPPDIPXLHVSEELDANVARLLRNDINRPIHLFRVIARGMIWTRILLEIALLCPLSGVESTCDFLPVTYI

SEQ ID NO: 321079 - protein, 74 aa, Zea mays
  Clone ID: MRT4577_55886C.1.pep
HWELCTDQRIPSLCLHGPRKCRFKNDASDGGLSGNFVYYSCVFLQVRMDAIIITTIKHHQTTTIYSASLVRNWW

SEQ ID NO: 321080 - protein, 66 aa, Zea mays
  Clone ID: MRT4577_55887C.1.pep
MMTMGLSAIYNLLMINKSSGLVYCKDYGLAGRMDTNDSPKSSSLWHSMHAILQQVSHTADSTGIDL

SEQ ID NO: 321081 - protein, 193 aa, Zea mays
  unsure (1)..(193): unsure at all Xaa locations
  Clone ID: MRT4577_55888C.1.pep
MEKATPTDYGDIYGRGGGPHPFPAEVRADAPRVLAAGQDNIYDANPQRSSNTLAATNXTDSIVEANHVIPNVAASAAACYLXVHENLVPNYPSTQDNVLLAGNQILSYLPIANSSWYTRAAAMENMQRSLLKKSISDVKIXTTVAMDDLANSSISCPARDAEFRGVFVXPVVRPLLHFLNGTTXYYFGDANPY

SEQ ID NO: 321082 - protein, 68 aa, Zea mays
  Clone ID: MRT4577_55889C.1.pep
PIVKKLPKRPIGAFYEARSKRPLSVMVILAKFALKGGFGLRDKHFFFFFFFFFFFFFFFFFFFFFFFL

SEQ ID NO: 321083 - protein, 42 aa, Zea mays
  Clone ID: MRT4577_5588C.1.pep
QSRSTSHEQAALISSSPLFSITLLESSTNSPYYSKLVYFLKV

SEQ ID NO: 321084 - protein, 51 aa, Zea mays
  Clone ID: MRT4577_55890C.1.pep
LSILDADRLERKHVTGHHARTGNNSHFLFQPPFLACAVCGEKSNILNMAYF

SEQ ID NO: 321085 - protein, 76 aa, Zea mays
  Clone ID: MRT4577_55891C.1.pep
IHWHIKVFSLVHQRSFFYVYLSFSRFIFVVPVERFCGLVPTSGLRLRSVAMDVSWHIASCRPCPFTDRSGRPGPSV

SEQ ID NO: 321086 - protein, 95 aa, Zea mays
  Clone ID: MRT4577_55892C.1.pep
SFPPTSFPFKRLFPPRWNSSGPPSSVLGHPGRFLGPPKRILGLTLKGPSRKIRLGRGFPPPNSLFPPSGSRGVWPLGCLFRYPIKFSWPRVFPRP

SEQ ID NO: 321087 - protein, 133 aa, Zea mays
  Clone ID: MRT4577_55893C.1.pep
EGGGGLYPYPGAQTEPNTGGPGPPNLTPPGLCPRGARPLTKKLPKTRGSTFGGGARRAPPTHKKKTPAPSGTKAVGSDPAQKKSSTILGTSLGKKPLVLGNGFLQTNPLFPEKTINPPEENLAQTLPGGRGGG

SEQ ID NO: 321088 - protein, 74 aa, Zea mays
  Clone ID: MRT4577_55894C.1.pep
GKYKGPGRKGHGGPSWVPRKGGGAEPPLFMKNPGGGDPGGEGPPPPPQTVLKWPKGGPPITPPQLKSIQGNPPP

SEQ ID NO: 321089 - protein, 111 aa, Zea mays
  Clone ID: MRT4577_55895C.1.pep
AGPGPNFRARLPFRFSIKQTFHGLTNKLVRKSYMGDGNLNLILARAWTRPLFVDRRGASLAAYQGDQGGGSPKPWERGQTGPAKRTLTIYLHRRPRRYHWLFKDLPQQLLK

SEQ ID NO: 321090 - protein, 208 aa, Zea mays
  unsure (1)..(208): unsure at all Xaa locations
  Clone ID: MRT4577_55896C.1.pep
MGKSRRLEGGGGERRGAGGGGVAAAAFAALLLGCVVMALVGGAAAQGPRLPSDYKTLSGAAPLVVARGGFSGAFPDSSEGAYSFGASASAPGTAMWCDVQLTKDGVGLCLRDVNMKNCTTVDQTYPGRKRTYVIDGVHKTGWFVPDFTSAELLQSVYLTQAIWSRTERMDGIYPIVTVPDVQSIVNTSPIWLNVQHPIFYKQRXLGMS

SEQ ID NO: 321091 - protein, 100 aa, Zea mays
  unsure (1)..(100): unsure at all Xaa locations
  Clone ID: MRT4577_55897C.1.pep
FHQRQQGHMQXQKHQRLLXVYVKKXPPQRRAPSKRQQQHQHQQEGGGQQQHDQQSQGHGQQHEQSHEQHQGQSPEQQLQQLVLANLAAYSQEAGSLHSTN

SEQ ID NO: 321092 - protein, 78 aa, Zea mays
  Clone ID: MRT4577_55899C.1.pep
KTAQKGPNCPLKIQIQSKANLKNIPTKSPQSAHAQSTNLFFFFFPFLFQNQNFIMMQILLVIPHMIMCLVVLHYYIYR

SEQ ID NO: 321093 - protein, 69 aa, Zea mays
  Clone ID: MRT4577_5589C.1.pep
MADWGPVVVGVVLFVLLSPGLLCELPGTHRHVDFGGFHTNGKAIFVHTLVFFAAFTILTLALHIHIYTG

SEQ ID NO: 321094 - protein, 51 aa, Zea mays
  Clone ID: MRT4577_558C.1.pep
TKTHRPSESLRGEPHRLRVVCRPRKASPDRRHHVRHVSENGANLGPPLRRR

SEQ ID NO: 321095 - protein, 84 aa, Zea mays
  unsure (1)..(84): unsure at all Xaa locations
  Clone ID: MRT4577_55900C.1.pep
MVQDEGSSSSVTSSPLHNFSTMPLHAXPGGAPTPTPPWLVRELRSDERGLCLIHLLLNCAAAAGAGRLDAANAALEHIASPDRL

SEQ ID NO: 321096 - protein, 184 aa, Zea mays
  unsure (1)..(184): unsure at all Xaa locations
  Clone ID: MRT4577_55901C.1.pep
RTMDSSPEFQLAVRQQFPDIVSCRRAIRNTVILCHCEIXTVKSDKSRFTAKCAAXSCPWRIHAARLPGVPTFSIRTIHDNHSCVGINHLGHQQASVQWVANTVEERLRENPEYKPKEILEEIHKAHGITLYYKQAWRGKERIMAAVRGSFEEGYRLLPEYCRQVERTNAGSIARVYGNPDDNCF

SEQ ID NO: 321097 - protein, 137 aa, Zea mays
  unsure (1)..(137): unsure at all Xaa locations
  Clone ID: MRT4577_55902C.1.pep
GQGSXRVASHXRREAXLRLRAGDGKRPPGEDDXMVVGGGARAITAXYARAVGTXSTFFPPGPAAAVPASSSSPRKPTARLRRAALAXPRRPRDVPARTVEGGVSRRSAPARRAKKPKALCTQAKRRFVFEGAGRGGR

SEQ ID NO: 321098 - protein, 56 aa, Zea mays
  Clone ID: MRT4577_55903C.1.pep
MLTNNKCDHHKLTGQGYRTTAANKGALMKHTCTLATYVQFAGNARVAAGPVGHQGM

SEQ ID NO: 321099 - protein, 97 aa, Zea mays
  Clone ID: MRT4577_55904C.1.pep
RGRVGFRKLIDLVVLVPNYLKGHSACLSGLLLGHKHSCLARGTIQTIPYRACLDAVMRLGFAFACLCPADSWACKQTRPNYLNSELFTPRQKTCQSP

SEQ ID NO: 321100 - protein, 94 aa, Zea mays
  Clone ID: MRT4577_55905C.1.pep
SPQVFIWVGNCLQEMTTVVFFFLSLIYIYVVLGMLKINTLMRSLGEKSEPSPLESAILCTLVKLVVCSVAHCNVNSCTNAVLNCYEFKNVVFCK

SEQ ID NO: 321101 - protein, 65 aa, Zea mays
  Clone ID: MRT4577_55907C.1.pep
LIINNKTSFLLKKKKKKKKKIKKKIKNKKKKREKKQKKKKKKKKKKKKITKKKKKKKKKNPSPGS

SEQ ID NO: 321102 - protein, 584 aa, Zea mays
  Clone ID: MRT4577_55908C.1.pep
VGRGEVVHSSRDPSREPSRSDRPWYLGGLFCTLSLILVLGCIAFGIFWVMAVFPTVPFMPVGRTAGSLLGAMLMVLFRVISPEDAYAAIDLPIIGLLFGTMVVSIFLERADMFKYLGNLLSWKSRGSKDLLFRVCIVSAFASALFTNDTCCVVLTEFILKVARQNNLPPQPFLLALATSSNIGSAATPIGNPQNLVIAVESGISFGQFLLGVFPAMIVGVLTNAAILLLYFWKYLSVEKDQEGGQPTGPEVVADDEVTSHRFTPARMSHVSSLNPDDMDCVSEPIIRSNSVSTTGNENLRSRSINSEADIQLAIKSLRASSMSHEMVEVSTVPDRRDEGASSRKFTRTASQQRSVIIEDLAPSPEINGEKEKETEVAEKRWKVLVWKTAVYLITLGMLIALLMGLNMSWTAITAALVLLALDFTDAQACLEKVSYSLLIFFCGMFITVDGFNKTGIPNTLWELVEPYSRIDSAKGVALLAVVILILSNVASNVPTVLLLGTRVAASAASISHGSERKAWLILAWVSTVAGNLTLLGSAANLIVCEQARRAQFFGYNLTFWSHLRFGVPSTIIVTAIGLLIVISY

SEQ ID NO: 321103 - protein, 556 aa, Zea mays
  Clone ID: MRT4577_55909C.1.pep
MALAGTSKVVLGCIAFGIFWVMAVFPTVPFMPVGRTAGSLLGAMLMVLFRVISPEDAYAAIDLPIIGLLFGTMVVSIFLERADMFKYLGNLLSWKSRGSKDLLFRVCIVSAFASALFTNDTCCVVLTEFILKVARQNNLPPQPFLLALATSSNIGSAATPIGNPQNLVIAVESGISFGQFLLGVFPAMIVGVLTNAAILLLYFWKYLSVEKDQEGGQPTGPEVVADDEVTSHRFTPARMSHVSSLNPDDMDCVSEPIIRSNSVSTTGNENLRSRSINSEADIQLAIKSLRASSVSHEMVEVSTVPDRRDEGASSRKFTRTASQQRSVIIEDLAPSPEINGEKEKETEVAEKRWKVLVWKTAVYLITLGMLIALLMGLNMSWTAITAALVLLALDFTDAQACLEKVSYSLLIFFCGMFITVDGFNKTGIPNTLWELVEPYSRIDSAKGVALLAVVILILSNVAPNVPTVLLLGTRVAASAASISHGSERKAWLILAWVSTVAGNLTLLGSAANLIVCEQARRAQFFGYNLTFWSHLRFGVPSTIIVTAIGLLIVISY

SEQ ID NO: 321104 - protein, 79 aa, Zea mays
  Clone ID: MRT4577_5590C.1.pep
SPFFFFLFHLAGQRSVKIFFFWLGFYYFIFFFFFQNPEPRAFFLKKSQPGEGASPPWPGLSFATKTCAHTPQPIQFFKP

SEQ ID NO: 321105 - protein, 557 aa, Zea mays
  unsure (1)..(557): unsure at all Xaa locations
  Clone ID: MRT4577_55910C.1.pep
MALAGTSKVVLGCIAFGIFWVMAVFPTVPFMPVGRTAGSLLGAMLMVLFRVISPEDAYAAIDLPIIGLLFGTMVVSIFLERADMFKYLGNLLSWKSRGSKDLLFRVCIVSAFASALFTNDTCCVVLTEFILKVARQNNLPPQPFLLALATSSNIGSAATPIGNPQNLVIAVESGISFGQFLLGVFPAMIVGVLTNAAILLLYFWKYLSVEKDQEGGQPTGPEVVADDEVTSHRFTPARMSHVSSLNPDDMDCVSEPIIRSNSVSTTGNENLRSRSINSEADIQLAIKSLRASSMSHEMVEVSTVPDRRDEGASSRKFTRTASQQRSVIIEDLAPSPEINGEKEKETEVAEKRWKVLVWKTAVYLITLGMLIALLMGLNMSWTAITAALVLLALDFTDAQACLEKVSYSLLIFFCGMFITVDGFNKTGIPNTLWELVEPYSRIDSAKGVALLAVVILILSNVASNVPTVLLLGTRVAASAASISHGSERKAWLILAWVSTVAGNLTLLGSAANLIVCEQARRAQFFGYNLTXWSHLXRFGVPSTIIVTAIGLLIVISY

SEQ ID NO: 321106 - protein, 81 aa, Zea mays
  Clone ID: MRT4577_55911C.1.pep
SPSPGPNHTSNSSNASNATVVPQNSSARSTCSLTPALAAHFSENLIKHVQGWPADHAEKQASRLREEAHNHGTIHMSEICT

SEQ ID NO: 321107 - protein, 372 aa, Zea mays
  Clone ID: MRT4577_55912C.1.pep
MAGSAVAVVLLSAVALLCLYHLLFLSLSVPDPAAAAAAVPRRAGGHHGSNVPSGSGTANVVLRFGLSGQPLRLHDPASAAGLPDIDTFRGKLERLLPPDDHDPGWSRRFDAELGPVHRYFGPDAPLDVRQRIAYLFAILDRSSRGVGVGVGVGELEAWLRWQAAARLDAVTRREMAPHDTDRDGAVTLREFFAGWIKMEFARADRDGDGSLNAVEFNDFLHPEDSSQESVMLWLLKDKLSEMDHDGDGRLSQEEFVAQSHIIISGARHADDGGHAHDLERAEAAKKFTELDADKDNYLTVEEARCVLQSLVTGEFSYATSHAKFLMKADVNHDGKLSLEEMLDDYISFYSTVYMDDHYASEGEVDSDSRDEL

SEQ ID NO: 321108 - protein, 67 aa, Zea mays
  Clone ID: MRT4577_55913C.1.pep
KRYFEETCFFVNNESHPMACFLKKRNNTNIFFLNAGPTKGGCKNMGGTPKAFGLNMNGNSCGSGHKG

SEQ ID NO: 321109 - protein, 268 aa, Zea mays
  Clone ID: MRT4577_55914C.1.pep
MAATFRPGQEPPTSSSASAWLRWQAAARLDAVTRREMAPHDTDRDGAVTLRECFAGECVRPCVRNISLSRAHDDGYIYEDWINMGHDKMGWWMHKCASADRDGDGSLNAVEFNDFLHPEDSSQESVMLWLLKDKLSEMDHDGDGRLSLEEFLAQSHIIISGARHADDGGHAHDLERAEAAKKFTELDADKDNYLTVEEARCVLQSLVTGEFSYATSHAKFLMKADVNHDGKLSLEEMLDDYISFYSTVYMDDHYASEGEVDSDSRDEL

SEQ ID NO: 321110 - protein, 271 aa, Zea mays
  Clone ID: MRT4577_55915C.1.pep
GRVGLLPPDDHDPGWSRRFDAELGPVHRYFGPDAPLDVRQRIAYLFAGRVGGRVGGGVGVGELEAWLRWQAAARLDAVTRREMAPHDTDRNGAVTLREFFADWINMGHGKMARWMDKFASADRNGDGSLNAVEFNDFLHPEDTSQESVMLWLLKDKLSEMDHDGDGRINLEEFVAQSDLERAEAEEKFRELDADMDNYLTVEEARSVLQSLITGEFSYATSHAKFLMKADVNQDGKLSLEEMLDDYVSFYSTVYTDDHYSNEVDSDSHDEL

SEQ ID NO: 321111 - protein, 187 aa, Zea mays
  unsure (1)..(187): unsure at all Xaa locations
  Clone ID: MRT4577_55916C.1.pep
RTATVPSRCASSSQFASADRDGDGSLNAVEFNDFLHPEDSSQESVMLWLLKDKLSEMDHDGDGRLSQEEFVAQSHIIISGARHADDGGHAHDLERAEAAKKFTELDADKDXYLTVEEARCVLQSLVTGEFSYATSHAKFLMKADVNHDGKLSLEEMLDDYISFYSTVYMDDHYASEGEVDSDSRDEL

SEQ ID NO: 321112 - protein, 148 aa, Zea mays
  unsure (1)..(148): unsure at all Xaa locations
  Clone ID: MRT4577_55917C.1.pep
GHPLSPGNAGMDIMSPIIACEGXSTCLQLYVLVNVFTGGDDGPCVVRQVLGDGSXQFALGSLGFGDMAAVLPKELEVISPKKSARINILNGSFPGLTGGLMGINGSGGIVRLXNTSEVEILDMGFWPTCPLEMDVFLLCNVSTIEHIL

SEQ ID NO: 321113 - protein, 71 aa, Zea mays
  Clone ID: MRT4577_55918C.1.pep
RPFFSPGPWKNFYEGTGRTPPLFLTGRVIFFSPLKNKPFFPLRFWFYPVPPPPFSKGVAPPFKPGAFFFWG

SEQ ID NO: 321114 - protein, 134 aa, Zea mays
  unsure (1)..(134): unsure at all Xaa locations
  Clone ID: MRT4577_55919C.1.pep
SQPHLAAKLLALYRATISIIHSVHRLNNNGPVFHAARDDXYSGYGAATAVQESRDAGIGXADDSWKTKKALKNLXYPNHKELNTVLMIIXTIPSVALAGXARHLEERMTEDAMVRSFILQCGDXAESFKEFHAN

SEQ ID NO: 321115 - protein, 98 aa, Zea mays
  Clone ID: MRT4577_5591C.1.pep
SPLHTPALLLLCSVIWSGEIGDRTVDSANMADWGPVVVGVVLFVLLSPGLLCELPGTHRHVDFGGFHTNGKAIFVHTLVFFAAFTILTLALHIHIYTG

SEQ ID NO: 321116 - protein, 91 aa, Zea mays
  Clone ID: MRT4577_55920C.1.pep
KFYYRSPSFKILNTPRTLRAMWTQNFGFSRFTNKKIYGDLFFDKTAQDTKANFWDCGKKNLLGKTKTGGNKFSIFPNRDLYFFAATGGGVF

SEQ ID NO: 321117 - protein, 72 aa, Zea mays
  Clone ID: MRT4577_55921C.1.pep
VGSRKNASCLPGMVLNLKKAVSYPNHLGFECSAAGGRLECTMQNIADGFMNTFNYRCSKGIESELNTFIVYR

SEQ ID NO: 321118 - protein, 127 aa, Zea mays
  unsure (1)..(127): unsure at all Xaa locations
  Clone ID: MRT4577_55922C.1.pep
MGPLIVPAIVPSFAPDCNQVGTDSHRWGTNEALIICIXLGHRHAAQRLSLRRAHAXATARGLLRCFSDEISGDLARGMLLCTLHPSWRDPGLPHEPARQRNPGYRLLWDIGYSRTXAQIFRTRRGYH

SEQ ID NO: 321119 - protein, 68 aa, Zea mays
  Clone ID: MRT4577_55923C.1.pep
INFQCILCRLCVYRLPARVTERRKQEDTDAGRSAACRRRRHRFGSTSRRPPFSVSVSCRRALVRDSTS

SEQ ID NO: 321120 - protein, 71 aa, Zea mays
  unsure (1)..(71): unsure at all Xaa locations
  Clone ID: MRT4577_55924C.1.pep
FMGTPPXARPXKKKKKKKKKKLRTLLYKIITCIQKEKVLGLPFWFIPAIKGLWFLRLKVSLKKKKKSPLYE

SEQ ID NO: 321121 - protein, 28 aa, Zea mays
  Clone ID: MRT4577_55925C.1.pep
KARDNNTSGSDNRTMWLIYVVHVVVRVG

SEQ ID NO: 321122 - protein, 84 aa, Zea mays
  Clone ID: MRT4577_55926C.1.pep
MMVTREHPMRSRECQLCHENPLSSPSMTKMIVEAIAALKERKGSSSVAISKYVEGKHGGKLPTNFRKQLTVQLKKLAAAGKLTR

SEQ ID NO: 321123 - protein, 185 aa, Zea mays
  unsure (1)..(185): unsure at all Xaa locations
  Clone ID: MRT4577_55927C.1.pep
MSTEEAVVAEVPVTEVPAEVPAAHVAEAPKAKKAPKEKKAPKEKKLSXGKLTRVKNSFKLPATDAKPKAAKPKAPKAAPKPKPSPKAKAKTAAKPKAASPKPKAKAKAKAKAKPVAPAAASPKPRGRPPKVAKTSAKASPAKAAKKAAAPAKKGKAAAAPKKVATPKKAAAAAPARKGVARKAKK

SEQ ID NO: 321124 - protein, 186 aa, Zea mays
  unsure (1)..(186): unsure at all Xaa locations
  Clone ID: MRT4577_55928C.1.pep
MMVTREHPMRSRECQLCHENPLSSPSMTKMIVEAIAALKERKGSSSVAISKYVEGKHGGKLPTNFRKQLTVQLKKLAAAGKLTRVKNSFKLPATDAKPKAAKPKAPKAAPKPKPSPKAKAKTAAKPKAASPKPKAKAKAKPVAPAAASKXXPXGRPSKVAKTSAKASPAKPAKKAAAPXAKKGKAA

SEQ ID NO: 321125 - protein, 63 aa, Zea mays
  Clone ID: MRT4577_55929C.1.pep
IYVVDPLGVCCNLEPLPLKSMSLSLAVAGSRDLAPSLQPESVLLTLFVTESEKKSLDPRERTP

SEQ ID NO: 321126 - protein, 85 aa, Zea mays
  Clone ID: MRT4577_5592C.1.pep
KDSKYPWGEKNKEMLPANTIHTRRGFHTQPIEMTNNPPLINPRLIKIAPAGGRTTKQPKTRKQKKNHRAARTRPGGSPNVKPPTT

SEQ ID NO: 321127 - protein, 149 aa, Zea mays
  unsure (1)..(149): unsure at all Xaa locations
  Clone ID: MRT4577_55930C.1.pep
MGLYFSAAPMPSFSGGQPAKKEGSKAEMGPAHAKREGRPPPPPXGKTNGPPGGGRRPKRXAPKNPGAKPGXAAPAARPGGPGRGRGARPPPPRCARAPPRPCGGPGGPSPRGGDGPPGGRRRRPPPCRRPXSPPRRGVAGNPTPPGGEK

SEQ ID NO: 321128 - protein, 205 aa, Zea mays
  unsure (1)..(205): unsure at all Xaa locations
  Clone ID: MRT4577_55931C.1.pep
LLSSLRHIHYDPQCSREDGDVDDVPATDPAAEVPEVHVAXAPKVNKAPKENKAPNEKKPSAAKKPAAHPPYAEMIVQAIAALKERXGSSSVAISKYVEGNHGGKLPTNFRKHLTVQLKKLAAAGKLTRVKNSFKLPATDAXPKAAKPKAPNAAPKPKSSSKAKVKTAAKPKAASXSPMPXKVKAKAKPVVPAAASPKPRGRPPKV

SEQ ID NO: 321129 - protein, 192 aa, Zea mays
  unsure (1)..(192): unsure at all Xaa locations
  Clone ID: MRT4577_55932C.1.pep
MMVTREHPMRSRECQLCHENPLSSPSMTKMIVEAIAALKERKGSSSVAISKYVEGKHGGKLPTNFRKQLTVQLKKLAAAGKLTRVKNSFKLPATDAKPKAAKPKAPKAAPKPKPSPKAKAKTAAKPKAASPKPKAKAKAKXPVAPAAASPKPRGRPPKVAKTSAKASPAKAAKKAAAPAAPARKGVARKAKK

SEQ ID NO: 321130 - protein, 244 aa, Zea mays
  Clone ID: MRT4577_55933C.1.pep
MSTEEAVVAEVPVTEVPAEVPAAQVAEAPKAKKAPKEKKAPKEKKLSAAKKPAAHPPYAEMIVEAIAALKERKGSSSVAISKYVEGKHGGKLPTNFRKQLTVQLKKLAAAGKLTRVKNSFKLPATDAKPKAAKPKAPKAAPKPKPSPKAKAKTAAKPKAASPKPKAKAKAKPVAPAAASPKPRGRPPKVAKTSAKASPAKAAKKAAAPAKKGKAAAAPKKVATPKKAAAAAAPARKGVARKAKK

SEQ ID NO: 321131 - protein, 120 aa, Zea mays
  Clone ID: MRT4577_55934C.1.pep
NKPLFLRSRVYLEKVLYLLEVVINNAASQVDCPPHSVQITNNSDIEFVDGTPYQTQVEPSTLEQGHIPDNNQSRDVEVPPSCAKLDVNVHAILTQLPDAELHNLCNILALEGLPDKVYSL

SEQ ID NO: 321132 - protein, 70 aa, Zea mays
  unsure (1)..(70): unsure at all Xaa locations
  Clone ID: MRT4577_55935C.1.pep
MLISAKTLTGKTITLDVEASDTMDIVTANIQDXEGIPADQYRLKYAGKQIEDRRTLADYNIQKESTLHLV

SEQ ID NO: 321133 - protein, 97 aa, Zea mays
  unsure (1)..(97): unsure at all Xaa locations
  Clone ID: MRT4577_55936C.1.pep
PHATIRAPKPFFLGGRHTRSIVGGVPKETSPXRPSPPIGRXGPPSEPAPALDVPFRFLFLRQMLFDPLRRPLSYLLTPERGKKKKSCVLTLGGPLMF

SEQ ID NO: 321134 - protein, 81 aa, Zea mays
  Clone ID: MRT4577_55937C.1.pep
VHVPHFWGRWCGRWALGEICQQCFKRARWTLDTRRCHARSRFSWPITESSQINGPTVTSGLRVAKSIVTVRSVDGAASAEI

SEQ ID NO: 321135 - protein, 228 aa, Zea mays
  unsure (1)..(228): unsure at all Xaa locations
  Clone ID: MRT4577_55938C.1.pep
MLVYVACQHRISQCSPVLSTQDFLNEMSQKDKKVDSLVKMGFPEDEAALAITRCXDASISVLVDSIYASQTAGDGYCGNFAILQGNSNGGRNKGRFMDGNKKKRKRYGGQAQGSRGPLDGSCEEPMPVPNPMVGFNLPDHWTRPVDRSLPTQAIGPPYFYYENVALAPKGVWTTISRFLYDIQPEFVDSKYFCAAARKRGYIHNLPLERRSPLLPIPAKTIFEAFART

SEQ ID NO: 321136 - protein, 74 aa, Zea mays
  Clone ID: MRT4577_55939C.1.pep
HISPRPIYATGPQCSIAPCLITDKALVSSLVSAYIQVLSPPTARYRTEFPSPSSIVWGLESLTRNCTPYKCEHP

SEQ ID NO: 321137 - protein, 206 aa, Zea mays
  Clone ID: MRT4577_5593C.1.pep
CAALVAAGRAAIYMGNAISTTGFLALCASTSAVHMVSFLNPWPGSSATVAAQAPPAVHSGVRIRDLQLLASAAGFFISVGFIYRHHLHRGAGNRRLPEIVPFMLCVCAGVLQFLLFVGASAASGGADVVDHRAEARALGLAALRVLPAAATVTFFLGTMLIFAALISAGGVGGGAAGRRERSRSRLPWASGSSAGWLWLLRRHCSA

SEQ ID NO: 321138 - protein, 149 aa, Zea mays
  unsure (1)..(149): unsure at all Xaa locations
  Clone ID: MRT4577_55940C.1.pep
MSNRPRHAAPRRLASSSTIRRLIQDGDLAVPGSSAEDVAHALRNHRSELRRKRLKPLTEAVRRVLSSDFDDDDDDDSASRGHQGAHATLSSTTCLWDECAHPAAPPYLDATKTMLSSQYASQTSKQNPRTNQHLVMVMTGXKARRLITS

SEQ ID NO: 321139 - protein, 37 aa, Zea mays
  Clone ID: MRT4577_55941C.1.pep
MMGHSNYKVQTTIISVLCTRPTTLYPPRIMFENEREL

SEQ ID NO: 321140 - protein, 94 aa, Zea mays
  Clone ID: MRT4577_55942C.1.pep
MEWWQKAVVVPVKRAWIAAAARLTTRHKKEDGGHGVLVKLHDDVQTCAYEDVQVMWEMLQRAETERLAREPSPKGARALVWLRRHHKMDPRRRC

SEQ ID NO: 321141 - protein, 35 aa, Zea mays
  Clone ID: MRT4577_55943C.1.pep
RIATVNMLGIRKVLSPYDLTHRGRYWGKFYMPERV

SEQ ID NO: 321142 - protein, 69 aa, Zea mays
  Clone ID: MRT4577_55944C.1.pep
APYIDRGQSISTFPKKIRNKERNAEIYQALSFESRSKAVVDEPLEILESLLLVVVVIVVAAVVVKEPPL

SEQ ID NO: 321143 - protein, 114 aa, Zea mays
  Clone ID: MRT4577_55945C.1.pep
NSARQSPPCFFHCLVTTLFLPDPRGSTTFLSPGSQGGEDFPRQSRRRLSSLSNPPPSPLPTNPPSSIASFSPSHSRTFRGSPLRLPRVERAATAGTALHRRTAGGNHSCTLAKG

SEQ ID NO: 321144 - protein, 48 aa, Zea mays
  Clone ID: MRT4577_55946C.1.pep
IINFMGGFLFKVCYLFKQKFWVPMFTTPNGKIANNTLLKGEENIPYLI

SEQ ID NO: 321145 - protein, 72 aa, Zea mays
  Clone ID: MRT4577_55947C.1.pep
QPPLVFARYKDGGNIFPMPWLPDPKYAQALAVALRLFQVQKSGKMVNNTIPWRGDSVLRDREDAKLDLSRGM

SEQ ID NO: 321146 - protein, 92 aa, Zea mays
  Clone ID: MRT4577_55948C.1.pep
HHVPGITSPSMLDKVSQIKILLAEIVFVVCDLLILERQKLPHTLNNIKFKVNYCATAVLSLNLMCKSSSGRTYSMLVSIELQICLHLENENK

SEQ ID NO: 321147 - protein, 126 aa, Zea mays
  Clone ID: MRT4577_55949C.1.pep
PLGLLVRCGLCECSWRSTADIRTHGSLRRRPERDPDWGVQRHRRANGANTGAGRCTTNCGGQELMPLARRLRTLASARRYGVKLYMVELYHLVMDCVGTYLLKLINRGLSLMILINNARFMAIPCA

SEQ ID NO: 321148 - protein, 62 aa, Zea mays
  Clone ID: MRT4577_5594C.1.pep
NNLVGESFFPRERVKGLKAEKFSFQYGFYKKQLCQNSHEKTCVGGTHYGKNGKKIGVQRWNT

SEQ ID NO: 321149 - protein, 38 aa, Zea mays
  unsure (1)..(38): unsure at all Xaa locations
  Clone ID: MRT4577_55950C.1.pep
KKKKKKNKKIKKXKKKRKKKKKKKKKKKKKKKKKKKKK

SEQ ID NO: 321150 - protein, 61 aa, Zea mays
  Clone ID: MRT4577_55951C.1.pep
ATRARGSLFNPRPAISAMIANHYKLREQRRQLQPKREWGATEEAHLHQNSAQHLDSGAHGT

SEQ ID NO: 321151 - protein, 79 aa, Zea mays
  Clone ID: MRT4577_55952C.1.pep
RTCVRLTREPKKRGGCETKHDAKFPTRPDLTGARSESESRIHLGYGRAWLNGKTLGCSVTLISSLAAYLYIYSYSNYTI

SEQ ID NO: 321152 - protein, 54 aa, Zea mays
  Clone ID: MRT4577_55953C.1.pep
NARGVGEKALVGSIFTLLGGAGASGGALTINPSAYALVSGPGPNASSQEGVRSP

SEQ ID NO: 321153 - protein, 157 aa, Zea mays
  unsure (1)..(157): unsure at all Xaa locations
  Clone ID: MRT4577_55954C.1.pep
ENLSEEEIVGLKEXFKSLDTDNSGTITLEELRAGLPKLGTKISESEIRQLMEAADVRGNGTIDYVEFISATMHMNRLEKEDHIFKAFEYFDKDHSGHITVDELEEALKKYDMGDEATVKEIIAEVDTDHDGRINYQEFVAMMKNNSPEIVPNRRRMF

SEQ ID NO: 321154 - protein, 189 aa, Zea mays
  unsure (1)..(189): unsure at all Xaa locations
  Clone ID: MRT4577_55955C.1.pep
GPTHASNLSEEETXGLEGKFKSLDTDNSGTITLEELRAGLPKLGTKISESEIRQLMEAADVDGNGTIDYVEFISATMHMNRLEKEDHIFKAFEYFDKDHSGXSLRTPPFRYFSPLTLTLFVACTFMYRHITVDELEEALKKYDMGDEATVKEIIAEVDTDHDGRINYQEFVAMMKNNSPEIVPNRRRMF

SEQ ID NO: 321155 - protein, 469 aa, Zea mays
  unsure (1)..(469): unsure at all Xaa locations
  Clone ID: MRT4577_55956C.1.pep
HWVPRGRPMEDVRASYTFGRELGRGQFGVTYLATHKPTGHRYACKSIATRKLAHSDDVDDVRREVQIMHHLTGHRSIVELRGAYEDRHSVNLVMELCEGGELFDRIIARGHYSERAAAALCREIVSVVHSCHSMGVMHRDLKPENFLFLNKREDSPLKATDFGLSVFFKPGEQFRDLVGSAYYVAPEVLKRRYGAEADIWSAGVILYILLSGVPPFWAENEDGIFDAVLRGHIDFASDPWPSISNSAKDLVKKMLRQDPKERRTAAEIXSNHAXIREDGEAPDKPLDITVISRMKQFRAMNKLKKVALKVVAENLSEEEIVGLKEMFKSLDTDNSGTITLEELRAGLPKLGTKISESEIRQLMEAADVDGNGTIDYVEFISATMHMNRLEKEDHIFKAFEYFDKDHSGHITVDELEEALKKYDMGDEATVKEIIAEVDTDHDGRINYQEFVAMMKNNSPEIVPNRRRMF

SEQ ID NO: 321156 - protein, 97 aa, Zea mays
  Clone ID: MRT4577_55957C.1.pep
IKLCPPVGPKPRGPCPPPGFGRGGPLVLHMDDLGRFFFPGFPFCYFTPKVGFFFRALPFQFFPLFLGQAFFFPPCVFFLPFWAPFGPPAPFLLFPLP

SEQ ID NO: 321157 - protein, 256 aa, Zea mays
  unsure (1)..(256): unsure at all Xaa locations
  Clone ID: MRT4577_55958C.1.pep
GSPPPPPPGSLPSILSGTSRPVQFTSVRDRDYTDGGASEPSRRRANGDSSDILPPPQRAPRAASCRAAPRSGLFRARHPHLPFRRLFLPASXFSGIRRAVAVDSEQGSPESPEQEKKPKTYYFLVANAKFMLDEEEHFQEQLAEKLRNYAERDKEQDFWLVVEPKFLDRFPNITKRLKRPAVALVSTDGNWITFMKLRLDRVLQDQFDAESVEEALASNPVELKFEKPEKWTAPYPKYGFGWWEPFLPPKFSNGTA

SEQ ID NO: 321158 - protein, 228 aa, Zea mays
  unsure (1)..(228): unsure at all Xaa locations
  Clone ID: MRT4577_55959C.1.pep
GSTHASGRDARGSAEQQTARHTPPLQQWRAPALCAWRCCASWPRTRPWRRNPPRSRPPHRPPPPPHRRTRPRRRPRQPRRRPPPPPPWPRPPRRPPPLPPPRPPRPRQPPXPAAAPPKASPPAPAPKXPRPPHPPPRRWPSCRPPPRPLPPPPPPRPPSPPRSPRPRRPRRRRTPPRPPRTRRRSPRPQPPPPSSPRHPPAPSTPRLRRPQPAKPTRPARSATPPPPT

SEQ ID NO: 321159 - protein, 99 aa, Zea mays
  unsure (1)..(99): unsure at all Xaa locations
  Clone ID: MRT4577_5595C.1.pep
MRALKEPNKNMKLDKRLAKKCHAFXASEAIIQQIPRLHGPGLNKARKFPTLGTHQESLXSNVNETHATPKFQLKKALCMGVTVSDLPMEEKQIQPNIQM

SEQ ID NO: 321160 - protein, 143 aa, Zea mays
  unsure (1)..(143): unsure at all Xaa locations
  Clone ID: MRT4577_55960C.1.pep
HTRAHARAGYGGHHHLLSCSVCVTTLAAAKARQHPNALAGANSTTNYKGKRRNVMVIWHGHPSVGGAPDHGGVCGIKNVNLPPXRGMTDYQNVPIVEDXKGCGSCYEVRXDKXPECWRYPLTMYMTDMNYDAIGRYHFDLMRK

SEQ ID NO: 321161 - protein, 34 aa, Zea mays
  Clone ID: MRT4577_55961C.1.pep
NDLNLAGFLLRWLIKLKKTQKKKKKKGRQKTSEL

SEQ ID NO: 321162 - protein, 317 aa, Zea mays
  Clone ID: MRT4577_55962C.1.pep
MGGLCSKVSAVDKSPSDTALGRNQVADHEPGASLELEKPPVSRESAAPAKRLDEQLQSFSFLESVVPGVAFHAGANTGGEAGSRTSPQLTRSLSQRAGVGKAKAGAAKVSEVSSILGRASTAGLEKAVEVLDTLGSSMTSLNSSSGFVSSSAAKGNKISMLAFEVANTIVKGSNLMRSLSEPSIKHLKEVVLHSEGVENLISKDFDELLKMASADKREELEVFTREVVRFGNRCKDPQWHNLDRYFEKLASERTPQSYLKEKAESVMQKLVTCVQNTVELYHELHALDRFEHDCRLKQKEQDGLSSRGDNLDILKQE

SEQ ID NO: 321163 - protein, 274 aa, Zea mays
  unsure (1)..(274): unsure at all Xaa locations
  Clone ID: MRT4577_55963C.1.pep
IPTRQWGPPSQLALSYLISHPCPHLLRHLQKLGGIWADRIGGALAWSSLLSSRSRDRSILHHDIRAQEDYVSKLTGHKSEDYGASQCMSAIAGSYGYIAPXNAYTPKVNEKSXVYTFGVVLLELVTGKKPVGEFWDGVNIVHRVKSMTNTNKEQVIKIIGPRLSTVXHKVMHVFCVALLCVKEQSVQQPMMRKMVQMLNELPNPAAGKEMRFPTATIFPLHNRILQQQMDLLKRRVTKSPKSSSKRDLCYVSFSLLTTDLIKLGFSHCYVSLSW

SEQ ID NO: 321164 - protein, 60 aa, Zea mays
  Clone ID: MRT4577_55964C.1.pep
MRPGLVGPSPSHFGRYSALALLNRTKSVHDALRIMSAAALSKPTILIPKGDFLVGQLNFT

SEQ ID NO: 321165 - protein, 55 aa, Zea mays
  Clone ID: MRT4577_55965C.1.pep
LVGPIGRSVWQIIKGAFFLVEHGFFFFQLKDRSCISLDNRLYMPALDRGAFNNQK

SEQ ID NO: 321166 - protein, 65 aa, Zea mays
  Clone ID: MRT4577_55966C.1.pep
IQSCTFFQSLLHRHLQASDNQISIHVMPYVLETIEVSTRERSRSDSTTFSFLVYSDEPDAWADAW

SEQ ID NO: 321167 - protein, 68 aa, Zea mays
  unsure (1)..(68): unsure at all Xaa locations
  Clone ID: MRT4577_55967C.1.pep
QXAQGREGGRDSFFLAPALAASLIFEYNLRVGRIQAREIRARGHQSEQTCRPPPSPCTLPCFLXCVHP

SEQ ID NO: 321168 - protein, 59 aa, Zea mays
  Clone ID: MRT4577_55968C.1.pep
GGDFKKKTGKSQGKEKGDRDLDEPLLPNQERLTASGYAEALLDQKPDTNTYTLTQTLSQ

SEQ ID NO: 321169 - protein, 296 aa, Zea mays
  Clone ID: MRT4577_55969C.1.pep
MGDVAKDLTAGTVGGAANLIVGHPFDTIKVKLQSQPTPAPGQLPKYAGAIDAVKQTVAAEGPRGLYKGMGAPLATVAAFNAVLFSVRGQMEAFLRSEPGVPLTVKQQVVAGAGAGIAVSFLACPTELIKCRLQAQSSLAEAATASGVALPKGPIDVAKHVVRDAGAKGLFKGLVPTMGREVPGNALMFGVYEATKQYLAGGPDTSGLGRGSQVLAGGLAGAAFWLSVYPTDVVKSVIQVDDYKKPKYSGSLDALRKIVAADGVKGLYKGFGPAMARSVPANAATFVAYEITRSALG

SEQ ID NO: 321170 - protein, 87 aa, Zea mays
  Clone ID: MRT4577_5596C.1.pep
FPERLPRGFFSGGRGQQSICGPSRPRGFGHGSTAPSVICPPRQGLGPPGVWVVLLSGRALVCSVSAGPFVWLPFLILGAPVGLAPPF

SEQ ID NO: 321171 - protein, 123 aa, Zea mays
  unsure (1)..(123): unsure at all Xaa locations
  Clone ID: MRT4577_55971C.1.pep
PPINFGHHPPEPTGKKGGGDQPRRDQPRRVEKGTPEKDPPRSPXRGQHRAPTGGPQTRPXETAEPEGPQPGQGEAGPRQGARPPEQPPGREDAHTQGPPGAQPPPKDGADAPHARAAERKKHR

SEQ ID NO: 321172 - protein, 116 aa, Zea mays
  Clone ID: MRT4577_55972C.1.pep
KKKKNPGFNYKQKIYLRLVKVWGGTKKKKKRGLLNQTRKLRPNRKTWTTPHGRGPQKTQGQGQLKRPKTYGPQGKRGKRGGGPPFGMGEKAKGRPSPSGGPKKNKGGGPGEKPPLT

SEQ ID NO: 321173 - protein, 72 aa, Zea mays
  Clone ID: MRT4577_55973C.1.pep
MHLQFLCIVLLQVQSVMLHTDDELMMADEQKKKKKKKKKKKKKKKKKKKKKKKKKKTSPQKKKKKNKGLSPA

SEQ ID NO: 321174 - protein, 46 aa, Zea mays
  unsure (1)..(46): unsure at all Xaa locations
  Clone ID: MRT4577_55974C.1.pep
GTRVKKIALHAFNQAIKDITDESSNSNERFVAITLLPTVYSLWXHX

SEQ ID NO: 321175 - protein, 106 aa, Zea mays
  Clone ID: MRT4577_55975C.1.pep
FLFCCNHKKPNDLPPHPFPYFERPDHPKKNSLFWEIHPKNKLQGVGKKKKWEEWNRLIKPPLKFFSGRSKTWCSGKRTPRLMAPTSLYPPCWEKKIRGSQLPKGGF

SEQ ID NO: 321176 - protein, 44 aa, Zea mays
  Clone ID: MRT4577_55976C.1.pep
SRIHQLEATNQAMMRCKAKTILETYEAKEDDGRYSSGAYPKSTK

SEQ ID NO: 321177 - protein, 79 aa, Zea mays
  unsure (1)..(79): unsure at all Xaa locations
  Clone ID: MRT4577_55977C.1.pep
MSRTNGKDGSKLQELRLSLSRSRGGVGGSPGASTQHYGGGGGFAQEAFVRRLPDRFSVEXARVDGGQHRGGGRWRRRVH

SEQ ID NO: 321178 - protein, 224 aa, Zea mays
  unsure (1)..(224): unsure at all Xaa locations
  Clone ID: MRT4577_55978C.1.pep
PPPPGGGCPPPPGPMFQGQAGFSAGGPQLPAPPPGRPPXGFPAKFFPGPLVAEKAQVPPAGPPAPWPXPPGXGVAPPGSEXGPSWGVGPPPPPPPVPLLSGVRRVPPPPPPWXGAPPPPPGPSPVFPLGLFCFSGGVCVFFWGGWSFFPPLSPPPVGPPPFFFLFLLLGPGPAGAACFVVWPPPPLLVALSVGGGAFCVCWGLWVLLYWCVVKIKGIQFFTYRK

SEQ ID NO: 321179 - protein, 68 aa, Zea mays
  Clone ID: MRT4577_55979C.1.pep
QRGVWSFQITASLFLVFATVFGALFKIVLPRKMWALDVVLFFFIPREVPKKGVFSGFFNFFSRAGGKD

SEQ ID NO: 321180 - protein, 258 aa, Zea mays
  unsure (1)..(258): unsure at all Xaa locations
  Clone ID: MRT4577_5597C.1.pep
MERATADPHLLLLPWQGAISHIIPMTDIGRLLASHGAAVTIITTPANAPLVQSRVEDLAAALHRPRRRPSCVVAGMCHSWALGLARELRAPCYIFHGFGAFALLCVEYLYKHRPHEAVSSADELFSIPALPAFDCRVSRAQLPQHFAPSTSMGGGTLQEIREFDVAVDGVVVNSFEELEHGSCELLAAATGKTVVAVGPVSLCHQHPMTMTDDDDGGGGRRVLEWLDXKETSXVVYVSFGSAGCMPPAQVVQLGMALA

SEQ ID NO: 321181 - protein, 77 aa, Zea mays
  unsure (1)..(77): unsure at all Xaa locations
  Clone ID: MRT4577_55980C.1.pep
KVQMRTYYMDIIAERGIDAHYRGRGVGFAPVHAVISRGRNXRGKKDXLNNTSLDLRIGXLTAVREWHEEIVGHLSYR

SEQ ID NO: 321182 - protein, 88 aa, Zea mays
  Clone ID: MRT4577_55981C.1.pep
LWACCAATGLFRTVYSFLQPPSQPCRSLAWQCFHACSYGVVWWSSCRSGHVRFPRCCCGASLYPWLEVVFHLPRALAVLAAHKAIKKL

SEQ ID NO: 321183 - protein, 86 aa, Zea mays
  Clone ID: MRT4577_55982C.1.pep
PRVRPRVRRLMSHMNKLMTRAAGRPPLATTAWYQSILTLSTGYDHRLTETYLVDNEFETEFVMTKEELYEQSRCKHELRNKKADLL

SEQ ID NO: 321184 - protein, 202 aa, Zea mays
  unsure (1)..(202): unsure at all Xaa locations
  Clone ID: MRT4577_55984C.1.pep
MRVKKNVPKIDRKRDYDMKLCKLLNEYSSVLIVEADHVGSTQLAAVRRGIRGESELLMGKNTLIRRCIKVHAEATGNDKIKAIIPLLEGNVGLIFTKADLKKVREEVAKYKVGAPARVGLVAPIXDVVVPPGNTGLDPSQTSFFQVLKIPTKINKGTVEILAPVDLIKKGXDRVGXXSKAALLAKLGIRPFSXYGLVITNIY

SEQ ID NO: 321185 - protein, 138 aa, Zea mays
  Clone ID: MRT4577_55985C.1.pep
VAVAYVSQVQGTLFLAMEILLLEENGYVDLRQGIGHLINAIVAVIGPELAPDSTFFSRCKSVIAEISSSNEMATLLESVRFSQQLVLFAPQAVPVHLHVQGLIPMLYSRQPSLRYLAVSTLHHLIERDILDMMYTISE

SEQ ID NO: 321186 - protein, 74 aa, Zea mays
  Clone ID: MRT4577_55986C.1.pep
RPEICGACLNRRCTVMISTDCHCARALAQIPVGAILPCRSRYDHAHRNCRYSMESLWLTMCACMYLGADNELPV

SEQ ID NO: 321187 - protein, 67 aa, Zea mays
  Clone ID: MRT4577_55987C.1.pep
MACDDHASLLPSDFSLYLSLFIVYTVQANMTTLRWDLCAPLVQSYQNTHRSTVITHLLNPILTDNIR

SEQ ID NO: 321188 - protein, 105 aa, Zea mays
  Clone ID: MRT4577_55988C.1.pep
ARNSARARLSPPVSFPPPSPTNKGGFIKTMPGYPHGTQPLTHTEGQHAHQNPAPPAGDQHAQPTRPEPNPPEARAPHQDKNHNPAREPAAPPHRTKPAHTTTKQP

SEQ ID NO: 321189 - protein, 131 aa, Zea mays
  unsure (1)..(131): unsure at all Xaa locations
  Clone ID: MRT4577_55989C.1.pep
MAGPLSRPRNASDDRINELPEVLLSDILSRLGTAEAARTVVLSTRFRDAWLATPLRLDDLELPVPARGNVSLIQPWTARADVVTRALASHPGPVALFRLSRTSFRGRVPAAEXWFRELGAKRVREVSLWFS

SEQ ID NO: 321190 - protein, 84 aa, Zea mays
  Clone ID: MRT4577_5598C.1.pep
FYSVHLQYKAVDSYIKLARGCPLRPACPARANWLYFEVLYASRWWHRLVILTMTDSASVCTNPGTRIFLDVDTFFIPWKIHNHG

SEQ ID NO: 321191 - protein, 188 aa, Zea mays
  Clone ID: MRT4577_55990C.1.pep
MGGGKDDGHDPSKADKGFHGGGYPAAGGYYGGQYPGGGYPAPPGGGAYPPGPGYPVPPGGYPPPGGYPQPGGYPPSHGAYPAPGAGAYPPSGYPHQPVYPQPGYPSMPGHGGMYGGGHGAGGSAGHGAMLAGGAAAAYGAHTVSHSHGMYGHGHGHGKFKHGKFKHGKFGKHKKMFGKHKNMFGRKWK

SEQ ID NO: 321192 - protein, 105 aa, Zea mays
  Clone ID: MRT4577_55991C.1.pep
ENPRGTGGVFFFFFFKLFDQTGGFWAPPTLLLDFFWAGGGGFKPQAFFLCERVPLFQGPGGGGPTGASEFLILGSSRGGGGVPGSGNSVNTCGATPLVRFFSGRG

SEQ ID NO: 321193 - protein, 90 aa, Zea mays
  unsure (1)..(90): unsure at all Xaa locations
  Clone ID: MRT4577_55992C.1.pep
ALEQVKLSPRVAAVAPFRRLPIPLPRPSPRIRLLPGLQYMGCPTPTGANRLSTPTPGCRGFLPKQQQQQQHLMGFRXPAVGLTLPKHKAK

SEQ ID NO: 321194 - protein, 75 aa, Zea mays
  Clone ID: MRT4577_55993C.1.pep
LMRGSNARDVEAELPASRSRLFATWSGFLRWLLVRMVNRQRKPNRELCGEWIGATNSHQIQIALGIITFAVKFPA

SEQ ID NO: 321195 - protein, 82 aa, Zea mays
  Clone ID: MRT4577_55994C.1.pep
SKRFSKPLQIVNTNDIPVCNTVEQLARFFPLFVITVSTMYLILFHYYLFIYFFYCLFLFFFFFFFFFFFFFFFFSDAWADAW

SEQ ID NO: 321196 - protein, 121 aa, Zea mays
  Clone ID: MRT4577_55995C.1.pep
ATDADIWKLRAYANMIPMETISIRTDSSDITSKYRDSVIAEDSPGRRSYAPAQLLWMKLPTIHLPSLPTIRMSHNERLAIYIYISPEGGYVYHESTAIPVHRFHVAPLISDELEWRSSSSS

SEQ ID NO: 321197 - protein, 67 aa, Zea mays
  Clone ID: MRT4577_55996C.1.pep
CAAPSCSPLWPVTASHVVTREERRVDVAAGLRSYALPLVAQVPDRTVLARPSIVSAYSAPRRRQCSS

SEQ ID NO: 321198 - protein, 69 aa, Zea mays
  Clone ID: MRT4577_55997C.1.pep
NQKHTMAAPELILIGCYLFTLNSNTFCLYKGLLRVALTHLQVHKGQQPAIQPFVWTGGRQSKPLFAQEF

SEQ ID NO: 321199 - protein, 132 aa, Zea mays
  unsure (1)..(132): unsure at all Xaa locations
  Clone ID: MRT4577_55998C.1.pep
FGSRSGHTILGTNPSGHDIMNCNDNEGLFRNYPVFDGGTXNALLSQALAKQVYYPILLNDVQLPCMMERGLLRTVTDYNWNRLHEXAVELARNLDDTDGICXIKYSVDDVLDTXLEKNIMNITDNGTLNAIG

SEQ ID NO: 321200 - protein, 166 aa, Zea mays
  unsure (1)..(166): unsure at all Xaa locations
  Clone ID: MRT4577_55999C.1.pep
HGPFLGTLYLNNILVAPNIIQNPLSVRRFTTDKRRSMEFDPXGLTIRDLTTHAVVARYDSSSPLYPIRFPTQPSFAHVVQPYVVASTAPASTWHFCLGHPGHDVLSXTLGHSLPSRRXTTSLCHAYRLXXHTRLPFYSSISRATHPFDLIHCDLWTXHVPINTSRS

SEQ ID NO: 321201 - protein, 508 aa, Zea mays
  Clone ID: MRT4577_5599C.1.pep
MERATADPHFLLLPWQGAISHIIPMTDIGRLLASHGAAVTIITTPANALLVQSRVEDLAAALHRPHGHGAAGTITVTAIPFPAAEAGLPEGSERLDLLRSPADVPRFFHANRLFGEAVARYFRGEALPPRRRPSCVVAGMCHSWALGLARELRAPCYIFHGFGAFALLCVEYLYKHRPHEAVSSADELFSIPALPAFDCRVSRAQLPQHFAPSTSMGGGTLQEIREFDVAVDGVVVNSFEELEHGSCELLAAATGKTVVAVGPVSLCHQHPMTMTDDDDGGGGRRVLEWLDTKETKFVVYVSFGSAGCMPPAQVVQLGMALASCAWPVVWVLKGADSMPDDVKEWLRESLDDKQCLLVRGWAPQVAILAHRAVGGFLTHCGWGSTLEAIAAGMPMATWPLFAEQFINERLVVDLLGVGVSVGVTKPTENILTASKLGADVEAEVGMEQVAKALERLMDQGSQGEHRRRKAQELKAKATGALQDGGSSYMNLEKLIVQSSVSRPNTCGV

SEQ ID NO: 321202 - protein, 87 aa, Zea mays
  Clone ID: MRT4577_559C.1.pep
RTYSNGIVGPMAFLFSSLFARHLNVVSFSFFYNLYAHREKGRSSAAAVSHRRGVGMSKEGRRGAGLAGQNGDGATRKGRARPGTIFL

SEQ ID NO: 321203 - protein, 653 aa, Zea mays
  Clone ID: MRT4577_55C.1.pep
MGKNNKRKREPTPPSEEFGDSEYSEEEFSSESEGSPAPIPLCESSDDSDDSQGLAAEVWTYIRAVERSGLEGSDESEYSSDEEDSDGGGEDEDDDDDDDGGGDSDGDDELPMGVPNPLLIPMWVLHLLLIPMGEEENEIPLTQKNSRQFIASGESSGVPSPALSALIGLQELSLANFDQTLEDMVPEDLLSELVDDGVMEVCADVPDAGLRSSRASSTLERDLEGRETDLDRPGPMEVAEGPSTLEVATAENLDPKDGADTCPAPEDVAGDDLARVGSVSHCPAPEGAAGDDPAQVGSANYDPAPEGARAGSPSCTSMDVHAGSPPHSGYMVVAQTLDQGVALEDSVPADRVLSSVDGTELVSAGLLQAASGGGLTPGYQLISLDLGIPSFFSNLQALVDGMASQLRLQGASVPEVASSLACWNPVSLQRRVSELEATNAGITRQISTLEEKHSRDQAELVSAALDDANALSSSLHAQLNSEKEEKRILAASRDSLDRLYRDSSNSLTILERSHRFTMEELDNQRCKLQESTDEVARLKQLISAKDATIKELRASKKSIVQELETARLAAKVAEETSVTLRAQRDRAMDKAIRAGRILMRRPGVVVPEDIRADVNAAPDSSSRPSSSIAPEKNITKWRNVLRALSVRLAWSDI

SEQ ID NO: 321204 - protein, 177 aa, Zea mays
  Clone ID: MRT4577_56000C.1.pep
ISREAAIGVQHRVVRHSGCITAPGNLLVNLGACMANRSYLYSLSNRPTSYEDRPQTISGLSEWAYDVPFMYRLLMSGDPQLCASLVSDGLDDSKMPLYAVSSPFDPGFARVRRFVAIVRVLISGHAAQKPAVTAADAPEPTLIDRMRRWAGLASASPAPKPASEMTPAAAPAAVDPG

SEQ ID NO: 321205 - protein, 49 aa, Zea mays
  Clone ID: MRT4577_56001C.1.pep
SIPTYTASSLQSLRRASILPWQWPSTALQNTQQAAAATAPAKQRQADQA

SEQ ID NO: 321206 - protein, 93 aa, Zea mays
  Clone ID: MRT4577_56002C.1.pep
QMGGPHAQHGHCCPRMGYVSSILVAWHVSPCISLLLLEGQYSQAPHVPFCYNWRKCSTRRLCIVVVLGYFVRWALRQVFSNKLSQAILVKSIK

SEQ ID NO: 321207 - protein, 80 aa, Zea mays
  unsure (1)..(80): unsure at all Xaa locations
  Clone ID: MRT4577_56003C.1.pep
KNGHVETKYFCFLMLLGPSARAATATIFPQCLQAPIASLLPPYLSSXVSTIXENPILQPYKIQQAITTSIYTFITLVIQQ

SEQ ID NO: 321208 - protein, 258 aa, Zea mays
  Clone ID: MRT4577_56007C.1.pep
MAPAVRLKRSATQTITLPPPDARLAVRDVMRSTIPSRPAEAPASTERPAPAAALQGFLCLEEVDGRRWSYVVDGGSAKGRGSGGVAVPAGASVRAVPLQSPLPPAEEIMSFIRSYVVPEGFPDSVTPSYVPYMNWRALKHFFGGAMGVFTTRTLLSSVGVSQSKDGAGRVGKMLFARQGKKFDNDLKQLRFSSDLLLEIGAGIELTTAAFPQFFLPMACVANVVKNVAAVTSTSTRTPIYKAYARGETIGDVTAKGNL

SEQ ID NO: 321209 - protein, 50 aa, Zea mays
  Clone ID: MRT4577_56008C.1.pep
QSSRIELYLPFSRPWRRRQDGGSTGDVKCDPRFQAIATQVAVTLWLMELS

SEQ ID NO: 321210 - protein, 63 aa, Zea mays
  Clone ID: MRT4577_56009C.1.pep
GRRRARRRAARARALAGSTRAPSCLTTSEWLRTRTLLIKGALANIMDYLFKNMAGRGFHSFHL

SEQ ID NO: 321211 - protein, 59 aa, Zea mays
  Clone ID: MRT4577_5600C.1.pep
GTSQVVHVHLVASNYSTSSSTSLMRLFRICEPMYVIGIAGAGRAYYSCSGRCVVLAIYI

SEQ ID NO: 321212 - protein, 228 aa, Zea mays
  unsure (1)..(228): unsure at all Xaa locations
  Clone ID: MRT4577_56010C.1.pep
MAPAVRLKRSSTQTITLPPPDARLAVRDVMRSTIPSRPAEAPASTERPAPAAALQGFLCLEEVDGRRWSYVVDGGSAKGRGSGGVAVPAGASVRAVPLQSPLPPAEEIMSFIRSYVVPEGFPDSVTPSYVPYMNWRALKHFFGGAMGVFTTRTLLSSVGVSQSKVIPGAIAINWILKDGAGRVGKMLFARQGKKFDNDLKQLRXSSDLLLEIXAGIELTTAAFPSVFL

SEQ ID NO: 321213 - protein, 132 aa, Zea mays
  Clone ID: MRT4577_56011C.1.pep
PQSVIPSPRHTHGSILLSALAPPGSSPSSPRRGALVQSGSPFVAPRLCRRLGPRSPGFGGAPHRPTPAGSGNCHSAALLGAGRSSGDSARDREEQWRAASFLLFGPGLRNYLDPPLHLSPPPHTLHRSSTRA

SEQ ID NO: 321214 - protein, 103 aa, Zea mays
  Clone ID: MRT4577_56012C.1.pep
RDAFATDTSQLRLESPSPGVLSTRCSSRYSRSATGDSGSDELELLISYRTLFDITGRSVQIGLMAEETLLALDNSTTICFRADMSFFNLEITMFFLLRTSCSS

SEQ ID NO: 321215 - protein, 27 aa, Zea mays
  Clone ID: MRT4577_56013C.1.pep
LENLADHIADPVNNNAWAYATNFVPGK

SEQ ID NO: 321216 - protein, 52 aa, Zea mays
  Clone ID: MRT4577_56014C.1.pep
VVSRDQNGYRNKADMYKNSMLTFFFVTRHIFISKNKIWYRFFMHYLLIRTKD

SEQ ID NO: 321217 - protein, 67 aa, Zea mays
  Clone ID: MRT4577_56015C.1.pep
PRLPPLQRPGRGSTSSSPSHLSTSYSSPIWRFGDALGFRAIGATCFDLEACEMRCVATTQIRELSSV

SEQ ID NO: 321218 - protein, 98 aa, Zea mays
  Clone ID: MRT4577_56016C.1.pep
LMSSPSRTRSRSPIIWWLRAPRLGIVPLLAPAQCKDPLLLVWFRVNQLPLQLRQIIMTDISLLHLVKSVPSVVGHLLPVVPSTVPPVPAVRAAADKRA

SEQ ID NO: 321219 - protein, 111 aa, Zea mays
  unsure (1)..(111): unsure at all Xaa locations
  Clone ID: MRT4577_56017C.1.pep
NKGTNKGKSGLPDDVPAPPPAEGATDTEAWPPQPGTITLTAATDAAAXGSKTEYNFICYASTCPCGGXTESSRGTAYSHSFCDLSSSESTASSYDAREERWDLTWLLDPLA

SEQ ID NO: 321220 - protein, 122 aa, Zea mays
  unsure (1)..(122): unsure at all Xaa locations
  Clone ID: MRT4577_56018C.1.pep
AQQVFPIKQLSAINFGXNWHHHQFQLSKYLVANPNQFXPINQLATINFSGXLPQPPLIPIHQVSGGKPGTFFNQPQVVPVQQAGGPNGGPLLPLPPMVPIHPPGFANPTXFTHHPTMGGALL

SEQ ID NO: 321221 - protein, 125 aa, Zea mays
  unsure (1)..(125): unsure at all Xaa locations
  Clone ID: MRT4577_56019C.1.pep
YHRRHLDACPHTKQYRSNCSGPFSWLELARWHARPRTEKKPAVNKPLQDEPATDMDDKDQLGNKPNADKRLPXGXSTCHAQGMMGTRTSNKTVTTYTIYILKVLNLVHPIIGMSVKAMYIMIFTS

SEQ ID NO: 321222 - protein, 53 aa, Zea mays
  Clone ID: MRT4577_5601C.1.pep
RNSRDLQFNSYIPNLTQNNISLKHIITIVSAIGNEHSKSFLNHPKNILLNIIN

SEQ ID NO: 321223 - protein, 111 aa, Zea mays
  Clone ID: MRT4577_56020C.1.pep
GGENHTFLVENPIFLGKKHYISKFLLFFRGEGGKIKTNFFKKSGPPGGLNGGEGFQLTNQAQHPRGVGRVNGHSCSLGPPGPPGINWPPFLAPGPPGRPFHQALNWGRPWT

SEQ ID NO: 321224 - protein, 102 aa, Zea mays
  unsure (1)..(102): unsure at all Xaa locations
  Clone ID: MRT4577_56021C.1.pep
LDNNLVIIVLNDDYLXYLVVHSHVDKDNLIDVHLVDLVQNDNNHYPDLVLSSVLLNSFNLPRVLSSVLLSSTCTWSFNSNCCELKPYWEFYTGNFKPISRNR

SEQ ID NO: 321225 - protein, 112 aa, Zea mays
  unsure (1)..(112): unsure at all Xaa locations
  Clone ID: MRT4577_56022C.1.pep
ACTLQTDLYLWIMKSSGGPXIXYIDIDGDTLDELMLSXTHMKGLRPLLTFSTNFDEQAHWKLVKEMITQICASSKDHRXSKXFHDHVFVLSFDDGNVLFSNYQILVPHNEID

SEQ ID NO: 321226 - protein, 96 aa, Zea mays
  Clone ID: MRT4577_56023C.1.pep
RPGLSPASARSVEPWADSKATSAVTLRTRKFMTNRLLARKQFVLEVIHPGRANVSKAELKDRLANPYQPKESNYLIRHLFLPNNHPTLKHNISSYS

SEQ ID NO: 321227 - protein, 55 aa, Zea mays
  Clone ID: MRT4577_56024C.1.pep
PPPINITTHTLLAQISTKLPSNYYSTKLESTDFILHCLLNNHFDTKHLQIILTTQ

SEQ ID NO: 321228 - protein, 65 aa, Zea mays
  Clone ID: MRT4577_56025C.1.pep
PTRPKSNKSSSRLNARRTRPGTGRPQSLSQPHSNLQQVCQSTGSMLPTPIMEETAYFLLIPKMNS

SEQ ID NO: 321229 - protein, 142 aa, Zea mays
  unsure (1)..(142): unsure at all Xaa locations
  Clone ID: MRT4577_56026C.1.pep
MASPGDVEGITASMGELSVEAAPSSANGGGDVAAVDQDDVWEDVSDSQGHASTLDREWIHRQNQFQKMGYRDGITQGQKDSAQEGFNAGFRQSVNAGYKWGLVRXVASALASLPDSLKEXLVPDVQCRGKLQDLHSSVRKYQ

SEQ ID NO: 321230 - protein, 134 aa, Zea mays
  unsure (1)..(134): unsure at all Xaa locations
  Clone ID: MRT4577_56027C.1.pep
GTDVEEVIVGELEVTPEARGEXQQITGQAKQMAAPSGTSERGPSSQREGGAQIGHVSMRMMARKSMSEKLAEXDNESPATQMSQEAYEIGVRHIKNNREAIDRIGEVHXEKQSEPEAELRALLSECAEIPAEPR

SEQ ID NO: 321231 - protein, 176 aa, Zea mays
  unsure (1)..(176): unsure at all Xaa locations
  Clone ID: MRT4577_56028C.1.pep
MASPGDAEGITISMGELSVEAATSSANGGGDVAAVDQDDVWEDVSDSHGHASTLDREWIHRQNQFQKMGYRDGITQGQKDSAQEGFNAGFRQSVNAGYKWGLVRGVXVYILPGTXLRLPFSSSLAPILISFPIYSXYALASLPDSLKENWXADVQCRGKLQDLHSSVRXISADDAL

SEQ ID NO: 321232 - protein, 144 aa, Zea mays
  unsure (1)..(144): unsure at all Xaa locations
  Clone ID: MRT4577_56029C.1.pep
AESDVEYRCFVGGLAWATDDHCLHNALSTYWEGLXSKIILHRETHRSRGFGFVTFSTEEAYARNVHLRASNGQGSLERNATLPRNEAHSLCGRGGGGCRYRGGHGGGCYCGGRRRDGCGGYSRGRGYGSRGLYGGGGGGYSGGN

SEQ ID NO: 321233 - protein, 48 aa, Zea mays
  Clone ID: MRT4577_5602C.1.pep
AMEPAGTLLKLIGDLNLCGNTRETAARFALVETGVYIIVTNLAGQAMV

SEQ ID NO: 321234 - protein, 70 aa, Zea mays
  unsure (1)..(70): unsure at all Xaa locations
  Clone ID: MRT4577_56030C.1.pep
EHRKHKSGPTNADKRESQTLQGXPAXADTATMIPQSAQAPIATLQPPNLTPARATASENPIRQPYRNQQA

SEQ ID NO: 321235 - protein, 66 aa, Zea mays
  Clone ID: MRT4577_56031C.1.pep
RNACPPKKACLLYYRPPFFFFFFFFFFFFFFFFFFFFFFRTPWRTPGPTRWRTRGRTPWRTLGGRW

SEQ ID NO: 321236 - protein, 182 aa, Zea mays
  Clone ID: MRT4577_56032C.1.pep
PWCCSQSSARPCPQPWRLAATAPAFHGGIFCFLVADALPKLSTAVNCALALILPNLFFAGGRLQPLPWHLVLFPWRARPSNHLHHSSPCLRSPDNDSLFCVAPLTRSMECRSELYPICNACAPSSKSPQPCWSATTRPRSAIPSLVVDLALRRCPALRIACSTKASLVNDMRDSSDPARYAR

SEQ ID NO: 321237 - protein, 60 aa, Zea mays
  Clone ID: MRT4577_56033C.1.pep
SLYELVFFRTDAHGGQEIGNAMLDEFLTWLKRFREFALVRLAYYTLSGLNNFFIWKKIPK

SEQ ID NO: 321238 - protein, 104 aa, Zea mays
  Clone ID: MRT4577_56034C.1.pep
NRAAHRRPAHRRHFLPHGHKQGGDLLWVLRNCCYRRFSHNATTCYNFLIPIPLTNRDKCLIRNEQTVRIHLGYNTTFTIAPEVTTYPKQSKIYQVAALNSDDDL

SEQ ID NO: 321239 - protein, 212 aa, Zea mays
  unsure (1)..(212): unsure at all Xaa locations
  Clone ID: MRT4577_56035C.1.pep
MQSATRLTLLLCAAWVAALLYGEMGAYWAAHLSCSWPSASSSSPSPSNHVKVAVIADPQLMDRTSLGLPPGSVALQAAEFFTDLNMRRSFQSVVLPFKPDVVLFLGDYFDGGTHLSDEEWQDSLFRFKHIFSMSEQRTSPHVPIYYLSGNHDIGYSAFHSVHPEVISRYEKEFGPRNFHFLSGKVDFVXVDAQTLDGGAKQSKERSSSWGVI

SEQ ID NO: 321240 - protein, 93 aa, Zea mays
  Clone ID: MRT4577_56036C.1.pep
RGPHAPLRTFCESTITNQGSRALFWPKVKGPNMLKPGALGPKASPNSGIGAKSDARVPGEKTVYAFSRGAYRITPQGRGRAPLVGNPPKGEAP

SEQ ID NO: 321241 - protein, 69 aa, Zea mays
  Clone ID: MRT4577_56037C.1.pep
LGLISSNSGQNGSVHAGISGGEFVSVILLWEVEEIVSLVGEAAAIYGDHAFVCSCHFFFLLLICLLRNL

SEQ ID NO: 321242 - protein, 55 aa, Zea mays
  Clone ID: MRT4577_56038C.1.pep
TLELQRRAKRHAIDAGDQSEKTVAVAAVDPVPTSIPPRRLARKKVYTPRPCRRAW

SEQ ID NO: 321243 - protein, 133 aa, Zea mays
  Clone ID: MRT4577_56039C.1.pep
LVWVGAKGGTAHRNTPLPVSMVAQTCAFRPTVLDALRGCDRAWRTVFENGSIDATAATVRSDLAETVWLAYTVPADLDMLPAGSGLPALPNFAINLHLPRGQRTPGVAVLDRHLRIGYARLHQDVLEEPSIRT

SEQ ID NO: 321244 - protein, 446 aa, Zea mays
  unsure (1)..(446): unsure at all Xaa locations
  Clone ID: MRT4577_5603C.1.pep
EHSALSNAGAAAPGPGAASPLSLGHIVFGVAGSAHLWPRRREYVHLWXPPASTMRGNVGLDAGAPGAPGPSTPWVGSLPPIRVSADTSRFRYTNPTGHPSGLRIARIAAEVVRLVGGGAGARWVALVDDDTVLRADNLVAVLSKYDXREMVYVGALSESHSANTYFSHSMAFGGGGIALSFPLAAALAQTLDVCIKRYPKLYGSDDRLHACITELGVPLSREYGFHQWDIRGNAHGLLASHPIAPFISIHHVELVDPIYPGLNXLESLELFTKAMKMEPMSFLQRSICYDQSQKLTFAISLGYVVEVYPNVLLPRDLERSQRTYVAYNRMSQRNEFDFDTRDVQKSLCKKPILFFLKDVWKDGNITTGSYTHSSARDDLKRKVFCFRSPPLSDIDEIQVSSSPLSKRWHLAPRRLCTALKGSIDGTLFMVVRQCGLGTFGLASDTL

SEQ ID NO: 321245 - protein, 614 aa, Zea mays
  Clone ID: MRT4577_56040C.1.pep
MASSSQSGGAGGGGTVASNPRVWIVASIAVAGVLVLAEVARRRRRWLRGMSGTAPDAGSFCDRFELHPPAQPPPPAARHILSGLTFAASDNFEIEGYVAGFGNPDWKKTHETARHTAVAVTMLRKQGATCVGRTIMDELGFGVTGENLHHGTPANPVSSSLVPGGSCSGSAVAVAAQLIDFAIGTDTPRVRRIPASFCGLLCFRPSYGVISTLGTIANSQSLDTIGWFARDPCILHRVGEVLLPAAVGGLKQTRQFVFADDCFQLLKVSNQKTVHAIKNAVQALRGYQPPKHINIGQYIYSNVPSLKEFCEPATKLEEGTSALKAISTVMLLLQRYEFKANHEEWVNTVKPKLGLDISTRVLQAVNFARENIKSLYAIRNELRAALKNLLKDTGILVLPTTAGYPLKRNSKERLSSGFEDRMYKFVGVAALSGCCEVTIPMENLDHHVSLSFVAAHGSDKFLLRNILDTYSLIQDQVVLASKLETAPVTNVDVDVNASELLKEKGNSAFKRRQWIKAIEFYSEAISLSDTNATYYCNRAAAYLELGRFKQAEADCDRALLLDRKNVKAYLRRGFAREVTLNYKEALQDFRHALALEPQNKTALAAERRLQKLLK

SEQ ID NO: 321246 - protein, 80 aa, Zea mays
  Clone ID: MRT4577_56041C.1.pep
RPGSTARSQVTSVSTRWGWARTRLRGSDGGFVDLTAQLRGEPPTTQPRGTKGEPPTAQPRGTKPNSKGYDFVDLMAASWI

SEQ ID NO: 321247 - protein, 91 aa, Zea mays
  Clone ID: MRT4577_56042C.1.pep
EFWVQHKGHNRSLKPTKPHPRFLTHKPRVFILRLHPFRGAPEGTRGRRYPFTSAYLMNHGLLTTGEADHHVESALLLDVVALVGAAILHVL

SEQ ID NO: 321248 - protein, 38 aa, Zea mays
  Clone ID: MRT4577_56043C.1.pep
GGLRSSPRRSQFKKICNFCSSPHECCTGEASLFLKTWD

SEQ ID NO: 321249 - protein, 49 aa, Zea mays
  Clone ID: MRT4577_56044C.1.pep
TITFAATSSLTQFLVNRGPIWHSTEPSCIFSCLLSSPRFRHKSTICFFQ

SEQ ID NO: 321250 - protein, 44 aa, Zea mays
  Clone ID: MRT4577_56045C.1.pep
HAYHHRSEFWATLAFFIIALLINCSLLLYYERNSSNRLPSRCLS

SEQ ID NO: 321251 - protein, 154 aa, Zea mays
  unsure (1)..(154): unsure at all Xaa locations
  Clone ID: MRT4577_56046C.1.pep
WTSLLVLRLLLLAASASSMHMTCPCAWLQASYGDVPALTTMIPPGHLYPYAHHLTQPHLTPLVHLPYYAHGAQTSDMYQPLRQYRCQQHMTMMHAQSHPXQLQMMIQIERDVDASSSLYEPALMQQQHQVPEAQGLNHMDIIMLHNMPGMAGLY

SEQ ID NO: 321252 - protein, 60 aa, Zea mays
  unsure (1)..(60): unsure at all Xaa locations
  Clone ID: MRT4577_56047C.1.pep
YHNLTSDHHSKYISLLHSYYIXSSRNMRNQNHHRTIIIIRAKAACGVVRNPRQHHQTSAR

SEQ ID NO: 321253 - protein, 86 aa, Zea mays
  Clone ID: MRT4577_56048C.1.pep
EISPVTKRCSCRRWVSVCSHSVTTIQFIGTDGNRMHEICRLWYWHLDLHRNHTRTKKEVSMSCIPSQTKKNLTLEESNPFPCHSCC

SEQ ID NO: 321254 - protein, 118 aa, Zea mays
  unsure (1)..(118): unsure at all Xaa locations
  Clone ID: MRT4577_56049C.1.pep
RGSATKQXIFLSIPLFYLCLSYALKNHCLANNVLVLSFXIQIIYILSLLSYKTLSILFDLLFVYDIFLLFFTPIMVSVAKSFHSPIKLLFPTAYDTLPFSMLFLSYILKPYIXFSLSF

SEQ ID NO: 321255 - protein, 327 aa, Zea mays
  Clone ID: MRT4577_5604C.1.pep
MLAWKEKVADRLARLLADSPVSPSPAQAAVEPSQAKSFPPEHFTPPKTSSLSSYVFSLLPTSNTGHEQNSPCSETLRPLPPESLPKKWRWSDVTWKDPPVELSEESGSESDRDERNGNFGNDPVLQSYRPINNSNGNEETSTSDCVGTLRYLTEKSMFVSPKLFAFFQSSLPGTLKGCHWVLLYSTWKHGISLRTLLRRSENIQGPCLLIVGDMQGAVFGGLLNSPLRPTEKRKYQGTNQTFVFTTIHGEPRLFRPTGANRFYYLCLNNALAFGGGGSFALCVDEDLLHGSSGSCETFGNSCLAYSPEFELKNVELWGFTHSWSRST

SEQ ID NO: 321256 - protein, 59 aa, Zea mays
  Clone ID: MRT4577_56050C.1.pep
RVYLRWSGVCGCPSVVLIEGRSVSVVKAEFILGSSGPMHQPAWVWDRWGLLPPSGFILS

SEQ ID NO: 321257 - protein, 80 aa, Zea mays
  Clone ID: MRT4577_56051C.1.pep
RVRSRSAPAIAPPNWLGLLAPTPMQKAGMGKRRGDAQLENSLHYRSRDYAPPPSCCHCHSLEVESIIFLARLNSRTKGSD

SEQ ID NO: 321258 - protein, 310 aa, Zea mays
  unsure (1)..(310): unsure at all Xaa locations
  Clone ID: MRT4577_56052C.1.pep
MAGGGSRRAGAAEQPKIGSGNVFAALETLKKKKKPADKGAKPAAREKTKPDKGGKPAAREDPKPEVFWAPAPLTAKSWADVEDDDDDDYFATTAPPPXGPSGGTPTATXAKDQHDAPALEEGSQSGDDGLYDAVYNDPDEYHTHTAHHAVTERPLSKKELKKKELAELDAVLAELGLGTSNNSIQEEPNGKKGADQVADGEKKEDAPAPLESKNSKKKKSKKEKSSKELKEAQDQANGSEAAAVAEPDEDTASVDVKERIKKVASMKKKKSSKEMDAAAKIAASEAAARSARLAAAKKKEKSHYNQQPVR

SEQ ID NO: 321259 - protein, 178 aa, Zea mays
  unsure (1)..(178): unsure at all Xaa locations
  Clone ID: MRT4577_56053C.1.pep
MAATSFFTGRFALGAPPDYRLPPAAGLALAPPPXPASAPPLPAFARPPPSHGTPPPRPSLIPSAPXRAHAPPPPSPXPPPTPPPPPRPPPPQPHPPPPPASRPAPPPAPPPLSPSXEAPAPAAPRAXPPPPPPAPPPTPPPLSPAPPPRSPPPPPPPPPPPAPPXPPPSPPPXAPPPP

SEQ ID NO: 321260 - protein, 238 aa, Zea mays
  Clone ID: MRT4577_56054C.1.pep
MAGGGSRRAGAAEQPKIGSGNVFAALETLKKKKKPADKGAKPAAREDPKPEVFWAPAPLTAKSWADVEDDDDDDYFATTAPPPRPVWGDAHRDAAKDQHDAPALEEEIESEDDGLDDEVDDDADEDHEDKADDAVPAEPTVKNATAPPAPPKDTERQLSKKELKKKELAELDAVLAELGLGTSNNSIQEEPNGKKGADQVADGEKKEDAPAPLESKNSKKKNLRRKVFKELKERMIKQ

SEQ ID NO: 321261 - protein, 34 aa, Zea mays
  Clone ID: MRT4577_56055C.1.pep
LSIFRGPSSLLENAPYLEVKECQKVCSVKESVRG

SEQ ID NO: 321262 - protein, 104 aa, Zea mays
  unsure (1)..(104): unsure at all Xaa locations
  Clone ID: MRT4577_56056C.1.pep
LVLRCRRWVSLFSARTGSDTSGTSRGMKVDHRTYHSETKKTLGNVYALLSKEMGPNESDGLQGTTLRFRVSPRTFEAPITTTVNQRIGTWXSXSFRTAGLYVQA

SEQ ID NO: 321263 - protein, 76 aa, Zea mays
  Clone ID: MRT4577_56057C.1.pep
LTFFGEMRYRAAASLLLDMGCTGWGGIWLSSWVPGNPHGFLLSHFTILGNIFRHPNLAFNRGSFYDLADGVQTMFA

SEQ ID NO: 321264 - protein, 75 aa, Zea mays
  unsure (1)..(75): unsure at all Xaa locations
  Clone ID: MRT4577_56058C.1.pep
TGWLARGAALSACIAFMIITGASHPPAASLPLLFIDGPKFHSLQXWYALLPGAVGCIVLCLIQEVVVYLKKNIKF

SEQ ID NO: 321265 - protein, 50 aa, Zea mays
  Clone ID: MRT4577_56059C.1.pep
HAVLVPETVCARDNTFKHKGDHIDSTPYCLLQFNLPIALSTVVTSKERIV

SEQ ID NO: 321266 - protein, 89 aa, Zea mays
  Clone ID: MRT4577_5605C.1.pep
VLRFVFALPKGSKTGPRPNVRAPKKFYKCPRDVNSKVCKNGYFCEEVGTPRAKGTMPSRLNRAKCPVSFPKKKKKKKKKKKKKKKKKPK

SEQ ID NO: 321267 - protein, 113 aa, Zea mays
  Clone ID: MRT4577_56060C.1.pep
LEAGRAGRSISSGEFALPFSLLARRILVATGMSHYAYQHGSPSKQSRGVETHHDQLASRGPAFHKHAEVASSYCDDYYIYICHSVHVIATVMTQTSRVFARRSRTSTPSRGSA

SEQ ID NO: 321268 - protein, 45 aa, Zea mays
  Clone ID: MRT4577_56061C.1.pep
HMVVLQLEEIDFHYQRYLQPPSRFYENNLAVQNDLWLMGLVEHSL

SEQ ID NO: 321269 - protein, 78 aa, Zea mays
  Clone ID: MRT4577_56062C.1.pep
QPLQPGTVLHFGSLEVMCFDRSYDMILLTPPRDNDNGDRQPDRRRRNRRRLPRMVEEQPSSSYRLFPSRRMGRHGNQR

SEQ ID NO: 321270 - protein, 43 aa, Zea mays
  unsure (1)..(43): unsure at all Xaa locations
  Clone ID: MRT4577_56063C.1.pep
SRAHXRTLGTTARDRWPEYYDGKLRRHDTSIRRIPTWSSLSRS

SEQ ID NO: 321271 - protein, 75 aa, Zea mays
  Clone ID: MRT4577_56064C.1.pep
MMLLFFFITIFISYPTFNSCRFHPSCMGMTIEQAKKIDHYMCSDCAKENGAKRPSNSYSVSPNSDSKIESKRRKR

SEQ ID NO: 321272 - protein, 63 aa, Zea mays
  Clone ID: MRT4577_56065C.1.pep
SRPSSYTPRADQGRSLRLRYRVALEVLSIRRYSLGAEPEDTPVFSSFRVSSSKMVCPLHDPML

SEQ ID NO: 321273 - protein, 217 aa, Zea mays
  unsure (1)..(217): unsure at all Xaa locations
  Clone ID: MRT4577_56066C.1.pep
MAKTKQGKRDVDAYTIKGTNKVVRVGDCVLMRPADTDNPPYVARVERIXESDGRGSVRVRVRWYYRPEEAKGGRRPFHGAKELFLSDHFDTQSAHTIEGKCIVHSFKSYTKLDNVGPEDFYCRFDYKAATGAFTPDRVAVYCKCEMPYNPDDLMVQCEGCKDWFHPSCMGMTIEQAKKIDHYMCSDCAKENGAKRPSNSYSVSPNSDSKIESKRRKR

SEQ ID NO: 321274 - protein, 208 aa, Zea mays
  Clone ID: MRT4577_56067C.1.pep
MDLHYGARVGEAMAVGEAAYIATAGAGVGAGPSTVVDVVTRESAAQALGTVVQLHFDKTVEKKRAADAQKQELWRLFLAFFFLLALVLSGVAASPPARLQCRHLWAPAGLLSLAHLAFYAAVAHHLRCLNGFRYQRRCHKLTLALAADRLRMLKSAADVVPAADVEVPYQEPPEAYLAKFRRSWAIHFAFLITTFAFCVAASVAILCF

SEQ ID NO: 321275 - protein, 68 aa, Zea mays
  Clone ID: MRT4577_56068C.1.pep
QTNDFSMHYRQERIQVRTDASYSITRTQQDRLAWMYVERAHNPPTTFQEGSLCSHEIATTLEAPYFLY

SEQ ID NO: 321276 - protein, 75 aa, Zea mays
  Clone ID: MRT4577_56069C.1.pep
FCVLYFTRFTEYNFITIQEVLCKDCTFTEKLWDKIMNWANLSFLQGTQNSGSLYTWWKSLRTRCSKDTRTFFDGL

SEQ ID NO: 321277 - protein, 86 aa, Zea mays
  Clone ID: MRT4577_5606C.1.pep
LDGQSVETVDAVRLCIMLIARIVVHCNWLCKRPASACCCMLACTARCSSPLSTWWENCGIMALGASELVNNNALLRSQKGQKRKEG

SEQ ID NO: 321278 - protein, 57 aa, Zea mays
  Clone ID: MRT4577_56070C.1.pep
TCFITGIKIRIKTGRNEGPNLFAIVWAKDDYPLGKVPLATNGVSSGCQKARILAPPC

SEQ ID NO: 321279 - protein, 140 aa, Zea mays
  unsure (1)..(140): unsure at all Xaa locations
  Clone ID: MRT4577_56072C.1.pep
EERAPAGRRRXPAGPPARRWPRRPRRRGSGRRRRAAPTAPRRXTPSPPXTPARGTGKPPAAAATPPRRRRPPPPSPRPPRMGSPAARRGPPPPSRRASPCIPAAARTIEKAAERESRIGWERFCALLARGRSRHEGRRKK

SEQ ID NO: 321280 - protein, 94 aa, Zea mays
  Clone ID: MRT4577_56073C.1.pep
AREQQRSAALQAISPCGVYSDRTGSLSGGSVNGVPEDGDHGVPDAVGCDRQGAADRYGAGASASRATFTRGRVRRTVQAMLLVPIPCCGGLLAP

SEQ ID NO: 321281 - protein, 89 aa, Zea mays
  Clone ID: MRT4577_56074C.1.pep
RRACCTTRRTALACIQIINLGARHASTSKVEPNGSQGCADPRTNTAHARVIAHNEQALAGCVDEPTGPEPDQRPSRAGGQVLPQGQQPG

SEQ ID NO: 321282 - protein, 73 aa, Zea mays
  Clone ID: MRT4577_56075C.1.pep
RFTEAHREATLRRIMASVTVRAQVVALRPTAKRALLDHSRRLRRTDTALSTRCIVKAEAKGQMLPGHISYAYL

SEQ ID NO: 321283 - protein, 106 aa, Zea mays
  Clone ID: MRT4577_56076C.1.pep
IELKSILGTTKSTGRRHLDGIEHLAMWLLLNHLFFSYDSVYQRRWRQIPWASPAHDSDEPAPDDPAGLLDGTPQPDGHPKRGSTVAAAHTAQRPDGGGVAIQEGGS

SEQ ID NO: 321284 - protein, 122 aa, Zea mays
  Clone ID: MRT4577_56077C.1.pep
IVKKKTFPAEKNFSLFCGMVYSFSKKGSVVGLRARGGNSGVTQWVCVVCFSFHPRLGFLYNPARVCLEKGKNLNPFKRICFFFFPPPKKIFFFLKKRKTKKKGGPPPFFFFVVVVLLSWNST

SEQ ID NO: 321285 - protein, 130 aa, Zea mays
  Clone ID: MRT4577_56078C.1.pep
GHPGPRLLQPSTEFASSSVPAPNHAPQLPISSGHGSGVRPYKCGASFTIAHQVRNPLLVSQHHHRLGAVLCAQPPPSIRAWGDHPAGACHLEARRDHQEQVHQSRGPGKPTEFVASAVGTLNRSSEVTRI

SEQ ID NO: 321286 - protein, 65 aa, Zea mays
  Clone ID: MRT4577_56079C.1.pep
MGHRATLAAAVLLAAVVALCLAARCADAARPVPPSPAAAGSAYEAMVSKLMEMLPQGPSGGGAGH

SEQ ID NO: 321287 - protein, 61 aa, Zea mays
  Clone ID: MRT4577_5607C.1.pep
RFMSEAFKEGEVVLSNGASPSIVVLFMGRTQTRLTDWLLSFGSVQSKKVRHLTDGCEADLD

SEQ ID NO: 321288 - protein, 418 aa, Zea mays
  Clone ID: MRT4577_56080C.1.pep
MLLLRRLVRAGRSWGTEARGLASGAPREAADAVVVGAGVVGLAAARALAMAGREVVVVEAAPSFGTGTSSRNSEVIHAGIYYPPRSLKARLCVRGKEMLYKYCEERGVAHKRISKLIVATGAAEVPKLDMLLRNAKENGVDDLQLMEGSEAMEMEPELRCLKALLSPSTGIIDSHSLMLSLLADAENLGTTISYNTSVISGHVGSNGLELHVCESKELQNYHVGSHVNAQLVLLPKLVINSAGLSAVLLAKQFHGLDQEFVPTPHYARGCYFTLSQTKSPFSRLIYPLPEDGGIGVHVTLDLNGLVRFGPDVEWISDGGKDHVSCFLNKFDYSVNPNRCSVFYPVVRKYFPNLKDGSLEPGYSGIRPKLSGPGQPPSDFVIQGWDVHGVPGLVNLFGIESPGLTSSLAIAEHIVSKYL

SEQ ID NO: 321289 - protein, 136 aa, Zea mays
  unsure (1)..(136): unsure at all Xaa locations
  Clone ID: MRT4577_56081C.1.pep
MATPTPDAXSEGTLVAVMPRSPSPTPAEAGTSATETPVLIFLYFHKAIRAELEALHGAAVLLATERTGDVAALAERCRFFFSIYKHHCDAEDAVQMLATPCGALFLCFWPFSPVASCWAGGLDPWWIWVWMCLGVG

SEQ ID NO: 321290 - protein, 71 aa, Zea mays
  Clone ID: MRT4577_56082C.1.pep
LDTVVEGQALKMSSTVPKSSNIFWHDCLVGKTDRQKLLNQKGCVVWITGLSGSGKQTLFFSNWFVVCFLLC

SEQ ID NO: 321291 - protein, 65 aa, Zea mays
  unsure (1)..(65): unsure at all Xaa locations
  Clone ID: MRT4577_56083C.1.pep
GEYLEVCFYLTKVNRVPRGLVKRVNVSKMPTIQLWEHEECKTXVIVALKACFVMDEVRSMFENNK

SEQ ID NO: 321292 - protein, 168 aa, Zea mays
  unsure (1)..(168): unsure at all Xaa locations
  Clone ID: MRT4577_56084C.1.pep
ACSSGPESRGRAGRPRRLVRAGRSWGTEARGLAWGAALEAADAVVVGAGVLRLAAARALAMAGREVLLVKAAPSFGTGTSSRNSEVIHAGIYYPPRSLKALQYCMEPLINVSXFYLRIAFCRXLCVRGKEMLYKYCEERGVAHKRISKLIGATGAAKVPKLDMLLKNA

SEQ ID NO: 321293 - protein, 77 aa, Zea mays
  unsure (1)..(77): unsure at all Xaa locations
  Clone ID: MRT4577_56085C.1.pep
TXXSTRCRKYWGLWTAPXKIFFQFNLLPVMLLKYIERPVIVATSHYVSCSKQPLHVLRRLALNNHFLILHSCASLQH

SEQ ID NO: 321294 - protein, 71 aa, Zea mays
  unsure (1)..(71): unsure at all Xaa locations
  Clone ID: MRT4577_56086C.1.pep
TQMGKEVGSFPSWATKPXMEKKKLLGVKWIFLLSQEVFQISYYPRIKWSVLKSPKLVLDVVNLGPTLPLFI

SEQ ID NO: 321295 - protein, 77 aa, Zea mays
  Clone ID: MRT4577_56087C.1.pep
KQQQQFAEVEPPLLPSRSLASFSFKPTSRSPWCREPLQRCHLQLLQVQALPPNPPVHIDVLASPSHHRHAVVRSLAS

SEQ ID NO: 321296 - protein, 56 aa, Zea mays
  Clone ID: MRT4577_56088C.1.pep
SEFRARTVAHRAQCSHVRCSFVSLATDRFAITVLMLDRPLFIDLVWNGEDSKLRMW

SEQ ID NO: 321297 - protein, 164 aa, Zea mays
  unsure (1)..(164): unsure at all Xaa locations
  Clone ID: MRT4577_56089C.1.pep
MSDSEEHDCESKDDAGPTNTYPQQVGTARKSGFIVIKNRTCKAAEGSTSNTVNHGHAKCHFVAVHIFTAKKLEDIGPSSHNCDXPHVNRTEYQLNDISEDGFAILLTSHADSKEDLRLPTDETLVAQXIFEDSKAVNDLDVTVQTAPYEEQICALKDVGPNPLP

SEQ ID NO: 321298 - protein, 39 aa, Zea mays
  Clone ID: MRT4577_5608C.1.pep
IKSDRLETCHRGRKENLEDVPRRSTLKDKLIFRCLRNNS

SEQ ID NO: 321299 - protein, 191 aa, Zea mays
  unsure (1)..(191): unsure at all Xaa locations
  Clone ID: MRT4577_56091C.1.pep
MSDSEEHDFESKDDAGATNTYPQQVGTARKNGFIVFKNRPCKAAEGSTSNTVNHGHAKCHFVTVHIFNAKKLEDIGPSSHNCDXPHANRTEYQLIDISEDGFAILLTSDGDSKEDLRLPTDETLVAQIKEEVESVKDLDVTVQTATYEEQICALKDVGAKQLPCLWTLYPTVSSTCIGKEVHLLKDWYRYI

SEQ ID NO: 321300 - protein, 37 aa, Zea mays
  Clone ID: MRT4577_56092C.1.pep
LLAGLGNKRAAKQVQGHSCRGRTERDVVAWSGRSGCV

SEQ ID NO: 321301 - protein, 44 aa, Zea mays
  Clone ID: MRT4577_56093C.1.pep
SDCIYPEQPATLERNALMLWDAHKPFFKERQLYLRLRFLMRRET

SEQ ID NO: 321302 - protein, 65 aa, Zea mays
  Clone ID: MRT4577_56094C.1.pep
KRGPNPWLGMFQKPKEWFLKFKAGPNWNQWEGCFHLKTPSFWGKKRVFPNSWLFQVKTNGANFKF

SEQ ID NO: 321303 - protein, 83 aa, Zea mays
  unsure (1)..(83): unsure at all Xaa locations
  Clone ID: MRT4577_56095C.1.pep
TSIXGVEIPQKEVYQISTASSWQAHTCFPSQLSLYIQLLIGRIRTLARPVAIREKIVTDRSLRAGVAAQKASNEGSCCLKKKN

SEQ ID NO: 321304 - protein, 120 aa, Zea mays
  Clone ID: MRT4577_56096C.1.pep
EGLSPGQQRLIFFGKQLEDGRTLPGFNIPKESPPPLVLPLPGGMPIFVKAFAGKAITLEGERSPPLGNVKGKIPGKKGIPPDQQGFIFSGKQLEEGRPLAGFHIPKESPLPLVVPPPGGQ

SEQ ID NO: 321305 - protein, 49 aa, Zea mays
  Clone ID: MRT4577_56097C.1.pep
SGLVGKPRAMCARRRRHLTRRQGILQGCSADRHHRRAFSVLLRSFSRAR

SEQ ID NO: 321306 - protein, 104 aa, Zea mays
  Clone ID: MRT4577_56098C.1.pep
MVTELTAALLRAYDGTVPYKSFYVSVRGKVYDVTSGRGFYGPCGAYAVFWGREASRALGKMSKDEADVFWDLFGLSDKELGVLADWEIKFQAMYPVCVRLVADA

SEQ ID NO: 321307 - protein, 53 aa, Zea mays
  Clone ID: MRT4577_56099C.1.pep
NTFKQTVEKQKFGTLSDPLKGKSLSYKIVALFLFQNIHLLFVLDLFYMRLYIF

SEQ ID NO: 321308 - protein, 130 aa, Zea mays
  Clone ID: MRT4577_5609C.1.pep
PPPTSHSRSELPAMTVTSGAPNDNGRDAGAAATDDEHRVDLEVKHKDTGTRDSPAPIAAAAPASQSRVAGKLGPSDPKHLIYAGSKSKHIKAAPAAPDKNRRPPLSPPAPAVNRGRGSVRTPLGEQVKYK

SEQ ID NO: 321309 - protein, 37 aa, Zea mays
  Clone ID: MRT4577_560C.1.pep
NCIMVKDCWRFAIMMQWIGFVVWYYFRLSQDFFSFFF

SEQ ID NO: 321310 - protein, 107 aa, Zea mays
  Clone ID: MRT4577_56100C.1.pep
TCRALAVSGLRSVLPLSHMWCSICSMVVKTWLAKVVALLTVGNTKDRCVGDIRPCRVEQCQMSLRSSRRALVRVGLCSSFLADAVSKHRAPSHMGSTRTPSVSARVG

SEQ ID NO: 321311 - protein, 50 aa, Zea mays
  Clone ID: MRT4577_56101C.1.pep
TSNLFLVPSSNPNSNSIPILNFKFSSEYNLYYLQYYYLFFSLLFIYERTK

SEQ ID NO: 321312 - protein, 71 aa, Zea mays
  Clone ID: MRT4577_56102C.1.pep
IRLQVPIQNFVGEAHILLPASREHSKLFLREGLSKGGCYRQVGGSLLYYSTLTCLLLREGRHTVGRPVHPL

SEQ ID NO: 321313 - protein, 285 aa, Zea mays
  Clone ID: MRT4577_56103C.1.pep
MAAADGRSGDFRVRGGSVGGRIDRLVVENFKSYKGEQTIGPFVDFTAIIGPNGAGKSNLMDAISFVLGVRSTHLRGAQLKDLIYALDDRDKEAKGRKASVRLFYCQPNQEELCFTRSITGAGGSEYRIDRNQVTWDVYNAKLRSLGILVKARNFLVFQGDVESIASKNPKELTALLEQISGSDELRREYDELEEQKARAEEKSALVYQEKRTIVMERKQKKVQKEEAEKHLRLQQDLKLLKTEHYLWQLYTIEKDIEKIEAELVEDRESLQQVQEENRSSDYELT

SEQ ID NO: 321314 - protein, 95 aa, Zea mays
  Clone ID: MRT4577_56104C.1.pep
GSSAACSVLRPSVVCCSPARRGDMRLRQRGGGDQGGGRVRGAAAVDTLAPLAAAVDVSSGSAYPSLPASLDVLLFLFSRYRMVVLLATLTHQVPR

SEQ ID NO: 321315 - protein, 177 aa, Zea mays
  unsure (1)..(177): unsure at all Xaa locations
  Clone ID: MRT4577_56105C.1.pep
PRPSGKGPPPFPCLSSPPPPGPGPPGVGKIFRPWGVRPPRPPPGXPGSFPTHSXTPPHEGGPLYHPPAVRDSPAPRPXIIRLGPTPSPLDLGGGPPPGVNKLFLAPQKSRASVLGIFLTCFFKNTGVKRSFLFHCPGMIPIYPSCPIYMSPMPHISLFKKKKKGRGRPLYRTPSRRP

SEQ ID NO: 321316 - protein, 123 aa, Zea mays
  Clone ID: MRT4577_56106C.1.pep
CLFTMYIYMYTFHEINTTVTFSLHFCVSFSLRSNTLSVLLARIEKLLLYKEEEYAAGKKEKIIEQQEHPPPVAEHCRIEISLEKSSSYVAFGAVSTAIITPAKTHERNHWSVETEASTFLCPM

SEQ ID NO: 321317 - protein, 145 aa, Zea mays
  Clone ID: MRT4577_56107C.1.pep
IFPPTSFLPSRHSLLPPLPHTHSSLLPCTWRRKISSHGVSTIPMAELTSLPRVCQRPPRGSPFPLAVARRRVLCWLPPRRAQGTFGVRPGELHSLAMVATELPAPISSARRPPYSYSTQGSRLPFLLSPFSPMAEPPLLLTELQL

SEQ ID NO: 321318 - protein, 53 aa, Zea mays
  Clone ID: MRT4577_56108C.1.pep
RISSVMRRRFRPSSGISRRTLFPRSPIAQCGRREEEGGGGGDESRWGLVPAGS

SEQ ID NO: 321319 - protein, 94 aa, Zea mays
  unsure (1)..(94): unsure at all Xaa locations
  Clone ID: MRT4577_56109C.1.pep
WARRGGGSGRDVGDRRHPEAPRGRRAGVQDRGRDRPGRRHVHRQGSTPDVGGGGGPNCLIXXXXLCLQSEIFLSCLVDLCTAXKNLXDLXGXWT

SEQ ID NO: 321320 - protein, 153 aa, Zea mays
  Clone ID: MRT4577_5610C.1.pep
PFAAAAATGSTLTRTHNPLPPPTSHSRSELPAMAVTSGAPNDNGWDVGAAATDDEHRVDLEVKHKDTGTRDSPAPIAAAAPPSDLLPLPAPPSQSRVAGKLGPSDPKHLIYAGSKSKHIKAAPAAPGKNRRPPLSPPAPAVNRGRGSVRTPLG

SEQ ID NO: 321321 - protein, 187 aa, Zea mays
  unsure (1)..(187): unsure at all Xaa locations
  Clone ID: MRT4577_56110C.1.pep
LFFIYFFYFLLLWLLRKLKDPPPIIIKINPPRKRKPKKGKTKKEGEKKKKKKTMGRGGKKKQQKKREPTTDTKRKKKKGHPKKKPRKKKKRVWSEIRKGGGGGGPQKKKKKGERPKKXKQWDRGMRGRKTVNFPPHKYRNLGEATRKKKKKNRXGHEKNQESKLRSKRPRRRKKPPKHCEKKKTARG

SEQ ID NO: 321322 - protein, 88 aa, Zea mays
  Clone ID: MRT4577_56111C.1.pep
IAQNCIINQNLWWTAHLHSANVQSLRMSCPSAVVRAVSLNPQVAVRISLSTFMGKSLPLFISSIDPPPPLRTSGTGSVLFLVSRYWHL

SEQ ID NO: 321323 - protein, 133 aa, Zea mays
  Clone ID: MRT4577_56112C.1.pep
VRARHTRHSQRPSTTFRPRSRTRGRRGRTRRGRRPPPRRSRQTAAAPRAAPTTRHPTTTTPRARTADPTRRRRPGRTPTPRSARPPGARGTSPPEPPGWDSPEPRPGRNPGTRDEDGGEHRQNRQRREPDPDP

SEQ ID NO: 321324 - protein, 119 aa, Zea mays
  unsure (1)..(119): unsure at all Xaa locations
  Clone ID: MRT4577_56113C.1.pep
THACATLVVVSLTPPSRLFHLIRSRPFPTGTGGTGNQRPWPRFRRQTFSVIFIVLFCAAAXPSSTTTSPDFVIQCRVYCXTCRAGFVTNVTXFIAGAKVRLECKLFCTGKLEXSIDGVT

SEQ ID NO: 321325 - protein, 98 aa, Zea mays
  unsure (1)..(98): unsure at all Xaa locations
  Clone ID: MRT4577_56114C.1.pep
PLEARILPLVRSLSSVSYILPQIGISGHLIGDQSSQFNEAFILFDKDCYCFITTNELLTVILSFGHNPTDAYLHDMINEVDAYCNXTIYFPEFLNLIA

SEQ ID NO: 321326 - protein, 68 aa, Zea mays
  Clone ID: MRT4577_56115C.1.pep
DTIFLTSTFGYYYPTPSSTITPPYYDTSYNHLYKTLLFVPHPTITSYPYLSTSPSNSLSSTSSPSCLP

SEQ ID NO: 321327 - protein, 88 aa, Zea mays
  Clone ID: MRT4577_56116C.1.pep
MSSQRPGRHQRRASQSVFVLPENLASLDVDAAGEVGANSKAGGPDGAGAEQQARPPAGRHRRAMSVAVASTRDLELIKEDLGSYKLGA

SEQ ID NO: 321328 - protein, 50 aa, Zea mays
  Clone ID: MRT4577_56117C.1.pep
TIRSNSCTLDPGARLANSNGKGTMDSTGAKPGGQGKKGAADHKVTRPRKK

SEQ ID NO: 321329 - protein, 31 aa, Zea mays
  Clone ID: MRT4577_56118C.1.pep
CYWPDVTYLWSGIVCVLCFKISLGQPIPLRV

SEQ ID NO: 321330 - protein, 70 aa, Zea mays
  unsure (1)..(70): unsure at all Xaa locations
  Clone ID: MRT4577_56119C.1.pep
AKKNFWVPKPSXFSPPKKHTKSSFWPSFGLNPFSKIIFNFFHPKIFKNISLKTQKSLQANPKMFSPFHTF

SEQ ID NO: 321331 - protein, 84 aa, Zea mays
  Clone ID: MRT4577_5611C.1.pep
RRAAGRPGAVVPGHGQRRPPPSRPRTPRRLDGATARPTLASSSNGPVACALCSRRRRRRRGSVLKQLARERAARPIEALLRLAS

SEQ ID NO: 321332 - protein, 98 aa, Zea mays
  Clone ID: MRT4577_56120C.1.pep
PRVRFSNFLPVIFLESGPGTDPRRSGVERFHTKARGRERWLCLVRQRWRSAKAAGRRQQQQAHNNGGLDPCKAHSKVDFPRLLTRARNWRTGYHCPRI

SEQ ID NO: 321333 - protein, 58 aa, Zea mays
  Clone ID: MRT4577_56121C.1.pep
RELQGHGYLTSREGLTHDNVRGQHSHSERTMGLLKPSHFFYRQLNHIIPNIGLLASLP

SEQ ID NO: 321334 - protein, 106 aa, Zea mays
  Clone ID: MRT4577_56122C.1.pep
MQQRLPEMQQLVRSLAVDNERLREEMRDLQGACEALSKENDELETRLGQSSRQSEVASKEQRGKGLLDPRQPARDSFALPDLNLPPQDSADVSTVSLIAPDRLQLC

SEQ ID NO: 321335 - protein, 95 aa, Zea mays
  unsure (1)..(95): unsure at all Xaa locations
  Clone ID: MRT4577_56123C.1.pep
AAPHSVLLSIECTEKRQRTSVGIISPYTAQVIALRXHDFLSVXVKSIDGFHGGEEDIILISTVWSNKDGKVGXSDSERINVAFTRAKYLALDSLV

SEQ ID NO: 321336 - protein, 108 aa, Zea mays
  Clone ID: MRT4577_56124C.1.pep
THSANTAVRASSRSANGIHTAPMPRQIPAAESIPAWNEYWRPTNTTSVPSLSDDSSAQTAHHSIHPLDCKTHTKQFTPLDFDLSTQVKQTSSVSHATAATMPSSQPQP

SEQ ID NO: 321337 - protein, 52 aa, Zea mays
  unsure (1)..(52): unsure at all Xaa locations
  Clone ID: MRT4577_56125C.1.pep
DPHSGVRLGWCDTHDESLGGGGHLLTMSGTSCCTLXSQFQQEHPLLACSYVL

SEQ ID NO: 321338 - protein, 55 aa, Zea mays
  unsure (1)..(55): unsure at all Xaa locations
  Clone ID: MRT4577_56126C.1.pep
GGGNGTCSKKAHSEPLVMTVWLVRSMPCVWLLVLTLRLVFVAACSALILPSXXEF

SEQ ID NO: 321339 - protein, 156 aa, Zea mays
  unsure (1)..(156): unsure at all Xaa locations
  Clone ID: MRT4577_56127C.1.pep
VRAPRDRRPVTTSSFSFFLAKKYKWGAGRQAVERSTATASMDXRAFVYADELVKTAKTIACAGRCILDMDDANTTCXKRLANICLDNTDANRAAYHTLLGTVSDLGHNIYGANLYKETLYQDCEYCRKIVGILPEHGIAPGIKVDKGLVPLVGYNN

SEQ ID NO: 321340 - protein, 33 aa, Zea mays
  Clone ID: MRT4577_56128C.1.pep
SILSEADSLQSHCPLSPNIHIVPLNPIFCACVL

SEQ ID NO: 321341 - protein, 95 aa, Zea mays
  Clone ID: MRT4577_56129C.1.pep
SRASSHSFVLSNERTKRGRFPTQSPRPQPLSPLPISTPMPPPLLEARDYMGAGATPLSCSSSGEGTGPQLQLGVGVAPAEGHRHADPRPRRREDV

SEQ ID NO: 321342 - protein, 115 aa, Zea mays
  Clone ID: MRT4577_5612C.1.pep
PIKPSRRDVGAAATDDEHRVDLEVKHKDTGTRDSPAPIAAAAPPSDLLPLPAPPSQSRVAGKLGPSDPKHLIYAGSKSKHIKAAPAAPGKNRRPPLSPPAPAVNRGRGSVRTPLG

SEQ ID NO: 321343 - protein, 49 aa, Zea mays
  Clone ID: MRT4577_56130C.1.pep
PSKLPEPCLLPACLPLRVPSTMGAWIFFLLCLAGRALAAPQQEALPDET

SEQ ID NO: 321344 - protein, 95 aa, Zea mays
  Clone ID: MRT4577_56131C.1.pep
DRTDRRAGESKATAVSSPARSWPEKTVTGVYGVKRRSCFKQQVKGKRRYFVIASKILFRNRKMGKFRRVLSSVNESSITVCRILFVGGPLHSLEV

SEQ ID NO: 321345 - protein, 76 aa, Zea mays
  Clone ID: MRT4577_56132C.1.pep
RRTRGATGFVFDGRFTLLGGGAVPPHGQLTSVYSFFGYFGLWFAVRVARLLAALLYRLSPWEAQHVGCVLLHLSRP

SEQ ID NO: 321346 - protein, 158 aa, Zea mays
  unsure (1)..(158): unsure at all Xaa locations
  Clone ID: MRT4577_56133C.1.pep
MDTVPYLSDSYDADDSRRLLMXQMVHIRKHKREESLHNKRRDAIPPSDVDGAPMYDSSALHLQLHDLPXSCTAIXSNDPSIXLLCTIWPTKMLSIQWTPPVXMEISTLVSPRFMESLTRDDNPQFQCEGAXALSYVGSSTYEDSXAVSDSDAAPIFVK

SEQ ID NO: 321347 - protein, 72 aa, Zea mays
  Clone ID: MRT4577_56134C.1.pep
TKEQRQTKLLYAINSRAGFYITPPDRESVFAVHKVVIKGTKGRGLPTIGPIWSPMNEGNEGKKKRPAGVFPK

SEQ ID NO: 321348 - protein, 116 aa, Zea mays
  Clone ID: MRT4577_56135C.1.pep
KKSHPAPQGEIKGGAKPLKKGKTPLPRKKKPPGETDKLLHFRGGDPPPTGKNFRFPFPPGPKKKQINGGPPRKPCHFPLYRPHNHGESPCFEGAGKHVYKNPIYFQKRPGNKKGGE

SEQ ID NO: 321349 - protein, 79 aa, Zea mays
  Clone ID: MRT4577_56136C.1.pep
GKARFVINPFFGFLFVLANCHGGFLALYWKVGFFLRGFFFRFFFWGSRVFCNPGWFLINITLSGCGVFIYINFLYLLVW

SEQ ID NO: 321350 - protein, 88 aa, Zea mays
  Clone ID: MRT4577_56137C.1.pep
VKGERRRRATRAKKEEELLAAVVTAQNAMAAVVTAAEVVQQHNYICERYSHYLVTQERRNDTLSKEIRQDRAALAKKQKKKHEPVDET

SEQ ID NO: 321351 - protein, 126 aa, Zea mays
  unsure (1)..(126): unsure at all Xaa locations
  Clone ID: MRT4577_56138C.1.pep
IPLSNKQGIGRGEDSRGKDRFAHLTPCLRPNLFCTVTIFTLTRCSSPLYESXCYYYILPINLVTVEHKISYHLFRNPFXGQFPALHDGDLYLFXSRAICKYAARNNKPQLLKDGNLXEAPMVDVWI

SEQ ID NO: 321352 - protein, 102 aa, Zea mays
  unsure (1)..(102): unsure at all Xaa locations
  Clone ID: MRT4577_56139C.1.pep
PPQTTPYANNPLNPVPNPPQPGXGVGIFFYPPPPGAPKGGGPPPXKPPPGVPPPRWEKPKLNPPPKPGPLPGCLSPLKEGAGPLPFLITPNPGPNHKLGAEF

SEQ ID NO: 321353 - protein, 74 aa, Zea mays
  Clone ID: MRT4577_5613C.1.pep
FLVRPRVRPRVRNVERESENIERRERDREEWETRERLTCMDRVLSYCERWIRGWPVSDRSGRTGSLTLCGRRHP

SEQ ID NO: 321354 - protein, 116 aa, Zea mays
  Clone ID: MRT4577_56140C.1.pep
ASLYLLAGVAPASMASRAPAHLPHVRLLPMAGCQPLFLHRTALRSLPWRSVPSLQRAPGQSSCALRLSFPQAPWHARLSVLAQSTRRPILRLTGHGHLFGCSSLSSLPWSLAILAP

SEQ ID NO: 321355 - protein, 269 aa, Zea mays
  unsure (1)..(269): unsure at all Xaa locations
  Clone ID: MRT4577_56141C.1.pep
MPPPLSFRVAVIGAGAAGLAAARELRREGHVPVVFERAHAVGGTWLYDHDDRHHSSSLYASLRTNLPREVMGFLDFPFAAVPDSADARRFPRHXQEVLRYIQAFARRFHLDGLIRLRTEVLAVSKDNDEGSSGGWRVRWRRNAAGDESEQEQEXVFDAVVVCNGHYTEPRTAAADIPGLDAWPPGKQMHSHSYRVPAPFADQVVVIIGASNSGADISREIAGVAREVHMADRSAPTATCHTLPGYRNLWLRSMVERADQDGTTVVFRDG

SEQ ID NO: 321356 - protein, 83 aa, Zea mays
  unsure (1)..(83): unsure at all Xaa locations
  Clone ID: MRT4577_56142C.1.pep
RPXYGHPASILTKFSPAKARSFSVSLVSLRSKPPSLPPAPAITGVPPPWGMMDLLIAQITTDLRRRALHEVWRGDLAEHGIVQ

SEQ ID NO: 321357 - protein, 98 aa, Zea mays
  Clone ID: MRT4577_56143C.1.pep
IYSYATALISAILRPELHATPSPHVHNDLEPTNLQMRRRGAREGIWPVAAAHDSRSGVPTDFSEDTHAALRRPRNNLLPLEDHLMLLHHLHDPHYNQS

SEQ ID NO: 321358 - protein, 71 aa, Zea mays
  Clone ID: MRT4577_56144C.1.pep
SSVVKHFRVIDSVMPVHLMKGSSAILVMMVMPFVDVLFKHLAFVVHLHFLFLFIEHLLLCREWGRLEDLIH

SEQ ID NO: 321359 - protein, 110 aa, Zea mays
  Clone ID: MRT4577_56145C.1.pep
REFPFPFPDPLSWFRGGEPPPPLGPLVHPRGGPVLKPPGVFRPFFWLGGPPFSGFLPKVLGPNDRPPQTKKQMGFFFFHGLVTKNPPTPVRGWGENQFFSGFFWVQTGPV

SEQ ID NO: 321360 - protein, 81 aa, Zea mays
  Clone ID: MRT4577_56146C.1.pep
TLLYEPHWKRVLITKKKGVYFTRPKNDPTNFANRPKCDAVFTPKSSTWNPGNTQKHRWMQRLQLPEDLAPPNARGSIVGGA

SEQ ID NO: 321361 - protein, 130 aa, Zea mays
  Clone ID: MRT4577_56147C.1.pep
RESHRVIFLQYLSATDPLVMARVLQDVLDTFTPTIPLRITYNNSQVLAGAELKPSAVISKPRVDIGGNDMRTFYTLVLIDPDAPSPSHPSLREYLHWMVTDIPETTSVNFGMNAYSYLSFRCVSAEYCGA

SEQ ID NO: 321362 - protein, 61 aa, Zea mays
  Clone ID: MRT4577_56148C.1.pep
DKGFTLILDRPKLVPFKTSNTLITGACCGFNPTATGVSIGFWIYRLQLQQSKHLKPASRKI

SEQ ID NO: 321363 - protein, 170 aa, Zea mays
  Clone ID: MRT4577_56149C.1.pep
LHRAIGILEAGRGAQGSELEDGQVLNNNGVTNATTNGVENGDAKSTRVGKFVPGGVGGVQKKGNFFSKWLKPWIYADYATMRQLVPHESTMGLDYTEQVERDAYFPPSITSETPILWIPADPAGISKQEVLHTSKVIPISDEGCTLNDKNNIEWDTEGARPPILTEKIYY

SEQ ID NO: 321364 - protein, 99 aa, Zea mays
  Clone ID: MRT4577_5614C.1.pep
MSQLKWWKVAGTRFPILRRIARDIYVIPVTTVASEAAFSTSGRVLSEHRSRLTSKMLEALMCSQDWLRNKYKVDEKTKQPATFWSCLQDMQEGLQELAL

SEQ ID NO: 321365 - protein, 176 aa, Zea mays
  Clone ID: MRT4577_56150C.1.pep
NSARGEALSPATGDADGDGDGDRDGDGAGPTPDADRRTTWHYIIPNHHDLPDEPRGPTLDHRLPDVATTPYLLAQLPRSRAICEHTLVRSAATPASAVRHRRVAGLLSASVHCYRTPDREDARSDRLMTPPRSPATSTAERSRWAYNWLTMCIALVLRVQMPATTAQVMDLSNPDL

SEQ ID NO: 321366 - protein, 128 aa, Zea mays
  unsure (1)..(128): unsure at all Xaa locations
  Clone ID: MRT4577_56151C.1.pep
QLAAMNPASHXQHQHWTRSRPPKAHPQQSPQFNQVGALRPFDYPHQQEPVPPSQRAGLRPXATIDTQSQKMAFYQHDAPNAGTLLQRQRVPAPPPCMVPKSCSVDPTTKQPFGSSLWGVHMRHITMYP

SEQ ID NO: 321367 - protein, 85 aa, Zea mays
  unsure (1)..(85): unsure at all Xaa locations
  Clone ID: MRT4577_56152C.1.pep
KYSSFNPVAYDIAXHFCELAADYHSSKPHIVDYNRYLDVDEQKCFVKPYLNISGYIMSLECARDALLQNIHEINSDPRVRPRVRF

SEQ ID NO: 321368 - protein, 444 aa, Zea mays
  unsure (1)..(444): unsure at all Xaa locations
  Clone ID: MRT4577_56153C.1.pep
MSDPFYPYYRGAFPGGDGAXAAAXYSDFEVDLIAARYAGTLLPYPSSADVGAFDSYVGARRSAEVLYHQSFMGSHSTVGQNEALYSSNTMAKRPRLESSLPIYPQRPGQKDCAFYMSTGTCKYGETCKFDHPQRVPEGGVPNWKEAPTVEDSYPERPGEPDCPYLLNSRCKFKSKCKFNHPKDMVNALGTGTNNESLIADSAVLPVRPSEPICVFYAKTGKCKFGAICKFNHPKDIKTSPLIAKETIYTATTDAADAPTEACNAKGLPIRQGEVDCSFYMKTGSCKYGSICRFNHPDRPGPAADITFMVPLVQATLPSSAPIVPAVVEPLPMIYPQRPGETVCDFYMKTGSCKYSQKCKFHHPISRFAPHSKENGDPQQPATLASLPRREDAEACAFYMRSGMCRFGAHCKFDHPPREEAISELQAAGKEGIEGPSLVQRDHDV

SEQ ID NO: 321369 - protein, 344 aa, Zea mays
  unsure (1)..(344): unsure at all Xaa locations
  Clone ID: MRT4577_56154C.1.pep
MGRRFNLTMSLLAVVVLVLLAAPCASAAQVKTTDTRWSFQLPLPSGVSGAESLAFDGKGEGPYAGVSDGRVLKWGGSAVGWTTFAHSXTTGRSRCARXVVPSAETESMCGRPLGLQFHAKTGDLYIADAYLGLTRVGPGGGEAEVLATGADDGVPFNFVNGLDVDEATGDVYFTDSSATYPRRFNTEIMMNADTTGRLLRYDARTRSVSVLKAGLPYPNGVAVSPDGEQVVVAHTVPCQAFRYFLRGARKGQYELLADLPGYPDNVRRDGRGGYWVALNQEKQRLDATPATGPVKHLVGVRLDAHGVVVEELTAAKGVTLSDVAETKGKLWLGSIELEYVGLVA

SEQ ID NO: 321370 - protein, 112 aa, Zea mays
  Clone ID: MRT4577_56155C.1.pep
HASDHAFDPCLHWRSTIMLSTTAHTKPHMMLVPIPMHGHMTPNEQMGRALRARGVYAMLVHTELDHCRLLCTKDEHATISDDTMDPDDGLFVEFIPNRLSLEDEPSTLRAYH

SEQ ID NO: 321371 - protein, 82 aa, Zea mays
  Clone ID: MRT4577_56156C.1.pep
PTNPLVSSKWVGCQIFAGFDPPEFFGEKIFGPGNLAFKFLFFVPKKNFRFTPVSVKIKWPGQTPFGGFWLDFFFLNPPSQFL

SEQ ID NO: 321372 - protein, 51 aa, Zea mays
  unsure (1)..(51): unsure at all Xaa locations
  Clone ID: MRT4577_56157C.1.pep
MANASSGAGIHDDCKLRFVELKSKRMHRFITYRLENQKEVIVDQTGEXAPM

SEQ ID NO: 321373 - protein, 46 aa, Zea mays
  Clone ID: MRT4577_56158C.1.pep
RNQTDQIYTTKCSCIKRRKRLSIHQTLCHANSTKGELCIALAAKES

SEQ ID NO: 321374 - protein, 119 aa, Zea mays
  Clone ID: MRT4577_56159C.1.pep
GSGLATGFRRAILRSDARMGPSIRWEERRIRSLAVWYSLRTILRVKKFDKDYRSHLEDTLSQCKDKYLDYNVLKKLMMNLGRRKTSMSCPVTTHDLVDADALEAVGSRLRPRQPQPARL

SEQ ID NO: 321375 - protein, 41 aa, Zea mays
  unsure (1)..(41): unsure at all Xaa locations
  Clone ID: MRT4577_56160C.1.pep
HNPAGKDGYXPKFLEFSKGAGFSGFKAPYIYAYAWALEFFK

SEQ ID NO: 321376 - protein, 108 aa, Zea mays
  unsure (1)..(108): unsure at all Xaa locations
  Clone ID: MRT4577_56161C.1.pep
SHASTHPFSLCINLTTIGGRILSLLALLALFANTTYAFIITQCSLTSSSIIPQFLPPVTSMTFXHPTVQAYNLQQAIATNVLQQPIVQFQQQSLSHLTIQTITTQHQQ

SEQ ID NO: 321377 - protein, 116 aa, Zea mays
  Clone ID: MRT4577_56162C.1.pep
FQNLLYQPPRNHDGSSSSATTVVIAATDLVEASATGASTIVVATEPTIYVTTFPSIVVMAGSIDVATLARTAFITSRPSKRTTVVRPPRPRSCGGDDLGQKQARCMLDVIESHVQY

SEQ ID NO: 321378 - protein, 71 aa, Zea mays
  unsure (1)..(71): unsure at all Xaa locations
  Clone ID: MRT4577_56163C.1.pep
QGHYNQLFSLLQHMRLEKTLGATQFKGTSRTXYLLTVGGGGRTSALNDPTNRGMALNEKGNRLCIWLLNEI

SEQ ID NO: 321379 - protein, 272 aa, Zea mays
  unsure (1)..(272): unsure at all Xaa locations
  Clone ID: MRT4577_56164C.1.pep
MHHDPNPFDEGADENPFSNGGGXAWRRRQAAVRVPAXTEPAGFGGGRGDATTDIPLDTMNDSKGKAKELSQWESDLRRRESDIRRREEALKSAGVPMEDKNWPPFFPIIHHDIANEIPANAQKLQYLAFASWLGIVLCLFWNFIAVIVCWIRGGDSKLFFLATIYGMLGIPLSYLMWYRPLYRAMRTDSAFSFGWFFLCYLLHICFCIFAAIAPPVVFRGKSLTGILAAIDTFSDHAIVGIFYFVGFALFCLETLVSIWVLQKVYMYFRGHK

SEQ ID NO: 321380 - protein, 80 aa, Zea mays
  Clone ID: MRT4577_56165C.1.pep
PAGTLGPPRLWTNRLFSRRQLGLEVFHPGRANVFKAGLKEGLVKMSEGRDPTGIFVLRYGTHFGGGMLTGFGSINNTFNL

SEQ ID NO: 321381 - protein, 102 aa, Zea mays
  unsure (1)..(102): unsure at all Xaa locations
  Clone ID: MRT4577_56166C.1.pep
XXLTPLTLSFXFPSVSYKTVYVFFYILHXNPFYLFSLPLPLGGAAXXSSXTSXSQPHXXKQKSPQNNPLQSFCGVPPLSTSLLSWLLPNCXTYSPLCLNVGP

SEQ ID NO: 321382 - protein, 381 aa, Zea mays
  unsure (1)..(381): unsure at all Xaa locations
  Clone ID: MRT4577_56167C.1.pep
MTSASDTDALQLSEQEEQATPLPTDGPGVTAQEDHQQQQDLEGSGTFAVRPPLSGCGRKSLKITIPLTTPSRTISALTDILWDELAISHFSSSSKKCIPDGKQSVSKTKLRHAEKMIKRAFVELYKGLGYLATYRSLNMMAFVKILKKFEKITGKEVLSIYLKVVETSYFNSSDEALKLMDEVEDIFVRHFAGDNRRKAMKYLRPAQRRDSHAATFFTGLMAGCFAALFVGYCVMXAHGGDVLLLLHPGAAASRPRYRRRLGIGVGGCVHGDRVPGAEHVRAAVPAPAPLRVQHGGVAQVPRQLRLHLRVVAVARRRGARAPGRVPRLRRVHGRRRRRHVRAPRPRAQVGLPRVAARGGHPRVLAPGXFLLLLFCPVNVVY

SEQ ID NO: 321383 - protein, 34 aa, Zea mays
  Clone ID: MRT4577_56168C.1.pep
ENLRMKLPKPPKPVSKMRMATPLLMQALHMGALP

SEQ ID NO: 321384 - protein, 36 aa, Zea mays
  Clone ID: MRT4577_56169C.1.pep
SHLNPGRCLVEKHLRGLITYFILAARFLSRTQMLSS

SEQ ID NO: 321385 - protein, 128 aa, Zea mays
  unsure (1)..(128): unsure at all Xaa locations
  Clone ID: MRT4577_5616C.1.pep
MALPNNGTGDYPSLKLVIVGDGGTGKTTFVKRHVTGEFEKKYEPTIGVEDHTLDLTTNCGKIRVYWWDTARQDKFGGLRDGYYIHGQRAIIMFDVTWRLTYKNVPTWXHXDLCRGCENIPIVLCGDKV

SEQ ID NO: 321386 - protein, 68 aa, Zea mays
  Clone ID: MRT4577_56170C.1.pep
ILACTSTIGGPLWLWSVYPQQCACTDPLRETDVVIGLGESLFGSQKAQSGCGNRLECKTGPSLTARAE

SEQ ID NO: 321387 - protein, 77 aa, Zea mays
  Clone ID: MRT4577_56171C.1.pep
GKRSRFSVLYTKEYIFGPNRCQGDQIHPFSLPEHLSFHLFPSVEVPLRRKHFLVLRRCLKIELEPPFLCDLQLGSHL

SEQ ID NO: 321388 - protein, 57 aa, Zea mays
  Clone ID: MRT4577_56172C.1.pep
GRGRCPPYQWLLNLPHYLNDTPRLTTEDLTPSYRNPPWRHLRQPCPLSVSVVERSSL

SEQ ID NO: 321389 - protein, 59 aa, Zea mays
  Clone ID: MRT4577_56173C.1.pep
RILYCHLHFNTLAKYYTTPLLLKTLTLPNLYPFHHIPLLPACLISIKPSPIFLPNNSSS

SEQ ID NO: 321390 - protein, 135 aa, Zea mays
  Clone ID: MRT4577_56174C.1.pep
MASTACFVIVSKNDIPIYEAEVGSAPKKEDLSYHHQFILHAALDVVQDLAWTTNAMFLKSVDRFNDLVVSVYVTAGHTRFMLLHDSRSEDGIKSFFQEVHELYIKIFLNPLYLPGSRITSSHFDTKVRALARRYL

SEQ ID NO: 321391 - protein, 72 aa, Zea mays
  Clone ID: MRT4577_56176C.1.pep
SALVVNKTFFSLIQIHNLGDTNEVYLTLAHLKKSIPPAWGFLGIPLPSLELSPACFLAQLEKNSPKAPFNFW

SEQ ID NO: 321392 - protein, 49 aa, Zea mays
  unsure (1)..(49): unsure at all Xaa locations
  Clone ID: MRT4577_56177C.1.pep
LGAPGARGVSPLLNXIKPPAKDSRFGVISMCKGSGMGAPPVFHRGNGVY

SEQ ID NO: 321393 - protein, 87 aa, Zea mays
  Clone ID: MRT4577_56178C.1.pep
KQLHITSISSSSLEVSRIAQEAAYNTRCYTIIACRIQIMKTVNMPSNSLANKLIEQCMLRLLSQSTSFQPVKHVIKLFRRRVQTNMA

SEQ ID NO: 321394 - protein, 56 aa, Zea mays
  Clone ID: MRT4577_56179C.1.pep
LTIYIFQPHKSTIWGGSTLNAQGKKYGHRKNIGWSSKLQNISHPYIHPPHFCNTTP

SEQ ID NO: 321395 - protein, 36 aa, Zea mays
  Clone ID: MRT4577_5617C.1.pep
DYSRIKWIVSMFISPVPLILPMLELIYVLELWINLA

SEQ ID NO: 321396 - protein, 48 aa, Zea mays
  Clone ID: MRT4577_56180C.1.pep
FPGGWTSFMFLSLPPCIKCCVTRLALHAVSFFMVRVITVATHLILSGN

SEQ ID NO: 321397 - protein, 143 aa, Zea mays
  Clone ID: MRT4577_56181C.1.pep
MDSPEIPPSDRREERPPASLPLPAAFLEFLGENGLDPALYSKADTIPRYIRLKPGMESSVVTEIESELKCDLMRVSWLPDFYAIPPEIQIAGSKAYQQGKIYGIDAASGAAILALDVQSGDHVLDLCAAPGAKLCMLADMLGS

SEQ ID NO: 321398 - protein, 197 aa, Zea mays
  unsure (1)..(197): unsure at all Xaa locations
  Clone ID: MRT4577_56182C.1.pep
ALRCLVNYEALRFGEPIRVLADDMVVRMMKKSSLAGGKYVSVHLHFEEDIVAXKEKIEMENARERSWRGKFHRPGRVINPEANRRDGKCPLTPLEVGMMLXGMGFDSTTFLYVASGKIYNAAKYMAPLCQMFSLLQTKDTLALSEELAEFEGYSSRLAALDYTVCVQSEVFVTTQGGNFPHLLMGHGRYLLGGNAKT

SEQ ID NO: 321399 - protein, 282 aa, Zea mays
  unsure (1)..(282): unsure at all Xaa locations
  Clone ID: MRT4577_56183C.1.pep
GRASDGRLVIDSLGQAMGLPLLSPYLQSIGSDYRHGANFATLASTALLPNTSVFVTGTSPFSLGIQLNQMKEFRNRVLASKGNNGQLPGPETLGDALYTIDIGQNDFTSNLGSLGVEIVKRSLPSVVSQISWTIQDLYSSIGARNFMVFNMAPVGCYPAFLAGLPRDSKDLDELGCVKSYNGGVTYYNQLLNDSLAEVRKKVQDASVVYVDKHAVTLELFQHPTAHGLKHGARACCGYGGGTYNFDRDVYCGDSKVVNGEAATXGACADPQNYVSWDGIHAT

SEQ ID NO: 321400 - protein, 86 aa, Zea mays
  Clone ID: MRT4577_56184C.1.pep
PGPLGPGSPLVLAPPSFWVLLIRPPPVTNSPVLVFLCFVKKLTIRFPFWWPQKKKKKKKKKKKKKKKKKKKKKKKKKRKKKKKKAA

SEQ ID NO: 321401 - protein, 67 aa, Zea mays
  Clone ID: MRT4577_56185C.1.pep
TTIKTIMNVLSFFHKKALLAYKPKESLPVTVRLNKPPGQIVFQPLHLDVPCPYPQCWGRLVNRPGGN

SEQ ID NO: 321402 - protein, 104 aa, Zea mays
  Clone ID: MRT4577_56186C.1.pep
YDTAHGQWKHREMTVKDYNTLLFGEKPTTDFGIKNPQEIPRREDGAEYVLECTGVFTDKDIAGAHRKDGAKNVDIYAASKDAPMFDDGVTDDNCTCDVYIEHKA

SEQ ID NO: 321403 - protein, 63 aa, Zea mays
  unsure (1)..(63): unsure at all Xaa locations
  Clone ID: MRT4577_56187C.1.pep
RLPXPLENALLTIXKQLGQRIIYLFADILLKPFATTSIEQIHLPTLANYKPVSCTLHHHSVNK

SEQ ID NO: 321404 - protein, 59 aa, Zea mays
  unsure (1)..(59): unsure at all Xaa locations
  Clone ID: MRT4577_56188C.1.pep
RSGRESRGGSRGATKGPFREVIEKGDYPRXKLVPVAXSLRPASANSIHRGGLGGKKGGE

SEQ ID NO: 321405 - protein, 216 aa, Zea mays
  unsure (1)..(216): unsure at all Xaa locations
  Clone ID: MRT4577_56189C.1.pep
LPAMVSGVYSDDNNLQLEATTQFRKLLSIERSPPXIEEVIKSGVVPRFVQLLTREDLPQLQFEAAWALTNIASGTSENTKVVIDHGAVPIFVKLLGSGSDDVREQAVWALGNVAGDSPKCRDLVLANGALMPLLAQLNEHAKLSMLRNATWTLSNFCRGKPQPSFDQTKPALPALARLIHSNDEEVLTDACWALSYLSDGXVELLLHPSPSVLIPA

SEQ ID NO: 321406 - protein, 78 aa, Zea mays
  unsure (1)..(78): unsure at all Xaa locations
  Clone ID: MRT4577_5618C.1.pep
LGXRSGFSPGPLACVRLGCCPCPPALAFLLVPVLGGALLLRGLVVVCLPRVRPCPWCCLXGPPPPRAVGGRVAFPGCG

SEQ ID NO: 321407 - protein, 230 aa, Zea mays
  Clone ID: MRT4577_56190C.1.pep
MASSGLAYPDRFYAAAAYAGFGVGEATSSAAISRFQNDVALLLYGLHQQATVGPCNVPKPRAWNPVEQSKWTSWHGLGSMPSAEAMRLFVKILEEEDPGWYSRAPEFNPEPVVDIQMHKPKDEPHSVPGSTNGTSIPEPNISENRSSAEAQDKDVILEGLSTVSSHDQWTPLSVSGLRPKPRYEHGATVMQNKMYIFGENHNGRYLSDLQALDLKSLTWSRLMPIASRTC

SEQ ID NO: 321408 - protein, 44 aa, Zea mays
  Clone ID: MRT4577_56191C.1.pep
RTYDPPASIIIAADIVLALAHRSGLQGYRREANPRRLGQRAPRA

SEQ ID NO: 321409 - protein, 202 aa, Zea mays
  Clone ID: MRT4577_56192C.1.pep
GFTKKNSYDQQLRKEESQKMTPRSRAVSQQSGVEFLSEESRRIQCTKCGNFHIWICTKRSKTKARFCQGCDQFHQAKDGDGWVETRFSSSIKMEIPRALVCAESKIFDVSEWATCQGMECKPNTHGPTFMVNMVGADRMPQRSYSSRYPFSLDAEMIPDDEFEMWLQQALASGVFADSPKRRKSWSPFKLPQKGIKSWRRSS

SEQ ID NO: 321410 - protein, 220 aa, Zea mays
  unsure (1)..(220): unsure at all Xaa locations
  Clone ID: MRT4577_56193C.1.pep
MASSGLAYPDRFYAAAAYAGFGAGGATSSAAISRFQNDVALLLYGLHQQATVGPCNVPKPRAWNPVEQSKWTSWHGLGSMPSAEAMRLFVKILEEEDPGWYSRVPEFNPEPVVDIQMHKPKDEPQSVPASTNGTSISEPKIISXENGSSVETQDKDVILEGLSTVISHDEWTPLSVSGLRPKPRYEHGATVLQNKMVYILVETHNGTYLSDLQAWGSGRS

SEQ ID NO: 321411 - protein, 176 aa, Zea mays
  Clone ID: MRT4577_56194C.1.pep
MRLLPLLLLLSLAAVAAGTDADADALLAAKAALSDPTGALASWDAASSDHCAWVGVTCAPRGSGGGVVVGLDVSGLNLSGALPPALSRLRGLQRLSVAANGFYGPIPPSLARLQLLVHLNLSNNAFNGSFPPALARLRALRVLDLYNNNLTSATLPLEVTHMPMLRHLHLGGNFFS

SEQ ID NO: 321412 - protein, 628 aa, Zea mays
  unsure (1)..(628): unsure at all Xaa locations
  Clone ID: MRT4577_56195C.1.pep
ASSGLAYPDRFYAAAAYAGFGAGGAXLLLYGLXQQATVGPCNVPKPRAWNPVEQSKWASWHGLGSMPSAEAMRLFVKILEEEDPGWYSRVPEFNSEPIVDIQMHKPKEEPQIVPGSTNGTSISEPKIISENGSSVEAQDKDVILEGLSTVSSHDQWTPLSVSGLRPKPRYEHGATVLQNKMYIFGGNHNGRYLSDLQALDLKSLTWSKVDAKLQAEPADSTKTTQIAPCAGHSLISWGNKFLSIAGHTKDPSEGVTVKEFDPHTCTWSIVRTYGKPPVSRGGQTVTLVGTTLVLFGGEDAKRCLLNDLHILDLETMTWDDVDAIGNPPSPRSDHAAACHADRYLLIFGGGSHATCFNDLHVLDCWNGQTXLRVGKNWYIVGGDNNKSGVSETLVLNMSTLTWSVVSTVEGRVPLASEGMTLVHSNYNGYDYLVSFGGYNGRYSNEVYTLKLSLKSDSQPIVEEETVSDTISRVREPETEISQDGRIREIAMDSADSDLNNRNDEASEQLVADLKAQKEELEATINREQLQTVQLKEDIAQAETRNAELTKELQAVRGQLASEQSRCFKLEVDVAELRQKLQSMDALEKEVELLRRQKAASEQAALDAKQRQGSGGMWGWLAGSPPPSQ

SEQ ID NO: 321413 - protein, 69 aa, Zea mays
  Clone ID: MRT4577_56196C.1.pep
FTLLKMHWENNIVLLLLRGFAVIYPNLVIATCLFSKTYCCPPKSMLIVHLSLYTPFILSIFTIVCMYKI

SEQ ID NO: 321414 - protein, 131 aa, Zea mays
  Clone ID: MRT4577_56197C.1.pep
PRGRPGGCLGPTISTLATEVTSKLAALKGLDARLREIRSYLDLVIDGKLPLNHEILYHLQDVFNLLPNLNVNELIKAFAVKTNDMMLVIYLSSLIRSVIALHNLINNKMLNKEHEKAEDSKPTAIPTAAGS

SEQ ID NO: 321415 - protein, 310 aa, Zea mays
  Clone ID: MRT4577_56198C.1.pep
MDVVKAAQLSGRTLERVVVHPLVLLSIVDHYNRVARDTRKRVVGVLLGTSSRGSVDVTNSYAVPFEEDDKDPRIWFLDHNYHESMFSMFKRINAKEHVVGWYSTGPKLRENDLDVHALFNSYVPNPVLVIIDVQPKELGIPTKAYYAVEEVKENATQKSQKVFVHVPSEIAAHEVEEIGVEHLLRDVKDTTISTLATEVTSKLAALKGLDARLREIRSYLDLVIDGKLPLNHEILYHLQDVFNLLPNLNVNELIKAFAVKTNDMMLVIYLSSLIRSVIALHNLINNKMLNKEHEKAEDSKPTAIPTAAGS

SEQ ID NO: 321416 - protein, 81 aa, Zea mays
  Clone ID: MRT4577_56199C.1.pep
FYLKKKKKKSVWVKKIFGATKKKTGPAPIYDHHNPGINTHPNPSFLPTFPKLTPLTPCHNHCHNYFPHKIIIPSHFHTTNN

SEQ ID NO: 321417 - protein, 73 aa, Zea mays
  Clone ID: MRT4577_5619C.1.pep
AARDNLCVNECIGMYSRVVAEVPSYSRLFSMPPLARLMNLRGPARASDRHSCGHEPLGDDPLCPSEPTAEHFS

SEQ ID NO: 321418 - protein, 67 aa, Zea mays
  Clone ID: MRT4577_561C.1.pep
FDLGIEDYYEQDEDSSGAKGEYDSAFTFVSYDEDQDDFDDLSDEDEYDDHYDEDLRDLTARGLELFL

SEQ ID NO: 321419 - protein, 227 aa, Zea mays
  Clone ID: MRT4577_56200C.1.pep
MRVTALFPALAAIARAQDAGDAAESVSSAATEVSSSVGSVVESVTSSAADIPTFTPTTLKAPFLEQFTDDWDSRWQASHAKKENTEEEWQFVGNWNVEEPTVLRGIAGDKGLVLKDKAAHHAISAKFPTAISNKDDTLVVQYEVKLQGGLECGGAYMKLLQDNKALHAEEFSNASPYIIMFGPDKCGSTNKVHFIFRHKNPKTGEYEEKHLKSPPAARITKTTTLYT

SEQ ID NO: 321420 - protein, 159 aa, Zea mays
  unsure (1)..(159): unsure at all Xaa locations
  Clone ID: MRT4577_56201C.1.pep
MCDLHHQDITAQIISATIAXDMVLASAYSHALPPYALEFGLMIYVDVYCIGLLLPHPELKISALDLEYKGNGHATGDDFSVETAAAEDGYXALLDAXLIMTTKANRDFXALSVALDASLAIPHGKKRFAGLNKVDICLNDXTQRRHIYGGHDAEYLKNL

SEQ ID NO: 321421 - protein, 262 aa, Zea mays
  unsure (1)..(262): unsure at all Xaa locations
  Clone ID: MRT4577_56202C.1.pep
MCSASIFLPRCPNTMFQKNLLPLAAVLAVVASLMAAAAGYPWSVCGDSTDSSDFMPNGAYQAHLDFIAAALPKNASKSPDLFATVVAGTVPDQVWAVGLCRGDAKPTACFTCLTLAFQDLPGYCTYAKDASIYYDSCMVHYSDVHTLSGGDDTGPMMDRYVVGDTQTITSDPGRFVLLVAALVNATADYAAXASAARRGFATGEADAGFDPEFPKLYALAQCMPGQTPALCRECLSRLISXRWTDPEQYRRQGARRQLHLQV

SEQ ID NO: 321422 - protein, 42 aa, Zea mays
  Clone ID: MRT4577_56203C.1.pep
VDHASAHASDQLHSNLCSKFSIYTMGTVKFLLGSIHIMVDTL

SEQ ID NO: 321423 - protein, 62 aa, Zea mays
  unsure (1)..(62): unsure at all Xaa locations
  Clone ID: MRT4577_56204C.1.pep
GKTPNFEDHXXDGSXSKDXALGXHGSAIXAXSMEDLGPNKGDLAKMQATLXRLSKGCCKQPG

SEQ ID NO: 321424 - protein, 97 aa, Zea mays
  unsure (1)..(97): unsure at all Xaa locations
  Clone ID: MRT4577_56205C.1.pep
LRSHRSDSRVQRKLQGCNSLTNXSMTTDSFSRYYLPNKCRKPMCHYGSELXMFLKHHTTYCTEIAHKWATKNRKDIVYRAAHLNTVDTNKLVKLRTR

SEQ ID NO: 321425 - protein, 139 aa, Zea mays
  unsure (1)..(139): unsure at all Xaa locations
  Clone ID: MRT4577_56206C.1.pep
LAYLDAGRCIDIVVDNPAPGPDGEEDAVHVPVICRLSRCNHRDILPVREGVRHARPPQIHTLIVTSDIHMQHKLRKTPDQVVAXARDMEHYARSSXCTDAAFSHEDAGRPTGELSYHNLGEVIKAGATXTLNITDTVGY

SEQ ID NO: 321426 - protein, 249 aa, Zea mays
  Clone ID: MRT4577_56207C.1.pep
MVATKPRIAVVGAGVAGLTAAHRLCAAGGDRFEVTVVEAGARAGGRVLTSEFAGHRVEMGATWVQGVDGSPVYALARDAGALACGKDLLPYERMDGFPGRVLTVAEGGEEVDADRVASPIEELYRGMMEAARAGEAGSGGGVEEYLSRGLRAFQAARPGGGKELEEVEDALLAMHINRERADTSADDLGDLDLAIEGEYRDFPGEHVTIPAGYSRVVEHLVAALPPDTVRLGHRLRRLDWSETPLRLHF

SEQ ID NO: 321427 - protein, 179 aa, Zea mays
  unsure (1)..(179): unsure at all Xaa locations
  Clone ID: MRT4577_56208C.1.pep
PGRPTRPLFAPLPSLRXVETEHISISAAAPKKKSETVTXPTPAAKKNSSVEEETEEEVEEDMPWIKRGGDLXSXTGSVSQAIPGPRVGSSKLPWMLGGPVAYAGVTFXTXFXKAXRRFXXPKAKXKKLGXNXKALLWXFIDEXIXRXGGTVHXSSELKXLEQXTEVSXREILXRKYISL

SEQ ID NO: 321428 - protein, 89 aa, Zea mays
  unsure (1)..(89): unsure at all Xaa locations
  Clone ID: MRT4577_56209C.1.pep
XXTASTTQXKRLGHREXAATSTLADRRHSVGVRFSPIVLTSSSSPFHRVHRLHLSTAKLVLDADLSAPCDALVLFAGSTNHVVTLNCYL

SEQ ID NO: 321429 - protein, 98 aa, Zea mays
  Clone ID: MRT4577_5620C.1.pep
NDDLKQTVILIRFDNVLWSVSPHLCFPSHLYWFDHKHLYFVGRLMEMGLARRQKKVLVASCDTQHRGCLDAYMMPQKQWQRLSRILLVGINLHTNRLF

SEQ ID NO: 321430 - protein, 57 aa, Zea mays
  Clone ID: MRT4577_56210C.1.pep
WRSVSCQPARVAWFFWSVRLAQQLGLSKAVVLACGPGCTSSTIALLVVYGAAAAVAC

SEQ ID NO: 321431 - protein, 44 aa, Zea mays
  unsure (1)..(44): unsure at all Xaa locations
  Clone ID: MRT4577_56211C.1.pep
FTSLPLCPRRDSFFFLEHXGELSIIILKNMVRKLYTHIWLQDHP

SEQ ID NO: 321432 - protein, 88 aa, Zea mays
  Clone ID: MRT4577_56212C.1.pep
SHLNISSKWRQAGTHSFLSLMSARLRRHAILPRDYSLFFIHQLIPDICRFQQQYTSTTQQQGIHFAFAFGFSFSFSAVLGPTRPPKRP

SEQ ID NO: 321433 - protein, 155 aa, Zea mays
  unsure (1)..(155): unsure at all Xaa locations
  Clone ID: MRT4577_56213C.1.pep
PKIDKGAFGSGWYFCLSLLGKLSRPGMTVXEAVALVVKCLREIRLRLVVAPPTFVFKIVAKDGARGYPGGELVGASAPAEAAAAVPAFGLNLVCVSCLFLSGASLFSNGSWWGSPPCFFFHFGPPLDSRFRPNSCFRRGPVSPGCVGLARFGPPF

SEQ ID NO: 321434 - protein, 76 aa, Zea mays
  Clone ID: MRT4577_56214C.1.pep
ADKRGRDVTENMKQILLTPANWILHKSPMLALGYQPCWCHQEAHAWFYTALGVTATLMYYHQAGCLVPNLLKFTQH

SEQ ID NO: 321435 - protein, 101 aa, Zea mays
  Clone ID: MRT4577_56215C.1.pep
TLEPAGFLFFPFAPLRRCYIPRPPRLIIVAAGSGYRDRHRHGSALGGREGLRRTPKRVSKAFRDGTRGYRQKVKDIVRGALFPEVGADTGTGSCWTYSWTP

SEQ ID NO: 321436 - protein, 124 aa, Zea mays
  Clone ID: MRT4577_56216C.1.pep
KILLLYPSRHKQPAGRQDFSLRSCMAAWPLTDCRPPGAIHAFLHGPHGRAMLKCRLWFPFFFFFNFLLPSRCSTRPPGSITLVSFSDSLSEQPLEHRATGRTCPSTAVPARLSLSFFFLSFTVY

SEQ ID NO: 321437 - protein, 93 aa, Zea mays
  Clone ID: MRT4577_56217C.1.pep
TTKSPKIFKKGEFHWVAKILGHQRQKRQQTSQAMSFDKKMRATGGGKYYRRGKKNRAGGVAGCYLFTLAFFENNRKFAICLRHSFIGTAGNPP

SEQ ID NO: 321438 - protein, 84 aa, Zea mays
  Clone ID: MRT4577_56218C.1.pep
IIIVINFFYSYTFLMFGFNSRPPKNLRWGGHKTYLLKKQEQIQNFPKNVQRYNKLGPFSCCGPLTVPICAKAFKPQLQKRGLFN

SEQ ID NO: 321439 - protein, 153 aa, Zea mays
  unsure (1)..(153): unsure at all Xaa locations
  Clone ID: MRT4577_56219C.1.pep
MACTNNAMRALFLLILYCIVHAEKEQSKGLAAIASSPDGSFYITKWGAYSYGKTNRTTAVQEAWTSTCGRTGKHTLLIPNGDFLVGQLTFTGPCMVDVTIQTDGNLLATTDLSXTKDHXGMRIEILRVDTWXLTGMVNLEWQGPSPWSKNSCS

SEQ ID NO: 321440 - protein, 137 aa, Zea mays
  Clone ID: MRT4577_5621C.1.pep
AGRFGISYLAFHFSCRLTPRQGEPQPWRAHHASLSSPTKPEVFRGDQDATSSGTAASPCYSMFGLFRPEHHPRTRHRSRSSLYHVVEARITTRRVPMPPTLCPASDRRCKASPYAELRWECVSAYLHDRWDWLQFAP

SEQ ID NO: 321441 - protein, 157 aa, Zea mays
  unsure (1)..(157): unsure at all Xaa locations
  Clone ID: MRT4577_56220C.1.pep
RIGLSSQLPGAWASRVLAASVPSGGSIDADRHHRSPLMQLQYSITKLVPDPSGLQNVMLRVARNCXAEKXLYGGPXLSWNNDYGEDLLFLSSSGIFKPPLTIRXDITICFPQFGSHRNXEQHGLPTNRLWTIDTNTPPLTLNPXAIIAIGDLNLKAS

SEQ ID NO: 321442 - protein, 144 aa, Zea mays
  Clone ID: MRT4577_56221C.1.pep
GRDRVHNKASGGRRRAPLLTSRLPETPVVPAAAATPCDEYYRWPYHTGRKMRSPHHLTISSATISRQEHNAGDSARRSAGHSIQDGRPRRPPPLTIRRPYSRTFSVHRPCIPEGRLGFHAEACVRLVLEHNIARLSCLLSSASG

SEQ ID NO: 321443 - protein, 59 aa, Zea mays
  Clone ID: MRT4577_56222C.1.pep
MNYLELSRRFVNNYTVFSVSRRRKNNLRLWWHISARIMTTRRLNSSLYVVSRRKLLSKH

SEQ ID NO: 321444 - protein, 108 aa, Zea mays
  unsure (1)..(108): unsure at all Xaa locations
  Clone ID: MRT4577_56223C.1.pep
MGRSPCCDENGLKKGPWTQEEDEKLLHYIQKNGHGSWRTLPRLAGXACPSPVHAGLNRCGKSCRLRWTNYLRPGIKRGKFSREEEQTILHLHSVLGXXWSALAXXXPG

SEQ ID NO: 321445 - protein, 83 aa, Zea mays
  Clone ID: MRT4577_56224C.1.pep
GSIFVQIYITLHPRLASPWWGAHPRPICELVLPFLWRAVSPPFDGDNPAFTGVTPLSTPPLFPTWGRGKHARSDPYSLGAHRL

SEQ ID NO: 321446 - protein, 42 aa, Zea mays
  Clone ID: MRT4577_56225C.1.pep
MIIQFRAELPSSIAQTIKQLIMLILSFYALNFSPGPVMWWIH

SEQ ID NO: 321447 - protein, 318 aa, Zea mays
  Clone ID: MRT4577_56226C.1.pep
MGRSPCCDENGLKKGPWTQEEDEKLLHYIQKNGHGSWRTLPRLAGLNRCGKSCRLRWTNYLRPDIKRGKFSQEEEQTILHLHSVLGNKWSAIATHLPGRTDNEIKNFWNTHLKKRLIQMGFDPMTHRPRTDLFAALPQLIALAALREQLSADPDPPQQAGTTAAAAAALAGLIGALCSPPQLTLLDTTTATTAAAAPPVVSSSSADDDAAHQYYLPRTTFPDAPGSGEAAHQRQQQAAGLISYGRRPDDAGGDVDVFACYGGGGGSSLPPLTDLSDDAATLLQLQVDTASSEFGSGGSSPLLPWPEFFPDDPFITDFL

SEQ ID NO: 321448 - protein, 73 aa, Zea mays
  Clone ID: MRT4577_56227C.1.pep
FLGAVVFFFFCGKGEPKLVFFLFQRIITPVGKAGGCKHLAIDVFLKKKKKKKKKKKKKRTKEKKIKKKKKRKA

SEQ ID NO: 321449 - protein, 40 aa, Zea mays
  Clone ID: MRT4577_56228C.1.pep
SVSLSPKMALTVSLSCRSTDGLAYYGPSHVPSVVLLRPTA

SEQ ID NO: 321450 - protein, 34 aa, Zea mays
  Clone ID: MRT4577_56229C.1.pep
LIKTLAVGFSYYWAAYSSRPFMLSKGALPLSHNH

SEQ ID NO: 321451 - protein, 137 aa, Zea mays
  Clone ID: MRT4577_5622C.1.pep
MESPDGSSLPDFLELQRTRVLCKADAPTHTEGFQYSGAFAAMGVDTSVSVEKFCKNFKIEINRLTDEDMEFDMIGVDASIANAFRRILIAEVPTMAIEKVFMVDNTSVIADEVLSHRLGLIPLDADPRLFDYISDDV

SEQ ID NO: 321452 - protein, 164 aa, Zea mays
  Clone ID: MRT4577_56230C.1.pep
IDANGILKVSAEDKTPGQKNKIPIPNAKGRLSKEEIEKMVQEAEKSKAKAEEVKKKVDPKNALENYASNMRNPIKDDKIASKLPAEDKKKIENAVDGAISWLDSNQLAEVEEFEAKMKELEGICNPIIAKMYQGEGAGMGAAAGMDEDAPFGGSGAGPKIEEVD

SEQ ID NO: 321453 - protein, 648 aa, Zea mays
  Clone ID: MRT4577_56231C.1.pep
MAKGEGPAIGIDLGTTYSCVGVWQHDRVEIIANDQGNRTTPSYVAFTDTERLIGDAAKNQVAMNPTNTVFDAKRLIGRRFSDPSVQSDMKLWPFKVIPGPGDKPMIVVSYKGEEKQFAAEEISSMVLIKMKEIAEAYLGSTIKNAVVTVPAYFNDSQRQATKDAGVIAGLNVMRIINEPTAAAIAYGLDKKASSSGEKNVLIFDLGGGTFDVSLLTIEEGIFEVKATAGDTHLGGEDFDNRMVNHFVQEFKRKHKKDISGNPRALRRLRTACERAKRTLSSTAQTTIEIDSLFEGIDFYSTITRARFEELNMDLFRKCMEPVEKCLRDAKMDKSSVHDVVLVGGSTRIPKVQQLLQDFFNGKELCKSINPDEAVAYGAAVQAAILSGEGNEKVQDLLLLDVTPLSLGLETAGGVMTVLIPRNTTIPTKKEQVFSTYSDNQPGVLIQVYEGERARTKDNNLLGKFELSGIPPAPRGVPQITVTFDIDANGILNVSAEDKTTGQKNKITITNDKGRLSKEEIEKMVQEAEKYKAEDEEVKKKVDAKNTLENYAYNMRNTIKDDKIASKLSADDKKKIEDAVDSATSWLDSNQLAEVDEFEDKMKELEGICNPIIAKMYQGAGAGMGDAAGMDEDAPSGGSGAGPKIEEVD

SEQ ID NO: 321454 - protein, 731 aa, Zea mays
  unsure (1)..(731): unsure at all Xaa locations
  Clone ID: MRT4577_56232C.1.pep
PAGTLLERPSVLDPRSVSAGLERSRNHVTPDKSPRTASSLPQPSLQKRSKAIGILCDFSRSRLPPTSFGSSFRSRERFSSWWQWAKSEGPAIGIDLGTTYSCVGVWQHDRVEIIANDQGNRTTPSYVAFTDTERLIGDAAKNQVAMNPTNTVFDAKRLIGRRFSDPSVQSDMKLWPFKVIPGPSDKPMINVQYKGEEKQFAAEEISSMVLIKMREIAEAYLGSTIKNAVVTVPAYFNDSQRQATKDAGVIXGLNVMRIINEPTAAAIAYGLDKKATSSGEKNVLIFDLGGGTFDVSLLTIEEGIFEVKATAGDTHLGGEDFDNRMVNHFVQEFKRKNKKDISGNPRALRRLRTACERAKRTLSSTAQTTIEIDSLFEGIDFYSTITRARFEELNMDLFRKCMEPVEKCLRDAKMDKSSVHDVVLVGGSTRIPKVQQLLQDFFNGKELCKSINPDEAVAYGAAVQAAILSGEGNEKVQDLLLLDVTPLSLGLETAGGVMTVLIPRNTTIPTKKEQVFSTYSDNQPGVLIQVYEGERARTKDNNLLGKFELSGIPPAPRGVPQITVTFDIDANGILNVSAEDKTTGQKNKITITNDKGRLSKEEIEKMVQEAEKYKAEDEEVKKKVDAKNALENYAYNMRNTIKDDKIASKLPAEDKKKIEDAVDGAISWLDSNQLAEVEEFEDKMKELEGICNPIIAKMYQGEGAGMGAAAGMDEDAPSGGSGAGPKIEEVD

SEQ ID NO: 321455 - protein, 92 aa, Zea mays
  Clone ID: MRT4577_56233C.1.pep
RTRRECGAQAGTDPKFTQQHLSPIMRPDQRPPTIGKCRRAAGPGREYHANSQLMFLALQIIDPRVLWLLYTDVSVCGSQLLMVNVIYKYSAN

SEQ ID NO: 321456 - protein, 50 aa, Zea mays
  Clone ID: MRT4577_56234C.1.pep
RAITCDFTQYQLKKTTHFFNQINFQGKFTFYKIYKKINNSLIIFRIIKLK

SEQ ID NO: 321457 - protein, 98 aa, Zea mays
  unsure (1)..(98): unsure at all Xaa locations
  Clone ID: MRT4577_56235C.1.pep
GEGGGLVGGGGGGGWCREGVGSQGGACSFRNIREQKASVELKRWNLQARLKVQAEAGKGWEEPKKQQEMTRTAWPPSSLTPSSHSLSLSLRPXDPGPA

SEQ ID NO: 321458 - protein, 160 aa, Zea mays
  unsure (1)..(160): unsure at all Xaa locations
  Clone ID: MRT4577_56236C.1.pep
QGPFFGKWGEHKLYSLLFFVRDVKVHPTPNKVPHVKYVTPPELKELLRKASPGKDGVKISPXWFRLVVANFLMGWWAHVEKGPLGEAVAMEPPPNLKELGAPGRPAPMPPPPVYVAAAAALHVFQKFSPPPPESELSCSPGGSVVLASKISPPEGFFFFF

SEQ ID NO: 321459 - protein, 63 aa, Zea mays
  unsure (1)..(63): unsure at all Xaa locations
  Clone ID: MRT4577_56237C.1.pep
KTLXFVLEDGPKGRPPXLARPASTLENGPGLLSTRTQFPVPSPVXCRPFSTKKAGQKAGYAGR

SEQ ID NO: 321460 - protein, 43 aa, Zea mays
  unsure (1)..(43): unsure at all Xaa locations
  Clone ID: MRT4577_56238C.1.pep
CSFNLSSVEIGGIPPSKIFFVLGKSLDGXSYFGSVLVPSSGLH

SEQ ID NO: 321461 - protein, 83 aa, Zea mays
  Clone ID: MRT4577_56239C.1.pep
QTLHMSIFTALISFKEPVHTQYIVQTTQGASRTLTTLPHSTPRTMSYRARTHQPYEILEPDRVRTGTTQGNPRINAQEWAKNG

SEQ ID NO: 321462 - protein, 216 aa, Zea mays
  unsure (1)..(216): unsure at all Xaa locations
  Clone ID: MRT4577_5623C.1.pep
RVSDNLGQMSQSLGYXITHIFVSMIGXWNFLGRIGGGYFSEIIVKDYAYPRAIALGIAQILIAIGHFNFAMAWPGTMYVGTLLVGVGYGAHWAIVPAAASELFGVKNFGALYNFLTVANPAGSLVFSGVIASGIYDAEAAKQAQQRHSTSKLLATSGRVVSVVSEAAPALKCEGAICFFLSSLIMAGFCVVAFGLSLILVYRTKVVYAGLYGKPRT

SEQ ID NO: 321463 - protein, 101 aa, Zea mays
  Clone ID: MRT4577_56240C.1.pep
QSSDPLPSINTSLVPWKQSQVIDSSSTSSITQNRSISQRENQPIHHLSRLSRVSAGPSPAAPVPAPPPPAGAYGYPPPQAAAYGYPPPPQAGYGYQQQPKK

SEQ ID NO: 321464 - protein, 74 aa, Zea mays
  Clone ID: MRT4577_56241C.1.pep
KKKKKKKKKKKKKKKKKKKRGGPALGEPKLYVTRSHADGHKLLSYSGPPKITIPLGPWVFTNGRGLGKKPWAVT

SEQ ID NO: 321465 - protein, 133 aa, Zea mays
  Clone ID: MRT4577_56242C.1.pep
LGEEIHGLLPRLPLFYVRVRPLCIEYSSDTEAKIDTRGTVMPYVANNQNPAHAKAGRRLTGFISVPSSSCSPQISHSTLRNHIANSLSNRTCNLYTNSARTPLATIVAVCCSCHRDALGPTPGIRGTGVPAGV

SEQ ID NO: 321466 - protein, 124 aa, Zea mays
  unsure (1)..(124): unsure at all Xaa locations
  Clone ID: MRT4577_56243C.1.pep
LKIPLLVINQMFDAIICDPPYGVRAGGRKSGGRKLIKGVKGPYTVPDEKRDNHIPSTAPYSLAECVHDLLHLAARMVVMGGRLVFFYPVLRGEDGXEPAVPXHPCFKLITXSEQILSFRYSRVL

SEQ ID NO: 321467 - protein, 815 aa, Zea mays
  unsure (1)..(815): unsure at all Xaa locations
  Clone ID: MRT4577_56244C.1.pep
NSARGLSWSSTTLSDVATAVVKWRKSHVDGTADKTRRKEPLFPSAAINSCKQVNNVSQDRSNGVPTASPPSGQLQQKKSLAATLLENIKKDTIALVPADIARLAQRFFSLFNFALFPHKSPPSPMANRVLFTDAEDRLLALGILEYNNDWAAIQKRFLXLKSKASXFVRNSNRSSSNDLDIQSCAECAIGKVAMFSLLALRCWVXLINVYNEHAGESNFAIPRRDPSLLQRQWRVASEIPKSYNFSSAEKERRRTYGAKRRKLRAAMPDSLREQEADHNASEDVENDDDSYVNEAFLEDTDSRSMNMMPXSCPYQKMLEKAXDAVRHRHRXEECGYIEPQKGTGAKLDVTTSYIPFMYCPSDGSSYVRTPSTAAPVASCGSLDQLSASKLSKEKGGCVVKLAPDLPPVNLPPSVRVLSQVAFHPNATHFHGTSDNAAKNMYPVPPLAFTENAYRQLNLFPEANSRLQQNGITNDNATEDGSEQDLQMHPLLFHYPRDVVSSYSHPVQNLINQSRKYDLFPFEKVQVERSNNQTTGSTKNGTVNANTIDFHPLLQRTEVDVHNDVPEYDSNLDYHQSDNNMSKVPVDDQSTAGQASTGPSERETSIDLNIHLCSPTVIKDSNDFRSSFSRSNVQDEVSRKDKSSVPGLEIVNSYFHHCIQEPNEESMQGIVMEQEELSDSEEDSQHVEFECEEMDDSEEEQVQGPEASPIQNKGISASVVCGEFHVSNDQSQIQQGSVQKDKQGASSMQKTQVPSRSVRAKLKPETAKRTGSRTSTSRTVETSRSKTRSSKVPQGQSSAEWKSNDSRRTRKIPAPR

SEQ ID NO: 321468 - protein, 153 aa, Zea mays
  unsure (1)..(153): unsure at all Xaa locations
  Clone ID: MRT4577_56245C.1.pep
EESMQGIVMEQEELSDSEEDSQHVEFECEEMDDSEEEQVQGPEASPIQNKGISASVVCGEFHVSNDQSQIQQGSVQKDKQGASSMQKTXVPSRSXXXXXXXXXXKRTGSRTSTSRTVETSRSKTRSSKVPQGQSSAEWKSNDSRRTRKIPAPR

SEQ ID NO: 321469 - protein, 121 aa, Zea mays
  Clone ID: MRT4577_56246C.1.pep
TLIKFHHQTEEKKFKGPPFLGRIPNYKGSITRKKPLHHQCFFDQRLQPIDFKPFFRFKTLAQTHPPPQAQRSGPYPPCCQPLPLPLNPLSAALPLPFRMAMGHVMASRQTATPPTVARTTM

SEQ ID NO: 321470 - protein, 138 aa, Zea mays
  Clone ID: MRT4577_56247C.1.pep
RTRVLGLSSTALLGIALEAMIQARPDPVQDPMSSVRLLAYLPENKHEYILSTQNRRSQLFKIDYLRTLILKQCTFYNIGIYTYLRALILYSCKDSGCIAAIQYLKLLRYLNIRNCDSLTGKNLNHLTQSICHLYSLEK

SEQ ID NO: 321471 - protein, 115 aa, Zea mays
  Clone ID: MRT4577_56248C.1.pep
MSNDPHPNADPTRGLNRSTFATDQADTCRSPASSPCDTNVNDDTFMDKVTRELMIGVMDVLMIRNLGEDQEGLGKDQDVKEEKLGRSQQEKSKFDSTSSPPWSLEQTPRMHPNSN

SEQ ID NO: 321472 - protein, 50 aa, Zea mays
  Clone ID: MRT4577_56249C.1.pep
LRIVRSEFGTYEIVLPLSLKNSYNSCSVSRKEQTVIVKPCMLSLCKAMVT

SEQ ID NO: 321473 - protein, 61 aa, Zea mays
  Clone ID: MRT4577_5624C.1.pep
AHTSSQWTVSLGADITRFEGRGQRDMIGPDVAVPHQQLDAWSQDDFTDTANSQDYRYHEVR

SEQ ID NO: 321474 - protein, 68 aa, Zea mays
  Clone ID: MRT4577_56250C.1.pep
TKSLTVKDPFRKSKNRRGGLTETTSTIQLKGGGRSNNCCFYISPPRGGVLKRGATNKKRSLCIPQLRL

SEQ ID NO: 321475 - protein, 336 aa, Zea mays
  Clone ID: MRT4577_56251C.1.pep
MANLRARRAILSFRTRTYEEGTLAVEDMDWDALTVKGTCQEIEKRYLRLTEAPDPAKIRPEDVLEKALAMVETSQKNYLYKCDQLKSIRQDLTVQRIQNELTIKVYETHARLAMQAGDLHEFNQCQSQLKRLYAQGIKGCYFEFSAYHAFGVMLHSNNKRDLLSSMASLSKEAKQDAAVKHALAVHASVLSCNYVLFFKLYKKAPNLNSCLMDLYVERMRFEAMKCMSRSYRPTVPVGYVAQILGFLRTDTGCATNGDDGLEGCEKWLKAHGTVLSEDSSGELQIDTKASSSTLYMPEPENAVAHGDASLAVDDFFARTDGQLKRGSSDGPTVDTP

SEQ ID NO: 321476 - protein, 44 aa, Zea mays
  Clone ID: MRT4577_56252C.1.pep
SYTRPMSSRRFLPRGGAPSIQCTIPNPPTRLRKLHRANISLFDY

SEQ ID NO: 321477 - protein, 59 aa, Zea mays
  Clone ID: MRT4577_56253C.1.pep
TVSVFVICIGCSLIQVFRCLKTINSKKYGVELVCFTDNPNIVLYSSKNGWDGKSSFMLI

SEQ ID NO: 321478 - protein, 145 aa, Zea mays
  unsure (1)..(145): unsure at all Xaa locations
  Clone ID: MRT4577_56254C.1.pep
MTSSEVAAAITFLGTRLADPVPQNGXIEDRLGLSEGGKANPAPKKVAKTSTSSDRPLWFPGGKAPDYLGASLVRDYRDXPLGLEKPVEYLHFQLDSLDHNLVKNEGGGIIGTRGESSQLKSTPLQPYRKGAGLHRLHECELIHAR

SEQ ID NO: 321479 - protein, 179 aa, Zea mays
  Clone ID: MRT4577_56255C.1.pep
MQSIRQPLRSALSKAATRQYATASSQYAETIKNLRINSDTKVLFQGFTGKQGTFHAQQAIEYGTKVVGGTNPKKAGTQHLGLPVFKNVADAMKETQATATAIFVPPPVAAASIEEAIAAEVPLIVTITEGIPQHDMVRITDMLKSQSKSRMVGPNCPGIIAPGQCKIGIMPGFIHKRGP

SEQ ID NO: 321480 - protein, 196 aa, Zea mays
  Clone ID: MRT4577_56256C.1.pep
MRVAVVGAGVSGLAAAHELARSGGSRVTVYEKEDYLGGHARTVAVEDADAASTVQLDLGFMVFNRVTYPNMLEWFEGLGVEMEISDMSFSVSTELGASGSRCEWGSRNGISGLLAQKSNALSPSFWRMIREILKFKNDALRYLEDHENNPDMDRNETLGQFIRSHGYSQFFQEAYLTPICACIWSCPSQGECGISA

SEQ ID NO: 321481 - protein, 92 aa, Zea mays
  unsure (1)..(92): unsure at all Xaa locations
  Clone ID: MRT4577_56257C.1.pep
LINTVFDSKRVIGMKVRDAFVQIDIKLLPLKDMYEPRVMPMIVXHHTGQDMQSAXKEISSIGLXKMREIAEAYLVSTIKDAVVTVXVYFNDS

SEQ ID NO: 321482 - protein, 111 aa, Zea mays
  Clone ID: MRT4577_56258C.1.pep
MPRDLRPAGMRLFGVTIAPVPEANPPGRNPSPNPPVAAREDVMRKCKSMGNLAALGAGLDGGGGCADGGVAGDGYLSDGGLMQSCGKRRRAQERKKGAVFCSCFALEIFVF

SEQ ID NO: 321483 - protein, 85 aa, Zea mays
  unsure (1)..(85): unsure at all Xaa locations
  Clone ID: MRT4577_56259C.1.pep
FPFNHVAALTPXCFFHQQFXLPFGQLXTTSPXSFFPNQQVLPFPQRFVANPSPLLQLHQLVPFVHLALPTPAAFYPQHIIGGALF

SEQ ID NO: 321484 - protein, 38 aa, Zea mays
  Clone ID: MRT4577_5625C.1.pep
AGRVQKLWSSAPNLSPRKSESSGVDTASELARTCVPLT

SEQ ID NO: 321485 - protein, 71 aa, Zea mays
  Clone ID: MRT4577_56260C.1.pep
YQIVSLLSNLYIVTAYSILLTNLHVDSRTCSHILILNIFKEIAYCITLFLNYITFTSILYLFMLINLVLVY

SEQ ID NO: 321486 - protein, 269 aa, Zea mays
  Clone ID: MRT4577_56261C.1.pep
IVLRSIPTWSSKTHLQSSVIPKVPRSAAALAKRKIKEIGRRESTKLDNYDIVRNPTSVKRFEARILSFSTAGPSNGPNRSASTSKKIRKHRSPLRTGRRAFSPSSTRLVHGFGEEHEPETRHVNKKFRITSNEAPKKFLKHTEEDTADNDFSFASDMPVSGQQNDQYDVAQETEGTQMDCEGEDAETDVPYDSVSRSDPAECCNQISDVSLSPENYRTADDDVLVEGCSVAVEDPNSSEQLAHGHESNSAANNEMDEWQMDPTSTEESS

SEQ ID NO: 321487 - protein, 75 aa, Zea mays
  Clone ID: MRT4577_56262C.1.pep
FPLFFFHFFFFLYFFLLSQCHFHSFRKPHSNIFSIYWEHDLFTPTPFQLNPHQPPEVPFQSTTSPTRKSSVLPPS

SEQ ID NO: 321488 - protein, 64 aa, Zea mays
  Clone ID: MRT4577_56263C.1.pep
LYLLQCAEEPDRHHEGVACRPLYPGSSCECHLHAYKRWLWLTATVVFHFTAVVAYVNFGSSCHL

SEQ ID NO: 321489 - protein, 116 aa, Zea mays
  Clone ID: MRT4577_56264C.1.pep
KQVWGVKNPKPNFTPKIGPKIPFTPWPKNLKIPLLKGAPFGQSWGPKPNNGIFKKKPWGPPRGFFPLPPPSSNLGPRGKTPTTFLGGGGLKSFGSKGPGLFYPKPRGGILAFRGGV

SEQ ID NO: 321490 - protein, 178 aa, Zea mays
  Clone ID: MRT4577_56265C.1.pep
MVAHRFHQYQVVGRALPTPGDEQPKIYRMKLWATNEVRAKSKFWYFLRKLKKVKKANGQMLAINEIFEKNPTTIKNYGIWLRYQSRTGYHNMYKEYRDTTLNGGVEQMYTEMASRHRVRAPCIQIIKTATVDFKLCKRDNTKQFHNSKIKFPLVYQKVRPPTRKLKTTYKATRPNLFM

SEQ ID NO: 321491 - protein, 90 aa, Zea mays
  Clone ID: MRT4577_56266C.1.pep
NHARCVDVGGLSRLVRLSSRTDGGAACDIPSPRPLHRSPFRGTSSTSNLRWKCLVNDGSPRMLFLFMFLTECLVDDESSYVVSLFISQKY

SEQ ID NO: 321492 - protein, 88 aa, Zea mays
  Clone ID: MRT4577_56267C.1.pep
VGRMTFVVIKFVFCFDVDGGVVVIIGHAVVIAREGQVHHPVDAGLDSILDTGGVLGGDVGVAFPGHGMAIVHGRLEVIDHILFDVPFG

SEQ ID NO: 321493 - protein, 215 aa, Zea mays
  Clone ID: MRT4577_56268C.1.pep
MDSSSSSLSQQPEFDYLFKLLLIGDSGVGKSSLLLRFTADSFDDLSPTIGVDFKVKMVSIGGKKLKLAIWDTAGQERFRTLTSSYYRGAQGIIMVYDVSRRETFTNLSDIWAKEIDLYSTNQDCVKMLVGNKVDKESERAVTKKEGIEFAREYGCLFLECSAKTKVNVEQCFEELVLKILDTPSLLADASSAGVSKKNIFKQKAPEADAATGSCC

SEQ ID NO: 321494 - protein, 104 aa, Zea mays
  Clone ID: MRT4577_56269C.1.pep
SSSPARKVRLQIYCPPTTNQASCTTALPPLLLLCRRLAASLLARAGRRRGRCGGWNPIPDVSDSTSRSRRVALGRRSTRSWPPRAAVPPRGARRAAGRVQDELP

SEQ ID NO: 321495 - protein, 99 aa, Zea mays
  Clone ID: MRT4577_5626C.1.pep
CNYAQLLQQFLVLNGFELQSASHITPRMHTRCLLFLLLWCAASVFEFASPIISSKIYVFINFESNIPSIHSAPAALCNIPGVTRTKTLTCHHMHQHHFV

SEQ ID NO: 321496 - protein, 85 aa, Zea mays
  Clone ID: MRT4577_56270C.1.pep
CPRHLLSCIFGTVLEGMDVITSIATIPTYKPAERIRLFNGFAQLIGDGRAQTARAMWDRPLKTVYISDCGELTVTKPSLSPPSLP

SEQ ID NO: 321497 - protein, 220 aa, Zea mays
  unsure (1)..(220): unsure at all Xaa locations
  Clone ID: MRT4577_56271C.1.pep
PTRPAPSVLEFLHRQSEXHPPMTTGFPXERNRRILRCLLSWVRVRCFSETPAASLARHPLLTFAFNSLQVSFSFEVAIEVMTELVSQHQELPEAFLSKTPYIREALLLPALANRNEKIIAGLACLMCEVGQAAPALVAEGGSQALALTDGLLRSIYCIXYXCVAFTSEDWEIAESTLQFWCSLAHFILGIDVKSAKRNVAQELLGPVFSSLLDALLFRAQ

SEQ ID NO: 321498 - protein, 136 aa, Zea mays
  unsure (1)..(136): unsure at all Xaa locations
  Clone ID: MRT4577_56272C.1.pep
RPTXPXXDRERTTTIQXPGTQSKGKRSQQSQGGEQRREGNRQNDTREEATHRRGREKKGTNQGSGKETSGSTTKGGKSRANRREAEGKKRQGDRRKGTTKQRNTGKQKRTKGTTKAAKDKKTSRTGANGKRKKARG

SEQ ID NO: 321499 - protein, 130 aa, Zea mays
  Clone ID: MRT4577_56273C.1.pep
MAPGVVSEKGGPAGAKKKGWVSLTMDCPKPGGDKIWGAPSLEKFLQDPIRVPGGRVGNLGDSVTFFGEKTKVTVTFEGPFSKGTLKSLPKKSLKNHNGGNWLPGVVAKRAQTVYDPRYLTIVENEGGKKN

SEQ ID NO: 321500 - protein, 218 aa, Zea mays
  Clone ID: MRT4577_56274C.1.pep
SRPPVLDPSSLPRLPVPLPAMELGPSSDSCAAPGCFSPACRGCAVPVCAAHCSASIPLCSPWSSLLPGVSCRTRCIPARSSLCTAQIQPSRAEFGLCLSLCLSSVLPAMAHTLVASARARPARVPGRRVLSSLAPCVRFFSLSSPRCRTLKPSARCSRPLPCLRILLPARTLLSLTRVCSSSPSRRSSLPSSFSALPLVQHRLLLLVDVTLPSFDAAP

SEQ ID NO: 321501 - protein, 100 aa, Zea mays
  Clone ID: MRT4577_56275C.1.pep
MSSTEVPTGNAMENSYQSRIGQSEIPVLKDEAPIESTEYDNGGDSDQQLERDEKEAIDRDNIISERTRGAAKQPGAYAEPGDEEGLGDAADGIDGTSSVR

SEQ ID NO: 321502 - protein, 140 aa, Zea mays
  unsure (1)..(140): unsure at all Xaa locations
  Clone ID: MRT4577_56276C.1.pep
VEQCVEETHRCTWTYIISAAYLSVVLGATAEKMAAAKVGIMGRNASNRRKLCAXATYNVKLITPXGEEELKVTDNMNILFFCEEDGIDLTYSCRAGICSSCAGKVVSGSVDQSDHSYLYDGQIAAGWVFSCHAYPNSDVD

SEQ ID NO: 321503 - protein, 82 aa, Zea mays
  Clone ID: MRT4577_56277C.1.pep
EGPGEVAPSLTLSYNTITGSEPLKTNPWYLRVPQIPNRNSNGSEKTQKKTRPAQPNPTGNPAFLDPFQQLTPRCRAPHLAHL

SEQ ID NO: 321504 - protein, 64 aa, Zea mays
  Clone ID: MRT4577_56278C.1.pep
IRYEIGNCSKKYLVFSIEYKVNGSYVACWVNVLQHFNSSVERSMPLCHESFIDRIMYGKWGFLV

SEQ ID NO: 321505 - protein, 75 aa, Zea mays
  Clone ID: MRT4577_56279C.1.pep
CDLLPTRDPARITTAPQRCRPGRTKSPPYNLPGRIRSSTSFIQFFLLPSQCTSTYLVTSISNRQPIEVGDMYNNS

SEQ ID NO: 321506 - protein, 187 aa, Zea mays
  Clone ID: MRT4577_5627C.1.pep
RPGGNYVGVTLVGKTLAVMGFGKVGPEVARRARGLGMDVVAHDPYAAADRARAVGVDLVSFDEAISTADFISLHMPLTPSTAKLFNDETFARMRKGVRIINVSRGGVADEEALLRALDNGTVSQEGVALEIAEAVIGALRGDLAATAVNAPMVPAEVLSELSPYVVLAEKLGRLVVQLVAVGSGIKG

SEQ ID NO: 321507 - protein, 124 aa, Zea mays
  Clone ID: MRT4577_56280C.1.pep
LRSRAPGGARPRRVVLAASPGVPRAPSCSGLSVGWRRLRGGGGEKKNSALCRSALARAGCAPLPPAGSPGFACSRVARRCGGRRSRLLVLRLLGGVRAPGGLRPARGLRGRFGRLPSGASPALG

SEQ ID NO: 321508 - protein, 156 aa, Zea mays
  Clone ID: MRT4577_56281C.1.pep
CVLPPPSARLCILAGHDRAGALEARDGSRTTPRRRAHEASRLPANEESRDILPAAQWTPRAPSWRAAPSPGLNRDRDTDLSFRRLFVAGAELQRHPAPRARQVRGGVLRATRAGEEPQDGLLPGASTPSTCPRTLMISRSRSTRSCPTTASATRSR

SEQ ID NO: 321509 - protein, 267 aa, Zea mays
  unsure (1)..(267): unsure at all Xaa locations
  Clone ID: MRT4577_56282C.1.pep
TRGQIWSPWPPSSPCRAARSTQLACHPVASIQGTKTLELKDCIGAIDGTHVRASVPKEMEAAFRGRKSHPTQNVMAAVDFDLRFTFVMAGWEGTTHDALILRDALEXENGLRVPEGKFYLVDAGYGAKPGFLPPFCGVRYHLNEWGXNNPVQNEKELFNHRHSSLRVTVERAFGSLKRRFKILDDAIPFFPFPTQVEIVVASCIIHNWVIEDGGDEFIVPEAEDELPSINHQRSSHGQAMEHAFMVNFRQQIANAMWEDRQQYQNTT

SEQ ID NO: 321510 - protein, 86 aa, Zea mays
  Clone ID: MRT4577_56283C.1.pep
SNAAGEWALRKKLLRNLSEGLHPVELPIHDAFLRGGMLLLIGHEPRDPRGGANQPDRQPPPGEALVMSGQNAHKGLVARDTARSTA

SEQ ID NO: 321511 - protein, 56 aa, Zea mays
  Clone ID: MRT4577_56284C.1.pep
PPGRALCSLGARSAARAIRWLSSSYSCPALTSQMRRRIAASSPRPGAHSCGAPRRR

SEQ ID NO: 321512 - protein, 167 aa, Zea mays
  Clone ID: MRT4577_56285C.1.pep
MAMVPSDSSHHGAVDNSPNGFTQGRREEARKLGPSWYFSRKEIEEHSPSRRDDIDLKKECSLRKSYCSFLQDLGMKLKVPQVTIATATVFCHRFFLRQSHAKNDRRIIAPVCMFLAGKVEETPRPLKDVILVSYELIHKKDSTAGQRIKQQKKKKKKKKSTLRCYHC

SEQ ID NO: 321513 - protein, 267 aa, Zea mays
  Clone ID: MRT4577_56286C.1.pep
GRSLYSLAQKRSSRLPCSPAPFFSTGRRNFPHPWRHKSPAAFPLHLPPCAPAGRPPGAPRQQRDSSSPSSSTILLDHVRSLAPAPSADSLPSHGAEFFPLTLADSERRAPYARVPCISLLASSPEHAGVGTPWRPLPWPELVQPVFFPNSGTQSSPGCGLPVLRASTSPGRPCDSPPALPIHLPQGRAPFIQAADCACAPGTTELASTTPSSPASMDARLPLPWRLCSSHTRCPTPCSYLQPPPLCSLRRGISSPGQRFVFPASSPP

SEQ ID NO: 321514 - protein, 606 aa, Zea mays
  Clone ID: MRT4577_56287C.1.pep
MAASSRSRPLSKLSPSHLVPLDLSTSWCCTPHGLGGHAPHSSSSSSSSHPSSPARAAAHHMDPPPTSSTVASSYATPPQPSYAPSYPTSYTKFNSALNAGLLNPMSPPPLPLDKTRSSPTLFDMMANEQDYHPRTAAGIHSIPAPPQPHQLPPARSMDRQMLLQDRIADLIGSCSPGNQFNDADSSDVRLTLSSKDGLSVTLCVHRHILVAHSRFFAAKLSDRWSKQQRTLPHIVEISDCDDVEVYAETLRLMYCKDLRRRLMREDVNKVLGILKVSAAIVFDAGVLSCLEYLEAAPWAEDDDEKVATLLTQLHLENSGAGEVLKRVSLELAPSSLVEEADEGGSCNGGNSSGGEEVLLRLLQVVLEGKDEKARREMKGLVSKMLRENSTSRGGAIGGDLRKESLYSACNGCLSLLCEQFVRASEGDHSEVARIARQADNLHWMLDILVERQIAEDFLRTWATQTELAAMHRKVPAIHRYEVSRVTARLFVGVGKGQILVSKEARCQLLSTWLEPFYEDFGWMRRACKGLDRHLIEDGLANTILTLPLATQQEILLAWFNRFLNSGEDCPNIQRGFEVWWRRAFWKRNSEPEPPSRLRITAICENS

SEQ ID NO: 321515 - protein, 58 aa, Zea mays
  Clone ID: MRT4577_56288C.1.pep
GGICFYLLFGDTSIEDCLFDSHLDYLIMVRIAVKYHDQMTTIITTCLSGYFPCRNVSG

SEQ ID NO: 321516 - protein, 73 aa, Zea mays
  Clone ID: MRT4577_56289C.1.pep
ARAWLERLWIWSVIHRNNRIQGEQICKRKLLRAKAMQRAERAIVVGAAVGVVGVVIGPLQPRFAKFIVCGLNS

SEQ ID NO: 321517 - protein, 259 aa, Zea mays
  unsure (1)..(259): unsure at all Xaa locations
  Clone ID: MRT4577_5628C.1.pep
RGTQVTREVFEAARGRLRVVGRAGVGIDNVDLQAATEAGCLVVNAPTANTVAAAEHAVALLAAVARNIAPADASLKAGKWQRGKYVGVTLVGKTLAVMGFGKVGPEVARRARGLGMDVVAHDPYAAADRARAVGVDLVSFDEAISTADFISLHMPLTPSTAKLFNDETFARMRKGVRIINVSRGGVVDEEALLRALDNGTVSQAALDVFTEEPPPRDSKLVQHENVTVTPHLXASTIEAQEGVALEIAEAVIGALRGDL

SEQ ID NO: 321518 - protein, 146 aa, Zea mays
  unsure (1)..(146): unsure at all Xaa locations
  Clone ID: MRT4577_56290C.1.pep
MAVAQKRTPLTHAMGRMHSRGKGITGKTPTYKRTPTTWLKTDDYDMKEMITKAAKKGQMPAQIGVLLRDQDGIHLVKSANDSKIXLRILKGHGXHPEIPEDXYFLIKKAEAIRKHLERNRKDKXCKFRLILEESRIHRLARYYKAQ

SEQ ID NO: 321519 - protein, 86 aa, Zea mays
  unsure (1)..(86): unsure at all Xaa locations
  Clone ID: MRT4577_56291C.1.pep
YPSSVSYPSGLLPGPVLYPSRILTPCIRSRIQEKYITVGSRMTLHPARFHPSAIATHHCILFALLGIRNGTRXXLXPILLLWESNL

SEQ ID NO: 321520 - protein, 64 aa, Zea mays
  Clone ID: MRT4577_56292C.1.pep
MAFGDTSRFGAIQIGGWFLPKATPLFKNSPVNFLAGKVNQGVPLKLQTVESGELGLELKWVPFL

SEQ ID NO: 321521 - protein, 61 aa, Zea mays
  Clone ID: MRT4577_56293C.1.pep
LFYVALLRRQLGFSGIRDQASRERRVEVTDSFLARSLFSDFTRHESRGRRTKPQSEGERDA

SEQ ID NO: 321522 - protein, 70 aa, Zea mays
  unsure (1)..(70): unsure at all Xaa locations
  Clone ID: MRT4577_56294C.1.pep
GKPDQGPLFGFVPKTDISSVRWPMFGFPVGMLHEXAADYDCVHLLNIFLYHFEFVDLDLKIPGCGVLCHA

SEQ ID NO: 321523 - protein, 60 aa, Zea mays
  Clone ID: MRT4577_56295C.1.pep
QLFFDKHTGRALYNTQDMGAWRSKIKQGQNGKIYGIAYCTVHIHTLHWESRFIYMYDAEC

SEQ ID NO: 321524 - protein, 839 aa, Zea mays
  unsure (1)..(839): unsure at all Xaa locations
  Clone ID: MRT4577_56296C.1.pep
MALSASAASAGRGSRAEKVRRIFERFDTNGDGGLDRNEMAALVVAVNPRVKFSEDQISAILDEVFHTYGEFILPDGRGLSLLGLLRTYDDGAGDVDRDFLALSLPAVDSDASSPDIAAGDAAAHSSXPPGLPPPHRCSTTTPSRSAPAALRRRSAXAAVAAPAWATSPNHGIAFDSSWGLLDDLEILVKRLRSKQLRKGSIDGAGNNNFDSFSEAGWSREISGAADSASTAAPWDETSRDYLTFVKELAVLRTRADASRSREEAFDNHMIIGRALSEHRLFRDALASFRRACELQPTDVRPHFRAGNCLYGLGRYAEAKEEYLLALEAAEAGGSQSADILPQIHVNLGIAMEAEGMVLGACEHYREAAILCPSHARALKLLGSALFGVGEYRAAEKALEEAIFLKEDYADAHCDLGSALHAVGEDDRAIQEFQTAIDLKPGHVDALYNLGGLNMDAGRFVRAAEMYTRVLSIRPNHWRAQLNKAVALLGQGESEEAKKALKDAFKMTQRVEVYDAISHLKTLQKKKPKPSKGKDDGQGEQAYVVVEASKFKRVGRKTTLRQDLANALDIRAFERMTKLGHCDVELLRKEMNETDVPVSYSGTGIPEKSIRKAALEVILRRLLSFLKPDTFQGAIKAINERILSVLDASGSGRVDLGMFFATIAPICSGPVDMRKRIVFDALLWRPASEGSNGQIRRSDALTYIKLLRAVYIPTHGASDMLEMHGESDPTMVSYTEFLEMFNDPDWGFGILSTLVKLEESDHIRHGRHTCSICLYPIIGSRFKETKHSFSLCNRCYSEGKVPSAFKLEEYRFKEYGNESEALIDKCMCFNLHSKKLEADA

SEQ ID NO: 321525 - protein, 174 aa, Zea mays
  Clone ID: MRT4577_56297C.1.pep
MPPATVADTAPAAGTVLLGRYELGGLLGRGASAKVYLARDLLTGRSVAIKSFPNPRAGGGGVNAAIEREACILRRLRHRHVVRLHEILATRKKVHFVLDLAGGGELFSLVDASGRMTEDLARHYFRQLVSAVRYCHARGVYHRDIKPENLLLDEGGALVWTELLEPAVKPPALS

SEQ ID NO: 321526 - protein, 74 aa, Zea mays
  Clone ID: MRT4577_56298C.1.pep
RRRLLVQGSKRCERGRHRGRPETVYDACTCTRETKRRRAGRERWMLDVLRCAPVGRWDMAFSSRRRTAARGCGR

SEQ ID NO: 321527 - protein, 62 aa, Zea mays
  unsure (1)..(62): unsure at all Xaa locations
  Clone ID: MRT4577_56299C.1.pep
MPTTPAAAALRMLLWTRPYGXDTEDEGATSPYQDASKDGDERVTDLVARMTLTQKDEQMTHI

SEQ ID NO: 321528 - protein, 107 aa, Zea mays
  Clone ID: MRT4577_5629C.1.pep
VVKPDKYRHHLISFALPLPQQKPTTTILAVTPLKQSPGLHKHCQAPLPAIILPKPPESILRKLQTPLFSSHVREAGLSPWRSAPLGRRHPPLGAQTVGSLAPPTLGG

SEQ ID NO: 321529 - protein, 285 aa, Zea mays
  Clone ID: MRT4577_562C.1.pep
FAGHVPSPVVSSTRALVALCARPQAPSSYRIPPTLCLAAACHCPNAVAGSGPCWRVFPQRRLFAGNLLLLPMSVMFSTTAQISVLNSWMPRLRGIRRVSSSTSVAPGVEPLASGVTHLLIVAPCASAHTRHQLRHVAVPPCVSVVGRLPALSLLADGSTVVFPRARPHARALLVVGSLYVAPFLPGLADAEFAQVASLSVLAVSLLSFFSSPVIYAHTSSPPLAIMLGRRLALCHCVDVCTGLRCPVLAASFSFSLAVRPCSSFDLAVGCLLLSLCKLSGCLMLL

SEQ ID NO: 321530 - protein, 201 aa, Zea mays
  Clone ID: MRT4577_56300C.1.pep
MAMSSSASKKQAQAQAQKAGRRPPAVSSAAAADAEMQRVFSRIDADGDGRISPSELAAVSRAISPPASSSHGRREVAAMMEELDTDRDGFVDLGEFRAFHARGGGVGGGGDDDDDAELRAAFAVYDADGDGRITAAELGSVLARIGEGCSAEECRRMIAGVDADGDGCVGFEEFKMMMRGPQPQPQAGAGVTAVPDKAKKE

SEQ ID NO: 321531 - protein, 112 aa, Zea mays
  unsure (1)..(112): unsure at all Xaa locations
  Clone ID: MRT4577_56301C.1.pep
MATKIVTLLMLVALSACVANATIFPQCSQAPIAYLITPYLTSTIASVCENSALEPYRLQQAISASHLPLSXPSLFHHRQALCWVQSLVHTIKAHELHQLGLPVINPVALANL

SEQ ID NO: 321532 - protein, 91 aa, Zea mays
  Clone ID: MRT4577_56302C.1.pep
RAMYKNRSSSEPILVAWARPYCTSKRRVSRILDSRLTGHYPLLAVQRTATLALQCLSKNSRKRPTMDQVVASQQQLTSAQDHGYSPRSSRR

SEQ ID NO: 321533 - protein, 74 aa, Zea mays
  Clone ID: MRT4577_56303C.1.pep
IAIGFIVGANILVGGAFDGGSMNPAVSFGPALVSWEWGYQWVEWVGPLIGGGLAGVIYEVVFIFHTHEQVPSTE

SEQ ID NO: 321534 - protein, 56 aa, Zea mays
  Clone ID: MRT4577_56304C.1.pep
MGHSNVWNSHPKNYGPGSRTCRVCGNPHGLIRKYGLMCCRQCFRSNAKEIGFIKYR

SEQ ID NO: 321535 - protein, 82 aa, Zea mays
  unsure (1)..(82): unsure at all Xaa locations
  Clone ID: MRT4577_56305C.1.pep
TWFAIXPIPXAWNXWQYEFHXVRDQIGSXFFYLPSTGLQRATGSFGRIIVNNRHIITAPLFRTDGDITIFIGDWYNKNHTDL

SEQ ID NO: 321536 - protein, 271 aa, Zea mays
  unsure (1)..(271): unsure at all Xaa locations
  Clone ID: MRT4577_56306C.1.pep
ETDRTGVRSPPPAARREHGLPXTLPRRDLQALCKRNGIRANMTSAAMADALRALPKVEGIEEYVKVLQPVSVPQTAAKPVNEEQKQESPLPRGRRVTAQSSEPIEAEEDKENDAKRQSNKEDVQVPGVGRRGASRRARPVPAVPQPLGKAVAEEDGQGEQNLKREAKKDSAPAPVVGRLARPSTVVIARADESEVAGVEEEQSKEVVDDALALGVGRRGASRRARPAPSIAALAGNVVADEEQIVPIPRGRRVKAHGNSSEPIRLDTSYDD

SEQ ID NO: 321537 - protein, 157 aa, Zea mays
  unsure (1)..(157): unsure at all Xaa locations
  Clone ID: MRT4577_56307C.1.pep
MRKCSTDTWRASVLLLALSLVRATIASRSILCILCAATDCYIEACLMSMYPSQCPPIRYLIELGVLSMGGNNRMRRLYRIQQAIEARMLRLSPLELQLXSXALLEQVPXTIRLAQKMMYTXLQQLELASIDAYSQQHEFLALDQLDALNYAAYMQQQ

SEQ ID NO: 321538 - protein, 39 aa, Zea mays
  Clone ID: MRT4577_56308C.1.pep
GPGFLSKKKKKKKKKKKKKKKKKKKKKKKKKKKKKQKKK

SEQ ID NO: 321539 - protein, 375 aa, Zea mays
  Clone ID: MRT4577_56309C.1.pep
MAIDSKEADPLETIKVMSEFLDVFPKNLPGMPSKRKVEFAIELIPGTAPISKRAYRVSRPELVELKKQIDELSEKGYIRPSTSPWAAHVLFVEKKDGTRRMCIDYRALNEVTIKNKYPLPRIEDLFDQLRGTSVLFSKIDLRSGYHQLRIRPSDILKTTFITKYGLYEFTVMSFRLTNAPTFFMNPMNSVFMDYLNKFVVPFSVYCDTCYTGLGCVLMQEGRVVAYSSRQLKVHEKNYPIHDLELATVVHALKTWRHYLYGQKCDVYTDHKSLKYIFTQLEMNMRQRRWLELIKDYELEIHYHPGKANVVAYALSKKSQVNMMVAHPTPYELAKEFDRLSLRFLNNMRGVTVELEPTLEREIKIAQKNDEKINEI

SEQ ID NO: 321540 - protein, 81 aa, Zea mays
  unsure (1)..(81): unsure at all Xaa locations
  Clone ID: MRT4577_5630C.1.pep
YNTRTKSTLDRVVQSIRALSFFSKKYPNLKETSTAAQATVNLSVDQENKAAPEFCQAAEDSGEANHTCXCCSSCKFYPCNC

SEQ ID NO: 321541 - protein, 113 aa, Zea mays
  Clone ID: MRT4577_56310C.1.pep
IGARLRSRAGPCMHAQDFVRRRVHMVVAWLVEGPVEAGAAEGPVGGRLTRQLRRSSYRSSVGTRSGLGCSRAAVGMRCVVAVRKEMSSSGRSGNSHAVRVATDLGRAAMSFTS

SEQ ID NO: 321542 - protein, 61 aa, Zea mays
  Clone ID: MRT4577_56311C.1.pep
LTDPCAPPGGVPPSIRALPFLFVRIIVYTLLAVYWTLSSCEYAGVLFSVRNIYIYICFIAA

SEQ ID NO: 321543 - protein, 48 aa, Zea mays
  unsure (1)..(48): unsure at all Xaa locations
  Clone ID: MRT4577_56312C.1.pep
MLFTILLDPHFYYTIVWDLNXRLDFHPYTNFLIEKIFYLQHTNFNPNF

SEQ ID NO: 321544 - protein, 80 aa, Zea mays
  Clone ID: MRT4577_56313C.1.pep
FERLLEEEALTTSTPPPVVVVPNSCCSTGLNVYRPPVIEKAATTIAHSAVSNALIGDPMESNALLRRKFKENLKALKIWG

SEQ ID NO: 321545 - protein, 38 aa, Zea mays
  unsure (1)..(38): unsure at all Xaa locations
  Clone ID: MRT4577_56314C.1.pep
TRVLLLTRHEFHKDSXETGYLINFIPSEAILXSSNSFI

SEQ ID NO: 321546 - protein, 189 aa, Zea mays
  Clone ID: MRT4577_56315C.1.pep
FLFLRAEIACSFPSSSFFPARASSLLGAREALYSPSNRLLAVRTDEISSPCVLASAAADLAIKFTSAPCSAHFVVGNFSTPQIRAACPVCARSSSIGFRACSRLLSSRRTRYPLLNLTSPARPRYNPVVVRASPRNPKNRVKTKLAEWYSPSTRQKLEHPARLKFGSSKLFSQGEDLHQLITEEKKAPG

SEQ ID NO: 321547 - protein, 103 aa, Zea mays
  Clone ID: MRT4577_56316C.1.pep
QPSTGTYKHHIYTYIRTIMSHASRAQQKFFTENHIQEQMERREKKKERAQSCRGGSKKKHRFIYMVMVDEYNAPTIDYTQSHRLMNALPPHDRRSHPMHAPTC

SEQ ID NO: 321548 - protein, 46 aa, Zea mays
  Clone ID: MRT4577_56317C.1.pep
EVSVHPLGVFEHRPLGAVLGISAHPISAILAPVGLLLSTHWIDCIS

SEQ ID NO: 321549 - protein, 163 aa, Zea mays
  Clone ID: MRT4577_56318C.1.pep
RAGSSLPAHGVVPSLLHGRRPISDALLLPWRSAGWCCRQGLLLLSQVASLHSAPWNAAARQSRALPMAPPPSSFPSTSAPLTVPFFPLLLRCMLCSKWRSLAEPPLLQTELHLRPAVTAPCTTFPRPCFPPWSRRRSLGRPRRGPCPWRRSSSSPPMAPLLFP

SEQ ID NO: 321550 - protein, 82 aa, Zea mays
  Clone ID: MRT4577_56319C.1.pep
AGIVDRRCIIFINHIWTGGFYFFTSSSAALCSLFFLSLLSICSWIWFSVKNFCCARDACDIIVRIYVYIYIWCLYVPVLLGC

SEQ ID NO: 321551 - protein, 77 aa, Zea mays
  Clone ID: MRT4577_5631C.1.pep
QHKNPKNHPSPHKPYYHTYHSKNNYLNIKIVTKKNPLSNHKTCTKKHPFLYYKKHFLINTPILKGSTLSPYFISPLP

SEQ ID NO: 321552 - protein, 109 aa, Zea mays
  unsure (1)..(109): unsure at all Xaa locations
  Clone ID: MRT4577_56320C.1.pep
RQCVERAQEKVGVVDWQWVVLQVVPFWRWQGXSENGRASCKSVRARSRKEWGMFKASMAGAKSADSKMMGMAPANSTRVQPRLASWFSNAATLTFVVAGDLKPLSYSTT

SEQ ID NO: 321553 - protein, 127 aa, Zea mays
  Clone ID: MRT4577_56321C.1.pep
PPPGGGGDPSCYNLGEAGPIAPDCPPLGVAGSVRPTRSDRVAPPPVGFMGPPPFRFCLKKPPPLPLCWRTPLVFPIRARVPPAFFLSWVKGTRPPFSNFVRAVKKLPSLVKFSWCGLGRCLSSSLRF

SEQ ID NO: 321554 - protein, 57 aa, Zea mays
  Clone ID: MRT4577_56322C.1.pep
LFTLLCFNRLPSTNLFHFTLVTTPLIFCWIMYAIVYLAHMKPFINPILNLELTLHLF

SEQ ID NO: 321555 - protein, 126 aa, Zea mays
  unsure (1)..(126): unsure at all Xaa locations
  Clone ID: MRT4577_56323C.1.pep
PHKAPRETPGGAHKPQPGPQPPRGGGGXEHPAXQAXRXQQAXAASXXQQPXAQXQQQXXAXXTXQTXATQQQQQXXPAXSQXXXXNXXAXXQQQXXAXNPXXXANKXAXQQQQQXQQXQPAXXQPA

SEQ ID NO: 321556 - protein, 186 aa, Zea mays
  Clone ID: MRT4577_56324C.1.pep
VSSLLPFSSDCTKKYKCLKLPQHVEETGPESGAGAWALARSAAGDERRGAGHPWPSEGDGARSWARWRSPAAWRLRTRRAEEGHGANAGAWTGSTASSRQSTARRGLTHGGARSGDSTSRLREGGAGDGRSRGHHGAVQGGRVEDGVAAMGMTVGRIGGTDVRAWSSRRHPWRTSGRKARSGPATG

SEQ ID NO: 321557 - protein, 63 aa, Zea mays
  Clone ID: MRT4577_56325C.1.pep
MGPRLLPLSLSLLVAASLCVNVVVVVGTGGSVPWPVALAAFCAWIAASTAVAVRLPAPPRAVK

SEQ ID NO: 321558 - protein, 68 aa, Zea mays
  Clone ID: MRT4577_56326C.1.pep
TQLYSYHREDSVLRWGLKRLGKKGPSKHFSIYYMYRVIVRGIIHVILVLSFLNGYECIVGCPRMVGSE

SEQ ID NO: 321559 - protein, 69 aa, Zea mays
  Clone ID: MRT4577_56327C.1.pep
AIPSSSHLPLYDLSTLISNRAFWSYLMNPSITMTLFSIPPIYPSSTSITVSSSSSLLPSTCTLITTIIL

SEQ ID NO: 321560 - protein, 101 aa, Zea mays
  Clone ID: MRT4577_56328C.1.pep
LLSSFRFSIPDTEMALKLPLKNGWPQLKSHNHHSLGLLPTTHLFSLLIRFYGLIIYAVNSPFHFRPYSVAERDLILSNPLLTEQALIERGYQKSRFSQSKP

SEQ ID NO: 321561 - protein, 56 aa, Zea mays
  Clone ID: MRT4577_56329C.1.pep
AIGVTSVYSPCHHRHRHLITMQAHARYRLLYHLSILRPIICSIDCHFQPYYWCNLW

SEQ ID NO: 321562 - protein, 51 aa, Zea mays
  Clone ID: MRT4577_5632C.1.pep
GSCHHTMAHCSPVHDGPVSCGRMFGRAVKSMFTVRVIRTPPLVCSRCTPPP

SEQ ID NO: 321563 - protein, 263 aa, Zea mays
  unsure (1)..(263): unsure at all Xaa locations
  Clone ID: MRT4577_56330C.1.pep
MVRRRPATGAAPRPHLAAVGRGLLLASVLAAAASSLPVAESSCPRDNSLVRDISRMQQRNYGREGFSHITVTGALAHGTKEVEVWLQTFGPGQRTPIHRHSCEEVFIVLKGKGTLLLGSSSLKYPGQPQEVPVFQNTTFSIPVNDPHQVXEGLSFICTFTLSDTVISRVLICTTLLIIWYCTFASFKILLELGXAYLLVSIIFLFLAXWNSNEHEDLQVLVIISRPPVKIFIYDDWSMPHTAAKLKFPYFWDEDCLPAPKDEL

SEQ ID NO: 321564 - protein, 38 aa, Zea mays
  Clone ID: MRT4577_56331C.1.pep
HHPSTLGRYKIFRSYTSKMYSGKSRGEKRWVHNRKVGN

SEQ ID NO: 321565 - protein, 133 aa, Zea mays
  Clone ID: MRT4577_56332C.1.pep
MGVRSVAVHVCSAHKATSYAVEVVANLTQWPSCKAIIACVGLSNGLGPVAAANTTIPVISCPPTDDVASLGVDVWSSLRLPSGLGATLALGHKQAAQAAAHIVATGSAFVWSTIRTQQAYNYISILHEDSKLN

SEQ ID NO: 321566 - protein, 142 aa, Zea mays
  unsure (1)..(142): unsure at all Xaa locations
  Clone ID: MRT4577_56333C.1.pep
MPRVALPAKGGAAAGKKKGSASFTIDXCTKPEEDKIMEVASLDKLLLERIEGADDEVAHLGDSATISREKTKDSVTSDGAFSDRHLXKYLTKKHLKKRHVRHXLRVLAASKDRKVYELRYFNIAENDREELRLHCTTLILYY

SEQ ID NO: 321567 - protein, 113 aa, Zea mays
  Clone ID: MRT4577_56334C.1.pep
AVRPKGLLLRGLLLGVGPQARLGFRARGGEAGPRGAPRQVFQGHGRGKGPRPVRFFFPGVPPDFPFWMEVSPVGFFFWFGPLGLSCRALTPPGGPKWLPSSKNGLGPVRLRIA

SEQ ID NO: 321568 - protein, 69 aa, Zea mays
  Clone ID: MRT4577_56335C.1.pep
VPVDHVNVPHFFHHPLDDAARRWDLIPLPFLFCSPQSLLVLGAPGDTPPRRPGEFALYWMFSVGHQQTS

SEQ ID NO: 321569 - protein, 43 aa, Zea mays
  Clone ID: MRT4577_56336C.1.pep
SSVPSIIVRPDHITIKLVDPYPVTDHQRSEQPRRPCRLNRGRS

SEQ ID NO: 321570 - protein, 55 aa, Zea mays
  Clone ID: MRT4577_56337C.1.pep
RECHWAGAACSTLAERWVLVKAVMRLPLHMIQLSSYPGPTYGRGKIHERDSREAC

SEQ ID NO: 321571 - protein, 59 aa, Zea mays
  Clone ID: MRT4577_56338C.1.pep
CRASAARVGVARARSYCARCRRAAASGSRGTASAISESSSAYTWDPGSSDQFLGSCCGT

SEQ ID NO: 321572 - protein, 74 aa, Zea mays
  Clone ID: MRT4577_56339C.1.pep
RPAQVGREVLCCAARRCHAFHIQRVTSIVAKGFTIPGICTSPNIVCPPCEIFSLPLAHQSLISLIGRAAFLDQA

SEQ ID NO: 321573 - protein, 89 aa, Zea mays
  Clone ID: MRT4577_5633C.1.pep
CKIRTTHCMYLLCTHAEGGLFYMHARTDGRRPVRWCTMVLIRNVHACEAGSEREIHIHTRTHSPVDFDWGWGARDHEVILIRRGWTWAG

SEQ ID NO: 321574 - protein, 43 aa, Zea mays
  Clone ID: MRT4577_56340C.1.pep
HTASQLRVKCHYRSSMSGRSIASRRGYVTKTHPFTFFVFCFIF

SEQ ID NO: 321575 - protein, 97 aa, Zea mays
  Clone ID: MRT4577_56341C.1.pep
HQRWRGTRMITWVKITPRGGGKQWVNPNTKESIPYRNTGAMPLHPQTLLKLSWIRPWEARPLRSTMQSWTATLLYVQRALVGKKTQTSLAIHYLTGV

SEQ ID NO: 321576 - protein, 94 aa, Zea mays
  Clone ID: MRT4577_56342C.1.pep
KPFLGSPRSVFVPPSWEGQGGSPRGPKKPWWELPPPPRQIVPFFFFQGPGGFLCEPSLKFLDLFLFFFFPLFRGGHGILFVFLTKKKENKRPII

SEQ ID NO: 321577 - protein, 40 aa, Zea mays
  Clone ID: MRT4577_56343C.1.pep
IYFPFTHLQFLCTSVVHQVLLPLCKRKITPDSQCKGYTTI

SEQ ID NO: 321578 - protein, 43 aa, Zea mays
  Clone ID: MRT4577_56344C.1.pep
SDNEQKLGEIIVDQDRHKHVELNEDRLHVVSGRVYCQHHKVCI

SEQ ID NO: 321579 - protein, 57 aa, Zea mays
  Clone ID: MRT4577_56345C.1.pep
ISYSSILERPIRPQNNTAGRCNLPCLCAALTHTSNGHTFRHLSCCPYHRPVLGAHFE

SEQ ID NO: 321580 - protein, 55 aa, Zea mays
  Clone ID: MRT4577_56346C.1.pep
SEYRLHLISYNIQMKNTKEQFLWPYHFFILQQTMLYHKQKYWEKINLNNPKFVIA

SEQ ID NO: 321581 - protein, 1223 aa, Zea mays
  unsure (1)..(1223): unsure at all Xaa locations
  Clone ID: MRT4577_56347C.1.pep
MAGETFSTIYAQEATKFGATTQLFQFGTNPPVAVIKYEGKTYYHITKDPAKPDTGKHASMKAKKHRCEAITKARYLLKNNEVLHTKQRKRSEVKGLYEALTNRVIQDTRSEEEPHGSVYLDPVETPYVLSIKARRPHELKQLIRDAIMNEFWTHTMKHPVHFPGCKPPPLLQSTMLVSVNHITTNDNTKNRFATLPNEVLAPHSDGLQRQFQQLQAQMMQLQQQLQGREEGTQAEVRPICSHVNEHAGSRPIHFHENENYTHAGGRPSRPYENYTRAGGRSMHRTWDRYHEEPESSRQANMRQHTSGYRSQYDQRTLAPGRGSHQYFKTRHASSSSHVYKQARQEWRPVSPRQEQHHGEPTITFASRGQEGPMPPPQRPTSAPTQIATTSSPQQNRSLLPTPSIQPIAAYVPSVNKRKRENRRNNRRVLYQELQELVLNNVRVKVRPEGQVHPFYDKIMLRLSPALKQNERYRYLVERLVPKPKKLQENAQTITPEQGIGSLKPKAAAMEVDTKNSIKEKSEALTPPKEIEQTKAQHVTPLRDFERKGEEILQNTEDGDNMKGVDNNVALCGTLSTLSEQSDDPKWAPPQVTHEFSYPSDEEIVPNPKASYSKRGLLPNLGKVSASGRSRGRLSPRHYINVESRLPQDNPSLEIIAQREGVSTRLKMIASQKIACTSPHVNNESFEEEESDGDSSTSLEERPRSPHYSELAHSIVSDDDTEEGNLYDAPANVIIAGDEDKEKDSGAGQLVELFKNVAGDVSNKVIGPQMEEQEEDENWHEAGKDHEQFMFQKQQAPPPLRTLKDYHDIINDLVDKKMKKISIEKRPQVSESELEKPYEAWHDLVPFPSGWHPPKFRLFDGTGGAREHLAYFEAIRLPVGSIPDWKTMKELFKSHFVSMKKEFSIVELLQVKQKRDEKIDDYILRFRNSYXPCKRNAPSRSCLYVYTWHATTLVTXVSRREPRDFSSLSSAVASTKLEFEKSPQIMELYKNAGLSDNTKRFNATMKPNNNNNKLKMAETNTTRVGSSMPQGNVPILGTRNEAPGGRQRPSMQELLKKQYVFKRSMIKGFFNQVLEHDHIKLPDPNRPDQVRMTNNPLYCPYHRYVGHIIEDCVAFKEWLQRAIDEKRLGIQPDAINLDYHATNMENLPQVDTRNAPMNDGDAALKVDYNVVAHLKRIPALLSVYDALLLVPELRQALIVALQKPEVYEINMAKHNLLCNSVGAN

SEQ ID NO: 321582 - protein, 86 aa, Zea mays
  unsure (1)..(86): unsure at all Xaa locations
  Clone ID: MRT4577_56348C.1.pep
SFXKTHLLGKTRSPNKEAETTTNPIDRIVAHLLFHRHCSKVAKATKEIISSIPLTLEPEPKVPLGTPRVPSKDQRDEQEIVLQPSQ

SEQ ID NO: 321583 - protein, 81 aa, Zea mays
  Clone ID: MRT4577_56349C.1.pep
HGLDYPQTDRVIPFLNILLIQPTPPIQPIPFSFTYFFTLLTPFRQFFPLLNFHLPYPKFSLFILFLPYISISFLIFFLYFF

SEQ ID NO: 321584 - protein, 63 aa, Zea mays
  Clone ID: MRT4577_5634C.1.pep
LHVQFHLVFFPFGGVIYFGGCCARFLMDGDDDDYPLVDFGSPGGWWLVFCPRVSPCTFAAVLF

SEQ ID NO: 321585 - protein, 640 aa, Zea mays
  Clone ID: MRT4577_56350C.1.pep
MSSGHAFSLPWTILGGWREPQKAAGRGEDRARLRAGEFGCFSCGPRCDRWDPGDSAARVRVRGGGSHLSRMFNWNDEQHQVRDAIWAEFNECDDHIVPCPKGAQDSTIVSSRVRKNNEEEVASIAAITEQSAGVQNGHQGMEKQTASHTSAHISATQIDMESWPDLPSLNPTLDRNYSDDNIASTYLDFCAATSLQEVTGNSTEQLDGKSEVFGNDQEEKSNSFLDCDWGNIGDFDDFDRLFSHSDSIFGNEIVANDSDFLSASSNLMDTAVLSIPIPVEAHKRPVWSRRKPEERGKSKISSSTSGFSHSKVESSSTNLQTPMEPVQTPQYALFQDSKKIGEVQHANQFMFPGYGYPAYPFPTIPLVSNIQAEGYQTKPAGTSYRTSEDYLKQSSSTEMSQDIPSRPLTMTPQEKIEKLRRRQQMQALIAIQQQQQQFGQQGPGSDTMVSQAYTPGNKNPDSLGSSIVIDENTNKVISPEMIPTDHDRVHKSSAISDDPFIEEKIYYQLQDALGKLDTKTRLCIRDSLLRLVHSATERKIDGDRSTNKTNKDEDEASEDASTRKTRSPNKEAETTTNPIDRIVAHLLFHRHCSKVAKATKEIISSIPLTLEPEPKVPFGTPRVPSKDQRDEQEIVLQPSQ

SEQ ID NO: 321586 - protein, 260 aa, Zea mays
  unsure (1)..(260): unsure at all Xaa locations
  Clone ID: MRT4577_56351C.1.pep
MEAGRMDQPCMASINSQPFVADTEPVKKASGDMPAAPTGSGCFDCNICLDFAAEPVVTLCGHLYCWPCIYEWLRPGVESTASDNGSSARRQCPVCKATLSPDTLVPLYGRGGNSKKSLDGMAIPRRPMVHREAVEQQNARSNVNDQHYHQSTGDSPQHQPLMQAHHHPVPXGSTSSXSSAGRAWFDPXTAGGVLGGMAEVVLPWVLRGQLPASLHYTSPYHVAAQNVNPRLRRHQMEIERSLHQIWFFLFVFVLLCLLLF

SEQ ID NO: 321587 - protein, 96 aa, Zea mays
  Clone ID: MRT4577_56352C.1.pep
PGGKEGAKSRCPRSSKPNNLMKKNRFQVFYTEHIIKHKRISGPNYLEIHTNGRERKGPLSGVTHWPRVGHWGPQPGDPLKPPPGGRPPLGGQWGHQ

SEQ ID NO: 321588 - protein, 41 aa, Zea mays
  Clone ID: MRT4577_56353C.1.pep
GTIATIIHNILAETPCKLFIHNRVVRSSTLEAASFESRPKH

SEQ ID NO: 321589 - protein, 141 aa, Zea mays
  Clone ID: MRT4577_56354C.1.pep
RGGKKFPPPRGRPIRELTFKKGPPPKKVFPSLPSPWKSCPKGKKQLFRNLPPFFWGFLGFPWPPPPPFKGQGGGVQSFFFWLKGFFQPPPKFLSKKVILDKLSTKCYIPKFFFFPFKKKKKKKKRKKRGEGGGGGKNSRGG

SEQ ID NO: 321590 - protein, 38 aa, Zea mays
  Clone ID: MRT4577_56355C.1.pep
RLQVSACTIKPKYAPSVALTGGTALQHDTLVAIEPSPE

SEQ ID NO: 321591 - protein, 70 aa, Zea mays
  Clone ID: MRT4577_56356C.1.pep
NPKFVVKAQGVFFLRGCSFNPVTMNLIGPPHIVFLVRGFCIPPKQQLKKVIGFFSPKIIRACIHFFPPGT

SEQ ID NO: 321592 - protein, 69 aa, Zea mays
  unsure (1)..(69): unsure at all Xaa locations
  Clone ID: MRT4577_56357C.1.pep
KXEGEFWKCXMLWGGMVNLKNPYGMNFWKKVCCAKQPQRGGFFGFFRGILRTLFFKGFLFLSEISLVFF

SEQ ID NO: 321593 - protein, 72 aa, Zea mays
  Clone ID: MRT4577_56358C.1.pep
MSSLSHLLVLVFLYVLLFYSSESRKPQVLYDTGSSDYGAKGTRWAVLIAASSYYYNYMHYAYICHAYHVLLK

SEQ ID NO: 321594 - protein, 76 aa, Zea mays
  unsure (1)..(76): unsure at all Xaa locations
  Clone ID: MRT4577_56359C.1.pep
RRGPCPFGPPCSKSWIRGXTAFSYNPLLPPPNWWALNPKSLSPGFKICTLKRKGNPKCFWGGGPNFEGGILAIGPP

SEQ ID NO: 321595 - protein, 134 aa, Zea mays
  Clone ID: MRT4577_5635C.1.pep
MAAVVNARAATARCSAAGGPPRGAASSFPPSTIRTRKRTTAAAGGRGRLVAVSAVGDVAAEGNTYLIAGAVAVALVGTAFPILFSRKDTCPECDGAGFIRKAGATLRANAARKDEAQIVCPNCNGLGKLGQIDK

SEQ ID NO: 321596 - protein, 158 aa, Zea mays
  Clone ID: MRT4577_56360C.1.pep
LAHTRRVTPTTDVFAFGSFVLQVACGRRPIERGRRGDDDDGRFVLVDWVLELWHTGALADAADARLCGEYPADEAELVLKLGLLCSHPVPAARPSMRQVVQYLDGDAPLPEPPASYQSFTALAMMQNQGFDSYAASYPSSSATVTSGGAMSSVHSGGR

SEQ ID NO: 321597 - protein, 66 aa, Zea mays
  Clone ID: MRT4577_56361C.1.pep
SGRRHRRRRRCRRESCTSAGARPRSTPFPLFSPTHERSSGAAARDLRLLFEETCDGLELECLENEV

SEQ ID NO: 321598 - protein, 127 aa, Zea mays
  Clone ID: MRT4577_56362C.1.pep
MGGSTPEELTEEGEASLHCWAFEQPAIMQEGPNGEHSKEPGSREEKQAGQEAIAAEEVAAGSREGTGVGLVGRDRGRGNVTCLDPVDITVLFKDGAFQWKRLENLIVLAKENVSKMSSNPALKKNSL

SEQ ID NO: 321599 - protein, 96 aa, Zea mays
  Clone ID: MRT4577_56363C.1.pep
MASFSEAPPGNPKAGEKIFKTKCAQCHTVDKGAGHKQGPNLNGLFGRQSGTTAGYSYSAGNKNKAVVWEEDTLYEYLLNPKKLLPLPLSTLRLERH

SEQ ID NO: 321600 - protein, 202 aa, Zea mays
  unsure (1)..(202): unsure at all Xaa locations
  Clone ID: MRT4577_56364C.1.pep
MSKGTPRRKAELEHLVLMLSTINAMHIETRSLDVMTSRVCMADQVMHLNEKKMFPTDHDKGNNVWVLDTGASNHMKGCLEALAPLNISVRDTMRFGDGSLVEIEGIGFMMLXTKTKSYKVLVEVYFIPKLKSNIVSLGQLEEXGCKIVVEDGFCNVFGIERSLLWHVCYEHLNFQALSSAQKSKALHHDAIHTTTKWCHRAP

SEQ ID NO: 321601 - protein, 117 aa, Zea mays
  Clone ID: MRT4577_56365C.1.pep
QAASESWRALRSKEAASYGPPTLSCPMLTHCSEALWCDRDFAQHSNVMFLRVSASLYRVSGVGVLFQYLLVPPKRVRLWWICVITRYSPVAEKWTSSILNFSNLGSILASYIVVLQL

SEQ ID NO: 321602 - protein, 43 aa, Zea mays
  Clone ID: MRT4577_56366C.1.pep
YNSIVINLLSPPFLYVNHWKSKALRVYSSNESQSVSTLILIIL

SEQ ID NO: 321603 - protein, 90 aa, Zea mays
  unsure (1)..(90): unsure at all Xaa locations
  Clone ID: MRT4577_56367C.1.pep
ALVREFLKTSLKEFLDDXSSIIFVVIFKNYAAHYICLDSIPLEPSILYNLINAYLAYIKERNPIILYLFSLFLSFTIISLLSIFIHYSYF

SEQ ID NO: 321604 - protein, 47 aa, Zea mays
  Clone ID: MRT4577_56368C.1.pep
DALAKVIQHHPDRHETLKELEALGKELEHLSHIKESVEDKLELRRKQ

SEQ ID NO: 321605 - protein, 41 aa, Zea mays
  Clone ID: MRT4577_56369C.1.pep
IMPWRCRSPQRGRTTGSTAAAPCTSSSGSARSPPPFRAAVR

SEQ ID NO: 321606 - protein, 155 aa, Zea mays
  unsure (1)..(155): unsure at all Xaa locations
  Clone ID: MRT4577_5636C.1.pep
MSTATAPRLSVPKSSGASYRTAAPAPKTALSFVAGHKRQQALPRARLSTXRRCGVAPAAVHRVRLVGPDGAEHEFEAPEDTYILEAAESAGVELPFSCRAGSCSTCAGKMSAGEVDQSEGSFLDDGQTAEGYLLTCISYPRADCVIHTHKEEELY

SEQ ID NO: 321607 - protein, 49 aa, Zea mays
  Clone ID: MRT4577_56370C.1.pep
SPFFFLCISMGSFCSGQKKKKKKKKKKKKKKKKKKKKKKKNKKKKKKAA

SEQ ID NO: 321608 - protein, 52 aa, Zea mays
  Clone ID: MRT4577_56371C.1.pep
TDLEEKMFRDDTLRYYVKMKQLKPKKSADTCMDRSLTEQTPLELALNINIII

SEQ ID NO: 321609 - protein, 88 aa, Zea mays
  unsure (1)..(88): unsure at all Xaa locations
  Clone ID: MRT4577_56372C.1.pep
NLVXPGTVDSHNWSSRXVEKPVARTTVCSDYDXTPLSHNPSXQPXPXXRXPXRXTLXXFAPSRARAIGSXRXXYXXGVPPRSSLPNGR

SEQ ID NO: 321610 - protein, 145 aa, Zea mays
  Clone ID: MRT4577_56373C.1.pep
PRGRGASTPKRDNKPARQEASGGGARRGDRPGGEEEGGGEGAPGGQGRRGGGRGPTRAGGKRGTRRKPTGATGHGGRKQGTPSRGRAQGEEDERHQREGDESPRGRKSARTAPNRGTTRSGSQTRREDEQPPGGKASTRAPRGPR

SEQ ID NO: 321611 - protein, 53 aa, Zea mays
  Clone ID: MRT4577_56374C.1.pep
RQGVRRPEEGRLAGDCSTVYSMYGDGRRMIRPAHAVTRMRVGPGTLFFQRLVR

SEQ ID NO: 321612 - protein, 143 aa, Zea mays
  Clone ID: MRT4577_56375C.1.pep
NLEVLHQKKKKKKKKKKKKKKKKKKKKKKKKPLENRKRQGSSELRLSPRTQSFPPIPPFSHFLTTGRRSPPFQQHHEGRASSIHIGQVGIQVENAGWELNCLKQGIQVEGQMPGDKTMGGGEEAFNTFFRETGVGKNVPRAVF

SEQ ID NO: 321613 - protein, 88 aa, Zea mays
  Clone ID: MRT4577_56376C.1.pep
NPFLVGTTQTGNCKYFCHWAKSQGGAQLGYKTFIKSHFSGGFLWSHGGTQLRQFDFVNGTKPWNIKIGPFLAPIGFLYRGGIRVVPKT

SEQ ID NO: 321614 - protein, 147 aa, Zea mays
  Clone ID: MRT4577_56377C.1.pep
MGKREALVAIAVVAVFLAASAGKVDAAKAAAKGKYRALFNFGDSLADVGNLLIANGVSDNLTTARLPYGQTYFGKPTGRCSDGRLVIDHLAQEFGLSLLPPSKANHSDFKHGANFAITGATALDTPYFEARGLGAVVWNSGALMTQI

SEQ ID NO: 321615 - protein, 48 aa, Zea mays
  Clone ID: MRT4577_56378C.1.pep
SEKLDPIIRFMEVELIFVHYSKGGVRKKSFCVSLGVEIISFRVGSYSQ

SEQ ID NO: 321616 - protein, 36 aa, Zea mays
  Clone ID: MRT4577_56379C.1.pep
ILESTQLVTGTDGNTTGATAPTTYGPPQQNGWTLHR

SEQ ID NO: 321617 - protein, 48 aa, Zea mays
  Clone ID: MRT4577_5637C.1.pep
LYGQVVHQKKGRLERVHFCWTLNETPALTHDVTSLGSDSFISLFSLFG

SEQ ID NO: 321618 - protein, 39 aa, Zea mays
  Clone ID: MRT4577_56380C.1.pep
RALQPNGKHSNSDRVYFLDLMVNGMEFLTMGRYLHQRIL

SEQ ID NO: 321619 - protein, 189 aa, Zea mays
  Clone ID: MRT4577_56381C.1.pep
MAAIPAAIPGCCSSSRLSQLAGLPASTSRRRFKVTAMAPQKKVNRYDENWSKQWFGAGIFAEGSEVVSVDVFKKLERRKVLSTVEKAGLLSKAEELGLTLSSLEKLGLLSKAEDLGLLSLVETAAGTSPSVLASISLPLLVAAVAAVVVVPDDSVALVALQAVVAAVLAAGAAGLFVGSVVLAGLQESD

SEQ ID NO: 321620 - protein, 107 aa, Zea mays
  unsure (1)..(107): unsure at all Xaa locations
  Clone ID: MRT4577_56382C.1.pep
GTLEAGLLSRXEELGLTLSSLEKLGLLSKAEDLGLLSLVETAAGTSPSVLASISLPLLVAAVAAVVVVPDDSVALVALQAVVAAVLAAGAAGLFVGSVVLAGLQESD

SEQ ID NO: 321621 - protein, 51 aa, Zea mays
  Clone ID: MRT4577_56383C.1.pep
KKRSLPNKKPNGSDFLLPPPPYMQECMLSPCIHTLMHPPSFCSLSGARTFN

SEQ ID NO: 321622 - protein, 47 aa, Zea mays
  unsure (1)..(47): unsure at all Xaa locations
  Clone ID: MRT4577_56384C.1.pep
CGPCRCGRAGWPWLLVLLPRPFAAXXCRVLLRWAXVCRNRRXLGXPG

SEQ ID NO: 321623 - protein, 39 aa, Zea mays
  Clone ID: MRT4577_56385C.1.pep
CGIYHNTTGTYLDEKIQLRKEKYKYRETRTTNCSGGSMR

SEQ ID NO: 321624 - protein, 50 aa, Zea mays
  Clone ID: MRT4577_56386C.1.pep
CGTFDLVFLRQIDLHTMRIPNLTERIIRFKSTLTHIECKNTHRKCKTEAG

SEQ ID NO: 321625 - protein, 118 aa, Zea mays
  unsure (1)..(118): unsure at all Xaa locations
  Clone ID: MRT4577_56387C.1.pep
KKKKRGGGGGGGGGPPPPPPPLFFEGSWGAPPPPPKNKKGLFGCFPPSFGGGGGGPPPPQTKKKKKKGLCXFXLXSFXPXPPPXXSXXFLXPPPGPPLFRFCIQSSEFIEHVELIYSF

SEQ ID NO: 321626 - protein, 55 aa, Zea mays
  Clone ID: MRT4577_56388C.1.pep
QYFVVLIHSSMEARRSLPVWYLESYPRMSRYASHPIYVTCAVAANYHEFELDICV

SEQ ID NO: 321627 - protein, 101 aa, Zea mays
  Clone ID: MRT4577_56389C.1.pep
MGDVHEPLVPRKKKKGLVDFLVKFPLILVIFVGLSFLTFIYLTSFLGNLGARLKFEKKPPKPAFPTNVNGLGLFLPPRAGPKGEGVHRPGGCPQAEAWVDQ

SEQ ID NO: 321628 - protein, 72 aa, Zea mays
  Clone ID: MRT4577_5638C.1.pep
TIEMAALDVEYRCFIFGLVWATNDHSLHNAFSSYCEVLVSKIILDRESHLFRGFGFVTSFTVEAMRSRHRWA

SEQ ID NO: 321629 - protein, 199 aa, Zea mays
  unsure (1)..(199): unsure at all Xaa locations
  Clone ID: MRT4577_56390C.1.pep
ISTTPTSLGSSFPWTQRFCCQCTNTEAPVIGIDLGTTYSRVGVCQHDRTEIIANDQGNRTTPTYVSFTDTERVISDAAKNQVAMNPTNTVFYAWRLIGKXYRDPTVQSASCKLWPLYXIPGAGDKPMIGDYLQVEEKELAAEDISSMALLPMKEIAEAYLGSTIIEPPVATVSAFFNDSSRQATXDAAVIGGLNVMRII

SEQ ID NO: 321630 - protein, 62 aa, Zea mays
  Clone ID: MRT4577_56391C.1.pep
PLCRASRITSGDDVTDIAIANRLKECYSKATGVGHSARAKLTVSLRRCATTLRGTARLSSRG

SEQ ID NO: 321631 - protein, 79 aa, Zea mays
  Clone ID: MRT4577_56392C.1.pep
MACWTANKTTRFVLANIIGFKQQVIFTHRLQHNPAIKLGLRNHNFHELKMGLDFKHLENLTFRKLYGNYSLPNGPDIFY

SEQ ID NO: 321632 - protein, 95 aa, Zea mays
  unsure (1)..(95): unsure at all Xaa locations
  Clone ID: MRT4577_56393C.1.pep
AFYSWQCPPRXYCTGWRTCTWVGYLVWLVGLLLAGVFYHDLEVLRDRVKLIAEGSAKPASSXPSPASSDPRAPLIAPDFAWRWSSRVGGASMLWA

SEQ ID NO: 321633 - protein, 96 aa, Zea mays
  unsure (1)..(96): unsure at all Xaa locations
  Clone ID: MRT4577_56394C.1.pep
GNQQGKKKKARFFQNKRMHNCGSTCTDSLFEQIFFLASIFFFLSAGTLXCNVMTLGRCFQXXGDSRXYXAISGXRLSFSYLDXLRPHCKKGQXYSP

SEQ ID NO: 321634 - protein, 48 aa, Zea mays
  Clone ID: MRT4577_56395C.1.pep
ADAWADAWVFVQKKNNATYLIKCDILFICLNCLTSITRGGKEQNVTFD

SEQ ID NO: 321635 - protein, 71 aa, Zea mays
  Clone ID: MRT4577_56396C.1.pep
TLISWNDSGYNPTQTNKALVILVAWCICKARNGCIFDEASPRVLDVVQNIKDEAEIWCRAGAKGLAAIWSG

SEQ ID NO: 321636 - protein, 96 aa, Zea mays
  Clone ID: MRT4577_56397C.1.pep
MAKSKNHTTHNQSRKWHRNGIKKPRSQRYESLKGVDPKFLRNMRFAKKHNKKGLKKMQANNAKAMSARAEAIKALVKPKEVKPKIPKGVSRKLDRL

SEQ ID NO: 321637 - protein, 57 aa, Zea mays
  Clone ID: MRT4577_56398C.1.pep
RRMYPCVRYIAGIIVIESRNLIHWGNVRILSLIFMADDFVGAVGLSRSSHPAPAATS

SEQ ID NO: 321638 - protein, 114 aa, Zea mays
  Clone ID: MRT4577_56399C.1.pep
IGREKFFKTRGSRVQTSFGPSRKVTPAKDKNFGSTVNNGGFPTTFWFAVLQPQFQPLPEKGEKTTHPSIEFSPLFPPKKKLGPPRTTPGFSSLFLTGGRPPPLKKIWGPPKKKK

SEQ ID NO: 321639 - protein, 882 aa, Zea mays
  unsure (1)..(882): unsure at all Xaa locations
  Clone ID: MRT4577_5639C.1.pep
MPRGQGSSVSTRENPKVDRATDSNDDSRKNRRGAYLLLGLLIVFLHGSWSVYQIQFGSLPLPLDAEQAGKRGFSEASALKHVKYLTGLGPHPVGSDPLDHAIQXIGANRLSGGLFKGKTLLYSDLKHVLLRVTPKYLPEAEENLILVSSHIDTVSTTEGAGDCSSCVGVMLELARGVAQWAHGFKSGILFLFNTGEEEGLDGAHSFITQHHWRNSVIFAVDLEAMGISGKSTLFQGTDHWALESFAAVAKYPSAQIASQDVFSSGAIKSATDFQIYEEVGRLPGLDFAYTDTTSVYHTKNDKMALLKPGSLQHIGDNMLAFLLHSAASPKFLKDAQQRKQGKTEQDRAVYFDILGKYMVVYPLRLATMFHNSIILQSLLIWGTSLLMGGHPALVSFAISCLSIILMWIFSICLPVVVAFALPYMCPFPIPYVANPWLTIGLFGSPALLGAFIGQHIGFILLKRHLRRVHSKAKTGITPSMIENVTDLEAERWIFKSGFVQWLIALILGTYFKVGSSYIALIWLVSPAFAYGFLEATLSPVRLPKQLKVVTLVVGLVAPVVSSAGLAVRMADVIVGSIVRIDRNPGGLPDWLGNVIVSVAIAVVVCSTFVYLLSYIHISGDKRILGLLLSLSFGLSIALASSGIVPAFTEDVARSVNVVHVVDTTGVHGGHIEPVSYISLFSNTPGKLTNELVDLGGEEFSCGRNMTTDLVTFTVKYGCWSYKESSTGWSRSEVPVLLVESDSVIGGARQTVVSVDTKSSTRWTLGINKDGIDDFTVQVDSEKIVLPGDKSEIDGWHTIQFAGGKNSPTKFQLTLYWSSSKPSEREAKQAADAPLLVKLRTDVNRVTPQVARVVEKLPRWCTPFGKSTSPYTLAFLTALRVDI

SEQ ID NO: 321640 - protein, 131 aa, Zea mays
  Clone ID: MRT4577_563C.1.pep
MEASVGAAGGGGGKSKKEEESLPPGFRFHPTDEELITYYLRQKIADASFTARAIAEVDLNKCEPWDLPGKDRRKPTVYICTRTCMHTAYSVRQLFTIKSQLINSTNDSSPIFITGGKTFDLNYITRGKKRN

SEQ ID NO: 321641 - protein, 50 aa, Zea mays
  Clone ID: MRT4577_56400C.1.pep
CLVGDVHLTIILVLALDQAGSSISITMRSSPRLGSTWVVFRITWLIHVLE

SEQ ID NO: 321642 - protein, 64 aa, Zea mays
  Clone ID: MRT4577_56401C.1.pep
APAAFTFPQSSKPHITNCFPLYSNLPSNLAEVLAILRSLHCLSWSSHVSSYSWSLIYATNSRQS

SEQ ID NO: 321643 - protein, 156 aa, Zea mays
  Clone ID: MRT4577_56402C.1.pep
CWPCLPVVARSRPAHSLLCSCCCARARRCFQLARPEFSCARHFPISDFASRRCPIRVSTRPWSCSSSSPTFCCRVDCRRCCVPRCVLTFDVELLKPSSLAHNLAVVRALPRFGSSPEPALTCLTTPRKLAPDSISSSFRTSSRANPKSRVKTKLAS

SEQ ID NO: 321644 - protein, 110 aa, Zea mays
  Clone ID: MRT4577_56403C.1.pep
HHEQEQDQEQQDSSPSPQQEVETRRLPSPAPQPEMPLHYHRASQLLTETTTTLVAVRAMTRSSRRSQSRRDGSLDPSLATLLLSVTSTTLSTCCCVGPSTDTLDPSSTIV

SEQ ID NO: 321645 - protein, 77 aa, Zea mays
  unsure (1)..(77): unsure at all Xaa locations
  Clone ID: MRT4577_56404C.1.pep
MILFYGTGAQSMHRNFYTIRKQLDHLMADKRNCDVREVIRSYYHRDVYRLXFTRLCTYYHFQLTKIDMDPCTKLNSL

SEQ ID NO: 321646 - protein, 86 aa, Zea mays
  Clone ID: MRT4577_56405C.1.pep
SNTCLLPRCGVPMDEGCTQPLSSDPMINLNTTVFPFFDFLPFVIFFSQLGASRPYNDDHKRSTEVREGRATHKTQITAQSRTQVTT

SEQ ID NO: 321647 - protein, 52 aa, Zea mays
  Clone ID: MRT4577_56406C.1.pep
LCTKGWVTLSSITDHFPDYIQNLTFFLYRNMCSNFYTTQLLLKIKKILLLII

SEQ ID NO: 321648 - protein, 148 aa, Zea mays
  unsure (1)..(148): unsure at all Xaa locations
  Clone ID: MRT4577_56407C.1.pep
VAPYVPVPPTPRPSPPYVPPTPRPPTPPYVPPTTSYVSATTRPSSPYVPFYVPPTPRASPRYESPXYASSTPTEERTCSIDTVXLNACVNVLNALIHLVIGQDVRYTCCPLVQELEDMDVELRLCTSIRVRLLYIMIYIPIMVNLIIS

SEQ ID NO: 321649 - protein, 78 aa, Zea mays
  Clone ID: MRT4577_56408C.1.pep
TTVVWLRRLEGLNQLVGWKELVEAGSRFRHSSMLQSWYIVINPWGLQVFKCVNGIGRAGTKAAGANACRRLGSTWFFY

SEQ ID NO: 321650 - protein, 123 aa, Zea mays
  unsure (1)..(123): unsure at all Xaa locations
  Clone ID: MRT4577_56409C.1.pep
YDGCCVPDTRDYISNLHTDDGLKXIEAHLAGKTYVPGDSITKDDIIVFAXAVPSNPVAELPNAARWYETPCAAAASTFRGTAAVVHLPAXSAAAAAAPSPEAEHHEXDLDLCSHETDEDTTAA

SEQ ID NO: 321651 - protein, 49 aa, Zea mays
  Clone ID: MRT4577_5640C.1.pep
IFGYAFYSLGGSPKKKKKKKKKKKKKKKKKKKKKKKKKKKYSALLPLLR

SEQ ID NO: 321652 - protein, 37 aa, Zea mays
  Clone ID: MRT4577_56410C.1.pep
RRLGYISSGHHAAERPTLVLMDYCNYIKNYRASLLLM

SEQ ID NO: 321653 - protein, 44 aa, Zea mays
  Clone ID: MRT4577_56411C.1.pep
NKLEGLMRKNLFDTFNEVWSGVHLLTRDLLATQLAQYNKRRWST

SEQ ID NO: 321654 - protein, 241 aa, Zea mays
  unsure (1)..(241): unsure at all Xaa locations
  Clone ID: MRT4577_56412C.1.pep
CPICESGSPPGRKFLRLHFYPANYTDRDAADGLFSVSVAAPGGKLTLLSNFRSYQTAAAITYSYLIREFSVNVSSPTLDLTFTPEKAHLNAYAFVNGIEVVSSPDXRLPVLDLFDISTPNMLAGDGNLQPFPIDAGTAMQTMYRLNVGGQAISPSKXDDDSAYIFGASFGVSYPKDSKVTITYPSNVPEYVAPEDVYGTARSMGPDKNVNMNYNLTWMLEVDAGFMYLIRMHFCEIQYPIT

SEQ ID NO: 321655 - protein, 319 aa, Zea mays
  unsure (1)..(319): unsure at all Xaa locations
  Clone ID: MRT4577_56413C.1.pep
MRAVLLLALLLSACAAAAAQGANSTAFVPRDDIRLDCGAKGQGNDTDGRVWTGDAGSKYAPPDNLASVASASGQDPSVPQVPYLTARVSASPFTYSFPLGPGRKFLRLHFYPANYTDRDAADGLFSVSVAAPGGKLTLLSNFSAYQTAAAITYSYLIREFSVNVSSPTLDLTFTPEKAHPNAYAFVNGIEVVSSPDLFDISTPNMLAGDGNLQPFPIDAGTAMQTMYRLNVGGQAISPSKDTGGYRSWDDDSSYIFGASFXVSYPKDSKVTITYXSNVPEYVAPEDVYGTARSMGPDKNGDMNYILXWXXXVDAGFMYL

SEQ ID NO: 321656 - protein, 74 aa, Zea mays
  Clone ID: MRT4577_56414C.1.pep
EQQRLEWERQQELDEEERIRQLRRTELIPKAQPMPYFDRPFIPKRSTKPATVPMEPKFYLRPEKLSCNVWSLES

SEQ ID NO: 321657 - protein, 94 aa, Zea mays
  Clone ID: MRT4577_56415C.1.pep
SWGREYLLGHSLPRKTLSPFSLDNASCVCSGRSSKWNACCTVPRRVAAMRPEDHTWGTNHVLHHCALESPLDRVPGQRGKQLPGLTQASGPWVG

SEQ ID NO: 321658 - protein, 131 aa, Zea mays
  unsure (1)..(131): unsure at all Xaa locations
  Clone ID: MRT4577_56416C.1.pep
HAVRTQVLTCSVHATKNRDVNTDNRTQGHALSITHLRDRLCTEKKDREDGWSSEXAAELNIYAYSXTARRCLSGAHYMKRARTCARPEPKHRTDDYEXENVRANPQESLLSVQPYKRICAYMLGERDKDRD

SEQ ID NO: 321659 - protein, 110 aa, Zea mays
  unsure (1)..(110): unsure at all Xaa locations
  Clone ID: MRT4577_56417C.1.pep
SPEQQEFGTRRMAMLKDGLVSRDNEIRELKIVVSDAEMKILGEKAQIGAKVSKLLEXEERLHDEIEALKTEIAKRGDSIKILNENLETLKSERDELKMKIDLLGRRKLGY

SEQ ID NO: 321660 - protein, 114 aa, Zea mays
  Clone ID: MRT4577_56418C.1.pep
MASIGSSNIGFQLLKKSGWKEGTGLGAQEQGRLEPVETRVKNNKRGIGSKEPKPQPKVGDDIETHPQKPKQEMQSKKRAKLAAKRIRKLQEEEKRLKEKEFEMAFFREFWPDNV

SEQ ID NO: 321661 - protein, 62 aa, Zea mays
  Clone ID: MRT4577_56419C.1.pep
ASNTDLTDPGWLFQRQGRALIFSVQLLTFIPSLLCHHCGSPVSSSSFSCFFYKLKPPLFLLP

SEQ ID NO: 321662 - protein, 119 aa, Zea mays
  Clone ID: MRT4577_5641C.1.pep
MLPPTTKAAEKPLNGTATEQPQPQTRLRTLGSLTTRTSSTGDIRKLMMEDMPMVSSKVEGPNARRIDGFLYRYKKGEDVRIVCVCHGSFLTPAEFVKHAGGGDVSNPLRHIVVNPAPFS

SEQ ID NO: 321663 - protein, 83 aa, Zea mays
  Clone ID: MRT4577_56420C.1.pep
SRLDRTLHTLPTLPSHLIVSLYHHLNPVRWILHDTVATVKTLLLPNSIALTIIPLPTSCLLTNKTASIDVTYSFANSMSNLTP

SEQ ID NO: 321664 - protein, 145 aa, Zea mays
  Clone ID: MRT4577_56421C.1.pep
KNGGYQTGLKLINKKPKLNTEGSPQGLPKTRQCKRTKTFENQKENRAGNKNIQGSRWQQEKKPPKPQNPIYQADATKVKFLPRKGNTLIAGPRELGKRGARTTPDGNLIQNGGKPPSKQNTYTRRPGWFFIGKKIKRLGKIGIAP

SEQ ID NO: 321665 - protein, 288 aa, Zea mays
  Clone ID: MRT4577_56422C.1.pep
VPHGSGIGFVRGKSCFSVTNMHVMRGASDLRDTLADQAVYEAQVDGLDQDKDVADQRIEAPKDKLRPIPAGVSADLLVGQKVYAMGNPFGLDHTITTGDIRGLRREIRTAATGRPIQDGIQTDAAINPGNSGGPLLDSSGDLIGVNTAIYSPSGASSGVGFSIPVDTVGGIVDQLIRFGKVTRPILGVKFAPDQSVEQLGLSGVLVLDAPPNGPAGKAGLQPTKRDPYGRLILGDIITSVNGTKVTNGSDLYRILDQCKVGETVTVEVLRGDHKEKIPVVLEPKADES

SEQ ID NO: 321666 - protein, 204 aa, Zea mays
  unsure (1)..(204): unsure at all Xaa locations
  Clone ID: MRT4577_56423C.1.pep
VRHSRVFSLFLSGCSLLLRVGALSLAWCLRALTVFFCSRSXLIRPMAGVVSLLGSSVWLLRACVVMLWGXGCRLQVIGVAAKMPASLRGASALAYEASWHVSQLRVMLALCFRGRCDMVQACRELARXLALRAGSVRTTSSSRSSPXLLRACAAGXFSCPVLLFSDLGEMRLSFFLLWQSCFFGLFLTGGLCPGFGGAVFLVAL

SEQ ID NO: 321667 - protein, 58 aa, Zea mays
  Clone ID: MRT4577_56424C.1.pep
IDIIYQQPNPSKFSKLSPCFITPASSSVLRTLTKGHIKIKTIIMFYHQHQVECKAEYK

SEQ ID NO: 321668 - protein, 148 aa, Zea mays
  unsure (1)..(148): unsure at all Xaa locations
  Clone ID: MRT4577_56425C.1.pep
MLDQDLIRLHSVRDRRENPLSAHPKEPVAXITRAXNAQGGGSCQPHQIIDAVNHAIPEAWRXEKLNAWCLVMMLHGAXNEANDMPXWVHIDIRPNTVVWEYEDDNGRDIAGDDLXRPECLQVKEHRXEERRNNNDHLELDLHTSNASL

SEQ ID NO: 321669 - protein, 62 aa, Zea mays
  Clone ID: MRT4577_56426C.1.pep
KNLQDLVPNSNKVHFFGGLTCLVHFHIATGAATAVIKTDHRANYQNFATYICNGNMYFLVVA

SEQ ID NO: 321670 - protein, 74 aa, Zea mays
  Clone ID: MRT4577_56427C.1.pep
GTGRAVVSDPPHPRRGKPACRTDNDLDYVARLVNKMNAQGAALQGSGWVCLPLDREGKQLSGETTANQDPLMTK

SEQ ID NO: 321671 - protein, 126 aa, Zea mays
  Clone ID: MRT4577_56428C.1.pep
MRRVALLLVAAVCALAAPAAAVVTDGLLPNGNFEDGPPKSALVNGTVVSGAHAIPRWETSGFVEYIESGHKQGDMLLVVPQGAHAVRLGNEARAPSSWWAAGRARSCRRSAPCLGGPTVLSSLWET

SEQ ID NO: 321672 - protein, 195 aa, Zea mays
  unsure (1)..(195): unsure at all Xaa locations
  Clone ID: MRT4577_56429C.1.pep
LXASLMNHQNDLSQQLDRISDMQKNXENLELANSNLHNEIVKVQGQKNEAVASIVNLESMLEQQVQEIANLQEANKELKAAKTDLHNEVMLLQQEKIVALTQLQEYEAQIKNLRIDLEQQCNQISVMQQANEETQDKNSSLHKQLEETRIHLQEEIIALQGEKEEAISSLQQSNDSLKTLEVQLEQQREQISVLQ

SEQ ID NO: 321673 - protein, 116 aa, Zea mays
  Clone ID: MRT4577_5642C.1.pep
SRTSMTMPPRTLDGSYRPPPFFFFFFFFFFFFFFFFFFFFFFFSQAQRGKMHKFWGAKTFPVFWAKNFGPRKLSVKILEFKTKPTIHTGFRKKKKAASKPLWQLMDGKILEKPHIH

SEQ ID NO: 321674 - protein, 182 aa, Zea mays
  Clone ID: MRT4577_56430C.1.pep
MRRVALLLVAAVCALAAPAAAVVSSKAVKYVDAAHFAVPQGARAVELVGGRESALVQEVRTVPGWTYRLAFAVGDSGDGCAGSMAAEAYAARATVKVPYQSRGTGGYKRAVLDFTAIANRTRVVFQSTFYHMKPDGTLCGPLVDDASLVGLRKKKPARRLMQLPVSAASTCTTPGRTAQAMV

SEQ ID NO: 321675 - protein, 93 aa, Zea mays
  Clone ID: MRT4577_56431C.1.pep
AVGDSGDGCAGSMAAEAYAARATVKVPYQSRGTGGYKRAVLDFTAIANRTRVVFQSTFYHMKPDGTLCGPLVDDASLVGLRKKKPARRLMQLL

SEQ ID NO: 321676 - protein, 378 aa, Zea mays
  unsure (1)..(378): unsure at all Xaa locations
  Clone ID: MRT4577_56432C.1.pep
MRRVALLLVAAVCALAAPAAAVVTDGLLPNGNFEDGPPKSALVNGTVVSGAHAIPRWETSGFVEYIESGHKQGDMLLVVPQGAHAVRLGNEASIRQRLAVARGAYYAVTFSAARTCAQAERLNVSVSPEWGVLPMQTIYGSNGWDSYAWAFKAKMDAVTLVIHNPGVEEDPVCGALIDGVAIRALXRPRSPGGRGETLLKNGGFEEGPYFLPGASWGVLVPPNIEDDHSPLPAWMIVSSKAVKYVDAAHFAVPQGARAVELVGGRESALVQEVRTVPGWTYRLAFAVGDSGDGCAGSMAAEAYAARATVKVPYQSRGTGGYKRAVLDFTAIANRTRVVFQSTFYHMKPDGTLCGPLVDDASLVGLRKKKPARRLMQLL

SEQ ID NO: 321677 - protein, 75 aa, Zea mays
  Clone ID: MRT4577_56433C.1.pep
PGLEVFGTRAPLPPVAWRSSQRGERRRGIRPSAWRRLSDRGCVTHLGRRADLCSALYYPIATKWRGWWILRLESG

SEQ ID NO: 321678 - protein, 148 aa, Zea mays
  Clone ID: MRT4577_56434C.1.pep
TVKESEPGLGSPNPWWGALFFLGGGAVLALARAALTHKNWVKNKRGTGQNLCSHNVTLTLDPLANSPPLFGGTYTLNPGSHAEFPVCWGTGRLPAPDAAKGEFHVGVDGGSFYLAPNAQPGQRVRVSVTPNGWPLKGRCPAVGCPIQG

SEQ ID NO: 321679 - protein, 473 aa, Zea mays
  Clone ID: MRT4577_56435C.1.pep
MAAQLLFSNPSSCHCPLGISRINVGKTLLGESASFQRKKSFSGGSYRFSRFDCSANSRRAGPRRTKDTLYDLHPEISLLYGEDNGAATVSSKEQGIDTTAERLVDTSPSYRYNEPRIKVIGVGGGGSNAVNRMIESSMKGVEFWIVNTDFQAMRMSPIEPENRLQIGQELTRGLGAGGNPEIGMNAAKESQELVEQAVAGADMVFVTAGMGGGTGTGGAPIIAGIAKSMGILTVGIVTTPFSFEGRRRALQAQEGIASLRSNVDTLIVIPNDKLLTAVSPNTPVTEAFNLADDILRQGVRGISDIITVPGLVNVDFADVRSVMSDAGSSLMGIGTATGKTRARDAALNAIQSPLLDIGIERATGIVWNITGGNDLTLTEVNAAAEVIYDLVDPGANLIFGSVIDPSYTGQVSITLIATGFKRQEESESRSSQAGEDSNRGRSGWFSPTSQEEGHALQIPEFLQRKGRPGFPRV

SEQ ID NO: 321680 - protein, 80 aa, Zea mays
  Clone ID: MRT4577_56436C.1.pep
SLIMKTSVSLLDALTAHVEAYVDHQGPDNIACGETGGTPSLWNGSTTAPWSRELLSMGARHNCDDRSAHGSSAVPGACTQ

SEQ ID NO: 321681 - protein, 98 aa, Zea mays
  unsure (1)..(98): unsure at all Xaa locations
  Clone ID: MRT4577_56437C.1.pep
MGDEKTDINIAVMAHVASDTATTTGHLDYRLGGLDKRVIEXVQTEVAEXMNKRPFKCAXVLDKLKADHARGITPDIALWKCETTKCSCTGTDARGHRD

SEQ ID NO: 321682 - protein, 108 aa, Zea mays
  Clone ID: MRT4577_56438C.1.pep
FGFFFFFFGVFFFFFFFFFFLKVKINCSLKNQGGHQSWFHKWEPHAHLGPVPNYIIPGGGFFFFGNQGGFPMLNHPPQEFPGSIHLGPRFKLFKNLVKNKGSISIWPV

SEQ ID NO: 321683 - protein, 143 aa, Zea mays
  Clone ID: MRT4577_56439C.1.pep
SARAQTEALFRRTLHLAKGGEILAGRPAAKGVSHADMTKRDRLDRRKAEMLEPPKLHVSRTRLIIYNWPNTMTINDVKKLRRESVICRATKQNRDIRTEDILNKEMKGIHNHSRGVAMDDLQEHEHALVAQKVLNNNPRTFAS

SEQ ID NO: 321684 - protein, 291 aa, Zea mays
  unsure (1)..(291): unsure at all Xaa locations
  Clone ID: MRT4577_5643C.1.pep
MASRDFLRVFGAGAGHQDDAAAAAGRTDDVELSLGLSLGGRFGTTDAKRPRLARSSSIASVCSVSSLHADADAAPLPLLRTTSLPTETEEERWRRRETQSRRRLEARQKRVERRNSMASLAPAVVGGTGRRSNASQGSNSASTTEQGIGGSASNQSTDARSPSSISDNNTNQNNMLPPTTKAAEKPLNXLRQSSRSPRLRTLGSLXRRGRAVPATSGXMMEDMPMVSSKVEGPNARRIDGFLYRYKKGEDVRIVCVCHGSFLTPAEFVKHAGGGDVPNPLRHIVVNPAPFS

SEQ ID NO: 321685 - protein, 106 aa, Zea mays
  Clone ID: MRT4577_56440C.1.pep
ACACRLTPTCPLPCPPRAMPPWPYTDAELAHATVHVPRRRRDARVSPPSRAYVSMYLEQKRFRQHCRGAHRCESVLVPSPPGPDSTIHLCIPPKHYETVCTAPIKQ

SEQ ID NO: 321686 - protein, 116 aa, Zea mays
  unsure (1)..(116): unsure at all Xaa locations
  Clone ID: MRT4577_56441C.1.pep
GGEYYSVDESPVKVVDMVDTFLVQQPPXFDNGSFVSSIKQYVKNTLWCVVARQSXEFKKGVEGATKFLLSXLKXDLQFFVGXGIKGVASVVFPCSKDGALNLAVVYFSHGLKEIKS

SEQ ID NO: 321687 - protein, 113 aa, Zea mays
  unsure (1)..(113): unsure at all Xaa locations
  Clone ID: MRT4577_56442C.1.pep
KGMKKLIETDDRWERTRNMGGDISGWSAKAIKCLLRRTRPIDTIFIVLSQMRNSNPHPNQNLDQKRKIQRTKTPPIQIQMLETKAVENWRGARVVESERRRRRPLFSXPGPAG

SEQ ID NO: 321688 - protein, 84 aa, Zea mays
  unsure (1)..(84): unsure at all Xaa locations
  Clone ID: MRT4577_56443C.1.pep
GPPFSXPLPTAGGDANAHAPTRHIQMMLRVSPSPAAAVPTQLSGAPATPAPVVRVAAPRGVVGGGGGAVCRAAGVATVALPGVW

SEQ ID NO: 321689 - protein, 85 aa, Zea mays
  Clone ID: MRT4577_56444C.1.pep
MGTKKLTLLGLLGLLGGGTNGFIIPQGSLGPRGIIPQVLPPVTSRGFEHPAGEAYRVQLGVGGSALQQPIGQLEQQSLGHLTLQT

SEQ ID NO: 321690 - protein, 113 aa, Zea mays
  unsure (1)..(113): unsure at all Xaa locations
  Clone ID: MRT4577_56445C.1.pep
CQSCFSILLQVGLINYLNVVYLRYCLNVWDVGGQKTIMSYWRNYFEQTNGLVWFADSSDIRRLDDCRAELHNLLKEEDXFTYLGSVLLLIFANKQDMQGALXPTGIAKIYLVR

SEQ ID NO: 321691 - protein, 58 aa, Zea mays
  unsure (1)..(58): unsure at all Xaa locations
  Clone ID: MRT4577_56446C.1.pep
LTSIVQSPTFSLEIATLHYVELLIXMLFFSVMQXYLLIIILPLLXPYVANKQGASWGH

SEQ ID NO: 321692 - protein, 66 aa, Zea mays
  Clone ID: MRT4577_56447C.1.pep
GLKGKHHLRFIQLGLQFFLHVSPISIRRLCKVGKAPFHCRCLTGQDPRGLRGVRQFRRQRSLLTKE

SEQ ID NO: 321693 - protein, 92 aa, Zea mays
  Clone ID: MRT4577_56448C.1.pep
SRRIGIADFYTGKNILITGGTGFVAKVLVEKILRTSPTIGKIYMMVKAKDAQTALERLQKEVLDTELFKSLEEIHGKDYESFVASKLIPVVG

SEQ ID NO: 321694 - protein, 102 aa, Zea mays
  unsure (1)..(102): unsure at all Xaa locations
  Clone ID: MRT4577_56449C.1.pep
YLDNDDDDRYNDVLDVDEHHNVLTTLIPASVYIKFHDVEXYNSMXSIPXLYIEIVPDKCTAXVKPTIGVLTFLNMSKSNXLDLRCWEDKFKPNMDKEKDPMS

SEQ ID NO: 321695 - protein, 139 aa, Zea mays
  Clone ID: MRT4577_5644C.1.pep
PRVRPRVRPRVRPRVRENGDQKTDKSCPSQSTKAATSANKTENQDQKKTKKISAKQSTRAATPAKKKQRNTDAQVSSKPSSENRKNSKTADKDGLRKSSKVPRSTPKIHAVNEEQIKEKEGEPPTRKGEADNKVVIPGT

SEQ ID NO: 321696 - protein, 44 aa, Zea mays
  Clone ID: MRT4577_56450C.1.pep
VPAQVNSLDSGTHKRGATSAGPSWHQILKGLRVCSIQGNPESPS

SEQ ID NO: 321697 - protein, 126 aa, Zea mays
  unsure (1)..(126): unsure at all Xaa locations
  Clone ID: MRT4577_56451C.1.pep
MIKALAALXQALKYKATILFSQERNXPPLETAKYXSGLKTRIHGIHVHELGDPXNVCCRLXAHFDLSQDHAXPKDDERHVVDHVNETVAEDGADIVHITDKHIPLAGDNSIIGRLVVAHDDPDDLG

SEQ ID NO: 321698 - protein, 357 aa, Zea mays
  unsure (1)..(357): unsure at all Xaa locations
  Clone ID: MRT4577_56452C.1.pep
MENGGIEEADDAPPVPAPPNGRRYRPVGSSDRAVIQMTSMEPGSSSATIDAVVTPQPPRNLKPDANLTIDPSMREGSPDDHATSSGSQGDSKLELFGFDSLVNILGLKSMTGEQIQAPSSPRDGEDVAITIGRPKESGPKFGTMMGVFVPCLQNILGIIYYIRFTWIVGMAGVWQSLVLVSFCGACTFLTSISLSAIATNGAMKGGGPYYLIGRALGPEVGVSIGLCFFLGNAVAGSMYVLGAVETFLDAVPSAGLFQKSVTAVNNTLVNGTETTGTSTISTPSLHDLQVYGVIVTILLCFIVFGGVKIINKVAPAFLIPVLFSLLCIYLGXVFIAPRHNAPGGITGLSITTFERQL

SEQ ID NO: 321699 - protein, 113 aa, Zea mays
  Clone ID: MRT4577_56453C.1.pep
VLHLREGGTADPRVQLVEPRRGQLFPDLRSSLSRMRFQFWGPNCATSLLELAVLAGAPVAPGAQLPLAGAAVARPSPLPKWTSSRGHLLGGVLMLLLLLLVAERSESRGGSAP

SEQ ID NO: 321700 - protein, 115 aa, Zea mays
  Clone ID: MRT4577_56454C.1.pep
MGKIRMPVPSLFRRRYSKPASPQPKQQAPAAGDGHGSGSPERATEDEEMARVFRKFDTNRHGQIWRSQLAALLESLGHGASDDKVARMIAEADADGDGCISLTEFAALNATVAGD

SEQ ID NO: 321701 - protein, 82 aa, Zea mays
  Clone ID: MRT4577_56455C.1.pep
SKLGTCARVQIRWAKSIIEIRRSVEPIEYHIDKNVSHKELHIEGKKQCKLQKMQDMDSTALNTIGGGLEATKVERISIKDYN

SEQ ID NO: 321702 - protein, 88 aa, Zea mays
  Clone ID: MRT4577_56456C.1.pep
SRTPRSRETPKSPPHCHHLLLGSGYNVDNLHQAPARGLLLQLPQETQTAHCLKARLRIPWKRQQEGGGLERWRRLRDMTKPPLEAQRR

SEQ ID NO: 321703 - protein, 103 aa, Zea mays
  Clone ID: MRT4577_56457C.1.pep
GAGGGIFPPPGLPIKMVAPGVGNLGPGFGGRLPAGMAPGDFSMEELFGLSPPRKVPLFPVREPRLPGPLFGNVPPPPQVGGSPIWNLSPRPGDKLVFLILPPS

SEQ ID NO: 321704 - protein, 290 aa, Zea mays
  Clone ID: MRT4577_56458C.1.pep
MKKAASRGPWAQREAMEVGGGEKHFVLVHGLCLGAWSWYKVATALESAGHRVTALDLAASGAHPARLQEVRSFEEYSRPLLDAVAAAPDGDRLVLVGHSHGGASLALAMERFPRKVAAAVFVDAAMPWVGKHIGVTTEGFMKKAASKGLLMDCQIVAITDGTGSEEGAGQRGTAIVMGPEFLKKCYKESPAEDLTLATLLVRPGNQFMDDPVMKDEALLTAANYGSVKKVFVVAKAAHGSSASAEEVQSWLAATNPGTEMQEIAGADHAVMNSKPRELCDVLVGIASRYD

SEQ ID NO: 321705 - protein, 416 aa, Zea mays
  Clone ID: MRT4577_56459C.1.pep
MGVSARAHHPKHRCHQETCVPDGASLAAMYLYGDVLESVVERVPVADLAAAARVSREWLRAVRAALRRRPLRLPWLVVHLQGRGGLRCAAAYDPCSGAWLAVPAPRHATPSHVRLLRGARGDRVCALSLSGLAVAADPLGTAGCVALDAPGVWRIDPVLAAVGDRVVALGGACRLALAEGGNAAAVEVHEDGGWTACDPMPDALRDSAAATWLSTAATDQRVYLVERTTGWASWFDPANRRWGPTRRLGPDAAVTTWGVAPGRAGAEDRLLLFGAKRADKEAECTVVVQAWEVDGDTLEQSPSASSDAMPPELSERLFRRDDTDDDDDEEELDDMTLSIGVCGNAAGGYVYNAAEPANGAVLYELWEEGNAIAVARWDWVPCAPAVQAQPLGRAILGCSPVGLDELALAVAARGPR

SEQ ID NO: 321706 - protein, 71 aa, Zea mays
  Clone ID: MRT4577_5645C.1.pep
ELTSLRPPCACLVCACALVGITFFSPKGRGGRSQTELGQTMNCPAHDTAPIRTRHVFNSARALGSSYTTGI

SEQ ID NO: 321707 - protein, 569 aa, Zea mays
  Clone ID: MRT4577_56460C.1.pep
KYVGDNGDLIIANPTRHGKEGSKSFKFNKVFGPTTSQDDVFKDIEPLIRSVLDGYNVCIFAYGQTGSGKTYTMTGPENATENEWGVNYRALNDLFHISHNRGDTIMYEINVQMIEIYNEQIRDLLCSNGSEKELEIMNASQPNGLVVPDATVHPVNSTSDVIEFNENRTCQTEQVGSTMLNERSSRSHSIVTHTHSEVLDFENRELLCVGALHLVDLAGSERVDRSSVTGNRLKEAQHINKSLSALGDVIFSLPQKNAHVPYRNSKLTQVLQSSLGGHAKTLMFVQINPDVSSYSETLSTLKFAERVSGVELGASKANKEGKDIREFMEQLSLLKHKMAKKDDEINRLQQLKTQTPRVRTAKRADSPLKHSSSSPGISNLGSKIQHRRTVSSGKAMSIASRAGSDTFSDTSDRHSESGSMQSVDDILPRRGIMGLPKLSIGEMGQNSADPELVCFDYADSEERLSDISDSGLSMGTETDVSVSSIVELTRFQEQENIPSTLKEQESARKIPNDQLSKVATRVQKTTVPKLAQTSLWPKLRDPPALRSPGRITTQTISVPRTSMTSKRWT

SEQ ID NO: 321708 - protein, 144 aa, Zea mays
  unsure (1)..(144): unsure at all Xaa locations
  Clone ID: MRT4577_56461C.1.pep
ERVNRSSVTGNRLKEAQHINKSLSALGDVIFSLSQKNAHVPYRNSKLTQVLQSSLGXTIADCSIYYLHVISYLIFFICXGHAKTLMFVQINPDVSSYSETLSTLKFAERVSGVELGAKANKESKNIREFMEQVINYCFPFARPL

SEQ ID NO: 321709 - protein, 139 aa, Zea mays
  Clone ID: MRT4577_56462C.1.pep
SRNQGKILGEFSKTQAKKAPVFSGEKKGDRKTSGPCRKPGQKTNKQFLPKKRTGPPSSGGDSPPLWLKRVTPHLKGQFPPQKKSPPPWHPRPHKTPFSKGPQKNPPKKNPNLGALGKGKGSQKKKKRGGVFQERGGTGP

SEQ ID NO: 321710 - protein, 36 aa, Zea mays
  Clone ID: MRT4577_56463C.1.pep
SITKRTHIVVITHGRVYDHDTQTKGLRLKKITVLIL

SEQ ID NO: 321711 - protein, 90 aa, Zea mays
  unsure (1)..(90): unsure at all Xaa locations
  Clone ID: MRT4577_56464C.1.pep
QYAHQLEKGELDTVQVLIVALAVLALSASSSSSTSCGCHXQTPHLHLPPYMYMPXYLYLPPQQQPXAXQYQTQPLKLSPYQQFXSCGIGS

SEQ ID NO: 321712 - protein, 220 aa, Zea mays
  Clone ID: MRT4577_56465C.1.pep
LELGIANDVKVVIFNFGGQPAGWELKKEWLPDGWLCLVCGASDTQELPTKFTLSLHKDAYTPDLMAASDCMLGKIGYGTVSEALAYNLPFVFVRRDYFPRVRFLRNMLEHYQCGIEMIRRDLLTGHWKPYLQRAITLQPCYDGPINGGKVAAHILQDTAVGKKYISGKLSGARRLRDAIVLGYQLQRAPGRDVGIPYWYSHSQKETTAGPTPTPHDMNGS

SEQ ID NO: 321713 - protein, 92 aa, Zea mays
  Clone ID: MRT4577_56466C.1.pep
FTSTESIPAGDIFFSRDCRAPLEKTSTKLNNIDQSFTSDSNVHTENDGTVTQSNLGQPSQFVSARTGLSRTTTKSSYATGRHCQMSTTTTLS

SEQ ID NO: 321714 - protein, 90 aa, Zea mays
  Clone ID: MRT4577_56467C.1.pep
IPGGPLGEVVDPLSPGGSLDPLGLAEAPEAFPELKVKELKTGPLPMFSMFGFFVQAIVPGKGPLKNLAVPIVDPVTNNAWASAPNLVPGN

SEQ ID NO: 321715 - protein, 59 aa, Zea mays
  Clone ID: MRT4577_56468C.1.pep
QTHLYQYRNSYRNPQPTAHSHRIEPDSKDANRQRIPGIPKQLHIDIRTEGTDHPEDRRT

SEQ ID NO: 321716 - protein, 172 aa, Zea mays
  Clone ID: MRT4577_56469C.1.pep
MEAAAAGSGGSGAATKLQKVYRSYRTRRRLADSAVVVEELWWQALDFARLNYNTISFFDEPKPKAAASHWNRIGQNALKVGHGLSREPKALKLAFEHWIEAIDSRHRSGHNLHFYYNLWCQSQAGQPFFYWLDVGDGKEVDLPECPRTLLKKQCIRYLGPKERELYEYIINE

SEQ ID NO: 321717 - protein, 79 aa, Zea mays
  Clone ID: MRT4577_5646C.1.pep
GGEQADLTRCCMRDRAMIEVGTLGLRALFTITSSSGDALFKRTRSSEKPFRIGIVLMKRFFLHSIADRARGRNQCIDGN

SEQ ID NO: 321718 - protein, 239 aa, Zea mays
  unsure (1)..(239): unsure at all Xaa locations
  Clone ID: MRT4577_56470C.1.pep
PTIKRSHQIGVPIDIKRIIKVFWVPMIEKIEKKARWXQGSFWSLGGRLTLLNSCLSNVPLYMLSIYPTPKSIIXRLIFLGGVFFGKGVVSPKKCHLVDWLSVCSXKSQGGLGVLNLDFMNDSLMTKWLWNIETSNGLWQKIITSKYIKGKPLILIRQKQGDSHFWKKILRLRDNFYKFCKSGVGNGLKTSFWKSNWIGNLPLSVQFPVLFDLAYDKDITVNVVLASNFEVLTFRRRIAW

SEQ ID NO: 321719 - protein, 75 aa, Zea mays
  unsure (1)..(75): unsure at all Xaa locations
  Clone ID: MRT4577_56471C.1.pep
NDRVAXNXPNPXAXVXXLLXQQXVXXVXLYDADPTVXXALXNTXIXVVXTLXXEQIAXAASRXSYALLWXXRNXA

SEQ ID NO: 321720 - protein, 101 aa, Zea mays
  Clone ID: MRT4577_56472C.1.pep
IFSIQSKYTLYGLVDPLHRGIRGDHNTGRSKQHLMEHTFMLLLRLSLFPNAKVTQLAQRKPAAASTGAHLYSPYSYGKGEGVSFAGNQIITEQAGRDHSHS

SEQ ID NO: 321721 - protein, 126 aa, Zea mays
  Clone ID: MRT4577_56473C.1.pep
AASRTATVHVELWTIGLSHPANSAFHAIVRAIGEQQRVRGTLALMMSAPGSRWVMLAPETEVRAQARHHERAVVLPARAELAPPRRAAGWPGASLLAGGAPGRAFTESWSSATKLIVFVSMALFQK

SEQ ID NO: 321722 - protein, 83 aa, Zea mays
  Clone ID: MRT4577_56474C.1.pep
PGNHPINKAPYGIGSKETVGLRSKKLVSQKQTIPIMSHLKRPIGPTLLTLLSLSLTYHERMCARSGLITILNTKLCVCQNTCG

SEQ ID NO: 321723 - protein, 43 aa, Zea mays
  Clone ID: MRT4577_56475C.1.pep
KNERSVIAKLNHFKLKSMGGGLNLKNMFYQPNLKTLGHQPKVF

SEQ ID NO: 321724 - protein, 45 aa, Zea mays
  Clone ID: MRT4577_56476C.1.pep
PSGQPYRHRRLTMRAAELRQITTRHELQRKKRWTQSDSTRWGEEQ

SEQ ID NO: 321725 - protein, 99 aa, Zea mays
  unsure (1)..(99): unsure at all Xaa locations
  Clone ID: MRT4577_56477C.1.pep
SMLMQVVGAGGHVEASRCLYGGTHALLARLLPRAYWERATFEVADNKGDGRAKEAPDETRVEYAESMCNPTLGVGNIPILSRVALEGGTKLXEDNTFTP

SEQ ID NO: 321726 - protein, 48 aa, Zea mays
  Clone ID: MRT4577_56478C.1.pep
MAADKAAAAKAKAKAKARGVSRGALLPPRETEGPQRGGKVRAGSVLAL

SEQ ID NO: 321727 - protein, 85 aa, Zea mays
  Clone ID: MRT4577_56479C.1.pep
KTSTFPNLLTTITSSFFHFFPLYTSILFFPYSSHTSNLIHSPHLLYNILFPFIFSTITRLFLSLFFFYIIFNNNFFLIIFIFSYL

SEQ ID NO: 321728 - protein, 195 aa, Zea mays
  Clone ID: MRT4577_5647C.1.pep
LGSRLGGSAWSRPSNVTAVRRHRMDGHLTRRLLRRMDRAVPSIRSRVWVQGMCEHTHIHTYILLHPTATSSMLLHPSTVLERLQSSIQKNGDGDGDGKARKSQRAYQNHSFATEGSKKVHQRRLRSRAARPRPRPADGMDPAATVPNPNPYRRRTVARHRVCNQVRRTGAGTRVAPGRRGSANERRSETGPAPSC

SEQ ID NO: 321729 - protein, 225 aa, Zea mays
  Clone ID: MRT4577_56480C.1.pep
MSTESGELLGIDPVELRFPFELNKQISCTLQLTNKTDKQVAFKVKTTSPKKYCVRPNNGMVAPRSKADVVVTMQAQRDVPPDMQCKDKFLVQSATVAKEVVPKEVTGDMFTKDSGNVVEEVKLKVVYVAPSSSQSERFEDGNLGSLSYQEETKEPKESEKIITEPFALISKLMEEKNSAIELNNKVRQELDFLRRDISRRHGGFSLVLVLVVAILGILLGFLMKR

SEQ ID NO: 321730 - protein, 188 aa, Zea mays
  Clone ID: MRT4577_56481C.1.pep
VKTTSPKKYCVRPNNGMVAPRSKADVVVTMQAQRDAPPDMHCKDKFLVQSAIVAKETMPKEVTGDMFTKDSGNIVDEVKLKVVYTAPSSSQSEGFADGNLGSLSHQEETKIPTESEIIISVSGFPFRKKKKKGGPPFFFFFSCFFFLFFFFFFSFGFLTTAGSMVVYSLVLVLVVAILGILLGFLMNR

SEQ ID NO: 321731 - protein, 225 aa, Zea mays
  Clone ID: MRT4577_56482C.1.pep
MSTESGELLGIDPVELRFPFELNKQISCTLQLTNKTDKQVAFKVKTTSPKKYCVRPNNGMVAPRSKADVVVTMQAQRDAPPDMHCKDKFLVQSAIVAKETMPKEVTGDMFTKDSGNIVDEVKLKVVYTAPSSSQSEGFEDGNLGSLSYQEETKEPKESEKIISEPFALISKLMEEKNSAVELNNKLRQELDLLRRDISRQHGGFSLVLVLVVAILGILLGFLMKR

SEQ ID NO: 321732 - protein, 806 aa, Zea mays
  unsure (1)..(806): unsure at all Xaa locations
  Clone ID: MRT4577_56483C.1.pep
MLGWWGLARAAIAAAGGGGGXARGQRSDGVVIAQADLQGLQAIRQALVDPRGFLAGWNGTGLDACSGGWTGIKCARGKVVAIQLPFKGLAGALSDKVGQLAALRRLSFHDNIIGGQVPAALGFLRELRGVYLHNNRFAGAVPPALGACALLQTLDLSGNSLSGSIPSALANATRLYRVNLAYNNLSGVVPPSLTSLPFLESLQLNNNNLSGVIPLTVGSLRLLHDLSLASNLIGGSIPDGIGNATKLRNLDLSDNLLGGSLPESLCNLTLLVELDLDGNDIGGHIPACFDGLRNLTKLSMRRNVLDGEIPATVGNLSALSLFDVSENNLTGDIPTSLSGLVNLGSFNVSYNNLSGPVPAALSNKFNSSSFVGNLQLCGFNGSAICTSVSSPLVAPSPPLPLSERRTRKLNKKELIFAVAGILLLFFLLFCCVFIFWRKDKKESSPPKKGAKDVTTKTVGKTGTGAGKGTDTGGDGGGKLVHFDGPLSFTADDLLCATAEILGKSTYGTVYKATMEDGSYVAVKRLREKIAKSQKEFEPEVNALGKLRHPNLLALRAYYLGPKGEKLLVFDYMPKGNLASFLHARAPDSSPADWPTRMNIAMGLARGLHHLHTDANMVHGNITSNNILLDEGNDAKIADCGLSRLMSAAANTSVIAAAGALGYRAPELSKLKKANTKTDIYSLGVVMLELLTGKSPGDTTNGLDLPQWVASVVEEEWTNEVFDLELMKDAAAGSDTGEELVKTLKLALHCVDPSPPARPEAQQVLRQLEQIKPSIAVSAASSFAGEPSHTTATATSVTDETKSTVTE

SEQ ID NO: 321733 - protein, 73 aa, Zea mays
  unsure (1)..(73): unsure at all Xaa locations
  Clone ID: MRT4577_56484C.1.pep
MALLPRTARLALLSTPRAYSAAAAAGASPTSPAPYGGAPPPAMSKTAEXXXSKXDDXXNRARKGTNSPMTFGL

SEQ ID NO: 321734 - protein, 98 aa, Zea mays
  Clone ID: MRT4577_56485C.1.pep
SLQPRVDIVALVNVAFSRQCGGAFGLSAIMVVMGRVVWCSVLACDYVCPHVNFCKKKPSIHIMFLAPLASKGELERVVTYKTHSNFGKGHKPLIMCYP

SEQ ID NO: 321735 - protein, 43 aa, Zea mays
  unsure (1)..(43): unsure at all Xaa locations
  Clone ID: MRT4577_56486C.1.pep
SIVDRGGERRXLPATPDEASGRTRRNWVAEKAETCGKSLVINV

SEQ ID NO: 321736 - protein, 119 aa, Zea mays
  Clone ID: MRT4577_56487C.1.pep
EMFKSISLSQGSLWICFGGYRSRGSYVVGLVMMSKLYIDCRVTMDPPLSTSVALYLLELFGARRLSSAYTLSLPHPLFFAVGAIRSHPRVLTHMRPSKPARTSNNNRSLAQTHNNATSP

SEQ ID NO: 321737 - protein, 62 aa, Zea mays
  Clone ID: MRT4577_56488C.1.pep
KHKLYPLLFLHHVANATLFPTMVTNTFNFPYSPIPSLNHPLTFLEGGGQPYKAPKAIAPGNI

SEQ ID NO: 321738 - protein, 62 aa, Zea mays
  Clone ID: MRT4577_56489C.1.pep
LARAQYGKMSRLAELKEARTMFRVGTRGEFTVPDTFDDHVRSRIIKNRTRGASPQICAGSCR

SEQ ID NO: 321739 - protein, 93 aa, Zea mays
  Clone ID: MRT4577_5648C.1.pep
VYSLPGQHISTARQASRIMHKQNTLLQETLHGSCKNRTHRKQYRVTASHRSIGNQYKQSRQSRRRMKSNRNSHKSCKDAATTICGEKNVKPSS

SEQ ID NO: 321740 - protein, 67 aa, Zea mays
  Clone ID: MRT4577_56490C.1.pep
SLGVFFSLKRRHLSENFLGRGGPQPSQILPCHHFFTNPDFSFFAPASFPIKGAPLVSKGGGIFYGQG

SEQ ID NO: 321741 - protein, 93 aa, Zea mays
  Clone ID: MRT4577_56491C.1.pep
MGAGGDEKAAMAASAAAAGAGAAEGEGAVDSKDLQQQSKALDKLTDHVEDRQLDSSRVQSAMAALASSKEADWNAMRLREKELAAVKINPSGS

SEQ ID NO: 321742 - protein, 93 aa, Zea mays
  Clone ID: MRT4577_56492C.1.pep
ALSFRLELLLIWHRFLNYNNEYFFVKKKKKKKKKKKKKKKKKKKKKKKKKKKKKNPKIPFPKPPPQAQNFVNSNSGNPGAPRKRESWGPGNPA

SEQ ID NO: 321743 - protein, 98 aa, Zea mays
  Clone ID: MRT4577_56493C.1.pep
WEQTIAWNRSNCRAQQTNYFSYNNLKKKLLSSKQPISYRISKMVHIYVFINCCGCQLICSLRRWSSWHRTLLKLRKMVLCTSIRRQITLPVGYPESTR

SEQ ID NO: 321744 - protein, 48 aa, Zea mays
  Clone ID: MRT4577_56494C.1.pep
SVSPHASDQSTSKSSFTTMDAFRDSIATTLTCVELAPNIYAIFCNIYL

SEQ ID NO: 321745 - protein, 100 aa, Zea mays
  unsure (1)..(100): unsure at all Xaa locations
  Clone ID: MRT4577_56495C.1.pep
FELLALCASATKAXIXPQRSLAATTIMPQLLHTTSXNGXKHPAVQTYRLQEALPMSVXQTPVAQVQQQSLSHLTIQTXLKRDHEQQFLPALNQTCAVNPE

SEQ ID NO: 321746 - protein, 70 aa, Zea mays
  Clone ID: MRT4577_56496C.1.pep
TEYNLNQLGFVVYRGLNSFWGLGHMQICLFGRDHPLALITLIQPIKLKTHEARGQQKLKYSRGGMYGESE

SEQ ID NO: 321747 - protein, 66 aa, Zea mays
  Clone ID: MRT4577_56497C.1.pep
LKFCTSRCTNLTTIKASVSKHSWFHWSHDGWKLEENIKRTVSEICRGHFHHFFFSIITSMWKEGPL

SEQ ID NO: 321748 - protein, 234 aa, Zea mays
  Clone ID: MRT4577_56498C.1.pep
LRTHDDLGVLRHVGGGEAAALAGEREVEGVDLVAHPAAAVVDLAALLRAAVVAEPGQRRGQALRAGQRREVPRALRQPVDGHERRVLLLVPPEPRAARRRRLRRRLAHHLPHRLLERLRVVHGLHVHQDHARVRVRLPEEVGVLVPHEAVVVPYPRVGTVAAGAGELLGGVGKAGRAVAGGDVAAALREAVDDAVALAGGGRGVAPGGGGRGDEVGEDGVDVGHGLAAASVAAS

SEQ ID NO: 321749 - protein, 78 aa, Zea mays
  Clone ID: MRT4577_56499C.1.pep
GKSAGPIIRRSPPAPNMSKFVDGGLAFLPFFFPPRELFRLSPGPAPGTRGFPKQHSLGPLFPPPQVQNPVSGWLFLNI

SEQ ID NO: 321750 - protein, 131 aa, Zea mays
  Clone ID: MRT4577_5649C.1.pep
IIFLFSSSAPTNITTTIVTSQPWTHLCSDGDGVPEAVDFWNRIAKGYPEHGWMSCLYHAQWMKCVYAALRLNALMESVVHTVDFQQHSPSTTTHAPMTASGHEPAHGDVREPSTRPTPHVFACSGPPTMSY

SEQ ID NO: 321751 - protein, 53 aa, Zea mays
  Clone ID: MRT4577_564C.1.pep
MLLINAQNAIELNVTCEEAPQMEDHDLTAQANDVRIADYEYDDYDEHSLYEHK

SEQ ID NO: 321752 - protein, 45 aa, Zea mays
  Clone ID: MRT4577_56500C.1.pep
FPGRPAHYLTPFLLYPTLFFSFILRQIFWGVSPKFKALSIFLQHL

SEQ ID NO: 321753 - protein, 79 aa, Zea mays
  unsure (1)..(79): unsure at all Xaa locations
  Clone ID: MRT4577_56501C.1.pep
QNLLKDLDALDPAHKEALEIISRERSGGTLESISKVMGAHLGIASSVSKTXQAQPESTRFGRIMRSGFGDILRGQSKGQ

SEQ ID NO: 321754 - protein, 67 aa, Zea mays
  Clone ID: MRT4577_56502C.1.pep
MLWSGGTNPRQSFVSGHDGGGGDVGQVLLEAMALVEGLRTAIRMGITSVKAFTDHRLLYNCVRHCLF

SEQ ID NO: 321755 - protein, 50 aa, Zea mays
  Clone ID: MRT4577_56503C.1.pep
PCFTSSPGHGRVGYRSSPLTIDLFCRPCIRDLALIRLEQLKPLLAHERSR

SEQ ID NO: 321756 - protein, 1074 aa, Zea mays
  unsure (1)..(1074): unsure at all Xaa locations
  Clone ID: MRT4577_56504C.1.pep
FGTRQKQKESSPDDSNGLLLGASIREGYTRQQENWDVKISALGPLKDNERKDLNCAVKEYLLLAGYRLAVMTFIEEVPDQDLDVWPNSSACVPDALRRYYYQYLSSTAEAAEEKISILQENETLLKDNERLNAENDSLMKSREGANSQVAALRKSLEAAHKDIKDKEKMIQDLRQSLDVQRKELNDCRAEITALKMYIEGTQSIKQLFVGTSDGVKSHSFANSVGASSLNNEDEDSKGSEAITNKLASAVNITDDTQKDRQVLESSAEGSSVSETPVSFTAVENDSYGTSKEDKSVSNISSNNVCFQSNLHGASMTGKSQGSSDGISMYLSIEKLESPSKQKSSDKIALETIKIVSDALPKIVPYVLINHREELLPLIICAIEKHPDSDVRDSLTHTLFNLIKRPDGEQRRIIMDACVELAKSVGEMRTETELLPQCWEQINHQYEERRLLVAQSCGELAVYVRPEIRDSLILSIVQQLVEDAATVVREAATHNLALLLPMFPNLDKYYKVEELMFQLVCDPSGAVVEVALKELVPAVVRWGDKLDQISRVLLAHILASAQRCPPISGVEGTIDSHLRVLGEQERWNIGVLLRMLTELLPFIHQKAIQTCPFASADPTSSTPENFSASCLKSYATGDSEWSAFEWMHTDCLPDLIKLACLLPVKEDNLRTIITKYLLEVSGLYGKDYLEHIMLPVFLVAAGDIDSGDFTYFPLSIQPKVRGLRPKTSTAEKLAIMCVFPLLLSGILGSPSSRQQLEEYLRKVLIQNTKDGSFSMHHTTEIINAVRFLCLFVEHHSVIFNILWEMVASSDTSLKINAAALLRALVPYTDVKIASTHILPALVTLGSDQNLKVKYASIDAFGAVAQHFKNDMVVDKIRIQMDAFLEDGSHEASVSVIRALAVAVPHSTDRLREYLLTKIFKMTCITPVGNDIERRRERANVLCEALRALDATDSXPAMGIRDLLLPSIQNLXLKDLDAXLDPAHKEALEIISRERSGGTLESISKVMGAHLGIASSVSSFFGENSLLTKKEGGEEHDPAGPTAPEQNLQAQPESTRFGRIMRSGFGDILRGQSKGQ

SEQ ID NO: 321757 - protein, 86 aa, Zea mays
  Clone ID: MRT4577_56506C.1.pep
GVLFFFYFFFFFFFFFFFFFFFFFFFFFYPGTKPIKGYPKGVQIKPKGGGGGGAKSRGESMKWKAKKNSLGGGHKHRHIHKNNACN

SEQ ID NO: 321758 - protein, 98 aa, Zea mays
  unsure (1)..(98): unsure at all Xaa locations
  Clone ID: MRT4577_56507C.1.pep
LGHNKNKGLGVGGFLLVGRGKLLGVNKNKRLKLGLGLGLGGGKILGEDGRRRGFQQGGFLGRQDGWGFDLGNCHWVRLKGLWVXGGIGRLSNPPRLEP

SEQ ID NO: 321759 - protein, 68 aa, Zea mays
  Clone ID: MRT4577_56508C.1.pep
QVYLTPIFYHTSRLFHNYDGNQAPRNYDLYPYQLAIRINDDDPCSGLSPSTWGHRPGACFFTYSWNLS

SEQ ID NO: 321760 - protein, 73 aa, Zea mays
  Clone ID: MRT4577_56509C.1.pep
GKPALADLAAQVGGTILESLKRGAGSLSFPHWGGRGKNKNFWGTRSKPKGPGAQNPYNKPGCQWISRAKTPSL

SEQ ID NO: 321761 - protein, 81 aa, Zea mays
  Clone ID: MRT4577_5650C.1.pep
MVKIAAADQAVVCLCSEALVAAAFCQGEVERHRLRDLHCLQEVQESPLDACFQVLDRQITGGGVVRPFRWDTGLRMRCCQQ

SEQ ID NO: 321762 - protein, 43 aa, Zea mays
  Clone ID: MRT4577_56510C.1.pep
ASTKPGRAHGGKGLSKGRANLQRKVLHDFMQGMTKPATRRLSK

SEQ ID NO: 321763 - protein, 180 aa, Zea mays
  unsure (1)..(180): unsure at all Xaa locations
  Clone ID: MRT4577_56511C.1.pep
MSSSSTSSCHGSGNPSPPAAAGAVSVAAAAAGPAAWPRRQCRDVFWLVVFLLHLLVFGAALALFGLNRFHQADRFNIGRYAXHRGALGHPRRXPDPAPAPPPPSVYRSEDPSVPPSELTETYWKYYGAAGAVGAALACAWLAAAAWRKDGGKVAMRTAVHCLTGYLAVVSVLCFWGKHFF

SEQ ID NO: 321764 - protein, 85 aa, Zea mays
  Clone ID: MRT4577_56512C.1.pep
GLCGLFSSSVTTSVMTRSCSLSALESAFVAFAVISANNRSVWYGSVLVTLFCLCSSCSPCCGHRWELPFSPSHVPHGLLLAHARD

SEQ ID NO: 321765 - protein, 320 aa, Zea mays
  Clone ID: MRT4577_56513C.1.pep
MESLGVLLLHPLDTYLEQELDRRCRLLRLWEVPHDRRGEFLRAHASSIRAVVIGGGSGFGGNPALIDDLPRLEIIACYAVGYDCVDLTRCRERGVRVTNTPDVLTDDVADLAVGLAIAALRRIPHADSYVRAGLWKANDGHYGLTTRFSGKRVGIIGLGRIGLSIAKRVEGFGCPVCYYQRTRQDAYPNYIYLPTVLQLAANSDVLVVACSLNEQSRGIVSREVIEALGPTGVLVNVGRGAHVDEPELVAALADGRLGGAGLDVFQAEPDVPQALMALDNVVLAPHMGSGTHETRKAMADLVLANLEAHALNMPLLTPVV

SEQ ID NO: 321766 - protein, 57 aa, Zea mays
  unsure (1)..(57): unsure at all Xaa locations
  Clone ID: MRT4577_56514C.1.pep
NECKNRVLLGIVIQRLKAALSLGPVVICLRKNSSADANKSFDMLASPFCXCWVRPFF

SEQ ID NO: 321767 - protein, 103 aa, Zea mays
  Clone ID: MRT4577_56515C.1.pep
TLVLIYSQFLYNFKRSFFKSPPRAWATQKNPKKEFPLGDKLAPPVLKIIHIHRFLFEKAPKQGFHFWFGIRVFSLLGCWVKKKNPGGHLFFFFLAPHKGFFGL

SEQ ID NO: 321768 - protein, 95 aa, Zea mays
  unsure (1)..(95): unsure at all Xaa locations
  Clone ID: MRT4577_56516C.1.pep
AGEKQARQKPPRDEPGDGSTXXEGRRXEDTEADXRGPKQAKXTREKRXGHEHNKKAGARXARRPATXAKANGPXNPNPDGDHXXDNPQXXREGRS

SEQ ID NO: 321769 - protein, 53 aa, Zea mays
  Clone ID: MRT4577_56517C.1.pep
TRYKDNQNWGNLKGPIKINLCRSLKLIRTWLEKVSYQGHNLPSMSSCSATSTC

SEQ ID NO: 321770 - protein, 82 aa, Zea mays
  Clone ID: MRT4577_56518C.1.pep
PPLKNLLWGYIKHPLNGGGKPILGKLKQRRLCLSTGGFYSPPFLGGGANGSTHVLFFLETRAQRFWKTQNSHRDFLRIFVRK

SEQ ID NO: 321771 - protein, 77 aa, Zea mays
  Clone ID: MRT4577_56519C.1.pep
GLKRFAVRIGTLCEQDPVHGQVHGQQRDALQLPRMLEEGMAFSQIDPIPVKVVCVEEKVKMGRAVLARAEFRADVGV

SEQ ID NO: 321772 - protein, 103 aa, Zea mays
  unsure (1)..(103): unsure at all Xaa locations
  Clone ID: MRT4577_5651C.1.pep
IDYSVITIRSSVKSQWGCLISAGDMPATAVKRGRGGSSIYLVLDDWTKGYSIHKIQADSFDSDSDSGSDDQHSGAARHLPEPPTQRXECPVGTVPHPGMSFSA

SEQ ID NO: 321773 - protein, 149 aa, Zea mays
  unsure (1)..(149): unsure at all Xaa locations
  Clone ID: MRT4577_56520C.1.pep
KQEQIFFFTAPAMGKAPRYGEPRFFPPPFLPPFVPAFFCGLWANPPASLQEAFPFTHSVLASFGGALHQRPPFFYPQPGGYPLVGAFPPTPPFVPXNPFXFLNPALWGPPPPVGGALFLVPFYMACLMGPPNRRGFSQKIQYIFCVFFR

SEQ ID NO: 321774 - protein, 114 aa, Zea mays
  Clone ID: MRT4577_56521C.1.pep
PAGPGVSSFLPRSKEASSHGRRRRAASASASASAAGGRTARINRAALRVGILASAVGSVAGCGFLMMALVNVVQVKLGRLGCGAGGAADWAAVVSLVTLVPSGMLMYIATVFYA

SEQ ID NO: 321775 - protein, 75 aa, Zea mays
  Clone ID: MRT4577_56522C.1.pep
GGGPVNLYVTRKCNVCTPPPKCVNCFLLALLLGPNVGVYMEALNGSFIFPARLQMQVFWVDSPPFCFLGCKKTVS

SEQ ID NO: 321776 - protein, 123 aa, Zea mays
  Clone ID: MRT4577_56523C.1.pep
SLGSTFVPIWDMPVLPQSHRVPKSRRIGSHMTDHQYKKLFTGLFKGTPCNPNMARHNKILQQALCLNSSLAGCRLWTTVSCIARNLPALEEGSLWWGLMNNHCYLGQLAGSRVRSTLKTVLCV

SEQ ID NO: 321777 - protein, 204 aa, Zea mays
  unsure (1)..(204): unsure at all Xaa locations
  Clone ID: MRT4577_56524C.1.pep
MAPKIAIVYYSMYGHIKKMADAELKGIQEAGGDAKLFQVAETLPQEVLDKMYAPAKDSSVPVLEDPAVLEEFDGILFGIPTRYGNFPAQFKTFWDKTGKQWQQGAFWGKYAGVFVSTGTLGGGQETTAITSMSTLVHHGFIYVPLGYKTAFSMLANLDEVHGGSPWGAGTFSAXDXSRQPSELELNIAQAQGKAFLRAXCQAHQ

SEQ ID NO: 321778 - protein, 44 aa, Zea mays
  Clone ID: MRT4577_56525C.1.pep
VGFGPPVGVLAPVAVGYRSVRAEWRYERALESGYIKDRKEWRFW

SEQ ID NO: 321779 - protein, 121 aa, Zea mays
  Clone ID: MRT4577_56526C.1.pep
QQFFPFNQLGALNFGFFLEQQQLPFRQVPGAYPPQFFPFNQLGALDFPGFFQQQQLFPFSQLGGVGPAPFFIQPQLLPFFQAGGPNGGPLFQLEQLVPFNPLGLANPAGFFPQPLIGGGPF

SEQ ID NO: 321780 - protein, 142 aa, Zea mays
  unsure (1)..(142): unsure at all Xaa locations
  Clone ID: MRT4577_56527C.1.pep
NIRGQQLQQLVVANPGGYFXQQQFFPFNQLGALNFGFFLQQQQFPFSQVPGAYPQQFFSFNQLGALDFPGFFQQQQLFPFSQVGGVGPGTFLIQPPVVPFFQPGGPNGGPLFQLQQLVPFNPPGLANPAGFFPQPLLGGGPF

SEQ ID NO: 321781 - protein, 84 aa, Zea mays
  Clone ID: MRT4577_56528C.1.pep
LAEDGPQDVRRLHRDEDLRVRTSGWGGCQCQRQRQSVLSRGPWRSVLSAARSELSQGLAATAACKPLVATKPRSSGGASGLTMG

SEQ ID NO: 321782 - protein, 77 aa, Zea mays
  Clone ID: MRT4577_56529C.1.pep
IKRAIKEDSRGKLKGILGYPEDDGVSTDFVGANRSSIFDAKAGIALSDKFVKLVSWYDNEWGYSSRVVDLIVHMSKA

SEQ ID NO: 321783 - protein, 66 aa, Zea mays
  Clone ID: MRT4577_5652C.1.pep
MAEAQGKAKQMAEAPSKIESMRRWVVEHKLRAVGCLWLGGISSSIAYNWSRPNMKPSVKIIHARFV

SEQ ID NO: 321784 - protein, 75 aa, Zea mays
  Clone ID: MRT4577_56530C.1.pep
PRVVKTPMDFKGGFLDGPIFFGFYPGTWKRFFFPFMVLGVKFGPLWFRDIKVDPVKKITTGIWRWAEPGLCLFFF

SEQ ID NO: 321785 - protein, 49 aa, Zea mays
  Clone ID: MRT4577_56531C.1.pep
IRMQAFGSKDASERSSFFLFSLFFLINSSFFFFFYLDIYYFFLYFSDAW

SEQ ID NO: 321786 - protein, 516 aa, Zea mays
  Clone ID: MRT4577_56532C.1.pep
MAKMAMASSRLPALLCLAAVAVAVAAEAAAAAGEGGLRLPRDATFPAAQAERLIRALNLLPKEKEAGPAAGGGDGPSVAPGELLERRVRLPGAPAGVGDLGHHAGYFRLPHTHDARMFYFFFESRGKKKEDDPVVIWLTGGPGCSSELAVFYENGPFTIANNMSLVWNKFGWDTISNIIFVDQPTGTGFSYSSDDRDTRHDEIGVSNDLYDFLQVFFKKHPEFAKNDFFITGESYAGHYIPAFASRVHQGNKANEGIHINLKGFAIGNGLTDPEIQYKAYTDYALEMNLITKSDYERINRFIPPCEFAIKMCGTDGKASCMAAYMVCNNIFNSIMKLVGTKNYYDVRKECEGKLCYDFSNLERFFGDKAVKEALGVGDIDFVSCSTTVYEAMLTDWMRNLEVGIPALLEDGINVLIYAGEYDLICNWLGNSRWVHSMEWSGQKDFVSSCDSPFVVDGAEAGVLKSHGPLSFLKVHNAGHMVPMDQPKAALEMLRRFTQGKLKQEPLPETMALKAAM

SEQ ID NO: 321787 - protein, 252 aa, Zea mays
  unsure (1)..(252): unsure at all Xaa locations
  Clone ID: MRT4577_56533C.1.pep
PNGNRNPPPLGSVWNQGGTWEGKNPPSWGXSRKKDLVGPLGSLKVPPGKAPLFXGPRVPGIPFRALSPPKKGGGFTPPLALDFKGEGLFKKKPKRSKGPLPFPSFXFGGIHSPGGQIRFSFPKGLASPAKGGVFKGFQSFLAPIXRKKRGCFKKSPRVNNGPLRKSPVFGGGSRAPPGNTSKTFFRFWGFPPFKIVFGRLGRFSVLFFAPPGKSLAVSPPPKKKKKKKKKKKKKKKKKKKKKKKKKKKLEGG

SEQ ID NO: 321788 - protein, 45 aa, Zea mays
  Clone ID: MRT4577_56534C.1.pep
RFGGCHAQLLQAWYLRGFDHMVHSLLAVMATSPLVACSDSSHGPI

SEQ ID NO: 321789 - protein, 57 aa, Zea mays
  Clone ID: MRT4577_56535C.1.pep
NIGSINSAQPEQYILTFNVTIIYIRTPHLIFSSHSIHVWACMCLAHHQYSTESLQLV

SEQ ID NO: 321790 - protein, 77 aa, Zea mays
  unsure (1)..(77): unsure at all Xaa locations
  Clone ID: MRT4577_56536C.1.pep
GGGSLPPLPFLXXWARSVDLXXCAAPPPGGXAARFSXWAAPGSLAVXXXXLXXFFSSASFXAXXXRVVPXXLGSPRG

SEQ ID NO: 321791 - protein, 95 aa, Zea mays
  unsure (1)..(95): unsure at all Xaa locations
  Clone ID: MRT4577_56537C.1.pep
IKSIDDHGYDYYLFSLWWWLNNNKRGGSGLLYIGIVWCVCEREIKRVVQFAICFCMYGVSICVYVRVFTCMLVDTIVLSVXFINQYKIIRSQFLY

SEQ ID NO: 321792 - protein, 434 aa, Zea mays
  unsure (1)..(434): unsure at all Xaa locations
  Clone ID: MRT4577_56538C.1.pep
MSGAGPDLQLPPGFRFHPTDEELVMHYLCRRCAGLPIAVPIIAEIDLYKFDPWQLPRMALYGEKEWYFFSPRDRKYPNGSRPNRAAGAGYWKATGADKPVGTPKPLAIKKALVFYAGKAPKGEKTNWIMHEYRLADVDRSARKKNSLRVRTSALRRRPSVRPLASSPSKSNKKNSAIMCRFRNERGDKRGPXFGPLNFFYVGHARWGAWGAAPCPMIRPRRSPRRASIRCPWVMVYRSFSPVAXCDCDGDGEPVGSGIRHRNDALXLKLIHFLSAARMXTKFSIVLTGAVGXWVLCRIYNKKGGGLEKAPAAGGDHKPVFATAAVSSPPEQKPFVAAAGGLPPAFPELAAYYDRPSDSMPRLHADYSSCSEQVLSPEQLACDREVQSQPKISEWERTFASDPVNPAGSMLDPVVGHAGGDPLLQDILMYWGKPF

SEQ ID NO: 321793 - protein, 56 aa, Zea mays
  Clone ID: MRT4577_56539C.1.pep
ILITQPLVSRPLPYQDFLLSTEPISSIHQPTKQASFIPGSEELSQPRNVNLLRCGL

SEQ ID NO: 321794 - protein, 89 aa, Zea mays
  Clone ID: MRT4577_5653C.1.pep
NIPLTAPSLGKSHEPLLSRCGSVLHDLHAPSLSPTTAYCLTRNLRVIPKLLLGLDFLSSIQMSKPFPGRMCYTCCRRKAISKCRRRNGI

SEQ ID NO: 321795 - protein, 293 aa, Zea mays
  Clone ID: MRT4577_56540C.1.pep
MSGAGPDLQLPPGFRFHPTDEELVMHYLCRRCAGLPIAVPIIAEIDLYKFDPWQLPRMALYGEKEWYFFSPRDRKYPNGSRPNRAAGAGYWKATGADKPVGTPKPLAIKKALVFYAGKAPKGEKTNWIMHEYRLADVDRSARKKNSLRLDDWVLCRIYNKKGGGLEKAPAAGGDHKPVFATAAVSSPPEQKPFVAAAGGLPPAFPELAAYYDRPSDSMPRLHADYSSCSEQVLSPEQLACDREVQSQPKISEWERTFASDPVNPAGSMLDPVVGHAGGDPLLQDILMYWGKPF

SEQ ID NO: 321796 - protein, 472 aa, Zea mays
  unsure (1)..(472): unsure at all Xaa locations
  Clone ID: MRT4577_56541C.1.pep
MSGAGPDLQLPPGFRFHPTDEELVMHYLCRRCAGLPIAVPIIAEIDLYKFDPWQLPSTSRRPRSSCSSSSSREPISCAAVTMASXRSIANSLCAGMALYGEKEWYFFSPRDRKYPNGSRPNRAAGAGYWKATGADKPVGTPKPLAIKKALVFYAGKAPKGEKTNWIMHEYRLXDVDRSARKKNSLRVRTSAPPPSVRPLASSPSKSNKKNLAIMCRFRNERGDKRGPWFWAAEFFLRGPCXGVGGCTVPNDSTASQSSARKYSMPMGHSEQIIFARRALRRRRRRRASGVSLGLDIEMTLCDSLAHPFLVSCTDDKLSSLLCXGXLDDWVLCRIYNKKGGGLEKAAAPAAGGDHKPVFATAAVSSPPEQKPFVAAAGGLPPAFPELAAYYDRPSDSMPRLHADYSSCSEQVLSPEQLACDREVQSQPKISEWERTFASDPVNPAGSMLDPVVGHAGGDPLLQDILMYWGKPF

SEQ ID NO: 321797 - protein, 56 aa, Zea mays
  Clone ID: MRT4577_56542C.1.pep
ALVLAEVVCLAATTSSSGYLQLIAAELGQHPRVWSQAATSSCTIKNWYEAMDGAME

SEQ ID NO: 321798 - protein, 559 aa, Zea mays
  unsure (1)..(559): unsure at all Xaa locations
  Clone ID: MRT4577_56543C.1.pep
FWPFWCGIFGDDRSISYQVIISKLLIVQFRAHTSPISALCFDPSGTLLVTASVHGQNMNVFRIIPPHGTSEAGQIGTYVHLYKLQRGITNAIIKDISFSDDSDWIMISSSRGTSHLFSISPYSGSTRFRYSDNNPVENDYTVDSSVNHTAHWSQNSATSLSLSQKTLFVSGPPVTLSVVSRIRNGSNVFKGAVHGAAAFATGASTPISGAIASTFHNRMAGDIDSDGSLRMKYYLLVFSPSGSIIQYALHLSAEQDSGLDFRTSPISYGPERETDTKFVIEALQKWDVCYKRNRRDSAESFAYSDFENGENNKLLLKAMWKGTSIYPFDCSVERQKLSADENRNLYSQSELQTHVVQTPLWSKSXIFLHHFLFQCCIYILCLIDMLGLIKCNACLLTDXIHFQVMEGETLEADNADVISGEVEVEKVQTHNIESRSKNLIPVFDSLHTSRFQQTRLNAPDNSRCGLLQRQKSGISEDGRLSRRSSCSSLDCMSEGPKSSDDGAFSKYVVDDNSSAVINNPSVKFHAELVNNTGSLKSEAQLGFVNSEEDGGGGEQLPDL

SEQ ID NO: 321799 - protein, 101 aa, Zea mays
  unsure (1)..(101): unsure at all Xaa locations
  Clone ID: MRT4577_56544C.1.pep
RCACVAPLAHAPGMPCQSGACKGPXXHXLVTQGTRVHXSLLHWRPAQGTRPPAAGGGGGXARSFSLATXRRSPPXTINGSRHRLRCLAGCLRRRGSPLCPG

SEQ ID NO: 321800 - protein, 42 aa, Zea mays
  Clone ID: MRT4577_56545C.1.pep
MKLVRFLMKLNNETVTIELKNGTVVHGTITGMTSCELYHCGN

SEQ ID NO: 321801 - protein, 264 aa, Zea mays
  unsure (1)..(264): unsure at all Xaa locations
  Clone ID: MRT4577_56546C.1.pep
SFAYSDFENGGNNKLLLGAMWKGTSIYPFDCSVERQKLSADENRNLYISQSELQTHVVQTPLWSKSRIHFQVMEGETLEADNADVISGEVEVEKXQTHNITRSKNLYQLDSLIHKVFHXWLIKALGILLDNSGLHPDXKLLLLFCLIRFXVVTFIXQPSRLNAPDNSRCGLLQRQKSGISEDGRXXXXXXXXXXXXXXXXXXXXXXGAFSKYVVDDNSSAVINNPSVKFHAELVNNTGSLKSEAQLGFVNXXXXXXXXXXLPDL

SEQ ID NO: 321802 - protein, 77 aa, Zea mays
  Clone ID: MRT4577_56547C.1.pep
RSSCSSLDCMSEGPKSSDAGAFSKYVVDDNSSAVINNPSVKFHAELVNNTGSLKSEAQLGFVNSEEDGGGGEQLPDL

SEQ ID NO: 321803 - protein, 65 aa, Zea mays
  Clone ID: MRT4577_56548C.1.pep
HPFGLQQHDPSAYFVPCNPLAGRPNWIGPRSVKGVLGSQPPLLPRSSWFQSMRARSHARISLTLF

SEQ ID NO: 321804 - protein, 35 aa, Zea mays
  Clone ID: MRT4577_56549C.1.pep
KNKITGFGFLKKTKKKRRGFTLKGNQSYLPFLTTK

SEQ ID NO: 321805 - protein, 194 aa, Zea mays
  Clone ID: MRT4577_5654C.1.pep
MTNLLLINNAKRSEPFDVNLEGAIEKSCELAKNSFDNTLENRYELAKNSFDNTLENRYELAKSNSDYINMVRNGLQEQDLACLSNSHNVNYLKPSHLAEEYTEKLKHVFSLGKSLGPPKKKLLILDLNGLLVDINEDYHNAHMADAKVRRKLVFRRPYCDDFLNFCALNFELGIWSSRENKQTKTNIYYKRSKP

SEQ ID NO: 321806 - protein, 97 aa, Zea mays
  Clone ID: MRT4577_56550C.1.pep
MGEVASTAAAASLSSSSSLLMAATAVKGDEERYVMVASRFFRVKPGAAARHHFLDSCFLCKRSISRDRDIFMYKGDAAFCGEECRQDQMAMDEALHA

SEQ ID NO: 321807 - protein, 51 aa, Zea mays
  unsure (1)..(51): unsure at all Xaa locations
  Clone ID: MRT4577_56551C.1.pep
EFPGRPTPVLFPDYGXGFLXXCLEAXNLNPEEVIQRXLEXTXXQDLLALDX

SEQ ID NO: 321808 - protein, 152 aa, Zea mays
  unsure (1)..(152): unsure at all Xaa locations
  Clone ID: MRT4577_56552C.1.pep
AGIYHNIFSVHEAHQAKRTINDLTTLATKILALLAFLAXLLESATXNAIIIPQGSLAPXAIISQLLPPVTLMGXFEHPAVQAYRLQLALAESALQQPSAQLRQRSLAHLTLQTIATQQLLQFLTPLMQLSVVNPVDYLQQQLLAFNPLALAN

SEQ ID NO: 321809 - protein, 82 aa, Zea mays
  Clone ID: MRT4577_56553C.1.pep
SLVDRSSACMRLYVCQSSLLHSIALRLRVASYSSISIIFFFCSCFVVISCRKGRKGTSFDALTIYIVAKPKAKKKKKKKKKK

SEQ ID NO: 321810 - protein, 502 aa, Zea mays
  unsure (1)..(502): unsure at all Xaa locations
  Clone ID: MRT4577_56554C.1.pep
MSDSELSQGTLVFGLHLWELVGIGVGAAFVLLLVLLSLLCLLASRRRRRRRAAPVLHLPAVVPNAQPKHPTKPPKDIQEVPSRGTAAPAAPAKAPLAQVLQAPPPXDSIQIETGKEHRITFPEQPPPPHHQRSGGPSSRGASGESRGGGGEPGVPEVSHLGWGHWYTLKELEDATCMFADEKVIGEGGYGIVYHGMLEGGVQVAVKNLLNNRGQAEREFKVEVEAIGRVRHKNLVRLLGYCAEGNQRMLVYEYVNNGNLEQWLHGDVGPVSPLTWDIRMKIILGTAKGLMYLHEGLEPKVVHRDVKSSNILLDKHWNAKLSDFGLAKLLGSERSYVTTRVMGTFGYVAPEYAGTGMLNETSDVYSFGILIMEIISGRVPVDYNRPPGEINLVEWLKTMVSNRNSEGVLDPKMTEKPTSRALKKALLVALRCVDPEARKRPKIGHVIHMLEVDDFPYRDERRGGKAPAQARSVETPPASEPGDSSGNNTPKDAPNGEPFKWRN

SEQ ID NO: 321811 - protein, 85 aa, Zea mays
  Clone ID: MRT4577_56555C.1.pep
GGGEKKTWLGLNPPPLKQRGVPHLSVFSPLFRACPFAPNYRFFKPCGLNNPLFSPLKFYNRNVPFQFLGGGKGKKKPQRTLSLAQ

SEQ ID NO: 321812 - protein, 67 aa, Zea mays
  unsure (1)..(67): unsure at all Xaa locations
  Clone ID: MRT4577_56556C.1.pep
MRECVLIHIGQTGVQVXYATRELLCLEQGIKADCHKRRDNTIGGGDDANNTYVTGTGAWKQKPHAFF

SEQ ID NO: 321813 - protein, 53 aa, Zea mays
  Clone ID: MRT4577_56557C.1.pep
WICWGRSIDAMGCCWCRRLFITWRICRRLGVSSLAIRRDGWLHYGGYNLALTR

SEQ ID NO: 321814 - protein, 127 aa, Zea mays
  unsure (1)..(127): unsure at all Xaa locations
  Clone ID: MRT4577_56558C.1.pep
LTPEQQASFKAEPSHNNGATLATNIFPLLMLLALSACVANATFYSQCSQAPIVSLLTQFLTSMIASVFQNPPLQPYRLQQAIAASXIPLSPLXFNKSPALSFVQSLVQTIRSHQLQQLLLPVINQVA

SEQ ID NO: 321815 - protein, 212 aa, Zea mays
  Clone ID: MRT4577_56559C.1.pep
LFLHPRPLPIPHPVPAQNPNPSGAPRHGRRLPHTRQAPPRRRRRGAGPGPAHAVYFSVYEFAKSRLSDRFGPNNPAAHASSGVLATIASDAVFTPMDTVKQRLQLTSSPYTGVAHCVRTVFRDEGLRALFVSYRTTVLMNAPYTAVHFSTYEAAKRVLGDMAVDEESLAVHATAGAAAGALAAALTTPLDDVKTQLQCQGECDCERFASSSI

SEQ ID NO: 321816 - protein, 130 aa, Zea mays
  unsure (1)..(130): unsure at all Xaa locations
  Clone ID: MRT4577_5655C.1.pep
PTYNVAFTFITDTTGGAGRLCVLMPHALDACGANATICHQCSQAHIASLHPPYLASKIATVCENPTVKPYRLQQELAASSIPLSPXRLNNTQPYSWGTHXMQTNEAQHMKELVLRVINQKGVANISQYYQ

SEQ ID NO: 321817 - protein, 62 aa, Zea mays
  unsure (1)..(62): unsure at all Xaa locations
  Clone ID: MRT4577_56560C.1.pep
MGRKFFVGGNWKCNGTTDQVEKIGKTLNEGQGPPSEVVEGXGSXPXXFLPXDKSQHRQEFHV

SEQ ID NO: 321818 - protein, 102 aa, Zea mays
  Clone ID: MRT4577_56561C.1.pep
MAPAPSPYARVMEDMVKGREYATQLKALLRESPEASRLVDRILHAISLTIQTASRAWRTWGTTTRSIWKTLCSAPSPAACMLLSTDGRTTTARPAVCWRRVG

SEQ ID NO: 321819 - protein, 115 aa, Zea mays
  Clone ID: MRT4577_56562C.1.pep
GRLGLSRPAGINDIAITSSVLLGLSEDNNRCLSRRVCCSNASQRGSIGRRMTAPRLRQPNWTSVKAEVDADNDPKATYYSIGERPTDTADMGARGYKDDLGKDYGTLTTGSVHPR

SEQ ID NO: 321820 - protein, 120 aa, Zea mays
  unsure (1)..(120): unsure at all Xaa locations
  Clone ID: MRT4577_56563C.1.pep
MRSRTHRVHYQPSTRRAPRDRTRIKKKALEMPYKEIRKFAQKAMFTTDDHIDVNLNKHIXNSAIRSVPRRVTVRMTAXRNDEXTDKDELYSLDTDAEIPPQGLTRLQTNDAQDEDETWIP

SEQ ID NO: 321821 - protein, 271 aa, Zea mays
  unsure (1)..(271): unsure at all Xaa locations
  Clone ID: MRT4577_56564C.1.pep
ILRGLPGSGKSYLAKALRDLEVESGGSAPRIHSMDDYFMIEVEKKVEDNEGSKSSTASKGRKQLTKKVIEYCYEPEMEETYRSSMLNAFKKTLDEGNFTFVXRSGYEVYLLEAPYKDPTGCAARNVHGFTLDDIKKMAGDWEEAPPLYVRLDTRSLFHGDNLHEHSIQEVDMDTEDNDDADDTAVNTQSGSSKKAILESADDIPDQGDKWDSSDEEDLDDIKELGQSKWSKDFDEDTDKSKHGRWKHILFLGWPRHMTLIKNTLLWGDRLE

SEQ ID NO: 321822 - protein, 95 aa, Zea mays
  Clone ID: MRT4577_56565C.1.pep
PRVRATPEPMELAGATPSAIQSRALLFSTRPNPRRTLPVTRTNSRLKTTQNILCIFEISFDSICELYIYYVVIRACCDSKFTCMRAMEFLVDICG

SEQ ID NO: 321823 - protein, 37 aa, Zea mays
  Clone ID: MRT4577_56566C.1.pep
TEPSTLMMAMSFLEDPRRWINLNIPLELMELATHWFL

SEQ ID NO: 321824 - protein, 120 aa, Zea mays
  Clone ID: MRT4577_56567C.1.pep
MEEGAPGPSQAIPDSGDTYRNSSTAPVGSSSPSVAKLRKLLFRRMLIGVNDGRYFHGLFHCIDKQGNIILQDAVEYRSARHCSPPTEQRCLGLILIPAACRSSCQVDCSVEEKMSLLCFE

SEQ ID NO: 321825 - protein, 78 aa, Zea mays
  Clone ID: MRT4577_56568C.1.pep
KKKKKKKKKKKKKKKKKRGDRIKDHRRIPPACYVLFVVLWSQITVHWCALYNVVTAEKPPRLPPFWPCSTSPFCRLVE

SEQ ID NO: 321826 - protein, 183 aa, Zea mays
  unsure (1)..(183): unsure at all Xaa locations
  Clone ID: MRT4577_56569C.1.pep
ESNLLRARSSSTCSPPLPCSSRPPPPPPXYATPSPXLAADRAHALIPLLLPKXPPNQSAPSPHPRPVPMDRXHLQQQQQCQXTTSXQPEPAPRRQQARPLHPQGHAAAAPAATARRKPPSPAPAAGLQHQQEPVPRHRPAAHRRYPVPTXPPQPHHQLAHRPPQPQPKTPSMRLQXIRPPPIR

SEQ ID NO: 321827 - protein, 117 aa, Zea mays
  Clone ID: MRT4577_5656C.1.pep
SDICRIISNKPLSSEESGLGPGGPREAQSIQLSATNCGAQTSVGRFSKSQAHQVHVKNNGWAKRSSLASLKIVSLLCEQSPPHLTNGAFSARRSTPCRCSMVPFAAVVVETLSSSVV

SEQ ID NO: 321828 - protein, 106 aa, Zea mays
  Clone ID: MRT4577_56570C.1.pep
FCVPEPISKFSLTLLHAHAHAHLPLPEGILSTMEEGAPGPSQAIPDSGDTYRNSSTAPVGSSSPSVAKLRKLLFRRMLIGVNDGPLLPTACFTCIDQEGPTSSLQG

SEQ ID NO: 321829 - protein, 79 aa, Zea mays
  Clone ID: MRT4577_56571C.1.pep
SFLLAGRDTVCWALTTLFRLLSKNPAVVAGMRAEDRDGDGHGDSATVSYEHLMRLHYSHAALYQTMRMLPPVQSDYKIC

SEQ ID NO: 321830 - protein, 121 aa, Zea mays
  unsure (1)..(121): unsure at all Xaa locations
  Clone ID: MRT4577_56572C.1.pep
GNLGSNMKSIIQGAPQGEVFFFPPPTPGVFLGGKPGGGGGVATSFWRGTKSKPPSPFLRGKEKVIVFPKSLGTPLKRVVWAPFQGVGIAQARVLELKRLGFFPVGWRTRSPTNRCACLXKD

SEQ ID NO: 321831 - protein, 98 aa, Zea mays
  Clone ID: MRT4577_56573C.1.pep
RGAVILLPLSGAPGLAGFRTSVVGAFESCRGGPLPFLRGPIHCPVLLGCPLGSRNRSKFLKWIKKAPRTLSVGNNRLSTRKKPTEKKKRKGGRQLVSS

SEQ ID NO: 321832 - protein, 313 aa, Zea mays
  Clone ID: MRT4577_56574C.1.pep
FPVDDKGTRETVVQYFLDKYDYRLKYVSWPCLQAGSDSRPVYLPMEVCKIVEGQRYSKKLNDRQVTNILRATCKRPQEREKSIRDMVLHNKYADDKFAQEFGIEVSSDLVTVPARVLPPPLLKYHDSGREKTCAPSVGQWNMINKKMINGGTIDNWTCLNFSRMRPDEVQRFCMDLTHMCNATGMVVNPRPFIEVRSAAPNHIENALRDVHKRATQILAQQAVGNQLQLLIVILPEVSGSYGKIKRVCETDIGIVSQCCLPKHASRPNKQYLENVALKINVKVGGRNTVLERAFSHDGIPFVSEVPTIIFGAD

SEQ ID NO: 321833 - protein, 144 aa, Zea mays
  unsure (1)..(144): unsure at all Xaa locations
  Clone ID: MRT4577_56575C.1.pep
PRVRSYDTIDNVKAKIQDKEGIPPDHKRLIFAVKHLEYGRTLADYIFYKESTLHLVLCLTDDMHIFCETLTVNTITLEVEYSDTIXDCVKAKIHDTDGISPDQHRLIFDGKQLXDGRSLADYNMHNESTLHLVLRLMSGMHIFL

SEQ ID NO: 321834 - protein, 162 aa, Zea mays
  unsure (1)..(162): unsure at all Xaa locations
  Clone ID: MRT4577_56576C.1.pep
SVEDGRTLXDYNIXQKESTLHLVLRLRGGMQIFVKTLTGKTITLEVESSDTIDNVKAKIQDKEGIPPDQQRLIFAGKQLEDGRTLADYNIQKESTLHLVLRLKGGMQIFVKTLTGKTITLEVESSDTIDHVKAKIQDQDGIPPDQQRLXIFARKQLDDRRTL

SEQ ID NO: 321835 - protein, 63 aa, Zea mays
  unsure (1)..(63): unsure at all Xaa locations
  Clone ID: MRT4577_56577C.1.pep
SFPASDPXGKLFMGIQNPAWYQILSLRADEPMDIIFNVVSYIWSPSFLSTAPPPPPPPXQKKG

SEQ ID NO: 321836 - protein, 366 aa, Zea mays
  Clone ID: MRT4577_56578C.1.pep
MVAIENQNQSQAAVAVAAEAVPAPASRIPREARRLLHELAAAWADVADCRALEVVPLKGAMTNEVYQARWLTAGPAGQKEEPRAEREVRKVLVRIYGDGVDLFFDREDEVRTFECMSRHGQGPRLLGRFPNGRVEEFIHARTLSAADLRDPEISALVASKLREFHNLDMPGPKSVLIWDRLRNWLRTAKSLCPPEEAKEFRLDGLENQVTALENECSGDYQWIGFCHNDLQYGNIMIDEETNVLTIIDYEYASFNPVAYDIANHFCEMAADYHSSKPHILDYSRYPDVDEQKRFVKTYLNISGEEPDAEVVENLLQSIEKHTLASHLVWGLWGIISDHVNDIDFDYKEYARQRFEQYWHKSAILTS

SEQ ID NO: 321837 - protein, 98 aa, Zea mays
  unsure (1)..(98): unsure at all Xaa locations
  Clone ID: MRT4577_56579C.1.pep
SVGTTPILVQLFEPLRHQGGLSTTPYCSPHSQTTRPXCFQHLRHVXPQHLHHTIFCLVLQSILKQYSQICHFKNADGTAYSPLTDVYVPPASDDLILL

SEQ ID NO: 321838 - protein, 222 aa, Zea mays
  unsure (1)..(222): unsure at all Xaa locations
  Clone ID: MRT4577_5657C.1.pep
KKNKKKKKKKKKKKKKKKKKKKKNLARDTTFLSVGRLLEGFGVGVISYVGPVYFAKIFPNNMRGAFGAVNPLFETFGVLFSYVLGLFFLWRFFALIGTLPCLLWGVGLFLIREFPRWLARMNMMDDCEIFLQVLRGFDADITEKVNDLKIVVASANKSGTVSFKELNQKKYRTPLILGMGLLGLKQLRGINCIXFYLGSILKAAGLNNRNLNTCFIGAIWVF

SEQ ID NO: 321839 - protein, 128 aa, Zea mays
  Clone ID: MRT4577_56580C.1.pep
ITLGFHNTCSYHQTIKFTFLTSNPNLTITTFFSFSNLNKNPSCTTTLNPIFFSHLHFTKYFFPSLLSQTFTLTPIIVFSPPSTIYFFQFFLFPSLSFSLLLFSNSTTHFNNFLSFFFLSNKQTSFYIF

SEQ ID NO: 321840 - protein, 90 aa, Zea mays
  Clone ID: MRT4577_56581C.1.pep
VKKHGDWRLHASVKLVSCATYPKFNALNLTHLPLIKRWKLISQRACTTPSYGGVTEYYKGDARVKCPPEHHLPWIRRRCMSPAYKQGLML

SEQ ID NO: 321841 - protein, 372 aa, Zea mays
  Clone ID: MRT4577_56582C.1.pep
ETEHNFLRVEILKLLQPNVMGIDFMKINLANMGDLRAGTKSWSQEHDFQLRLIFLRFFAQILSGYRNFIDTTSATGFNSQAFLKKRSRATNQPVDSMSMIMQFLETQGFLDYLERCNTAEENAHNLLDKLQDATGRGQNPLTIFPSQVSDPEIITIANPEIEGLDNRHCYKRFPANARTEEQEEKRKSILALASGASKQVPSSPSIRVNGGPKAESLSPRERAAERERMVLDIKVKLQGLWLRLLRLGATEDPLSSFEYGTILALIESDAEGIGGSGFVECIREHIHSGWQCRLTDEQFIAVKELLKMAITLANSRNDLATIRDALEVSAEMYRKDPNNVQDYVQRHLLSLSVWEELRYVILSVKTIISVLN

SEQ ID NO: 321842 - protein, 90 aa, Zea mays
  Clone ID: MRT4577_56583C.1.pep
MGLRIEMATFDAEYRCLVCNLSWATEDHSLHNTFNTYSKVLKLKSILDLYTHRSRGFSFVTFFTDEAMRNAFQGINGKELDGLNITVYEA

SEQ ID NO: 321843 - protein, 55 aa, Zea mays
  Clone ID: MRT4577_56584C.1.pep
ARIAYITTCIHSYIIKHNHVSCIQLYKGSLIIYLQLAVKMLLCTAPLRFFLTLHL

SEQ ID NO: 321844 - protein, 97 aa, Zea mays
  unsure (1)..(97): unsure at all Xaa locations
  Clone ID: MRT4577_56585C.1.pep
MSCFSAMTTTTVGRGTYYYSSSPGRSRGGGGGKRPWRRWLAKCAGIAAAVGSRLRRSVVRAVDGGRSAHAAVFVLIRSRGXVPPPPPRSTKLRPVYV

SEQ ID NO: 321845 - protein, 130 aa, Zea mays
  Clone ID: MRT4577_56586C.1.pep
NGTYKRRAPQGINPPPLNKKTKVFNLANVLWGGKKFKNPEKKKTPPQKAVGVKKGMAPGPPKKTPPKGLGFIQKIWEKNPFGRAGFPNILTQLGGFFAQGQGTPGKKGPAPPKKLNPKNLPPRPQTRRFF

SEQ ID NO: 321846 - protein, 54 aa, Zea mays
  Clone ID: MRT4577_56587C.1.pep
GIEPSAALPLFAVRFRLRKLLNELNDAMCCVLQMSDCTNTGSYSYAIHTEPSET

SEQ ID NO: 321847 - protein, 61 aa, Zea mays
  Clone ID: MRT4577_56588C.1.pep
NKGSIFICGPRPTSFNLEGPHHQIGHKKVKKKCLKNAPKIGAFFQLIGHQPGFFAPPGGFT

SEQ ID NO: 321848 - protein, 66 aa, Zea mays
  Clone ID: MRT4577_56589C.1.pep
FTGVQQGVVAGVFQSSLTGERRALKNSQIMYEAGLALLWIDRRLHGLRRDCLTQSPLPHLPTQTQT

SEQ ID NO: 321849 - protein, 113 aa, Zea mays
  Clone ID: MRT4577_5658C.1.pep
SMVIAPNSILHLPTTKHTRPLSIFQALTGSCSMNPNSLDVKASADATISTPKHAPYTTSIHIDVAAKQSDIDKTEEDKYDALTSTANQDPASTTDPKHIAGHFTTYEFADITA

SEQ ID NO: 321850 - protein, 119 aa, Zea mays
  Clone ID: MRT4577_56590C.1.pep
SPPFQWSFTGGGGEGPKPPPPPPGGLAIPFCRRPPRFSIWAVGGGPPPKIFCLVPPWGPRGLRFRFPPRLLFGPVCGFPFFPGRAFTHATPKFGPPSPPPGPGGRFFGISPFHRGPGRV

SEQ ID NO: 321851 - protein, 93 aa, Zea mays
  Clone ID: MRT4577_56591C.1.pep
PFDMDGDPALPYYHHGDLRDLIPLQRARWLSVTVAVSEDMHSPTDTGSLPCTCLECHAHHLVCTAVYLNRSLFTAWWSQIALVLSNLNQETLV

SEQ ID NO: 321852 - protein, 65 aa, Zea mays
  Clone ID: MRT4577_56592C.1.pep
MCSCYIQIVKENQMLHKGSVEIEDDFATLADKSIFPGDFLWVRDSEIYENRDIADEISEQKDDML

SEQ ID NO: 321853 - protein, 141 aa, Zea mays
  Clone ID: MRT4577_56593C.1.pep
MAQTSSYFMLISCLMFLSQSQGQEAQTELPQARISCPEGTNAYRSYCYYFNEDRETWVDADLYCQNMNSGNLVSVLTQAEGAFVASLIKESGTDDFNVWIGLHDPKKNRRWHWSSGSLVSYKSWGIGAPSSVNPGYCVSLT

SEQ ID NO: 321854 - protein, 66 aa, Zea mays
  Clone ID: MRT4577_56594C.1.pep
HIYNWHTLPYHFVILYLHHPLDALIGRSIGIQKKGHLNTANESMYNEGNKFFLQAQPPKDANFFFP

SEQ ID NO: 321855 - protein, 231 aa, Zea mays
  unsure (1)..(231): unsure at all Xaa locations
  Clone ID: MRT4577_56595C.1.pep
GRGHTSRCKINETDVSHQMLHMVGFIPQXEVHEKVNDISXPAEDELRIDRLHLAQAETKKIRPQYERTEKQAAPRXRSYYSMQVNASRIIVLQGQDXLIIQMTGDAMNELLLVSHNHHEHDNLLKDXIIIQXLLRWKEPAVLLRCPKEDLSSXESVLHCWKHEYASKADGHGPETCADRDGYLPXPAEGSHDAHGQYRSGGIVLSSRDGKIVSETHLTXRXERVFRKKLPE

SEQ ID NO: 321856 - protein, 41 aa, Zea mays
  Clone ID: MRT4577_56596C.1.pep
STGVCTTVTIWRKLNQGASSTNVDTLSARVFRCLIPSDTLP

SEQ ID NO: 321857 - protein, 94 aa, Zea mays
  unsure (1)..(94): unsure at all Xaa locations
  Clone ID: MRT4577_56597C.1.pep
MAASTAKXXEDVNPHNFVKANPANLKAPGRMNLPNWFTIVRTARFKDLPPXDPEWXYIRAASVPGNIYLTKHLGLGXVHKIYSGRHRKRSHPNH

SEQ ID NO: 321858 - protein, 62 aa, Zea mays
  Clone ID: MRT4577_56598C.1.pep
LDVHRAYDILNLSIFLGVMLSLLVPPLYEKYQDEIDEKVGVAYSVLSRHIDTIITRTRQSAK

SEQ ID NO: 321859 - protein, 60 aa, Zea mays
  Clone ID: MRT4577_56599C.1.pep
WDLSVIGTRSPFRPPSRPNSLDSPKPWPPIGFGEENQIRMFLGSFPRGPTKEAAYKQLRS

SEQ ID NO: 321860 - protein, 188 aa, Zea mays
  Clone ID: MRT4577_5659C.1.pep
GGTARRTRAGIVEAVDNLTLRRFLRARDHDVDKASAMFLKFLKWRREAAPGGSVPEEQVRRELSQDKLCMGGVDRAGRPILVAFAARHFSAGRDMAEFKSFVVYFFDKICARIPRGQEKFLCIVDLKGWGYSNCDVRAYIAAIEILQYFYRLTRYIQRRRLLPRLLNKSPVMMTLATRPLNLMSFQSF

SEQ ID NO: 321861 - protein, 106 aa, Zea mays
  Clone ID: MRT4577_565C.1.pep
GRGPSPTILTPAPLLRPPPPSAAAPQSVSTLCRTSAATAPPSLPRLLQRRSTGEVISSSTPCLDDSLHFCSRSSPNIYLSLLGSLLFFSSAQVPYLIGTAVFLLPN

SEQ ID NO: 321862 - protein, 182 aa, Zea mays
  Clone ID: MRT4577_56600C.1.pep
FQHALGPVSALCELGEGAARGIHIGSAKARRQRACAGARHLHVGGHGVVWWNGRLLHLWLGKSESAALAVCAVKRRHVQVHMLHYIVHWQTAEVRTVRVHRDPSHGVEAHPPLTIFRIAQPSQQVGSRVPQHHRSGIAPWRCRSTPQRHSACGVVQAGGITGTPPASARAEDGWNILGGGGR

SEQ ID NO: 321863 - protein, 78 aa, Zea mays
  Clone ID: MRT4577_56601C.1.pep
NNFFFISWTREQALSKHWPPRKVKSPLLLGKPLANLQGSGFYPGLGLGYLTHPRINFYPNFWALNFYLEKKEKWASSL

SEQ ID NO: 321864 - protein, 94 aa, Zea mays
  unsure (1)..(94): unsure at all Xaa locations
  Clone ID: MRT4577_56602C.1.pep
KSLAHPYYNRLPQLQRXPSCQPIPKMEFHSHRXKNDQLGIQXLIFTDITYYKSQLLNDNINSTXKTNTVYPTTPYHFTRAFTNIYENGGTSGAY

SEQ ID NO: 321865 - protein, 60 aa, Zea mays
  Clone ID: MRT4577_56603C.1.pep
GNVSPKSQEMLSRRTIWGVERVLQLHNQFPSQHSFPFPLYNSHSDVIRMVVMGLIRHTGD

SEQ ID NO: 321866 - protein, 46 aa, Zea mays
  Clone ID: MRT4577_56604C.1.pep
SPEGTTGQSYNQYSQRCHQRTNTNVNCPIECLMPLDVQADREDSRE

SEQ ID NO: 321867 - protein, 76 aa, Zea mays
  Clone ID: MRT4577_56605C.1.pep
RVVICVIVHINTVVEPRPLPQYNGTYDQDPTLNVWCAIGGARLRNLADSQPRPHQTDRLDEDGAPRQQLALGSVNA

SEQ ID NO: 321868 - protein, 74 aa, Zea mays
  unsure (1)..(74): unsure at all Xaa locations
  Clone ID: MRT4577_56606C.1.pep
MMPNTFAVCAVNATSVSAGSXSFXIAHCLQQYLSSMIAAGCEYPAIQSYTVQEAILASIIRLLALSQQQPVALL

SEQ ID NO: 321869 - protein, 279 aa, Zea mays
  Clone ID: MRT4577_56607C.1.pep
MENPAPSIVVPPIAAPVSANFSRLAFRNLYIRRTGPDSREMVTVEGRRGSSDQTGDMRLKGSTLLTEGVVTDGSDEWAIYGGTGEFAMARGVVKRRYLADRDGAGNTDELSMQVFCPVFGSSQQPNKQDSTISVTKIGLWGGEGGSAQDITTTEPPQRLHSLTVRASAAVDSIEFTYTDRGGQRRAAGRWGGLGGNLRTIDLGDAEDVREVSGTYGTFEGATTLTSFRILTSSRTWGPWGVENGTRFCITAPVGSSIVGFYGRATSRLVAALGVYLRRL

SEQ ID NO: 321870 - protein, 388 aa, Zea mays
  unsure (1)..(388): unsure at all Xaa locations
  Clone ID: MRT4577_56608C.1.pep
MMENRTPSIVVPPVPSAVSVHITRPANRSEHSSQSQPADRVRRNVEECACIVRCSIVAVMENPAPSIVVPPIAAPVSANFSRLAFRNLYIRRTGPDSREMVTVEGRRGSSDQTGDMRYVSDFPVYDGRGSDAVLVARVQGVTTTFGNSNQFFTVAFEAGSRLKGSTLLTEGVVTDGSDEWAIYGGTGEFAMARGVVKRRYLADRDGAGNTDELSMQVFCPVFGSSQQPNKQLHVLCRTPASLXTKIGLWGGEGGSAQDITTTEPPQRLHSLTVRAGGAVDSIEFTYTDRGGQRRAAGRWGGLGGNLRTIDLGDAEDVREVSGTYGTFEGATTLTSFRILTSSRTWGPWGVENGTRFCITAPVGSSIVGFYGRATSRLVAALGVYLRRL

SEQ ID NO: 321871 - protein, 37 aa, Zea mays
  Clone ID: MRT4577_56609C.1.pep
LSLMLKKKQDASSCSHETSIGTHHQTPLELGIKLQLK

SEQ ID NO: 321872 - protein, 116 aa, Zea mays
  Clone ID: MRT4577_5660C.1.pep
GNAGGEHHHRINMDKYHPGYFGKLGMRNYHERKNKLFNPVLNLDKLWTLVSEQSRLKYASATDGKVPVINIVKAGYYKLLGKGKLPKQPVIVKAKFFSKTAERKIKAVGGACVLSA

SEQ ID NO: 321873 - protein, 368 aa, Zea mays
  unsure (1)..(368): unsure at all Xaa locations
  Clone ID: MRT4577_56610C.1.pep
IDATVVAIADDLDDSDCRRPLLAQNEEXTSTQSPLTVSTPPLDAAANAXEEQRKPERVASLDVFRGFTVAMMILVDXAGGAWPGINHAPWFGVTVADFVMPAFLFIIGVSAALVFKKMANKTAATKKAAIRASKLFILGVILQGGYIHGRHKLTYGVDLDHIRWLGVLQRIAIGYFVAAMSEIWLVNNNLVCXLFHLLXIQCGVRGSLGPPCNAVGLVDRVLLGENHLYKNPVYKRTKXSSKKLNDVYFLLFFSLHQKSLIFYRTEILXPYPKHKITSFFFXSSXECSINSPDYGPLPPNAPDWCLAPFDPEGLLSTLMAVVTCFVGLFFGHVLIHCKXSFTANANMAASFCGADNLCVFSAIIRHAF

SEQ ID NO: 321874 - protein, 462 aa, Zea mays
  unsure (1)..(462): unsure at all Xaa locations
  Clone ID: MRT4577_56611C.1.pep
MEIVRSHRQVAAAASGGVNSCAGALPTYKAAPQLEVRLEEFELFAIDRLRVLKGISDGLSRGKRPEEVEKLVNELWKTHMGHQDPAETLNKDIISHFVLRLVYCRTEELRKWFLSMETTLFRYRFRLENPESQRMLMTEFQLPYKALPHSEFEAVKDKLSQVARSIGQSANVDHVFFKVPFEQVPDLVAGRRVFLSKGYAYVAMSQVVSLVVTQFRCNISKALALTNRKWTATIKEQEKDRLTPIVEALSNAYFGPDYSQPKDAVDISLKDIDQLAKSSFPLCMRHMLDKLRENHHLKHGGRLQFGLFLKGAGLKLEDALAFWRAEFSQKIGSERFDKEYAYSIXRHNYGKEGKRTDYTPYSCQNIISATPGVGDHHGCPFRHFGEENLRAALNKMGVGGHALEEIIDKVKNRHYQLACTLTFETTHGVSCDSGINHPNQYFSESQKVLRAKNQKMESQSAT

SEQ ID NO: 321875 - protein, 91 aa, Zea mays
  Clone ID: MRT4577_56612C.1.pep
RPRTAFSVVQSAHTSKYHAVTDTIDTSWLKKFQPKLQFIIKHHSSSKLFKRKHHSRKMISCMIYIHIYEDTFCSNSMAHAGMQPVSKAKKI

SEQ ID NO: 321876 - protein, 132 aa, Zea mays
  unsure (1)..(132): unsure at all Xaa locations
  Clone ID: MRT4577_56613C.1.pep
PASAERFDKXYAYSINSXKGKEGKRTDYTPYSCQNIISATPGVGDHHGCPFRHFGEENLRAALNKMGVGGHALEEIIDKVKNRHYQLACTLTFETTHGVSCDSGINHPNQYFSESQKVLRAKNQKMESQSAT

SEQ ID NO: 321877 - protein, 89 aa, Zea mays
  Clone ID: MRT4577_56614C.1.pep
IPRAAGRHFGEENLRAALNKMGVGGHALEEVMDKVKNRHYQVACTLTFEATHGVSCDSGINHPNQYFSESQKVLRAKNQTMESQSQSAT

SEQ ID NO: 321878 - protein, 64 aa, Zea mays
  unsure (1)..(64): unsure at all Xaa locations
  Clone ID: MRT4577_56615C.1.pep
DAGFVRADQIDLKSLDDQLXRHLGRRADVGVGLPSGTGSRCCESAMLGPDELTPLRRCREDWEI

SEQ ID NO: 321879 - protein, 74 aa, Zea mays
  Clone ID: MRT4577_56616C.1.pep
APPLFSLQPPSLFPLCWSSSLSPLCWPPSLSLLWCCYPKSGARWALPWWLGERKKEGEEGKVRRSRGISFSFRW

SEQ ID NO: 321880 - protein, 93 aa, Zea mays
  Clone ID: MRT4577_56617C.1.pep
QQFFPSTPVAACHFPACVHRTLSPFSKLGVVSPVAFLAQQRLCRLSLHVAPKVGTLLHRQQLLPFNQHVLTNPTGFYQQPIIGGALFYIAYEL

SEQ ID NO: 321881 - protein, 74 aa, Zea mays
  Clone ID: MRT4577_56618C.1.pep
GRVDANGLSVTVMSLFKSIAPAAAGTVFSWAQERQHAFFFPGDQMVFFLLNAIELLGLVLTFKPFMAAPESRAA

SEQ ID NO: 321882 - protein, 77 aa, Zea mays
  Clone ID: MRT4577_56619C.1.pep
WSHRLVPGMIKMVTHRVSTLTFGLTKAQMYYLHGWRFGMFYCSVQMLVHGSSGLYSTEYAPPLGPSLAEAHEDASWS

SEQ ID NO: 321883 - protein, 57 aa, Zea mays
  Clone ID: MRT4577_56620C.1.pep
CHCFMVMMCLYFVGLQSLDAFALINFGQVTIYNVGLDAPHLHAEGCSTQLLNYFVWM

SEQ ID NO: 321884 - protein, 58 aa, Zea mays
  Clone ID: MRT4577_56621C.1.pep
TALESASEKNVKCTHDRPSQGFARGLTIPSSVECLVCPSAMTRPVHRLFISNHVEPIR

SEQ ID NO: 321885 - protein, 56 aa, Zea mays
  Clone ID: MRT4577_56622C.1.pep
ICPPRREIRSSGVVVLKVFQSIATADHEPLALLQGAMVYLSLRRWSVLLFVCRGPS

SEQ ID NO: 321886 - protein, 187 aa, Zea mays
  unsure (1)..(187): unsure at all Xaa locations
  Clone ID: MRT4577_56623C.1.pep
MTVLRRPTPGTAQCFGRKKTAVAPAHAKAVRVLIKVNGVPIELIRPEMLRLKGFEPILLVARTRFKDIDMRIRVRDGVKTSQIYAIRQGVAKGLVAYYQKYFDEAGXKEIQDIFTRYYRTLLIIDPRSCEPXKRLGGSVARLQGPENKYDELCDCSLSSFHHRLQVFCLFAIHGSAYLGLYLTAALP

SEQ ID NO: 321887 - protein, 55 aa, Zea mays
  Clone ID: MRT4577_56624C.1.pep
QVSRSCSLEYCFSVIVWKFHPMIVLHALVSYIPYPQQMGKGSLPKGRESIVLSVV

SEQ ID NO: 321888 - protein, 74 aa, Zea mays
  Clone ID: MRT4577_56625C.1.pep
RENKEELLILLASALSKRFLLVLDDLESPSIWDNLLKDSLGEIMLTCTYVGGDAIQMHALIVQRVARLAYSSAT

SEQ ID NO: 321889 - protein, 707 aa, Zea mays
  unsure (1)..(707): unsure at all Xaa locations
  Clone ID: MRT4577_56626C.1.pep
GLKLCFMSTPDGENCGLVKNLAVTAIVSSRVMQPLIESFISCGMSKLNDIPTEHIQRMDKIFLNGNWVGSCENSASFVFRLRCMRRSSLIDXSRPGLVWPHVSFPCNQKTEGQCAPEGQKNRKQKIMRITTIILDVEIKRDKHHNEVRVFTDAGRILRPLLVVENLNKIRKXKGRSFSFHELMQQEIIEFIGVEEEEDIQCAWGIRHLFESEGAISSYTHCELDPSFLLGLSCGIIPFANHNFARRVLYQSEKHSQQAIGYSTTNPHIRVDTLSHQLYYPQRPLFKTVIADCLGRSDYASFGRKNDFARPEYFNGQNAIVAVNVHQGFNQEDSLVMNRASLERGMFRTEHLRSYKADVENKDGTKRLKLKEKIDFGKTESKRGRVDNLDDDGLPYVGASLQTNDIVIGKVSESGEDHSIKLKHTEKGMVQKVLLSANDEGKNFAVVTLRQVRTPCLGDKFSSMHGQKGVVGFLESQENFPFTHEGIVPDIVINPHAFPTRQTPGQLLEAALGKGIACKGTMRYATPFTTASVDVIAEQLHRAGYSRWGSENVLNGRTGERVQSLVFMGPTFYQRLIHMSEDKVKFRNTGPVHPLTRQPVADRKRFGGVKFGEMERDCLLAHGSAANLHERLFLLSDFSQMHICQTCERVANVVMRSVPGGKKIRGPYCGFCKSSENIVRINVPYGAKLLYQELFSMGICLKFETQVC

SEQ ID NO: 321890 - protein, 86 aa, Zea mays
  Clone ID: MRT4577_56627C.1.pep
GAWCGWRFLLCSRALVFLRRSWWPGPRSRPCRGVSEGVWAAFMGALSALVSAVVAVPGLLVSVGSGFCRRWVLSPAPAIVSGACQT

SEQ ID NO: 321891 - protein, 73 aa, Zea mays
  Clone ID: MRT4577_56628C.1.pep
ARLLQLIFFFSWPGNFCLGPMVDVGLNRPALVVVPDTEPVIMHTVYYAKNAGLIGSGSHGLFVPITDKRSLST

SEQ ID NO: 321892 - protein, 240 aa, Zea mays
  unsure (1)..(240): unsure at all Xaa locations
  Clone ID: MRT4577_56629C.1.pep
MAMAMAEWWAAATEAVAVYTGLTPAAFFTAVAVAAALYVAVSGLLARPAQTSSRRQEEAAEERAFEPLPPPVQLGEVTEQELRTYDGSDPKKPLLMAIKGQIYDVTQSRIFYGPGGPYASFAGRDASRALAKMSFEASDLTGDISGLGPLEVEALQEWEYKFKSKYVTVGIIKKTVPFSEGDAARSDVTTERDIVAGIVESNSVPEPEEXNDXPRECSREDTESPDIDNTSSHEDAKKAK

SEQ ID NO: 321893 - protein, 50 aa, Zea mays
  Clone ID: MRT4577_5662C.1.pep
ICRGIYLFFVVQLGSVAPLALVGSSYASAALYRCSALSHTLRWGPPARPS

SEQ ID NO: 321894 - protein, 85 aa, Zea mays
  Clone ID: MRT4577_56630C.1.pep
SSQFGRQTRRAPRSLEIGEISPCCDQARRSACAKSGGPDVLRSRSASIACEPRRSPHKLLLARLRITPAASIIMNWHPRPASRYP

SEQ ID NO: 321895 - protein, 74 aa, Zea mays
  Clone ID: MRT4577_56631C.1.pep
MSTLSLLTGQGLVSAAPIHLKELYYLTYRHWPHTKRLMHCTAVFFFASTYADEDTLYRKGTTPALFDPLITKIC

SEQ ID NO: 321896 - protein, 100 aa, Zea mays
  unsure (1)..(100): unsure at all Xaa locations
  Clone ID: MRT4577_56633C.1.pep
TWPWAYKSGFQVWDVEHXDDVRQLESRHDGAVSFIQVLKDPIFTTESGDRFADTRPLLALACEGTHTGSGKNHDTNVPVFDGTNGAFHSIGGENLPTVLL

SEQ ID NO: 321897 - protein, 84 aa, Zea mays
  Clone ID: MRT4577_56634C.1.pep
CAPDTIYQIVHLVTRMTKGNIPVGGRTSIWGLGFKNRGNCVTPKRMDCTVFPGIRVYRAFSVSRITDPWPNLERLAGELIWNES

SEQ ID NO: 321898 - protein, 35 aa, Zea mays
  unsure (1)..(35): unsure at all Xaa locations
  Clone ID: MRT4577_56635C.1.pep
PRIRGRVGSRLGSTSVGAKLCPYIILXPYDMRYML

SEQ ID NO: 321899 - protein, 185 aa, Zea mays
  Clone ID: MRT4577_56636C.1.pep
STAIAAAEAASSAKADALAAFPSLTLNAKEEFEWLKKEYTVHEQVVFGKIKEGAIMAIEHPGIAAGSTAIAGIVLFKRPRSYLIQRVRRIFVSKETLLSGIQAGVNHMRQTVNLVSNESQKLLDRAATAEKRFQKGWNTLREEGRAIQSELNQISDIEKQAVGLKSILNQLPRAHASEFQSEISG

SEQ ID NO: 321900 - protein, 52 aa, Zea mays
  Clone ID: MRT4577_56637C.1.pep
CFSLTSIDGVFVRRGAIITTFIVCYALTSFISGYVSGGLYSRSGGMVLHTFL

SEQ ID NO: 321901 - protein, 82 aa, Zea mays
  Clone ID: MRT4577_56638C.1.pep
IHKLRNSGQRIEIRGHQKKIIKLNERESKLWILKQGAAISLFYFLILLVFFCLFFYLLCFYCYFIYFSYLYRINHVNSYRLM

SEQ ID NO: 321902 - protein, 92 aa, Zea mays
  unsure (1)..(92): unsure at all Xaa locations
  Clone ID: MRT4577_56639C.1.pep
SLTTLKNKEPNRNLXKDRQQAXNEAKMNYAELIRRNPLININNSGSFNVNKMLDDNYLFNNQTLRXTNTPKLFINDTIKSDFHRKFLQKYIK

SEQ ID NO: 321903 - protein, 71 aa, Zea mays
  Clone ID: MRT4577_5663C.1.pep
PKLPWEVRIPSFYSTHLYLQMVQARHPKNLFFDKPCGPLLQLEIFFAPATIYLKQQIPFLSQQTTHQSEKK

SEQ ID NO: 321904 - protein, 139 aa, Zea mays
  Clone ID: MRT4577_56640C.1.pep
WPFSSMVPWPHAGGGSEAAECADALHAGAAGRGRRSDLGGARGAGASDWGRHEQRGWRWVGLGEDEDEAGELGFLRGSIPIHRMGFLRGSKRDWFAARSRVNPFSLFPLTNGSIEWPFRLGGLPASWLSTAPHMADTSR

SEQ ID NO: 321905 - protein, 446 aa, Zea mays
  Clone ID: MRT4577_56641C.1.pep
MDAHAVDIPSLAEELRKELATADALAARSASLYPVVIAEVGPRTRNVCPEDYDPSHVSIGPYHHIKNPKLVRKQDKIRSLSTVMSAAARVDVKSYIDVVAGIEAKARSCYANTFDNHIDSNDFVRMLLLDACYVLVNFGGIGGGGHRGSDMMEDVGVVRDVIYLAENQIPFFVVDEIRKLTIPDGGGGSAPDAITVYVRNLLRELQYSVAMPAVAEPPGPDNLLHLLHMHLMPTVALPSSRSTVGTGKPRRFGRWRSATEYYCAGVGFRSRPLGGKGARSILEVKLDYYGRTLEIPHLKIDAETSRLLRNLMALEQSNPEEVGSHVTAYCVFLSQLAGTVQDVELLSRRGIIAHGLGSHNEVATSLANLCKGIAFGGDDPDSNYLRATWEGLEESFRSRPRRWAAWLMLKYFRNPWLAVGLAAAGVGLVCTVVQAVYAVLAYTSNP

SEQ ID NO: 321906 - protein, 116 aa, Zea mays
  Clone ID: MRT4577_56643C.1.pep
VEGAQPPQGPSEVGGQAQGPVHPRPPPEIGGVRAPGLQGRAQHLFCLLGPICFRIKIFQSVNLYIPPGSCHMMVWLGTRLSRGFLFSLSFHSVNFSHRGGGACCFRFWVRFPQFTR

SEQ ID NO: 321907 - protein, 173 aa, Zea mays
  unsure (1)..(173): unsure at all Xaa locations
  Clone ID: MRT4577_56644C.1.pep
SPLQGDVVFEANAIGWAPSGARTALSLRHERDPARLPAAAVGGERTPSSGRYVLAAGRGGEEDGLRQAIPPGALRPRVTYRVAGWASVXSGGGGGGGGGSPPAVPPHPVPVSIRVDDGVVVECGAVACSAAFDSDFGAGAXGCXRWAEIKGAFRLRESPRSAGGHVDGAPAGV

SEQ ID NO: 321908 - protein, 100 aa, Zea mays
  Clone ID: MRT4577_56645C.1.pep
MDGEQAARWAAAQEGVPVGADLVAAALRQLRFLAAVDRRRWLYDEGPLLDRAIRRYKACWLPLLDKHTKGVVVDGPLVVPLDCEWIWHCHRLNPVQYIRD

SEQ ID NO: 321909 - protein, 53 aa, Zea mays
  Clone ID: MRT4577_56646C.1.pep
MLVQFSLVGMAMGRVEKKPAKSARDHTRGCNSKPTREPVRFRVGFESPVCFKP

SEQ ID NO: 321910 - protein, 153 aa, Zea mays
  unsure (1)..(153): unsure at all Xaa locations
  Clone ID: MRT4577_56647C.1.pep
GXXSFSSGGAPTTTVGGGALAPTVARGGRRTFPPFCFSVFVRAVFLPRACSHAPILLLLPPFLPPGFDWGCDNSVTHPFMNQLGHQRVACLPQSPLVLLVASPSYSTFLGAIVGXNHCGPTASATFASYTLLTTFSNTCFLLSTTSLACTPPS

SEQ ID NO: 321911 - protein, 96 aa, Zea mays
  Clone ID: MRT4577_56648C.1.pep
WLVFSSARISYSLLLRNLDRCMMRMILKSLTMTWLVRSWISFLIYYLVRLIFSSICDAARRSYLNCPPRFICNRWRQPQVNMDSVFVNTRGFPSAD

SEQ ID NO: 321912 - protein, 96 aa, Zea mays
  Clone ID: MRT4577_56649C.1.pep
VTTRARPSHKCAGLLAVKPLVRTFVMIKPGGVQRGLIGEIMSRFEKKGFYLRASVLVNLDRSVAEKHYTDLAFKPFFQGLLGYLISGPVAAMDWEG

SEQ ID NO: 321913 - protein, 64 aa, Zea mays
  Clone ID: MRT4577_5664C.1.pep
ETHPAYSVPLEGADGSRVKAVAVCHTDTSKWNPKHLAFQVLKVQPGTVPVCHFLPQDHVVFVPK

SEQ ID NO: 321914 - protein, 36 aa, Zea mays
  Clone ID: MRT4577_56650C.1.pep
FATGPVFSFLGSFGLLAVVAYSYPGKSTLAVAGPAP

SEQ ID NO: 321915 - protein, 126 aa, Zea mays
  unsure (1)..(126): unsure at all Xaa locations
  Clone ID: MRT4577_56651C.1.pep
KNKRISKGKKGGKKKTVDPFSKKDWYDIKAPSVFSVRNIXKILVSRTQDTMIASEGMKHTVFEVCLPDLHGDEDHAYWEIMLRAEDVQGTNVLTNFCSMNFTTDXLTSLLEKWYTLIERHVDVETT

SEQ ID NO: 321916 - protein, 81 aa, Zea mays
  Clone ID: MRT4577_56652C.1.pep
SNSIQIKSTCVFYSNMLGQPLNHHILHSILWCKSFTLILTSYLSYFLSYFILSKTYILQILVKANFAILCKASISLQCLCL

SEQ ID NO: 321917 - protein, 88 aa, Zea mays
  Clone ID: MRT4577_56653C.1.pep
GQCRLWRVTPTCPLWSIGLWRASMEEVVINRCYSYGVVDREHRVCSVGVDPFGFHAMCCWYATAKMEMRVSESILVLPCVVSVPPLQR

SEQ ID NO: 321918 - protein, 155 aa, Zea mays
  unsure (1)..(155): unsure at all Xaa locations
  Clone ID: MRT4577_56654C.1.pep
PKKKNDGENRRTGRKRKGKKGKQRAQGERQRKRAGRXTTTTPAVKKPQKGGPNRQKGRGKKRGKGRQRAGQIGEKTRVGQKGEGYKGAKKGKKRGLKRQKGGKKKGQMEMENNGKKRPKGPPKRRAKRPPKGRKXKKPPKGGNGKRKNKFYIYFF

SEQ ID NO: 321919 - protein, 129 aa, Zea mays
  Clone ID: MRT4577_56655C.1.pep
HSYHCAGLRMDYQGDNLRDFFQTNGRKVLQRAENNYSLKYFTENEIRNITDGYKSVLGRGAFGEVYKGTLEDQSSVAVKRYIHGTHKEVFAKEVIVHSQINHKNVVRLLGCCTEENALMIVMEFISNGN

SEQ ID NO: 321920 - protein, 102 aa, Zea mays
  Clone ID: MRT4577_56656C.1.pep
KKTPMDSDFTPKIMWKAPPGNVRPPSNGDHQIKLAWAFLALEVFCGREHLSQGPLSWAWATAKGGQLGVKGWPGGWANKGALKRKTTHVHHFFLRFEIFFFR

SEQ ID NO: 321921 - protein, 229 aa, Zea mays
  unsure (1)..(229): unsure at all Xaa locations
  Clone ID: MRT4577_56657C.1.pep
PGNILNTSTVPQGHNIVNNQTDDPFSINDCYAIXSSSGFRDXNIEITRRSTTLWTRIAPDGLTTRTTEGCVADLQGEQDPAYKKIRLRVCYVQTLNVLTSFCGMEFTTKSFRSLXLTWPTSMAAPADVTTNYNYXLPVVCIGSTKRPPNQVKRICYAHAYQIREIRRMMGEIMINQASTCDLRELVYKFIPEGIGKEIENATSSIFPLXNVFIRKVKILKAPKFDLGKL

SEQ ID NO: 321922 - protein, 203 aa, Zea mays
  unsure (1)..(203): unsure at all Xaa locations
  Clone ID: MRT4577_56658C.1.pep
MRGHAYVCPTSSMLSLTGTAHPRRNRRPAADPPPARHTLVGPGREEPDRDEIVADDQGRRTTAXYVKCTDSHRLDDEPDSNYHLMIPINTGVNRELMSYMRLFADTSMKKEVMLCTFQVIPNSDDHSMIWELCVHKDKLVSSEEIISMILILWIDTSEVDLEVTIKNTVVTASGXFNNSHRQATTRIRLHVRTAWTCESCTSP

SEQ ID NO: 321923 - protein, 80 aa, Zea mays
  unsure (1)..(80): unsure at all Xaa locations
  Clone ID: MRT4577_56659C.1.pep
GLPSLNPLACLSHKQLIAGQYLHLLRRDPSLQRHYLPGDSDVIXSSDLHYLSTPDNSLHRHYREHHTERISNAVTSPLTT

SEQ ID NO: 321924 - protein, 73 aa, Zea mays
  unsure (1)..(73): unsure at all Xaa locations
  Clone ID: MRT4577_5665C.1.pep
FRGADTSEPAVGDPAADESEKAXXLPFSMGYKARGVTPCSLLSLLRRTAGLEIYGSSRARLHGTGLLFSTTRT

SEQ ID NO: 321925 - protein, 152 aa, Zea mays
  unsure (1)..(152): unsure at all Xaa locations
  Clone ID: MRT4577_56660C.1.pep
RAHTIRTQYTMQLERPVINQETWANLLTYSQPQQSLXFNQLYRLNPAAYLQXQLLSHSGTLATXAYSQHQQLRPLNQLAALNPDAYLQELILLPFSQLAXANRAYFLXTQHQVLPFYQQFAANRATILQLLQMQPFGQLAXTDPADFYQQHM

SEQ ID NO: 321926 - protein, 127 aa, Zea mays
  unsure (1)..(127): unsure at all Xaa locations
  Clone ID: MRT4577_56661C.1.pep
MAFKMLFWGKLTPAWGGYCKESMVEYRRYNRRLIWAKHXHSLHTTFITYGEGPTILNILELETQRLHLLIFITFSTEEAMRNAIEGMNGKELDGRYITANDAHSRIGRGSCCIGYRDGLRCRGYNNG

SEQ ID NO: 321927 - protein, 144 aa, Zea mays
  Clone ID: MRT4577_56662C.1.pep
MDQQAKIDADFLEPTVLLDETHYQEGYRNGYNDGLASGKEEGRQVGLKMGFQVGEELGFFQGCLDVWTSAILIDQNAFTARVRKNIEQLAALVGSYPLSDPENEQIQDVMEKIRLKFRVITASLGVKLEYEGHPKSSKQDAEDL

SEQ ID NO: 321928 - protein, 144 aa, Zea mays
  Clone ID: MRT4577_56663C.1.pep
RTRPLNFLPRLSSVYLPPSLPAPPLPSHGHPAPSSPPHPNSPRPSLSRWWCPWRLLMVYLSMIKCWITCRHTTSNNLCRIYSRSSPTPSASSRSLFGAMGTTSPPRPSVHIMTTCLLNTSSKSLYPMAKVCVYDSLSQIIFLQY

SEQ ID NO: 321929 - protein, 108 aa, Zea mays
  unsure (1)..(108): unsure at all Xaa locations
  Clone ID: MRT4577_56664C.1.pep
TGPRRLRSAFPFREVXALVGTVHHLWAGKGKXFKXLALAQINPRASVGPKDKWKTLVFPASIFPPPPKGHPVPQKILNRVLLGQAFWFPHQHQGRVLGKPPPPALPFS

SEQ ID NO: 321930 - protein, 120 aa, Zea mays
  unsure (1)..(120): unsure at all Xaa locations
  Clone ID: MRT4577_56665C.1.pep
TFSCSNNQTLIPIKAQGLQNKSMAQSNGWQPRLSVKEKKVEKDPTIPKRPPTPSSSSRENLRKDSKENHPKLKQVSLIGKAGCDKXEVLSDSENAHYVSKAEKLKAEYTKKIDAYNNKQS

SEQ ID NO: 321931 - protein, 39 aa, Zea mays
  Clone ID: MRT4577_56666C.1.pep
LNLDPEKWQPFFFLCFIFFLYFIYFLYFFIFFFFFRTRG

SEQ ID NO: 321932 - protein, 94 aa, Zea mays
  Clone ID: MRT4577_56667C.1.pep
LRDYVSLSSDWICYAMIDDIVDSFGPIMRDVEIESEAIEDHVFVARVEDFGTFLPRIGDLRKKVMTLMRLLGGKADVIRGFSKRCNEQYSVTPR

SEQ ID NO: 321933 - protein, 116 aa, Zea mays
  unsure (1)..(116): unsure at all Xaa locations
  Clone ID: MRT4577_56668C.1.pep
SFFQTLSPSSTLEISGVCAGATDTDTFPFHADINQLLSLIINTFYSNKEIFLRQLISNSSYALYKIRFQSLTDKSTLDAHPELFIHLVPDKAXDTLSIIYSVICMTKSYLVNNLST

SEQ ID NO: 321934 - protein, 66 aa, Zea mays
  Clone ID: MRT4577_56669C.1.pep
LPYQGYRAGLPIRRGVMIASSLLAGHPHPVGFSFSWALKEVYPCIDRFSKKLSLLKSHSRWAFACP

SEQ ID NO: 321935 - protein, 91 aa, Zea mays
  unsure (1)..(91): unsure at all Xaa locations
  Clone ID: MRT4577_5666C.1.pep
NVRGGSPRMMGPERLRASYAQRDGGPHFFTHRGSATKTHXXATHPFXTHLAFTSVVDRETMLHRREHAVPMPRVAIEXMSGRHRVRSTLNC

SEQ ID NO: 321936 - protein, 51 aa, Zea mays
  Clone ID: MRT4577_56670C.1.pep
WVGLDNKVEKVLKKGARIQRFDVEGSKLMNDLENEFAAGDGFYDSAYVNVM

SEQ ID NO: 321937 - protein, 69 aa, Zea mays
  Clone ID: MRT4577_56671C.1.pep
PELHLHLGGKMLTVVFTQDSKWTIQPKCWRDFRDLCRLDRWRGRGLPDVHDPCCFGGYNRPLNAHSAGV

SEQ ID NO: 321938 - protein, 78 aa, Zea mays
  Clone ID: MRT4577_56672C.1.pep
VGRGEVVHSSRDPSREPSRSDRPWYLGVCTLSLIWTSKVVLGCIAFGIFWVMGVFPTVPFMPVWRTGGSLLGAMLMVL

SEQ ID NO: 321939 - protein, 32 aa, Zea mays
  Clone ID: MRT4577_56673C.1.pep
MALAGTSKVVLGCIGFGIFWVMGVFPTRPFMP

SEQ ID NO: 321940 - protein, 91 aa, Zea mays
  Clone ID: MRT4577_56674C.1.pep
MALAGTSKVVLGCIAFGIFWVMAVFPTVPFMPVGRTAGSLLGAMLMVLFRVISPEDAYAAIDLPIIGLLFGTMVVSIFLERADMFKYLGKL

SEQ ID NO: 321941 - protein, 88 aa, Zea mays
  Clone ID: MRT4577_56675C.1.pep
RRHHAAREHDPGGLAESDLEGLLLCQPPHPRARDHSSNTLHGHADSVDGSIDGTKHESDRLSPNKIMKLIDKESDEEWTELHVAVKLN

SEQ ID NO: 321942 - protein, 773 aa, Zea mays
  Clone ID: MRT4577_56676C.1.pep
HWVPRGRPGFVSTVDPLKEPPIITANTVLSILAVDYPVDRVSCYVSDDGASMLLFDALSETAEFARRWVPFCKKFAVEPRAPEFYFSQKIDYLKDKVQPTFVKERRAMKREYEEFKVRINALVAKAQKKPEEGWVMQDGTPWPGNNTRDHPGMIQVYLGSQGALDVEGHELPRLVYVSREKRPGYNHHKKAGAMNALVRVSAVLTNAPFILNLDCDHYVNNSKAVREAMCFLMDPQLGKKLCYVQFPQRFDGIDRHDRYANRNVVFFDINMKGLDGIQGPVYVGTGCVFNRQALYGYDPPRPEKRPKMTCDCWPSWCCCCCCFGGGKRGKARKDKKGDGGEEPRRGLLGFYRKRSKKDKLGGGSVAGSKKGGGLYKKHQRAFELEEIEEGLEGYDELERSSLMSQKSFEKRFGQSPVFIASTLVEDGGLPQGAAADPAALIKEAIHVISCGYEEKTEWGKEIGWIYGSVTEDILTGFKMHCRGWKSVYCTPTRPAFKGSAPINLSDRLHQVLRWALGSVEIFMSRHCPLWYAYGGRLKWLERFAYTNTIVYPFTSIPLLAYCTIPAVCLLTGKFIIPTLNNLASIWFIALFLSIIATSVLELRWSGVSIEDWWRNEQFWVIGGVSAHLFAVFQGFLKVLGGVDTSFTVTSKAAGDEADAFGDLYLFKWTTLLVPPTTLIIINMVGIVAGVSDAVNNGYGSWGPLFGKLFFSFWVIVHLYPFLKGLMGRQNRTPTIVVLWSILLASIFSLVWVRIDPFIPKAKGPILKPCGVEC

SEQ ID NO: 321943 - protein, 48 aa, Zea mays
  Clone ID: MRT4577_56677C.1.pep
VVDTCPVQLPFVLEVVEFGVHIDVIIAWCQFLISLVLSIWTENGVNSL

SEQ ID NO: 321944 - protein, 113 aa, Zea mays
  Clone ID: MRT4577_56678C.1.pep
AHTLGVDLDEAYILMEDCNINYTLYPHITRHWLIMRHYALVSRQAHIPYTLVAAPLFRPHLCLLIPPCFVHVFGLIKLPLRLAPDMEVRALLTHVISLFQIYPCLLELMVHHI

SEQ ID NO: 321945 - protein, 138 aa, Zea mays
  Clone ID: MRT4577_56679C.1.pep
PRVGPFFCASGWAPLLTGIRSVPSSWLIELAPSVGSPGFPFYAFGSFVVWFFSPVFFPAVPSFCPAFFLLAGLFFWPLRFPRLLFLFSFCSVTCLAVSPPAIRRVCSPFFRPLLCSSWLPLVSSCRSPSGFPGPTQPC

SEQ ID NO: 321946 - protein, 116 aa, Zea mays
  Clone ID: MRT4577_5667C.1.pep
LVYSLSASAKRLSELSCAHHGWMARATCTHDAFGGPQASDSARGGPPPLSPSCLPVLQSQLQLQACSTKGKGNMERTAPISTPSVSFYLSLDSVKLQKKKKKTAALELRFLFLYRG

SEQ ID NO: 321947 - protein, 117 aa, Zea mays
  Clone ID: MRT4577_56680C.1.pep
IHVFLRIHFTITCWCPLSMPSLMSEDGSVLHRDALVYHTGSFVVVVIWRGLCALLQRRKAVRGGGVSPRTPAIESHWREAVGPWRDAVLALSPALLYLYFLASSTQSDNSDMFPAGL

SEQ ID NO: 321948 - protein, 89 aa, Zea mays
  Clone ID: MRT4577_56681C.1.pep
PAQADPQPAGHKPTSRQASPGQHPGRRTRTARGPGTASIASHPTPTDNRRREKTPRPAARQPHKPAGESPPRRQQRRNTSAKKKKKKRP

SEQ ID NO: 321949 - protein, 130 aa, Zea mays
  unsure (1)..(130): unsure at all Xaa locations
  Clone ID: MRT4577_56682C.1.pep
VQCASIIILSVCVQHIIAYGISYFVYSQLLYILPEVLFSHSDILVIERDDFEDIIQLAAVGGGVIASTVDNTEYVERGQYXLVNRLIIAVDMILIWQFPRLAGLKVERCPCLTSSAYRVCGDARRPTGRT

SEQ ID NO: 321950 - protein, 61 aa, Zea mays
  Clone ID: MRT4577_56683C.1.pep
MMQSTRVPFAVLVFISSHSLHLVVSCPSLPPSGHIQMACRRLRPASTLLDHANLLLYLLRC

SEQ ID NO: 321951 - protein, 36 aa, Zea mays
  Clone ID: MRT4577_56684C.1.pep
PLQSRGTKDSVQLQISDDGNAHVDRTTDRYATGRNF

SEQ ID NO: 321952 - protein, 45 aa, Zea mays
  Clone ID: MRT4577_56685C.1.pep
KVCVILHGLLTSDYTHGHQAFFYGRAENLVSATTFSGDFPLAWGF

SEQ ID NO: 321953 - protein, 57 aa, Zea mays
  Clone ID: MRT4577_56686C.1.pep
YNIKTFVQYCLIYKMQNAPSSPKIIKNHNFFSTPCPPLFKTIQTLHTHSILTSYALL

SEQ ID NO: 321954 - protein, 81 aa, Zea mays
  Clone ID: MRT4577_56687C.1.pep
MDGDTSQQGTWIACYRYAPTQLNTTHCLLPEAPEGAGEDYRTRRRHQASSVISVSEHAMCTHITDCVSLNTHRDAAIFISL

SEQ ID NO: 321955 - protein, 69 aa, Zea mays
  Clone ID: MRT4577_56688C.1.pep
PGRRPGDHSSFFFICLTVSTIRGCQDRLAPDPYLEDMPRLRLRLRLPKGDQISLGGGGGFLVWLKMFSL

SEQ ID NO: 321956 - protein, 325 aa, Zea mays
  unsure (1)..(325): unsure at all Xaa locations
  Clone ID: MRT4577_56689C.1.pep
MASGVLHRSASLCLRPAAGSSADSGRGHGAVMIGDSRTRVAALRLGGSSRRELLSVTMASRDHTGLTRQLLDFQHDTIDEVGAGHDPFMDLKARFMDFKQRNYVEKFSNYQTLAEQQTPKFMVVACADSXSALPLFWGFSLGKHLHSARARVCPTAVLGFQPGEAFTVRNVANLVPPYEHEGSETSAALEFAINTLEVENVLVVGHSRCGGIQALMSMKDDSTSGSFIKNWVSIGKSARLSTRAAAGNLSFDMQCKHCEKESINSSLLNLLTYPWIEKRVNEGTLNLHGGYYNFVDCTFEKWTLLYREGLEGGSKYAIKNRSTWS

SEQ ID NO: 321957 - protein, 81 aa, Zea mays
  unsure (1)..(81): unsure at all Xaa locations
  Clone ID: MRT4577_5668C.1.pep
MIYKSDSNLDGSIYSPQSLRLMVRSTSDTDSYHELKEAFRVSEKDQIESILPAELVLIITEMXEXLTDHYMYQMILDADIH

SEQ ID NO: 321958 - protein, 46 aa, Zea mays
  Clone ID: MRT4577_56690C.1.pep
PYCWLIRCCSKKRSPVPQRSALIEWISPPGPHAPPSRCRIPLVQIT

SEQ ID NO: 321959 - protein, 119 aa, Zea mays
  unsure (1)..(119): unsure at all Xaa locations
  Clone ID: MRT4577_56691C.1.pep
MRDSISSTSATTRPRSSTQAANCYGLEHGIHXEGQTHXDHTIXRGDDALLTFFDDNGAGQDGPRARFADLKATVIDAVRTMAXRHFFHPRAPSSGXDDAPHKCALALYTIAPEIPAPRL

SEQ ID NO: 321960 - protein, 96 aa, Zea mays
  unsure (1)..(96): unsure at all Xaa locations
  Clone ID: MRT4577_56692C.1.pep
VRHTQCIIFIATEPPGTEKRLGLEHALAILLQVERVTRRMCTSITPPPSCARPLKVSFWPAPHRSLCCWQVCGRCTNHGILHPHVCSXFYVLPFLV

SEQ ID NO: 321961 - protein, 119 aa, Zea mays
  Clone ID: MRT4577_56693C.1.pep
MQIQRGDVQPGSSNRRRKKMRISSENMIRVNPLEEEFGTSSDSGEGVWRLLSEEVAAHIDDSVVSLASFHKDNAKSVYFACTGIIIESNSTITSFLTSLSLLRSIDDDSKIFQDMMIEV

SEQ ID NO: 321962 - protein, 92 aa, Zea mays
  Clone ID: MRT4577_56694C.1.pep
SFLAARIGGPNWDRMSPVFIDPSRGKKNRGRVCPPAPCPKLVFFPRKLFTSWGGGGGPPLSIPDHAVRVTSFTPGRSPPNSWSKTKRLPLGL

SEQ ID NO: 321963 - protein, 58 aa, Zea mays
  Clone ID: MRT4577_56695C.1.pep
KQSKNANGVINSEDVVVYTLPLDRVADCISNIQLDPFTQKSTTRTSNVSSNSLSRQSS

SEQ ID NO: 321964 - protein, 81 aa, Zea mays
  Clone ID: MRT4577_56696C.1.pep
WPALVTPVQHTRHQPSHSSAMCLLGSPPMPVAPSPLAEYLAVRPCLSSLSSRMFFARRRSVESRPLLCILLCSAYVYLHGR

SEQ ID NO: 321965 - protein, 80 aa, Zea mays
  Clone ID: MRT4577_56697C.1.pep
LSCRSSSCRSPSLTQRYKHELVAGVVAVDDLHLIADVAVEVVLLEVQGCAAVSVQVDHDLFTLVRLVLGARGAVRVILVV

SEQ ID NO: 321966 - protein, 76 aa, Zea mays
  Clone ID: MRT4577_56698C.1.pep
KGLHPEDEPPCNGLCLNYTTEYDRPAPRRALLFRPVSVGSDRNARTWYGFPSEASSFLYPSSGGLGRRLVGGCGMR

SEQ ID NO: 321967 - protein, 63 aa, Zea mays
  Clone ID: MRT4577_56699C.1.pep
CTRYVEASNMPLSRRTLCTTSMSTKITNTSRLLTGLYHLCYNPTDTLPSRARCCTTISICRLS

SEQ ID NO: 321968 - protein, 141 aa, Zea mays
  Clone ID: MRT4577_5669C.1.pep
DGGSPPGLAAADRDETAPGAPTTTAVSPAATWDAAERAKHMARYRREEMKIQAWENRRRQKAELQMKVAEAKAERMKLRAQEKTASKLASAQAAAREKRAQAEAKLNRRAARVDRADALRRTGHLPSSSSVFSLKLPLMCR

SEQ ID NO: 321969 - protein, 53 aa, Zea mays
  unsure (1)..(53): unsure at all Xaa locations
  Clone ID: MRT4577_566C.1.pep
LXXFFFNXXGGPQGLFRGGLYKKNIFYHMPRVLSGPRNGREIEHPLCYNKIKN

SEQ ID NO: 321970 - protein, 158 aa, Zea mays
  Clone ID: MRT4577_56700C.1.pep
LYPTTSRTLSSSQNYNSLPTSINQSAKLVYQTSLLYLLFNSSSFHCHHQSINQLAVINKLPKNSVRAWWRQEGGQSVRRRRGGTAAQRRRSGVTHGGAGSRSVAVAGELPGRGVAGKRRQCRGTGGARGQWPRSMAGRDSGWPRTGMDRRRRSEPGAG

SEQ ID NO: 321971 - protein, 216 aa, Zea mays
  Clone ID: MRT4577_56701C.1.pep
YVFAFMFPMGLGAAASIRVSNELGAGRPREARLATRVVMLLAFSLGVSEGLVMVLARSLLGYAYANDKQVALYTSRLMPILAASTLFDCLQCVLSGVVRGCGRQKMGAFINVAAFYIVGIPVASVFAFVRHLGGMGLWFGILCGVAVQMILLLCITLYTNWNKEVSKANDRLFSCSLPVNDTITSGVSEQGNGCSFVGNKDAANGDIELTSGLNKG

SEQ ID NO: 321972 - protein, 88 aa, Zea mays
  Clone ID: MRT4577_56702C.1.pep
RSALSVRYTAARSAVATLNQDQPPRHPPWTSTMCLPQPWATGRTGAMRRIWGFGQRETGGVGRRRARAGRRAEGGESGSKGHDVARCG

SEQ ID NO: 321973 - protein, 91 aa, Zea mays
  Clone ID: MRT4577_56703C.1.pep
KRRCRAGLKYSRYRGGGAVSLSEGHHSERVDESVQIRTPPQITRRRWTETYCSGLVPDQGYMGDVQNHKRGDDLDVYGKVDQSGSQLACVT

SEQ ID NO: 321974 - protein, 101 aa, Zea mays
  unsure (1)..(101): unsure at all Xaa locations
  Clone ID: MRT4577_56704C.1.pep
SCTHTNSIYLYGDNQLGADTFPVIHPSSSRFTEPFLMYPVYSVEVYSKESQESAWDAFLTCSFLDTAHNIVKYIXESYHKVIKDGGVXLTXGPLLYHFADS

SEQ ID NO: 321975 - protein, 109 aa, Zea mays
  Clone ID: MRT4577_56705C.1.pep
LVYTYMNVFINEDAYQTNKFNSISHFFFYQTIITLPSNFYFYYSYLLFHLFYHIISSLFNFYITTFTNLNNPINKSLYFSTPIFSMITLKPLSHYPSSTQILKPTVHIN

SEQ ID NO: 321976 - protein, 162 aa, Zea mays
  Clone ID: MRT4577_56706C.1.pep
LGTSRPAGDRLHPASGTNQLHQAPPEKTARRGADGRSRGRTRESRVRRCSSQLRVPARNLPKSGPAMRAEVTQISALTAVAAHVLCSAGLAAAHALAGRGALVSDPALALRLLMVCEAPIVIAVFSYLRRDAKSCSGCCKRIDRLARGFVLYLDFDCRLTFF

SEQ ID NO: 321977 - protein, 157 aa, Zea mays
  Clone ID: MRT4577_56707C.1.pep
SLRDDKLPVTRQRPLQQQRRSQEVGPRVALTGLSAEKLSPAATTSAPTAASTNTAPASADRPKAHRQVLTPVLATKTRTEDGMFLAFPDMAGGCLLRRAGDGFHPQKLEEEVASRPVREVELRLASLSAPARMMNILEDEGGAEAAARLASPHHRTG

SEQ ID NO: 321978 - protein, 80 aa, Zea mays
  unsure (1)..(80): unsure at all Xaa locations
  Clone ID: MRT4577_56708C.1.pep
MSGRGKGGKGLGKGGAKRHRKVLRDTIQGITKPAIRRLARRGGGSTFRLYYKEPXGALNFSKNXIEPCIYTEHARRRPHT

SEQ ID NO: 321979 - protein, 254 aa, Zea mays
  unsure (1)..(254): unsure at all Xaa locations
  Clone ID: MRT4577_56709C.1.pep
MMERVEDLGLSLRLSSSLAFPRTQHVATMLLRAPEKRFLEMPLLLPAKRTTEVTGEDGLRGGSDEEDGGCGIDGSRKKLRLAKDQSAVLEDSFREHPTLNQKQKAALAKQLNLKPRQVEVWFQNRRARXKAAPLKQHTHAIYTDSSSVANTSLIIILSFRTKLKQTEVDCEFLKRCCETLTEENRRLQREVAELRVLKLVAPHHYARMPPPTTLTMCPSCERLASASASADQAGRAGPCWGPLPVFVDGPARRP

SEQ ID NO: 321980 - protein, 62 aa, Zea mays
  unsure (1)..(62): unsure at all Xaa locations
  Clone ID: MRT4577_5670C.1.pep
FFFFFFFFFLGWVFFGGGFFFXXXFFWEPKVSPIFNYSCPKKYMPIFFFFGFTIPNLITGAQ

SEQ ID NO: 321981 - protein, 208 aa, Zea mays
  unsure (1)..(208): unsure at all Xaa locations
  Clone ID: MRT4577_56710C.1.pep
MPLLLPAKRTTEVTGEDGLRGGSDEEDGGCGIDGSRKKLRLSKDQSAVLEDSFREHPTLNPRQKAALAQQLGLRPRQVEVWFQNRRARYVRSAHAICRRALARVCXDQQACTAWPGFLSLFCPSLDRFIRSCRTKLKQTEVDCEYLKRCCETLTEENRRLQKEVQELRALKLVSPHLYMHMSPPTTLTMCPSCERVSSSNGNSAAATA

SEQ ID NO: 321982 - protein, 71 aa, Zea mays
  Clone ID: MRT4577_56711C.1.pep
HPIPLFGRYGDCLPLIPIVSDLPGLAHSTLHLWAFPGARGLTQASPFTRSQNPGCERRENLTYKLTTAPSG

SEQ ID NO: 321983 - protein, 34 aa, Zea mays
  unsure (1)..(34): unsure at all Xaa locations
  Clone ID: MRT4577_56712C.1.pep
TGPGLCMSCGVSSLEGMQVSQPSSGRREVSXVAD

SEQ ID NO: 321984 - protein, 172 aa, Zea mays
  Clone ID: MRT4577_56713C.1.pep
MAFNLPPFLARLARPFTQSSRLSIAPDQSAASVIPEGAQRCTVAAGCFWGTEHLYRRHFADKGLIDAKVGYIGGDLENPSYRAVCGGKTGHAEAAQIIFDPTKVTYAQLLEFFYKTHDPTTLNQQGPDTGPQYRSAIYFHNPEQEKIAREVTEKANKQWWKGGIGTEIAPAG

SEQ ID NO: 321985 - protein, 80 aa, Zea mays
  Clone ID: MRT4577_56714C.1.pep
AGDRFFRVGFSYPKRLFGWVVFFSGRRRDHQTPPWFDFNTTVFLLFSFFLLLGKVRMIPIPWALFPLPGEVGSPCAPYVV

SEQ ID NO: 321986 - protein, 168 aa, Zea mays
  unsure (1)..(168): unsure at all Xaa locations
  Clone ID: MRT4577_56715C.1.pep
MASPVVVAAALLVAALAPFCGTNQLRTGSMVDFPGFESHLVDLPNPTEMPTHADERERLRGAEVQFHGEVQGPESVAFDPXGPYTGVADGRVVFWDGERWVPFATASPRWTQELCGGPKASLLEYLPTPGDGALQLTPVLRAPRPAGSHGSRRAGISQITPGRDLAQA

SEQ ID NO: 321987 - protein, 130 aa, Zea mays
  unsure (1)..(130): unsure at all Xaa locations
  Clone ID: MRT4577_56716C.1.pep
QHATWNAVSTINNQSPPGTEIFLFFMLLALAAXAAHATIIAHSLQAPIAFLHTSYLXSMIAVKSENSNLIRYKLQQAIAACNIHLXTLXNQQSSVLCLEQSXPQTIRAQQLXRFVLSVINHIAMANLTLY

SEQ ID NO: 321988 - protein, 122 aa, Zea mays
  unsure (1)..(122): unsure at all Xaa locations
  Clone ID: MRT4577_56717C.1.pep
RPLRSADALGPQLSDYDFRQYPLAVNQTGSTAMNFIIQDVKGXSSKNLPKVKVDLGSDHKYAGRSSKNGYEGKFIATLSVDSSIECFDVAYIQLTIGGDSXHGPPRAVIXTFYDHTHGMNDP

SEQ ID NO: 321989 - protein, 168 aa, Zea mays
  unsure (1)..(168): unsure at all Xaa locations
  Clone ID: MRT4577_56718C.1.pep
RTRLYFWQKAAEARLFEQEKEAEARRASAEAAFFARQREAEAELFAKQKEAEGLAAMGEAQSAYLSAMLGALGGSYGALRDYLMISSGVYQEMARINADAIKGLEPKISVWSSGTDGEAGNASGGXXMXEMXGVYKMLPXLLTTVHEQTGMLPPAWMGTLTDRLSTST

SEQ ID NO: 321990 - protein, 104 aa, Zea mays
  Clone ID: MRT4577_56719C.1.pep
TSGKVCGGKNYPPKTPPRGEPPPWVPHPGPRARAPQDRPPAPWNSPLGGPPCQVPKKKFFKKKKKKKKKKKKKKKKKKKKKKNKKKKKKSKKRKKKKKKKACTL

SEQ ID NO: 321991 - protein, 136 aa, Zea mays
  Clone ID: MRT4577_5671C.1.pep
PWLLRVRAPSINPGGGRRLAQATPDGGGGESFTCLWPSRFTDPTRHTAVCTDPRCVVVHLSPTRRAPTVPLPHLHGGATVTPVLDRPCTAARDQSTTCLAPSALQRPSATADNNDNCQRKKHDNIPDTNTTMLQIP

SEQ ID NO: 321992 - protein, 71 aa, Zea mays
  Clone ID: MRT4577_56720C.1.pep
VFDAQQIAQGYRKKKQAGVQAKYEFIFENKEHQVVNYLHELTGMTHTQSGPYLQHYTFFANIKLCYSQTPT

SEQ ID NO: 321993 - protein, 112 aa, Zea mays
  Clone ID: MRT4577_56721C.1.pep
TFNQPQQSPNLSGTVNSVIPHHPITFTSWTPISPLNMDSFTGNGSDQATSNNNNQQKEDYLDKGLDAVEKKYGGASTEDTQRYRGVNEKITDGARNMFEKATGKDVPDKFSN

SEQ ID NO: 321994 - protein, 86 aa, Zea mays
  Clone ID: MRT4577_56722C.1.pep
MYLLYYTHAQQRAQPTYNPNRPANIGLAGEETDTRIPNTLDYYLYKDVYTQLWYRSIDECVPECEVTLPDPTSASSSFPPDVSSAV

SEQ ID NO: 321995 - protein, 77 aa, Zea mays
  Clone ID: MRT4577_56723C.1.pep
MDSFTGNGSNQATSNNNNNQQKEDYLDKGLDAVEKKYGGASTEDTQRYRGVNEKITDGARNMFEKATGKDVPDKFSN

SEQ ID NO: 321996 - protein, 140 aa, Zea mays
  Clone ID: MRT4577_56724C.1.pep
MTTTFATVAGLGGALLSSTSSRLTSGFVKSPVIARNPWRQAVAMGNGRITCFERNWLRADYSVIGFGLIGWLAPSSIPAINGKSLTGLFFESIGAELAHFPSPPALTSSFWLWLVTWHLGLFIVLTFGQIGFKGRTEDYF

SEQ ID NO: 321997 - protein, 79 aa, Zea mays
  Clone ID: MRT4577_56725C.1.pep
FIIYKIVGRAYGSHCVQQASIVASQRVPPIGHTTYNPLPACIFVAVLSNPETRGSKETYYGLHLLPEQCVKKRLFGLRK

SEQ ID NO: 321998 - protein, 114 aa, Zea mays
  Clone ID: MRT4577_56726C.1.pep
IIRENRGKQPPPRGGTKGRTQGPPGAPGGHDTHQKSRNPKTTPDPNREPETQPGTRPQKGPKKPRGTAKATPEPKPQPPPKMAQPSRNHEQRDRPIVRANPPGAKKTKARPPRG

SEQ ID NO: 321999 - protein, 94 aa, Zea mays
  Clone ID: MRT4577_56727C.1.pep
GRVGQNWRLLAEVQVPPIQRKGFNTLVSLVAWMLWKHRNTCVFDKAPPSIARIIQEVRDEASLWCLAGAAGLRGLWPYSCYVMWYRSSIVLYLR

SEQ ID NO: 322000 - protein, 215 aa, Zea mays
  unsure (1)..(215): unsure at all Xaa locations
  Clone ID: MRT4577_56728C.1.pep
MAACNGLFVYHILGLASLVAVFYFSLLGEVDLRFPGLLPSPGASQSHDASLPFVERRGAQLFLEGRPFYINGWNSYWLMDQAVEPASRHRVSDMFRAATGMGLTVCRTWAFNDGAYNALQLSPGHFDERVFKALDRVVVEARRHGVRLVLSLANNLEAYGGKXQYVRWAWDESVGLTASNDSFFFDPXIRDYFXVYXKALLTRTNTWDGVQYKTT

SEQ ID NO: 322001 - protein, 73 aa, Zea mays
  Clone ID: MRT4577_56729C.1.pep
LMIKATKQQIKQIQSSVDQCSDKRHTVGTKSFLCFDLHFPVRNFGCNWFYTERLYFIYFFVFLGVLDFTFFFF

SEQ ID NO: 322002 - protein, 58 aa, Zea mays
  Clone ID: MRT4577_5672C.1.pep
MGLLSNRIGRESLKAGDHIYSWRAAWVYAHHGEVIRIVLLLHMLTPLYLNFDWTIGSH

SEQ ID NO: 322003 - protein, 72 aa, Zea mays
  Clone ID: MRT4577_56730C.1.pep
RHLTRIHSSLRIGDRMYRRVVREYGRRYRRLLSRSGYGLVYDRYRISHRGHANRGQERRISIRCVLIPMLNS

SEQ ID NO: 322004 - protein, 89 aa, Zea mays
  unsure (1)..(89): unsure at all Xaa locations
  Clone ID: MRT4577_56731C.1.pep
GYPXGPGRXCSQTHRHTPPSAGSVSPLPASRQGRERDRRSPSGRQGCDPPPSLSELCLLPDLSDPVLRICSLRPVSVHGPTMADSGLTR

SEQ ID NO: 322005 - protein, 160 aa, Zea mays
  Clone ID: MRT4577_56732C.1.pep
GLGGLRFPLVAKPVEVDGSAASHDLCLVYRREGLRGLRGRPPLVLQEFANHGGVLFKVYVVGDRATCVVRSSLPDVPPERLRDPAAADEAPFANISLLAPSGGDEGSEKVVPPPQDFVDRVAREIRRAVGLHLINFDLIRTRDDAASGDANKYLVLDINY

SEQ ID NO: 322006 - protein, 104 aa, Zea mays
  Clone ID: MRT4577_56733C.1.pep
NRSSVERDPSHRTWWARAPCGPPTWPVSLFTCAPLSSSCSSSFPASASASLSLASAVSSPSPFLWASVAAAAGPVEGPQLKSTRPRKRRDTAAVGVRGPWDIVE

SEQ ID NO: 322007 - protein, 71 aa, Zea mays
  Clone ID: MRT4577_56734C.1.pep
LERATSDAVLFDGGHECRMARLDGQDGMRVDQVRVIQVVNSAVPVDIGYDLDRNDLVVFEAVTDYRISQYA

SEQ ID NO: 322008 - protein, 72 aa, Zea mays
  Clone ID: MRT4577_56735C.1.pep
HMPCKNTLHTNLCCGLSVNYFIFEKKQPTKEPPSTNGVVQKQQHGIHNNASNARKDTGRRHRVSLRKSYLCY

SEQ ID NO: 322009 - protein, 195 aa, Zea mays
  Clone ID: MRT4577_56736C.1.pep
MDVEKVTEVAPEVDDDGRVRTGTVWTATTHAITAVIGSGVLALPWSVAQMGWVLGPIALIGCAYITYFTACLLSDCYRSPDPVHGKRNYTYMDAVRSCLGPREVVVCGITQYTILCGAVVGYTITAATGIMSVVRSNCRHYKGHGADCSQEGTMYLVMFGVIEVVLSQLPSLEKVTFVSIVAAVMSFTYSFVALF

SEQ ID NO: 322010 - protein, 52 aa, Zea mays
  Clone ID: MRT4577_56737C.1.pep
FFCTQDYFNNITFLYSLAFGLEWICPFAPILLYAPFFCDEQTVILFLPDLKG

SEQ ID NO: 322011 - protein, 58 aa, Zea mays
  unsure (1)..(58): unsure at all Xaa locations
  Clone ID: MRT4577_56738C.1.pep
SCMTAVHLSXHDNXMGXQVCFDPRTKVYMCGDXXSIVDEKNSVTRFSKESYACGRPGF

SEQ ID NO: 322012 - protein, 108 aa, Zea mays
  unsure (1)..(108): unsure at all Xaa locations
  Clone ID: MRT4577_56739C.1.pep
XLFFFSTNATYAESGKGGGRNKKNTKPSHNIITPLNKQTEHKTVKEQYCNPREPTQHLIHDKRAKSPQNADASQRVIILRGCIPSAIVITTRGAPQSRTHQGNRSTRP

SEQ ID NO: 322013 - protein, 224 aa, Zea mays
  unsure (1)..(224): unsure at all Xaa locations
  Clone ID: MRT4577_5673C.1.pep
DVREEXTYQKXPTGYKGELEKVATEPVPVSWDKLAGTNWSIVTTSDGKKXYYDNKXKVSSWQLPPEVCEILKNAESGSLKEGSTSLQDAATIENKGVISIDASTPAIQXQDAGASSAPSALATSSATSELNGSKPADAALKGQLVANNGEKLKDNNGDVNISDSSSDSDDEEHGPSKEDCIRQFKVMLKERGVAPFSKWEKELPKIVXXDPRFKAIPSHSTRRA

SEQ ID NO: 322014 - protein, 55 aa, Zea mays
  Clone ID: MRT4577_56740C.1.pep
CPYLIQGPKSAHTPSPRPFSKRAPGTFINIPTALPPLRFIKAVPVIFHFRPYFLY

SEQ ID NO: 322015 - protein, 315 aa, Zea mays
  Clone ID: MRT4577_56741C.1.pep
MVGVALAPAVSRVPCLPGASFHASRPSSSARLPARPRARAPPERLVVVARYSSSYEVEGEEEEEDEEGLGGGGGWGRRDRGPDPDYDPALDIERIESSTVRLLDEQKRMVGVVSVSEAVQIADDNDLILAILSMDGDPPVLRLFEERDYKKHRYEQQKKKKIQQKRSVAKRMGLKELKMGYNIDIHDYSVRLKAAKKFLKAGDKVKIIVNLKGRENLYKKEAIELLRRFQNDVGELATEESKNFAERNIYLVLVPNKIAIQKEQDELNKKGAVREEKDQSDSDEPEENDQPDSDVPLTELLEESMEPEAEVSANV

SEQ ID NO: 322016 - protein, 66 aa, Zea mays
  Clone ID: MRT4577_56742C.1.pep
MGDTRVYGYIIILRAVTTSDFMSAEAFEFPWALLQKIARTIVNSVAGVSRVTYDLTSKLLGTIELE

SEQ ID NO: 322017 - protein, 36 aa, Zea mays
  Clone ID: MRT4577_56743C.1.pep
GVSGGGHHSASPVQPGVMSINKPRNQSPIRDVAIIP

SEQ ID NO: 322018 - protein, 135 aa, Zea mays
  Clone ID: MRT4577_56744C.1.pep
DSTRVYQPIFHRVMTVIFHRSILSLESANPFTSGRRKLNAVLQEAMQNGTKNSSRDQQQQQQLGSPGGASDGKPPVSESWSIWSRCPGPATITVAKTRNDTAWSLVRCCLPSLVQGVTLCDSDRGLFIGWGPWPS

SEQ ID NO: 322019 - protein, 74 aa, Zea mays
  Clone ID: MRT4577_56745C.1.pep
SMLILSTLDVAILVYGEGSISKWTRALYMACDSVFTVGPLTCGCRPLVTRGSTLLVPRLSIALLRLQMLPGVGR

SEQ ID NO: 322020 - protein, 78 aa, Zea mays
  Clone ID: MRT4577_56746C.1.pep
FVLEIIYYRCIMFNTNQEKNQARDTILLEQKDLSVLKIGAPQRLPKWLGAINTPNHHNFWHPSFSEITFNTRASAPAS

SEQ ID NO: 322021 - protein, 105 aa, Zea mays
  unsure (1)..(105): unsure at all Xaa locations
  Clone ID: MRT4577_56747C.1.pep
IQGAQGEGPLTVARVTGEKKNPPGAQDANRLSPRVSQSNNSPRVSGFLNGKGAXRLTPINGGNVSXFGSSDFTLXLLPARMLCGMVTXSSSSRKKRCPFFLRDLI

SEQ ID NO: 322022 - protein, 48 aa, Zea mays
  Clone ID: MRT4577_56748C.1.pep
TTSWHRLGRGSLTRACLAVDWWGSGSGRRREVRGALKERIRRLGPAAR

SEQ ID NO: 322023 - protein, 51 aa, Zea mays
  Clone ID: MRT4577_56749C.1.pep
LAILCIIMTKGFLLILTIYKYIRRSFFYHNKASDFPELLLLCIIITKLLIS

SEQ ID NO: 322024 - protein, 960 aa, Zea mays
  Clone ID: MRT4577_5674C.1.pep
CSSPALMVAPIPASALQPPAPGQYFGNRPSFSYNVVSHANARLPTGQQFQPVTGANLAGPISRFVPPGSLQPPTPGHITRPSTAFPGSMAPNPPGSIQLPFSVPRPSNIPFGAIAQQGSSDINNLKSDSPRAPEVTPQAMQLSTGMPSKSPSTIASASGSPSIPIQTLTNSSVPPRPEVFGATRPSVPAQPSATVSNPTGFLGRPIVPPAAPLPQTPPPIATQGGTPQNSQRPFYPSYPSGPGIVPPQPLWPHPHPPQPTGFQQPPFQYYPAGPVGSLGRPITGASAATMAFANVQPPGVSTGGDRKVQASTNAGSEQSTHAAAEPDSTGHGGQVTEQLEDNRNTGVQDSDAWSAHKTETGVVYYYNALTGESTYQKPTGYKGELEKVATEPVPVSWDKLAGTNWSIVTTSDGKKYYYDNKQKVSSWQLPPEVCEILKNAESGSLKEGSTSLQDAATIENKGVISIDASTPAIQTGGRDSLPLRQTVAPASPSPLDLIKKKLQDAGASSAPSALATSSATSELNGSKPADAALKGQLVANNGEKLKDNNGDVNISDSSSDSDDEEHGPSKEDCIRQFKVMLKERGVAPFSKWEKELPKIVFDPRFKAIPSHSTRRAIFDHYVRTRAEEERKEKRAALKAAVEAYKELLEEASEDINQKTDYQEFKRKWGADTRFEALDRKEREILFSEKVKAVQEKVQSMRKAVIANFKSMLRESKDITSTSRWAKVKENFRSDPRYKAMKHEERETIFNEYIVELKSAEQEAEQAAKAKVDEQAKLKERERETRKRKEREEQEMERVKMKIRRKEAVSSYQALLVEMIKDPKASWTESKPKLEKDPQGRARNPDLGQGDAEKLFRDHVKDLYERCVRDFRALLSEVITPEVAARTTAEGKTAINSWSEAKGHLRSDLRYNKLPSKDKESIWRRYADDLTRKLRQSDTKEKDKSDTDGKQPRSSDPPRRR

SEQ ID NO: 322025 - protein, 60 aa, Zea mays
  unsure (1)..(60): unsure at all Xaa locations
  Clone ID: MRT4577_56750C.1.pep
KKKFFNFFVQGGLFKKEXPQIYGFLTTPGSKLKQPCNKGLLIKKKFEGGEIFLALLFKKG

SEQ ID NO: 322026 - protein, 157 aa, Zea mays
  unsure (1)..(157): unsure at all Xaa locations
  Clone ID: MRT4577_56751C.1.pep
MYVVKRDGRQETVHFDKITARLKKLSYGLSQDHCDPVLVAQKVCAGVYKGVTTSQLDELAAETAAAMXCVLLDYASLGXRIAVSNLHKNTKKSFSETIKDMYRHFNERSGLMAPLVAEEVYEIILNNAAPLDREIIYDRDFXYDXFGFKTLERAYPL

SEQ ID NO: 322027 - protein, 94 aa, Zea mays
  Clone ID: MRT4577_56752C.1.pep
GSPLGIYPRGERGWGRNVPRERLWGSPRGNFFVSETGMESYFPRRITRCHTLCPLGVEARCVKSIVLRSDALEDDDELSSKQSYATNVFFLLNS

SEQ ID NO: 322028 - protein, 94 aa, Zea mays
  Clone ID: MRT4577_56753C.1.pep
SVVKVHCELADGVPKGGVGPGLCSPGRRGSGHARMAPSMSSHRSGCGGGPCGLCGPLSGVKKMGPGGHPRGMVSGKVAQYQVMNRCMKKKKNKG

SEQ ID NO: 322029 - protein, 65 aa, Zea mays
  Clone ID: MRT4577_56754C.1.pep
NKVKKMQNGLLRDSYTIDASTSFWTIWDTISNEIQFLTELNGGGLNHRGSLVFTILGFLATMRTL

SEQ ID NO: 322030 - protein, 94 aa, Zea mays
  Clone ID: MRT4577_56755C.1.pep
NKVKKSRMDYLEIATLSMHLHHFGLYGTPSVMVDLVYCALEFLSTLLGAFHATDGVICLCPEIQFLTELNGGGLNHRGSLVFTILGFLATMRTL

SEQ ID NO: 322031 - protein, 219 aa, Zea mays
  Clone ID: MRT4577_56756C.1.pep
MEAMEEANRTAVESCHRVLALLSNPHGQLVPSRELVATTGEAVARFGSLAAKLSSSNGNGLQGHARVRKTKKPLPIFYSNLFLESSSAVAAAATVAKTPSPSPTTGLQLFPRYHQMEGSSCKDPVRIPAQFPKRLLLENLAAGLEGSSPPAPPVRMVQPVSVAPPAGMPTPALPAAHLHFIQQQQSYQRFQLMQQMKIQSEMMKRSNLGDQGGSISGGG

SEQ ID NO: 322032 - protein, 397 aa, Zea mays
  Clone ID: MRT4577_56757C.1.pep
MPGLTAPSDYAEEPPRHPALKINSKEPFNAEPHRSELVASYITPVDFFYKRNHGPIPKVEDLSRYTVSISGLVNKSIQLSMADIWSLPKYNVTATLQCAGNRRTAMSNVRKVRGVGWDISALGTATWGGAKLSDVLELVGIPKLSSVTSLGGKHVEFVSVDKCKEEKGGPYTASIPLNQATNPDADVLLAYEMNGEVLNRDHGYPLRVVVPGVIGARSVKWLDSINVKEEECQGFFMQKDYKMFPPTVDWDNINWSTRRPQMDFPVQSAICTLEDVDVIKEGQARIAGYALSGGGRGIERVDVSADGGKTWVEARRYQKDNVAYVSDGPQSDKWAWVLFEATLDVPANPEIVVKAVDSAANVQPEKVEDIWNLRGILNTSWHRIKIQRSSCVERSKL

SEQ ID NO: 322033 - protein, 101 aa, Zea mays
  Clone ID: MRT4577_56758C.1.pep
MAEGGSSTAPSAPPCCGLARLLRRLRRQGSRALCAAAASRRHRASCRQYDPLSYARNFDLGRDAADAERRAHLLRLLLLLALRARPAPRLLVRRRPRCCPG

SEQ ID NO: 322034 - protein, 72 aa, Zea mays
  unsure (1)..(72): unsure at all Xaa locations
  Clone ID: MRT4577_56759C.1.pep
MWGRNTIDPNDYNVSLGPTVHEXEYVFGVSHIFSSFNDTYIHITDLSGMETLTLITTLINVNCLPLIFLTLL

SEQ ID NO: 322035 - protein, 44 aa, Zea mays
  Clone ID: MRT4577_5675C.1.pep
VGGDTSNDERSIQVHSVACCHCSINLVSSEDMMYTPKERIGSDA

SEQ ID NO: 322036 - protein, 266 aa, Zea mays
  Clone ID: MRT4577_56760C.1.pep
MPGLTAPSDYAEEPPRHPALKINSKEPFNAEPHRSELVASYITPVDFFYKRNHGPIPKVEDLSRYTVSISGLVNKSIQLSMADIWSLPKYNVTATLQCAGNRRTAMSNVRKVRGVGWDISALGTATWGGAKLSDVLELVGIPKLSSVTSLGGKHVEFVSVDKCKVLNRDHGYPLRVVVPGVIGARSVKWLDSINVKEEECQGFFMQKDYKMFPPTVDWDNINWSTRRPQMDFPVQSAICTLEDVDVIKEGQARIAGYALSGGGRGI

SEQ ID NO: 322037 - protein, 397 aa, Zea mays
  Clone ID: MRT4577_56761C.1.pep
MPGLTAPSDYAEEPPRHPALKINSKEPFNAEPHRSELVASYITPVDFFYKRNHGPIPKVEDLSRYAVSISGLVNKSIQLSMADIWSLPKYNVTATLQCAGNRRTAMSNVRKVRGVGWDISALGTATWGGAKLSDVLELVGIPKLSSVTSLGGKHVEFVSVDKCKEEKGGPYTASIPLNQATNPDADVLLAYEMNGEVLNRDHGYPLRVVVPGVIGARSVKWLDSINVKEEECQGFFMQKDYKMFPPTVDWDNINWSTRRPQMDFPVQSAICTLEDVDVIKEGQARIAGYALSGGGRGIERVDVSADGGKTWVEARRYQKDNVAYVSDGPQSDKWAWVLFEATLDVPANPEIVVKAVDSAANVQPEKVEDIWNLRGILNTSWHRIKIQRSLCVERSKL

SEQ ID NO: 322038 - protein, 51 aa, Zea mays
  Clone ID: MRT4577_56762C.1.pep
GRHINLGWRPLRGRKKVSPWVASLAPVYELLEDQTTGRDLEPMKRLADYFL

SEQ ID NO: 322039 - protein, 37 aa, Zea mays
  Clone ID: MRT4577_56763C.1.pep
IRSEASRDRRVTAWILIMIMPPSLPLQSELIEAAGVD

SEQ ID NO: 322040 - protein, 62 aa, Zea mays
  Clone ID: MRT4577_56764C.1.pep
TTTNTVQEMSTIDKKDQMIQPTEQLCQIQKNKCVKYASSLVRRKHCAQAAVTLFSSRPTNRD

SEQ ID NO: 322041 - protein, 52 aa, Zea mays
  Clone ID: MRT4577_56765C.1.pep
PFDSVRTQSSLHPLTFVQPTKKTKLNQKINSFLYTHPGAWASILQVISTHCS

SEQ ID NO: 322042 - protein, 52 aa, Zea mays
  Clone ID: MRT4577_56766C.1.pep
PLFFFFFWGRDWMFSVTYRLVQNIKQASLLFINSNMTNAVMHACPWIFNFMS

SEQ ID NO: 322043 - protein, 58 aa, Zea mays
  Clone ID: MRT4577_56767C.1.pep
ALAMSNLRMCLSWIIHLARQLVSFLFECCINFRNSRFREWGCCCTSIEFMLAWNSPLL

SEQ ID NO: 322044 - protein, 108 aa, Zea mays
  Clone ID: MRT4577_56768C.1.pep
CLGFSRVGPQPRFQGFFGWVLLSLLQRPPLRGLVPGLLAAQIAQFLPGGFPPRQPVPWPYAAGGGVPRFFEGGLWVDFWLASSLGPLAAVVRSLCVPLPLGGQGQCKQ

SEQ ID NO: 322045 - protein, 573 aa, Zea mays
  unsure (1)..(573): unsure at all Xaa locations
  Clone ID: MRT4577_56769C.1.pep
MGTAGKGAWVVPAPAYREVEGWEGAGDDAPGFRCAHSLTAVAPTKGHGPRLILFGGATAIETGASSGLPGIRLAGVTNSVHSYDVETRRWTRLHPAGEPPSPRAAHAAAAVGTMVVFQGGIGPAGHSTDDLYVLDLTNDKFKWHRVVVQGAGPGPRYGHCMDLVAQRYLVTVSGNDGKRALSDAWALDTAQKPYRWQKLNPEXDRPSARMYATASTRSDGMLLLCGGRDASGMPLSDAYGLLMHTNGQWEWTLAPGVSPSPRYQHAAVFVGARLHVTGGVLRGGRAIEGEGAIAVLDTAAGVWLDRNGIVTSRTLKSSNEHDASSDLLRRCRHAAASVGSQIYIYGGLRGDILLDDFLVAENAPFQSEITSSMYNVDRVPRGETQNRNNNFHSDSPVHQSTNNRQEAASGFSADKKSIDMLIEASTAEAEAVSAVWRAAKEASAASSEDSLSEGIGSESPLSETSPMPEDFDDGGSLEPDVKLHSRAVVVAKEAVGDLGCLVRQLSLDQFENESRRMHPSNNDQSYPGRRTLNRQRSPQGLHKKVISFLLKPRNWRAPADRTFFLDSYEVGEL

SEQ ID NO: 322046 - protein, 49 aa, Zea mays
  Clone ID: MRT4577_5676C.1.pep
DQVLEDNVVSHRRVKPQFRCKLLDYDGPVYFLDGILHMKPRTCSNVSKG

SEQ ID NO: 322047 - protein, 64 aa, Zea mays
  Clone ID: MRT4577_56770C.1.pep
LTSGNARHSIAYIIVAARSGMAFSNRVQLRANVNIRSQRGPQAARQGSKIHDINLFPWCSGPNM

SEQ ID NO: 322048 - protein, 98 aa, Zea mays
  Clone ID: MRT4577_56771C.1.pep
MIATLFFAALALAAGTIASPIEANANAGAAHATSTTAAAPQVGAQTQTSASAKLFGPWGGYPYGGYPYGAYSYGSYPYGAYPYGAYPYGTYSYGGIVA

SEQ ID NO: 322049 - protein, 67 aa, Zea mays
  Clone ID: MRT4577_56772C.1.pep
NIIMLTRTIGGWVTWVVLVLVLVVGCRAQAPDPAILINQMTTDEKYSLLRGIGWAGWNPKNNYYVGN

SEQ ID NO: 322050 - protein, 150 aa, Zea mays
  unsure (1)..(150): unsure at all Xaa locations
  Clone ID: MRT4577_56773C.1.pep
MGTVLGSPRAPGFFFSCGSLRAGGGPTAVGLPAGKGGIMGRXASXRRRLRAXATYNVKLITPEGEVELXGPDDGGILDXAEEERIDLPYSCAAGCCSSCAGKGGSGSVGXSDQSYLDDGQIGGGWVLTCHAYPTCDVVIETHKGEELTGA

SEQ ID NO: 322051 - protein, 324 aa, Zea mays
  Clone ID: MRT4577_56774C.1.pep
MCDDVQLCNRCVREFMVLARTWFAFGLPSKTECDNTQRAKREADVWGLHVGAELPYWAGAAIYKFEFTFKFGFEFQLQSRCIKQKSSSMICKGSMDFGCYNPVVINKIARVTILPKCGDKSKIKYKFWNIIDHVMKGEVVNVVLFMMRQLHDLKMDKNQNLAYAPYIMTLIKAKTRFEGQSDVARVPYSYGWKVLGYMMTHVDGRFDATQTHFDGQYSAFNTSFNVVGNQLDRIHSQFDDLRSHIQYIVHYPIMSRMNNMQQSFQDNMGALSSQFETLSTSDSIHTLDERQQQLQNDFSQFTFIFDTFSSQYYIMYPRSAPVAQ

SEQ ID NO: 322052 - protein, 114 aa, Zea mays
  Clone ID: MRT4577_56775C.1.pep
LRDGIRRLTPSARCELLQPRSLPGQRARLHTAPLPQCCQQSPDRESSSTPTAPPSSPYSGCWLSTSNRSSAAWSTRTISGVPELHLTSTRRRISSRDRSASPWTACITVSPRST

SEQ ID NO: 322053 - protein, 78 aa, Zea mays
  Clone ID: MRT4577_56776C.1.pep
ETKTTSFALACARSVRASDQSYLCLRATVFFVRASFILVDLTVNLIVTKQYGGSGVAPCAAHGDWGRVQRTRIGCEIV

SEQ ID NO: 322054 - protein, 139 aa, Zea mays
  Clone ID: MRT4577_56777C.1.pep
IALERWRKCTIGAGRSGDTVNRGVRHRVGVTRRPMTSSLPPAPTPSRLAWRIVRNKEASTLSLAASRPMAVEVVGMRSCRGHMAPDHYMTRHGEVSSRCASSGHWVLDYRPPRAHVRTMPKREAAKAARTTLANNRTVG

SEQ ID NO: 322055 - protein, 135 aa, Zea mays
  Clone ID: MRT4577_56778C.1.pep
MSEYKNVVGGRLKLKGKALDVKEGGVKKKKKKHQLEESSQIEHDELHKGGNSGLPADHNNELIEAGKVGDEERNLHPDYDHLTPAERRYIDQKQKIDMQKLAKVANKSHRDRIQDFNQYLANLSEHYDIPKVGPG

SEQ ID NO: 322056 - protein, 107 aa, Zea mays
  unsure (1)..(107): unsure at all Xaa locations
  Clone ID: MRT4577_56779C.1.pep
MSRTQSAXAXAXXAAXLLLAAAATTXEAAISCVLVSGGGAPCXSYARGTGSGPSASCCCGVRNPKSAXSTXADRRAXRNCPKNAXRGXSGXNAGNAASXPXKXXXSX

SEQ ID NO: 322057 - protein, 337 aa, Zea mays
  unsure (1)..(337): unsure at all Xaa locations
  Clone ID: MRT4577_5677C.1.pep
MKGLFKSKPRTPVDIVRQTRECLVYLDXSTRTPGAXDAKREEKMTELSKNIRDMKSILYGNGESEPVTEACVQLTQEFFRENTLRLLIIHLPKLNLETRKDATQVVANLQRQQVSSKIVASEYLESNKDLLDILILGYENMDIALHYGAMLRECIRHQSIARYVLESEHMKKFFDYIQLPNFDIASDASATFKELLTRHKATVAEFLSNNYDWFFEEFNSRLLSSTNYITKRQAIKLLGDMLLDRSNAAVMMRYVSSKDNLMILMNLLRDSSKNIQIEAFHVFKLFAANKNKPPEVVNILVTNRSKLLRFFAGFKIDKEDEQFEADKEQVIKEISAL

SEQ ID NO: 322058 - protein, 135 aa, Zea mays
  Clone ID: MRT4577_56780C.1.pep
MSEYKNVVGGRLKLKGKALDVKEGGVKKKKKKHQLEESSQIEHDELHKGGDSGLPTDHNNELIEAGKVGDEEGNPHPDYDHLTPAERRYIEQKRKIDMQKLAKVANKSHRDRIQDFNQYLANLSEHYDIPKVGPG

SEQ ID NO: 322059 - protein, 135 aa, Zea mays; identical to SEQ ID NO: 322055
  Clone ID: MRT4577_56781C.1.pep

SEQ ID NO: 322060 - protein, 230 aa, Zea mays
  Clone ID: MRT4577_56782C.1.pep
MSKPASSSSFLLLLLLSATLLATVCRADPDPVQDFCVAVAPGGHNNASSSSSTYPGFPCKPASTVVSDDFFFAAHAGGASTDNPMGAGVTPGNVEAFPGLNTLGLSINRVDLAPGGVNPLHTHPRSAELVHVEAGEMLVGFVSTEGRFYSKVVRAGESFVIPRGMVHFQYNVGKGAARAMTVFNSQLPGVVLAAQTLFGADPEIPDDVLAKSFQVDTDTIKLLKSKFQKG

SEQ ID NO: 322061 - protein, 52 aa, Zea mays
  Clone ID: MRT4577_56783C.1.pep
KRPSFLFIRATTLTCVFSNICWPTIYCIHGQINRFPSHSSKYLLHSIMNTKL

SEQ ID NO: 322062 - protein, 89 aa, Zea mays
  Clone ID: MRT4577_56784C.1.pep
PKKHQLLLMNDDDGDDTASAHRWCLPMWPAGPPPGSIKRMTDRWLQTADEPFFVCYYDGSRDRLAIVYGVNRAHQASRPSEMMSDLGMI

SEQ ID NO: 322063 - protein, 50 aa, Zea mays
  Clone ID: MRT4577_56785C.1.pep
NKEHKDGIISFYAICELYLLHTAINTSYYRMPCQVSLLLPIPVYLIRTAW

SEQ ID NO: 322064 - protein, 121 aa, Zea mays
  unsure (1)..(121): unsure at all Xaa locations
  Clone ID: MRT4577_56786C.1.pep
VLVLYYLRNREGGNTIYLDVVKDVALDKIEPWDLQMKCTIGTVDQNEWLFLGHLGEKYLMDTLTNRATTDXFWKANVRDKPIYTKRCLDSMSKTLVFYKGRAPNVPESDWIMHEIHLKTTD

SEQ ID NO: 322065 - protein, 233 aa, Zea mays
  Clone ID: MRT4577_56787C.1.pep
LGTSRPAGPSHQRPPPSTEGGRGSAPPSSPRRRRWKVRSPTPLLHHQRPPPSPSIVAAPPPHHVSQTRRSEDPPSTPRPPSSPSAPRRQGSEAAINALLPAPSMARADPVSFRQHRAISGISFRHQQKVLRILGKQERGRGGQGHNREAKLIQSSPFCRPHLDGFTVPPPHRDHGEGAGWLALGPPQPAARRDKIRIAKLEGLLYNKDGPSGGSEATSSAVKDLQPKLEGVTA

SEQ ID NO: 322066 - protein, 133 aa, Zea mays
  unsure (1)..(133): unsure at all Xaa locations
  Clone ID: MRT4577_56788C.1.pep
TKGATAHHTINNNVWLGMTTGEDTLSDKTELNTMRNSHTKLIVMLYNWPPLIKYEMAXYNLLTXTTVDHIHGKNSDLDTACDNDYSMCYLTMIKPRDSRLITTASGTRSPTRTTNRRCFASRTMTSYRLIPCY

SEQ ID NO: 322067 - protein, 155 aa, Zea mays
  Clone ID: MRT4577_56789C.1.pep
RPGGSSPPSFNITDLRSRLITKTIKQMTFYAYLLFVFTTAAVIQAQLLPSSILCAPSNSPPIIREDCRKALIKFPHESNVVFWHDKSNFRSCGTCKVAITKPSVPKPKIDAAVLGDAVTALHQGFDKCQGKPTNATIGISEPISVLLDIGTGEKC

SEQ ID NO: 322068 - protein, 98 aa, Zea mays
  Clone ID: MRT4577_5678C.1.pep
MASPPPGAGLTEYERRREENIRRNETILAALRRKAAELSASFIPTASSPKHPKKQHPLARTTSPVVLRRSLRTRGIPAGESSACDGANTSLNTPPSPT

SEQ ID NO: 322069 - protein, 75 aa, Zea mays
  Clone ID: MRT4577_56790C.1.pep
GAAGPRLRVERPQTDGLVPVGRNTSGHQLHAVSRQSGKRIPSPHVSGTRQLPLHRLAHRSEWVADPVSARTEVYL

SEQ ID NO: 322070 - protein, 84 aa, Zea mays
  Clone ID: MRT4577_56791C.1.pep
CHDFSHRKCLFPISTLVLMRFLRISCRVRVPAISDGKYSHRHRMCGQPSYASTCLVCRSLYQRDSFPCCAFGVVELFKNQVSSQ

SEQ ID NO: 322071 - protein, 616 aa, Zea mays
  Clone ID: MRT4577_56792C.1.pep
MLGKGEEEKPDGDATQKEQNELDMNVEANGEKDQMPNTNELGLYGMYHEWLEDSNTQNGSFPTQAAESQNEKEVQALPKSSGDAASYTWKLCNSSASTDYIPCLDNEKAIKKLRTTKHYEHRERHCPEEPPTCLVPLPEGYKRPIEWPKSRDKVWYSNVPHTRLAEYKGHQNWVKVSGDYLLFPGGGTQFKNGALHYIDTIQQALPDIAWGKRSRVILDVGCGVASFGGYMFDRDALTMSFAPKDEHEAQVQFALERGIPAISAVMGTKRLPYPSRVFDVIHCARCRVPWHIEGGMLLLELNRLLRPGGYFVWSATPVYQKLPEDVEIWNAMSTLTKSMCWKMVNKTKDKLNQVGMVIYQKPMDNICYEKRSENSPPLCKESDDADAAWNVPLEACMHKLPGGSKVRGSKWPELWPQRLEKTPFWIDGSKVGVYGKPANEDFEADNAHWKRVVSKSYVNGMGIDWSKVRNVMDMRAVYGGFAAALRDQKVWVMNIVPIDSPDTLPIIYERGLFGMYHDWCESFSTYPRTYDLLHADHLFSKLRKRCKLAAVFAEVDRVLRPQGKLIVRDTADTINELESMAKSVQWEVRMTYTKGSEGLLCVEKSMWRPKELDAST

SEQ ID NO: 322072 - protein, 102 aa, Zea mays
  Clone ID: MRT4577_56793C.1.pep
PSALAPSFRNRSCCLLIRFLSLKAVCFTFPSVVGTKNKSLTPLPPNRLQCISGNITWLSERDPCHLALPPAAQPRSGSRPRWLSCSSQRRSWVRPMLFCGCR

SEQ ID NO: 322073 - protein, 409 aa, Zea mays
  unsure (1)..(409): unsure at all Xaa locations
  Clone ID: MRT4577_56794C.1.pep
MAFGRGGKMDGRRPSSSSSSSSFCTTTTVVLFVALCLVGAWMMTSSTVFPLETSSNKKPVVKQQPAPVSFGASQEASPGIAGEGSEKFEDTDNNDATVPEEPNKQDASEQENFNEKPEEKELEVPVEKAETKDMFDDANGKSEGLSDETKNDDGEKSVEKKDDEITNESGDEKTDGESKDGQEEKPDGDATQEEPPKIEENVEENGEKDQSSNSNEVFPDGAQSELLKESNTQNGSFPTQAAESKNEKEVQALPKSSGVATSYTWKLCNSSASTDYIPCLDNEKAIKKLRTTKHYEHRERHCPEEPPTCLVPLPEGYKRPIEWPKSRDKVWYSNVPHTRLAEYKGHQNWVKVSGDYLLFPGGGTQFKNGALHYIDTIQQALPDIAWXKRSRVILDXXXGVASFGGYMFD

SEQ ID NO: 322074 - protein, 90 aa, Zea mays
  Clone ID: MRT4577_56795C.1.pep
VDELFDHLFFRCDYGARCPYLRDTELRLPLLVTFMRIIHDCLKKPAPSCDSKMRSGTTSTHDARSSSDLCTGRLETSTSTTTPAPLPSEN

SEQ ID NO: 322075 - protein, 222 aa, Zea mays
  Clone ID: MRT4577_56796C.1.pep
PGRGSYCPQPASVASSGRRFPSVSAAYADWIASAGGDDLSLGFNAAGASANGLWGPASRQSAALNYGITAAGDVGMVVLAPASSFHHQRAAAAAAAADAADQGFALLSAGQCGLADPGAPKSGSAIQFWQSHSQPHTTPPAAAPADKKQVVSAVDYGGVSSGSGGSTTCNDCGNQAKKDCPHQRCRTCCKSRGFDCTTHVRSTWIPAARRRENTRSGATFPL

SEQ ID NO: 322076 - protein, 119 aa, Zea mays
  Clone ID: MRT4577_56797C.1.pep
VTARGRTLTLCGCCFADQLLMLTGTCHVYWYWPGQGQDKAPYPYPSKGIGRARGWCTSGSGLILLTATFTLINLNVHELQPQIYHHQAESRSTCSSLNVQDCSRPRTKTSGSRCTCHCH

SEQ ID NO: 322077 - protein, 60 aa, Zea mays
  unsure (1)..(60): unsure at all Xaa locations
  Clone ID: MRT4577_56798C.1.pep
VVSCLFVRPRRRTWSIACRSWALVQCSCACAVTPAVCFVRPSDSRKLALCVARGSAAXEI

SEQ ID NO: 322078 - protein, 90 aa, Zea mays
  Clone ID: MRT4577_56799C.1.pep
ARNALAGSTRSHHAKSGKNSSSHSLQKPNLKAEPEHHQASEAVPSYATTATAATTTSTTTTATTSTTSNSTPPETVAAVKEEAMVGSEVE

SEQ ID NO: 322079 - protein, 36 aa, Zea mays
  Clone ID: MRT4577_5679C.1.pep
KKKKKKKKKKKKKKKKKKKKKKKKKKKQRKKKKKKR

SEQ ID NO: 322080 - protein, 57 aa, Zea mays
  Clone ID: MRT4577_567C.1.pep
MKLFCRVPKSLDSSPLCNKGVMSMSWSTPWYSLLQVERKASGPCMSQMKVLPIPGLP

SEQ ID NO: 322081 - protein, 255 aa, Zea mays
  unsure (1)..(255): unsure at all Xaa locations
  Clone ID: MRT4577_56800C.1.pep
MGRAERGAPKHTQRAAQQPDDVRASQGGGQRIQRKETRRADKQKKKKKKRENDKKEPKQRKKASKKKTPKKEKPKNKTTGQQQNKHDKQRKTQETTKHKSTRKKTTQNNKNGTKNKKARKQTTNQQKKKQKQQKGKPPEAKKKERRRKKKXKKKRKKNKKQNTKHHKKKQHKTTKKAKTNPKTKHRKNQKTHKQNKKQNKNKKQKRQNKRQKTKNTKQTNKKKKKQNEQNKHQPKDKPKKKTPNKQKTKNKKPKT

SEQ ID NO: 322082 - protein, 197 aa, Zea mays
  Clone ID: MRT4577_56801C.1.pep
MSAGNRYTNRSPSRAMARKDLSSRRRRLPLRRPRDEDRLNALSDDLILQILGRLDTRSALGAAALCRRLAYLPRELPVLDLKVSDALPPRYRRWLDLLNEAVRSDALRGCSRRLRPIVGRYERRAMRAMVSSVRSLRARRHRRACSRLSLEFFSFSTSATINRLVVDAVDFWGDEDLQVVPKPTEPIPHLSPVHPLP

SEQ ID NO: 322083 - protein, 86 aa, Zea mays
  Clone ID: MRT4577_56802C.1.pep
MMTISRAAMAICLWMLKYGRTVNHRRGGDHRGDRLYWCVDVECCSSCSHAAPVLLVAKLIAVKIMILVKVEMRCMHFLLVPHRNLN

SEQ ID NO: 322084 - protein, 53 aa, Zea mays
  Clone ID: MRT4577_56803C.1.pep
DRHIPIPKPFTHTNFHITPAKTIQPIYFPIINGISLKFNIPKYKSSFLISMFT

SEQ ID NO: 322085 - protein, 169 aa, Zea mays
  unsure (1)..(169): unsure at all Xaa locations
  Clone ID: MRT4577_56804C.1.pep
AQFVSATHAFIILQXSVAASPFIPQFIYAVNSIDFGHILVXASSVQQCLATSLFQRPISQVLQLSRAHLPIQAILSHHNHQFLPTVIQLDVVNLRLHAQQXVVASSHARXAMVNVYHNPRQLKQFKAALSYRVMVISAVSVQHHLLLXTXPLVVGNAKVYVILPFMLHN

SEQ ID NO: 322086 - protein, 75 aa, Zea mays
  unsure (1)..(75): unsure at all Xaa locations
  Clone ID: MRT4577_56805C.1.pep
MAFKGLPRDSRGSLEVFNPDAPVSDRATTSPFLLPPAAASHPSLLAAGDGGXTGXPGRPQRAXEWGLVLQTDEHT

SEQ ID NO: 322087 - protein, 38 aa, Zea mays
  Clone ID: MRT4577_56808C.1.pep
MAFKGLPRDSRGSLEVFNPDAPVSDRATTSPFLLPPAA

SEQ ID NO: 322088 - protein, 59 aa, Zea mays
  Clone ID: MRT4577_56809C.1.pep
YDVKFGDKNVFAGGVQAMERPEVLAGAWPTRQSSGWRSPCLSLDPPESAALDSDVPRVR

SEQ ID NO: 322089 - protein, 74 aa, Zea mays
  unsure (1)..(74): unsure at all Xaa locations
  Clone ID: MRT4577_5680C.1.pep
XGSFLXXFVCVVFXSXGXXFGXLALXVWSXGXXGXXVXGLXFXXXXFXGXXSFXXXXLXXPLPGVSFXXXPPPP

SEQ ID NO: 322090 - protein, 79 aa, Zea mays
  Clone ID: MRT4577_56810C.1.pep
TLLVLSRKKRYIIQPHSRFWITLIRPCTSPCAKYSPSYFVNYLQYFFFAPCFCCLPILLIYFVEFTICVLMPLPRKMDK

SEQ ID NO: 322091 - protein, 42 aa, Zea mays
  Clone ID: MRT4577_56811C.1.pep
QKSLLTVKAIRVCNGPEAAASTSAIEELLQWLRRIRVSTGLA

SEQ ID NO: 322092 - protein, 50 aa, Zea mays
  Clone ID: MRT4577_56812C.1.pep
GFYTVGYLLLNPIEGSGIIRVVPPSHPYVHKHSKAGASFLIIKITKNRWV

SEQ ID NO: 322093 - protein, 73 aa, Zea mays
  Clone ID: MRT4577_56813C.1.pep
GPGYPGFFFGCSKACFWGNKMWGVCFCPFYLLILNVSPRVVLFPLRFGVFFVTGPAGSPPPPVCSLLKPVNPH

SEQ ID NO: 322094 - protein, 164 aa, Zea mays
  unsure (1)..(164): unsure at all Xaa locations
  Clone ID: MRT4577_56814C.1.pep
PSAGRPGGARHTATTTHAGPTEGNDSEETASXPSGPEPRQDXQPREEGAHXSEKRSPESARHARGARGKGARERTHDATTKTSAKXQRAPGARTPRTARTKSETHEPEXPKTSRDPRGSARNTNTREEQGGQQGKRNAQSATRDGNKDRDXXHAXEHSPRAHXQ

SEQ ID NO: 322095 - protein, 194 aa, Zea mays
  unsure (1)..(194): unsure at all Xaa locations
  Clone ID: MRT4577_56815C.1.pep
GPPLGVFFFFFFSFFFSFLFFFXFAPAXFXXPSXLXXXXXXXXXXXXXXXLLVGCLPAXXXAXXRXXXGXSXGCAAVXXSXGSCXRGFRGVCRGXCXWWCPCPWXRXRXWCGWRRPWXXGRRXSXRXXKKKTRXPXPAXXSSALQVLWXRPXXXXGPXXXXSXXECCSXSSXPLALPLAAVLXXPPPPLXPRAA

SEQ ID NO: 322096 - protein, 40 aa, Zea mays
  Clone ID: MRT4577_56817C.1.pep
FLFSKDDSNRGGHLTNMGGYKSLISHIVRHVLKPVFLLHI

SEQ ID NO: 322097 - protein, 140 aa, Zea mays
  unsure (1)..(140): unsure at all Xaa locations
  Clone ID: MRT4577_56818C.1.pep
CPPSPVRESRQPNLSFEALNPRAVTVVVDPIXSVKGKVVIDVFRLINPQTMMLGQEPRQTTSKVGHLNNSSIQALIHGLNRHYXNXAINYRKNELEKKMLLNLHKKKWIDGLILKRFDTHSKXTNEQTVQVPSVLYGNDH

SEQ ID NO: 322098 - protein, 156 aa, Zea mays
  Clone ID: MRT4577_56819C.1.pep
FVLQLHKVPPQGGQLKGPYLLKLALKEAIDEGMDVIYQKFSVYVGRGVDLLVRDLALIKEQTKGTDFVQAWCSRLAHQWLNKGFINFVDKSWTILPYVAGVYLFVLFVKTLVESGIPPWEYPDFLNFYRVYGLTSAIAFYQDEKKKKEEAAAAGEK

SEQ ID NO: 322099 - protein, 256 aa, Zea mays
  unsure (1)..(256): unsure at all Xaa locations
  Clone ID: MRT4577_5681C.1.pep
MKGLFKTKPRTPVDIVRQTRECLVHLDXSTRAPGAXDAKRDEKMTELSKNIRDMKSILYGNGESEPVTEACVQLTQEFFRENTLRLLIIHLPKLNLETRKDATQVVANLQRQQVSSKIVASEYLESNKDLLDILILGYENMDIALHYGAMLRECIRHQSIARYVLESEHMKMFFDYIQLPNFDIASDASATFKELLTRHKATVAEFLSNNYDWFFEEFNSRLLSSTNLIACLFAPLLSHPLHLGVTHSAYAPTRVE

SEQ ID NO: 322100 - protein, 82 aa, Zea mays
  Clone ID: MRT4577_56820C.1.pep
YFFDDAYDQVLRVWRMNEMYMHQITCSRVNLEHWECDNQQKLIWMSQGLQVELVLDRAHPLDQEFFNWGGDKKHEPWGTNAA

SEQ ID NO: 322101 - protein, 37 aa, Zea mays
  Clone ID: MRT4577_56821C.1.pep
FRPLVDKYAADEDAFFADYAEAHLKLSELGFGEAGCC

SEQ ID NO: 322102 - protein, 40 aa, Zea mays
  Clone ID: MRT4577_56822C.1.pep
FSCPRSVCSPLGSVCARLRCVFGGPQGRVGRSGRSVRVRA

SEQ ID NO: 322103 - protein, 113 aa, Zea mays
  Clone ID: MRT4577_56823C.1.pep
RMHLEVAQFALCSIYVGHALLATRAGQTFASLGFTGIVAVVFLVLAIRGHEKFSEERCRPRRRIRCPLPALPSSATTSSVLSPPVSGGGSKASRLIGVILFIPPPCRNPIALW

SEQ ID NO: 322104 - protein, 40 aa, Zea mays
  Clone ID: MRT4577_56824C.1.pep
NLIGLSWIFVLSLALCRAACYRRLRWSVLKSRSLVLDVVK

SEQ ID NO: 322105 - protein, 109 aa, Zea mays
  unsure (1)..(109): unsure at all Xaa locations
  Clone ID: MRT4577_56825C.1.pep
PGNLFGATRFAKARPWFFTGPQKFVEFPXSLDKQNNVPPEKSLKLPPKIEGAKEGSPPLALSFNKNENGPKALKDMLCNLKWVLPGFMGKPSFAPPFGSRPPQSLKTKS

SEQ ID NO: 322106 - protein, 137 aa, Zea mays
  unsure (1)..(137): unsure at all Xaa locations
  Clone ID: MRT4577_56826C.1.pep
GGGGDYTCVGGRGGSFFGSGYGPAGSDVLTGDWYCSCRAHNFASRCSCFKCSAYKEEAAANRGAGGFDGYXHAHGATAYATVLLELXGSDRTTKRTGWKYRNWICTRXGCSEHNXFYSMMEWFMCQRTGDFGSAVIT

SEQ ID NO: 322107 - protein, 65 aa, Zea mays
  Clone ID: MRT4577_56827C.1.pep
LTFTPWVDSHTIKSMCISAIALCVATCEAFAFYRTSCRAPCAKAEWMLFRDGPVSLRQSSIRMPP

SEQ ID NO: 322108 - protein, 65 aa, Zea mays
  unsure (1)..(65): unsure at all Xaa locations
  Clone ID: MRT4577_56828C.1.pep
NHSLVQLMQVEVSIVFGLSLRIALLLYQPNLXKSCLIIFLNLVSLISSYLLKAYQLHLVIVFLCI

SEQ ID NO: 322109 - protein, 733 aa, Zea mays
  unsure (1)..(733): unsure at all Xaa locations
  Clone ID: MRT4577_56829C.1.pep
MPGGKRRRARNPTAGGPQRSAGAGRRRPVPELPSFVSPASVAAAFSPASGGRSRGRCARRCGAYSDGESSHAVPFSYPSLRSCSAYPERDQAQALEVTIDTAPCADPAASVPMYSYGPAVLGETGLVLSADEEEACDRGLHLGLGFRDGGHDEMELKLKELTEEDVSFKTPKRKQEQRAKANPGFLLIGGVRIYTEDISSSESDRMSSSDVDLEPNSGDGERFENDDGDSDEEDRQGEERDSISDSESLGSESDEDLSTGDSSSVDNEVVADYMEGIGGSDELLSSKWITSMNLGDADTIEQMYTNDNDGFVKKGKEKLEGYALMTASEQYGMKRRNSLEQRKGKGMVCDRDLSSMQVMDQEDMFMVNNVWMPNRSRKGMKTGSSSSQLSQSWPKDDRKSKNYQSRPGEKKQHRKELIAKKRQQRALSRGVDLGQINSKLRKMVVDQVDMLCFHPMHSRDCSQVQRLASIYQLKSGCQGSGKKRFVTVTLTGHSSLPSADGQVRLEKLLGTESENSVSSSKGPARLKGHSAPGKCVKHWESSGNKSTKKQVSFAERPVSFVKCGTIVDSLTEAIAGPSGGDTSCVKPVESNSTHLGSFEVHTKGFGSKMMAKMGFIEGTGLGKDGQGIVQPIQAVHRPKSLGLGVEFDSVAEXRSKQGQNPSNXFRAEAECVGTRDEXVGSFEKHTKGFGSKMMVNMGFVPGSGLGKDGQGIATPLTGVRRPKSRGLGAEDKY

SEQ ID NO: 322110 - protein, 309 aa, Zea mays
  Clone ID: MRT4577_5682C.1.pep
MADAADNSMALVHSSLADSVLTSPRTLRQGQKWEVEYARYFGTPRRDPTAAPPSGLRYIMRGVHRHQGTWIPASCPASLCVCHPSLPSAVPVLTISIGDVVFEEHFVSILNFSWPQVTCVTQCPIRGSRVVFVSFCDKFKQIQKFAVRFPQPCDADSFLSCVECSCGSSGTMDIIPFGNDYVCEDSSASEYIASNGLHHRLDDASNLEEQCSDHTIDEPPMNYHEETDQPVLEPLSASNTSNNSAFPPSFNQMLKNCSIDYDQEEPCPLAASNHVLQEVYVLILLMLLPMKKGLLVKEWMLLKELMPVY

SEQ ID NO: 322111 - protein, 45 aa, Zea mays
  unsure (1)..(45): unsure at all Xaa locations
  Clone ID: MRT4577_56830C.1.pep
MARTRIQKELMDLQKDPPTSCSAGSAGEDLFHWQATIMGSSDXPY

SEQ ID NO: 322112 - protein, 53 aa, Zea mays
  Clone ID: MRT4577_56831C.1.pep
EAILFTVILSVVRAGFSRLNYRFPVWIVMPSWSFGFCLFPPGSMGDSGQKKNN

SEQ ID NO: 322113 - protein, 61 aa, Zea mays
  unsure (1)..(61): unsure at all Xaa locations
  Clone ID: MRT4577_56832C.1.pep
MVADRLXRLALLXLSACLCSAXWAHPRLEPTIRLPSERAAADETDDDAVRTRWAVLIAGSN

SEQ ID NO: 322114 - protein, 86 aa, Zea mays
  Clone ID: MRT4577_56833C.1.pep
VLIYTNMLTGSAWRSTGIPGRKEHVNIYLLLRHYCAKKKSTLIDMTQRSTLEETNTTIRSGVHDLIGELRLHHARQSKQRIREQPG

SEQ ID NO: 322115 - protein, 69 aa, Zea mays
  unsure (1)..(69): unsure at all Xaa locations
  Clone ID: MRT4577_56834C.1.pep
DSASLAHTFIXDGNAMVTGADLPYQDQESVQFYPTDIHGSEILSTERSGGESGILRNSECEQNTERSCF

SEQ ID NO: 322116 - protein, 64 aa, Zea mays
  Clone ID: MRT4577_56835C.1.pep
CNQQHTARAKLSNHHKATGPDAQPGQLMALADHLLKGLAAQPYHLGPPRRSGPRPNYQPSNCYN

SEQ ID NO: 322117 - protein, 59 aa, Zea mays
  Clone ID: MRT4577_56836C.1.pep
FELKTASILLKPSNASWNGLCSVLTHSVFQALRFETARFRLAFDRHSTTTMACPRGGCE

SEQ ID NO: 322118 - protein, 96 aa, Zea mays
  Clone ID: MRT4577_56837C.1.pep
SLTSTTTIRMWLWTLSLRYMCVHGSGLTSARDEVNYASLRANVRMLILIPLRFTLSLKCGALPQLGPHLPPCDLKDICRGSAAHTDAGVADSIYLL

SEQ ID NO: 322119 - protein, 44 aa, Zea mays
  Clone ID: MRT4577_56838C.1.pep
STAIIMPIVCAVVYTAGSRVMACSRLMQAAHSIQLLRNVLVRVG

SEQ ID NO: 322120 - protein, 184 aa, Zea mays
  Clone ID: MRT4577_56839C.1.pep
MGLTFTKLFRRLFAKKEMRILMVGLDAAGKTTILYKLKLGEIVTTIPTIGFNVETVEYKNISFTVWDVGGQDKIRPLWRHYFQNTQGLIFVVDSNDRERVVEARDELHRMLNEDELRDAVLLVFANKQDLPNAMNAAEITDKLGLHSLRQRHWYIQSTCATSGEGLYEGLDWLSNNIANKARSI

SEQ ID NO: 322121 - protein, 61 aa, Zea mays
  Clone ID: MRT4577_5683C.1.pep
TKSLAYTLYFIKPTRPHKGGVGFPIGPANTNSLPIHSYKRHWKHTAISYLKSIDTHAFFTF

SEQ ID NO: 322122 - protein, 184 aa, Zea mays; identical to SEQ ID NO: 322120
  Clone ID: MRT4577_56840C.1.pep

SEQ ID NO: 322123 - protein, 108 aa, Zea mays
  Clone ID: MRT4577_56841C.1.pep
KNGGEKKETKWGPRAFFSFWGRGGHPPRGADQRGGPGPGKKGGPLRVVAASHVNFTGWWLMTTQKGWVPGSGGAQLGSMAHEKNIPFLTLEEKPWPGSRNSTKAFCFT

SEQ ID NO: 322124 - protein, 52 aa, Zea mays
  Clone ID: MRT4577_56842C.1.pep
SISAGSGTMIFVNSSDPLLTILFFVPFGYHLTHPTCSRRDTKAVYPKTIFKE

SEQ ID NO: 322125 - protein, 103 aa, Zea mays
  unsure (1)..(103): unsure at all Xaa locations
  Clone ID: MRT4577_56843C.1.pep
VLQSLVKPGKQARLEEFKIPAKIKLKPKPWTLXSGLVTYALKLKRQVIKKAFFMALAQLFNQYGSRSSFSMIGVFLVAPANNSFFYLALEQCPGLSFKTIVDS

SEQ ID NO: 322126 - protein, 161 aa, Zea mays
  Clone ID: MRT4577_56844C.1.pep
STPSEKNDRRTEAETNSGNASKSADKKPAPKEPPKDYIHVRARRGQATDSHSLAERARREKISERMKVLQDIVPGCNKVIGKASVLDEIINYIQSLQRQVEFLSMKLEAINAHVSNATVAFPTKDFGVAPYNTAPSLTLDPQTPREYAQGSMSDWLLSWAS

SEQ ID NO: 322127 - protein, 71 aa, Zea mays
  Clone ID: MRT4577_56845C.1.pep
TMCNIFEERGAPIRCPSHITLRRSCTIFTTSHYISFIFLIEGVTFRCLDRLSYSIEPHTCSSLITITIVAT

SEQ ID NO: 322128 - protein, 87 aa, Zea mays
  Clone ID: MRT4577_56846C.1.pep
MPPSTRSPFLAKKYESGATTQAVAPRPPNDNMHVPTFAYTNDLLKTTKTIAPPDQCILPNNKTNATSCKPVAPITLENTKANRKAHP

SEQ ID NO: 322129 - protein, 365 aa, Zea mays
  Clone ID: MRT4577_56847C.1.pep
AKGDTLYTGSDSKNIRVWRKQKDSGGFKSSSGLVKAIVMSGERIFTGHQDGKIRVWKVSAKNGMHKRVGSLPRLRDFLRGSLNPSNYVEVRKNRSALWIRHSDAVSCLSPTDPAQGLLYSGSWDRTFKVWRISDSKCLESVVAHDDNVNSVVAAFDGLVFTGSADGTVKVWRREQQGKGTKHTAVQTLLKQEHAVNALAVSAVAPVLYCGSSDGLVNFWEGDRHLVHGGVMRGHKKAVFCLAAAGALLLSGSADNTIFVWRRDCGVHSCLSVLTGHTEPIRCIAVVEDNGENSSESNAGDSAAGGGSSASRWIVYTGSLDKSIKVWRVTDEAPDPLFHGSGDAPQIFDRYPGDAFGTSGSTTSFR

SEQ ID NO: 322130 - protein, 80 aa, Zea mays
  Clone ID: MRT4577_56848C.1.pep
KRGGKIIFISYYTNHLYAFFIITSVYHQDPELHQLSPHQPFSLSLSLRNTSSFLYSYPTFISTLSVFYTLHFLFAAFCYV

SEQ ID NO: 322131 - protein, 45 aa, Zea mays
  Clone ID: MRT4577_56849C.1.pep
QFVTRCRFHHVYMPSLGLTPSGKRTHSVYPINAYARHLKIIFSSG

SEQ ID NO: 322132 - protein, 124 aa, Zea mays
  Clone ID: MRT4577_5684C.1.pep
PRKTHYPWIRRQTLPATYGTIPRPSHMTRTSCCRTPSATCRTASRTCSAPRHIFIPNKRSTRAISSSRPSGTPPASRRSSPRPPPSSPSRSYLMSCYEMHRCADPMRLRKDRYRLLLPHQEALG

SEQ ID NO: 322133 - protein, 99 aa, Zea mays
  Clone ID: MRT4577_56850C.1.pep
CHHHMLILREVVTHVLSIRGVEGGPQVRVPQRRRREFIGDGVRRLVVGVHMSIGDLCLQLRAKDLDYREYGTRARALNRKRMGSRESLKVDGDCEGSQK

SEQ ID NO: 322134 - protein, 164 aa, Zea mays
  Clone ID: MRT4577_56851C.1.pep
MAAPQATNRQVVCSCKNKLISNMTSQLIEMFSILPANSLHRFKCVSKVWCGLVTDPLHRQLFAQTVAGFLCRVDGDGDTESSRLTRPNAMVLERKETMRRFVNVSGMAELHPDAKGLHNVILDDCDGLVLLARARGHEPPDLHPPACYKVRNPTTTWWASVPGS

SEQ ID NO: 322135 - protein, 113 aa, Zea mays
  unsure (1)..(113): unsure at all Xaa locations
  Clone ID: MRT4577_56852C.1.pep
MHGGGSKMLGVVNFITFLASIPVLGGGIWLASRANSTDCIRFMQWPGIIIGLAVMVVSLMGFAGACYRQTWLLRIYLFDMFFIVVGLLSFIVFAFTATXRGEGQAVMNRRFLE

SEQ ID NO: 322136 - protein, 36 aa, Zea mays
  Clone ID: MRT4577_56853C.1.pep
SVSLFSKKVARPLAYMCVWMFSINPLLPPLISQSKE

SEQ ID NO: 322137 - protein, 64 aa, Zea mays
  Clone ID: MRT4577_56854C.1.pep
RPGINLPASQPHNTAPALLLFHSGFFKKIWRAKTQFTVHKHTTPQTGKTTHKTQPHSPLQHKPP

SEQ ID NO: 322138 - protein, 95 aa, Zea mays
  unsure (1)..(95): unsure at all Xaa locations
  Clone ID: MRT4577_56855C.1.pep
PXPCATSRSSPSMSSSPWRWWRQSRVIRTTMPPPPPPALRPCSRTRARTPRRRQRRDASWQYRRRDSSIALSRRRRVDVCARVALAAHRSLFPAG

SEQ ID NO: 322139 - protein, 80 aa, Zea mays
  Clone ID: MRT4577_56856C.1.pep
IWKQPASTTPSTGPLPELPNLCCFFVGFHGVIIELQKTTKKRTPRHMYGKCPAFRMIVHPFLPDPGQGVKLGAAAYSLLS

SEQ ID NO: 322140 - protein, 522 aa, Zea mays
  Clone ID: MRT4577_56857C.1.pep
MQPQVAAVFFVSAACTVALAALLAVLRMRPPWWCACPVCEAYLTASWAGDFDNLCDWYAHLLRTSPAQTVHVHVLRNVLTANPATVDHMLRARFDNYPKGAPFSAILADFLGRGIFNVDGDAWLFQRKLAAAELASPALRAFAVRVVASELRGRLIPLLRSAACASGREGGGGGGGGRVLDLQDVFRRFAFDCICKISFGLDPGCLQLSMPVSSFEDAFDTASTLSARRATAPMHVVWKLKRLLNLGDERRLRDAVHLVDALAAEVIRQRRKLGGAASSGSDLLSRFMGSIDDDKYLRDIVVSFMLAGRDTVASALTAFFLLLSDHPEVAAAIRDEAARVAGDDDDGDGDDGRLTDSAFGKLKGMHYVHAALYESMRLFPPVQFDSKFAAGDDTLPDGTAVAKGTRVTYHAYAMGRMESVWGPDCGEFRPERWLRDGRFVPESPYRYPVFQAGARVCVGKELALVEMKAVIVSVVQGFDIEAVSRSSHRPKFAPGLTATFAGGVPVRVRRRARASDELRPPS

SEQ ID NO: 322141 - protein, 30 aa, Zea mays
  Clone ID: MRT4577_56858C.1.pep
TNYIILTKPKTVPLFILSKLTLTTLQTSYQ

SEQ ID NO: 322142 - protein, 144 aa, Zea mays
  unsure (1)..(144): unsure at all Xaa locations
  Clone ID: MRT4577_56859C.1.pep
PNGRPPTPXXYLQQAKTYYPFSPXSSKQNRASPSLKQATGWLPFSNQPSLRAKNPANPSLQTNKQXWLAPLCXQTXAFLNRNPSRAFLNQPTTFNLGGVAPSFLRIGFKLSLVNFEITKRFFLGMEGNGGPKPQKKKKGYQVFP

SEQ ID NO: 322143 - protein, 261 aa, Zea mays
  unsure (1)..(261): unsure at all Xaa locations
  Clone ID: MRT4577_5685C.1.pep
LGTSRPAGILICRTPFGLLPPPPLARVPAPNTSTPRAGCERCPRSQRPPPPAPCASSSPAATASTSPTRRLALTTSGKPRRASRRHVPAKPAPAPASSPRXAAPPARTDVRPPALPVMPDALPHSESAAQEPPHRRGDTRSRTRLSRDPVEPSGRPRAKXRRKGRTNSDLALQATRVHGSAPSDTVGRRGAVVAQWERRSSPRRSTGRRRPPTATTRAPAASLLRRPPRGSRTPSTTRGGVGGHADGARPEESRRAPPPTR

SEQ ID NO: 322144 - protein, 154 aa, Zea mays
  Clone ID: MRT4577_56860C.1.pep
GGGNFLAKRGGGGFWLYQAPVLFFGKKGGSGGGLNGKIFLPPKPGGVPGPFQRGLGRIFPFLWEKFNFLWKGGIFPTIFFGWRFRSPNPGKYPKGGGTGAPKNFWGIKFPLCFSAGQFFLKKKPLFKEGVGCCAKKFVCFSPWQRFIVEGIVFG

SEQ ID NO: 322145 - protein, 287 aa, Zea mays
  unsure (1)..(287): unsure at all Xaa locations
  Clone ID: MRT4577_56861C.1.pep
MLAAPAALHLLLPAPPLPPPHYHHHHVAFPAPPLHASLPCSRRPRRRPPRHGVARASAAVAEEASSSGPAKFSVRIPVGDREILVETGHIGRQASASVMVTDGETILYCSVCLSDTPNDPSDFFPLSVHYQERLSAAGRTSGGFFKREGKTKDHEVLVCRLIDRPLRPTMPKGFYFETQILSWVFSYDGIHSPDCLAITAAGIAVALSEIPNKQTIAGVRIGLINNQFIVNPTTEQMENSELDLMMAGTDSAILMIXGYCDFLTXEKLLEAVEAGQVAIREICXAID

SEQ ID NO: 322146 - protein, 252 aa, Zea mays
  unsure (1)..(252): unsure at all Xaa locations
  Clone ID: MRT4577_56862C.1.pep
MEKGTPALGWAARDESGLLSPYSFSRRVQKDDDVTIKVLFCGICHTDLHIAKNEWGNALYPIVPGHEIVGVVTDVGPGVESFKAGDTVGVGYFIDSCRSCDTCSKGYENYCSTLVLTSNGVDYDGATTQGGFSDVLVVNQDYVLRVPESLSLAGAAPLLCAGVTVYSPMMQYGLNAPGKHLGVVGLGGLGHMAVKFGKAFRMTVTVISSSPRKREEALERLGADAFLVSQDAEQMKAAAATMDXIIDTVSAG

SEQ ID NO: 322147 - protein, 61 aa, Zea mays
  Clone ID: MRT4577_56863C.1.pep
VKFCGGNHVSRLFKIMVCVWQRWVLSRIISVSCDHRFDRSLSVRPAHFKNPTLRHLTWCQW

SEQ ID NO: 322148 - protein, 65 aa, Zea mays
  Clone ID: MRT4577_56864C.1.pep
MTTGSNGDGGGAGSWYPQRRPNYGYGGGYAYFHGCCSCLFQLLTFLALLALAEALSYALLAKTRK

SEQ ID NO: 322149 - protein, 110 aa, Zea mays
  unsure (1)..(110): unsure at all Xaa locations
  Clone ID: MRT4577_56865C.1.pep
TKKTSYTKKNRHSIHYTLLSLIPQMLPPRYHIITYLCPSKSTXNCGGDTPYXYHTQXLQNXTLNQSISSHYXLTXLSHIFQXXXLQXINXSKLXYSHFLTSIPSXXLPST

SEQ ID NO: 322150 - protein, 94 aa, Zea mays
  Clone ID: MRT4577_56866C.1.pep
GKGPETFPRDKIKIGCLNLRPFSMPSKKRLGLVKAPDQFVFFFWAKPKTRKKFGFKNPPPLKGGGYFKVKKRAPPCFLGKRRGFFPGKKKVFPP

SEQ ID NO: 322151 - protein, 113 aa, Zea mays
  Clone ID: MRT4577_56867C.1.pep
KKKGPKGQKIRGEKTTPTQMPFVWGKKNRPPLHKIKGGPSPQKGPRGRAQKKVQKGKAGKIFFFPPPPLKTGKRTPSLSPKKKLLGPVVQKGVNFYSDQNWGASPAPFPLFGP

SEQ ID NO: 322152 - protein, 71 aa, Zea mays
  Clone ID: MRT4577_56868C.1.pep
EKKKVLILGVSASTMTSPLKPGTYTEDHSTENLCLSYQCYILHQLNAAPRNTMALSTACQNTTLTSYHNFN

SEQ ID NO: 322153 - protein, 92 aa, Zea mays
  unsure (1)..(92): unsure at all Xaa locations
  Clone ID: MRT4577_56869C.1.pep
RWTTDESYSSSSAYKIQFIMNFCKIKFSPIGKASIEPKCRFFAWTMLHNRILTANNLQKRGWPCSPICXFATYHXETMPHLGKDCPFSAEVW

SEQ ID NO: 322154 - protein, 200 aa, Zea mays
  Clone ID: MRT4577_5686C.1.pep
HPSSPARSLSMAASPCRAPSRNLHLQSRVGSSSSDFSCCRCSAQPPAPTPAGAPSSSPQSSTPSSVSFSQRLVVVLQPNQACSCAPDSRTDHALFSSPALPLFHGRRVPSLWCSAPSYFLVHGRGFLSPSLHLSLQLATPSVGSPWPPRVARPARSWRWPLPAAACSCTDSMWWVYPFLELLELSRLSPMARAAPARIGP

SEQ ID NO: 322155 - protein, 68 aa, Zea mays
  unsure (1)..(68): unsure at all Xaa locations
  Clone ID: MRT4577_56870C.1.pep
GLVSXPHFSKFFSFFQRKLVFFSLGKIEIFWKKXSLPTLPQVHYMEHSLYPRTQHSTSHGTLINHISP

SEQ ID NO: 322156 - protein, 74 aa, Zea mays
  Clone ID: MRT4577_56871C.1.pep
GLEGTGKDLAIQVDGTDATAVATSSPYFAAGGNAKLQGEEGVEDSKNGVMVEIGGLALPLGKSFTMTWNMRIEA

SEQ ID NO: 322157 - protein, 693 aa, Zea mays
  Clone ID: MRT4577_56872C.1.pep
GVAHAVLLLNSNGMDVFYRGTSLTYKVIGGLLDFYFFSGPTPLAIVDQYTSMIGRPAPMPYWAFGFHQCRWGYKNLSVVESVVEGYRNAQIPLDVIWNDDDHMDAAKDFTLDPVNYPRPKLLAFLDKIHAQGMKYIVLIDPGIAVNSSYGVYQRGMERDIFIKLDGQPYLAQVWPGPVYFPDFLNPNGVSWWIDEVRRFHDLVPVDGLWIDMNEASNFCTGKCTIPKTHQCPIPDTKTPWLCCLDCKNLTNTRWDEPPYKINASGQTARLGFNTIATSATHYNGILEYNAHSLYGFSQAIATHTALQGLQGKRPFILTRSTFVGSGAYAAHWTGDNKGTWENLRYSISTMLNFGIFGMPMVGSDICGFYPSPTEELCNRWIELGAFYPFSRDHANFASPRQELYVWDSVAKSARNALGMRYKLLPYLYTLNYQAHLTGAPVARPVFFSFPDFTPCYGLSTQFLLGPGVMVSPVLEQGATSVSAMFPPGTWYNLFDMSKVVVSRSGAPVKLDAPLNEINVHVYQNTILPMQRGGFVSKDARATPFTLVVAFPFGATQADAEGAVYVDDDERPEMVLAEGQASYVRFHASVRGKAVTVRSEVLMGSYSLHKGLVVEKLSVLGLEGTGKDLAIQVDGTDATAVATSSPYFAAGGNAKLQGEEGVEDSKNGVMVEIGGLALPLGKSFTMTWNMRIEA

SEQ ID NO: 322158 - protein, 76 aa, Zea mays
  Clone ID: MRT4577_56873C.1.pep
GKNRAGFFLKKLTPPNFPSKGPQKAKPPLAPPRLCRGPPPLFGQGSPGKPKTPSHFPGGGPRAGSRFPPKRALGGV

SEQ ID NO: 322159 - protein, 77 aa, Zea mays
  Clone ID: MRT4577_56874C.1.pep
SYYIRSAFQALTPRGTPTRPRCLLVPFAACALAGGSDEGVAAWSRAGVSRSPWLTGPGLVPHNSSPWQDRFHTSLLY

SEQ ID NO: 322160 - protein, 102 aa, Zea mays
  Clone ID: MRT4577_56875C.1.pep
RRPSTRPNEGDGGRRGCREVRGEEGCCCCGFDAAAVWEETAPRDWEWAVPLGVQIHERAAILLRGRRWLDSYYSIKIFICSFTYFKVHKLILVLYVAVHCSL

SEQ ID NO: 322161 - protein, 86 aa, Zea mays
  Clone ID: MRT4577_56876C.1.pep
FHFTLPFFFGLCNQAAYAMPGRSSGHHCRRMRRRGFQLRCGSLGRGEEGPRAVLAPTCPRQSAVKSAIPVHANTASFSCVRGLRCG

SEQ ID NO: 322162 - protein, 73 aa, Zea mays
  unsure (1)..(73): unsure at all Xaa locations
  Clone ID: MRT4577_56877C.1.pep
NDTEILXCLGYXLGLVSHEGHSSQIFSESQMLAFXLLTLFAXCVXAWGWGGCTGLREXNDXCHXLRLSQSTSL

SEQ ID NO: 322163 - protein, 78 aa, Zea mays
  Clone ID: MRT4577_56878C.1.pep
LVFLQVKAAEHAAEMEATVVVAAAVEAEEEEAAAAAASTPQRSGRKRPRAIGSGRYRSVSRCFSQSPLLSSSCCRFCF

SEQ ID NO: 322164 - protein, 57 aa, Zea mays
  Clone ID: MRT4577_56879C.1.pep
EGRYTQHGFCTESQTLAGSPFRGWGLIITYMTGIYTVAYLKNCNLVLEHTQMHCLTT

SEQ ID NO: 322165 - protein, 116 aa, Zea mays
  unsure (1)..(116): unsure at all Xaa locations
  Clone ID: MRT4577_5687C.1.pep
PWRARCGCCCASCRSARALVLPRSPAVCCVVGAARGVRRARARAVPRRRAXLRALRLGPPRRRRRRAVLLARPSGCRRLVGRGRGRRVQPXGAGCCGGXGNRIPXVGVLLEXXSXL

SEQ ID NO: 322166 - protein, 120 aa, Zea mays
  Clone ID: MRT4577_56880C.1.pep
QWSQPITHCTKWRTRVHEKSPPFGAHHRSLTRRRSRAAGASGGGGSVVQPSLKCGAAPHCHCHLRAPSQRRQNRHNGQPVAGRLNEIFVACHSICGQFNDELIRELSYFNKTKQNYIHII

SEQ ID NO: 322167 - protein, 68 aa, Zea mays
  Clone ID: MRT4577_56881C.1.pep
RPGRDLPGRGLRAINKARFLGLYCTWWVRWLTISPSGRVDVIIYGRGGTRSRGPCLNTCQKKKKKKAP

SEQ ID NO: 322168 - protein, 194 aa, Zea mays
  unsure (1)..(194): unsure at all Xaa locations
  Clone ID: MRT4577_56882C.1.pep
RPTRLRAVSPSPSPPSPSPVGSFGFDALKETFSVDVAAAGARPLRVPLAGRLTIASSRLAALSNVAVRVELRSGAVGWGEAPVLPSVTAEDQPAALGAAARACAALAAAPAAPLGALLQDVAGVLPGHAFASARAGVEMALIDAVANSIRIPLWRLFGGASDSVTTDITXAQLAAKYRGQGFQTLKLKVGKNLN

SEQ ID NO: 322169 - protein, 78 aa, Zea mays
  Clone ID: MRT4577_56883C.1.pep
LKNNPTPNNNIKPIKERDFHATKPLFSQYYPGKASKMVVTLFCLPLGMTKKPKPSPLAQPTNTHGGVTKTSYSHFVNA

SEQ ID NO: 322170 - protein, 35 aa, Zea mays
  Clone ID: MRT4577_56884C.1.pep
HIHTYKYYKFKKNLNITIAMFNITKSIYLCIIYAK

SEQ ID NO: 322171 - protein, 342 aa, Zea mays
  unsure (1)..(342): unsure at all Xaa locations
  Clone ID: MRT4577_56885C.1.pep
PGXTVYNTXLPAVPSVEGGTLPRETXEQLLLREELVWDKVXKNRIGSLLSMEGSLDTWSWSLNVPVLNSLSEDNEVERFSQEHQDAVECYKQQRRKVSHLKKTIKATRGFKEFQKIIDMRNFTKEKIERLEARSRRLTRRIRQIEPTGWKEFLQISKVIQEARALDINTQVIYPLGETAAAIRGENELWLAMVLRNKVLLDLKPSQLAAVCGSLVSEGIKLRPWKNSSYVYEPSSVVTGVISYLEEQRNSLIDLQERHSVKIPCEIDAQFAGMVEAWASGLTWREIMMDSAMDDGDLARLLRRSIDLLAQIPKLPDIDPVLQKNAQIACSVMDRVPISELAG

SEQ ID NO: 322172 - protein, 55 aa, Zea mays
  Clone ID: MRT4577_56886C.1.pep
LEFARADRPPSPMAPSSDCPCSLILQLAPVRLLDARVGRRPHLTLRRRASLAALA

SEQ ID NO: 322173 - protein, 71 aa, Zea mays
  Clone ID: MRT4577_56887C.1.pep
PWGSIANFARIPARGYYATPITMAEGTRRSSMLPRLTCEDGPMVNNQLAAVLPVHSRRARSYGTGCSRRTL

SEQ ID NO: 322174 - protein, 180 aa, Zea mays
  Clone ID: MRT4577_56888C.1.pep
MLRAGGRRLLAPGLRRLGLGTGASGEAGPAAAAAGVRAYHERVVDHYNNPRNVGSFDKDDPNVGTGLVGAPACGDVMKLQIRVDENSGKIVDACFKTFGCGSAIASSSVATEWVKGKPMDEVLTIKNTEIAKHLSLPPVKLHCSMLAEDAIKAAVKDYEAKKSKMGQKGEDSPSQKAAEA

SEQ ID NO: 322175 - protein, 261 aa, Zea mays
  Clone ID: MRT4577_5688C.1.pep
MPFRPSLPCRCPFDRKLTSFLSAVASLADSRSRSPFPPAGAVPATLTPTAYNALMSAYSRAGRHDEVLRLFFSLPFAPTAPLFTTLISSLAASGSKSAALDAFSLLASGIGPTTSAFTALLKSIDAASSESVYRAFFATMAAMECAPDAATYNCLIWILCDSQRLDEAWGVLDSMLEVGVCPTVRSYTAILHGYCKQGRVLEAERLLDTMIQVGCAPDVISYSVLIQGLCRVGEFGKVERILGESEAKGWTPNAVTLHIYM

SEQ ID NO: 322176 - protein, 102 aa, Zea mays
  Clone ID: MRT4577_56890C.1.pep
MEETKPAPEAMLRCARAALLLASLRRPRAPTPTQDRRRTSYSPSSAAAAELARLRSEGLLRSAEIAAARREAAAHARVAGSELLLVLAVAPAVLLLLLLGLL

SEQ ID NO: 322177 - protein, 104 aa, Zea mays
  unsure (1)..(104): unsure at all Xaa locations
  Clone ID: MRT4577_56891C.1.pep
RPTTYAYALTKLSMSITLTYVHHQHPPESYSLSTHNAPTYLLQQPVLTIAXQRTPXAVANPVGYLXQMLPFYXASLSNPGAHLPQAQQLLNSLVLHKKFPANTT

SEQ ID NO: 322178 - protein, 72 aa, Zea mays
  Clone ID: MRT4577_56892C.1.pep
AYHIQFHNHCEPCSPACVLTFALVINSVNHTGNHVRSFHQAVHRDKTYEHPSQEVARKSLWRCEQRVLQLVW

SEQ ID NO: 322179 - protein, 144 aa, Zea mays
  Clone ID: MRT4577_56893C.1.pep
KKKGGGVASGPTGKKDLGPFFYPKSGPLVSKPQKGTRPQRLPNPKGGGIFPNEGETGPVSPRPEFPPGKPHFYSQGGGAKGVKIKTPPLFFSKGPGGALLATLKKENPFSRGPQSKKKKKPGPPLMGSFLGGKTFHQNPHQRFP

SEQ ID NO: 322180 - protein, 138 aa, Zea mays
  unsure (1)..(138): unsure at all Xaa locations
  Clone ID: MRT4577_56894C.1.pep
KHQDRSACGANTPSRRDADAGYAPDEDRALEKAKXPAAASLQTVTLTTADXSIGCSSDSCKDVCEEGRLSFNALFSWEKLTHSFPAAHALDSKDAAMEEEDDATTEAADPNMTATCIDLDDLDTLADPRASFAMNMHT

SEQ ID NO: 322181 - protein, 121 aa, Zea mays
  unsure (1)..(121): unsure at all Xaa locations
  Clone ID: MRT4577_56895C.1.pep
GVLKGARGGGTRVTPTKGPVIPFPSLEEWGIQIEGAKSPKKLVVFYFTATWCLPCGARAPIFVNMAKKSPNVXFLKVFVDEMKPFFEQFRVEAMPTFFFLREGDVKERVVGAPKEKLARKL

SEQ ID NO: 322182 - protein, 129 aa, Zea mays
  Clone ID: MRT4577_56896C.1.pep
WLNPQWRNGSKDNKAAILAPFPRLGGAHNKAGSFNPQRGSSCSPMDSFPPSTNHARIREMVCSLPSQKVPTSLRIRSFSAVQAEKRTRAVLLRGSSREEGKFMVGLQCTARKKRARNGKRREKGERRST

SEQ ID NO: 322183 - protein, 70 aa, Zea mays
  Clone ID: MRT4577_56897C.1.pep
HTIGSVRYSIYSIGLLDPPLTTLVVFDNPSHRLGVTPDPVCSPMRWNPGSSRLCPPTKHRVWITRLITPG

SEQ ID NO: 322184 - protein, 154 aa, Zea mays
  Clone ID: MRT4577_56898C.1.pep
RIQRQQSSNPCPFSSIGWSTQQGRFLQPSARIELQPHGFLPSQHKPAVPHLRSDHPNRFKLCRKTKFNRSYSENGRIDSCDQGSGGRKVTHHARIREMVCSLPSQKVPTSLRIRSFSAVQAEKRTRAVLLRGSSREEGKFMVGLQCTARKKPGR

SEQ ID NO: 322185 - protein, 53 aa, Zea mays
  Clone ID: MRT4577_56899C.1.pep
GRFFFFFFVPITIHEDYRSTLVKCICTCLTNNPTTHCASSYLLSFYAETLLGI

SEQ ID NO: 322186 - protein, 50 aa, Zea mays
  Clone ID: MRT4577_5689C.1.pep
IFASVIHHPKKKRGKADIRTKTFSPLCSDPCVPSWKSSSRKKDLYFLKNP

SEQ ID NO: 322187 - protein, 63 aa, Zea mays
  unsure (1)..(63): unsure at all Xaa locations
  Clone ID: MRT4577_568C.1.pep
PSYKELENXAPWDXEGKHAALGPVHLYIGTNPSTEGGYDDXIXDTVASGVDFGDPLRLREQPP

SEQ ID NO: 322188 - protein, 131 aa, Zea mays
  unsure (1)..(131): unsure at all Xaa locations
  Clone ID: MRT4577_56900C.1.pep
MEPDIGHMLISPNNILENITNETATDCIWLSLCKPEVTAYNHLPKGSVDPSAAALGIKGLNDAQTDRXKIRNTSDSMMITLTRTTEQIARXMKNTSMXAKQYSGTAKKIRSTXSTLWCTADGKNPEDLAHT

SEQ ID NO: 322189 - protein, 87 aa, Zea mays
  Clone ID: MRT4577_56901C.1.pep
NFRNKLGFTNPPKFPITTNYLDHHLNDLGEKNQNPMGGLQKGNGKILPWAKSERGGHLAYSTLIQSPFTGGALWDHGGMQLRELGFL

SEQ ID NO: 322190 - protein, 64 aa, Zea mays
  Clone ID: MRT4577_56902C.1.pep
ISSNSLNPLLTEQALVFPNFFLHQTFGFSLHNKGYGLVVQELQCCMLSLNTFLSIYSHYILLSE

SEQ ID NO: 322191 - protein, 142 aa, Zea mays
  Clone ID: MRT4577_56903C.1.pep
SKTESHSLLGSDILEYFHLRQLALEQLRVEDYVTMSSPFDVIAIITPKPGKADRVEELLTTAAKAVKANEPGTLRYHIHRQTKGDAPIFVMLETYANKAALETHGKSEDFKKLGKTMKTEDLLAEPMKVLFTKEAGGYASKL

SEQ ID NO: 322192 - protein, 38 aa, Zea mays
  Clone ID: MRT4577_56904C.1.pep
VMRDAVTYTELARGKTVTVTDVVYALKRQGRTLYGFRG

SEQ ID NO: 322193 - protein, 160 aa, Zea mays
  unsure (1)..(160): unsure at all Xaa locations
  Clone ID: MRT4577_56905C.1.pep
GRLGSSRPAGTQSTLXAFNPNSEVLVATASADKTIGIWDLRNVKEKVHTLEGHNDAVTSLAWHPTEAGILGSASYDRRIIFWDLSRVGEEQLPDDQDDGPPELLFMHGGHTNHLADFSWNPNEPWLVASAAEDNLLQIWKVAESIVGKDDGDLPIDELDR

SEQ ID NO: 322194 - protein, 69 aa, Zea mays
  Clone ID: MRT4577_56906C.1.pep
VCHPLGPGWRECSQINYTPPKTRECVSCFLNPARTSFWAGEHFNPEPKTWRSFLPPFSLGQGSNTIEGG

SEQ ID NO: 322195 - protein, 66 aa, Zea mays
  unsure (1)..(66): unsure at all Xaa locations
  Clone ID: MRT4577_56907C.1.pep
MPKYYEDKPQCGTXPGLKEDLGASLLQSDCVVQEGKSPRQGLKEGYCNSVKYALFECKRSVLDNRA

SEQ ID NO: 322196 - protein, 100 aa, Zea mays
  Clone ID: MRT4577_56908C.1.pep
GAAFKLLSPSSCSISLCQRGTPCYLPVPGVPQLLGASGPPRLFRPLGFREVLPLSHFCWSPPPRSLFLGACLQFLFGALLSVPFWKRFWLPPMNKAKGLP

SEQ ID NO: 322197 - protein, 83 aa, Zea mays
  Clone ID: MRT4577_56909C.1.pep
MAAGSAGKENAAPSTSDATVSAAAVSRRHVCAVKSCGVKKRPSRARLLGRVPLRDITNLVQTSLAVAGPEAPLGQEVSPALAT

SEQ ID NO: 322198 - protein, 40 aa, Zea mays
  Clone ID: MRT4577_5690C.1.pep
GLLPFLRLIKLRLSTKALKTIEKHGLDAVARKAGIDLNKK

SEQ ID NO: 322199 - protein, 239 aa, Zea mays
  unsure (1)..(239): unsure at all Xaa locations
  Clone ID: MRT4577_56910C.1.pep
MCTVTFFPYYHGSISISMSLHQTSFCFVCTHLTSGQKDGDQLRRNADVVEILRKTRFPHVHGAGDRKSPETILDPDAWVWLGDLNYRIALSYRSVKALVEMHSWKQLLEKDQLRIEQRFGRVFAGWKEGRIYFPPTYKYSYNSDRYAGDDMHPNEKRRTPAWCDRILWYGRGLSQLCYVRGESRFSDHRPVYSIFTAEVEXRASQLLTSAASXSASLLGLDELPPYQTYPRSYMDINFY

SEQ ID NO: 322200 - protein, 113 aa, Zea mays
  Clone ID: MRT4577_56911C.1.pep
SHCLPCFKSNAYEWSSTCFSKTYLATISRSESIDLLEYLFCTLKTARRRSWGRQWHAGQQQQESRRQVHKNAWRKESPASYQTFRFPTDGTEPWEKRTPSQSVVKRPALPLIR

SEQ ID NO: 322201 - protein, 41 aa, Zea mays
  Clone ID: MRT4577_56912C.1.pep
FSRALRASVPPETERQIRLRFYARLICLFHPLPPEGGRPSD

SEQ ID NO: 322202 - protein, 103 aa, Zea mays
  Clone ID: MRT4577_56913C.1.pep
TAERPTGEAPHGGTDTARHGQPAPAWARGSWRLSGAAPHSGSGEGASGAVSSGHGRHRRTVPSWARPRERSMSRESRGNNPEQEILNNGAIERKNATKSSFCS

SEQ ID NO: 322203 - protein, 32 aa, Zea mays
  Clone ID: MRT4577_56914C.1.pep
ELWVSKKPSEWCRTSEQHHIAVSPRSLPELAS

SEQ ID NO: 322204 - protein, 47 aa, Zea mays
  Clone ID: MRT4577_56915C.1.pep
NFLHFFFFFFFFFFFFFYTSKLNCRYKTHVTGKPLHKKRCTKTSYIK

SEQ ID NO: 322205 - protein, 46 aa, Zea mays
  Clone ID: MRT4577_56916C.1.pep
VSVNSILCQSDGMTSCHPTFNNAQDITTHLYLQVPLSNWRGAQKNE

SEQ ID NO: 322206 - protein, 71 aa, Zea mays
  Clone ID: MRT4577_56917C.1.pep
EEAQGQALSACGWLMLSSDWNAVASWGSGGLLGFRNSVWVKVSVWGVTSPLDVCLARLGLSLVCRCVVHGF

SEQ ID NO: 322207 - protein, 66 aa, Zea mays
  Clone ID: MRT4577_56918C.1.pep
TDNAQLFEFVSVQELGSDVNLYALVFGESVLNDAMAISLYRTMSSVRSHAAGGENFFMMILQFLET

SEQ ID NO: 322208 - protein, 73 aa, Zea mays
  unsure (1)..(73): unsure at all Xaa locations
  Clone ID: MRT4577_56919C.1.pep
HLVHHRRQTHPWQCSNCTALHCIASQAGVCVYLYYMYSTRLLSQSKLPGYXIRCRCRLRESVDQPGVYINSQV

SEQ ID NO: 322209 - protein, 141 aa, Zea mays
  Clone ID: MRT4577_5691C.1.pep
MATATLLSSSFAMPAAARRASSPSSASLSFATSQLAGLSLSAGVATPTAVALLPKRQQLQPIVARRVCPFTDKKTNRANKVSFSNHKTKKQQFVNLQYKKLWWEAGKRFVKLRLSTKALKTIEKHGLDAVARKAGIDLNKK

SEQ ID NO: 322210 - protein, 73 aa, Zea mays
  Clone ID: MRT4577_56920C.1.pep
MRVVSAERLRSPVYALRVTEWEIATCAVAHHPVIKLCGDWGTDDVQLSDISLQDYIAADDKYATYLPHNAGRY

SEQ ID NO: 322211 - protein, 211 aa, Zea mays
  unsure (1)..(211): unsure at all Xaa locations
  Clone ID: MRT4577_56921C.1.pep
YSLRASQKYIWSSSLLGVGVETPTRRPRRICGWIRXSVLESIQAMQIRPVVAQIITLGMILTSALILWKGLVVVTGSESPVVVVLSGSMEPGFRKGDVLFLHMNKDPVRTGDIIVFNVEGRDIPIVHRVIKVHERHDTVDSDILTKGDNNPGDDRVLYAHGQLWLQRQHIIGRAVGYLPYAGWLTIIMTEKPVLKYLLIGALGLLVVASKE

SEQ ID NO: 322212 - protein, 119 aa, Zea mays
  Clone ID: MRT4577_56922C.1.pep
TFGTYSGYFAGMILTSALILWKGLVVLTGSESPAEEDLSGSMEPAFRKGDVLFLHMNKDPVRTGDIAGYNVEGRDIPIVHRVINDHERHDTVDSDILTKGDNNPGDDRVLHAHVQLWLQ

SEQ ID NO: 322213 - protein, 48 aa, Zea mays
  Clone ID: MRT4577_56923C.1.pep
NNPSSVVPSFTLLMSYSSIVKLLRHALNDFCNARAIMQTVSTVHLSSR

SEQ ID NO: 322214 - protein, 81 aa, Zea mays
  Clone ID: MRT4577_56924C.1.pep
TQVAPTQRGQSSALTTPWTWCSGSTWRITSSLVHAHLWTSPVTYETAAATGQDLPRHNSSSSSAARAPGSGRVPAGSRGVV

SEQ ID NO: 322215 - protein, 51 aa, Zea mays
  Clone ID: MRT4577_56925C.1.pep
RVDTKAKFYGTISSPKICQLHGGKSTSEPMGPKLKPKFQLFTITGHLNPSL

SEQ ID NO: 322216 - protein, 423 aa, Zea mays
  unsure (1)..(423): unsure at all Xaa locations
  Clone ID: MRT4577_56926C.1.pep
MSSAIEKRVVGCSVPYAMRNCCGSADADVNPPSRPPTEGLPGFSHTLLAPSLRSSSRLVFRRHAVGRGPLPPPKPSDGGGAKQEKGGGDGPDQCPGLGRVLEAPRLREFTLAELRVATRGLKPEMVLGEGGFGPVYKGWVDERTLNPAKSNAGVIVAVKKLNPESFRGLQEWQSEVNFLGRLSHPNLVRLLGYCGXGEDRELLLVXGNLEALSWSRRLKIATGAARGLAFLHSSEKQVIHRDFKASNILLDSTCQDFTAKLSDFGLAKNGPSAGKSHVTTRIIGTYGYAAPEYVATGHLYVKSDVYGFGVVLLELLTGMRAHDPNRPSHQHNLVEWARPYLSGAGSKLKTLMDQRIDGQYHTKAALRAARLAGKCLTGDPKSRPSMDDVVAALEDIEALQQRAAGGHRDLPPRPGARRSAAVP

SEQ ID NO: 322217 - protein, 43 aa, Zea mays
  Clone ID: MRT4577_56927C.1.pep
YTICSSCTKVVLETTFKEHIKIRGKFELINIMQILAVISGFVV

SEQ ID NO: 322218 - protein, 97 aa, Zea mays
  Clone ID: MRT4577_56928C.1.pep
ARQLAYLCSMPSGHFPPYLSRSSVIRLSSWVHMRLPSAPILSTHVQYKHHRVQLGSLHLLAATPAIGSNIGSVSLSRAHSASQSPNFMCILNVKVTP

SEQ ID NO: 322219 - protein, 103 aa, Zea mays
  Clone ID: MRT4577_56929C.1.pep
VQVVRGSYKDLEAKMVQFCLPRWVILVHRIIREKVCGFTVNVGSRPSKVLVTKLKLGKARKALLNRKARGRASVKTKGKFAADAVSASAAGGAAVGASLQENG

SEQ ID NO: 322220 - protein, 39 aa, Zea mays
  Clone ID: MRT4577_5692C.1.pep
ANPPVCLSAGVGACYVLYDIVLSNPRLLMCTDSRYVSRA

SEQ ID NO: 322221 - protein, 157 aa, Zea mays
  Clone ID: MRT4577_56930C.1.pep
MAARGGRALLALCGALAACGWLLGAGALEPGAPAAGVRRRRRLQQEDGISFEYHRYPELREALVAVWLQCTAVARIYTVGRSVEGRELLVIELSDRPGVHEPGEPEFKYIGNMHGNEAVGRELLIFLAQYLCNEYQKGNETIVKLIHSTRIHIMPSL

SEQ ID NO: 322222 - protein, 136 aa, Zea mays
  Clone ID: MRT4577_56931C.1.pep
TPRASSLRKFRSASSGVLSTTARLALGINVHQVSLVTTNVLPTQPKTSLHGIGRSGRFGRKGVPITFVTPAAKGILFAIQKFSTLLIKNLPANVPALLCPFPRKTKPKKGGKDPGKAWFCQNPLEKGLLRPVGFLC

SEQ ID NO: 322223 - protein, 153 aa, Zea mays
  Clone ID: MRT4577_56933C.1.pep
AGSGIMVSVCKFIFVPCITTFQWKAAMQMTSAAHNLLCLSYPALIIRISGEGVAAETWWQEPQMLWTPPQTRKRRGDWRGEGGATPAAARQPRPASRDPIDSGRRGRSRNVVAGAADAVDAAANEKEARGLARPGRRNARRSSATRRAEGRIG

SEQ ID NO: 322224 - protein, 159 aa, Zea mays
  Clone ID: MRT4577_56934C.1.pep
AGSGIMVSVCKFIFVPCITTFQWKAAMQMTSAAHNLLCLSYPALIRWKLGFGRVGMHEDGCVAAKRRLETDVALVPYHSSRAKGSQPKRGGRSRRCCGRRRKRERGEGTGEAREAQRPPQLGNTESGRPKRLLAHRSPQDIPCGSSEAREAQRPPQPSC

SEQ ID NO: 322225 - protein, 178 aa, Zea mays
  unsure (1)..(178): unsure at all Xaa locations
  Clone ID: MRT4577_56935C.1.pep
MSMLACALQTMGSSCSRPHSVNEADAADNTRSADIDRRILHETEADQHIHKLLLLGAGESGKATIFKQIKLLFRTGFDEAELKGYTPVIHANVFQTIKILYDGAKELAQVESESSKYVMLPDNQEIGEKLSEIGGRLDYPSLNXELVQDVRKLWEDQAIQETYSCGSVLLGPDCAPYF

SEQ ID NO: 322226 - protein, 53 aa, Zea mays
  unsure (1)..(53): unsure at all Xaa locations
  Clone ID: MRT4577_56936C.1.pep
AXHXLPXSTXMXSPCQADXLRYKXXXQYSVXWXSVXXXXGXKLXXWGKYEYSM

SEQ ID NO: 322227 - protein, 85 aa, Zea mays
  Clone ID: MRT4577_56937C.1.pep
HYCSFFFFATWGGGALHFEGLNICIASQIQGSLTDTSKYKNSIRALLLDNGRPNRNLFPSLTNQNCPLCYHYASCADYRPLGRVF

SEQ ID NO: 322228 - protein, 60 aa, Zea mays
  Clone ID: MRT4577_56938C.1.pep
PPLPISLSFWVELVGACNLIKLYELIVQTLEMILNLYHAFKELCYLFYDSISPTLYYTMK

SEQ ID NO: 322229 - protein, 74 aa, Zea mays
  Clone ID: MRT4577_56939C.1.pep
ALRDPKNYLQGKCQREMAYGQAGSMLVYFQNKSGDNASFQYALQMDSEEQIANIFWADAKMITGFAHFGDVVSI

SEQ ID NO: 322230 - protein, 86 aa, Zea mays
  Clone ID: MRT4577_5693C.1.pep
HSRAVRKPRSRSASAAVSVPSGPLGQSAWLGPRPRRHRGRGSRPRAAGAGPAPASRQAGGRAPPFLAGQPAGEPGLGGHRTRGDPE

SEQ ID NO: 322231 - protein, 106 aa, Zea mays
  unsure (1)..(106): unsure at all Xaa locations
  Clone ID: MRT4577_56940C.1.pep
ITPISKHSFFYYKHYSELKNIHILIIFSYIHSKPSLGGGEHKSYKIFFFSXIPNNLIPLPLFFYXTYLYSLXLNHINPXXITFXNXQHLTHTFFKLYSHXLLPINT

SEQ ID NO: 322232 - protein, 64 aa, Zea mays
  Clone ID: MRT4577_56941C.1.pep
APGGSGGAREGGGSGGGGPRNGGGGSGGGGGYGGGGGGSGGGGGGYGGGTRGGGSGNPPGNWGN

SEQ ID NO: 322233 - protein, 113 aa, Zea mays
  Clone ID: MRT4577_56942C.1.pep
TSHELVTASSMRLILRYLFLTSAGAVAEVCHGTHPHRGGAATPAENHRPHGCDPRLPRSRARAAASRDALRTPPEVGELPTEEIDGGGIISLSTMANLDHGGMCCFGLRTPAG

SEQ ID NO: 322234 - protein, 105 aa, Zea mays
  Clone ID: MRT4577_56943C.1.pep
PLPLPIYSVCSTAEFRKAFLPCSRAVVPVHYKGVGVLVFLLVCILSFSHQVCFTLELNANLLPVVTKPNRFSPPRGQGFPQVFLVVYYLFHARQRTPTRRSEDSS

SEQ ID NO: 322235 - protein, 105 aa, Zea mays
  Clone ID: MRT4577_56944C.1.pep
MQGRPDYVQVPRQHIIASGRSQWGPRLHPENARLGCGSSLEGLNRPLTDSQASDAELCCICFEQACTIEVQDYGHQMCAACTLALCCHSKSYPATLTPPSLDCPF

SEQ ID NO: 322236 - protein, 188 aa, Zea mays
  unsure (1)..(188): unsure at all Xaa locations
  Clone ID: MRT4577_56945C.1.pep
CIVCREMTRLYLTDMITHSDTDVVMRGXAGSAYLSXACHLSKDLTGSVDVVXNSTGXGDGACLAGHAVXTMEEIRPSLLLLDQLDEYYDXDDDTTMAKNAWLLTNTVMSRLLARTNCDCDNAAQEEDLIDMQWHDKGVVTNWALVYMNQDTDMSVDLNTIEANDVVXTCKHNGPLCAHGXKRLQDMRM

SEQ ID NO: 322237 - protein, 87 aa, Zea mays
  Clone ID: MRT4577_56946C.1.pep
GKIPPPFLDELYTLFGRTTRNKGNLISAGGVREPPRSYGSQDTPDDGVGCSNIRSSSKRPIREATMDSHPKKKMSLEEHIANISESI

SEQ ID NO: 322238 - protein, 54 aa, Zea mays
  Clone ID: MRT4577_56947C.1.pep
SLFFFLFILYEGSLNFFRVKNTYFIHFTLSTKEIKTYLTTYPAKHNYNPILKSP

SEQ ID NO: 322239 - protein, 78 aa, Zea mays
  Clone ID: MRT4577_56948C.1.pep
GDWGPSRAGRAATLLRGSCSLRRSPASGSEERSAIGSSPAAAPTSLRERWLSLRRYGFLLESSFFGVMALVLAVIAED

SEQ ID NO: 322240 - protein, 96 aa, Zea mays
  unsure (1)..(96): unsure at all Xaa locations
  Clone ID: MRT4577_56949C.1.pep
EFYGQYAASIHSYTMRHMIYDDCSYNXIPVTNVNSKILSNVIEYCNKHVHAVDVAVVASNAGSDDVGAFFVNSTDGFGEDLKNCDADLVKVEQATL

SEQ ID NO: 322241 - protein, 125 aa, Zea mays
  Clone ID: MRT4577_5694C.1.pep
VGPAKKYGWPLFLLGLGNYFHSRWQIFMGNFNCSNKFSTWEQKKFFFLEPLRKTPKTHGCCFFAQLGANNKQGKLVREFKKNGFGPVFKYFDLMFPGKAHPFLKFFCPVKKKNGFVPNKKGLEVP

SEQ ID NO: 322242 - protein, 123 aa, Zea mays
  unsure (1)..(123): unsure at all Xaa locations
  Clone ID: MRT4577_56950C.1.pep
QRWAGENPXGFPQFNRFEENPLFPSWVNSKRAPPVRLSKHLPTLIGKGAPPFTGPLTPGGGGVPPRGTFTFASPLAPVLFVFFLSFFATLAVFPRKVLNGGLLLGSQLRVLGPLTPKKLVWGE

SEQ ID NO: 322243 - protein, 417 aa, Zea mays
  Clone ID: MRT4577_56951C.1.pep
YLMLNLQLGTTRTVGKITPVPLREVRSNDFGPRARIRMYFPTEGSQYTPPHCSVNFFWKDYCPMVFRNLREMFHIDAADYMMSIWGDDSLKELSSPGKSGSIFYLSQDERFVIKTLRKTELKILLKMLPKYYNHVRAYDNTLITKFFGVHRITLKGGRKVRFVVMGNMFCTELRIHRKYDLKGSTQGRSTKKQNINENTTLKDLDLSYVFHVDKPWRDALFRQISLDCMFLESQSIIDYSMLLGIHFRAPHHLKTSSSHQSSLERCGIPDSDLLQYEEKSSWKGFLLVAHEPGATVGGSHIRGSMVRASEAGYEEVDLVLPGTGRFRVQLGVNMPARARKVHEDTNTELENPDTIEEYDVVLYLGIIDILQEYNMSKRVEHAVKSLKFDPLSISAVDPDLYSKRFVKFLESVFPEQD

SEQ ID NO: 322244 - protein, 81 aa, Zea mays
  Clone ID: MRT4577_56952C.1.pep
SSHRPMGFCHHWRFFLRRFPHRLGLLLAFVNKNHLLLVWVDLRSNQFVVSKNLCFSFVPPGEWLGPFSFSNKNKKIKNMQL

SEQ ID NO: 322245 - protein, 137 aa, Zea mays
  unsure (1)..(137): unsure at all Xaa locations
  Clone ID: MRT4577_56953C.1.pep
VSFASARSYHAGGCHADRCLSIFGGGSHATCFNDLHGLVLQTMEWSRSKQQGPTPRPXAGHAGGTAGXTXHILGGGNNKSGATETLVLNMSTMTRSAVSTVEXPVPLASVVMTLVHTSYVGYDCVMCFGGYSGRYNN

SEQ ID NO: 322246 - protein, 74 aa, Zea mays
  Clone ID: MRT4577_56954C.1.pep
ITMCSSVVYWFPSSKIITWTRPNPLIKALNTCRSSTSPWPGMLRKFLTRMACVPCSGLISEADQVVWSSFTTIR

SEQ ID NO: 322247 - protein, 480 aa, Zea mays
  Clone ID: MRT4577_56955C.1.pep
HASVQKLGLQPTSYTYDGFIKTVIAGKGIAYASIVINAMERRGIEPYSDTLAALSEGHSNSLQLDLAEEFLERISEIKPKHIGSFNALLSGCAIMNEPERAVRILAKMKHVNMKPTLRTYELLFSLFGNVNVPYEQGDVLSHVDVSKRISIIEMDMFNNGIQHSFVSMKNLIRAFGAEGMIEEMLRYLNIAENTLWNINPYQKSYLYSTALHALVDVKETHRAVKMFKIMRSCSLPTNISIYNTMIECCKWLPCFKSASALLSLMLRDGFNPTVVTFTSLLKVVLENDNFEGALDLLDICKIEGLQPGIQTFNTVLLRAYARGQIHVLEYILECIHRSKIQPDPSTLWYTFCAYEEHELYNTAIESLLVLSMRMISEDAGIPSEKRIVFEDLILSEEPDAEFRIIRAFQAGEEFLATALLNLRWCATMGATVSWSPEESLWAMRLAASYDANKRPHINPSDVPKSRGRNPLNRPYWEANR

SEQ ID NO: 322248 - protein, 97 aa, Zea mays
  unsure (1)..(97): unsure at all Xaa locations
  Clone ID: MRT4577_56956C.1.pep
EDIHFHYYXYTRSEEPYFYSSIFRVPNKFPPSYKTTSSLLSKCLLKRPMTYHPPFPPLHLPRQKAITPSLHISLIFSSTTPPYIPPHHPHTPLLTTQ

SEQ ID NO: 322249 - protein, 89 aa, Zea mays
  Clone ID: MRT4577_56957C.1.pep
PNGKNHRGRGLLETNSASHQQYSYNSSFIPFHHIDGLCACAHSHLLARIPSPAGPTITWYVSPGSNLDRRKLHTNTWMFKPQRTSGSIL

SEQ ID NO: 322250 - protein, 55 aa, Zea mays
  unsure (1)..(55): unsure at all Xaa locations
  Clone ID: MRT4577_56958C.1.pep
VVLFQVCPVCSYPGGPYSMCIPAPXXYTIIGNIPSRPLGVCSFTPCTFNCLSLHL

SEQ ID NO: 322251 - protein, 107 aa, Zea mays
  unsure (1)..(107): unsure at all Xaa locations
  Clone ID: MRT4577_56959C.1.pep
KKKGPGLGSPPVKKRGKVWFTKVCXVIRANFHPRFNRVRKKWGGGIMGTKSRAKTKAREKMLPKGVGQGKPKIVNPGGSPGVLGGKTEPEWGFSQPGFKGFCPPAQV

SEQ ID NO: 322252 - protein, 42 aa, Zea mays
  Clone ID: MRT4577_5695C.1.pep
HTNDKKITLLGHSYKLVGMGHPSGHPYPQKLNIYQNIILYKC

SEQ ID NO: 322253 - protein, 72 aa, Zea mays
  Clone ID: MRT4577_56960C.1.pep
GLGRRQQRLPTYRRSKVDGNDVRDVDVAAWNTNVSRNLERSREEIGVQGQSLPVGLVTPHHGPQVTDKKEGR

SEQ ID NO: 322254 - protein, 65 aa, Zea mays
  Clone ID: MRT4577_56961C.1.pep
IVFLLWCLLSAAGESATLELGLLKVSKFFPSPLRFLEEHRRRLTSDMVDVLSYIKDWELANSHMQ

SEQ ID NO: 322255 - protein, 62 aa, Zea mays
  unsure (1)..(62): unsure at all Xaa locations
  Clone ID: MRT4577_56962C.1.pep
MGRATCEALSHPEXRLPWPPGGLRSPXPHPDSVSMQRALCGPSRGSGRDGLGRPLFSVWYGR

SEQ ID NO: 322256 - protein, 53 aa, Zea mays
  Clone ID: MRT4577_56963C.1.pep
AIRRRLAAACRRPVSLAVPWTSLLLRCYHHYNIDMTMCTKVAWLPLLYLLFTT

SEQ ID NO: 322257 - protein, 67 aa, Zea mays
  unsure (1)..(67): unsure at all Xaa locations
  Clone ID: MRT4577_56964C.1.pep
IGHLINKDITFLAPSMIMMKVVAPTERMYITWIGLSILNLLSTFQQMGISXDDYHESNPTIVHRKCF

SEQ ID NO: 322258 - protein, 151 aa, Zea mays
  Clone ID: MRT4577_56965C.1.pep
MSHFAAAMKSPLAVAVAAPAAAADAKSPLFCPKPRRPAAPLRCHQSGGFSDAGTDLLDLLLSKGDESGLSSASPQPPLFCGSPPRRASNPVVHDSRFGADCPPMPVPGLPVHRPSPRPSAAAPSMSPRGCARARFAFQPAAVRVEGFDCLD

SEQ ID NO: 322259 - protein, 196 aa, Zea mays
  Clone ID: MRT4577_56966C.1.pep
GLTRKQNKKRRKHEPLRRRHEEPPCGRRRSARRRRRRQEPALLPQAAAPRGAAAVPPERRLLRRRHGSARPPPLEGAWILLARRPRYRVFFVRTVHGADVSLSERSFQGDESGLSSASPQPPLFCGSPPRRASNPVVHDSRFGADCPPMPVPGLPVHRPSPRPSAAAPSMSPRGCARARFAFQPAAVRVEGFDCLD

SEQ ID NO: 322260 - protein, 104 aa, Zea mays
  Clone ID: MRT4577_56967C.1.pep
NSHLCGSNEEQQCWCRSTLDAGISSRYGSVYLPTKGQTILLQCGGTTWKAKLMFHNGRRWFLNGGWPNFARGNGLRVGDICLFELKKKDSKLTMAVHIIRREKF

SEQ ID NO: 322261 - protein, 150 aa, Zea mays
  Clone ID: MRT4577_56968C.1.pep
PTRPPTRPPTRPETAEDAEVDQKNLENKDDVPNTEKGSSMGVDSDFTSECKTKTVNNMNHSGITLKEKSSDPPVSNKKQDSAVEPASTAPKRRKVLKTRIDERGREVTDAVWEGEGSADDKAEKNVSTTAASGATIPSKPKPSTSTDKIK

SEQ ID NO: 322262 - protein, 202 aa, Zea mays
  unsure (1)..(202): unsure at all Xaa locations
  Clone ID: MRT4577_56969C.1.pep
MLDINLFRKEKGGDPELVRQSQRSRFAPVELVDEVIVLDEAWRQRQFELDKIRQELNKTSKEIGKLKAKKQDATELIQSTEEIKKRLAAKETEVQEAKSTLDAKLVTIGNLVHESVPISNDEANNAIVRTWGAKRLEEKLKNHVDLCIMLDIVSLDKGADVAGXGRGFFLKGDGVLLNXALINFGLSFLGKRDFTPMQTPFF

SEQ ID NO: 322263 - protein, 498 aa, Zea mays
  Clone ID: MRT4577_5696C.1.pep
MDAKLLLPFPFAPAAATRSPKSLFLGAPLPPPPRPPPFPLRLRPRPAAVVAQAAVKRRKEAPFDTVIQRDKKLKLVLKLRNILVAQPDRVMSLRELGRFRRDLGLTRKRRLIALLRRFPGVFDVVEEGVYSLRFRLTPAAERLYLDELRLRNESEGLAVAKLRKLLMMSQEKRILIEKVAHLKHDLGLPPEFRDTVCLRYPQYFRVVRMDRGPALELTHWDPELAVSAAELAEEESRAREAEERNLIIDRPLKFNRVRLPKGLKLTRGEARRIARFKEMPYISPYADFSHLRSGSDEKEKHACGVVHEILSLTVEKRTLVDHLTHFREEFRFSQSLRGMIIRHPDMFYVSFKGDRDSVFLREAYKDSQLVEKNQLVLLKEKMRALVAVPRFPRRAAVGTGEEAEGMNGSLQSRDQVSDEEYDDEDEGLSDMEDLISELSGGKSDADYEWGDGWFGENDDSPPDFGDDEVKVAMKIADGSANGSAPVPVFPDGRPRERW

SEQ ID NO: 322264 - protein, 95 aa, Zea mays
  Clone ID: MRT4577_56970C.1.pep
AVAGRGGVDEAWGMRGAGCGASCRARRTGMRRLPKTSGGSSSAPRRRRKKGRRRTSTTMGLRSVCRRRASTSSTSTKRSTPCLVYGAAAVRNHAT

SEQ ID NO: 322265 - protein, 54 aa, Zea mays
  Clone ID: MRT4577_56971C.1.pep
VGFVPSRPSSNLVFVITSRRSSLAVASSSIFITFKLYFHLDIRENLHPEAEAPL

SEQ ID NO: 322266 - protein, 160 aa, Zea mays
  unsure (1)..(160): unsure at all Xaa locations
  Clone ID: MRT4577_56972C.1.pep
MLILNSASTGSPSDSDPPEHPASLADQENMCIVCDTFXLFTSGXSVNEGHPXDSCCDQXSDGALDDCLVEDPDRLVACETCSKTNMLMVFGEYXTTRPMMYYHKIDRESCRSIEFVSDDDGLDTDHCEVLVNIEHKSPDIAQDEHGHYTKIPEQIAAGDH

SEQ ID NO: 322267 - protein, 252 aa, Zea mays
  Clone ID: MRT4577_56973C.1.pep
MATFLGSSPALLARPIAKPHISCAQTPRPAIAQNQTPSSEQPEPQKQRHSVQAQPQQAAAARPKHAGVADSTDWIASSLTRRSGIGAGLAWAGFLAVGVVSEQLKTRFEVAQQQANTKDVEQEHEVVLPNGIRYYEMRVGGGDVPRPGDLVVTDLQGRVAGSGGEAFVDTFGDGKRPLALVMGSRPYTRGMCEGVEYALRSMRAGGKRRVVVPPGLGFGDDGADFGEEHVQVPPGATLEYIVQVDRVSIAPA

SEQ ID NO: 322268 - protein, 64 aa, Zea mays
  unsure (1)..(64): unsure at all Xaa locations
  Clone ID: MRT4577_56974C.1.pep
GVXKEKRGIIDFHSFHLHPPPPIRGGFGKSPLRPGLPQRIMEKVSKGFWGESLVTRNTYVVTES

SEQ ID NO: 322269 - protein, 136 aa, Zea mays; identical to SEQ ID NO: 223521
  Clone ID: MRT4577_56975C.1.pep

SEQ ID NO: 322270 - protein, 136 aa, Zea mays; identical to SEQ ID NO: 223521
  Clone ID: MRT4577_56976C.1.pep

SEQ ID NO: 322271 - protein, 77 aa, Zea mays
  Clone ID: MRT4577_56977C.1.pep
QAHHGRADLYHSLYFAEYCLRTSSLRFFFLPKGYLTIKKSLDYNPLDVLNPEACGRVFNPVSDTVILDFEMTHCTEK

SEQ ID NO: 322272 - protein, 136 aa, Zea mays; identical to SEQ ID NO: 223521
  Clone ID: MRT4577_56978C.1.pep

SEQ ID NO: 322273 - protein, 136 aa, Zea mays; identical to SEQ ID NO: 223521
  Clone ID: MRT4577_56979C.1.pep

SEQ ID NO: 322274 - protein, 113 aa, Zea mays
  unsure (1)..(113): unsure at all Xaa locations
  Clone ID: MRT4577_56980C.1.pep
VLAGRSLMVNSRPPPGRDQSSXRXPKGDANMVYVXNLSXSVDNSALANLFTEQGELLEAVTIYNRXSARSKGFGFFFVMYGSAEEVENALSNLDGAVTSESLFSSPCYSCHSL

SEQ ID NO: 322275 - protein, 144 aa, Zea mays
  Clone ID: MRT4577_56981C.1.pep
SGGRPVLKGVFKPQLGGGVYSSPGGNFEKGSFSLGVPGLGPSPPGWGPHLSGPLFFKTWFRGFFFWVLGSFGVFQSRKPWVSSPGKLGPPFSPLFWGPNNKSQDFHARPKTNVPFKGGSGFFFFFSPPLIRGPLKKPFGRGWGP

SEQ ID NO: 322276 - protein, 136 aa, Zea mays; identical to SEQ ID NO: 223521
  Clone ID: MRT4577_56982C.1.pep

SEQ ID NO: 322277 - protein, 122 aa, Zea mays
  unsure (1)..(122): unsure at all Xaa locations
  Clone ID: MRT4577_56983C.1.pep
LVLGLSCSPSFSSFPGLLRAASLVLLRRPPRGSCSPGPAALWAPWGVWCARRFRAWPPPAPSXCSWPGCCSAVGWSALVPGGPRGCRFRASLASAARRSLXGFVGCSAPRPLALRGRCLSWL

SEQ ID NO: 322278 - protein, 136 aa, Zea mays; identical to SEQ ID NO: 223521
  Clone ID: MRT4577_56984C.1.pep

SEQ ID NO: 322279 - protein, 104 aa, Zea mays
  Clone ID: MRT4577_56985C.1.pep
GSGASVNALGSTPPVLTFGKVMAKNSFSNPNKVGPVKTHFSNPADQMQVTLAPHSFPPFDLGLVKPKFVGEILCVCCPLQYPNRGGMAAPKGFEVWCPVTDLDQ

SEQ ID NO: 322280 - protein, 136 aa, Zea mays; identical to SEQ ID NO: 223521
  Clone ID: MRT4577_56986C.1.pep

SEQ ID NO: 322281 - protein, 168 aa, Zea mays
  Clone ID: MRT4577_56987C.1.pep
MMSSSSGIKQEGPKLFSSRRILARDRSSVAVADASFRVYYSLGAGTVPFLWESKPGTPKSSVTPPASASASSTAGAVPVPPISPPPSYQQAVSRSKANKFARKQRPARTSWPPAGWIIGWLSLNVRRRSPPSSSPTDHQQRCVARDEHGVVVVDSDDERRSPRSSTVL

SEQ ID NO: 322282 - protein, 136 aa, Zea mays; identical to SEQ ID NO: 223521
  Clone ID: MRT4577_56988C.1.pep

SEQ ID NO: 322283 - protein, 57 aa, Zea mays
  Clone ID: MRT4577_56989C.1.pep
MKEGTANCIDILIAIILPPLGVFLKFGCKVEFWLCLLLTFLAYLPGIIYAIYVITKD

SEQ ID NO: 322284 - protein, 59 aa, Zea mays
  Clone ID: MRT4577_5698C.1.pep
LRLNSRLDATPPQHSAPNAGSLLQLQQLLSFDLLALTNPLSFYQQPIIDCALFYISYHL

SEQ ID NO: 322285 - protein, 169 aa, Zea mays
  unsure (1)..(169): unsure at all Xaa locations
  Clone ID: MRT4577_56990C.1.pep
MAHHLNQPTDLHKLGXRCHLQLQHSLNVHASRNIMPXFSPXMQRRFATRXNYMTHRLXGPAVSDNGGINGPGMPTPXLFAYAPPEKCAINFMIDYMMGAVSAAVSNTACAPIERMKLLMQKQDEMIKYARLSRPYNGIADXCFERSIKEEGFSSLRRGSTANVIRDFPT

SEQ ID NO: 322286 - protein, 119 aa, Zea mays
  unsure (1)..(119): unsure at all Xaa locations
  Clone ID: MRT4577_56991C.1.pep
SAGKTGTAQRSLTSQTXATQKHLSTRRPEACRRRNWTRXXXKERKRKGGRTPRXDKWKMKEAFIADGRPVRKGNIEQCVTGGGAGDSPAGKLKNPAKRGEGAPQKEAKGPPRPPPREEN

SEQ ID NO: 322287 - protein, 157 aa, Zea mays
  Clone ID: MRT4577_56992C.1.pep
PAGPGIQKKKKKKKKKKKKKKKKKKKKKKKKKKPPRRRHHWFAFAPFVSHRPKKTRNAQGVRVSKRGLKNDFDLLNPPEKFEKLKHKKKGLVQPPNSFFRDVKGQGCFRITTGFSHSQTGVGGPGCQIVLCQPTRGKGQVPPRGAPSAERAIRPCFS

SEQ ID NO: 322288 - protein, 219 aa, Zea mays
  unsure (1)..(219): unsure at all Xaa locations
  Clone ID: MRT4577_56993C.1.pep
LFPGERIYENGQNSPQIVLFVGTLVKKYADGLCLSVGGRVGWYINPSIPEAETLMSSARGDHKPVKWNATVTSSQLISPVAEEQKVSYIKYLHPFENKGKEFLVTVTIRKVDSKWWYNSCRKCACTAVTHGDSYKCTNRDCANIAMPVQRYKIFVTAGDETADTDFILFGRMAQRIVKRPCDMLIANTPSGFIPDAIXSCLKDVHWNVSFLAHINSGTS

SEQ ID NO: 322289 - protein, 129 aa, Zea mays
  unsure (1)..(129): unsure at all Xaa locations
  Clone ID: MRT4577_56994C.1.pep
ASPSTMGKDKCHINIVAIGHLYSDKMTTTGHLIYNLGRIDTRAIHRFEKEAADMNKRTFKYARVLYKLMAEXDRSITIDIALCKSETTKHYCTVIDACGHRDFIKSMITGTFHADXAALMKDSTTDGYE

SEQ ID NO: 322290 - protein, 318 aa, Zea mays
  unsure (1)..(318): unsure at all Xaa locations
  Clone ID: MRT4577_56995C.1.pep
MACSTASLAAXAAGVRADVPGLRRGEEEAHRARAGAGHHHEVPQGRAPVGPHRRQLHLVRRLHGATAGGDHRLRLVAVRGPAGGGAVAAGAVRVHVVQDGAQVLRHLQXARFPALRLGSHXPSTGTAPSAGGSRSGXLLRLAARGAPSRAINLVLTAADVAVDGFCASRCGTHGAXSPRSRAGRFAYVWVGNPASQCPGQCAWPFHQPVYGPQAPPLTPPNADVGVDGMVISLASMIVGTVTNPFGNGFYQEGSADAPLEAATACAGVYGKGAYPGYAGALLVDPASGASFNANGAHGRKYLVPALVDPDTSSCATLG

SEQ ID NO: 322291 - protein, 34 aa, Zea mays
  Clone ID: MRT4577_56996C.1.pep
SVVIKWEGLSEPWSAVSTKCFDRSKVFAGELSYR

SEQ ID NO: 322292 - protein, 82 aa, Zea mays
  Clone ID: MRT4577_56997C.1.pep
PPLTSTTLTPRSSRCITSLLSVLSALQLRAGAVNAVSDRRRPVRCVLITFMCVWDGTSVAVTFILDLVIVGRFHVIWIPAKP

SEQ ID NO: 322293 - protein, 89 aa, Zea mays
  Clone ID: MRT4577_56998C.1.pep
HLSRDINTTHQISPPTKPQQNPNPTTGVNHHTEANKKLRLEMKPFEPTLSGKTQAAGNLKNKTETDAVLLKPLQGPVDPIHLEDLNPGP

SEQ ID NO: 322294 - protein, 74 aa, Zea mays
  Clone ID: MRT4577_56999C.1.pep
NYAAEEGLHQISRLNVPQQIYAGHPSHRLANSTSANILDFSSSCFVDESDWTAPLAGKKLLPPLLLSNMLDLSG

SEQ ID NO: 322295 - protein, 97 aa, Zea mays
  unsure (1)..(97): unsure at all Xaa locations
  Clone ID: MRT4577_5699C.1.pep
FDLFTATIPLLVSPSTVSCLCCSAGKVSSCSCYDASTPRLSTSSILLHVVVLLEXPTQSPRRRQQAVMSFANINRASPLLTGTSHADRSTAVGGTPL

SEQ ID NO: 322296 - protein, 63 aa, Zea mays
  Clone ID: MRT4577_569C.1.pep
KLKWAFKHYDDGTRAYETKPRNLGKKKWEKWSFLLGFPITRTNWKKKAHFVSGNSLPGRQENP

SEQ ID NO: 322297 - protein, 583 aa, Zea mays
  Clone ID: MRT4577_56C.1.pep
MARAGVLPLITAPIVANMRLHHVLIDGGAGLNVISHAAFRQLQIPGSRLGPSCPFSRVGPQPVYPLGSIALPVTFGTEENFRTENVQFDVAEVKLPFNAIIRRPTLYRFMAIAHYGYLVFKMPSPMGVLSVRGDRTAALAAVEKLHALAAETARPGGGGRSPSASGAKAPKPVSQKPWRQSVERQDFIHEEVRKLLHAGFIEEVHHPMWLANPVIVPKANRKLRMCIDYTSLNKACPKDPYPLPRIDQIVDSTSGCDLLSFLDAYSGFHQIRMSREDMKHAAFVTVDGLYCYVVMPYGLKNALSTFVRAMSKTFGDLIWDKVEVYVNDIVVKTRRGSIVVEDLTLVFDKLRATRTKLNPEKCIFGVSTGKLLGFLVSYWGIEANPEKIKAIEIMRPPARVKDIQKLAGSLAALSRFISRLTERALPFFKLLWKSGPFTWTKEAEQAFQELKQHLTSLPILVALEPGEPLYLYIVAAAEAVSMVLVAERATPEGQGPENLGPTSGTRIVQKPVYYVSEVLHEAKTRYLETHKLLYVVLVASRKLRHYFQAHRVVVVTSFPLRAILHNSNASDNIAKWAAELAEF

SEQ ID NO: 322298 - protein, 54 aa, Zea mays
  Clone ID: MRT4577_57000C.1.pep
ASALVGTVSVHEYERVLVSVKVRLGELPSRVPARRAVPLGLRCSSCPCTSCLPA

SEQ ID NO: 322299 - protein, 104 aa, Zea mays
  Clone ID: MRT4577_57001C.1.pep
HNPSTYTFHWPFRWRKRLGMDTSTALGERGTPPERGKCSNSINLANAEGFNRRTRGKSIPQDPRVKSSALSRPNWMAGRRPTRLRGIDTAGAGDSNHPGGGLWF

SEQ ID NO: 322300 - protein, 149 aa, Zea mays
  Clone ID: MRT4577_57002C.1.pep
MARYDDEADQAVADEVEAEATADEAEADEATTASTGNIRSRRSLPLKHRKEFERRQIIKPTGTMSTKEVYWDGQVHRTPVSNMIGICYRFFYLRMVIEEQYRLSDDMSLDDQHMREKYVVGHKGQDTDHSEILCDENVTQKLGHYIENL

SEQ ID NO: 322301 - protein, 104 aa, Zea mays
  Clone ID: MRT4577_57003C.1.pep
QRLYGQSPIVFGSFPSLHAAWPIAITIFAPDYKIVKFVGTLYVATVWWAAMYLNHHFLVDLLGGAIFTAFAYFVSTQFIALMTYLKHKIYSRGSLKWIIMSGEK

SEQ ID NO: 322302 - protein, 137 aa, Zea mays
  unsure (1)..(137): unsure at all Xaa locations
  Clone ID: MRT4577_57004C.1.pep
MAAAAAMMVSGGRAALAVXGRALRGGXAMAAAQQASNVRATYHLXTAWDADKPLSWRQKHGWTAFCGPAGQKGQAACGKCIRVKNRATGASIVARIVDQCSNGGLDLDYETVFKKIDTNGQGYQMGHLNVDYQFVAC

SEQ ID NO: 322303 - protein, 153 aa, Zea mays
  unsure (1)..(153): unsure at all Xaa locations
  Clone ID: MRT4577_57005C.1.pep
MAAAAAMMVSGGRAALAVXGRALRGGXAMAAAQQASNVRATYHLYNPAQNGWDLNRVSAYCATWDADKPLSWRQKHGWTAFCGPAGQKGQAACGKCIRVKNRATGASIVARIVDQCSNGGLDLDYETVFKKIDTNGQGYQMGHLNVDYQFVAC

SEQ ID NO: 322304 - protein, 99 aa, Zea mays
  Clone ID: MRT4577_57006C.1.pep
KFGAFTNKGGGVFPSPKMGPPRAGGHTQKNNRYSLKGKNGFPIEHGNGPPCFATILAGFPVLFGAPGGETEAPEGVTRPIYPFGGGETPNNPGGTPPPP

SEQ ID NO: 322305 - protein, 177 aa, Zea mays
  unsure (1)..(177): unsure at all Xaa locations
  Clone ID: MRT4577_57007C.1.pep
MAAAAAMMVSGGRAALVVAGVLCAVAAMAAAQQASNVRATYHLYNPAQNGWDLNRVSAYCATWDADKPLSWRQKHGWTAFCGPAGQKGQAACGKCIXLWLCVCATFTFPPAGLSQEIVGLLQVKNRATGASIVARIVDQCSNGGLDLDYETVFKKIDTNGQGYQMGHLNVDYQFVAC

SEQ ID NO: 322306 - protein, 570 aa, Zea mays
  Clone ID: MRT4577_57008C.1.pep
MSLRTTAWLSARPGHHQPVQCLSAPEKPRRRSANYQPTSWDYNALLSLDSGRPGDQVHPSSYYKMKRRIRDMLLKKVEPSSKLQTIDAMQRLGISYHFEDEISNILYSISNESTKAQYTYDNIAFTALKFRLLRENGFPTILGPLGYHNYEKFITKTPSLEDANTLLLLYEASYLAFGDEEKLDVARTFSAKALKQLMPFMLPHLREGVAHSLELPLHWRASRLETRWFIDYYARDRNMCPLLLQFAEIDFNQVQYEHQKDLAVVTRWWKKIGLGEKLPFARDRLMECFHYANGVRWDPKLGTCRQMLAKVSNLIVYLDDLYDVYGTIEELVLFTNAIARWDAIPNETLPEYMKALYSIIYDTSNEVAEHALKKHGCSMHYLLQKSWYDICLAFLVEAKWHHGNYRPSIQKYLENGWVSSSAPLLLLHAFAMLDSVVNMSTISPLQTKLRLVQHVSLILRLCNDSATHLDELGRGDAPSFIALHMIENGGNENDSRKAMQEHILKSWKVINEEAFDSCQYSMPFNKACIDLARISHCVYQGGDGFGTPNGLKKKQIRDLFLDPIDICNKQ

SEQ ID NO: 322307 - protein, 153 aa, Zea mays; identical to SEQ ID NO: 322303
  unsure (1)..(153): unsure at all Xaa locations
  Clone ID: MRT4577_57009C.1.pep

SEQ ID NO: 322308 - protein, 40 aa, Zea mays
  Clone ID: MRT4577_5700C.1.pep
PNSGTGGTVFFATMFHSFFVRLRMIFGQSLRELSFVGLKK

SEQ ID NO: 322309 - protein, 241 aa, Zea mays
  unsure (1)..(241): unsure at all Xaa locations
  Clone ID: MRT4577_57010C.1.pep
RAEAGRGRRSLEGEKREXEHDEEEELPSPSSSLGYLMLCRICHEEEDGGRATMESPCGCSGSLKYAHRRCVQRWCDEKGTAICEICLQNFEPGYTMPPKKTPVVETAVTISEHEDMQSLESREGLSGGAGYTRCSYTADQCATWCRSLAITFTIMLLAWHLVAVVTVEAAAHCAFSLLAMYLLRAAGILLPLCVVMRLIRIVQSGQEQQYGLQLLEHQRRNVSXMNYMRVQEEDQRVINIH

SEQ ID NO: 322310 - protein, 153 aa, Zea mays
  unsure (1)..(153): unsure at all Xaa locations
  Clone ID: MRT4577_57011C.1.pep
MAAAAAMMVSGGRAALVVXGRALRGGXAMAAAQQASNVRATYYLYNPAQNGWDLNRVSAYCATWDADKPLSWRQKHGWTAFCGPPGQKGQAACGKCIRAKNRATGASIVARIVDQCSNGGLDLDYETVFKKIDTTGQGYQMGPLNVDYQFVAC

SEQ ID NO: 322311 - protein, 256 aa, Zea mays
  unsure (1)..(256): unsure at all Xaa locations
  Clone ID: MRT4577_57012C.1.pep
MEHDEEEELPSPSSSLGYLMLCRICHEEEDGGRATMESPCGCSGSLKYAHRRCVQRWCDEKGTAICEICLQNFEPGYTMPPKKTPVVETAVTISEHEDMQSLESREGLSGGAGYTRCSYTADQCATWCRSLAITFTIMLLAWHLVAVVTVEAAAHCAFSLLAVXHCWHGQAEKSRVLIGNLIPSTKSRGYVSLQMYLLRAAGILLPLCVVMRLIRIVQSGQEQQYGLQLLEHQRRNVSXMNYMRVQEEDQRVINIH

SEQ ID NO: 322312 - protein, 176 aa, Zea mays
  unsure (1)..(176): unsure at all Xaa locations
  Clone ID: MRT4577_57013C.1.pep
MAAAAAMMVSGGRAALVVXGRALRGGXAMAAAQQASNVRATYHLYNPAQNGWDLNRVSAYCATWDADKPLSWRQKHGWTAFCGPAGQKGQAACGKCIRVCVCATFTFPPAGLSQEIVGLLQVKNRATGASIVARIVDQCSNGGLDLDYETVFKKIDTNGQGYQMGHLNVDYQFVAC

SEQ ID NO: 322313 - protein, 176 aa, Zea mays
  unsure (1)..(176): unsure at all Xaa locations
  Clone ID: MRT4577_57014C.1.pep
MAAAAAMMVSGGRAALAVXGRALRGGXAMAAAQQASNVRATYHLYNPAQNGWDLNRVSAYCATWDADKPLSWRQKHGWTAFCGPAGQKGQAACGKCIRVCGSATFTFPPAGLSQAIVGLLQVKNRATGASIVARIVDQCSNGGLDLDYETVFKKIDTNGQGYQMGHLNVDYQFVAC

SEQ ID NO: 322314 - protein, 204 aa, Zea mays
  Clone ID: MRT4577_57015C.1.pep
GIAVASVPSAFAHGVITAVQGENGNGGSGFGMVPSTPRDGTRRNPFQTDSGIIRDRDIARGKASGCGRTLAGGPINMAAAMAEAESAGVPSIGADGQVKMTLHQVNGDGAGPYTCDIDASGMGTNFTPMMVVTNIPGSNSRSRAKAQDFPLVAQVPNGMTCTGGSDGQTCVVRCRNAANAGPFGGMCGRDPGPMSHHFKSTWWT

SEQ ID NO: 322315 - protein, 153 aa, Zea mays; identical to SEQ ID NO: 316796
  unsure (1)..(153): unsure at all Xaa locations
  Clone ID: MRT4577_57016C.1.pep

SEQ ID NO: 322316 - protein, 153 aa, Zea mays; identical to SEQ ID NO: 322303
  unsure (1)..(153): unsure at all Xaa locations
  Clone ID: MRT4577_57017C.1.pep

SEQ ID NO: 322317 - protein, 90 aa, Zea mays
  Clone ID: MRT4577_57018C.1.pep
KFSRERLEFVRDIFNLLFLLPSLMDRLQPKCKSHSSRAAAYDLLVEMVKGSVENYRLIHNWVMAQHMQSHAPYKWDYWPHEDVRAECRFV

SEQ ID NO: 322318 - protein, 90 aa, Zea mays
  unsure (1)..(90): unsure at all Xaa locations
  Clone ID: MRT4577_57019C.1.pep
TVILSMIFTTMHTLCYPPSFLWCSPSSFLWCSSAILWCSTSLFLWSPPMWSFSTPLWMITDTPTCSSLLSLNNKRIRETVNNXCDAWPRP

SEQ ID NO: 322319 - protein, 109 aa, Zea mays
  Clone ID: MRT4577_5701C.1.pep
VEHRRLYVPRCVVVKSARDVICRMAAGLISMQHLGARRELVYTMRGGSAHWSVGPVTPPSFSVFLFLSVDLLAIAEVQCFLLDRVTLCAFAHRARGGRDKKMRRIYLEV

SEQ ID NO: 322320 - protein, 55 aa, Zea mays
  Clone ID: MRT4577_57020C.1.pep
EKKNQNLGLDVTLTYRFLKKNWGCKAFLSQREYQSGTLIWPFYCLQFGKLEPFSN

SEQ ID NO: 322321 - protein, 62 aa, Zea mays
  Clone ID: MRT4577_57021C.1.pep
RRSAVHTRVAPPWNHVHTVARDPIARPGAYHVGREVWLLASRHHTHGYRVSLTRYASSVSHS

SEQ ID NO: 322322 - protein, 145 aa, Zea mays
  Clone ID: MRT4577_57022C.1.pep
HASGLVLYRLEAVDLRTMTNEEKIAFWVNVHNALLMHAYLENGVPQNKTSLLAKQAACKIAGRSINAAVIQSVVLGCTTHCPGQWLRRTLLYPRTKSKVSKAGHEWRAFAVAQPEPLLRFALCSGSHSDPAVRVYTPKRLFHQLE

SEQ ID NO: 322323 - protein, 67 aa, Zea mays
  Clone ID: MRT4577_57023C.1.pep
QTNTSAFVCQLLLTDGYCIATYAPVSILLSSLHHLCSHIMCDSYSDAAMLAFILAGYIDELVCCTYR

SEQ ID NO: 322324 - protein, 366 aa, Zea mays
  Clone ID: MRT4577_57024C.1.pep
MALSDRSRESLLPSFLYASSARSFAATGAAARLPVSSPAPATAGAGGGVPFSIQAPKEKIEMYSPAFYAACTAGGIASCGLTHMAVTPLDLVKCNMQIDPAKYKSISSGFGILLKEQGARGFFRGWVPTLLGYSAQGACKFGFYEFFKKYYSDIAGPEYAQKYKTLIYLAGSASAEVIADVALCPFEAVKVRVQTQPGFARGLSDGLPKFVRSEGVLGLYKGIVPLWGRQIPYTMMKFASFETIVELIYKHAVPVPKSECSKTTQLGISFAGGYIAGVFCAIVSHPADNLVSFLNNAKGATVGDAVKKLGLWGLFTRGLPLRIVMIGTLTGAQWGIYDAFKVMVGLPTTGGVTPAPAAEAELKASA

SEQ ID NO: 322325 - protein, 71 aa, Zea mays
  Clone ID: MRT4577_57025C.1.pep
PWANFYHTGGPQPSKATFITLLPYYPNCSKPFYSIFSYYAEEDDQNDPSNLFNTTCSSTKFTTSTIKTIIK

SEQ ID NO: 322326 - protein, 52 aa, Zea mays
  Clone ID: MRT4577_57026C.1.pep
LLLQKYAASDTFIVSLSLVPRFKIAFITLLKPFIPNCYHPFFFVFQPFYLKP

SEQ ID NO: 322327 - protein, 87 aa, Zea mays
  unsure (1)..(87): unsure at all Xaa locations
  Clone ID: MRT4577_57027C.1.pep
ALIPRGHQPXGGEINRRRGATPTARGQTPPGTGSRASPRTEPSGPGTSPEGQSRTHSAKLGPSDQPEHRPSALTGPASNAATATGRT

SEQ ID NO: 322328 - protein, 72 aa, Zea mays
  Clone ID: MRT4577_57028C.1.pep
TQRRCIILQPRFLGIFHLFAPAIMTSIMHSSFCSQRLYSWSSHVVVFRYLSRIFMVRRLLNRQLWVVLFVFH

SEQ ID NO: 322329 - protein, 45 aa, Zea mays
  Clone ID: MRT4577_57029C.1.pep
HHVILVRSVCKGSMLSQRGRGHHLLVCKIFPQGGYVIVRAEWLLF

SEQ ID NO: 322330 - protein, 71 aa, Zea mays
  Clone ID: MRT4577_5702C.1.pep
RKYNRECYHEFFILFEGKKNFCRDHDLPLALMYHSQIGPSRGWCVLYILACHSQRVQTRFTPRVSSAGARE

SEQ ID NO: 322331 - protein, 65 aa, Zea mays
  unsure (1)..(65): unsure at all Xaa locations
  Clone ID: MRT4577_57030C.1.pep
IIIIYFVYMFGVMLIXLYILCLFVLWRVEEPVTEDPGDXQIEVAKQELIEGKRTSGSGEATNPGV

SEQ ID NO: 322332 - protein, 225 aa, Zea mays
  Clone ID: MRT4577_57031C.1.pep
MGSGSLLKVFANNFDVLAGPLVALAYPLYASIKAIETKSPVDDQQWLTYWVLYSLITLFELTFASIIQWLPFWPSMKLIFICWLVLPYFNGAAYVYQNYVRPAFIKNQMVNIWYVPQKKGLLGKSDDFLTALDKFIEENGTDALKKLANKAGKPFKQSGKSSKDQKETKSSKDSKEPKPSKDAKQPKPSKDTKEPKPPKDSKSTQGLQRTEEGNAERSEESTEGF

SEQ ID NO: 322333 - protein, 151 aa, Zea mays
  unsure (1)..(151): unsure at all Xaa locations
  Clone ID: MRT4577_57032C.1.pep
PGKGGAGRTTRNKKNRKKRGHXXAGHGRXGKHRKHPGGRXNAXGXHHHXXXXDKXQAGYXGRXGRXDXQKXRNKGXXPAXNNERXXXXXPTDKAAEAGGDKAPQNDXTQGGXXKGXGKGXXPPKPXXXKAKXNXKGAEKKNKAAGGAGGPT

SEQ ID NO: 322334 - protein, 77 aa, Zea mays
  Clone ID: MRT4577_57033C.1.pep
MGTSPVIPATMLFNDLLVAVCFSATAARSSHARHTDADNEIRLPSSFGTGDRPCNCCESAIKDASLQAWRCNAPVHK

SEQ ID NO: 322335 - protein, 135 aa, Zea mays
  Clone ID: MRT4577_57034C.1.pep
NQCCPQQVHGGWGINFQKFGQALGFQNPPCFPQIDPLKKPFQALPKKKYRFEVPSLSQKKAPEFYLKLFFRPNIAYFEHFFPPLCTPRWKILKNLGVPGPQLCFRKQVSGQMYQKISVNDLNTKCCCNSFFLPAP

SEQ ID NO: 322336 - protein, 80 aa, Zea mays
  Clone ID: MRT4577_57035C.1.pep
CEPLERNHCDIILDTLCKKTMEKLLQPFTTCRDVLKTTHNTLESPKTMNLEIFGIHSMNGAPVALVLQCASLRVRQWFNT

SEQ ID NO: 322337 - protein, 117 aa, Zea mays
  unsure (1)..(117): unsure at all Xaa locations
  Clone ID: MRT4577_57036C.1.pep
SRDRKIITCTSPSAPLLRQHPLVLLHEXELLXTMAQHFWGDHLHLLVLAYLSAYSXQHWDLPFDQLYALHSAADLQQQPPFSLLVPAYPQLFLPFNQLEVLDHDVYLQQQQLLPFSQ

SEQ ID NO: 322338 - protein, 81 aa, Zea mays
  unsure (1)..(81): unsure at all Xaa locations
  Clone ID: MRT4577_57037C.1.pep
MASSASQASLLLQKQLKDLAKNPADGLHXRLVNHSYIFEWQVTIIGPSDTLYDGSYFNAIMTLGQNYPNSPPSVRCTSEMW

SEQ ID NO: 322339 - protein, 203 aa, Zea mays
  unsure (1)..(203): unsure at all Xaa locations
  Clone ID: MRT4577_57038C.1.pep
LLDDPGNAYFALLSQHCVPLHSFPRLYAALFPTPTRARTRXSYIEVLEGEPQMASRYAARGGEEGMLPEVPYERFRIGSQFFALARRHAVLVVRERRLWRKFRAPCVPEMAQDSCYPEEHYFPTLLDMADPGGVARYTLTRVNWTGSVAGHPHTYAAPEVSPRLIADLRASNHTHHPHMFARKFAPDCLGPLLAIADTVIFKD

SEQ ID NO: 322340 - protein, 139 aa, Zea mays
  Clone ID: MRT4577_57039C.1.pep
QRYPNPPPPLIRDLEFSANKKHLTIIGTGHTSSLDHIFACGLGFVWTGLDWLGWFRPGPCSNQSKALATSTNNNNSRSDHPRRYYLLLGSRGLGLGLVKAADDGRRGTGISGVLLPFGPPLQRHACSSAPVFLCSRLGV

SEQ ID NO: 322341 - protein, 88 aa, Zea mays
  unsure (1)..(88): unsure at all Xaa locations
  Clone ID: MRT4577_5703C.1.pep
YSALSFSTKVGKGVGRGLFAYFFTGXGVQKGEPFARGDEWVMPVLTWCCQSSENRLYLLNKAGIRPLLCMFERPSILLHSDELPPSLT

SEQ ID NO: 322342 - protein, 114 aa, Zea mays
  Clone ID: MRT4577_57040C.1.pep
PSKLDLLVKAVFGRPQPLYVGGVGGKTHSPKVVYLFTRNFSGPFLAKFFPHALCLPSKGSSFDVPSLLKPGGVNPGFRPPAVKNPGPLGRGQTSLFNFFMRALNQGPQSFGPTP

SEQ ID NO: 322343 - protein, 135 aa, Zea mays
  Clone ID: MRT4577_57041C.1.pep
KQFAADPAGLVPMQQLVPVVVLVLTTRAASVRRTQRWGGPPLEVEEVGIPQKSFLDDGRGPPRKKKIPAREQRGKWWPRGGSHEDLCQGVGEGGQLFICRKHKRSKKRRKKKKNKNKDKKRKKKKKKKRLPGRPL

SEQ ID NO: 322344 - protein, 182 aa, Zea mays
  unsure (1)..(182): unsure at all Xaa locations
  Clone ID: MRT4577_57042C.1.pep
MSDSALQDLNAAQSVVLEKSKDSSVEPCSSKPVLNGNKCVKKEGNAVPACPDVTNGCDAVVVDVEYIDSENLTDLPDVDTSLSTLLATLDSKDWIKTCEALNNVRQLAIYHKQRLQELLEPLVPLIVKSVKNPRSALCKTALMTCADIFKAYGAQMVDLIDLLLMPLFLKSSQXNRFVCEHL

SEQ ID NO: 322345 - protein, 368 aa, Zea mays
  Clone ID: MRT4577_57043C.1.pep
MVVKEFGREVVMSMDKVKRGGEALMAAGAGAGDEEKDDAVLPGFRFHPTDEELVTFYLRRKVARKPLSMEIIKEMDIYKHDPWDLPKASTAAGGEKEWYFFCLRGRKYRNSIRPNRVTGSGFWKATGIDRHIYPATANPVESVSVGLKKSLVYYRGSAGKGTKTDWMMHEFRLPPAAASPSPTPTSMQEAEVWTICRIFKRNIAYKRQPQLPAWRQQQQSSSNTGSFESDGGGGGDEYMNRCLPVPATATATAHQIGGMLNGGGVVSATGSSSSSFFRDRESVHGGQQFHFHEQWLSRFPAAPAVEQKPQLLDPSAMAIAFHQNDDQSVATAAAAAASECCKDGYYWDEIARFMEVNDPTVLHDCRYA

SEQ ID NO: 322346 - protein, 366 aa, Zea mays
  unsure (1)..(366): unsure at all Xaa locations
  Clone ID: MRT4577_57044C.1.pep
MVVKEFGREVVMSMDKVKRDGEVLVAAATGDSEEQDDLVLPGFRFHPTDEELVSFYLRRKVARKPLSMEIIKEMDIYKHDPWDLPKASTAAGGEKEWYFFCLRGRKYRNSIRPNRVTGSGFWKATGIDRHIYPATANPVESVSVGLKKSLVYYRGSAGKGTKTDWMMHEFRLPPAAAASPTPTSMQEAEVWTICRIFKRNIAYKXQPQLPAWRQQQQSSSNTGSFESDGGGGGDEYMNRCLPVPATATATAHQIGGMLNGGGVVSATRSSSSSFFRDRESVHGGQQFHFHEQWLSRFPAAPAVEQKPQLLDPSAMAIAFHQNDDQSVATATAAAASECCKDGYYWDEIARFMEVNDPTVLHDCRYA

SEQ ID NO: 322347 - protein, 60 aa, Zea mays
  Clone ID: MRT4577_57045C.1.pep
SRHLMNSSCSILRPHRLSCQPHPASERERGELPPEGGGRRGGEGLDGRGHRRRLESSWRG

SEQ ID NO: 322348 - protein, 63 aa, Zea mays
  Clone ID: MRT4577_57046C.1.pep
TYSGACSTQIDFMTRTGLTQKTWPSRHVGLKGLLMMVPHPHISATGQGLENTINTRTKRCPNS

SEQ ID NO: 322349 - protein, 67 aa, Zea mays
  Clone ID: MRT4577_57047C.1.pep
GYSPVLQFIQFFGKPCGQKNILKGPSHRCFPRCVGVPTPPPKLWWLVGNFRNAFFEPFPPIGAEMGS

SEQ ID NO: 322350 - protein, 224 aa, Zea mays
  unsure (1)..(224): unsure at all Xaa locations
  Clone ID: MRT4577_57048C.1.pep
RVIPRKNVCTGGEETSLTESGSSNFGVDSVDSVKKPSFDPKRSNSFNFSGASSHSMERHQYLQRGISLLKTSVTAITTYYYNSLGLDVPSNLSTFEAFAKLLHMLSSSKALRTAFELDIASRSEKQAQQLNRSIWKASSAISSDSSFMDSMHTTIMTRXLYTGKLVKHGGVPDSIFDSWDMVEREVLPPPPSRVEGVAQWEWAMYAGSTKKNDLYYKSSLKSKC

SEQ ID NO: 322351 - protein, 478 aa, Zea mays
  Clone ID: MRT4577_57049C.1.pep
MASRRGSSSCALCEGSNLPSCCASCVNARLVEYHTRLRMMRSLRDSLHGRIAARLEAKRKTDEQRIWRTSKEQDIMELRNRLTELKRKTAVDKTEVEQASSDLKAKTVPLNLALATLKKRRADAVAMHTNAMKVAQMNLMATTSDCMKMQSKSVKQLCRLFPMRRVIKEGEKKDGYNGPYDSICGVRLPRGLDPHSISSEELSASLGHMLHFINIAVRILSAPALHVSGCKGSCSNIWQRSSYWSTRQSQSKVYPLFIPRKNVCTGGEETSLTESGSSNFGVDSVDSVKKPSFDPKRSNSFNFSGASSHSMERHQYLQRGISLLKTSVTAITTYYYNSLGLDVPSNLSTFEAFAKLLHMLSSSKALRTAFELDIASRSEKQAQQLNRSIWKASSAISSDSSFMDSMHTTIMPSTLDNLLMNSDESLYTGKLVKHGGVPDSIFDSWDMVEREVLPPPPSRVEDVAQWEWAMYAGSTKKK

SEQ ID NO: 322352 - protein, 104 aa, Zea mays
  Clone ID: MRT4577_5704C.1.pep
VIGSACGAIGKTATFPPKVARKPLQVGTVVRRHVLKNVFHALVCRMDKKGAVGLSKGPGPMCIRLMPPSGISFMCYETCKKILVGANMDSESTSSMYAPEEGYL

SEQ ID NO: 322353 - protein, 46 aa, Zea mays
  Clone ID: MRT4577_57050C.1.pep
FLFFSWHLFEYWGFFKEEKLIFHKTCLHRTATNSYTKFWSSKSAQV

SEQ ID NO: 322354 - protein, 107 aa, Zea mays
  unsure (1)..(107): unsure at all Xaa locations
  Clone ID: MRT4577_57051C.1.pep
PRRGGGRAPQREPAAAGGPGARGREFGPPGKRPPGGGDERRRXRGGPTNVLSLYGGNWRERGGGEREEAAGGRDPRGDRGAACAGARGETKETPPSTSVVREKRICW

SEQ ID NO: 322355 - protein, 135 aa, Zea mays
  unsure (1)..(135): unsure at all Xaa locations
  Clone ID: MRT4577_57052C.1.pep
TKKTKNIPKKNNLKKGAGDNTQDRSLKPNQQKRTKNPWYRPNRIXLYLSPLSXKPPNYLTDEGARXYGWDTVALFADPXLFSRTPXLEVIHSRFTMLGALNCVFPQLIALNGIKFFEAVWFKERSQIFSYGKLDY

SEQ ID NO: 322356 - protein, 89 aa, Zea mays
  unsure (1)..(89): unsure at all Xaa locations
  Clone ID: MRT4577_57053C.1.pep
NKSHVKAVETTIVERDIALRLKITYSSTNIGLCSSRPPLVATRVPLTYGHEQGLKEVRGIATITYRPPRSPFDKTETPHASETTWAXAW

SEQ ID NO: 322357 - protein, 70 aa, Zea mays
  Clone ID: MRT4577_57054C.1.pep
DSYKHWNYNFGATLFNLPFSSTFCGINILNFIELTFLHDSCLVFDLSKYYLFEVLETIITTIFIISILLS

SEQ ID NO: 322358 - protein, 77 aa, Zea mays
  Clone ID: MRT4577_57055C.1.pep
RSAIMARAEAALMSTDSANLDVRSSPAERRVYSLHSARAPAAAGLPAIGRTSTTCAASTTSSSATRCTCSPSPSSGG

SEQ ID NO: 322359 - protein, 100 aa, Zea mays
  unsure (1)..(100): unsure at all Xaa locations
  Clone ID: MRT4577_57056C.1.pep
TPNRRQQRPGQRRDDRKKPGRDADAQRAGKNAXARNPKRGATPGDPATREHQETXSPPPPQKXDXERKRKEQRAQTXPNNPKKQHKPRPKQKKKKKTTPA

SEQ ID NO: 322360 - protein, 125 aa, Zea mays
  Clone ID: MRT4577_57057C.1.pep
RVPQKPFPTGPLHWGRGGPFPPPPRSLPSPVGPWVPPPPPCFFPFFFGPPPPVFWLVYGLGGFLGPPGGASFKCPPLFNFGGCRPPPNFPKKKKKKKHKKKKKKKKKKKKKKKKKKKKKKKKKKK

SEQ ID NO: 322361 - protein, 141 aa, Zea mays
  Clone ID: MRT4577_57058C.1.pep
WQCCCSLPCTASSLAPPIPHRCPSIISPLALVYAVACILFHSRHAVLLLVLFAIYIPAGLLIKPKNLPPGVDCTFRKIVLKYPVCIFGEDEWAASRRDEPTMPRYSKKQDPIDRCSSSPATKEKMPPRKIISSFPNSTHVD

SEQ ID NO: 322362 - protein, 64 aa, Zea mays
  Clone ID: MRT4577_57059C.1.pep
SDGGLSLIITKTLQDDFSLKKKKKKKKKKKKKKKKKKKKKKKKKKKNNKEKGAGEFPGVLYIRA

SEQ ID NO: 322363 - protein, 93 aa, Zea mays
  Clone ID: MRT4577_5705C.1.pep
RAAGNKGKDPDLSVGDADVPFPQPFTSGQVPRRPAGARRRVAPAPVAHAALRDALHRLRGLARRLRPNPRRDARPACHRWCQPRRHAAAARAL

SEQ ID NO: 322364 - protein, 94 aa, Zea mays
  Clone ID: MRT4577_57060C.1.pep
PPGNKGLCVIAGNFSPIDVIPPVPILCGESNVPSIFVPPKKVFAPPGPLKGPPCWVLVLPNPNKGGLSAGVKVKLKSAFAPVVPEVFGAPFPMF

SEQ ID NO: 322365 - protein, 42 aa, Zea mays
  unsure (1)..(42): unsure at all Xaa locations
  Clone ID: MRT4577_57061C.1.pep
PWXLXTXRXAYNSPSXSFLXXXMPRIDSRIXDYEHXXXXTXG

SEQ ID NO: 322366 - protein, 171 aa, Zea mays
  unsure (1)..(171): unsure at all Xaa locations
  Clone ID: MRT4577_57062C.1.pep
MEPLSSFRPPADSDVDRDDRRLTRLLVNVTVDRSLWPVHLVLGADATVADLVRAAVAAYAREGRRPPLAGAADDGFELHLDKYSLQSXHRDEXRLDDKVLDLGSRNFFLCARRXCGARLDGLMRAWLVGSIGSDRRCTHVQPRVRRGCECSRYSGLQGLEMEMATANDVEC

SEQ ID NO: 322367 - protein, 236 aa, Zea mays
  unsure (1)..(236): unsure at all Xaa locations
  Clone ID: MRT4577_57063C.1.pep
MPIGSGCTTQALAAMHGGGEPEVVEPHRRLLQQRMEPLSSFRPPADSDVDRDDRRLTRLLVNVTVDRSLWPVHLVLGADATVADLVRAAVAAYAREGRRPPLAGAADDGFELHLDKYSLQSLRLDDKVLDLGSRNFFLCARRXCGARLDGLMRAWLVGSIGSDRRCTHVQPRVVDRGKITCEKGVASAAGIQAFRVWRWRWRWRTTLNVGVPVEPFLCRVNLRERDANRKRGNMVS

SEQ ID NO: 322368 - protein, 55 aa, Zea mays
  Clone ID: MRT4577_57064C.1.pep
CKNKRLELVYFIENSYELQITSFQFLKFCNFILYHLESLVCHENSNKIYLSLNSI

SEQ ID NO: 322369 - protein, 51 aa, Zea mays
  Clone ID: MRT4577_57065C.1.pep
IPCATWIQTILGVKLIPIKFCFPGHQFELNCFLWHFNCGLNSFVAAMYVTY

SEQ ID NO: 322370 - protein, 58 aa, Zea mays
  unsure (1)..(58): unsure at all Xaa locations
  Clone ID: MRT4577_57066C.1.pep
KTSYXGDELLSDSFTDRSSRRRLWESXKWHQVCVSMCIIASVDTYPRSVYVPSLALLQ

SEQ ID NO: 322371 - protein, 103 aa, Zea mays
  Clone ID: MRT4577_57067C.1.pep
VSKLWSRDEQLKFDALEQLVPVMDQKTYWAVVSKNFASKPRIDLIKYYLNVFLMRRVLYQCRLGLLEIDSDEDDVEEEEDEDQPEGSSSLQRTQDAQDLKKVP

SEQ ID NO: 322372 - protein, 48 aa, Zea mays
  unsure (1)..(48): unsure at all Xaa locations
  Clone ID: MRT4577_57068C.1.pep
GLRSSALSVRGPGSSARLPFWVLSCXPSASFCLGSCSLLRCXXAGSXR

SEQ ID NO: 322373 - protein, 53 aa, Zea mays
  unsure (1)..(53): unsure at all Xaa locations
  Clone ID: MRT4577_57069C.1.pep
FGEVLAAHXSSDNPNWFQDTVDAVRQYLWLNQEHNVMEFLIIDGEHLYRMDYE

SEQ ID NO: 322374 - protein, 95 aa, Zea mays
  Clone ID: MRT4577_5706C.1.pep
DLAERRPVVRGRKSGSPQGPVDVDIGCLSISLGCVRITSGDDTGAKVADIADTFRVPEQRSFCDRSSTYLLSENRSRVSVMCWSPRSWMSSTRVM

SEQ ID NO: 322375 - protein, 246 aa, Zea mays
  unsure (1)..(246): unsure at all Xaa locations
  Clone ID: MRT4577_57070C.1.pep
MATRRAFSSILRSASRIRSASPSPCPRAPLHHRPSPAGFILNRVAAYASSATAQAAPAPPPPSTGKKTGGGKITDEFTGAGAIGQVCQVIGAVVDVRFDEGLPPILTALEVLDNNIRLVLEVAQHLGENMVRTIAMDGTEGLVRGQRVLNTGSPITVPVGRATLGRIINVIGEPIDEKGDITTNHFLPIHREAPAFVEQATEQQILVTGIKVVDLLAPYQRGGKIGLFGGAGXGKTVLIMELINTL

SEQ ID NO: 322376 - protein, 41 aa, Zea mays
  Clone ID: MRT4577_57071C.1.pep
VAVKVGDALKNNTTNRRWTSSRIVSECFFISLSLWCFGLVS

SEQ ID NO: 322377 - protein, 113 aa, Zea mays
  Clone ID: MRT4577_57072C.1.pep
RCGLLCLVLFAILCGLLDRGSGDGDWDSSSSVTSASASAKDDRHRHASSAPAAEPVTVVATTTSSGDWDVWLPWRMWSLSSSFTRVLRIPNPQSGSLNISNAPFGCWNWRWWN

SEQ ID NO: 322378 - protein, 100 aa, Zea mays
  Clone ID: MRT4577_57073C.1.pep
TTSVQRSNNSKPETHAPKPTTTRGPGYPPAHALQRSIRGDTYDTCHLKSHTPKTVGRTRTVKCRLAPVLGQPPPSGRTHYCPFAWTPPPRAAAEADDTDL

SEQ ID NO: 322379 - protein, 74 aa, Zea mays
  Clone ID: MRT4577_57074C.1.pep
MILCDGNDGHCSLLNGMTRCFICAKKKKKKKKKKKKKKKKKKKKKKKKKKKKKKKKKKKKKKKKKKKKKGGALF

SEQ ID NO: 322380 - protein, 127 aa, Zea mays
  Clone ID: MRT4577_57075C.1.pep
LGPWRGVAAPAPHRPALLFSAVNCWLKCMLLEPYNQIDHPECKSRPDSGLSAITELDPGYITGPLSSVWKEWVKWCVEFGIEANAIIAVPYDWRLPPSMLEERDLYFHKLKFVTLASTCYEATKCYT

SEQ ID NO: 322381 - protein, 59 aa, Zea mays
  Clone ID: MRT4577_57076C.1.pep
SRPGPGESYLPICDLYSLSLPASLTYTMDSGKETVISRARHLPAITSPDTHSRHLDGTG

SEQ ID NO: 322382 - protein, 79 aa, Zea mays
  Clone ID: MRT4577_57077C.1.pep
YKDVQIGKYYSGCYHPTGRWPLPNMSSSLWMVLSSFFLTVRELVHWESKSARVVHSWLDLGGTLSQSLENQGRVQVQVL

SEQ ID NO: 322383 - protein, 331 aa, Zea mays
  Clone ID: MRT4577_57078C.1.pep
MVSAPPPSGPFPCLGRPAMDSPSGLWWRPAPSSCPPFPSTPSMSPRYVGDPIVASFASSQLPPSTIEARPQRPPLPARHGARLATATAGPAPPTATPLVLHHPLAKAPSVSLKPPSPTDFCGSPRDADACGRARQDLSLTDAPPRSRRRGRRDTYCRGSPGDADACGGAWLDLSLTDERLRPTHRVPVVHLGLLLGATSPPSPRCCTCLYRGDMPKHVTEANLLVLFCEVATVEEVTIIKDKATKVSRGVDLPGPRSGLAALPSPRLLPLGSPQCCDLHCSLQRSFSPLGVGFGSNVTRRNLLCTGWSLWEIWAPWFGSELDHLQRLFQLI

SEQ ID NO: 322384 - protein, 78 aa, Zea mays
  Clone ID: MRT4577_57079C.1.pep
LTLYKQNWYSPPVPSRYSGVTPRVGKKFNWGFKLNFTNFGLFVPRSPPQIFFFFPCPPPIFFPLLATSFLEKKPPAHP

SEQ ID NO: 322385 - protein, 56 aa, Zea mays
  Clone ID: MRT4577_5707C.1.pep
LETLSCNQPHCVIFFVTRTAGQRSSVKNSLCPSFPEATPYHSWELPNTRMPIFTWQ

SEQ ID NO: 322386 - protein, 127 aa, Zea mays
  unsure (1)..(127): unsure at all Xaa locations
  Clone ID: MRT4577_57080C.1.pep
NASPHAAAPKRPIGTARAKTALXRGDTYIKASDYFXAEKKEADAEKERKKXERFNQSYELEKXRLLVEQARAANEAKRFTDXENEMQVKRMFEEERIMTTDITSMADHSQQYYKGLXIEIIARRASK

SEQ ID NO: 322387 - protein, 127 aa, Zea mays
  Clone ID: MRT4577_57081C.1.pep
GLDHPATAEAPSYGSGATLADSRDVSAEVPDTGRTRIATSPSAPTGAVRPSRFSSSLRRRASRAMAASTLSVASGVGASSAGTPWSSVLSCASSAGTPWSCVLASLLLISSLLPLGHSHSHYKRKQG

SEQ ID NO: 322388 - protein, 91 aa, Zea mays
  Clone ID: MRT4577_57082C.1.pep
GHLRYLPTNKHPKSVCSRLSPTLLSNITETMDKALACARLHSCQGHLFLFTLWTMSHHRDCFVSGLKPSLHDIPCARAGLHHLRSGANWST

SEQ ID NO: 322389 - protein, 38 aa, Zea mays
  Clone ID: MRT4577_57083C.1.pep
YALSFNFEKMFWGFGRRPYSTPLKKAPSQGAGRINSLL

SEQ ID NO: 322390 - protein, 57 aa, Zea mays
  Clone ID: MRT4577_57084C.1.pep
RNCCFFFSKGGNLRAPFSKKKKKKKKKKKKKKKKKKKKKKKKKKKKKKKLEGGARVP

SEQ ID NO: 322391 - protein, 34 aa, Zea mays
  Clone ID: MRT4577_57085C.1.pep
HKPLHRCTSTSHGLLHYHHTTRPHHWLTTRTWII

SEQ ID NO: 322392 - protein, 96 aa, Zea mays
  Clone ID: MRT4577_57086C.1.pep
ELHGPVCGGALALAVRFFGSVLDVVHVALGAAPEHGRRLEVLQAQLPRRWRRRRRDGRHCAKELGRWIAVRIGVASALREHSGKGDGAARRGGGFG

SEQ ID NO: 322393 - protein, 112 aa, Zea mays
  unsure (1)..(112): unsure at all Xaa locations
  Clone ID: MRT4577_57087C.1.pep
LTKPKSGHKRFPFNNFTYFLTLFSKCFSSFDHSTCALSVSGRYLALEDIYLPFRAAFPNYSTRRRRFTEIWHPXQTGLSPSMASRSREXSEGTASKSSSTNYNSGPKARFQI

SEQ ID NO: 322394 - protein, 67 aa, Zea mays
  Clone ID: MRT4577_57088C.1.pep
VAEVQMSLTRGTQIKLLKKKKRAKNQRLVLLACLPWMPLVKKIICIVKMLPNKILFLLKRRLPMNLL

SEQ ID NO: 322395 - protein, 101 aa, Zea mays
  Clone ID: MRT4577_57089C.1.pep
VKEDVGAAVGVHGRDVYATVDGVRDELHALWMAADCREVQALALRRVRQVAEPALVAAWPAARSGGGVPTEACLPSSSFLVCPFAEWQSCKDDDDNSQCHE

SEQ ID NO: 322396 - protein, 356 aa, Zea mays
  Clone ID: MRT4577_5708C.1.pep
MQGGRGGRQGLFGFGDPFVGFGSFGQPGNIMSGFFGGANPFDDPFFTNPFGGMMQPSFSTPFSGMMQPSFMNPFGSMMQPSLLGSSMFASHGNLNGGTFGSQTHLNQGMSNASGFIQQASESSRPKGPIIKELSSDDEDKPEDDKEDGKKNGNFRKHPRESREPCVEDPDEEEEEDNKRPKHRQFGRELSRSGTSRLQPQTFMFQSSTVTYGGPNGACYTSSTTRKTGANGITLEESKEADTTTGKATHRISRGIGIKGHSLTRNLNSDGRVNTLQTLHNLNEDELGGFEESWQRNARQNMPGWDTRMNMLGNGNLHTGFRDANQRPALPAPGRSRKANSSWNFQNGSSTGRAPRT

SEQ ID NO: 322397 - protein, 73 aa, Zea mays
  unsure (1)..(73): unsure at all Xaa locations
  Clone ID: MRT4577_57090C.1.pep
MYSGNSGLCGHTIGKIGSASNSSSLHVHGHGFEVVSFYVGLSLGXILGLWRVFCVLLLNKAWRVAYCGVIDKI

SEQ ID NO: 322398 - protein, 91 aa, Zea mays
  Clone ID: MRT4577_57091C.1.pep
WARALELGDYVLHLEDRVDCQDVDSDADHDGRGTENTWKMLLLIMRQVAQHHQIQRLQSATVASDNAEDIYVVSNAANGTTPYSYPLEGED

SEQ ID NO: 322399 - protein, 121 aa, Zea mays
  Clone ID: MRT4577_57092C.1.pep
MAQGRGSATRGLALGALLAAAFLLLLGVADAATHRVDWSFNADSWSKGKSFRAGDVLEFNYDPSVHNVVAVDAGGYNGCRPSGTSYGSGSDRITLGPGTSYFICSLNGHCGMGMKMVVNAS

SEQ ID NO: 322400 - protein, 32 aa, Zea mays
  unsure (1)..(32): unsure at all Xaa locations
  Clone ID: MRT4577_57093C.1.pep
KFAKHAXGFGSTSARLNWLRVAYFELVARFVG

SEQ ID NO: 322401 - protein, 38 aa, Zea mays
  Clone ID: MRT4577_57094C.1.pep
MLCFYLIGIVHVVTDGVLFDCSRVSSDQFKIMFSVCTN

SEQ ID NO: 322402 - protein, 110 aa, Zea mays
  Clone ID: MRT4577_57095C.1.pep
PNQEKSDMNIGEICNSRLAFRGLGTMERQQVELMWHQPLMSMARDMCLVHIIALPIAVGRLPQTPLSPESAQYQCGHEPRMRHSDDPYAAIWEVHMHQAHNPPPASRAAF

SEQ ID NO: 322403 - protein, 97 aa, Zea mays
  unsure (1)..(97): unsure at all Xaa locations
  Clone ID: MRT4577_57096C.1.pep
GAKGLMKGGAIRHRKVLRDNIHRITKPXIRMLVRRRAAKRISGVIYEDTRGVLXLPYENVIRDASTYTENARRKTVXAMDAEYALKRQGRTLYGIGV

SEQ ID NO: 322404 - protein, 96 aa, Zea mays
  unsure (1)..(96): unsure at all Xaa locations
  Clone ID: MRT4577_57097C.1.pep
AARRRSRGXGKEGSDRGEGTREXGREDRTAAGGGGXQXRRAEARGPKDQERGNXRPGGGTNRRGQAPQSDGEKAAGQERGGTPGGDNKHTPAQGTG

SEQ ID NO: 322405 - protein, 72 aa, Zea mays
  unsure (1)..(72): unsure at all Xaa locations
  Clone ID: MRT4577_57098C.1.pep
FVVGILQNXVGPMGFVIKVXKGPLEFYADIGGLDGPIQEIKKAVGVPFTPPELYXNIGIRPPQGVILYGGRW

SEQ ID NO: 322406 - protein, 88 aa, Zea mays
  unsure (1)..(88): unsure at all Xaa locations
  Clone ID: MRT4577_57099C.1.pep
FGTRPQATPRVQNPXIRATMPRLAAAAAAVSRRAXXALRRGAKEGQKTPLALQPXNSVCSDYVLVEGKTSXRAGGVNRPGYLNALTTT

SEQ ID NO: 322407 - protein, 217 aa, Zea mays
  unsure (1)..(217): unsure at all Xaa locations
  Clone ID: MRT4577_5709C.1.pep
MSNASGFIQQASESSRPKGPIIKELSSDDEDKPEDDKEDGKKNGNFRKHPRESREPCVEDPDEEEEEDNKRPKHRQFGRELSRSGTSRLQPQTFMFQSSTVTYGGPNGACYTSSTTRKTGANGXHTWKLWHWVSPFFLHICRVKGRPGEVVRVVSLSTHITLEESKEADTTTGKATHRISRGIGIKGHSLTRNLNSDGRVNTLQTLHNLNEESFVGL

SEQ ID NO: 322408 - protein, 69 aa, Zea mays
  Clone ID: MRT4577_57100C.1.pep
SSPPSVSIATALLSARPSNLLPSRFVYESKLTGPILQNGGHRKCFRALKRGRTNSMFFIYYFFFFFFFV

SEQ ID NO: 322409 - protein, 102 aa, Zea mays
  Clone ID: MRT4577_57101C.1.pep
GGHCTATGGGPPRGFPQARGIPKKRPSAGPGQSVKTPPKVNFLVQWPRPGVDNDTVLTWPAPFTRSGCPKKKVRALPTSKKSLAFRSPRRVLFFYPPNPILD

SEQ ID NO: 322410 - protein, 52 aa, Zea mays
  Clone ID: MRT4577_57102C.1.pep
STSRQDGPYPRSVALIALRGCAGLPYPNWRVDLPICCQGVTLLHGPCSKKLN

SEQ ID NO: 322411 - protein, 45 aa, Zea mays
  Clone ID: MRT4577_57103C.1.pep
YELRRCLPMLLTFFGQLGVNTDQIRAVVEFDKARLCRNTVGEDVI

SEQ ID NO: 322412 - protein, 37 aa, Zea mays
  Clone ID: MRT4577_57104C.1.pep
SPYIRTTALGGARTRCGALLPSNGGPCLGVRGARGEA

SEQ ID NO: 322413 - protein, 463 aa, Zea mays
  Clone ID: MRT4577_57105C.1.pep
FCFISLHIQIWYNNVPHPKLVEYKKDQNWVTRSGDYLVFPGGGTQFKDGVGRYIQFVEQIMPTIQWGRRTRTVLDVGCGVASFGGYLLDRNAITMSFAPKDEHEAQIQFALERGIPAFLAVIGTQKLPFPDNVFDVVHCARCRVHWYANGGKPLLELNRVLRPGGYFIWSATPVYRQEQRDQDDWNAMVTLTKSICWRTVVKSQDVNGIGVVIYQKPASNSCYAERKTNEPPLCSERDGSRFPWYAPLDSCLFTTAITTSDERYNWPVPWPERLDVSYASVPDDSASNKEKFEADTKYWKQLISEVYFNDFPLNWSSIRNVMDMNAGFGGFAAALIDQPLWVMNAVPIGQPDTLPLIFNRGLIGAYHDWCESFSTYPRTYDLLHMSNLIGNLTNRCDLIDVVVEIDRILRPGRWFVLKDTLEMIKKIRPILKSLHYEIVVVKQQFLVATKSFWRPGKPASTSG

SEQ ID NO: 322414 - protein, 90 aa, Zea mays
  unsure (1)..(90): unsure at all Xaa locations
  Clone ID: MRT4577_57106C.1.pep
VVVPFSRFPPLGRFAVRALGPPAAVXVLXGVXGXPPPPPGVGGGAVPAGXXRPCLCPRLFCACARXLLSVGFSWLCAPRLLFGLFPPSSP

SEQ ID NO: 322415 - protein, 155 aa, Zea mays
  unsure (1)..(155): unsure at all Xaa locations
  Clone ID: MRT4577_57107C.1.pep
YTWIGMHATFMGFFLRPHPRFFLLNFSKSTHTQLTHPHMVQSPLASSSRRSTSPRRWCSSPRRRRQALAHERAPAGQKECTAAPARRSAPPCRRRRGSRRTRGAVRQSGAQIERNHCSLAHXPLPPLQTLAGPTPLHLHPNLASPLGFPTAAATA

SEQ ID NO: 322416 - protein, 151 aa, Zea mays
  Clone ID: MRT4577_57108C.1.pep
MGRLHSNGKGISASAIPYSRSAPAWLKTTPEQVVDQICKLAKKGATPSQIGEILRDSHGVAQVKVITGNKILRILKSNGLSPDIPEDLYMLIKKAVAVRKHLQTNRKDKDSKFRLILIESRIHRLSRYYKTVGALPPTWRYESATASTLVA

SEQ ID NO: 322417 - protein, 124 aa, Zea mays
  Clone ID: MRT4577_57109C.1.pep
VSSEFGSSADELACWKLVAGDVLREPFHPVLLCVLVGDGVRILGMGVVTIVFAALGFMSPACRGALVTGMLCLYLVLGVAAGYTSVGVWKTVRQGEAAGWKSVAWRASFAFPGVGFTVFTAANC

SEQ ID NO: 322418 - protein, 145 aa, Zea mays
  Clone ID: MRT4577_5710C.1.pep
VRSCLQMMRSGQRMIKKMTRRMVTLGSIQGKAENRVWRTQMKKKKNNKRPKHRQFGRELSRSGTYRTSRLQPQTFMFQSSTVTYGGPNGACYTSSTTRKTGANGVSIYHHLMNVFLHLPQFIPSPDPTRGSFGTGSPPFFCIFVG

SEQ ID NO: 322419 - protein, 42 aa, Zea mays
  Clone ID: MRT4577_57110C.1.pep
SESSMLVTDCFNGLKDTRSFQLWGSLLGHRSPSVSKHLIISL

SEQ ID NO: 322420 - protein, 70 aa, Zea mays
  Clone ID: MRT4577_57111C.1.pep
KCFPNIKKEFLRYSLIIIPFLKMFFLIFKKEFLRYSATSIFSEFSRVRIIGVQKKKKKKKKKVLCVVTTA

SEQ ID NO: 322421 - protein, 69 aa, Zea mays
  Clone ID: MRT4577_57112C.1.pep
GGPPPSLRVFFFFFFFIFFKDVAPAGGYVFPRIPPHSAQTRTGTRGRGGGLPPGSQGPISHSWDRDHQG

SEQ ID NO: 322422 - protein, 42 aa, Zea mays
  Clone ID: MRT4577_57113C.1.pep
LAPNFLFGLYTCIHTGDGFNRNKKPGHVPPPPDLKLAWAEFR

SEQ ID NO: 322423 - protein, 69 aa, Zea mays
  Clone ID: MRT4577_57114C.1.pep
TFFFFVRAQPVIRNSLIEPHSPRPLNEGTHNNSPPCAPCPFSERNLCVHYSSVLTCYWGPCSPGAPAGC

SEQ ID NO: 322424 - protein, 64 aa, Zea mays
  Clone ID: MRT4577_57115C.1.pep
MARLVLSECCGLAPLRLRAGRGAIAAPSPPALSAAAAPGRPAPAGIHRDWALRVSAPTRLTYVV

SEQ ID NO: 322425 - protein, 68 aa, Zea mays
  Clone ID: MRT4577_57116C.1.pep
KGPPFKEICYLGPYALETFFLLPMVPVPFFPIFKVFLPQNPVLVFRSQLKILRKGPPWEQKGPGFPNP

SEQ ID NO: 322426 - protein, 118 aa, Zea mays
  unsure (1)..(118): unsure at all Xaa locations
  Clone ID: MRT4577_57117C.1.pep
VAGLDLTDGVRKTVTEREYYFTTYAEREMERGIKEKLAYIGGEYNYDFXTAKNSSSGEKSYELPDAHPITIGAXRFKCPEVLFXPSMRGMEAVANHETTYISIMKSEGDIRKDHYGNI

SEQ ID NO: 322427 - protein, 65 aa, Zea mays
  Clone ID: MRT4577_57118C.1.pep
EVGVRSAFKQKAQLRSDIGTDGDHLAGGEGQGQGRGALGQEGFGGRASSCESVATRGRWEEIGSL

SEQ ID NO: 322428 - protein, 105 aa, Zea mays
  Clone ID: MRT4577_57119C.1.pep
SHPSSRSPNRQPPPFIVTRPLMTCHPQFSSVSSLSVSSHSFRPSLVQRQLLALKLLLPQQLVNGITMTEPHSPSSSASQGRGVLPAFLLSPVYSICHSVPLHPGT

SEQ ID NO: 322429 - protein, 68 aa, Zea mays
  Clone ID: MRT4577_5711C.1.pep
AADGATHAVPNHTSRLSPSSLSPAPSRRRVKSAERDDLISPLIESGHNGRSSVVVISIAGDLDGTGGA

SEQ ID NO: 322430 - protein, 70 aa, Zea mays
  Clone ID: MRT4577_57120C.1.pep
KKERREYLTGNFTSNCYANQYLVITKSEQLIRYNLWSYMQSSQSMLKLTLNCTSIHVNLLPFSSSTWTRS

SEQ ID NO: 322431 - protein, 75 aa, Zea mays
  unsure (1)..(75): unsure at all Xaa locations
  Clone ID: MRT4577_57121C.1.pep
APAGAGGVFFWGIYPLGDISGXRRPPVPMEWMGMPPLIKNVLIACNILPIFIPGFFWKGPPNPLFKFFGIGPLGD

SEQ ID NO: 322432 - protein, 200 aa, Zea mays
  Clone ID: MRT4577_57122C.1.pep
MTTVAHHHHLAAATVLFFVAFTMAPLAAGDPVGQLCGTSGNYTLNSTYQGNIRRLAATLPKNTSTSATLFATDTFGAVPDIVYALALCRGDTNASACSGCVAAAFLDAQQLCAYNKDATMFYDPCLLRYSNQNFLADPNSDGRGTALILRNTQNVTAPFKVFDASVAALLLMNTQNVTAPFKVFDAAVAALLNATAAYAA

SEQ ID NO: 322433 - protein, 664 aa, Zea mays
  Clone ID: MRT4577_57123C.1.pep
KSLWKKEKDLRDAEKKVSVDRSRLNQTKQDLDQREEDIIKAYSRQHEMEKALMKASRDLTLQVRQINNLKVMIEEQDKKLVSSQDALSKKVIEVDKLKQEMLKKNDEVALLHSEIESKEQELLVANQAIARQEATIRELRSETKRKETEVERLNELAKANEDKLKFAEQELEKQNSGWIAAQQELKELAQMAFKDKDDIKNTINDFKRVRYLLDAVRSELIASKEALTFSRKQVEDQAAQLSNQVQELTDQKALIISYTRNLEAAQLEIQGKSNELSTVQSRCSELESQLLEETEKVEFLEAMLTKEREILEQKTKEVAFLQEEVVQKEKDYFNSQKLVETKETELLEARHEVEDMKLKVDSIQFAVREKDLELLEAQRKLDEVNSEVVELQQLINSKEDQLVQVRTELQDKEQCIQLMQDELDKMRLGRSQAESVVQKIVELTSNLIGSVKGEEFDIYNLLDDEILSTSTALEYSLHKHNQLEADIDMLKESLRQKDMDLTAAYKALDAKDRELKAVVGRLDVRDKELENLEELSIDPYGTRKLSRVADEATEDNIAGEAELQKHEMESVEMEALAASTMLKKLADVTKKFLRSGRTDSGTNLDSNVSEGASELEPQRKLNVILEAKKEIVGLFSLTEELVTGAQVKDDEEHHKFITEHITAS

SEQ ID NO: 322434 - protein, 235 aa, Zea mays
  unsure (1)..(235): unsure at all Xaa locations
  Clone ID: MRT4577_57124C.1.pep
MTTVAHHHHLAAATVLFFVAFTMAPLAAGDPVGQLCGTSGNYTLNSTYQGNIRRLAATLPKNTSTSATLFATDTFGAVPDIVYALALCRGDTNASACSGCVAAAFLDAQQLCAYNKDATMFYDPCLLRYSNQNFLADPSSDGRGTALILMNTQNVTARFKVFDAAVAALLNATAAYAAANSSKRFGTRGRGVPELRQQPPEDLXGLAQCTPDMTPXDCQSCLSGIIQTGPKYFSG

SEQ ID NO: 322435 - protein, 104 aa, Zea mays
  Clone ID: MRT4577_57125C.1.pep
ILADAETSDETKNFLAVPADNNKLKYIERIAERSDDLTIEHKGEMKVVVTTVISLTKEEEKELMETLQDILNENKTILTEQKTDYIIIKLLAIEFRQKVHNILI

SEQ ID NO: 322436 - protein, 302 aa, Zea mays
  Clone ID: MRT4577_57126C.1.pep
MRPCSSSPGRTPPPRRSGHGSTWWATESRGTRRWEGKRRRGEVTGAVGCRMLAAGWQVGCVLGKGGKTVERMRQECGAQIRVFRNREQLPPWAPPGDELIHISGSFSQVRKALLAVSTCLQDNPRPDTHNIPIGRPFGLPGSGTGCPPGMDPHSQRSYLPPHIPDYHTRNYPSNAGPPGPRFFFEQEIVFRMIILNEMVGSIIGKGGSTIRALQSETGACIKILEPVADSDERVVAITARENSDMLHSPAQDAVVRVYSRISEASIDRSSHTPARLLVPSQHIGCLLGKGGSIISEMRKITG

SEQ ID NO: 322437 - protein, 62 aa, Zea mays
  Clone ID: MRT4577_57127C.1.pep
TVQSLEAASGTASDASEDGLIDRMKNYREVHSASFQNLMASVGRASSVKGRYARIGFHDVEM

SEQ ID NO: 322438 - protein, 97 aa, Zea mays
  unsure (1)..(97): unsure at all Xaa locations
  Clone ID: MRT4577_57128C.1.pep
GPLPXPCCXCXXXXXXLALPGAFXFGFPWXXXXXXXXXVAPPPARXLXGALGVXVVXALXRXVLVAXXXLGVRPRQRVAXRLXRRVCWVPPPAPAGW

SEQ ID NO: 322439 - protein, 87 aa, Zea mays
  Clone ID: MRT4577_57129C.1.pep
STFRITNSIVLNIYLTYHNAHVLNTKIITINKSTNPIIIPTIQSNEFAYQYQVAPLPWTRRQILLQTFRRALGRRHPGVFFSSVINY

SEQ ID NO: 322440 - protein, 37 aa, Zea mays
  Clone ID: MRT4577_5712C.1.pep
MFVKKKKKKKKKKKKKKKKKKKKKKKKKKKKKYKKLK

SEQ ID NO: 322441 - protein, 141 aa, Zea mays
  unsure (1)..(141): unsure at all Xaa locations
  Clone ID: MRT4577_57130C.1.pep
RAVPRVDTSVLEELAGLLDRTVTAAWRASGLIFSAFPLIETCTLAELHMALSVXVFAAAPLSKLVGAVTASLLRVVHMDRGCIPWLDPQQQGSVLYVSFGSMSAMEPHEFVELACGLCDNNRAFVWVVSPSIKKASRVRNA

SEQ ID NO: 322442 - protein, 55 aa, Zea mays
  Clone ID: MRT4577_57131C.1.pep
VLALHRTHTQKTGRINKRAVPSLTSPMGETIAACTRGATQKTYAYGRLKRLTAYW

SEQ ID NO: 322443 - protein, 70 aa, Zea mays
  Clone ID: MRT4577_57132C.1.pep
YSIHRTPFLPFNLFTHLSFLKGNVNVIKKFRIPGQIVRKLFHHPIRYSPPPPPKPKPIITQSTIVTKKDA

SEQ ID NO: 322444 - protein, 117 aa, Zea mays
  Clone ID: MRT4577_57133C.1.pep
SARLLLGASFRSSVPRVLGLVALWRVFFPCVGSLCPLLVFACPSCSVRPCWFGLLLVRSVLSLSGSCGVPPLFLLLSCVLSRGFLRAFCRPPPRLGLRFPSLCRSGSLAFSVAWCAG

SEQ ID NO: 322445 - protein, 123 aa, Zea mays
  unsure (1)..(123): unsure at all Xaa locations
  Clone ID: MRT4577_57134C.1.pep
XPFFFFFXFFXLAMPTRCLRFRHQVSHLSMYFIQNSSLIFMTHDSVWFLYTQGRDCTSSCSVKPRDAHPISQSGAPCTNTGAPECASEIVNHVYKTLCLDVQTRPFLEKELGSSACYVATITK

SEQ ID NO: 322446 - protein, 158 aa, Zea mays
  Clone ID: MRT4577_57135C.1.pep
MAKRLAGADKEVLVEVVRFTQKSGLRGCDGGWKDFLARNDRKFGASVSDPRKRSRDVLLAFLQTFPKDFQKYFGKLVKRHNERSAVQQYVADFPDEVSPQQKLVQLTAEHPEYRKHYCFPSYQEAWKVLQIDVSSLTSSSAMLSIDCEMVLCSDGTEA

SEQ ID NO: 322447 - protein, 50 aa, Zea mays
  Clone ID: MRT4577_57136C.1.pep
LVRTSITVGDHLCYPFISLIIAQSIPFSMQHYCLIHLNQSNRSLFSCLCC

SEQ ID NO: 322448 - protein, 160 aa, Zea mays
  unsure (1)..(160): unsure at all Xaa locations
  Clone ID: MRT4577_57137C.1.pep
VSHGAPAAGPEAATLARWICQSYRFHFGAELIKSADGSGCGEAVLKTLWHHAGAILCCSLKALPVFTFANQSGLDMLETTLVALQDIALERVFDDQGRKNLCAELPGVMEQGFACVPGGMCVSGLGRPVSYEKALAWKVLDXGSGGVHCVCFMFVNWSFV

SEQ ID NO: 322449 - protein, 146 aa, Zea mays
  unsure (1)..(146): unsure at all Xaa locations
  Clone ID: MRT4577_57138C.1.pep
MSERKLQHSMHGXSSGXLSRKRCCRDRGXVKEYPRDDGQKTGYLTDLVGYTDSVTDIDREVDKLGSKVHRKETCEADTIIEAIAVVIAGLEAYVKTRRGLRTLDYDWTQHLSEEVMXKFYKNWSKSMTKAVTKYAIESENDAGQME

SEQ ID NO: 322450 - protein, 92 aa, Zea mays
  Clone ID: MRT4577_57139C.1.pep
RSSFESRDEILLRGEGRDTPGVNFALCREIYPNLGCSVKISISRSRMSLIIQIIYPHFTKFGIIQSQEQPNLGAVKTFILGANVISIFILEL

SEQ ID NO: 322451 - protein, 104 aa, Zea mays
  unsure (1)..(104): unsure at all Xaa locations
  Clone ID: MRT4577_5713C.1.pep
NEHAWQRKPSHWLPRCESEASTSXPQDDPVARIPHGTSRMALPRVVHPAHEFFCAIRRITVLSTGGIHYFAEKCCNPSAHSKDYCIAYDSFLIFERQLKIRSFP

SEQ ID NO: 322452 - protein, 260 aa, Zea mays
  Clone ID: MRT4577_57140C.1.pep
MSEGSEVKTGNFMLDFALGGVSAAVSKTAVAPIERVKLLLQTQDANAKLTKKYTGIVDCLTRVPKEEGVSAFWRGNLANVIRYFPTQALNFAFKDTYKKIFCPYNPKTEFWKFFFGNLASGGAAGATSLMVVYPLDFARTRLAADVGKTGAERQFTGLVDCLTKVYKSDGYKGLYQGFGVSVLGIIAYRACYFGGYDTLKRVLFSEGKTSILFKFLVAQVVTAASGLVSYPLDTVRRRLMMQSGGKTGMYNGTLDCFAKI

SEQ ID NO: 322453 - protein, 84 aa, Zea mays
  Clone ID: MRT4577_57141C.1.pep
GLSACHAGGVAILNRHQSRSCSCATGTAWPHSPNTHWSLTRTQAGGVRVAMLYADEVRVDAVGRLSNVAIEIAAGRTRTRAPIG

SEQ ID NO: 322454 - protein, 84 aa, Zea mays
  unsure (1)..(84): unsure at all Xaa locations
  Clone ID: MRT4577_57142C.1.pep
KLLXTATXGXQPLRQLERHLXFIVXXXASAXLPXVXSPRSPGXSXPXNRAXDDVAXXAXXTWKTLXTTXSAPXXAGXTTTXXXG

SEQ ID NO: 322455 - protein, 178 aa, Zea mays
  Clone ID: MRT4577_57143C.1.pep
HDALRAPPQRAPRFVRRKNVLLSVDSDKTDEAELQAAVERAARLLAPYDAAIAEYTSQADATTIPGHYVVYWELMVREGGASPDAAVFERCCLEMEEALNAVYRQGRNGDAIGPLEIRVVRGGTFEEVMDYAISRGASINQYKAPRCVSFGPIIELLNSRVVSSHFSPACPTYSPHKK

SEQ ID NO: 322456 - protein, 235 aa, Zea mays
  unsure (1)..(235): unsure at all Xaa locations
  Clone ID: MRT4577_57144C.1.pep
FLPLCLSLSRSSRVHRVRSVSGGAASATLHQVAIPSPETSAHQIRFVDMSDNEKLVGEGTTRRGADWEVVAXAASAYEAAPGPVGTEVKPVNEDQERSSSDALLMSDHFVFPPSEHENLPIQTSFDEIHAEKDVQKPSTSVEDYSIKNDVGSERVQFDDEGKHLSDDDVEMKDDTPGYGSSHAEDDAHGFVAHGDGIESGEDFDEKSGHPLELSDSKSWDTGASCKWWXLKKHMA

SEQ ID NO: 322457 - protein, 76 aa, Zea mays
  Clone ID: MRT4577_57145C.1.pep
GSHRLNLEQPPGALVGSLRGCIQSLKVSCLYEQQQWSDPARLRPVYVNTQSTVGPLLFPVSKKPAKEGGRPLANKN

SEQ ID NO: 322458 - protein, 89 aa, Zea mays
  Clone ID: MRT4577_57146C.1.pep
RTSKMPGFLSDPISNKRSHRPSLDETSKGKRSHFAEISYHINNNRSFHILIQPPLITRGHTPETNPGGAGSTRRTWFAQIQTIHTRDRA

SEQ ID NO: 322459 - protein, 133 aa, Zea mays
  Clone ID: MRT4577_57147C.1.pep
AARWARHRHRLRAGNRGRARSDWAAGVWAINHALAPPTAHMRSPGSRGYSARHARRQLFGGDHHVALATSTSTCPLLPCCTDHCGFGRTTKGGHFGAGSETTQVHCRQCPRGPSSTTNYVRTVTVHGANNWET

SEQ ID NO: 322460 - protein, 66 aa, Zea mays
  Clone ID: MRT4577_57148C.1.pep
FKTLLKISHSMSRRVNLKPHHENFVYLKAESAFIPFVSFGDLDNNTFKGLTSLLSVEQKNQYDEHT

SEQ ID NO: 322461 - protein, 88 aa, Zea mays
  Clone ID: MRT4577_57149C.1.pep
FLAPLPFPFFFFSPPPFVFVAFFPPPPPHLLFFPPLIKKKKKKKKKKKKKKKKKKKKKKKKKKKKKKKKKKKKKKKKKTNKKKKKKAA

SEQ ID NO: 322462 - protein, 69 aa, Zea mays
  unsure (1)..(69): unsure at all Xaa locations
  Clone ID: MRT4577_5714C.1.pep
GPGGWFGTPFFVKKNPALRARVKFGLVSFPRKENKGNSLKGLFPSAFMAPVFFFXNQTRNIYPPTPCNN

SEQ ID NO: 322463 - protein, 95 aa, Zea mays
  Clone ID: MRT4577_57150C.1.pep
EGKKGRGFSLKKNTGERGNVPQRELSWEKGRVFRVKRVVNMAASGNEYWGLDKKNVIIFGCMRREAWTFYTPGSPFFFFFFFFFFFFFFFFFFFP

SEQ ID NO: 322464 - protein, 60 aa, Zea mays
  Clone ID: MRT4577_57151C.1.pep
ESGVTCSFSSSLALSGFFVVNQPKQNDAMLYVTIKSVVTLKLCLKKTDKIISKLINNSQT

SEQ ID NO: 322465 - protein, 86 aa, Zea mays
  Clone ID: MRT4577_57152C.1.pep
LASNQLLYPNHSLIIVPFQIFCWLHQYHVNFAQVQECVHITVCSLLTAFCGCHDGLLVNLRHTMRIASIHSKTITEQHCLSEDITS

SEQ ID NO: 322466 - protein, 187 aa, Zea mays
  unsure (1)..(187): unsure at all Xaa locations
  Clone ID: MRT4577_57153C.1.pep
ESAKPAAAKAVPPAKSRLSPAKGRLKAGSAAAAAAAAXAAAAAVPPPEWERGXGAEERGELARRLGDEARAWFLAFVERFLDADVAAAAPWDPDRAARMLPQLKRVNDWLSEIGKSAEMAPHPPPEADGEAAAPTANGGAASGVPEETIERLRKKIYEYLLTNVDSAAPVLGGCEMAPAPVANGKKG

SEQ ID NO: 322467 - protein, 55 aa, Zea mays
  Clone ID: MRT4577_57154C.1.pep
REPEQTIFQQTSIRTAFMFGALLVVLAATTQEETDVLLLVDAKVLRRFCLHADND

SEQ ID NO: 322468 - protein, 204 aa, Zea mays
  Clone ID: MRT4577_57155C.1.pep
MHIRTPNPSSQERAGSQAHGTYVQYRHLITRARMHPWPCTALLTPYGTPAPPAPAPPPPPPPPPRPPPPPNPPNGPAPATAPPNGPNPATPPPSGPWTPPKRPPPPVRPPNTSAVLACSSSSSTAPALSSPAANAAVVSQSRGIIALAAADATARQSSREATNHHLDAIGLSRSLAYYQEDQLLFFEVGLSGLVLLDWWWRGFD

SEQ ID NO: 322469 - protein, 104 aa, Zea mays
  unsure (1)..(104): unsure at all Xaa locations
  Clone ID: MRT4577_57156C.1.pep
RTPLCRYGGRFIRMRRGSSKAVCRHSHFRRESQSTGASGLARRRTCSTTSLQSMRRRRSLTSGKSSTKSPGAKRRFPWSAPKKISPPVAPKKDTSRSSAIXLHP

SEQ ID NO: 322470 - protein, 111 aa, Zea mays
  unsure (1)..(111): unsure at all Xaa locations
  Clone ID: MRT4577_57157C.1.pep
VGSVAYKLDLPASSKIHPIFHVSQLXRRLSLRLLQSXQLPQSLEGLQVPDKILQRRLNSAGXQLLIQWSGMPTLLATWEDELLLRQKFPYAPAWGQAPFIAGGLLQTLPKF

SEQ ID NO: 322471 - protein, 79 aa, Zea mays
  unsure (1)..(79): unsure at all Xaa locations
  Clone ID: MRT4577_57158C.1.pep
CNRILVTVFVRTAFACACFYWRGIKRQAQVXTCSSAVCYHLASPFFAGCKLLIRSDATPARPSRSSSMRSAMSAVIYGV

SEQ ID NO: 322472 - protein, 60 aa, Zea mays
  Clone ID: MRT4577_57159C.1.pep
PKPRTSELAPHPPSLSLKRLLKRRHDPMTNLFDIGCLGTNYPVRTELIPVQCRCRCTSHP

SEQ ID NO: 322473 - protein, 106 aa, Zea mays
  unsure (1)..(106): unsure at all Xaa locations
  Clone ID: MRT4577_5715C.1.pep
RGAFLEVAWLLLPLRFVSGSRGSPWFGFVAERIETAESDVEHCCFVRGLGXATDYHSLHRRLSSXPEALASRIILNRPMLRSRRLGFSALWSRYRTRPALYAMSAR

SEQ ID NO: 322474 - protein, 77 aa, Zea mays
  unsure (1)..(77): unsure at all Xaa locations
  Clone ID: MRT4577_57160C.1.pep
NPSPTRLILTPPPLFQNLLSVLLPPPPPIYSLHKLQPKYVVPICIHSTLRCKSASAFVQKIXXHSPLLVCSKKHPPP

SEQ ID NO: 322475 - protein, 123 aa, Zea mays
  Clone ID: MRT4577_57161C.1.pep
MRTTASGRMLLSVLVALAVTAAHHAAAVGPPKPRGQETHLFEATVRVPDNGAAGDLEEYNYRLLANVLGSVEAARSAMYESELGLFSAFITNNQARRLSKVPGVLKVTRLEDPPALPETDGHL

SEQ ID NO: 322476 - protein, 88 aa, Zea mays
  Clone ID: MRT4577_57162C.1.pep
VHLTGPMHATLARCEHVLLIHGPRAPASHAGSTQQGGRAPSLPPLNMDASAVDTDNRWVFLPNIPYYATEEQLVLICQEEDQVVSFRI

SEQ ID NO: 322477 - protein, 264 aa, Zea mays
  Clone ID: MRT4577_57163C.1.pep
AHASAHASAGITCGYVAANVIGEGGFGGVYMGALGDGRSVAVKQLKLGSGQGEKELLAEVDIISRIYHRHLVTLVGYCVTENHRLLVYEFVANKTLEHHLHGKGLPVMDWPKRMRIAIGAARGLTYLHKDCHPRIIHRDIKSANILLDDAFEAKVADFGLAKLTNDSLTHISTRVMGTFGYMAPEYAQSGKLTDRSDVFSFGVVLLELITGRKPVDASQPLEEESLVEWARLLLVNALETDDFREVTDPALQCRFSKTEIRRMV

SEQ ID NO: 322478 - protein, 77 aa, Zea mays
  Clone ID: MRT4577_57164C.1.pep
IVVHLVLPTRLHVCRSRITDSPTACCTGSRGPASSACPSPVFSTSMLAASCNPLRNALLWISSMSEYDHPVQASARQ

SEQ ID NO: 322479 - protein, 117 aa, Zea mays
  unsure (1)..(117): unsure at all Xaa locations
  Clone ID: MRT4577_57165C.1.pep
LYKVXFSASPDQARNEMRQACFDYLSLGGVFSNGPIALLSGLNPRPLSLVAHFFAVAIYGVGRLMLPLPSPKRMWIGARLISGACGIILPIIKAEGVRQMFFPATVPAYYRAAPTGE

SEQ ID NO: 322480 - protein, 36 aa, Zea mays
  Clone ID: MRT4577_57166C.1.pep
DLVEPMVGDSHRQGCRRWKSTTSSTQLTLQRCNLCR

SEQ ID NO: 322481 - protein, 80 aa, Zea mays
  Clone ID: MRT4577_57167C.1.pep
YCQGRLHEHPHTQLHWLLERLRLLPQATSRGAFALLKHQPCLMSTIPAAPCGFRSTRRYHGKRGYLLACIRKFTRELRCP

SEQ ID NO: 322482 - protein, 179 aa, Zea mays
  Clone ID: MRT4577_57168C.1.pep
GPSPSPAHRQSPLLAHFSLDHHFGTAASESLRTPTQARCPAVLIEPALIPSARGLHSTYGGSPPSRPPLRWTWPRPRTQMMVAEKPAPGVLGRARGGGRRAGAGVAGVATEDALAGLRAHQRARRRGQGAGAQEHAAESAHHRALQGSCTPRTTRWSRSARSSSCSTISTERTKDGGSF

SEQ ID NO: 322483 - protein, 110 aa, Zea mays
  unsure (1)..(110): unsure at all Xaa locations
  Clone ID: MRT4577_57169C.1.pep
LTEIERRSXRVVDFPCSKRRTPGRARPCLTIAVYVLLLLLSGSPSSSSQIRILDQQLAILLRCSRPSWRQEATTTIFYRSGEVRLFVTCTLDLSVLNPIYSTSVSVRTPS

SEQ ID NO: 322484 - protein, 92 aa, Zea mays
  unsure (1)..(92): unsure at all Xaa locations
  Clone ID: MRT4577_5716C.1.pep
MPPKKAAPSKAELANKQNVVEDKTFRLKNKNKSKNVQXYVQSLHHAVHPKPDSTKTAVKNNNDDEKAREKDLNDLFKGVDRHSKVPVDVDPK

SEQ ID NO: 322485 - protein, 124 aa, Zea mays
  Clone ID: MRT4577_57170C.1.pep
MGGKDLTEEQIAWMRKALTLFDTDGAGRFVPTELAVLIPSLGGTQTKAQFRNIAAQEKLTAPLNFQRFLGLMRAHLRPEPLDRPFRNAFRVSNKDGSGTVAVADLRHVLTSIEEKLEVHEFYKW

SEQ ID NO: 322486 - protein, 98 aa, Zea mays
  unsure (1)..(98): unsure at all Xaa locations
  Clone ID: MRT4577_57171C.1.pep
SQYQNPNNDPNTWKVISFLXANIRYHQIFMXKKDTSKMAFVYPSFIGLFEWGVMTFGXKNESATYQRAMNLILNEILGDIVEVYCWGPLSSEGPQKHD

SEQ ID NO: 322487 - protein, 135 aa, Zea mays
  Clone ID: MRT4577_57172C.1.pep
FFKGPFESPGSFNALHPFFFFPPGFVCFPPEPGSPPGPVSGQYLYCRPSPFSVIGPGTPPVVVTPMCKCQRSGFFPPNFVGPFLFFPGTLRFSFGFPWPQVAAKRGPPPPPLFFFFSRNSAFVAFKIGIQCWVPV

SEQ ID NO: 322488 - protein, 111 aa, Zea mays
  Clone ID: MRT4577_57173C.1.pep
VKHKKTTGSKTKMDPGARGTGKIYFQQKQAAKMGWNQRPLGTTLDGGGKNFFLLGLENGGEQGNNPVVVTPLVGEPKKKLDKRGVKGKPGLGVKKLNLLSPGKNGGKTKPP

SEQ ID NO: 322489 - protein, 30 aa, Zea mays
  Clone ID: MRT4577_57174C.1.pep
MAGIASRHVILVEHLAATSQLGATQKAAPW

SEQ ID NO: 322490 - protein, 40 aa, Zea mays
  Clone ID: MRT4577_57175C.1.pep
TILYTPCLVPSDPIRGEAKTCYLLCTCRRYIHSKCLFGPF

SEQ ID NO: 322491 - protein, 132 aa, Zea mays
  unsure (1)..(132): unsure at all Xaa locations
  Clone ID: MRT4577_57176C.1.pep
HASEGGAVAGKKKGAGSFTIDCAKPVEDKIMGGASLEKFLRERIKGAGGEGGDLGDSVTIXARKTKGTVTSDGPFSKRXLRYLTKKYLNKHNVRDWVRVGAANKDRNVYELRYFNIAENEGEGRLDCATLIF

SEQ ID NO: 322492 - protein, 51 aa, Zea mays
  Clone ID: MRT4577_57177C.1.pep
FCLVASIVLTVIHPCLGVDAIPFYAIDQFLVDSCSVQTRQVAQALLWMISR

SEQ ID NO: 322493 - protein, 115 aa, Zea mays
  Clone ID: MRT4577_57178C.1.pep
PRGGARGFCGGVVWPGGPTRFFNSRVGPQTRGKIQGLEGVFSDPTPPNWVGGKPGPPEWASNRGRPLGGRYKSFHKAPPPGRKRSPKIGFSFWGESPGAREIPPREKKKKRRRIK

SEQ ID NO: 322494 - protein, 102 aa, Zea mays
  Clone ID: MRT4577_57179C.1.pep
GHDLTKQGEPEPEELLTCTAETDSTGLERRGPPILHGTTVTKSPGTRKMTLRLTPSVAAGLAEGTLFLLSPNAKNGHRSSVEIPPGSIPVLQVVKDLISTSL

SEQ ID NO: 322495 - protein, 62 aa, Zea mays
  Clone ID: MRT4577_5717C.1.pep
VVFYRRLSRQLASRATKLYLLRKWSPPSVLATSRSLTACRSPSSGYERQPAFVGNLVSCANA

SEQ ID NO: 322496 - protein, 41 aa, Zea mays
  Clone ID: MRT4577_57180C.1.pep
TTRPRYRAGSSRTQPRAAGKLRSRVTAGERAKPSEPLGPAP

SEQ ID NO: 322497 - protein, 230 aa, Zea mays
  unsure (1)..(230): unsure at all Xaa locations
  Clone ID: MRT4577_57181C.1.pep
MARYDRAITVFSPDGHLFQVEYALEAVRKGNAAVGVRGTDTVVLGVEKKSTPKLQDSRSVRKIASLDTHVALACAGLKADARVLINRARVECQSHRLTVEDPVTVEYITRHIAGLQQKYTQSGGVRPFGLSTLIVGFDPYTDKPALYQTDPSGTFSAWKANATGRNSNSMREFLEKNYKDTSGKETIKLTIRALLEVVESGGKXIEIAVMTKKDGLRQLEETEIDEYVAE

SEQ ID NO: 322498 - protein, 75 aa, Zea mays
  Clone ID: MRT4577_57182C.1.pep
RKAQPIGSWNFWNSLAGAKWLNPLTGRTGIRPAWNWRDDFNSFFLARITNMQVSGIHELFIPNYFKSPHASANAW

SEQ ID NO: 322499 - protein, 113 aa, Zea mays
  Clone ID: MRT4577_57183C.1.pep
ADPSDYTPADLSWLRPPVAHRSHAFNYSTYTCFIYICLLGGPANCLLHYHYTTSVQQTGASPGHHWAAWQPGMASLFSKRCVALGVSYVGDGRPAGMEYVETTSRTRYFRLYS

SEQ ID NO: 322500 - protein, 166 aa, Zea mays
  unsure (1)..(166): unsure at all Xaa locations
  Clone ID: MRT4577_57184C.1.pep
MPPPAPVAAAIHAPVPSASATLCARVNPSRIRAPVPSASATLCARPNSSRDRRRSEAAAPCPSLHSVRAPGSVSPLSRALRSPPTFLRPSTSASPSIDNQPSMTTPDXTRRPLPGVMAAPHPPTPIPPTEPQPXASTPRRPPPVPASANAPAPHTHPPLPRCPPPS

SEQ ID NO: 322501 - protein, 53 aa, Zea mays
  unsure (1)..(53): unsure at all Xaa locations
  Clone ID: MRT4577_57185C.1.pep
MAIKRTKAEKKIAYDKKLCSLLDEYTKVLIALADNVGSKQLPDIXRALKGQLR

SEQ ID NO: 322502 - protein, 41 aa, Zea mays
  Clone ID: MRT4577_57186C.1.pep
MINDFCLKKKKKKKKKKKKKKKKKKKKKKKIKKKKKKAPRA

SEQ ID NO: 322503 - protein, 71 aa, Zea mays
  Clone ID: MRT4577_57187C.1.pep
SVNAFLYGENEGLGQIVEVVGRDNLDVDFRQAGVDPSYRTLVSLGSRVESSWRSSIREPRYRVEDGDGGKA

SEQ ID NO: 322504 - protein, 97 aa, Zea mays
  Clone ID: MRT4577_57188C.1.pep
LKGSTYKDTESRHVDPGAKWKEVTNACNAWAIFERHNVRSPYSIDMSRYFLDNARVMMSIVYTATRAYRLPTEWTGTPPVGWPGRRPSVEWTGLIKC

SEQ ID NO: 322505 - protein, 90 aa, Zea mays
  Clone ID: MRT4577_57189C.1.pep
FGGPRKKKKFDPGLGGLKFFFFHPIPTDGGKQKGQIQGFNQKKGFFQLGNPHFSFDPPKICTPQTPGQKLKLVFFGLTWFLGPPIFGPFF

SEQ ID NO: 322506 - protein, 99 aa, Zea mays
  unsure (1)..(99): unsure at all Xaa locations
  Clone ID: MRT4577_5718C.1.pep
MSCGWGLMSPQPERKPGVGFRGXFKDFKWPYSTPGSETKVPVFLAAFRVTLKFGVPPEEPGPAEPAESLTGPWPTVWTDGLTSLDRSKGRCLYIGPVSW

SEQ ID NO: 322507 - protein, 93 aa, Zea mays
  Clone ID: MRT4577_57190C.1.pep
APCICPILVLHQPLALPRASRMTMVFPCKWLHVNNHTFHCLLISRPPTSLCNLHNPPSTNIGPLHFSYVVVLICVQPFTQNIHLLIFASDIYR

SEQ ID NO: 322508 - protein, 103 aa, Zea mays
  Clone ID: MRT4577_57191C.1.pep
PSHVWCQPSEEGSQAKGGRPRALIIQAAGAARGTGPYDPQAACPGLVKTCMFPFRFLPCGELTSLLYILSTMVWRVTVCQLHRVRALPFRHRLLQGLSILYTL

SEQ ID NO: 322509 - protein, 180 aa, Zea mays
  Clone ID: MRT4577_57192C.1.pep
YQVDNISKALHKCNYQMRGFETMYNGHTGRKLTAMIFLGPTYYQRLKHMVDDKIHSRGRGPVQILTRQPAEGRSRDGGLRFGEMERDCMIAHGAAFFLKERLFDQSDAYRVHVCEKCGLIAIANLKKNSFECRGCKNKTDIVQVHIPYACKLLFQELMAMAIAPRMLTHHCHKLLEQKKR

SEQ ID NO: 322510 - protein, 65 aa, Zea mays
  unsure (1)..(65): unsure at all Xaa locations
  Clone ID: MRT4577_57193C.1.pep
LVAWXGXSXGGXXCRSLXXFPASVSXCSSCXPXXXLPPGXXGPRXSSLXVLXAVSXXFIVFLRCS

SEQ ID NO: 322511 - protein, 55 aa, Zea mays
  Clone ID: MRT4577_57194C.1.pep
MTLQMEPPVPSPRRSVSTTCDLHPGETFTGFCAACLRERLAGLESTGGSAAGVGP

SEQ ID NO: 322512 - protein, 552 aa, Zea mays
  unsure (1)..(552): unsure at all Xaa locations
  Clone ID: MRT4577_57195C.1.pep
HKLLLSFCPLIQETPDEGWHELVSKGYIEYIDTEEEETTMISMTINDLQNARHNPEEAYSETYTHCEIHPSLILGVCASIIPFPDHNQSPRNTYQPAMGKQAMGIYVTNYQLRMDTLAYVLYYPQKPLVTTRAMEHLHFRQLPAGINAIVAIACYSGYNQEDSVIMNQSSLARGFYRSVFXLAYRXEETNVRTLIKEEFGRPNRENTMGMRHGSYDKLDDDGLAPPGTRVSGEDVIIGKTSPIPQDDAQGQASRYSKRDHSTALRHSESGMVDQVLLTTNADGLRFVKVRMRSVRIPQIGDKFSSRHGQKGTVGMTYTQEDMPWTIEGITPDIIVNPHAIPSRMTIGQLIECIMGKVAAQMGKEGDATPFTDVTVDNISKALHKCNYQMRGFETMYNGHTGRKLTAMIFLGPTYYQRLKHMVDDKIHSRGRGPVQILTRQPAEGRSRDGGLRFGEMERDCMIAHGAAFFLKERLFDQSDAYRVHVCEKCGLIAIANLKKNSFECRGCKNKTDIVQVHIPYACKLLFQELMAMAIAPRMLTHDMKTGKDQKKR

SEQ ID NO: 322513 - protein, 75 aa, Zea mays
  Clone ID: MRT4577_57196C.1.pep
YIYLCESRFCCLFVCKSVEHSLLVATALFLSVTRCIMLALTFGSMHVRHGGQSCYLKNSTQMVMFISNTAAPMFM

SEQ ID NO: 322514 - protein, 64 aa, Zea mays
  unsure (1)..(64): unsure at all Xaa locations
  Clone ID: MRT4577_57197C.1.pep
TLVSTTQVTMIAYDGLKHRVSDVCLPDLQGDXDQAYRKIRLPAEDVQGKNVLTNSFALNFTTDK

SEQ ID NO: 322515 - protein, 593 aa, Zea mays
  Clone ID: MRT4577_57198C.1.pep
GLPTPLPSASASASASASASSGGDSSLGSSTSDDQLDLGVYRLSETSSTLLGRTVAIESRKQSQVPAEGTIFTNNQAVEHTRLSETSVSPRKEFRPQNLDLANDRTTYCRGRRSTEIVFSTQVPTSPPSSRGHHYQNSPVPSRTFGQCPASPTSWQDDSRSSSSPQPLPLPPGSPCLPSSSLQWKKGKLLGSGTFGQVYMGFNSEGGQMCAIKEVKVISDDSNSKESLRQLNQEIVLLSQLSHPNIVQYYGSDLCNETLSVYLEYVSGGSIHKLLQEYGPFGEAVLRNYTAQILSGLAYLHGRNTVHRDIKGANILVDPNGDIKLADFGMAKHISAYTSIKSFKGSPYWMAPEVIMNSNGYSLSVDIWSLGCTILEMATAKPPWSQYEGVAAIFKIGNSKDIPDIPNNLSSEAKSFLKLCLQRDPAARPTAAQLMDHPFVKDQATVRSSRSSITRDMFPNSTDGKNSRVKIETSSYRSLSPLRDPDILGRNLPGPTSPIPSTSSRRIAALNTSNVRMNMSLPVSPCSSPLRQYRQSNRSCLRSPPHPAYSAGAANYNPINNALYPTRPSSGLTDPWLEISQVKTQTFDSPRRL

SEQ ID NO: 322516 - protein, 86 aa, Zea mays
  unsure (1)..(86): unsure at all Xaa locations
  Clone ID: MRT4577_57199C.1.pep
VPHLKGTGGRSIYGECFDDENFTXNGSQFFICTVKTPWLDNRHVVFGHVLEGMDVVKQLEXQETSRSDTPKQPCRIVNCGEGPLDS

SEQ ID NO: 322517 - protein, 111 aa, Zea mays
  unsure (1)..(111): unsure at all Xaa locations
  Clone ID: MRT4577_5719C.1.pep
MMLLARDPIVVGVDLAALVHDVICGPSKVTXGPNISTNYYCXCLTPMVTCYIESNLARVADNWWSWAIKNVYTASYTRMKMCSYELIFNERQGCXNXYEVTYHEKPGCSGN

SEQ ID NO: 322518 - protein, 221 aa, Zea mays
  Clone ID: MRT4577_571C.1.pep
MNFKGARMPSAPAGAGALVKLGLLGGAALYLGNKTLYNVEGGHRAIVFNRLEGIKDKVYPEGTHIVIPWFERPIIYDVRARPNLVESTSGSRDLQMVRIGLRVLTRPMPERLPTMYRTLGENYNERVLPSIIHETLKAVVAQYNASQLITQREAVSREIRKILTERAKNFNIALDDVSITSLSFGKEFTHAIEAKQVAAQEAERAKFIVEKAEQDKKSAII

SEQ ID NO: 322519 - protein, 53 aa, Zea mays
  Clone ID: MRT4577_57200C.1.pep
EARPPDKHKVASLLCSSSYTVSIELPVKWIKYPPAPCFFGVGVMSQVPHTQIN

SEQ ID NO: 322520 - protein, 146 aa, Zea mays
  Clone ID: MRT4577_57201C.1.pep
LVGVSGRRKEEPGINSGRTGGRTGGVVPRSPGRRRQMGIENLRSRDREIKRKQESKYGFGNKAPARSTSMGMLPQRRNVLLLGLVVGEIERIRVGLPPPCTLSCPGLRAGVQTHRNGAGGFFAKARSLPSSGRKGWGMNSAPPDLA

SEQ ID NO: 322521 - protein, 161 aa, Zea mays
  Clone ID: MRT4577_57202C.1.pep
MAMMPPAAASSLASTPRGIAAPPTRTASLCIRLGVVTATLFAGLAAASQPVERHAAVVVAMAKREQELEGIRAMTTEQLEEEVVDLKGELFLLRLKRSARQEFKNSEFGRMRKRIARILTVKRERETEQGINKRLSRELDRKWKQGIVVRPPPSLRENKEE

SEQ ID NO: 322522 - protein, 127 aa, Zea mays
  Clone ID: MRT4577_57203C.1.pep
INASNEFNTNFQKSLASESKQKSLQDQASSSTEAANVNPQDLHTQKSSQCHAASSTSTEVPNGQPPESQMQNSLQVHVLPIKRSFIVYPSKLPVLDDILECTQEQQTQFHRDEGVTIACTSPMFSHH

SEQ ID NO: 322523 - protein, 105 aa, Zea mays
  Clone ID: MRT4577_57204C.1.pep
MRQLIAAAAILLLVLGSGAGQQRGRVGPGRVPWRSRRLKLGGGAICDEESGGGNGHGRQLRSAVRLHQRQRTRRLLPPSLGALTTIVQLAVVGNFGFVGEQCVLA

SEQ ID NO: 322524 - protein, 57 aa, Zea mays
  Clone ID: MRT4577_57205C.1.pep
HNEESDDFERQTWQVLYQNKVIKETISRIKTQCQPSMYTDLFTINQNELDIYILKRL

SEQ ID NO: 322525 - protein, 92 aa, Zea mays
  Clone ID: MRT4577_57206C.1.pep
KFLPKVTSRKPWMAQHLAQCFLGIQWGWSNLLGGEVARVRAKPFVEWASADGFGPSSLRCRETKASWNSKRVWPAWPVPGLGKRGFPPRNKG

SEQ ID NO: 322526 - protein, 98 aa, Zea mays
  Clone ID: MRT4577_57207C.1.pep
FLSCLPRTIKTKTPPRVSFENCPHRWCPCLQLREKLVNVLAKPNDLTLFYSMPTFCYHGSLFPGNNAGAGCRSDAVTLVRKQLAGVGVLRQNWGQHVT

SEQ ID NO: 322527 - protein, 63 aa, Zea mays
  Clone ID: MRT4577_57208C.1.pep
SNGFKKRQSCSCHVRPLFWDKEQIGLQLRLRPPQAAKELRVRSLSQLWWSTWSSLCHTHNAAE

SEQ ID NO: 322528 - protein, 471 aa, Zea mays
  Clone ID: MRT4577_57209C.1.pep
MESSSAATTMTGSSSGREHGGVHVLLVPLPAQGHMNPMIQFGRRLAYHGLIPTLVTTRYVMSTSPAAGVPFPLLAISDGFDEGGMASCSDPVEFCRRLEAVGSETLARAIDAEARAGRAPAVMVYDPHMPWAQRVASAAGVPTAAFLSQSCAVDLIYGEAWARRAPLPMADGSALRRRRVISVDLGAEDLPPFVVAPEIYAQYLKVSISQFEFVDAAADVFVNSFRDLEPLEAEYMESTWRAKTVGPALPSFYLDDGRMPSNVASGVSFFSSSAPTMGWLDRQPPCSVVLASYGTVYSLDADQLGELGNGLCDSGWPFIWVVRPDEAQKLPQDLEDACGEKGLIVQWCPQLEVLSHKATGCFITHCGWNSTVEAIVAGVPMVGMPRSADQPTNARYVESAWGIGLRMRLDKNGLLKREEVQRCIRQVMEGERKTEFRRNAAKWMNKAKEAMQEGGSSDKNIAEFAAKYLSA

SEQ ID NO: 322529 - protein, 135 aa, Zea mays
  Clone ID: MRT4577_5720C.1.pep
FTHVPSISITHTSSASAELSRSLDIKQHTHDNGIQRTKIAALSMLKRNSVQHNHLPRYYTCAGAYYYEIRRGRARAQTTTSTASTRTSRARYNLARSRATQAEVVGEATQSHQPGSHADHRPHDLPVIQPERLVL

SEQ ID NO: 322530 - protein, 54 aa, Zea mays
  Clone ID: MRT4577_57210C.1.pep
FRAYSLYNRTSFDMTPFSMILLANSMLLDKPSNEIAICLPRDYTPEYQLFMYLY

SEQ ID NO: 322531 - protein, 38 aa, Zea mays
  Clone ID: MRT4577_57212C.1.pep
NPNLPPETVDSLKNILTSNNIDVKKMTVTDQVNCPKLS

SEQ ID NO: 322532 - protein, 150 aa, Zea mays
  unsure (1)..(150): unsure at all Xaa locations
  Clone ID: MRT4577_57213C.1.pep
PRSPVFFCCAPPTNTSGGCGXXPXPXVHLPPPVHLPPPVHLPPPVHFFFXVHXPSXVRVGAXXHXXXPLHLTXKPSHYPTQXXXPXPHSHPHPFPFQHPHPIPFHLLXTFXXFITPIXXHFXXFFMHHFIPSXTPYCSSXCQFFFFALFP

SEQ ID NO: 322533 - protein, 102 aa, Zea mays
  Clone ID: MRT4577_57214C.1.pep
HASAHASAHASAHLTYRLLCLLCCASTLLFRVRTWQYWSLPWCTCRAATAEPASAKILESHKEEFCMEKIEFEEKVNKVIVRGQFDGEKLQKAVLDKGGETV

SEQ ID NO: 322534 - protein, 69 aa, Zea mays
  Clone ID: MRT4577_57215C.1.pep
VGYGGGGGYGGGGGGYGGYGGGDYGGNSNRGGGGDYGVAGGGGCTSTDVGSVSIFTSCYDYDFALWCNQ

SEQ ID NO: 322535 - protein, 100 aa, Zea mays
  Clone ID: MRT4577_57216C.1.pep
KKLNPVPMARPSVVFALPLSFFSPWSRPQWPRQSPPMPLGLRPHPLDLRGRILPLPPRVSKACQPMRITFLSPPFEAPPVGPVIFGPHHGKKIKPMSLNP

SEQ ID NO: 322536 - protein, 132 aa, Zea mays
  Clone ID: MRT4577_57217C.1.pep
QWEETWKAEIDTRSGSKRRLDHLDASWEGFYMNEPLKGINDTKQQQLVIGGEVCMWGEEIDASDIQQTIWPRAAAAAERLWTPIEKLANDTRFVTSRLARFRCLLNQRGVAAAPLAGYGRASPSEPGPCVRQ

SEQ ID NO: 322537 - protein, 46 aa, Zea mays
  Clone ID: MRT4577_57218C.1.pep
PASSSPMATRMGPCSALESSTCPRRTWLTSPTVLSTWLTPCHWPSL

SEQ ID NO: 322538 - protein, 95 aa, Zea mays
  unsure (1)..(95): unsure at all Xaa locations
  Clone ID: MRT4577_57219C.1.pep
KPGSTDSYGLVMFYPFIYVYLFSFQNSSSCFLKRHGSXFLCLLLEIAKNYHFRILFLGVALVFLFKEAEERKDIEDESVASSRYYFHMCSLIIIP

SEQ ID NO: 322539 - protein, 184 aa, Zea mays
  Clone ID: MRT4577_5721C.1.pep
MARLYIGNLDPRVTARELEDEFRTFGVLRSVWVARKPPGFAFIDFDDKRDAEDAIRDLDGKNGWRVELSRNASGGRGGRDRHGGSESKCYECGETGHFARECRLRIGSGGLGSGRRRSRSRSRSRSPRYRRSPSYGRRSYSPAARSPRRRSVSPARGRSYSRSPQHKGAREESPYDNGYRRSRS

SEQ ID NO: 322540 - protein, 66 aa, Zea mays
  Clone ID: MRT4577_57220C.1.pep
ADNAIPNKQHETGYSPAIVRVLGPTPPWMHALSSSTSKFCYMAPSPTCVLVMPWLSVNATEPINLH

SEQ ID NO: 322541 - protein, 225 aa, Zea mays
  Clone ID: MRT4577_57221C.1.pep
PTRPPTRPPTRPPAQRIFCEVLDAVVLQPGIRDHHLWKFSASGEYTTSSAYKALFLGSVQFEPAERVWKSWAPGKCKFFIWLVEHNRCWTADRLIKRGLDRPEQCPLCDQEAETMNHLLVKCVFAIQFWFHFLSSVGLQELCPAHEDSFESWWKSSSSRASDFLRKGFNSLVILGAWTIWKHRNRCVFDGCNPSLVTALRVAREEAVLWSLTGAKALSFLQVDEL

SEQ ID NO: 322542 - protein, 97 aa, Zea mays
  Clone ID: MRT4577_57222C.1.pep
RYLSPDLSGILIAVKTTGGTGGGKVFSRLLATIHGVAHLVVALGIELATDQVLKQAFVDVSIKFSSALCGMFWVFSVLTVLHTLVTALMNAFMDFIE

SEQ ID NO: 322543 - protein, 97 aa, Zea mays
  Clone ID: MRT4577_57223C.1.pep
FHDFHPKTHVLFFCRETPPPPQTGPPLPTFNDMKGSPITGFTSLASAQRIIKGFFFFFFPGGWHLKQDACNCFAWHHCGGSKPLLGYHWSKTYNPSG

SEQ ID NO: 322544 - protein, 54 aa, Zea mays
  Clone ID: MRT4577_57224C.1.pep
GKPFQTPVHIFCTKKITSPHPHEMKGKVNENDYPIPLLKQTICHTTNTGAHKQP

SEQ ID NO: 322545 - protein, 107 aa, Zea mays
  Clone ID: MRT4577_57225C.1.pep
LLVRPRVRVLAGDLQSTEAGCGAASTSGRAAATTNGVLSLLYRQGMEIDPLARLETERMPAGLQEARRRHAHTMAAAVHSARAEPLLLAAAELGRARRRNTKLEERL

SEQ ID NO: 322546 - protein, 131 aa, Zea mays
  unsure (1)..(131): unsure at all Xaa locations
  Clone ID: MRT4577_57226C.1.pep
KLFPYFKEKXFFPLNXLYILNPVAFXQQQLLPLSQLVTAYFKKQKFFPFNKLAALNPFVYFQQQILLPFGQLGTTSPVSFLTKKKVLRFYKKFVANPATLLQLQQLLPFVQLVLTNPAAFYQQHIIGGALF

SEQ ID NO: 322547 - protein, 344 aa, Zea mays
  unsure (1)..(344): unsure at all Xaa locations
  Clone ID: MRT4577_57227C.1.pep
MRIEEVQSTSKKQRIATHTHIKGLGLDANGMAIALAAGFVGQAAAREAAGLAVDMIRQKKMAGRAVLLAGPPATGKTALALGIAQELGSKVPFCPMVGSEVYSSEVKKTEVLMENFRRAIGLRIKENKEVYEGEVTELSPEEAESTTGGYAKSISHVIISLKTVKGTKQLKLDSSIYDALIKEKVAVGDVIYIEANSGAVKXMLDIECFCYLNRALESPLSPIVILATNRGICNVRGTDMTSPHGIPVDLLDRLVIIRTETYGPTEMIQILAIRAQVEEIDIDEESLAYLGEIGQQTSLRHAIQLLSPASVVMCKADLEEVSGLYLDAKSSARLLQEQQERYIT

SEQ ID NO: 322548 - protein, 134 aa, Zea mays
  Clone ID: MRT4577_57228C.1.pep
MAAQEAVPIDAIGSQLEISLVGLEHAVLLTNNLDLAGQTFVVEKVQVRQAPALLEVIQRAVCHPKRKWVVRIPNTLKLRHIARISNEIEVVVAVVIPQLLRDNVDPTGARLLRRYAWSICHAARKVDGAPRIPG

SEQ ID NO: 322549 - protein, 455 aa, Zea mays
  unsure (1)..(455): unsure at all Xaa locations
  Clone ID: MRT4577_57229C.1.pep
MRIEEVQSTSKKQRIATHTHIKGLGLDXNGMSMPLAAGFVGQAAAREAAGLAVDMIRQKKMAGRALLLAGPPATGKTALALGIAQELGSKVPFCPMVGSEVYSSEVKKTEVLMENFRRAIGLRIKENKEVYEGEVIELSPEEAESTTGGYAKSISHVIIGLKTVKGTKQLKLDPSIYDALIKEKVAVGDVIYIEANSGAVKRVGRCDSFATEYDLEAEEYVPIPKGEVHKKKEIVQDVTLHDLDAANAQPQGGQDILSLMGQMMKPRKTEITEKLRQEINKVVNRYIDEGIAELVPGVLFIDEVHMLDIECFSYLNRALESPLSPIVILATNRGICNVRGTDMTSPHGIPVDLLDRLVIIRTETYGPTEMIQILAIRAQVEEIDIDEESLAYLGEIGQQTSLRHAIQLLSPASVVAKTNGREKMCKADLEEVSGLYLDAKSSARLLQEQQERYIT

SEQ ID NO: 322550 - protein, 128 aa, Zea mays
  unsure (1)..(128): unsure at all Xaa locations
  Clone ID: MRT4577_5722C.1.pep
LVLSVLLRTFSKVHVKAMSTCNFINIILPLSNPTSHSXCTTNKTYNSTQRRIIFSTINPFDXIXYYPKVFLPXHSNNSYIIPTYFLPLIISISITLHYYMLLTNSXALATHATHENFYNISILPPFTN

SEQ ID NO: 322551 - protein, 80 aa, Zea mays
  Clone ID: MRT4577_57230C.1.pep
KKKKKKKKKKKKKKKKKKNKKKKKKKKKKVCPCPGGPPGGYKLPSYRTNPGGVSVAFPPYYCLMIFGKSPLSIPFYLFME

SEQ ID NO: 322552 - protein, 232 aa, Zea mays
  Clone ID: MRT4577_57231C.1.pep
PARKLKKVKTNGTDIIGVNHTLNDECQKNGQPVKKVKLPAEVANHSCGEGTNGTWLDPANLTPTKKKKPAQHFSNPAAVIVEFVPGATVPSREELLSTFGKHGYLIESQTDISEATRSACVVFGKSIEAEEAYKNGCQYLLGQFGPPFATLRLDFSPVKLTVPSPSLASKPPLRDIRKNLEDMISSRRSALNKATSSADAQLDPVPDKLLGEMQGLLAKVDRMLTRPHANAP

SEQ ID NO: 322553 - protein, 131 aa, Zea mays
  Clone ID: MRT4577_57232C.1.pep
PTRPGDLIESQTDISETTRSASVVYGKSVEAEEAYRNGCQYLLGQFGPPFATLRLDFSPTVPLPSPASKPPLRDIRKNLEDMISSRRSALNKATSSADAQLDPVPDKLLGEMQGLLAKVDRMLTRPHANAP

SEQ ID NO: 322554 - protein, 107 aa, Zea mays
  Clone ID: MRT4577_57233C.1.pep
VSVNLKKVRVSDKNSRLHSYQYQLYPLVNGGSQNYMGDEHQDIGKVIAKLETSKEVVANLKLQTFLRSAFLSEASHINSGEDVGKFLEAILQEGEEMFNYLANHAPV

SEQ ID NO: 322555 - protein, 86 aa, Zea mays
  unsure (1)..(86): unsure at all Xaa locations
  Clone ID: MRT4577_57234C.1.pep
ICTLFLENWCFGSLLWHFGFSFLRVDYCWDISYFIPAHTIRLIRREICHRKHNTSVERLRLVVCFCIFQVLCKLPHGSPVFLTSXS

SEQ ID NO: 322556 - protein, 68 aa, Zea mays
  unsure (1)..(68): unsure at all Xaa locations
  Clone ID: MRT4577_57235C.1.pep
FRKRNEVTLDVREPKEVKKGIHQRHTRGIRTEKYSFYTPREVMKANSPAPWLRTHCSNSVXPCHACNK

SEQ ID NO: 322557 - protein, 43 aa, Zea mays
  Clone ID: MRT4577_57236C.1.pep
PLPGPAQAQGAKWQLANQKPAPMPFCLAGRHNDFFMAPLEIPK

SEQ ID NO: 322558 - protein, 39 aa, Zea mays
  Clone ID: MRT4577_57237C.1.pep
TMHALIGLSAHGQAPFKSSPAQVQPSRATRLPDATTDHT

SEQ ID NO: 322559 - protein, 64 aa, Zea mays
  unsure (1)..(64): unsure at all Xaa locations
  Clone ID: MRT4577_57238C.1.pep
RSIFFLQLESNNVEDMFLAHIFEMDTLAHGLHNVVKLIXDDIFRKKYQSFDSEIGALIEDVKGD

SEQ ID NO: 322560 - protein, 108 aa, Zea mays
  Clone ID: MRT4577_57239C.1.pep
MRSKFKDEHPFEKRKAEAERIRQKYADRIPVICEKVEKSDIATIDKKKYLVPADLTVGQFVYVIRKRIKLSPEKAIFIFVDEVLPPTAALMSSIYEEHKDEDGFLYIT

SEQ ID NO: 322561 - protein, 184 aa, Zea mays; identical to SEQ ID NO: 322539
  Clone ID: MRT4577_5723C.1.pep

SEQ ID NO: 322562 - protein, 108 aa, Zea mays
  Clone ID: MRT4577_57240C.1.pep
CTITSTTLSFRIPHCQPGNTFYFPCIILLTTATDIATILLFLHQVMPEPLDHPHLKHAHILLNHNCFTKTNDVLLTQLDPQFRVDPTHSMITSTDGTYCYIDPHYLPT

SEQ ID NO: 322563 - protein, 66 aa, Zea mays
  Clone ID: MRT4577_57241C.1.pep
DVTSLHELTHRRSVTHVFLLRHPQSPSAYLDLSLILRRFLLSLLISFFFHSFFILPSWRALLVASP

SEQ ID NO: 322564 - protein, 62 aa, Zea mays
  Clone ID: MRT4577_57242C.1.pep
YVPCHLSIECEIFGILRFKAGLSLYRDSCLECMYTVFMVIHIQPVVMSLCRSRITVCSVYLE

SEQ ID NO: 322565 - protein, 43 aa, Zea mays
  Clone ID: MRT4577_57243C.1.pep
YYLGRPAFFFFFKSQKSDLLWFKGSRPPLQLTKFGPLIASPNP

SEQ ID NO: 322566 - protein, 124 aa, Zea mays
  Clone ID: MRT4577_57244C.1.pep
RAGLGNQVRSMYQTEEFITGIHPFIGLIPFSPPKTGIPPHGSQKKSGTYIYGSHPINPNPLFSGSKSNQLFENPNPLEKGWDRILEKPPKNVRVDDPIIHKRTDPHITLQKYKLLAEPVGISRH

SEQ ID NO: 322567 - protein, 151 aa, Zea mays
  unsure (1)..(151): unsure at all Xaa locations
  Clone ID: MRT4577_57245C.1.pep
GFAFSXHCTXCRAAFFLRAGVPPASAHAYVKFQLLVVRDHTLIFFIVQLVVAFMGMVIYRFYGDELREMFGYEEHPYAFYAMAILAIVLVGLLYGFFIAIICGQRITERHYHVLAKQELTKEYIVEDLEGADHVPDLDPSHVIELKILGLY

SEQ ID NO: 322568 - protein, 45 aa, Zea mays
  Clone ID: MRT4577_57246C.1.pep
RTFLRILTLNSTLKYNELLNSDLFFLLGGLSKLVIAYLLALWLVL

SEQ ID NO: 322569 - protein, 161 aa, Zea mays
  unsure (1)..(161): unsure at all Xaa locations
  Clone ID: MRT4577_57247C.1.pep
MASIDVNXRCFVGGVAWDTSNESLENAFASYVEILDSKVYXTDRRVRRRSRXFIFVTFSSENSMXDAIENMNGKEVDGRNITDNQGQTRAAVDGGDGYSDGRDALAXYGGGRRDGAYGVGGVYGGRRERAFGDYGSDVLYYGRREAGVGYYHHAACNTCMH

SEQ ID NO: 322570 - protein, 117 aa, Zea mays
  Clone ID: MRT4577_57248C.1.pep
KKKPGGPRPPFSLKKPNLVCGPFHKQNLGPFKPPPGNQQGSPPLKKKTKQGLKKGLKWQQFFAPERPPKFYSQGGGPPFPFPPLKFTLKGRAPTPPPFWKGPPPPPWGAHSGPQNPC

SEQ ID NO: 322571 - protein, 177 aa, Zea mays
  Clone ID: MRT4577_57249C.1.pep
MVAALAAVHGLTLTGVDATVVATCLAASNSDGRVNYDFCVSELNKHRDSPGADTAGLAKVAANVGLNSAGGAVNEIEALLAAKPPPPDARTSAALRLCERLYYDMELAFAGAYDEINALNYTAGKQMAADADSLVRRCTGGFAQAGLLPPEPVARRGAYAMQIAIVCTAITNLIISP

SEQ ID NO: 322572 - protein, 190 aa, Zea mays
  Clone ID: MRT4577_5724C.1.pep
MARLYIGNLDPRVTARELEDEFRTFGVLRSVWVARKPPGFAFIDFDDKRDAEDAIRDLDDFYGSVGKNGWRVELSRNASGGRGGRDRHGGSESKCYECGETGHFARECRLRIGSGGLGSGRRRSRSRSRSRSPRYRRSPSYGRRSYSPAARSPRRRSVSPARGRSYSRSPQHKGAREESPYDNGYRRSRS

SEQ ID NO: 322573 - protein, 255 aa, Zea mays
  Clone ID: MRT4577_57250C.1.pep
MALASNKLLINSFVTVAFLVASTRGSGTIQLILVNNCAESIWPGLLGTAGQPTPQSGGLHLAPGDEAAFDVPVGWSGRVWPRRGCSFDQRERGQCATGDCGGVLRCDGRPGAAPATVVEMTLGTPKSPLHFYDVSLVDGFNAPVSMAPVGGGAGCGVAGCQADLNVCCPSALEVRDREGRVAGCRSACKAMGGDRYCCTGDYASPDRCRPTIFAHVFKAVCPKAYSYAYDDATSLNRCKASRYLITFCPPPTSRK

SEQ ID NO: 322574 - protein, 255 aa, Zea mays
  unsure (1)..(255): unsure at all Xaa locations
  Clone ID: MRT4577_57251C.1.pep
PAGNHSSAFGNLANAKPLPPVQFHALDSDHQVLDVWKPSVIIVYHPDITFVREIEVYKAENSSRKLKVYFLFYEDSTEVQKYESSIRRENEAFESLIRQKSLMMIPVDQDGRCIGPTVANEPEPPLCQNSITRKAGGKKAPEKEMQVIVDMREFMSSLPNVLHQKGXETMARYYKIPVLLIEFSQDKSFSFQSANEIGDDVSPTNIISKLSLLVLHFPRLRIIWSRSLHATXRIFMSLKXNQDEPDEKKAPRVGV

SEQ ID NO: 322575 - protein, 772 aa, Zea mays
  unsure (1)..(772): unsure at all Xaa locations
  Clone ID: MRT4577_57252C.1.pep
GIQAAVLATMDACLKELRRTNKVDVEDLTVDKGLFKSFDEIVRRQLDPIWHTLGKKTKQLVADLRTLRKLLDYLVRYDAVTYLKYLDTLRVSEGVRSVWILADSSHRIFELAKRRVYQAVRTDGVKVSIDNKGTPTKKRKVAHNSTKKGKVTENEDSTVGPNTQKANTDVGIVLEEVLEEAPKWKVLXELLQEITEQRMKSSAGNVHDEDKNDESGIVLVSCKDERTCLQLQECILKGPCQVMREEWEKYLIGKAELHGLNKDKRKSEQPKGVGVLDGEVQMGSSESVCPVSISKLETNALLAAASELRNISNEADVKSGSNSSCSKAGGAKGKPKKTISKRQGSNRKNKSKEGNDXPRYWSGXKVNQEKXVQAEIVASKMSAYDASMSASTSNVKFNHSSAFGNLANAKPLPPVQFHALDSDHQVLDVWKPSVIIVYHPDITFVREIEVYKAENSSRKLKVYFLFXYEDSTEVQKYESSIRRENEAFESLIRQKSLMMIPVDQDGSCIGPTVANEPEPPICQNSITRKAGGKKAPEKEMQVIVDMREXMSSLPNVLHQKGIRIVPVTLEVGDYVLSPLICVERKSIADLFQSFASGRLYNQVETMARYYKIPVLLIEFSQDKSFSFQSANEIGDDVSPTNIISKLSLLVLHFPRLRIIWSRSLHATAEIFMSLKTNQDEPDEKKATRVGVPSEDGIVEDDVRSENYNTSAIEFLRRLPGVTDSNYRAIMDGCNSLAELALLPVERLAELMGGQKAARTLKEFLDAKCPTML

SEQ ID NO: 322576 - protein, 57 aa, Zea mays
  unsure (1)..(57): unsure at all Xaa locations
  Clone ID: MRT4577_57253C.1.pep
VVITVAEXKXMXSCQLVGPPPPPSTTSHFSCAGRYIIFTAHGSVYGCFRNICTHAHE

SEQ ID NO: 322577 - protein, 138 aa, Zea mays
  unsure (1)..(138): unsure at all Xaa locations
  Clone ID: MRT4577_57254C.1.pep
GKVIILDLSSDHFAPILATHLLMDIGIMTLAKGLQRGEKEFIEVFTQAGFSAXQFLNEFGARVAFGVVSVRLHLGYPYIFHGLYVCVWVPCVAWRNPVINKEGGRASGNHGWPWISAQDAGSFFKSLVDLLSCEAAVK

SEQ ID NO: 322578 - protein, 123 aa, Zea mays
  Clone ID: MRT4577_57255C.1.pep
DVIVVPPRVRADPAASQNPAVVARRMVLKSPRLRIKRPVVVAQLMKGSHRKRPAARKTRTGDKASSSTRQGTPNDSNITGEVDIGDLIDFLREEYGCRGTSTRSYQARQMTVMSGFSCMNLFC

SEQ ID NO: 322579 - protein, 101 aa, Zea mays
  unsure (1)..(101): unsure at all Xaa locations
  Clone ID: MRT4577_57256C.1.pep
GNEDNTGITSPVDGLVVGLVRYNVQGYRAAKCTVDARSCVQAGDSQQSGGGXEEGSWVGTVTTVGDGLPPPQVGNLGWLRNKKKTPHPWSFYAGSQTDRRY

SEQ ID NO: 322580 - protein, 40 aa, Zea mays
  Clone ID: MRT4577_57257C.1.pep
RHRQYRRHRLPSSEYLSSPFMRSLHRMGLTVKSQCASQTQ

SEQ ID NO: 322581 - protein, 73 aa, Zea mays
  Clone ID: MRT4577_57258C.1.pep
SSLAHRQRDISNISNVALYSLYMVSISAYRHQDYFLIILKGRTMSKKSLQLLSHKNIAHYMVTGLSLQIRLQP

SEQ ID NO: 322582 - protein, 84 aa, Zea mays
  Clone ID: MRT4577_57259C.1.pep
VAQKGGSRAPPPPRCFGTLGPPLKPLKTSGGQLTRFFIILPAGINGHMSRPPQSRSGNNPPPKFNPPPMAGPRIFFPHQEGSTF

SEQ ID NO: 322583 - protein, 104 aa, Zea mays
  Clone ID: MRT4577_5725C.1.pep
PGPPAFSPGQSPPRRGSPPPKKGPRGILKKPPPRVLPRIPFPPRFLVSGPKGFAPLVARFPPPFSANLGPGSWAPAWVARKPPLGAAFCAGLLFKCPFCPPKLP

SEQ ID NO: 322584 - protein, 62 aa, Zea mays
  Clone ID: MRT4577_57260C.1.pep
DINGQYSFTQKLQVHGVVQKTADKMSIKVKGPLFIHHSEQHGIAKLCKLRWPVQEPSIWMTS

SEQ ID NO: 322585 - protein, 61 aa, Zea mays
  Clone ID: MRT4577_57261C.1.pep
NGGPKRDMAVKPNPNHYFFCKKVTNSALYYCTLPTPKGRPPWGGFPGCKKRQTTKKCKSSS

SEQ ID NO: 322586 - protein, 349 aa, Zea mays
  Clone ID: MRT4577_57262C.1.pep
MDEWDSATAAVSIDDLDAYLEQLRKDVAMAEQGNQKVSGEISVTAETTFNDMIQLDVGIEMLESLISNLGPKALNHFDESSVLGLSDSTDSCRNRSIADKDYIYELELDHQIEKSTMELEILQHLQRDDEMFQLESKLLPFGAKILDFKDDCLRMFLKAPILTSDCEIYGQKFNCSIDSFISDHELLIEIDKINMEPKKVQIIPDDMSVDILIERMESSRDTVCSPTLIWLIQQCQHQSIINALRRSLVNDANSSRHCFEYLNKKEMIVAHLDRGIDVSIKMSSDWPLCSYGLKLISIRNAGDRPTNIASTILCKTKELANELEPQIRQHLLTLVDAVEDIIIRELRSR

SEQ ID NO: 322587 - protein, 47 aa, Zea mays
  Clone ID: MRT4577_57263C.1.pep
GRCASSFQHYKDGGSVLGVAWLKKKLMSAYPTSVEKARGRIFWTISL

SEQ ID NO: 322588 - protein, 101 aa, Zea mays
  Clone ID: MRT4577_57264C.1.pep
VHVGAVPYDHQLVLALQRLLRAGLHDDGRAIGVRRRRPVARQLVPTADPRGPAPCKLSCSPCSCRPQGERLTGRNWPLMRQRTAVEPYMVRIIKQCQIGST

SEQ ID NO: 322589 - protein, 41 aa, Zea mays
  Clone ID: MRT4577_57265C.1.pep
RTRGRTLGFVRQCLHVLGAYCGCFTSQTRLTDIAIVLRLPK

SEQ ID NO: 322590 - protein, 96 aa, Zea mays
  Clone ID: MRT4577_57266C.1.pep
LIFIFIIGSTITIYECTFGSNESKATNGMQKRMPSQGEQDGGTVHLFIGTGRSPCKITPMPFTFANDSIGIHRGLNGLFPFKAVLFSAIMPKLPCA

SEQ ID NO: 322591 - protein, 46 aa, Zea mays
  Clone ID: MRT4577_57267C.1.pep
LTDPPNLFLSWVCSTQEPNAATRLRLALGYHLGMGVSDNRPLGTPK

SEQ ID NO: 322592 - protein, 261 aa, Zea mays
  unsure (1)..(261): unsure at all Xaa locations
  Clone ID: MRT4577_57268C.1.pep
MAPRSVSLLLLLTLVVAAVGAGADDEAALIAFKAAAIFGGDTLASWNSSGAGGFCGWVGVTCGGGAKHRRVVALSLPLHGLSGALSPAVGNLSFLRTLNLSSNALSGGIPDSLGRLRLLRELDLSSNAFSGEIPANLSSCTSLVLMRLRFNQLTGSVPYELGEKLMNLVVLSVWNNSLTGTIPASLANLSSLSILSLXFNQLHGTIPPGIGAFQALQHLDXHDNHLSGEPPHSLYNLTSLERFQLRPRSVVPNPGMRMDWE

SEQ ID NO: 322593 - protein, 85 aa, Zea mays
  Clone ID: MRT4577_57269C.1.pep
PAGVPANGPGGGRGVLGPAADTPPQQHPGGGGFLERILPPHLLLLGPRHVLLRTYFRSIDAGQGMLASLCPPGPCVVYDPPHVLL

SEQ ID NO: 322594 - protein, 94 aa, Zea mays
  Clone ID: MRT4577_5726C.1.pep
NSARGYSSYDSAHTALFYSRDTSSCRHRFPRLLMECTHGTRREHLYLTLDDSGGERLEAFTGLPRSHTSCSLWGWRTRLPCVQEPDHAIYSSSE

SEQ ID NO: 322595 - protein, 86 aa, Zea mays
  Clone ID: MRT4577_57270C.1.pep
TPKCFGGDETPIQSGTRGGGRERVIVKLKNGLVLSSKPGGGVWEPQHAKNGAVKGKGDTKTLWGGFFWGAGFSFDFKGGGGGPFGF

SEQ ID NO: 322596 - protein, 457 aa, Zea mays
  Clone ID: MRT4577_57271C.1.pep
MGTRNLTRNRAASMATASTTLLLSLAFLAFAWAASPSPDAEAISRFQEYLRIDTAQPAPDYAAAVAFLRKQAAEAGLEARTLELVAGKPLLLLRWPGRRPSLPSILLNSHTDVVPSEPNKWDHPPFSAALDEPSGRIYARGSQDMKCVGMQYLEAIRRLRSAGFVPDRNIYITFVPDEEIGGHGGVEPFVSSKEFKDMNVALVLDEGLASPGEEYRVFYAERSPWWLTIKATGAPGHGAKLYDGSAMENLMKSVEAIRRFRTSQFDLVKSGEKAEGDVVSVNFAYLKAGTPTPTGFVMNLQPSEAEVGLDIRIPPSAHVEALERRLVEEWAPPSRNLTFEFKQKMSVLDNFGKPAMTAADSTNPWWTLLEEAVKSADGKLGKPEIFPASTDARYFRKIGLPAFGFSPMANTPILLHDHNEFLSKDEYLKGIGIYESIIRALATHEDGGKDDESRAEL

SEQ ID NO: 322597 - protein, 98 aa, Zea mays
  unsure (1)..(98): unsure at all Xaa locations
  Clone ID: MRT4577_57272C.1.pep
NYKGTTLARSINDSYFCLLARMHACMRGLWGVPCSRRFSGSQASHRGVWLXSLSPRSTVSSATCRLKYREACACHGCLTSLPFYGTGKQSTFCRGIVW

SEQ ID NO: 322598 - protein, 106 aa, Zea mays
  unsure (1)..(106): unsure at all Xaa locations
  Clone ID: MRT4577_57273C.1.pep
RPPRVGNGPWGLQKKFLEQIVPGFYXLILGKPFGFFKKLFSFKQMGVVKFCGGLQKGQKFFYPLGGGYPLGGSFFEKKKKFFPLNQFFFFNPSFEKPLVGGALFFI

SEQ ID NO: 322599 - protein, 99 aa, Zea mays
  Clone ID: MRT4577_57274C.1.pep
RRSCGVELSRDTYNTLIAAYGRCGSRTNAFKMYNEMTSAGFTPCITTYNALLNVLSRQGDWSTAQSIVSKMRTKGFKPNEQSYSLLLQCYAKGGNLAGI

SEQ ID NO: 322600 - protein, 44 aa, Zea mays
  Clone ID: MRT4577_57275C.1.pep
FKNPLGLPFQKKAIPLPGLRVVISPLPPKPKLQKWVQIRIFRLT

SEQ ID NO: 322601 - protein, 63 aa, Zea mays
  Clone ID: MRT4577_57276C.1.pep
ENLISERLPGKKHNSLCMLSSLFACFHQFVHLLGDVHVADQVDHSGAVSSYQDTSFTKLPFKA

SEQ ID NO: 322602 - protein, 102 aa, Zea mays
  Clone ID: MRT4577_57277C.1.pep
FEFGRGGGGAGGACTFCCARGGLRRSGALGWLVGAGGVCVRDLVRLPVPLLILTLVFWGGGSRVACLIAIACVWLVWLLPTWPVTTCAGALRGETLLLGRGP

SEQ ID NO: 322603 - protein, 75 aa, Zea mays
  Clone ID: MRT4577_57278C.1.pep
GGGHTFPNQVLEKPNQGIQSPIPPRGFRKRKKGKPPQKGPIGDAPIIKSPEGGNKPGLAGSGKILKATGGPGLGV

SEQ ID NO: 322604 - protein, 242 aa, Zea mays
  Clone ID: MRT4577_57279C.1.pep
MQIFVKTLTGKTITLEVESSDTIDNVKAKIQDKEGIPPDQQRLIFAGKQLEDGRTLADYNIQKESTLHLVLRLRGGMQIFVKTLTGKTITLEVESSGTIDNVKAKIQDKEGIPPDQQRLIFAGKQLEDGRTLADYNIQKESTLHLVLRLRGGMQIFVKTLTGKTITLEVESSDTIDNVKAKIQDKEGIPPDQQRLIFAGKQLEDGRTLADYNIQKESTLHLVLRLRGGMQIFVKTLPADITL

SEQ ID NO: 322605 - protein, 138 aa, Zea mays
  Clone ID: MRT4577_5727C.1.pep
MVTVLTCSFGCPPSLPCTVQLKGNVSREVSGAGGDRARRMLGRDCQLMGLTWLLAKNKTAYIPTVSAVLRAMLYTARPTEAAGAAPRCSPDQENMPLAVDSLQFERAGSTTGSAAANATPRGALLLSLALGLTIGSVG

SEQ ID NO: 322606 - protein, 101 aa, Zea mays
  unsure (1)..(101): unsure at all Xaa locations
  Clone ID: MRT4577_57280C.1.pep
SAPYGGYGGEGWGYDSLKNLQQIRAAVQTHLMLGDLTLCVALASAAVGAVLHVGWNINGMLTMLSLVGSIAXLFSVPVYEVWKRFXLLIAGALLEGAGVRT

SEQ ID NO: 322607 - protein, 58 aa, Zea mays
  Clone ID: MRT4577_57281C.1.pep
CSGRSQDLVRGELGPVRRRQRQVLSGEDHCHQSLLDGVLSPSEWVFSVGAMASERGTL

SEQ ID NO: 322608 - protein, 102 aa, Zea mays
  Clone ID: MRT4577_57282C.1.pep
VCRRALVDAGRERARQVKGQLGLLGRPRHIHRLLGRAIASDRHRAIDFVVLLRYSRLMDVRRQTVAKAHGARRIKKRWELGIWNSKLGRSKIHLGFKEPIIA

SEQ ID NO: 322609 - protein, 202 aa, Zea mays
  Clone ID: MRT4577_57283C.1.pep
MASDTASAVPSSVVSAAEETLGYTESVGDHLSHLLAAAAADPDAVAELPPLLRARAFLALAQAATSLLGVRLRCSGVDPDEHPIRKEFERLSLMQEKLNQFENWDKAPLRPSTTLNTQAAARFIGHSLSHLTSDQKRSMHEISRGERRSWSGQKRKPEPSVEKKSVRAAAEEFLAKASQELIGHSDSRVKGPVILISDEDED

SEQ ID NO: 322610 - protein, 97 aa, Zea mays
  unsure (1)..(97): unsure at all Xaa locations
  Clone ID: MRT4577_57284C.1.pep
LGEKLEQKGRVGGGPPGPLQRVVGAPNPGVGGARRRLLAGPPYVSAQGLPHFEAEPKNVALVLRLGVPFFTFFFAAAXGGGVAGLLIMLGLVPERPG

SEQ ID NO: 322611 - protein, 109 aa, Zea mays
  unsure (1)..(109): unsure at all Xaa locations
  Clone ID: MRT4577_57285C.1.pep
MDGGGEEGNQQPQLVLAHKLFLLSQPDVDDLXAKVXVRDDVLAAVKCDDMXALYETLVDDEVLKMDATLLAHMGARYRGMRARGATRISRLLITISKRWKSVKPIYPDP

SEQ ID NO: 322612 - protein, 78 aa, Zea mays
  Clone ID: MRT4577_57286C.1.pep
AVAAGTKLLPNILLTGTPGVGKTTLGKELASKSGLKYINVGDLAREGQRFTVQMPTSQSPAEIASIPATSAVQNVLIN

SEQ ID NO: 322613 - protein, 66 aa, Zea mays
  Clone ID: MRT4577_57287C.1.pep
RTIVQSRRKCGGGTNHITLARPAENAKHTPKEPNEQSTKDTEPTNKTRMDKTTVSKATLIKNGGGR

SEQ ID NO: 322614 - protein, 119 aa, Zea mays
  unsure (1)..(119): unsure at all Xaa locations
  Clone ID: MRT4577_57288C.1.pep
ICCCLTCIISDLGVHEDLDMNRGATTEAINTLVAYKFQSKRVHDGDVGGDGGGALXVGTDRKRAITRLKALCCICLITFXNXEDLGELSCAHAFHTECIDKWIQMNTLCPVCKAEIMGS

SEQ ID NO: 322615 - protein, 115 aa, Zea mays
  unsure (1)..(115): unsure at all Xaa locations
  Clone ID: MRT4577_57289C.1.pep
GDASFAKASVRDMQQTLTTLTAPCREKAVHLESKSADNRVLHEQLHKKNXEIYDWQEKVLXVAHQLCPKVDICREKETDCAQRETIDPKFKLQAKGAEIPMLKYDPLKMSEEHCD

SEQ ID NO: 322616 - protein, 350 aa, Zea mays
  unsure (1)..(350): unsure at all Xaa locations
  Clone ID: MRT4577_5728C.1.pep
MGQALGLVQVDQSTVAIKESFGKFDEVLEPGCHFLPWCIGKQIAGYLSLRVQQLDVRCETKTKDNVFVNVVASVQYRALAEKASDAFYRLSNTREQIQSYVFDVIRASVPKMNLDDAFEQKNEIAKAVEDELEKAMSMYGYEIVQTLGRGRAGKGHGCAHVYPIICWAFATAAGAAHAEAQIMHLSMKTXSQSCIKXLEKAMTMYGYEIVQTLIADVEPDEHEKRAMNEINANARMRLAAREKAEAEKILKIKRAEGDTKSKYLARMGIARQRQAIVDGLIDSVLAFSENVPGTSAKDVMDMVLVTQYFDTMKEIGASNKSSSVFIPHGPGAVRDIAAQIRDGHLQASLL

SEQ ID NO: 322617 - protein, 540 aa, Zea mays
  Clone ID: MRT4577_57290C.1.pep
MRLWSLFLLPLLCLPARVRSEDYADATVIVRGSETIASTSDEFVCATIDWWPPEKCNYDQCPWERASVLNLDLTNPLLAKAIQAFSPLRIRVGGSLQDQVLYGTPNLGLPCDPFTKVSSGLFGFSQGCITLERWDDINDMFLKTGAVVTFGLNALRGRQQTRKGVWGGPWNSSNAREFIEYTVLKNYPIDSWEFGNELSGSGVGASVSAEQYGKDLVELQTIISELYGDSNKPLVVAPGGFYDQKWFAQLLDVSGPNVLNAMTHHIYNLGAGNDPQVPNRILNPQYLSRTSDTFRSLQLTIQRHGPWSAPWVGESGGAYNSGSRLVSNTFLNSFWYLDQLGQSAKYDTKVYCRQTLIGGNYGLLDTETFVPNPDYYSALLWHQLMGTGVLSVDISGSSYLRAYVHCAKQKGGVTLLLLNLHRTMGFMVSVRNDLNVNLAEGQGIRRDSAFVHGLKRTVSWVGSKASDGFSKREEYHLSSKDGNPFARTMLLNGAPLELTEDGGIPSLYPVEVSVNSPIYVAPLTIAFVVFPDFEAEACGR

SEQ ID NO: 322618 - protein, 78 aa, Zea mays
  Clone ID: MRT4577_57291C.1.pep
HGVLGRVAWAWLCRWSACCCCRLSPAWCWLSAVSSACALVWIGARWCCPLFSVFCASVPSFWPALVLGRSLGYLLVVM

SEQ ID NO: 322619 - protein, 81 aa, Zea mays
  Clone ID: MRT4577_57292C.1.pep
LANRGKCRWLRLELRLGIDRQHHYRLRQNSRCTNRVREAVEDRSTCAVNLRAWGFRGPRQFLAGHRYQPRIRAAPRLGLSH

SEQ ID NO: 322620 - protein, 84 aa, Zea mays
  unsure (1)..(84): unsure at all Xaa locations
  Clone ID: MRT4577_57293C.1.pep
SNAQPAGERFMQXXXXXXXXXXSKALAAGDSDASSSTYDMDDEESDETIEEGGPVEDXSTSSDKKLPSYSGKKGKRSKRKRMVQ

SEQ ID NO: 322621 - protein, 61 aa, Zea mays
  Clone ID: MRT4577_57294C.1.pep
QDEFIPGQWDAPHKMIGWRVRDPYSKECLVRIGRCGLPPAAYHSDCVKVAPWAGIVNEHWV

SEQ ID NO: 322622 - protein, 98 aa, Zea mays
  Clone ID: MRT4577_57295C.1.pep
HASGGIITAGRAKRSNAQPAGERFRQLKEEENRRKFSKALAAGDSDASSSTYDMDDEESDETIEEGGPVEEASTSSDKKLPSYSGKKGKRSKRKRMVQ

SEQ ID NO: 322623 - protein, 87 aa, Zea mays
  Clone ID: MRT4577_57296C.1.pep
TSQPTWKCSSHQLPHHKQPQKTGVAFQLASEPAVRKEDNSSQQLREKVKPSALEPTYMEESQAKRDDDEPSDIQTSRAVDEQIICTT

SEQ ID NO: 322624 - protein, 133 aa, Zea mays
  Clone ID: MRT4577_57297C.1.pep
MASFTASASTVSAARPALLLKPTVAISAPVLGLPPMGKKKGGVRCSMETKQGNVSVMGAGVSAAATAALTAVMSNPAMALVDERMSTEGTGLPFGLSNNLLGWILFGVFGLIWTFFFVYTSSLEEDEESGLSL

SEQ ID NO: 322625 - protein, 137 aa, Zea mays
  unsure (1)..(137): unsure at all Xaa locations
  Clone ID: MRT4577_57298C.1.pep
PPPPPAVANKKPAASSVRCTSSHRDYVKFACTGDDGRIVHKGMVVLRRRIHEMKAAERGWDPPXEWPAWKKKWYPTXDADVCQQLVGVLQAFLVNSRPGVGVGLVTVLMLAVTASAFVLVSLLLDASRAVVSNLHHH

SEQ ID NO: 322626 - protein, 92 aa, Zea mays
  Clone ID: MRT4577_57299C.1.pep
DTPDNIHANKSWPSRLQNLHNRPEHPHNSTWLLHQICQILPKEHSLSRTLHAALSDFNPLRLRSSSQNLRRQRSGQFIRELRNELLQRRGQL

SEQ ID NO: 322627 - protein, 284 aa, Zea mays
  Clone ID: MRT4577_5729C.1.pep
MGQALGLIQVDQSTVAIKETFGKFDEVLEPGCHFLPWCIGKQIAGYLSLRVQQLDVRCETKTKDNVFVNVVASVQYRALADKASDAFYRLSNTREQIQSYVFDVIRASVPKMNLDDAFEQKNEIAKAVENELEKAMSMYGYEIVQTLIVDIEPDEHVKRAMNEINAAARLRLAASEKAEAEKILQIKRAEGDAESKYLAGLGIARQRQAIVDGLRDSVLAFSENVPGTSAKDVMDMVLVTQYFDTMKEIGASSKSSSVFIPHGPGAVRDIAAQIRDGQLQASLL

SEQ ID NO: 322628 - protein, 89 aa, Zea mays
  unsure (1)..(89): unsure at all Xaa locations
  Clone ID: MRT4577_57300C.1.pep
PVSTLPSLHGKQGVTSVTCHGGYVYTTGRDGAYYQLFVRDGQLQPVLRQKSCRGMNWLAGLRIVPDASMVILXFHANEFVVWXPSAHES

SEQ ID NO: 322629 - protein, 98 aa, Zea mays
  unsure (1)..(98): unsure at all Xaa locations
  Clone ID: MRT4577_57301C.1.pep
GFKVEEAHLSERNFRAPGGFGFGNPKPKNFGPKXYPSPGFSGKEFYVVLKGVGDRVAPPPRGKFPVGVPPRVPKEGPQKWFPAKNKGVFLHKGQTPPP

SEQ ID NO: 322630 - protein, 135 aa, Zea mays
  Clone ID: MRT4577_57302C.1.pep
MAASAAVRFLLLLLLLLLLLFAASPRASRSSSMAPPDDAEAAAPPRRGCTDATTIDAMMTLRSRNSAGDGTESDAGHHHGATGSGGATSLLTPDTISAAAAATSAASTSSSSLGLAIRHAPSVGFVASCSALRWS

SEQ ID NO: 322631 - protein, 71 aa, Zea mays
  Clone ID: MRT4577_57303C.1.pep
IRIFKFFYNTSHKVLIQPGKRTGLNLLSPSRAQPGYRQKAFPCKWLPGKKAPPEKSTLPTFWPFLQFPYFF

SEQ ID NO: 322632 - protein, 43 aa, Zea mays
  Clone ID: MRT4577_57304C.1.pep
RAKLRQNKSQPCPHLQPTPTRTSALSLLHIYNVTALPFYYRCV

SEQ ID NO: 322633 - protein, 122 aa, Zea mays
  unsure (1)..(122): unsure at all Xaa locations
  Clone ID: MRT4577_57305C.1.pep
MYGPVHSQPSPDMATVTRTLLPAILMSLHAFVARGLSTEKADGADDVADRHTAKWMQDTRKKSPMELIXEAPPINVDGRIAAXDNDXERDELGHPIENICLDLQAPNARKYCALRYDQVHHH

SEQ ID NO: 322634 - protein, 489 aa, Zea mays
  Clone ID: MRT4577_57306C.1.pep
MATQAAFLAGFSQLAAQPGRDRAVAVAVAPAPGPARVAVAAVGSAKLGVKAGTSRTAAVARLGVRCRASLIEPDGGRLVDLVAPEEGGRRAALRREAAELPHRLRLGRVDKEWVHVLSEGWASPLQGFMRDDEFLQTLHFNAIRGQDGRMVNMSVPIVLSVGDAQRRAIQADGATRVAVVDERDRPIAVLSDIEIYKHNKEERIARTWGTTAPGLPYVEEAITNAGDWLIGGDLEVIEPIKYNDGLDQYRLSPAQLREEFARRNADAVFAFQLRNPVHNGHALLMTDTRKRLLEMGYKNPVLLLHPLGGFTKADDVPLSWRMKQHEKVLEEGVLNPESTVVAIFPSPMHYAGPTEVQWHAKARINAGANFYIVGRDPAGMSHPTEKRDLYDADHGKKVLSMAPGLERLNILPFKVAAYDTKQKKMDFFDPSRKDDFLFISGTKMRTLAKNRESPPDGFMCPGGWKVLVEYYDSLVPSEGSSKLREPIAA

SEQ ID NO: 322635 - protein, 110 aa, Zea mays
  Clone ID: MRT4577_57307C.1.pep
LRPVLVLQGDLLQLKGGKGLCKGGANRHRKVLRDNIHGITKPAILMLALMGGVKRISVLIYEETRYVLKIFLENVILDTFTYTEHARRKTDTAMDVDYTLKLQCRTLYGF

SEQ ID NO: 322636 - protein, 207 aa, Zea mays
  Clone ID: MRT4577_57308C.1.pep
LLMTDTRKRLLEMGYKNPVLLLHPLGGFTKADDVPLSWRMKQHEKVLEEGVLNPESTVVAIFPSPMHYAGPTEVQWHAKARINAGANFYIVGRDPAGMSHPTEKRDLYDADHGKKVLSMAPGLERLNILPFKVAAYDTKQKKMDFFDPSRKDDFLFISGTKMRTLAKNRESPPDGFMCPGGWKVLVEYYDSLVPSEGSSKLREPVAA

SEQ ID NO: 322637 - protein, 491 aa, Zea mays
  Clone ID: MRT4577_57309C.1.pep
MATQAAFLAGFSQLAAQPGRDRAVAVAVAVAPAPGPARVAVAAVGSAKLGVKAGTSRTAAVARLGVRCRASLIEPDGGRLVDLVAPEEGGRRAALRREAAELPHRLRLGRVDKEWVHVLSEGWASPLQGFMREHEFLQALHFNAIRGQDGRMVNMSVPIVLSVGDAQRRAIQADGATRVALVDERDRPIAVLSDIEIYKHNKEERVARTWGTTAPGLPYVEEAITNAGDWLVGGDLEVIEPIKYNDGLDQYRLSPAQLREEFARRNADAVFAFQLRNPVHNGHALLMTDTRKRLLEMGYKNPVLLLHPLGGFTKADDVPLSWRMKQHEKVLEEGVLNPESTVVAIFPSPMHYAGPTEVQWHAKARINAGANFYIVGRDPAGMSHPTEKRDLYDADHGKKVLSMAPGLERLNILPFKVAAYDTKQKKMDFFDPSRKDDFLFISGTKMRTLAKNRESPPDGFMCPGGWKVLVEYYDSLVPSEGSSKLREPVAA

SEQ ID NO: 322638 - protein, 81 aa, Zea mays
  Clone ID: MRT4577_5730C.1.pep
LIATLFTTCSLFPASLHKARSYVFYSNQHERGQEKPNAGTGSQTRGRGRHMFFTGENTRATPSAGKKRTPAPAMIELWLSP

SEQ ID NO: 322639 - protein, 72 aa, Zea mays
  Clone ID: MRT4577_57310C.1.pep
SFAIPTHALKGSMSRCKTLAVNHPIWRSISFRSLNHFTHITFVIFYRLIVIRSFLPISPARPIHSEVLVHFI

SEQ ID NO: 322640 - protein, 498 aa, Zea mays
  Clone ID: MRT4577_57311C.1.pep
MAMALRRLAGVSGSPSASSAAATVLLRSALTRPISTGFREERDTFGPIQVPNDKLWGAQTQRSLQNFDIGGERERMPVPIIRAFGVLKKCAAKVNMDYGLDPTIGKAIIQAAEEVAEGKLDDHFPLVIWQTGSGTQSNMNANEVIANRASEILGHKRGEKFVHPNDHVNRSQSSNDTFPTVMHIATAVEIHSRFIPSLQQLHDSLHSKTIEFKDIIKIGRTHTQDATPLTLGQEFSGYTTQVKYGIDRINCTLPRMYQLAQGGTAVGTGLNTKKGFDAKIAAAVAEETNLPFVTAENKFEALAAHDAFVESSGAVNTISASLMKIANDIRLLGSGPRCGLGELILPENEPGSSIMPGKVNPTQCEALTMVCAQVMGNHVGVTIGGANGHFELNVFKPMIAAGLLRSLRLLGDASVSFEKNCVRGIQANHKRISQLLHESLMLVTSLNPKIGYDNAAAVAKKAHKEGTTLKEAALDLGVLTEQEFHELVVPEKMIGPSD

SEQ ID NO: 322641 - protein, 489 aa, Zea mays
  Clone ID: MRT4577_57312C.1.pep
MAMQAAFLAGFSQLAAQPSRDCAVAVAPTRVAVAAVGSAKVGARVGLKAGIAAPAPAPAAGRGVRCRASLIEPDGGQLVDLVAPEEGGRRAALRREAAELPHRLRLGRVDKEWVHVLSEGWASPLQGFMREHEFLQTLHFNAIRGQDGRMVNMSVPIVLSVGDAQRRAIQADGATRVALVDERDRPIAVLSDIEIYKHNKEERIARTWGTTAPGLPYVEEAITNAGDWLIGGDLEVIEPIKYNDGLDQYRLSPAQLREEFARRNADAVFAFQLRNPVHNGHALLMTDTRKRLLEMGYKNPVLLLHPLGGFTKADDVPLSWRMKQHEKVLEEGVLNPESTVVAIFPSPMHYAGPTEVQWHAKARINAGANFYIVGRDPAGMSHPTEKRDLYDADHGKKVLSMAPGLERLNILPFKVAAYDTKQKKMDFFDPSRKDDFLFISGTKMRTLAKNRESPPDGFMCPGGWKVLVEYYDSLVPSEGSSKLREPIAA

SEQ ID NO: 322642 - protein, 68 aa, Zea mays
  unsure (1)..(68): unsure at all Xaa locations
  Clone ID: MRT4577_57313C.1.pep
PYNLFEIYNQYQFLSTDFNYIYXTFFSNQMSKIILTLKPLLTSLYYTSSILFYQFKFIISNLPYFHFT

SEQ ID NO: 322643 - protein, 87 aa, Zea mays
  Clone ID: MRT4577_57314C.1.pep
RAPAVAYLQARGYKRCTSTRGPPAERLRLQNIWACKIASCVEYLPVIMVWRTFAPVWHGLDALGDLGHLISSPKQMLGHHAHLCSDL

SEQ ID NO: 322644 - protein, 56 aa, Zea mays
  Clone ID: MRT4577_57315C.1.pep
HVSMCARSRGRRNRRVRQHASLDKKGAVHEIEVQHSRTESRGSLLHVHASHAYGGS

SEQ ID NO: 322645 - protein, 378 aa, Zea mays
  unsure (1)..(378): unsure at all Xaa locations
  Clone ID: MRT4577_57316C.1.pep
MAAAIAAALLRRSTSHHRLILPLLSHLHRTFPQPSSPWLPPQHRFFSTGESAGDPTQKPTSSLDPKKLWRELSASDPAVGSCRLPKATWDAIVGLVRGFAKSPAISDQALALYVPSSAFPSYVRRFRGFILPRLSRESAAHLLSLPAEDAHELLLPAFAEFCFSNFADKLRQHRSVMAAADLTAPHTWYPFARAMRRRIVYHCGPTNSGKTHNALTRFAAAKSGVYCSPLRLLAMEIFDKVNALGVYCSLRTGQEVKEVPFSNHVACTIEMMSTEELYEVAVVDEIQMMADPVRGFAWSRAVLGLKADEIHLCGDPSVLKIVQKICAXTGDDLXVHQYERFKPLXVEAKTLLXDLKNIRSGDWXXAFSRKENFEVKLA

SEQ ID NO: 322646 - protein, 182 aa, Zea mays
  Clone ID: MRT4577_57317C.1.pep
MASMTTPRLPFLPARTRSAVAASSSSSSSSPLPRRSIKCSSSTNANSAPLPSTARQPRAPVVDGVGSADLNGLRAPPIPVADSPLPAYRDPHGLPRPLTSADLMESSGEGLKVAYQGFPGAYSEAAAKKAYPNCQTVPCEHFDTAFQAVQNWIVDRAVLPLENTLGGSIHRNYDLLLRHELH

SEQ ID NO: 322647 - protein, 96 aa, Zea mays
  unsure (1)..(96): unsure at all Xaa locations
  Clone ID: MRT4577_57318C.1.pep
SDTVRIVFVRIGRLGASVAMHCDHTKLVCVYDPLISTDYMTYMFKYDTVHGQWKHHVVKVKDSITLLFGEKEVAXVFACTNPEEIPWGXVGAEYCC

SEQ ID NO: 322648 - protein, 179 aa, Zea mays
  Clone ID: MRT4577_57319C.1.pep
MEVGDARNGSAAAALTKGGADDAARKPLPPCCVKAKARVPETEANCHDTVVSGWFTEPRSRFGEAHSLKVEKILFQGKSPYQEILVFESSTYGNVLVLDGIVQLTDKDECAYQEMVTHLPLCSIPAPKNVLVVGGGDGGVLREIARHDSVETIDICEIDQLVIDVSKEFFPNLSIGSKI

SEQ ID NO: 322649 - protein, 71 aa, Zea mays
  Clone ID: MRT4577_5731C.1.pep
TWPACAEDPVGTRLLQARDLRDLQVAVDDREHDVKHCARALLTTADVRADSADKQAGEGRWEWTGERRMNG

SEQ ID NO: 322650 - protein, 240 aa, Zea mays
  unsure (1)..(240): unsure at all Xaa locations
  Clone ID: MRT4577_57320C.1.pep
LINIVIFEIDQLVIAVRNEFFPNLSIGFKDPRVRLHVGDAVDFLRNSPEGKYDAIIVDSSDPIGPAQALVEKPSTQTIARALKPGXSFKSSFDNVSEHGGVLCNVAESMWLHTHXLIQDMLAICRQTFKGAVHYAWTSVPTYPSGVIGFLLCAKEGRAVNFLTPVNPIEKIEGTAKAGRELRFYNSEIHRAAFVLPTFVRRELEAYTTPSASAENEKPKESVSEPQKIKILSNNAILTAS

SEQ ID NO: 322651 - protein, 389 aa, Zea mays
  Clone ID: MRT4577_57321C.1.pep
MEVGDARNGSAAAALTKGSADDAARKPLPPCCVKAKARVPETEANCHDTVVSGWFTEPRSRFGKTSKVQYFNNPMWPGEAHSLKVEKILFQGKSPYQEILVFESSTYGNVLVLDGIVQLTDKDECAYQEMVTHLPLCSIPAPKNVLVVGGGDGGVLREIARHDSVETIDICEIDQLVIDVCKEFFPNLSIGFKDPRVRLHVGDAVDFLRNSPEGKYDAIIVDSSDPIGPAQALVEKPFIQTIARALKPGGVLCNLAESMWLHTHLIQDMLAICRQTFKGAVHYAWTSVPTYPSGVIGFLLCAKEGRAVNFLTPANPIEKIEGAAKAGRELRFYNSEIHRAAFVLPTFVRRELEAYTTPISSAENEKPKESVSEPQKIKILSNNAILTAS

SEQ ID NO: 322652 - protein, 105 aa, Zea mays
  Clone ID: MRT4577_57322C.1.pep
SSVNFPSAATPRPFSATRQHPRGLRSLLLIARVYGSPSDSSANRTRLLPAYSCARSWPHDRDKTIPYDHIQPPPRPLASPSPGSDRCITYTFKNYVDMMPIPIIL

SEQ ID NO: 322653 - protein, 139 aa, Zea mays
  Clone ID: MRT4577_57323C.1.pep
NQLLGLYQKMKSPRRSSRKQKARSQESSRPSFCAPENLALSKILGPSIFLDCRATRICAFDKKKKACFVYKFSCQFFYKIWGISFRATGGFVKLRNYFEALMTQQIRLGPSKLPSGNGAQVLGLLSNSGAFILNRPHFF

SEQ ID NO: 322654 - protein, 37 aa, Zea mays
  Clone ID: MRT4577_57324C.1.pep
QDLWLHPGSCYLVSYSIISPNFTPKFIHLHLLLQLKP

SEQ ID NO: 322655 - protein, 257 aa, Zea mays
  unsure (1)..(257): unsure at all Xaa locations
  Clone ID: MRT4577_57325C.1.pep
MEKTEAKKPTPASPLFSFSNPSASFGFGFGAAPGPPPPPPPPAVEVLLSEESPVAAGNLEPVVVDDSLSIYKGRVNTSDVFGVKNSDLVPGKYEGGLKLWEGSLDLVKTLNSDIKDDRLLMEGKHVLELGCGHGLPGIYAGLKGAGLVHFQDFNAEVLRCLTIPNVKANLLKKSSQGTSTSRSIGFYAGDWSEIDKLLLCGDAVQDKITNLRTENEGYRGYDIILMAETVYALDSLPSLYXLVKKCLHYPSGVVYMA

SEQ ID NO: 322656 - protein, 183 aa, Zea mays
  Clone ID: MRT4577_57326C.1.pep
PGADDNGTGSSAVLNILRLIVELRKKESFLFKKSIVFVLFSGEEQGLLGSAALAADYKRSGAALTAMVNIDMIGYPQGNAPRTLYWMNGSVNKALTDLAFDLTKLYLGAGTVVAPTSACCSDQQSFNSQGYPAAGIFESLSANNNPNYHKSSDLPDTVTYEHVARSTKSALSLLATLAEPQRG

SEQ ID NO: 322657 - protein, 71 aa, Zea mays
  Clone ID: MRT4577_57327C.1.pep
KVKNDIHRVLPISGHMAAWHFVFGFRIVDSMFAIALCKCFLHQARHVLAHTFTSMFNCATSASMSKHACVF

SEQ ID NO: 322658 - protein, 110 aa, Zea mays
  Clone ID: MRT4577_57328C.1.pep
ASWRANEAWMCKRHISFEVWGIFTCGHHVRLFLHQHLSGLLMLAISRGGQQFQVGSGVGYVQLHTVVGAGLRPALVAIFSIWERFLVCTCDAVLLGTSHLSRFFGGLELV

SEQ ID NO: 322659 - protein, 53 aa, Zea mays
  Clone ID: MRT4577_57329C.1.pep
VLTVADLCACRGARKYSYRGTNPRIRVPERVPRPISAREHTLTNTQENYPTAK

SEQ ID NO: 322660 - protein, 78 aa, Zea mays
  unsure (1)..(78): unsure at all Xaa locations
  Clone ID: MRT4577_5732C.1.pep
MWTPPLDIALAGSCDTTWYYXCPLIDALAHRDFVKNLISGASQVDCAVRFFACATGGFEAVIFMDAPTLEHAALEITL

SEQ ID NO: 322661 - protein, 185 aa, Zea mays
  Clone ID: MRT4577_57330C.1.pep
GRSRRPGGIPFFPSTGAQRYLLPPPSVTGKWACRIHTPQGLPEPPVGSPRRQGSPCRIPTPPAGGRLLRDPAGVAMEGSSGRRRFVARPDFQQSYLRRASPAPPPQPDTSSLRPTEAPPRRPATGVDNGDRGHGRSVWVSAPEVAVPLPLANPPTPADLPGTGDPRPAEIHLQPCSSSALPRFHP

SEQ ID NO: 322662 - protein, 487 aa, Zea mays
  unsure (1)..(487): unsure at all Xaa locations
  Clone ID: MRT4577_57331C.1.pep
MDMDMSSAYPHHWLSFSLSNNYHHGLLEAFSNSSGTPLGDEQGAVEESPRTVEDFLGGVGCVGAPXRSRRLQIRITSLCAASXGSITARFLRHYPAAPAGTTVENPGAVTVAAMSSTDVAGAESDQARRPAETFGQRTSIYRGVTRHRWTGRYEAHLWDNSCRREGQSRKGRQVYLGGYDKEEKAARAYDLAALKYWGPTTTTNFQVSNYEKELEEMKSMTRQEFIASLRRKSSGFSRGASIYRGVTRHHQHGRWQARIGRVAGNKDLYLGTFSTQEEAAEAYDIAAIKFRGLNAVTNFDMSRYDVESILSSDLPVGGGASGRAPAKFPLDSLQPGSAAAMMLAGAAAASQATMPPSEKDYWSLLALHYQQQQEQERQFPASAYEAYGSGGVNVDFTMGTSSGNNNNNTGSGVMWGATTGAVVVGQQDSSSKQGNGYASNIPYAAAMVSGSAGYEGSTGDNGTWVTTTTSSNTGTAPHYYNYLFGME

SEQ ID NO: 322663 - protein, 104 aa, Zea mays
  Clone ID: MRT4577_57332C.1.pep
IMATACASALAFVRYNVLRRRGRGDRALTHGSCMMTWVFAERPNRDDDPDKPSRNYVLDPVLEALGASPLMSWAHSFRVPGTNDMISFASCVIIAAGRSCRVSY

SEQ ID NO: 322664 - protein, 505 aa, Zea mays
  unsure (1)..(505): unsure at all Xaa locations
  Clone ID: MRT4577_57333C.1.pep
MDMDMSSATHPAHHWLSFSLSNNYHHGLLEALSSSSSAHQIAGDEAPVDEAPKMEDFLGCVGSAGTGSTAVVDHGELGSIAAGFLHRYPAHDGMTDQNSGAVTVAAATMEVAESDQARRPAETFGQRTSIYRGVTRHRWTGRYEAHLWDNSCRREGQSRKGRQVYLGGYDKEEKAARAYDLAALKYWGPTTTTNFPVKRTQSQSRAATHICCERWLALPEXPCMHGXVSNYEKELEEMKSMTRQEFIASLRRKSSGFSRGASIYRGVTRHHQHGRWQARIGRVAGNKDLYLGTFSTQEEAAEAYDIAAIKFRGLNAVTNFDMSRYDVESILSSDLPVGGGATGRAAKFPLDSLQPGSAAAMMLAGAAAASQATMPPSEKDYWSLLALHYQQQQEQERQFPASAYEAYGSGGVNVDFTMGTSSGSNNNTGSGVMWGATSGAVVGQQDSSSKQGNGYASNIPYAAAMVSGSAGYEGSTGDNGTWVTTTTSSNTGTAPHYYNYLFGME

SEQ ID NO: 322665 - protein, 240 aa, Zea mays
  unsure (1)..(240): unsure at all Xaa locations
  Clone ID: MRT4577_57334C.1.pep
MATTATKTTAPAQEQQANGNGNGNGNGNGEQKTRHSEVGHKSLLKSDDLYQYILDTSVYPREPESMKELREITAKHPWNLMTTSADEGQFLNMLIKLIGAKKTMEIGVYTGYSLLATALALPEDGTILAMDINRENYELGLPCINKXAGVGHKIDFREGPALPVLDDLVADKEQHGSFDFAFVDADKDNYLSYHERLLKLVRPGGLIGYDNTLWNGSVVLPDDAPMRKYIRFYRDFVLAL

SEQ ID NO: 322666 - protein, 247 aa, Zea mays
  unsure (1)..(247): unsure at all Xaa locations
  Clone ID: MRT4577_57335C.1.pep
MATTATEAAPAQEQQANGNGEQKTRHSEVGHKSLLKSDDLYQYILDTSVYPREPESMKELREITAKHPXFLNMLIKLIGAKKTMEIGVYTGYSLLATALALPEDGTILAMDINRENYELGLPCIEKAGVAHKIDFREGPALPVLDDLIAEEKNHGSFDFVFVDADKDNYLNYHERLLKLVKLGGLIGYDNTLWNGSVVLPDDAPMRKYIRFYRDFVLVLNKALAADDRVEICQLPVGDGVTLCRRVK

SEQ ID NO: 322667 - protein, 197 aa, Zea mays
  unsure (1)..(197): unsure at all Xaa locations
  Clone ID: MRT4577_57336C.1.pep
MIRPSSKESLNYDNNSQKVYPQPIDENMNQNMGSMIGRIFNNISSLKAAYIQLQEAHTPYDPDKIQTADKLVIDELTSLSELKHTYRERNPKPVAASPQDSRLLSEIQEQQNLLKTYEVMVKKFQSQIQNRDTEITHLQQQTDEAKHRKTKLEKEMKQRGLLNQESEESDEERAISLLSXTSLFTSTADNAYQSIHE

SEQ ID NO: 322668 - protein, 78 aa, Zea mays
  Clone ID: MRT4577_57337C.1.pep
PPHLPSAPVPPYPTTQHERRRRLRWQSEMQDLPAGADPERQHQILEDPRGAQVDFPGRPQERLPQARYQAPPREGAVT

SEQ ID NO: 322669 - protein, 201 aa, Zea mays
  unsure (1)..(201): unsure at all Xaa locations
  Clone ID: MRT4577_57338C.1.pep
MATTATEAAKAAPAQEQQANGNGNGEQKTRHSEVGHKSLLKSDDLYQXQAERNEWLNLTGIXSLTAGEEXPQYILDTSVYPRGPESMKELREITAKHPWYVPLAFRPVVRGGFECVGLLDVDRPRSENERGVACRNLMTTSADEGQFLNMLIKLIGAKKTMEIGVYTGYSLLATGLALPEDGTVXALSLFLSLSLSQICHP

SEQ ID NO: 322670 - protein, 289 aa, Zea mays
  unsure (1)..(289): unsure at all Xaa locations
  Clone ID: MRT4577_57339C.1.pep
MATTATEATKTTAPAQEQQANGNGNGEQKTRHSEVGHKSLLKSDDLYQXQAGRNEWLNLTGIRVSDRGGRMIXYILDTSVYPREPESMKELREITAKHPWNLMTTSADEGQFLNMLIKLIGAKKTMEIGVYTGYSLLATALALPEDGTILAMDINRENYELGLPCINKAGVGHKIDFREGPALPVLDDLVADKEQHGSFDFAFVDADKDNYLNYHERLLKLVRPGGLIGYDNTLWNGSVVLPDDAPMRKYIRFYRDFVLALNSALAADDRVEICQLPVGDGVTLCRRVK

SEQ ID NO: 322671 - protein, 111 aa, Zea mays
  Clone ID: MRT4577_5733C.1.pep
SWRLILFIPPQTAPVPQKPDGLFNFSLNFFIDVVKDKLSKLKAQIKYGLFLNEFLFEAFLKNQFLSEEFLIEFSWSIILNGFSLGLNQMTIFTHKLSVLLKYVVHERAKND

SEQ ID NO: 322672 - protein, 396 aa, Zea mays
  unsure (1)..(396): unsure at all Xaa locations
  Clone ID: MRT4577_57340C.1.pep
MATTATEAAPAQEQQANGNGEQKTXRHSEVGHKSLLKSDDLYQVNREHTPDPACPFPASRSRSYLPWLESDRGKNHFHQYILDTSVYPREPESMKELREVTAKHPWXFRFPGPISRRRPSCWTTDRDLKTWRXNLMTTSADEGQFLNMLIKLIGAKKTMEIGVYTGYSLLATALALPEDGTXVVVPSLFPDLPPHLPEGEAASGPPTDKPRIPLSLSLLFVPPXILAMDINRENYELGLPCIEKAGVAHKIDFREGPALPVLDDLIAEXKWPPDLCFFAYIDRVEVDMTSRNRVCLHLXEKNHGSFDFVFVDADKDNYLNYHERLLKLVKLGGLIGYDNTLWNGSVVLPDDAPMRKYIRFYRDFVLVLNKALAADDRVEICQLPVGDGVTLCRRVK

SEQ ID NO: 322673 - protein, 258 aa, Zea mays
  Clone ID: MRT4577_57341C.1.pep
MATTATEAAPAQEQQANGNGEQKTRHSEVGHKSLLKSDDLYQYILDTSVYPREPESMKELREVTAKHPWNLMTTSADEGQFLNMLIKLIGAKKTMEIGVYTGYSLLATALALPEDGTILAMDINRENYELGLPCIEKAGVAHKIDFREGPALPVLDDLIAEEKNHGSFDFVFVDADKDNYLNYHERLLKLVKLGGLIGYDNTLWNGSVVLPDDAPMRKYIRFYRDFVLVLNKALAADDRVEICQLPVGDGVTLCRRVK

SEQ ID NO: 322674 - protein, 101 aa, Zea mays
  Clone ID: MRT4577_57342C.1.pep
QCFTLALKGKAWRAGGGRSDVLASVGVSSCGVRAELPPTVQTTEDEEARVRPEAEKAELDEEIVTLKAEIFALEEELTTMDAHVAGTHASASHSRVSAMPL

SEQ ID NO: 322675 - protein, 87 aa, Zea mays
  unsure (1)..(87): unsure at all Xaa locations
  Clone ID: MRT4577_57343C.1.pep
VLPSARKSGGQAKVVXPASSCIGPDRVQYLVPFCGEPLRYLTVEFHRDYRWDTARLSGDPETFGKNRELEVIHSRWAMLSALGCVLP

SEQ ID NO: 322676 - protein, 266 aa, Zea mays
  Clone ID: MRT4577_57344C.1.pep
MATTATEATKTTAPAQEQQANGNGNGNGEQKTRHSEVGHKSLLKSDDLYQYILDTSVYPREPESMKELREITAKHPWNLMTTSADEGQFLNMLIKLIGAKKTMEIGVYTGYSLLATALALPEDGTILAMDINRENYELGLPCINKAGMGHKIDFREGPALPVLDDLVADKEQHGSFDFAFVDADKDNYLNYHERLLKLVRPGGLIGYDNTLWNGSVVLPDDAPMRKYIRFYRDFVLALNSALAADDRVEICQLPVGDGVTLCRRVK

SEQ ID NO: 322677 - protein, 130 aa, Zea mays
  Clone ID: MRT4577_57345C.1.pep
METLASVMRRDNRRFKPPPSSSAAAASASAGRAPLVMAFLACLAWVYVAGRLWQDAQTRAVLSGLLQKSTSNLPREISGDDKLRDLGCTGIGRKIAEAEMDIAKAKSEGYLWGNGTGGTGTEGSGRKKFL

SEQ ID NO: 322678 - protein, 259 aa, Zea mays
  unsure (1)..(259): unsure at all Xaa locations
  Clone ID: MRT4577_57346C.1.pep
MATTATEAAPAQEQQANGNGEQKTRHSEVGHKSLLKSDDLYQYILDTSVYPREPESMKELREITAKHPWNLMTTSADEGQFLNMLIKLIGAKKTMEIGVYTGYSLLATALAXLPEDGTILAMDINRENYELGLPCIEKAGVAHKIDFREGPALPVLDDLIAEEKNHGSFDFVFVDADKDNYLNYHERLLKLVKLGGLIGYDNTLWNGSVVLPDDAPMRKYIRFYRDFVLVLNKALAADDRVEICQLPVGDGVTLCRRVK

SEQ ID NO: 322679 - protein, 45 aa, Zea mays
  Clone ID: MRT4577_57347C.1.pep
DLSGGGSRSIDSGSSTPSSPEQCRARWEEHESEIHRARPRLVQFS

SEQ ID NO: 322680 - protein, 164 aa, Zea mays
  unsure (1)..(164): unsure at all Xaa locations
  Clone ID: MRT4577_57348C.1.pep
GVLGLFAWPAAAGARSGPACGTAYSKIARDEMLGEGCDYFMCLITDGTVRAGGRXGRRWSGLACTLAGGAAAGIARTVRACGVTTTRLMPVLRRQGPGEGTDPLEVGLMHHSSYPMGLGASLELGSAHTSISMGSYLFHHKQVILVVLMHCLESEFLRINVRFW

SEQ ID NO: 322681 - protein, 629 aa, Zea mays
  unsure (1)..(629): unsure at all Xaa locations
  Clone ID: MRT4577_57349C.1.pep
CLSSLPPTTLPASDPSPPPLPCSRIPHSCSTRRFSARAPSRRCILPFPXAFDAWVXRGPLTSRDRLKIPALXYKAFDQLEGLEVAWNQIKVGDLLRNNDDLERLRSEVRLLKTLKHKNIIKFYNSWLDKRSNNINFITEVFTSGTLRQYRIKHKKVDIRALKKWSRQILSGLVYLHSHDPPVIHRDLKCDNIFVNGNQGEVKIGDLGLATILDNARSAHSIIGTPEFMAPELYDEEYNELVDIYAFGMCLLELVTFEYPYCECSNAAQIYRKGEKPGSLAKIGDPEVKLFIEKCIAKVTERLSANELLMDPFLLDVSDEKIFYPVHPNINTTGSMSDSHPSDNYVHDTVDPHAAIGRSITVESQRKDLNTIFLKLRIADPTGHAQNIHFPFDIEADTSISVATEMVVQLDLTDQDVTAIAEMIDAEIRSHIPDWAAEESIDNQGDEAAHSETHSSEGDEGTSELRDEIGASHNGFVQEQLPSGRKYCSANGIPKRNKVDGIVICARDEEDQSFGSSIHPAEAMFERISSSVDLSNPSAVDSMSRDASVGGSPHSLDGEEEHNSDQHLAAGVTERLIDLLAQQQEELRALQRKHKADIEEMLKIVPAEDREETLTLCHLKAEQKNRAAEP

SEQ ID NO: 322682 - protein, 39 aa, Zea mays
  unsure (1)..(39): unsure at all Xaa locations
  Clone ID: MRT4577_5734C.1.pep
DNFSVRHXTPQPINLELTNTTRKNYIITNILYSINYKIN

SEQ ID NO: 322683 - protein, 43 aa, Zea mays
  Clone ID: MRT4577_57350C.1.pep
LIICSMVHACCSDRFGTCFPQPGFFALMLVFLYITLAPGKSGR

SEQ ID NO: 322684 - protein, 80 aa, Zea mays
  Clone ID: MRT4577_57351C.1.pep
MPPTPPETETETEPEFAEVDPTGRYGRYTEVLGKGAFKTVYPSIPPGRLTPGSDSGPFDFARSIKDPGFTRSMPWEGTVS

SEQ ID NO: 322685 - protein, 651 aa, Zea mays
  unsure (1)..(651): unsure at all Xaa locations
  Clone ID: MRT4577_57352C.1.pep
CLSSLPPTTLPASDPSPPPLPCSRIPHSCSTRRFSARAPSRRCILPFPXAFDAWVXRGPLTSRDRLKIPALXYKAFDQLEGLEVAWNQIKVGDLLRNNDDLERLRSEVRLLKTLKHKNIIKFYNSWLDKRSNNINFITEVFTSGTLRQYRIKHKKVDIRALKKWSRQILSGLVYLHSHDPPVIHRDLKCDNIFVNGNQGEVKIGDLGLATILDNARSAHSIIGTPEFMAPELYDEEYNELVDIYAFGMCLLELVTFEYPYCECSNAAQIYRKGEKPGSLAKIGDPEVKLFIEKCIAKVTERLSANELLMDPFLLDVSDEKIFYPVHPNINTTGSMSDSHPSDNYVHDTVDPHAAIGRSITVESQRKDLNTIFLKLRSADPTGHAQNIHFPFDIEADTSISVATEMVVQLDLTDQDVTAIAEMIDAEIRSHIPDWAAEESIDNQGDEAAHSETHSSEGDEGTSELRDEIGASHNGFVQEQLPSGRKYWSDSPRRDGEISQSVVEHQIGDSSANGIPKRNKVDGIVICARDEEDQSFGSSIHPAEAMFERISSSVDLSNPSAVDSMSRDASVGGSPHSLDGEEEHNSDQHLAAGVTERLIDLLAQQQEELRALQRKHKADIEEMLKIVPAEDREETLTLCHLKAEQKNRAAEP

SEQ ID NO: 322686 - protein, 254 aa, Zea mays
  Clone ID: MRT4577_57353C.1.pep
MIQIGSSLLASKDLTLDQWNRVAMRDDGSNQETLLSYSKLAIHKLLLLKRKHFALLLLIGLTGSFGAVSSSEVVTTFVCVFILAVLVPFCFLLQVARFETCFLGHNKGARGEDDASRRVKCSPPRESSTWFAASAAVHHMTGNQSLLLTGGHGNGNNGEGAVVHQVVNGRELPLRVRGSGSVRTERIVLDDVWYVPGLDLNLVSTGQLVRQGCAVTLGPGPGGCRITRAGALVGSARFTEASNFQLDFLNLADP

SEQ ID NO: 322687 - protein, 74 aa, Zea mays
  Clone ID: MRT4577_57354C.1.pep
GRGPPFGKKIFPPLIWGVEPPEENVLFFLGRLYNKTSFLPLNRGFFTQTQAKEPGFFRGEKPPTPGGGGGLIFY

SEQ ID NO: 322688 - protein, 426 aa, Zea mays
  unsure (1)..(426): unsure at all Xaa locations
  Clone ID: MRT4577_57355C.1.pep
MSGDHAKREIMTGEKPTGSGRTLSRESDNKYKEESSSSIKSHQRGDNNNNKKKKKKKKKVVYYETDSSSPSTSSTESSTTSKRHERKKYNVRGECTKGLSTPTRGLRDITNEITGATNVGHLAPSPCAPTSAARVELARVFFAPRSFRGRSGPHLGGSGSRRSSGSGILSRGSESTDDIKSYRLHVCLRSWQVRGPRSRQFRRGARGAPYCRRLKNIFQRPLGDVRSCVTVRFREDGPSSIHFEAGSLGVCHVDLGPHVGDRVTEFGLQLQHLTPHSILQAAIFAHLCEMFVRVAPCTSLFRHFFVLXSPGRPRTXLGAYYFQTRADSAGAYISSLSGARWENWRAEWVIASTEASDRLALLSDRPRLERKLWRAKPSLVPEFEPVLGRIESLATCGLTSMHVVGDFLQRRIAXLQTRARLSCWRS

SEQ ID NO: 322689 - protein, 48 aa, Zea mays
  unsure (1)..(48): unsure at all Xaa locations
  Clone ID: MRT4577_57356C.1.pep
MQRKPLPTSPLAMKHSLGQSHPVKLVPFNPEYQDESVLWTESXDDGKG

SEQ ID NO: 322690 - protein, 99 aa, Zea mays
  unsure (1)..(99): unsure at all Xaa locations
  Clone ID: MRT4577_57357C.1.pep
VALALLALAASAPSXTTHGCGCQTPPIHLPPXXYIPPXGGVPXXHXPXPSQYPTQPPHLTPCHQIASCXIRSXSSPXLGQXAXSPQHHRNXXATPYGSP

SEQ ID NO: 322691 - protein, 85 aa, Zea mays
  Clone ID: MRT4577_57358C.1.pep
HGKRLCMVHSFAPWTTKLLTTKQLSSAYAENNPRTRLQVILYILTNAWTTQHSTPIFQSQSSRAFMRPYNSKPPLSKTTLMNPFS

SEQ ID NO: 322692 - protein, 71 aa, Zea mays
  Clone ID: MRT4577_57359C.1.pep
LFFFFLKGGSHCPICNVIKGNYFVPKATSFCFLMKLQVLFGFPKKKKKKKKKKKKKKKKKKKKKKKKKKKK

SEQ ID NO: 322693 - protein, 79 aa, Zea mays
  Clone ID: MRT4577_5735C.1.pep
VSTPPLEESPPCPAYVSEQPPTVKYHSPPSPPPMIKSPPPPVPVRSPPSSVKSPPPSPLLSSPQPPAPVRTPPPLTKSS

SEQ ID NO: 322694 - protein, 74 aa, Zea mays
  Clone ID: MRT4577_57360C.1.pep
RHESARGFLRFSEWAKSGTERVGRRPGVADRIETLYHADKARTEDCILELLVWLHHLVSQSNRLAMQKVTDQCI

SEQ ID NO: 322695 - protein, 214 aa, Zea mays
  unsure (1)..(214): unsure at all Xaa locations
  Clone ID: MRT4577_57361C.1.pep
YACRFRSGIPGSTHASDSEPERKRARADEATAGGSRSEDEDEDDEDYVPYVPLRQRRQLLXGPHPWCNGDMSPAVSGRGDLGSCSPTLGRGSEEDQGLVNLSSGQTCASVHTIPFPEKALPGAVPPHLLGPGLGSEGHCWDXLQKLLQRRRKGATEEEQQDSGSEPRGDEDDIPLGPQSNVSLLDQHQHLKEKAEGGPSRKERGRALAAVLLLL

SEQ ID NO: 322696 - protein, 84 aa, Zea mays
  Clone ID: MRT4577_57362C.1.pep
VRRRSCLVLPPVRDPYDTHTHRNSVELSDDEKKKKKKKKKKKRVVVSEDLSPCMCVRHATVSSQRYSNLTYRLLPHNACDRENF

SEQ ID NO: 322697 - protein, 87 aa, Zea mays
  unsure (1)..(87): unsure at all Xaa locations
  Clone ID: MRT4577_57363C.1.pep
RQVQRGGKKPRGGGXXXERHSFAMDLPLGMLXSLLLVLSVLSSSSSSAAYTLAVSSLFSLPVSSSCQCSRLPIQFSLNLTSIHFPGS

SEQ ID NO: 322698 - protein, 464 aa, Zea mays
  unsure (1)..(464): unsure at all Xaa locations
  Clone ID: MRT4577_57364C.1.pep
GVYILELMLPLQEXISMQQRAAAASLLGKLVGQPMHGPRVAITLARFLPDGLVSAIKDGPGEAVVSSLEQTTETPELVWTPAMAASLSAQLATMASDLYQEQMKGRVVDWDVPEQASGQHVMKDEPQVGGIYVRLFLKDPKFPLRNPKRFLEGLLDQYVSSVAATHHEAIATDPELPLLLSAALVSLLRVHPALADHVGYLGYVPKLVAAMAYEGRRETMASGQATSASKAEPSEHDNSAHSEATVQTPQERVRLSCLRVLHQLASSTTCAEAMAATSAGTPQVVPLLMKAIGWQGGSILALETLKRVVGAGNRARDALVAQGLKVGLVEVLLGILDWRVGGRQGLCNQMKWNESEASIGRVLAVEVLHAFATEGAHCARVREVLNSSDVWSAYKDQKHDLFLPSNAQSSAAGIAGLIESSSSRLTYALTAPPPQPSLVRLPSSSPSPPSAPANPSGRHSYQRL

SEQ ID NO: 322699 - protein, 98 aa, Zea mays
  Clone ID: MRT4577_57365C.1.pep
DSIGVDTKYNEMSFLDNLFDDSMRIASENSPKGEAGQLTVQHVNKRKSTSKDESKFGPVSIAKPKLKRSSGSENSTAKPESAKKVKADIASSIGSLSE

SEQ ID NO: 322700 - protein, 85 aa, Zea mays
  unsure (1)..(85): unsure at all Xaa locations
  Clone ID: MRT4577_57366C.1.pep
DPRLVEPTSWRPPSRGGLVACNRSISAFVASVRENFKXDRILFIPFXGTFSRQDSNILTSGSTQMSLVLMSLLLLLPAAEAVQCR

SEQ ID NO: 322701 - protein, 31 aa, Zea mays
  Clone ID: MRT4577_57367C.1.pep
KKKKKKKKKKKKKKKKKKKKKKKKKKKKGQL

SEQ ID NO: 322702 - protein, 154 aa, Zea mays
  Clone ID: MRT4577_57368C.1.pep
MSVQEYLEKHLLSRKIEEAVNAAVRAKAPDPVLFIAGHMRRAAPAVITRVRARQILDGHGAPAVEVELHTNKAIHRASAAGSGALEGAAADAAGAAERRKILAKVVADSVRMINDKVSEALVGMDPQEQAQIDQAIMDLNKARHKAEPWIWSKC

SEQ ID NO: 322703 - protein, 57 aa, Zea mays
  Clone ID: MRT4577_57369C.1.pep
HVEVDYHFVRERVAANQLDVRPISSKDQLADIMTKPLSGSAFNMFRHNLHLVSHRPD

SEQ ID NO: 322704 - protein, 85 aa, Zea mays
  Clone ID: MRT4577_5736C.1.pep
GKRRSGIGDVVAVLTGHLAERAVVALLVATGGAGGADDNHASTLAAVLVGRHSGDVVGFGFWCCCFSCGVSWKDCLDVEAGDPGR

SEQ ID NO: 322705 - protein, 84 aa, Zea mays
  Clone ID: MRT4577_57370C.1.pep
LGPMASCMSPPCPVSFIVWLGALCLYTLARLEVARIWVEHGPVAPWPRCTLGLVVVMLTEQVFIKKNKGDITACVLVFVQNLAY

SEQ ID NO: 322706 - protein, 119 aa, Zea mays
  unsure (1)..(119): unsure at all Xaa locations
  Clone ID: MRT4577_57371C.1.pep
TGPNFRAGPHAPTQLSEPHEYYLQTRRPGGQARXLSNRDIAVTNREGFHAXLFRITSXLATFTRYISLRVIADLKHAYLFHSANIVSSIEGHRDYELFPTARVLKRGKACGCYTEGCVP

SEQ ID NO: 322707 - protein, 87 aa, Zea mays
  Clone ID: MRT4577_57372C.1.pep
AGSWQRGGEQLLETMIRSRRHSHHDGRQRQRHAPRQILQSSPGLDSLGGLHSASYPVRRITETRGSRWARFGEKLKNVRGRLVRTSA

SEQ ID NO: 322708 - protein, 47 aa, Zea mays
  Clone ID: MRT4577_57373C.1.pep
FPVSTHSSSHSSYKLLCSKKKKKKKKKKKRRIKYKNSQSYIHLHTTS

SEQ ID NO: 322709 - protein, 183 aa, Zea mays
  unsure (1)..(183): unsure at all Xaa locations
  Clone ID: MRT4577_57374C.1.pep
MTRTMVTTTRNPNTAASAAMCIDLVDRGRNKKTERTAAKSDDVYLKILVKLYRFLVRRTKSNFNAVILKRLFMSTTNRPPISMGSLVMFMERTEKNIRVXIVGTATDDKRIQEVXPPMNVHCXLRFTXTEMTRIVDAGXHXLTFDQLALRAPLXENTVLLRRLTNAREVASDFDQCPGVTHCH

SEQ ID NO: 322710 - protein, 55 aa, Zea mays
  Clone ID: MRT4577_57375C.1.pep
PRLRHHTSLHNFIYNLRQFFSVPATMNEYLTAYIFKTNNIILYVKLVFISYDFHL

SEQ ID NO: 322711 - protein, 44 aa, Zea mays
  Clone ID: MRT4577_57376C.1.pep
VRPRAASRKLMVQATAYSRFNLSVHQVIPRRRLRVIEVSMPRFL

SEQ ID NO: 322712 - protein, 69 aa, Zea mays
  Clone ID: MRT4577_57377C.1.pep
VWSNGKLKKVRGMARPTSAPPMAAQHGETDRLSLTVLITLPLDNIVSPLVPLSMRPEKPRGEATVPERH

SEQ ID NO: 322713 - protein, 90 aa, Zea mays
  Clone ID: MRT4577_57378C.1.pep
RVDWHQTTARHTHLHMVQEYPSASCLCSHKCVYSNATCSSQYTVSTSLNGLDTLAAMVHSNAGVYTPIQCNTIWNLTSTMTTAQHSTHCH

SEQ ID NO: 322714 - protein, 42 aa, Zea mays
  Clone ID: MRT4577_57379C.1.pep
DIQGPFRSSCSWADHVLLCQRHVKVLLNLQCAIARILKWDVL

SEQ ID NO: 322715 - protein, 255 aa, Zea mays
  Clone ID: MRT4577_5737C.1.pep
MTRTNDASGGGKLPRKRFYRARAHSNPLSDSHFPVPISPEEVDLSQHYPRYFPADKGSDGEEAAAPQQIRFADVGCGFGGLLVGLSPLFPDTLMIGMELRDKVTEYVKERILALRAANPGQYDNISVVRTNSMKYIPNYFRKAQLTKMFFLFPDPHFKEKNHRRRVISMQLLDEYAYVMEVGGIIYTITDVEELGEWMRSCLEKHPLFETVPEEEIKADPVFKLLSTATEESQKVARNGGQTFYAIFRRISLQEE

SEQ ID NO: 322716 - protein, 72 aa, Zea mays
  Clone ID: MRT4577_57380C.1.pep
NSVLRILKARRGRTGTERCGVLFWPMDLYLRLNRFQGWRPVKQKRYLFLRPPLAYLDFLKSPSAAMSRLGKS

SEQ ID NO: 322717 - protein, 291 aa, Zea mays
  unsure (1)..(291): unsure at all Xaa locations
  Clone ID: MRT4577_57381C.1.pep
QSLFNSTPDLSEIYLGSNXLTGXAIPDSVSSLLKLEVLAIEKNLLSGSMPPSLFNSSQLQALYVGRNNLSGPIPGNGSFHLPLLQMLSLQENHFSGPIPVGLSACKNLDSLYVAANSFTGPVPSWLATLPNITAIALSMNNLTGMIPVELSNNTMLVVLDLSENNLQGGIPPELGQLTNLQFLGLANNQLTGAIPESIGNLSDLTQMDVSRSRLTGSVPMSFRNLLNLGRFFVDGNRLSGNLDFLAALSNCRSLTTIVISNNEFTGMLPTSIGNHSTLLEITKPGRPRGTQ

SEQ ID NO: 322718 - protein, 63 aa, Zea mays
  Clone ID: MRT4577_57382C.1.pep
LTPTLLWQCINRCYLKPTLSSELERINKMRVGLHQPSPSLLGGDSASVGLFGRSIEDMLNQKT

SEQ ID NO: 322719 - protein, 324 aa, Zea mays
  Clone ID: MRT4577_57383C.1.pep
MAENPAPSSPLVTSPDAAAPPLPAEFTKLTFRSLYIRRTGPGSREMTVDGRPSDQLGRRFVSDFPIYDGRGSGARLVARLQGVTVQIGSSHQLVSIVFEAERLKGSTLLTNGVITDGSDEWAIYGGTGVFAMATGVIRRRFLAGSNDGNSDELTSIEVFCPAFGSAQQQPNKQDSVSVTRIGVWGGGGGSAQDIPTTEPPQRLHSITVRTGFAVDSIEFTYTDRGGQRRTAGRWGGLGGNLRTIDLGDAEVVREVSGTYGMFEGATTLTSIRILTSSRTWGPWGIEDGTRFCITAPIGSSIVGFYGRSTSRLVAAIGVYLRQQL

SEQ ID NO: 322720 - protein, 53 aa, Zea mays
  Clone ID: MRT4577_57384C.1.pep
RALILMRLHSTIDPHILLQLFKLTYTSIALSLNYNSPSSDLLYIMICALTYYS

SEQ ID NO: 322721 - protein, 493 aa, Zea mays
  unsure (1)..(493): unsure at all Xaa locations
  Clone ID: MRT4577_57385C.1.pep
RPHELHGTLPDELYDATSLEHISFPNNRLQGALSAERLAELRSLVVLDLAENELTGGIPDSIGRLERLEELRLEHNSMSGELPPGLSRCSSLRTVILRSNGFHGDLNSVDFSTLPRLKVLDFMDNNFTGTVPESLYSCSDLIALRLSSNGFHGQLSPGIGRLKSLRFLSLTNNSFTNVTNALQVLKSASSLTTLLIGDNFRGEXMPEDETIDGYRSLQVLSLADCSLSGEIPRWGVXLENLRELFLSSNRLSGPIPAWVSGLSLLFVLDVSNNSLAGEIPTALADLPMLRSETTVDXRRRRWVFEPVXFPLPVYMAASLQYHRANYCPKLLNLGDNRLTGAVPPEIGRLKGLTQLNLSFNSLRGEVPQAVGNLTNLEVLDLSSNRLTGEIPRALESLHFLSYFNVSNNDLDGPVPAGGQFCTFPXXSFAGNPGMCGPMLVRRCSAASVEAGRRAPVRDAGLCGGDVVVFAVTFGVFVGVGVLYDQMVRSRYFG

SEQ ID NO: 322722 - protein, 73 aa, Zea mays
  Clone ID: MRT4577_57386C.1.pep
GRAGKIEYSMQLNASRIKVLQAQDDLVNKMKDDAMKELLLVSHNHHEYKNLLKDLIIQLWRYCIGFSRWKDCV

SEQ ID NO: 322723 - protein, 200 aa, Zea mays
  Clone ID: MRT4577_57387C.1.pep
GRVGVRVGKKPEETAVLKVLRDGKEQELGVTLRPLQPLVPVHQFDKLPSYYIFAGFVFIPLTQPYLHEFGEDWYNASPRRLCERALRELPKKTGEQLVILSQVLMDDINVGYERLAELQVKKVNGVEVENLKHLCSLVEGCTEENLRFDLDDERVIVLKYQNARLATSRVLKRHRIPSAISSDLVEDQVTDGEVETSCTS

SEQ ID NO: 322724 - protein, 293 aa, Zea mays
  Clone ID: MRT4577_57388C.1.pep
MKTRRGACHAAAAATAPGEGPEAQRRKRRRTAAAEGSPAAAGTPGVRPVGRDMFEELPDDLVVSILRDVAASASSPADLAGAMLTCKRFRELGQSKVVLARASPRCLAVRAKAWSEEAHRFLQRCADAGSLEACYLLGMIRFYCLGIRGSGAALMAAAAVGGHREALYSLAVVQFNGSGGGKDDRDLRAGAALCARAASLGHVGALRELGHCLQDGYGVRRSVLDGRRLLIQANARELAAVAAASPLQPPPQPLGKAAPHPTRRHSCLLSDFGCRAAAGEPHAANRFLADWFA

SEQ ID NO: 322725 - protein, 79 aa, Zea mays
  Clone ID: MRT4577_57389C.1.pep
LRRGEWPCPHLAHAASRYQDSIVLSASAGYWSHKLSCQGNSESEDSPHHVCIPNAACIERSSSNSDIFPRQSRSHATVV

SEQ ID NO: 322726 - protein, 132 aa, Zea mays
  Clone ID: MRT4577_5738C.1.pep
CPPSPRPQISRTPTISCTPTREPSPSYARAEPSPTDPRISYPSAPDLLLPSPEIAVINGSAEDPPDRALLPSAPDPSAPPSVLAVRDAATCSATASARCPLPHENPNGVPPPSPLSPDYTSLHRCFLFHRHQ

SEQ ID NO: 322727 - protein, 45 aa, Zea mays
  Clone ID: MRT4577_57390C.1.pep
LGLTCHGLDMHAFCDLYDYSNKPIIHLKPKPPNLASPELLYHPPS

SEQ ID NO: 322728 - protein, 72 aa, Zea mays
  Clone ID: MRT4577_57391C.1.pep
FNVDRSDLILTHRNIPSVAVHGWTEIAVLLEFSFRAGDWTAPLAVWKPCSDSVDFTSICHSSDSFEGSWCLW

SEQ ID NO: 322729 - protein, 99 aa, Zea mays
  Clone ID: MRT4577_57392C.1.pep
GPSKNASTRVSAIFPLPNKFAHHNVVVFRRGEAWSPGSAILGDVRRVTVSSICPEHFEFGYPQVDDPCARLQSAGWNRHAVLDHVWHRLVPVVGWHIPG

SEQ ID NO: 322730 - protein, 80 aa, Zea mays
  Clone ID: MRT4577_57393C.1.pep
NLSQPLWHFPWGKNLGGYLAPVTQNSERPLHPVFVKVIGLCFLSTNNYVNDPRLGLTKLYRSPTCIVCPSILQYPKLFGA

SEQ ID NO: 322731 - protein, 68 aa, Zea mays
  Clone ID: MRT4577_57394C.1.pep
MESVEGDSKSASTVRLLKYTEAVPMLTFAKEKLETADDENKVASYSAVDGIAGGFLQELQDHAEGDSC

SEQ ID NO: 322732 - protein, 139 aa, Zea mays
  Clone ID: MRT4577_57395C.1.pep
TCQAGLAGVNDLVARMACLSRAQAPAAATAVFNSVPVGGAAGRAEPAARPSASVAPLGRSAARLVLSRRSRSITCACCVARFWWLCSCNFRAIYGQRDQLEPTPSHQPKNEGPPTATNPSCWAPTIALRAFFFLTRGSA

SEQ ID NO: 322733 - protein, 100 aa, Zea mays
  unsure (1)..(100): unsure at all Xaa locations
  Clone ID: MRT4577_57396C.1.pep
NPQIIATVPGAKLGPTITKQLLIQQKQRAAIKAQGRKKPPFQGAKNTRVPSNTGPGGLEEKERLFYLRGRSSPGGPATCPRGQSRGPQIGSCPGPXPGKR

SEQ ID NO: 322734 - protein, 100 aa, Zea mays
  Clone ID: MRT4577_57397C.1.pep
HHNYLPVPCAQVSLCVECSLISSLVRVHASDVAYTLSVAHTVYSRNMMCQDMRRCEMPLAGVDLAVRQQSASKQDRPATAFIVRRGPGQLPISGTIQQAE

SEQ ID NO: 322735 - protein, 67 aa, Zea mays
  Clone ID: MRT4577_57398C.1.pep
DALSKTKPVVFPKVSTVMCTLIPVFYASFNFLTAIMNYYMDDIITPCALLLTLQAPCKHLQNAWTHA

SEQ ID NO: 322736 - protein, 97 aa, Zea mays
  Clone ID: MRT4577_57399C.1.pep
GATLGAPARLKGRAGGFPFPPVPVPVKRGASPWGWASTFRARSKRKPLFCFFPPRPLFLVLARLTPAARVGIFFPPPPWWVSLFCPMGGALHLQAWP

SEQ ID NO: 322737 - protein, 188 aa, Zea mays
  Clone ID: MRT4577_5739C.1.pep
MQVVVGKLPRKRFYRARAHSNPLSDSHFPVPISPEEVDLSQHYPRYFPADKGSDGEEAAAPQQIRFADVGCGFGGLLVGLSPLFPDTLMIGMELRDKVTEYVKERILALRAANPGQYDNISVVRTNSMKYIPNYFRKAQLTKMFFLSPDPHFKEKDHRRRVISMQLLDEYAYVMEVGGIIYTITDVEE

SEQ ID NO: 322738 - protein, 54 aa, Zea mays
  Clone ID: MRT4577_573C.1.pep
AVTLHTIKDALSYSKKLTPPREDPCRTAYMASKLLSDSVVEPYLYNSQCREDYS

SEQ ID NO: 322739 - protein, 45 aa, Zea mays
  Clone ID: MRT4577_57401C.1.pep
QDTPCNGPLNAACIEVTRNVTATLSNTLTTAPFSSLPSFFATFVG

SEQ ID NO: 322740 - protein, 163 aa, Zea mays
  Clone ID: MRT4577_57402C.1.pep
PEFGSSLKFEHQSSKGCNFGAPYEWQVYNTLSGNHGVPRVHYKGKQGEFYIMVMDILGPSLWDVWNNNSHSMSVEMVACIGIEAISILEKMHSKGYVHGDVKPENFLLGPPGTPEEKKLFLVDLGLATKWKDACTGHHVEYDQRPDIYRGTARYASVHCPLGK

SEQ ID NO: 322741 - protein, 400 aa, Zea mays
  unsure (1)..(400): unsure at all Xaa locations
  Clone ID: MRT4577_57403C.1.pep
MEMAGAAEADTPSQEPVRTGRSNTILLPIGGILLAYLLYRFLRPRLRGLRLDLPAWLRCRRAPTGGGAVLPYFAPIADRLGAVALPYLGAFAGPQAALLRFPGGEALSVAAILEAPGEVVAKSAHSTLYRAAVRSGEAAVLLRFVRPACADEAFAAAAARRIGAVRHPNLVPLRAVYVGPRGEKLLVYPFYAAGSLQRFLQEGIAESQRWSIVCKLSVGIARGLDHLHTGLDKPMVHGNLKTSNVLLDGSYDECRVSDYGLHLLLSPAAAQEALEAAAAQGYGAPELAKARDATRESDVYSLGVVLLELLATAPAGGDGVXRHPPPPCLLLXSSFKNLVLERKISDAFGSSGLARQCRSGAGKERSLGAFFELATACCSPSPSLRPSARQVLQRLQEIAR

SEQ ID NO: 322742 - protein, 149 aa, Zea mays
  Clone ID: MRT4577_57404C.1.pep
VLLDGSYDECRVSDYGLHLLLSPAAAQEALEAAAAQGYVAPELAKARDATRESDVYSLGVVLLELLAPAGGDGILLLPASSSSFKNLVLERKISDAFGSSGLARQCRSGAGKERSLGAFFELATACCSPSPSLRPCARQILQRLQEIAR

SEQ ID NO: 322743 - protein, 100 aa, Zea mays
  Clone ID: MRT4577_57405C.1.pep
SGASGGKCVAMDYTDPTADPLIDSADLLSCALHRAAIADVIATLLFLNMTGATGIGYKHETDSSTSGSYTSCCTVRALGISWAFTSMIFVLAYCTCGLCG

SEQ ID NO: 322744 - protein, 92 aa, Zea mays
  Clone ID: MRT4577_57406C.1.pep
CSCSYIYLYSILLTCLQMRIQHWRYITDHYSYRCADTPNHMAIKRLVCSGRVPHSDACMACWLLESSALCEVEEDGRRRRFPPPPRHARPRP

SEQ ID NO: 322745 - protein, 44 aa, Zea mays
  Clone ID: MRT4577_57407C.1.pep
TMYFAYFLGPPLFISQNPSLLCFSYILYKIGSLIGFLLVVRCGV

SEQ ID NO: 322746 - protein, 102 aa, Zea mays
  Clone ID: MRT4577_57408C.1.pep
MVGIGALAVLVPGLLLGFLGGGFFPAGTTTDFFQAFGIVFAALGYLNYISEKWPEVPKKEVTTVVGGVFGLLALWNLMVLFWGYEIGFMIFFNFHLKAGFVL

SEQ ID NO: 322747 - protein, 74 aa, Zea mays
  unsure (1)..(74): unsure at all Xaa locations
  Clone ID: MRT4577_57409C.1.pep
SACISCSGIKSCASGFSDDEAGHGADSVNPCFPYVSVNGWMLLWCVLELGSDRGDGLTGTTGAARTRGSTLXGG

SEQ ID NO: 322748 - protein, 148 aa, Zea mays
  unsure (1)..(148): unsure at all Xaa locations
  Clone ID: MRT4577_5740C.1.pep
LGTSRPAGSFDISGXVTGFGNPFWARSRGRMSXGATFPVVLAALAAGAISIGKTVMDEIXYSVNGENTHYGTPTNPCAPDRVPGGSSSGSAVAVAAKLVDFALGXTGGSVRVPAAYCGIFGLRPFHGLVSTENVMPMSQMFDTVGALV

SEQ ID NO: 322749 - protein, 88 aa, Zea mays
  unsure (1)..(88): unsure at all Xaa locations
  Clone ID: MRT4577_57410C.1.pep
ARLRKRWKTYLERYSLQREANHVIXGSTAIQDWLASRVAIELMKEGAMHTVLNGIIXAFAVPTTLISTAVFINSKXGVTIDSANKVGK

SEQ ID NO: 322750 - protein, 43 aa, Zea mays
  Clone ID: MRT4577_57411C.1.pep
LCVRPRVGALVEPFKVTKTTVSTQSMSVCPIVRSTRISCHTLT

SEQ ID NO: 322751 - protein, 54 aa, Zea mays
  Clone ID: MRT4577_57412C.1.pep
IKVCIQDSSSIHQILDFKTRAKISCICYLCRGTSNVQRAGKNNILLQSCNSWTF

SEQ ID NO: 322752 - protein, 102 aa, Zea mays
  Clone ID: MRT4577_57413C.1.pep
HGQEISSTIHTRNTGASCESDELKEQNSKNTDASLDKSVAKMHELLKFPYPSGKVEMSTIRPEKRRHKLRLHHPAYLPFLGFLWSACFKKKICKVRGLIKRV

SEQ ID NO: 322753 - protein, 161 aa, Zea mays
  unsure (1)..(161): unsure at all Xaa locations
  Clone ID: MRT4577_57414C.1.pep
LHGRRVRRTSSALAERALEAENTHDMTIGVEIPRDXFTTKCGKIRVYCCDTAGEENFGDLTDGYYIHGQCAIILLDVTSRLTYHNVPTCHRXDLGRVCENIPIVLCCNKVDVKNRQVKANQVTFHRKNNLQYYEISAKSNYNFEKSFLYLARKLGGDPHLH

SEQ ID NO: 322754 - protein, 784 aa, Zea mays
  Clone ID: MRT4577_57415C.1.pep
MHYQHAGSRSRMPPFARGGGAYSRGQKQFYPPPPPPLPAAALPLLPQNKHEVLMEAGRLAAEYLVAKGVLPPGSLQQRGSTVVAGGWGQLPPPPPPPLSVTQEAPAYHIARNSRRQIDDERGIRNARSRRNRGGDYSSSNGSNYNGRGKRKFGADNKYSDWTKDRGRNRRYSDIRSYDDEDDDGAPPGFKRERRSSGGIDEVGSSMSGVAWEGPSSKVEAMGESELEDTGSKASSNSNIQQKASALQEVEDENEANKMQENSVVSNSDVAEQALNGEDNSNNDSSAGVEEAGTKHLPVSSGEKVSDGRLEHSGVLNDKVEDDSTLHEKSEDDTMSEEVSVMESNLPNDARNLLNYCSFARVPTRPRTVLANRNVGPGQREITVSEQLNLVTSEEISNMAMDGEANTNSITSIEEGSKVELVGQDQEHAEQSAICNQVAESVAFHEKETRGETEEKEEQKNIPQHYEVEDNKETNELCPTFASSQNNQSAICNQVAESVASHEKETQGETEEMEEQKNIPQHYEVEDNNETNELSPTFASQNNFNLQVEKGIQIYNLDTPPQDELLIDPPDKGKTVDSELLPNIKAEDAVTVEEEKIGQSSSFKIRDLNLVGSPEVVDMRGDPRLGQSSTAGCPVDLQDNQQVEFETALGNNPNNTDTCAPFLLGNKSVQVIDIEDDIPIEAGACDTSKSKGEMVYSSMESMMNPPPVNTDALHGIQDGYSLAISDYLGADMSCYQSIQAELQDGMDLNGSEGITVMDDPIYSSLSDIGFMEVWDQQPQDYEKFF

SEQ ID NO: 322755 - protein, 91 aa, Zea mays
  Clone ID: MRT4577_57416C.1.pep
TGQPDGPRSQKLQRSNPNGLVTWLAHRTCPVCTGLSGVHRTVRCTIRPSASTKTLRWWRLTVVWCTGQSGAHRTVRCTPDMSCAPATSPGR

SEQ ID NO: 322756 - protein, 101 aa, Zea mays
  Clone ID: MRT4577_57417C.1.pep
PGPWWTPRSPIPPSFDFYLSTHAGIPGTSRPAPKHGGGYKGFGPGFRILTIALSPCNGALPSKTERGRAGFPSRCFSPPPPPRRGTPPGFPPRGFPTAFPF

SEQ ID NO: 322757 - protein, 340 aa, Zea mays
  Clone ID: MRT4577_57418C.1.pep
MTVGDDAAAPGRGQTVCVTGAGGYVGSWIVKLLLERGYAVRGTVRNPDDAKNAHLLALPGAAERLALCKADLLDYGALRAAVAGCHGVFHAASPVTDDPEEMVEPAVRGTRYVIDAAAESGTVRRVVLTSSIGAVAMDPRREPDAVVDESCWSDLDFCKKTKNWYCYGKAAAERAAWEAAAARGVDLVVVVPVLVQGPALQPSVNASLMHVLKYLNGSAKTYANAVQAYVHVRDAADAHVRVFEAPRAAGRYICADAVLHREDVVRTLRKSFPGYPVPERCSDEVNPRKQPYKISNQRLRELGLEFTPAAQALYDTVVCFQEKGILPLPVPAPTPASPDA

SEQ ID NO: 322758 - protein, 53 aa, Zea mays
  Clone ID: MRT4577_57419C.1.pep
PLARTCTQASDSDLAWSAGVYELTMSFAVRLLLTSDTYIHGYPQIESVTRSRT

SEQ ID NO: 322759 - protein, 46 aa, Zea mays
  unsure (1)..(46): unsure at all Xaa locations
  Clone ID: MRT4577_5741C.1.pep
RFELYNSGILTGTCGTELDHGDTXVGYGTENGQDYWIPKNSWGISW

SEQ ID NO: 322760 - protein, 80 aa, Zea mays
  Clone ID: MRT4577_57420C.1.pep
ILKVVGLFGLLAINSIIFDNATCNFNIWKRRNRSLAWCVEAKQSRRDPLTLWRDTTLVSSSVIILYICNFLHFYRYTINK

SEQ ID NO: 322761 - protein, 41 aa, Zea mays
  Clone ID: MRT4577_57421C.1.pep
PYLPTLSCRVGAPNKPGSALNASITLKRQCVYKESASAVYP

SEQ ID NO: 322762 - protein, 368 aa, Zea mays
  unsure (1)..(368): unsure at all Xaa locations
  Clone ID: MRT4577_57422C.1.pep
MTVGDDAAAPGRGQTVCVTGAGGYVGSWIVKLLLERGYAVRGTVRNPGNVVVDLSSGAPVVIVVAADRPLGGRWXDDAKNAHLLALPGAAERLALCKADLLDYGALRAAVAGCHGVFHAASPVTDDPEEMVEPAVRGTRYVIDAAAEAGTVRRVVLTSSIGAVAMDPRREPDAVVDESCWSDLDFCKKTKNWYCYGKAVAERAAWEAAAARGVDLVVVVPVLVQGPALQPSVNASLMHVLKYLNGSAKTYANAVQAYVHVRDAADAHVRVFEAPRAAGRYICADAVLHREDVVRTLRKSFPGYPVPERCSDEVNPRKQPYKISNQRLRELGLEFTPAAQALYDTVVCFQEKGILPLPVPAPTPASPDA

SEQ ID NO: 322763 - protein, 172 aa, Zea mays
  unsure (1)..(172): unsure at all Xaa locations
  Clone ID: MRT4577_57423C.1.pep
MLRRRPCSPHCCHAPIALLTPPCLSPSASPVXQNGVWHWDPIQQALTAGILPLSPLLLQQTLALLHLLPLMHLLPQNITAQQLQQLALANLAAYXSDXQHLLAFNQLAALNSASYLQQRQLPFTQLPAVYPQQSRPPNQLAALNSPAYLQLPHLLPFDQLAAVSPVTFVIQP

SEQ ID NO: 322764 - protein, 40 aa, Zea mays
  Clone ID: MRT4577_57424C.1.pep
MVRRYPRPRELCACPQCGEVFTKADTLEHHQAINHAGLQF

SEQ ID NO: 322765 - protein, 60 aa, Zea mays
  Clone ID: MRT4577_57425C.1.pep
PRLFIGGLFSWVSAYKWSVQDPLILRSLIARHPALAMMVPLDSAGMMALLDSRAPVILVY

SEQ ID NO: 322766 - protein, 112 aa, Zea mays
  Clone ID: MRT4577_57426C.1.pep
GVEYSRAFKDPAVVLVLFEICYWILNHMKVGFGLVLSFKQKFQNGLVLFLVTDGTTRTGTGNGMEDFLPVFAGYHFFTRMILYPSCLHAYSLLRLGIEKNKPRGTDLRCGFA

SEQ ID NO: 322767 - protein, 112 aa, Zea mays
  unsure (1)..(112): unsure at all Xaa locations
  Clone ID: MRT4577_57427C.1.pep
PIDTSRVVLVALAILALSGSATXSTHSSGGCXGCQPPTPVHLPPPEHLPPSVHLPPSVHLPPPVHLSPPVHLPTAVHVPPPVHLTAAPXCHYPTQTARAXPYSPAHPCPCQQ

SEQ ID NO: 322768 - protein, 93 aa, Zea mays
  unsure (1)..(93): unsure at all Xaa locations
  Clone ID: MRT4577_57428C.1.pep
QELGXPQILPXYTPXAPTSAAQAPMAPTWRHHLLSCIQQALAIIRAYQQPQRSHYIILSLTLLSMVYPDVYLRHIHLRECRPIAGDNASTYLR

SEQ ID NO: 322769 - protein, 75 aa, Zea mays
  Clone ID: MRT4577_57429C.1.pep
QSCQEGKLFFGGRRNILCLYHHIVHLRMSERLLSYNCSMQIIQFPASADPKERHHVVCVILWRSRSYMLQKWSKW

SEQ ID NO: 322770 - protein, 199 aa, Zea mays
  Clone ID: MRT4577_5742C.1.pep
RAGATGWSLRRLAAAVALLLLLVAAAPASGQVATSCTASLISTFTPCLNFVTGSTNGGGSPTKQCCGVLAEMVRTGADCACLILTGNVPFSLPINRTLAVSLPKLCSSTSVPLQCRDTATQIPAPGPIAFAPALPPLPPIPPESSDPPADPTAIPPAVDSPPFSQRPVVVPSSAVRRSHVSVAAVAAVLPIVAAASIFV

SEQ ID NO: 322771 - protein, 395 aa, Zea mays
  unsure (1)..(395): unsure at all Xaa locations
  Clone ID: MRT4577_57430C.1.pep
MSGTGCLPTDGPALSRVCRDGAAAARLKTGSLLAILVASAVGICLPVALTRAFRGSPNYARGLLLVKCYAAGVILSTSLVHVLPDAHAALADCAVASRRPWRDFPFAGLFTLVGALLALLVDLSASSHLEAHAHVGAHHETPYAPIPKKVXVRARRRNEPQEARFLGRRPRRGPRAARRHQRRRPGPRRRGALRTQEGRXSDEVPAITAGCHAVAHEVVEVGEGPGEDEEEARRKQKMVSKVLEIGIVFHSVIIGVTMGMSQDVCAIRPLVVALSFHQVFEGMGLGGCIAQAGFGMATVGYMCIMFSVTTPLGILLGMLVFHMTGYDDSNPNALIMEGILGSLSAGILIYMALVDLVSLDFFHNKMMSASLKLKKACYIALVLGSASMSVLALWA

SEQ ID NO: 322772 - protein, 41 aa, Zea mays
  Clone ID: MRT4577_57431C.1.pep
SPTLPKASIHHLVMLDYALRRPTGRLAWRAIDLNSSELAAT

SEQ ID NO: 322773 - protein, 126 aa, Zea mays
  Clone ID: MRT4577_57432C.1.pep
AAYHGKTRSHMAFENTSTNVAAAQMRNALTNLAETVEDPKEKKLFETEMDNFFALFRRYLNDKAKGNAVDWDRIAPPAQGQVVDYEDLANTESVQFLSKLAVLKLNGGLGTSMGCVGPKSVIEVRD

SEQ ID NO: 322774 - protein, 87 aa, Zea mays
  unsure (1)..(87): unsure at all Xaa locations
  Clone ID: MRT4577_57433C.1.pep
LRKKKXKKKKKLKKKKKKKKKKKKKXKKKKKIKTPKNKKKKDPPGRHGLNIRVSPTPNLPGVTVIKFAHLGGVFNAAIWPNVVRYRS

SEQ ID NO: 322775 - protein, 171 aa, Zea mays
  Clone ID: MRT4577_57434C.1.pep
MMEAAEFRPWSDLPPELLGLVLKRLPSLADRVRLRAVCHPWRSNSMLQPLPLPFPWLTLPDGTFLSIPNGEIHRISLPEDACCQGSIGNWLFLTHNDDVCYLMNPFSKTRLELPKLAKIWKRGILDLDSRFSPIFYKLVVPFPLDSLPWSLAALIMDDSNCGTLCISEPPV

SEQ ID NO: 322776 - protein, 93 aa, Zea mays
  Clone ID: MRT4577_57435C.1.pep
CMRDDETTAVDSLSPLPSPRWTCFVDADDDDDTYTLPIIHGDDASSAVSSRRLQLVAPPLELLAETSASCAWSSSSSSSEIAGGHVVAASDNT

SEQ ID NO: 322777 - protein, 79 aa, Zea mays
  unsure (1)..(79): unsure at all Xaa locations
  Clone ID: MRT4577_57436C.1.pep
MYLLTLSIPLNIIFLXPKYLPFPFNILFLNXXLXXIFIFNLFXFFILFSLFFFLFFFFFFFFFFFFFFFFFFFFFFFLF

SEQ ID NO: 322778 - protein, 426 aa, Zea mays
  Clone ID: MRT4577_57437C.1.pep
MSSSMQSSYLPATTESVAKAQEAKDASESISILYRVLEDPSSSADALRVKELAITNLTNYLTKENRAEDLRNLLTQLRPFFALIPKAKTAKIVRGIIDAVAKVPGTSQLQISLCKEMVEWTRAEKRTFLRQRVEARLAALLLENQEYTEALTLLSGLIKENWELDDKLLSVDIDLLESKLHFSLRNLPKAKASLTAARTAANAIYVPPSQQGTIDLQSGILHAEEKDYKTAYSYFFEAFEAFSSLEDPKAIFSLKYMLLCKIMVNQADDVAGIISSKAGLKYLGPDVDAMKAVADAYSKRSLKYFETALRDYKAQLEEDPIVHRHLSSLYDTLLEQNLCRLIEPYSRVEIAHIAEMIELPMNHVEKKLSQMILDKKFAGTLDQGAGCLIIFEDSKTEEIFPATLETITNVGKVVDSLYMRSAKIMA

SEQ ID NO: 322779 - protein, 91 aa, Zea mays
  Clone ID: MRT4577_57438C.1.pep
NRERRSFCVTFFHKIFFHHNLVSYTKSKTQKDLFCQTIYKKKTPAPAKELRNQSRSRFKRSRRPAKRGLALISQIGQKQNPPHEHRLPLHN

SEQ ID NO: 322780 - protein, 140 aa, Zea mays
  Clone ID: MRT4577_57439C.1.pep
VAHARIVARRWLFKAWHFLKQSKGAEMATSMDGDECWQESSKGGLTFLEPRARKLEVRRADQPPKRGVENSRRTLTPGEQSARHRELEAVLHVDGGYQDQQHEGEEEGAIHDGEGTRRSELGHAGGDRPEHRSRNGSGDT

SEQ ID NO: 322781 - protein, 82 aa, Zea mays
  Clone ID: MRT4577_5743C.1.pep
GSPRVHGCPRQAQANHENVEEVTGLTPAPLKELLTVADKAKEGVGISPWAQLVVNSFLIGSWRHINGATIKGTVDVRAIQGI

SEQ ID NO: 322782 - protein, 114 aa, Zea mays
  Clone ID: MRT4577_57440C.1.pep
AVRTKGGGPGPSPQGIGVRAWRVFFRGGTWQFYPGFFFSVRPGYGGPPGGGGVCVERSPVRSYQFLSGGRVRSGLQITWAKKSLRRVVMVVGPGVSAPGAPSLPRLPPPLSCVG

SEQ ID NO: 322783 - protein, 230 aa, Zea mays
  unsure (1)..(230): unsure at all Xaa locations
  Clone ID: MRT4577_57441C.1.pep
MGRRGSSDRLEALSLEIERKLHKALMSNSQRLXILQQLFADIALKVDDRARDAIMSENDDGIAPADEREDGWLCFYEILANHFVRVPESGRRILELIVQLWSQSFAANIFALLFQKWLFEAPLDEKEISLRYSSALVQGATNVFWIDIQTNTRHFLSLYHYLXLEDVALVPERLSKISLQAXLQKLKIEPVLLHYLSRMSILXQGLELRLSTSTRLKGCLYSFTSPGGPT

SEQ ID NO: 322784 - protein, 84 aa, Zea mays
  Clone ID: MRT4577_57442C.1.pep
RTVIPLTLLNKVQYAYLIILYYSIMEKMPCISLSLSLSLYTVNCIRDTNHLNLAYTMQGTYNFSSTAHASKLILVEGCQGRVHG

SEQ ID NO: 322785 - protein, 62 aa, Zea mays
  Clone ID: MRT4577_57443C.1.pep
ALDPHRTRYKAKNGAAGRKAGGPRKKSVSRSLKARLQFPVGRIGRYLKKGRYAQRVGTGAPV

SEQ ID NO: 322786 - protein, 389 aa, Zea mays
  unsure (1)..(389): unsure at all Xaa locations
  Clone ID: MRT4577_57444C.1.pep
MGRRGSSDRLEALSLEIERKLHKALMSNSQRLQILQQLFADIALKVDDRARDAIMSENDDGIAPADEREDGWLCFYEILANHFVRVPESGRRILELIVQLWSQSFAANIFALLFQKWLFEAPLDEKEISLRYSSALVQGATNVFWIDIQTNTRHFLSLYHYLLEDVALVPERLSKISLQAGRDLFLLLSRFMFFYDQDHMLSSFLEHFPNFPNSFLVGGPADYFVIELADQLQKLKIEPVLLHYLSRMSILQGLELRLSTSTRLKACLYSFTSPGGPTYPTRAVRHAAWNTLDLLFPXFSLLFICNLVKGXTMPLSVGHWVVGWLQIGRYPRHVISLFFRLLYPWYWPSSCWNFVMTCAMTVYYYILNLLVSCWENMRRRPSHRRTHGE

SEQ ID NO: 322787 - protein, 170 aa, Zea mays
  unsure (1)..(170): unsure at all Xaa locations
  Clone ID: MRT4577_57445C.1.pep
GRRVLAIRPLLRPGGRLYYLYNLLCWFLFCKAACLCLRLNVFELGKQIKSCTSLVPKLKLRPKGGGGGPSFPICRGPAKCVVADATLDASDYWATFFVRVQLHSFVASNGKVFLCFLWHACPKMKTSFAFMGAFSXVGSFLRGDPGGVLEWFCVEAVAFSEILSDRRDVC

SEQ ID NO: 322788 - protein, 185 aa, Zea mays
  unsure (1)..(185): unsure at all Xaa locations
  Clone ID: MRT4577_57446C.1.pep
DSHRSSSVAAAASTFLGTRLADPAPXQNGRIVARFGFGLGGKAKPAPKEGGARHSTCCDRTLWLPGAXVLPDYLDGSLVGYYSSDPFGLGKPVXYLHIELDSVXQNWQHEACGIIGTRFESYKVKYTPLQTYTEVFGLQRLRECELMHXRWAMLATLDALSXEWLTCVPXHDACNVELLNCCSYL

SEQ ID NO: 322789 - protein, 81 aa, Zea mays
  Clone ID: MRT4577_57447C.1.pep
GGWCWCMGPHEANVVGTLAPSRVVRPLCETRTPTWETTWCAIGFVSYKQRVLANACRDSKPADGRHLEPAESLFRNQGGLF

SEQ ID NO: 322790 - protein, 135 aa, Zea mays
  Clone ID: MRT4577_57448C.1.pep
VSAVAVEAPELDLGRNAVDLSLLVKESSEKSQQGERVRQWHMAFPLAGKAKGGELVVKLAFQIMDDGGVGLYSQPPVAASGKTSSSSSSSLFARKHSKSSFSIPSPKVMRSEPALIPSMGAPSVDLLGIDDFKLD

SEQ ID NO: 322791 - protein, 39 aa, Zea mays
  Clone ID: MRT4577_57449C.1.pep
YATSFQLNFHTSLLYFFIIIHTALPSSKGNHLIVALVHD

SEQ ID NO: 322792 - protein, 90 aa, Zea mays
  Clone ID: MRT4577_5744C.1.pep
FTNDAQENVITMISQGLAYSSNIMVPGKSTKERRDRNVPMAHAPRSPMIRTHHPPPPCLMYRQHQGRPKLERGSEVNKRGSPRAYPHADP

SEQ ID NO: 322793 - protein, 120 aa, Zea mays
  Clone ID: MRT4577_57450C.1.pep
ISKPLSSSPTKTLNNCTSRTCHDSQIKERGQSQPPPDTKDGQIDWAHEKDPCWNEPPLLAQLNNSRSCKIGGQRNIAREPRSSKARQYFIVKNVFKRFAMIHHSPKKKERKNKVVLDPSN

SEQ ID NO: 322794 - protein, 136 aa, Zea mays
  Clone ID: MRT4577_57451C.1.pep
MALAGTSKVVLGCIAFGIFWVMAVFPTVPFMPVGRTAGSLLGAMLMVLFRVISPEDAYAAIDLPIIGLLFGTMVVSIFLERADMFKYLGNLLSWKSRGSKDLLFRVCIVSAFASALFTNDTCCVVLTEFILKVARQ

SEQ ID NO: 322795 - protein, 106 aa, Zea mays
  Clone ID: MRT4577_57452C.1.pep
SQFGQVTDAIVMQDRETGRSRGFGFVTFNSEGEAQAAIAGLNDQELDGRRLKVNLANARPSGGGSRGGYGGGYQQRSYGGGGGYNQGGYGQQQGGYQQGGYGGGGY

SEQ ID NO: 322796 - protein, 767 aa, Zea mays
  Clone ID: MRT4577_57453C.1.pep
MNGPSNFMPTPEQDVLDVKPLRTLAPMFPASLGVNTFNHSTTPPLIFVTPSGQFQGGFGDWNNSAAKSFFAFSSKDARGGKADTFSDQNTGTGKAATFGDQDAFGSQNVFASDHSTGTGKAATFGDQDAFGSQNVATGVQDAAKGQTATDWTDVSANANPNGPIDAIAISAYRSTQPNVISLDDDDDDDDEPYAANKTSASGRKIKRPSHLSGYNVSDALVSDSSNSMKVKRPKSSHGKAAADNEHALLPPSEDPREIVEAVLMTFEALRRRHLQLDEAQETNKRADLKASAILMSSNIRANPGKRIGVVPGVEIGDIFYFRMELCIIGLHAPSMAGIDYMTAKFGDEDDSVAICIVAAGGYDNNDDDTDVLVYSGSGGNSKNSEEKHDQKLERGNLALERSLSRKNVIRVVRGYKDPGCLTGKVYIYDGLYRIHESWKEKTKSGIFCFKYKLLREPGQPDGVAIWKMSQKWVQNPLTRGSVLNPDLSSGAENLPVCLVNDIDSDEVPHHFTYTTQVEHLKPLSSVKPLQGCRCLSVCLPGDANCCCAQRNGGSLPYSSSGLLVCRKTMVYECGESCRCSFNCRNRVTQKGVRIHFEVFKTGNRGWGLRSWDAIRAGSFICEYVGEVIDDANINLNDIEDDYIFQMSCPGERTLKWNFGPELIGEQSTNVSADSFETLPIKISAKRIGNISRFMNHSCAPNVFWQPVQFDHEDDHRPHIMFFALKHIPPMTELTYDYGDVGADPSGVRSPRAKNCLCESSNCRGFFI

SEQ ID NO: 322797 - protein, 58 aa, Zea mays
  Clone ID: MRT4577_57454C.1.pep
GCGRCGCQGIPSRERHPLSLRREECSLGERPGSCSKVVRASIVSIEADARMPNSGASG

SEQ ID NO: 322798 - protein, 44 aa, Zea mays
  Clone ID: MRT4577_57455C.1.pep
IMLVVHCHISCSLRLATPVLLPNVPRPSVLQIQGGFSPDCVRCQ

SEQ ID NO: 322799 - protein, 184 aa, Zea mays
  unsure (1)..(184): unsure at all Xaa locations
  Clone ID: MRT4577_57456C.1.pep
ARDEVPHHFTYTTQVEHLKPLSSVKPLQGCRCLSVCLPGDANCCCAQRNGGSLPYSSSGLLVCRKTMVYECGESCRCSFNCRNRVTQKGVRIHFEVFKTGNRGWGLRSWDAIRAGSFICEYVGEVIDDANINLNDIEDDYIFQMSCPGEXTLKWNFGPELIREQSTNVSADSFETLXIKISAKR

SEQ ID NO: 322800 - protein, 121 aa, Zea mays
  Clone ID: MRT4577_57457C.1.pep
QGERDPSPQQVAQVAHVGPPGGKPGGKFWFPGARHLGVGLGFFFPGGGGEDPPPGPGKGGKGYAPFFLGTKVKGEKPPVPRGLFFLFCLKPPPQGLFCFVLKPLYITRGKCRSLQGVVVPK

SEQ ID NO: 322801 - protein, 121 aa, Zea mays
  unsure (1)..(121): unsure at all Xaa locations
  Clone ID: MRT4577_57458C.1.pep
KKEQTTSTNSNHPKNQRAAXNPQAKRQQQKQQPKSRQAAANRATNRTQQQRRPNNQQNAANPATLKQQHQRAPQDQRARTAPAATDREHXKGGALKQTTKKGKAKKKGRTKKANQKEEGTH

SEQ ID NO: 322802 - protein, 63 aa, Zea mays
  Clone ID: MRT4577_57459C.1.pep
KCFFFLNKVPGGWVFNRFFWFPKNGSSWNCFFSSQPFKLTPSRNLEKKIGFSVQNSSLKKFRL

SEQ ID NO: 322803 - protein, 36 aa, Zea mays
  unsure (1)..(36): unsure at all Xaa locations
  Clone ID: MRT4577_5745C.1.pep
IKVXNKGTTTQVHYTVYILEASNKLKTTVGKEKANA

SEQ ID NO: 322804 - protein, 68 aa, Zea mays
  Clone ID: MRT4577_57460C.1.pep
WWVGTMDPLGSLIRSIHSGAQLLNAWIRSSTPCLSEMNPGARTLSRGILKVLRGIFSCTTLTSMTKVK

SEQ ID NO: 322805 - protein, 89 aa, Zea mays
  Clone ID: MRT4577_57461C.1.pep
MLRSIISGTYISCIYLRYWQRIPVTNHRGVLSDDSAFSTFPPEFVRPFIDPIASIFHRMLCGRYDASNDDGYCLENEPLPGSDSIDASR

SEQ ID NO: 322806 - protein, 43 aa, Zea mays
  Clone ID: MRT4577_57463C.1.pep
AISLDSAATFSDDSYRADHSRPVLTRSIMPSILKQAGALSVRR

SEQ ID NO: 322807 - protein, 47 aa, Zea mays
  Clone ID: MRT4577_57464C.1.pep
AVRLSFSMTPRCLMLEACLQLASGWMEMYPAKLGWLGPPQEILAVPA

SEQ ID NO: 322808 - protein, 82 aa, Zea mays
  Clone ID: MRT4577_57465C.1.pep
RYTALTRGLGVELLRLVAEAMGIRPDYFEGNIIAGDVGLNVNHYPGCPIPEKTLGLPSHCDRNLITLLLQGSVYGLVVVYRG

SEQ ID NO: 322809 - protein, 80 aa, Zea mays
  Clone ID: MRT4577_57466C.1.pep
WMPAAWRGVDRIAIASPPRRQSSCSLRRQTNIRRSPIISLLCAPAGPRRLASRHAFAVSVHIKPCRPILLQLPVSERNRG

SEQ ID NO: 322810 - protein, 133 aa, Zea mays
  Clone ID: MRT4577_57467C.1.pep
MAARRSSSSSTTAVPLLCASALLLFILLSSGVAPAAACGGHPCPIPDGKCPVNAVKLGVCADVLDGLIHAVVGGPPKKPCCSLISGLADLDAAVCVCLAINANVLGVNLDVAVDLSLLVNYCGRRVPAGFKCA

SEQ ID NO: 322811 - protein, 69 aa, Zea mays
  unsure (1)..(69): unsure at all Xaa locations
  Clone ID: MRT4577_57468C.1.pep
MVAFLCIFQIGGELTDFIIVLHDRKAVKAFSSRIHLSLGAGLSAAAXPIGRAFEAYVRASEKGSGICYT

SEQ ID NO: 322812 - protein, 118 aa, Zea mays
  unsure (1)..(118): unsure at all Xaa locations
  Clone ID: MRT4577_57469C.1.pep
ITSALQLIMVMLSWILTTYLGRRTIYVYGQLINCAFLVALGIAASVGGGKAASNAQASLGLIVSVLFCLGPAPASWVIIGETSSVRLRPLTTGIGRGAYYVVNIPCIXLASYMLNTDK

SEQ ID NO: 322813 - protein, 69 aa, Zea mays
  Clone ID: MRT4577_5746C.1.pep
HTVVLKHTNNTTKMQTCQDTEQCTRDGRSQILKRQAAMRYETERGQPSNEGAHKTFKEGGNPERGYGIN

SEQ ID NO: 322814 - protein, 117 aa, Zea mays
  unsure (1)..(117): unsure at all Xaa locations
  Clone ID: MRT4577_57470C.1.pep
MAGKGDGPAIGIDLGTTDSCDGGWQHDRVEIIANDQGXNRTTPWGGDFTDSERLMGDAAKNQAGMNPINTAFDAKRRIGRRVSDAAXQKDIKLRPYQXLSGPGEKAMIAGQHTGEEK

SEQ ID NO: 322815 - protein, 60 aa, Zea mays
  Clone ID: MRT4577_57471C.1.pep
VHRTGLVTEEDLGLETRLKVGKIGQCAGPQAVISEKNRQVQRKKGLLGHNVPAFTRAIPS

SEQ ID NO: 322816 - protein, 90 aa, Zea mays
  Clone ID: MRT4577_57472C.1.pep
SSSTPHTAEHTDSHRRNLCLHRPTPCPTSPASGSTSAASKTPLPHSRSLPPRRTSPTTSPRPPPPPSPTPPNAARDSRPPPPRPSAHPPA

SEQ ID NO: 322817 - protein, 88 aa, Zea mays
  unsure (1)..(88): unsure at all Xaa locations
  Clone ID: MRT4577_57473C.1.pep
GRPTRSANGTKKSIYRFSSGEXTAGXCSICHRRLILSTDVLLSVLAADSASARTSCMPXWTILHNPIPSCLWFXTSLTCCIWPFLPCP

SEQ ID NO: 322818 - protein, 157 aa, Zea mays
  unsure (1)..(157): unsure at all Xaa locations
  Clone ID: MRT4577_57474C.1.pep
LSRNPSLLVLCITDRLPCTSAAPASIVPLISSIHPNEEGRGHEERVILVXDYRWQXIETDLTKICDCILKLLXSLFRQSSTTSTSXRPFYLKMTGDYYTYFADLRLHLIRKTLISTPMAXYNAAQEXCFSELCSTHPITLSLTLYFCLIYYEILNSR

SEQ ID NO: 322819 - protein, 59 aa, Zea mays
  unsure (1)..(59): unsure at all Xaa locations
  Clone ID: MRT4577_57475C.1.pep
CIYVAEIMFQVSLHTKLQWLSISYIQIWSLLIIRGGGAVAXTCRTVLSFSSLLYFSFFS

SEQ ID NO: 322820 - protein, 119 aa, Zea mays
  Clone ID: MRT4577_57476C.1.pep
RQSRTESRIPSLFPCADNRRNLGSLLEAVQALEGEPERSAASAVLVDDDSTASVLSAEAFSPHETHYCLVGSGIGLVVFVRALRGLMSLGIGGRCLLIWRCVRVGFRKAFETFDCVVCC

SEQ ID NO: 322821 - protein, 65 aa, Zea mays
  Clone ID: MRT4577_57477C.1.pep
NIITRLRGCYIYSHHTRHSMIRCNDTCATGEPQSGYAHQNTPFIPLGACTYMFTVKHAGMTGCIC

SEQ ID NO: 322822 - protein, 548 aa, Zea mays
  Clone ID: MRT4577_57478C.1.pep
MTQAKPAPSGKRNWSSGGTAAGRKNKERGDDKAKGIRVAGWNKGDKKKEDKGRQVSAGSKRRWSEGVPRVGVKRAVSGFDRRKRKIDDDSWDDDGGKDVSSSKSKFTRKCSSTISRRKVSPGKGDRLKSQTLYEDDYRAGKRSISKVSDVSRGVKNRLVNSVASKGKKLGASEGVIRTKKGGAKEVDLDEEAVNSKKSDDLDLIIEEEKPRPRLTRVLDQTGKKIKPAKKVVVPDNEERAPPKKRKRMKLDPYDTSNKRIEDSSIQDVSSAEKVLVNCTPEEETEMSINAKFRAIQPSSSILSYVEDNLLGRRRLIEIKNAGYNVKISAPLDNVPFSTSTERERIEDIAFRNKLEFFAAAKISSSFPTPTLPEIAFAGVSNVGKSSLLNSLTRQWGVVRTSDKPGLTQTINFFQLASKLCLVDLPGYGFAYAKDEVKESWEELVKEYVSTRVGLERVCLLVHTKRGMKPLDYELVDLMERHKTPYQIVLTKTDLVFPIDVARRAMEIQESLKRNKSVVNPVMMVSSKTGAGIRNLRGVLGKLARFIKP

SEQ ID NO: 322823 - protein, 70 aa, Zea mays
  Clone ID: MRT4577_57479C.1.pep
MGFGTTAAAAGDEEARRGTSRRVSGGSVTVVLVGEVASESPGVPPASPPGGGVPCDGRDEVGAPRELPVP

SEQ ID NO: 322824 - protein, 34 aa, Zea mays
  Clone ID: MRT4577_5747C.1.pep
KGGHLNYGWPQTIRSVRGGYITSYKVLSKNKQEA

SEQ ID NO: 322825 - protein, 112 aa, Zea mays
  Clone ID: MRT4577_57480C.1.pep
PPLFFFFFSDRRTKPTYPCHGFIYIFSSGSDILLSHTFLVYLHFSLHSETEKTKQKKQRKPQKQFARYTTFKLSDYLSISMPVPSCCTYCIRSGPSTIFILSHPIGSPPPGR

SEQ ID NO: 322826 - protein, 78 aa, Zea mays
  Clone ID: MRT4577_57481C.1.pep
SLLKTKLLGGGCFDQFKSLIYIFIFLASKTIHVSISTLPSVTTHATPAAPTALRLTLSFTGSANAPTATRQTGSRYHL

SEQ ID NO: 322827 - protein, 66 aa, Zea mays
  Clone ID: MRT4577_57482C.1.pep
MFLLDVLFVFTVNPPPPYPESPFVCRDPEEMAKSKNHTAHNQSYKAHKNGIKKPKRHRQTSTKGVR

SEQ ID NO: 322828 - protein, 64 aa, Zea mays
  unsure (1)..(64): unsure at all Xaa locations
  Clone ID: MRT4577_57483C.1.pep
GSLNYNAKLYDFGLAKLGPTGSNXHITTRVMGTYGYAAPEYVATGTGPHFSHVTSWYDHTLLPL

SEQ ID NO: 322829 - protein, 58 aa, Zea mays
  Clone ID: MRT4577_57484C.1.pep
KKKKKKKKIKKKKKTKKKIYKKNPIKNKHIKQKLLNHFPKKKKRLPFLKDPSLNTLYI

SEQ ID NO: 322830 - protein, 43 aa, Zea mays
  Clone ID: MRT4577_57485C.1.pep
IEKKPPTLASLLHINSVAHAAHARTSATRDQASALVYQDVLVG

SEQ ID NO: 322831 - protein, 107 aa, Zea mays
  unsure (1)..(107): unsure at all Xaa locations
  Clone ID: MRT4577_57486C.1.pep
SPRRRRRRPGSSAASLSFGAAAVWGGGLLALLLLRCRVPCGSWCACSFSCRLWRCLCFCCRGRVRRGPGGPPPCAPWFXCLGRGGPPCVSSPALPWGVARGRGARPP

SEQ ID NO: 322832 - protein, 55 aa, Zea mays
  Clone ID: MRT4577_57487C.1.pep
DRILKTLNLVRRPAVAMDRGGDPAWHRNQAISVNQDVYQDYGYDDYFHYQCNFLY

SEQ ID NO: 322833 - protein, 236 aa, Zea mays
  unsure (1)..(236): unsure at all Xaa locations
  Clone ID: MRT4577_57488C.1.pep
MSDVTAVMDLEVEEPQLALPPGFRFHPTDEEVVTHYLTRKVLRESFSCQVITDVDLNKNEPWELPGLAKMGEKEWFFFVHKGRKYPTGTRTNRATKKGYWKATGKDKEIFRGKGRDAVLVGMKKTLVFYTGRAPSGGKTPWVMHEYRLEGELPHRLPRTAKDDWAVCRVFNKDLAARNAPQMAPAADGXGMEDPLAFLDDLLIDTDLFXDDADLPMLMXSPSGVDDFAGASSSNCS

SEQ ID NO: 322834 - protein, 578 aa, Zea mays
  Clone ID: MRT4577_57489C.1.pep
MAMEVRRRVPPPHGSAPRRQQATGGEGQRVRVQAGDALPLPIRHTNLIFSALFAASLVYLMRRWREKIRSSTPLHVVSLAEIFAICGLVASLIYLLSFFGIAFVQSVVSNSDDEEDFIIDSRHGQARAPPPPAPAAPCALLGSPAAAPEKMPEEDEEIVAAVVAGKIPSYVLETRLGDCRRAAGIRREALRRITGREMDGLPLDGFDYASILGQCCELPVGFVQLPVGVAGPLLLDGRRLYVPMATTEGCLVASTNRGCKAIAESGGASSVVLKDGMTRAPAVRFPSARRAAELKAFLEDPANFDTLAMVFNRSSRFGRLQGVKCAIAGRNLYMRFSCSTGDAMGMNMVSKGVQNVLDYLQADFPDMDVISISGNFCSDKKSAAVNWIDGRGKSVVCEAVIKEEVVKKVLKTNVQALVELNVIKNLAGSAVAGALGGFNAHASNIVAAIFIATGQDPAQNVESSQCITMLEAINDGKDLHISVTMPSIEVGTVGGGTQLASQSACLDLLGVKGANRESPGSNARLLATVVAGAVLAGELSLISAQAAGHLVKSHMKYNRSSKDMSKTLAEETDKPKKC

SEQ ID NO: 322835 - protein, 67 aa, Zea mays
  Clone ID: MRT4577_5748C.1.pep
EYHVLKNKSTCHVSIFMGSLLELKPCGLITVSTWSIHYDQAHKHPHNSSEGDPIYGLFPTHPHIIMY

SEQ ID NO: 322836 - protein, 325 aa, Zea mays
  unsure (1)..(325): unsure at all Xaa locations
  Clone ID: MRT4577_57490C.1.pep
MDMDVRRRVPPPHGSVPRRQQATGAEGERVRVQAGDALPLPIRHTNLIFSALFAASLVYLMRRWRGKIRASTPLHVVSPAEIFAICGLVASLIYLLSFFGIAFVQSVVSSSDDDEDFIVDSRHARARAPPTPAQTPCALLGSPAAATEKMPEEDEEIVAAVVAGKIPSYVLESRLGDCRRAAGIRREALRRITGRDMDGLPLDGFDYAFILGXCCELRVRAGGGKTPISVTMPSIEVGTVGGGTQLASQSACLDLLGVKGANRESPGSNARLLATVVAGAVLAGELFLISAQAAGHLVKSHMKYNRSSKDMSKTLAEETDKAKKC

SEQ ID NO: 322837 - protein, 40 aa, Zea mays
  Clone ID: MRT4577_57491C.1.pep
LARTYSYYSFHIILYMAIMYSVMLLTPCTTSDSDNAKPQS

SEQ ID NO: 322838 - protein, 82 aa, Zea mays
  Clone ID: MRT4577_57492C.1.pep
TRLKKGFPHQDVLKPQPQELIYVPLKKKYALQRTQAPKLDTLKLPPPLFFIFYPLYFSSLFFFFFFFFFFFFFFFFFFGRVG

SEQ ID NO: 322839 - protein, 120 aa, Zea mays
  Clone ID: MRT4577_57493C.1.pep
CTTFSSLITAYAAIGGKYVEVTDLWGEMKLLASLSSMKFDQELLDSLLYCFVRGGFFLRAMEVIEMMEKREMFIDKYKYKSLWLKYHRTLYKGKAPKVQTEAQLKRREAAIRFKKWIGLT

SEQ ID NO: 322840 - protein, 112 aa, Zea mays
  unsure (1)..(112): unsure at all Xaa locations
  Clone ID: MRT4577_57494C.1.pep
MTHNIPPFNELKREAYCKCHXSFSHATNDCNAFCQKIQSAINXGPVNFREYRWINXPFPVNTMDLNGNKVFIQPKVADKGKGKGVLINDPRVLDVNKKILSWKVSAKRTLDG

SEQ ID NO: 322841 - protein, 81 aa, Zea mays
  Clone ID: MRT4577_57495C.1.pep
RRVAYTVNSIYIKAQTNAIETMRVLLAASLSGSAASAPHSYIRGCSATTAPAIYRDGALQIRSLHLMASPTVVHMNTPVQL

SEQ ID NO: 322842 - protein, 102 aa, Zea mays
  Clone ID: MRT4577_57496C.1.pep
SEFRVKYLCVCTARSIFILIFCTWDFGEGNTFQNRSVSSPAPVTMVCWYDLAEVVALTESIGKLLVEVLKELGKRVPDSLVKTRVEDDGFTINSRRGFQTPL

SEQ ID NO: 322843 - protein, 108 aa, Zea mays
  Clone ID: MRT4577_57497C.1.pep
RELQRVEDSHQILSQTSHDLNECTWSLNILAINKPQNKCDDLDRFVMVAKTVPDDAKQLTTTINTNAEALFRPGPGSLHLKNGPESIMNSTEYPHGGSQGQLLHPGDH

SEQ ID NO: 322844 - protein, 470 aa, Zea mays
  Clone ID: MRT4577_57498C.1.pep
MALALLSPSTPSHRILLRPIPFPSLPVARATSAGSFGLAFFCPLSRGSSSLQRTGAAGGVIDSAGEGSSEEPVAGWLSADLLRRISGAADADRVLDIVAESVEGAGAALGAPECNAIVSAAFDRGNIALALSVFEAMRSGFAGVGGWRWARPDVRTYALLVQRLAAAPRVADAIMIIDYVSRAGASSMDEVPFGIIVRCPTCMIAVAVVQPQDGTQVVSCSKCRYQYELFSGDITSIESEEVSMDISALEKALRFINMRKDGIPAAVHSIVIRSPSGTARTYRFATQNVTLPAQEGERVTISLAAPVNVYRDMGPLKVAARSQGFKPGEPMCLTNHINGQVSKLLRAPSKNKGTFFLSPYLLVGALAFLASTDAASAFIDPSLPRLVTATAIASAAIGTTLNGVVLPKIQKLPEKAVDIVAVQQKLLSQYDILQSRLKELKQFAQKEVWMLARMCQLDNKIVAVGEPSYR

SEQ ID NO: 322845 - protein, 138 aa, Zea mays
  Clone ID: MRT4577_57499C.1.pep
KRNKDKRPELGKRDRGGGRNKNKRQPGQNQNGPGSRAPTKKKKNKKKKEKREAPKGKGENPGRGGKKTGSTGAGTRGGGPPGKPGKARPEPAGGPTHPRGRPKKTRGKEGKRGGRGERGTPPKNPTPTNREQKRESPG

SEQ ID NO: 322846 - protein, 66 aa, Zea mays
  Clone ID: MRT4577_5749C.1.pep
AACASVAGTSRAVVPRQARVCIKAWPVCPATLRARLEAVPSMSPAYCVGAPQCIMQSEGTISVEPF

SEQ ID NO: 322847 - protein, 54 aa, Zea mays
  Clone ID: MRT4577_574C.1.pep
TGSFRLSGRPLAHGDPLHEDARCTPVVVLIFVAQVLVLDAQERPPGLVRQDVFS

SEQ ID NO: 322848 - protein, 87 aa, Zea mays
  unsure (1)..(87): unsure at all Xaa locations
  Clone ID: MRT4577_57500C.1.pep
DLLGRAHALDSPRKPIQKGPICKIENQSHSKNQNVNTNHISQHTPPPHTIRNQIREKNTQTTHQIEKPQQEKTNKEYXNSFVKYLHR

SEQ ID NO: 322849 - protein, 48 aa, Zea mays
  Clone ID: MRT4577_57501C.1.pep
SWSLFSSRLFLLFFLDHWERIPLGIFNYKIEEYPGTTFLEKYPQIGEP

SEQ ID NO: 322850 - protein, 263 aa, Zea mays
  Clone ID: MRT4577_57502C.1.pep
MGSAAASPPPSGKLTQEELKRVAAHRAVEFVEPGMTLGLGTGSTAAHALDRLGDLLRAGALPGVAGVPTSLKTEAHAARAGIPLLPLPGARIALSIDGADEVDPDLNLVKGRGGSLLREKMIEGAGARFVVIVDESKLVPRLGCTGAIPVEVIPFGALHTLGLIRGLFDGLPGFHARLRTVPAAPAKGGEDSDSESEQPFVTDNGNYIVEMFFEDGIRGDLRDISDRLLRITGVVEHGMFLGMATTVIVANKDGTVSVMDRKK

SEQ ID NO: 322851 - protein, 112 aa, Zea mays
  Clone ID: MRT4577_57503C.1.pep
TGPPRARAKGHRFFRFFREQPHRELNLGENHPRGELPKGGNRGAVQQQRGGKKKKMALAFFPPPPPNKPNGGGKKPPFCRSGSKRFPKVFKGPPKKGSFRLTQKEGATSRGN

SEQ ID NO: 322852 - protein, 259 aa, Zea mays
  unsure (1)..(259): unsure at all Xaa locations
  Clone ID: MRT4577_57504C.1.pep
MGSAAASPQPSGNLTQDELKRVAAHRAVEFVESGMTLGLGTGSTAAHALDRLGDLLRAGALPGVAGVPTSLKTEAHAARVGIPLLPLDAASGASIRLSIDGADEVDPDLNLVKGRGGSLLREKMIEGAGDRFVVIVDESKLVPRLGCTGAVPVEVIPFGAPHTLGLIRRFFDGVXGFHARLRTSPAPGGARLRREPFLTDNGNYIVEMFFDGGIRGDLRDISDRLLRITGVVEHGMFLGMATVAIVAKKDGTVAVMERK

SEQ ID NO: 322853 - protein, 95 aa, Zea mays
  unsure (1)..(95): unsure at all Xaa locations
  Clone ID: MRT4577_57505C.1.pep
MAASMISSSALAVERQGLPPLGRRASSFSVVCSKNNITTDNPYGIVGGLTVHVDANGRTGIGNVVYQFGEQVSAIVDGXTSIYSEDDWSPTCDVY

SEQ ID NO: 322854 - protein, 88 aa, Zea mays
  unsure (1)..(88): unsure at all Xaa locations
  Clone ID: MRT4577_57506C.1.pep
LGNVWLPDPLSGRNNLGILIPEVGRVLNSNFPPGGPHQKNVEVSPPQVKKRRAGPFFPTFLTKFXNGGGGFNTNPLKVPMWGPKSPRE

SEQ ID NO: 322855 - protein, 72 aa, Zea mays
  Clone ID: MRT4577_57507C.1.pep
PVYHYNLRDLQLQRTRDHYDRLRGALMPSPSMHYINTARHTLSELTHLDCRHIDIAQHYNSAAFHSPDTFQP

SEQ ID NO: 322856 - protein, 81 aa, Zea mays
  Clone ID: MRT4577_57508C.1.pep
DTDKVEWTHWPIAHAGHPSSGPSSTFQYIGPSFGVVNGVMAFNMFLCVDTLSVNWLDFFRRLNCVVTAQHIGSPFLFKVTL

SEQ ID NO: 322857 - protein, 123 aa, Zea mays
  unsure (1)..(123): unsure at all Xaa locations
  Clone ID: MRT4577_57509C.1.pep
TINVKNVAATDLKRGYVASNSEGDPAKEAASFTSQVIIMNHPGQIGNGYAPVLDWHTXHIAVKFAHLATKIDRIANWELHKEPKLLKSGDADLAKMAPTKPMAEETLFQDPPLGQLAVRDMMQ

SEQ ID NO: 322858 - protein, 152 aa, Zea mays
  Clone ID: MRT4577_5750C.1.pep
PPPHAPSVSSPDLFEYKQQRHLSKKVTNQPVMQVFAHELIKQSIGICAGVSQAMYDGSFPNLGPSQQQLMYCIIKFPPAVRCISTRQSDLFFFLNPLVGKVPLLTRIAIVFLETVSQIFLDFAGLSRNVAMRKQCVKKVTLPLVKFLRNNAV

SEQ ID NO: 322859 - protein, 36 aa, Zea mays
  Clone ID: MRT4577_57510C.1.pep
VLIRLRELRVWSTCRGGGSLTSETHASMQGFTPAVF

SEQ ID NO: 322860 - protein, 42 aa, Zea mays
  Clone ID: MRT4577_57511C.1.pep
TCGAFCKFESYSHFENPAIPKAHLVHAEEAAVTPILPLFCST

SEQ ID NO: 322861 - protein, 50 aa, Zea mays
  Clone ID: MRT4577_57512C.1.pep
SSSGHNSSPGSTAPSMATRMSVTPTAGTADHEAMSAVGITQTAGISADAL

SEQ ID NO: 322862 - protein, 69 aa, Zea mays
  Clone ID: MRT4577_57513C.1.pep
GAKRGFCLFSRKIMFFPALLSCNKWGRYHVHFNFSHNRAFSLPWKKNYISPPGGGIVIFFFRFFNFGAF

SEQ ID NO: 322863 - protein, 111 aa, Zea mays
  unsure (1)..(111): unsure at all Xaa locations
  Clone ID: MRT4577_57514C.1.pep
MAREQPAVWITPAMFGAPVTEQEAEDLSKSQRKFCSGSKLKEIGGSGIIAEKSANGDAEALTPANKTSLRMYHQTETGTSQIAFSADGSVSPTKPXSIPAEAKQRELSGTL

SEQ ID NO: 322864 - protein, 58 aa, Zea mays
  Clone ID: MRT4577_57515C.1.pep
ILIELLQRSGGGGGGGLVVIHQGPTTASVIFSCYKDRHGDAPHRHLECNSRYSKVAGI

SEQ ID NO: 322865 - protein, 38 aa, Zea mays
  Clone ID: MRT4577_57516C.1.pep
CFCIVVLVLPLFEVNASPVLVALCYGVGDLFPAPPSIY

SEQ ID NO: 322866 - protein, 173 aa, Zea mays
  Clone ID: MRT4577_57517C.1.pep
MAASASRPRAGAGGEEPAAAYEDLLPVMGERLGTAGLLAELRAGFRLLADPARGAITPDSLRRGAAAALGVAGMSHAEADAMVREGDADGDGALSEAEFCVLMVRLSPGIMADAEAWLADAIADELQMVDDDMDMDADADADDDGHGAAGGQDHAAAGPAGGAPATAARRSSV

SEQ ID NO: 322867 - protein, 89 aa, Zea mays
  Clone ID: MRT4577_57518C.1.pep
PGTGSRRRWPPSPPWAPPDSLSPSPPKRRAPKSPPPTDPSRLLFHLFFQPRLSILCAGQALILATHICMDVGTFLVGPRRFCIKIQSGP

SEQ ID NO: 322868 - protein, 44 aa, Zea mays
  Clone ID: MRT4577_57519C.1.pep
LRPGSTCGWPSASGATGHTTLDLTHAGSGARTGHPQALQLVELS

SEQ ID NO: 322869 - protein, 92 aa, Zea mays
  unsure (1)..(92): unsure at all Xaa locations
  Clone ID: MRT4577_5751C.1.pep
VPIRPGPASEPSEAGGSREERCSWGCRRTWSASRSAWVSPGTPAGVAALRGAQVQRLEHRICLKGGGGGCLLAVEEVLILIPRSAHASXPRP

SEQ ID NO: 322870 - protein, 42 aa, Zea mays
  Clone ID: MRT4577_57520C.1.pep
QILRSISLDFSDTNFQVYAGTPFLPPGNDCSFLPLIIYSEMT

SEQ ID NO: 322871 - protein, 240 aa, Zea mays
  Clone ID: MRT4577_57521C.1.pep
GVAMEGDDDGPEWMMEVGGAGATGKGKGGALDKNKKRFSEEQIKSLESMFATQTKLEPRQKLQLARELGLQPRQVAIWFQNKRARWKSKQLEREYSALRDDYDALLCSYESLKKEKHTLLKQLEKLAEMLHEPRGKYSGNADAAGAGDDVRSGVGGMKDEFADAGAAPYSSEGGGKFAHFTDDDVGALFRPSSPQPSAAGFTSSGPPEHQPFQFHSGCWPSSTEQTCSSSQWWEFESLSE

SEQ ID NO: 322872 - protein, 119 aa, Zea mays
  Clone ID: MRT4577_57522C.1.pep
KKNGPHLGWGIFRPYQRPPDIKKKGPCLLQVEFIKKNPLFTRGNWGKQKGLVKGGTPFFFCSISKPNPIRKSKSGGKPWGPGQRRPNPSFLAEKPPFGGAATGTPPFSGGGPPPTPFRI

SEQ ID NO: 322873 - protein, 177 aa, Zea mays
  unsure (1)..(177): unsure at all Xaa locations
  Clone ID: MRT4577_57523C.1.pep
KDARSYDAHGPAPALPLVRLNHVSFQCESVEASVGFYQRVLGFELVKRPASLDFGGAWMHRYGMGIYLLQRGSDSSPNAPAAARPPAINPKGNHISFQCTDMGLMKTRLGDMELEFVAAXVXDGETVVEQLFFRDPDGNVVEVCDCEKLPVIPLADAGSTGLLPNTLLLPVETNLHG

SEQ ID NO: 322874 - protein, 124 aa, Zea mays
  unsure (1)..(124): unsure at all Xaa locations
  Clone ID: MRT4577_57524C.1.pep
MPSACAMQMXPCPCTELEGLNRSGTGLTTMMGANGTVPLTQEYLTQAEHMPLAEATYYPGGGQXPSPCMQPVTLQCXQQQMMMNDMQLVQHDVHMMMQLKRADDLNMMLYEPDLHHHHQQLVAL

SEQ ID NO: 322875 - protein, 44 aa, Zea mays
  Clone ID: MRT4577_57525C.1.pep
LTRGAALVAVCERRRSGGVNFMNCAVAVQKYLSHLTLWRRLGYT

SEQ ID NO: 322876 - protein, 69 aa, Zea mays
  Clone ID: MRT4577_57526C.1.pep
PGTVLHSQSSLIGRSTTWSWVQGEEYRARRPLYNHHHHVRLRCIPWQATDCVTRYPRSDAAYTSIKLDN

SEQ ID NO: 322877 - protein, 95 aa, Zea mays
  Clone ID: MRT4577_57527C.1.pep
KWVLTQDLTSVVHLYIGYFRAVSVWIILQVGTYRPSMGSIARCGSCALMNRIVLKAGILSYEPKPPIPAFAVFAISKSFRSCVMILSVSDCVGRE

SEQ ID NO: 322878 - protein, 96 aa, Zea mays
  Clone ID: MRT4577_57528C.1.pep
FLCESLPTYGTGKEAGNEANYIVGMSTCYPKPGSIKVSDGEVLTIVSNYSSDRQHTGVMGLVYILVAEPQQPTPAPSLCFSFPVPWCLPAWMSSNM

SEQ ID NO: 322879 - protein, 54 aa, Zea mays
  Clone ID: MRT4577_57529C.1.pep
VRQSNSFMHDTTIVRCFALTSTRELNSSQSHQMDRVTNRNLPILTETKNQTQHV

SEQ ID NO: 322880 - protein, 44 aa, Zea mays
  unsure (1)..(44): unsure at all Xaa locations
  Clone ID: MRT4577_5752C.1.pep
QYFLPFXINLFSFWTIFYIILIPTTLTLPISIYNPMIFIFFSSF

SEQ ID NO: 322881 - protein, 89 aa, Zea mays
  Clone ID: MRT4577_57530C.1.pep
GYTFCLVATIGPFGWWGGLPWRRVEPYFFLLEALMVRGVMPALVGMPRWVTGGLGGRVLEAFIWGRFPVWSLAPGVKISFFRSSSRFRA

SEQ ID NO: 322882 - protein, 74 aa, Zea mays
  Clone ID: MRT4577_57531C.1.pep
FRLLPFFLTPKNSASHQLFKRKNHYIMSTNMQDLKVDSKYRSKVQNSLYLESTSLHYESSTKMHNRNNVISRNH

SEQ ID NO: 322883 - protein, 123 aa, Zea mays
  Clone ID: MRT4577_57532C.1.pep
SHFPTWTWRSTPSCRNCSFDRKNGSSLVVGSRPHHHPRRREQSRSPVKVKVKVKQQNGSVGWCFAHKPKEVWCCCEALHARNGGLALNKQNDDKCIRQKDLLVACTQTQKGRPKNAAKIINYH

SEQ ID NO: 322884 - protein, 220 aa, Zea mays
  Clone ID: MRT4577_57533C.1.pep
MATSEPVQESLVVHYSQPSRPRVLLAASGSVAAIKFESLCRSFSEWADVRAVATTSSLHFVDRSSLPSGIVLYTDDDEWSTWKKIGDEVLHIELRKWADVMVIAPLSANTLAKIAGGLCDNLLTCIVRAWDYSKPLFVAPAMNTLMWNNPFTERHLHTINQLGIALIPPVTKRLACGDYGNGAMAETSQIHTSVRLACKTQPHDASSSLAGPVSNNRPSS

SEQ ID NO: 322885 - protein, 220 aa, Zea mays
  Clone ID: MRT4577_57534C.1.pep
MATSEPVQESLVVHYSQPSRPRVLLAASGSVAAIKFESLCRSFSEWADVRAVATTSSLHFVDRSSLPSGIVLYTDDDEWSTWKKIGDEVLHIELRKWADVMVIAPLSANTLAKIAGGLCDNLLTCIVRAWDYSKPLFVAPAMNTLMWNNPFTERHLHTINQLGIALIPPVTKRLACGDYGNGAMAETSQIHTSVRLACKTQPHDAGSSLAGPVSNNRPSS

SEQ ID NO: 322886 - protein, 48 aa, Zea mays
  unsure (1)..(48): unsure at all Xaa locations
  Clone ID: MRT4577_57535C.1.pep
GELICGPEPRKALQAHEGQIXKTELPDLMADADRXEXMTXEYEGIFLD

SEQ ID NO: 322887 - protein, 78 aa, Zea mays
  unsure (1)..(78): unsure at all Xaa locations
  Clone ID: MRT4577_57536C.1.pep
RCVGGALPPPCGWPVFGAVGPPGPGPGVXVVAAPWVCCLSXFXSWCLRGXCXRVLLPPPALGSRAPRRXRGXPGXSAR

SEQ ID NO: 322888 - protein, 159 aa, Zea mays
  Clone ID: MRT4577_57537C.1.pep
VTTTRLSTPETVVEKAALPPKRIYQNNGYLMVSCNGGLNQMRAAICDMVAIARSLNVTLIVPELDKTSFWNDPSEFEDIFDVEHFIISLRDEVRILKELPPRVKRRVELGKFHSVPPVSWSDISYYHKKILPAIRKYKVLHLNRTDARLANNGLPLEIQ

SEQ ID NO: 322889 - protein, 168 aa, Zea mays
  unsure (1)..(168): unsure at all Xaa locations
  Clone ID: MRT4577_57538C.1.pep
MATSEPVQESLVVHYSQPSRPRVLLAASGSVAAIKFESLCRSFSEWADVRAVATTSSLHFVDRSSLPSGIVLYTDDDEWSTWKKIGDEVLHIELRKWADVMVIAPLSANTLAKIAGGLCDNLLTCIVRVWDYSXPLFVAPAMNTLMWNNPFTERHLHTINQLGIALIP

SEQ ID NO: 322890 - protein, 59 aa, Zea mays
  unsure (1)..(59): unsure at all Xaa locations
  Clone ID: MRT4577_57539C.1.pep
MGREXALSLARDRARTGALKRVTLRSXNTAARNSGGRVTCFHRGGGSXRPQSKANEKRD

SEQ ID NO: 322891 - protein, 131 aa, Zea mays
  Clone ID: MRT4577_5753C.1.pep
MSAVAVSSSLNPNAPLFIPAALLQVEDFSPQWWDLITTTAWFRDHWSREHAHLDEIAEQLELVALLAYDEDEDLFYGEQAPAAAALKTGTDLSLLLFHRFLDLPKRRIIVSSSAYAYVGVLFLRQIRCSRR

SEQ ID NO: 322892 - protein, 88 aa, Zea mays
  Clone ID: MRT4577_57540C.1.pep
SSTPHVQTLAIAFLIPSRETLAARVVLAHRRTAFLPRMCGLCGDVAATAALTDCGGGDDRDWLLPLHRRAPTLDRRSNSSSAALHVYW

SEQ ID NO: 322893 - protein, 427 aa, Zea mays
  unsure (1)..(427): unsure at all Xaa locations
  Clone ID: MRT4577_57541C.1.pep
VPRGRPGSCSGGLNQMRAAICDMVAIARSLNVTLIVPELDKTSFWNDXGVFIVDIKVFFSQXFYWMDFMHSLCDNMLMHSASSEFQDIFDVEHFIISLRDEVRILRELPPRVKRRVELGKFYSVPPVSWSDISYYHKKVRDVRCHELLCPYPIHXSLPFGQKLITFHPVQILPAIQKYKVLHLNRTDARLANNGLPLEIQRLRCRVNYSALKFTSQIEVLGRRVIRMLRQNGPFLVIHLRYEMDMLAFSGCTQGCTPKETEELTRMRYAYPWWKEKVINSSVKRKDGLCHLXPEEVVLVLRALDIDKSMQIYIAAGKIYGGKRRMASLTLAYPNVVRKETLLEPSDLMFFQNHSSQMAALDYLVSLESDIFVPTYDGNMAKVVEGHRRYLGFKKTIMLDRKLIVELVDQYTSGSLRWDEFASLVKAV

SEQ ID NO: 322894 - protein, 220 aa, Zea mays
  Clone ID: MRT4577_57542C.1.pep
MATSEPVQESLVVHYSQPSRPRVLLAASGSVAAIKFESLCRSFSEWADVRAVATTPSLHFVDRSSLPSGIVLYTDDDEWSTWKKIGDEVLHIELRKWADVMVIAPLSANTLAKIAGGLCDNLLTCIVRAWDYSKPLFVAPAMNTLMWNNPFTERHLHTINQLGIALIPPVTKRLACGDYGNGAMAETSQIHTSVRLACKTQPHDASSSLAGPVSNNRPSS

SEQ ID NO: 322895 - protein, 220 aa, Zea mays
  Clone ID: MRT4577_57543C.1.pep
MATSEPVQESLVVHYSQPSRPRVLLAASGSVAAIKFESLCRSFSEWADVRAVATTSSLHFVDRSSLPSGIVLYTDDDEWSTWKKIGDEVLHIELRKWADVMVIAPLSANTLAKIAGGLCDNLLTCIVRAWDYSKPLFVAPAMNTLMWNNPFTERHLHTINQLGIALIPPVTKRLACGDYGNGAMAETSQIHTAVRLACKTQPHDASSSLAGPVSNNRPSS

SEQ ID NO: 322896 - protein, 220 aa, Zea mays
  Clone ID: MRT4577_57544C.1.pep
MATSEPVQESLVVHYSQPSRPRVLLAASGSVAAIKFESLCRSLSEWADVRAVATTSSLHFVDRSSLPSGIVLYTDDDEWSTWKKIGDEVLHIELRKWADVMVIAPLSANTLAKIAGGLCDNLLTCIVRAWDYSKPLFVAPAMNTLMWNNPFTERHLHTINQLGIALIPPVTKRLACGDYGNGAMAETSQIHTSVRLACKTQPHDASSSLAGPVSNNRPSS

SEQ ID NO: 322897 - protein, 40 aa, Zea mays
  Clone ID: MRT4577_57545C.1.pep
TRPINLKKDDCYGAIDAYCHDHELHTTIMTQATPMCFCCD

SEQ ID NO: 322898 - protein, 72 aa, Zea mays
  Clone ID: MRT4577_57546C.1.pep
RIWLPPTLALYFRRTLSSDGGAPIWPTLLIMQDPSSNIQLNLVFTYWIPMPTDMHIRYYGTRMCCRSTLLCI

SEQ ID NO: 322899 - protein, 45 aa, Zea mays
  Clone ID: MRT4577_57547C.1.pep
SNPVLQVIKEVFPNHQQRTASTALSALLHSLKREFQRPSPVTTGS

SEQ ID NO: 322900 - protein, 84 aa, Zea mays
  Clone ID: MRT4577_57548C.1.pep
KKENVKAPKLEKIYFFYFPAPGFELGQPAFNGWGPSRVRDFFTPIRGGLTFSGRPKIPTWPGGFFQNVPVFVFFKDGLSGPHGI

SEQ ID NO: 322901 - protein, 176 aa, Zea mays
  Clone ID: MRT4577_57549C.1.pep
DFLEAARIFILHRLGSSSYLFVRSFCLIFSGHRFVYARSITGLALSAAAPDFFQPRVVLIFPARAVFPVARSRALLPAARSRSSLPCHAREFFCGSRAGILAARREGLWSPTRSPSHGSRSSVSLMLTAPSPYCSPLASLLHARDLPTLQPSSRPCSSPWRACSQLLLWCPANSLL

SEQ ID NO: 322902 - protein, 56 aa, Zea mays
  Clone ID: MRT4577_5754C.1.pep
DTGNWSRMYTYIHLSCQCNLAVTNFSTTIREQTSDLQQRQLDSRKPWMCTYLAQVH

SEQ ID NO: 322903 - protein, 74 aa, Zea mays
  unsure (1)..(74): unsure at all Xaa locations
  Clone ID: MRT4577_57550C.1.pep
GGGXRXREXGSAGTHGCGCAVARGTRAMVHETRGEAKLGGKHAGGTAGTRRCRRRSSRHGAVSHPHPPQKSEPX

SEQ ID NO: 322904 - protein, 318 aa, Zea mays
  Clone ID: MRT4577_57551C.1.pep
MAVLTKVLLRLFFTTGGLIVFLLCPASCLARPPHSSSNSNYYCDWCPRRSTASPDLDASLLRSCGTSRDGDDGGFGCGYGAAEQLDGGGAPHVAAAGADSFFSAGAGCGACYQLRCRDRRVCGDGGVKVVVVAGLANRTGFVLTREAFAAMMARPRVSSNDQLLPGLGGNVVEVDFRRIPCEYKNRNLSVRIDEEGSRHPAHLAITFLYQGGQTDIAAVELSHAHAQPPSWRPMAPVGRRGIVTWRTSSAPAGPLQLRLVVTAGVGGKWLRAGGDVLPADWRPGQVHDTGLRVRDVALSSCARSCRGAATAGASEELR

SEQ ID NO: 322905 - protein, 50 aa, Zea mays
  Clone ID: MRT4577_57552C.1.pep
RFPLTPRFFCEKKKKKKKKKKKKKKKKKKKKPKKKKKKKKKKSLRLLPLL

SEQ ID NO: 322906 - protein, 99 aa, Zea mays
  Clone ID: MRT4577_57553C.1.pep
ICTRAVCCFRSARFTIPSWSLQTVCSRCESRPCQVGYAVGPHVSTCSQGRPQKGTRTKAGQVNGIPNRRCFDVVAHVSCLRSRVEEWNHGGIDLSEHEK

SEQ ID NO: 322907 - protein, 76 aa, Zea mays
  Clone ID: MRT4577_57554C.1.pep
MTDPHGMAATGGAMGSYTQAGSDAALGPGHGHGHAQLSSQWSFSRQDLPQISEMGMIPGDIGESIVGAGGCNSSSD

SEQ ID NO: 322908 - protein, 56 aa, Zea mays
  Clone ID: MRT4577_57555C.1.pep
DFHLNYDDADNKYHQPGRVVLNRNIVEVYRNPAHVDPSTVLGTVHPFLFGLSTLIN

SEQ ID NO: 322909 - protein, 65 aa, Zea mays
  Clone ID: MRT4577_57556C.1.pep
VVHMWMPWFIIGWLIYYKPPRAQRQLCLITRSWSTNVCGRHTLCATHDRAGPRTTDTIHPHALEI

SEQ ID NO: 322910 - protein, 212 aa, Zea mays
  unsure (1)..(212): unsure at all Xaa locations
  Clone ID: MRT4577_57557C.1.pep
GRAGIYGDVSQRPFKSMIAGDGPSLFKNGKGCGACYQIRCTGNRACSGRPVTVTVTDSCPGGACLVESEHFYMSGTGFDAMANNRGMCDRLRSGGILKIRYRRVGCNYNGRTVSFKADAGSNXPYYLAVLIENVAGDDDISAEDIMQAGCDSWAPMQQSWGAVCRVNSNNGQALRAPFSVRVTSGSGNVLVIKNAIPRRVTRSXTYRSYANY

SEQ ID NO: 322911 - protein, 56 aa, Zea mays
  Clone ID: MRT4577_57558C.1.pep
NSKMQSPEWHFATLSHALIAFQNESYLRQLLWVKSYLYSRVRLLGVCLYNKRGGLS

SEQ ID NO: 322912 - protein, 85 aa, Zea mays
  unsure (1)..(85): unsure at all Xaa locations
  Clone ID: MRT4577_57559C.1.pep
FVFSYGIGSSNVPVMNSSTNGGVFXTLGFHHQIGLPELFPMTIVQRFGLDGGSGDGGGGYKGQNRQFGRDFIGGSNHQFLHDFVG

SEQ ID NO: 322913 - protein, 136 aa, Zea mays
  unsure (1)..(136): unsure at all Xaa locations
  Clone ID: MRT4577_5755C.1.pep
RALKLAPVRGVXRRKSVVVVNDSLVRGTTSSKSVRLLRDAGAREVHMRISSPPVVGSCLYGVDTPSEGELISNRMDLEGVRRTIGCDSLAFLSLEKLHSIYGNEAHEFCDACFSRNYPVLPTVPEPVPELVSAFED

SEQ ID NO: 322914 - protein, 191 aa, Zea mays
  unsure (1)..(191): unsure at all Xaa locations
  Clone ID: MRT4577_57560C.1.pep
QKLSSLKTNREFCSKSECNIQVWCILLSDKVPFRMHWPLHSDMQVNGIYVRVVNRQPTQKLGANGRDDGPLLTDYLKEGPNKISLYXNDDXRLFCIGXRIAKRRSIEQVLNLVPKEQDGENFDDTLARVRRCVGGGAEANNADSDSDIEVAADFVSGNLRCPMTASRIHIAGRFKSCAHMGCFDLEALIEI

SEQ ID NO: 322915 - protein, 104 aa, Zea mays
  Clone ID: MRT4577_57561C.1.pep
YNIRVELCIHLDHAALQQPVTSFIHFHILISLIIYSYSFVTYCECLSTKGWSLDSNKKLFMCKPLAETRAQTFPLLPKKPITERIIMNTMKQATPIEILATLLF

SEQ ID NO: 322916 - protein, 96 aa, Zea mays
  unsure (1)..(96): unsure at all Xaa locations
  Clone ID: MRT4577_57562C.1.pep
RDYRTRSLPVKSNPSAIRYPELGVRRGDTKGGTSTXNFVMMSVGALRLGIKVTDMPPNEIGTVFVTRRLPRLNTGLITALPSLSIRSLPRLHQNVE

SEQ ID NO: 322917 - protein, 53 aa, Zea mays
  Clone ID: MRT4577_57563C.1.pep
FLMSYVLCLYIVSNSPLLFKNSCKCFRITQENIFCQGQGFMYINVVFKYLKFK

SEQ ID NO: 322918 - protein, 65 aa, Zea mays
  Clone ID: MRT4577_57564C.1.pep
YNSRVMHSLSSFCSPTTYHIIYSFSDSCIFHHLFLFLCYLWLNLNLIFLNNLRSYYQIIYTKINS

SEQ ID NO: 322919 - protein, 185 aa, Zea mays
  Clone ID: MRT4577_57565C.1.pep
MLCDRLLILSSGQVLEFDSPENLLSNEGSAFSKMVQSTGPSNAEYLKSLVFASGEERSRREEIKLQDIQRRWVASNRWAEAAQFALARSLTSSHSDLLALEAAEGNNILRRTKDAVITLQSVLEGKHNTEIDESLTQYQVPADRWWSSLYKVIEGLATMSRLGRNRLQQPSYNFENNNSIDWDQM

SEQ ID NO: 322920 - protein, 105 aa, Zea mays
  unsure (1)..(105): unsure at all Xaa locations
  Clone ID: MRT4577_57566C.1.pep
RPAPFFFFFFFFFVXCXXXKQTCNLIPRLXTXKXGSXKLNXXXNSPPPKXKXEPPKNGRASAQPPGLPLGXEQGEDVPLGEGPLDIPHDEXVXXXXRXPIIKYHX

SEQ ID NO: 322921 - protein, 59 aa, Zea mays
  Clone ID: MRT4577_57567C.1.pep
RKIFYQQHHTNTRRRSFAAAAAPQYLIPQRYPHNANKMLTISYFPHSYIKPCIKCFNTL

SEQ ID NO: 322922 - protein, 169 aa, Zea mays
  Clone ID: MRT4577_57568C.1.pep
MSAPRNNEGPLLEEVSTTTSGEEVDPQILDIAMKLAEKMFPKMQEDGAKRKAEEEEARRKVEEEDKGKKKIDYNDDLIELLVSKVMRKMNVRIEDSPSDPKAKRRESAREIWSILKMSHEGDPKAKRHRIESLESELPSFLRNTEDSRLQLLQQQGEIPPPCARNVAPT

SEQ ID NO: 322923 - protein, 65 aa, Zea mays
  unsure (1)..(65): unsure at all Xaa locations
  Clone ID: MRT4577_57569C.1.pep
LDRXXPPPLALENINVGAVATNHPGLVASSRDTEPGAPSSPGTALKSVSRPPRQPRTGVGTARPA

SEQ ID NO: 322924 - protein, 63 aa, Zea mays
  Clone ID: MRT4577_5756C.1.pep
RRPRGGFFPLGGTELQGAPLNPRDVPFNWARGSGDPTKNKGHRVTGELGETGATLLTKHWDQG

SEQ ID NO: 322925 - protein, 84 aa, Zea mays
  Clone ID: MRT4577_57570C.1.pep
GLLLVVHQLSCGDAQRGGYSLFLAPGEVSRELHAGRSRRLRKSYRGETIPRYLAQMPPTRFLQIQETRNGILIFELLNEAIVAL

SEQ ID NO: 322926 - protein, 63 aa, Zea mays
  Clone ID: MRT4577_57571C.1.pep
YLFNLVYLGRYLVILSILKLNKHCVDRIFRWHVDDLAPIMICSLYHRASLSCYRPRAALDVWV

SEQ ID NO: 322927 - protein, 55 aa, Zea mays
  Clone ID: MRT4577_57572C.1.pep
VANLMFRYTYIYFLILYIFKFQKDTQLGKSINYIFIDLFFITFLHINCEWMQYQP

SEQ ID NO: 322928 - protein, 218 aa, Zea mays
  Clone ID: MRT4577_57573C.1.pep
AVARKKDELAVEFLTTLPNNSSCSIQLLRLASFIGNWLQSILNFPENSKKILHIFDPALDSRCWAILRVCVEKKPSISISLNLLKSLSRVASHGLGRVDSNTSCPDNESIELFEQVFDCMSLLFSSNTRAFFNAGVDLWASCAIEVVNLAQKVSAKKDNFCPVLQKLANCLLGQFACFLRFYANPKNIFHAFVDKVLGPLLELLVLLNSQAHSSGRCG

SEQ ID NO: 322929 - protein, 140 aa, Zea mays
  Clone ID: MRT4577_57574C.1.pep
FGVIAAVSASFDSALTRGSPSCVWAAMSLLLVAEVGPVDPVVHPVLEVRRNPPRSFTAPGPLVVLLVVDGRIWNMSVMSSAVAGLFSSHSPSLGSGFPCGLVVRSQPEGERGNYVRRSQDPDRRPGEKEKARGVASEEKH

SEQ ID NO: 322930 - protein, 85 aa, Zea mays
  Clone ID: MRT4577_57575C.1.pep
LRTTKSMVTAGSDLQLHSCDLDSGFPGALVEKKNFHISVYNDPPDFFYIVEHRYIVYKGMNKAVFVELHISSPAYIYRWLCNALS

SEQ ID NO: 322931 - protein, 38 aa, Zea mays
  Clone ID: MRT4577_57576C.1.pep
NAHWLQGCRKKHSQVEIKARGVHSSPLTMEWESDFACN

SEQ ID NO: 322932 - protein, 45 aa, Zea mays
  Clone ID: MRT4577_57577C.1.pep
PSQASVIFFCGAPPVSFMSTRNVAFTHFESPHDYHVVENYLSEHI

SEQ ID NO: 322933 - protein, 66 aa, Zea mays
  Clone ID: MRT4577_57578C.1.pep
CGSGSSSGPTSWASTSTCPSRWGSSSTIAGSGSPLASNASDHAHRFICMLHSLFKLVYIPTYVEYI

SEQ ID NO: 322934 - protein, 87 aa, Zea mays
  unsure (1)..(87): unsure at all Xaa locations
  Clone ID: MRT4577_57579C.1.pep
FRPVEGAQGILQHDPFEVGAQRGGGQLVKFATQRGRTARPALKVGICEERGGSLSSXAFFAKAGLDSVSCSPFRVPVARQAAAPVLV

SEQ ID NO: 322935 - protein, 78 aa, Zea mays
  Clone ID: MRT4577_5757C.1.pep
GSFPLLFAYSTPSCASGIPPNTPAPSMIRHRTSRPVVVHEHSAQFGDLTWEQFHPYSRNKACMTQRSVQCQSPPACVP

SEQ ID NO: 322936 - protein, 64 aa, Zea mays
  Clone ID: MRT4577_57580C.1.pep
MVWLKVKRMWWAHIRPRFPPAFIYRKLVPIRFPFEPKTLVYPDQQMCSNKKFFFFLWPLINSRS

SEQ ID NO: 322937 - protein, 254 aa, Zea mays
  unsure (1)..(254): unsure at all Xaa locations
  Clone ID: MRT4577_57581C.1.pep
SSCLSSDDDTSRDAPRRSRDGREPATTRPLRPSTSPPTTLSSPLGIADVAALADADAKSVSPPAWPDDDDDDVAGRDDWVHHLPPLDMHMPPLGLGAAEAWEPHAQPPGPGGLTLSHAXDPRQHLPRLVYCRRRRHVGRHGRPQLPLGTXHXPRPHTLFLRAAAAVPASRAPRALPAQAAPPPKPRGARVASXHTLLKPKPEAPGTDDASTAVDQLAEAAKLAKAGDVFGAREILARLNYLLPXGXXTATPLLR

SEQ ID NO: 322938 - protein, 71 aa, Zea mays
  Clone ID: MRT4577_57582C.1.pep
LGTSRPAGVKRVVGMQGDSVTYLVDPGKSDSSSRTVVVSWSLTGLGWAFGFLLLVRCCLRDRICAQLIDAE

SEQ ID NO: 322939 - protein, 62 aa, Zea mays
  Clone ID: MRT4577_57583C.1.pep
LRKKRDISDLRRRRVKLGFTVARNIFLLSGDPPPYIQVLGYAPPLDVYDQARQLYCVIPSCH

SEQ ID NO: 322940 - protein, 64 aa, Zea mays
  Clone ID: MRT4577_57584C.1.pep
FTGISVIPTECPFLKYVRADVYESKKLAIPGVDSALGGYYQLTLWEDSDTRDSVVISQVSVRAS

SEQ ID NO: 322941 - protein, 60 aa, Zea mays
  Clone ID: MRT4577_57585C.1.pep
QAAKPAGHQQKLFGVRLWPYIMLSVYVLRAHVNELLRCVLVLGSNRGFFGPSGSGQGYSS

SEQ ID NO: 322942 - protein, 57 aa, Zea mays
  Clone ID: MRT4577_57586C.1.pep
DLGVTSDQSFSWGAGDGGGWAMHQPNLSIAICLLCVASDIAVSIFGSYSSRMYQYQS

SEQ ID NO: 322943 - protein, 59 aa, Zea mays
  Clone ID: MRT4577_57587C.1.pep
ASAGAAALAKTAAPGRPREAFVDQQNQQPRPRPRPGRRQTLRALRPATGSPPRVLPRPT

SEQ ID NO: 322944 - protein, 92 aa, Zea mays
  unsure (1)..(92): unsure at all Xaa locations
  Clone ID: MRT4577_57588C.1.pep
HAAVNTSTGAKPVRELVSADQWLNGEFITAVPXRVCCRLXASQFSSALSAACSVCYPLRRWVLVSPXGPFVSIGVLSDGSFXVPFGTHFFFS

SEQ ID NO: 322945 - protein, 45 aa, Zea mays
  unsure (1)..(45): unsure at all Xaa locations
  Clone ID: MRT4577_57589C.1.pep
FLRVIVFLSREVWTFTEKRGGTDPRAGDLHRRHPRADXPSDSTET

SEQ ID NO: 322946 - protein, 101 aa, Zea mays
  Clone ID: MRT4577_57590C.1.pep
TPITGIGRGLQKSPKKIFPAVPIWLTPTQRPFSLPKAPFAFVLLKKLIPPPNKKMDYLNWIPKTQRKNGPFFLFNPRGLKMGKREPPQPFQKGGPLRTFLT

SEQ ID NO: 322947 - protein, 68 aa, Zea mays
  Clone ID: MRT4577_57591C.1.pep
IASGCLFFFFFCFYFLSFLGIFGGVRTLEFIPEKEERERERDDSAEILQLCLHVPGCFTCYHACYCLA

SEQ ID NO: 322948 - protein, 95 aa, Zea mays
  Clone ID: MRT4577_57592C.1.pep
FGCALRLSAGCVSPGLWLNVGTRPMSPARQAVGEASAHASAGQPAVQRREHACATAFRARGDGIGSRGQGGVRSPGGEESIGMVLWLEPNSELTY

SEQ ID NO: 322949 - protein, 103 aa, Zea mays
  Clone ID: MRT4577_57593C.1.pep
DIYFFFFFYFWGGLMENRALTNKKQEKDTRTRKTKGLPQERTIKHPGEGQGNTPHGQIPCRSTGNRATSAHMQKDRSMKNRGTRPTGYTPKEKGLKERMVSRW

SEQ ID NO: 322950 - protein, 43 aa, Zea mays
  Clone ID: MRT4577_57594C.1.pep
CPLPDDRYSVVYAMLLTIFYYRYIFVRNAFSVHINSISSVTQC

SEQ ID NO: 322951 - protein, 93 aa, Zea mays
  Clone ID: MRT4577_57595C.1.pep
APSHHWGQRHIYVVWAPRPLVKKAHTLSICDSEPQAMETSRTHANGVNEMHIHIRPEKLLTMRPDDHQTPDISSANEKSEITDAINSLMLDGK

SEQ ID NO: 322952 - protein, 67 aa, Zea mays
  Clone ID: MRT4577_57596C.1.pep
MGWPLFGGGFFAFCGSRPEKAPHFKTLTRLVVSKKKKKKKKKKKKKKKKKKKKKKKKKKKKKLEGGP

SEQ ID NO: 322953 - protein, 149 aa, Zea mays
  Clone ID: MRT4577_57597C.1.pep
AKLISLFDGLIEAPASRQIRIDGALKVGQKRGRLVADLEEDEQPKKKVRLGNRWGVVMSRNSGFSTQVVELDFLYPSEGIHRRWESGYRITSTAATNDQAAFILSMPKRKPMDETQETLRTSAFPSSHVKEKWAKNLYIASICFGRTVC

SEQ ID NO: 322954 - protein, 168 aa, Zea mays
  Clone ID: MRT4577_57598C.1.pep
MGKAGKWLRSFLPGSRRGRDNKAGALAPAPEPDLALTLPGVATTPGSTPGAKEKRRWSFRRPAAAASPGPGSAAKDAARGRLAPYGFLEPRVDPDQHAIAVAIATAAAAEAAMAAKQAAAVAARLSASAPGSKRTVIGIEEAAAIKIQAVFRSYLARKALCALRGLVK

SEQ ID NO: 322955 - protein, 701 aa, Zea mays
  Clone ID: MRT4577_57599C.1.pep
MPELRSNTRQARLRSKKLDDLQPGEPLAKPVSPALPSARKRAPTRAARGRKGAAGRGVPPAPKPRRKGVDIVVLEADPACETPLKAFKGLEVAAAAPKNLPLKQVAEVGVPKMNGESGEKIVGAEDESTATPVPERVQVGNSPEYITDRKLGKGGFGQVYVGRRVSGGAARTGPDAYEVALKFEHRNSKGCNYGPPYEWQVYNTLNGCYGIPSVHYKGRQGEYYILLNNVYSLNFFSASRLNESTISNRMTPNMAACIAVESISILEKLHSKGFVHGDVKPENFLLGQPGSPEDKKLYLIDLGLASKWRENNGHHVDYDQRPDIFRGTIRYASVHAHLGRTGSRRDDLESLAYTLIFLIRGRLPWQGYQGDTKSFLVCKKKMATSPEMLCCYCPAPFKQFLEIVTNMKFDEEPNYAKLISLFDGLIEAPASRQIRIDGALKVGQKRGRLHANLEDEQPKKKVRLGSPAAQWISVYNARRPMKQRYHYNVADSRLSQHIEKGNDDGLYVSCVASSANLWALIMDAGTGFCSQVYELSPVFLHKDWIMEQWEKSYYITAIAGSSNGSSLVVMSKGTPYTQQSYKVSESFPYKWINKKWKEGFHVTSMATAGNRWGVVMSRNSGFSTQVVELDFLYPSEGIHRRWESGYRITSTAATNDQAAFILSMPKRKPMDETQETLRTSAFPSSHVKISLPFASPVTVPS

SEQ ID NO: 322956 - protein, 85 aa, Zea mays
  unsure (1)..(85): unsure at all Xaa locations
  Clone ID: MRT4577_5759C.1.pep
RDHVRGVGIYNINKVLERGDRIELLGDKTANMQGKTARYKRHARRSRNTXWWRNAKLTDGLILPLLGIIYVLLDFVCHGLTLPTC

SEQ ID NO: 322957 - protein, 207 aa, Zea mays
  Clone ID: MRT4577_575C.1.pep
SGKSTQIPQYLKEAGWADGGRLIGCTQPRRLAVQMVASRRAEEVGVKLGEEVGYTIRFADQTNPGMTMIKFLTDGVLIREMMEDPLLTKYSVIMVDEAHERSISTDMLLGLLKKIQRRRPELRLIISSATIEARSMSTFFNIRRKNSLLGSSDNLPSPEPAVLSVEGKGYTVEIHYVEEPVSDYLQATVNTVLLIHEKEPPGDILVF

SEQ ID NO: 322958 - protein, 54 aa, Zea mays
  Clone ID: MRT4577_57600C.1.pep
CAGIRPLAVVTTQSTFFFFFFFFFFLFHCALHSYNKITDMFFDTLTHRLDHICD

SEQ ID NO: 322959 - protein, 477 aa, Zea mays
  unsure (1)..(477): unsure at all Xaa locations
  Clone ID: MRT4577_57601C.1.pep
MDMLGPSLWDVWNSMGQAMTPNMAACIAVESISILEKLHSKGFVHGDVKPENFLLGQPGSPDDKKLYLIDLGLASKWKENNGHHVDYDQRPDIFRGTIRYASVHAHLGRTGSRRDDLESLAYTLIFLIRGRLPWQGYQGDTKSFLVCKKKMATSPEMLCCFCPAPFKQFLEIVTNMKFDEEPNYAKLISIFDGLIEAPASRPVRIDGALKVGQKRGRLHADLEEDEQPKKKVRLGXPAAQWISVYNARRPMKQRYHYNVADSRLSQHIEKGNDDGLYVSCVASSANLWALIMDAGTGFXPXVYELSPVFLHKDWIMEQWEKSYYITAIAGSTNGSSLVVMSKGTPYTQQSYKVSESFPYKWINKKWKEGFHVTSMATAGNRWGVVMSRNSGFSTQVVELDFLYPSEGIHRRWESGYRITSTAATNDQAAFILSMPKRKPMDETQETLRTSAFPSSHVKEKWAKNLYIASICYGRTVC

SEQ ID NO: 322960 - protein, 78 aa, Zea mays
  unsure (1)..(78): unsure at all Xaa locations
  Clone ID: MRT4577_57602C.1.pep
LPLLWVPSSHRERRRTCQERIPAGWHALWPARAEGLAAHWSWWXRYRLRXRRXACHRRRRRRLVRPCSSCSCPWRRVI

SEQ ID NO: 322961 - protein, 275 aa, Zea mays
  Clone ID: MRT4577_57603C.1.pep
MNNLDGALKVGQKRGRLHANLEDEQPKKKVRLGSPAAQWISVYNARRPMKQRYHYNVADSRLSQHIEKGNDDGLYVSCVASSANLWALIMDAGTGFCSQVYELSPVFLHKDWIMEQWEKSYYITAIAGSSNGSSLVVMSKGTPYTQQSYKVSESFPYKWINKKWKEGFHVTSMATAGNRWGVVMSRNSGFSTQVVELDFLYPSEGIHRRWESGYRITSTAATNDQAAFILSMPKRKPMDETQETLRTSAFPSSHVKEKWAKNLYIASICFGRTVC

SEQ ID NO: 322962 - protein, 380 aa, Zea mays
  unsure (1)..(380): unsure at all Xaa locations
  Clone ID: MRT4577_57604C.1.pep
RAFRGXTIRYASVHAQFGCTGSRRDDLESLAYTLIFLIRGRLPWQGYQGDTKSFLVCKKKMATSPEMLCCYCPAPFKQFLEIVTNMKFDEEPNYAKLISLFDGLIEAPASRQIRIDGALKVGQKRGRLVADLEEDEQPKKKVILGSLAAQWISVYNAWWPMKQRYHYNVADSRLXHDGLYISSVASSANLWALIMDAGTGFCSQVYELSPVFLQKDWIMEQWEKSYYITTIAGSSNGSSLVVMSKGTPYTQQSYKVSESFPYKWINKKWKEGFHVTSMATAGNRWGVVMSRNSGFSTQVVELDFLYPSEGIHRRWESGYRITSTAATNDQAAFILSMPKRKPMDETQETLRTSAFPSSHVKEKWAKNLYIASICYGRTVC

SEQ ID NO: 322963 - protein, 172 aa, Zea mays
  unsure (1)..(172): unsure at all Xaa locations
  Clone ID: MRT4577_57605C.1.pep
IFLHKDWIMEQWXEKSYYITAIAGXIQGSSLVVMSKGXPYTQQSYKVSESFPYXKWINKKWXKEGFHVTSMATAGNRWGVVMSRNSGFSTQVVELDFLYPSEGIHRRWESGYRITSTAATNDQAAFILSMPKRKPMDETQETLRXAFPSSHVKEKWAKNLYIASICFGRTVC

SEQ ID NO: 322964 - protein, 422 aa, Zea mays
  Clone ID: MRT4577_57606C.1.pep
KKYLPPSLLLLICGTQNYTTSKWRENNGHHVDYDQRPDIFRGTIRYASVHAHLGCTGSRRDDLESLAYTLIFLIRGRLPWQGYQGDTKSFLVCKKKMATSPEMLCCYCPAPFKQFLEIVTNMKFDEEPNYAKLISLFDGLIEAPASRPVRIDGALKVGQKRGRLHANLEDEQPKKKVRLGSLAAQWISVYNARRPMKQRYHYNVADSRLSQHIEKGNDDGLYVSCVASSANLWALIMDAGTGFCSQVYELSPVFLHKDWIMEQWEKSYYITAIAGSTNGSSLVVMSKGTPYTQQSYKVSESFPYKWINKKWKEGFHVTSMATAGNRWGVVMSRNSGFSTQVVELDFLYPSEGIHRRWESGYRITSTAATNDQAAFILSMPKRKPMDETQETLRTSAFPSSHVKEKWAKNLYIASICYGRTVC

SEQ ID NO: 322965 - protein, 51 aa, Zea mays
  Clone ID: MRT4577_57607C.1.pep
KGPPLVNKCLMILFIFFFFFFVFFFFFFFFFCFFLLFFFSPKKEGEYYIYR

SEQ ID NO: 322966 - protein, 94 aa, Zea mays
  unsure (1)..(94): unsure at all Xaa locations
  Clone ID: MRT4577_57608C.1.pep
PPGGNPPFFLGPRKSLFGGXFKTLYPPPKRACCLFNNPRIGWRALNRPFLYLRPPRFVQGLEIKTPPDSIYPFPCPARMAPLTRPAPPKSPPGR

SEQ ID NO: 322967 - protein, 135 aa, Zea mays
  unsure (1)..(135): unsure at all Xaa locations
  Clone ID: MRT4577_57609C.1.pep
STMLTVSPAPQGNPRRWGPCGVSTASTSSLIRPHGRRTARLRXIQVGTTGSVAFPALAPVATEPAARSPDPTAFVTVQRRGDRASVRELSTGLGHVRSKLKLNAPSETRLLKIDQVAXLSNLINKHHVATRRGDH

SEQ ID NO: 322968 - protein, 95 aa, Zea mays
  Clone ID: MRT4577_57610C.1.pep
RPEIPGPTTPVRQSNCNQFGSKILLLVQINFFSSPRKRGGDAKITLKKQYTGFSNYPSNLNLFSNSPNPSSKTKLKFFFYLANPKPASSFSGSPN

SEQ ID NO: 322969 - protein, 112 aa, Zea mays
  unsure (1)..(112): unsure at all Xaa locations
  Clone ID: MRT4577_57611C.1.pep
SRAAASLEKPMDRKKRPRTKLFSSPPRKPMGVTTTVSPMPCMPCHSISIIRPTTARHRGGGKAGGXXXXHVLELGELLPSXPRLRRRGRLVPVGLLRCRAAGAREDADGRAS

SEQ ID NO: 322970 - protein, 178 aa, Zea mays
  unsure (1)..(178): unsure at all Xaa locations
  Clone ID: MRT4577_57612C.1.pep
MAGAELLEGGAGTSTQQGVRSIITLPMFQSMLSHRGDSGCQGALYTYDAFIXVSQQEPRXGTSFDEQTHMRXLCALLGHTSHKTTAXGSTAKYGPFAWGYWLVKEHKQTDPPXYGRRPIHLXLISTTTSSPDKTLNLNLQSDPDLVERDHLVAFKTDIXFWMTPESPKPSCHNVMTDD

SEQ ID NO: 322971 - protein, 107 aa, Zea mays
  Clone ID: MRT4577_57613C.1.pep
VYVTVADARFCKPLDTALIRELAAEHEVLITAEEGSIGGFGSHVAHYLSLTGLLDGPLKLRSMFLPDRYIDHGAPQDQIEEAGLTPRHIAATVLSLLGRPLEAMQLK

SEQ ID NO: 322972 - protein, 95 aa, Zea mays
  Clone ID: MRT4577_57614C.1.pep
RRKAAARVECINTLCTRCTQHSGLARSSTSESLSWGQPKVPPLGWAFNPAPQKKKISGGFFFLGGGGGPLFFLRGAPNKKKWGGGGVKKNPFFGG

SEQ ID NO: 322973 - protein, 82 aa, Zea mays
  Clone ID: MRT4577_57615C.1.pep
AELRRRDRDHADRVHGAAHEHEGDGWTIPRLAVRSLGRLPPLPCGPGPLFPGRTVALRASTTVASSACFCGDAAQRIVIKLK

SEQ ID NO: 322974 - protein, 83 aa, Zea mays
  Clone ID: MRT4577_57616C.1.pep
LELVSKLLVYFWGGGNPNLFLGTIYPLRDPGVQRDPLPLQGKVGPGVNRSLREILLGCPNARFFGGGVSPITLGGPLWPPWGG

SEQ ID NO: 322975 - protein, 98 aa, Zea mays
  Clone ID: MRT4577_57617C.1.pep
NPRGRRTERRVASQCNREKFDVNELLVEHSNGFGVREDVTEQRPVWRKEDRAPPLGRPTRPHTMSLTRLDTGRQATSDDAQLRRSTMHTYSLLYCHTT

SEQ ID NO: 322976 - protein, 108 aa, Zea mays
  unsure (1)..(108): unsure at all Xaa locations
  Clone ID: MRT4577_57618C.1.pep
MGRVIRAQRQGXAGSVFKSHTDHRKGPSRFRSLDFRERNGYLKGVVTDVFHHPGRGAPLAKVTFRRPFWYKPHKELFVVADGMYTRKFNDSVFFFTPSPLTGCPSAGS

SEQ ID NO: 322977 - protein, 66 aa, Zea mays
  Clone ID: MRT4577_57619C.1.pep
AMEKGPQGGRALFSCLCNMWPVFFVGDSGFVVVPIVHPTRARALRFILSSRGPPPPYADKNNALVP

SEQ ID NO: 322978 - protein, 47 aa, Zea mays
  Clone ID: MRT4577_57620C.1.pep
LLLPDCRNVVTQPSKPLGPANIPETPLTLDGILSAIDCQFLNHKVTT

SEQ ID NO: 322979 - protein, 113 aa, Zea mays
  Clone ID: MRT4577_57621C.1.pep
MDSTGTGARGKGKKGAAVRKVSGPRQKSESRSVKAGLLLPVSRIDRNWRKGLNHKGLGAVPTIYLTVDLNSLALMFLKLAVKATGATRKPGFIPRHVLLATRTNRKLEKLLGG

SEQ ID NO: 322980 - protein, 51 aa, Zea mays
  unsure (1)..(51): unsure at all Xaa locations
  Clone ID: MRT4577_57622C.1.pep
XGGXXDILLANKWNFNSPYNTRTRTYIFILLLALGTTLEQQQRDAHPFPFY

SEQ ID NO: 322981 - protein, 109 aa, Zea mays
  unsure (1)..(109): unsure at all Xaa locations
  Clone ID: MRT4577_57623C.1.pep
GGYTSELNRIRRARTTPDVTRICPTLPVQNRHQTMSQIRTPNLTERLMMTSMKXPTVSTILMSELMMPQXACDAASLICRSSTLPFMFNPMAMTIPPMFLQQPFVGAAF

SEQ ID NO: 322982 - protein, 173 aa, Zea mays
  Clone ID: MRT4577_57624C.1.pep
MGTTYKCCFIFKRRFHTRDAPPPEDVRALFSVHAGGGPHMGADDLRRYLVATGQEEAEVERLLEQIVQGRARVPRLARPLLSLDDFHRYLFSHDLNPPIRHPQVHHDMTRPLSHYFIYTGHNSYLTGNQLSSDCSDTPIIMALERGGRVIELDMWPNSTIDDINIVHGKTLTT

SEQ ID NO: 322983 - protein, 90 aa, Zea mays
  Clone ID: MRT4577_57625C.1.pep
WNKSRNGRRAGGYGLFILFGGGGWVLFSEKERVPILADWFDSGHSLNPPLQSLSLRSLKGNLLGVFHSSLFPPPPYIFYLSLSPFPRRPR

SEQ ID NO: 322984 - protein, 396 aa, Zea mays
  unsure (1)..(396): unsure at all Xaa locations
  Clone ID: MRT4577_57626C.1.pep
MALRFEILGRFNRARAARLTLPHFTCQTPLFMPVGTQGTIKGLTTDQLEEIGCQIILGNTYHLELRPGSQLIDDLGGLHKFMNWKRALLTDSGGFQMVSLLHLADITEEGVTFQSPVDGKPMLLTPEESIHIQNNIGADIIMALDDVVKTTITGPRIKEAMYRTIRWIDRCIAAHKKPDVQNLFGIVQGGLDPXFKLSXVRSLVERNLPGYAIAIQAGGECNDSVXHGVALSYARLAKNKPRYAMVASGQGPQIAIYAISAXVLYDYVYPTRTARFGTALVPEGVLKLKHNSMATDERPIDHTCSCMVCKKYTRAYLHCLVTKDAMGSQLLSYHNLSFMMRLSRDLHMSILEGRFPEFVRGFLRVQFPTGDVPQWVRNAMEVAGIDISECCASTNV

SEQ ID NO: 322985 - protein, 72 aa, Zea mays
  Clone ID: MRT4577_57627C.1.pep
LFLFWREMSITPLIQQIAYAIPHPIRHSHSFPTILQMVLAQNPCNPRLNLYRPTHDQLLFVLLDTLTRLFHA

SEQ ID NO: 322986 - protein, 128 aa, Zea mays
  unsure (1)..(128): unsure at all Xaa locations
  Clone ID: MRT4577_57628C.1.pep
WTHMDMKAPPGAVLRAGSRYVLTALFTDNQLTGFLATGGALXEGTDKIGSELTVLYVRGAAYCTGRGEMVQDIQNPLPENXPMVLINPPEACSTADVYKRFRLEQTSQADPMTMLEEITQNGILQDVC

SEQ ID NO: 322987 - protein, 42 aa, Zea mays
  Clone ID: MRT4577_57629C.1.pep
IRVVVMFPVRAPSPDLCLAPPGRGAPWWWPWEWETKAWTLAD

SEQ ID NO: 322988 - protein, 201 aa, Zea mays
  Clone ID: MRT4577_5762C.1.pep
HWVPRGRPIKIDTRSRQKKKKKKKKKKKKKKKKKKKKKKKKKKKKKKKKKKKKKKKPPPPKTQQTSRGGGVSPFPPQRPGQGKKKKNPPPFSRGGGGGSPPPGRKIPWKPPKIGPKIFPKKGEKSVESGWVMPGPQPGWYLPKRAQNWGWPWWTSPTPDWGKEKGTPPELKTPASIMLETREGEETFSSTLRLKTPPLRWK

SEQ ID NO: 322989 - protein, 66 aa, Zea mays
  Clone ID: MRT4577_57630C.1.pep
RLEYHVRDVLHLSRGCWPTCNVYSIVWLSVTCHKVSMDSNVTPGAVMPAVFNMFKQEFVMVGLDRG

SEQ ID NO: 322990 - protein, 74 aa, Zea mays
  Clone ID: MRT4577_57631C.1.pep
VIIPSSPEAWARTCRWKPMHLQIRGAILVSSIIILDSFSLYTISITLVFCCIPIHVDSVQKILFTHASLTTNVN

SEQ ID NO: 322991 - protein, 143 aa, Zea mays
  Clone ID: MRT4577_57632C.1.pep
QQLASRTMAGTGDVAAAARASARPAGSSSTHPLGGRVVDRDGRVRGDQPPLLTHLFSLRASLVLGYTELADNAVALEGYLHVRGEHALGCTYLGRGHYRGRCYTRGERTLAEHTFCWPEPACWTTHTPPVPESSSTLLTRCYI

SEQ ID NO: 322992 - protein, 77 aa, Zea mays
  Clone ID: MRT4577_57633C.1.pep
SSSTSSIVASIRSIANTSRSSTRLAAGDDVRAQQECECDSHGVRRGRRVQAMHTLPSSRGTVNKRVVSRSTVRNQIS

SEQ ID NO: 322993 - protein, 134 aa, Zea mays
  unsure (1)..(134): unsure at all Xaa locations
  Clone ID: MRT4577_57634C.1.pep
RELCEGGELLDRILSRGGRFIEGDAKIIVEQILKVVAFCHLQGVVHRDLKPENFLFSTREEHSAMKIIDFGLSDFIRPDEWLYDIVGSAYYVAPEVLHKSYSTQTDMWSIXVITYILLSGSRPFWARTESCIFR

SEQ ID NO: 322994 - protein, 127 aa, Zea mays
  unsure (1)..(127): unsure at all Xaa locations
  Clone ID: MRT4577_57635C.1.pep
MGELDTMKVLIAALAXLLALAASAACSTSGSCGCQTFXFHLPPPNYLPPTGYLPPQHLPXPWQYPTQPPHLSPCQQIRSCXGVRGVGXSPYLGQCVQFLGQQXHRAVTPYGXDQCQPLXKQSCHQIK

SEQ ID NO: 322995 - protein, 102 aa, Zea mays
  Clone ID: MRT4577_57636C.1.pep
CLSFFGIHQMRGQPARHHSCLVSSVFFKRVEKSGIQRMPTAMAEPRPCSACRQHYRTGGQLALQCQNKPLMLSMSPPFLFISRWIVQNNTSTLIKRNGESTP

SEQ ID NO: 322996 - protein, 74 aa, Zea mays
  Clone ID: MRT4577_57637C.1.pep
IWTATRARYCGHDPLACHLCFSAPAAAKAILVLLCPALSAPCAAAFPLVLSSPDSIQDNCGENTDAVTALELLG

SEQ ID NO: 322997 - protein, 81 aa, Zea mays
  Clone ID: MRT4577_57638C.1.pep
KASCSPVLEVWPIRTHTLQPYVIDGHDNDENLIYLIMENDHHLPYERLYILICSAAELSLGNDSPGIILATGRYSSLSISP

SEQ ID NO: 322998 - protein, 402 aa, Zea mays
  Clone ID: MRT4577_57639C.1.pep
MTTVPKPQQVAHSRARLAPRAIGALLEFAPASSSLRFAVHRCRTARLEVKASGNTFGNYFQVATYCESHGGGVGCVISGCPPRIPLTEADLQVELDRRRPGQSRITSTRKETDTCKILSGTHEGVTTGTPILVIVPNTDQIGSDHREIANVYRPSHADATYDFKYGVRAVQGGGRSSGRETVGRVAAGALAKKILKLKCGLEIESNIVRCPDPEYAEKMIDAIDRVRVRGDSVGGVITCVARNVPRGLGSPVFDKLESELAKAMLSIPASNGFEIGSGFAGTDLTGSEHNDEFYMDKAGSVRTRTNRSGGVQGGISNGEIVHFKVAFKPTPSIGVKQNTVSRERQNVELLARGRHDPCVAPRAVPVVESMAALVLMDQLMAHVAQCEMFALNAALQEPVGSF

SEQ ID NO: 322999 - protein, 85 aa, Zea mays
  unsure (1)..(85): unsure at all Xaa locations
  Clone ID: MRT4577_5763C.1.pep
ITFGTFGLTENKGTSVTQKQMPSQSVQYGSTVHLFIGTRRSXHVKLHPMPFTFANDSKVIHQGLNSLFPFKSVPFPAVISKLPCA

SEQ ID NO: 323000 - protein, 497 aa, Zea mays
  unsure (1)..(497): unsure at all Xaa locations
  Clone ID: MRT4577_57640C.1.pep
MTTVPTPQQVAHSRARLAPRAIGALLEFAPASSSLRFAVHRCRTARLEVKASGNTFGNYFQVATYGESHGGGVGCVISGCPPRIPLTEADLQVELDRRRPGQSRITSTRKETDTCKILSGTHEGVTTGTPILVIVPNTDQIGSDHREIANVYRPSHADATYDFKYGVRAVQGGGRSSGRETVGRVAAGALAKKILKLKCGLEILSFVSKVHQVVLPEDAVDYGSVTLEHIESNIVRCPDPEYAEKMIDAIDRVRVRGDSVGGVITCVARNVPRGLGSPVFDKLESELAKAMLSIPASNGFEIGSGFAGTDLTGSEHNDEFYMDKAGSVRTRTNRSGGVQXFSLHPNKTLSIVTVALFSKKNGIGLFAXVQGGISNGEIVHFKVAFKPTPSIGVKQNTVSRERQNVELLARGRHDPCVAPRXWHRVMTLLAASAATILFNFFPATATAIRGLLLTWLXAVPVVESMAALVLVDQLMAHVAQCEMFALNAALQEPVGSF

SEQ ID NO: 323001 - protein, 46 aa, Zea mays
  Clone ID: MRT4577_57641C.1.pep
VGGQLRYVLLIFDTFYDNKDSCFHFLKGSNSIAYQSIEEECTLDLI

SEQ ID NO: 323002 - protein, 149 aa, Zea mays
  Clone ID: MRT4577_57642C.1.pep
LPFQLDLGDAAHGATHNSDFAKSRSCTRLASACSSPPWRKPPPQARHLAGGAFVWPASDMTRPRSSRRRLVASSHHHSRSLPVARILGCGREDFPLRWIKGETLTLLADRSPNTTAEVAVSDPQRHQKKEAGPGYANATACMPFATWIG

SEQ ID NO: 323003 - protein, 367 aa, Zea mays
  unsure (1)..(367): unsure at all Xaa locations
  Clone ID: MRT4577_57643C.1.pep
QKKRAFYCGDVGEGCRQKFKGYDAAGTIXENYANILVLLLRVXQACDHPLLLXGHESDLGEGNSIERGKQLPKETVTNLLEKVEKGAGICSICNDPPEDAVVTTCGHVFCYQCVHERLTSDGHVCPYALCGNKLSFRSVFTPAVLKLCISPKPEFGEETSCSTAADKPSSICESSYISSKIRAAVEILNSIIKTPALTAGDTTESIPSMAPPVKAIVFSQWTGMLDLLELSLSRNGIQFRRLDGAMSLDLREKEVNGFKTDPEVRVMLMSLKAGNLGLNMVAACHVIMLDPWWNPYAEDQAVDRAHRIGQTRPVTVSRFTVKDTVEDRILALQEKKREMVESAFGEDGSRGTATKLTVEDLRYLFMV

SEQ ID NO: 323004 - protein, 57 aa, Zea mays
  Clone ID: MRT4577_57644C.1.pep
IIPLCLQRTILILFRTTHIYLIYLTIQLTKMCANNKFSSDPLHRLTNTNPDFSSITR

SEQ ID NO: 323005 - protein, 54 aa, Zea mays
  Clone ID: MRT4577_57645C.1.pep
KGKGELKKKKKKKKKRGGRYLEIHLLKQIIGGPLFNGQGYLNPIPRPFFYTGGA

SEQ ID NO: 323006 - protein, 94 aa, Zea mays
  unsure (1)..(94): unsure at all Xaa locations
  Clone ID: MRT4577_57646C.1.pep
QSLALFCQCGSSGICARASDTETFAFHAEINQLVXLIINTFYFNKEIFLRELISNCFDALDKIKFESLTDKSKLDAQPELFIHLGPDKGTNTLF

SEQ ID NO: 323007 - protein, 102 aa, Zea mays
  unsure (1)..(102): unsure at all Xaa locations
  Clone ID: MRT4577_57647C.1.pep
GRGLLLLVRGLGCLLGRFVCLRFVCVGGGAVSAAAVLLVSGPGLGVLRVLGLRAARASAGVLVSXGVGRRRVALAGVGRGVLRRRFLRVLPRCLCGVVVVLG

SEQ ID NO: 323008 - protein, 84 aa, Zea mays
  Clone ID: MRT4577_57648C.1.pep
AWVSFRDLNNSVKGKYSNWNALVSIRIGKDSSNHTETCICIRGCALMHMHLNWPTGRHNLEAVLFNVASYGASHRPASTEQMQF

SEQ ID NO: 323009 - protein, 85 aa, Zea mays
  Clone ID: MRT4577_57649C.1.pep
CINRQGEIEIESQASRAGQMLRHGRERNRLSIRRKTHRSGRQAEALKRRSGPEDMKSIDQRNRTKAREAAWNAARSRKQIPAGLE

SEQ ID NO: 323010 - protein, 100 aa, Zea mays
  Clone ID: MRT4577_5764C.1.pep
PELQCRAKPTGLFFVCRLPDPPGRILELMTAGYAPHMGKPWLSVRKTVQPLQMPATCSMRPVGPANSRDHSPEGFFGHSGPTQDGSAPPVGASDTGALLD

SEQ ID NO: 323011 - protein, 76 aa, Zea mays
  Clone ID: MRT4577_57650C.1.pep
FHRSHHCSTKLTQLISHQFTHMFISFQKATDKISTTFPIPSQDQCFPIVQLMVARSISSNDTVKTIRNLIIRLVVN

SEQ ID NO: 323012 - protein, 103 aa, Zea mays
  Clone ID: MRT4577_57651C.1.pep
RSCCPLYEISIVTDRRGSSRFANSTARRRNAIPRARIRGTRRFTSPQPQVYMPILLSSFIPQAPGLEHALICIICFSSDFRADCDLYCFVVTHTYLIVFVETK

SEQ ID NO: 323013 - protein, 62 aa, Zea mays
  Clone ID: MRT4577_57652C.1.pep
LMSRVVFKPASHYSDMLTGVFIISVILSNLFSNFSIKPRYVSKTKIWKKTFTCIAFYNTKYL

SEQ ID NO: 323014 - protein, 244 aa, Zea mays
  Clone ID: MRT4577_57653C.1.pep
MAAQISMKRKFVADGVFYAELNEFFTRELAEDGYAGVEVRVTPARTEIIIRATHTQNVLGEKGRRIRELTTLVQKRFKFPENAVELYAEHVQNRGLCAIAQCESVKFKLLNGLAVRRACYGVVRFVMESGAKGCEVVVSGKVRAARAKAMKFADGFMIHSGNPAREFITTAVRHVDLRQGVLGIKVKIMLDNDPTGRNGPKQCLPDIVTILEPKDEAAITEPSAQDFRPAPAAPAAADYAAVII

SEQ ID NO: 323015 - protein, 107 aa, Zea mays
  unsure (1)..(107): unsure at all Xaa locations
  Clone ID: MRT4577_57654C.1.pep
KQTETGNTRGRETGETGKNKPTGFHPGGRGGTGNPXGPCGQXKPGWGGNQFPWTETGVWGPGGTNKKTGLGDPGGEGGVFGGGGGHLWWIGNNRGRGAVLWGGLHPP

SEQ ID NO: 323016 - protein, 159 aa, Zea mays
  unsure (1)..(159): unsure at all Xaa locations
  Clone ID: MRT4577_57655C.1.pep
MGGQGSGSARGSGAAAALALVLLCVLLHGELAXVXXVRXGGRXXXSFNTXNWAKGKRVRAGDVLAFRYNAKAHNVGPVSAGGYKXCSAPKGVRGGTTGNDLFTLKRGANYLMCEFPGHXRAGMRDWCDRRVRGPGRLGRAGDDECGDTGARFGGQVLII

SEQ ID NO: 323017 - protein, 52 aa, Zea mays
  Clone ID: MRT4577_57656C.1.pep
AFLITWYSYCTSAPSLIFYLFQLWLTWSLRLLTRGLTWYSYFFGPLALFHLS

SEQ ID NO: 323018 - protein, 61 aa, Zea mays
  unsure (1)..(61): unsure at all Xaa locations
  Clone ID: MRT4577_57657C.1.pep
GGGKGGGGKGGGRRDGGXGGGGGXGGRXEGGGGGYEGGGGYGGRREGGGGGYGGGGGXWRD

SEQ ID NO: 323019 - protein, 72 aa, Zea mays
  Clone ID: MRT4577_57658C.1.pep
MFTNDKDDIKCTSQVMIMNHPCQIGNSFAPVMDCHTLHIAVKFAVLFTKIDMRSRKELVKKPPFFKNRDSGM

SEQ ID NO: 323020 - protein, 57 aa, Zea mays
  unsure (1)..(57): unsure at all Xaa locations
  Clone ID: MRT4577_57659C.1.pep
IIHTGERPYDCEEYGTCFNXSXSVLNTHTRIPTADKLYXPVGCDNASDNISNLSNHK

SEQ ID NO: 323021 - protein, 101 aa, Zea mays
  unsure (1)..(101): unsure at all Xaa locations
  Clone ID: MRT4577_57660C.1.pep
MCXXXXXLLLLITTISVNTVTGSRCNAQEKNQIVSLCQMYIMRGALVQLPSQTGPCCAAVRELERVHRGMQMKCIADLLNAGDLQKYDPTKIKHLDISCYT

SEQ ID NO: 323022 - protein, 104 aa, Zea mays
  Clone ID: MRT4577_57661C.1.pep
MAPCKVAAALLLLIITTISVNTVTGSRCNAQEKNQIVSLCQMYIQRGTLVQLPSQTGPCCAAVRELERVHRGMQMKCIADLLNAGDLQKYDPTKIKHLDISCYT

SEQ ID NO: 323023 - protein, 77 aa, Zea mays
  Clone ID: MRT4577_57662C.1.pep
PIRPTGPTHLALRLKHIMRTPLSRPHLDRQTATIPHLYHYTYQLQRSPLPRTNTRVLLIQPVLHLYKILPDHKQHTT

SEQ ID NO: 323024 - protein, 170 aa, Zea mays
  unsure (1)..(170): unsure at all Xaa locations
  Clone ID: MRT4577_57663C.1.pep
VAVASSSLDSPXATGSTSPSLHGRTAXPAAGDSSLASSTSAASSLLGCFQPNSAPLLQASSSSXFMAPXSSSNQAPSYGACSLQGCSSXADAQQSSHGRAPWEHAGAPAVPMVEASARPADMAASPXSSSSSPWPPCSLSTAPGNSNSSSPFSLRPLSMASSPPAASSFP

SEQ ID NO: 323025 - protein, 34 aa, Zea mays
  Clone ID: MRT4577_57664C.1.pep
IVPCSSWRFSELVWFKPSFTSKDQGRYANKWVPC

SEQ ID NO: 323026 - protein, 129 aa, Zea mays
  unsure (1)..(129): unsure at all Xaa locations
  Clone ID: MRT4577_57665C.1.pep
PSVLLLRVRAARAGGGXSRGGGGHXAGVAAAHDAHATCVLPFGGGVGGPRGVXVVCCDIFSSALVRGLMGVEQVVXALEGSAVGVMAGGVLGVARVPRDELLGXIAGXGVEPQDRRGLVLAQCPCVNGQ

SEQ ID NO: 323027 - protein, 96 aa, Zea mays
  Clone ID: MRT4577_57666C.1.pep
PFSERTNYHRIPTPAGAGLVGLRSVRSPRADINERRWQMPTHYFAPLILRTRDTMTSYMTRSDMPELTLDLLKTVTARMLVMTCTNTTHGHGLWRD

SEQ ID NO: 323028 - protein, 70 aa, Zea mays
  Clone ID: MRT4577_57667C.1.pep
LIYVAVFSRNPFSNRKVKSRRPARFEHTIPSSGGCGSRAVACGAGAYLIEKIAILVFLTWVKCYYVTLCL

SEQ ID NO: 323029 - protein, 71 aa, Zea mays
  Clone ID: MRT4577_57668C.1.pep
QKEVLFTLGATRAARRHQVSQQTLGQAVRGKKKPRQGGELAPSGFRLHLPCFSFLCRSVWGFCTHKSFMQF

SEQ ID NO: 323030 - protein, 105 aa, Zea mays
  Clone ID: MRT4577_57669C.1.pep
ERERALVGLFPPPAPIDPQGRQNVQRPVGPGNVLLGARAGAPRGKGLPLRLHFHWVGLLLLLRDLRVLPRLPLLLLQLAGASSGGRSKPSRWGSPPFFLPPSQFP

SEQ ID NO: 323031 - protein, 95 aa, Zea mays
  Clone ID: MRT4577_5766C.1.pep
HERLKKPDWIRVKAASPSSRFYEIKDILRANNLVTVCEEASCPNIGECFGKGTATFMIMGDKCTRRCPFCDVGHGRPDPLDVNEPGNLAKTIADL

SEQ ID NO: 323032 - protein, 231 aa, Zea mays
  unsure (1)..(231): unsure at all Xaa locations
  Clone ID: MRT4577_57670C.1.pep
MAEATGHGGRVVDLSGAEIRGDLEDRNPPIFLPRQPAASPLLALDIGGTLIKLVYTASRGGGADGTDLRFAKFERRRLQECFNFIRAEGLLASNGGGEGVTLKATGGGAYKFADDFLEKLGVCLDKLDEMDSVVSGANFLLQVTGNRKFERVTGTHIGGGTMFGLAKLLTGCKSYDEFLQLSQKGDNFVLDLIVKDICGEAVCQKQGLSXSTLASSFGKXITSKKKLTDYK

SEQ ID NO: 323033 - protein, 284 aa, Zea mays
  Clone ID: MRT4577_57671C.1.pep
EFRCCRKATGGGAYKFADDFLEKLGVCLGKLDEMDSVVSGANFLLQSIPGAAFTHMNGLRNPVDVSPNNLFPYLLVNIGSGVSILKVTGNRKFERVTGTHIGGGTMFGLAKLLTGCKSYDEFLQLSQKGDNFVLDLIVKDICGELVCQKQGLSTSTLASSFGKVITSKKKLTDYKPEDLASTLLSAFTYNIAQIAFLVASLLGLRRVFFGGSYIRGHKSTMENISYAIDFWSQSQMQAVFLRHEGYLGALGALMSYGDPSGENLTLEEKEPHHESAPVDGTSAD

SEQ ID NO: 323034 - protein, 55 aa, Zea mays
  unsure (1)..(55): unsure at all Xaa locations
  Clone ID: MRT4577_57672C.1.pep
MQVSMIFDLPQSNCHFLKETGRSSAFQLXRKDSLCTRMWLKPLITGNHPSGRPRI

SEQ ID NO: 323035 - protein, 132 aa, Zea mays
  unsure (1)..(132): unsure at all Xaa locations
  Clone ID: MRT4577_57673C.1.pep
FPPAFFPVLFAFPRLGGWLAPWXXSLSAPPSXFLRPPPVSPGFWLWPFPPVXARVXSXPCAXLGXVAXXXAXWRRRAGSALLLRFPAPASFLPFCACGPCFAWLALAFCPPSGVRFVLSRGCWCPLAFSFPF

SEQ ID NO: 323036 - protein, 125 aa, Zea mays
  unsure (1)..(125): unsure at all Xaa locations
  Clone ID: MRT4577_57674C.1.pep
PHHCTQFDEVVLSIADVCRHCLDDVCSMADNVSEIHIAIAEQPTAIQLVYRKLLGYDITLDIHKRDECEKKDRPDVITTPALNTTSYCFNNSQELNDYKDARHATPXYDRYGNSTTQALYNMMTH

SEQ ID NO: 323037 - protein, 106 aa, Zea mays
  unsure (1)..(106): unsure at all Xaa locations
  Clone ID: MRT4577_57675C.1.pep
HPRLRHTTDASVXLPLLYLHNNTCNRISSKSYCGKALKIYQNHIPWTXLNKIPLFLTDISTIYHTQNQHQQTLKLLHKAYKLYNTYALQHNTITDIQPXMGVLHYI

SEQ ID NO: 323038 - protein, 84 aa, Zea mays
  Clone ID: MRT4577_57676C.1.pep
MPTDHDLLHPLKVYEQKLNKLKRLVQSPNSYFMDVKCPGCFQFTTIFSHAATVVYCASCATVLCQPTGGKARLTEECSFRRKVE

SEQ ID NO: 323039 - protein, 98 aa, Zea mays
  Clone ID: MRT4577_57677C.1.pep
RTTAVAGTGSPTNRSAGSLLGARTSSTGTAASTETCSILANYNVGKLRLRGPHSGGQTKRLLRYIIIVREEVEREKSQDCLSCWMRIQETHIFSRNTE

SEQ ID NO: 323040 - protein, 75 aa, Zea mays
  unsure (1)..(75): unsure at all Xaa locations
  Clone ID: MRT4577_57678C.1.pep
MKVPIDALALLALAASATSXTHTAXSCKPPLHAQTPYYMPPPLYVDPPHQPQPXEYLNQPPQLNPXQQFRSCGDG

SEQ ID NO: 323041 - protein, 128 aa, Zea mays
  Clone ID: MRT4577_57679C.1.pep
AGRFGTSASIDAIADTGTSLVYVDDSILSAYYGQVRGAQVDSQQGGYVFPCSSTLPDFSIVVGGVKQTIPGKYINFAPNGDGTCFGGLQSGSDFGFNIFGDIFLKSKYVIHEMGSNGPRLGFAQQSGN

SEQ ID NO: 323042 - protein, 79 aa, Zea mays
  Clone ID: MRT4577_57680C.1.pep
LVSTSRLRVHTLSTVLVSFSLFTHAFILPLIALCPFQDERCSKLKIYPILQKVYLERILRKPEIDAFAEELMPHQESFI

SEQ ID NO: 323043 - protein, 399 aa, Zea mays
  Clone ID: MRT4577_57681C.1.pep
MDSSLASAAAIADQRQKIEQYRHILASVLSSSPPDISQAKRFLDHMVSDEVPLVVSRQLLQTFAQDLGKLESDAQKEVAHYALTQIQPRVVSFEEQVVVIREKLAELYESEQQWSKAAQMLSGIDLDSGIRMLDDTNKLSKCVQIARLYLEDDDAVNAEAFINKASFLVTNSHQEVLNLQYKVCYARILDLKRRFLEAALRYYDISQIEQRKIGDEEIDENALEQALSAAVTCTILAGAGPQRSRVLATLYKDERCSKLKIYPILQKVYLERILRKPEIDAFAEELRPHQKALLPDKSTVLDRAMIEHNLLSASKLYTNISFDELGTLLGIDPRKAEKIASRMIYEDRMRGSIDQVEAVIHFDDDTEELQQWDQQIAGLCQALNDILDSMSSKGITIPV

SEQ ID NO: 323044 - protein, 58 aa, Zea mays
  Clone ID: MRT4577_57682C.1.pep
RGQIFPLSFLESIFCKRRELVPRFYAGSPAQHSPGRRVLVTLQGTLRSFRSGIPIPAF

SEQ ID NO: 323045 - protein, 429 aa, Zea mays
  Clone ID: MRT4577_57683C.1.pep
IFSYQPVFSDLSQIVDLSSVEVYPVKTVEHRLVRKGSHSVVQVKVAWSNLPDDALTWEDFEVLKRRFPNVIDWGQLNPGRGKDVSTVVVIREKLAELYESEQQWSKAAQMLSGIDLDSGIRMLDDTNKLSKCVQIARLYLEDDDAVNAEAFINKASFLVTNSHQEVLNLQYKVCYARILDLKRRFLEAALRYYDISQIEQRKIGDEEIDENALEQALSAAVTCTILAGAGPQRSRVLATLYKVVQQIPINLDVYGFSGKYGLTEIIASGLSWVVSDLVQCQPDERCSKLKIYPILQKVYLERILRKPEIDAFAEELRPHQKALLPDKSTVLDRAMIEHNLLSASKLYTNISFDELGTLLGIDPRKAEKIASRMIYEDRMRGSIDQVEAVIHFDDDTEELQQWDQQIAGLCQALNDILDSMSSKGITIPV

SEQ ID NO: 323046 - protein, 108 aa, Zea mays
  Clone ID: MRT4577_57684C.1.pep
MDSSLASAAAIADQRQKIEQYRHILASVLSSSPPDISQAKRFLDHMVSDEVPLVVSRQLLQTFAQDLGKLESDAQKEVAHYALTQIQPRVVSFEEQVGYIGLLLRMLL

SEQ ID NO: 323047 - protein, 40 aa, Zea mays
  unsure (1)..(40): unsure at all Xaa locations
  Clone ID: MRT4577_57685C.1.pep
XXCHIAFXYISQMISRQIILRDSIRFHHFKDGKCSCGDYW

SEQ ID NO: 323048 - protein, 244 aa, Zea mays
  unsure (1)..(244): unsure at all Xaa locations
  Clone ID: MRT4577_57686C.1.pep
LILSTVCTKLLCTNAHLGRRVAAHHLKVYIRCFRNGIAILDSDKTLICLRNALDFVGYLICQKSRFFFLKTKNLFIYSIMAKMWSCINDSQWKIGAFFTNSYANPKKFRSRNNKIYFGLNRQPDCVVILHPDRKSSVILEADRSQIPIVYLVDSTIPSHKRFTFTIPANDSLRLLVYLFCNLITKTVRQKRTAINGPRAGARGASTXXLXIRTYPAASSKWXKEVXSLQNWIVMNRKFFLMLLL

SEQ ID NO: 323049 - protein, 67 aa, Zea mays
  Clone ID: MRT4577_57687C.1.pep
VLQSLGAILVQFVVEKTVNPFLVELNEGLEVDVRFSANLEISGVRPHYGVKVTSLCVKYLKSSLDAP

SEQ ID NO: 323050 - protein, 102 aa, Zea mays
  unsure (1)..(102): unsure at all Xaa locations
  Clone ID: MRT4577_57688C.1.pep
RLLMLXLGLSESADTGTIFQHCXQARIAPIIPPDLSPTQFWVCENPILEPYRIQQAIEDVILPLXPCFYNSYXGLLQQVPXAHILSQNIMSHQLQQLELADL

SEQ ID NO: 323051 - protein, 90 aa, Zea mays
  Clone ID: MRT4577_57689C.1.pep
VEPMAKGLKARNCLVEVGPEKIIAPVIWGPPFPHCKSKWIMCREIIFLTNNLELGWKCWIPPGHMPLVCCPRWVKSPFDPNLAHLCPAKK

SEQ ID NO: 323052 - protein, 100 aa, Zea mays
  Clone ID: MRT4577_57690C.1.pep
QSKATQSCKTFSFICHRLLYNTRKDVTLTQACDSRGNVDGTQPGLVRFKALFVFIKPMGIERDLIPYKSKSPSIHSNPPQSPWIRDETNKARGLKWIGGD

SEQ ID NO: 323053 - protein, 83 aa, Zea mays
  Clone ID: MRT4577_57691C.1.pep
LTHIDNLTTVRYCIAYYVLAYSCYFCQRNQCDNYCAVLTGYQYALPTLTSHQLLRGALNTHHGEPILYSKNCEGVRVKTTYFP

SEQ ID NO: 323054 - protein, 126 aa, Zea mays
  Clone ID: MRT4577_57692C.1.pep
CDTKHLYENFQSTRSLHSCSRTGTACIMHARPGKGQFLVPRKILQAMMPPVFGVCLWAEALSTGPKKQFGRGPQGLAGLRMGGSAASAICSGNLSLSKARRQRRARNRTRTGRRSKPEFFLFHLNK

SEQ ID NO: 323055 - protein, 44 aa, Zea mays
  Clone ID: MRT4577_57693C.1.pep
RPGALIPWSTMAHPDVATMTTNKRLLLISLASAGIRTAQAYAIA

SEQ ID NO: 323056 - protein, 52 aa, Zea mays
  unsure (1)..(52): unsure at all Xaa locations
  Clone ID: MRT4577_57696C.1.pep
WRPVXRXIPSAPGFWIRXRVDSAAGVEDGGAAAEVGEQIAFAEPSGRATARG

SEQ ID NO: 323057 - protein, 87 aa, Zea mays
  Clone ID: MRT4577_57697C.1.pep
KKSPVIPAALVTLLMIKKGVQKTAHRVQVGALVAPLFARGPLLLKNILSGQIMTGLHAHGALQHKHNSLPKHLPQLRTNGLALIQRV

SEQ ID NO: 323058 - protein, 98 aa, Zea mays
  unsure (1)..(98): unsure at all Xaa locations
  Clone ID: MRT4577_57698C.1.pep
PFNQLAALIPTGYLQQQILLPFNELVAASRASFLPQQQVLPFXDQFWANPAPLLFVPHLFPFVRPGFCYPTAPYQGMIIGGAPFKLICGGAGFHFFEL

SEQ ID NO: 323059 - protein, 110 aa, Zea mays
  Clone ID: MRT4577_57699C.1.pep
PTHPKKKKQNKIKQTPLLLQQVLGQQGAALHQTTPQTSTCMPKPYSYNAATAFTFHLLNSSKIRTHTTFLFALPKTTSASRNLKTGISEKPCCSKLKWTTIKTPMIRRTL

SEQ ID NO: 323060 - protein, 75 aa, Zea mays
  Clone ID: MRT4577_576C.1.pep
FGSSTSHIFDFNSIVLLCLKPLESRVSCHNFNFLFTPARLSPINTTLSAKMHTPRDILLYVPYDIMHYQSKKVRA

SEQ ID NO: 323061 - protein, 67 aa, Zea mays
  Clone ID: MRT4577_57700C.1.pep
RSHHAYLTLPACLSVLSVSMSCTCAETAPTEHGLISSGRAGRLRRKATLIAYQTLYGRSMLLRGSKF

SEQ ID NO: 323062 - protein, 56 aa, Zea mays
  Clone ID: MRT4577_57701C.1.pep
KGLSKKISYRMIILMCYCRLLGKIKFYFWCRKRRVLVDIWKFRNKSWLGVNLRSVS

SEQ ID NO: 323063 - protein, 56 aa, Zea mays
  Clone ID: MRT4577_57702C.1.pep
TLLYATLPPTLPNYQIFIKSILYISPVSSILNYYDSIIHYLINDIISHSYNLTSYY

SEQ ID NO: 323064 - protein, 101 aa, Zea mays
  unsure (1)..(101): unsure at all Xaa locations
  Clone ID: MRT4577_57703C.1.pep
KGAKTGEGTYRVVHKGMDRHTNETSGLKKIRLEQEDEGVRSTGIREISXLKEMHHRNIVRLQDVVHNDKSIYLGFEYLDLELKKHMDVCTDFKNHRIVKIF

SEQ ID NO: 323065 - protein, 64 aa, Zea mays
  unsure (1)..(64): unsure at all Xaa locations
  Clone ID: MRT4577_57704C.1.pep
GRXXXXXXFPKXXXRAXGPPPKAPPQGXGAXIXXRRXREGXXXXXKNFRGXXGDKEXRRTAXXA

SEQ ID NO: 323066 - protein, 44 aa, Zea mays
  unsure (1)..(44): unsure at all Xaa locations
  Clone ID: MRT4577_57705C.1.pep
KNEMGGLFLXWYEAAFLFVYMFSVCIYVSAERWVPFHLDPLKVV

SEQ ID NO: 323067 - protein, 258 aa, Zea mays
  unsure (1)..(258): unsure at all Xaa locations
  Clone ID: MRT4577_57706C.1.pep
MAHLRLHGTIDATIVGADNLHDRSRHTGKVPGFLGNIVQGVQETTGLGKGLSRMYAAIFLGSACIARTRTIAVPAAGSARWNEPLRAYCAHHAADVVISVXRAARPXDDTVLGRAYLPARELLSDGTTIDRWFDVLGANRKKLPDGPKIHVQISFRDVADQGVSWGGGVGSGVVPHTFFSQRPGCRVTLYQDAHASPEFDPKIQLXGGGLYKPGHCXEDIYDAISNARHLVYITAWSMFPHITLVRGPGRRPGTLGEL

SEQ ID NO: 323068 - protein, 236 aa, Zea mays
  unsure (1)..(236): unsure at all Xaa locations
  Clone ID: MRT4577_57707C.1.pep
PCRPRRRRLRRRRQRLSARAPAPIPRRGCRHQAPQLAPHGSAAPLHGYPLSPSCARSAPAAPPSRXSVEQLKRPTRLWSLRDEIVILRGLATYRAKRGVLPGSTYDISKLHGRIRSELSVKVTTTQLGDKVRRLKQKYNLLASRGKSGRDPDLPSQHEQSVYEIGKKVWGGSANGGGSTGGDGYEIGGDSQEEHEFGESDEDVESGWDEXPQEQEADANHYGKWTRIWVRGWQREV

SEQ ID NO: 323069 - protein, 273 aa, Zea mays
  Clone ID: MRT4577_57708C.1.pep
VPSFSEQRSKRPRSVAVPSSVEHLKRPTRLWSLHDEIVILRGLATYRAKRGVLPGSTYDISKLHGRIRSELSVKVTTTQLGDKVRRLKQKYNLLASRGKSGRDPDLPSQHEQSVYEIGKKVWGGSANGGGSTGGDGYEIGGDSEEEHEFRESDEDVENGRDERARKNRRVMPIAMANGNGAGLGAVNANSRGKFETEKGKDAYPYLWETVEDLSKEHPNGVAFKKAFESIEGPKARGMEEKLRKFRLTEIRHQLRRMELMKETVKMVLDALEG

SEQ ID NO: 323070 - protein, 92 aa, Zea mays
  Clone ID: MRT4577_57709C.1.pep
KKDGGSMGSPIKDVYLDSKTLPLVHKAFLKELLFVAQGRPPQKPRVLTSEGGILIRLTMKTDPGKPSEPEPEPEGEEKTTTDGLADGCGGRV

SEQ ID NO: 323071 - protein, 114 aa, Zea mays
  Clone ID: MRT4577_5770C.1.pep
TEQGGPRRRKGTPRGPQAAQGAGSQGREQKPQGRGENQEAERRQENAADRESRPQRTGRWVTHGVWPPPPGARLVPLGHLRGRYKSSRRSCALSLVFLARKKIETYRKKPKREK

SEQ ID NO: 323072 - protein, 97 aa, Zea mays
  Clone ID: MRT4577_57710C.1.pep
MVQVQGDDDCYVMKLYMSGRYVIVEHRPCKYIAWCFLTCGGGELAAADRKAVTATAIQGTSLPAELCGTQVINAPPLAGRRPSSSCWWVGAHPRLAA

SEQ ID NO: 323073 - protein, 65 aa, Zea mays
  unsure (1)..(65): unsure at all Xaa locations
  Clone ID: MRT4577_57711C.1.pep
MPRGSRRRTSRIAPPANRAPQIRAEPTPAPVAQPPAAAPPSAVGSPAAAPRQPSLMARXGTTAAG

SEQ ID NO: 323074 - protein, 36 aa, Zea mays
  Clone ID: MRT4577_57712C.1.pep
NTCAPALSVKDCVFLLIVLPCAYLFFSGAKKHCIPD

SEQ ID NO: 323075 - protein, 96 aa, Zea mays
  Clone ID: MRT4577_57713C.1.pep
AISFSKKKKKKKKKKKKKKKKKKKKKKKKKKKKKKKKKKKKKKKKKKGGPPFFELFTPEFISDPVPGGVPTFPFGRGFKTGGKHGKNVSLGKNFFP

SEQ ID NO: 323076 - protein, 133 aa, Zea mays
  Clone ID: MRT4577_57714C.1.pep
TQSSHCFSRGLAPGWPGIDEGITMSCYTLIRLLFDGRLYTYPTFGVLVAAAKCLPPRTLNLQGAFADFLTNTNSSRTKNYAQRKVESPTKESNALRFLVEHGGSGSPGDKGSLVFEQSSGHLLTVQMTGANLV

SEQ ID NO: 323077 - protein, 93 aa, Zea mays
  Clone ID: MRT4577_57715C.1.pep
SSRPDRERPPRWFFFFFCFFLFFFFFSREKKYAVCPHYCICLWQDHIFGSPWAYNFAPKKRVNPFFLQIKFDFSIRGQTSWGLPTKSSFDFFF

SEQ ID NO: 323078 - protein, 63 aa, Zea mays
  Clone ID: MRT4577_57716C.1.pep
MAQPSKEPCKKEACDIQACLSKNMFDSRKCVRVIQLLQSCCEQCEYKSTHCGSLSGLLKNISK

SEQ ID NO: 323079 - protein, 124 aa, Zea mays
  Clone ID: MRT4577_57717C.1.pep
PLSQTLFLSGFPNPPGPFFFPSLFPTQPAPNHLEPLPSKPPPLTEFHPPLPSRFSPFKCFSPPIYPPPPPPKRTFFLQGSGFFLNPSPPFSSPSRSKKKKKKKKNKKKKKHQKKKKKKNPPPPS

SEQ ID NO: 323080 - protein, 81 aa, Zea mays
  unsure (1)..(81): unsure at all Xaa locations
  Clone ID: MRT4577_57718C.1.pep
FAPICFLLLVALFFLGKKKGPRVFFCFPEKLFKFIGRYVFGLRDDYPFFFSPFLFLAIGPLSSLFVCRGFNPHVXAXXXXF

SEQ ID NO: 323081 - protein, 69 aa, Zea mays
  Clone ID: MRT4577_57719C.1.pep
GKPGFFQHRGVVKGRETGLFRGPKKKNLTAHTGEEKMYSLRGGAPIIYLFKKWREGATTHGPCKGGLLL

SEQ ID NO: 323082 - protein, 93 aa, Zea mays
  Clone ID: MRT4577_5771C.1.pep
CFFLHKDYYAVCSVKFIARKQWFICATEAEGLVHVYSYETQEMQNVISFRIDDEHYYYLRHRNAKGPIISLAVHLSQPYVMSCWHYHKEVMKL

SEQ ID NO: 323083 - protein, 79 aa, Zea mays
  Clone ID: MRT4577_57720C.1.pep
DIHAEAVKKRRRATKKPYSRSIVGASLEVIQKKRAEKPEVRDAAREAALRYACRFYNKIKPSFVPMTVVTVCWPNQQNL

SEQ ID NO: 323084 - protein, 114 aa, Zea mays
  Clone ID: MRT4577_57721C.1.pep
SLVIRNWLPPAMEHLLDCPGMLRCFKIQNSSSFFFSSLFQFLILADLSAFLLCVGVVHDCGTCFSASALCCSLPWMTGLSAKEHACAMPRRLLLLPSHCLLNATPTTRKLALHG

SEQ ID NO: 323085 - protein, 148 aa, Zea mays
  unsure (1)..(148): unsure at all Xaa locations
  Clone ID: MRT4577_57722C.1.pep
RPPPPTSSSSSSRRRTPPPRGATTTPTATTMRSSXSPVXSWTTRSRAPPSTPPCCPRRPRTPPPWTTSGTSWTRRRTAPRCSPSPSTSTSGTPTPTPTRTATTAATASAPRAAATTGPPPPPTGTGTRTRGSWHGRLSWWRPSSRPPG

SEQ ID NO: 323086 - protein, 72 aa, Zea mays
  Clone ID: MRT4577_57723C.1.pep
KKKKKKKKKKKKKKKKKKKREKRGKHYGGLTNFGRPFLRFLVFLPVLATFKGGGGFYKNPISCPAFYNFCFF

SEQ ID NO: 323087 - protein, 156 aa, Zea mays
  Clone ID: MRT4577_57724C.1.pep
MARRGLMEQDLSKLDVTKLHPLSPEVISRQATINMGTIGHVAHGKSTVVKAISGVQTVRFKNELERNITIKLGYANAKIYKCEDDRCPRPMCYKAYGSGKEDSPLCDVPGFENTRMKLLRHVSFVDCPGHDILMATMLNGAAIMDGALSLIAANGK

SEQ ID NO: 323088 - protein, 411 aa, Zea mays
  unsure (1)..(411): unsure at all Xaa locations
  Clone ID: MRT4577_57725C.1.pep
MARRGLMEQDLSKLDVTKLDPLSPEVISRQATINIGTIGHVAHGKSTVVKAISGVQTVRFKNELERNITIKLGYANAKIYKCEDDRCPRPMCYKAYGSGKEDSPLCDVPGFENTRMKLLRHVSFVDCPNKIDLIQESAAMNQHEAIQKFIQGTIAEGAPVVPISAQLKYNIDVICEYIVKKIPIPERNFTSPPNMIVIRSFDVNKPGSEVDEIRGWCSWWQILRGVLRVXQKIEVRPGIVXKDENGNIKCTPIYSRIVSLYAEQNELQFAVPGGLIGVGTTMDPTLTRADRLVGQVLGEVGSLPDVYVELEINFFLLRRLLGVRTKGTEKAGKVSKLTKGEILMLNIGSMSTGARVLAVKNDLAKLQLTAPVCTSRGEKVALSRRVEKHWRLIGWGQIQAGTTLEVPPCPL

SEQ ID NO: 323089 - protein, 141 aa, Zea mays
  Clone ID: MRT4577_57726C.1.pep
SPSGRRRTGSGAARLRASLSPRSRHETKQPGRGLLQPLLGPREAFHPLPVIPSSLRGFLPCSRPARWIRVRAGERCEREATARPHYWATGHALRFSWVRRQSRGRWGVGMRSIWAAEQKRKDILKSVIAYERNICSNKLMS

SEQ ID NO: 323090 - protein, 464 aa, Zea mays
  Clone ID: MRT4577_57727C.1.pep
MARRGLMEQDLSKLDVTKLDPLSPEVISRQATINIGTIGHVAHGKSTVVKAISGVQTVRFKNELERNITIKLGYANAKIYKCEDDRCPRPMCYKAYGSGKEDSPLCDVPGFENTRMKLLRHVSFVDCPGHDILMATMLNGAAIMDGALLLIAANESCPQPQTSEHLAAVEIMRLQHIIILQNKIDLIQESAAMNQHEAIQKFIQGTIAEGAPVVPISAQLKYNIDVICEYIVKKIPIPERNFTSPPNMIVIRSFDVNKPGSEVDEIRGGVAGGSILRGVLRVNQKIEVRPGIVMKDETGNIKCTPIYSRIVSLYAEQNELQFAVPGGLIGVGTTMDPTLTRADRLVGQVLGEVGSLPDVYVELEINFFLLRRLLGVRTKGTEKAGKVSKLTKGEILMLNIGSMSTGARVLAVKNDLAKLQLTAPVCTSRGEKVALSRRVEKHWRLIGWGQIQAGTTLEVPPCPL

SEQ ID NO: 323091 - protein, 91 aa, Zea mays
  Clone ID: MRT4577_57728C.1.pep
STTRGISDVDGLVLHLLHERVCQHVDHSLLGVRVQLHQLGNRRRAVLLQVVQEVVQVRSEVFIVHHLEQYLDHALRQSLTAELHVQRIRRV

SEQ ID NO: 323092 - protein, 97 aa, Zea mays
  unsure (1)..(97): unsure at all Xaa locations
  Clone ID: MRT4577_57729C.1.pep
PYHVLSVSRYSSSLVFMSAYRXRTLXYLPVKNTSIPQSLALFXQVAYFDSLLSAPEKGGQYATPGLEQLXNXGLCGGIGLSNLKTPPAMFAAPARHG

SEQ ID NO: 323093 - protein, 483 aa, Zea mays
  Clone ID: MRT4577_57730C.1.pep
MYPGLRRALAGDENPSVPKMARRGLMEQDLSKLDVTKLHPLSPEVISRQATINMGTIGHVAHGKSTVVKAISGVQTVRFKNELERNITIKLGYANAKIYKCEDDRCPRPMCYKAYGSGKEDSPLCDVPGFENTRMKLLRHVSFVDCPGHDILMATMLNGAAIMDGALLLIAANESCPQPQTSEHLAAVEIMRLQHIIILQNKIDLIQESAAMNQHEAIQKFIQGTIAEGAPVVPISAQLKYNIDVICEYLVKKIPIPERNFTSPPNMIVIRSFDVNKPGSEVDEIRGGVAGGSILRGVLRVNQKIEVRPGIVMKDETGNIKCTPIYSRIVSLYAEQNELQFAVPGGLIGVGTTMDPTLTRADRLVGQVLGEVGSLPDVYVELEINFFLLRRLLGVRTKGTEKAGKVSKLTKGEILMLNIGSMSTGARVVAVKNDLAKLQLTAPVCTSRGEKVALSRRVEKHWRLIGWGQIQAGTTLEVPACPV

SEQ ID NO: 323094 - protein, 107 aa, Zea mays
  Clone ID: MRT4577_57731C.1.pep
FCPTNGWGLMLEDQSVHPSGDLAGARLPVRLGRLGLGYPGCCDSVGPLYMLPSAFAVTRCGLLMSSPMLMSFALGRLLPCLFSQEACRMCTPSLAPWTSPVGKQTRG

SEQ ID NO: 323095 - protein, 244 aa, Zea mays
  Clone ID: MRT4577_57732C.1.pep
MARRGLMEQDLSKLDVTKLHPLSPEVISRQATINMGTIGHVAHGKSTVVKAISGVLFVRFKNELERNITIKLGYANAKIYKCEDDRCPRPMCYKAYGSGKEDSPLCDVPGFENTRMKLLRHVSFVDCPGHDILMATMLNGAAIMDGALLLIAANESCPQPQTSEHLAAVEIMRLQHIIILQNKIDLIQESAAMNQHEAIQKFIQGTIAEGAPVVPISAQLKYNIDVILGYLVKENPSLKGALPH

SEQ ID NO: 323096 - protein, 69 aa, Zea mays
  Clone ID: MRT4577_57733C.1.pep
IGVHRRRHAAFGAQIRGILGSSNNRPAHKYTTHLTLNQHLRRWIRSRTPVVLIDVIRAATAVGVDLSLR

SEQ ID NO: 323097 - protein, 107 aa, Zea mays
  Clone ID: MRT4577_57734C.1.pep
HDGVVSTRASLWMHPSWYLMSGVRMHDLAVGARRCLMNCIGIQIYKSSRAEVFYCASFCAYGVEGFFTSCYGLLRWHMGSSLNNLLETVRVSAWRLVTWHSSVGGCQ

SEQ ID NO: 323098 - protein, 56 aa, Zea mays
  unsure (1)..(56): unsure at all Xaa locations
  Clone ID: MRT4577_57735C.1.pep
MLGTRSDSCVLISVXPMAETAHSFRPELFYGDYRNETTARILLKTLVIIGVITAST

SEQ ID NO: 323099 - protein, 61 aa, Zea mays
  Clone ID: MRT4577_57736C.1.pep
PSTLVPLFSLVCLLYHRFFSSSLACYHPPDVVLTSLPEFCFRGCLLAYFRRSGVVPLYRHR

SEQ ID NO: 323100 - protein, 49 aa, Zea mays
  Clone ID: MRT4577_57737C.1.pep
SQCIIIKHSLIIKQSQCTPEWHDLKANAILMFQFFWRPLVDENPLCITC

SEQ ID NO: 323101 - protein, 48 aa, Zea mays
  Clone ID: MRT4577_57738C.1.pep
NIGDCSCCYPPVTPLDIEGPNCCYPRAFTFTLTTKISIPFNLSHRTLN

SEQ ID NO: 323102 - protein, 51 aa, Zea mays
  Clone ID: MRT4577_57739C.1.pep
PADRRAPCNCLRNAARGVSGLNAGNAASIPSKCGVSIPYTISPSTDCSRVN

SEQ ID NO: 323103 - protein, 82 aa, Zea mays
  Clone ID: MRT4577_5773C.1.pep
RTDFNEVPYVKSIHDNFLKRLFNELLHLNDEVNVEIVPQMHAPSESIDLVESLIDSETPSPFDLSKSAPIVHTKHLSEDISA

SEQ ID NO: 323104 - protein, 330 aa, Zea mays
  unsure (1)..(330): unsure at all Xaa locations
  Clone ID: MRT4577_57740C.1.pep
MARASWNMNYEKILVDILHEHNHVKYRGQNGWAPEGWRSMTQMFNEKCPLAKFTKAQIQEKEKELKANYKVLKEARKQSGVGWNEAMGMIIAEPPIWANIIVSNPKVKEISXSRPFPLYNQLSALYDGSCATGDLNFTSTQQHTSSRQQLHIQAEAEAEAEAMSSFRIDDDLGVNPDLNQISSNLHGLASSSTRVEIGGHDRTPASSEQRAESHGRKRKQSQIAGVLEEYLDYKRQHNDKLLDVVNQIDQQAEGCNKKEEYCIGKCVRVLESMEDITEEEMAAAMGVIKCEENREIFLNSQRPRVRLLWLRNEINKQKNNLYHFPNTTWK

SEQ ID NO: 323105 - protein, 71 aa, Zea mays
  Clone ID: MRT4577_57741C.1.pep
LTHIPLYRLGSYQGRLQRPPGRPARTQVLSLAAGRNNPRQSDEITLRPKGIKDRAALGASAIRRHRLKTLL

SEQ ID NO: 323106 - protein, 59 aa, Zea mays
  Clone ID: MRT4577_57742C.1.pep
APWPPYLPLANQNAIHNRPVSRPGTLLGFRPSALVGGRSPMEVRESPSPDLAVGASKKS

SEQ ID NO: 323107 - protein, 528 aa, Zea mays
  Clone ID: MRT4577_57743C.1.pep
RGRPGRDCRAHSFGLFSREFAHRLHLIGPREVRATSLVRAPEQSSLPDLHPSVIVRMKQMARKSMGGKAPRKQLATKGARKSETRTRGVKKAHQLRPGTAALCEIRQYKKSTGLLIRKLLFQRLVGHDATWFLLDIAFYSHNRFQEDSTSISGIPMSNTRSAEEKEVLATSPNRCLTNCFKLIQSCFSWDAVPYQQPWPPPHMQVEFGCGSADLCPIPWPFFTTIGTNEEIIDITSDDDKVDNVVDQLIDEQIAAVVFVPACMEATPNNVINTSKTVETFAAHQSPEYDSGLKDKDQRISFEDEISEGGQAEQSTPQQELWAMPPDTSDRETVERTTRSIEVEHFSQVESKHKMNSMSVEASEHVTITQIEKKPVQQVEITQELDSLPICSREHSNEALEGERTVQAGLEQECEVLGILSTITSDIFAIGLSPNQYTVYFYRNLMACMMLIRRRFLLSFGRSWDAVTYKQPWPPPVHVVILGDGFSVRLTPWQPLDTDIYSFPVNKPESSAGVFCIATESTQCAYDSQ

SEQ ID NO: 323108 - protein, 40 aa, Zea mays
  Clone ID: MRT4577_57744C.1.pep
KSQFFHIQMIDSSHSREPPLIWTRQMFSFPFSCYSQTLPP

SEQ ID NO: 323109 - protein, 110 aa, Zea mays
  unsure (1)..(110): unsure at all Xaa locations
  Clone ID: MRT4577_57745C.1.pep
ARYQRLSDFRAGCRALETEAIXVARDGEGAHRXPRGAXSQLFHFLXPRXKRFRQRRDPCPRQRTXTFXFPTLLMSRHDLPSRHLRKHSSLVSRPPTXRGXRGNQRKPREA

SEQ ID NO: 323110 - protein, 54 aa, Zea mays
  Clone ID: MRT4577_57746C.1.pep
DIHNKVPTLIYTKSITHKPTLSTNELLPLHAKYPANLIDRTLHIKLKLHPIPTH

SEQ ID NO: 323111 - protein, 79 aa, Zea mays
  Clone ID: MRT4577_57747C.1.pep
TCTDITLDFSWLNYSSTAPLYSTAKTKIEVLILYQVSSTPLTLRICSPSSFDSPFSAIASSSHLRGYFHHCSTTLCNVN

SEQ ID NO: 323112 - protein, 57 aa, Zea mays
  Clone ID: MRT4577_57748C.1.pep
KNFKSDQIFTTVHYSGALRNLATVNSGAHCYLCHMWTYFCVLQLCKLPGKLSSLSIP

SEQ ID NO: 323113 - protein, 32 aa, Zea mays
  Clone ID: MRT4577_57749C.1.pep
ISALCKLEADGVEPVVRRGLRVKVIRSFLPPT

SEQ ID NO: 323114 - protein, 61 aa, Zea mays
  Clone ID: MRT4577_57750C.1.pep
FSKRTLQSRVQSCQCSSVASLGHLHQLGSYPLCICCSTCRHSLRNVRSSKKERDKHPSSSE

SEQ ID NO: 323115 - protein, 218 aa, Zea mays
  unsure (1)..(218): unsure at all Xaa locations
  Clone ID: MRT4577_57751C.1.pep
MALRLSLAPPAAAPAASTCRCSSASFIRPGVAVGSRRGRARGCVVAMADLLGDLGARDPFPEEIESQFGEKVLGNVDTLHQILIPTLSALSLASLPLQPDAEPLSLDDARRLLFKVVGWRLVLSDGDGDEQRPARLQCVWKVRDETCGQELIARINAALHGAGHAPATLAFEAPNQVTAELSTPSAAGDSLTVNDYIVAAXIDKVKTLDLIPKKRAWA

SEQ ID NO: 323116 - protein, 84 aa, Zea mays
  Clone ID: MRT4577_57752C.1.pep
CKIRYRVFHFFPPRPSVARFILEPKSVLFNEQEQKLNDSESAIASMQTSKDYLEKQQGEVENNIRELLQQDPGLARQILSMTVQ

SEQ ID NO: 323117 - protein, 76 aa, Zea mays
  Clone ID: MRT4577_57753C.1.pep
QLLRELPGQRLIAAEVDHTSPPDESSLTDVVQRGLLHLRRQSALSTTVSSSPPNKSLMNSKVMKIPGRNVLRAKLH

SEQ ID NO: 323118 - protein, 45 aa, Zea mays
  Clone ID: MRT4577_57754C.1.pep
FDDSNSHHESSQELASTSSLRQGARGSTVTDGVARCAPTRPPTRP

SEQ ID NO: 323119 - protein, 143 aa, Zea mays
  unsure (1)..(143): unsure at all Xaa locations
  Clone ID: MRT4577_57755C.1.pep
KKRPFLPPAQTKKVRARSEPLPATRQSALRSEDDSFSLLPTNSLEDRGGARSSAAGSVVSQVRVPSAARFPSSAVPSPSLVYFPTREPLTLRPLLMVDSILPLLPPLVAAAAAAAKEEVARRAALDDRARATRPXATPLLXAP

SEQ ID NO: 323120 - protein, 87 aa, Zea mays
  Clone ID: MRT4577_57756C.1.pep
KKKKKKKKKKKKKKKKKKKKKKKKKKKKKKKKKKKKKKKKKKKDGGPLQWVQTLFSLKGNLFSFLFFNLISFHGLSFKNFGKGKPLF

SEQ ID NO: 323121 - protein, 154 aa, Zea mays
  unsure (1)..(154): unsure at all Xaa locations
  Clone ID: MRT4577_57757C.1.pep
MTERISIHILQAGVQEXYSRWNLYCLDNDIQVDEDMTLDSNIVRGDDAFFTFFLETGVEKHPPRAVFVDLEPTDIDDLITVTYRKFFLPDQLIRGNEDTINKFARVDXTIVPEIDDLCLDSIMNVDDHWTDVQRFLDFNYVXGRTXSGLVSLLL

SEQ ID NO: 323122 - protein, 60 aa, Zea mays
  unsure (1)..(60): unsure at all Xaa locations
  Clone ID: MRT4577_57758C.1.pep
KFMQHIFSYAFXXLMAYSRAGPGTKTGPTQIQSTATMSTCFVYAYKLGLGVASIKNEGYR

SEQ ID NO: 323123 - protein, 49 aa, Zea mays
  Clone ID: MRT4577_57759C.1.pep
KFLPRYSLKMCFCFSYRNIDFISIGVWIGCNKCAWCSHIIYKHPPFLIS

SEQ ID NO: 323124 - protein, 68 aa, Zea mays
  Clone ID: MRT4577_5775C.1.pep
NVEEVTEAAPSTPGNNKAYCDDHGTCYRNHNQDVEPQKPCCGGQPIHPLLEQDHLMLMLIDGMQAYIY

SEQ ID NO: 323125 - protein, 88 aa, Zea mays
  Clone ID: MRT4577_57760C.1.pep
MAVFKTTIVLVLVFVVLSSTSPCYEAGRSCIGGCDQQLDATPCVDPLKNDADHCTTATCALQCLSAKHKTKSAYCKHEGSKYECCCPP

SEQ ID NO: 323126 - protein, 677 aa, Zea mays
  unsure (1)..(677): unsure at all Xaa locations
  Clone ID: MRT4577_57761C.1.pep
MDSTDSIADKAIGRIQEIADKIFSIARETIRPGRGLTSFDATKIHVALEDIACMMEQDSLVLQEYLDKVNNVNNQLDSNYEPSDLSSPPPGEEDLSQDWDFAKHFEKWRSVAKWDTRATKIYTEICVEEVNARNRPQHFLNAEGYANLIRKFKERTGRMYTRDQMKNRWDSLKRMYTQWKTLNERATGLGRDPHTSSISAPDEWWAKQNEAMPGCIMFKTAPLENEDDLKIMFGPIVCTNETTLVPGVEDANSSSDGHEEDILGGGENSTPDPSSIVKGKRKVLHDSPKPKKKRDMKYEYMKCLVEAYESRTLSSNKSIASFENNLVRKEVAAQLQQVIEDGAAEGSDLHFFATHLLIEKRYRDVFATLKTKEGRNAWLRRDYEKNENAVTNFMPYESFSHQRSFSIIRVELVFAIITVMCEPDTHSXMMRGMVNSXALFAVDIWGSSPSGVSRRTMVETGIQLVERTLESSDDFFDMFRMRQTVFRRLHDTLVQNYGLVPSRGVSTTKATAIFLWACGGPQSFRQIRNKFGHSLETISHKFSEVLNAIYRMSSDVIKPKDTNFIEIHPRLRETRFWPHFKDCIGTIDGSHFPASVPATEQAKYIGRHGYASQNVMAVCDFDMRFTFVVTGWPGKYYLVDSGYPNRKGYLAPYKGQKCHISEWQNARQPVGSKEVCT

SEQ ID NO: 323127 - protein, 170 aa, Zea mays
  unsure (1)..(170): unsure at all Xaa locations
  Clone ID: MRT4577_57762C.1.pep
TKEAHRRTPNXNAGSPTEXTNDPSXAXGTGXAKQAENXTAEQXAKGGGGEGXXNGGXTPTXDNXXQAXXDKXDSQAXXPXQARHCEKKHXRXQDXTPTGNAAGADNATKENKEARXXXGQERPKKPGARXNXDTGXXEXXDGEGTXAQXRXDXAKQXXDERKPRKSXPNP

SEQ ID NO: 323128 - protein, 1281 aa, Zea mays
  Clone ID: MRT4577_57763C.1.pep
MVPGQSSHLERLHRRLHDEQERRRQEQEREQQDSSPSPQREVESERPPSPAPQPEMPPAPPQGIPAAGGDPDGDRDDDDAGGSSSHDTERSEEPELEGWIARPITRDATRGCHFHDALDTLLRWAFDRHTWSIEYRCVVYQHRRGLYPDQWEATCLVRRPDDDLWGAEAFSEHYSITERDTAEVAMQDAARRALSQYCSLFSGVADGLDLKYYPRRSTGSAGGVIVSPVGEGNPRLNSMVNLAAVLNTELDHTLNELGKMSENRRRGARRAQPEQQAPQEDAAQQQQLPPPPPMIVEQMFMMQTQAVQAIGQTLAAMQQEEFRDNFRHYHVPEGLMIVKKKEFLALKQGPLSVSEYRDKFLQLSRYAPEDVNTDAKRQYRFLRGLVDPLRYQLMNHTFPTFQHLTDRAIMTERKRREMEDRKCKIGGPQAGSSSRPRYSGNSPQQFKQARQGAPQQASGVRGQAYNRGKVNHLEAKAIQDAQDVAVGMFPVESYPAKVLFDTGATHSFVSASWVESHNIPIEPMIPPLICPNLRIEIRGIYFPTSLVVMGTQGLDVILGMNWLHKNQATVSCDKRTVKLVSPSGKEVVTKLYLPELEEGACHHLSVEDKGSNPIEAIRIVSEFPNVFPKELRGMPPERKVEFAIELIQGTAPISKRAYRVSRPELVELKKQIDELLEKGYIRPSTSSWAAPVLFVEKKDGTKRMCIDYRALNEVTVKNNVFMDYLDKFVVVFIDDILIYSQNEQEHEEHLRKLSKCKFWISEVLFLGHIINQDGLAVDPKKVAAILDWKAPKDVRGIKSFIGMVGYYRRFIEGFSKIARPMTALLAKKVEFKWTPACQESFEMLKQKLTTSPVLVLPDVHKPFSVYCDASYTGLGCVLMQEGKVVAYSSRQLKVHEKNYPTHDLELAVVVHALKTWRHYLYGQKCDIYTDHKSLKWLELIKDYELEIHYHPGKANVVADALSRKSQVSMLAAHPMSFELAKKFDRLSLEFLNNTQGVIIELEPTLEQDIRKGQKDDEKINEIRQLIIDGKGLDFREDGEGVIWFKDRLCVPDITSIRELILKEAHKTTYSIHPRSEKMYQDLKKRFWWYGMKREIAEYVAICDSCQRIKAEHQRPAGLLQPLQIPQWKWDEIGMDFIVGLPRTRASYDSIWVVVDRLTKVAHFIPIKTTYNSAVLAELYMSRIVCLHVCHPQTDGQTERTNQILEDMLRACGLQDKLGWDKRLSYAEFSYNNSYQASLKMSPFEALYGRNCRTPLDWDQPDERQVFGPEILLQAEENIRMV

SEQ ID NO: 323129 - protein, 1099 aa, Zea mays
  Clone ID: MRT4577_57764C.1.pep
MALGDRVQERSRVFPPLAQGNNEQLVVPECVAEDPSEQQLGEGKCPQTYHMARIKCTAHKSVIPFLPSRLAEHPPRRTVSGQSSHLERLHHRLHEEQERRRQEQEQEQQDSSPSPQREVESERPPSPAPQPEMPLHHLRASRLLEETLTEIETMTTLVAVRATTWSARRSRSQKDGSLDPSLATLLAGVTSTTLSIPCCVGPSTDTLGPSNTILSLAWCTIRTMISRVQRPSQNTILSLRGTLPRQPCKMQRDGHFLSIARCLVGAGGVIVSPVGGGNPRLNSMVNLATMLNTELDHTLDELGKVRVEVAKLHAECVAHHYLDGGSLTPVGIQHPYRSPPRGRFDYGSSGNWLDLSSDAAGAAAATPTSTSSASSDATSPPRQAGRVHEGPSPIFAHSVDPMDAEDWLHTVEHELHTAQCNDREKVLYGPRQLRGAAQSWWESYLTTHANPEAITWEEFRDNFHRYHVPKGLMIAYNRGKVNHLEAKAIQDAQDMAVGMFPVESYPAKVLFDTDATHSFVSTSWVESHNINIEPMIPPLRVNSVGGKVQSDRICPNLRIQIRGIDFPASLVVMGTQGLDVILGMNWLHRNQATISCNKRTVKFVSPSRKEVVTKLYLPELEGVCHHLSVDDKESNPIEAIRTVSEFPDVFPEELPGMPPEKVEFAIELIPGTTPISKRAYRVSGPKLVELKKQIDELLEKGYIRPSFSKIVRPMIALLAKKVEFKWTPTCQKSFEMLKQKLTTTPKCDIYTDHKSLKYIFTQSELSMRQRRWLELIKDYELEIHYHPGKANVVADALSRKSQVNMLATHSMSFELAKEFDRLSLRFVNNTQGVAIELEPTLEQDIRKGQKDDDKINEIWQLIIDGKGPDFCEDAEGVVWFKDRLCVPDITSIRELILKKAHETTYSIHPGSDKMYQDLKKRFWWYVVDRLTKAAHFILVKTTYNSTVLAELYMSRIVCLHGIPKKIISDRGTQFTSHFWQQLHEALGTHLKFSSTYHLQTNGQTERTNQILEDMLRACALQDKLGWDKRLPYAELSYNNSYQTSLKMSPFEALYGRNCRTPLHWDQLDERQVFGPEILLEAEENIRMVRENLKAAQSRQ

SEQ ID NO: 323130 - protein, 53 aa, Zea mays
  Clone ID: MRT4577_57765C.1.pep
EIPLCCAMYQTKNFLYLLRGHLPIDRKVGSNPASIFSNCGQANELNQSLGSIR

SEQ ID NO: 323131 - protein, 922 aa, Zea mays
  Clone ID: MRT4577_57766C.1.pep
MARLSCTAQRPLRRTVLGQSSQLERLHRRLHEEQERRRQEQEQQDSSPSPQRESTNIVAGYTQTSGRLLACGVADGLDLKYYPRRSIDSAGGVIVSPVGEGNPRLSSMVNLVAVLNTELDHALDELGKMSENRRRGVRRAQPEQQAPQEEAAPQQHLPSPPPMTIEQMFLMQTQTVQAIGQTLAAMQQCNDREKVLYGPRQLRGAAQSWWESYLATHANPEAITWEEFRDNFRRYHVPEGLMIVRKEEFLALKQGPLSISEYRDKFLQLSRYAPEDVNTDAKRQYRFLRGLVDPLHYQLMNPTFPTLQHLIDRAIMTKRKRQEMEDRKHKIGGPQAGSSSHPRYLGNSPQQFKQESHNIPIEPMIPPLRVNSVGGKVQSDRICPNLRIEIRGIAFPASLVVMGTQGLYVILGMNWLHRNQATVSCDKRTVKLVSPSGKEVVTKLYLPELEEGACHHLSVDDKESNPIEAIRVVSEFPDVFPEELPGMPPERKVEFAIDLIPGTTPISKRAYRVSRPELVELKKQIDELLEKAPVLFVEKKDETKRMFIDYRALNEVTVKNKYPLSRIEDLFDQLRGVSVFSKIDLRSGYHQLRIRPADIPKTTFITKYGLYEFMVMSFGLTNAPAYFMYLMNSVFMDYLDKFVVVFIDDILIYSQNEQEHEEHLRKVLQRLRDCQLYAKLSKCEFWIKEVLLLGHIINRDGLVVDPKKVAAILDSKAPKDVRGIKSFIGMAGYYRCFIEGFSKIARPMTALLAKKVEFKWTSEGRVVAYSSRQLKVHEKNYPTHDLDLAAVVHALKTWRHYLYGQKCDIYTDHKSLKYIFTQSELNMRQRRWLELIKDYELEIHYHPGKANVVADALSRKSQVNMLAAHSMSFELAKEFDRLSLGFLNNTQGVAIDLEPTLEQDIRKGQKDDEKINKTRVTP

SEQ ID NO: 323132 - protein, 1045 aa, Zea mays
  unsure (1)..(1045): unsure at all Xaa locations
  Clone ID: MRT4577_57767C.1.pep
MPPAPPQAIPIAGDRDDDDASGSSSHGTELSEEPEPKGWIARPITHDVARGCHFNDALDTLLRRAFDRHTCGVADGLDLKYYPRRSTDSAGGVIVSPVGEGIPRLNSMVNLVVVLNTELDHATDELGKVRAEVAELHAECTAHHYLDGGSPVPVGIQHPYRSPPHGRFDYGSPSNWSDPSSNAAGAVAATPTSAYSASPDATDWLRTMERELHTAQCNDREKVLYGPRQLRGAVQSWWESYLATHANPEAITWEEFKDNFRRYHVPKGLMIVTKEEFLALKQGPLSVKDVNTDAKRQYCFLRGLVDPLHYQLMNHTFPTFQHLIDRAIMTERKRQEMEDRKRKIGGSQVGSSSRPRYSGNSPQQFKQELPGMPPERKVEFAIELIPSTAPISKRAYRVSRPELVELKKQIDELLEKGYIRPSTSPWAAPVLFVENKDGTKRMCIDYKALNEVTVKNNXVDPKKVAAILDWKXPKDVRGIKSFIGMAGYYRRFIEGFAKIAIPMTALLAKKAEFKWTPACQESFEMLKQKLTTAPEGKVVAYSSRQLKVHEKNYPTHDLELQAVKCDIYTDHKSLKYIFTQSELNMRQRRWLELIKDYELEIHYHPDKANVVADALSRKSQVNMLAAHLMPFELAKEFDRLSLGFLNNTQGVTVELEPTLEQDIRKGQKDDEKINEIRQLIIDGKGPDFREDAEGLIWFKDRLCVPDIKSIRELILKEAHETTYSIHPGSEKMYQDLKKRFWWYGMKRQIAEYVARCDSCQRIKAEHQRPAVGLPHTRAGYDSIWVVVDRLTKATHFIPVKTTYNSAVLVELYMSRIVCLHGIPKKIVSDRGTQFTSHFWQQLHEALGTHLKFSLAYHPQTDGQTERTSQILEDMLRACALQDKLGWDKRLPYVEFSYNNNYQASLKMSPFEALYGRNCRTSLHWDQPGERQMFSSDILLEAEENIRMVRENLKAAQSRQRSYADTRRRELSFVVGYYVYLKVSPIRGTKRFGVKGKLAPRYIGSYKIQARGGEVAYQLSLPENLSAVHDVFHVSQLKKCLRVPKE

SEQ ID NO: 323133 - protein, 76 aa, Zea mays
  Clone ID: MRT4577_57768C.1.pep
KTVVKNVFFFQQTFSSLQAKYMNKNPKQKEPPPGLVFFHIPLPKFNSFTASNFTGVNQGGFNSPSINSGFFAPMGE

SEQ ID NO: 323134 - protein, 124 aa, Zea mays
  Clone ID: MRT4577_57769C.1.pep
PRFSLFNFGPGFVGDFERGTIFPREQLFAFFAPRFYFSLFRKMVCLQGPGPDFPVQPRVSGAVWKGCLNGRLLLGGKGPRAPPQVGGGLGVFVFLGSPGWGGAGHQPNLFLGDVIWAPPWSGDV

SEQ ID NO: 323135 - protein, 105 aa, Zea mays
  unsure (1)..(105): unsure at all Xaa locations
  Clone ID: MRT4577_5776C.1.pep
LLRRDLRSRRWPAAPARPPRKRPRRLSVTYRTTVYRARAQHQAYPTRCRSVRVRCTAGNMFWYVLSSPPAVEVESRRGRERGLYEHVTAKTMGSHRSXXGGSRYP

SEQ ID NO: 323136 - protein, 112 aa, Zea mays
  Clone ID: MRT4577_57770C.1.pep
MPYELAKEFDRLSLGFLNNTQGVTVELEPTLEQDIRKGQKDDEKINEIRQLIIDGKGPDFREDTEGVIWFKDRLCVPDFKSIWELILKEAHETTYSIHPGSEKMYQDLKKIF

SEQ ID NO: 323137 - protein, 60 aa, Zea mays
  Clone ID: MRT4577_57771C.1.pep
GVKDFVYNVSRIGSQFAPGIRFGRLPGLHLVVVRREPFEDCNVKQVFANNNWVVSAKNKE

SEQ ID NO: 323138 - protein, 131 aa, Zea mays
  Clone ID: MRT4577_57772C.1.pep
MTFELAKEFDRLSLGFLNNTQGVTVELEPTLEQDIRKGQKDDKKINEIWQLIIDGKGPDFREDAEGVIWFKDRLCVPDIKSIRELILKEAHETTYSIHPGSEKMYQDLKKRFWWYSMKREIAEYVAKCDSC

SEQ ID NO: 323139 - protein, 88 aa, Zea mays
  Clone ID: MRT4577_57773C.1.pep
KTALLPLQMKLQNPGQTVLLLLLMVRRLLFLFLLDGLLFVVGVVGFFVFGVNFIIVVALRVTLVETSKLVPPAIRVQELQPVYRVSVL

SEQ ID NO: 323140 - protein, 320 aa, Zea mays
  unsure (1)..(320): unsure at all Xaa locations
  Clone ID: MRT4577_57774C.1.pep
LXEGCHSRIVLGQSSHLERLHRRLHEEQERRRQEQEQEQQDSSPSPQQKVESERPPSPAPQPEMPPAPPQGIPAAGRDPDGDDDDAGGSSSHDTERSEELEPEGWIAKPITRDAARGCHFHDALDTLLRWALDRHTWSIEYHCVVYQHRRGLYPDQWEATCLVCHPDDDLQGVEAFSEHYYITERDTAEAAMQDAARRALSQYCSLFSGVADGLDLKYYPRRSTSSAGGLIASPVGEGNPRLNTMVNLAAMLNTELDHALDELGKVQAEVAELRAECAARHYLDGGSPAPVGIQHPYCLPPRGRFDYGTPDCRTWIDLDP

SEQ ID NO: 323141 - protein, 665 aa, Zea mays
  unsure (1)..(665): unsure at all Xaa locations
  Clone ID: MRT4577_57775C.1.pep
MTIEQMFMMQTQAVQAISQTLAVMQQVQQQPPPPQPPVQVQMPQVPRDKRAELMRGHPPXFAHSADPMDAEDWLXLRGAAQSWWESYLATHANPEAINWEEFRDNFHRYHVPEGLMIVRKEVFLAPKQGPLSVSEYRDKFLQLSRYAPEDINTYAKRQYRFLRGLHLIDRAIMTERKRREMEDRKHKIGGPQAGSSSHPRYSGNSPQQFKQVHQHPRQHQPQYQRQFPQQQQQQYRQNTQPGGNQYQRQNNQAARLPAPATNQSSQAAPAQVGGRACFYCGEQNHWAKNCPKKAAQQPPTVNAPARQGAPHQAPGVRGQAYNREKVNHLEVKAIQDAQDVAVGMFPVKSDPTKVLFDTGATHSFVSASWVESHNIPIEPMIPPLRVNSVGGKVQSDRICPNLRIEIRGIDFPASLVVMGTQGFDVILGMNWLHRNQAIVSCDKRTVKLVSPSGKEVVTKLYLPELEEGACHHLSVDDNESNPIEAIRIVSEFPDVFPEELPGMPPKRKVEFAIELISGTAPISKKDYRVSGPELVELKKQIDELLEKGYIRPSTSPWAAPVLFVEKKDGTKRMCIDYRALNEVTVKNKYPLPRIEDLFDQLRGASVFSKIDLRSGYHQLKIRPADISKTAFITKYGLYEFMVMSFGLMNVKGKCALGPFLKYFGD

SEQ ID NO: 323142 - protein, 157 aa, Zea mays
  Clone ID: MRT4577_57776C.1.pep
MPPAPPQGISAAGGDPDRDGDDDDAGGSSSHGTELSEEPESEGWIARPITRDAAHGCHFHDALDTLLRWAFDRHTWSIEYRCVVYQHRRGLYPDHWEATCLVRRLDDDLRGAEAFSEHYSITEGDTTKAAMQDAARRALSQYCSLFSGVADGLDLNS

SEQ ID NO: 323143 - protein, 57 aa, Zea mays; identical to SEQ ID NO: 322283
  Clone ID: MRT4577_57777C.1.pep

SEQ ID NO: 323144 - protein, 145 aa, Zea mays
  unsure (1)..(145): unsure at all Xaa locations
  Clone ID: MRT4577_57778C.1.pep
WSXGMKXATLRGNGAXEGPQGSGEXSGNTRETHTKERXRCAAGXXVAPXRDXEAGALGGKKTDXHPTXPLXPRPAMPALPPXXAAGRCPPAXWSXXGTPSRTPPPWTTXATXAGRXLRXXVRRVPARHGDXGTXWKRKSEGPEAP

SEQ ID NO: 323145 - protein, 57 aa, Zea mays; identical to SEQ ID NO: 322283
  Clone ID: MRT4577_57779C.1.pep

SEQ ID NO: 323146 - protein, 57 aa, Zea mays
  Clone ID: MRT4577_5777C.1.pep
YYFFHRMTTTANVLLQNGRGPPRPSLSLLLQTPRSEAPNNYALPYVTILKCMLFKSR

SEQ ID NO: 323147 - protein, 75 aa, Zea mays
  Clone ID: MRT4577_57780C.1.pep
HARARSSEFGSRGIVDPRAGHSEAKSALQGVLLKGDPGQQRPKDALMSSADFIGFLNNRYCQSLNSLQVHGPHQL

SEQ ID NO: 323148 - protein, 47 aa, Zea mays
  Clone ID: MRT4577_57781C.1.pep
HGTHFPNHSVEKQILGNQNTVSTSSNTSNTTLDVIVENFWDSCWSRN

SEQ ID NO: 323149 - protein, 88 aa, Zea mays
  unsure (1)..(88): unsure at all Xaa locations
  Clone ID: MRT4577_57782C.1.pep
TTQIXQKFFFFKKNKKKTPPRFYLKSWPTPKKXXXXLXYPILLTLSSNFIPFLXYHFFFFHFPSYYNFLTFKTLPLPNLIPXQHIPFS

SEQ ID NO: 323150 - protein, 62 aa, Zea mays
  Clone ID: MRT4577_57783C.1.pep
ELLARMKLVPYSSHSSQYKQRTFMMKWLLKRTLLQCLLINWVDPSNWGLREGFRPPSQQQRC

SEQ ID NO: 323151 - protein, 338 aa, Zea mays
  unsure (1)..(338): unsure at all Xaa locations
  Clone ID: MRT4577_57784C.1.pep
MVPVLNQKRLRFGSSRHGSWYNGTXAVPDTRAKPRARSPFGFSGENQARLTVSVAGPGSGGCGPMQGSGPSASNYGHNGVRSPAQWYDGPVYSNGHQIPTASPFXREGFPLTYKXRFFVIKSYSEDDVHKSIKYNVWASTPNGNKKLDAGYREAQEKSSDCPVFLFFSVNTSGQFVGVAEMVGPVDFDKTVEYWQQDKWNGCFPLKWHIVKDVPNNTLKHITLDNNDNKPVTNSRDTQEVKLEQGLEMLKIFKEHVTKTSILDDFGFYENRQKLMQEKRANQQLLQGQGADVSQEKDKDATNGKPGSQKQATSKEGTPAEVAADASKPVAESGISNDN

SEQ ID NO: 323152 - protein, 597 aa, Zea mays
  unsure (1)..(597): unsure at all Xaa locations
  Clone ID: MRT4577_57785C.1.pep
MSTVAPAPSAADQTTNLLQKLSLEGKDGSDTAKKPSGMPYGSTHAGDAQSAASQVDRSITPLLQEAMDPNFFYQPSAYASPAYYFPSGYDGSANEWDSRYAGHEGMEMPPTVYGDMYLGYGYAPYGPYPSGSPVPTVGHDGQSYGSQQYQYPSQYYQQPTPTNAKHGLNGASSQPEPPSVASQQARVLVDATKATPNVRANGMTIAHNSSLPRKQTHLNVSVANSGLYGRGPMQGSGPSASNYGHNGVRSPAQWYDGPVYSNGHQIPTASSTSYRSNSSSMRSQSQHPTTNLMGIHAQMPSSGMGLTSPRYPSRMYPDNRLYGQYGQYGNTLKGGLGFGSNMYSSRNNGRWGVVDTKYKPRGRAPFGFSGENQDGFTELNRGPRSGGFKHQKQFGPTVTIAVKGQALPSVGKQNSTLPDKGQFNQEGFPLTYKDAKFFVIKSYSEDDVHKSIKYNVWASTPNGNKKLDAGYREAQEKSSDCPVFLFFSVNTSGQFVGVAEMVGPVDFDKTVEYWQQDKWNGXCFPLKWHIVKDVPNNTXKHITLDNNDNKPVTNSRDTQEVKLEQGLEMLKIFQRHVYXTSILDDFXGFYENRQKFD

SEQ ID NO: 323153 - protein, 221 aa, Zea mays
  Clone ID: MRT4577_57786C.1.pep
NDNKPVTNSRDTQEVKLEQGLDYVPLKWNGCFPLKWHIVKDVPNNTLKHITLDNNDNKPVTNSRDTQEVKLEQGLDYVPLKWNGCFPLKWHIVKDVPNNTLKHITLDNNDNKPVTNSRDTQEVKLEQGLEMLKIFKEHVTKTSILDDFGFYENRQKLMQEKRANQQLLQGQGGDVSQEKDKDATNGTPGSQKQATSKGGTPAEVAADASKPVAESEISNDN

SEQ ID NO: 323154 - protein, 167 aa, Zea mays
  unsure (1)..(167): unsure at all Xaa locations
  Clone ID: MRT4577_57787C.1.pep
LCFFNXXYHNINKGVAKILLXRLQXXRXNQTLIPDXQLSXNRXXPAXXVMPFRDLKMXXAYQGTLIRQNXXTGGEGFXXISFNXXVCXSGPRRGSXXPFPQGXPXXKGXNXSXXRWEPXLFPXXNPSXXSXXXCXGXXSPWXXSXXGTPVEPRXLDAVLLXGXVQXS

SEQ ID NO: 323155 - protein, 61 aa, Zea mays
  Clone ID: MRT4577_57788C.1.pep
ALLLFVPPRLSRFFGSCAWGGAFFSCVGVAFCRCVCFPVGFSCARRGGALFVFLWFVRLFV

SEQ ID NO: 323156 - protein, 119 aa, Zea mays
  unsure (1)..(119): unsure at all Xaa locations
  Clone ID: MRT4577_57789C.1.pep
VDALTANLGVYGVYISCLXLHVVSILRIVRATIQGHRRKVPVNLCASVKVSLXIRXLHRSGLNNAWISWMDEHIAVTGKAPPVNVARYHTWVGGAAQRSPDLRMTPGLHVQLTVTLEQL

SEQ ID NO: 323157 - protein, 74 aa, Zea mays
  Clone ID: MRT4577_5778C.1.pep
RVEKGPPPPPPGFCAVHKVVQKTGQWIALKAATIKLVITLACTSYVYFWFPSPSFFFFFFFFPPPFFFFFFFFL

SEQ ID NO: 323158 - protein, 149 aa, Zea mays
  Clone ID: MRT4577_57790C.1.pep
VYYTTYGDRYSFVALLAPWAPYGYRKSCQAPASLNAGCSLDDVNISHIMIGSFHPQMMDLKRLYGTVLPGSCWNLDRQCSYHAHQDVTPLLHPNLSVAFDLNEDSATLLALAHPDAVLFMQLFDSHILLTTVSTNRLTELYCNTLKNSL

SEQ ID NO: 323159 - protein, 28 aa, Zea mays
  Clone ID: MRT4577_57791C.1.pep
KMSSYASSISGTIVEAEFNESIIQSGPA

SEQ ID NO: 323160 - protein, 63 aa, Zea mays
  Clone ID: MRT4577_57792C.1.pep
LFICDTDNRSQLAQGSHPHPLDIFGETTQDSYNPMGDTPIFMANAKKTFTSPIKCKNTHKPLK

SEQ ID NO: 323161 - protein, 150 aa, Zea mays; identical to SEQ ID NO: 205603
  Clone ID: MRT4577_57793C.1.pep

SEQ ID NO: 323162 - protein, 454 aa, Zea mays
  unsure (1)..(454): unsure at all Xaa locations
  Clone ID: MRT4577_57794C.1.pep
MDVIPHVRANKTYMPSGKKKKKKLLACFLASLSIFNFSNTMTTRACLLVAVAMALALLLQEHAAGAEAHKQKQQVQRLLRRLNKPPVKTIESPDGDIIDCVHITKQPAFDNPLLKNHTIQMWPSSHPRGGQLNEDYSNTASSITQTWHQNGSRSCPENTIPIRRTMEEDVRRADSPRSYGKKERRPKFTPVDGAGQPTTVTSGHQWAQASAQGGSTYYGTEATFDLWQPVVETASDFSLTQFWVVSGSYQANDLNTIEAGWQVSPNMYGDNSPRLFIYWTRDAYQTTGCYDLKCSGFXVQTNNAITFGVTQLSPVSTYGGPQNDITILVWKDPKTGNWWLQVGKDLLGYWPSSLFTNLASSASNIQWGGEVYSPDAGQTSTQMGSGHLPEEGLGKASYIRNIQVVDASNTLLSPSALGLFASRPNCYNVLNGGAGNSFGTYIYYGGPGRNPNCQ

SEQ ID NO: 323163 - protein, 72 aa, Zea mays
  Clone ID: MRT4577_57795C.1.pep
PGRAFNAGATTPYAGYTSASSSKYAYACPPPDPGDENGSHCYLVSFVGGVNHKNRTTRSRFSNAESTARDES

SEQ ID NO: 323164 - protein, 150 aa, Zea mays; identical to SEQ ID NO: 205603
  Clone ID: MRT4577_57796C.1.pep

SEQ ID NO: 323165 - protein, 46 aa, Zea mays
  Clone ID: MRT4577_57797C.1.pep
MGGFDQQVKERTKELKHLKTAAMKGIKAAGESCKKAWSKVRSSIKR

SEQ ID NO: 323166 - protein, 199 aa, Zea mays
  Clone ID: MRT4577_57798C.1.pep
MEAPPSSPFLVLLLLFFPSSGLAAPMDFNHEVQVLMVIKSLLKDPYGALRNWDRNSVDPCTWSFISCSPENLVTALEAPSKNLSGRLSPSIGNLTKLEKLQLQNNNIIGPIPAEIGKLAKLRTLVLSSNKLHGTVPNSLGRLGRLQYIDLSYNNLSGPIPKTSARTLNIAGNPLICAAEQDCDSTKLKPMLDSYIAGEQ

SEQ ID NO: 323167 - protein, 87 aa, Zea mays
  Clone ID: MRT4577_57799C.1.pep
PQKEIFRANKLSSLEWIFTAHRIFFTKKKKKKAPRAEKKKKKKKKKKKKKKKKKKKKKKKKKKKKGGGLRAPFFLGVGTTPPFFGGA

SEQ ID NO: 323168 - protein, 35 aa, Zea mays
  Clone ID: MRT4577_5779C.1.pep
IPCPCPVIQDGSTHDLLSSGLCTSTAYLPAKPLLN

SEQ ID NO: 323169 - protein, 79 aa, Zea mays
  Clone ID: MRT4577_577C.1.pep
SPCFTNTLAIRETWGYHLFHQRALRNSVAPRGLDNREYEGVLPQDYGCSCDLCCSPPCRLNEPPCAPCQDGHKDLLFKP

SEQ ID NO: 323170 - protein, 144 aa, Zea mays
  unsure (1)..(144): unsure at all Xaa locations
  Clone ID: MRT4577_57800C.1.pep
INKLYSNFTEISSFLREKRRKALALSVFFFYFLFIGSCSFFWCPSQLQNNNIIGPIPAEIGKLAKLRTLVLSSNKLHGTVPNSLGRLGRLQYMXEAHVPXLMLHVLAWVKPXLVCTDTALLSCRDLSYNNLSGPISKTSARTLK

SEQ ID NO: 323171 - protein, 46 aa, Zea mays
  Clone ID: MRT4577_57801C.1.pep
MGGFDQQVKERTKELKHIKTAAMKGIKAAGESCKKAWSKVRSSIKR

SEQ ID NO: 323172 - protein, 82 aa, Zea mays
  Clone ID: MRT4577_57802C.1.pep
SSSRLVLGLLLLRLLSILAAVTLMVCAWSQPLAASGFACTVSCCGNDCFHFQGPFPILASSASVDKNGLSAHDRQNFLVLPT

SEQ ID NO: 323173 - protein, 95 aa, Zea mays
  Clone ID: MRT4577_57803C.1.pep
MLLLRASTPFAYAKVDKVDAEEARHLRAQFLIHKVLEKKSPRPSALARARPRIGVRLKKLRLAVRALRARACRALQRHLGNLRRLVGRGGVQGSP

SEQ ID NO: 323174 - protein, 272 aa, Zea mays
  Clone ID: MRT4577_57804C.1.pep
MAGSPRHLSLFPLRLLLLLPLLAAGKPVLEDGYTVTTFADLNPLPASGPHPYAVLPRSRAGDLLLLDSAGSALYTISLSSSPGEPRRLAGGKRGSGFNDGGPGDAAFDRPRSVAVDAADNVYVADRLHGAVRKVAPSGYTTTIAGGFSSGPGHRDGPAQNATFSPDFALVYVPKICALLVADRGNRMVRQINLKPEDCAHEKQSGLGNTLVSFIAVLCTLLGSLIGFLARHFYPVNAGSLRQPLFQQDTEAIPEDTEEGNSDQLLRHKKRSC

SEQ ID NO: 323175 - protein, 124 aa, Zea mays
  unsure (1)..(124): unsure at all Xaa locations
  Clone ID: MRT4577_57805C.1.pep
THLSYCTSNNLTTRGTMILSLLALLAHFASATNASIIPQCSLAPSSIIPQFLPPVTLMAFEHPAVQAYRLQQAIAVSVLQQPIVHLXQHFLAHLTIQTIATXNXQQFLPSLIHLSMVNPVPYFA

SEQ ID NO: 323176 - protein, 41 aa, Zea mays
  Clone ID: MRT4577_57806C.1.pep
SFLHFITRLCAVLGGTFAVTGMLDRWMYRLLETLTKSKSKR

SEQ ID NO: 323177 - protein, 58 aa, Zea mays
  Clone ID: MRT4577_57807C.1.pep
TDCIQWHVGMARCLRSQMRPCRILQPMEKVSDLAVRSSQRHPNRQMEPQHLHLARVDY

SEQ ID NO: 323178 - protein, 175 aa, Zea mays
  Clone ID: MRT4577_57808C.1.pep
ALDIRFGPADIEELVRKALQLNCTAKPINHPTYDDPNNGKAYAIFRTKDAADAAISKINSGLVVGGRPLYCSKGLLEVPKPSANLVGHLSSYVKIGQKQRDEQKKAVATSHCSQPNTIEYDLALDWMLLREKQDQSFRVLHKKHREARKGFPSLVGKGSKAEYQPGSTLSKLGAV

SEQ ID NO: 323179 - protein, 531 aa, Zea mays
  Clone ID: MRT4577_57809C.1.pep
MDGNAETIQFSWGKRRGKGGAKMDTQFFGSFTLDNVKYSLFDCVYLFKHGDPEPYIGKIVKIWEKDNDKKVKILWFFHPDEVQKYLSGPVMGKEIFLACGEGAGLADINPLEAVAGKCTVICTSKDKRNRQPSPQELQIADYIFYRVFDVKSLTLSDQLPDKIAAFTVDLLLNPKDELVIPANVLVNPNVDEGMVATVPTPPSAVKLEDRSQAAALPLTQTGQVDENLPATVPLPQSEVKEEQKPVIAIPISQTVVKKEDKKSLSDIPLSHSAVKEDETPVASIGPPQSAVMENIPKHTQLQDAHAGERPPKKLKLSQETTEQDIDPTNTEQRPLELQPKNIDRSKWFNIEWNDRLKMADDKGTLVYIQNLDIRFGPADIEELVRKALQLNCTAKPINHPTYDDPNNGKAYAIFRTKDAADAAISKINSGLVVGGRPLYCSKGLLEVPKPSANLVGHLSSYVKIGQKQRDEQKKAVATSHCSQPNTIEYDLALDWMLLREKQDQSFRVLHKKHREARKGFASLVGKGSKAE

SEQ ID NO: 323180 - protein, 198 aa, Zea mays
  Clone ID: MRT4577_5780C.1.pep
FHELAHMVHSEHDANFFALNKQLNEEAASMDWTKSTGHMLSGRKIFDSYEEEFVLEPEITVAGHRLGGESSSLASARALSGAAAYQRFLNASANVDHASGTKIEYSSDDVPRGFVHETVKVEPDPDYAMHVDSAAGLSFAGQHTIGYSDPNPDDVGKQSFDRCLEPDPDDSSNANNLNQELRFDVRHHSEPDPDDGSK

SEQ ID NO: 323181 - protein, 189 aa, Zea mays
  unsure (1)..(189): unsure at all Xaa locations
  Clone ID: MRT4577_57810C.1.pep
MCAKGDVPRISIYISTTYSCVCVCENDRVXIFVNDHSNRTTPSHISFTESESLISDVGKKHIAMKPIYTAFDVKRLISRRFTDVSVHRDIXMWAFXGISVPVEKTLSVVHNKGEEKHIAHEKISSMCLIXIREIAENYIVRTIXNVVCTDPVYFYESHRQATKDVVVSAVLNVLCIIYETTDVDISYVL

SEQ ID NO: 323182 - protein, 146 aa, Zea mays
  unsure (1)..(146): unsure at all Xaa locations
  Clone ID: MRT4577_57811C.1.pep
RRKKFPKPYLGIWIEDPDVFFDXLTVPGVPCGRIRXQLYAIXDETKTRTNFQALYTDKKVERKTEKPLHYKXSTFHRVIRHALCHGGHYTRGNGTAGEXLYESKSPPEXFRRKHTGXXGVLSMXNAGTNTNGYEFFMCTGDTPWVD

SEQ ID NO: 323183 - protein, 47 aa, Zea mays
  Clone ID: MRT4577_57812C.1.pep
NPILGMFYGVFSAHIRGDGINTSPVPFYWGLTPSHVTWWGGFLEENL

SEQ ID NO: 323184 - protein, 132 aa, Zea mays
  Clone ID: MRT4577_57813C.1.pep
TLTCTDFNATYATAQDLFTAAPNRMSPLQSGCCKPPTKCGYTLVTPTYWISPISATADPDCAAWSNEEAKFCYSCASCKAGLLQNLRGEWRRADLILAVATAALLAVYAMGCYAFRTAKTDELFRRYRQGYT

SEQ ID NO: 323185 - protein, 75 aa, Zea mays
  Clone ID: MRT4577_57814C.1.pep
MEREPKSPDDRPEPAAAAAQPQPLEWRFAQVFGERAAGEDVQDGNKFNRPLASSDRPSTVVPSRDLVGPVCSGEV

SEQ ID NO: 323186 - protein, 87 aa, Zea mays
  Clone ID: MRT4577_57815C.1.pep
TKKHYFDLREGAIQKGAPPKKGCWKNPPGEGKTNFCVQPTGGVGLCRLFTTATTRARGWTREYITQPRRRTSFSYREAGQNPAGSRT

SEQ ID NO: 323187 - protein, 253 aa, Zea mays
  Clone ID: MRT4577_57816C.1.pep
MEREPKSPDDRPEPAAAAAQPQPLEWRFAQVFGERAAGEDVQDVDIISAIEFDKSGNHLATGDRGGRVVLFERTDIADNACRRELERQEYLVSRHPEFRYKTEFQSHEPEFDYLKSLEIEEKINKIKWCQTTNNALFLLSTNDKTIKYWKVQEKKVKRVSVMNLDTSQSSDNGSTSSPGTSSCRALLPNGGCTGKMYSPNNNMSFPPGGCTSLRLPVVVTGQEFTHVARSRRVYAHAHDYHINSISNNSVHGF

SEQ ID NO: 323188 - protein, 136 aa, Zea mays
  unsure (1)..(136): unsure at all Xaa locations
  Clone ID: MRT4577_57817C.1.pep
ERPSGPAGKKHSSPPTPQRQRPNYLAPVREGTKTPSRRRRRRCAARAARVWARVGAKRHXRKVLRDNIQGMTKAAIQMLARRGGAKRISGXLIYQETRGVLKIFLXNGIRDAXTYTEHARRKTATDMHAWVPASSA

SEQ ID NO: 323189 - protein, 377 aa, Zea mays
  unsure (1)..(377): unsure at all Xaa locations
  Clone ID: MRT4577_57818C.1.pep
MAAAQLRLLPLLLLTLTAAAKNVTLDSAILSFADLTLLGDSFLRNGSVWLTRDTDVPSSSAGTVLCTQPVAFRGPDATASNATAAVASFAARFSFVITNPNAGAAGGDGIAFFISPDRATLGATGGYLGLFNSSXPLQPRXSASATIVAVEFDTMANPEFADPSDNHVGLDLGSPVSVTAADLAASGVDLKSGNVTTAWIDYRSADRRLEVFLSSYAVAAKPKRPVLSVAVDLSPYIKEAMYVGFSASTEGSTQQHTIKGWTFQTFGFPPTANSTFESNATSNSSEPAAPAPAXPTPPTATRRRVXIALGILGPVALALAFIFFAWVSIKKIIELTSRTDAAFSXELVKGPRKFSYRELSAXTRRFHTSRVVGKGAF

SEQ ID NO: 323190 - protein, 82 aa, Zea mays
  Clone ID: MRT4577_57819C.1.pep
RCTDQVAHSPLPFVGNMAHPPRWAASPLCSRQQECAALIVATAKAGLLHSSPTHVMHIPCACTPDVVCHTALERLLAHVYIA

SEQ ID NO: 323191 - protein, 679 aa, Zea mays
  unsure (1)..(679): unsure at all Xaa locations
  Clone ID: MRT4577_5781C.1.pep
MDGNRIARFSVTWRGSQLDVDADPSCTVKEFGQLLQDLTSVRPETLKLIVPRSTNKGSKLIMPFSDAHSRLTLNGVGISEGKPIRMMGVYDDEIEEVSDNGKRPDQRIIGFDEEEQRLRQRSLGRPQISLKLPQGQYIFCDFRTLHLPGIELNPPPSEALKRMHMLACDPGVIAIMKKHKWRVGIMTEMAPVGYVGISPKCILGFNKNMGEEISLRLRTDDLKGFRKYESIKKTLLHELAHMVHSEHDANFFALNKQXFLDIPITFGCLSCYICVYLILILLFNFWQLNEEAASMDWTKSTGHMLSGRKIFDSYEEEFVLEPEITVAGHRLGGESSSLASARALSGAAAYQRFLNASANVDHASGTKIEYSSDDVPRGFVHETVKVEPDPDYAMHVDSXQLGYTRQGSXTIGYSDPNPDDVGKQSFDRCLEPDPDDSSNANNLNQELRFDVRHLSEPDPDDGSNEVLEHGNTMEMDSELTNHITVVKYELDPADSSNANQELIIDGKHGEEPDPDDTCQDVLKSGNGTEMITEQSGNSMVLKAEPDPDDHVGDSNINELQRVEEPVRALCSRLQKSIKMLRLQATPVEAESAIQTLFKIIKNVIEHPNDIKYKRLRKSNPHFQRSVANYKAAMEVLELIGFCEDVISDEVGRAETYLVLKRNDPGLLWLAKSSLEVSLA

SEQ ID NO: 323192 - protein, 41 aa, Zea mays
  Clone ID: MRT4577_57820C.1.pep
QPWFSFFLKNTKHAHPLVGETRDVLLGENLNKSPLPTNRNT

SEQ ID NO: 323193 - protein, 57 aa, Zea mays
  Clone ID: MRT4577_57821C.1.pep
ASNCSVFLSHLMAYYMSLYFMCISYHVKRMFTTIPSCDLIVNRTICSIIKVSTSSMS

SEQ ID NO: 323194 - protein, 114 aa, Zea mays
  unsure (1)..(114): unsure at all Xaa locations
  Clone ID: MRT4577_57822C.1.pep
VXLXWXXXXXXXXWWWXRSPRXLPLVGLLSVXXGXRLLLVXXXVWXXGXRPAXXCXXRLPXXFXAFLRLLXXXXVFXXXRLVCXRCCXRVXCXXLXXCXLXSFXLVXSCFSXFS

SEQ ID NO: 323195 - protein, 70 aa, Zea mays
  unsure (1)..(70): unsure at all Xaa locations
  Clone ID: MRT4577_57823C.1.pep
THAEYVHNTYHLYYECADILMLIVAGSLLDVHWSSSSIALLVLLAWDMKHIQMSVCIYLQMXITTRCQQG

SEQ ID NO: 323196 - protein, 43 aa, Zea mays
  unsure (1)..(43): unsure at all Xaa locations
  Clone ID: MRT4577_57824C.1.pep
XWIPLLIASRVEASTHARARETTLRYALPFRLWRAYHARAHLG

SEQ ID NO: 323197 - protein, 183 aa, Zea mays
  unsure (1)..(183): unsure at all Xaa locations
  Clone ID: MRT4577_57825C.1.pep
MAHARGGGGHGHGHEEEAEAAVCLDGDSEAGEARSAGRAPPWRDQLTARGMVASLAVGAMYSVIVMKLGLTTGLVPTLNVSAALIAFVILRGWTQALARFGVATRPFTRQENTVVQTCAVACYSIAVGGGFGSFLLALNKRTYEMAXEDTEGNLPGSYXEPGIGWMTGFLFAVSFVGIVALIP

SEQ ID NO: 323198 - protein, 100 aa, Zea mays
  unsure (1)..(100): unsure at all Xaa locations
  Clone ID: MRT4577_57826C.1.pep
MAHARDGGGHGHGHEEEAEAAVCLDGDSEAGEARSAGRAPPWRDQLTARGMVASLAVGALSSVXVLKLGLTTGLVPTLNVSAALIAFVILRGWPPALARF

SEQ ID NO: 323199 - protein, 54 aa, Zea mays
  unsure (1)..(54): unsure at all Xaa locations
  Clone ID: MRT4577_57827C.1.pep
MRGWLEAXLPLGIIGXMLCXMGNXKXXIHKXXXGRPXXXXNDMXEGAMERRDKK

SEQ ID NO: 323200 - protein, 55 aa, Zea mays
  Clone ID: MRT4577_57828C.1.pep
FLRTRHHRSLHAFTSHRSACDYDIMHGLRLRISDATRVGADAWALMHSAIPDKLQ

SEQ ID NO: 323201 - protein, 76 aa, Zea mays
  Clone ID: MRT4577_57829C.1.pep
SRCSQQQARRTTVGAFISPCHGPTCSRRSEELELAGQRHRRSRFHRLQLALLINDEPAVHTSERAACSQETTGRVG

SEQ ID NO: 323202 - protein, 112 aa, Zea mays
  Clone ID: MRT4577_5782C.1.pep
YATCEDPAVAGASAVASAATIAGSSALGAAAAGASGAPSAVSEGGSSPAAAAARASGAPSAVSGGGSPPAAAAAGASGTPSVVSGGGSRADPDMASAGIGSGSGSALFNAPK

SEQ ID NO: 323203 - protein, 110 aa, Zea mays
  unsure (1)..(110): unsure at all Xaa locations
  Clone ID: MRT4577_57830C.1.pep
KGEYXSKAMGKLDGFGAFSIPLSTDLHGADCVAQLHSAAGNPCPGQEPSRIVPQSSKGNFVVVPGKTDYPSKECASATLCGSIKKHLLDHFHKKPVHHHKPQYEFAGPVG

SEQ ID NO: 323204 - protein, 210 aa, Zea mays
  Clone ID: MRT4577_57831C.1.pep
MGAECRYEVAQAAYIKLALHALKHPATAVNGLLVGRLVEPSSSPAVVSVIDAVPLSHHPHHLPLLPTLELALTLVEDHFATQGEGLAVVGYYHANPRCDDTELPPVAKRVGDHIFRYFPRSAVLLVDNKKLEEAVKGKFSDAVIQLHTRDSSKSWRQAGSDGSSQLILKEPSTNVVLADHVTTKKWEKIVDFDDHLDDISKDWSNPGLLD

SEQ ID NO: 323205 - protein, 210 aa, Zea mays
  Clone ID: MRT4577_57832C.1.pep
MGAECRYEVAQAAYIKLALHALKHPATAVNGLLVGRLVEPSSSPAVVSVIDAVPLSHHPHHLPLLPTLELALTLVEDHFATQGEGLAVVGYYHANPRCDDTELPPVAKRVGDHIFRYFPRSAVLLVDNKKLEEAVKGKFSDAVIQLHTRDSSKSWRQAGSDGSSQLVLKEPSTNVVLADHVTTKKWEKIVDFDDHLDDISKDWSNPGLLD

SEQ ID NO: 323206 - protein, 41 aa, Zea mays
  Clone ID: MRT4577_57833C.1.pep
VVTALNLPLCPSSTYIPCLMYIPERCKGVNQIYAYVEELRL

SEQ ID NO: 323207 - protein, 153 aa, Zea mays
  Clone ID: MRT4577_57834C.1.pep
MGAECRYEVAQAAYIKLALHALKHPATAVNGLLVGRLVEPSSSPAVVSVIDAVPLSHHPHHLPLLPTLELALTLVEDHFATQGEGLAVVGYYHANPRCDDTELPPVAKRVGDHIFRYFPRSAVLLVDNKKLEEAVKGKFSDAVIQGLVEPRPP

SEQ ID NO: 323208 - protein, 124 aa, Zea mays
  unsure (1)..(124): unsure at all Xaa locations
  Clone ID: MRT4577_57835C.1.pep
GGKKGQRGEKKKGKKPKGGGPKGXGKGSGHGGGGHPAPRXXAPXQGGAXXQXGGGKGGRAPGGGPGAKKPAGERGKGGKATKXGNPRGCPPPGQGKARPPNGTDAPREKRAPPPQREGPPRKRP

SEQ ID NO: 323209 - protein, 128 aa, Zea mays
  unsure (1)..(128): unsure at all Xaa locations
  Clone ID: MRT4577_57836C.1.pep
EGLAVVGYYHAXNPRCDDTETXPVAKRVGDHIFRYFPRSAVLLVDNKKLEEAVKGKFSDAVIQLHTRDSSKSWRQAGSDGSSQLVLKEPSTNVVLADHVTTKKWEKIVDFDDHLDDISKDWSNPGLLD

SEQ ID NO: 323210 - protein, 294 aa, Zea mays
  unsure (1)..(294): unsure at all Xaa locations
  Clone ID: MRT4577_57837C.1.pep
RYKKILIDIFPAEQEDGPNARRIGRLCEYVARNPHRVPKITAYLARTCYRELRNEQYDIVKVVVLIYRRLLVSCNEQIAPLLANSLLSIIQTLLDQSRQDDMCIIGCETLFDFIVTQVDGTYQFNLEEFIPRLCKLSQIVRDKEKANALRAATLQSLSAMIWFMGELSHISLEFDSVCQVVLESYEPRQVQSDNSATENPGCQLVEEVLKPEGHASPSTFIFSVIPSWDSIVSDYGGIXTAIDDAKDPYVWSRVCVHNMAKLSREATTFRRVMESLFWHFDNTNSWSSENCLAL

SEQ ID NO: 323211 - protein, 64 aa, Zea mays
  Clone ID: MRT4577_57838C.1.pep
VFTLLPRPLTWLTCLHYQRHVQQDKLDPLGLLNIPVSSGIPRPLPCGLPKWPLSFLQSVTLLYC

SEQ ID NO: 323212 - protein, 122 aa, Zea mays
  Clone ID: MRT4577_57839C.1.pep
QRRRRRTDSLGARRLLCAAARAMLLVVEVAVVAAAVAVRKRCRGGVAPGGSALVVLQDEPLQLPADALHLVRVEERRRLLRRSSVLPGRCSCRLIHGERSETETGLPLVSWRGCPHASADAW

SEQ ID NO: 323213 - protein, 104 aa, Zea mays
  Clone ID: MRT4577_5783C.1.pep
YATCEDPAVAGASAVASAVASAATVAGSSALGAAAAGASGAPSAVSGGGPPPAAAAAGASGAPSAVSGGGSRAASGTASAGFNSGSGSALFNAPKSSTLSPRGA

SEQ ID NO: 323214 - protein, 103 aa, Zea mays
  unsure (1)..(103): unsure at all Xaa locations
  Clone ID: MRT4577_57840C.1.pep
PQNEHLXXTSSDKXEACLLACLHPKTKTTVGRREHQLDGRVDLRRSPHQVXRHLQELRTRLHGYGSQKVHMPRLPPRRVRLPDPLHTPPTNNGHTRRTLPPYG

SEQ ID NO: 323215 - protein, 95 aa, Zea mays
  unsure (1)..(95): unsure at all Xaa locations
  Clone ID: MRT4577_57841C.1.pep
FVPNIHEINLVFFVRTVLLLSTLLTSGLGLLSALSINYLCLLVLRFFVGIGVGSGHVFSSWFLEFVPAXNRGTWMXIFSFFWTIGTVLEASLAWV

SEQ ID NO: 323216 - protein, 73 aa, Zea mays
  unsure (1)..(73): unsure at all Xaa locations
  Clone ID: MRT4577_57842C.1.pep
FLAVFLRWLLLACLDQKKKKKKKKKKKKKKKKKKKKKKKKKKKKKKKKKKKKXPPGGGPGPQNPLIGGEFPPP

SEQ ID NO: 323217 - protein, 41 aa, Zea mays
  Clone ID: MRT4577_57843C.1.pep
SELPLNSVRRSPCECWYRAVQMNLHEDAFPSGLLHACDGLH

SEQ ID NO: 323218 - protein, 89 aa, Zea mays
  Clone ID: MRT4577_57844C.1.pep
MLPAIMARTTRRFMSMVTRALNARWLETRGHATEAPLEPGGVASKRTAEEDEPLYLREGEIRMGRRLPQQPGTDTAGARPGLACAADIA

SEQ ID NO: 323219 - protein, 69 aa, Zea mays
  unsure (1)..(69): unsure at all Xaa locations
  Clone ID: MRT4577_57845C.1.pep
AAHGGXRVPRTGHDKGRRVREPRPRPRPRRRAPPAVAVTVRVRVHHRGSGVHGPARHCTSAPGFASAPA

SEQ ID NO: 323220 - protein, 102 aa, Zea mays
  Clone ID: MRT4577_57846C.1.pep
MAAAGPGLYSDIGKKARGLLYKDYHTDRKFTLTTYAANGAFKARVTMDMKHRVVRAMIAGSMGDGDGAPVHVQDKTESVRDATRREHHRLPLTIKYDDCMPS

SEQ ID NO: 323221 - protein, 276 aa, Zea mays
  Clone ID: MRT4577_57847C.1.pep
MAAAGPGLYSEIGKKARDLLYKDYHTDQKFTLTTYAANGAAITAASTRKDEAIFNEIQSQLKHNNVTVDVKATSESNVITTITVHELGTPGLKAILCVPFPYQKSAKAELQYLHHHAGVAASVGLNANPVVNLSGVFGTKAIAVGADAAFDTSSGDLTKYNAGLSYTTPDFVAAATLNNKGDNIAASYYHSVSPTTAVGGELSHSFSTNGNTITFGTQHALDPLTTVKARFNNYGMASALIQHEWRPKSLVTISTEVDTKAIEKSSKVGLSLVLKP

SEQ ID NO: 323222 - protein, 276 aa, Zea mays
  Clone ID: MRT4577_57848C.1.pep
SGRAGGVSTQPDREHRDSSTAADTPPLGAPVLGRRRKKPNAITAASTRKDEAIFNEIQSQLKHNNVTVDVKATSESNVITTITVHELGTPGLKAILCVPFPYQKSAKAELQYLHHHAGVAASVGLNANPVVNLSGVFGTKAIAVGADAAFDTSSGDLTKYNAGLSYTTPDFVAAATLNNKGDNIAASYYHSVSPTTAVGGELSHSFSTNGNTITFGTQHALDPLTTVKARFNNYGMASALIQHEWRPKSLVTISTEVDTKAIEKSSKVGLSLVLKP

SEQ ID NO: 323223 - protein, 62 aa, Zea mays
  Clone ID: MRT4577_57849C.1.pep
RTSLTGLFFDALYSAKSSCCETKSYITLIQHGGTRYNIRSLLVQIQPLDPILFTNIQIRFSD

SEQ ID NO: 323224 - protein, 92 aa, Zea mays
  Clone ID: MRT4577_5784C.1.pep
AKVCIFQAQEWQKCSLIMNLDFIQDPFVKGSPLPFSLGGKHVSTQWQKEFRNPNARSVFPFLQRSGLYPRVNMVPQWVCPLGSNCKGRGLFP

SEQ ID NO: 323225 - protein, 57 aa, Zea mays
  Clone ID: MRT4577_57850C.1.pep
HAYLEIIFPQNALASIHALSGTTQGPAQTVYVVTSINTEFPKYQGHSYSFPHPTMQG

SEQ ID NO: 323226 - protein, 40 aa, Zea mays
  Clone ID: MRT4577_57851C.1.pep
SHTYIAIALITRHISTTEWNHLEDPPVDPQLRLALNPERI

SEQ ID NO: 323227 - protein, 295 aa, Zea mays
  unsure (1)..(295): unsure at all Xaa locations
  Clone ID: MRT4577_57852C.1.pep
MAAAGPGLYSDIGKKARGLLYKDYHTDRKFTLTTYAANGAFKARVTMDMKHHVVRAMIAGSMGDGDGAPVHVQDKTESGQLEHNNVTVDVKATSESKVTTTITVHELATPGLKAFLCIPFPYKKSAKAELQYLHHHAGVAASVGLNANPVVKISGVFGTKTVAXGADAAXDTSLGLNKYNAGLSYTTPDFGSATAFNNKGDNIAASYYHSVSPTTAVGGELSHSFSTNGNTITFGTQHALDPLTTVKARFNNYGMASALIQHEWRPKSLVTISTEVDTKAIEKSSKVGLSLVLKP

SEQ ID NO: 323228 - protein, 68 aa, Zea mays
  Clone ID: MRT4577_57853C.1.pep
RWWQDRKVTKKQEPGLFNNVTELFRRVRVRLRHLLTLFRLTEGHFVAGNQQACCCSSYESRCGAMSVF

SEQ ID NO: 323229 - protein, 69 aa, Zea mays
  unsure (1)..(69): unsure at all Xaa locations
  Clone ID: MRT4577_57854C.1.pep
MMPIILFCCRPKKKKKKKKKKKKKKKKKKKKKKKKKKKKKKKKKKKKKKKKKKKKKKKKXGGAFLKDQS

SEQ ID NO: 323230 - protein, 63 aa, Zea mays
  Clone ID: MRT4577_57855C.1.pep
LIEYGYLVAFSLFITCKRKKNKSQSKNKTIRQCKTSKSSSSIHRSVDIGEIKKGESRKKDRPF

SEQ ID NO: 323231 - protein, 133 aa, Zea mays
  Clone ID: MRT4577_57856C.1.pep
RTNRSIDISAFLRKNLRKYRGRRFQEFPKRRIISLFCATKLDCWNNNGNKLGGLMILFCALATIYLLGWPAHWPIHITIYRVENGFGFFRFFEYRFRNRNRLSEFYTGIGIEIGTTFYRPFLRLPNLIGIYRF

SEQ ID NO: 323232 - protein, 71 aa, Zea mays
  Clone ID: MRT4577_57857C.1.pep
MATHHTLWMGLALLGVLGDLQAAPEAQVSVQPNFQQDKFLGRWFSAGLASNSSWLREKKAALSMCKSVVAP

SEQ ID NO: 323233 - protein, 136 aa, Zea mays
  Clone ID: MRT4577_57858C.1.pep
KTRSGTCPGLKKTSPFFAWGPSPSLKNLGPTSSKGRASPRLFCQKTANKKKGWLAPRWRPSKPPLTGTKDSIPDGWTHSWRRQKRGAKNTMGQPKNPGRWVGPPKTKNPFFFFLKKKKKKKKKKKKKKTDQVTRQI

SEQ ID NO: 323234 - protein, 68 aa, Zea mays
  Clone ID: MRT4577_57859C.1.pep
RIRFSNDLAIIYVRYGETMEAIEACKHLVSIVAVSCYMLERARTVWMVTVPVNIDDMLMLIVSTLYVA

SEQ ID NO: 323235 - protein, 88 aa, Zea mays
  unsure (1)..(88): unsure at all Xaa locations
  Clone ID: MRT4577_5785C.1.pep
SRACRLSTIKXXQWERGQXTPPPPLFPQILRKQLSGASNDVLTNSSRDRSRLPASGGRRARNARDSMRNGRGRSVPRPVAVSVRPSRP

SEQ ID NO: 323236 - protein, 129 aa, Zea mays
  Clone ID: MRT4577_57860C.1.pep
GKGAKYLGAQKPKNPEKNLAPPTGGKKLNLGPILGRGSSKRGGGKGKKRGKKGQTHNEPGDPKNPPSKFIFGIKKRKPPLKRRGEKPPLGFKNGGGQGKNPVALAPLVVDPREKIKKGGIKREPRLGGK

SEQ ID NO: 323237 - protein, 185 aa, Zea mays
  Clone ID: MRT4577_57861C.1.pep
MADAVDARRVCGMPEKAQLHVAMLALQFGYAGFHVVSRLALNMGISKLVFPVYRNIIALFLLVPFAYFLEKKDRPRLTLGLAVHFFFLALCGITANQGFYLLGLDNTSPTFASAIQNSVPAITFGMAAALRIEKVRLDRRDGVAKVLGTLACVAGASVITLYQGPTIFAPTGDDKPSLQQEVPFL

SEQ ID NO: 323238 - protein, 63 aa, Zea mays
  Clone ID: MRT4577_57863C.1.pep
SSRCRRPWPGRRRCGRRLSGRTGSWRHASTVGTGLHPTTLTDAKKMSSSFSLRRRTPVSCHFY

SEQ ID NO: 323239 - protein, 85 aa, Zea mays
  Clone ID: MRT4577_57864C.1.pep
AFSSRGPFKTSGVLPNPPSFLGPTQFFFPVFLAWKTLKKGSSGIQFIPRPGQRHFQILKLFPIGKGCPSPLINTPFILYRPKCFW

SEQ ID NO: 323240 - protein, 68 aa, Zea mays
  Clone ID: MRT4577_57866C.1.pep
RSEMSNKAFINKFLIFIAKRKYAVTLYEKGNGLGFKPPQKSSVPTIIEGPPLLDPYTNRHSPTASPQR

SEQ ID NO: 323241 - protein, 103 aa, Zea mays
  Clone ID: MRT4577_57867C.1.pep
MPTHNGIERQNPTERGSSNLRSLLRAMMAAPWPVLQAVLVKLRWRLLRRSLSQRSSERPITTVLALMMLKTNAIIKQSHQKTYLNPAIEEGVVSNLYVFKGGF

SEQ ID NO: 323242 - protein, 197 aa, Zea mays
  unsure (1)..(197): unsure at all Xaa locations
  Clone ID: MRT4577_57868C.1.pep
PTHPSRQPTTPAPSSLFPSADLASSAWRRHVSPGTELLAGHGACSRADRCTSAQRLLHGGRPSPLLHRGALGQGGVLPDPSARPGRTSASSWPRRPPSRPPTTRRSCSSHAKASSAPTPHRRSGRASGMFAFGLGWPNGADGFGWKPCLYYARPPRSSPRRAFTCGLGLARATKWTGLFGXARARXGLHRAVLRXEX

SEQ ID NO: 323243 - protein, 165 aa, Zea mays
  unsure (1)..(165): unsure at all Xaa locations
  Clone ID: MRT4577_57869C.1.pep
SLLQLYAILQQPSLVHLXLLRIXAAQLLPHQLLPTINXQEAAGNLVAYFKHXQILPFCQVAEVNRAFYLHAQQILPFNQLXVGSTYALLLAQPLLPFHVPAGANIAAFLRHQQLMPFYSQGEGNNNAFLPQPQLLPFXPQNAANIGDFLQQQRLLTFIQHALTKP

SEQ ID NO: 323244 - protein, 58 aa, Zea mays
  Clone ID: MRT4577_5786C.1.pep
YEESPVTQNNSISATRLKHVEKFRMRLGGLTGMPRRSKFSPYMLSWIRPSASHTSRSF

SEQ ID NO: 323245 - protein, 46 aa, Zea mays
  unsure (1)..(46): unsure at all Xaa locations
  Clone ID: MRT4577_57870C.1.pep
QDGSYLHILAYCCYFDFISFLFFLFFLSFFFVCFFFFYILXLDVWV

SEQ ID NO: 323246 - protein, 48 aa, Zea mays
  Clone ID: MRT4577_57871C.1.pep
HNQFIFLQTEANQTMWMCQTLKTTLNTRTKLKSPLKTEHENHYRYNAD

SEQ ID NO: 323247 - protein, 66 aa, Zea mays
  Clone ID: MRT4577_57872C.1.pep
SYVIIKFKGFPYGIIINQNQQAIVYVSRLVHKHTTYINTSISKAPWSLYVCGSQARFIAIYELMTN

SEQ ID NO: 323248 - protein, 147 aa, Zea mays
  unsure (1)..(147): unsure at all Xaa locations
  Clone ID: MRT4577_57873C.1.pep
VRVRIRNYDPAKLDAFWTSYRQNVTYNLTHRNCSSTVSNALEAALDGAVWRLKGARAGWGAFVRLLVTPELWVAAQIRKRAVTMAWTPGLTLDYARALSMLADPRPFAWWKVARSAVKAIMASRRAWREQDSAALSSGGSEAAXDEV

SEQ ID NO: 323249 - protein, 63 aa, Zea mays
  Clone ID: MRT4577_57874C.1.pep
SKNWNFLGQEKKGTGAGAPHQGTPFPQGPKQGRLFNQTHGLMAQNKKQLALSNRIQGSRPALY

SEQ ID NO: 323250 - protein, 116 aa, Zea mays
  unsure (1)..(116): unsure at all Xaa locations
  Clone ID: MRT4577_57875C.1.pep
DTRLWCPSTGVSPLHQPYRXHQTYLADILPLSPLFLQQSSSLLQQXPLERGGEQNIRAQPRPQPALGQLCDYSYQQRGLPFDPLGALNSAWYLQXQQLPLSSLSGDXEKPFLPFNQ

SEQ ID NO: 323251 - protein, 179 aa, Zea mays
  Clone ID: MRT4577_57876C.1.pep
MATRAAAAATLTAATSSLLRRSTSLRPQGLRVPHRVPPQRFVRHIASSSNEEAAARAAAATADAGGPTIFDKIIAKEIPSSIVYEDENVLAFRDINPQAPVHVLVIPKARDGLTGLDKAEPRHTEILGRLLYAAKVVAEKEGVASGYRVVINNGAEGCQSVYHLHLHVLGGRQMKWPPG

SEQ ID NO: 323252 - protein, 81 aa, Zea mays
  unsure (1)..(81): unsure at all Xaa locations
  Clone ID: MRT4577_57877C.1.pep
MAPSSAEADSAVSSSGRLLVLYASQTGNAMDAAERVGREAERGGCPXVDVLSMDSFDPSRLPSXERVXVVFVVSPTGQGDP

SEQ ID NO: 323253 - protein, 103 aa, Zea mays
  Clone ID: MRT4577_57878C.1.pep
GYRGRSHRLTSVEIRTATELSVTLLATPTRTRRIDEASACIECGVYKGISAGTYAFKQRLQFVIPVRLNKQGPTEPFGKKNSSPFQAAEMPYCTVRRSPTMAT

SEQ ID NO: 323254 - protein, 238 aa, Zea mays
  Clone ID: MRT4577_57879C.1.pep
MAPSSAEADSAVSSSGRLLVLYASQTGNAMDAAERVGREAERGGCPAVDVLSMDSFDPSRLPSERFVVFVVSTTGQGDPPDSMKGFWRYMLRKDLDRQWLEGIHHAVFGLGDSGYQKYNFAAKKLDRRLLHLGAEPVLEIGLGDDQHPSGYEGALDPWLLSMWKSLNEINPSLLPRVSDINDPNLSFLGDPKVHVIYYSSNEVPQDPILLDSNKIISSARSMSPAYCSMLMDSHLTCF

SEQ ID NO: 323255 - protein, 126 aa, Zea mays
  Clone ID: MRT4577_5787C.1.pep
KVPSLDLEAVKPILVVVVQAMILLESTWVTVRLLRQRTVVHADSCREMFTTSLVFFVYLHTTLYTVSLVCLALLIVPSAYNCWKCAIDIVRVGLLLLLLVVSFQPLPTLFYSLSSVNIIAQACMSN

SEQ ID NO: 323256 - protein, 149 aa, Zea mays
  Clone ID: MRT4577_57881C.1.pep
MAADWLWARRVWEKWAAKHIGTSGKPVQAALLLNYDPSGPSRLLPVVAEQEGTQLSALDMQPLLDFVKRGNLQTELFSVGLNQHLVTSIHENWFCARCINSTKPEGEGVIVMQIGACLLVTMYAGSLAAASQAMVAADQFAIQFNRRSH

SEQ ID NO: 323257 - protein, 113 aa, Zea mays
  Clone ID: MRT4577_57882C.1.pep
SKLGSLIRNQKGDQKKNKAPPLNKGKRGKGKGGGQKKKVGPFGPIFYFYTPARGQNPSGQADINFPTPHSGIRSSSPFWGSSPPSFPPGACSCNAIATTSDTAPGELQDLQAY

SEQ ID NO: 323258 - protein, 70 aa, Zea mays
  Clone ID: MRT4577_57883C.1.pep
RKRGGQFPPYLEPGQGCPKTLKQGKKTGGAPFFWKPRSHNFYSRLTMGIGGKQIELAGLVFRPGVLFFFF

SEQ ID NO: 323259 - protein, 148 aa, Zea mays
  unsure (1)..(148): unsure at all Xaa locations
  Clone ID: MRT4577_57884C.1.pep
MLKDNAHIHIVLIGHVESGXKSTTTGHLIYXIERIDKRGIYTVEKEAADMNKRPFKYACPLDXFEGARERCMPIDIALCKSDITSYYCTDIEXPCHREFIKXMITGYPPRSDCVXLIIDSTTVGSWAAISNDGPTHGHALLAFTLEMK

SEQ ID NO: 323260 - protein, 68 aa, Zea mays
  unsure (1)..(68): unsure at all Xaa locations
  Clone ID: MRT4577_57885C.1.pep
ARALAPALTPRRRRGWGGRWASPRRRPSPSSAPPXSSATRGSSPRPSSGACPARYIYLSTKQKREARI

SEQ ID NO: 323261 - protein, 111 aa, Zea mays
  Clone ID: MRT4577_57886C.1.pep
RRLFQIFFSFWGQLNKGKNPEKQKSLFFPPPKKKRRAKNPTTKTSLWVPKKKGGPSFFPQAGNWAKKPQQALNTRFKKKKGVIFWRGENYPPTLLCNLRLLKNTRGAKASL

SEQ ID NO: 323262 - protein, 151 aa, Zea mays
  Clone ID: MRT4577_57887C.1.pep
FLFPQWGFGFSGLFWGGTCPPIFRPSGWGPGSFFDTTPVVSVFQGGGGKRGPLFASGTMWAFRPPFFYNPPTFFPPNPPRGGPFLAFFWGWGPIKEFFVSGWGLPQKKKALFLKQERNAFETKKRKKKSNKTKEEKKKEEKNKRRKKKRSK

SEQ ID NO: 323263 - protein, 273 aa, Zea mays
  unsure (1)..(273): unsure at all Xaa locations
  Clone ID: MRT4577_57888C.1.pep
ARASMTKRQAVEALDNSMRDIMGRPGLPFGGKTIVFGGGFRQVLPVVRKGSRAQVVASSLRMSYLWESMSHLKLVSNMRAKNDPWFAEFLLRIGGGTEVTNRDGDIRLPGEVCVPYSGSDSDLDNLIDYVFPNLKKXISDSTYITSRVILSTRNDWVDMINVKMIDRFQGAHTVYHSFDSAMDDPHNYYPPEFLNTLTPNGLPPHVLKLKIGCPVILLRNIDPANGXCNGTRLVVRGFQRNSIDAEIVLGQHAGKRIFLPRIPSCPSDDEMFP

SEQ ID NO: 323264 - protein, 103 aa, Zea mays
  Clone ID: MRT4577_57889C.1.pep
TCAQGGPGFNIVPPLSNMTALLVKVLYKVPKKTNWPGASGFDCLKTQGFFTGAPQGGVCLQTSRSPADWGPPRVQPVFGNKQAQPGKKIFRFGLPNFRGAWGV

SEQ ID NO: 323265 - protein, 115 aa, Zea mays
  unsure (1)..(115): unsure at all Xaa locations
  Clone ID: MRT4577_5788C.1.pep
MSRRKTREPKEENVXLDPREPEGHXLHDXAHIFASFNDAFIHITDXAGRETLGRITGGMKAKADRDEASPYAGMPAAQEAAQSCKELGTTALRIKXRATGGNKTQTPGPGAQAAL

SEQ ID NO: 323266 - protein, 128 aa, Zea mays
  Clone ID: MRT4577_57890C.1.pep
MSRRKTREPKEENVTLGPTVREGEFVFGVAHIFASFNDTFIHVTDLSGRETLVRITGGMKVKADRDESSPYAAMLAAQDVAQRCKRMLPRFPLTALAERVVGGEGGCRRVSLLFAITLHWPLGSVAVY

SEQ ID NO: 323267 - protein, 53 aa, Zea mays
  Clone ID: MRT4577_57891C.1.pep
RYPTGRIVYLQETPGLELQTRSFLKVIQFYPWAFFDNGLFALIYAYHSPWLMS

SEQ ID NO: 323268 - protein, 115 aa, Zea mays
  Clone ID: MRT4577_57892C.1.pep
VGDWSLLLLPTGGCNRSTHETWQRHRPRGPPLTPPDYGPEHCSRPLSEREFCSCAGSISRQTFSENKQYASGDNTLQHWDHSRAPENLQNLKARFWAHYHGQPSDIPVTDPDMGI

SEQ ID NO: 323269 - protein, 150 aa, Zea mays
  Clone ID: MRT4577_57893C.1.pep
MSRRKTREPKEENVTLGPTVREGEFVFGVAHIFASFNDTFIHVTDLSGRETLVRITGGMKVKADRDESSPYAAMLAAQDVAQRCKELGITALHIKLRATGGNKTKTPGPGAQSALRALARSGMKIGRIEDVTPVPTDSTRRKGGRRGRRL

SEQ ID NO: 323270 - protein, 150 aa, Zea mays; identical to SEQ ID NO: 323269
  Clone ID: MRT4577_57894C.1.pep

SEQ ID NO: 323271 - protein, 58 aa, Zea mays
  Clone ID: MRT4577_57895C.1.pep
YLLFFTFQYSSVSWPEIRFPYTRHVPYFRAVHSTSVSLIGPGNSSICAPMSVEARTCK

SEQ ID NO: 323272 - protein, 80 aa, Zea mays
  unsure (1)..(80): unsure at all Xaa locations
  Clone ID: MRT4577_57896C.1.pep
MXKEKTXHXTXVVXXHVXAXESTTTGHXIYKLGCIDKRVIEMFXKEAAEINKRSFKYAWVLDKLKAXREXXGITIXIXXW

SEQ ID NO: 323273 - protein, 154 aa, Zea mays
  Clone ID: MRT4577_57897C.1.pep
MSRRKTREPKEENVTLGPTVREGEFVFGVAHIFASFNDTFIHVTDLSGRETLVRITGGMKVKADRDESSPYAAMLAAQDVAQRCKELGITALHIKLRATGGNKTKTPGPGAQSALRALARSGMKIGRIEDVTPVPTDSTLVCEYLVDPTVNFVP

SEQ ID NO: 323274 - protein, 119 aa, Zea mays
  Clone ID: MRT4577_57898C.1.pep
FFLWCEEEFHREQEHPLRPYLESKQNIWAPWVWSFFIHKFLWAFGGGVATRRMYAGPIRGPGRYWGRRASSRAGDFTCPGRRGGTTAGSQLISLRLRAAWPRVTRTAYSTSARARYLGS

SEQ ID NO: 323275 - protein, 110 aa, Zea mays
  unsure (1)..(110): unsure at all Xaa locations
  Clone ID: MRT4577_57899C.1.pep
IVYLEAGRDGISXRDCARXSFPHPPQPGAEPRKEGAAGDDEAAAIRRRNGGGEGARRRPEPKRSRLSKLFLGVTFSDDTNWPIQDQQCLSLVAVMMRAITPTHHTLKTLV

SEQ ID NO: 323276 - protein, 171 aa, Zea mays
  unsure (1)..(171): unsure at all Xaa locations
  Clone ID: MRT4577_5789C.1.pep
FSSGNGRPITTQPTDLHXIGDQFHLISIISESAPDHNICPSVSSYERXRCATTNYXTHTLLGTSMPVIRVINVPMMPTPLCVNAPDDKEGKNCLIYYVILDATAADCNTDNAPIRSVKMLIQNXDNMSNAARLSHAHKGIVYCFKRTIKDEDPTSVPTGNTDNVIHDFPTS

SEQ ID NO: 323277 - protein, 120 aa, Zea mays
  unsure (1)..(120): unsure at all Xaa locations
  Clone ID: MRT4577_578C.1.pep
LDGYPAFALXNDXTVEAGKHSLGQSHPVRLVPYNPEYVDESVLWTESLDFWHGFRCVRMVNNIYLNMDAFHGDKDHFCFHDGTTLVLLECAMGFLYRFMILSLLFLVVLYVFVSFFFFRF

SEQ ID NO: 323278 - protein, 158 aa, Zea mays
  Clone ID: MRT4577_57900C.1.pep
IRHAASTKVWFIIWPVSCDFIPTIGSSVGSGSQSTMPVNPEEPSAVCAEDIAATIEVTKSSSLDQHERKRKHSSERCSDQRSKRSRSTCKIAKSEISSLAIRELKLLKIDKNMVLTDSRKLLGQQHIPSWLPADLSIRHRNPLHSQDLSASTAPKSNS

SEQ ID NO: 323279 - protein, 73 aa, Zea mays
  unsure (1)..(73): unsure at all Xaa locations
  Clone ID: MRT4577_57901C.1.pep
NTDTTSMLPQNGATKGAINNQDFSSGTICFGAPGLSIIGPTVPSNVVTTVCAINIGPASTAFITLXSQAGTDY

SEQ ID NO: 323280 - protein, 111 aa, Zea mays
  Clone ID: MRT4577_57902C.1.pep
VESFLHLNFSASSYSRVIFSCVFPVSPTRPIDPYIELHSCRGSATLQFVSPLMSTRSLLRLLTVYTHMNLFAPCSSVNTFYLGSCLVGCFSSVIAPNAIQSHYSMFGWAIT

SEQ ID NO: 323281 - protein, 108 aa, Zea mays
  Clone ID: MRT4577_57903C.1.pep
LLNLKFKGMFGPPHFFKKLSKLFFQGPQKGQKNNPGIQKEGFFKKKRLEAAHSLPYQKHPQKNGGGQNPGGLQGGHQGNLGGPPKQVGCNHTARNQPEQNQEANPFHK

SEQ ID NO: 323282 - protein, 57 aa, Zea mays
  Clone ID: MRT4577_57904C.1.pep
NPATVSLKKPQHFGFTHFAIQIDTYLRRLVTVLGSMEEAKKNMFAFSTTTYTGFQCT

SEQ ID NO: 323283 - protein, 112 aa, Zea mays
  unsure (1)..(112): unsure at all Xaa locations
  Clone ID: MRT4577_57905C.1.pep
LKKQKKKKKKKKKIKXIKKKEFETLEPKTTLKGPNLWQIFPLHLGEPFRALPLKGPHFPLFGEPLFSNFTWARPRFYHTPRWTLGINTLGGLPQPLIPLWGHLPPFSPGWPY

SEQ ID NO: 323284 - protein, 102 aa, Zea mays
  unsure (1)..(102): unsure at all Xaa locations
  Clone ID: MRT4577_57906C.1.pep
SIFRTVSVGNVNPNDTESLLHEVHQRVGLGEXCKLIHKENSHFGFEDYYAQWPADLAIMTLHGLDIYRQANKVNWAYPSPHREDTWGHXNIFLLVTEVVRRM

SEQ ID NO: 323285 - protein, 151 aa, Zea mays
  unsure (1)..(151): unsure at all Xaa locations
  Clone ID: MRT4577_57907C.1.pep
PYRPPGTPPPRGGAPPPGPPRSGGQRGGPPPPRGGPGPARGPXGPRGPRGSPWPTRAGTGVGPAGIPKAGPPGAPPXPKGRGLRGLGPPRKPGVGALGSDXPPGQGKRGWLPRPPPGPGPXPVGAPLSVYPPPPPPPPFPSPFGRGGSGPR

SEQ ID NO: 323286 - protein, 53 aa, Zea mays
  Clone ID: MRT4577_57908C.1.pep
WRKKPVAPLPTSPNASLGSSTSVSFSRGAPRPISEYYITDRLPYYSILVFPVT

SEQ ID NO: 323287 - protein, 190 aa, Zea mays
  unsure (1)..(190): unsure at all Xaa locations
  Clone ID: MRT4577_57909C.1.pep
MGAGIRVLAALLAALAAATAGVTAQLRQDYYAAVCPDLESIVRAAVSKKVQAQPVAVGATIRLFFHDCFVEGCDASVILVSTGNNTAEKDHPSNLSLAGDGFDTVIQAKAAVDAVPACANQVSCADILALATRDVIELAGGPSYAVELGRLDGLVSXSTNVDGSLPXPSFNXGQLTSIFASXHLSQADMI

SEQ ID NO: 323288 - protein, 133 aa, Zea mays
  Clone ID: MRT4577_5790C.1.pep
NSPDCPVCTGLSGEPTVGQGQRSAARSARDTWPSQRSEGGTGLSGVHRTCPVRQRLPDLQRSTAPIKERNRAPDTVRCAPDCPVRPTTEGKDGLPDLFSTAPSCLGAIKGTPRRMEENTKHTKQLLSILDHPH

SEQ ID NO: 323289 - protein, 47 aa, Zea mays
  Clone ID: MRT4577_57910C.1.pep
TLSCRGSIPSVEAPCFILHMTCSPPWCPQTDECYLEIIQIRIETDMY

SEQ ID NO: 323290 - protein, 356 aa, Zea mays
  Clone ID: MRT4577_57911C.1.pep
MGAGIRVLAALLAALAAATAGVTAQLRQDYYAAVCPDLESIVRAAVSKKVQAQPVAVGATIRLFFHDCFVEVRASSSSSSTTACVSDGPGRLAMLQLPACMQGCDASVILVSTGNNTAEKDHPSNLSLAGDGFDTVIQAKAAVDAVPACANQVSCADILALATRDVIELAGGPSYAVELGRLDGLVSMSTNVDGKLPPPSFNLDQLTSIFALNNLSQADMIALSAAHTVGFAHCSTFSDRIQPQSVDPTMNATYAEDLQAACPAGVDPNIALQLDPVTPQAFDNQYFANLVDGRGLFASDQVLFSDARSQPTVVAWAQNATAFEQAFVDAITRLGRVGVKTDPSLGDVRRDCAFLN

SEQ ID NO: 323291 - protein, 88 aa, Zea mays
  unsure (1)..(88): unsure at all Xaa locations
  Clone ID: MRT4577_57912C.1.pep
KTPPGGPGGRGGXKQPARRGGGGPTQRRSHAFPRGGGKNRXSPPPGGGRAQSQRGSPRGARGRGAPRRARGGTCPPTGPRGGWNWARG

SEQ ID NO: 323292 - protein, 278 aa, Zea mays
  Clone ID: MRT4577_57913C.1.pep
MSHASPQVVYNNSEKKRSCCWDGCIYAGTPLPAATTGWVVVKPGRCGWLVQRRQAAVRAMSAAAAAASSVTKFIKCVTVGDGAVGKTCMLICYTCNKFPTDYIPTVFDNFSANVSVGGSIVNLGLWDTAGQEDYSRLRPLSYRGADVFILSFSLVSRASYENVLKKWMPELRRFSPTVPVVLVGTKLDLREDRSYLADHSAASIISAEQGEELRKQIGAVAYIECSSKTQRNVKAVFDTAIKVVLQPPRRREVTTKKMKTSSNQSLRRYLCGSGCFTS

SEQ ID NO: 323293 - protein, 299 aa, Zea mays
  Clone ID: MRT4577_57914C.1.pep
HWVPRGRPGYIRFATPTPRCHTPARRWYIIIVKKKRRCFWDGCIYAGTLLPAATTGWKEGGVVVKPGRCGWLVQRRQAAVRAMSAAAASSVTKFIKCVTVGDGAVGKTCMLICYTCNKFPTDYIPTVFDNFSANVSVGGSIVNLGLWDTAGQEDYSRLRPLSYRGADVFILSFSLVSRASYENVLKKWMPELRRFSPTVPVVLVGTKLDLREDRSYLADHSAASIISTEQGEELRKQIGAVAYIECSSKTQRNVKAVLDTAIKVVLQPPRRREVTTKKMKARSNQSLRRYLCGSGCFTS

SEQ ID NO: 323294 - protein, 218 aa, Zea mays
  Clone ID: MRT4577_57915C.1.pep
MSAAAAASSVTKFIKCVTVGDGAVGKTCMLICYTCNKFPTDYIPTVFDNFSANVSVGGSIVNLGLWDTAGQEDYSRLRPLSYRGADVFILSFSLVSRASYENVLKKWMPELRRFSPTVPVVLVGTKLDLREDRSYLADHSAASIISTEQGEELRKQIGAVAYIECSSKTQRNVKAVFDTAIKVVLQPPRRREVTRKKMKARSNQSLRRYLCGSGCFTS

SEQ ID NO: 323295 - protein, 100 aa, Zea mays
  unsure (1)..(100): unsure at all Xaa locations
  Clone ID: MRT4577_57916C.1.pep
MPPAXSLTADQLSFLEKNGYLVLESFSSAEEVQAMRGXMXEXVEGFDGADSSVFSTKDHRXXKDDYFFKSAENIXFFFEEKXFGDDGWLRQXKELSINKV

SEQ ID NO: 323296 - protein, 221 aa, Zea mays
  unsure (1)..(221): unsure at all Xaa locations
  Clone ID: MRT4577_57917C.1.pep
MSAAAAAAASSXVTKFIKCVTVGDGAVGKTCMLICYTCNKFPTDYIPTVFDNFSANVSVGGSIVNLGLWDTAGQEDYSRLRPLSYRGADVFILSFSLVSRASYENVLKKWMPELRRFSPTVPVVLVGTKLDLREDRSYLADHSAASIISTEQGEELRKQIGAVAYIECSSKTQRNVKAVFDTAIKVVLQPPRRREVTRKKMKTSSNQSLRRYLCGSGCFTS

SEQ ID NO: 323297 - protein, 157 aa, Zea mays
  unsure (1)..(157): unsure at all Xaa locations
  Clone ID: MRT4577_57918C.1.pep
RKPNPAPGNXKFPELGAKPEKVFVGPLPNPFQALVGILVVEILSSPSSPKGFLGQGGXREWALDPKGQEGFKRFGGGLSQIKKRVVPLKRGPSLKNPNGPGEFPFPVVFPHPSHPKGGPPGIPPKGISKRISLLVFFFLTKDGRLFPQLFGFSPSLP

SEQ ID NO: 323298 - protein, 137 aa, Zea mays
  unsure (1)..(137): unsure at all Xaa locations
  Clone ID: MRT4577_57919C.1.pep
GRVGLNGEYAKSGLWVLEKWIADTEQHAGAVGDVLKKIRRAVDFLIIPGKSKXRLIEQINKNVLPALSARQIXRLCTRYWDYKCGTHSVLFEDAARMKDMGRNDMQNAVSNSFLLDDDLSITFTTEEIAHEVPYVDM

SEQ ID NO: 323299 - protein, 170 aa, Zea mays
  Clone ID: MRT4577_5791C.1.pep
SRVLKECLGVSSMRLGVPFIAPRQLGAVENKSGRPSLPSVVGRTGHCPVPDFFPEQAQPTVADRCRSGAPDSPVHTGQSGAPSRPLARPRVARRFRGRPLAHRTVRCTPDCPVNFSRTPSANSRERRLRVEAAWRTGHCPVHHRTVRCPRPKHPVGCTQPTFSFSSSLCF

SEQ ID NO: 323300 - protein, 145 aa, Zea mays
  Clone ID: MRT4577_57920C.1.pep
LVRRDHRGSLEARASVRGAEDGRCGGDCSPGSARTAVRSSCVVSTLPISAFAGGHEDLKNHPGTWNFKCQEKYRWFKWSYVTRSSIRSRWRLPVDLRQGRSLVRFIFIIYFVSLPLCNKYSDYIVTFISIHSVIIKNKKKKKKSP

SEQ ID NO: 323301 - protein, 70 aa, Zea mays
  Clone ID: MRT4577_57921C.1.pep
GWFGCRVRFGIKLLGEEISSLGAAQHNKILIFFFFFFFWTSKFCWFFFFFLVVTGYIQTALLSSCVTIET

SEQ ID NO: 323302 - protein, 177 aa, Zea mays
  Clone ID: MRT4577_57922C.1.pep
KISGVKVCFDTENARDSFYRAAVNFVLDDCSRAAKDIGAAKLNGEDPRDFLAGLASNIGLDKFRAATLVCASVATRTRTCFLQCWALEIQGKRPEALDELVKICRIHYIFPPEDNSAEMEMVAAGLEKNLHVAERVHLLYLYRSVCTAGNLKTAAQALGLSLPNENTEGFAMPIRQP

SEQ ID NO: 323303 - protein, 187 aa, Zea mays
  Clone ID: MRT4577_57923C.1.pep
IWRTGRSSKFCKGLQGHLSCSASQKVLEIAKKFPSKIRLEQLPRRNIWPPQIHGNGLSYDSIGLFFFAQDIQSYERHYSKLVEWMLKGDLALRGNIETAELLIFPSNILPKSFQRWNMSYYLWGVFRVRRKDSNLPYHVPTRKHCNFNGNLLDVGRRTHAHASSGPSFYYSPTCEDSPSIMPLEANH

SEQ ID NO: 323304 - protein, 116 aa, Zea mays
  unsure (1)..(116): unsure at all Xaa locations
  Clone ID: MRT4577_57924C.1.pep
LANLVLCVLPDTGQGHVWFYLALVHSILGFYFDMHISYYXLFLLEDFSGLLVFLLVIVLSVVLIIFFFCVSFFFFLLFFYSYLFFFLFFXYIFFYYFYFFIFYFFFFFIDFFFFFF

SEQ ID NO: 323305 - protein, 80 aa, Zea mays
  Clone ID: MRT4577_57925C.1.pep
TSGRRVVLYTTCIFMSRLDTVRIAAGVSDMNRRLEDVNRDALPHWSQRISLELHPWRKAIGTPVSSADRLARTGLSVHVC

SEQ ID NO: 323306 - protein, 112 aa, Zea mays
  Clone ID: MRT4577_57926C.1.pep
MASFSEAPPGNPKAGEKIFKTKCAQCHTVDKGAGHKQGPNLNGLFGRQSGTTAGYSYSAGNKNKAVVWEEDTLYEYLLNPKKYIPGTKMVFPGLKKPQERADLIAYLKEATA

SEQ ID NO: 323307 - protein, 148 aa, Zea mays
  Clone ID: MRT4577_57927C.1.pep
MLPARAWQVQRQRAKQKLRLASSSSSPSRLRSLRASMASFSEAPPGNPKAGEKIFKTKCAQCHTVDKGAGHKQGPNLNGLFGRQSGTTAGYSYSAGNKNKAVVWEEDTLYEYLLNPKKYIPGTKMVFPGLKKPQERADLIAYLKEATA

SEQ ID NO: 323308 - protein, 117 aa, Zea mays
  Clone ID: MRT4577_57928C.1.pep
FWWGFLNCPRGPTPGKKGVQGARGGNRETGRIAGANRAQKTKRKNRGTPGPTGAKREQKATRRARGAQSEKGETGEKKKRGGNRRSPKKIGRGKAQRNGNYHHEAPQSKCPGRGGPQ

SEQ ID NO: 323309 - protein, 112 aa, Zea mays
  Clone ID: MRT4577_57929C.1.pep
MASFSEAPPGNPKAGEKIFKTKCAQCHTVEKGAGHKQGPNLNGLFGRQSGTTAGYSYSAGNKNKAVVWEENTLYDYLLNPKKYIPGTKMVFPGLKKPQERADLIAYLKEATA

SEQ ID NO: 323310 - protein, 125 aa, Zea mays
  Clone ID: MRT4577_5792C.1.pep
VAREEFLRNTTTTKRSTQRDTVVYPVIRPSPILAYSTLWRPNGRGLHSTPFKWSKDPLEYHSVSFPFTISRLRGISTTWSLSPLQKMITNEHGSKDGMNNTHKTTAIRTHTRPRLELKRLSRSSH

SEQ ID NO: 323311 - protein, 48 aa, Zea mays
  unsure (1)..(48): unsure at all Xaa locations
  Clone ID: MRT4577_57931C.1.pep
ARVLPKAVTFVTGNAKKLEEVRAILGSNVPXQSLKLDLTKLKGEPEII

SEQ ID NO: 323312 - protein, 112 aa, Zea mays; identical to SEQ ID NO: 323306
  Clone ID: MRT4577_57932C.1.pep

SEQ ID NO: 323313 - protein, 61 aa, Zea mays
  Clone ID: MRT4577_57933C.1.pep
GIQLLYVSIIPRLDRNHRRMTNAHAHQNHVNPILLCVHINLAMAMWHQHSGRAWQNWDCTH

SEQ ID NO: 323314 - protein, 167 aa, Zea mays
  Clone ID: MRT4577_57934C.1.pep
MAAMVRGPAMASAAGPGATSAAAAAAAEEMRWRQLDSGVSAVSFGFVATAILVSMFLAMAILEHFLRPPTTAHAPPRGRGVLRRLRLFLLGRGGGAPGGTDLEAARKLHGHAPLEMPVYPRGVSVLMPGQDVPTFIAHPAPAPCPPERIRWPSHQPPPFTGSSPNPS

SEQ ID NO: 323315 - protein, 122 aa, Zea mays
  Clone ID: MRT4577_57935C.1.pep
RGKDKGKSNPQQGDASALKHAGEICFRCGSQQHWSRTCTTEKYLIDIYQEWKKRQNSEAHFIQAPVDATTGEHLELPQPAAQFEHAAINVDATAKSDTPLGKVDFDFDTDDLLLRRRLSNRR

SEQ ID NO: 323316 - protein, 101 aa, Zea mays
  Clone ID: MRT4577_57936C.1.pep
KTNTGEWRGVKSLKTWKRLYYKLLGPFAFGVFWNRGFNGGGGKNPEGGYLLTPPGMVPHKGFSPRCVFLEAPFPIESKISPTVPLGERVKTKPNPPGFCCC

SEQ ID NO: 323317 - protein, 59 aa, Zea mays
  Clone ID: MRT4577_57937C.1.pep
FPLKGLSCLQHKNSTCRDKTTLEYCIKKNTFSHLPRTSTLPIHSGIEAHVRTTATDAGP

SEQ ID NO: 323318 - protein, 114 aa, Zea mays
  Clone ID: MRT4577_57938C.1.pep
SRVPLGNRNVGLPICNLPGWLGPIHPSSYFKGFLLSSCPLGLWGRMYVHLVPGSRPFHPGTKSSVPCFRGQPPDPSVAPLFPQPFCPPPPLCRGVPPRAHPWVNVVPIINRWIL

SEQ ID NO: 323319 - protein, 138 aa, Zea mays
  unsure (1)..(138): unsure at all Xaa locations
  Clone ID: MRT4577_57939C.1.pep
GGGRAFFFIKKIFAPGKXESLGGPFFVPXIRGFXFFSTKGGGGSTGIKNNVGVPPGGKXGIERISKRSXKKAALSRGNIPLGVPKRIPDPGEVFGVFKRGHPWDPPLGVKGPKDVKIQGVWFAHLKYFVFIFKGGGPS

SEQ ID NO: 323320 - protein, 71 aa, Zea mays
  Clone ID: MRT4577_5793C.1.pep
PPTLPPSPPPKLSTPSGSSSCGNLKLHVAPPNPSPGAETSAGEHWRRAAHSGAEIWGGGVLTELRLERLGR

SEQ ID NO: 323321 - protein, 105 aa, Zea mays
  Clone ID: MRT4577_57940C.1.pep
ISRPPSGGWCPPPPSSGLRLVPVPLALGAWFFGRNRVLNPVSSQYPPHPPFSIREVSSPFSLGSALVPVLGSPGSLFPPIRYFIGRCFYTLYFSMQCSCLACSRQ

SEQ ID NO: 323322 - protein, 144 aa, Zea mays
  Clone ID: MRT4577_57941C.1.pep
LLARVLMTKPKGQKLQKVAFTNPSLIVLGSVPEMMSQTGTTAPDLPKEIMRPNNAYFPSPSEGSSPRAGGSPVLHPSAPPTGPRYPVAGGGKECGQLRGGERLWRREGEAVWHVSAAVSWGRGTGTRGGARSVGAMPYDPGRPR

SEQ ID NO: 323323 - protein, 81 aa, Zea mays
  unsure (1)..(81): unsure at all Xaa locations
  Clone ID: MRT4577_57942C.1.pep
PSLADDPTTRXRIWFGIATAHDYQSXDDLTEERLYQNIGDFHYALXGLIFLWXTAGNLFLVAWGGNFQPXTLDPLHLRPIA

SEQ ID NO: 323324 - protein, 213 aa, Zea mays
  Clone ID: MRT4577_57943C.1.pep
HTPGGGGGATSVRRRCRGGAGHPQGGVGLRQAAHRGVAELQAGAGRTAGGDRDLHPDRCHARAGTGTPTQGNPREEHTTASHQPATTALHFLSLSLGSSALLPESLASLPRLLPSPWTDSSPHLRFHSIRAKVNSSVGGARAGKRREGPGSEPSCAPRATDTQVSSSHADLLLLLRSKPKPELRLLVVGRRRRRRQGRLRRCRRALSARPLAR

SEQ ID NO: 323325 - protein, 228 aa, Zea mays
  unsure (1)..(228): unsure at all Xaa locations
  Clone ID: MRT4577_57944C.1.pep
MSSSTIRKALGAVKDQTSISLAKVTSNIAPDLDVLIVKATSHDDEPAEERHIREILHLTSGSRAHVAAAVAGCSRRLSRTRDYVVALKSLMLVHRLLVDGDPSFHRELLHGTRRGTRLLNLSDFRDEAHSGSWDHSAFVRTYALYLDQRLEFFLXERKQGLNDSSSTGSLLDHLQQLLDRFLACRPTGGAKQSRMVLRALYHIVRESFQLYSDICEVLAVLLDRFLDM

SEQ ID NO: 323326 - protein, 93 aa, Zea mays
  Clone ID: MRT4577_57945C.1.pep
TTVMAALPEELIWISCWVNNTLTCSTSLVRLCSSAMGVCSPNINTDGRMRKIEEYLRTTTCSTGYLTTKDELTRVLLVICSSIGYIYERIKVA

SEQ ID NO: 323327 - protein, 640 aa, Zea mays
  unsure (1)..(640): unsure at all Xaa locations
  Clone ID: MRT4577_57946C.1.pep
MSSSTIRKALGAVKDQTSISLAKVTSNIAPDLDVLIVKATSHDDEPAEERHIREILHLTSGSRAHVAAAVAGCSRRLSRTRDYVVALKSLMLVHRLLVDGDPSFHRELLHGTRRGTRLLNLSDFRDEAHSGSWDHSAFVRTYALYLDQRLEFFLMSXQQGLNAGSSSSSANGPSPRDRDRWGSPDPYGRRSPSYSSPPGYGGYDDYRERNGGNNDDKRPPTPVRDMKPERVLARMHHLQQLLDRFLACRPTGGAKHSRMVLVALYQIVRESFQLYSDICEVLAVLLDRFFDMEYAECVKAFEAYASAAKQIDELSAFYAWCKDTGVARSSEYPEVQRVTDKLLETLEEFMRDRAKRPKSPSPEPEPEPVKEEPEPDMNSIKALPAPEDYKEPEPVKVEEEVKPEPPPQPQGDLVDLREDTVSADEQGNRLALALFQGPPAAGGNNGSWEAFPSNGGNEVTSAWQNPAAEPGKADWELALVETASNLSMQKPAMSGGMDPLLLNGMYDQGVVRQHVGAQVTTGSASSVALPAPGQKTQMLALPAPDGSMQTVGGDPFAASLAVPPPSYVQMADLEKKQQLLTQEQIMWQQYQRDGMQGQSSLNRLDRAPNPAMPYGMPMAYNTNPMPMAYTGNTGYYYPTY

SEQ ID NO: 323328 - protein, 104 aa, Zea mays
  Clone ID: MRT4577_57947C.1.pep
GQPQAEGAALRLQKVYKSFRTRRQLADCAVLVEQSWRKLLDFALLKFATRQAGRGSRRSSHGERCHGLAPAGNKSGRGGRGSRRHGTTRSPPSGSPYQTSMISW

SEQ ID NO: 323329 - protein, 172 aa, Zea mays
  Clone ID: MRT4577_57948C.1.pep
MSSSTIRKALGAVKDQTSIGLAKVTSNIAPELDVLIVKATSHDDEPAEERHIREILHLTSGSRAHVAAAVAGCSRRLSRTRDYVVALKSLMLVHRLLADGDPSFHRELLHATRRGTRLLNLSDFRDEAHSGSWDHSAFVRTYALYLDQRLEFFPHERKQGSNAGSSSSANGP

SEQ ID NO: 323330 - protein, 178 aa, Zea mays
  Clone ID: MRT4577_57949C.1.pep
GHPWIRGTQEVKINLDMIIYRLMRAYISSSSLRKSALRALATALTTDQLFNLREQFTLFGPNKSGHISLQNMKTALMKNSSGAMNDSRILDFVNSICNIQYGMIDFEEFSATAISVYQMEGLETWEEHAQQAYELFDKEGNRPIVIEELASELGLGPSISFHVVLKDWIRHSDGHPGS

SEQ ID NO: 323331 - protein, 93 aa, Zea mays
  Clone ID: MRT4577_5794C.1.pep
HGSKLLQQIVPALTQLVVANPGASLQQLFPFNQRVVSNFVGYLQQGQQLLNPLAVANPLVAPFLQQQQQLLPNNQFFLMNPALQQPMVEGALF

SEQ ID NO: 323332 - protein, 80 aa, Zea mays
  Clone ID: MRT4577_57950C.1.pep
FQKPGETKKPARTGGHKKKGGGLTPKKPRAQKKKRGRKICPTYFEKGGGQNWGLENKGELGKPKNPSWGKWPGQTKKTPP

SEQ ID NO: 323333 - protein, 34 aa, Zea mays
  Clone ID: MRT4577_57951C.1.pep
RDSTNLVSYFNISFRNHTIVCIMVNFMPASSIIY

SEQ ID NO: 323334 - protein, 86 aa, Zea mays
  unsure (1)..(86): unsure at all Xaa locations
  Clone ID: MRT4577_57952C.1.pep
GSKTKNIFSLDLLKKKGGGTIIFIFGKQIVSPTKKGGLEXXQILATKXXRNQKGDERSFLTFPRFAPSTGFFKKIGTAIGPNPSGT

SEQ ID NO: 323335 - protein, 142 aa, Zea mays
  Clone ID: MRT4577_57953C.1.pep
KDASAVLLSEEFHEVFPLYLYTGTSDQADDEYSLDSIVKFGINGKKTSGGKPGFLYSSLRNSQSAQGTMRVKKNLVVSGLGKTHQVYKYVGTDGCYFRDVSSRNYTIVSDRSDDSCSKRAYSSVSAKLNDQPARRKLLANKL

SEQ ID NO: 323336 - protein, 91 aa, Zea mays
  unsure (1)..(91): unsure at all Xaa locations
  Clone ID: MRT4577_57954C.1.pep
ETPLQGRLNGVATCIGLVCLSVAVAVLDVLWIRXFTDIRNLRTXIVAGTTGVKSRIYWWQLRLLTIAVTIVVAAVPEGLPLAXTLTLXYSM

SEQ ID NO: 323337 - protein, 468 aa, Zea mays
  unsure (1)..(468): unsure at all Xaa locations
  Clone ID: MRT4577_57955C.1.pep
MKRLPILVVPVLLLLLSISFFLFRPTTPPVLSSRQAFEPDRRLRVYVADLPRAFNYGLLDRYWSLRAADSRIQASSDPDHPPPHDHPPYPENPLIKQYSAEYWLLASLRAAATAPAAVRVVADWREADVVFVPFFATLSAEMELGWGTKGAFPKKDGNEDYRRQREVVDRVTXTPRWRRSSGRDHIFVLTGYVKYXHSLEDPVAMWHVRAEIAPAILLVVDFGGWYKVDSKSSSKNSSRVIQHTQVSLLKDVIVPYTHLLPTLLLSENKDRRTLLYFTGAKHRHRGGLVREKLWDLLGNEPDVIMEEGFPNATGREQSIKGLRTSEFCLHPAGDTPTSCRLFDAIASLCIPVIVSDEVELPFEGIIDYTKISIFVSVSNAMRPKWLTSYLRNISKQQKDEFRRNLARVQPIFEYDTSYSSSRGSTSIDGAVSHIWKKIQQKLPMIQEAIIRDKRKPDGVSIPLRCHCT

SEQ ID NO: 323338 - protein, 72 aa, Zea mays
  Clone ID: MRT4577_57956C.1.pep
LLLEAVSSSSCHQVRTLEVNVPFHQHQLVVMSSALLQWGLPRERIQFQALGSDAASPPFERLRPPQSAICSP

SEQ ID NO: 323339 - protein, 120 aa, Zea mays
  unsure (1)..(120): unsure at all Xaa locations
  Clone ID: MRT4577_57957C.1.pep
MNCNPRVSISRRXKCRKAHFTAPSSVRRAIMSALLYNXLRHKYNVRSIPIHKDHYVHDMRGTYNGREAIVLQVYRRRWXIHIERITRXKVKDSTVNVGIXHPSKVMVNKLKLDNDRKVIL

SEQ ID NO: 323340 - protein, 88 aa, Zea mays
  unsure (1)..(88): unsure at all Xaa locations
  Clone ID: MRT4577_57958C.1.pep
SYACGFASIRCSYVCSLQSVGIIAVGCGXSSCQCAXSKYPRPXETSTAAQATVVLGVAPENKAAPEFVEAAAESVDVRHGCSCGGNCK

SEQ ID NO: 323341 - protein, 118 aa, Zea mays
  Clone ID: MRT4577_57959C.1.pep
HLLGLARGGAWRDVLLVVIASAAGRGPRFIAQRRLLWSRFLEADARRRGRLRRGAGAGRERREEEVGRLRGSGGGEGLQGPEDPRSEPSHFSCHPSDHTLPSHTVALSCDRHSDYFYV

SEQ ID NO: 323342 - protein, 41 aa, Zea mays
  Clone ID: MRT4577_5795C.1.pep
ASQKVVVMRIRMFCVGVHVNKFDFIDLQYVVLLKEHFAHAS

SEQ ID NO: 323343 - protein, 55 aa, Zea mays
  Clone ID: MRT4577_57960C.1.pep
SLPLRSCGGQINLFQNCVFLLLLRKNSPNNKVLLCPRLIYTWPPGPLRSNTTISK

SEQ ID NO: 323344 - protein, 47 aa, Zea mays
  unsure (1)..(47): unsure at all Xaa locations
  Clone ID: MRT4577_57961C.1.pep
SKMNYQTPYITVLTHQTDHAHLRDRLSHTLLSSGGGGXTYXTXNTGN

SEQ ID NO: 323345 - protein, 90 aa, Zea mays
  Clone ID: MRT4577_57962C.1.pep
GLLCCLAIKLGLPLYIRRGRVLVGIGKKNRSGLLLGPPTGGLSTRTILRVHRSSQHKCHQVPKQIYQSTPENLIMKEDELSFPNLQYRSN

SEQ ID NO: 323346 - protein, 56 aa, Zea mays
  Clone ID: MRT4577_57963C.1.pep
GPASSRRSRSPGASIYGTSTSIHWRHHTLHTLGNSISNLFVINPFFVSPSSMLLLL

SEQ ID NO: 323347 - protein, 56 aa, Zea mays
  Clone ID: MRT4577_57964C.1.pep
LGTINDPYFSFGPLGICSVVFVCGRPTPQCRGLFFPVSFVPARLQKHEWLLTRNYT

SEQ ID NO: 323348 - protein, 155 aa, Zea mays
  Clone ID: MRT4577_57965C.1.pep
IGYIARSSLLSKWASLFASFIGSLRPSITRGIVRRFLGPSWSVTAVDAACSHLLRYNTMRNVLFMAMTEFQKLTEEPDWTFIRAQEDKMAFLFGVDDHWGPLSHLEEISKHAPRVTLSVETEGHTHGYCCTEAGSVWVADYIANLIKNQMLLWNN

SEQ ID NO: 323349 - protein, 134 aa, Zea mays
  Clone ID: MRT4577_57966C.1.pep
LRRRRGPGFSVIEKRQPGTQPVWVQPGEVPPRGQRRLFCAPGVVFGLASIKITTGGLGFSNSFSLEEFFQGAAPAFSQRGGEGPLNPTPHGGPATQKQTPKGFGLGPPPTGGKFPRFYVTNVFPAPAVNPFYFR

SEQ ID NO: 323350 - protein, 195 aa, Zea mays
  Clone ID: MRT4577_57967C.1.pep
YCLKLGPKKGGVTATVDERPYVELFLSTYCKIAVAGSDFTSGGWGFAFPRDSPLQIDLSTAILTLSENGELQRIHDKWLKTGDCSTDNAEFVDSNQLRLESFMGLFLICGAACVLALLIYLGITIRQYLRHEQPGPAISVDAGSSTSKRSLRKFISFADDKQPPPKKKRAMSLSRSSMPTMPMSNRPGADIDVES

SEQ ID NO: 323351 - protein, 71 aa, Zea mays
  Clone ID: MRT4577_57968C.1.pep
MGGGMEVHKNKWIEEWNAGRENLEFNFRWTRRSLAVVGLFGLAVPILVYKGIVRDFHMQDEDAGRPPRKFL

SEQ ID NO: 323352 - protein, 318 aa, Zea mays
  Clone ID: MRT4577_57969C.1.pep
MARKKATVEQLRTLNKVREFKRRRNMHKAAGAGPGNKGENVCAICDDGGNLTCCEGCCQRSFHLDNEHNCIKTLGLTIQEAKNIIEKGDFICKNCQYKQHQCFICGSLGSSDDTDTASQQVFQCEHDDCARFYHPKCVAQMLYPDSQELFELHVAAGESFTCPMHECIVCKEVDNKKDKSMQFAVCRRCPTVYHRKCLPRDIIFKPKKGRRGPMRRAWKNMLPDRILIFCMKHEIVRELQTPARNHIVFPESNVLKTFQALYAQREAPDHSSSKQTHSSPPPAARDQNQCYCSSPLCSFAPSSVFMRPHPGSSGWLDD

SEQ ID NO: 323353 - protein, 55 aa, Zea mays
  Clone ID: MRT4577_5796C.1.pep
FFKLDCNQDNKPLSKELEIKVVPTFKIFKGGKVVKKVPGAKIEELAHAIDTLKSG

SEQ ID NO: 323354 - protein, 90 aa, Zea mays
  Clone ID: MRT4577_57970C.1.pep
AFIASCAREVYYPTLLLPPPTSVTRFRTPLSSVESASALQPDLGGDIAPVETPGSLHRHQRDMPSGRPWQSLMITNSSRNHCTPMRVLYG

SEQ ID NO: 323355 - protein, 136 aa, Zea mays
  Clone ID: MRT4577_57971C.1.pep
SNSPLCSSTQHQTHDSPLSSLCRLLAELRAANRAGELARSGALLISAPLEILRERLAKLSGPSSSLVESQACAPSASSSCVLTSSSLLTSSNCSLHLGRTRRPASRLLVFHLFNHQLPWNTLITLSVDQSLGGVIF

SEQ ID NO: 323356 - protein, 163 aa, Zea mays
  unsure (1)..(163): unsure at all Xaa locations
  Clone ID: MRT4577_57972C.1.pep
AFRLEATVKQAAAATHEYNVDPXWXMDSGATDHITXDLERLTFKDXYNGGDQVQLDNGAGLSFTHVVHSSISGSVSSIXLTHISYVPKXNKHLLSLRKLILYNNAFVHYHATHFFVKDQTTKQFSLRGRCRRRXLYIFPNKSLALMTEKSLLDLWHRRXGHPA

SEQ ID NO: 323357 - protein, 52 aa, Zea mays
  Clone ID: MRT4577_57973C.1.pep
VSVFQKHYHLSFYVDSALTKVKSVSWHSPNVLLTQELCQFMHLHTKDSASEC

SEQ ID NO: 323358 - protein, 75 aa, Zea mays
  Clone ID: MRT4577_57974C.1.pep
TDIMMYSLRLLVVPSETSMKEAQKSETSAIVDEYQLSDTSKKTRLLILKLSVHLRVQYKSIILVSNWMELCVISA

SEQ ID NO: 323359 - protein, 71 aa, Zea mays
  Clone ID: MRT4577_57975C.1.pep
TGVCSIRSVRDGGIDRVAESSARIKGEPIPSNLDPIPPLEPHRWREHRAKNRKKVAAGAVHPPHRRSMRRH

SEQ ID NO: 323360 - protein, 71 aa, Zea mays
  Clone ID: MRT4577_57976C.1.pep
LLRTLRLTICVSRYSSTSLYRHTDALTLTYRCSREIVEWTCAVALPGSRSQSRARHSSSARSERCEYELKG

SEQ ID NO: 323361 - protein, 59 aa, Zea mays
  Clone ID: MRT4577_57977C.1.pep
SAARSRDYALRAHPACRVSRLHPTGNASSLVASITIAGSLYVGSPPPSLDVVVNRDRCY

SEQ ID NO: 323362 - protein, 120 aa, Zea mays
  Clone ID: MRT4577_57978C.1.pep
ITPHLRRKLIVGNLVVVVRLIHVRVASSRNGFNSTITSIYAVSEVLTKAAGAIRSEAGSVFTCLPRVAHACPDSIVTLGVVLRDPSVPSPRVDRSAMLVGGTLMRCRVSSMARLALAVPS

SEQ ID NO: 323363 - protein, 117 aa, Zea mays
  unsure (1)..(117): unsure at all Xaa locations
  Clone ID: MRT4577_57979C.1.pep
MAXTGRQQQNXLRXPRFSXXFLLLLGRLAAVFTQPSSCRPVLLVDKTDATDVILLPVPADAETTATVVFAAPSATVPREDDDEGRRHHRLAGGRHQWLLNKKPRGKAPPSAPSKRTN

SEQ ID NO: 323364 - protein, 116 aa, Zea mays
  unsure (1)..(116): unsure at all Xaa locations
  Clone ID: MRT4577_5797C.1.pep
SNFPPPRLSPLGKRGPPPPVGXGPPPPHKRGNGQGPYGTPFPKGQKPPPLSPKGKGFPPGXFPGGFRPKRLKPPPFGGPPTFPWGPPFKPPGLWPPPFFWGGFWEGKKWAPPPPFF

SEQ ID NO: 323365 - protein, 72 aa, Zea mays
  Clone ID: MRT4577_57980C.1.pep
HTPTVKTDAVAAFLTRIEDPKVTSYAKTEKNPCKEIQDSGMRKVCGPMMRDKKAVVKAGLHNAAKAIKWDYK

SEQ ID NO: 323366 - protein, 46 aa, Zea mays
  Clone ID: MRT4577_57981C.1.pep
LRFWKNPWKILNHFRILNLFKRGLSPKDFFFPFAIFCLKAKIYFQN

SEQ ID NO: 323367 - protein, 78 aa, Zea mays
  unsure (1)..(78): unsure at all Xaa locations
  Clone ID: MRT4577_57982C.1.pep
NNCSSSVKVAWPVSQFQRSTPISSTSIVVTWRSAEIPLSSRHTANSMQALTRQRSXCIXXLFTLTKHAYAISSHLVIS

SEQ ID NO: 323368 - protein, 375 aa, Zea mays
  Clone ID: MRT4577_57983C.1.pep
SFPIPYSWRSLPTPPPLLRRRPSAPFPNPLAPLPGGDVADVAALLGEMDCVGLRPGFSLVEKAVALYWDRGEKELAVEFVRDVLRRGGLGAGAGGEHSSASGDGERGGPVGYLAWKMMMDGDYRNAVKLVIEFKESGLKPEVYSYLIGLTALVKEQKEFSKALRRLNASVKDGSISKLDAESMHSINKYQSDLLSDGVLLSNWVVQEGSSEVLGLVRERLLSLYTCAGCGLEAEHQLWEMKLLGREPDTQLYDVVLAICASQGEAAAVRRLLAGVESTSAGRRKKSMSWLLRGYVKGGFILDASETLIQMLDMGLLPDYLDRAAVLTALRRNIQESGSLESYLKLCKRLSETDLIGPCIVYLYVRKFKLWMAHML

SEQ ID NO: 323369 - protein, 53 aa, Zea mays
  Clone ID: MRT4577_57984C.1.pep
YILHVVPGRTECAYDIFCNKDIMGFMISPMSKIELSPQLSVTKKEKKKKKESL

SEQ ID NO: 323370 - protein, 273 aa, Zea mays
  Clone ID: MRT4577_57985C.1.pep
MALSSHATTAAAAAAVGTFPQSTRSSSRRFPASSVSPRPPPPPRSLRLDHAVAPSLSPATMPAPDGLLAAAIEHLEREPASVAADEAPLAALSPRELQLVLVYFAQEGRDTYCALEVFDWLRRANRVDGETMELMAAIACGWIERLVGAGGDVADVAALLGEMDCVGLRPGFSLVEKAVALYWDRGEKELAVEFVRDVLRRGGLGAGAGGEHSSANGDGERGGPVGYLAWKMMMDGDYRNAVKLVIEFKETGLKPEVDSYLIGLTAWVKSKRN

SEQ ID NO: 323371 - protein, 213 aa, Zea mays
  Clone ID: MRT4577_57986C.1.pep
STTRPIKGVIDAMAYSKLNVLHWHIVDEQSFPIEIPSYPKLWNGSYSYSERYTMSDAIDIVRYAEKRGVNVLAEIDVPGHARSWGIGYPALWPSESCREPLDVSKNFTFEVIDGILSDFSKIFKFKFVHLGGDEVNTSCWTRTPHIEGWLNNNHMNVSDAYRDFVLRSQKIAISHGYDVINWEETFNSFGDKLDPKTVVHNWLGEDVAPKVVA

SEQ ID NO: 323372 - protein, 119 aa, Zea mays
  unsure (1)..(119): unsure at all Xaa locations
  Clone ID: MRT4577_57987C.1.pep
YFFGSSTTILVVAVVMEVILLVGGEXYRIINDVVLHDNQLHPGRSFHLVVVSSAHQPAVLLVMKVINGGRPTMFTMAAFIQPAFVAEGAPVNLLDHHINPSFDNLLPVIFGGAEKRPRM

SEQ ID NO: 323373 - protein, 76 aa, Zea mays
  Clone ID: MRT4577_57988C.1.pep
LQPSLFIWPNPARCPGTSVVQSRTVLSPASEPYSNLVRIPRHSFFEPGPPESGGFPSVLVNLLAQVFSQIIKNPQS

SEQ ID NO: 323374 - protein, 76 aa, Zea mays
  Clone ID: MRT4577_57989C.1.pep
PPRGFGFFLGSPWGPKGGARPTPFRVLWGENGFGSPQIPQFIPSLFFPFARGPKPVSLVPPGFFGPLAGYKGRLSL

SEQ ID NO: 323375 - protein, 379 aa, Zea mays
  Clone ID: MRT4577_5798C.1.pep
MAMAAPPPTALCARRFRPHHFAYSSPATLRLPTASSSSQLRRRRRLAVSPRADAATGTGDVEALRAGVSVYKPRSYDVLVTDAARSLACAIDDGKTRLEIEFPPLPSSISSYKGSSDEFIDANIQFALVVARKLKELKGTRSCIVFPDQPEKRRASELFKTAIDTIEGVTISSLDDVPTDPVNSFFKSIRNTLDFDFSDDNEGRWKSDEPPSLYIFINSSTRDLASIEKYVEKFATSVPALLFNLELDTLRSDLGLLGFPPKDLHYRFLSQFTPVFYIRQRDYSKTIAVAPYIVNYSGAVFRQYPAPWQVMLKQADGSYACVAESEARFTLGQAKEELLRVIGLQEEEGSSLEFLRRGYKNATWWEENVDQETSSAWRT

SEQ ID NO: 323376 - protein, 143 aa, Zea mays
  Clone ID: MRT4577_57990C.1.pep
MARVRSTARVSREGGEVEVTEMTPISEVMRQSGLVLLEEPIAEGTSTAEAEGITVGEGSGNEDEEDYTILIPEKPSHLDFGRSTVTADDMVIMKKLGYFGETESRLVCFAGEEVVPEPKDDEVIVFKSFFRAGLRFPLYDIIG

SEQ ID NO: 323377 - protein, 54 aa, Zea mays
  unsure (1)..(54): unsure at all Xaa locations
  Clone ID: MRT4577_57992C.1.pep
ASSPGLXLCAPVXGCLGLLSVVSXWPXXXASXSGVPPSWSAGFXRSVAAGXRVR

SEQ ID NO: 323378 - protein, 156 aa, Zea mays
  unsure (1)..(156): unsure at all Xaa locations
  Clone ID: MRT4577_57993C.1.pep
DPCTILGKGRLYPPSLSAAVMEINAQTGMPYFQXGLKXLEETMQTNGAHAPNSTQMDGPFFEVSTRRKCPDSLKDPRKSDINGEERLETGSNNIKAXDGLXNAQTWHAILTHHTKDKNDLYRIATDXDLTVDHWKTYGKNFFTRYDYEASESHTAL

SEQ ID NO: 323379 - protein, 72 aa, Zea mays
  Clone ID: MRT4577_57994C.1.pep
RLGRGLKRRYDRRGHENTGTPPLYRMNQSHSNFIRTRANLGTRVLSLTCSFADYQLIDSSTKNVKAMGLHES

SEQ ID NO: 323380 - protein, 63 aa, Zea mays
  Clone ID: MRT4577_57995C.1.pep
HLVVGVFFCFVLGTCHSVVIADVSFPPAERGSLLVLDRFGEALLRFLLRVVCLTYPSVWLFRM

SEQ ID NO: 323381 - protein, 62 aa, Zea mays
  unsure (1)..(62): unsure at all Xaa locations
  Clone ID: MRT4577_57996C.1.pep
ISKKEAIKYIVKCILYIKEANYILTSFLVKDIIVLFELISYSFFCPLLETQSDEISXRMNIT

SEQ ID NO: 323382 - protein, 112 aa, Zea mays
  Clone ID: MRT4577_57997C.1.pep
KRSTIHPPSFPSGGWQRARLGKETSRSVAVGLDPSAEEGRLGSARSRRRPGPTAGHCGAHSRRCTPSRHRNNNPHCRRCSSSPHPTSLIQSIDAALKSSSPSHRRSISKHRS

SEQ ID NO: 323383 - protein, 69 aa, Zea mays
  unsure (1)..(69): unsure at all Xaa locations
  Clone ID: MRT4577_57998C.1.pep
GRVGVNVRNIFRFYKSTEGTGXPLGSXRGSQAXIRERMRAILIDWXIEGQDRLTLMPETLXLTXXIXDQ

SEQ ID NO: 323384 - protein, 138 aa, Zea mays
  Clone ID: MRT4577_57999C.1.pep
PFLLHRLSLQCPLPDVPLLSHSRSSGALFILNPFLLEDGSERALAKKSPAPLRWVWTRARRKADSNPLDLADDQAQQQDVAALRKHSRRCTPSRHRKNNPHCRGCSSSPHPTSLIQSIDAALKSSSPSHRRSISKHRS

SEQ ID NO: 323385 - protein, 120 aa, Zea mays
  unsure (1)..(120): unsure at all Xaa locations
  Clone ID: MRT4577_5799C.1.pep
LPFIKTAALNKKGPVRVVSTNFPETMVKILLRGGFMEGVGNHREGTRFFWVXNLGTSRGKAWKGIFWTWTXFLRGITRPGLQIYATFQGFPRVWGGREMVIFSTSRGIRPDREARLTRMG

SEQ ID NO: 323386 - protein, 69 aa, Zea mays
  Clone ID: MRT4577_579C.1.pep
IFMFSGGVLTLSKTLLWEATCKPRAYMRFGLRKLCIRLLLFPLGMHMIHSMLWLMVCAKLNKLECVYPA

SEQ ID NO: 323387 - protein, 1070 aa, Zea mays
  Clone ID: MRT4577_57C.1.pep
MTGHFLKRYLAREYPIRAALLASFAFRALVLAFPLPNPLRHSPSALLAGRIEMAPKRKTASSSAVVIPPIDPNSQLPFAGNHMSIISETELLHLVSIGVLSPQELCSWRICHGFTVPTEDTHESVVYAPFLLRGLGLPISPFFRGLLDFYHINLTHLNPNSILQIFIFVHLCEAFLGVLPYFGLWKYLYHCRPGMAGGQHQLVGGASLEMRRGRKTEYLEIPLKDSIKGWRLEWFILENYGNSLPSRSGRQPDVRTTSWTESPTDQEVAEAGVLLAEVGLLKERGLTAEAVVTDFVFKNIQPLKDRAYPAYLYRGLADSTRVTNRRIPSADLVSRLEMILRGKVSNVGAPVAYSAWNLPHPKAFTLFVSNPPITDGGLGLRVRPSAEEVNALVASLGEIPDDERQVHFEVPLNPSDADISAMLDLLDEDSSDAAPAGTSAVVPLPEVDTTLDAQKPVNTRPRRPCRANQPDPSVDEQKKKRRRLRRVSSFDQDVGTSVPATEEMPATGLVDADPNGCPQSAADPNVGAPSVADPNGCAVCVANVDDEEEETEAPLTRKNSRRFIASGESSGVPSPALSALIGLQELSLANFDQTLEDMVPEDLLSEPVDDGAMEACVDVPDAGLRSSRASSTLERDLEGREADLDCPGPMEVAEGPSTLEVVTAESLDLKNGADTNPAPEDVVGDDLARVKSVSHCPAPEGAAGDDPAQVGSANYDPAPEGAQAGSPSCTSMDVHAGSPPHSGCMVVAQTLDQGVALEGSVPADRVLGSVEGTELISAGSLQAASGGGFTPAYQLISPDLGIPSLFSNLQALVDGMASQLRLQGASVPEVVSSLACWNPVSLQHRVSELEATNAGMTRQISTLEEKHSRDQAELVQQCADFEEKYSQSQTELGQVSAALDDANALSSSLHAQLDSEKEEKCIIAASRDNLDRLYRDSSNSLTILERSHRFTMEELDNQRCRLQESADEVTRLKQLISAKDATIKELRASKKSIAQELETARLAAKVAEETSVTLKAQRDRAMDKAIRAGRILMRRPGVVVPEDIRADVNAAPDSSSRPSSSVAPEKDIAK

SEQ ID NO: 323388 - protein, 113 aa, Zea mays
  Clone ID: MRT4577_58000C.1.pep
MAAYRHPTKGNRGCGVERRGEWTKARHGWRCCCIGTGTGTGKGDETRGVGWYSAGTGALTGAENQLRLTSDAAAETQTPLVCVLFRPCSCLVRMQQRSLSFGSIDVLPALLFN

SEQ ID NO: 323389 - protein, 94 aa, Zea mays
  Clone ID: MRT4577_58001C.1.pep
PDFGARVEAHAIKVVVPEKSAVDPQLSDAAGIDHLRRKDLDVDTGADEQIACVVARRLRCARRSPRTSTARCCASHPCRTSPTRPRTRLRSRGW

SEQ ID NO: 323390 - protein, 84 aa, Zea mays
  Clone ID: MRT4577_58002C.1.pep
LRFISIKKKQKKKIKKIKINSAVLLNNPNFITLPPNSYLLIKGPKFLFTLPPLFNYHYSGKTFFLSQLNHQSNCIPSLNNSDIN

SEQ ID NO: 323391 - protein, 109 aa, Zea mays
  Clone ID: MRT4577_58003C.1.pep
YEPSRNKGKKRTSRAGEHRTQPGENTIKTRGGDTAPRGGTNKGRGRKKKRGPGGAQRPPGPPPLGGAHRGGGPAHPPPGAGEPQAPIRGGLGGKQTPATVKNTTERGRK

SEQ ID NO: 323392 - protein, 117 aa, Zea mays
  unsure (1)..(117): unsure at all Xaa locations
  Clone ID: MRT4577_58004C.1.pep
KRIYKYLFRHLFFFFFFNILKLFFFSLAHVGGRGFFFAPHGWPFWLSFEGSHCPYQWLFSLSAGLVFKSALSGKTFAPRLFWXRAAWPLLSPVLFCXILSLSSFPFLALLGLCRSRP

SEQ ID NO: 323393 - protein, 59 aa, Zea mays
  Clone ID: MRT4577_58005C.1.pep
FKNPSGLKWLFPIFPSCFFCLVQKLIEKTLRPPLGRSHFLIFFFKLFFITLSLIWSPLP

SEQ ID NO: 323394 - protein, 66 aa, Zea mays
  Clone ID: MRT4577_58006C.1.pep
VLDRERPLFFFFFFFFYFSKSTENINLNAASKLECTYCLLCPFPNGGGRPCFWKTYRILKITAFLY

SEQ ID NO: 323395 - protein, 161 aa, Zea mays
  Clone ID: MRT4577_58007C.1.pep
LILLDMHHMLHDDGASCVQAAAEAEAAGAAGSALTCTMTRTDAHATVQVSVVLGKNAEQQGRPRLRRVRRGLPRVQPRLQLQVQPLELLITLLDNHGYDHDLYNYLWSLNSYKHSHTRCHTYFYTYVLCRERNRDIKIAIYLCMFVCMFGAHVRTCVHPHV

SEQ ID NO: 323396 - protein, 71 aa, Zea mays
  unsure (1)..(71): unsure at all Xaa locations
  Clone ID: MRT4577_58008C.1.pep
FHKAPSRVISAHCTXPHGSDAHTTIVPPLQCDFYHRPHPRSLQANLATVLCLDGAIPVSQYITDALPRCEV

SEQ ID NO: 323397 - protein, 91 aa, Zea mays
  Clone ID: MRT4577_58009C.1.pep
SNPNRLFSKVVKKGDVFVFPKAMIPFQMTLDHDKPAGALLSLSSQNPGVIPIASPVFGSKPPISEDVLAKAFQVEKKLIAWLQFQFWDTNY

SEQ ID NO: 323398 - protein, 78 aa, Zea mays
  unsure (1)..(78): unsure at all Xaa locations
  Clone ID: MRT4577_5800C.1.pep
MRGRVIAIHSLXDEWSIHIEEANSANKLVVIDFTASWCPPCRAMAPISADMAXKTSPNVVFLRFDVDQLKTIAEQFSV

SEQ ID NO: 323399 - protein, 62 aa, Zea mays
  Clone ID: MRT4577_58010C.1.pep
GIALLIRLHEDAPSTMGTTRMMCMKELLNLRRETRRVFHALSLACSLTQCILSFSHGKWLQI

SEQ ID NO: 323400 - protein, 99 aa, Zea mays
  Clone ID: MRT4577_58011C.1.pep
LILKIYLLFSSFFYFFLLFFLFFLFFFILFFSSLLFFIYFIFLFFLFIILFFFINFFFFFFLFLFFFFLFFFFYFYFFFFFFFFFSFFLFFLFFFYFFF

SEQ ID NO: 323401 - protein, 82 aa, Zea mays
  Clone ID: MRT4577_58012C.1.pep
GGSPLRQGRLRRVTGKGTKRGGPHRERTTSGRKKGGTPKGSHNGPRPPNNAQKGAGVKKEEPRKWKLGGRRNRELKKWARPM

SEQ ID NO: 323402 - protein, 53 aa, Zea mays
  Clone ID: MRT4577_58013C.1.pep
HQKSLTSIICFLSFPPKIPTLVQSEIGGVSFPPFLTCHAKSAHHSITLDFIQT

SEQ ID NO: 323403 - protein, 63 aa, Zea mays
  Clone ID: MRT4577_58014C.1.pep
GSFFFPQERSCIIHSGQNDAHEGLVPCQGAVSVVHVHKTSSLTKSSTSCRDSHPSRTRRLSAA

SEQ ID NO: 323404 - protein, 70 aa, Zea mays
  Clone ID: MRT4577_58015C.1.pep
TTTKYIPLFTHYVINHLFHTNANYLPFILLLLNASNSQSKLSTTASARTTTTTTLRRSRFTCPYHYLIPS

SEQ ID NO: 323405 - protein, 775 aa, Zea mays
  Clone ID: MRT4577_58016C.1.pep
KHQFKVNLSKCSFAQTSLHYLGHIISQEGVATDPEKISAVKSWPTPRSVKDIRSFLGLAGYYRKFVKNFGIMSRPLTSLLKKGQLFVWTEDHDQAFQALKTALVSAPVLALPDFTKTFEIETDACDSGIGAVLHQAGHPIAFVSKTLGPRHQPLSTYEKKCLAILMAVDHWRSYLICGQFVIHTDQKSLTHLDDQRLTTPWQQKALTKLLGLQYKICYKQGTSNRVADALSRLSSEQMLALSVIQQSWLQDLADKYSSYPDTAPILQALSLKSPSGPYQITQGIIRYHNRILVPATSEFPLKIFTALHAAPIGGHSGFLVTYHKIKKQFVWRGMKKMIATWCSHCSICQQAQPERVKYPGLLQPIQVPAAAWQVISMDFIEGLPTSDKYNCIMVVVDKFSKYSHFVPLRHPFTALKVATQFMDHVFKLHGFPQAIITDRDRLFTSAFWKELFKLAGVDLRMTTAYHPQSDGQTERVNQCLETYLRCFIQACPTKWKKWLSLAEYWYNTSYHSSLQRTPFEVLYGHIPRQLGIDLPGQCDVPSLTDWLHERKLMLQLVQQQLIRAQQRQKHQADKLRSERVFQVGDWVYLKLQPYVQSSLVKRANHKLAFKFFGPFQIVARIGPVAYKLQLPATSAIHPVFHVSLLKKAVGSTDQVSSVLPSISDSLQWPEQILQRRVVHTPSGDVPQVLIKWSAWPEELATWEDEPVVKQRFPEAEASRRGECQDHGVKQTTDEGEASRSAQQPCLWARLDPVGFQPCIVSVGLLVVFCRVNKGD

SEQ ID NO: 323406 - protein, 107 aa, Zea mays
  unsure (1)..(107): unsure at all Xaa locations
  Clone ID: MRT4577_58017C.1.pep
HPSQVAEVFVRLTAGEVRDASSLHPKIRPLRLSQNKIGEDIAKDIAQDXKGLRITAKLTVHNLQDKVSLVPSTGTFVIKALKEPKRYWKKVXNITCCGNISLDDLIH

SEQ ID NO: 323407 - protein, 189 aa, Zea mays
  unsure (1)..(189): unsure at all Xaa locations
  Clone ID: MRT4577_58018C.1.pep
MSHRKFEHSRHGSLGFLRRKRSSSHLGKVMSFIRDDAKKPFHLTAFIGCKAGMSPIVREFEKAESIVHKKKICEAVPFIGMLHRVTVGLVAYVSAHRGVRTVRSVWVQYLNEXVRRRFSKIGCKSKNKXAFTMYAFKYTNEAGKKDXQLQLDYDEXYASVIRCQSXTEIRTMKGFKQKKSRLLRVRSMV

SEQ ID NO: 323408 - protein, 225 aa, Zea mays
  Clone ID: MRT4577_58019C.1.pep
MAEEPAIVVAASSSCEVDLGNLMAYDPCHHVAAAASASREELRQECLRKGTELAQAVADALFALPPTEDRDGPIVHLPPHTVRLPREKHLPKPKPPTKWELFAKAKGITKRKKNKREWDEQTQSWKRTYGYDRVNDDKDVPILEAKLTDEPGVDPFAQRRDEKKKRVEKQEKSRLENLKKAAKVGALPSHIQLAAKALPITGTKADLPKKKKKKKKNHVRVAYHC

SEQ ID NO: 323409 - protein, 99 aa, Zea mays
  unsure (1)..(99): unsure at all Xaa locations
  Clone ID: MRT4577_5801C.1.pep
MERDTYTFAFQAEIKQLLSLIINTYYSNKEIFLRELISNSSDELDKITFXSLIDNTKLDAQTELFIHLAPEKDTNTLSIIDRGEEMNKSDLVNNLGTIA

SEQ ID NO: 323410 - protein, 328 aa, Zea mays
  Clone ID: MRT4577_58020C.1.pep
MAEEPAVVVASSSCEVDLGNLMAYDPCHHVAAATASREELRQECLRKGTELAQAVADVLFALPPNEDRDGPIIHLPPPTFRLPREKHLPKPKPPTKWELFAKAKGITKRKKNKREWDEQTQSWKRTHGYDRVNDDKDIPIIEAKLTDEPGVDPFAQRRDEKKKRVEKQEKNRLDNLKKAAKVGALPSHIQLAAKALPITGTKADLPKKSRKEDLESVVGMASSATASGGKFDEKLPGEKPPKHPGKHRKFLPVAEGKGMGSLEKQQNDKILSSLLARNSDEPLDVSKAITMYKVKKEKQRRKEKNMPSKSDKLKPQKKPHKKSSKKRA

SEQ ID NO: 323411 - protein, 49 aa, Zea mays
  Clone ID: MRT4577_58021C.1.pep
LPRHGSPPTDHKTGRRESLGWEADKENREPPLSPRSDKGLPEPMAVRRD

SEQ ID NO: 323412 - protein, 84 aa, Zea mays
  unsure (1)..(84): unsure at all Xaa locations
  Clone ID: MRT4577_58022C.1.pep
YPSLKYSSXNTSPAFLYQITPPKNPPPPISFYNTSSLTSSLLTFSLTFFSFLSIKINTSLFQYPSITIIYHNFSLLYIPISFNF

SEQ ID NO: 323413 - protein, 131 aa, Zea mays
  unsure (1)..(131): unsure at all Xaa locations
  Clone ID: MRT4577_58023C.1.pep
DTQARERTEDDEEAQAPGDEAPRTARTXERGQGRQGTAEKPKRPRDADAHRQRXTKRTDTDEXARRNRSTAGARSSKKKARSRHPTDSSSRTDXPAXPTAPTTGSRXRDTPATXXATTPXEXTEQHRTQQG

SEQ ID NO: 323414 - protein, 81 aa, Zea mays
  Clone ID: MRT4577_58024C.1.pep
WVYFASCRVCCYPYLFFFSWLLCVSSLCCVLLGFRQVHFSISGASGLVDSVTPGLVFLGFFCGDGWFVLILPVTVDSLYFL

SEQ ID NO: 323415 - protein, 61 aa, Zea mays
  Clone ID: MRT4577_58025C.1.pep
KITQHPCPIFERETFPQTSDSREPNNLKFLPPNPFAVSKFFFFAFQNSHFLHCLWCVSALT

SEQ ID NO: 323416 - protein, 120 aa, Zea mays
  Clone ID: MRT4577_58026C.1.pep
TNQPTQRYPGPTSGTPREAMRDKSLRATEVDLPEPQFVNEPVSHLINTILGAAPGHRRVTPKPWLTLTAPWVCGRPGALGSVCQCNRLVFFQWGGAGSGWDRAASSQRLWGRMEATAPHP

SEQ ID NO: 323417 - protein, 93 aa, Zea mays
  Clone ID: MRT4577_58027C.1.pep
ASQSGGKNRRGSVGTPLFPFNNHSHSPLKSPPISFFSRGYFFWGLKKNPPGAQKTSPVWGTPPPPPFFFIFKVCQTSPTPPNYFLRFSFTTPL

SEQ ID NO: 323418 - protein, 84 aa, Zea mays
  Clone ID: MRT4577_58028C.1.pep
QPRHMQKILAPGGCTCTKKRMQELANDRGYLGSLKLNRPRRVAPFYPPSMICSGGNKGNIISLGGEDFLIKPPPPFVFIYRVLV

SEQ ID NO: 323419 - protein, 68 aa, Zea mays
  Clone ID: MRT4577_58029C.1.pep
MVLTIVGLTICAAASTTLPQYSHSHIAALLPPYHQSMTYSLREIFNLQPNCLQHTIPTHNFTSLNHLI

SEQ ID NO: 323420 - protein, 72 aa, Zea mays
  unsure (1)..(72): unsure at all Xaa locations
  Clone ID: MRT4577_5802C.1.pep
TSADLQVRILDRANVASSYRGLRRSIQVSVAFTPYGYHIIAASDHSSIYMWNYADQLARFTSRXKSVWSYDH

SEQ ID NO: 323421 - protein, 56 aa, Zea mays
  Clone ID: MRT4577_58030C.1.pep
GIIIHHLFIMLDLIININRTLQWKKQCRLPLFFALTFGTATQAHACSCSVVIYIHI

SEQ ID NO: 323422 - protein, 506 aa, Zea mays
  Clone ID: MRT4577_58031C.1.pep
MSFRDQESGGEDGGRTSSASDLRKPLINTGSWYRMPPAGGVMGSRQSSLMERLGSSAFSLRDVAISATLCTLIVALGPIQFGFTCGYSSPTQDAIIADLGLSLSEFSLFGSLSNVGAMVGAISSGQLAEYIGRKGSLMIAAIPNIIGWLAISFAKDSSFLFMGRLLEGFGVGVISYTVPVYIAEIAPQDQRGALGSVNQLSVTIGILLAYLFGMFVPWRILAVLGILPCSILIPGLFFVPESPRWLAKMGKMEDFEYSLQVLRGFQTDITAEVNEIKRSLASSRRRTTIRFADIKQKRYSVPLVIGIGLLVLQQLSGVNGILFYAASIFKAAGITNSNLATFGLGAVQVIATGVTTWLTDKAGRRLLLIISTTGMVITLVIVSVSFFVKDNIAAGSHLYSVMSMLSLAGLVAFVIAFSLGLGAIPWIIMSEILPVNIKSLAGSVATLANWLTAWAITMTASLMLNWSSGGTFAIYAVVSTMALIFVCLWVPETKGRTLEEIAFSFR

SEQ ID NO: 323423 - protein, 61 aa, Zea mays
  Clone ID: MRT4577_58032C.1.pep
TFTKYLGLEHKFFFFCLKKRGGLKTANCYKRIFPIKKNLGPLFAGDLKKHTIGAKGKKHGP

SEQ ID NO: 323424 - protein, 142 aa, Zea mays
  unsure (1)..(142): unsure at all Xaa locations
  Clone ID: MRT4577_58033C.1.pep
ACADDPAPDSIHYCLTLFLPDVRLYGVLAMHTSFSVHVLGHSXSGGHSARQGLXAAAYCTGVTPYTEAYGGAVDRTIGTVPEHHPKEILXYEEVTVESLRWVNDVLMRRMQPDHTNADVSPYMLRRITRSQRVSXISEKAAT

SEQ ID NO: 323425 - protein, 709 aa, Zea mays
  Clone ID: MRT4577_58034C.1.pep
CSLPSTHVYSGRLTDKIPLGKIERSVQAVEAALKKLENGGSVNDAKAVCEPEVLRQLARWHSKLRVYISPFIHGTRYSSFGRHFTKVEKLVEIVDRLHWYVETGDMIVDFCCGANDFSRLMKEKLDKVQKKCHFKNYDLIQPQNRFCFEKRDWMTVQPNELPHGSQLIMGLNPPFGVKASLANKFIDKALTFKPKLIVLIVPKETKRLDQRRTPYDLIWEDSECLSGKSFYLPGSVDLNDKIVEGWNASAPPLYLWSHPGWTKKHMQVAEEHGHTCMGKIACHVEESNLSDDLSVRKQSDATNKLNSRSGKETPFNDRMSNLLDDGSARKQARSEEEKRTLGKIEHHVKKANIPDNLPVKKEPEASSKVMSHSGKDRKIGRYNRRRHDNRSSKGTPDHTESLPPEKQVEVAYEETRVIPSKKIAHNEKKSAQYNYEQTAAGMPNMRSRGGDSDMSISPPVSCNARSKPMSYSLTRPIEHLDTNAHLLAEEPSDSVLNRVPNHDSYLAIKEEYCDGFKRKNDPIFSHIDDSSRMRGSSIEEVTKPYITAPNSDPWSKGDGSFYRHPSSEDLNANADVLMPGYSARYGQIGGDSNPQASMVPLATDSRLHGGTVADNYLSARYSLGSSGARVSQPAPTVPPFGLSGASSQRGSVMDRYSYGLSGPTGTQRSVIDRYAPSLDGTNTTRSRSSLPEQYPFGQPGSSGGGWPHH

SEQ ID NO: 323426 - protein, 139 aa, Zea mays
  unsure (1)..(139): unsure at all Xaa locations
  Clone ID: MRT4577_58035C.1.pep
VKASLANKFIDKALTFKPKLVVLIVPKETKRYATYSCCQSILFVASSHIFLLGKLXIPRLDKKKIPYDLIWEDSECLAGKSFYSPGSVDLNDNTVEGWNASAPPLYLWSHTHWTKKHMQVAEEHGHTCMGKIASHVEKK

SEQ ID NO: 323427 - protein, 191 aa, Zea mays
  unsure (1)..(191): unsure at all Xaa locations
  Clone ID: MRT4577_58036C.1.pep
IPYPCRDGRAAAPPLPPPGVIPAAPPSMPWCPRVPFFPRRLFPPYSSAFLPQPRXMASPPDPTAVPFHPTRDHAXPPRHGVPPAPIISSQPPSSLAPPSTITVVRGPNAPPSPSNPSPFSRXAPLAFPDPDFVDXSRSPSPKMARXARPAYYGAPSRPPSSPYPAQSMDGPPLHRSWKCMPSSPPFLMTLI

SEQ ID NO: 323428 - protein, 133 aa, Zea mays
  Clone ID: MRT4577_58037C.1.pep
LMPGYSARYGQIGGDSNPQASMVPLATDSRLHGGTVADNYLSARYSLGSSGARVSQPAPTVPPFGLSGASSQRGSVMDRYSYGLSGPTGTQRSVIDRYAPSLDGTNTTRSRSSLPEQYPFGQPGSSGGGWPHH

SEQ ID NO: 323429 - protein, 37 aa, Zea mays
  Clone ID: MRT4577_58038C.1.pep
TPPNPVYRMVTLLKQPRGTRSKTRVRCSTALRARMRK

SEQ ID NO: 323430 - protein, 62 aa, Zea mays
  Clone ID: MRT4577_58039C.1.pep
MVHTYGGRNGHLTLLGAWPSPLENRERMALYLKGLEYENVVEDLINKSDLFIVFNLSYTLVM

SEQ ID NO: 323431 - protein, 62 aa, Zea mays
  Clone ID: MRT4577_5803C.1.pep
KNISKKVKKCSIQCCSFARFTWASSIPPILSQPAFSLSMVHMQAYCYHCTHTWCERNEIEKP

SEQ ID NO: 323432 - protein, 54 aa, Zea mays
  Clone ID: MRT4577_58040C.1.pep
SPIEVSLSGRDFKILSLAITAASIPSSLFVLAARDNWMRQQIEKMGLMQMLWHP

SEQ ID NO: 323433 - protein, 104 aa, Zea mays
  Clone ID: MRT4577_58041C.1.pep
SSEDVVDDTRTDGGRHSGRRNCAGSEDVTRDHRCTHLAPSMTLLKPRALCGAVATRMSESAACSLALGVSPPQGPGDAAACPHRGPAIARPLDRRTVEACVDPR

SEQ ID NO: 323434 - protein, 133 aa, Zea mays
  unsure (1)..(133): unsure at all Xaa locations
  Clone ID: MRT4577_58042C.1.pep
NKPHTPPTPAGPAGRGGRATPTRRTPGGTNPPRQGRTTAGASRAASGTXRPPGPPDAPAAENRXEAGGGXTTKNXXPXRXERRQTPAAQGRAQPAGGXDPEAGQRGAPHAESGERDPDPQRGGRHQDKQGAEQ

SEQ ID NO: 323435 - protein, 60 aa, Zea mays
  Clone ID: MRT4577_58043C.1.pep
LKNVPTPAYSASLIHWQWPNPLVAPFLQQHQQLVPFISVLFDEPCFGVTRRWGCHLLDSI

SEQ ID NO: 323436 - protein, 48 aa, Zea mays
  unsure (1)..(48): unsure at all Xaa locations
  Clone ID: MRT4577_58044C.1.pep
TNXLMNLSTHFIHYHHNSHQTILTYRLITKMHTHKTDIIFSGTTILTK

SEQ ID NO: 323437 - protein, 48 aa, Zea mays
  Clone ID: MRT4577_58045C.1.pep
GSQGCVRLRMFRRSVVEEKTKMQASGHNRHVGEKLGSRRTPKVVRTRG

SEQ ID NO: 323438 - protein, 69 aa, Zea mays
  Clone ID: MRT4577_58046C.1.pep
WYIIRLSMNVLHSTTLYQAWCASKTPDLGNLSTRHPGFCTSERIISTVKYVEYNAKTFYAPFAVRSHAI

SEQ ID NO: 323439 - protein, 150 aa, Zea mays
  unsure (1)..(150): unsure at all Xaa locations
  Clone ID: MRT4577_58047C.1.pep
MGLYGERVGAFSVVCESAEEKKRVDSQIKILVRPLYSNPPVHGARIASEILNDASLNKQWLGEVKGMADRIITMRALLKENLEKLGSKHDWSHITSQIGMFAYTGLTPEQMDKLAKEHSVYATKDGRIXVAGITSENVGRLAEAILQGQG

SEQ ID NO: 323440 - protein, 94 aa, Zea mays
  Clone ID: MRT4577_58048C.1.pep
LGLLSVWVFVLCCRKLVCVAPHTAQSKHSRPYQTLILVLLTSERPGLIFELRTKQYMKRARFWISQTAIGSVQCRVKYGGENKGYGTEYQLISC

SEQ ID NO: 323441 - protein, 158 aa, Zea mays
  Clone ID: MRT4577_58049C.1.pep
ANHTTQPSSPSPGVGSSSSPMAAVALSLDSGSGGRRRRSCRPARRGDGGGAGAGAGCRHFHVHYHIPRQAVWASSPPAVAPVRYLLILPVLFLAALAFLVCFGWLTLVYLASSSLWSRSVAPWSTLRRRRCGAVAWTAPATPVDSPEKTNGRRDLWSL

SEQ ID NO: 323442 - protein, 86 aa, Zea mays
  Clone ID: MRT4577_5804C.1.pep
NHIIASHHSGNRSNVPLQQRKRKRPVHNFPPFLPLLFTVGTVHTAPLPASNPNPRTTAPKRRGPKPRPSHHSYLLRSRSSNRYPVG

SEQ ID NO: 323443 - protein, 75 aa, Zea mays
  unsure (1)..(75): unsure at all Xaa locations
  Clone ID: MRT4577_58050C.1.pep
ATLFSXSRVGAGQGQSRSGGXGSGCGGEGCGTGSMVAKGSNGGHAKSGGCGGGYGGEGGCGGGGCAGGCSPVFNA

SEQ ID NO: 323444 - protein, 82 aa, Zea mays
  Clone ID: MRT4577_58051C.1.pep
TRGVKQFHQQPKILGVGPKQKRGGNLVLGTLFLGEVPPPLGTLGAAPKGVWGHNVPRGKDTLGAPLSRGGGPKRGGETKDFF

SEQ ID NO: 323445 - protein, 197 aa, Zea mays
  Clone ID: MRT4577_58052C.1.pep
MLAQRVGVNALRSGAAKPFFAQNISKSALAAGISTSSPTRATGSVKVSQEDGHQILVNQRLNRPVSPHLAIYKLEQTWFGSSAWNRITGCTLSATLYGFSIAYLAAPVVGLHPESLSIASFVAGLPLAVKGGLKFTLGFPFVYHTISGVKHLLYDAGKGFAKSTIIQADKYVWAASVLGAIGSGCFPVRYISNRRAE

SEQ ID NO: 323446 - protein, 125 aa, Zea mays
  unsure (1)..(125): unsure at all Xaa locations
  Clone ID: MRT4577_58053C.1.pep
SSRRGXSSQCAHFTPLSVSPSWRRLGGRPYVADTPRQGSCLRYPCAWGPPETTAPHTVPEFRVKFPDEPRLCVCLCSTLVSLSHTGAGARVRRFDTPEWETSARNLYLLMMSAPKQSSTTQEEDA

SEQ ID NO: 323447 - protein, 67 aa, Zea mays
  Clone ID: MRT4577_58054C.1.pep
TADGPSIFFFFFFLTNRVALFLGSLLLENYKDPWQQVVTASTSTPRNSRCKCSYKPFMAMFFIHAKN

SEQ ID NO: 323448 - protein, 119 aa, Zea mays
  Clone ID: MRT4577_58055C.1.pep
SGEPVFNKLPSECLPPTSTARALPTPPDKALSPARSKRLPPRALRSPSPRAFTPPAATQTASPQARPTPSTTAMTQSSPRRFRRSFLSPSRRPSPTPSTTLATSKLLIPVYSKKGEGPR

SEQ ID NO: 323449 - protein, 318 aa, Zea mays
  Clone ID: MRT4577_58056C.1.pep
MGDVPQAPHAAGGGEEWAGPDPNPSPSLGGCSDPVSVELSMGGDYYRACCGEPDPDIPEGPKLPCVGDKEPLSSLAAEFQSGSPILQEKIKLLGEQYGALRRTRGDGNCFYRSFMFSYLEHILETQDKAEADRIMVKIEECKKTLLSLGYIEFTFEDFFSIFIELLESVLQGHETPIGPEELLERTRDPQVSDYVVMFFRFVTSGEIQRRSDFFEPFISGLTNSTVVQFCKASVEPMGEESDHVHIIALSDALGVPIRVMYLDRSSCDTGNLSVNHHDFIPSANDSEGDAATTPAPATEKPYITLLYRPGHYDILYPK

SEQ ID NO: 323450 - protein, 106 aa, Zea mays
  Clone ID: MRT4577_58057C.1.pep
PYSYSYLQINGELFRSLRSSENICEMAMQGTHARMHVRQQSNDRFGWSPPDAGRVAAAAAGRPERCGLTKLLPWRGDTQQAALTPAEYDDDAVEAAINCREPRRTV

SEQ ID NO: 323451 - protein, 62 aa, Zea mays
  Clone ID: MRT4577_58058C.1.pep
PYCKAIALFALDTANKFLTPKPGEERKNPVPPSPSAWAFARASSTLCTNPSATALYTAHSSQ

SEQ ID NO: 323452 - protein, 159 aa, Zea mays
  unsure (1)..(159): unsure at all Xaa locations
  Clone ID: MRT4577_58059C.1.pep
ERFYEPLSGSILLDGHDIKELDVKWLRRQIGLVNQEPALFATSIRENILYGKGDATAEEINHAAKLSEAITFINHLPDRYETQVGERGIQLSGGQKQRIAISRAILKNPSILLLDEATSALDAESEKSVQEALDRVMVGRXTVVIAPRLSTFRNAGSIA

SEQ ID NO: 323453 - protein, 70 aa, Zea mays
  Clone ID: MRT4577_5805C.1.pep
SPAKTRGFFPVSDFNWRVSEMVPLGFLCMGPPPNYVSFRIAIKTYSFLVRGLSGILCVWRRMFGSGGRLD

SEQ ID NO: 323454 - protein, 148 aa, Zea mays
  unsure (1)..(148): unsure at all Xaa locations
  Clone ID: MRT4577_58060C.1.pep
IPCIGIGQMCSYSSREGVLSCDTPVXQLYKXAGNFSXNCARGGKSSSKGELPRAPSDLSSVFTGTQDKCAACEKAVYGLDKXPLEGESDSESVFKXSDGGCILTTSSYPALNGDLYCKIHFAQLFKEKGSYSHMIKKSPSQDTLPPMA

SEQ ID NO: 323455 - protein, 109 aa, Zea mays
  Clone ID: MRT4577_58061C.1.pep
SPGFSRFPAAGAFSPQGSSWGASPGGGGRTSSFLCSTSPPPGVGFELFGWLIQDIALAPIRPLCYSGWLSQHCGALGGFQFSPSRPPWRVPRPFLSPFFLKKNHQAPPN

SEQ ID NO: 323456 - protein, 194 aa, Zea mays
  unsure (1)..(194): unsure at all Xaa locations
  Clone ID: MRT4577_58062C.1.pep
GWLAYGAVLENLQSRADLTERIRGCIVDSXPVLEIRPEVWAAGFSAAMLKKSRSMTGPTTESLDGPVVNGTLNRVGSNVTQPSWGECFLLSTLRKFFEIVLYVPDVNKRLCKVLSVLSEQQPPCPQFYLYSSADRVIPGECVERFVESQRSLGRSVFAHDFVSSPHVDHYRSFPHVYSAKIDEFLKVCSTVEVS

SEQ ID NO: 323457 - protein, 110 aa, Zea mays
  unsure (1)..(110): unsure at all Xaa locations
  Clone ID: MRT4577_58063C.1.pep
LPCRTFEGGAMSEEKHHXHHLFHHRQRTGEGSXDEVRYLQEEKHHKHMEKLGELGAIAGSAYALHEKHKAKMDLQNEHGHXVKEDVTDVTDMSFVVFLLHEHHEQERRQE

SEQ ID NO: 323458 - protein, 82 aa, Zea mays
  unsure (1)..(82): unsure at all Xaa locations
  Clone ID: MRT4577_58064C.1.pep
SRGRRAGGGGEVLVAQQXMCAQLLPLALPAPPMPGVGGPPPPMGGMGLPPLGXPPVGGGGFSPVGSVCFGFAACVGLWGCGW

SEQ ID NO: 323459 - protein, 33 aa, Zea mays
  Clone ID: MRT4577_58065C.1.pep
LSRQVSSSVFTASSSCMVSSLNPLFSPLAQAHA

SEQ ID NO: 323460 - protein, 87 aa, Zea mays
  Clone ID: MRT4577_58066C.1.pep
AYSWADSTPGPVISKTRRGYKILYQDLKIDSDTLALNRAYHMDSNHQSYYRDHLQLQHQVSDIYFRHLHNLNQSAYAFHRTALLPLN

SEQ ID NO: 323461 - protein, 202 aa, Zea mays
  unsure (1)..(202): unsure at all Xaa locations
  Clone ID: MRT4577_58067C.1.pep
MYPPMAALGGRRRRASSAALLLALLAVALVSLAGPATAAGNKTGQVTVFWGRNKAEGTLREACDSGLYTMVIMSFLDVYGPQRGGYHQYHLDLSGHPTAGIGDDIKHCQFVGVPVTLSVGGFGSGYSLPSTQAALDLFDYPATRFYVGLTASEMTHGWVHPKNVYYDVAPSAQKADNYGGFMIWDRYYDXLSNYTSMVKDYA

SEQ ID NO: 323462 - protein, 313 aa, Zea mays
  Clone ID: MRT4577_58068C.1.pep
MYPPMAALGGRRRRASSAALLLALLAVALVSLAGPATAAGNKTGQVTVFWGRNKAEGTLREACDSGLYTMVIMSFLDVYGPQRGGYHQYHLDLSGHPTAGIGDDIKHCQFVGVPVTLSVGGFGSGYSLPSTQAALDLFDYLWNAFLGGSKPGVRRPFGDAWLDGVDLFLERGSPADRYDVLALELAKHNIRGGPGKPLHLTATPRCGFPPAGYLRRALDTGIFERVHVRIYDDADCEARWHLAWDEWTAAYPATRFYVGLTASEMTHGWVHPKNVYYDVAPSAQKADNYGGFMIWDRYYDKLSNYTSMVKDYA

SEQ ID NO: 323463 - protein, 212 aa, Zea mays
  Clone ID: MRT4577_58069C.1.pep
MFIPHQSPEELSDNEFYEEYGFELSESDESGTEDEETTIKKNRDESLKSGGQRSRRTSALELDDASLTPYKLKFKRGKIVELPLDSMGPRRLKFRRKSANEASNRESQPARRIYRRNSTSTAVPTDVESPGVKLRHQDAQEKKDAQGLFNNVIEETASKLVESRKSKVKALVGAFETVISLQDGKPTSSTAQAGNSQDLIPDDGGNAPEETG

SEQ ID NO: 323464 - protein, 66 aa, Zea mays
  unsure (1)..(66): unsure at all Xaa locations
  Clone ID: MRT4577_5806C.1.pep
XCQSIFQEYIVDIFETWRVLGHMXSAERSYXQLEEIKLQKNVGLKVTLQAVHVLCRYNATLRRKLW

SEQ ID NO: 323465 - protein, 87 aa, Zea mays
  Clone ID: MRT4577_58070C.1.pep
RSYTNKDTDSQRCIGDTTEHAPVLLSRLLGRPTQGTSLPCARYPNDRPHILMFVSDLRASPGGNLCNLGILELIETLASTYRWHRVG

SEQ ID NO: 323466 - protein, 71 aa, Zea mays
  Clone ID: MRT4577_58071C.1.pep
LRGRQMELLVPGLVGAVVPYSYRAEAMLSGSMSGNIYNPVVQSFFLVLARANSLLSSTAEFSCQALPAPIS

SEQ ID NO: 323467 - protein, 64 aa, Zea mays
  Clone ID: MRT4577_58072C.1.pep
IPVTYAGGVSTMDDLERIKKAGKSRVDVTVGSALDIFGGDLPYKDVVLWHKKQSMVGQVSRNMW

SEQ ID NO: 323468 - protein, 189 aa, Zea mays
  Clone ID: MRT4577_58073C.1.pep
TSRYPSYPPGSDARKFTGMGEFQCYDKYMLQQLRQHAAEEGHARWGLSGPHDAPRYHDSPDACGFFRERGGSWETPYGDFFLSWYAGQLVGHGDRVLGTANAVFGGKPVALSAKIPFMHWWHGVRSRPAEAAAGFYKSNKKNGYSPVAKMFARHGCTMVVPGMDVCMNKQHHSTGSSPDTLLVQMKNAC

SEQ ID NO: 323469 - protein, 52 aa, Zea mays
  Clone ID: MRT4577_58074C.1.pep
KSKGLLKVSVAPVKRKLWGGWCLPNQGGAPLCFRAPPPPLEKKWEGPWTPFP

SEQ ID NO: 323470 - protein, 41 aa, Zea mays
  Clone ID: MRT4577_58075C.1.pep
KPRIRKCIWGLSKGGLKRRAFRGIDWARDCVLGLGCGLVGR

SEQ ID NO: 323471 - protein, 221 aa, Zea mays
  unsure (1)..(221): unsure at all Xaa locations
  Clone ID: MRT4577_58076C.1.pep
DGARRLDGDLLLKSTNEPRAPTQNGVRRHTNNTERRHHKHREDAQHGILQKTQRTKTEPEHEHTRPQSTTLQKLTTKEKKTKTRTKKTNRNKKKLKXKKRNKKQKKKKQKQKQKRTMNKNKKKKKKKKKKQQNQEKKKQKRKRITKKKTKKQKKKKXKKKKKYKKKKKKKNEKTKKKKKKNKKKKKNEKKKKKKQTENKNKKKKRKXRKDERERNKKRKKK

SEQ ID NO: 323472 - protein, 54 aa, Zea mays
  Clone ID: MRT4577_58077C.1.pep
WLRRCSARRSSLSPVSAVALAVVGRCCRRRGIGVWCFGFGPGSPWGWLWSVFPG

SEQ ID NO: 323473 - protein, 98 aa, Zea mays
  Clone ID: MRT4577_58078C.1.pep
HFYHSSQEAIIRSVQSSLLLLLLLLPAPLYQLLCNAAPPWLWGNQAPWSEEIRLLFLARIYVLVQEYVMHATLYVIPTCSWSICRYIWFVQTSILVCL

SEQ ID NO: 323474 - protein, 44 aa, Zea mays
  Clone ID: MRT4577_58079C.1.pep
VRVFQLSVAGLSVYRKRFLVTSPARAYSGDAHMCRKQSCEVQFH

SEQ ID NO: 323475 - protein, 196 aa, Zea mays
  unsure (1)..(196): unsure at all Xaa locations
  Clone ID: MRT4577_5807C.1.pep
MAGGKGVQQRTTSDGSQSPAPEERRGRSRSRRGHRGEVVVREIVRETAISGSVPITFPMLTRSNYSEWALIMECNLHAASLWAPMEDDLIERKEDRKAVAALMRATPPEMXACFAAKASAKEAWEAIRTQRLGSNRVREANAQKLRADFENIVFKEGELVDXFAMRISALXSQLRALGDPXDDARVLRKFLRVVPS

SEQ ID NO: 323476 - protein, 108 aa, Zea mays
  Clone ID: MRT4577_58080C.1.pep
FFLNPSFFLNLHGGHCLHIIWGPRFWKQHCGTFGPGPSKLGKPPPKPGPHNTVPGSFFVSGFLVNRWGGALGLNCQIFDNFGGWISKYFVGNTDRPFFFAFEGLYPQV

SEQ ID NO: 323477 - protein, 56 aa, Zea mays
  Clone ID: MRT4577_58081C.1.pep
SCPLFHIFQSFTSIVHPTCQASYLAYLVIVTTLNPHSIPYFTLIIATLYILILYCY

SEQ ID NO: 323478 - protein, 49 aa, Zea mays
  unsure (1)..(49): unsure at all Xaa locations
  Clone ID: MRT4577_58082C.1.pep
DSNDSTGSSLYDRGGGTLXLPILTLXHSLVGCSLAEAEREIPLEPNSEL

SEQ ID NO: 323479 - protein, 131 aa, Zea mays
  Clone ID: MRT4577_58083C.1.pep
SRRRRRTLCTASATGTLGKLTDCMDYATGHAGSPSSTCMGDASKAETARPECLCYIIQQVHTERSQVHSLGLRFHRLMALPAACNLPNYDVSLCIRECYRLQLPQSLTMAELALIKDADHLQSLNDETILG

SEQ ID NO: 323480 - protein, 65 aa, Zea mays
  Clone ID: MRT4577_58084C.1.pep
LAQEARNRRSIGAPWTSHHQVVRGASPQGILGGGHLHPHLRLPRPRLPNGLQQAGRGGNPRPRGA

SEQ ID NO: 323481 - protein, 135 aa, Zea mays
  Clone ID: MRT4577_58085C.1.pep
HEQGVAVDTSTTGAALQGVFNRQVRGHNPNGELEVVAAPGCPCHVHPQEKRLPATALQVAPLVGGYLSGHLGRGSEASSSSGCKRRRLSGALPRRRPQEWPSRRVCGCPPCRPSRPREASHGGEWQVSKSFGARP

SEQ ID NO: 323482 - protein, 63 aa, Zea mays
  Clone ID: MRT4577_58086C.1.pep
IRHEEKNCHPPPRRRAMASPSPYSPLHPYQHPAAPNESPPIPIPTALNAAAADTNEADNGART

SEQ ID NO: 323483 - protein, 69 aa, Zea mays
  Clone ID: MRT4577_58087C.1.pep
KTCLFFIHKAHTKQNRIKTKIQKPLLKPTINGCLTNQQNSNLPTKPNSNTSRIHANLPTTKLYHIKYTN

SEQ ID NO: 323484 - protein, 286 aa, Zea mays
  Clone ID: MRT4577_58088C.1.pep
MHIREEEATPSTVTGIMSTLTSAGQQKLKEPISPGGGSASVAGSAAERNNGGRGKGKTEIKRIENTTNRQVTFCKRRNGLLKKAYELSVLCDAEVALIVFSSRGRLYEYANNSVKGTIERYKKATSDNSSAAGTIAEVTIQHYKQESARLRQQIVNLQNSNRALIGDSITTMSHKELKHLETRLDKALGKIRAKKNDVLCSEVEYMQRREMELQNDNLYLRSRVDENERAQQTANMMGAPSTSEYQQHGFTPYDPIRSFLQFNIVQQPQFYSQQEDRKDFNDQGGR

SEQ ID NO: 323485 - protein, 64 aa, Zea mays
  Clone ID: MRT4577_58089C.1.pep
QLYGHPGLGGGRWKGSEETITNTRHRSRHRTNTMAKRQGHHDRGEQQTGQAARRITPPAPQAQR

SEQ ID NO: 323486 - protein, 76 aa, Zea mays
  Clone ID: MRT4577_5808C.1.pep
PPSTRRARDSLRRPYVLRMSLPAGANAVTLSDASFTMELRVSNIKPDTLPPGRLSTVYTVELSYMHGYQHLMPSIC

SEQ ID NO: 323487 - protein, 59 aa, Zea mays
  Clone ID: MRT4577_58090C.1.pep
HAALSLVDRHCFKVLFWTITLWMSIGAKMFKPTWFPGSKKNRKQAKIVSPQNMYKTPQK

SEQ ID NO: 323488 - protein, 114 aa, Zea mays
  Clone ID: MRT4577_58091C.1.pep
QREGPTMSNSPCHRQDSQRVAKGVHERGSSLIPAVLGAGEHPNHGNFPAGVRGQRKIRTTPTSSLWVYDVVEDIRHCMWMFIVAAPRRNRSPGHRNSSPEMGPAAEPRRGWDSA

SEQ ID NO: 323489 - protein, 32 aa, Zea mays
  Clone ID: MRT4577_58092C.1.pep
KKNKKKKKKKKTQKITKKKKKKKKKKKKKKKK

SEQ ID NO: 323490 - protein, 141 aa, Zea mays
  Clone ID: MRT4577_58093C.1.pep
SLFIDYAALLTGRTSYFLKGEEMKSMYTTYNPQNVVATARFLFHKKNLYYSFYTSSRIGRPRAIQFVDDAGVILEEHQLETTLAGTLSVYQNATGKICGVWRRVPRDYKRILRDDRLHVVLLWGNKQQTELALAGKGAKYT

SEQ ID NO: 323491 - protein, 109 aa, Zea mays
  Clone ID: MRT4577_58094C.1.pep
MLEGKAVIGETDMLQTMQQDAMDLASKALDFFDVTEAIKIARFIKKEFDRMHGPGWQCIVGTDFGSFVTHCCGCFIYFCLGNLAILLFRGSAAPEAHENRFSALDAAKA

SEQ ID NO: 323492 - protein, 93 aa, Zea mays
  Clone ID: MRT4577_58095C.1.pep
MAFFTTFQGLFWGGSIIFLACFILNPPPPGGQPKKASIVGTLPLPKTGPSATILVSRIATGPSFLNSGFNESFCKRTNKSFKTLFFCLASCHP

SEQ ID NO: 323493 - protein, 155 aa, Zea mays
  Clone ID: MRT4577_58096C.1.pep
MATVPAPAAETAASTARTVKDVNPHEFVKAYSAHLKRSGKMELPEWVDIVKTARFKELPPSDADWYYIRAASMARKIYLRQGIGIGGFQKIYGGRQRNGSRPPHFCKSSGAVSRNILQELQKMGIIDVDPKGGRLITSQGRRDLDQVAGTVPAEF

SEQ ID NO: 323494 - protein, 67 aa, Zea mays
  Clone ID: MRT4577_58097C.1.pep
IFSLWGAFWNFLFGVFCFLFFNWFNFFPGFGFLKKKKKKKKKKKKKKKKKSKKKKKVKKKKKKKKKY

SEQ ID NO: 323495 - protein, 119 aa, Zea mays
  Clone ID: MRT4577_58098C.1.pep
APSQRRWKTAAALPGRALSRGSLLGAAAQLVVRKWFVYQGVSLVQWTSASRAPSRRGTPPSASRCCTYRETLWAVTFWACSARESPSSTWTSSATGSPSASRPWTNRNRMEKRNKGRHA

SEQ ID NO: 323496 - protein, 65 aa, Zea mays
  Clone ID: MRT4577_58099C.1.pep
STVKGRNEPCLVRQVLGVVAGSKGISDIEGLSRTLYHNTCRLFFPQDLDASANAQLESGTAVQDC

SEQ ID NO: 323497 - protein, 106 aa, Zea mays
  unsure (1)..(106): unsure at all Xaa locations
  Clone ID: MRT4577_5809C.1.pep
MAREGKEGXKKGKKSVEYLXIYIFNVLKQVHPDIGICFKAMSIMNSFINDIFEKLGAEAAKLVRYNKKPTITCREIHTSVRLVLQGELAKHALFQGTKGRTKFTSF

SEQ ID NO: 323498 - protein, 75 aa, Zea mays
  Clone ID: MRT4577_580C.1.pep
GGDPTPNIFNLGEKPPLYKNHWFRGGLTKTRVLKAESHPQKKGFYWPKNFAMGLQKKFCTQPPFHRGKGNYPWTW

SEQ ID NO: 323499 - protein, 122 aa, Zea mays
  Clone ID: MRT4577_58100C.1.pep
MASGGFVDWRGNLVNRQVHGGVKAAWFLHFLTFVTNMVNVPILLNLVTYLRGTMHMGVSDSATTVTNFVGATSGFTLIGAFLSDSYITRSRTILLFGPLEFLVIFSHGFSNQLQLTKITCMF

SEQ ID NO: 323500 - protein, 108 aa, Zea mays
  Clone ID: MRT4577_58101C.1.pep
REKTLAILHEFQVLHVVAVGECGLDYDRLQFCPADMQKKYFEKQFELAEAVKLPMFLHMCAVGEDLCEIMTRNLHRFPGGVTHSFTDSAEDRDRLLSFEKMFIGKFLR

SEQ ID NO: 323501 - protein, 71 aa, Zea mays
  Clone ID: MRT4577_58102C.1.pep
HINTHAGSQYVKSVWPSKKKDKHEPDLTVKGRNEPCLVRQVLEVVAGSKGISDIEGLSRTLYHNTCRLFFP

SEQ ID NO: 323502 - protein, 324 aa, Zea mays
  Clone ID: MRT4577_58103C.1.pep
MASTAVKLIDIAVNFTDGMFKGIYHGKQCHVADIPAVLARAWAAGVDRIIVTGGSLKESREALQIAETDGRLFCTVGVHPTRCGEFEESGDPEGHFQALLALAKEGLDKGKVVAVGECGLDYDRLQFCPADMQKKYFEKQFELAEAVKLPMFLHMRAAGEDFCEIMTRNLHRFPGGVTHSFTDSAEDRDMLLSFEKMFIGVNGCSLKTNENLEVLRGIPVERLMIETDSPYCDIRNTHAGSQYVKSVWPSKKKEKYEPDSTVKGRNEPCLVRQVLEVVAGSKGISDIEGLSRTLYHNTCRLFFPQDLDASANAQLESGTAVQDC

SEQ ID NO: 323503 - protein, 76 aa, Zea mays
  Clone ID: MRT4577_58104C.1.pep
FQCYTWTRYSALQRHELRPVIRWTILLSVLECVSFHRQRHYARSGVETQVLRCQLGLLRGVSRQIKMLSFCTVLFT

SEQ ID NO: 323504 - protein, 74 aa, Zea mays
  Clone ID: MRT4577_58105C.1.pep
VISPKERRPLDLQGAREGKDHLPARTHNVRCSGRAPGRSDDAYVVRFVWRWCDPYAQRTCGRGRTRSPSRSRRF

SEQ ID NO: 323505 - protein, 137 aa, Zea mays
  Clone ID: MRT4577_58106C.1.pep
SALPHPTLFDDITSLPYSTIKASGWIHSVGTAASSSFWSSWSSPAECGSDLAAESCRGAAPRIRGRSLPWSWSWSSWSSSVERIIQDQRSTEAKKTEVTLVSSQLTQLCMPDLLLGLRCGGVDQTRNGTQARERERR

SEQ ID NO: 323506 - protein, 54 aa, Zea mays
  Clone ID: MRT4577_58108C.1.pep
HWEPRHLTIYNLEFCILLLYLGTLICWGTDTSLRPATIICVDRFAWLPLIVARE

SEQ ID NO: 323507 - protein, 110 aa, Zea mays
  unsure (1)..(110): unsure at all Xaa locations
  Clone ID: MRT4577_58109C.1.pep
KKAGIHFCPPVKKPFNLGESLISWAPKVGNNHKRLLARKSIIXNRKKELERQILGREKEKQKKGMAGQKKTLDEERVGLLNXQRQREQVRICREIKEKNKPQAKKMLFIF

SEQ ID NO: 323508 - protein, 186 aa, Zea mays
  unsure (1)..(186): unsure at all Xaa locations
  Clone ID: MRT4577_5810C.1.pep
MAGGKGVQQRTTSGGSQARPSQDGSQSPAPEERRGRSRSRRGHRGEVVVREVVRETAVSGSVPITFPMLTRSNYSEWALIMECNLHAASLWAPMEDXWSRERRTGXAVAALMRATPPEMHGMLRXRQAPREAWEAIRTQRLGSNRVREANAQKLRADFEXLXFKEGELVDNFAMRISSLASQLRAL

SEQ ID NO: 323509 - protein, 185 aa, Zea mays
  unsure (1)..(185): unsure at all Xaa locations
  Clone ID: MRT4577_58110C.1.pep
PTKPKPSPPKKNPPEKKKPQNPENPPPQRKPKKPKKGGAPPPTRGENQGXRRNEPGPQGANHPERKKPHGTPPESTPGKAAGVMARSPFGKQAAPQMGKAPPKKNQPTTPTRQXGKFHQSPPPPVIPNGFPKKKRSIHLHPSKSKIKLSINKHFFFFLIFFSLIFFPFFFFFPFFFFFFFFFFFF

SEQ ID NO: 323510 - protein, 140 aa, Zea mays
  unsure (1)..(140): unsure at all Xaa locations
  Clone ID: MRT4577_58111C.1.pep
MEIRWERSQRAVNKFLKIKAPPKVNWAKLKAGFWFPEMARKKPVIWLKFQEAKIITLEMGNIPGPIQKVKKKAREKRAHPWQKMEGYSGLGADQGKKKLKAELVEPYYGALGLENXNILVFEGPKWDIFGWQALLGSKGK

SEQ ID NO: 323511 - protein, 44 aa, Zea mays
  Clone ID: MRT4577_58112C.1.pep
CMWPTRLSYDTYSHQNLDMLSTRDAITTTPRQRLTNSIAAFNDR

SEQ ID NO: 323512 - protein, 113 aa, Zea mays
  Clone ID: MRT4577_58113C.1.pep
QTNPQCLCAALNGDSSSLGGVPVDKRGAVQFPQGCNVKTPPASKCNFVGGGSAPGAATPAPPSAGVPLTPGTGPGLKGTPTAPFLTSGPGLTRGAVSLVLAFATVAVYGISAG

SEQ ID NO: 323513 - protein, 359 aa, Zea mays
  Clone ID: MRT4577_58114C.1.pep
MDCGGALQLPPGFRFHPTDDELVMYYLLRKCGGLPLAAPVIAEVDLYKFDPWQLPEKAFGGEKEWYFFSPRDRKYPNGSRPNRAAGTGYWKATGADKPVGSPRPVAIKKALVFYAGKPPKGVKTNWIMHEYRLADVDRSAAARKKTNNALRLDDWVLCRIYNKKGVIERYDTVDDDDGDGAVAEDVKPVPAPAASKNPRASARVGAAAAAPMKVELPEYGGGYYDYDDLETPSAGMLCFDRPSAPAPADRDSNNSVPWTTHHTHTDNSSSGSERVLSPSPDLPDRDHAESQPAAAAAAAGWWPVGGDWGSAAEDGFMVDVDVDDGSSLFGPLSPGLFARVDAAAFGFGDMLASYLHKPF

SEQ ID NO: 323514 - protein, 92 aa, Zea mays
  Clone ID: MRT4577_58115C.1.pep
MDKKAATPYLIKKKKNGKMIAIKANMQANKGKGQNTSGCQRKLSQPWKAPRRFGSQEGSEKSEGLREICRLDKIGMYIMGCITLDQAYCQMS

SEQ ID NO: 323515 - protein, 230 aa, Zea mays
  unsure (1)..(230): unsure at all Xaa locations
  Clone ID: MRT4577_58116C.1.pep
MDCGGALQLPPGFRFHPTDDELVMYYLLRKCGGLPLAAPVIAEVDLYKFDPWQLPEKAFGGEKEWYFFSPRDRKYPNGSRPNRAAGTGYWKATGADKPVGSPRPVAIKKALVFYAGKPPKGVKTNWIMHEYRXLADVDRSAAARKKTNNALRLDDWVLCRIYNKKGVIERYDTVNDDDGDGAVAEDVKPVPAPAASKNPRASARVGAAAAAPNEVELPEYGGGYYDYDDL

SEQ ID NO: 323516 - protein, 170 aa, Zea mays
  Clone ID: MRT4577_58117C.1.pep
MDCGGALQLPPGFRFHPTDDELVMYYLLRKCGGLPLAAPVIAEVDLYKFDPWQLPEKAFGGEKEWYFFSPRDRKYPNGSRPNRAAGTGYWKATGADKPVGSPRPVAIKKALVFYAGKPPKGVKTNWIMHEYRLADVDRSAAARKKTNNALRVIHYTMTFLRRTYLSPPKY

SEQ ID NO: 323517 - protein, 74 aa, Zea mays
  unsure (1)..(74): unsure at all Xaa locations
  Clone ID: MRT4577_58118C.1.pep
QMIMQLXRAAPAINILYEPALMQQQQQLLPAKGLIPMAMMLAQNIPAMGGLYQCQSQLPSSRTNPCGVTVPIPP

SEQ ID NO: 323518 - protein, 258 aa, Zea mays
  Clone ID: MRT4577_58119C.1.pep
MTAPADKGKKAKTDADGGEENEQIDGALVFSIEKLQEIQDELEKVNEEASDKVMEVEQKYSEIRRPVYLKRGDIIKTIPDFWLTAFLSHPLLSELLTEEDQKIFKYLDSIDVDDSDVKAGYSIYLNFSENPYFEDTKLTKTYSFVDDGTTTIKASQIKWKDGMGPANGNGINKKGNKRPLVVESFFSWFSDTELKSLADGVQDEVAEIIKEDLWPNPLKYFNNEVEDEFEGDEEDDDDDDDDDNLDGDDNDDDGDQEN

SEQ ID NO: 323519 - protein, 98 aa, Zea mays
  Clone ID: MRT4577_5811C.1.pep
MAAVAVSGRLRTLGRGASGAVVSLAWDAASGELVAVKSAGASGAAALRREHAVLAGLRSPHVVRCFGGGEAAAAEEGSSYQLFLEYAPGGSLADEVAR

SEQ ID NO: 323520 - protein, 118 aa, Zea mays
  unsure (1)..(118): unsure at all Xaa locations
  Clone ID: MRT4577_58120C.1.pep
FQGVFIFKPKREKFQKHSFFLLKFFCQLSIHDNRAFVSWYFNASPEXEPLNPNPFRXDWRSPFDSFSNGPVVSSPNIELRLKSFYVSXPAFXNGVFSSGANFGSGGPPNRFPPAPPKY

SEQ ID NO: 323521 - protein, 314 aa, Zea mays
  unsure (1)..(314): unsure at all Xaa locations
  Clone ID: MRT4577_58121C.1.pep
PAFWDWTWDQLADYDLPAVLEFVYNSTGGMKVHYVGDSLGTLIXCAPLGEQLNRHCAISRVARPNRLSRPHGIEAHPACHSHLPRRNDSHARLSRVQPCWASGKGSVGKXVCVDPEVDCYDLFWSPDGIGGPDCCLNTSTTCIFLQHGPQSSSIKNMIHMSQXEYNPFIYFSSLRNQRTQELIFIRNEGICSPVARVKYIDPCVSSIXVRKETIRKYDYGSEKENTKRYNQTRPPTYNLSSIPSHVPLFLTHGGQDFLGDVADTRHLLRTLLSQHDSDDIEVLYMPDYAHGDFIMGYNAPQLIYKPMVEFFKRH

SEQ ID NO: 323522 - protein, 173 aa, Zea mays
  unsure (1)..(173): unsure at all Xaa locations
  Clone ID: MRT4577_58122C.1.pep
GVNPKTGENRNSPREGAETGPPNXGPSPASXNQEREKGPKRKTPPPGGGANQKNKGGHKVSNGKKGKEANPNKGGEGPPKGPPGLPGKPPGKKAGGKGKGKQISPGKRQGPXPQKWGPGWEPQKRDRQGGGKPPLRKGPPRAGKPLFCVLDFFITGLSVFCNFFLFYLFVSGR

SEQ ID NO: 323523 - protein, 251 aa, Zea mays
  Clone ID: MRT4577_58123C.1.pep
MTAPADKGKKAKTDADGGEENEQIDGVLVLSIEKLQEIQDELEKVNEEASDKVMEVEQKYSEIRRPVYLKRGDIIKTIPDFWLTAFMSHPLLSELLTEEDQKIFKYLDSIDVDDSDVKAGYSIHLNFSENPYFEDTKLAKTYIFADDGTTTIKASEIKWKEGMGPANGNGINKKGSKRPLVEESFFSWFGDTELKSLADGVQDEVAEIIKEDLWPNPLKYFNNEVDDEFEGDEDDDDLDGDDDDEGDDLEN

SEQ ID NO: 323524 - protein, 87 aa, Zea mays
  Clone ID: MRT4577_58124C.1.pep
TPWLPCSHQPGPARPKPRRDLPVPVSPAAADPIEPRGGGARSGDGDGVGSGRDWGRDARCAASKSRLASVFFLCASSTRRESDRFPG

SEQ ID NO: 323525 - protein, 56 aa, Zea mays
  Clone ID: MRT4577_58125C.1.pep
ILTFNKKKKKANALKFKLVWGTLKQPHFTFTLLQRSFFTFTLPKYYTHPFIPPFYP

SEQ ID NO: 323526 - protein, 56 aa, Zea mays
  unsure (1)..(56): unsure at all Xaa locations
  Clone ID: MRT4577_58126C.1.pep
KKKKKKKKYKKKKKKKKKKKKKKKKKKKKKKKKKKKKKKKNKKKIKKKKKKXKKNK

SEQ ID NO: 323527 - protein, 78 aa, Zea mays
  Clone ID: MRT4577_58127C.1.pep
TPIGRLGSSRPAGVTNRTYNIPLQLRWERSLIASCLMGDVLFAFLGVDPCGTSKETLGTNITTYYNCTGFTASGYWNG

SEQ ID NO: 323528 - protein, 109 aa, Zea mays
  Clone ID: MRT4577_58128C.1.pep
PVGPFSQSSFPRTLPISFGDLALQVFPLGNAHFSHFLYLFVGPPLWPSGFFPFCFRLFCFGTFLSVYHFSPVSALSLIRPTLFSTSFLYCLCSLVSRFGFSGLSLRFPK

SEQ ID NO: 323529 - protein, 33 aa, Zea mays
  Clone ID: MRT4577_58129C.1.pep
TPQNIYRKTFDFPSISAITMMISHNSRVVHAKR

SEQ ID NO: 323530 - protein, 77 aa, Zea mays
  unsure (1)..(77): unsure at all Xaa locations
  Clone ID: MRT4577_5812C.1.pep
ECTAIISFRMVXFVSLDEIRTAALFPSICIPPLILCAVRKFQYQCIYMSIHLFVYYKSSPKKKKAPLEIKLRRGMAS

SEQ ID NO: 323531 - protein, 137 aa, Zea mays
  Clone ID: MRT4577_58130C.1.pep
MAPKAADKKPASKAPATASKAPEKKDAGKKTAASGDKKKRSKTRKETYSFYIYKVLKQVHPDTGISNRAMSILNSFVNDIFERVAFEASKLAAYNKKSPIFSREIQTSVRFILPGELAKHPVFEGTKAVTKYFSSTK

SEQ ID NO: 323532 - protein, 686 aa, Zea mays
  Clone ID: MRT4577_58131C.1.pep
MDQSRRAVDSYWRSRMVDGVTADDDKVAPVYKLEEICELLRASDASIVKEVADFVLKRLDNKSPLVKQKALRLIKYAVGKSGTDFKREMQRHSAAMRQLVHYKGHPDPLRGDALNKAVRETANEAIAAIFSTEDPKPAVATESLGKRIQGFGNTNYEPSRDDKKSFLSELSEVVGIGSASIKQGLSNFAAAHAIMTNDNGSTYRSPNLRRSLTTESERYGRYDPSEIQRESRASSDASKNAPSGPWGPTSSSTPTDETSSSQPGIKTREERLLETIVTASGVRLQPTRDALQIFFAEASKLDAVALSRALEGKLNSPLWQVRMKAICVLEAIVRKQDTDPYSIIASYFTENTASVVKCSELPQVSLREKASKVLNMLIGEQPTGTAATKAAMPTPVQMPDLIDTGDQDDLATSSGHASIEQNSGNSAYVSSVDDLLGGEPISDTSVTADSNGSDPFADVSFHEAETKETNDLFSGLTVEEKSSTTMHDSSSDKNELPDIFGSSPDSFIQGSVTDQGTVNDLIAGLNLNGTGHAQSAVKAEPNSNSGSQFFDTKNESGHVPSAATLNDILGQNSLYQQQQTPLQYSFPQHMMLNQSFPGQQLNYGAMGILLAQQQQLLQSFGNFNAGLGNSSFNSMNGGNTSVLPDIFNSSNQPQNHVAVMSSSKKDDNKAFDFVSDHLAAARGSRK

SEQ ID NO: 323533 - protein, 688 aa, Zea mays
  Clone ID: MRT4577_58132C.1.pep
MDQSRRAVESYWRSRMVDGVTADDDKVAPVYKLEEICELLRASDASIVKEVADFVLKRLDNKSSLVKQEALRLIKYAIGKSGTDFKREMQRHSAAIRQLVHYKGHPDPLRGDALNKAVRETANEAIAAIFSTEDPKPAVATESLGKRIQGFGNTNYEPSRDEKKSFLSELSEVVGIGSASIKQGLSNFAAAHAIMINDNGSTYKSPNLRRSLTTESEKYGRYDPSEIQSESRASSDASKNVASGSWGPTSSSAPSDDTSSSQPGVKTREERLLETIVTASGVRLQPTRDALRVFLTEASKLDAVALSRALENKLNSPLWQVRMKAICVLEAIVRKQDTDPYSIIASYFIENTASVVKCSELPQVSLREKASKVLNMLIGEEPTGTTATKSAMATPVQMPDLIDTGDQDGLATSSGQESNGQKNTGKAYVSSVDDLLGGEPIADTSVTADSNGSDPFADVSFHEVEAKETNDLFSGLIVEEKSSATMHGSSSSNKNELPDIFGSPPDSFIQGSVTDQGTVNDLMSGLNLNGTGQAHPPVKAEPNSTFSGSQFFDTNNEIGHVASAAALNGIVGQNSFYQQQQTPLQYSFPQHMMLNQSFPGQQLNYGAMGILLAQQQQLLQNFGNFNAELGNSSFNSMNSGNASVLPDIFNSSNQPQNHVAAMSSSKKDDTRAFDFVSDHLAAARASRK

SEQ ID NO: 323534 - protein, 314 aa, Zea mays
  Clone ID: MRT4577_58133C.1.pep
MTSPTSLTTPPELYCRRKLRHYFQAHRVVVVTSFPLRAILHNSNATGNIAKWAAELAEFQLDFQPRHAIKSQVLADFIVEWTPPPSATRGSESQFGPHTRGAQGSGLHRAPLDTLLRRVRPSASWWSWSGPHRPKWRSSERIVRLAKCYAVIEGGLYRRGANGILMRCITQEEGRELLTEIHGGECGSHSSSRTLVCKAFRHGFYWPTALQDVAEMVKSREACQFHAKQIHTLAQALQMIPPSWPFAVWGVDILGPFPRAVDGYWYLFVAIDKFTKWPEATPIVSITQGAAVAFLKSIVCRFGVPSCIITDNRT

SEQ ID NO: 323535 - protein, 118 aa, Zea mays
  unsure (1)..(118): unsure at all Xaa locations
  Clone ID: MRT4577_58134C.1.pep
NTTHPSKTSXXSAXVGDHLXFQNEPCKPXETTFHPTLTNLPSITFTNFIFQPAVPKSIQLKLVPPSATTVPPIESGPSPQGLNLTITHQGQNPFPFRFRLPFKGNAKTNLNQGQSTIF

SEQ ID NO: 323536 - protein, 45 aa, Zea mays
  Clone ID: MRT4577_58135C.1.pep
FFREHSSRLVSCIVLRVSGFGTRILGISDLYITLYEHTGNEYSVI

SEQ ID NO: 323537 - protein, 109 aa, Zea mays
  unsure (1)..(109): unsure at all Xaa locations
  Clone ID: MRT4577_58136C.1.pep
LPCFGXRGRRSPGVVLGVGPVGRVAGGSVLGGGRWXGPAXGGPPPRRAGLAEVAGVVLGSGLGLLGVVVRXRVRPAXLGLRRLVGPWSFGLGSPPPPPALCGVKRRRRV

SEQ ID NO: 323538 - protein, 57 aa, Zea mays
  Clone ID: MRT4577_58137C.1.pep
YNMIALAMNYAQIDRNLDYILKFTVRNKCDMNICLKLVHSSMSVVRVTEVDLGRHSF

SEQ ID NO: 323539 - protein, 54 aa, Zea mays
  Clone ID: MRT4577_58138C.1.pep
TPLALYFCIFLPPTAADIHALHVISVARARIYSVSVATRRACVHLVSFSNLIPP

SEQ ID NO: 323540 - protein, 78 aa, Zea mays
  Clone ID: MRT4577_58139C.1.pep
SIFSTLKVRWAICPLLLPRSIYFVLYFRDILSPSQNVIRFRLYMHSLINYEYSLYVCLDLLSFVRIWMKKRVRKNYIF

SEQ ID NO: 323541 - protein, 42 aa, Zea mays
  Clone ID: MRT4577_5813C.1.pep
RTLYKLLGNQYPGRPLGPKTPLPGLGLNDPHVPYCFPMKMKW

SEQ ID NO: 323542 - protein, 88 aa, Zea mays
  Clone ID: MRT4577_58140C.1.pep
EAVTCKRDAMYKLMMEKLQHFFSNVEVIAFDTASNFLHKRTDLLDASVSDAELFYGDSDAALPCNMAADEKDDSSSNSQESSDKEDPL

SEQ ID NO: 323543 - protein, 86 aa, Zea mays
  Clone ID: MRT4577_58141C.1.pep
GESIIFDGCRNLKILCKFIYNTRTRGRAHTHFITYGFNITGVYTFHHINILSYTHSTSLKFTIQQQYTITINIQILSIQHNEVVRV

SEQ ID NO: 323544 - protein, 67 aa, Zea mays
  Clone ID: MRT4577_58142C.1.pep
QPSNLLDSRRSIISLSRWLGNIIVIIVFLFLLADFALCFHPHSIYRHHRPIYGPHHQNNRHYRLSSR

SEQ ID NO: 323545 - protein, 113 aa, Zea mays
  unsure (1)..(113): unsure at all Xaa locations
  Clone ID: MRT4577_58143C.1.pep
MGRTQSAVAVAVGAPVLLLATATTTSEAAIICCPMSLHTKNRAFHPLGTGNTPSAFCCSGARNLKSAASTILQQXHACTGIXNAHRGDSRLNAGNAGSKPYKCGVXIPYTNRT

SEQ ID NO: 323546 - protein, 202 aa, Zea mays
  Clone ID: MRT4577_58144C.1.pep
SIIFMDEPTSGLDARAAAIVMRTVRNTVDTGRTVVCTIHQPSIDIFEAFDELFLMKRGGEEIYAGPLGHHSSDLIKYFESIQGVSKIKDGYNPATWMLEVTTISQEQILGVDFSDIYKKSELYQRNKALIKELSQPAPGSTDLHFSSKYAQSFNTQCVACLWKQNLSYWRNPPYNTVRFFFTGIIALLLGTIFWDLGSKVYT

SEQ ID NO: 323547 - protein, 113 aa, Zea mays
  Clone ID: MRT4577_58145C.1.pep
ITNKNMQITRALKNTEGEGPTPRGQQTAPTNTRRPQQPQKGREQRNRQTNPTPKKGKKKYAHKHPVKPPAATDPYHKHAQETKKPRQEDKRIGPKPRNGRRPGNPNLPEQKHK

SEQ ID NO: 323548 - protein, 43 aa, Zea mays
  Clone ID: MRT4577_58146C.1.pep
LAARSACVRWAVCSPARSYGPPLCLRLGPPLSRVVCPRVSGPV

SEQ ID NO: 323549 - protein, 80 aa, Zea mays
  Clone ID: MRT4577_58147C.1.pep
RSATPPVLTRKLKRRWLFHTDGRLSRKMNEDKSVCKVPIILRERNPILAGPLQTPIAPMPCRGLLVLGNLGWAGGGEHGL

SEQ ID NO: 323550 - protein, 88 aa, Zea mays
  Clone ID: MRT4577_58148C.1.pep
NLNMKESLLKDQSGQQKPSGARQLLNSGTFIFFFFFFFFFFFFFFFFGLPSLNRIYWSENHIIIYIQLLNSSSIRTVYPYPPMLVASG

SEQ ID NO: 323551 - protein, 45 aa, Zea mays
  Clone ID: MRT4577_58149C.1.pep
LNGPSGHMARRDKLASCLPKMLLPSLRQLQRSHAPPLHGVVNWVA

SEQ ID NO: 323552 - protein, 60 aa, Zea mays
  unsure (1)..(60): unsure at all Xaa locations
  Clone ID: MRT4577_5814C.1.pep
MAGKVSCLLMSVXQXAXXATATIIPQCSQAPIASLIPPYLSPAETLMRKNPKAHPYRIQQ

SEQ ID NO: 323553 - protein, 39 aa, Zea mays
  Clone ID: MRT4577_58150C.1.pep
KMRPTKFKFLRQLGLNSCLNQGLGWPVLQCPDLKFHAKN

SEQ ID NO: 323554 - protein, 318 aa, Zea mays
  unsure (1)..(318): unsure at all Xaa locations
  Clone ID: MRT4577_58151C.1.pep
KPSRRGSWPLSFWPVVRVLDWEAQILRDVSISGFHLESHFSSSKPKGFCVFKSWLLNLAKVAKAPDGNGGVYAALKSKKLMEDKPVLLRKYVDWVVADGALLTHSVPLYMTGVKVSPLSSYAGENLEAXLPWANVPCAERDLVLGGRPVHGTGVAVVSSVXNERKGWAGCCVLRVVDVTSRTDTKFISSFLEKDSVYHLAEKKIPSIHGFTTGLKLEQFIFDAFTYSPSTALFEVMREEEFAPVKNASGATYDTPDSAKLMLLRLHSRWVVAAGGFLTHSVPLYMTGVEVSPLSSYAGENLEAICRGRTFHAPSEISF

SEQ ID NO: 323555 - protein, 119 aa, Zea mays
  Clone ID: MRT4577_58152C.1.pep
SEKKIPSIHGFTTGLKLEQFIFDAFTYSPSTALFEVMREEEFAPVKNASGATYDTPDSAKLMLLRLHSRWVVAAGGFLTHSVPLYMTGVEVSPLSSYAGENLEAICRGRTFHAPSEISF

SEQ ID NO: 323556 - protein, 76 aa, Zea mays
  Clone ID: MRT4577_58153C.1.pep
TRRNSTLAGAQVSRRRRGQRASRGSAGARHVARGHGRIGKHRKQPGGRGNAGGMRHHRILFDKYHRGDVRKVGMRY

SEQ ID NO: 323557 - protein, 546 aa, Zea mays
  Clone ID: MRT4577_58154C.1.pep
MVRVAPPRCPGPGPARGRSISLSLSRISHYLLLLLACSVCAARGEERSREVKGMKEEMMVGLSAPEPVGRWGAAPPQAMLERMKDYGQEGAFALWDDLSPEDQELLVRDIESLDLSRIDRIIRRSLGSQGIPLPAVEPVPESSVSKVEGRSAEDKERWWKKGLKAISEGKLAVVLLAGGQGTRLGSSDPKGCFNIGLPSGKSLFQLQAERILCVQKLAAQSSESPSNTVLIHWYIMTSPFTDAATGKFFETRRYFGLDPDQVTFFQQGTLPCVSADGRFIMETPYRVAKAPDGNGGVYAALKSKKLMEDMAARGVKYVDCYGVDNALVRVADPTFLGYFIDKGVSSAAKVVRKAYPQENVGVFVQRGRGGPLSVVEYSEMDAAMTTEINQSTGRLRYCWSNICLHMFTLDFLNQVANSLEKDSVYHLAEKKIPSIHGFTTGLKLEQFIFDAFTYSPSTELFEVMREEEFAPVKNANGATYDTPDSAKLMLLRLHSRWVVAAGGFLTHSVPLYMTGVEVSPLSSYAGENLEAICRGRTFHAPSEISF

SEQ ID NO: 323558 - protein, 107 aa, Zea mays
  Clone ID: MRT4577_58155C.1.pep
PRTLDLQTRNVIARCNSSGDLYPFHAPYTSTSALLAVPTSLWHRRLGHLGHQALSKLITSSVISCNKDDVNHICHACQLGRHTRLPFNSSSSRASHNFDLIHCDLWT

SEQ ID NO: 323559 - protein, 145 aa, Zea mays
  Clone ID: MRT4577_58156C.1.pep
ICLHMFTLDFLNQVANSLEKDSVYHLAEKKIPSIHGFTTGLKLEQFIFDAFTYSPSTALFEVMREEEFAPVKNASGATYDTPDSAKLMLLRLHSRWVVAAGGFLTHSVPLYMTGVEVSPLSSYAGENLEAICRGRTFHAPSEISF

SEQ ID NO: 323560 - protein, 91 aa, Zea mays
  Clone ID: MRT4577_58157C.1.pep
SAAVLRQIGGKATGAERGREWMTDRAVSTRPRRHHPPVPFRPAVCSLSSVTARRGRRIRAPDSQPARVRLWPAPPPRSPHAATGDVDGESY

SEQ ID NO: 323561 - protein, 354 aa, Zea mays
  unsure (1)..(354): unsure at all Xaa locations
  Clone ID: MRT4577_58158C.1.pep
MAGGKIQKKRHGAAGGARLQGGIPFEKSKGQHILRNPALVDSIVAKAGLKPTDTVLEIGPGTGNLTKRLLEAGVKAVVAVELDPRMVLELNRRFQGHPLSSRLKVIQGDVLKCDLPYFDICVANIPYQISSPLTFKLLSHRPIFRCAVIMFQREFAMRLVAQPGDSLYCRLSVNVQLLSRVSHLLKVGRNNFRPPPKVDSSVVRIEPRKPLPPVSFKEWDGLVRICFNRKNKTLGSLFKQKRVLELLEKNYKTMQSLXLCKMQKXGEEKMSADDVALLANMVEDMSMETGYDKEDDEMEMDDADMAGDGAASFKEKIMGILQQGDFAEKRGSKLSQVDFLYLLSLFNKAGIHFS

SEQ ID NO: 323562 - protein, 1197 aa, Zea mays
  Clone ID: MRT4577_58159C.1.pep
MAASLAEFGDPISDRQMVLTLLRGLGGKFRHMVSILKMHRPFPTFAEALRAPTTAASVQRPSTVSSFGSTPSAYGGFYGAPPPPYGMPYGGAAPPGFQAPAPAYQAMPWNPTHGGAWHQDALAHSFNTMTLNPPNATSEWYADSGAGSHMTSDTGKLSAISSPTSFTPTSIIVGNGALLPVTATGSHTFSFPHRNLVLNNVLVSPNIIKNLISIRRFTTDNNCSIEFDPFGLSVKDLQTRNVIAKCNSSGDLYPFHAPYTSTSALLVVPTSLWHRRLGHLGHQALSKLITSSVISCNKDDVNHICHAYQLGRHTRLPFNSSSSRASHNFDLIHCDLWTSPIVSVSGYKYYLVVASSTVATGHTADTRPISITPVANAHPMRTRGKAGIAQPVDRINLHAVPMSPLPRSVRAALSDPNWRSAMQAEYDALLANDTWSLVARPPGVNVVTGKWIFCHKLLVDGSLDRYKARWVLRGFTQRPGVDYDETFSPVVKPATVRVVLSLALSQDWPIHQLDVKNAFLHGTLTELVYCVQPAGFMDSSHPDLVCRLNKSLYGFKQAPRAWHHRFASYLFSIGFAETRSDNSLFIYRRGSDTAYLLLYVDDIVLTASSAKFLQHIIGALQREFAMTDMGQLHHFLGISVTRSANGLFLSQRQYTQDILERAGMSACKPCSTPVDLHSKLSADGPPVDDATQYRSLAEPHLAALKRILRYLQGTLSLGLTMRRSSPTELVVYTDADWAGCPDTRRSTFGYAVFLGDNLVSWSSKRQHTVSRSSAEAEYRDVANGVAEATWLRQLLIELQQPPPCATLVYCDNISVVYLSSNPVQHQRTKHVEIDLHFVREKVALGHARVLHVPTTSHIGSLTKLKVILLYKNNLSGVIPSSLGNITNLSVITLSENQLNGPIPTELWQMPHIASLYLFYNNLSGEIPQTISNLTSLQELSLAANMLSNTLPSNFGHALPNLKFLYLAANLFEGQIPDSLDNVSGLVYLDMSSNKFTSKIPSIFGKLSGLSFLNLERNMLEASDSTGWQFFADLTTCSSLTLLSLASNNLHGVIPNSIANLSTNLTYLLLSDNHLSGIVPTNIRKLNGLIQLALNNFTGTIEHWIPKMTSLQRLDLNDNNFDGTMPTSISNLTQLTFLNLSNNKFIGSIQSSLGNIQVLVNLSLSNNNFRGRIPVELGDLKQLVFLDVSSNKLSGEIP

SEQ ID NO: 323563 - protein, 52 aa, Zea mays
  Clone ID: MRT4577_5815C.1.pep
MIFSRLIFFVLPPYVSYGRLQGHYGDIAMNPSGSFLVEKCLTASNCSHKEAI

SEQ ID NO: 323564 - protein, 43 aa, Zea mays
  Clone ID: MRT4577_58160C.1.pep
MSFSADQIAEFKEAFLLFDRTGECKITLSQVGDVLRALGTNPT

SEQ ID NO: 323565 - protein, 49 aa, Zea mays
  Clone ID: MRT4577_58161C.1.pep
RQSGRGRIVVIGLHRGCFLKLIVSTFRSQSTSSHTYTTNRSPSMCISIK

SEQ ID NO: 323566 - protein, 106 aa, Zea mays
  Clone ID: MRT4577_58162C.1.pep
GSQPVKFFRSRKLSGWQLFKDLCAVVDRLTKCSEEEENENMVLDEDAINGTKDWMSFDTVLHGMVWEIERSIFKGLIDEVVSGETPEKMRFGQRKLQRQLSFGSPN

SEQ ID NO: 323567 - protein, 50 aa, Zea mays
  Clone ID: MRT4577_58163C.1.pep
ASPKVIDPWVDLENMSPEIILLIFFRWWQCIKAAPAGGVITSGGSDSIYV

SEQ ID NO: 323568 - protein, 54 aa, Zea mays
  Clone ID: MRT4577_58164C.1.pep
QIQIHSLRNIHLILIFSTIRILYILQHHTPINSHIIHTHTQKLTYTNLLFINNI

SEQ ID NO: 323569 - protein, 108 aa, Zea mays
  Clone ID: MRT4577_58165C.1.pep
ITCFPQPGKGNIGLSKRMWSTLSSMDTVIWSSGPRTGYIIYICGGALLGVPCLLPRRWKVIFFLCGPLIPFDWPNLLHRACGKTPGLPHFIAFGDLPLFWGWGFCQGA

SEQ ID NO: 323570 - protein, 223 aa, Zea mays
  Clone ID: MRT4577_58166C.1.pep
MARRPASWEQGGDEYDYLFKVVLIGDSGVGKSNLLSRFTKNTFALDSKSTIGVEFATRTLQVENKIIKAQIWDTAGQERYRAITSAYYRGAVGALLVYDVTKVMTFENVKRWLKELRDHADSNIVVMLIGNKTDLRHLRSVAVEDAASFAESEGLFFIETSALDATNVEKAFHTVLAEIYRIISKKPLSSEESGLGSGNLREGQSIQVSATNSGALTSRCCSS

SEQ ID NO: 323571 - protein, 65 aa, Zea mays
  unsure (1)..(65): unsure at all Xaa locations
  Clone ID: MRT4577_58167C.1.pep
MAHEKKLSNPMREIKVQKLVLNISVWESGYRLTRASKVLEQLSGHTPVFXSSARYTVRFFGILRN

SEQ ID NO: 323572 - protein, 76 aa, Zea mays
  Clone ID: MRT4577_58168C.1.pep
RTRTRTTTRTTTRSVWKARYAAEVKVMPGSRVSLLQLCCKSGRPDMAAHLGSQHCRGTLLMSNTSSVFYLSCFSKK

SEQ ID NO: 323573 - protein, 74 aa, Zea mays
  Clone ID: MRT4577_58169C.1.pep
VREVLNSSDVWSAYKDQKHDLFLPSSAQSSAAGVAGLIESSSRFTYALAAPPSSSLSPPSAPANPSGRQYYQHS

SEQ ID NO: 323574 - protein, 69 aa, Zea mays
  Clone ID: MRT4577_5816C.1.pep
TLPWHACDLIYRLYKIHYTESTGYNVYNWETANTTQLNNLVAHPPIPIWPDSEKARTDRPFELLNSLKG

SEQ ID NO: 323575 - protein, 52 aa, Zea mays
  Clone ID: MRT4577_58170C.1.pep
RAIADLISPLLGVESLRHYTARRLGASQSLLRQFRALAHPCRAPNVGCPPKL

SEQ ID NO: 323576 - protein, 80 aa, Zea mays
  Clone ID: MRT4577_58171C.1.pep
VPRPRGPPPPHGDENREMDDPSVGPKIPQALEKILQLKESRQEAMNSQQEEEEMETDTRSSLGQSASETEEDTVSTSKKE

SEQ ID NO: 323577 - protein, 88 aa, Zea mays
  Clone ID: MRT4577_58172C.1.pep
VSNVPTRPAGRYDRWEPCLVLSIFLVTYMLIGSYTGVDGACSRFLVSAFSRFFLSRTCSSGVITLVLLYVYSLKAYWCIRRHLERHIK

SEQ ID NO: 323578 - protein, 51 aa, Zea mays
  Clone ID: MRT4577_58173C.1.pep
RKFLSQGAFFPRDIFQSLGFAWALVWVFPRELFPRIPAKPLGPFYSKDASP

SEQ ID NO: 323579 - protein, 54 aa, Zea mays
  Clone ID: MRT4577_58175C.1.pep
RLRQRVVIHASSFSFSKEHDSNHKHSSILQMLEIAPSALLVMRLQNVKTIVNRS

SEQ ID NO: 323580 - protein, 47 aa, Zea mays
  Clone ID: MRT4577_58176C.1.pep
EFRVDLSLKGKGVCFCGHAALTLELYSLNQPPKFKGVVVSRQGLQVT

SEQ ID NO: 323581 - protein, 137 aa, Zea mays
  unsure (1)..(137): unsure at all Xaa locations
  Clone ID: MRT4577_58177C.1.pep
LTREPLSPYPPSLRASIISAYCAKYTDELILNAAYIGTPVNGILAAEESTGTXGKRLSSITVDNVEENRRALHXLLVCCPGALHYISSVILFEETLYQMTYDGKPFVYVLNDGRLLPGIKVDIGTIQVVGTDNENTA

SEQ ID NO: 323582 - protein, 107 aa, Zea mays
  Clone ID: MRT4577_58178C.1.pep
AICVCVPRSRAGPLNVAGGGRVRPGDGGGDRRGGAPRPLHHRRRGDAAEAARCRSTRDRAAGRLASQDDSGRGLPGVTGRHGLRGVSASVSCKVQWRACVAGQHTRA

SEQ ID NO: 323583 - protein, 51 aa, Zea mays
  Clone ID: MRT4577_58179C.1.pep
ASTLPTPNKSQLRFTLIIPTKGTGCSFTLWRHHTLLHTLTSNLCTTLFVLL

SEQ ID NO: 323584 - protein, 122 aa, Zea mays
  unsure (1)..(122): unsure at all Xaa locations
  Clone ID: MRT4577_5817C.1.pep
MIPPPVRGGAPKGLPPLGGRASSFAVVCSKKKIKTDNPYGMGGGLTVNVNPKGKKGKGKGGNHFVKKNGANVNGYSPIYNEDDGFPTGDVYVGETTGFLIGAATLAGILGGGALLVXNTRAL

SEQ ID NO: 323585 - protein, 139 aa, Zea mays
  unsure (1)..(139): unsure at all Xaa locations
  Clone ID: MRT4577_58180C.1.pep
KKKKKKKKXXKKKKKKQXPTPPKKKTKXXKQXKTKTKNKKHQKKNPPPXRKTKXRKANNKKHKDEGEXRQHRAEAEPQSDRHGARRPRRREAARAADCRGRRRREPTQIVDGAEEPVRLGPVPAAVEQHRFVRAGARRG

SEQ ID NO: 323586 - protein, 69 aa, Zea mays
  Clone ID: MRT4577_58181C.1.pep
RSSQEFRDSRAEPLRSPPSFCSICYLCWRRRVGLHYFCWFDQGSNDLYVSVRHIWVGSASLISFRVCRS

SEQ ID NO: 323587 - protein, 72 aa, Zea mays
  Clone ID: MRT4577_58182C.1.pep
KKKKTKKKKRKLKQYDPNLQTHTSNFNPLLYLNLNPINFPTFTNIITHKTITFLNLLLHSTTSPLISTYIQY

SEQ ID NO: 323588 - protein, 71 aa, Zea mays
  Clone ID: MRT4577_58183C.1.pep
CEHFILDIPEIRILQCYFCDFEMHLSLLLRRRLCVQAEVQRLGVQAVVQRLVSTYRFKNHGIYIQVFHYHA

SEQ ID NO: 323589 - protein, 137 aa, Zea mays
  unsure (1)..(137): unsure at all Xaa locations
  Clone ID: MRT4577_58184C.1.pep
PAQLWGTILAAPLQLVEAASYSAPPAIRLTPLPNDEEVERDQLEPAMRRLENTRGYFKNLETLGVWPHLQRTIVSGGSLTFSTDVPRQVTAPFRFYATAAGTADAFISSFWXFGYISLSGRLIRSSEVPAKAPPRDR

SEQ ID NO: 323590 - protein, 48 aa, Zea mays
  Clone ID: MRT4577_58185C.1.pep
KKKKKKKKKKKKKKKKKKKKKKKKKKKKNKKKKKKKNPRGAEIRTSHM

SEQ ID NO: 323591 - protein, 32 aa, Zea mays
  Clone ID: MRT4577_58186C.1.pep
FSWKMRSQVLLAIIALLLIFSALNIINVYTIE

SEQ ID NO: 323592 - protein, 75 aa, Zea mays
  Clone ID: MRT4577_58187C.1.pep
GCRRRRLPALGPQPHHGHRQDELASYKLKIYLPVHGVHACAWMVRRRDRWRRPRRKEGRDASRSSKHHRLVPLAS

SEQ ID NO: 323593 - protein, 87 aa, Zea mays
  Clone ID: MRT4577_58188C.1.pep
MQQGRSVRVLTRADADAASSSSSYFSSSRAPASNAAVATAPGDDEDIDIVAIVTGCCLASEEESKAAGGGDYPHLDLNLIMDIVRMN

SEQ ID NO: 323594 - protein, 76 aa, Zea mays
  Clone ID: MRT4577_58189C.1.pep
FILCYLWFFFVFFVLLILLFLYLGPKERGDNRPHGGRKNNDKVTDGAHPHQPRLFPLKKGLPFRRCLNQRSFPVRP

SEQ ID NO: 323595 - protein, 53 aa, Zea mays
  Clone ID: MRT4577_5818C.1.pep
LFFFLLFLFFWFFLYYFWVYSTIREGPQHINPREQVWAYKGKPLPNKKMGTLH

SEQ ID NO: 323596 - protein, 78 aa, Zea mays
  unsure (1)..(78): unsure at all Xaa locations
  Clone ID: MRT4577_58190C.1.pep
PNPSPCYLXGTCGVXSTRILGQGVXFLMHHCNPTATPYCSPQCQSLRQQCFQHLMHVEPHHRYQAIFGLVLQSILHQQ

SEQ ID NO: 323597 - protein, 97 aa, Zea mays
  unsure (1)..(97): unsure at all Xaa locations
  Clone ID: MRT4577_58191C.1.pep
PNFKSVREFIFQRGYGKLNQQRVPLSHHPVFEEGFGKPNIICLXGFVPQIITVGPPFKEGDHLLWPFQFKAPLGGLKKKRNPFFEGGYSRYPQNYPH

SEQ ID NO: 323598 - protein, 144 aa, Zea mays
  Clone ID: MRT4577_58192C.1.pep
MFTYSPTQKVLEPNIVVGAPSSARLPEAGSQLNCVVLPAFAGEFPSNHRKSLARISGARPNTLHVSAEVIHIGSLAVPSGADKWALQKDQGMELLFSADFEPDARIHCGCNTITAVLRGGFCLFFVSAIMLLVSYEVGMCIYGK

SEQ ID NO: 323599 - protein, 216 aa, Zea mays
  Clone ID: MRT4577_58193C.1.pep
MTHPSSPSSSAPPPPPAAAAAAAAAEATSLAPGFRFHPTDEELVSYYLKRKVLGRPLKVDAIAEVDLYKLEPWDLPPRSRLRSRDSQWYFFSRLDRKHANRARTNRATSGGYWKTTGKDREVRHGPRVVGMKKTLVFHAGRAPKGERTNWVMHEYRLEGDAAVEIPQDSFVVCRIFQKAGPGPQNGAQYGAPFVEEEWGGDDAVGLLPVGDAAVDP

SEQ ID NO: 323600 - protein, 110 aa, Zea mays
  Clone ID: MRT4577_58194C.1.pep
IGTSSRPGHPVQGRILRRVPLMRDGAEGRLLCCGAIHLLHGHPGRGILPQLLQIPRGRWWCWLQDWHGPLQLKELDRGTEAAPVFSTLGELGWTTSRHCCSCLDCCGCNP

SEQ ID NO: 323601 - protein, 38 aa, Zea mays
  Clone ID: MRT4577_58195C.1.pep
ISATLPQSPHTRRYLKISNKINNTANLLAQLQEAWSYY

SEQ ID NO: 323602 - protein, 138 aa, Zea mays
  Clone ID: MRT4577_58196C.1.pep
QVFCVVLPDGQAKSSTIGKGFVKILDSISAPPAFAGEFPAIHRKSLAHISGGRPNTLHVSAEVIRVGSLAVPSGADKWALQKDQGMELVFSADFEPDTRLHCGCNTITAVLRGGFCLFFVSAIMLLVSYEVGMCIYGK

SEQ ID NO: 323603 - protein, 182 aa, Zea mays
  Clone ID: MRT4577_58197C.1.pep
MASIIVQAVVILLDVIAFGLGVAAEQRRSRATVTPDAAKEYDYCVYDSDIATGYGVGALLLLAAAQVVLMVASRCFCCGRGLKPGGSRACALILFLFTWVTFLIAEACLLAGSVRNAYHTRYRGVFYGESLSCETVRKGVFAAGAAFTFFTAILGEVYYLSYSKSRDAAGGAGSSIGMGPYN

SEQ ID NO: 323604 - protein, 60 aa, Zea mays
  unsure (1)..(60): unsure at all Xaa locations
  Clone ID: MRT4577_58198C.1.pep
KKKTKKKKIKKKKKKKNKKEVKKKKKVKKKKKKKKXKKKSKKKNKKKKKNQKLKKRGRVF

SEQ ID NO: 323605 - protein, 665 aa, Zea mays
  Clone ID: MRT4577_58199C.1.pep
MNHPSSSSSSAQPPPAPAAAAEATSLAPGFRFHPTDEELVSYYLKRKVLGRPLKVDAIADVDLYKLEPWDLPARSRLRSRDSQWYFFSRLDRKHANRARTNRATSGGYWKTTGKDREVRHGPRLVGMKKTLVFHAGRAPKGERTNWVMHEYRLEGDDAAGIPQDSFVVCRIFQKAGPGPQNGAQYGAPFVEEEWEEDDTDDGLLPVEGVAAADPEVPLASVEIPGALDRGYLQMSDLIQGLDDQNGNGTPSLPVSDTSNNSNHSEDVDGNSGDILSDPNLGSNFLQCVEPGEQNSLMLNGTIISNANAGDFFDNSSHSDGFLELKDFADAANLDFPLGNGSSIWPLDGWAWKTPDSAESVNGANDEIPPLPDDQTFQPDELEQLLQSIQEDSHLGSSIIDPPHSSMTNSVLPDEDCLMFYDAPFDSTMCDDGFAQNGILGSAATNLSGIGMVDDGMPYFDAMDGNLFNDILGSIQQPDGSSSHAFNGPVLTQEVNNTMFTYSPTQKVLEPNILVGAPSSARLPEAGSQLNCVVLPDGQAKSSTIGKGFVRILDSISAPPAFAGEFPAIHRKSLAHISGGRPNTLHVSAEVIRVGSLAVPSGADKWALQKDQGMELVFSADFEPDARIHCGCNTITAVLRGGFCLFFVSAIMLLVSYEVGMCIYGK

SEQ ID NO: 323606 - protein, 51 aa, Zea mays
  unsure (1)..(51): unsure at all Xaa locations
  Clone ID: MRT4577_5819C.1.pep
RRDRPDFRRPSRGDXXDSRTRXXXPREQKGKATTLFIQESHVFPWLRIQAH

SEQ ID NO: 323607 - protein, 63 aa, Zea mays
  Clone ID: MRT4577_581C.1.pep
NLRREMHACATPRLSRVKSTRPKHDSYAARLPSIIDVRGRHGADARERECFGARSFACSRVER

SEQ ID NO: 323608 - protein, 109 aa, Zea mays
  Clone ID: MRT4577_58200C.1.pep
AKQGVPSLNKPSIRGDHLFTVKVAIPKRISGRERELLEELASLSNGRFARTDTKPKAAQPKAIHQKKEVGASQEDPSKSKEAEGDWLKKLTDFAGSIVNGAAKWLNDNL

SEQ ID NO: 323609 - protein, 59 aa, Zea mays
  Clone ID: MRT4577_58201C.1.pep
TCIMPINFDILHTEKPGFICVLPCPTSRPTLLLVTDLITSVYMYYTVPDRNKSGECVLM

SEQ ID NO: 323610 - protein, 80 aa, Zea mays
  Clone ID: MRT4577_58202C.1.pep
FGFFLRGTALTIINQVCNNHMLEALRMPITRSKRRKALVNQKTTMGPRWLFSSPKVFHLYDTLGEICLHERSSVIQAVPE

SEQ ID NO: 323611 - protein, 60 aa, Zea mays
  Clone ID: MRT4577_58204C.1.pep
LVSNRNRLRPLDLEPSDHHHLIWTMVISAALGYGWCFFHPVKYKLALRIVYGCQLSGFSD

SEQ ID NO: 323612 - protein, 33 aa, Zea mays
  Clone ID: MRT4577_58205C.1.pep
FSTACIKRDVFSCLVYFACCTDLVREPSLRNIE

SEQ ID NO: 323613 - protein, 109 aa, Zea mays
  Clone ID: MRT4577_58206C.1.pep
MNLDVPARQQNNQDADHSDKTVAEDVLGTEACTQPKLRLLLRDTNTDDALLPSLNFPMVDDGMLRSGLPDAANLRFLLCLNLSSIVYQSPEPYPEENARFLLTNGIRLH

SEQ ID NO: 323614 - protein, 224 aa, Zea mays
  Clone ID: MRT4577_58207C.1.pep
MDTGAQAMFIISLVLWCTTSFALDDAAATRIPIVGTLPLSMKENPQLCQLCEEFASEALFYLNENETQTEIIDTLHQACSKFGSFKLECTRLVDYYVPLFFTKIASLSPEEFCASASFCGEVTFIRLPRHEDTCTLCHEVVDEVVTNLEDPGMELKIIEILLKGCNNAEDYVQKCKRLIIQNAPIIMENIKKFLEKRDFCNSIHVCGSKSVRAGSQVLRSLSSA

SEQ ID NO: 323615 - protein, 71 aa, Zea mays
  Clone ID: MRT4577_58208C.1.pep
PIWYLDGDSRDVLLPLHGAPLAASRHHDPGSRLSIDGLPTPLRGCSYQISSLSGIPCAACCKSEKTFTYRA

SEQ ID NO: 323616 - protein, 45 aa, Zea mays
  unsure (1)..(45): unsure at all Xaa locations
  Clone ID: MRT4577_58209C.1.pep
MDPVATWGXTPFAXXDPEIYDLLEXEKXXQRXGIEFIXSENFTSF

SEQ ID NO: 323617 - protein, 50 aa, Zea mays
  Clone ID: MRT4577_5820C.1.pep
AFMNSWALYTFKAERDIRITIDIGGSNFETTKNYCTDIDTPGHRELIKNM

SEQ ID NO: 323618 - protein, 73 aa, Zea mays
  unsure (1)..(73): unsure at all Xaa locations
  Clone ID: MRT4577_58210C.1.pep
MIGIMMTSWLLNREGRSFLSCSSTPHQITHGISAAVLTPIVTGASIFISAETVRTLALRGAHVIMALXNLPAA

SEQ ID NO: 323619 - protein, 74 aa, Zea mays
  Clone ID: MRT4577_58211C.1.pep
FSVAVLPSGAPCGVSVASWACPASGLPGSPCGRGRAGFSGAVREPGPLVPLLELVRLGFYRGVCDHPGHSAPVL

SEQ ID NO: 323620 - protein, 106 aa, Zea mays
  unsure (1)..(106): unsure at all Xaa locations
  Clone ID: MRT4577_58212C.1.pep
GGPTPENNHLELLEDDRETAXFSAFDGHGGTEAAQFCAKYLXRXVHKNENDSTGDLGADVHRAFFKTDEMTQGQRGWGELXELGDKNNKPRGMIERLIRPKRSSDL

SEQ ID NO: 323621 - protein, 173 aa, Zea mays
  Clone ID: MRT4577_58213C.1.pep
MEAAAGEGPTTTMKTVCVTGAGGFVASWLVERLLAGGRYKIHGTVRDPGDAKNAHLLGLDGAAERLRLFKADLLDFGSLAAAIAGCDGVFHVACPVPDYTLTDPETELLAPAVTGTMNILRACSDAHIRRVVVVSSLSAVMINPDWGECKVMDEGCWSDVDLCRTTKVYGGTT

SEQ ID NO: 323622 - protein, 80 aa, Zea mays
  Clone ID: MRT4577_58214C.1.pep
LVVVFFLGVRYCRLLRMLRANPDCSGQHIPGLFQGGDQIAQFPPWHAAHPIGSDYDLHPLDVVLERTSVSNVKVHYACSH

SEQ ID NO: 323623 - protein, 86 aa, Zea mays
  Clone ID: MRT4577_58215C.1.pep
MTNGNHTFYVSKLIQRLARLSKYDTMYHMHSITSSASWEKILLSGFRGCCTQLLMKGFAGVATKIHAKSSMVAGEAGTHFLALYHQ

SEQ ID NO: 323624 - protein, 103 aa, Zea mays
  Clone ID: MRT4577_58216C.1.pep
RLCCINLVGPEIFLPGSGLMWKVKQDDHCPSVFWVLSNRGPALGSVQIHLFSPPSCIYGWGDNLNVYCPHVLGRINNPLNWWPLKKKNKLEKKKKKKKKKKNH

SEQ ID NO: 323625 - protein, 86 aa, Zea mays
  unsure (1)..(86): unsure at all Xaa locations
  Clone ID: MRT4577_58217C.1.pep
CHYFFSIMGENLTVRVQRMLXRNEVGXFDEEENIFSLVAVRLAVDAADEKSXIAERISVILQXNMSSHMTSFRGXIIIEGRVAILS

SEQ ID NO: 323626 - protein, 69 aa, Zea mays
  unsure (1)..(69): unsure at all Xaa locations
  Clone ID: MRT4577_58218C.1.pep
GFATHIYSXTGFVDDLLGFLAPLPPTGQLLPRSWQLLHNLDRQAPYSPKGGLEVYEANTGSWDTDPALD

SEQ ID NO: 323627 - protein, 137 aa, Zea mays
  unsure (1)..(137): unsure at all Xaa locations
  Clone ID: MRT4577_58219C.1.pep
ISTIFLVAILRNEVGXFDEEENIFSLVAVRLAVDAADEKSAIAERISVILQXNMSSHMTSFVVGFIIEWRVAILSLXPLLVLANFAXQLLMKGFVGVATKIHAKSSMVAGEAVSNICVIVAFNVQSKKCIWFNYCKQ

SEQ ID NO: 323628 - protein, 208 aa, Zea mays
  Clone ID: MRT4577_5821C.1.pep
MDVDGPAPADASARPATNGEAPSGVLRSFVDGVWYPDEPLLRRLRAASCDAAPRLRGASRNSARDLLEWTRRGSGLRAILVISVGTITLIALTGLLTFMFFLLVATANAIIVSVLMSLAAAGGFLAIFFACLVAVYIGAVSVAIFVISATVISAVVGILVATGWVGFFWMIWFTARKSMVLTKHSFGMTSSAIQSYSASRQVKQKPVD

SEQ ID NO: 323629 - protein, 439 aa, Zea mays
  unsure (1)..(439): unsure at all Xaa locations
  Clone ID: MRT4577_58220C.1.pep
FRNLKVVTCEAACCLVHVGCTFNVLIXAYAFCGMLDKAMIIFNEMRDHGVKPDVVTYTTVIAALCRIGKMDDAMEKFNQMIDQGVAPDKYACHCLIQGFCTHGSLLKAKELILEIMNNGMRLDIVFFSSIINNLCKLGRVMEAQNIFDLTVNAGLHPTAVVYSMLMDGYRLVGRMEKALRVFDAMVSAGIEPNVVVYGTLVNAYCKIGRIDEGLSLFREMLQKGIKPSTILYSIIIDGLFEAGRTVPAKVKFHEMTESGIAMNTCTYNIVDGRVFKNRCFDEAIFLFKELRAMNVKIDIITLNTMIAGMFQTRRVEEAKDLFASISRSGLVPXVVTYSIMITNLIKEGLVEEAEDMFSSMQNAGCEPDSRLLNHVVRELLKKNEIVRAGAYLSKIDERNFSLEHLTTMLLVDLFSSKGTCREHIRFLPAKYHFLAEASP

SEQ ID NO: 323630 - protein, 67 aa, Zea mays
  Clone ID: MRT4577_58221C.1.pep
HRCSQSASRGIRRCDNVLHVEETLINNVCRHSHPGIRNQSIYIMYSKKSPRHIRPDIASGALMYPFV

SEQ ID NO: 323631 - protein, 226 aa, Zea mays
  unsure (1)..(226): unsure at all Xaa locations
  Clone ID: MRT4577_58222C.1.pep
TYELIRKAVAVKDHLAQLSDFHKYQRNVYLESGRGHQLRKPMRKYIQNLLKVNMEEPYGPEWLLEXKVKRREMVVPEAXYIFVKQYSNGFITESSMKETEVEHMCAVCPESCLLGFVPYRFVVEEELPVLYVYELQMEPSAQGKGLGKFMMQLIEQIACKNQMGAVMLTVQKANTQAMAFYTKLRYVISSTSPSRVDPQIGLEKSYEILCKTFDSEAKSKLEDGDY

SEQ ID NO: 323632 - protein, 50 aa, Zea mays
  Clone ID: MRT4577_58223C.1.pep
MPPSSVGDSARGRYLMIGVALALADLLRIAFGYDTHHIYKTEKPGNVSHE

SEQ ID NO: 323633 - protein, 49 aa, Zea mays
  Clone ID: MRT4577_58224C.1.pep
SCELYSQRTERKDQGQRQPGGGAFRFRRRATWRAPSRGYAGAMRRAFWT

SEQ ID NO: 323634 - protein, 128 aa, Zea mays
  Clone ID: MRT4577_58225C.1.pep
MGAARGGVSALLVAALLLGAFAPPASAASYPAKVVSGFLSNAASAVLKRLWSLKSTVKTASGAKSMVKYEGGYTVETVFDGSKLGIEPYTVEVTQGGELLVMDSMNSNIYRIALPLSRYSRTKLCCWF

SEQ ID NO: 323635 - protein, 52 aa, Zea mays
  Clone ID: MRT4577_58226C.1.pep
PVGPGFTYEERTGALIQKQKGLRKEQNGLLASHCEKYLRSSSRPDVATGGIY

SEQ ID NO: 323636 - protein, 58 aa, Zea mays
  Clone ID: MRT4577_58227C.1.pep
TPPQPKKMEPGPILSSEICVNFLASGWYILVQELGGLVPISNTHHGPFNHSGVRSIYN

SEQ ID NO: 323637 - protein, 145 aa, Zea mays
  unsure (1)..(145): unsure at all Xaa locations
  Clone ID: MRT4577_58228C.1.pep
GGRCFIAXWCAQEQVLRHRAVGGFLTHSGWNXTAESIWAGVPMVCWPGFADQYINCRYACEEWGIGLRLDEALRREQVAAHVEELMAGGTDRAREMRRCAAKWKAAAWKATAPGGSSCESLDRLVDDLRLWEEDAELATATPLIR

SEQ ID NO: 323638 - protein, 83 aa, Zea mays
  Clone ID: MRT4577_58229C.1.pep
ARLCEGFTGSDILEVCKQAAFYPIRELLDNERNGRKLDKPRPLRQSDLERALSTSRKCKKAASSGLQSPLWVRPTDSEDDQIA

SEQ ID NO: 323639 - protein, 92 aa, Zea mays
  unsure (1)..(92): unsure at all Xaa locations
  Clone ID: MRT4577_5822C.1.pep
YLGLVGTIMPIALTGLLIFMFFLLIATANAIIVSALMSLAAAGGFLAIFFACLVAVYIGAVGVAIFAISAIVISSVVGVMITXXWVGFFWMI

SEQ ID NO: 323640 - protein, 390 aa, Zea mays
  unsure (1)..(390): unsure at all Xaa locations
  Clone ID: MRT4577_58230C.1.pep
MGSSEPSSRSVQNLVLYAASAALSCLVLLAGLRHLDPNRAASQKAQQQKKEIAKRLGRPLVSTTPYEDVIACDVINPDSIDVEFDSIGGLDKVKQALYELVILPLRRPELFASGKLLSPQKGVLLYGPPGTGKTMLAKAIARESGAVFINVRISNLMSKWFGDAQKLVSAVFSLAHKLQPAIIFIDEVDSFLGQRRTTDHEAMTNMKTEFMSLWDGFTTDQNARVMVLAATNRPSELDEGILRRFTQIFEIGIPSRVKGQILQVVLKGEXVEPHVAYDHIARLCEGFTGSAILEVCKQAAFYPIRDWFLLLLFLLLFQKPRPLRQSDLERALSTSRKCKKAASSGLQSPLWVRPTDSEDDQVQNAILEISKLMSRIVESSQSEPQEPSSP

SEQ ID NO: 323641 - protein, 391 aa, Zea mays
  Clone ID: MRT4577_58231C.1.pep
MRSSEASSRLVQELVLYAASAALSCLVLFAGLRHLDPNRAASQKAQQQKKEIAKRLGRPLVSTTPYEDVIACDVINPDSIDVEFDSIGGLDQIKQALYELVILPLRRPELFTFGKLLSPQKGVLLYGPPGTGKTMLAKAIARESGAVFINVRISNLMSKWFGDAQKLVAAVFSLAHKLQPAIIFIDEVDSFLGQRRTTDHEAMTNMKTEFMSLWDGFTTDQNARVMVLAATNRPSELDEAILRRFTQIFEIGIPVESERSKILQVVLKGENVEHNIDYDHIASLCEGFTGSDILELCKQAAFYPIRELLDDEKKGRKLDKPRPLRQSDLERALSMSRKGKKAASSALQSPLWVRPTNSEDDQVQNAIFEISKLMSRIVQNSESEPQEPSSP

SEQ ID NO: 323642 - protein, 76 aa, Zea mays
  Clone ID: MRT4577_58232C.1.pep
REGRKRGLLKENHPLSKNTYTVKKKTKGTHLLLRRGESQGTLLKKKWLVFRGGKKVKVTKQTNRPKGRRFLSSLGP

SEQ ID NO: 323643 - protein, 182 aa, Zea mays
  Clone ID: MRT4577_58233C.1.pep
MAGSGGMELPPLRDLSRRAASFLRMARLALTGAATPAQLLAGEEVVVDGGISCNPYYKSISTEDDWGSELWPDQEDESELLVDGDEDGSTTRGGGGGASESVTLVGAGGGGVGGPLDRKPQLRHQSAAPGAHVTSSEPSSSEPLMTRRRATKRVNDTAVAVDHPFGRDRRGGESSSLLLVSS

SEQ ID NO: 323644 - protein, 97 aa, Zea mays
  unsure (1)..(97): unsure at all Xaa locations
  Clone ID: MRT4577_58234C.1.pep
AMTGSTALDMGFFEEHWLAHTVWISSXLHTQIGXEPDMKPNICTSTQERRELIRHALFVLIESQGXDYRSTMLLVRPLEDVHALVPHVEDAIDTERG

SEQ ID NO: 323645 - protein, 134 aa, Zea mays
  unsure (1)..(134): unsure at all Xaa locations
  Clone ID: MRT4577_58235C.1.pep
CLAASYTRFQLAAERSVGCITKSAGVGGRDPPAGAVSRDDGCSSSLIYAFXARGTVVLAEYTEVTGKFTTITVQGLLKLTDCHSESTYNCYGHNVNFLLNGRFTNRVACDDIEGRHNTLVVLDRRQEDFTKKYC

SEQ ID NO: 323646 - protein, 53 aa, Zea mays
  Clone ID: MRT4577_58236C.1.pep
PKEFWKRVLEFGPNYVGRNLLLRQLPILPEGPGPVDRKGTQATAVGGARARAP

SEQ ID NO: 323647 - protein, 100 aa, Zea mays
  Clone ID: MRT4577_58237C.1.pep
MAAADPDTEVQGEFPPLVRQYKSGRVERVFNLAPLPVGTDPATGVVSKDVVVDPGTGLWARLFLPAGMHGKKLPVVVYYHGGAYVIGSAGDPMTHGYLNA

SEQ ID NO: 323648 - protein, 74 aa, Zea mays
  Clone ID: MRT4577_58238C.1.pep
YSMQRVVFFLFTNYISWLQIKASKNICNHYGAQLHKNLTIIRRHNQSSIKKLKGTVTLTRTTCKSQDTAKAKKK

SEQ ID NO: 323649 - protein, 198 aa, Zea mays
  unsure (1)..(198): unsure at all Xaa locations
  Clone ID: MRT4577_58239C.1.pep
MFGTTRGTCTNELINMGIYIGTRGKPIVGANDSTGTIGKRICRINGSNSTETRRALRELLFSCCGXALQNMSGAILCWETIYHKTRDGRAFCRILMDARTLLAMKADTDKIVXCSTDDDTTIHSHDXLXKRWTEYYXATHHYAKQRAGQQRPPRAPSQIDIVPXAHGLARYAIICQENGLVPIVEPEILVDGPHDIDR

SEQ ID NO: 323650 - protein, 222 aa, Zea mays
  Clone ID: MRT4577_5823C.1.pep
MDVDGPAPADASARPATNGEAPSGAREVDVGEEDTLAGVLRSFVDGVWYPDEPLLRRLRAASCDAAPRLRGASRNSARDLLEWTRRGSGLRAILVISVGTITLIALTGLLTFMFFLLVATANAIIVSVLMSLAAAGGFLAIFFACLVAVYIGAVSVAIFVISATVISAVVGILVATGWVGFFWMIWFTARKSMVLTKHSFGMTSSAIQSYSASRQVKQKPVD

SEQ ID NO: 323651 - protein, 132 aa, Zea mays
  unsure (1)..(132): unsure at all Xaa locations
  Clone ID: MRT4577_58240C.1.pep
MIQYTLRRRRLEALRADMAELTEKDFLQXPIDFVASQKSDEEKRPGTDALDVCKTTLLLGFKTRSXMMVGTYIDEKCPFTGTXSIRGRIIAXGTCXHSAXMNRTIIARRDYIHSAWRYQTYETRHSYIPAQI

SEQ ID NO: 323652 - protein, 155 aa, Zea mays
  unsure (1)..(155): unsure at all Xaa locations
  Clone ID: MRT4577_58241C.1.pep
YPPSRSNGNLAPTSPPRRPPPPPPTAPLRRPSASPTPTPPXSSPPSPAAAPPLPVPPTPADAPPLRGPPXPPTXPPDCGASSPPPKAXPSPRRRHLHSPDPHAAERRGLPSRLPGPLPXAHTPPTADSPPRATXAPHPPPPQPPPLLPPLXSPPP

SEQ ID NO: 323653 - protein, 78 aa, Zea mays
  Clone ID: MRT4577_58242C.1.pep
QCRLQAGGGCEFFLLNPQPHVLSCCIIREDWIAIIKNAGSWTRTMYQYSLDPGNLDSTASKYQVFFTGLVQDRWFYKS

SEQ ID NO: 323654 - protein, 153 aa, Zea mays
  unsure (1)..(153): unsure at all Xaa locations
  Clone ID: MRT4577_58243C.1.pep
PRGRPGRDFDDTPSVAVTLKYGRRADMENIMFVHTLSNSSEQVYLGAMRAVEINPRHPIIKELRDQVAQHNESEELKQTXRLGDQTGLMERAINLPDPQEITPSIYXSPHQSLDLSPDSVXYEEDEAEEQPEAKEKETSPNEGSNASFDKDEL

SEQ ID NO: 323655 - protein, 182 aa, Zea mays
  Clone ID: MRT4577_58244C.1.pep
MVVPRAPEQTQQDQDEEMLVPHQDAIEGLQKDVLEGPQPMEEFASAVENQIIPDTSTSRFTWYIENFSKRNVRKHYSDDFIVGGYKWRVLVFPRGNNVDYLSMYLDVADSNLMPPGWSRNAQFSLAVVNQLDSKASLRKEATHQFNSRESDWGFTSFMPLLDLYDSSKGYVVNDKCIIEAEV

SEQ ID NO: 323656 - protein, 251 aa, Zea mays
  unsure (1)..(251): unsure at all Xaa locations
  Clone ID: MRT4577_58245C.1.pep
MAAMAMAPAAVSFLALALLMLSDAEAKFLPNNITVVGSVYCDACSNNTFSKHSFFLKGARVLIKCSFKVNSTSSEELSLEAERTTDQHGVYKLDVPPVDGFECREGHELRSACRATLVRSSSAACNVPGLGASTQHIELRSRATSACFLNLNALNFRPAKRDGALCHAQGGDAFGSSLFFWPFLPLFWPPFRVPGGGAGGTVSFPWPFPVPAWLVPFLRPXLAIPALRAGAVTTAAVLPXFPPPREAVSRP

SEQ ID NO: 323657 - protein, 121 aa, Zea mays
  Clone ID: MRT4577_58246C.1.pep
VSELRCPPLCPHSVVRFVMPILPESLTDSVRLGMCLNILHNRLAKDANKKALSLMFQNADSVLHSSSSPVVVMCLVRSHSYWRPLPPKYVNNQPCHCSIRGYHDAPLASSVPCVPQKETQH

SEQ ID NO: 323658 - protein, 55 aa, Zea mays
  Clone ID: MRT4577_58247C.1.pep
PSAPADNPKKHTPIYFKQSILLFNKQPPFLLNTGQRGVYHFLSRRQRIKFHRGHR

SEQ ID NO: 323659 - protein, 76 aa, Zea mays
  Clone ID: MRT4577_58248C.1.pep
LAYDGVPVTSDDATTHFVFTEMDVLFLYTKPFVWTSSTIQFNHRVGTNEHDIRYLSKCYVAKRGKYLIKLCFGNNY

SEQ ID NO: 323660 - protein, 76 aa, Zea mays
  Clone ID: MRT4577_58249C.1.pep
SVLLPLAERKTNAPFLTPEKLFKHLHYFQNLAMHTYLNGPVDVITYMAIPIALADFSIFMIGHGAYNISHRVAKKE

SEQ ID NO: 323661 - protein, 221 aa, Zea mays
  unsure (1)..(221): unsure at all Xaa locations
  Clone ID: MRT4577_5824C.1.pep
IPYSSDTYHSAGNRLPFSTSDDFISCSATSAESIKWTQDVAAQIAIYLLTDYSCFSCAYSIRVKIIANDQXNXRTTPSYVAFTESERLFXDERINHLAMNPINSFFYAKRLIVRRFMDSSVESXSNLWTFDVIPDILVKSVLGVPHQDEEKXDALEKISSMVLIKMHDIAEPDLGSTIKNADVTAPAYIRDSQRPPTKDAGVIAGLNVLRIHYEPTAAAIA

SEQ ID NO: 323662 - protein, 73 aa, Zea mays
  Clone ID: MRT4577_58250C.1.pep
WKKVEKNSTTSVLEYLSLASSFFELNGDIVTNKKERRINFHTYDRTLDSIFTRCPQYASHSLVYIGLFPCFPC

SEQ ID NO: 323663 - protein, 98 aa, Zea mays
  Clone ID: MRT4577_58251C.1.pep
ICRHNTTPHTDHLIGQWRGSTNDKQGADQERTTRKSQKKASKKGGRPDQKLFPKQRRQKKQNTGCGLVGAQPPTKGSLCKTSQRARKDAGFEERARLK

SEQ ID NO: 323664 - protein, 268 aa, Zea mays
  unsure (1)..(268): unsure at all Xaa locations
  Clone ID: MRT4577_58252C.1.pep
MGFLSLVGNSFGCSASGERLVSAARDGDLQEARALLQYNPRLARYSTFGGRNSPLHYAAAQGHHEIVSLLLESGVEINLRNYRGQTALMQACQYGHWEVVQTLILFNANVHRTDYLNGGTALHFAALHGHARCLRLVLADYVPSVPNFCTLVNHKSSEEDSAADFDXVCRIASXFSVLXILVHKSCDSMSLLPVLXKMVNQKADGGLTPLHMAALNGHVECVQLLLDLGASVSEVTIEDGTTIDLIGITFAFLVAYSCCKCLTLVRTL

SEQ ID NO: 323665 - protein, 20 aa, Zea mays
  Clone ID: MRT4577_58253C.1.pep
IRLFVYMHRCYIARNSTTHS

SEQ ID NO: 323666 - protein, 72 aa, Zea mays
  Clone ID: MRT4577_58254C.1.pep
TFRPPPFFFFYNKSPTRGIFIHYNSIPLNSIINTIPTFPKKQLPIIPIIHNPLIHTNYYYLTPSGPLLKLHT

SEQ ID NO: 323667 - protein, 59 aa, Zea mays
  Clone ID: MRT4577_58255C.1.pep
VGPFCAHLLKQRKKKITKKTTCMTCHNPKARPNAPTTNHTKIHLPLGPTLGPELVHVPL

SEQ ID NO: 323668 - protein, 159 aa, Zea mays
  Clone ID: MRT4577_58256C.1.pep
NDITLLKLATPARFSQTVSAVCLPSADHDFPAGTLCATTGWGKTKYNANKTPDKLQQAALPLLSNAECKKSWGRRITDVMICAGASGVSSCMGDSGGPLVCQKDGAWTLVGIVSWGSRTCSTTTPAVYARVAKLIPWVQKILAANCARSSCHPCLKISH

SEQ ID NO: 323669 - protein, 82 aa, Zea mays
  Clone ID: MRT4577_58257C.1.pep
MAATGQEGDDVDHYEVLCLPSGEEGAALTIEHIEKAYRTQSRLRHPDKRPDDPNATADFQLLSSSYKLLRDESLRRQFDARL

SEQ ID NO: 323670 - protein, 113 aa, Zea mays
  unsure (1)..(113): unsure at all Xaa locations
  Clone ID: MRT4577_58258C.1.pep
SELSGQTLTAASTVPRHLALLLPLLLLASPAATRLASAACACYKFPAGQAYGGWEDXXKLGASLHWACEACKSSLSVVLVAAPAGAAGWVVWGLFLRARXCAXXRCWGXCVRS

SEQ ID NO: 323671 - protein, 47 aa, Zea mays
  Clone ID: MRT4577_58259C.1.pep
WVVFVGVFLLTKARESGDCIAVWAVLCLMSEWVSDGERARAPSFYSC

SEQ ID NO: 323672 - protein, 399 aa, Zea mays
  unsure (1)..(399): unsure at all Xaa locations
  Clone ID: MRT4577_5825C.1.pep
THASFSSFFPVGFRSGNHFPTTRGRSTRPRAVELGSEASEFCHYKGFYSSNYLPMTPKSVNDIHKRGGTVLGTSRGGHDTKKIVDNIQDRGAIQVYTLGGDGTHQGAHGAINXSRGRGLQVAVAGIPKTIDNDIAVIDKSFGFDTAVEEAQRAINAAHVEASSAENGIGLVKLMGRYSGFIAMYATLASRDVDCCLIPESPFYLEGEGGLFEYIDRRLKENNHMVIVVAEGAGQDLIAQSIPAADQQDASGNKLLLDVGLWLTHKIKDYCKSKKMEMTIKYIDPTYMIRAIPSNASDNVYCTLLAHSAIHGAMAGYSFTVGMVNGRHAYIPFHRVTSTRNKVRITDRMWARLLSSTNQPSFLSQKDIDAAREADKAANRTKSREDAKKQSTPVLANGEK

SEQ ID NO: 323673 - protein, 78 aa, Zea mays
  Clone ID: MRT4577_58260C.1.pep
VERVLLISFCCWQHHCSKQDDLPYQTGVKHISSVHCTPIHLQVQSDACSRDEAVHPSHGLIGNREVMSQGIICSCAHA

SEQ ID NO: 323674 - protein, 63 aa, Zea mays
  Clone ID: MRT4577_58261C.1.pep
SNYKALRSLASWCPAILHGSGLPLVSYRMTGLLDHRLNIADPFAGADYAHTTPKQHLSTNEKT

SEQ ID NO: 323675 - protein, 211 aa, Zea mays
  unsure (1)..(211): unsure at all Xaa locations
  Clone ID: MRT4577_58262C.1.pep
MQYLTDVARSKDLLKVVGHSVIKAMCDGEFLMSRKWAVGGHDWEVHLRPKDHSEGHERPVTLRLVLISEARGGDVKAKLSCRLVDPTGRLKPSKENSKSHKFYKSGDYSGAIQVTGREDLEKSGYLVDDSYTVECSITVLKKAPARNTAAAAAATAMDRDAAMLPSLELHRHLXELLQKGTGADVTFHVSGEKFAAHKGILCSRXSPVFMA

SEQ ID NO: 323676 - protein, 81 aa, Zea mays
  Clone ID: MRT4577_58263C.1.pep
GGRDPQWARSQVGLSCESSDIDEFVMTPPAPRSNANIQSYINLAFDVDDDSASVSSNDFIAANTSLEEYLKGRWSRSSSFD

SEQ ID NO: 323677 - protein, 739 aa, Zea mays
  Clone ID: MRT4577_58264C.1.pep
MRLLVPDGARRQRLLQCEAPPSPSPPSPSPYPSSSPSRTVVVGIRRDAASRELLTWALVKVANAGDRVVALHVATAAAADGLLVRLDERSRAADSLASVLAVYDGFCNLKQINLELKVCGGSSIRKTLVKEAAACGAAHLILGVTNNSRSFGSSLTSVAKYCSKRVPASCSVLAVNNGKVVYHKDAGHGLQHELYQSNTTIPETPRRSYRKLLSTMIGDKLWDENGKDRRCVSRAVTMPMRSPARPKEFSLALVPVKGCQHESPAVATGWPLLRKKFLPDRKASAPDKSKMSVVQWAMRLPSRYSAVSPVHSEYRTTKPDSTSASHILRDRVIVPSRSNSGKSCVVIEELEKETPEELTLLKEKFSSIYSSFSYSELAKITSDFSPECVVGQGGTSQVYRGCLANGKELAVKILKYSDEVLKEFVSEIEIVSSLSHKNVISLVGFCFKNDDLLLVYEYLQRGSLEEILHGKKECKSIFGWTERFSVAMGVARALDYLHSDNNSRPVIHRDVKSSNILISKCFEPKLSDFGLAVWAADVTSQMTCNDVAGTFGYLAPEYFMHGKVGNKIDVYAFGVVLLELISGRKPLCTGCPKGQESLVMWANSIIQGGKLRQLVDPNLPTEGHVDEVERMTLAASLCIRQTPQNRPEIDAVLKLLHGDNDTLKWARSQVGLSCESSDIDEFVMTPPAPRSNTNIQSYINLAFDVDDDSASVSSNDFIAANTSLEEYLKGRWSRSSSFD

SEQ ID NO: 323678 - protein, 58 aa, Zea mays
  unsure (1)..(58): unsure at all Xaa locations
  Clone ID: MRT4577_58265C.1.pep
RFSVPAGQYAXYLVARRESARAHVIRTRAXLAYNLSFGVGDARNGCHGSMLVEAFAGN

SEQ ID NO: 323679 - protein, 168 aa, Zea mays
  Clone ID: MRT4577_58266C.1.pep
MARRTTTTREPAAAVVLMLLLAAATAAAAEEEALPMEAYFSAAELARIAGYGEEPVSSVSVSGQLTCELCLRPGSPLLALEMPGAKVAVTCDCESHQHPSDEPDSHALLAATTDESGNFTIDLPPRLHATPDLEKACAVKVLRLPPGSSSCRLRHRVADAYRLMLVSA

SEQ ID NO: 323680 - protein, 462 aa, Zea mays
  Clone ID: MRT4577_58267C.1.pep
MGTPNEMMAYSSLSKMDTSQNHGAALSNVVAGNNYPVQDYLYEQASEPDFPEYDSRDDLFAPTRASPKVNLNTVLGGLVSIVTGVNKSEDDASQHESFSTDISFLRSDKNGNVNVHPSVCVPSAPPLLEANALQYSAYKEVLLADPPEWLPDSSANVCLQCNLPFTALTRGRHHCRFCGGIFCKNCSKGRCLMPMKFRIRDPQRVCDACYERLDPLQGLLINYNSNCMQQAKHDVMDWTSTRSWLNMPVGVSMEYEIYKATNTMKKYCQVARLNPEKSIPSSILKGAKGLAILTVAKAGAVLTYKVGTGLVVARRSDGSWSAPSAILSVGLGWGVQIGGELTDFIIVLHDRKAVKAFSSRIHLSLGAGLSAAAGPIGRAFEADVRASEKGSGICYTYSCTKGAFVGVSLEGNVVTTRMETNLRFYGDAYLTATDILFGRVERPRAAQPLYSALDDLFSKMVC

SEQ ID NO: 323681 - protein, 74 aa, Zea mays
  unsure (1)..(74): unsure at all Xaa locations
  Clone ID: MRT4577_58268C.1.pep
METKIWSLLMLFALSTCVANAINFPQCLHAPIAPLHPPYLPSIIASVCENPAXLTIYAIXHASASSNILLSPLL

SEQ ID NO: 323682 - protein, 57 aa, Zea mays
  Clone ID: MRT4577_58269C.1.pep
HGLKGPPLRCRIPVYKEGLTAPIIARNKAVSVVNDVAYSLGLRLTCLVCVTRGAPRA

SEQ ID NO: 323683 - protein, 226 aa, Zea mays
  Clone ID: MRT4577_5826C.1.pep
MDVDVDEATATPASASAKPASNGEAPSGAREVDVGEEYTLAGVLRSFVDGVWYPDEPLLRRLRAASCEAAPRLKGASRNSARDLLEWTRQGSGLRAILVISVGTIMPIALTGLLIFMFFLLIATANAIIVSALMSLAAAGGFLAIFFACLVAVYIGAVGVAIFAISAIVISSVVGVMITTGWVGFFWMIWFTARKSMDLTKHSISMTSSAVQSYSASRQVKQKHVD

SEQ ID NO: 323684 - protein, 83 aa, Zea mays
  Clone ID: MRT4577_58270C.1.pep
EDKRRSKIHEKIRLVHVKVSKLCPRGTGRSLIVELVDPYVCACVALFFLLWGDALPPLGMRIPWQEALSKAYTVVFWGEIHLR

SEQ ID NO: 323685 - protein, 43 aa, Zea mays
  Clone ID: MRT4577_58271C.1.pep
FFSLYSPPLFKVSQLVARSKCLRLDRPNTFLFKSHATSPLNSS

SEQ ID NO: 323686 - protein, 55 aa, Zea mays
  Clone ID: MRT4577_58272C.1.pep
ALGLHTWQTLTVDEPNTTDQRICGGGVIPFQLDVQALLGATEVISTEIPILQIAN

SEQ ID NO: 323687 - protein, 169 aa, Zea mays
  unsure (1)..(169): unsure at all Xaa locations
  Clone ID: MRT4577_58273C.1.pep
LXPQTPAYPVEYMGTQIVREQTSGSLTAIVVDENLCHARAASCMLANLQCKVIVYASPVDALKFLKDHQRDTDFALVEVNMKEMHGFQFLDMSRKLHKSLQVIMMSADTTWPTMKRSVELGARFLIKKPLDANTMNNLWQHLDLKFQRTDKIKALFPGWSYCDMFSFSF

SEQ ID NO: 323688 - protein, 33 aa, Zea mays
  Clone ID: MRT4577_58274C.1.pep
ISKSQNLALYPALSEGKFLTFTYGGHEIKKGFS

SEQ ID NO: 323689 - protein, 71 aa, Zea mays
  Clone ID: MRT4577_58275C.1.pep
TNPSGCSQEAGTGRLIQVNNVPHITNHSILATNNANSHVNQLLGRYHKMSPMSEQMTVPKDNSTLHNFHDQ

SEQ ID NO: 323690 - protein, 126 aa, Zea mays
  Clone ID: MRT4577_58276C.1.pep
MASASGSGCASTGASLVAANTLAMAVQDTTPVNGVGEGEDGERTTDIGVKESDTKKRKPKRQTSGVWDYFIKSTVTEKGDKGETEEQIWAKCKKCKFKTRGESSRGTTIFWNHLKSRHYIHRGQQE

SEQ ID NO: 323691 - protein, 161 aa, Zea mays
  unsure (1)..(161): unsure at all Xaa locations
  Clone ID: MRT4577_58277C.1.pep
MPIVVNTLIGXTITIHVPISEGTDNGKANIHHLDDIPPDHQRLIYDGXAPDDGRTXLHDYNFHERLTXIELLLPLKECMKNFIXTLTEKTXTVRRHTITSLTQYSERFHDEENVPPEQXRVISDDYYVXDGRNLVNYDISKENHIMLKMLHRGGKEICART

SEQ ID NO: 323692 - protein, 83 aa, Zea mays
  unsure (1)..(83): unsure at all Xaa locations
  Clone ID: MRT4577_58278C.1.pep
NTHDNKYCLSLWKAPIQKAGFTRKVPIVPHVAASDIFXEKDMTYHLNYMEDNSEGSNKIYXYILNDLCTSLVSRQPYLVETKS

SEQ ID NO: 323693 - protein, 125 aa, Zea mays
  Clone ID: MRT4577_58279C.1.pep
THAHTSRHYSGGLTVGNIRSCFPRHKRGGDYDGLSVGHSSSSDAAKVSTVDPNLKLVPTLFSHLQGLDSSHLQFFTTHAFRFFIGLLNFSTLMTQTITPDGAFGLELFGTHQGILYEAEYNALVL

SEQ ID NO: 323694 - protein, 389 aa, Zea mays
  unsure (1)..(389): unsure at all Xaa locations
  Clone ID: MRT4577_5827C.1.pep
MASSHIILPKEEEEEAAAAAVAEVGLGAAVEADHDXPAVPGXQGPGKAALPFSATCVRISRDSYPNLRALRNASTMTLHDDDAAFVKLEEGDYGYVLDDVPHLTDYLPDLPTFPNPLQDHPAYSTVKQYFVNADDTVPEKVVVQKNSPRGVHFRRAGPRQRVYFESEEAKACIVTCGGLCPGLNTVIRELVCGLSHMYNVSNVFGIQNGYKGFYSSNYLPMTPKSVNDIHKRGGTVLGTSRGGHDTKKXVDNIQDRGINQVFIIGGDGTQKGAYEIYKEIRRRGLQVAVAGIPKTIDNDIAVIDKSFGFDSAVEEAQRAINAAHVEASSAENGIGLVKLMGRYSGFIAMYATLASRDVDCCLIPESPFYLEGEGGLFEYIDRRLKENNT

SEQ ID NO: 323695 - protein, 228 aa, Zea mays
  Clone ID: MRT4577_58280C.1.pep
LFAALLVVCAAVAAPPPAAAPAAAPPVIVIPVNGAIGPASADFIVRSLERAAHERAPLAILQLDTPGGLDTSMRQIIKAILGSPVPVAAFVAPGGARAASAGTYIVYASHFAAMAPGTNLGAASPVQLGIGGATPPGANPAAPRAPAAGASGASEASATPAALPTDTQSTEIRKAMQDAAAYIRGLAQLRGRNAEWGERAVREAVSLSANEARAQHVVDPGVSARKLQ

SEQ ID NO: 323696 - protein, 379 aa, Zea mays
  unsure (1)..(379): unsure at all Xaa locations
  Clone ID: MRT4577_58281C.1.pep
RHEGGXGGGGDAGFVRADQIDLKSLDEQLERHLTRAWTMEKRKEEASAGAGAGARQHQQSRRPRREDWEIDPAKLVVKGVIARGTFGTVHRGIYDAHDVAVKLLDWGEDGHRSEQDIAALRAAFSQEVSVWHKLDHPNVTKFIGAIMGARDLNIQTENGHIGMPTNICCVVVEYLPGGALKSFLIKNRRKKLAFKVVVQIALDLARGLSYLHSKKIVHRDVKTENMLLDKTRTVKIADFGVARLEASNPSDMTGETGTLGYMAPEVLNGNPYNRKCDVYSFGICLWEIYCCDMPYPDLSFSEVTSAVVRQNLRPEIPRCCPSSLSNVMKRCWDANPDKRPEMAEAVSMLEAIDTSKGGGMIPVDQRPGCLACFRQYRGP

SEQ ID NO: 323697 - protein, 362 aa, Zea mays
  unsure (1)..(362): unsure at all Xaa locations
  Clone ID: MRT4577_58282C.1.pep
PVQFIGAIMGARDLNIQTENGHIGMPTNICCVVVEYLPGGALKSFLIKNRRKKLAFKVVVQIALDLARGLXFTGSSSVSLNLYRTVSCWIIIVCIDSSIFVRLSYLHSKKIVHRDVKTENMLLDKTRTVKIADFGVARLEASNPSDMTGETGTLGYMAPEVXFLGSDRHSTPPPLLAALLSRGVITFSXSGTIIVIKRHPCMKHLYXLCYVPCXLNGNPYNRKCDVYSFGICLWEIYCCDMPYPDLSFSEVTSAVVRQXDLIFRLACLPLASCNSLAAEFXQVDDTTILPGLQNLRPEIPRCCPSSLSNVMKRCWDANPDKRPEMAEAVSMLEAIDTSKGGGMIPVDQRPGCLACFRQYRGP

SEQ ID NO: 323698 - protein, 135 aa, Zea mays
  Clone ID: MRT4577_58283C.1.pep
HRFGPSNQGRVSRPLSGGGSPLCLGAGLPPNPFRGPGSNAAPAGKNVRSPAPDPGRVSPPLIQPWIPPRLNCPKPRFVYTAPGFARIILGMQSPVLCLRTRSPYLPAGPFSIYSPQKHMVQTTPIPRVQLLVFPN

SEQ ID NO: 323699 - protein, 102 aa, Zea mays
  Clone ID: MRT4577_58284C.1.pep
GNCFYRTASFNILVQPPPLNHKTPRGETGIQKAPHICPGVMMDLKNRLHQQDACSHHPAFNFYHRTMLDGSRKHFQHYKKPFSAFPLLFLVHKRERPPPIIQ

SEQ ID NO: 323700 - protein, 53 aa, Zea mays
  Clone ID: MRT4577_58285C.1.pep
ALVHQFESPKAAGEYLRPRQAVAIQLSHNPDLALPFFSDRRIYQSLRKTIVLW

SEQ ID NO: 323701 - protein, 147 aa, Zea mays
  Clone ID: MRT4577_58286C.1.pep
DKTTGGDLLTGGVGIRIRIRIRTKKAWRPPVTHYCQMPNPPPIFGPKLWVFLSSRCWLGLGPMQNALPGPGLVFVALGVGGPRQLQIKTLIQGPLVVPFPGVGALARERGPKPRSPEDRKREPLPLHSGGDKGHAPCPPRGPPPVLP

SEQ ID NO: 323702 - protein, 168 aa, Zea mays
  Clone ID: MRT4577_58287C.1.pep
MATITTQLRSALLSPAASSSSSSPRRGGRRAPSSVRCDASPPAASASASLDPDFDKKAFRHNLTRSDNYNRKGFGHKKETLELMSQEYTSDVIKTLKDNGNEYTWGPVTVKLAEAYGFCWGVERAVQIAYEARKQFPEERIWITNEIIHNPTVNKKLEDMGVKDIPVN

SEQ ID NO: 323703 - protein, 144 aa, Zea mays
  unsure (1)..(144): unsure at all Xaa locations
  Clone ID: MRT4577_58288C.1.pep
SKKKKQKGEILREIFKKFLLKNPPPKFPPPLGAGAKNAPPKYPSWGPQKGPXAPPGAPFGPPXKKSVKNQXCPPAPFXNPPVKTPGGVPHIWPPRLGAPIWPPSWGPLWGNGPPKGPPVFPKWQKGGPQGGKPPPGARPRGSPP

SEQ ID NO: 323704 - protein, 56 aa, Zea mays
  Clone ID: MRT4577_58289C.1.pep
IWDRVTLFLCQEAPCFPEFCTSRTGVMMVYLFASSPAVNFPGGSLKKPNPKGNKKK

SEQ ID NO: 323705 - protein, 92 aa, Zea mays
  Clone ID: MRT4577_5828C.1.pep
EGKVVKFTTVELRAIIDKKNNICNMSVIAHEVHGKSTLTDILDADVVIKVHVVTIIIFNDSYYFKYIYYLFFSLLNYICFIIFLFKILIYIF

SEQ ID NO: 323706 - protein, 59 aa, Zea mays
  Clone ID: MRT4577_58290C.1.pep
WVGFGEPPPPPPPFGFSRWGPLWGFLLLSKRIKKNGIFIKQKKRMVFKKKKKKKKKKTK

SEQ ID NO: 323707 - protein, 104 aa, Zea mays
  unsure (1)..(104): unsure at all Xaa locations
  Clone ID: MRT4577_58291C.1.pep
HEERDHTKHSANKTTGSXAARKHLGTKVARKSAPTTARTNKPDKYRHRTMALTEILKYNKSSQLIIQLLILQRLFHEIVHDINTDLQMQMHAQMDVQEAVEEYL

SEQ ID NO: 323708 - protein, 113 aa, Zea mays
  unsure (1)..(113): unsure at all Xaa locations
  Clone ID: MRT4577_58292C.1.pep
MAAVVRGGLRGIRXNGLTTFIRDVSDERYLKCLLNGNLLQTKXRNIGTTLAGVAHVGKQIXSKLHDTQAGRHRWIEHARKVNMHSKALKAGWLHHITXSTGDNLMSQKTARYL

SEQ ID NO: 323709 - protein, 240 aa, Zea mays
  unsure (1)..(240): unsure at all Xaa locations
  Clone ID: MRT4577_58293C.1.pep
MQQQGSKHPLTCQTAPSSSGGALAISSLPSTANLVRPPSASAAVPNPRKTQHRWWPWHRSGKLGERIRLTDATMGASSCSSVRLLLPLLCLLGFCFAASHQKSDSCDGDLQVARLVPFDTDAFHCITLWKDEDFILRYKNTGSSQWSFVLSAPEKRSYVAVGFSGKGGMVGSSAMVGWSSGGKGVAKQYYLQGRSPEAGTPDDGRLTLVRNRTVAXSKSGRLYLAFELSTRRPQPYLIYS

SEQ ID NO: 323710 - protein, 49 aa, Zea mays
  Clone ID: MRT4577_58294C.1.pep
PSRPFLDSLLSAPSTYAGSTLWEILLCNCVWHVLLLVIHQVSLQSNLQL

SEQ ID NO: 323711 - protein, 75 aa, Zea mays
  unsure (1)..(75): unsure at all Xaa locations
  Clone ID: MRT4577_58295C.1.pep
NVTRFATTLVEAGYNYXIVPMNFGTDKHNITLHLDLDPDRNVPDMHDYDWALFESLSIXTDADCINKPKLIMERN

SEQ ID NO: 323712 - protein, 57 aa, Zea mays
  unsure (1)..(57): unsure at all Xaa locations
  Clone ID: MRT4577_58296C.1.pep
PGDDGEGVIEEXEEEEEEELGAKRACAHRAQRPGQEETMEMWTEALMASRTRGXPKI

SEQ ID NO: 323713 - protein, 106 aa, Zea mays
  Clone ID: MRT4577_58297C.1.pep
YDSLVGPVQLKPAGAKLLCRISGSTNSQIDEPPSYEEALKQGLPTTRPIAPMATGVLGQHTPVTLDLPPPADTQQKPVLPGPSAVVVTRPSRASLRRAASGPRSTL

SEQ ID NO: 323714 - protein, 93 aa, Zea mays
  unsure (1)..(93): unsure at all Xaa locations
  Clone ID: MRT4577_58298C.1.pep
SLGVLRICLGWIYVGVRLLSSVEPDKDPEWWSVHMWVKPRHVVXRGRVLGSHEVDPVGSFLKRXLLGPGVLLVGAVWLFVLAGTLEDLFLDLS

SEQ ID NO: 323715 - protein, 495 aa, Zea mays
  Clone ID: MRT4577_58299C.1.pep
MSSFWGVEVKPGKPYTLTHGDFAGRLRLTQATLGVDVGKGEKATGVKRCVLQCSAENRDPVFLCVLMPEQSETCHLELEFEEEVTFSVIGPRSIHLAGYYMTDACGEDRSDGDSGSDSLQSSDEDGFLEEDDDGNMVMGYSDSEDDDSESDDEEMAYNQGRGKSSVVIEEIEEDDKAAVAEVQKGLKKQSRENGDESQLQLAARNPPTESLESEDEDGFPVSFSESKKSSEIVSNKNGGKDKETSNKDLKRKSGAISDRGDSSGGVKAEIDGASKKKKKGKDKSTVMDTGKVNNEEKEVKLHDSPADPVSTKQKKKKNKNKSASEGDTSEQSAKNNNIDKDNEEASAQEANKKNKKKKAHDISRSESQAGTGLGESDSKEPLQTRTFANGMMIQELEMGKPDGKKASRGKKVSVRYIGKLKNGTIFDSNVSGRPFEFRLGVGQVISGWDVGVNGMRVGDKRRLTIPPSMGYGSKRVGQIPQNSTLIFDVELVNVK

SEQ ID NO: 323716 - protein, 38 aa, Zea mays
  Clone ID: MRT4577_5829C.1.pep
LIASIIQRSITIQTTEHNSHSLFIPSVALTQNVSYYII

SEQ ID NO: 323717 - protein, 102 aa, Zea mays
  Clone ID: MRT4577_582C.1.pep
HPVENGVMESASFKEFLHDKIKVSEKAGVLVDRVRISRDKTKVFVTAQAPFSKRYLKYLAKKYLKKQSLKNWLRVVASQKNSYELKYFNIRDQEGAEEEKAE

SEQ ID NO: 323718 - protein, 118 aa, Zea mays
  Clone ID: MRT4577_58300C.1.pep
AGRVAIIPSLLHSTGHTRRTAPYWTWRRPSASPLRVAPRCATRMRRRAPRRRIDPQRRDIMQRIIEGPHRGRLPRAVLAVSVTASATTTTTAAPHPPPLLSTDAHGWCGPFYDNTIER

SEQ ID NO: 323719 - protein, 65 aa, Zea mays
  Clone ID: MRT4577_58301C.1.pep
ALTVKDLPGEVLSLSLDSQLRILYITSLYVIQSRWGVWLRAANVHCNYAIDRDLYIDEYIWVGGA

SEQ ID NO: 323720 - protein, 64 aa, Zea mays
  Clone ID: MRT4577_58302C.1.pep
VHQVVWMYVEVCRTSLFIVVVDSHECVLSGLSRSSSLGRVVCIWSDCAFCKTCCPLDVRIASLV

SEQ ID NO: 323721 - protein, 75 aa, Zea mays
  unsure (1)..(75): unsure at all Xaa locations
  Clone ID: MRT4577_58303C.1.pep
MIIPKKNRDEICKYLFXEGVLCAKKDYNLANLSQIDVPNLGFVRGXXXFXSKEFVRGAFSWRFYYWCLSYVGVGL

SEQ ID NO: 323722 - protein, 103 aa, Zea mays
  unsure (1)..(103): unsure at all Xaa locations
  Clone ID: MRT4577_58304C.1.pep
MSGRGKGGKGLGKGGAKRHRRXLGHNLQGINKPAIXSLPRRGGLNPFFGLFYKETRGVLKIFLENVFRDAVTYTEHARRRTVTAMVVVYALKRQGRTLYGFGG

SEQ ID NO: 323723 - protein, 348 aa, Zea mays
  Clone ID: MRT4577_58305C.1.pep
MTMCDQTRPRKLATGATQTANCHLLPQPLCPSPCHQGPRSPERDLAATQAMESPFRADLLRGKAALVTGGGSGIGFEIAAQLARHGAHVALMGRRREVLDKAVAALRSEGLRAVGFDGDVRKQEDAARVIAATVEHFGKLDILVNGAAGNFLASPEDLKPKGFRTVLDIDTVGTYTMCYEALKYLKKGGPGRGPSSGGLIINISATLQYTAAWYQIHVSAAKAGVDGITRSLALEWGTDYDIRVNGIAPGPIQDTPGMRKLAPEEMGNKGKRETMPLFKLGEKWDIAMAALYLASDAGKYVNGAIIIVDGGLWLSRPRHIPKEEVKALSKVVEKKVRASGVGVPSSKL

SEQ ID NO: 323724 - protein, 237 aa, Zea mays
  unsure (1)..(237): unsure at all Xaa locations
  Clone ID: MRT4577_58306C.1.pep
GKLDILVNGAAGNFLASPEDLKPKGFRTVLDIDTVGTYTMCYEALKYLKKGGPGRGPSSGGLIINISATLQYTAAWYQIHVSAAKVLGPSLNRSARENRXVCRFLLIDRXXAGVDGITRSLALEWGTDYDIRVNGIAPGPIQDTPGMRKLAPEEMGNKGKRETMPLFKLGEKWDIAMAALYLASDAGKYVNGAIIIVDGGLWLSRPRHIPKEEVKALSKVVEKKVRASGVGVPSSKL

SEQ ID NO: 323725 - protein, 97 aa, Zea mays
  unsure (1)..(97): unsure at all Xaa locations
  Clone ID: MRT4577_58307C.1.pep
SGNSVYWISYGNEYARKEIPLHSDLIGIKHKLSLTRHADXPXWVVQCGCLNNIXAQEFDLELVLMSNLXEFVHEYLLKPEPDELMPRLGALRDGRQA

SEQ ID NO: 323726 - protein, 122 aa, Zea mays
  unsure (1)..(122): unsure at all Xaa locations
  Clone ID: MRT4577_58308C.1.pep
MDMLYSVLTDXEGGALSEADAATAAAASWKRIATSTHRSATGAHAKDDDCSSDGARVYPMLGLLETASLAADNNSKHELRAGPAGKSSGAGFRRHRSWQPVLDTIEEVLDAPVHQRGAAGGE

SEQ ID NO: 323727 - protein, 39 aa, Zea mays
  Clone ID: MRT4577_58309C.1.pep
APPPVLASAPRLPDRIHGVGRSLTSKKGGAPARLLAQSP

SEQ ID NO: 323728 - protein, 81 aa, Zea mays
  Clone ID: MRT4577_5830C.1.pep
MSASSPKAAAIGSSQSYNPLRRRAVSCEELAAVATQQAAVHMGAGAFSRACSNVSVVFRWLGSAFKFAEMGYFAKVGDLVE

SEQ ID NO: 323729 - protein, 97 aa, Zea mays
  Clone ID: MRT4577_58310C.1.pep
KIICLVHLRKFAELTLRSPVLSYIKVSRCSVLHRGSITSNALQKLVLQKQESLSSLSLLCNNLIDVDLSDWELLTNAVCDGFSDGGGCPIVRSLILD

SEQ ID NO: 323730 - protein, 193 aa, Zea mays
  Clone ID: MRT4577_58311C.1.pep
MATTRPLLLCAALLLAALSCTFAADAPFLVAHKKVALSRPKPGVERLAVSLDLYNQGSATAYDVAINDDSWPKEAFELVSGEVSKTLERLEPGATASHAFVLESKTQGRFQASPAVIKYRVATKAAVQEAYSTPILPLDILAERPPVKKFEWAKKLVAKYGALVSVVSFVLGFIYLVASPSKSAGSKSGKKRR

SEQ ID NO: 323731 - protein, 81 aa, Zea mays
  Clone ID: MRT4577_58312C.1.pep
LGLGFFFFFFFTFSHINNGLFVHDFSNCTGTYLGGGENALFELPESSRRALLLKRGHPNVGGTGRRIYTCGAIRKKGLQNT

SEQ ID NO: 323732 - protein, 119 aa, Zea mays
  Clone ID: MRT4577_58313C.1.pep
MPGQRYPTFLAHERRCERDDGKACSGLPTTVAAGVGHRTVLMPGQRYPMYLAQPAPLAPCPREGVLWPSHHRRRSFVPPCLFFSHHIVLYRGYCKRQRPGLFEASLYTSWVPVRCDGTI

SEQ ID NO: 323733 - protein, 48 aa, Zea mays
  Clone ID: MRT4577_58314C.1.pep
CPFPPRGLGPLFAGWKKKKKKKKKKKKKKKKKKKKKKKKKKKKKKKHH

SEQ ID NO: 323734 - protein, 159 aa, Zea mays
  unsure (1)..(159): unsure at all Xaa locations
  Clone ID: MRT4577_58315C.1.pep
SSFHHHKRIWKSWTPSKCQFFLWLVAHNKCXTADRLGKKGMNHPTRCPLCDQEPENINHLLVSCVFSRVFWYNLLRKFGLHSLSPQQADASFFDWWERASAQVFGLGKKGLDSLITLGAWMIWKHRNKVVFDGRAPCLSFLLQARYDNGYPKPDRFLLH

SEQ ID NO: 323735 - protein, 119 aa, Zea mays
  Clone ID: MRT4577_58316C.1.pep
MAGLSVLLENHSKSYTGKAAAAQIISKATLVTTTHGPNHHQQQRKIPVSAAAAGSFLQRCCLCHKELAEGMDIYMYKGDRAFCSEECRCRQIFMDEDATTVRGRRPVKTRQGWEREWET

SEQ ID NO: 323736 - protein, 72 aa, Zea mays
  unsure (1)..(72): unsure at all Xaa locations
  Clone ID: MRT4577_58317C.1.pep
MAAGMYLEHNLDSIENLPFELQRNFQLMRDLDXRTEDLKAEIDKLATEYMSSARSLXSEEKLALLKQTQEAY

SEQ ID NO: 323737 - protein, 119 aa, Zea mays; identical to SEQ ID NO: 323735
  Clone ID: MRT4577_58318C.1.pep

SEQ ID NO: 323738 - protein, 75 aa, Zea mays
  Clone ID: MRT4577_58319C.1.pep
RSAADASSIQRPASPCQSVTVMVSPVMTSGITVSYAVSTGDAYLHNVVDMYRVRSPSRWRRRTQATSSAILAYAW

SEQ ID NO: 323739 - protein, 138 aa, Zea mays
  unsure (1)..(138): unsure at all Xaa locations
  Clone ID: MRT4577_5831C.1.pep
LTKYLNSAVAGXYLMQKGLVYLVGAGAHQNKPFVPILATSKVLYKITYIEXSLVAXVHILILGKPLIYTSYKAQRSSPLKPLGEYQKLQLATSFIKIANAKGVYVLPPTDIIIPDKFAAYAHSNIVPGTDITDDWMRF

SEQ ID NO: 323740 - protein, 91 aa, Zea mays
  Clone ID: MRT4577_58320C.1.pep
PVVRAASREPLCLCTPNIYTCALTGGVCDLHACRGDRAFCSEECRCRQIFMDEDASSSCCGNGNGAGAAATTVRGRRRVKTRQGWEREWET

SEQ ID NO: 323741 - protein, 249 aa, Zea mays
  unsure (1)..(249): unsure at all Xaa locations
  Clone ID: MRT4577_58321C.1.pep
MLPPAAAAAIRATAGLPRAVRRVHARLLKEGLADLPSAPALLVSAYARSCLLPDARRAFDDAPRRDLHLYSALLAAVSHSSDPELVLPLLRRMLSDDALRPDHFVLASLASAAGRLRSLRLGRELHAHFAASPYSADNVVKSSLIDMYCKCGVPQDARKVFDSIGVKNSVVWTALISGYASNGCTGEALDLFQSMPAHGLFTWTALISGFVKAXEXTGAMGLFVEMRRDDIRIHDAFVLGTVIGGAADL

SEQ ID NO: 323742 - protein, 104 aa, Zea mays
  Clone ID: MRT4577_58322C.1.pep
YACAALICTVTWSCKIVCTSVLIEGARGRDFLRELVGSFESRKDNAEHSYLVLLYNMIHWDTSCYGFHYQWYLMEGYLMHACAYTTAGGAFDPTERAFACPSGA

SEQ ID NO: 323743 - protein, 134 aa, Zea mays
  unsure (1)..(134): unsure at all Xaa locations
  Clone ID: MRT4577_58323C.1.pep
MAGLSVLLENHSKSYTGKAAAAQIISKATLVTTTXAPTTSTSSSRRSLSXAAAGSFLQRCCLCHKELAEGMDIYMYKGDRAFCSEECRCRQIFMDEDASSSCCGNGNGAGAAAATVRGRRRVKTRQGWEREWET

SEQ ID NO: 323744 - protein, 71 aa, Zea mays
  Clone ID: MRT4577_58324C.1.pep
GRPQGCCEKKGDVMGVTLLFMNWQKKGQVFLWNTCCQKKVLVCLFVGPVCNVNKRYRRGLYVVFDPKNKPD

SEQ ID NO: 323745 - protein, 128 aa, Zea mays
  Clone ID: MRT4577_58325C.1.pep
MAYPAGTEFPPGFCPVHGWNIPPPETTPPPAAAVTTEVVSPRRAPMSDTAGATAAPSRGWIRTGHVPGLPNGFGPVDAGASLPEEGVEMAAHGGRPSGGTAARSSRGTVTAENGVGTAAANGGGGRML

SEQ ID NO: 323746 - protein, 188 aa, Zea mays
  Clone ID: MRT4577_58326C.1.pep
MARSVSMAMSSSSLATGDTTFCHTNHRSHTTLSYQARPHVDVPFAYHSSATLQQVLLRHHALKRLTPLQPLGWGSITVAQQRVDLRLISRGEVGYGQSIIRGNLQYASLSALRRLPLDHGNQTFLHRDVQGDSLTVVSFTKEGCEATLLSGSKTSDTTITKESSPISTLKLVHTENTPAEWDHLNIVQ

SEQ ID NO: 323747 - protein, 29 aa, Zea mays
  unsure (1)..(29): unsure at all Xaa locations
  Clone ID: MRT4577_58327C.1.pep
VHLLLASSARRGQSVITSRXSISQPSXRR

SEQ ID NO: 323748 - protein, 81 aa, Zea mays
  Clone ID: MRT4577_58328C.1.pep
KQRKIGSLNEKPEPLGKKKRPRGQKSPGEKKKTLAQQQSMALRPQKNYDPGRPLSWAGPGACLPFQIRPNQKGGTSPGDPG

SEQ ID NO: 323749 - protein, 90 aa, Zea mays
  unsure (1)..(90): unsure at all Xaa locations
  Clone ID: MRT4577_58329C.1.pep
HQEKTLYYLNYISYHIYKRAPPMMDCWENTAGFVTARWFGGSTCSIRTSEPWLSAASXATRAKRAGGYGGTGSCAPSAPYCCYWTPRSMP

SEQ ID NO: 323750 - protein, 100 aa, Zea mays
  unsure (1)..(100): unsure at all Xaa locations
  Clone ID: MRT4577_5832C.1.pep
XGPXXRRASLXRSNLVKGXSPPXWGYGRPEIRXXSLXLTCIAKHXXXXAPXXXXTXGPSVTPPLXXXMXXXXXQXLSTGWRHIEKKTPXLMXXALVXVXX

SEQ ID NO: 323751 - protein, 66 aa, Zea mays
  Clone ID: MRT4577_58330C.1.pep
GDMPELESLQVRPASEVVAAGASSSATPTTETATTDCVRATPLCFVPLPLSFSPCSFCFFLLFVFV

SEQ ID NO: 323752 - protein, 83 aa, Zea mays
  Clone ID: MRT4577_58331C.1.pep
PPMRKGHRTHRRQQIYRTHLCLHTHHLEGTRALPRRGFDFSFRECAQPVLSVLASFNRSVGSVQTPRHVRLAQTVLIDLLGFP

SEQ ID NO: 323753 - protein, 61 aa, Zea mays
  Clone ID: MRT4577_58332C.1.pep
TAMSLLQRASVAALTALSGRRAGTRLGVGSFLTRSFPKTVAPVRHSVDHGKRLFVIKPSLY

SEQ ID NO: 323754 - protein, 55 aa, Zea mays
  Clone ID: MRT4577_58333C.1.pep
FTPPTGPGCNHREPSCAFYVKIRLKVRVNMACSLNACTLAIHVSLSFCEECPAIL

SEQ ID NO: 323755 - protein, 86 aa, Zea mays
  Clone ID: MRT4577_58334C.1.pep
TAVPIAALLLMLWFKSFSSKSSGSLVSAKLCYHLMLEPFPFSLVKFVWVVSSSEAKMYLMGGPACFKKCPPEQKKKKKKKKKKRRK

SEQ ID NO: 323756 - protein, 48 aa, Zea mays
  Clone ID: MRT4577_58335C.1.pep
IGDRCTFEFSQARNCGIMALGASEALSNNAREALHSHSGQKAQGGMMS

SEQ ID NO: 323757 - protein, 68 aa, Zea mays
  Clone ID: MRT4577_58336C.1.pep
RCHPGRLITSWGEPITITCFAKFSITKNQPLAAPLIHDVAKLTPNPHPKFPGCACPQPEPILSTYRLD

SEQ ID NO: 323758 - protein, 91 aa, Zea mays
  Clone ID: MRT4577_58337C.1.pep
EGLGDVENRMLKEFVQRLITENHQLQVRVRWEQDDLVIWDNRAVYHSATYDYGGITGGKRIGNRVCGVGEIPYLDPRSSGRRYALGMDYLA

SEQ ID NO: 323759 - protein, 822 aa, Zea mays
  Clone ID: MRT4577_58338C.1.pep
MDCKNVVVFDDTNQIISHLVCRGFVKDYTVLTKHGEGSAPYTTEAAEDKRFQFVHGTYPPLPQSEHVMPNVNDHGYCGGSEHDRTHVLPNVIDEEDVELLEAMLRCHTDPSMFFKKDMLPKENKVPANMYYAKKLICPLALDVEKIHTCRNHCILYRGDDYKDLESFPKCNASRYKTNKDYREDECVASISKGKKRKKGQKKTSKSTSKEKEVDYYALKKIPALVMWLEPANKKQKKEAQRRVQHVGVQGPFIRSKWSHIPITFSQEDLQLKDYPHNDAMVISCVIKGFLVHNVLVDTGSAADIIFAKAFRQMDVIEHSLNVDPSFRPRKQRLRKMSEDKAEGARNEVKRLLSAGVIREVTYSEWLANNVMVKKANGKWRMCIDFTDLNKACPKDEFPLPRIDSLVDAAASSELMSLLDYYSCYHQIWMKKEDEPKTSFITPSGTYYFLRMPEGLKNAGASFSRMTAKNHIADFQEMFANFRQAGLKLNPEKCVFRVKKGKFLSCLVSTKGIEANPSKIEAILRMELPNSKKRAQRLAGRLASLNRFISRSAERNMPFFEILKSAEVFQWGLAQQKAFEELKQYLIDLTTLTPLHRELRYSWLQKLKAMGIRRVVIKTDSHVISDHVDKSSKARDPKLEKYLDAVRRLEASFEGFSVKNIPRGENEHANLLAKSAAQGLSLPSEVFFETIKAPSVELMERAVLAISPVHSEDWRTKIISFLQVRHPESNGLVERVNGIIMTGIMKLIFNQPRGKWPDELINVVWSHNTTVSRSTSFTPFKLLFGDEAITREEAKTGSIRTTSLAEDEADYQTTKDTIKGTRL

SEQ ID NO: 323760 - protein, 61 aa, Zea mays
  Clone ID: MRT4577_58339C.1.pep
KCGKKYPDLEETSSAAQATVVQGVPPEKKAAPDFVEAAAKSEKAAHALFCGSSCKCDPCNC

SEQ ID NO: 323761 - protein, 93 aa, Zea mays
  Clone ID: MRT4577_5833C.1.pep
SSNYSCFEKKKKKNRHTNTSRRRQRASLLSHASRQGRERDRRSPSGGGGCGCPPSSSEICLGTDLSDKMVKICLMVAGYVGGRTKALRALKRP

SEQ ID NO: 323762 - protein, 220 aa, Zea mays
  Clone ID: MRT4577_58340C.1.pep
MPKGLKNVGGSFNRMTAKVLHSQIGRNVLTYVDDIIVKSTKQENHIADLQETFANFRQSGLKLNPEKCVFGVKKGKFLGCLVSTKGIEANLSKIEAILRMEPPNSKKGVQRLAGRLASLNRFISRSAERNLPFFEILRSAEVFQWGPAQQKAFEELKQYLIDLTTLTPPSSGTLLLLYVAASHSAVSATLVQEKQDGQVKRQAPIYFVSEVLSLSKKNYS

SEQ ID NO: 323763 - protein, 91 aa, Zea mays
  Clone ID: MRT4577_58341C.1.pep
MPGTNYLSSSNNKQQLQHARGQWEGNKHTATASRCTRSQKAKHQATHGESHCDDDGDGTGRGSYNRLIRTVLDLLVINLRLAMATRPNLSI

SEQ ID NO: 323764 - protein, 103 aa, Zea mays
  Clone ID: MRT4577_58343C.1.pep
VERLQEYRKRLILFPRRNGKTKQGDASAEDVKAAKSADNLVQSTAAALPIKNVAQFEEGPIGNYEATENAYKTLRAARCEARLVGVREKRAKAKAEEADSKKK

SEQ ID NO: 323765 - protein, 88 aa, Zea mays
  unsure (1)..(88): unsure at all Xaa locations
  Clone ID: MRT4577_58344C.1.pep
EQAPDRVPRVPAQAFNTSYKQYAGYLTFSEQRGAALFYWFFEAXKDPWSKPIVLWLNKGPGCSIIAFGLGEEDRPFHVNTNWKGVHVI

SEQ ID NO: 323766 - protein, 87 aa, Zea mays
  unsure (1)..(87): unsure at all Xaa locations
  Clone ID: MRT4577_58345C.1.pep
ELCSCFYDLPSHHLLHVSIFPEDYKIKRDQLIWRWIAEGFVCHANEXGPFELRESYFNELINRSMIQPVGIDGESIAKSYCAHNMMN

SEQ ID NO: 323767 - protein, 35 aa, Zea mays
  Clone ID: MRT4577_58346C.1.pep
FSGRERQPFIKVPLSICNLVSICAGFYYGFTPPWF

SEQ ID NO: 323768 - protein, 162 aa, Zea mays
  unsure (1)..(162): unsure at all Xaa locations
  Clone ID: MRT4577_58347C.1.pep
LAPNVMQRLLLPXTHQPLCGKAKLLLREGGRSYGCIGELGEVVPRIHDLKWHPDRCLLPPPPPLQSSKTVPNSQAAGAGGRDAPMPRNRDPVRARARVDHAALRSSRDPMRRRGCTPWPRGGGRAKKKATDTYLTLEPRRRRAPGRWPPFRRSPRSPCSAPL

SEQ ID NO: 323769 - protein, 95 aa, Zea mays
  unsure (1)..(95): unsure at all Xaa locations
  Clone ID: MRT4577_58348C.1.pep
ATRPRTLVKALILTHSLVGKTSLMNQYVNNKFINQYKATIGTDLLTKGVQIADRLFTLEIWDTDGQERVQSMGVAFYRRGDXRVLVYETYCMKRF

SEQ ID NO: 323770 - protein, 233 aa, Zea mays
  unsure (1)..(233): unsure at all Xaa locations
  Clone ID: MRT4577_58349C.1.pep
GPSRPAGGKNGLRSADTTWLPKATNPEREHQTAPKSQDPRPARRRPPMXSPSPATGRXPPTLSPAEGTPIRPSYPPPRRAPPLPXPGPSPSRPASPPPSPTSSSXPWPPQXILPRPPSAAPPXSPSPLPSPSTPTSPSLSPPAESPPPPTAADAVSPSDRPRPDHPPAQPPRRGKGGGFGPGLGLGFLAVSGVVASLALLVIWRKGVAGVTVASFSLYLLESVRSSSLPRRRP

SEQ ID NO: 323771 - protein, 49 aa, Zea mays
  Clone ID: MRT4577_5834C.1.pep
SWVCCAVEERRQRAARVDPAWSARRIGVGGWTWMRDGLRALNEVAGSSV

SEQ ID NO: 323772 - protein, 113 aa, Zea mays
  Clone ID: MRT4577_58350C.1.pep
MKHIDLMFWFQVLAFRDINPQAPTHILIIPKVKDGLTGLAKVEFTAHQLHCTCLNLYPHKPKHFIFIFISLAPIRRIHPAGQSLKHRVRDVRHTQQQLDVRVPRSRCRQGGAG

SEQ ID NO: 323773 - protein, 127 aa, Zea mays
  Clone ID: MRT4577_58351C.1.pep
MSAPASIPCGSKSVRGNDNGVDRLSSLSDDLLHHVMSFLPTPEVVRTSLLSPRWRNLWSSVPFIHINNKDFVVKNDVGTACFDNHKLENFVDHLLLLRDGTVSLDEVRVFITTRSSKKRSVRIRHAI

SEQ ID NO: 323774 - protein, 101 aa, Zea mays
  Clone ID: MRT4577_58352C.1.pep
GVLVGFFFFFFFFLKKRRFHFFIATLGFTGQKKVLKNSKKKSELVYVYSTGGCWGPCSYRHIPASPTRGCSDVTFTCKCNSTHLCEQEQSRTLHDQAEREN

SEQ ID NO: 323775 - protein, 91 aa, Zea mays
  Clone ID: MRT4577_58353C.1.pep
LNAVKNLLFMEPNLGMPTWGGGPLQKRFRLKLFNPNNPLSCGLPPKFGKFVKKTVISFKGCVGIAMWGLCDPMETLLSYWTLKTKNLGDCG

SEQ ID NO: 323776 - protein, 156 aa, Zea mays
  unsure (1)..(156): unsure at all Xaa locations
  Clone ID: MRT4577_58354C.1.pep
EQGISQWLLADVLLLSHASTAAHAAAVDWEXPLIPKAVPAXDDTXLELNAXEPHLLNFSTRFGKLXKDADDHTYRLSDFQGHTXAQRPRRXTLLHPSAEHGVTRISDLPPVXYRRTYLGLRKSRSALLRQLGESXHEAPVLPTDDLPDDFHCIDHG

SEQ ID NO: 323777 - protein, 133 aa, Zea mays
  unsure (1)..(133): unsure at all Xaa locations
  Clone ID: MRT4577_58355C.1.pep
TRPERVWHILXKIPRRATGAYGHRQGMTGLRDEIAGGTAARDGVHASVDNMFVTGGAGPAVLMMMQLLICAGSDGILCPITQCPLCSASVGLHGGSLGPYFLMEQTXWGXDVCGLVKPLGGACSLGLTGRLLG

SEQ ID NO: 323778 - protein, 128 aa, Zea mays
  unsure (1)..(128): unsure at all Xaa locations
  Clone ID: MRT4577_58356C.1.pep
MGVLLDALALLALAASATYTHTSGGXSCQPPPTVHLPPPVHMPPAVHLPPPVHLTSSVHLPTPVHLTPAVHVPPTVHVPTTPXHYPTKPPRPESHPQSHPCPCQQPHPSPCQLQETCGVGNTPILGQC

SEQ ID NO: 323779 - protein, 98 aa, Zea mays
  Clone ID: MRT4577_58357C.1.pep
SRCSSHRPVEPRSGNTSSSAGILELPARVCKWWLCPNSLPHPYLASAIHTYRVHARGATGDPQDPLTAKEARPRTDVCYLKWWPQPMEKASVYPGSLL

SEQ ID NO: 323780 - protein, 166 aa, Zea mays
  unsure (1)..(166): unsure at all Xaa locations
  Clone ID: MRT4577_58358C.1.pep
PLKPRGLLPPTPLVRAGGPPFIPPPMVPVPGAPTRPSRAQKGSGSRRRYENRGGRPGGHSGRRGAPKRGAPGPPKNANGAGGAHGPQRNPGRPPPPGRGAKKGGARNGDRGPAGTQGSPGPGXGKSGRAGKKPGHRGGPAGEPPPPPPQKKKKKKKKKKKKKKKKK

SEQ ID NO: 323781 - protein, 103 aa, Zea mays
  Clone ID: MRT4577_58359C.1.pep
LHGMVKKAKMVMTSTADTTTQALVFEFLHGFQDVLHDLGEIKENGGSATSPHVESAAAQDMPLLLLEAEQNIVDADQEAQHQEEEELHMVDDATMTLEPMDEE

SEQ ID NO: 323782 - protein, 58 aa, Zea mays
  Clone ID: MRT4577_5835C.1.pep
RRPTPLRRANPPPHGAAEPDPPDGADPAPGEHGGDGGASTNNGGGQRAMDLYEKLEKV

SEQ ID NO: 323783 - protein, 91 aa, Zea mays
  Clone ID: MRT4577_58360C.1.pep
SYSSDRQTHLYVPCTYQSNTKAARDTSSEPPLPPSICGKKVVISAPAATIKQNKKTSLPDAVQAAPNAALAAEKREKEKAKETPFEANLFT

SEQ ID NO: 323784 - protein, 156 aa, Zea mays
  Clone ID: MRT4577_58361C.1.pep
HVNLSAGQGQSSPTYHPARRVGPLLYPLPKPLGGRNVSHKGRGDLTCTTAGLCVHSAVLLYSSCTAPLRPCPWCRPWARRAWHWFGCYCTAQRDAPRTSTNARSPYLLSSPTPTPRCHGLAALAAMDGPIARRPEAERSTRYPTLLDSADGHVTVP

SEQ ID NO: 323785 - protein, 71 aa, Zea mays
  Clone ID: MRT4577_58362C.1.pep
ASNTLKNMLLPHPLFYILPELLKKTSTQHITAFMRWHQPGHRHPSPLSSICQLFPALAATGFYPAGDGRPG

SEQ ID NO: 323786 - protein, 93 aa, Zea mays
  unsure (1)..(93): unsure at all Xaa locations
  Clone ID: MRT4577_58363C.1.pep
FSCSYHELAEVDDGGCAEQQEDDADGDDRFGRXIGSVVFRVFLESEDVXEVVAVNDPFISTDYMTYMVNEQTVNGEGKHGDITLKDSKTLLLS

SEQ ID NO: 323787 - protein, 53 aa, Zea mays
  Clone ID: MRT4577_58364C.1.pep
MENFHVREKKKKKKKKKKKKKKKKKKKKKKKKKKKKKKKKKNKKKKENKKYEI

SEQ ID NO: 323788 - protein, 127 aa, Zea mays
  Clone ID: MRT4577_58365C.1.pep
RFLLPTMAPNGGTASAPRPSDSVYQMPTQSVLHEEGMMANYIGASYLGSSGGEIERRCMAGLRRWCCSGEQFAVSRAASTTGTSFHGPQVMSFECSARLKWWRTEDDLRHFALSSLNARQRGLCMAT

SEQ ID NO: 323789 - protein, 171 aa, Zea mays
  Clone ID: MRT4577_58366C.1.pep
GTTTHHTPTNQSTLLHTNFTPSTTNNHTTTTSKWTKQRQPSPSSWAGPATTTPLSTRQLPLLYTTRLSSPMYMRRSTLPLTRRSTKITTTALSSPSTTARSSQRHTLPSSEQSSTASSTTVTLMLPRGPSSKIRLALPTRGVLRTPPTARALLPPLAESTSTTTSMRPSNP

SEQ ID NO: 323790 - protein, 74 aa, Zea mays
  Clone ID: MRT4577_58367C.1.pep
DESVICVMHTSLFSGTVCIRQQVYSHQMYSRQAGCIRNVAMPMLVIPPTYLHVSTDPLKPLNLYTMCWLSQDAK

SEQ ID NO: 323791 - protein, 118 aa, Zea mays
  unsure (1)..(118): unsure at all Xaa locations
  Clone ID: MRT4577_58368C.1.pep
RKLPKSSARRLIDYGSAPYHHQDCILTVCTTHYCAIEXHLGTSXIYTCDIWSAACILVELCSCDTLHHTHDTLEQLALMDIGLGPLPLYMLERADQHAAKYVRIGGLNWPPAITTVES

SEQ ID NO: 323792 - protein, 84 aa, Zea mays
  Clone ID: MRT4577_58369C.1.pep
ITDEKAPKEGDFDNLVRRISQVDIETEIVFNCQMGRGRTTTGMVIATLVYLNRIGASGENKIYSGSCFCYLCASVICVDLTEKQ

SEQ ID NO: 323793 - protein, 68 aa, Zea mays
  Clone ID: MRT4577_5836C.1.pep
ANVLGLVKVGLPQHERCCTLQDGLVELDVALCLCTDIKDSVLGIELHMALSLHLILNDCGKICDDDFS

SEQ ID NO: 323794 - protein, 57 aa, Zea mays
  Clone ID: MRT4577_58370C.1.pep
MRPYAVGTGCMCVWRLKAGAVAGAASPELMVVPASGPARVDEAGKHAVMARTRLSGR

SEQ ID NO: 323795 - protein, 284 aa, Zea mays
  Clone ID: MRT4577_58371C.1.pep
MRGELSRFVLIISLFRGWSRRHTHTACLFLWTYSIFPWSPPFCFACRCAQGGRKTATMAKQQNPIPIPMPLSLSLPLVLVALLLPAARGAAETPQYTTVHAESDFEVRLYGDTVWMSAPTPDIPSFHVATKLGFHRLFQYLMGANLNSSRIRMTTPVLTSVVPGAGPLRSSAYSVRLYLPAKFQASPPVPLPELNLHPDRWPGHCVAARSFSGRARDKNVVEEAEKLAMSLSRSPWANSTDYSSKSAYSVAQYSSPFRIIGRVNEVWFDVNCRSTSTAAGVESY

SEQ ID NO: 323796 - protein, 93 aa, Zea mays
  Clone ID: MRT4577_58372C.1.pep
GDRSPVLWNQSRLRTTTSTPLEPALRQSYPSSRLIMSNDRHDTSRKTSPRSPIIDPNVILIMGRNNTGTPHKISTNTNSESNNRISRRRNGPS

SEQ ID NO: 323797 - protein, 278 aa, Zea mays
  unsure (1)..(278): unsure at all Xaa locations
  Clone ID: MRT4577_58373C.1.pep
HWVPRGRPGTVIVRNIPRVSSHSTSETVDEFFRRNHPDHYLGHQPVYNANRYAKLVKQKERLQNWLDYYELKFERHPERRPTRRTGCLGFCGREVDQIDYYRARISELERRMTSERQKILNDPKAVMPVSFVTFDSRWGAAVCAQTQQSKNPTQWLTDWAPEPRDVYWQNLAIPFFSLSIRRFLMSVAVFALVFFYMIPIAFVQSLANLEGLEKVAPFLKPVIEAHVVKSFLQGFLPGLALKIFLYILPTVLLIMSKXVEGYVSLSSLERRTASXYYY

SEQ ID NO: 323798 - protein, 82 aa, Zea mays
  Clone ID: MRT4577_58374C.1.pep
NPCHWGPGAKLTINTMVPGKKNPRGVDYPLGIFFNNQELGAPRIIFWQNNLGKRNLGWVRFPLFTEFDIKSHPLVKTNFIFF

SEQ ID NO: 323799 - protein, 98 aa, Zea mays
  Clone ID: MRT4577_58375C.1.pep
WAPGVFFAFLGSPIFFFAWRGFFLTPGAAGGPFSWPVGSPFKPPLPVPGTSGSACKPVGDFQAQKSHPPEDRRGVLDAKVNYHTLFFRKKKKKKTPQP

SEQ ID NO: 323800 - protein, 93 aa, Zea mays
  Clone ID: MRT4577_58376C.1.pep
HLNLFCDILASSAHQCTHILCVRSTTASGESRQNIIETAMCLEPATGQQLTQLQHSSSFSSAFSYITKKKEYEWEDASGEQRQWQFLFIGSCN

SEQ ID NO: 323801 - protein, 87 aa, Zea mays
  Clone ID: MRT4577_58377C.1.pep
RQHHYMTLGYAARHHGMHARCPEAGPLHKRRKSNATHARTHTDRSIQPKSNNQERSTERSGTYTCTGLIQFDGFSSLARLLLGALFT

SEQ ID NO: 323802 - protein, 94 aa, Zea mays
  unsure (1)..(94): unsure at all Xaa locations
  Clone ID: MRT4577_58378C.1.pep
PSFFFFFFPPPPPPQGRRHTXXPIAQTQKDGITXHPQGKKHRCQQNSKGHLPRPFGFLTQQFPTFNFPQQQKLMELTESKQKEGQKTAGNFQPL

SEQ ID NO: 323803 - protein, 59 aa, Zea mays
  Clone ID: MRT4577_58379C.1.pep
SVRTTTLIKRVSMPPRRLFPYGCFFCTCPSGQASILFHGAFVALSASGYQTAGHAHPVV

SEQ ID NO: 323804 - protein, 74 aa, Zea mays
  Clone ID: MRT4577_5837C.1.pep
KHPHNQTSSPCICQHQQQRGPRFQPQWSAKSIPSVVGNQICKFCTAVSHLIMKACCTKFWKSLGVHNSNIIIKI

SEQ ID NO: 323805 - protein, 154 aa, Zea mays
  Clone ID: MRT4577_58380C.1.pep
MAPDTETTLAIRDDEPAAAEVDRSMATDTESPTPTPVPTLAIRDEEEPAAAAGAGAGAQVLEERSVAVILQELLQPRDRRVQASAFFFACGGSVVLHGTVANLADNPEHVLLGFGLFTVGAALAFLTLSGSDRLGRAAARVEEKLRGLFRSPAG

SEQ ID NO: 323806 - protein, 81 aa, Zea mays
  unsure (1)..(81): unsure at all Xaa locations
  Clone ID: MRT4577_58381C.1.pep
YDNAVALPXAEGRGDEEELLKENIKNAAASTGNITLSVTKSNPETGEVIGVFESVQPSDTDLGAKAPKDVKIQGIWYAQLE

SEQ ID NO: 323807 - protein, 102 aa, Zea mays
  unsure (1)..(102): unsure at all Xaa locations
  Clone ID: MRT4577_58382C.1.pep
MMGDPTNAITNQGKYXYYSMRHTLFEIDTTYGPIXSIGPRPYGIIXSSINRETPDKAPISKIHYVSRLPAVVMSLSTLREVKLIRHIRHENAIALNDIMMTI

SEQ ID NO: 323808 - protein, 103 aa, Zea mays
  Clone ID: MRT4577_58383C.1.pep
ISPFRKLWGQKGGRGVWFFKIGDPGLRGFFLVWNFFFLGVGGGPFNFFSKKSPPPLFLKTRGVKVFSKKKKKKKKKKKKKKKKKKKKKKKKKKKKKKKKKKKK

SEQ ID NO: 323809 - protein, 108 aa, Zea mays
  unsure (1)..(108): unsure at all Xaa locations
  Clone ID: MRT4577_58384C.1.pep
DCFLNNNGSITNWKSPPIFARNELCSMIARLDLPLGIGESQVWEDYIASAQNXXRXXKVSRQTTTRDLLKLFTERRNVLINSVLPDTXWVALTXDIWSRHAKEDYISV

SEQ ID NO: 323810 - protein, 65 aa, Zea mays
  Clone ID: MRT4577_58385C.1.pep
RVGIVFYAPPLFCPKKWGVWGIRVLVGPPTKRRVINLCSLVLGLGKPVVKWVPTCKKNVCLNVQE

SEQ ID NO: 323811 - protein, 74 aa, Zea mays
  Clone ID: MRT4577_58386C.1.pep
SFVLHLPLPSLHYRRAAVTLIPTLPPYHIISPTYSTFTTSSPSFFPLTSSSKSFYLPLPTLYTSTTNITYTTNL

SEQ ID NO: 323812 - protein, 127 aa, Zea mays
  Clone ID: MRT4577_58387C.1.pep
MAIAWTNELKSCSGVEQHILLAQAGQYEHLTPICANNTTSGLVNIYLHRMGRQKNAAHLARVMSPGHRLQSRPKPEIPPDPPPEHQQDRQDQADINVQYTSAELLGEGVCVLLVLACTTSDDADFTA

SEQ ID NO: 323813 - protein, 62 aa, Zea mays
  unsure (1)..(62): unsure at all Xaa locations
  Clone ID: MRT4577_58388C.1.pep
AQKVNIYVKFVKKKQQERMADIEKVIKGREDRAIEKAQHEXEMTLLARERARAXFQDWEKKE

SEQ ID NO: 323814 - protein, 81 aa, Zea mays
  Clone ID: MRT4577_58389C.1.pep
WACTRLHRLRAGCICITNQGVSIQQPNAWSNYRHGAMACLEACDRLQATLGANVNVLAYPHSLRGGCTVDDAIHVHGDTLA

SEQ ID NO: 323815 - protein, 308 aa, Zea mays
  Clone ID: MRT4577_5838C.1.pep
MQEELNNFKRNEVCSLVPRLKQNVAGTKWVFHNKQDEYGVVTRNKARLVAKGYTQFIGLDFEETFAHVARLESIHILLAYAAHHYFKLYQMDVKSAFLNGPIKEGVYVEQPPRDFLISNAFKVEKADLTLFTNTCNVKQLKEGTFISQTKCTQDILKKFRMKDTKLAKTPMGTYEHLDLNTGGKSVDQKVYRSMIGSLLYLCASRPDIMLCVFICARFQSDPNEYHFVDVKRILRYLVHTPYIGLLYPKGSTSDLIGYSDSDYARSKVDRNSTSDTCQFLGTSLVTWSSKKQTSVALSIVEAEYVATN

SEQ ID NO: 323816 - protein, 160 aa, Zea mays
  Clone ID: MRT4577_58390C.1.pep
MGKIKMGINGLEGIGRLGARVPLQSEDVKLVPANNPLLTRAYLTYLFKYNPAHGLWRHSDFTLRDSKTFFLGDKPATVFGIRNPGEIPGGEAGPDYIGEPTGVFIDKDRVAAHLKGGAKKVVISAPSKNPPMFVVGVNEDKSTWDVNIVSNVSRPTNCLA

SEQ ID NO: 323817 - protein, 76 aa, Zea mays
  Clone ID: MRT4577_58391C.1.pep
WGSAPPRRPTRARQGGPRRRSCPWLDLPSFSSSSRGASSSRPSRPRGGQLLVWGQAKPCSFVFPLVSSKSTSHGLC

SEQ ID NO: 323818 - protein, 164 aa, Zea mays
  unsure (1)..(164): unsure at all Xaa locations
  Clone ID: MRT4577_58392C.1.pep
RTRGRTRGSGFLGYRVRQXSEFSNESVVCEKMSEAKIREEFPDEATKHEADPYHHRYPRAESYHDLAVRMEPIILELEREENDLLIIAHESVLRVLYRYLMACNXADIPKLEFPRDEIIESIPSSYNNVAXRIKIPDLPESMVPGSPEDIKIPVPPSGAVSPLS

SEQ ID NO: 323819 - protein, 85 aa, Zea mays
  Clone ID: MRT4577_58393C.1.pep
QHGCGPAGALSLGRGHARAPHDGGCSACEGHGEGLIGHRGGGTSPTEWGPAAPGLVSCVERDAKGGNKDLAPRIQRRRFSVIMSP

SEQ ID NO: 323820 - protein, 91 aa, Zea mays
  Clone ID: MRT4577_58394C.1.pep
QYKPLTFKGKGSLFYGQKTPHAFFFFFFHKLILERIGSIFYTGSWAGRSNLQTVFLPYFLKMDSLSPTFKNSNHLRGGKSSKMLALLGPKD

SEQ ID NO: 323821 - protein, 503 aa, Zea mays
  Clone ID: MRT4577_58395C.1.pep
MGWLSKIFKGPVNRVSRGHYNGNSHEGYSTQHTKSYGVHGNEDEDMDHAIALSLSEEDQRKGKAIDTGHHLDEDEQIAQALQENIGHNLAEDEQLARALQESMNDGPPRQHIPVEDVNSESTPASILPSNIFGPSGLRVCAGCRSPIGRGRFLSCMDSVWHPECFRCYACDRPISEYEFAVHENHAYHRPCYKERFHPKCDVCSSFIPTDKNGLIEYRAHPFWMQKYCPSHENDGTPRCCSCERMEPKDSQYITLDDGRRLCLECLHTAIMETNECQPLYIDIQEFYEGMNMKVEQQVPLLLVERQALNEAMEAEKSVHHLPETRGLCLSEEQIVRTILKGPIGPGNRIIDMVTGPYKLIRRCEVTAILILYGLPRLLTGSILAHEMMHAYLRLKGYRTLSPEVEEGICQVLAHLWLESEITSGSGSMSTTSDASSSSSTSSSSKKGAKTEFEKRLGEFFKYQIETDSSVAYGDGFRAGMRAIERYGLRSTLDHIKMTGSFPC

SEQ ID NO: 323822 - protein, 142 aa, Zea mays
  unsure (1)..(142): unsure at all Xaa locations
  Clone ID: MRT4577_58396C.1.pep
MGWVESQVVWNKHNDSGGGAECTSLDGGGHNNAMQFKXMSTAMFSVSYRENYYQNSIAAQDFSELAYLNDIXVSAPPCRLENTECGSARAYIMTLSALAADRCARYGYTMLPNTVXNLCAKHHISEIYLHAQLLHDDAIAFY

SEQ ID NO: 323823 - protein, 205 aa, Zea mays
  unsure (1)..(205): unsure at all Xaa locations
  Clone ID: MRT4577_58397C.1.pep
PRLVVGAASRAPPPAPRSQRRRIPRPCGGAHCSPSARAAPPVLLTRCSSYSSSREGNGDSHGKARRESSSAVRLDVEADSDQVPSLADEQRGEGDVTELFNLAQRNILYINKQRLIAMEEMKKLQDENNLLLEEIQGLETEMQGIPLEAAQWSSFSELLLRIDTMVISGMISMTEASDLREKLVTNRSIIXSTFSDIHHKPNTEL

SEQ ID NO: 323824 - protein, 82 aa, Zea mays
  Clone ID: MRT4577_58398C.1.pep
QEQARRKATLTATTHAMKPHLTCPTWEEEASALGPGRRNEGCARRERKTTTAAGYVWGVAGGVAMGANGALGLKFQSRLGGG

SEQ ID NO: 323825 - protein, 133 aa, Zea mays
  unsure (1)..(133): unsure at all Xaa locations
  Clone ID: MRT4577_58399C.1.pep
MSWLVXVDEXHLMXXEIEGQHLXPFFIVGHDGXAWAQSESFPLLKPEEVAGFIKDFDEPGSLAPTGLFVGGPXFMVIQGEPXVVFRGKKGSGGISIMKTGLSLIIGVCDEPMTSGLCILVVERLGGFLFERGF

SEQ ID NO: 323826 - protein, 137 aa, Zea mays
  Clone ID: MRT4577_5839C.1.pep
RLFQYFLKPCTIMFDKNDKVLRCTLESLKSFVTGGDHLLSSVSTLNYPGELSCRVCAVTTILIFLCNDRKLHRNLSLGKSVIKGILEYIRHQLDSSVPDVTHVGKQKLKSAFEQLKTKALQLNCWDRSELEGLSSAT

SEQ ID NO: 323827 - protein, 112 aa, Zea mays
  unsure (1)..(112): unsure at all Xaa locations
  Clone ID: MRT4577_583C.1.pep
MYSRAHKNPIDTMRVLLVALALLALAASATSTHTTSGCCCQPPPPSHIPAAVHLPPTAHLPPPLHLPPTVHLLSPVXLPPPVHVPAPVHLSPSPCLYPTXPTGPQPHPQPHP

SEQ ID NO: 323828 - protein, 233 aa, Zea mays
  unsure (1)..(233): unsure at all Xaa locations
  Clone ID: MRT4577_58400C.1.pep
MATRIXTLLELLALLESGTNACIIPQRSLAPSAIIPQLLPPGTSMDFKHPGGLAYRLLLALAASAXRQPIAQLRQQLLGXVTLQTIAXQQQQHXLTSLSHLAXANPVGYLQQQLIASDPLALANVATYQPQQQLRQIMPALTQLAMVNPGVYLQLISSRPLAASNAPTDLHQQLLQDIVPALTHQLDMXNPATYLQQMLPFNQLVVSNSDAHLRQRLQLLNPLTVANPLDATF

SEQ ID NO: 323829 - protein, 71 aa, Zea mays
  unsure (1)..(71): unsure at all Xaa locations
  Clone ID: MRT4577_58401C.1.pep
MNRPFTVQELVRFAVYEHNLKANALLGFEKLVKAXKTQVGAGTMYYLSLEVKDGEAKKLYEVNVWEKPWEN

SEQ ID NO: 323830 - protein, 110 aa, Zea mays
  Clone ID: MRT4577_58402C.1.pep
TLGLLFPSDLHSGRPTDRESLGCHAVCVMNQGRPPLIKKSRHLPSGCYDRAPRPLNLSLKRIKRVTMSSAWCKTLPRPSLGSRASEATPPPGPASRLRQGLRYFPDRASG

SEQ ID NO: 323831 - protein, 524 aa, Zea mays
  Clone ID: MRT4577_58403C.1.pep
MEPSPAAGELGAMLRAAADFASYPGLHSDDTVRQFLERCPLPKLLGALQSEADVPGMVETVTECLDKIFSSRYGASLLPNYGAFIQAGLLTDSKQIRKLACKAVLHLLDKAEDGAAAVETVVQHNLYPLLIKCLIEGDEEISAIVLDTVKRLAQIPKGAEVIFPPDGQGSVQLGKVAAQSSSLARIRILSLMAKIFTKKSKTATAIRDSNLLSIFEEEIKDRRDMLKTLSALEVLYELVEHPHSNIFLLKTNLLQLIIDIINDSSADSVIRSRAASVSGRLLSSADAFTAIDKSCVTNLLVAIDRILKMEESKNTDEIESALETLGLIGTTSQGAHFLLTSSNVARHVVESSFDRQGRGRQLAALHAFGNICGVGRQEDQMKLDSEAEENLKRLVYTTAANSPKLTPSALLLSVLQQDPDVRIAGYRVITGLVIREWCLREVCLNSEIIRFVTDPTMETTKLGMETRYGCCVAINKALSSSHLLHEASLSELVGKLNDAVKRGPYLSDRKRVEARPVVDTAERF

SEQ ID NO: 323832 - protein, 39 aa, Zea mays
  Clone ID: MRT4577_58404C.1.pep
NRLCYQHKAFVVQRKVGIGHVAIPSQFLPQKNLRGWSGA

SEQ ID NO: 323833 - protein, 283 aa, Zea mays
  Clone ID: MRT4577_58405C.1.pep
MVVAAMRDEGEEGRRRAVVAIRDYDPKTDRDGTEAVERECEVGPAAAAGGMSLHADLLGDPVARIRHSPHYLMLVAETSGPDGRIVALVRGTVKSVASGKSRPGAPAFARVGYILGLRVAPSHRRMGIARQLVHRLEQWFELMGAEYAYMATDRSNEASLRLFTGRCGYSKFRTPSLLVHPVHSHRLRAPRRATVVRLGARDAERLYRSRLAHVEFFPADIGAVLGNALSRGTFLATVGGYEWGGVDRFLACPPASWAVASAWDCGGVFRLQVRGASRLRRAA

SEQ ID NO: 323834 - protein, 520 aa, Zea mays
  Clone ID: MRT4577_58406C.1.pep
FGTRVLLTGTPLQNNIGEMYNLLNFLQPTSFPSLSSFEEKFNDLTTAEKVEELKKLVAPHMLRRLKKDAMQNIPPKIERMVPVELTSIQAEYYRAMLTKNYQVLRNIGKGGAHQSLLNIVMQLRKVCNHPYLIPGTEPESGSPEFLHEMRIKASAKLTLLHSMLKILHKEGHRVLIFSQMTKLLDILEDYLTLEFGPKTFERVDGSVSVAERQAAIARFNQDKTRFVFLLSTRSCGLGINLATADTVIIYDSDFNPHADIQAMNRAHRIGQSNRLLVYRLVVRASVEERILQLAKKKLMLDQLFVNKSESQKEVEDIIRWGTEELFGSSDSVDGKDSSEAPGSVADVEFKHRRKTGGLGDVYEDKCIGGSTKLVWDENAILKLLDRSNLPSSVAESTDGDLDNDMLGTVKSIDWNDELNDHPGTNEDIAPIDNDGSELASESKQGATNRLEENEWDKLLRVRWEQYQIEEEASLGRGKRLRKAVSYRETFATLPNEALSEGSDEGDEPKREYTAAGLVLK

SEQ ID NO: 323835 - protein, 111 aa, Zea mays
  unsure (1)..(111): unsure at all Xaa locations
  Clone ID: MRT4577_58407C.1.pep
GTNNGNTNKFSCLMLLGLCASAVPVTILPQWSQASIAALLPPYLXQRRHAVCQNXILQPYRIQQAKAAWLRTLXSPSFLQHPPYLFHHPPWMHMSTQNMQTHYLQRLVLQN

SEQ ID NO: 323836 - protein, 109 aa, Zea mays
  Clone ID: MRT4577_58408C.1.pep
LASSPAPSNYPYVRTCASDGGDGILSQAGNGAGLAWFAYTAAVLSAASLVPLLQGESAEGRSGRFMTADAELWNGRLAMLGLVALAVTEYLIGAFLPHPRIHTSRNVQL

SEQ ID NO: 323837 - protein, 187 aa, Zea mays
  unsure (1)..(187): unsure at all Xaa locations
  Clone ID: MRT4577_58409C.1.pep
MATTVMASATASSPAFSAPGARARRAARLPAGFRGRVAAXRRAASRCSPGPPSRPMTLPPTRARAXAPAARKLGLWDALAFSGPAPERINGRLAMVGFVSALAVEATRGDGILSQAGNGAGLAWFAYTAAVLSAASLVPLLQGESAEGRSGRFMTADAELWNGRLAMLGLVALAVTEYLTGAPFVNV

SEQ ID NO: 323838 - protein, 104 aa, Zea mays
  Clone ID: MRT4577_5840C.1.pep
TAWIRCSYRGRCEQHPTATAMGTPRGGVSCLCRPCNCPACGLPTCLWSMLLSLRVLMRVLSTHRRGYHRSEYSFGHRGLGLGLPLHAFRVFDFLLLSQGVQDCV

SEQ ID NO: 323839 - protein, 187 aa, Zea mays
  unsure (1)..(187): unsure at all Xaa locations
  Clone ID: MRT4577_58410C.1.pep
MATTVMASASSLAFCAPGARARRAAQIPAGFRGGVAXRRAASRRCSSGPPSRPMTLPPTRARAXAPAAAPKKLGFWDALAFSGPAPERINGRLAMVGFVSALAVEATRGDGILSQAGNGAGLAWFAYTAVVLSAASLAPVLQGESAESRSGGFMTADAELWNGRLAMLGLVALAVTEYLTGAPFVNV

SEQ ID NO: 323840 - protein, 201 aa, Zea mays
  Clone ID: MRT4577_58411C.1.pep
HQAERTNYHLTTIAANLLTLLALAALPVSAPNACIIPHRSLAPSAILPQTLPPVTSMGWQHPPVQASLQHPALAGSVRQQPTAQSQQQSLPHLTIHAITTHQPQQSLPSMTHLTMVNPAVYLQEQVLACNPLALANVLANQPQPQLQQSLPTLTQLTMENHACYVQQQQLISSIPLAVGNAPTYLHQQSVQQTVPALTQLA

SEQ ID NO: 323841 - protein, 38 aa, Zea mays
  Clone ID: MRT4577_58412C.1.pep
RPLLPHLPVKLLMDPPNALRIASVLMPHCSLAKPGTWN

SEQ ID NO: 323842 - protein, 76 aa, Zea mays
  Clone ID: MRT4577_58413C.1.pep
MADSTAMTVDFLRARLLSERSVSRAAKERADELAKRVAELEEQVRAVTAQRRQAEWATAEVLAVLESQGFGDHLSM

SEQ ID NO: 323843 - protein, 104 aa, Zea mays
  unsure (1)..(104): unsure at all Xaa locations
  Clone ID: MRT4577_58414C.1.pep
RXXRAGHTLPNPSPKSYKPFLPFPNCPPVLSFIPNMRCHFTINLNLKVLLPYPIICQKNCLFPIFILLILLNAPNSIILSPFSIYTFLFIFLKIFSIIHLFIFL

SEQ ID NO: 323844 - protein, 175 aa, Zea mays
  Clone ID: MRT4577_58415C.1.pep
MVQIIEHRDLSPEDFLMEEGEASSMPRGSNRLAPGAAAMHAVRQHTPAQTSRTLSRAAPGGALSAVRELLRNPPSSTASPGAMRQWREDVDRLLGMAHPSSARSKPRSFWRQRKASTSVRSPSVRGAQTDDLWAELNHRRAGEDARISLERVRERRQNFEGRNLDQDFTARDARI

SEQ ID NO: 323845 - protein, 60 aa, Zea mays
  Clone ID: MRT4577_58416C.1.pep
HAVSSRLCLPEARLLGITPGCGESKGTLQNSGLLRSLTCYSFYNAVCYDRSRPILIMYDW

SEQ ID NO: 323846 - protein, 145 aa, Zea mays
  unsure (1)..(145): unsure at all Xaa locations
  Clone ID: MRT4577_58417C.1.pep
MALRLILGFDYGTKQIGVAVGQVITGQARELCTLKAQNGVPDWNQVEALIKEWKPDAVVVGLPLNMDGTPSDMCLRAEKFARRLNGRYNLPFYTHDERLTXFEAKGERRDRGGQKGSYRDNPVDAIAAALLLQGWLDENTALFES

SEQ ID NO: 323847 - protein, 91 aa, Zea mays
  unsure (1)..(91): unsure at all Xaa locations
  Clone ID: MRT4577_58418C.1.pep
MPPSSLLPASEFHSPPPPPPPPPPPLPPPPSFATFSLSSLLPXFSHFSLHIPPRPPPPPPPPPPPPPLFFFFPPPPXXPLSSSPPPPPIPP

SEQ ID NO: 323848 - protein, 85 aa, Zea mays
  Clone ID: MRT4577_58419C.1.pep
CLPCVTFSLIPGGPKNKRGWTPALSLRHQGTSPGQTFKNAPFFEKTGCSRTKKKPSFWGQKHWADKTRKQLSGTQLVSRFCPPLP

SEQ ID NO: 323849 - protein, 194 aa, Zea mays
  unsure (1)..(194): unsure at all Xaa locations
  Clone ID: MRT4577_5841C.1.pep
LIALRIADGDEXPAMPEIMAAMEKAKSSITNSLSKKPQLLREVLDCYEKRWDGQMEQKIYGAALFLNPSKFFTLREKDRRSAARLRSMFNDVLWKMVVDEDEQSKISKQADDYERSEGDTFSKPGAIRDRDKKNPINWWGSYGGNTFELQCLAKKIVSLCCSASGCERSWSAFANVHTKKRNRLEHKRLDKLGY

SEQ ID NO: 323850 - protein, 84 aa, Zea mays
  Clone ID: MRT4577_58420C.1.pep
PRVRSSSPALGFSIRPQWRSGAGGAAGTVMLGGKGSALSPGGVYAFSLGLAAPGIDPSAHKSVSTRAPWPKETPARVGAALLAL

SEQ ID NO: 323851 - protein, 38 aa, Zea mays
  Clone ID: MRT4577_58421C.1.pep
KPSELTAAQRQLLSPNVLCQDQLPKILHATDLESLAQC

SEQ ID NO: 323852 - protein, 114 aa, Zea mays
  Clone ID: MRT4577_58422C.1.pep
MEDYYYLTSWGTTGSVEPTGFPAHTVPRNHSSASPRTRRASRGDADAGERLHHYYLDACFRCGRHLGGNKDIFMYRGDTPFCSDECRQQQIEDDEAREKKRSRQHAATATATAT

SEQ ID NO: 323853 - protein, 40 aa, Zea mays
  Clone ID: MRT4577_58423C.1.pep
LYFLIIYSLLNLRKLDPHEYYDEVDLNTSVLHRKPGKIRA

SEQ ID NO: 323854 - protein, 55 aa, Zea mays
  Clone ID: MRT4577_58424C.1.pep
SSPSLDSLIRSPEFPAGAWSLNVTPAVLVPYRAPSWPPPLGGELRWVSELLLSDL

SEQ ID NO: 323855 - protein, 75 aa, Zea mays
  Clone ID: MRT4577_58425C.1.pep
GASSTPEAQPVAFKATKQKKKESTPSRTPIDASKLDNKEMALIIKSFRQILKQRRGKGFNAPLQDKYAAECGRTR

SEQ ID NO: 323856 - protein, 50 aa, Zea mays
  Clone ID: MRT4577_58426C.1.pep
RCCSTRSWPSRSRSRSPWSPRRHDGSPYPTNPQCMTDLIDLLIASRPHTT

SEQ ID NO: 323857 - protein, 134 aa, Zea mays
  unsure (1)..(134): unsure at all Xaa locations
  Clone ID: MRT4577_58427C.1.pep
KPRVNNWGPPGFPKEPGGGPQKKRGPKKPPQTFPKGLKTLTQNGPKTPVSPKKGQKKSRGPPLXGKLEGPPKIPFNQSFGPPIKKEWPHRGNPALAPPPGFGFGTGPGGPSKGQIPPPGGXGTRGPGPGPTLGE

SEQ ID NO: 323858 - protein, 245 aa, Zea mays
  Clone ID: MRT4577_58428C.1.pep
MGRGRGKVEVRRIENSVSRQVTFSKRRRGLAKKARELAVLCDADVALLVFSDKGRLHDFAAHGSMERILGRYERYLLCEDRDDVTQDYPEESQGNMSYDHIKLRSKLEAIKKSQRNLMGEQLESLTFREVQQLEHRIDSALRNVRSRKDHILLNSIQELRNKETFLMEQNGILEKEKAAVGASSSLHTTTSTAAASSTAAAAAALPNLNICPDDSDEPGMAAAAGIRLPWWMLQPSAVSQRQEQH

SEQ ID NO: 323859 - protein, 141 aa, Zea mays
  Clone ID: MRT4577_58429C.1.pep
MGHEGTKYGEDGRPTCDCLLFDLDDTLYPVASGIGLDVMKNIQEYMVEKLGIDKSVSHELCILLYKQYGTTMAGLRAVGYQFDYDDFHGFVHGRLAYEKLKPDPVLRNILLSLPIRKLVFTNGDRLHASRAMKRLGIEDCF

SEQ ID NO: 323860 - protein, 113 aa, Zea mays
  Clone ID: MRT4577_5842C.1.pep
ISTSADSERTLDVMPILARPRLVSAISGPDQLGNSSHLWTVEETNMMDQENNETCLGNHSDQVACGLMMGTYSGCSSLRPDKGHIASCWRREKARLFDEELEHGDDFNRHSGS

SEQ ID NO: 323861 - protein, 42 aa, Zea mays
  Clone ID: MRT4577_58430C.1.pep
MGSPSSLPAAAALVLLALLAGAQCREAQFDAADAGAENFNTS

SEQ ID NO: 323862 - protein, 129 aa, Zea mays
  Clone ID: MRT4577_58431C.1.pep
HTLPPPAARVHAKAGRVPCEFPGLKIGFHVEEYSNPVYFAVLVEYEDGDGDVVQVDLMESKTARGPPTGRWTPMRESWGSVWRMDTNHRMQPPFSIRIRNESGKTLVANNVIPANWRPNTFYRSFVQYS

SEQ ID NO: 323863 - protein, 65 aa, Zea mays
  Clone ID: MRT4577_58432C.1.pep
LCANKFKSYLSYTLAAFRPILGHSVLNSLFRVMDWQLPWTGLLHRSKVGRGILDAAIGDLCRVGL

SEQ ID NO: 323864 - protein, 90 aa, Zea mays
  Clone ID: MRT4577_58433C.1.pep
SSGNNAEYAGSPVTVPLQLYRDHGPGSCCIRGALFRSGVVCDVCGVRLACHAVRDPDCEPASKKTKKLKPCGKMEEAGVQATLSRPLLLL

SEQ ID NO: 323865 - protein, 98 aa, Zea mays
  Clone ID: MRT4577_58434C.1.pep
WSPEARGAIGSNSARGCPVATSRAQDRDLGSPAPHLWPGNGIPARGEHPPSEGERRRDGAGGRREGPADWPPAHAAAEPRMRPGAQKQEGKQRASAES

SEQ ID NO: 323866 - protein, 183 aa, Zea mays
  Clone ID: MRT4577_58435C.1.pep
HASALVLLLALLAGGQCREGQLDAADAGTGTENYTASDAAVYWGPWQRARATWYGQPNGAGPDDNGGACGFKHTNQYPFMSMGSCGNQPLFKDGKGSCGSCYKIRCRKDPSCSGRTETVIITDMNYYPVSKYHFDLSGTAFGRLAKPGLNDKLRHSGIIDIEFTRSVVCVLLNFVARQVKVWW

SEQ ID NO: 323867 - protein, 375 aa, Zea mays
  unsure (1)..(375): unsure at all Xaa locations
  Clone ID: MRT4577_58436C.1.pep
MRQGMGSPSATAAALVLLLALLAGGHCREAQLDAAAGTENYTASDAAVYWGPWQRARATWYGQPNGAGPDDNGXPAFPRPLLPLCLLPSPSRPACLGALWAAMWLTGRVVCALGGACGFKHTNQYPFMSMGSCGNQPLFKDGKGCGSCYKIRCRKDPSCSGRTETVIITDMNYYPVSKYHFDLSGTAFGRLAKPGLNDKLRHSGIIDIEFTRVPCEFPGLKIGFHVEEYSSPVYFXVLVEYEDGDGDVVQVDLMESKTARGPPTGRWAPMRESWGSIWRMDTNHRMQPPFSIRIRNESGKTLVARNVIPANWRPNTFYRSFVQYSKLAGLRPRAARSPPPTTYYHHHPLDYCFCYQSTTAERNGWLPPPPSSWKG

SEQ ID NO: 323868 - protein, 346 aa, Zea mays
  unsure (1)..(346): unsure at all Xaa locations
  Clone ID: MRT4577_58437C.1.pep
KKKKKKKLKKKKKKKKKKKKKKKKKKKPARTHSQSPPLPSAHCSPLEESERERGERAKEAQAGMGSPSSLPAAAALVLLALLAGAQCREAQFDAADAGAENFNTSEAAVYWGPWQKARATWYGQPNGAGPDDNGGACGFKHTNQYPFMSMGSCGNQPLFKDGKGCGSCYKIRCRKDPSCSGRTETVIITDMNYYPVSKYHFDLSGTAFGRLAKSGLNDKLRHSGIIDIEFXTRVPCEFPGLKIGFHVEEYSSPVYFAVLVEYEDGDGDVVQVDLMESKTARGPPTGRWAPMRESWGSIWRMDTNHRMQPPFSIRIRNESGKTLVARNVIPANWRPNTFYRSFVQYS

SEQ ID NO: 323869 - protein, 39 aa, Zea mays
  Clone ID: MRT4577_58438C.1.pep
SALAAKRLYPRVARSINQLDIQGFSAGEWSVSDGQLRLV

SEQ ID NO: 323870 - protein, 243 aa, Zea mays
  Clone ID: MRT4577_58439C.1.pep
IRHEAAVYWGPWQKARATWYGQPNGAGPDDNGGACGFKHTNQYPFMSMGSCGNQPLFKDGKGCGSCYKIRCRKDPSCSGRTETVIITDMNYYPVSKYHFDLSGTAFGRLAKSGLNDKLRHSGIIDIEFTRVPCEFPGLKIGFHVEEYSSPVYFAVLVEYEDGDGDVVQVDLMESKTARGPPTGRWAPMRESWGSVWRMDTNHRMQPPFSIRIRNESGKTLVARNVIPANWRPNTFYRSFVQYS

SEQ ID NO: 323871 - protein, 93 aa, Zea mays
  Clone ID: MRT4577_5843C.1.pep
LFGSRVPVVSPWFGPPWGWVGPVVACYVRAASSDGLLPVFLWPVVGRVLPPPPGLCPCHVPGLCFVNLSPQAPAPLCGCAGRGCLPSSSRSPR

SEQ ID NO: 323872 - protein, 82 aa, Zea mays
  Clone ID: MRT4577_58440C.1.pep
KEEGTIPAQTPIQQQKTYTSTTNPTNTKNPRPAPVTRTGNPKNKKMFSNKTSPYKPRYIYSMLNSFTEPLEQPNKNSNSNIR

SEQ ID NO: 323873 - protein, 46 aa, Zea mays
  Clone ID: MRT4577_58441C.1.pep
FISTHGNHTVSCRASNHSRLCTLQWVRCLINTSFLNTCLISYTTHN

SEQ ID NO: 323874 - protein, 52 aa, Zea mays
  Clone ID: MRT4577_58442C.1.pep
LTNHIEGGDLYKHKICLARRTKSRRAVWTRVKKCPCSIRHMRHVMASRGELN

SEQ ID NO: 323875 - protein, 64 aa, Zea mays
  Clone ID: MRT4577_58443C.1.pep
DFQYQRRSTPTLLPSRAMAHTVVLKVGMSCDGCVGAVKRVLGKIEGVESYDVDIMANNVTVHGN

SEQ ID NO: 323876 - protein, 97 aa, Zea mays
  Clone ID: MRT4577_58444C.1.pep
VLFFRSKTPLWVFLSGRQSPPPCDWVLNSRGVVSGILFFGAANSFLGFYSTFFPSPLNLTPRFKDNKKSFLLGGKISWAGGHVLKKNFCGPSAGLLI

SEQ ID NO: 323877 - protein, 207 aa, Zea mays
  Clone ID: MRT4577_58445C.1.pep
MISSSKLKSVDFYRKIPRDLTEASLSGAGLSIFAALAMVFLFGMELSSYLAVNTTTSVIVDRSSDGEFLRIDFNLSFPALSCEFASVDVSDVLGTNRLNITKTVRKFSIDRNLVPTGSEFHAGPIPTVNKHGDDVEEYHGDGSVALSSRNFDSYSHLYPVLVVNFYAPWCYWSNRLKPSWEKAAQIIRERYDPEMDGRILLGKVDCT

SEQ ID NO: 323878 - protein, 51 aa, Zea mays
  Clone ID: MRT4577_58446C.1.pep
TINISYVGVSPCHLFPQRETSSSAEESVGHAWGRIPARRRRGSPGLPPPWV

SEQ ID NO: 323879 - protein, 347 aa, Zea mays
  Clone ID: MRT4577_58447C.1.pep
MDAYEATKVVFSRIQALDPDHAAKIMGLLLIQDHGEKEMIRLAFGPESLLHAVMAKARKDLGLLLPASPTSVAAAGHAPFLQLPRQNSGRAGAPSPLSVSSPSSWGHAPVFSRSNSTSNGTGTAEEAAGAGEELPSPVNGGAAPFFPRQAGDALLDDLQLQEQLAFLNEGGGNPAHQLLGFDGGECRSPGPGDADGMFAFGLGWHNGGPAHRRSSSVNELCLGGGGGGGDGFGWKPCLYYARGFCKNGGSCRFVHGGLSDDAAALAGAKMEAAADQQQQCQDFLIRSKGQRLGPAAFPYSPTGSLPGSPSAASKCLSFLLQQQQQQHDRAAAAASLMWAAATRRQVH

SEQ ID NO: 323880 - protein, 55 aa, Zea mays
  Clone ID: MRT4577_58448C.1.pep
TVANAAAVLDSSDGVKGTIYFTQEGDGTTGGTGSSSVLKPGMHGSHVHALSDTTD

SEQ ID NO: 323881 - protein, 112 aa, Zea mays
  Clone ID: MRT4577_58449C.1.pep
LGARCWREQGARVAEREGKLGKVQEELKKLREQLVSTKPAKKDAQVAPGAAHVRRGHQEGRAGRAARHERAGRDAHRFLLGRARHRRHAAHSRSRRPHVCRLELQWRRRRRR

SEQ ID NO: 323882 - protein, 70 aa, Zea mays
  Clone ID: MRT4577_5844C.1.pep
HNSHEIFISYIVCHICLKKHTGHCHPLFARDVLLHFWYTIMRQQHYIAPRLFYNKFRKTHTHTHKGFTLF

SEQ ID NO: 323883 - protein, 40 aa, Zea mays
  Clone ID: MRT4577_58450C.1.pep
LSNELRAFLFTYGYSSACSGFVDQFGHFNRALVVVVLHLG

SEQ ID NO: 323884 - protein, 62 aa, Zea mays
  unsure (1)..(62): unsure at all Xaa locations
  Clone ID: MRT4577_58451C.1.pep
MPTCVNTRTGKTXTLEASPVTLFENGKCXIQDMEGIPPDQQRLIFAGKQLEDGRTLSDYNIQ

SEQ ID NO: 323885 - protein, 113 aa, Zea mays
  unsure (1)..(113): unsure at all Xaa locations
  Clone ID: MRT4577_58452C.1.pep
SLPPTLPAPRANIFKLPLPAQLTQPVVFNRLGGQFHLPSIIFEGVRPRTISPFVXSNERGFATGTSLPQSLLAPSMFVSGGINVQVFRPPFFANAPAKKGGRTSMIDLMMAVF

SEQ ID NO: 323886 - protein, 70 aa, Zea mays
  Clone ID: MRT4577_58453C.1.pep
NQNLSPPNPLKIRVSSLCFHLKKNYPVAIPPYLCRWFHTTFSPRTYFFPTNALAFASVRSSTHPTLFFFL

SEQ ID NO: 323887 - protein, 119 aa, Zea mays
  Clone ID: MRT4577_58454C.1.pep
IGINASFTKNMFLRVNDQVFSMSSRNVILQVVWVLVIDWIHLICSQPFCLCHCAPYALFAVKKMWLLSWLVSAYYEPASINIRHPPKCSLTAPEHGEKVWVVHLRWSCNACLVGLEYCV

SEQ ID NO: 323888 - protein, 84 aa, Zea mays
  Clone ID: MRT4577_58455C.1.pep
ERERKRERDAVESETDQQPKDFPVPGVPAPGSSRAEWSGASFSSPSSPQPLVGRGSCPFAQSINATEAVIFQTTVGGKIKGREE

SEQ ID NO: 323889 - protein, 110 aa, Zea mays
  Clone ID: MRT4577_58456C.1.pep
HVTQRSPLRFTGGARHDGENYICLLAPTAVRALSYYRARRAAVMLASAPIGHVGQLYIFGTHPSCSEGDKIGNGVRAHVCFCPGRARAALGESQWRCNIMYTPFVLQHKQ

SEQ ID NO: 323890 - protein, 163 aa, Zea mays
  unsure (1)..(163): unsure at all Xaa locations
  Clone ID: MRT4577_58457C.1.pep
RFPYWQLWARLQINLPKLRKSEEKAKFLVGERDRLLTERDSALQEAQMWRSELGKARGNAAILEAAVVRAEEKARVXAANGDIGIKEAMSRLESAIKEKENLLALVDALQSQLQRQETSTIHVCEESSELSLLLRSTWKMTMFIKLAYTDRILVIENVVELDD

SEQ ID NO: 323891 - protein, 105 aa, Zea mays
  Clone ID: MRT4577_58458C.1.pep
DAWEKKKKIKKKKKKKKKRKIKKKKKKKKTKKKKKKKKKKQKKKKKRGGAPSKGPKLTARGSKEKTFLKGHPKLNSRGADQKRCNGKNPRFPNLNGKGQKPRCKT

SEQ ID NO: 323892 - protein, 33 aa, Zea mays
  Clone ID: MRT4577_58459C.1.pep
KRVPVSQEDFKMAVAKVFKKNPEKKMSLPNLWK

SEQ ID NO: 323893 - protein, 59 aa, Zea mays
  Clone ID: MRT4577_5845C.1.pep
LNIDAHNGMTQYLNALSFFQLDRKPMLWLVLWVQQICLDKCHDRLLFQFSVLVSVTCIP

SEQ ID NO: 323894 - protein, 107 aa, Zea mays
  Clone ID: MRT4577_58460C.1.pep
VAAASSLSPSMWRRWCAPLNSALRVPSAPCRKYRTTTIKCEPRGRGLRVLQGDQIWRADLLPFGPSVRALRHVAREPWFLGDQTLCWCHSASKEGLKKQVESKPGED

SEQ ID NO: 323895 - protein, 89 aa, Zea mays
  unsure (1)..(89): unsure at all Xaa locations
  Clone ID: MRT4577_58461C.1.pep
VLQSSYRYDXSMTYISVCLAGVSMLSDLRAMGTGVPSSTSRVDREDHMRVACRVXLSDXYREAGDTIAIEEYPNHDDVKYAISSLDDSQ

SEQ ID NO: 323896 - protein, 83 aa, Zea mays
  Clone ID: MRT4577_58462C.1.pep
FGPVCARICRCGDALTRGAASCSASSAGFDRVPPALFAPGDLPALLRLRGPEGGDPDCRFNAPPQRHGPGGGLQAGSTDRLFR

SEQ ID NO: 323897 - protein, 39 aa, Zea mays
  Clone ID: MRT4577_58463C.1.pep
GIFKNSGHDIYIQYIYSMFPNRYKILRQFREKSDHKNYD

SEQ ID NO: 323898 - protein, 116 aa, Zea mays
  unsure (1)..(116): unsure at all Xaa locations
  Clone ID: MRT4577_58464C.1.pep
NTLTAQQGAWGAGAATSCCRKQPPACGHGQTLYLRRGEHIXVVFAPPGCRGTGSGGAAEDSTRTRRKPPKARGNTTEARSGPPEATTTHPSTNATPSTKGLMASGHRRRTATLSST

SEQ ID NO: 323899 - protein, 880 aa, Zea mays
  Clone ID: MRT4577_58465C.1.pep
MSEDKKVVAESKLSLSEEMHLGFLQSIAKTNTEKITREILEGLSEDTGDSDSYDVDSGGEDSVDRPWRPSHAVFGKSSIKQSHLVNMRGRYFRDLSIVRADEGEKTCPTPEENEVVIFRSFLKAGLRFPLSSFVVEVLKIFEICLHQLTPEAIIRMGIFVWAVRSQGLEPNAKSFCNIHELLYETKPWGKEQYHNNFGCYSFGARSGSSCPMPTFRKRWPDDWMTEWFYVKSDLKTREDIKDIIMRPIWQRFGLRRPKVEMNEAAEECQRAFGVVCSFIGTRDLVQEHIAFRIWPLVEKWEMPKETVRETDEGGLVRLKYTFQYGDKFVEPDDDWLKNTALSSAFGGRKKKTLNRVFDAIGFVYPDYRYPTRGQKRKNTSSAKEVASAAPSEPAPKRKREWPKCRRRKKIEEPRAEETKTSEILSPSAKIEVPMPIQMTTPKRKRMVNVLDVLETIKSSSTTPKKFGETSEVQIEAFDAEASKHQSETEAGPSEPTKVKSLEAEETEIAEEISAEKTGTAAPEASSEAFDYILRHASGKKLTEKEKQEAQFYAQKLKYPKGALIFNDSGEEDFLYCLPDSKEISVCREMSKSFGFPTLENGLSVLSKDELADSLAYNSLKGLILSNALRAQKDAEDEGCVMALSNLRSEVIELRNEGLKKDKILYSLINRIKEDEATFKAQAEAQKREIEDLRKQLARAKEEHTLEETKKEISEQWANHLEKNVEELRASKKRCYEISMECVKTIKTSFASVGAFSSEENFVRGDPEGPIGWISHEAEAFEEILSSRGDICAFSGVRGIATILERKGCDHVKFLAQSEAALSSEDIKDPSAEASLVGGKFFTDIWDNGGREMAQEIIRKSEKGIHDARKVVEPEVQIGID

SEQ ID NO: 323900 - protein, 83 aa, Zea mays
  Clone ID: MRT4577_58466C.1.pep
ATSSSRGSCSHTAPSAPPAAAQPVRPSGSPGSPTRPPASAPPTTAGSPWTARTTWSGARPGSGRHGPSSSETRGSTSCWASPT

SEQ ID NO: 323901 - protein, 341 aa, Zea mays
  Clone ID: MRT4577_58467C.1.pep
MSEDKKAVAESKLSLSEEMHLGFLQSISKTNTEKITREILEGLSEDTGDSDSYDVESGDIIMRPIWQRFGLRRPKVEMNEAAEECQRAFGVVCSFIGTRDLVQEHIAFRVWPLVEKWEMSKETVRETDEGGLVGLKYTFQYGDKFVEPDDDWLKSIDAISDELLGLYSKAEDTALSAAFGGRNKEISVCWEMSKSFGFPILENGLSVLSKDDLADNLAYNSLKGLILSNALRAQKDAEDEGCVMALSNLRSEVIELRNEGLEKYKILHSLINRIKEDEATFKVQAEAQRREIEDLRKQLARAKEERTLEETKREISEQWANHLEKALKSFVHLRKYAMKNL

SEQ ID NO: 323902 - protein, 566 aa, Zea mays
  Clone ID: MRT4577_58468C.1.pep
MSEDKKVVVESKLSLSEEMHLGFLQSIAKTNTEKITREILEGLSEDTGDSDSYDVDSGGEDSEDRPWRPSHAVFGKSSIKQSHLVNMRGRYFRDLSIVRADEGEKTCPTPEENEVVIFRSFLKAGLRFPLSSFVMEVLKIFEICLHQLTPEAIIRMGIFVWAVRSQGLEPNAKSFCNIHELLYETKPWVPEFVGETSSATEAKEPTPLPNIEGLAEVPATEKIEEPRAEETKTSEILSPSAKIEVPMPMPMTTPKRKRMVNVLDVLETIKSSSSTPKKFGETSEVQIEAFDVEASKHQSETEAGPSEPTKGLILSNALRAQKDAEDEGCVTALSNLRSEVIELRNEGLEKDEILYSLINRIKEDEATFKAQAEAQKLEIEDLRKQLARAKEERTLKETKREISEQWANHLEKNIEELRVSKKRCYEKSMECVKTIKTSFASVGAFSSEENFVRGDPEGPIGWISHEAEAFEEILSSRGDICAFSGARGIATILERKGCDHVKFLAQSKAALSSEDIKDPSAEASLVGGKFFTDIWDNGGREMAQEIIRKSEKGIHDARKVQSPKCK

SEQ ID NO: 323903 - protein, 901 aa, Zea mays
  Clone ID: MRT4577_58469C.1.pep
MSEDKKSVAESKLSLSEEMHLGFLQSIVKTNTKKITKEILEGLSEDTGDSDNYDVDSGGEDSKNRPWRPSHAVFGKSSIKQSHLVNMRGRYFRDLSIVRANEGEKTCPTPEENEVVIFRSLLKAGLRFPLSSFVVEVLKIFEICLHQITPEAIIRMGIFVWAMKSQGLEPNAKSFCNIHELLYETKPWGKEQYHNNFGCYSFGARSGSRCPVPTFRKRWPGDWMTEWFYQRFGLRRPKVEMDEAAEECQRAFGEVCSFIGTRDLIQGHIAFRVWPLAEKWEMPKETVREPDEGGLVRLKYTFKYGDKFVELDDDWLKSIEAISDELLGSYSKAEDTALSAAFGGRKKKRLNRVFDAIGFVYPDYRYPTRGQKRKNAASAKEVASAVPMPKYAGETSSAIETKEPTPLPNVEEPIIMPEIKKIEEPKATETRTYEILCPSAKIEAPKSQKGPAMTPKRKRMVNVLDVLETIKSSSTSPRKIVETSEVHIEAFGAEASKHQSKTEAGSSEPTKVKSLEAEESEIVEQILAEETSTAAPKASSEAFDYILRHASGKKLTEKEKQEAQFYAQKPKYPKGALIFHGSGEEDFLCCLPDSKEISVCREMSKSFRFPTLEVGLSLLSKDELADSLAYNSLKGLILSNALRAQKDVEDEGCVMALSNLRSEVIELRNKGLEKDKILYSLINRIKEDEATFKAQAEAQKREIEDLRKQLARAKEEHTLEETKREISEQWANHLKKNVEELRASKKICYEKSMECVKTIKTSFASVGAFSSEENFIRGDPEGPIGWISHEAEAFEEILNSQGDICAFSGARGIATILERKGCDHVKFLAQSEVALSSEDIKDPSGEASLVGGKFFTDIWDNGGREMAQEIIRKSEKGIHDARKVAEAAEKSADPEGQLGID

SEQ ID NO: 323904 - protein, 86 aa, Zea mays
  unsure (1)..(86): unsure at all Xaa locations
  Clone ID: MRT4577_5846C.1.pep
AKDHSEQDQRLPHHREPTEFIPLDKLSXELGTLIWRLNAADCNNDYNLKKMREASGYSYMDMXHVCPKTLSIKKLAKETPEEHLPT

SEQ ID NO: 323905 - protein, 124 aa, Zea mays
  unsure (1)..(124): unsure at all Xaa locations
  Clone ID: MRT4577_58470C.1.pep
SYFLQHWGGGRDINQMPQCSSRVEGLYPITVDRPLKHTMNDLEEXLHTITPGQQTPIHRHYXEEVFTVLKGKGTLXMGSSSLKYPLHPHETAFFKDTTLSIPVNDPHQVWNSDEHEDMQGVMII

SEQ ID NO: 323906 - protein, 35 aa, Zea mays
  Clone ID: MRT4577_58471C.1.pep
KIYRTSTFMSAASNTLHRAYCSVTLALLITLFTNS

SEQ ID NO: 323907 - protein, 808 aa, Zea mays
  Clone ID: MRT4577_58472C.1.pep
MSGDKKVVAESKLSLSEEMHLGFLQSIAKTNTEKITREILEGLSEDTGDSDSYDVDSGVFGKSSIKQSHLVNMRGRYFRDLSIVRADEGEKTCPTPEENEVVIFRSFLKAGLRFPLSSFVVEVLKIFEICLHQITPEAIIRMGIFVWAVRSQGLEPNAKSFCNIHELLYETKPWGKEQYHNNFGCYSFGARSGSSCPVPTFRKRWPGDWMTEWFYVKNDLKTREDIKDIIMRPIWQRFGLRRPKVEMDEAAEECQRAFGAFCSFIGTRDLMQEHIAFKVWPLAEEWEMPKEIVREPDEGGLVRLKYTFKYRDKFVEPDDDWLKSIEVISDELLGSYSKAEDTALSAAFGGRKKKRLNRVFDAIGFVYPDYRYPTRGQKRKNTSSTKEIASAAPSEPAPKRKKMKVLTHRPRYIEPTTVPEFVEEPRAEETKSSEILSPSARMEVPMPMPMTTPKRRRMVNVLDVLETIKSSSTTPKKIVETSEVQIEASGAEASKHQSETKAGPSEPTKMSKSFGFPTLEDGLSVLSKDELADSLAYNSLKGLILSNALRAQKDAEDEGCVMALSNLRSEVIELRNEGLEKDKILYSLINRIKEDEATFKAQAEAQKREIEDLRKQLARAKEERTLEETKREISEQWINHLEKNVEELRASKKRCYEKSMECVKTIKTSFASVGAFSSEENFIRGDPEGPIGWISHEAEAFEEILNSRGDICAFSGARGIAIILERKGFDHVKFLAQSEAALSSEDIKDPSAEASLVGGKIFTDIWDNGGREMAQEIIRKSEKGIHDARKVAEAAEKSVDPKGQIGID

SEQ ID NO: 323908 - protein, 181 aa, Zea mays
  Clone ID: MRT4577_58473C.1.pep
EDFSKSCLLSKLLSEAVIRMGIFVWAMRSQGLEPSAKSFCNIHELLYETKPWGKEQYHNNFGCYNFGARSGSSCPVPTFRKRCPGDWMTEWFYVKNDLKTREDIKDIIMRPIWQRFGLRRPKVEIDEAAEECERAFGVICSFIGTRDLIQEHIAFRVWPLAEKWEMSKETVREPDEGGLVR

SEQ ID NO: 323909 - protein, 73 aa, Zea mays
  Clone ID: MRT4577_58474C.1.pep
NCRVDDYTTRRPPYSYFLSWEPAMHLDNLPGQIIIILDNLIGTHVRTYKSKLIKHNAVVAQLKPRQMHTTEEA

SEQ ID NO: 323910 - protein, 201 aa, Zea mays
  unsure (1)..(201): unsure at all Xaa locations
  Clone ID: MRT4577_58475C.1.pep
ETKPWGKEQYHNNFGYYSFGARSGSSCPVPTFXKRWPGDWMTEWFYVNNDLKTREDIKDIIMRPIXVTXFGLQRPKVEMNEAAEECQRAFGVVCSFIRTRDLVQEHIAFRVWPLVEKWEMPKETIKETDEGGLVKLKYTFQYRDKFVKPDDDWLKSIEAISDELLGVYSKAEDTALSVAFGGRKKKRLNRVFDTIGFCYPD

SEQ ID NO: 323911 - protein, 162 aa, Zea mays
  unsure (1)..(162): unsure at all Xaa locations
  Clone ID: MRT4577_58476C.1.pep
PGTTHTPDFSLVPLLRGGRGQLHNHRCDASQIGPPPTDESILGAAGDIXMALLVLMXLSPLDSSLSGGGRAXIPRVXAAPRSHINCPCLLKAXYLADEHHAEPLQGSPAVIIPDVVQKKLGMASDDLFDINAGIXVRNLSTAIAKALPAALANLVMDPENST

SEQ ID NO: 323912 - protein, 103 aa, Zea mays
  unsure (1)..(103): unsure at all Xaa locations
  Clone ID: MRT4577_58477C.1.pep
PSATSFISSLPVPGQATKHGDPSPFRAPDANLRPSTDIESSRGGAFLGHSRRLERTAPSTTNNLKAXDKGECLPGLPSPSYLDGSLTGDNGPNTPNPAKDPEN

SEQ ID NO: 323913 - protein, 144 aa, Zea mays
  Clone ID: MRT4577_58478C.1.pep
ALLSAAAAGCVNSGCEARGSPLDTGRPSMSERALTRPHPLPRLWAPHRPRHRAPGPAEQRVAARPVRLSQPDTQRPIQVSIQRVTCATRSMCTPPAARWAREVGGLGVSSRAWCPYGVPWASVLNSLAVAPPTHCRLCGADLSH

SEQ ID NO: 323914 - protein, 66 aa, Zea mays
  Clone ID: MRT4577_58479C.1.pep
QLRVMANMYGQYLDTILTMTLQSVKCLYDSANIHDKCQAFMNLHMYVYSACALSETMVFDCGTKEY

SEQ ID NO: 323915 - protein, 36 aa, Zea mays
  Clone ID: MRT4577_5847C.1.pep
LQRLHVLFYAKCLVITKASPNYWEPNKEDAYNQHTH

SEQ ID NO: 323916 - protein, 79 aa, Zea mays
  Clone ID: MRT4577_58480C.1.pep
LYRKYILQLLIFLQNQQTSKPVPSKRTIHALIKRKLQDQALQMANPFWLIDAPLIMFLPTIVYFRMLRTQRLLSHHLCL

SEQ ID NO: 323917 - protein, 128 aa, Zea mays
  Clone ID: MRT4577_58481C.1.pep
SASAYMHLHCLSRLSSTRACSPATRKTKSMLWNVTTWTSSTASSLCTRLRPSSQPSSTSTTSGTSPTGSMNILKGIISLYSLFGYFAGKRTSDRIVHLLTVGFAVIVFFKVAFPHGLLRQLHHDHGAL

SEQ ID NO: 323918 - protein, 296 aa, Zea mays
  unsure (1)..(296): unsure at all Xaa locations
  Clone ID: MRT4577_58482C.1.pep
MLISLTSLRRRFAGLLRSPEVRHLDALPKMGSFWFQGSKSLATLFICGAGRVGFSAPYVCSSALFSGNGSGGRYISNGKLLSRRPRGIDSKKRLWTNVLLALNVLAYVAQVASQGKLLMWGAKINSLIDRGQFWRLATSSLLHANLTHLAFNCFSLNSIGPMVEMLSGPRRYLAVXYFSSALAGSLMSYRCSASPAVGASGAIFGLVGAYAVYMWRHRRFFGNSRESLEHIGRVVVLNMGMGLLSRGIDNWGHLGGLLGGVAMAWFLGPAWQYQYVAKDGRAVFKDRAPVLRLIKG

SEQ ID NO: 323919 - protein, 158 aa, Zea mays
  unsure (1)..(158): unsure at all Xaa locations
  Clone ID: MRT4577_58483C.1.pep
MVVSGGGAASTLLRTRLAHPAXTNESIGSSLPSGLREMLHPAPNNVAXTSTSSDRXLWIPAPXRPXYLDCSLSRDYGFDPCGFXMPRXHLRYKLYSLXDXNRLNNDAAGFIDSRFNXSEVWPTSKXPDCEMISLHCFYKRGLIHGRWYMIRQPPYPLQ

SEQ ID NO: 323920 - protein, 96 aa, Zea mays
  Clone ID: MRT4577_58484C.1.pep
FPTRQLPSLSHDSRYREQTFHFCARTTEMCSELPLQASACAPLLHRRHAHRPYSFLHSAQGARRGSRHGSRAESSMPDVTLVYHGWLRASGFPPPL

SEQ ID NO: 323921 - protein, 108 aa, Zea mays
  Clone ID: MRT4577_58485C.1.pep
LASAHSTSLRSELKGASVARSAVGGVVVNSVFHEGDGGVHEHELDDTDGVPSVGGLAKQRKKSAIVMMAVIYTRSCQRILTCNPRNLRISLSLVCSESSGGQISGVIV

SEQ ID NO: 323922 - protein, 105 aa, Zea mays
  unsure (1)..(105): unsure at all Xaa locations
  Clone ID: MRT4577_58486C.1.pep
ARPVSMPDSRLGERVVACVSVKDGWNWVDARADHEHRCGGEEVSPKILHGHCMTKELNKFKVPRSYYQLRQPFSVTTTGXIRKEELKMELLAAILLPINLYFFRR

SEQ ID NO: 323923 - protein, 75 aa, Zea mays
  Clone ID: MRT4577_58487C.1.pep
QDLKLEASVLVLSQRKPSPFCCFLRSRSSSEEEELVEECINRAECLTLAVRRRSKGVGGYLVSTRWQKNFWLLAS

SEQ ID NO: 323924 - protein, 92 aa, Zea mays
  Clone ID: MRT4577_58488C.1.pep
AFGQGPGNATTLAFRLVVEDAYVGPDAAAALKTGAVDVQVRLMAVAVFDRGGWRTSRRVMRVMCDGVKVVFRGKNSTEAAFHGPPRRCDVFL

SEQ ID NO: 323925 - protein, 60 aa, Zea mays
  unsure (1)..(60): unsure at all Xaa locations
  Clone ID: MRT4577_58489C.1.pep
MATAARERRLPGAVALATLIGRKLXTGGSERPALRYXHAGFAKRGEDYFLVKPDCLRVPG

SEQ ID NO: 323926 - protein, 127 aa, Zea mays
  unsure (1)..(127): unsure at all Xaa locations
  Clone ID: MRT4577_5848C.1.pep
MIEVLTTTESQKLLHQLNALLEQESRCQPKVCGLRLIESAHDNGLRMTARLRDFEVKDLLSLTQFFGFDTETFSLAVNLLDRFLSKMKVQPKHLXXCVGLSCFYLAVKSIEEERNVPLATDLIRISQ

SEQ ID NO: 323927 - protein, 50 aa, Zea mays
  Clone ID: MRT4577_58490C.1.pep
TGGSSGVNKTGSPPPVKRGCCTVIGPGRCQGAVKKTRFPALMGGSGRVRP

SEQ ID NO: 323928 - protein, 66 aa, Zea mays
  Clone ID: MRT4577_58491C.1.pep
KNLLKTAQEKRDVCVHVVNSWDEFTTALNNKKLILAPWCDEEEFENGLLPLVLNRCLDIINLSITS

SEQ ID NO: 323929 - protein, 139 aa, Zea mays
  unsure (1)..(139): unsure at all Xaa locations
  Clone ID: MRT4577_58492C.1.pep
FSVPGPMTRSQFLGSLGLNFRVVPFLQNCPWEQAESLRPGFWRLVGDGVPPFWEGPEVQPAPVGMGARSLPNSLCXLEQGTPFPFELGSGSGIAFPVFLECSSVVAGFFCSAQPFFLCFSSCARFSWSLCFVTNERRET

SEQ ID NO: 323930 - protein, 121 aa, Zea mays
  Clone ID: MRT4577_58493C.1.pep
SRHECCRRIAAHGHLGLLYTKFSLAMAILGLLGGHMCACASPADPVDGFTREAVVHNTLRSSDETHGPEEASGSGGGGGHSCRRGRRVLCSYPMWCTTRQETDANDLSSYLLDKIVRLYNR

SEQ ID NO: 323931 - protein, 220 aa, Zea mays
  Clone ID: MRT4577_58494C.1.pep
MHTEETLSAPVFLFFHKISSRPTFFLLRIHFDLCLNIGNYDNTINVQICTKKERMHVLLSLLERDAPKSAIIFVAGQSERSKKAGNPPSTMVVSDFLRNEYKGSLDVMLLEEDMNFNARAVSFSEVKGRGFLLVSTDIASRGFDLPQTSHVYNLDLPKTATDYLHRAGRTGRQPFSRLELECCVTTLITEEEHFVLRRFQNELKFHTQEEELPLMNCFPG

SEQ ID NO: 323932 - protein, 304 aa, Zea mays
  unsure (1)..(304): unsure at all Xaa locations
  Clone ID: MRT4577_58495C.1.pep
VALLATLPPRDXNLTRQLQELGAFRALATKLVELRRGTIRGNRHVAPFTEGAVKVLYRVTCALALLQQEEMYVELAREVGLAPLFVELLQQMMSSGQEAVLLYSAMALENLSLQSSRLTDVPAPRRGSSLVCGCFGQGRSPPPPGAMGTCRVHGGFCSLRETFCLAEGGCKAVERLVACLEHADPRVVEAALAALSTLLGDGVANATEGELVIGXAEGXRPVVEVLVENRTEALQRRAVWAVXRILRVEDIALEVAADQTVASVLVEAYRNGDVRTRQTAERALRHLDRIPNFSSAFHQAKGRA

SEQ ID NO: 323933 - protein, 109 aa, Zea mays
  Clone ID: MRT4577_58496C.1.pep
TGFQGPGPTTTPPMVPTAARVFWGASPGSKRTSTPAPGRSPSAGRASSPGLINPPGGGHPRPFVLAWVPYVCLWLPGWPGPSYWAIEGARTHLLYELRQKARALNKPFW

SEQ ID NO: 323934 - protein, 34 aa, Zea mays
  Clone ID: MRT4577_58497C.1.pep
GTTSGRLEHRLLIILHYISNTDHFWDQEDSPNTK

SEQ ID NO: 323935 - protein, 245 aa, Zea mays
  unsure (1)..(245): unsure at all Xaa locations
  Clone ID: MRT4577_58498C.1.pep
VVLMSNHQSEADPAIIALLLEKXNPWISENIVYVAGDRVVTDPLCKPFSMGRNLICVYSKKHMNDFPELIEMKRRSNTRSLKEMALLLRXFPYNNIGGSQLIWIAPSGGRDRPNPSTGEWYPXAPFDSSTVDNMRRLLEHAGVPGHIYPLLLLCYEVMPPPQQVEKEIGEQRVISFHGVGLSATEETKYGDITCHTKNADEGRELFTNTLYNSVVNQYNVLKSAIFRDRGAAVSNNAISLSQPWR

SEQ ID NO: 323936 - protein, 134 aa, Zea mays
  unsure (1)..(134): unsure at all Xaa locations
  Clone ID: MRT4577_58499C.1.pep
NTRSLKEMALLLRXIWIAPSGGRDRPNPSTGEWYPAXNEMVQTVVEVAHKNYPFXLPKTMLEKSAXVDNMRRLLEHAGVPGHIYPLSLLCYEVMPPPQQVEKEIGEQRVISFHGVGLSATEEXKYGDITCHTKN

SEQ ID NO: 323937 - protein, 162 aa, Zea mays
  unsure (1)..(162): unsure at all Xaa locations
  Clone ID: MRT4577_5849C.1.pep
NSLGSSPRRLGSSVGTNRRGRPRLSSWTPXSFGANAVQSPRGTPXXIRXSRANGAAFWQXSRTKRPHIPPACIARXGPGPAWTTXSQWGPAXXFFGGASSAXFMXXFLSPPLVFYXXFTNIEENRYLGELFKRVEGLFXSSLFLKPLKNPTIXSIVWIPPPX

SEQ ID NO: 323938 - protein, 81 aa, Zea mays
  unsure (1)..(81): unsure at all Xaa locations
  Clone ID: MRT4577_584C.1.pep
LTDVHYVWLXSSRRMCPGXALGLAHVQLALYAMLFQFDWQMPEGMVAQXMHVTETAGITMPPRSELLLVAIPRVPVPVPVD

SEQ ID NO: 323939 - protein, 148 aa, Zea mays
  Clone ID: MRT4577_58500C.1.pep
MLEKSAAWVSMFPYVYFICYMQKQGQAHFDSSTVDNMRRLLEHAGVPGHIYPLSLLCYEVMPPPQQVEKEIGEQRVISFHGVGLSATEETKYGDITCHTKNADEGRELFTNTLYNSVVNQYNVLKSAIFRDRGAAVSNNAISLSQPWR

SEQ ID NO: 323940 - protein, 132 aa, Zea mays
  unsure (1)..(132): unsure at all Xaa locations
  Clone ID: MRT4577_58501C.1.pep
RFAFIPVTATFEAEYNLEGAQKPVXALIPYTAQIGLNTNVPDYHIDQVSNLVEYGSDEFCLDEPRELFGKVKHAKRLSDEPYSLHHPYFPPIIGRFFVGWGGSTGITIQKXDAVFKKKKEKKKGTKKEKIRA

SEQ ID NO: 323941 - protein, 152 aa, Zea mays
  Clone ID: MRT4577_58502C.1.pep
MVDVMAKAIDGILIAAASSPTPVFSLLPSLYKTRSHPWSLASIQSASRLPLSLCGSPTELHRALRRRPKPELPALPFAAPESSTTMSNPPEPPRHDPDDPPHCPALAEPPTRGQPEEADFVVEESNTFEDDPQDTFEQEGDEEDFPDDVNEY

SEQ ID NO: 323942 - protein, 89 aa, Zea mays
  unsure (1)..(89): unsure at all Xaa locations
  Clone ID: MRT4577_58503C.1.pep
TDMIXLGQEQYLTSLLHNITLFVQTDTLKKVEPVAIDGFLRSTWNPSKTINLELIMWDQPTTASLTMKQTELGVKYSTQDRKASAFKTH

SEQ ID NO: 323943 - protein, 96 aa, Zea mays
  Clone ID: MRT4577_58504C.1.pep
YLLRISTYHGSTSGRKVRYRDRRIAGYWRTIARNLASKGCSLLLNYTSESSRTRTEELASSFTESFGIQCTTVRADLNDPQAASDVIIDASKKHFG

SEQ ID NO: 323944 - protein, 81 aa, Zea mays
  Clone ID: MRT4577_58505C.1.pep
PPPTWVQPGGPRKFRPPFKVQARQALLSVSPRRVRSGFLNVIQFCLPQGPWGKRFFYTPVVSGPGEGYIPGVSPAPGEIFN

SEQ ID NO: 323945 - protein, 122 aa, Zea mays
  unsure (1)..(122): unsure at all Xaa locations
  Clone ID: MRT4577_58506C.1.pep
VYLQQQLLPFSKLVTANFXEKKIFPFNQLAALNPVAYLQQQILLPFSELAAASGASFLKKQKLLPFYKQFGANPATFLKIKQLLPFVQLVLTNQEASYQKKIIGGAFFRLIISCNSKIKFFG

SEQ ID NO: 323946 - protein, 148 aa, Zea mays
  unsure (1)..(148): unsure at all Xaa locations
  Clone ID: MRT4577_58507C.1.pep
FIRSLCSGNDPLCSSVDCSVHEGDQQQLXQSXXXRSFXGRPFXLVSVPFSLARALGRRDERPSKVLSPHSIPRPCESAPEPAALSCPSFSLPFGEEGRGSGEGRNRMLPFVLPRLARQTNPGAGHLCFRFSFFFLLFSSSPSCFALLS

SEQ ID NO: 323947 - protein, 92 aa, Zea mays
  Clone ID: MRT4577_58508C.1.pep
AFFLFPPLGKGGFPPRRFSWGTPGFFPSRRCKTPARVFLSPSLWGGLGPLKAGPTAPPFVGFFPNFPLGGSRPGYPVGPPPPMKNALWGFGP

SEQ ID NO: 323948 - protein, 67 aa, Zea mays
  Clone ID: MRT4577_58509C.1.pep
TDSFGGQHIFNSCNYANKAIQASNAYMPSNLVNCPPYSHFFSLSLESISLAGRANLQKWKSKNIPKI

SEQ ID NO: 323949 - protein, 163 aa, Zea mays
  Clone ID: MRT4577_5850C.1.pep
HASAVGWLRSLFLDLTLPPEATDDDLRAAVANGRLLCALLRRLLPGALLDDAATDNVGRFRAAIQRMGVPTFSAYDLERGEMSAVVTCILALKDRFSSRLGEDHRSSSFLTRCESEGGRRNMEGKLQRVLTSPIMSEPYSPSFGGDAYSPSQVFQPEHGYSDL

SEQ ID NO: 323950 - protein, 241 aa, Zea mays
  unsure (1)..(241): unsure at all Xaa locations
  Clone ID: MRT4577_58510C.1.pep
SSLGAIRNSFFRLLDCLSRNATSCISLRCPLKFVSLAKRRFSNPPFGXPPPPPSRSSPRMLHRCLSGAARPGGAXAPREPRAAPAPPSARRXAGPRPRTPPRSXDAAXGPRAPAGPXKASEKPSXAAPPXGGRSRPAPRRAPPPPPPRRAGGGWSPRRAPASGTPRGGATARRARXADGRXAAAGSECAGAGRPGDPRCGPPPPPPASRGPLPYGAASRRAPPXAPPPAPIGAASEDDSTG

SEQ ID NO: 323951 - protein, 444 aa, Zea mays
  Clone ID: MRT4577_58511C.1.pep
MKRKSMKAMVEHIWNNGFTLDYTRWIFHGEVHRTREEVVRQRVEDYDADAGVADILNDSHEAQFAVIFKCHWFDHQVTRQTHSNLGIVKIQQDSTLLGDDVYIVAQQATQVYYLPYACKTKEHLKGWNVVYKVSPHGKLPVPNDEDYNLDPDTYAGEFFQEDGLEGRFEIDLIEAIRMEVDIEMVVDEEEDEVVENAGGHGRNPNGILGLLCREHFPGLVEYAGMTGLAYTFDHYDVTPDALDRDDREFNKKAERVKQELWMIPYWCAAHSQCWEQMSASHGGQPCSIFSAYAMAHKGKATSDVTYNPDDGPEVYSNPAVYSCLSEYTAMAQEVHAPDYDPRIEDINGDVDVLMRLEEERRERQEMEARMIAEQEAHLVGQKWMAEMFQYIQSLGAAHGFAPPPSLFPSVDPAQFHTPGQSRAASNNPHGSPSPSPHQSSCSLR

SEQ ID NO: 323952 - protein, 76 aa, Zea mays
  Clone ID: MRT4577_58512C.1.pep
IVAACPSPDGSARDGTQRGKTVRGNRGEPRVDREYDMVIVPSDGGGCLSGSDSDDSDWSIGWLEPQAPELQTDGDP

SEQ ID NO: 323953 - protein, 113 aa, Zea mays
  Clone ID: MRT4577_58513C.1.pep
MEGAECIADCLKYNTTLSTLDLRANGLGNDGAICLARSFKIINESLTSLDLGFNEIRDDGAFALAQALKANEDLAVTSLNLANNFFTKFGQVALSEARDHVYEMTEREIDIYF

SEQ ID NO: 323954 - protein, 51 aa, Zea mays
  Clone ID: MRT4577_58514C.1.pep
SHVRRGVHSTGLFYLRGGFIQYTKHHSNTTMSTSSTTTHGHNPHTGHTMTL

SEQ ID NO: 323955 - protein, 70 aa, Zea mays
  Clone ID: MRT4577_58515C.1.pep
PAPDNSFGLVRRGKVVMRVQKVMDGDKSAEFRRSANVCMAKARAASRKGASSDRNIAEFVAKYAYRTPSE

SEQ ID NO: 323956 - protein, 153 aa, Zea mays
  unsure (1)..(153): unsure at all Xaa locations
  Clone ID: MRT4577_58517C.1.pep
LGTSGPAGEIPRRFSPSLPPSAQTPRRETPTRSAPASSGPRDGRRRTTTARTAPTRLPPPPPVSTTAPTATRSCPTVTAASTSSSSRPRGRRRXSNRGGGGGVGSAWCFSDPEMKRRRRVASYKAYSAEGKVKASFRRGFRWIKAKCSELIHG

SEQ ID NO: 323957 - protein, 104 aa, Zea mays
  Clone ID: MRT4577_58518C.1.pep
FQCVFALFLSPFFALVPLFSKFCLIVFYYLPPNHPSNMLQLLKAPIKYILLAASATPYPLINYNHQLCAQCAHLQHDRVLSRRECLSALVPENGLCSRLVPCTL

SEQ ID NO: 323958 - protein, 152 aa, Zea mays
  unsure (1)..(152): unsure at all Xaa locations
  Clone ID: MRT4577_58519C.1.pep
YLFLLLDLLTGTLLCMLRGNLKVLLLYDPFINCCVQIKLVLSTSNDTIFHSSMDMALSKKDPPDTSLVTDIDIVNYKVFDMCMLKLHYLKLVSNTPAVSQPYMKFVGYVYNCLVTXEHCVKYQCLMYLVLLLFNRRHALTSMLSTDIACIWS

SEQ ID NO: 323959 - protein, 78 aa, Zea mays
  Clone ID: MRT4577_5851C.1.pep
AEHTMTPRLEQTHTRPEPVHRRQGAGRSRVNCKSVPHEHSSDYDGCRRRYDYYDLRGGPAACRQLLELQPAQPPGTTR

SEQ ID NO: 323960 - protein, 91 aa, Zea mays
  Clone ID: MRT4577_58520C.1.pep
GSSAAFCPLLGLSAVRLVRVAQRPHLPGVLRRAVPVQIGCEAHRREAIGVHSVYWAFQSHQPAEPGVPVLSAPRLRCTAQRQQALVHALTA

SEQ ID NO: 323961 - protein, 136 aa, Zea mays
  unsure (1)..(136): unsure at all Xaa locations
  Clone ID: MRT4577_58521C.1.pep
GEGVKDKSSLEGFQQIXKREGPXSLFKGGGGNIFWANAGGGGLFGXDQLQILFFGKKYGSGGGLMEKYYGAQKQGVFPVPSQQDLGKFFPFLSKEFIIPVKGGFFPPFVLGGDLNFPTLGTILLGGGIGPPKHLWS

SEQ ID NO: 323962 - protein, 68 aa, Zea mays
  Clone ID: MRT4577_58522C.1.pep
DRKKCGLHPTNFGGGGQFLGIRQRTEHWCPVGTNAETKIFSRGADKKQNWVQSIETRFLKGTFFKYTR

SEQ ID NO: 323963 - protein, 189 aa, Zea mays
  unsure (1)..(189): unsure at all Xaa locations
  Clone ID: MRT4577_58523C.1.pep
PNNESFSRKQLAASSSQKNKRRXMLIFSTLSAIVXGTNGVLMLSPSXITQREWFPSNFTFVDATSAXQIESACNENXKGXRHWYNFCHNHPERIQDVSXNNXIGEKSNHMYXTDVRLLLEMGMDAYRFSISWTIILPNGTKEXWINPDGIKYERNLITLLLENGIEPYVAIFHCDVPLALQXKYGGFLD

SEQ ID NO: 323964 - protein, 105 aa, Zea mays
  Clone ID: MRT4577_58524C.1.pep
GARYTVLLQQDLISWSSKRQTTVSRSSAEAEYRAVAHAVAECCWLRQLLEELHVSITSATVVYCDNVSAVYMAANPVHHRRTKHIEIDIHFVREKVALGQVRVLH

SEQ ID NO: 323965 - protein, 335 aa, Zea mays
  unsure (1)..(335): unsure at all Xaa locations
  Clone ID: MRT4577_58525C.1.pep
TRPRIQSASGCSLQAAPRRRGSGRVGVGVKKRNRPREASEKKAVLRRRSVRWGSTCASAGGPRARGWPQSRSRRSSASGRGPGPRRRPAAVSRRSLRRGGRRRCCPPRTRRRRGSLVPWAVVVGTAEAAAXHLRSRXCSWQHLSSNRRRLRRPRRLLVRHSRAGWWRSRLASRVAPARRRRXGRRGPAAREREPRXAAPTLRLRRXRGSRPGCRHREQLGERPGPREERDDAIVEPGARRRAQRXESDLVGRQKTGCSSSPATTTSAAELIVPPXRRSRNSSRPPRRPMPNALLPSTTSTSSAACPSTPAGSSGRQGSASEASVRCKVKLLLARK

SEQ ID NO: 323966 - protein, 70 aa, Zea mays
  Clone ID: MRT4577_58526C.1.pep
FYPTTYRFLSDKFFSGPGGKPQGQGAIMGGGPIFLGEKKLGGPFTFWGPKRGPLDSFFFNSFGGPGFKRF

SEQ ID NO: 323967 - protein, 99 aa, Zea mays
  Clone ID: MRT4577_58527C.1.pep
FPFSQVVAVYPQRFFPFHPLAAMEFSAYCTQQQLLPFSQVIYVNPGAFLTQQQLLPFYLHPMPNGGTLLQLQPLLPFSQLGLTNPTVFYPPPIIGGALF

SEQ ID NO: 323968 - protein, 72 aa, Zea mays
  Clone ID: MRT4577_58528C.1.pep
KQRKPSVALTYRLQLQGGLCQPHVSFASDITRVPWAKSRFSLPDTTAKEFKETNVVLGESHSSPMGHGTAPI

SEQ ID NO: 323969 - protein, 50 aa, Zea mays
  Clone ID: MRT4577_58529C.1.pep
VHHLGPCRQGGALSWLCGNTSSGGEGPTTQVFLCFAHFVLSCNFMGAPVI

SEQ ID NO: 323970 - protein, 136 aa, Zea mays
  Clone ID: MRT4577_5852C.1.pep
HKTRNPKLLCACADRPAHRRGLSGPRTGSASGPDRPAPLNRCSTPLLYIKCRILSIHLSILMNFYLDKDTVSRIERRTYITLRRPYAGDKDCFVEPLRRIRCSRKLHADGIPGSQRCGHFFCDQRTGPSSTGVGEI

SEQ ID NO: 323971 - protein, 56 aa, Zea mays
  Clone ID: MRT4577_58530C.1.pep
AKREGACLLVVWGRADLRVHQRGNRCRARMVGIRILMLCCLCWLSEVAGAGLRGLG

SEQ ID NO: 323972 - protein, 60 aa, Zea mays
  Clone ID: MRT4577_58531C.1.pep
LQSELVGEPAHGVHGRGQFAYVRHLPRHRMPYGTPCRCRRVPLKVGVALPTCRRLRREKS

SEQ ID NO: 323973 - protein, 66 aa, Zea mays
  Clone ID: MRT4577_58532C.1.pep
TIEMKRKKYCSKKKKKKKKKKKKKKKKKKKKKKKKKKKKKLKKKKKNQKKKKKKKKKKFFPSPGAP

SEQ ID NO: 323974 - protein, 89 aa, Zea mays
  Clone ID: MRT4577_58533C.1.pep
IRRGEVMLNQTKCADPGGYGATKKNKVAFYNQSIKQTRKIGGCIYQVYPTGVILEPSNHVGQETEITEKRPNTHSQMGGTTIWVRSPPT

SEQ ID NO: 323975 - protein, 225 aa, Zea mays
  Clone ID: MRT4577_58534C.1.pep
LALFNWGNVHMCEARKRIPLDESAPKEVMAAQLRTAYYWVKERYALAGHKYEEALKIKPDFYEGLLALGQQHFETAKLHWSYALADKADLSTWDSLETFKLFDSAEQNMRAATEMWEKVEEQRMAELKEPGACDKDGVLRKRHHGAGGQPELTPEEAAEQAAVMRQQIHLFWGNMLFERSQVEFKLSVGDWKTNLDASVERFKLAGASESDILTVLKNHFFICSL

SEQ ID NO: 323976 - protein, 63 aa, Zea mays
  Clone ID: MRT4577_58535C.1.pep
MKRKKYCSKKKKKKKKKKKKKKKKKKKKKKKKKKKKKIKKKKKNQKKKKKKKKKNFFPSPGAL

SEQ ID NO: 323977 - protein, 62 aa, Zea mays
  Clone ID: MRT4577_58536C.1.pep
DLVVSAASASPIGESLHSGRAPTKSFSDQEPSSKESNAPNRSLQGRTQPIVTCSPLTTSNDL

SEQ ID NO: 323978 - protein, 125 aa, Zea mays
  unsure (1)..(125): unsure at all Xaa locations
  Clone ID: MRT4577_58537C.1.pep
NSARGFSNSARGPPPPXATPRFQSPLPPPAHPXQPPSAHPAPGLPPPAHPCSRPPAXPHPQGXRSCSRHRPPQPASVQGTRPHHPPPPPTGSRNLPASXGSRQGPPRDHVSQVSRSLASFHGACW

SEQ ID NO: 323979 - protein, 259 aa, Zea mays
  Clone ID: MRT4577_58538C.1.pep
MLNMMTDLSCGPSSKVKEQVAAAPTGSGDRQGQGRGKIEIKRIENTTSRQVTFCKRRNGLLKKAYELSVLCDAEVALVVFSSRGRLYEYANNSVKSTIERYKKANSDSSNSGTVAEVNAQYYQQESSKLRQMIHSLQNANTRNIVGDSIHTMGLRDLKQMEGKLEKAIIKIRARKNELLYAEVDYMQKREMDLQTDNMYLRSKIAESNETGQPAMHMTMGAPPTSEYDHMAPFDSRNFLQVSMPQHYSHQLQPTTLQLG

SEQ ID NO: 323980 - protein, 81 aa, Zea mays
  Clone ID: MRT4577_58539C.1.pep
GILRLTTMDEYTLYKSTDPCYFTERPIHQCSALGDAGHKNAGEDRVQHLNKTYLEHRGPRPVDCLKPNLRGPEILALVNYN

SEQ ID NO: 323981 - protein, 89 aa, Zea mays
  unsure (1)..(89): unsure at all Xaa locations
  Clone ID: MRT4577_5853C.1.pep
VASAQTQPSSSSVPAPFGATPSTHHKIYNAGPSVASLTNSFQINARFXTAATFGTASMSMRHGLLYPAPYSLPTSFSGSFQQPAFPAQA

SEQ ID NO: 323982 - protein, 70 aa, Zea mays
  Clone ID: MRT4577_58540C.1.pep
PCRDVFLHGPLSRSCSPDGARSPSCLCSGPSVRLLLVASPAVVAARPEVYAFADRFTCGDTSYSASAVRP

SEQ ID NO: 323983 - protein, 124 aa, Zea mays
  unsure (1)..(124): unsure at all Xaa locations
  Clone ID: MRT4577_58541C.1.pep
VGGLFFFVSSVPCPVASLSSMQWVWGPVCVPNFFAGAGLQMPDLLPLACXFLCPWWCTLPLLFILCLPPWLCSLLKLCRWRAHLFGLFDAPGGXRWRQILLLEGPPSVWGSPFLGTPWSCQKRC

SEQ ID NO: 323984 - protein, 94 aa, Zea mays
  Clone ID: MRT4577_58542C.1.pep
HVRFSNTMPYCPKPSCRITTTFIYFGKLLTECLDCIIRINTHGYSSLCGYFDGSYPSTVQKTMSSLGQDGAVLRLSSTWTASITRTSGPFFTHT

SEQ ID NO: 323985 - protein, 140 aa, Zea mays
  unsure (1)..(140): unsure at all Xaa locations
  Clone ID: MRT4577_58543C.1.pep
XLXVXPFLLFXXFRXRVXSAPLSXXFPFLPSLAPGSXRGVXGVLVVSXCLSXXPWLLLXRVVAVLPLGXGVLGXAACLSGPPGXXXSAXSSASSPFCFAFSLRXCVXXXGCXSLPPXSALSGPSPVVLAPLSLGAXQGVG

SEQ ID NO: 323986 - protein, 59 aa, Zea mays
  unsure (1)..(59): unsure at all Xaa locations
  Clone ID: MRT4577_58544C.1.pep
VPFLFFLAAFSFNPXPIIFFPSTSISYKKPLLLHPFFLFNPNSPTILLXSHIHHQNLLL

SEQ ID NO: 323987 - protein, 73 aa, Zea mays
  Clone ID: MRT4577_58545C.1.pep
QNQRVFPVLAHQVLMTITPFIWKTLMIPLEGGFFQLFVLDGDFYLPTPVTIPLGGVIRPQYLLFIYDIFFYLH

SEQ ID NO: 323988 - protein, 146 aa, Zea mays
  unsure (1)..(146): unsure at all Xaa locations
  Clone ID: MRT4577_58546C.1.pep
VQDHGGGPQGPRDGAQALRRPALLGLPVGDGQQRAGRRHLRGGQVLRSLRIQASAYLLVTSASAAAELLQLARHGDRGVSWGEACSYFGRFCGKXTVSLALHAAALACFAALSLVSAFRVFSSRCHPPPDADGQPPKHARDEEQRV

SEQ ID NO: 323989 - protein, 185 aa, Zea mays
  Clone ID: MRT4577_58547C.1.pep
MAAGLKVPEMALRLCVVPLSLASLWEMATNAQADDTYGEVKFSDLSGFSYLVGVNAVTAAYAVASVLASSFKRPLAARYDWVVLVMDQASAYLLVTSASAAAELLQLARHGDRGVSWGEACSYFGRFCGKATVSLALHAAALACFAALSLVSAFRVFSSRCHPPPDADGQPPKHARDEEQRVYHY

SEQ ID NO: 323990 - protein, 86 aa, Zea mays
  Clone ID: MRT4577_58548C.1.pep
ALQRRYITLQRPGAKLMFLLIPSLLGSLASFHGIHCLARAPHFHCVRAVLKGTVLNRAATAHVRGLRLAVTLWLKNVSEICVRPQS

SEQ ID NO: 323991 - protein, 81 aa, Zea mays
  unsure (1)..(81): unsure at all Xaa locations
  Clone ID: MRT4577_58549C.1.pep
SLQAKRRLEKRSRAAREEGWEHVEPKGRFFAWPSFLAPSASRVVVINKTARPRRRQTVEHLRASXATGTQEAMPAPSPTNS

SEQ ID NO: 323992 - protein, 96 aa, Zea mays
  Clone ID: MRT4577_5854C.1.pep
WGCGFFFFFFFFFFFFFFFFFFVFLKPLAPPFNFQPCKPKALSQGGIPLEIFCKKGDISPKILGTPKNGGQNRGQKTHPFLIPFKAAPTGCIKKRL

SEQ ID NO: 323993 - protein, 81 aa, Zea mays
  Clone ID: MRT4577_58550C.1.pep
FFSAPFGQPFLFRQGRLPQQEPAQIIPPIFLSAPNSCRPKQRMAALNQPKKLLRPPQGTGNIYFWPQGLGLKCRRPPKKKK

SEQ ID NO: 323994 - protein, 321 aa, Zea mays
  unsure (1)..(321): unsure at all Xaa locations
  Clone ID: MRT4577_58551C.1.pep
MPAPAPPIRLGPPTPYISSHGSKVARLHMYDWIVLILLAVLDGVLNIIEPFHRFVGSEMMTDLRYPMKGNTVPFWAVPIIGIIGPMVIITVIYFKKRNVYDLHHAILGLLFSVLITAVLTDAIKDGVGRPRPDFFWRCFPDGKPEYNNFTTGAICHGQASVIKEGHKSFPSGHTSWSFAGLGFLSWYLAGKIKVFDRRGHVAKVCIVLSPLLLAALVAVSRVDDYWHHWQDVCTGGLLGFTVASICYLQFFXPLPSDENGLWPHAYFRHILEPEGDSQAQPTYMSRRSSVQNGSFQYSPDAVEMRSTSQAMDSMEAGQRAQ

SEQ ID NO: 323995 - protein, 76 aa, Zea mays
  Clone ID: MRT4577_58552C.1.pep
PLIHCNYLTTYNFSLPNQQNNLMRGSPHTTQPPLLTPLLPLSTHPLHHIPTSPTFQNHTKPPNPYEPCLLLSTLLH

SEQ ID NO: 323996 - protein, 312 aa, Zea mays
  unsure (1)..(312): unsure at all Xaa locations
  Clone ID: MRT4577_58553C.1.pep
MDHAAEHLDPTAPAPSSASSSAAVAEVNAWLASLAADVGGRGGGGGAAAELSLGPDPTPRGVAYLRALASASQGRSRAAGIAAAGLRAQAAEYRAEAARLREALERAGLARDALPPPAAAAARAVAAVANLLAIRDTEMSSFVVASADLSLRRAEVEEKRDKVHKESNAXALLDYTRKAINKLTELKKMLEKFKNDVEKQQVEQMTDWQTKLVMMDSKERQYILQVSNYKAMLNRVGYTPEINHGVLMEMAEHKKDLERKTKPIADTLRSYQDLPPDKALAALAIEDKKRQYAAAEKYLEDVLQSALTTSGL

SEQ ID NO: 323997 - protein, 68 aa, Zea mays
  Clone ID: MRT4577_58554C.1.pep
CQSCAFLCSIGLICPSPPPGAFVLAICDGPVAFGTSCPCNENFATMAPASPGFKNLAPPSWPLNLWPF

SEQ ID NO: 323998 - protein, 75 aa, Zea mays
  Clone ID: MRT4577_58555C.1.pep
YIYEGQKGTSLAHSTGGCSRSRGEGTRKIATQRRSFSNLNKPERAVSNLVIESSSANERGPYPSESQHWKTQIGR

SEQ ID NO: 323999 - protein, 55 aa, Zea mays
  Clone ID: MRT4577_58556C.1.pep
RRCGGSGRPWKRGDSGRSRGIKHRGVAVSIRSPRDLNPGEPHEPETEPEGEEKTT

SEQ ID NO: 324000 - protein, 90 aa, Zea mays
  Clone ID: MRT4577_58557C.1.pep
GGLYVVPKMVSQGVPLANLHLRSTRPGVDEIPLPLLVKFSMSCRIFRDNALYQTGLFLFQLAQIAFNNRNSVSNGARMERALKLIWSTLT

SEQ ID NO: 324001 - protein, 752 aa, Zea mays
  Clone ID: MRT4577_58558C.1.pep
MALIIKSFRQILKQRRGKDYKPRSKRVCYKCGKSGHFIAKCPMSNDSDRGNDKKGKKKEKKRYYKKKGGDTHMCREWDSDESSTDSSDDEDATNIAVNKGLLFPNVGHKCFMAKDGKKKKVQSRATKYTTSSDEGSSSEDEDDLLTLFANLNMQQKEKLNKLIGAIHEKDELLDSQEEFLIKENKKHVKVEKLNACNDSIVSLRNENASLIAKIDKLNESISSLRDENARLISKAKDLNVCNDSISSLRNENAILHAKIDELNVCEPSTSTVDHVSICTRCRDVNVDAINDHLALIKQQNDHIAQLTTKINEHEIENEKFKFARSMLYNGRCPGIKNDIGFQQGSNVKLNTPKKLSNFVKGEKRMFSSYEKNEDPQQAITFRDGNQDSLDYNLLSVSQLCKMGYNCLFSDVGVTVFRRSDDSIAFKGVLEGQVYLVDFDRAELDTCLIAKTNMGWLWHRRLAHVGMKNLHKLLKGEHILGITNVHFEKDKFSLRIKKIRSDNGTEFKNSQIEGFLEDEGIKHEFSSPYTPQQNGVVERKNRTLLDMARTMLDEYKTPDRFWAEAINTACYSINRLYLHRILKKTSYELLTGKKSNVSYFRVFGSKCFILVKRGRKSKFTPKAVEGFLLGYDSNTRAYRVFNKSTGLVEVSCDIVFDETNGSQVEQVDLDELYDEEAPCVALRNMSIGDVCPKESEEPPQAQDQPSSSNQASPPTQNEEHAQGDEEEDQEDEPPQEEVNDQGGDEDNQDKEDD

SEQ ID NO: 324002 - protein, 74 aa, Zea mays
  Clone ID: MRT4577_58559C.1.pep
DLLHKYNVRSIPIRMDDQGHVVRGSYNGLEGKVVQVYRRRYVIHVERITREKVNGSTVNVGIHPSKVIVTKLNL

SEQ ID NO: 324003 - protein, 70 aa, Zea mays
  Clone ID: MRT4577_5855C.1.pep
KQAEVDPLVSACGSIHDRYADMWKHLMERMEQLAQIGSATGIYNTFVRYLVCVPHDSLNFSRQIYDHNGP

SEQ ID NO: 324004 - protein, 242 aa, Zea mays
  Clone ID: MRT4577_58560C.1.pep
HSPVRAGWRTARKGARCAGRRQPGRFEARTPASATRRGTTAGRADAELGDIIDFAEFRRRVSKKCTVMDSKAFYDFNQRRGKPGDPFYVLLCCWLAAIGAGLLKTEEILEGVARLRISNDIEFEEETFIDMMRAAKEKRAKLKAPAPQIPMETRAEKALEAIYVCCFGQDMVEDEDEKLLRAILNAVFPSVGRAAVERMVASMAKQVASGERKRDGRTVSKEVQQRQLKDLEFLKQNKLESS

SEQ ID NO: 324005 - protein, 84 aa, Zea mays
  Clone ID: MRT4577_58561C.1.pep
GPFFFFFFQKGHVGFQYGHFLVPTSKGLQIHIEFCSNNPTKFHHESVVPKRTESKAAAAAGEPRRVICCQVSARRRCCFTRPGR

SEQ ID NO: 324006 - protein, 130 aa, Zea mays
  unsure (1)..(130): unsure at all Xaa locations
  Clone ID: MRT4577_58562C.1.pep
MGALPVAHSLALTAAFLPCRRPAARGRCRRRRYRAVVAYMEPNPNSPAAIAGRLVGALPIVGLVARILNDEGGVGGDIIDFAEFRRRVSKKCTVMDSKAFYDFNQRRGKPGDPFYVLLCCWLAXHRAGLL

SEQ ID NO: 324007 - protein, 56 aa, Zea mays
  Clone ID: MRT4577_58563C.1.pep
PVARKGLHIIRCNPRLQRHNRHHDGEAHRRTLPYLRSTRTSCSSLLENMNSKELQG

SEQ ID NO: 324008 - protein, 61 aa, Zea mays
  Clone ID: MRT4577_58564C.1.pep
ARACRNDRYNFSWAKFGPASRCQATAAGGVAAAGPPVSELEAIQWGSAKLHGARDEMDDEV

SEQ ID NO: 324009 - protein, 46 aa, Zea mays
  Clone ID: MRT4577_58565C.1.pep
CKHNLHFRHTQNGHLPARFASPVYALGSPPCISWLTSAGTCSSSAP

SEQ ID NO: 324010 - protein, 57 aa, Zea mays; identical to SEQ ID NO: 322283
  Clone ID: MRT4577_58566C.1.pep

SEQ ID NO: 324011 - protein, 55 aa, Zea mays
  Clone ID: MRT4577_58567C.1.pep
LAMGSLALLWLGSSLLPKAGLGHQRSGYVTTPASTLLTERKRDWTRLWGTGGGQS

SEQ ID NO: 324012 - protein, 42 aa, Zea mays
  Clone ID: MRT4577_58568C.1.pep
CIILYNEVDCRCNHHSATIGCSYKRGLAIFWKATPQGSLQHP

SEQ ID NO: 324013 - protein, 118 aa, Zea mays
  Clone ID: MRT4577_58569C.1.pep
FFFLIIFILLFFKVLLVFHSIYYKVYNQSLRNQLLKREHNLPNIWKPRMYMAKRRERPHIKKNRKFPGAKNPNCLDKRKELICISKTAGLALNPKNCSKTKGAFKYSPGLESTTISSP

SEQ ID NO: 324014 - protein, 76 aa, Zea mays
  Clone ID: MRT4577_5856C.1.pep
WQRVAHSEHTIRFVCTSLYRMLTRPGAVPFVPTAPPLSRLPPPPPCVRSQRPECLHLSGCFDRFSFHLRSPTQSRQ

SEQ ID NO: 324015 - protein, 66 aa, Zea mays
  Clone ID: MRT4577_58570C.1.pep
PTYKVKPYGIRKTPKYYTKNTISTLSHGRTSIEGPIQDDTYLSGKVQHSVGNQPSALDERNGVLRY

SEQ ID NO: 324016 - protein, 107 aa, Zea mays
  unsure (1)..(107): unsure at all Xaa locations
  Clone ID: MRT4577_58571C.1.pep
ILHIQGGQCGNQIDANLWEGVCEQHCLDTTCQSTDSSDLXXQRVNDHYSEAYCGRFVTRSLLMDLGPATIYSAATEPYRQIFRTNNVWYRKSLAGNNWDTGDYTEGS

SEQ ID NO: 324017 - protein, 33 aa, Zea mays
  Clone ID: MRT4577_58572C.1.pep
ELVLRVLGLAVQELINLRCKGGQPFVRLWLHGT

SEQ ID NO: 324018 - protein, 79 aa, Zea mays
  Clone ID: MRT4577_58573C.1.pep
PFPISNIPMNPLDAFSSYNLAPTQQSWLLQELQLHPVIPGQSPHQWLLWRTKVAEGLTEADAWEFVIRTNSPIVPAQQA

SEQ ID NO: 324019 - protein, 72 aa, Zea mays
  Clone ID: MRT4577_58574C.1.pep
STCKDVPTSSQKRPHAKATTSKRSDFNRHSFNNRNITLSYMVAIHVVRRGGGVVLMQGWVDDIRRRRRLRPL

SEQ ID NO: 324020 - protein, 62 aa, Zea mays
  Clone ID: MRT4577_58575C.1.pep
AGCNSTLYEAWNFTYIPFFSLRRKPCLFFMLREEYPNSVKIYSFRKNIMLCEQWISFSYQSD

SEQ ID NO: 324021 - protein, 64 aa, Zea mays
  Clone ID: MRT4577_58576C.1.pep
PRPPPLPVVVCPPVLLFLIPPRHGVPSQAGGISSPNLFQWQGQKDWRGCGAGLFSPRFPFLSIR

SEQ ID NO: 324022 - protein, 62 aa, Zea mays
  Clone ID: MRT4577_58577C.1.pep
SCGSGQSSLSTEDYSWKGKPSRMSYYERWQTVPSRSCRSAVPSPGWNLMSAKTAQLHRHRDN

SEQ ID NO: 324023 - protein, 92 aa, Zea mays
  Clone ID: MRT4577_58578C.1.pep
CLRVGGPTKNRGNQGEPGADNRGKKGSGGKTEKKTGQAKVDGINDEPMTPGQSNMADERLGDYLVEQGLRKESTNHARRPDHGSSHQQQRHQ

SEQ ID NO: 324024 - protein, 92 aa, Zea mays
  Clone ID: MRT4577_58579C.1.pep
ARTPASGRPWPTGCAPWSRARRDPSPPWGWHRTVTGRCESPVESRRLRRRAQIWLPESLTCGPDAHASRTWRPSIGCEENKALLVGEHIKKK

SEQ ID NO: 324025 - protein, 765 aa, Zea mays
  Clone ID: MRT4577_5857C.1.pep
MDGGEDRTFKANFTSEGVTMLQDRVKEKLSELMGDYSDDTLAEYVVVLLRNGRHKDEAAKELHVFLGDDNDAFVSWLWDHLSSNLHLYVQPKAASSKDDTRSSHNAARGLPVHSVISSTQVNHEPEAETQKTVITHKKKDWGHRKRDWGTIGRGQSETVPLRSVVDNVSLAKEKDLHESHADEKAFHKSHSVRRTRSPDMHNHRKRSREADVRSTKSATHPVNGAPRRLLQFAVRDAVRTVPPVTSGSESASKRLCSVVSTLASDSTLDITHIRLQKTNSDLRIPVATAALRAAAEAAEDALKDSFCGSVFSRLGRMPTINSTEQSPDRRSQDLEGKEYENIDNIQAENQVEFYGRNQHGGSDVYMRDRRTEEATGSLSNIDEYGHNSSVRYNGLGSLRSALPASGGKESLVLGYVRGASEVRSGRLIAQGPPAGSGPRSSEKILNVSGNTKTQKLRTHVTRDALAFDPQVPMEKVSGARKSIGQGPHAGSGPRPSERILNVSGNTNTQKLPTHVTRDDLAFDPQVPMEKVADARKSHVKIAHANDMSMTTDKSKDLIQSSSMLEAQKATSGAAGSNTTGQPEGGSDSRTVFVSNVHFGATKDALSRHFNKFGAILKTHIVTDGVTGQSTGSAYIEFLHKESAEQALTLNGASFMLRILKVVRKNSTEATRSPGLLRVSRGSPFASRLIRTAYPRPTFPGAIRGRLPLRGVAQSLQWKRSATDSSNAVKPSQAAPSAPGNQLVTPTPRSFTYTRTEPKPNDGAMA

SEQ ID NO: 324026 - protein, 93 aa, Zea mays
  unsure (1)..(93): unsure at all Xaa locations
  Clone ID: MRT4577_58580C.1.pep
TATTTGRCRSDEMRPRGPCGLLPGTARRKLIRWTSYWSXAMRQTTRLSDLAPSADLFGRPNTRAVKRYADACPGTEWCSQMTRTDSADWLPCM

SEQ ID NO: 324027 - protein, 216 aa, Zea mays
  unsure (1)..(216): unsure at all Xaa locations
  Clone ID: MRT4577_58581C.1.pep
GLMRPCFKVNSGGLYSGGSAQMVEKSLDIHGDEILYVGDHIYTDVSQSKVHLRWRTALICRELEDEFNALVKSHDQKEKLVTLIQQKEIVGDLFNQLRLALQRRSNSRPAQTLAATCMDDQELTESMQKLLIVMQRLDEKIGPMLEADGELFNKRYADIYTSRVSNFLHYTPFMYFQSQEQTLAHDXPIPILEERTSKFIEHPFVTIWRLGRKEGT

SEQ ID NO: 324028 - protein, 763 aa, Zea mays
  unsure (1)..(763): unsure at all Xaa locations
  Clone ID: MRT4577_58582C.1.pep
MATPFPPEADEGEARELLYEAYNELHALASELGGAAAAPAVVVVGHQTDGKSALVEALMGFQFNHVGGGTKTRRPVALHLRFNPRCDEPQCRLLSATGDADEHDEAGVAARPMPLADIQAYIEAENLRLENDPCQFSEKEIIIKVEYKHSPNLTIIDTPGLILPAPGRKNRVLQSQASAVESLVRAKIQHKETIILCLEDCSDWSNATTRRVVMQVDPDLARTVLVSTKLDTKIPQFARPSDVEVFLHPPNCVLDVSLLGDSPFFTSVPSGRVGSCHEAVFRSNGEFKKAILSRELEDIASIEDKLGRSLTTMEKDRIGVGNLRLYLEELLQKRYVKSVPLIIPLLEKQHRNTTSKLREISHELSDLDETKLKEKAQLFHDTFLTKLSLLLKGMVVAPPDKFGETLVNERINGGTFTGSENFQLPNKMMPNGGMRLYGGAQYHRAMAEFRLVVGSTRCPPITRDEIVNACGVEDIHDGTNYSRTACVIAVAKARDTFEPFLDQLGFXAFVHTEEADPNLCLSXLEKDGEHFNSHEVLIRRVQEAFKRFVESTEQSCRQRCMEDFXAARAGTTRYVTWSLHNKNRAGLRHFLDSFVAPEQLSVNTLNERFSGLNDNKQDKAKGDSKSNHSPDTNSSTAMPETRLVDLLDSTLWNRRLVPSSERLVYALVHQIFHGIKEHFLVTTELKFNCFLLMPIVDKLPALLRQDLESAFEEELDSIFDVTQLRQSLGQKKRELEIELKRIKRLKEKFGEINKKLNSLQVRQ

SEQ ID NO: 324029 - protein, 650 aa, Zea mays
  unsure (1)..(650): unsure at all Xaa locations
  Clone ID: MRT4577_58583C.1.pep
MADAAEMVRFLYLRTPPRPLLPQFAVHTQRPQSLLRVSPRFRPPIRLRCRALDASRPVAVEGERDEEDGLEDEEESYFSVTSSGLSEVDYLGESTRGDLNVRRERLEALGNSKSTLHGPIEEIAWKEAGEAETLLHDLGIADPFSVRHSPRGIFCTRTLNLRSISVVGYDMDYTLIHYNVMAWEGRAYDYGMDNLKSMGFPVDDLKFDPDLVIRGLVIDKEKGNLVKADRFGYIKRAMHGTQMLSTRAVSEIYGRELVDLRKEIRWEFLNTLFSVSEAVMFMQMVDKLDQGLVPAELGPLDYKGLYNAVSKALFRAHVEGQLKREIMAEPDRFVEPDPELPLALLDQKEAGKKLLLITNSDFHYTNKMMNHAFNRFLPNDVGWRDLFEMVIVSARKPEFFQLSHPLYEVVTDDGLMRPCFKVNSGGLYSGGSAQMVEKSLDIHGDEILYVGDHIYTDVSQSKVHLRWRTALICRELEDEFNALVKSHDQKEKLVTLIQQKEIVGDLFNQLRLALQRRSNSRPAQTLAATCMDDQELTESMQKLLIVMQRLDEKIGPMLEADGELFNKRWGWLSRAGLWDKSHLTRQIEKYADIYTSRVSNFLHYTPFMYFQSQEQTLAHDXPIPILEERTSKFIEHPFVTIWRLGRKEGT

SEQ ID NO: 324030 - protein, 536 aa, Zea mays
  unsure (1)..(536): unsure at all Xaa locations
  Clone ID: MRT4577_58584C.1.pep
MKAILSRELEDIASIEDKLGRSLTTMEKDRIGVGNLRLYLEELLQKRYVKSVPLIIPLLEKQHRNTTSKLXKSVMNSGDVXLLVDYSVQXWVLPCSGLCGVSXLKALMESWVTFFPISPTLQAHDNIFVIQDVXYVVTLYLNSDLDETKLKEKAQLFHDTFLTKLSLLLKGMVVAPPDKFGETLVNERINGGTFTGSENFQLPNKMMPNGGMRLYGGAQYHRAMAEFRLVVGSTRCPPITRDEIVNACGVEDIHDGTNYSRTACVIAVAKARDTFEPFLDQLGFRLLYILKRLIPISVYLLEKDGEHFSSHEVLIRRVQEAFKRFVESTEQSCRQRCMEDLESTTRYVTWSLHNKNRAGLRHFLDSFVAPEQLSVNTLNERFSGLNDNKQDKAKGDSKSNHSPDTNSSTAMPETRLVDLLDSTLWNRRLVPSSERLVYALVHQIFHGIKEHFLVTTELKFNCFLLMPIVDKLPALLRQDLESAFEEELDSIFDVTQLRQSLGQKKRELEIELKRVKRLKEKFGEINKKLNSLQVRQ

SEQ ID NO: 324031 - protein, 71 aa, Zea mays
  Clone ID: MRT4577_58585C.1.pep
SNCGHNNGPWSHVFGPTTTRLRDIYHVQLDNATFDPYDNASRFYSRSNLKPLIGFKHNPTRCWEKLVWSPT

SEQ ID NO: 324032 - protein, 91 aa, Zea mays
  Clone ID: MRT4577_58586C.1.pep
VKDVEGLKDSRSSALWIGVAVPMKGSECGQWPSDGEEGLCQRLARGNEHSNLAACHQTRLRSDEKLASSLCLSPGSRACRDGSKPEERING

SEQ ID NO: 324033 - protein, 97 aa, Zea mays
  Clone ID: MRT4577_58587C.1.pep
HRPPPPLLLYLSFAWESLTSVKVARFGRLARLAWDFWFHRSTERHGHCLRSHVLGLCITTNPLMRNPTVPLYLCRRSMLSAKAQHVVRKPQVTRIFA

SEQ ID NO: 324034 - protein, 79 aa, Zea mays
  Clone ID: MRT4577_58588C.1.pep
CGDEPVHMKAGREVTAGILRQSLPCRTPPTGVPFCGTILRGCDWSIARLQGADDPAYRTMILVDRPLNGRAPLTNFLQV

SEQ ID NO: 324035 - protein, 102 aa, Zea mays
  Clone ID: MRT4577_58589C.1.pep
EVLHTSMASYHCVRNTDVDRQLMQPHLLSSRPLIFGLMPVPGLGLIIMAVSGMLGPLLDCGDQPQRLWWVFLAFIQTAYGAVNAICVVKVLPLRVGAARASR

SEQ ID NO: 324036 - protein, 124 aa, Zea mays
  Clone ID: MRT4577_5858C.1.pep
KSLVVLEMTLSLEKDEQWRSRHQEQHECTIPIFLSHSLPLLYLLRVVDDTVPPGPQGCALTRLGLCARAGRAGQAVATLPGPHGCALTRLCHCARVGRARMPSQNVAWRLVAPWPPTRFMRPLE

SEQ ID NO: 324037 - protein, 263 aa, Zea mays
  unsure (1)..(263): unsure at all Xaa locations
  Clone ID: MRT4577_58590C.1.pep
EPALAGAARQACAPSGRSQRSSCPHAPGPPGSHRRRGQPASASRATAPRCGESRLPPVLGLGPRPPRGIAXPRRSHARRGXHPCPPASGRQGLNPKPPGGPRPCSPRRRGHVPAPGSRDHAVVAGWQARAGGADDRRAPIHSRGRGSRTPAHPXAGAGPRSXAPGGHPAVPRSCARSRYSVSSRRGXARAAEGPACACWPGSRARAAXAVGGLPARAPGDAHPRAPGSQGRRGQVLMRWGRLQLAGDGRTARAASLHRTGAAR

SEQ ID NO: 324038 - protein, 140 aa, Zea mays
  Clone ID: MRT4577_58591C.1.pep
TIGTPRVLLEGSTYPRRGGRGGGFNIVGGGEPDPRGKHRLINEFRERRPGGLAKLPSSTENFTTHRRQGHVKFPRQKKKFHKEWGGQNLQLPQIRMVSRNGNREYIPKGEEIPKIFLCRIKEIFPKICAGVKKVLAALKG

SEQ ID NO: 324039 - protein, 84 aa, Zea mays
  unsure (1)..(84): unsure at all Xaa locations
  Clone ID: MRT4577_58592C.1.pep
KIXXEDXSIVLRXSXXWXRVXKCXXLXXXLLEFGFCGCXSWWHACXXVLVSGICPTKXRGAWMLVXSVSGXRNHLXGXLVGRVV

SEQ ID NO: 324040 - protein, 86 aa, Zea mays
  Clone ID: MRT4577_58593C.1.pep
ELGALTGLESEPQGSKFPCTVLGMAFSCPITSCRLSPCARLFLPSIRLISGCRLPVWWNRIPYVALKIRLPHHSPRDVSILRGTVS

SEQ ID NO: 324041 - protein, 83 aa, Zea mays
  unsure (1)..(83): unsure at all Xaa locations
  Clone ID: MRT4577_58594C.1.pep
VGPTPSAHAVXRSMRVYGQASRGKMPVMVAYQSAVLTLRKTEGGKNVPMTPASSGKVYVIITRGLRLRHKESSLMAKTYNVKM

SEQ ID NO: 324042 - protein, 50 aa, Zea mays
  Clone ID: MRT4577_58595C.1.pep
KQRMVPATTTTCSQPNSVCNVSTSYMLLIIKGLIEINSPSERFLIYNLFL

SEQ ID NO: 324043 - protein, 60 aa, Zea mays
  Clone ID: MRT4577_58596C.1.pep
DPARPARTLTGAVRRGGENTSVDASGNSCDLSTKLLHLAWHPTENSIACAAANSLYMYYA

SEQ ID NO: 324044 - protein, 68 aa, Zea mays
  unsure (1)..(68): unsure at all Xaa locations
  Clone ID: MRT4577_58597C.1.pep
FLMVQLSDKLRNYEPVGTPMLALIQVERIIVQSKPKIYSTVXDKCNSKQDNXEHKAEEVXDKALVTEE

SEQ ID NO: 324045 - protein, 401 aa, Zea mays
  Clone ID: MRT4577_58598C.1.pep
FREKQIVQYCVPAARAGGVRRRRDPAVAGGWRQGGGARRSGGASGVQLLAGCVRGFGSFRRQGHEGAAAIQHLVLPVVLLLADGRVLPAVLIVDPHPVAPRRRRVLVLILVVLRVRPRVGERVFPRVRNSISNNSDGETFISADDLRINLWNLEISNQSFNIVDVKPANMEDLTEVITCAEFHPTHCNTLAYSSSKGTIRLIDLRQSALCDNHAKLFEEHEAPGSRSFFTEIIASVSDIKFARDGRHILSRDYMTLKLWDLNMDSGPVATFQVHEYLRPKLCDLYENDSIFDKFECCLSGDGLHVATGSYSNLFRVFGCSPESVEASTLEASRNPMRRQVVDPARPARTLTGAVRRGGENTSVDASGNSCDLSTKLLHLAWHPTENSIACAAANSLYMYYA

SEQ ID NO: 324046 - protein, 126 aa, Zea mays
  Clone ID: MRT4577_58599C.1.pep
GQAVKGHYLFPVLLVKRKTPLGPNSPTAFPRGFADFFLPFALPVFPLLSGPLAPRHFFFFASSFGPPGFSLFASGLFFFWNFLRFPIFPRFPLCPFFPPAFFRLLFGVLGPPPGSGSGFPGRPPRP

SEQ ID NO: 324047 - protein, 94 aa, Zea mays
  Clone ID: MRT4577_5859C.1.pep
VSNNTIPPGLGWGAGTPLKGQVPLYKRTNGPFFPLLIYALVGGLSVEHVMVFFLNIFKTLLPTVDQVAVLLAGCLRAYLWLLGKPVFLVKPRPG

SEQ ID NO: 324048 - protein, 156 aa, Zea mays
  Clone ID: MRT4577_585C.1.pep
KGAVGPPPFFWVGPPLGPPRFSPFFFRLFFFLEFWGDNIFPPGTLFPFFSPTLVPGRGPLLPPPRVLDFPPWGVPPRGPNFFFLPPGGLSRPQKKKKKKKKKKKKKKKKKKKKKKKKKKKKKKKKKKKKKKKKLGYLPRPVSKRISAIHLAPSRAH

SEQ ID NO: 324049 - protein, 254 aa, Zea mays
  Clone ID: MRT4577_58600C.1.pep
RPGVDLEISNQSFNIVDVKPANMEDLTEVITCAEFHPTHCNTLAYSSSKGTIRLIDLRQSALCDNHAKLFEEHEAPGSRSFFTEIIASVSDIKFARDGRHILSRDYMTLKLWDLNMDSGPVATFQVHEYLRPKLCDLYENDSTFDKFECCLSGDGLHVATGSYSNLFRVFGCSPESVEASTLEASRNPMRRQVVDPARPARTLTGAVRRGGENTSVDASGNSCDLSTKLLHLAWHPTENSIACAAANSLYMYYA

SEQ ID NO: 324050 - protein, 67 aa, Zea mays
  Clone ID: MRT4577_58601C.1.pep
ACGKIESWKENVRMHGRDREQGHLCGTMEALGGSFAHTPDATFWEGEIDCAEDITDFTGEREAWPDD

SEQ ID NO: 324051 - protein, 76 aa, Zea mays
  Clone ID: MRT4577_58602C.1.pep
LPTTCNLIPRSANLGEVACAQRISEAVKNLLLQGIGSVIDTKDIIGVYTTPLMDDYASICDNHHEMHVHVTRCQRG

SEQ ID NO: 324052 - protein, 183 aa, Zea mays
  unsure (1)..(183): unsure at all Xaa locations
  Clone ID: MRT4577_58603C.1.pep
LWXXSFSXSSXPAAHGGPTRRRATLDTPALVXWPPPRHAFLGDANARVTXXAFLQHPVLCGRPSGRCTRFPSAXXSCRXEVRRRVRRGAPAGQSHSDRNGRGAXXCXXSARSTRSRHTFXHGXXGTNTKQPLGPPXGGAAXADPSRTPACGAGXPGSGGRDTTAPXPDWTARPPPPHTGEGRR

SEQ ID NO: 324053 - protein, 201 aa, Zea mays
  Clone ID: MRT4577_58604C.1.pep
MDPVKQGSQKYTKNVASMLCKSPEEVVSERHNSKSYQPSMEQCTQKSKESKQVVDDHVADFLYENGIPLNVVNSRSWEIMLESIGQYGPGYLSPSYHQLRNSLLERAVDKTNEVRKKHEEAWKKYGCTLMSDAWTDTRPRHFINFFVKSPVLVENEENEEDVDMEDEEDDFNEMQDDEDDEEDEDGGGGAAGAFRVDDALL

SEQ ID NO: 324054 - protein, 147 aa, Zea mays
  unsure (1)..(147): unsure at all Xaa locations
  Clone ID: MRT4577_58605C.1.pep
MNLEIQMPQGQKPVVIKNQLVSFFEMIPGDXPPXWSXRIXXXSLSXNDNXDGAPFLDPPXGSXPQWNLYXLDEIXDXDVXGIRKKWASHQILFLGXNPXHXHXKDVPKGLKNXWKFGRKXRAGAGLVNDWVXSSXXSRXDDAMEDGR

SEQ ID NO: 324055 - protein, 91 aa, Zea mays
  Clone ID: MRT4577_58606C.1.pep
MAAMGMKEGVLMLALGLAMAATSSAVVYKVGDASGWTILGNVNYTDWTSKQNFRVGDTIGYQDWSLLDGELFSCMCSLYSIFEKMMLLNNM

SEQ ID NO: 324056 - protein, 90 aa, Zea mays
  Clone ID: MRT4577_58607C.1.pep
GTSSRPGPLSRATRLTYVCWLAHSCPHGADRRRWNGHAHRRRGQRFSQPRAPFARTAPPPNTMLETTNNLPMELIEYDVGEMLTATSHSR

SEQ ID NO: 324057 - protein, 529 aa, Zea mays
  Clone ID: MRT4577_58608C.1.pep
MHGLPDGKQADANKPPYSIASASSGAGRTAAMGGDASTIEGGPLPHLGGRPASRVPDTPLVRTAGDAARMVWDESKRLWGIGLPIGVGMLSMYAISSITQIFIGHLGNLPLAAASIGLSVFATFALGFLLGMGSALETLCGQAFGAGEVAMLGVYLQRSWIILVAACVVMTPVFVFAESLLLLIGQDADVARESARFATYIVPSIYAMGINFAASKFLQAQSKVTVPAWIGFGALLACALLNYLFVSVLGWGLPGAAAAYDIAHWIIALGQVVYIIGWCKDGWKGWSVAAFHEIWPFVRLSLESAVMLCLEVWYMSLITVLTGDLEDAQIAVDSLGICMNINGWEAMIFIGLNAAISVRVSNELGSGRPRAAWNAVMVVVGEALVIGILCMALILIFRDSFSIIFTSDTTLQRAVARIAGLLGLTMVLNSVQPVVSGVAVGGGWQGLVAYINLGCYYIFGLPLGYLLGYKFSFGVGGIWSGMLCGITLQTLILLGVVWRTDWKAEAAQASGRVQKWGGKGTDEVKPLLE

SEQ ID NO: 324058 - protein, 372 aa, Zea mays
  Clone ID: MRT4577_58609C.1.pep
MPKKGTKSKKEKVDDVPNEQENKLPDYLELQRTRVVCNADAPIHTQGFQYSGAFAAMGIDNSVSVDKFCKNFKIEINRLTEDDMEFDMIGIDASIANAFRRILISEVPTMAIEKVFMADNNSVIADEVLSHRLGLIPLDADPRLFEYISENDVPNERNTIVYKLHVSCPKNSQRITVKSSELEWLPEGSQLSMSAPAQSGDKQKTFTSFSQSQKEILEKPLGVKYKDITIARLGPGQAIELEAHAVKGTGNVHAKWSPVATAWYRMLPEVVILKEVEGPQAEELVNKCRVNVFDIEDLANGGKRAVVARPRACTLCRECVMGPNEKQVELRRVRDHFIFTIESTGSMPPEVLFTEAVKILEEKCERVISELS

SEQ ID NO: 324059 - protein, 170 aa, Zea mays
  unsure (1)..(170): unsure at all Xaa locations
  Clone ID: MRT4577_5860C.1.pep
VHFGATXFSLSRHFNKFGAILKTHIVTDGVTGQSTGSAYIEFLHKESAEQALTLNGASFMLRILKVVRKNSTEATRSPGLLRVSRGSPFASRLIRTAYPRPTFPGAIRGRLPLRGVAQSLQWKRSATDSSNAVKPSQAAPSAPGNQLVTPTPRSFTYTRTEPKPNDGAMA

SEQ ID NO: 324060 - protein, 53 aa, Zea mays
  Clone ID: MRT4577_58610C.1.pep
VHLELPVCVPPLRAQGAVGADATLVCLAHHLLPDGPALADAAGPRANAAQVAR

SEQ ID NO: 324061 - protein, 86 aa, Zea mays
  Clone ID: MRT4577_58611C.1.pep
GREAVFTSSHNQRGYMVQETSLQVFPALQLYRYVRRIARANHTVRKSWEGRITRSPLFSNAGRRVSAYHLFCEELAQKQVHNLVAD

SEQ ID NO: 324062 - protein, 404 aa, Zea mays
  Clone ID: MRT4577_58612C.1.pep
HNASTGGVPQNPSNVRRKFLEEFVLLAVSLTVLMVATLVVTAYKLRRPRGSKTEEIQTAGYSDSPASSTSTSWKLSGSKEPLSINLAIFENPLRKLTYAHLHEATNGFSSEALVGTGGFGEVYKARLMDGSVVAVKKLMHFTGQGDREFTAEMETIGKIKHRNLVPLLGYCKVGDERLLVYEYMNNGSLDVLLHERDKTDVGLDWATRKKIAVGSARGLAFLHHSCIPHIIHRDMKSSNVLLDDNLDAYVSDFGMARLVNAVDSHLTVSKLLGTPGYVAPEYFQSVICTTKGDVYSYGVVLLELLSGKKPINPTEFGDNNLIDWAKQMVKEDRCSEIFDPILTDTKSCESELYQYLAIACQCLDDQPSRRPTMIQVMAMFSEFQIDSGSFFLDGFSLDSDRGII

SEQ ID NO: 324063 - protein, 231 aa, Zea mays
  unsure (1)..(231): unsure at all Xaa locations
  Clone ID: MRT4577_58613C.1.pep
MVGFFRSGNLASRVFDRQFLSPRPGATVNTVRQFYENLVPSYTIYDIDCPDYSFRKFTDDGKYLVAFSRNHQDLIVYRPIWLTFSCHEECDSHDLPANAERFESFFKQLYSISLASSNEYICKDFFLYMECHQYGLFATSTAQSNDSSVTDGAIHGVPSIEKITFYLVRLEDGAILDEKAFCNDFINLAHSIGAYLYXDLVCIVSLRYQTIHVLQIRDSGXLVEVRRNWCI

SEQ ID NO: 324064 - protein, 148 aa, Zea mays
  unsure (1)..(148): unsure at all Xaa locations
  Clone ID: MRT4577_58614C.1.pep
FTVRDRVKPAHATFYGVRDGSGTTXGACVYHDTRTQGYSVQTLGVNTVMFLDLTACXTXYDVQCVDIPSQCNSYMAALVVTMTYLCPPKDQWCNPSLDHFDLSMSAFLQIAQEKADIVLISYRRMACAKHGGIRYTISENQYFNMVTI

SEQ ID NO: 324065 - protein, 123 aa, Zea mays
  unsure (1)..(123): unsure at all Xaa locations
  Clone ID: MRT4577_58615C.1.pep
YEERGYDSEDKISICVSNTDGEEDATPSSCPTFAWWKIWRFTTPTFLMCIAILKPRNVKGELPAXAAGGYHLLRMLVRRTIMXALMQMICARIGVYKGKDLAKICRQXAPSLXTRAVWDMTEI

SEQ ID NO: 324066 - protein, 165 aa, Zea mays
  Clone ID: MRT4577_58616C.1.pep
MLRGARTDWVWGLGAQKKKRFFLFGLKQGCFQSVLISDVLRRWTDSAATVLPILAELLNNDIRVWVYSGDTDGRVPVTSSRYSVNQLQLPVAAKWRAWFSSTQGAGEVGGYVVQYKGKEKGSLSLVTVRGAGHEVPSYQPRRALVLVQGFLAGKTLPGCKTCESA

SEQ ID NO: 324067 - protein, 207 aa, Zea mays
  unsure (1)..(207): unsure at all Xaa locations
  Clone ID: MRT4577_58617C.1.pep
PVVHDCSTCSGPCCVAPELIGFGALGPKKKDFFLFGLKQGCLQSVLISDVLRRWTDSAATVLPILAELLKNDLRVWVYXRHNSTAQSSLFSAPLMRQIDNVEACRCDVGSGDTDGRVPVTSSRYSVNQLQLPVAAKWRAWFSSTQGAGEVGGYVVQYKGKEKGSLSLVTVRGAGHEVPSYQPRRALVLVQGFLAGKTLPDCKTCESA

SEQ ID NO: 324068 - protein, 83 aa, Zea mays
  unsure (1)..(83): unsure at all Xaa locations
  Clone ID: MRT4577_58618C.1.pep
PRRRRLLEHAFDQLSLHSEEHLKGPILVSFTNEHRDEQVRIXSGGTFKDFMENTTPAAFGVQYRLFKATADYLSXPSPRSGLA

SEQ ID NO: 324069 - protein, 66 aa, Zea mays
  Clone ID: MRT4577_58619C.1.pep
AKVCMAQDCVPHLAFPHGVLSRELLCDLRYPSSALNNLVYFVHWGRCQAIWPEIPPSLIRSVNTRE

SEQ ID NO: 324070 - protein, 271 aa, Zea mays
  Clone ID: MRT4577_5861C.1.pep
MAGDALIVIVTSFLLALPSATAIGKVCGNAGNYTANGRYRSNLDSLAAALPASTSSSPQLLANTTAGEAPDAVYALALCRGDLTGNLTGCSACVNGSLQYARRACPYAKAASVYDDNCLVGYSSANILVPAYNATRDTSTLFDYWNSMTIAGNATLVAAHVEDLLTQTAQQAASSPRRFVTAYMDGSSNAVIPTLYSLAQCTPDLSAGDCLACLQRILGLLNATTSVSLGGRVLLLRCNFRFENNMFFDGAQMTQIKPSSGASAPPPPFFD

SEQ ID NO: 324071 - protein, 147 aa, Zea mays
  unsure (1)..(147): unsure at all Xaa locations
  Clone ID: MRT4577_58621C.1.pep
MGGYVKTHKTYAYFKRFQVKFKRRRAGKTDYRARIRLINQDSIKFNTPVIRHLXCEFTTEDITVQIIYATIAGDMSLACAYSHELPRYGLEAGLTNYAAAYCTGLLLARRVLKIRGLDQEYEGNVEATGEDFSVEPADERRPFRALL

SEQ ID NO: 324072 - protein, 124 aa, Zea mays
  Clone ID: MRT4577_58625C.1.pep
WLYVASLVFLVTWRAMVVHRLLTRACVAGIRACSQGVRQRRSASLLSCDGRRRRGRLAPARRDPAPSCRIVARTVALCDRSDRLVRLGGVRHLDPVARPRQARRGSFASRVSIYPWHCPKGDYP

SEQ ID NO: 324073 - protein, 158 aa, Zea mays
  unsure (1)..(158): unsure at all Xaa locations
  Clone ID: MRT4577_58627C.1.pep
MGTSRPAGRLQSPLAVSRASPSPPRRRHRTPAAASAMGAYKYVSELWRRKQSDVMRFVQRVRCWEYRQQPAIVRLTRPTRPDKARRLGYKAKQGYVVYRVRVRRGGRNRXAPKGIAYGQPNPQGITHLPIHTDKMSEPDSSPRQPVGHLEAGRELQSS

SEQ ID NO: 324074 - protein, 142 aa, Zea mays
  Clone ID: MRT4577_58628C.1.pep
FFFGGKPPKKGVKPGPFPKEGSPPLGGVTPFLKKGEEAHSGFQKQTLKKKKNNQPVVKIKKKAGQVLQTRFFPTSRGGFLTPGFPGKRGWFSRTGPASWPKNPIKGVFFFLKKKKKKKKKKKKKKKKKKKGKKNSRGGRVPP

SEQ ID NO: 324075 - protein, 94 aa, Zea mays
  Clone ID: MRT4577_5862C.1.pep
GQPNLFGFTRGKIYKQVSQNPHPVFFAQKRCFIRGPKGTQKKGPFLKIFKGRKLFRGLPVLGGQILFLGDLGGAELRGKSPSLETYTPGWSQVD

SEQ ID NO: 324076 - protein, 186 aa, Zea mays
  Clone ID: MRT4577_58630C.1.pep
MGGFVKTHKTNAYFKRFQVKFKRRRAGKTDYRARIRLINQDKNKYNTPKYRFVVRFTNKDITAQIISASIAGDMVLASAYSHELPRYGLEVGLTNYAAAYCTGLLLARRVLKIRGLDKEYEGNVEATGEDFSVEPADERRPFRALLDVGLIRTTTGNRVFGALKGALDGGLDIPHSEKRFAGLSFS

SEQ ID NO: 324077 - protein, 438 aa, Zea mays
  Clone ID: MRT4577_58632C.1.pep
LAAPATVPPEVRGCDRGMDTLPEGVVQHILSQLSNARDVAGCAAVARCWRDCVAFLPSLYFPRGAFEALAGGPASAVAFADDAIGRMVDAAARLEELVVYCPFSASLLPHWLAARAATLRVLELRMDSAAADKSGHLNLDSIGVAAGLEELRLWGLTMTRAPAWGRMERLRVLEIVSAILVDAAVNDVLAACPNLTDLSLLGCQCDGEAVISLASLERCRLDFLGSGNSSLRFAAPRVESLEVQGFSFIYLQGGNRLKHLTISKNTGSVHHVEMGKLPELDQLSLRGVQWSWGAISSVLQCASEVKHLVMKVEFSGDYDTLQPFPEIDLVEFFNSHPKLRKFEVHGAMFAALSQENSLKNLDSRFVIPFLEQVVVTVRSSLNAKQKLNTLKSVVRYSVRLRRMIIRISQMKNCHAAGDDFFEEICKFTYMNSGTVCIE

SEQ ID NO: 324078 - protein, 117 aa, Zea mays
  Clone ID: MRT4577_58633C.1.pep
MPTRNIAIGGVQEEVYHPNALMAALAEFISTLIFVFAGSGSGIAFNKITDNGATTPSGLVDAALAHAFGLFVAVSVGANISGGHVNPAVTFCVLLGGNITLLRGILYWIAQLLGSVA

SEQ ID NO: 324079 - protein, 192 aa, Zea mays
  unsure (1)..(192): unsure at all Xaa locations
  Clone ID: MRT4577_58634C.1.pep
QTHINVHGPDIGIYLNSTNSXQGAXECERHKIIDRYQRNRTTASDVAFTDSKRLNQDLHTNQXLMKPACTGVDDNQPDLRTHTDAAVXSDIKLRPXFNDYSGTADNTTIXVVQSHRQLNYRALEDISTMVHILTRENAEAYSAXTIYNAGTPHPAYFNVSNSNATNDTRVTGGPSVLSIIKXATAAAIAYAM

SEQ ID NO: 324080 - protein, 112 aa, Zea mays
  Clone ID: MRT4577_58635C.1.pep
NLPPRPLGKAKSNPQAVLFWGSPPPPRGGGGNFKPVTWANKLYAQNIKQKTSRAQKGKNLGCLRRGPTPINRGGNPARLPVEKTGHPPGKRNWPTRREKRFAYRDPFRLLVH

SEQ ID NO: 324081 - protein, 229 aa, Zea mays
  unsure (1)..(229): unsure at all Xaa locations
  Clone ID: MRT4577_58636C.1.pep
MAAALRALAVLLWVAAAYPVVFRARPVQALAANWGTRALHPLPGDITVRLLRDNGFDKVKLFEADPPALRALGHSGIQVMLGLPNELLGSVAASVTAAEQWVIQNVSTYVSKYGVDIRYVAVGNEPFLKSYKGKFEAATLPAVQNVQAALVKAGLARQVHVTVPLNADVYESGDGRPSSGDFRPDIXGLMVSLVRFLLDNGGVLTINIYPFLPLYADPNFPVDYXYFPS

SEQ ID NO: 324082 - protein, 190 aa, Zea mays
  Clone ID: MRT4577_58637C.1.pep
AFRKKKKKKKKKKKKKKKKKKKKKKKKKKKKKKKKKKKKKKKKKKKKGGGGFRVFIFTSRGLQVFVFFLGPLNLIYWAVFLNGGVGKNLGFPNFIGFGENPFLPGGVIGKGARPVGFSKILPTLMGNGAPPFGGLLSGGGGGFPPGWPFSFARPLGPFFLFFFLFFLAILAGFPGKFLIGGFLWGFFNRF

SEQ ID NO: 324083 - protein, 125 aa, Zea mays
  Clone ID: MRT4577_58638C.1.pep
DEIEVCSGRYSVDSSPRRDDVTRRTAVPLYRYATMPGQQSYYSTDDGYSDLSSSRDTALARAEGQPVGRAQARVGEYADEEYPVFSGTFEFSSQVGGPNNGGTSQGGDGSEDFHTGPARRESNNL

SEQ ID NO: 324084 - protein, 102 aa, Zea mays
  Clone ID: MRT4577_58639C.1.pep
HFGCGPQRAAMLQGSHRSPRFKRAYALKLPRFFWRSWEFLGVKLGAVKMMHAAVDGILREEETIVLPLGAAEFRALGGAEHRLGLRLRRRLGGHFSRTSCVG

SEQ ID NO: 324085 - protein, 89 aa, Zea mays
  Clone ID: MRT4577_5863C.1.pep
SSGSTPFMQCKLSSSWHICFHMQPPRIALQHVGSAPESSPIVYTWSAWVPGPLLWIQTSQWHFSHEFRRQSGKYGDKSSAAARALVPII

SEQ ID NO: 324086 - protein, 84 aa, Zea mays
  Clone ID: MRT4577_58640C.1.pep
SIKSLYLAKQANAEHESSTVVLHCFSRPADPLTQEVLCVCVRSFLLCPYRARLASLCTSGLYSYASRSSGLSGCTSRLFCSAVM

SEQ ID NO: 324087 - protein, 402 aa, Zea mays
  unsure (1)..(402): unsure at all Xaa locations
  Clone ID: MRT4577_58641C.1.pep
MDVTGDAGGGRRPNFPLQLLEKKEEQPCSTSPAVAVGAGANGSGEMQMKKVAAPKRTSSKDRHTKVDGRGRRIRMPAICAARVFQLTRELGHKTDGETIEWLLQQAKPAVVAATGTGTIPANFTSLNISLRSSGSSFSIPAHLRAAGPRFGGARGDPWERVVGVGLGFGAAAEDPPSATSSASSPLLLSFXTPAASVLTCXSPSSAAAGSDLSKKRRWEQEMQQQHQQQYHQQQQMAGYTTQSQMPGAVWMVPSASSNAQAAAAAGGGGSNANESIWTFPQXQAAAAAARRPVYRGVPSGLHFMNFPAAPMALVPGGGQQLGLGGPVPVGGAGNDSSGSASGGGGGEGHMGILAALNAYRAHSAVSDAAPEQNGAEGGSRQHQQHGGGGERQESVSPPSDGS

SEQ ID NO: 324088 - protein, 63 aa, Zea mays
  Clone ID: MRT4577_58642C.1.pep
DGGLESWTYGVIESQRQTTTCKLDPCVTREREQNPMKACPDSDGCRYGPFIFSPLYSFHLPRK

SEQ ID NO: 324089 - protein, 98 aa, Zea mays
  Clone ID: MRT4577_58643C.1.pep
VKAPAQASELRGSSAPPLSLRQFGSLKVLGHGVVLAKPTVAKGERVPKVPPNRFQLPAGSIVPEVSFSTLVFLLVLKSICCPHRAVLCGQLVVKKPLV

SEQ ID NO: 324090 - protein, 72 aa, Zea mays
  Clone ID: MRT4577_58644C.1.pep
SHRQDLACLQQDDPQRTAVPQLHHLHRRDPLAAHAYIVAVQRVEDQAQRVHPQHAPRDNITLLFRLLGPLRR

SEQ ID NO: 324091 - protein, 119 aa, Zea mays
  Clone ID: MRT4577_58645C.1.pep
GTNAGGGWVRPPAGTHAWIFFFLVGPLPSLSVYRSFFFFLSALGWLSVYGARAFFFCFLYSRISFFFFVGCFCLSLPSLFFFPRFHSFLSVCPSSLFYFLFFMRLLCFLAAPPRRVVYE

SEQ ID NO: 324092 - protein, 71 aa, Zea mays
  Clone ID: MRT4577_58646C.1.pep
LAPSINSSHSSDTSKRTLDPASHRPQRGSQDAYLSFIVVLLRCCIVKCLDLGVLHRDQLCCCCMFPCPLTS

SEQ ID NO: 324093 - protein, 3229 aa, Zea mays
  Clone ID: MRT4577_58647C.1.pep
MTSHGSSDDGNALTHTDGLAREGFPRILWEVLQGAGYTTPPQYAVQQFEKHRVPRCRVRMTLEPHPLQPGWRSLDSESFGYRAEDTIEAIALHGLTTFCGFHPLELATHPIGLFPAEKEDDPMWKDRVEHAKDIWAIYPGQTAHLTVRCMNALYRLQVMRGEAMSHLMALLEATKITLDNREELVVDLSQEMVEKDLQVEQLSTDIQELEELVGTRENTIEVLEDQLINTQQQLAEANEHLDMHHQEIQDQEANEDVDIEGGDEPASSVDTAGSGRPPSPESSMAGRQHRGQNERVPPPPPPPPTLQELMAQQNEILRQLAQRQPPPQHYGGGDHQRHPAAATYQEFLSTQPPLFTRAEDPLDADVWLRVVESKFPLLHGVCSEVTKVRFATQQLRGPARTWWDHFLAMQPEDREVEWREFKAAFRGHHIPAGIMDRKLNELLALTQGNRTVLQYAQAFNDLCQYAGYHADTDEKKRDRFRRGLSTKLRDRLNTVRANSYNELGRGPQQQQGRWVIRPQQQQAPNRNQFPAQRNNQQQQYRQANDNRCFTCGNTGHYAKNCPRNQQRQGQNANQNQGKRQKVQGCTRSCAFVMLESPVEKIPVVCDYLDVFPDELPGMPPDRDIEFAIELQPGTAPISKRPYRMPPAELAELKKQLQELLDKGFIRPSTSPWGCPALFVKKKDESLRMCVNYRPLNAVTIKNKYPLPRIDVLFDQLVGAKVFSRIDLRSGYHQIKIRASDIPKTAFSTRYGLYEFLVMSFGLTNAPAYFMYLMNSVFMPELDKFVVVFIDDILVYSKNEDGHTEHLHIVLQRLRDHHLYAKLSKCEFWLKEIKFLGHTISQDGISVDPEKVQEVMDWKPPTTVKQIRSFLGLAGYYRRFIPDFSRIAKPMTELLKKGVKFEWSQKCEDAFHTLRQHLTTAPVLAQPDNTKPFEVYCDASGTGLGCVLMQENRVIAYASWALRPHEQNYPTHDLELAAVVHALKIWRHYLMGAHCNIYIDHKSLKYIFTQADLNMRQRRWLELIKDYDLEVHYHPGKANVVADALSRKAQCNCVSMDVGVTTMCDELCRLNLEVVSSGDLSYISVEPTLQEQIVRAQVEDKGVQIVRLHGIPKTIISDRGALFVARFWEKLQESLGTHVIRSSAYHPQTDGQTERVNQILEDMLRACALHYGKDWDKCLSLAEFSYNNSYQSSLKMAPFEALYGRRCRTPLNWSQAGEREIFGPDLVLEAEAKVRVITKNLEAAQARQKSYHDKRRKPLQFEVGDHVYLKVSPTKGVQRFGIKGKLAPRYIGPYEIKEACGPVAYQVELPPHMSSVHNVFHVSQLRKCVRLPTEVLPEPDIEIEPDLSYQEYRVKVLDQKERSTRARSVRMYKVQWSHHSAEEATWETEDFLRSRFPDFLPKGVDCNLADGEYILMPEQGAAQEVAQIQHPSLHQRTCLPLLWKASPGSLEEMVARITWPSTLPPDDFTHPRQWRRHSFQFRFPFSRGFPFHLVGGAQLHRLPYAPLYTVQLYEDHRVPRCRVWLTLEAHPLQPSWRSLDSEAIGFRTDDTTEAVATKTLTTFCGYHPLEMCMSALYRLQALQSDAMAHLANLAQTTKLTLDSREDFVVDLSSELVEKDLQENQLHNVQQELEDANEHLDMHHQEIQDQEANEDVDIEGGDEPASSVDTAGSGRPPSPESISMWIFQMAGRQRRGQNEHVPPPPPPPTLQELMAQQNEILRQLAQRQPPPQHYGGGDHQRHPAAATYQEFLSTQPPLFTRAEDPLDADVWLRVVESKFPLLHGVCSEVTKVRFATQQLRGPARTWWDHFLAMQPEDREVEWREFKAAFRGHHIPAGIMDRKLNEFLALTQGNRTVLQYAQAFNDLCQYAGYHADTDEKKRDRFRRGLSTKLRDRLNTVRANSYNELVNMAISQEDCITARQAEKKRKTPVAGPSAQPQRFRIVSDTQGRGPQQQQGRWVIRPQQQQQQAPNRNQFPAQRNNQQQYRQANDNRCFTCGNTGHYAKNCPRNQQRQGQNVNQNQGKRQKVQVRQGRLNFTTMVDIPEGAPVMTGIFTVLNYPAIILFDSGASHSFISTKFSAKCQLPFHHTDGGITISTPGGRVATYQINRQVPIKFGSLVIRTTLHILGLDSVDIILGADWLTRHQAVLDIAARAIEIHSPAYGETVLYLPNQGCTRSCAFVLIESPVEKIPVVCDYPDVFPDELPGMPPDRDIEFAIELQPGTAPISKRPYRMPPAELAELKKQLQELLDKGFIRPSTSPWGCPALFVKKKDESLRMCVDYRPLNAVTIKNKYPLPRIDVLFDQLVGAKVFSKIDLRSGYHQIKIRASDIPKTAFSTRYGLYEFLVMSFGLTNAPAYFMYLMNSVFMPELDKFVVVFIDDILVYSKNEDEHTEHLHVVLQRLRDHHLYAKLSKCEFWLKEIKFLGHTISQDGISVDPEKVQEVMDWKPPTTVKQIRSFLGLAGYYRRFIPDFSRIAKPMTELLKKGVKFEWSQKCEDAFHTLRQHLTTAPVLAQPDNTKPFEVYCDASGTGLGCVLMQENRVIAYASRALRPHEQNYPTHDLELAVVVHALKIWRHYLMGAHCNIYTDHKSLKYIFTQADLNMRQRRWLELIKDYDLEVHYHPRKANVVADALSRKAQCNCMSMDVGVTTLCDELCKLNLEVVSSGNLSYISVEPTLQEQIIRAQVEDKGVQVIRDMIKQKAEKYKCFRQDSKGILWFGDRLVVPKDPELRRKILDEAHLSKFSMHPGSNKMYHDLRSLYWWTRMKREIAKYISECDTCQRIKASHLKAAGPLQPLPIPSWKWEDICMDFIVGLPNTSRHHDSIWVIVDRLTKTAHFLPVHTTHRAEKYAELYVDQIVRLHGIPKTIISDRGASFVARFWEQLQESLGTHVIRSSAYHPQTDGQTERVNQILEDMLRACALHYGKDWDKCLSLVEFSYNNSYQSSLKMAPFEALYGRRCRTPLNWSQAGEREIFGPDLVLEAEAKVRVITKNLEAAQARQRSYHDKRRKPLQFEVGDHVYLKVSPTKGVQRFGIKGKLAPRYIGPYKIKEACGTVAYQVELPPHMSAVHNVFHVSQLRKCVRLPTEVLPEPDIEIEPDLSYQEYPVKVLDQKERSTRARSVRMYKVQWSHHSAEEATWETEDFLRSRFPDFLPKGVDCNLADGEYILVPEQGAAQEVAPDPAPEPAPEDLPATALEGSLEEMVAGITWPSTLPPGWTVEWDPASAGEEHEE

SEQ ID NO: 324094 - protein, 104 aa, Zea mays
  unsure (1)..(104): unsure at all Xaa locations
  Clone ID: MRT4577_58648C.1.pep
NFEKVTEIVRSGEHRNDPSSRAIPALPRYNIAXRRHRHHTTTPSLPSHXRSLXHYRLLRVTPLVASCGDRRRIVXRRQPXGLHREKKXTFEXXAVLGSXKYVSQ

SEQ ID NO: 324095 - protein, 1444 aa, Zea mays
  Clone ID: MRT4577_58649C.1.pep
MAGRQRRGQNERVPPPPPPPPTLQELMAQQNEILRQLAQRQPPPQHYGGGDHQRHPAAATYQEFLSTQPPLFTRAEDPLDADVWLRVVESKFPLLHGVCSEITKVRFATQQLRGPARTWWDHFLAMQPEDREVEWREFKAAFRGHHIPAGIMDRKLNEFLALTQGNRTVLQYAQAFNDLCQYAGYHADTDEKKRDRFRRGLSTKLRDRLNTVRANSYNELVNMAISQEDCITARQAEKKRKTPVAGPSAQPQRFRIVSDTQGRGPQQQQGRWVIRPQQQQQQAPNRNQFPAQRNNQQQQYRQANDNRCFTCGNTGHYAKNCPRNQQRQGQNANQNQGKRQKVQVRQGRLNFTTMADIPEGAPILTGIFTVLNYPAIVLFDSGASHSFISTKFCAKCQLPFHHTNGGITISTPGGRVASYQICRHVPIKLGSLIFKTTLMIMGLDSVDIILGADWLTRHQAVMDIAARAIEVHSPTCGETTLYLRDRGCTRPCAFVMLESPVEKIPVVYDYPDVFPDELPGMPPDRDIEFAIELQPGTAPISKRPYRMPPAELAELKKQLQELLDKGFIRPSTSPWGCPALFVKKKDESLRMCVDYRPLNAVTIKNKYPLPRIDVLFDQLVGAKVFSKIDLRSGYHQIKIRASDIPKTAFSTIYGLYEFLVMSFGLTNAPAYFMYLMNSVFMPELDKFVVVFIDDILRLRDHQLYAKLSKCEFWLKEIKFLGHTISQDGISVDPEKVQEVMDWKPPTTVKQIRSFLGLAGYYRRFIPDFSRIAKPMTELLKKGVKFEWSQKCEGAFHTLRQHLTTAPVLAQPDNTKPFEVYCDASGTGLGCVLMQENRVIAYASRALRPHEQNYPTHDLELAAVVHALKIWRHYLMGAHCNIYTDHKSLKYIFTQADLNMRQRRWLELIKDYDLEVHYHPGKANVVADALSRKAQCNCVSMDVGVTTLCDELCKLNLEVVYSGNLSYISVEPTLQELIVRAQVEDKGVQVIKDMIKQKAEKYKCFRQDNKGILWFGDRLVVPKDPELRKKILDEAHLSKFSMHPGSNKMYHDLRSLYWWTRMKREIAKYISECDTCQRIKASHLKAAGPLQPLPIPSWKWEDICMDFIVGLPNTSRHHDSIWVIVDRLTKTAHFLPVHTTHKTEKYAEIYVDQIVRLHGIPKTIISDRGALFVARFWEKLQESLGTQVIRSSAYHPQTDGQTERVNQILEDMLRACALHYGKDWDKCLSLAEFSYNNSYQSSLKMAPFEALYGRRCRTPLNWSQAGEREIFGPDLVLEAEAKVRVLTKNLEAAQARQRSYHDRRRKPLQFVVGDHVYLKVSPTKGVQRFGIKGKLAPRYIGPYEIKASCGPVAYQVELPPHMSAVHNVFHVSQLRKCVRLPTEVLPELDIEIEPDLSYQEYPVKVLDQKERSTRARSVRMYKVQWSHHSAEEATWETEDFLLIVA

SEQ ID NO: 324096 - protein, 65 aa, Zea mays
  Clone ID: MRT4577_5864C.1.pep
LLLTRSHAGPMHMRLSSLASLIHREGFRFKIKTKGCLFAIRTSSLVRPPRSPIVFAHALPLVLDR

SEQ ID NO: 324097 - protein, 70 aa, Zea mays
  Clone ID: MRT4577_58650C.1.pep
YKSSSLRSAMLPLARYLHGGIWVYVVNAHPRSVYVAVQALEVSHRQSVLACFIRLDSWVICIGSQRLARH

SEQ ID NO: 324098 - protein, 1766 aa, Zea mays
  Clone ID: MRT4577_58651C.1.pep
MTSHGSSDDGNALTHTDRLAREGFPRILWEVLQGAGYATPPQYAVQQFEKHRVPRCRVRMTLEPHPLQPGWRSLDSESFGYRAEDTIEAIALHGLTTFCGFHPLELATHPIGLFPAEKEDDPMWKDRVEHAKDIWAIYPGQTAHLTVRCMNALYRLQVMRGEAMSHLMALLEATKITLDNREELVVDLSQEMVEKDLQVEQLSTDIQELEELVGTRENTIEVLEDQLINTQRQLVEANEHLDMHHQEIQDQEANEDVDIEGGDEPASSVDTAGSGRPPSPESSMAERQRRGQNERVPPPPPPPPTLQELIAQQNEILRQLAQRQPPPQHYGGGDHQRHPAAATYQEFLSTQPPLFTRAEDPLDADVWLRVVESKFPLLHGACSEVTKVRFATQQLRGPARTWWDHFLAMQPEDREVEWREFKAAFRGHHIPAGIMDRKLNEFLALTQGNRTVLQYAQAFNDLCQYAGYHADTDEKKRDRFRRGLSTKLRDRLNTVRANSYNELVNLAISQEDCITARQAEKKRKTPVAGPSAQPQRFRIVSDTQGRGPQQQQGRWVIRPQQQQQAPNRTQFPAQRGNQQQQQYRQANDNRCFTCGNTGHYAKNCPRNQQRQGQNANQNQGKRQKVQVRQGRLNFTTMADIPEGAPVMTGIFTVSNFPAIVLFDSGASHSFISAKFSAKCQLPFHHTDGGITISTPGGRVATYQINRQVPIKFGSLVIRTTLLILGLDSVDIILGTDWLTRHQAVLDIAARAIEIHSPAYGETVLYLPDQGCTRSCAFVMIESPVEKIPVVCDYPDVFPDELPGMPPDRDIEFAIELQPGTAPISKRPYRMPPAELAELKKQLQELLDKGFIRPSTSPWGCPALFVKKKDESLRMCVDYRPLNAVTIKNKYPLPRIDVLFDQLVGAKVFSKIDLRSGYHQIKIRASDIPKTAFSTRYGLYEFLVMSFGLTNAPAYFMYLMNSVFMPELDKFVLVFIDDILVYSKNEDEHTEHLHIVLQRLREHHLYAKLSKCEFWLKEIKFLGHTISQDGISVDPEKVQEVMDWKPPTTVKQIRSFLGLAGYYRRFIPDFSRMAKPMTKLLKKGVKFEWSQKCEDAFHALRQHLTTAPVLAQPDSTKPFEVYCDASGTGLGCVLMQENRVIAYASRALRPHEQNYPTHDLELAAVVHALKIWRHYLMGAHCNIYTDHKSLKYIFTQADLNMRQRRWLELIKDYDLEVHYHPGKANVVADALSRKVQCNCMSMDVGVTTLCDELCKLNLEVVSSGDLSYISMEPTLQEQIVRAHVGDKGVQDPELRKKILDEAHLSKFSMHPGSNKMYHDLRSLYWWTRMKREIAKYISECDTCQRIKASHLKAAGPLQPLPIPSWKWEDICMDFIVGLPNTSRHHDSIWVIVDRLTKTAHFLPVHTTHRAEKYAEIYVDQIIRLHGIPKTIISDRGAPFVARFWEQLQESLGTHVIRSSAYHPQTDGQTERVNQILEDMLRACALHYGKDWDKCLSLAEFSYNNSYQSSLKMAPFEALYGRRCRTPLNWSQAGEREIFGPDLVLEAEAKVRVITKNLEAAQARQRSYHDKRRKPLQFEVGDHVYLKVSPTKGVQRFGIKGKLAPRYIGPYEIKASCGPVAYQLELPPHMSSVHNVFHVSQLRKCVRLPTEVLPEPAIEIEPDLSYQEYPVKVLDQKERSTRARSVRMYKVQWSHHSAEEATWETEDFLRSRFPDFLPKGVDCNLADGEYILVPEQGAAQEVAPDPAPEPAPEDLPATALEGKPRFYA

SEQ ID NO: 324099 - protein, 1517 aa, Zea mays
  Clone ID: MRT4577_58652C.1.pep
MAGRQRRGQNEHVPPPPPPPPTLQELMAQQNEILRQLAQRQPPPQHYGGGDHQRHPAAATYQEFLSTQPPLFTRAEDPLDADVWLRVVESKFPLLHGACSEVTKVRFATQQLRGPARTWWDHFLAMQPEDREVEWREFKAAFRGHHIPAGIMDRKLNEFLALTQGNKTVLQYAQAFNDLCQYAGYHADTDEKKRDRFGRGLSTKLRDRLNTVRANSYNELVNMAISQEDCITARQAEKKRKTPVAGPSAQPQRFRIVSDTQGRGPQQQQGRWVIRPQQQQQQAPNRNQFPAQRNNQQQQYRQANDNRCFTCGNTGHYAKNCPRNQQRQGQNANQNQGKRQRVQVRQGRLNFTTMADIPEGAPVMTCIFTILNYPAIVLFDSGASHSFISAKFSAKCQLPFHHTDGGITISTPGGRVATYQINRQVPIKFGSLVIRTTLLILGLDSVDIILGADWLTRHQAVLDIAARAIEIHSPAYGETVLYLPNQGCTRSCAFVMLESPVKEIPVVCAYPDVFPEELPGMPPDRDIEFAIELQPGTAPISKRPYRMPPVELAELKKQLQELFDKGFIRPSTSPWGCPALFVKKKDESLRMCVDYRPLNAVTIKNKYPLPRIDVLFDQLVGAKVFSKIDLRSGYHQIKIRASDIPKTAFSTRYGLYEFLVMSFGLTNAPAYFMYLMNSVFMPELDKFVVVFIDDILVYSKNEAEHTKHLHTVLQRLRDHQLYAKLSKCEFWLKEIKFLGHTISQDGISVDPEKVQEVMDWKPPTTVKQIRSFLGLAGYYRRFIPDFSRIAKPMTELLKKGVKFEWSRKCEDAFHTLRQHLTTAPVLAQPDNTKPFEVYCDASGTGLGCVLMQESRVIAYASRALRPHEQNYPTHDLELAAVVHALKIWRHYLMGAHCNIYTDHKSLKYIFTQADLNMRQRRWLELIKDYDLEVHYHPGKANVVADALSRKAQCNCMSMDVGVTTLCDELCKLNLEVVSSGNLSYISVEPTLQEQIVRAQVEDKGVQVIKDMIKQKTEKYKCFRQDSKGILWFGDRLVVPKDPELRKQILDGAHLSKFSMHPGSNKMYHDLRSLYWWTRMKREIAKYISECDTCQRIKASHLKAAGHLQPLPIPSWKWEDICMDFIVGLPNTSRHHDSIWVIVDRLTKTAHFLPVHTTHRAEKYAEIYVDQIVRLHGIPKTIISDRGAPFVARFWEQLQESLGTHVIRSSAYHPQTDGQTERVNQILEDMLRACALHYGKDWDKCLSLAEFSYNNSYQSSLKMAPFEALYGRRCRTPLNWSQAGEREIFGPDLVLEAEAKVRIIKKNLEAAQARQRSYHDKRWKPLQFEVGDHVYLKVSPTKGVQRFGIKGKLAPRYIGPYEIKEACGLIAYQVELPPHLSAVHNVFHVSQLRKCVRLPTEVLPEPDIEIEPDLSYQEYPVKVVDQKERSTRARSVRMYKVQWSHHSAEEATWETEDFLRSRFPDFLPKGVDCNLADGEYILVPEQGAAQEVAPDPAPESAPEDPPATALEGKPRFYA

SEQ ID NO: 324100 - protein, 84 aa, Zea mays
  unsure (1)..(84): unsure at all Xaa locations
  Clone ID: MRT4577_58653C.1.pep
IGLLTRVRYIGGGGKLLIGGVTAMFRSIXLCRNDMAFTFRPTPSILHVLFRGTFXFRFXNCYTKEDVQQEIFXICQTLEIVAIC

SEQ ID NO: 324101 - protein, 87 aa, Zea mays
  unsure (1)..(87): unsure at all Xaa locations
  Clone ID: MRT4577_58654C.1.pep
TXXXXXXXRSXXRXXXRGXIRXXPXRRXLSXRCPXKISXRXWEXGGGGRKLLGSGRHXSSPPLLFIKLLXPPPLGGXRXMPCXPRCG

SEQ ID NO: 324102 - protein, 348 aa, Zea mays
  unsure (1)..(348): unsure at all Xaa locations
  Clone ID: MRT4577_58655C.1.pep
MAGRQRRGQNERVPPPPPPPPTLQELMAQQNEILRQLAQRQPPPQHYGXGPPTSPRGGHLXEFLSTQPPLFTRAEDPLDADVWLRVVESKFPLLHGVCSEVTKVRFATQQLRGPARTWWDHFLAMQPEDREVEWREFKAAFRGHHIPAGIMDRKLNEFLALTQGNRTVLQYAQAFNDLCQYAGYHADTDEKKRDRFRRGLSTKLRDRLNTVRANNYNELVNMAISQEDCITARQAEKKRKTPVAGPSAQPQRFRIVSDTQGRGPQQQQGRWVIRPQQQQQAPNRIQFLAQRGNQQQQQYRQANDNRCFTCGNTGHYAKNCPRNQQRQGQNANQNQGKRQKVQFYQYQI

SEQ ID NO: 324103 - protein, 1708 aa, Zea mays
  Clone ID: MRT4577_58656C.1.pep
MTSHGSSDDGNALTHTDGLAREGFPRILWEVLQGAGYTTPPQYAVQQFEKHRVPRCRVRMTLEPHPLQPGWRSLDSESFGYRAEDTIEAIALHGLTTFCGFHPLELATHPIGLFPADKEDDPMWKDRVEHAKDIWAIYPGQTAHLTVRCMNALYRLQVMRGEAMSHLMALLEATKITLDNREELVVDLSQEMVEKDLQVEQLSTDIQELEELVGTRENTIEVLEDQLINTQQQLAEANEHLDMHHQEIQDQEANEDVDIEGGDEPASKDPLDADVWLRVVESKFPLLHGVCSEITKVRFATQQLRGPARTWWDHFLAMQPEDREVEWREFKAAFRGYHIPAGIMDRKLNEFLALTQGNRTVLQYAQAFNDLCQYAGYHADTDEKKRDRFRRGLSTKLRDRLNTVRANSYNELVNMAISQEDCITARQAEKKRKTPVAGPSAQPQRFRIVSDTQGRGPQQQQGRWVIRPQQQQQAPNRNQFPAQRNNQQQQYRQANDNRCFTCGNTGHYAKNCPRNQQRQGQNANQNQGKRQKVQVRQGRLNFTTMADIPEGAPVMTGIFTVLNYPAIILFDSGASHSFISAKFSAKCQLPFHHTNGGITISTPGGRVATYQINKNVPIKFGSLIIKTNLLILGLESVDIILGTDWLTRNQAVIDIAARAIEVHSPTCGGTTLYLPDQGCTRSCAFVMIESPVEKIPVVRDYPDVFPDELPGMPPDRDIEFAIELQPGTAPISKRPYRMPPAELAELKKQLQELLDKGFIRPSTSPWGCPASFVKKKDESLRMCVDYRPLNAVTIKNKYPLPRIDVLFDQLVGAKVFSKIDLRSGYHQIKIRASDIPKTAFSTRYGLYEFLVMSFGLTNAPAYFMYLMNSVFMPELDKFVVVFIDDILVYSKNEDEHTEHLHIVLQRLRDHHLYAKLSKCEFWLREIKFLGHTISQDGISVDPEKVQEVMDWKPPTTVKQIRSFLGLAGYYRRFIPDFSRIAKPMTELLKKGVKFEWSQKCEGAFHTLRQHLTTAPVLAQHDNTKPFEVYCDASGTGLGCVLMQENRVIAYASRALRPHEQNYPTHDLELAAVVHALKIWRHYLMGAHCNIYTDHKSLKYIFTQADLNMRQRRWLELIKDYDLEVHYHPGKANVVADALSRKAQCNCVSMDVGVTTLCDKLCKLSLEVVYSGNLSYISVEPTLQELIVMAQVEDKGVQVIKVMIRQKAEKYKCFRQDSKGILWFGDRLVVPKDPELRKKILDEAHLSKFSMHPGSTKMYHDLRSLYWWTRMKREIAKYISECDTCQRIKASHLKAAGPLQPLPIPSWKWEDICMDFIVGLPNTSRHHDSIWVIVDRLTKTAHFLPVHTTHKTEKYAEIYVDQIVRLHGIPKTIISDRGALFVARFWEKLQESLGTQVIRSSAYHPQTDGQTERVNQILEDMLRACALHYGKDWDKCLSLAEFSYNNSYQSSLKMAPFEALYGRRCRTPLNWSQAGEREIFGPDLVLEAEAKVRVITKNLEAAQARQRSYHDRRRKPLQFVVGDHVYLKVSPTKGVQRFGIKGKLAPRYIGPYEIKASCGPVAYQVELPPHMSAVHNVFHVSQLRKCVRLPTEVLPEPDIEIEPDLSYQEYPVKVLDQKERSTRARSVRMYKVQWSHHSAEEATWETEDFLRSRFPDFLPKGVDCNLADGEYILVPEQGAAKEVAPDPAPGPAPEDLPATALEGKPRFYA

SEQ ID NO: 324104 - protein, 1754 aa, Zea mays
  Clone ID: MRT4577_58657C.1.pep
MTSHGSSDDGNALTHTDGLAREGFPRILWEVLQGAGYTTPPQYAVQQFEKHRVPRCRVRMTLEPHPLQPGWRSLDSESFGYRAEDTIEAIALHGLTTFCGFHPLELATHPIGLFPAEREDDPMWKDRVEHAKDIWAIYPGQTAHLTVRCMNALYRLQVMRGEAMSHLMALLEATKITLDNREELMVDLSQEMVEKDLQVEQLSTDIQELEELVGTRENTIEVLEDQLINTQQQLAEANEHLDMHHQEIQDQEANEDVDIEGGDEPASSVDTAGSGRPPSPESSMAGRQRRGQNERVPPPPPPPPTLQELMAQQNEILRQLAQRQPPPQHYGGGDHQRHPAAATYQEFLSTQPPLFTRAEDPLDADVWLRVVESKFSLLHGACSEVTKVRFATQQLRGPARTWWDHFLAMQPEDREVEWREFKAAFRGHHIPAGIMDRKLNEFLALTQGNRTVLQYAQAFSDLCQYAGYHADTDEKKRDRFRRGLSTKLRDRLNTVRANRYNELVNMAISQEDCITARQAEKKRKTPVAGPSAQPQRFRIVSDTQGRGPQQQQGRCVIRPQQQQAPNRTQFPAQRNNQQQQQYRQANDNRCFTCGNTGHYAKNCPRNQQRQGQNVNQTQGKRQKVQVRQGRLNFTTMADIPEGAPVMTGIFTVLSYPAIILFDSSASHSFISAKFSAKCQLPFHHTNGGITISTPGGRVATYQINRQVPIKFGSLVIRTTLLILGLDSVDIILGADWLTRHQAVLDIAARAIEIHSPAYGETVLYLPNQGCTRSCAFVMLESPVEKIPVVCDYPDVFPDELPGMPPDRDIEFAIEWQPGTAPISKRPYRMPPAELAELKKQLQELLNKGFIRPSTSPWGCPALFVKKKDESLRMCVDYRPLNAVTIKNKYPLPRIDVLFDQLVGAKVFSKIDLRSGYHQIRIRASDIPKTAFSTRYGLYEFLVMSFGLTNAPAYFMYLMNSVFMPELDKFMVVFIDDILVYSKNEAEHTKHLHTVLQRLRDHQLYAKLSKCEFWLKEIKFLGHTISQDGISVDPEKVQEVTDWEPPTTVKQIRSFLGLAGYYRRFILDFSKIAKPMTELLKKGVKFEWGQKCEDAFHTLRQHLTTAPVLAQPDNTKPFEVYCDASGTGLGCVLMQENRVIAYASRALRPHEQNYPTHDLELAAVVHALKIWRHYLMGAHCNIYTDHKSLKYIFTQADLNMRQRRWLELIKDYDLEVHYHPGKANVVADALSRKAQCNCMSMDVGVTTLCDELCRLNLEVVSSGDLSYISVEPTLQEQIVRAQVEDKGVQVIKDMIKQKAEKYKCFRQDSKGILWFGDRLVVPKDPELRKQILDEAHLSKFSMHPGSNKMYHDLRSLYWWTRMKREIAKYVSECDTCQRIKASHLKAAGPLQPLPIPSWKWEGICMDFIVGLPNTSRHHDSIWVIVDRLTKTAHFLPVHTTHKIEKYAEIYVDQIVRLHGIPKTIISDRGALFVARFWEKLQESLGTQVIRSSAYHPQTDGQTERVNQILEDMLRACALHYGKDWDKCLSLAEFSYNNSYQSSLKMAPFEALYGRRCRTPLNWSQAGEMEIFGPDLVLEAEAKVRVITKNLEAAQARQRSYHDKRRKPLRFEVGDHVYLKVSPTKGVQRFGIKGKLAPCYIGPYKIKASCGPVAYQLELPPHMSAVHNVFHVSQLRKCVRLPTEVLPEPDIEIEPDLSYQEYPVKVLDQKERSTRARSVRMYKVQWSHHSAEEATWETEDFLRSRFPDFLPKGVGM

SEQ ID NO: 324105 - protein, 376 aa, Zea mays
  unsure (1)..(376): unsure at all Xaa locations
  Clone ID: MRT4577_58658C.1.pep
MRTSTLREEMSLPPVWTLLAREDHLPPSRVLLRSLTRCPGFGTVVLSKYVVFQMAGRQRRGQNERVPPPPPPPPTLQELMAQQNEILRQLAQCQPPPQHYGXRPPTSPRGGHLXEFLSTQPPLFTRAEDPLDADVWLRVVESKFPLLHRACSEVTKVRFAAQQLRGPARTWWDHFLAMQPEDREVEWREFKAAFRGHHIPAGIMDRKLNEFLALTQGNRTVLQYAQAFNDLCQYAGYHADTDEKKRDRFRRGLSTKLRDRLNTVRANSYNELVNMAISQEDCITARQAEKKRKTPVAGPSAQPQRFRIVSDTQGRGPQQQQGRWVIRPPQQQQAPNRNQFPAQRNNQQQQYRQANDNRCFTCGNTGHYAKNCPRNQ

SEQ ID NO: 324106 - protein, 84 aa, Zea mays
  Clone ID: MRT4577_58659C.1.pep
QKSCCLKQALARGTLAGENILRFRNYCASLIGSEQRLIGTVGGIHIIIYTGEILGLIKYEQPQKHSARDGSIKQELKRTAHIRS

SEQ ID NO: 324107 - protein, 55 aa, Zea mays
  Clone ID: MRT4577_5865C.1.pep
LMLLIWREVSVRGLMLSKLSLYPLGFLLLVMFTKEGGKTTSNPTVFNPQLTFTTT

SEQ ID NO: 324108 - protein, 1368 aa, Zea mays
  Clone ID: MRT4577_58660C.1.pep
MAQQNEILRQLAQRQPPPQHYGGGDHQRHPAAATYQEFLSTQPPLFTRAEDPLDADVWLRVVESKFPLLHGACSEVTKVRFATQQLCGPARTWWDHFLAMQPEDREVEWREFKAAFRGHHIPAGIMDRKLNEFLALTQGSRTVLQYAQAFNDLCQYAGYHADTDEKKRDRFRRGLSTKLRDRLNTVRANNYNELVNMAISQEDCITAQQAEKKRKTPVAGPSAQPQRFRIVSDTQNRGPQQRQGRWNCPRNQQRQGQNVNQNQGKRQKVQVRQGRLNFTTMADIPEGAPVMTGIFTVLNYPAIILFDSGASHSFISAKFSAKCQLPFHQTNGGITISTPGGRVATYQINKNVPIKFGSLIIKTNLLFLGLDSVDIILGTDWLTKHQAVIDIAARAIEVHSSTCGETTLYLPDQGCTRSCAFVMIESPVEKIPVVCDYPDVFPDELPGMPPDRDIEFAIELQPGTAPISKRPYRMPPSELAELKKQLQELLDKGFIRPSTSPWGCPALFVKKKDESLRMCVDYRPLNAVTIKNKYPLPRIDVLFDQLVGAKVFSKIDLRSGYHQIKIRASDIPKTAFSTRYGLYEFLVMSFGLTNAPAYFMYLMNSVFMPELDKFVVVFIDDILVYSKNEAEHTKHLHTVLQRLRDHQLYAKLSKCEFWLKEIKFLGHTISQNGISVDPEKVQEVMDWKPPTTVRQIRSFLGLAGYYRRFIPDFSRIAKPMTELLKKGVKYVWSQKCEEAFHTLRQHLTTAPVLAQSDNTKPFEVYCDASGTGLGCVLMQENRVIAYASRALRPHEQNYPTHDLELAAVADLNMRQQRWLELIKDYDLEVHYHPGKANVVADALSRKAQCNCISIDTKVTTLCDELCKLNLEVIPSGELSYISVEPTLQEQIVRAQIEDKGVQMIKEMIKQKAEKYKCFRQDSKGILWFGDRLVVPKDPELRKKILDEAHLSKFSIHPGSNKMYHDLRSLYWWTRMKREISKYISECDTCQRIKASHLKAAGPLQPLPIPSWKWEDICMDFIVGLPNTSRHHDSIWVIVDRLTKTAHFLPVHTTHKTEKYAEIYVDQIVRLHGIPRTIISDRGALFVARFWEKLQESLGTQVIRSSAYHPQTDGQTERVNQILEDMLRACALHYGKDWDKCLSLAEFSYNNSYQSSLKMAPFEALYGRRCRTPLNWSQAGEREIFGPDLVLEAEAKVRIITKNLEAAQARQRSYHDKRRKPLQFEVGDHVYLKVSPTKGVQRFGIKGKLAPRYIGPYEIKASCGPVAYQLELPPHMSAVHNVFHVSQLRKCVRLPTEVLPEPDLEIEPDLSYQEYPVKVLDQKERSTRARSVRMYKVQWSHHSVEEATWETEDFLRSHFPDFLPKGVGM

SEQ ID NO: 324109 - protein, 1713 aa, Zea mays
  Clone ID: MRT4577_58661C.1.pep
MTSHGSSDDGNALTHTDGLAREGFPRILWEVLQGAGYTTPPQYAVQQFEKHRVPRCKVRMTLEPHPLQPGWRSLDSESFGYRAEDTIEAIALHGLTTFCGFHPLELATHPIGLFPAEREDDPMWKDRVEHAKDIWAIYPGQTAHLTVRCMNALYRLQVMRGEAMSHLMALLEATKITLDNREELVVDLSQEMVEKDLQMAGRQRRGQNEHVPPPPPPPPTLQELMAQQNEILRQLAQRQPPPQHYGGGDHQRHPAAATYQEFLSTQPPLFTRAEDPLDADVWLRVVESKFPLLHGACSEVTKVRFATQQLRGPARTWWDHFLAMQPEDREVEWREFKAAFRGHHIPTGIMDRKLNEFLALTQGNRTVLQYAQAFNDLCQYAGYHADTDEKKRDRFRRGLSTKLRDRLNTVRANSYNELVNMAISQEDCITARQAEKKRKTPVAGPLAQPQHFRIVSDTQGRGPQQQQGRWVIRPQQQQAPNRNQFPAQRNNQQQQYRQANDNRCFTCGNTGYYAKNCPRNQQRQGQNANQNQGKRQKVQVRQGRLNFTTMADIPEGAPVMTGIFTVLNYPAIILFDSGASHSFISAKFSAKCQLPFHHTDGGITISMPGGRVATYQINRQVPIKFGSLVIRTTLLILGLDSVDIILGADWLTRHQAVLDIAARAIEIHSPAYGETVLYLPDQGCTRSCAFVMIESPVKNIPVVCDYPDVFPDELPGMPPDRDIEFAIELQPGTAPISKRPYRMPPAELAELKKQLQELLDKGFIRPSTSPWGCPALFVKKKDESLRMCVDYRPLNAVTIKNKYPLPRIDVLFDQLVGAKVFSKIDLRSGYHQIKIRASDIPKTAFSTRYGLYEFLVMSFGLTNAPAYFMYLMNSVFMPELDKFVVVFIDDILVYSKNEAEHTKHLHTVLQRLRDHQLYAKLSKCEFWLEEIKFLGHTISQNGISVDPEKVQEVMDWKPPTTVKQIRSFLGLAGYYRRFIPDFSRIAKPMTELLKKGVKFEWSQKCEDAFHTLRQHLTTAPVLAQPNNTKPFEVYCDASGTGLGCVLMQENKVIAYASRALRPHEQNYPTHDLELAAVVHALKIWRHYLMGAHCNIYTDHKSLKYIFTQADLNMRQRRWLELIKDYDLEVHYHPGKANVVADALSRKTQCNCMSMDVGVTTLCDELCKLNLEVVSSGNLSYISVEPTLQEQIIRAQVEDKGVQVIKDMIKQKAEKYKCFRQDSKGILWFGDRLVVPKDPELRKQILDEAHLSKFSMHPGSNKMYHDLRSLYWWTRMKREIAKYISECDTCQRIKASHLKAAGPLQPLPIPSWKWEDICMDFIVGLPNTSRHHDSIWVIVDRLTKTAHFLPVHTTHKTEKYAEIYVDQIVRLHGIPKTIISDRGALFVACFWEKLQESLGTQVIRSSAYHPQTDGQTERVNQILEDMLRACALHYGKDWDKCLSLAEFSYNNSYQSSLKMAPFEALYGRRCRTPLNWSQAGEREIFGPDLVLEAEAKVRVITKNLEAAQARQRSYHDRRLKPLQFEVGDHVYLKVSPTKGVQRFRIKGKLAPRYVGPYKIKASCGPVAYQLELPPHMSAVHNVFHVSQLRKCVRLPTEVLPEPDIEIEPDLSYQEYPVVVLDQKERSTRARSVRMYKVQWSHHSAEEATWETEEFLRSRFPDFLPKGVDCNLADGEYILVPEQGAAQEVAPDPAPEPAPEDLPATALEGKPRFYA

SEQ ID NO: 324110 - protein, 96 aa, Zea mays
  Clone ID: MRT4577_58662C.1.pep
GLYQKTSMLTFEGQKFQGPSPIAGKVGFFPFQAWEHQIVTVDCHPLGPQEGMLVFVSGSIRPGPEEPPLKFFQAFHFLPAVGSFFVQKNMFRLKYG

SEQ ID NO: 324111 - protein, 86 aa, Zea mays
  unsure (1)..(86): unsure at all Xaa locations
  Clone ID: MRT4577_58663C.1.pep
MPQNRDLFRRRRPWLQRPRRRSQPSPRFELPDLPRRPNXGKTRXMGAGXKLXTXRRXXRWPDXAYXKSPLGHERXPPFXRSSHAKG

SEQ ID NO: 324112 - protein, 158 aa, Zea mays
  unsure (1)..(158): unsure at all Xaa locations
  Clone ID: MRT4577_58664C.1.pep
PPRPXAPRSRATACARAMALVSASSSSTTAVAALPRNGQQRASSSLFSSSYPSSFLVAETLLTQAEGARYPLARCPSSTSWRPFVTSTPSRTACLLRAPSRAVPMTTLVALALRPPARLLLLPAPAAAPRPTDARRGSRXSSAGTSTTAGALAALSRA

SEQ ID NO: 324113 - protein, 76 aa, Zea mays
  Clone ID: MRT4577_58665C.1.pep
LYSRCLGYVTDSGRTYTGVRIQTQWAIMTGLTFVTPMYAYIHDSERRYIVHRKGPLLCIYSPISIEWACIYNVQTV

SEQ ID NO: 324114 - protein, 86 aa, Zea mays
  Clone ID: MRT4577_58666C.1.pep
AAGFFFFFCFKCGNTCHFIAQCPDNENDQGEERHGKKKKKIYRKAKGEAHLGKEWDSDCSSFDSDDEGLAASAFNKSSLFPNERHT

SEQ ID NO: 324115 - protein, 74 aa, Zea mays
  unsure (1)..(74): unsure at all Xaa locations
  Clone ID: MRT4577_58667C.1.pep
PPPGRXGVQQTLAEEPLHFRGRLERGGGPSRSASGRSSXSATSLLISYLLPSTTLPRCRRRQRLQPPLIPACPR

SEQ ID NO: 324116 - protein, 166 aa, Zea mays
  Clone ID: MRT4577_58668C.1.pep
ALGAFFFFFFDFSDTATNVVNAINRRFGQVATTADGTSVEVVAPTNPTERVAFVAKLENMAVEAGEEVPRVVFNSRTGTVVISDGLRVKSAAVTHGSLKVVISESSAVSQPGPFSKGQTQVTPQSKVSVDQGSGQMFHWPAGARLQTIIDTVNSLGASTPGPAGLE

SEQ ID NO: 324117 - protein, 74 aa, Zea mays
  Clone ID: MRT4577_58669C.1.pep
VHKYHFIYIEVVNSVATTHIRYEETYSTTATPPISDHRPTTYMQYTIHTNSKHQKKNLLSTGSSRQRVEAEQQC

SEQ ID NO: 324118 - protein, 38 aa, Zea mays
  Clone ID: MRT4577_5866C.1.pep
GVAIWSSSGGYCYWNLIGQYHPRNLGRWRELHGNEMMG

SEQ ID NO: 324119 - protein, 58 aa, Zea mays
  Clone ID: MRT4577_58670C.1.pep
IYTSSAFNINTIKKMTTFYLFTQHDHDITSTHIYYAHLNRSFVLLLTVQEQPTQRKFK

SEQ ID NO: 324120 - protein, 116 aa, Zea mays
  unsure (1)..(116): unsure at all Xaa locations
  Clone ID: MRT4577_58671C.1.pep
ASPSQGGLTSSLAKKLGVRAPPVXMDSPPKYGALARGDGALFLGLPPQSFIKTVWGHAAGSIFFPKTGGMVKNSPGNHLGFFKGKYFFCAKGIFSPNQPFMPLVLKGVQKAFKEDP

SEQ ID NO: 324121 - protein, 128 aa, Zea mays
  unsure (1)..(128): unsure at all Xaa locations
  Clone ID: MRT4577_58672C.1.pep
GHVPSDGTAGGHQXSCWITERXLVVDLSQEMVEKDLQVEQLSGEIHELEELVGTRENTIEVLEDQLLNTQQQLAEANEHLDMHHQEIHGGEADEDVDIEGGDESASSIDTAGSGRPPSPESSVASFAH

SEQ ID NO: 324122 - protein, 1259 aa, Zea mays
  Clone ID: MRT4577_58673C.1.pep
MRSSSSSGAEPESEPWGRAKRSSSSSGAEPESEPWVGQSGVRRLPGLSPSPSPGSGEAELPMALEDGLGCCQPHSAEWRSSRSGAGSAVLLSGRCFTCGNTGHYAKNCPRNQQRQGPNANQNQGNRQKVQVRQGRLNFTTMADISEGAPIMTGIFSVLNYPAIILFDSGASHSFISAKFSAKCQLPFHHTNRGITISTPGGRVATYQINKNVPIKFGSLIIKTNLLILGLDSVDIILGTDWLTKHQATMDIAARAIEVHSPTCGETTLYLPDQGCTRSCAFVMIGSPVERIPVVCDYPDVFSNELPWMPPDRDIEFAIELQPGTAPISKRPYRMPPAELAELKKQLQELLDKGFIRPSTSPWGCPALFVKKKDESLRMCVDYRPLNAVTIKNKYPPPRIDVLFDQLVGAKVFSKIDLRSGYHQIKIRASDIPKTAFSTRYGLYEFLVMSFGLTNAPAYFMYLMNSVFMPELDKFVVVFIDDILVYSKNEDEHTEHLHIVLQRLRDHHLYAKLSKCEFWLTEIKFLGHTISQDGISVDPEKVQEVMDWKPPTTVRQIRSFLGLAGYYRRFIPDFSRIAKPMTELLKKGVKFEWSQKCEDAFHTLRQHLTTAPVLAQPDNTKPFEVYCDASGTGLGCVLMQENRVIAYASRALRPHEQNYPTHDLELAAVVHALKIWRHYLMGAHCNIYTDHKSLKYIFTQADLNMRQRRWLELIKDYDLEVHYHPGKANVVADALSRKAQCNCMSMDVGVTTLCDELCKLNLEVVSSGDLSYISVEPTLQEQIVRAQVEDKGVQVIKDMIKQKAEKYKCFRQDSKGILWFGDRLVVPKDPELRKKILDEAHLSKFSMHPGSNKMYHDLRSLYWWTRMKREIAKYISECDTCQRIKASHLKAAGPLQPLPIPSWKWEDICMDFIVGLPNTSRHHDSIWVIVDRLTKTAHFLPVHTTHKTEKYAEIYVDQIVRLHGIPKTIISDRGALFVARFWEKLQESLGTHVIRSSAYHPQTDGQTERVNQILEDMLRACALHYGKDWDKCLSLAEFSYNNSYQSSLKMAPFEALYGRRCRTPLNWSQAGEREIFGPDLVLEAEAKVRVITKNLEAAQARQRSYHDKRRKPLQFEVGDHVYLKVSPTKGVQRFGIKGKLAPRYIGPYEIKATCGPVAYQLELPPHMSAVHNVFHVSQLRKCVRLPTEVLPEPDIEIEPDLSYQEYPVKVLDQKERSTRARSIRMYKVQWSHHSAEEATWETEDFLRSRFPDFLPKGVGM

SEQ ID NO: 324123 - protein, 1715 aa, Zea mays
  Clone ID: MRT4577_58674C.1.pep
MTSHGSSDDENALTHTDGLAREGFPRILWEVLQGAGYTTPPQYAVQQFEKHRVPRCRVRMTLEPHPLQPGWRSLDSESFGYRAEDTIEAIALHGLTTFCGFHPLELATHPIGLFPAEKEDDPMWKDRVEHAKDIWAIYPGQTAHLTVRCMNALYRLQVMRGEAMSHLMALLEATKITLDNREELVVDLSQEMVEKDLQVEQLSTDIQELEELVGTRENTIEVLEDQLINTQQQLAEANEHLDMHHQEIQDQEANEDVDIEGGDEPASSVDTAGSGRPPSPESNGRKAAFRGHHIPAGIMYRKLNEFLALTQGNRTVLQYAQAFNDLCQYAGYHADTDEKKRDRFRRGLSTKLRDRLNTIRANSYNELVNMAISQEDCITARQAEKKRKTPVAGPSAQPQRFRIVSDTQGRGPQQQQGRWVIRPQQQQQQGPNRTQFPAQRGNQQQQQYRQANDNRCFTCGNTGHYAKNCPRNQQRQGQNVNQNQGKRQKVQVRQGRLNFTTMADIPEGAPVMTGIFTVLNYPAIVLFNSGASHSFISAKFSAKCQLPFHHTDGGITISTPGGRVATYQINRQVPIKFGSLVIRTTLLVLGLDSVDIILGADWLTRHQAVLDIATRAIEIHSPAYGKTVLYLPNQGCTRSCAFVMIESPVEKIPVVCDYPDVFPDELPGMPPDRDIEFAIELQPGTAPISKRPYRMPPAELAELKKQLQELLDKGFIRPSTSPWGCPALFVKKKDESLRMCVDYRPLNAVTIKNKYPLPRIDVLFDQLVGAKVFSKIDLRSGYHQIKIRASDIPKTAFSTRYGLYEFLVMSFGLTNAPAYFMYLMNSVFMPELDKFVVVFIDDILVYSKNEAEHTKHLHTVLQRLRDHQLYAKLSKCEFWLKEIKFLGHTISQDGISVDPEKVQEVMEWKPPATVKQIRSFLGLAGYYRRFIPDFSRIAKPMTELLKKGVKFEWSQKCEDAFHTLRQHLTIAPVLAQPDNTKPFEVYCDASGTGLGCVLMQESRVIAYASRALRPHEQNYPTHDLELAVVVHALKIWRHYLMGAHCNIYTSHKSLKYIFTQADLNMRQRRWLELIKDYDLEVHYHPGKANVVADALSRKAQCNCMSMDVGVTTLCDELCKLNLEVVSSGKLSYISVEPTLQEQIVRAQVGDKGVQVIKDMIKQKAEKYKCFRQDSKGILWFGDRLVVPKDPELRKKILDEAHLSKFSMHPGSNKMYHDLRSLYWWTRMKREIAKYISECDTCQRIKASHLKAAGPLQPLPIPSWKWEDICMDFIVGLPNTSRHHDSIWVIVDRLTKTAHFLPVHTTHRAEKYAEIYVDQIVRLHGIPKTIISDRGAPFVARFWEQLQESLGTHVIRSSAYHPQTDGQTERVNQILEDMLRACALHYGKDWDKCLSLAEFSYNNSYQSSLKMAPFEALYGRRCRTPLNWSQAGEREIFGPDLVLEAEAKVRVITKNLEAAQARQRSYHDKRRKPLQFEVGDHVYLKVSPTKGVQRFGIKGKLAPRYIGPYEIKEACGPVAYQVELPPHMSAVHNVFHVSQLRKCVRLPTEELPEPDLEIEPDLSYQEYPVKVLDQKERSTRARSVRMYKVQWGHHSAEEATWETEDFLRSRFPDFLPKGVDCNLADGEYVLVPEQGVAQEVVPDPALESAPEDLLATALEGKPRHIPSRDLRRGLPFRLWWVQVRSLHDDSRGQWGIVRQGDDFPRILRGRKCTIPH

SEQ ID NO: 324124 - protein, 86 aa, Zea mays
  unsure (1)..(86): unsure at all Xaa locations
  Clone ID: MRT4577_58675C.1.pep
MLPSCHYSHKFLLSSYLQWLRTLHAVQSLGYQHSACERAVLQQXFAQLQQQXLAHLTIQTIATQQQQQFLPALSQLAVVNPVAYLQ

SEQ ID NO: 324125 - protein, 3749 aa, Zea mays
  unsure (1)..(3749): unsure at all Xaa locations
  Clone ID: MRT4577_58676C.1.pep
MWKDRVEHAKDIWAIYPGQTAHLTVRCMNALYHLQVMRGEAMSHLMALLEATKITLDNREELVVDLSQEMVEKDLQVEQLSTDIQELEELVGTRENTIEVVEDQLLNTQQQLAEANEHLDMHHQEIQDQEANEDVDIEGGDEPASNTDEKKRDRFRRGLSTKLRDRLNTVRANNYNELVNMAISQEDCITARQAEKKRKTPVAGPSAQPQRFRIVSDTQGRGPQQQQGRWVIRPQEQQQAPNRTQFPAQRSNQQQQQYRQANDNRCFTCGNTGHYAKNCPRNQQRQGQNVNQNQGKRQKVQVRQGRLNFTTMTDIPEGAPVMTGIFTVLNYPAIILFDSGASHSFISTKFCAKCQLPFHHTNGGITISTPGGRVASYQICRHVPIKLGSLIFKTTLMIMGLDSVDIILGADWLTTHQAVMDIAARAIEVHSPTCGETTLYLPDRGCTRSCAFVMLESPVEKIPVVCDYPDVFPDELPGMPPDRDIEFAIELQPGTAPISKRPYRMPPAELAELKKQLQELLDKGFIRPSTSPWGCPALFVKKKDESLRMCVDYRPLNAVTIKNKYPLPRIDVLFDQLVGAKVFSKIDLLSGYHQIKIRASDIPKTAFSTRYGLYEFLVMSFGLTNAPAYFMYLMNSVFMPELDKFVVVFIDDILVYSKNEAEHTKHLHTVLQRLRDHQLYAKLSKCEFWLKEIKFLGHTISQDGISVDPEKVQEVMDWKPPTTVKQIRSFLGLAGYYRRFIPDFSRIAKPMTELLKKGVKFEWSQKCEGAFHTLRQHLTTAPVLAQPDNTKPFEVYCDASGTGLGCVLMQENRVIAYASRALKPHEQNYPTHDLELAAVVHALKIWRHYLMGAHCNIYTDHKSLKYIFTQADLNMRQRRWLELIKDYDLEVHYHPGKANVVADALSRKAQCNCVSMDVGVTTLCDELCKLSLEVVYSGNLSYISVEPTLQELIVMAQVEDKGVQVIKDMIKQKAEKYKCFRQDNKGILWFGDRLVVPKDPELRKKILDEAHLSKFSMHPGSNKMYHDLRSLYWWTRMKREIAKYISECDTCQRIKASHLKAAGPLQPLPIPSWKWEDICMDFIVGLPNTSRHHDSIWVIVDRLTKTAHFLPVHTTHKTEKYAEIYVDQIVRLHGIPKTIISDRGALFVARFWEKLQESLGTQVIRSSAYHPQTDGQTERVNQILEDMLRACALHYGKDWDKCLSLAEFSYNNSYQSSLKMAPFEALYGRRVITKNLEAAQARQRSYHDKRRKPLQFEVGDHVYIKVSPTKGVQRFGIKGKLAPRYIGPYEIKASCGPVAYQVELPPHMSAVHNVFHVSQLRKCVRLPTEVLLDPDIEIEPDLSYQEYPVKVLDQKERSTRARTVRMYKVQWSHHSAEEATWETEDFLRSRFPDFLPKGVDCNLADGEYILVPEQGAAQEVAPDPAPEPAPEDLPATALEGKPRNSASAFGNQTPQPNSCMSRGRGVDSSHQMTSHGSSNDGNALTHTDGLAREGFPRILWEVLQGAGYTTPPQYAVQQFEKHRVPRCRVRMTLEPHPLQPGWRSLDSESFGYRAEDTIEAIALHGLTTFCGFHPLELATHPIGLFPAEREDDPMWKDRVEHAKDIWAIYPGQTAHLTIRCMNALYRLQVMRGEAMSHLMALLEATKITLDNREELVVDLSQEMVEKDLQVEQLSTDIQELEELVGTRENTIEVLEDQLINTQQQLAEANEHLDMHHQEIQDQEANEDVDIEGGDEPASSVDTAGSGRPPSPESSMAGRQRRGQNEHVPPPPPPPPTLQELMAQQNEILRQLAQRQPPPQHYGXRPPASPRXATYQEFLSTQPPLFTRAEDPLDADVWLRVVESKFPLLHGVCSEVTKVRFATQQLRGPARTWWDHFLAMQPEDREVEWREFKAAFRVHHIPAGIMDRKLNEFLALTQGNRTVLQYAQAFNDLCQYAGYHADTDEKKRDRFRRGLSTKLRDRLNTVRANSYNELVNMAISQEDCITARQAEKKRKTPVAGPSAQPQRFRIVSDTQGRGPQQQQGRWVIRPQQQQQPAPNRTQFPAQRGNQQQQQYRQANDNRCFTCGNTGHYAKNCPRNQQRQGQNANQNQGKSFISAKFSAKCQLPFHHTNGGITISTPGGRVATYQINRHVPIKFGSLIIKTTLLILGLDSVDIILGTDWLTRHRAVIDIAARAIEVHSPTCGETTLYLPDQGCTRSCAFVMIDSPVEKIPVVCDYPDVFPDELPGMPPDRDIEFAIELQPGTAPISKRPYRMPPAELAELKKQLQELLDKGFIRPSTSPWGCPALFVKKKDESLRMCVDYRPLNAVTIKNKYPLPRIDVLFDQLVGAKVFSKIDLRSGYHQIKIHASDISKTAFSTRYGLYEFLVMSFGLTNAPAYFMYLMNSVFMPELDKFVVVFIDDILVYSKNEAEHTKHLHTVLQRLRDHQLYAKLSKCEFWLKEIKFLGHTISQDGISVDPEKVQKVMDWKPPTTVKQIRSFLGLAGYYRRFIPDFSRIAKPMTELLKKGVKFEWSQKCDDAFHTLRQHLTTAPVLAQPDNTKPFEVYCDASGTGLGCVLMQENRVIAYASRALRPHEQNYPTHDLELAAVVHALKIWRHYLMGAHCNIYTDHKSLKYIFTQADLNMRQRRWLELIKDYDLEVHYHPGKANVVADALSRKAQCNCMNMDVGVTTLCDELCRLNLEVVSAGDLSYISVEPTLQEQIVRAQVEDKGVQVIKDMIKQKAEKYKCFRQDSKGILWFGDRLVVPKDPELRKQILDEAHLSKFSMHPGSNKMYHDLRSLYWWTRMKREIAKYISECDTCQRIKASHLKAAGPLQPLPIPSWKWEDICMDFIVGLPNTSRHHDSIWVIMDRLTKTAHFLPVHTTHKTEKYAEIYVDQIVRLHGIPKTIISDRGALFVARFWEKLQESLGTQVIRSSAYHPQTDGQTERVNQILEDMLRACALHYGKDWDKCLSLAEFSYNNSYQSSLKMAPFEALYGRRCRTPLNWSQAGEREIFGSDLVLEAEAKVRVITKNLEAAQARQRSYHDKRRKPLQFEVGDHVYLKVSPTKGVQRFGIKGKLAPRYIGPYEIKASCGPVAYQLELPPRMSTVHNVFHVSQLRKCVRLPTEVIPEPDIEIEPDLSYQEYPVKVLDQKERSTRARSIRMYKVQWSHHSAEEATWETEDFLCSRFPDFLPKGVDCNLADGEYILVPEQGAAQEVAPDPAPKPAPEDLPATALEGKPRNSASAFGNQTPQPNSCMSRGRGVDSSHRGRHARTQANSSTGRTTSFHSKPVAVAPPAATSPSTSTPRDKIVAKSLAPPPSTKGSSFAGRTKDIQCYRCKGFGHVIRDRPNKHTLIIHNNGEYSSASDSEETIYAMLATDVAGTQEEHVDATDTNKYESLVVQCVLSTQVAQPEQHQRHTLFHTKGVVQERSIHIIIDGGSCNNLARMQLMEKLSLPTRPHPHPYHIQWLNRGGKLKVTRSIHVHFSMGSYHDYADCDVVPMEACSLLLGRPWKYDTDSLHHGRTNNYSLMFKGKKIILHPMTPEQIVKSDIARAKQQYQQPPIPNEIKLKAPILLATKSNFDDGYIRESLSPISIPILLIPKKDGTWHMCVDCRAINNITIHYGYPIPRLDDMLDELSGAAIFSKDSTDGLCVISAPSPLCCMNSPRRASLSPRSFPYIIKHKNTKDNTIADALSRGYTMLSQLDFKIFGLQTVKEQYANDSDFKDNLMHCKDGRPWGKFHEPHGGRLMGHFGVYKTHEILAAHLFWP

SEQ ID NO: 324126 - protein, 137 aa, Zea mays
  Clone ID: MRT4577_58677C.1.pep
MSGSSGTPYLGSKISLISKAQIRYEGILYTIDTDNSTVALAKVRSFGTEDRPTDRPAPPREEIYEYIIFRGSDIKDITVGEPPKAQHTLPQDPAIGQASLGSASASPFQPHVPYSPFRGMATYGPLASSSLVSQQHA

SEQ ID NO: 324127 - protein, 213 aa, Zea mays
  unsure (1)..(213): unsure at all Xaa locations
  Clone ID: MRT4577_58678C.1.pep
RLAVDLVYLVLDRIDEQNDRRMARHLVGMYLEDTPENAAKNEVLPIEFLTAYISYARSNIHPKITEPASKALVDAYVAMRGLGADVRSQERRITATTRQLESMIRLSEAHAKMRLSEEVTADDVHEAVRLIKSALKQAATDARTGLIDMSLLAEGTSTSDRRRKEDLKRAVLASLDELGSAGQSVRLSDLMKSVREGASRQVEXQEFLEGVAK

SEQ ID NO: 324128 - protein, 61 aa, Zea mays
  Clone ID: MRT4577_58679C.1.pep
SGEVESPPGHNSFLEPELYFHFCKGLELITQHNVLTSGLSLAGCLPSDGRILLFKRPSKAH

SEQ ID NO: 324129 - protein, 90 aa, Zea mays
  Clone ID: MRT4577_5867C.1.pep
PVRVDSRHSCSIVGSCLVECRSSDTSQGPTMLETCLWFVPRRSQVVTHCFPTYNSGSDYECTDRTSSATASTRLRLYESIRPAYHRRWSP

SEQ ID NO: 324130 - protein, 53 aa, Zea mays
  Clone ID: MRT4577_58680C.1.pep
EQKRPDLPLYWTHPLIHQITPTPRAQVKKSVQKEAFYLAHHPSRQGKDWRMGK

SEQ ID NO: 324131 - protein, 111 aa, Zea mays
  Clone ID: MRT4577_58681C.1.pep
MDMAMSQHSSDTSSTSSYSSDPSSTSSTTSGKKRPRPHAAAAPAYRGVRMRAWGKWVSEIREPRKKSRIWLGTFPRPEMAARAHDAAALSVKGARALLNFSALACRLLRPV

SEQ ID NO: 324132 - protein, 198 aa, Zea mays
  unsure (1)..(198): unsure at all Xaa locations
  Clone ID: MRT4577_58682C.1.pep
YRPPFGVFFFSFFFFFFFFFFFFFFFFFFFFFFFSQKKGFFSRRKRYFKKPPPLEPRRGGGPPTFLGREKPWGEPPKKKKPQGFXKGPPPKTPEKVGGGPNFSSKNXPPPGFPPGKKKPPFFFPKRNPXPPPYRAPQRGFPQIPPPPQMGSPPLPGGXARRGPKGATPPXRDLGAPPGGGPPPQHMGENPPKXEPPPL

SEQ ID NO: 324133 - protein, 275 aa, Zea mays
  unsure (1)..(275): unsure at all Xaa locations
  Clone ID: MRT4577_58683C.1.pep
PPGAHRRRLPPPRAARRQIPPSGAAQRRIPLHRAPGRRIPSXPSRRRRILPSQSRRCRIRLPRPARCRLPPLPTRTSPVCFWDRPSPQRASERWRQPGSATSCCRRGRSSGGGPGRPPSLRSSVPPPPPGCCCSRGVRAWISSPPXGACCFRGVRQWIPPPPPPGSLLSSGARSGIPSLPPGIGISPLPPPLGACCCCRPGRLRRKGWLDHIAAATAGGPSWPQAHLSSSSAARSRVLVLALLHVGPLSSLDWLLPSMAAAGLSASRGPVSNSRP

SEQ ID NO: 324134 - protein, 51 aa, Zea mays
  unsure (1)..(51): unsure at all Xaa locations
  Clone ID: MRT4577_58684C.1.pep
RGLAAAFXXXSLLPCAGXLSVPACSXXFSARGGXVGAPRSVFLLVGGRFFG

SEQ ID NO: 324135 - protein, 246 aa, Zea mays
  Clone ID: MRT4577_58685C.1.pep
GRGASSPFTIRPTNMSYFPGQGYNGGGGGGNGYGYGPPSGPPPPQQQYGGYSGDNSGSRRYPPPNYPPPPHLDAYGFPLPQGLNHHAQHARSGPPPPSVPQQFGHGAPEGYTFQYSRCTGRRKALLIGINYFNQEGELRGCINDVHNVSAFLVERYGYKREDMILLTDDQQDPVIIPTRENIIRAMGWLVSNAQPDDALFLHYSGHGGQVEDLDGDEDDGYDECIYPVDHSQAGPIIDDEIHFRVV

SEQ ID NO: 324136 - protein, 129 aa, Zea mays
  Clone ID: MRT4577_58686C.1.pep
WTQGSGCPKCIRTPIGKKLKWLEKKGDFLPPPLGSPKKFVWNQRELSKQVRVQNLFRGWDVVFWAFGPSIFVNPLGGGPGFDNPRVFIKNPPTLLKGGFLKKKKKKKTPPKKKKKKKKKKKKRRRLRIQ

SEQ ID NO: 324137 - protein, 94 aa, Zea mays
  unsure (1)..(94): unsure at all Xaa locations
  Clone ID: MRT4577_58687C.1.pep
IMSYINHILVTLCTVRLRAVYLSIHGNACSKRSHGRPWALSWLQVHFVSTPIFXSLXSISKTLHPCGSGTXXSDKSRSNXISSFCFPAFLXFFF

SEQ ID NO: 324138 - protein, 43 aa, Zea mays
  Clone ID: MRT4577_58688C.1.pep
TPPALLLRNPRKKIPPWWGSLQLPPPLFFNIFPLYKKNLSFNP

SEQ ID NO: 324139 - protein, 61 aa, Zea mays
  Clone ID: MRT4577_58689C.1.pep
SKGATNPPWPIQRSSLRRKGGPTSANIICRRGIPEPSVRPPKCPLKEPIRFKNQGVNGSLG

SEQ ID NO: 324140 - protein, 154 aa, Zea mays
  Clone ID: MRT4577_5868C.1.pep
FGGPHLSALSLSSNFRSAHLPWARPRPRESRPPPTRPTPTQAPSRSLCYSPTRRHPSSPSLVRRSFSESQKTTAARHAHAPVLSSPLGLRRAFHLGEFCLDARNLRRASIYSLPFWFPLPMLIEASHAQPKSHRRRPKPLLCPCHRSRVPESSL

SEQ ID NO: 324141 - protein, 54 aa, Zea mays
  Clone ID: MRT4577_58690C.1.pep
IVTRIFAPSVAAPRTMRGQPTPCYWVFSVNSIRCNKIHGHNLSNPDQMITHDTH

SEQ ID NO: 324142 - protein, 63 aa, Zea mays
  Clone ID: MRT4577_58691C.1.pep
DENPPNDLERTEVTSQTQLMLCQGGDVVQQEFQGVDVGHLTPPRLLLGATDSVGHVGHFTPPR

SEQ ID NO: 324143 - protein, 55 aa, Zea mays
  Clone ID: MRT4577_58692C.1.pep
KSIIGLNKKEVTTILSVQKIYTDPFEIMNQLLMLAKVRPFGQDKQLMNWNHHLID

SEQ ID NO: 324144 - protein, 94 aa, Zea mays
  unsure (1)..(94): unsure at all Xaa locations
  Clone ID: MRT4577_58693C.1.pep
RPGRGYARPPRPVANPDSDGRDPPLRLADXDPDTAAEIXVNELKNGRLAMFSMLEFYVNGIVTDKGRIENLFDHVIRPRRINRWAYATKFNHGN

SEQ ID NO: 324145 - protein, 145 aa, Zea mays
  unsure (1)..(145): unsure at all Xaa locations
  Clone ID: MRT4577_58694C.1.pep
MENPHVFLEMTVXGAPGGXRIVMELYANEVPKTAENLLALRTVYKGVCKSXKPLHYKGSTFHXVIHEFMCHGGYFTRGNGTGGESIYGEKFRDEKFVRKHTAPGVLYMVNAGPNTNGSQFFICTDTTPWVDSKHVVFXQVVEGMD

SEQ ID NO: 324146 - protein, 71 aa, Zea mays
  Clone ID: MRT4577_58695C.1.pep
LEPWADLCACLCACLCACLCACLCACLCACGCAVVGSVLYLCLLLVTYLFNKALNFNDLDCSILCYLCEPT

SEQ ID NO: 324147 - protein, 51 aa, Zea mays
  Clone ID: MRT4577_58696C.1.pep
AATSIMATVITPHQETRARGGAPSGGGGVAGVDQAVVSWEHDMVAGPWRAH

SEQ ID NO: 324148 - protein, 56 aa, Zea mays
  Clone ID: MRT4577_58697C.1.pep
RYCRSTRRPWTSRGRCRSSSTQHPTTLYGYVDSRYLTTENVTNPNPNQTLRRCQPS

SEQ ID NO: 324149 - protein, 94 aa, Zea mays
  Clone ID: MRT4577_58698C.1.pep
IKKNIERPHENPVTEKFPKKLNKKTPTNIFAFKPPAKKPGQIKISKTPTPTKKGIKGVCVPPGTKRTHISFGLANPPKIIHAPLFSDPLFPRES

SEQ ID NO: 324150 - protein, 120 aa, Zea mays
  Clone ID: MRT4577_58699C.1.pep
FPSLIMVSSFRIVIIFSCLNFKCPFFFFFLSTFLFWFIFGFFTFFIFFFSFFYYFFFFFFFVFFTNPCDAGLDLSGSWQQGHSAPYNAPSRFKSSAKDSARRPLGRELRGAPPRRVGRAG

SEQ ID NO: 324151 - protein, 78 aa, Zea mays
  Clone ID: MRT4577_5869C.1.pep
TPNKASNLVMPSTPLTPQSSATSVQDKTFCVGSSTVVPGATPAITKELTSTPRKRLLLDQCSPSMLCIGHAGFLCLLT

SEQ ID NO: 324152 - protein, 46 aa, Zea mays
  Clone ID: MRT4577_586C.1.pep
QAFKKKFRWPSILFLVELMVGEKQQNLQGSTENDRTSGADGERSCG

SEQ ID NO: 324153 - protein, 205 aa, Zea mays
  unsure (1)..(205): unsure at all Xaa locations
  Clone ID: MRT4577_58701C.1.pep
MXXLHXSSPTHXPXPLHAPAPKAAXPXXPGXXSXIGYXLRXXRLLFXLLGALIASTFFLLRPYLXLSXSSHLPNXRXLFSFXTLSXVPPGFXPXQXLFFXTXXXGFXXXHLLXDFLNQDHNVIXFLNFFTDIKDNLSHHLPNPNFYLLLHNVXHPILLQVNRNYXLSSPTSPVHYNYNPNQTIKTNVMHNFYFPSLTYPILTKVF

SEQ ID NO: 324154 - protein, 132 aa, Zea mays
  Clone ID: MRT4577_58702C.1.pep
MAQTQCRQIIPRSTQNSARADSDRSAAVVADAPPQQEMVAANGTGQPQLVVDGHKTILEEVPGEENGTLSAANYAGNGSIDDDDDDDTTLYQGGDVLPNRPTSIFENDLAWAGKAMQQLLRVLGFQIGTTRT

SEQ ID NO: 324155 - protein, 90 aa, Zea mays
  unsure (1)..(90): unsure at all Xaa locations
  Clone ID: MRT4577_58703C.1.pep
IHAXKSFTRYPLLDPWAPPHCXMDSMYRKLKGQYSQHARSCXPXDRLGMNLTXXPHXSGXWXRRIRPPPLSXGLPWKVTQCXPRPPLXLV

SEQ ID NO: 324156 - protein, 370 aa, Zea mays
  Clone ID: MRT4577_58704C.1.pep
MSSPAAPVQPPPPRAVRFGVLGCADIARKISRAMLMLPPGAATIAAVGSRSDDKARRFISEIGFPAARVHGSYESLLEDPDVEAVYLPLPTSLHVPWATAVAARGKHLLLEKPTALCTAELDAILGACDASGVQFMDTTMWIHNPRTAKMREIVSDKDAFGDVRVINSMCSFRASEEFLKNDIRVKPDLDALGVLGDVGWYCIRSILWAVDYELPETVIAHRHPVKNQAGVLLACGATLYWADGKTANFNCSFLANLAFDVTVYGTNGTLHVTDLVIPYEESSAEFSVASKSSFVKPTIGWDPLPEKHVVTTDLPQEALMIQEFTRLVQNVRAGGRPEGKWPAITRKTQVVLDAVKASIDKGSEPVEVAS

SEQ ID NO: 324157 - protein, 75 aa, Zea mays
  Clone ID: MRT4577_58705C.1.pep
MRRYSPQYRSPPRRGYGGRGRSPPRRGYGGRREQGSGSLLVRNIPLSCRPEDLRVPFERFGPVRDVYLPKDYYTR

SEQ ID NO: 324158 - protein, 44 aa, Zea mays
  Clone ID: MRT4577_58706C.1.pep
YRVRMGDIEECERLGKSVGASDTCRERQEDKEGEYIDIPELLNG

SEQ ID NO: 324159 - protein, 82 aa, Zea mays
  Clone ID: MRT4577_58707C.1.pep
PGVKTRAACWCTLRAPKLRLCVHPPNPPFPLSFGEPPSPKTFPSFGVATPQCLAIVLSRPLACSCFCGQLIQGMDKLCGTVN

SEQ ID NO: 324160 - protein, 114 aa, Zea mays
  unsure (1)..(114): unsure at all Xaa locations
  Clone ID: MRT4577_58708C.1.pep
GXXATXVQXXRGTFVXXMSSSLVXTXNATQAVCAAALCXVLVILSSTAISAIQEIETLCDPVXTGXCDELXACGRECQAKAAKHKQSVTXXTCEXNVXPVECCCTFVARVASHV

SEQ ID NO: 324161 - protein, 98 aa, Zea mays
  Clone ID: MRT4577_58709C.1.pep
DIENPEWHPFKVIIVDGKVSEALNEGDKKLQEVKELGEEPYAAVTKALTELKDGNGGRRDPFPELWNYHLDRKAKTVEAVRHALALWKASKTKGKRSR

SEQ ID NO: 324162 - protein, 57 aa, Zea mays
  Clone ID: MRT4577_5870C.1.pep
LPFYLTILPNFFSHNSTISRHSPPYIHFLTKHNTHGTYTLTHKPKTFLTTPQKFFIL

SEQ ID NO: 324163 - protein, 121 aa, Zea mays
  unsure (1)..(121): unsure at all Xaa locations
  Clone ID: MRT4577_58710C.1.pep
PARISGVDHTRPEPLVLTTDGLYYWRYNFPGGPKKDLGTGLATNXKNLILKEGPEPMAVLIVEPGRGAGGVILPPRTYFARVQAIAKKFAIFLIANEVITALGRLGTFFGGDSFTIKPDLV

SEQ ID NO: 324164 - protein, 55 aa, Zea mays
  Clone ID: MRT4577_58711C.1.pep
GGAPTMKMKTTSCMHVAKLGMAWTMDGWTSTTAKRRLLATTTGLFCCFLFAPTYA

SEQ ID NO: 324165 - protein, 221 aa, Zea mays
  unsure (1)..(221): unsure at all Xaa locations
  Clone ID: MRT4577_58712C.1.pep
MNIHQGWLQQFGHSVGISGSKMVLHMTHNVFSFRCFAANGRGFSADSTNKRKIKSKKRRKDVALESRSALEKKKAEENKDYQAIDYDAPIESDKSTIGFGTRVGIGVAVVIFGLVFAFGDFLPYGSVSPSRESAVVKQKLSQEEEEKFKNALQGFQATLSKSPNDPTALEGAAVXLSELGEYEKASTFLEKLIKVIPDKAEAYRLLGEVKFELRIMKGVHH

SEQ ID NO: 324166 - protein, 414 aa, Zea mays
  Clone ID: MRT4577_58713C.1.pep
MNIHQGWLQQFGHSVGISGSKMVLHMTHNVFSFRCFAANGRGFSADSTNKRKIKSKKRRKDVALESSEVISGNPRNRDQWVPELRTESENKSGKKVMDKKFLEKVEAVRRSALEKKKAEENKDYQAIDYDAPIESDKSTIGFGTRVGIGVAVVIFGLVFAFGDFLPYGSVSPSKESAVVKQKLSQEEEEKFKNALQGFQATLSKSPNDPTALEGAAVSLSELGEYEKASTFLEKLIKVIPDKAEAYRLLGEVKFELKDYEGSSSSYRSALSSSDNIDFEVLRGLTNSLLAAKKPDEAVDIILLCRRKLNEKSQTGLADLEATNDNGRQKPQDIDPIQVDLLLGKAYSDWGHISDAISVYDKLITDHPEDFRGYLAKGIILKENGKAGDAERMFIQAKFFAPEAAKALVDRYAQR

SEQ ID NO: 324167 - protein, 55 aa, Zea mays
  Clone ID: MRT4577_58714C.1.pep
NFLKHHFSSVTVEAAKILTVLVVAFNLCFLPGANDTTDESGARVATASAPSSHRG

SEQ ID NO: 324168 - protein, 74 aa, Zea mays
  Clone ID: MRT4577_58715C.1.pep
NIGSESKCRVILQNMKYSNSLQSYFLRFVLVGTKHCTGYTHEMTTVVHDSDIARIMQGRITLVSAPARASVVTE

SEQ ID NO: 324169 - protein, 39 aa, Zea mays
  Clone ID: MRT4577_58716C.1.pep
LNFKSPKKKLGSGNSPNKCMKSRTFHLCTQHIFLRRFIS

SEQ ID NO: 324170 - protein, 146 aa, Zea mays
  unsure (1)..(146): unsure at all Xaa locations
  Clone ID: MRT4577_58717C.1.pep
HPPRRRRGQPNNARLQATSADTLRTRKGMTNRLQARKQDGREXSHPGRANDXKADPKERPAKANEXKDPNTNXGHRHRTHFRGGKPXGFGLIYDNLEAAKKFEPKYRLTRNGLATKVXKPRKQMKERSSRAQKIRGVKKTKAGDPK

SEQ ID NO: 324171 - protein, 73 aa, Zea mays
  Clone ID: MRT4577_58718C.1.pep
TNAMDIGAHDVHFAKNRHFHNIVECPGHMRHDVAIGGNPGSCGDDAHPDRVILILEHPIQNRIVSCLLHCRLL

SEQ ID NO: 324172 - protein, 43 aa, Zea mays
  Clone ID: MRT4577_58719C.1.pep
HPTRRFKNIPGFHQTLLAADCLFLIHPVSFSTASPSTTTYAYT

SEQ ID NO: 324173 - protein, 58 aa, Zea mays
  Clone ID: MRT4577_5871C.1.pep
GRRLGFRERTEAAGATAVGLERQFVCVLRGLAPMPFKRPPVGVGLIVFRTWVMNPRAE

SEQ ID NO: 324174 - protein, 192 aa, Zea mays
  Clone ID: MRT4577_58720C.1.pep
GPSRPAGKSTFSLRSIQTTSTQTLSRRFHFHRRPQPHQSSSTAGVTNGNPAATTASDIDPLFPTGPSFLRPLARYCLSVEGVLRVSLGRFIIFVLCPMPPLHLSYPPAQPLPLSSLLSRIGNQLGMAELMAVYPWQVMAGFLTLSMFVMLEKMIKHDHLSPITENCEEFLIQKNTLKGPRSPDGDNMLALGK

SEQ ID NO: 324175 - protein, 55 aa, Zea mays
  Clone ID: MRT4577_58721C.1.pep
FRSIKILYISYKKIHFVAVITLGSVLVTSLVGHINMWNLNVATMSGKFTDLTSKT

SEQ ID NO: 324176 - protein, 52 aa, Zea mays
  Clone ID: MRT4577_58722C.1.pep
VVASVFPLKVNHNGTPLVVQKLQKLLTHSTMPTLYLYLARAKNAQIPTQRQG

SEQ ID NO: 324177 - protein, 97 aa, Zea mays
  Clone ID: MRT4577_58723C.1.pep
RPPVPSPVPLTVAPTARPRSSASAPSARCTADLGFLPKRSARLRSLGSRRAARAGRRNAGGRSQPAAPISLAARIGQTNNGRVTRLQRKKPGFPYEL

SEQ ID NO: 324178 - protein, 76 aa, Zea mays
  Clone ID: MRT4577_58724C.1.pep
PPLSYMRSGASSPGDSARAMSDTTTTVIGLRAIFYSWLFSAAPTLMRTATMTLYQRALYTIKRNSQGCLRTGYASS

SEQ ID NO: 324179 - protein, 52 aa, Zea mays
  Clone ID: MRT4577_58725C.1.pep
ESALSSVTFIHSRVELTVTRCTDEHGLFHCSASTHTNSTTRPVPLFRFPRVR

SEQ ID NO: 324180 - protein, 106 aa, Zea mays
  Clone ID: MRT4577_58726C.1.pep
SRDPHKLWCRADRAIAAASDDRHHQYPEPWAATWLNAPTSAGGPMCPEILDLLRTRTYASPGGSRRSAACVCNGRRAASRNWGRRGLCTSDGPERQRARPNCAPET

SEQ ID NO: 324181 - protein, 108 aa, Zea mays
  unsure (1)..(108): unsure at all Xaa locations
  Clone ID: MRT4577_58727C.1.pep
MAALFQAVFTGGQPSKIGGRPPFASLPSRPSPQLACRAFGVNACAARITCSLQDVASKXCVYAAKLARFALSTSALLVSGASAEGTPNRLTYDEIQSKTYXLEVKGTG

SEQ ID NO: 324182 - protein, 171 aa, Zea mays
  unsure (1)..(171): unsure at all Xaa locations
  Clone ID: MRT4577_58728C.1.pep
ITILWRAPPLPDHGRSSRSTQPCCASAAKRAVIQMTLXASVHXMSTNSWDYKMQRYVIEGRADIIYLIKRGHTCDKLYVAAXTCDSIENMHDVMVCHDRPHVQLAVLKNCHNSXAHAVHVIHLPGACTXNMLQISFSESRLLILTDPRTDHQPINETALANITTIDFCDTD

SEQ ID NO: 324183 - protein, 102 aa, Zea mays
  unsure (1)..(102): unsure at all Xaa locations
  Clone ID: MRT4577_58729C.1.pep
MADHHRCTTGGGGGYCDLQRVGVLHGXAHHQQKHGAMITALNAVTAATFGWSMLVLFRLILACTLIALTVATPVLVIFNPFLVDLKKTILLKSNLGPFYTCI

SEQ ID NO: 324184 - protein, 440 aa, Zea mays
  Clone ID: MRT4577_5872C.1.pep
MGDVLIPELQRGNTSVTICARVSHLWDFCDPQDEAKLLHCDMVLLDEEGNGIHAAIFPPVIQKFKPLIKEGVVYNITYFRVRASNNLYKPVFNENMITFTNWTKLEEVVEMPLELSLPSRPWRHTDPEGNIQPALRGLFPCAVSDGLCLSGGSPCKWYINPDVPEACALMASARKAHSPIKWNEVVSSNQPMPHVPEEQKIACIRDLHPFENKDREFLVTVTIKKIGYRWWYNACKKCTRTTVAHGDSYKCSDQVCATIGTPNQRYKLLLTAGDETGDTDFILFGRMAQCIIKRPCDMLIANNPTGFIPNPITDLLEKTYVWNVNAVMAEVGTAKDSIQASSSGPKQSQPVLLQGAPSGVEDTPDKASNLVMPSTPLTPQSSPTSVQDKTFGVGSSTAVPGATPAITKELTSTPRKRTRSSPSKTVTKRLFTDVDGGCRG

SEQ ID NO: 324185 - protein, 78 aa, Zea mays
  Clone ID: MRT4577_58730C.1.pep
INAWGPDLRVSPQEHDSNHIRYPFHTFIHTEKRIKLLRAKSGCKSIETVERLSVLTMPPIGTVAGAPTDGSTPSQGDK

SEQ ID NO: 324186 - protein, 577 aa, Zea mays
  Clone ID: MRT4577_58731C.1.pep
MDQLPKRPANYVPLSPVGFLARANAVYADRASVVYGGVRFTWRQTYERCRRLASALLSLGVRRGDVVSVLAPNVPAMYEMHFAVPMAGAVLNAINTRLDAAAVATILRHSGAKLLFVDYDYVRLAGDALRLLAAAAGGTVPLVAVVDDIDSPTGARLGELEYEALLAHGDPDADLPPLADEWDAVTLNYTSGTTSAPKGVVYSHRGAYLSTTSLLLQWGVATDPVYLWTLPMFHCNGWTFTWGMAARGGVNVCIRDARRADIYRAIARHRVTHMCCAPVVFSILLDGDGDGDGRQLEAPVHVLTGGAPPPAALLERVERIGFKVTHAYGLTEATGPALACEWRDQWDRLPLPERARLKARQGISVLSLADADVKNVDTMASVPRDGKSLGEIVLRGSSVMKGYLNNPEANDGAFRGGWFLTGDVGVVHPDGYIEIKDRSKDVIISGGENICSKEVEEVLFRHPAVADAAVVAMPHPRWGETPCAFVVPRDGKAHGLSEDDVLAFCARRMARFMVPKKVEVIGALPRNALGKVEKVKLREAARKLAPTVPAQIKPKGKTTTSTVVGGGRCEEQPVSRL

SEQ ID NO: 324187 - protein, 55 aa, Zea mays
  Clone ID: MRT4577_58732C.1.pep
TSKKAKMKPQSVSKHDYRTFLVILTNTDIPHLLPNTAIIFPISFQSLLKRTVLVS

SEQ ID NO: 324188 - protein, 88 aa, Zea mays
  Clone ID: MRT4577_58733C.1.pep
ELTAGGVPWRKHNSSSLRGAPSLLGRPTPPSTAAAPRQRGFPPVCECTRARDGSSPGGVVLHVGVSGRQQTEVAVRRHDPDESRRGRA

SEQ ID NO: 324189 - protein, 150 aa, Zea mays
  Clone ID: MRT4577_58734C.1.pep
MASAPAGFAPTVAASTSFGFSRFTIVACPFPSRTHLPAASSVGVRNQQRASTATACLPPPNTSHGAATRLYVSGLSFRTTERSLRDAFEKFGDLTEVCLVMDRVAKRPRGFAFLSYTGEEEARGAMEGMHGKFLDGRVIFVEVAKRRAEA

SEQ ID NO: 324190 - protein, 53 aa, Zea mays
  Clone ID: MRT4577_58735C.1.pep
ISRGTRACVTLDINFMLLFVIVHACVWLINMYLIKIIGCLFIGFQCTIACFRL

SEQ ID NO: 324191 - protein, 171 aa, Zea mays
  unsure (1)..(171): unsure at all Xaa locations
  Clone ID: MRT4577_58736C.1.pep
MASAPAGFAPTVAASTSFGFSRFTIVACPFPSRTHLPAASSVGVRNQQRASTATACLPPPNTSHGAATRLYVSGLSFRTTERSLRDAFEKFGDLTEGDRARDERMSXLNSELLKICSVLATPVCLVMDRVAKRPRGFAFLSYTGEEEARGAMEGMHGKVKDVQIVGCSCDR

SEQ ID NO: 324192 - protein, 158 aa, Zea mays
  Clone ID: MRT4577_58737C.1.pep
PRAGGNLFTHARSLLLSPSRGRLLFSEIHANTPAPWCGTTSGIICTGQGNRTRLARAFGCLALTITPLSWMRTLNPLDEAQQDVDYVFKNACRVYRHRGSRTKTVITLFRPLISALASLAASTDIRSLQAQESITSARVTKEMNCVSNHAKRRRRVKG

SEQ ID NO: 324193 - protein, 339 aa, Zea mays
  Clone ID: MRT4577_58738C.1.pep
MALEAVVFPKEHLAGTAKARSASSLACGFRTEEVEDNGGVVLQGEASDAPGAGAATTWEYWDAALCPCSTAPAGAVEECWDVRHRLSASPPPPAPSAAVAAPSSGHGKAAAAARRRRRQRPKAVKNTEEVESQRRNHIAVERNRRRQMNEYLSVLRSALPPSYPQRGDQASIVAGAINFVKELEHLLQSLEAQKRRRQGCTEPPAPAPFAGLFTFPQYSTAATGVVAGSGDGAGCGAAGARRGVADIEVAVAESHASVKVVTPRRPRQLLRMVVALQCLGLTVLHLNVTTTADQLVLYSLSLKMEDECRLSSVDDIAAAVNDILAKISDERASRHLVAA

SEQ ID NO: 324194 - protein, 152 aa, Zea mays
  unsure (1)..(152): unsure at all Xaa locations
  Clone ID: MRT4577_58739C.1.pep
TNRSTGSSGHAQLGPQKKGPFFSAPVNKKRVFAPPGGKSPPXLGPPEIEKGAHPALNPKGXGGGPFGPTPPGGGSPPRGGGGGGFFFLSPPPHKFFPPPPKKKKKHKRGVFFGVYKKKKKKGGGGGGGETPPPPPRXGGFFFFFPPPGGAPP

SEQ ID NO: 324195 - protein, 208 aa, Zea mays
  Clone ID: MRT4577_5873C.1.pep
MDEEEHEVYGQEIPVDGDMEAADVDMTAAGDDAAKELDEMKRRLKEMEEEAAALRDMQAKVAKEMQGGDANASTAEAKEQVDARSVYVGNVDYACTPEEVQQHFQACGTVNRVTILTDKFGQPKGFAYVEFLEQEAVQEALNLNESELHGRQIKVSPKRTNVPGMKQRPPRGFNPYHAYPYRSYGAPYFPLYGYGRVPRFRRPTRYRP

SEQ ID NO: 324196 - protein, 83 aa, Zea mays
  Clone ID: MRT4577_58740C.1.pep
TSPESDVLVPGSRGSMACPRPTLLWPRASRPDALHLLSLLPAATLLCRTPFSLLQRATNNGGTSCSFLRRIGLLHVISYGTMM

SEQ ID NO: 324197 - protein, 63 aa, Zea mays
  Clone ID: MRT4577_58741C.1.pep
YVFCNNNDIYNRDRILDYSLIHDNDMRCTATCIACMDRYIILHHIDHRTYVYILAWTNYLACR

SEQ ID NO: 324198 - protein, 106 aa, Zea mays
  unsure (1)..(106): unsure at all Xaa locations
  Clone ID: MRT4577_58742C.1.pep
EAPRSSFIDDEVHAVAVVVAKTSSRRGGRTAFLAMRSPRPNTEGITAYCRHRHRHXAXHXXXXXHXXAATKKKAXGRXRXXQSTQAAKGGTXDGQXPXXXAXKQDT

SEQ ID NO: 324199 - protein, 131 aa, Zea mays
  unsure (1)..(131): unsure at all Xaa locations
  Clone ID: MRT4577_58743C.1.pep
MEILAGTLNCQTGSMPFTYLGVPLGLSKPKICHFLPLIHRIEKRLSCTSALLSQADRLELVNSVFSALPTFLMCTLKIPVATVKKIDSYRKHCLWRGNDINSKKPALAAWSMITQTKKXGSLGVQTYCQRS

SEQ ID NO: 324200 - protein, 74 aa, Zea mays
  Clone ID: MRT4577_58745C.1.pep
DRTIPAPQGELLGMNLSQDKKRKNSPRTSSLSKNTNPLINPLVPPEIPTKTTRERSQRWLLFLPTSQPLKGVGV

SEQ ID NO: 324201 - protein, 47 aa, Zea mays
  Clone ID: MRT4577_58746C.1.pep
MLCGRGEWTRPAPVLPPHRALRRLLLAGLALRSAHRRWNPMTAAMLR

SEQ ID NO: 324202 - protein, 197 aa, Zea mays
  unsure (1)..(197): unsure at all Xaa locations
  Clone ID: MRT4577_58747C.1.pep
VSSEYRATVKWRYFSVTGIQAGEAFLHXLAESGDGEXFMQXTLLDQGQVHVEMSVVLREIQQRHGTVMGVEPIVLDLHQVFSFMAVLVAAQGEHLVGFEGIVDRVMVFGCFARPEQLTCWRLDSARTIILKRSGISILIILVIMLVMVLPIVLKGVNRGYVRLPCVIRCSFFFSMASCINTCGVVDYRSSLYYILFF

SEQ ID NO: 324203 - protein, 66 aa, Zea mays
  Clone ID: MRT4577_58748C.1.pep
DAWGLIEVIINTCYLPCWSTMHACKFKLIMLFMYIPCALWAPTPSLPGNSVPVATPQLSDPSRCYC

SEQ ID NO: 324204 - protein, 61 aa, Zea mays
  Clone ID: MRT4577_58749C.1.pep
TPVAAMGGMFTVRGTFHWCWGRLSRYSTLTGTVVSLPQSWACSCASYIGNSTHAQFRDIGA

SEQ ID NO: 324205 - protein, 354 aa, Zea mays
  unsure (1)..(354): unsure at all Xaa locations
  Clone ID: MRT4577_5874C.1.pep
QIYNDGQSSPQILMFVGTLVKKYADGLCLSGGSPFKWYINPDVPEAGALMASATPSHSPIKWNESLSCSISLCSNEXDKRCKSLIXDVRPFENKDREFLVTVTVKXIGDRWWYNACKKCTRTAVAHGDSYKCSDQVCANIGTPSQRYKLLLDAGDETGDTDFILFGRMAQHIIKKPCDMLIANNPIGFIPDPITDLLEKTYLWNVSFSDHTINTGNICFQVNAVVAEIGTAKDFIQESSSRPKQSQPVLLQDAPSGVEDTPNKASNLVMPSTPLTPQSSATSVQDKTFCVGSSTVVPGATPAITKELTSTPRKRTRSSPSKPVTKRLFTDVDGGITSSKDAADSAAAPSPTKDA

SEQ ID NO: 324206 - protein, 366 aa, Zea mays
  Clone ID: MRT4577_58750C.1.pep
MSMWWVWAYPTPMHMDGLLFARKKKKITAGVLRFVRAFALCVATACLLLAAGVPSPVAAQDPSKLSLQYYSKTCPNVEHVVRTEMECAVRADTRNAALMLRLHFHDCFVQGCDGSVLLDDTATMIGEKQAEQNVNSLKGFDLVDKIKEKLEAECPGTVSCADLLAIAARDAVVLVGGPYWDVPVGRLDSKKASLDQANSDIPTAQQGLLTLIAKFWEKGLDATDMVALVGSHTIGFARCENFRDRIYGDFEMTSKYNPSSEAYLSKLKEVCPRDGGDDNISAMDSHTSDVFDNAYFETLIKGEGLLNSDQAMWSSIAGYSTSDTVNKYWADPEAFFKQFSDSMVKMGNITNPAGGEVRKTCRFVNT

SEQ ID NO: 324207 - protein, 56 aa, Zea mays
  Clone ID: MRT4577_58751C.1.pep
PTRPWIFWWTHASRNDEGAEGAPELIQRKSHGIFRRGGPVRHNGIFEGSNSGHHQQ

SEQ ID NO: 324208 - protein, 37 aa, Zea mays
  Clone ID: MRT4577_58752C.1.pep
RNPGVSKKKKKKKKKKKKKKKKKKKKKKKKKKKKTPP

SEQ ID NO: 324209 - protein, 348 aa, Zea mays
  Clone ID: MRT4577_58753C.1.pep
MLRMGRASATAGVLRFVRAFALCVATACLLLAAGMPSPVAAQDPSKLSLQYYSKTCPNVEHVVRTEMECAVRADTRNAALMLRLHFHDCFVQGCDGSVLLDDTATMIGEKQAEQNVNSLKGFDLVDKIKEKLEAECPGTVSCADLLAIAARDAVVLVGGPYWDVPVGRLDSKKASLDLANSDIPTAQQGLLTLIAKFWEKGLDATDMVALVGSHTIGFARCENFRDRIYGDFEMTSKYNPSSEAYLSKLKEVCPRDGGDDNISAMDSHTSDVFDNAYFETLIKGEGLLNSDQAMWSSIAGYSTSDTVNKYWADPEAFFKQFSDSMVKMGNITNPAGGEVRKTCRFVNT

SEQ ID NO: 324210 - protein, 59 aa, Zea mays
  unsure (1)..(59): unsure at all Xaa locations
  Clone ID: MRT4577_58754C.1.pep
RETRVKISKTSDAYFPALLNVIWGVLDHFLPXNQHTNXXNXTTTLKHNXHITKIIXSFX

SEQ ID NO: 324211 - protein, 150 aa, Zea mays
  Clone ID: MRT4577_58755C.1.pep
AVQFDGFDLDPAAFFSNGANSDLMSSAFLKGMEEANKFLPSEDKLVIDLDPPDDPKRFVLPTRAAENLAPGFNAAAATTAPAAVAMAVKEEEVILAAPDAALGSGGVVLGRGRRNRLDDDEEDLELQRRSSKQSALQGDGDERDVSRSTS

SEQ ID NO: 324212 - protein, 92 aa, Zea mays
  Clone ID: MRT4577_58756C.1.pep
KPHREQERPRERKTWEREGTPQRERPVAGNAPQDRPPRKVFKSGKKDCNTTKKSEQNKKSSPPHTKEGGAHIKKKDTPPPKKKANQKSRGNT

SEQ ID NO: 324213 - protein, 75 aa, Zea mays
  Clone ID: MRT4577_58757C.1.pep
NTIFVHRTGPPLPVSPNQKNDKPVQHQRLSSLPSSYKTSPGLLGLTHPNLLLSGRPWPIHFWGGGGMPPPKQMKC

SEQ ID NO: 324214 - protein, 88 aa, Zea mays
  Clone ID: MRT4577_58758C.1.pep
RVAVVMDVCFHHRQGQGDSPYPGGCFRGVVGRIGPPAPTELLTGVSNPPQIDLRAWTTSSVPIPSMRGDDELGVPTFGSTSELQGFLK

SEQ ID NO: 324215 - protein, 60 aa, Zea mays
  Clone ID: MRT4577_58759C.1.pep
TCNRSQTLHIISYNSHTILTDSDVTRARLCIPFLIAKKYCNTSKSTCGFLFWKLLICMYS

SEQ ID NO: 324216 - protein, 61 aa, Zea mays
  Clone ID: MRT4577_5875C.1.pep
GEFAGNYCCDTTVLSAYPETFAKKRELEIIQSRWAMMYALSCVLPELLTRNGVKFWLGMWF

SEQ ID NO: 324217 - protein, 60 aa, Zea mays
  unsure (1)..(60): unsure at all Xaa locations
  Clone ID: MRT4577_58760C.1.pep
GVDVSTKVVHHRKPYSLKFEFLFKLWEEFIPICLSLEENGXNXXXGXMRAPSMCLWPLDG

SEQ ID NO: 324218 - protein, 63 aa, Zea mays
  Clone ID: MRT4577_58761C.1.pep
KKKKKKKKKKKKNTNFPSRKEQHHRGRNSVTLNSMYLSVPYITVETVKSLTLLNLMPCNPLPF

SEQ ID NO: 324219 - protein, 82 aa, Zea mays
  Clone ID: MRT4577_58762C.1.pep
ICIALGESLHSFKQNRTISLLAVLTAHFTPGTPTTDLTCIWNGIPSGIFTAEILNIHIRIFPFDYKEHIISCKGLNSIIYAV

SEQ ID NO: 324220 - protein, 141 aa, Zea mays
  Clone ID: MRT4577_58763C.1.pep
KKTKPIFLGQGGGAPRGGHFKGRGGKARAAFPRKPSGAPEFSPTLRNKPAPFGGVISKGGTAAIGGIPRGPLFNQAPQPLGPRARLENRVFPPRQGGVSSSLRAPGTPCSRGEPAPRGGQEPGGYFGQDPGGLGKPTPKWG

SEQ ID NO: 324221 - protein, 100 aa, Zea mays
  unsure (1)..(100): unsure at all Xaa locations
  Clone ID: MRT4577_58764C.1.pep
MSGSKVYTLEEVAKHNTKDDCWLVIGGKVYNVTKFLEDHPGGEIDAATIPSKVKYTPPKQPHYNQDKTPEFVIKILQFLDPLAILGLAVAVXIYTKLESA

SEQ ID NO: 324222 - protein, 79 aa, Zea mays
  Clone ID: MRT4577_58765C.1.pep
SHVTNLLIVICLARFSAFRQLGFPFFGPVWLRHRGCPSQGWVPCCMLRSLRGLGPPWPAPVRGIRRVPASTWRPSFRGW

SEQ ID NO: 324223 - protein, 107 aa, Zea mays
  Clone ID: MRT4577_58766C.1.pep
VYNVTKFLEDHPGGDDVLLSSTAKDATDDFEDVGHSTTARAMMDEYLVGEIDAATIPSKVKYTPPKQPHYNQDKTPEFVIKILQFLVPLAILGLAVAVRIYTKSESA

SEQ ID NO: 324224 - protein, 135 aa, Zea mays
  Clone ID: MRT4577_58767C.1.pep
VFFRFSLPFCLCLLGAPQYLSGVLYGVCHVVGPFFMGESAQWWRFFPRLENRGPVYLGAALKMGGLWFWPQIFLFFCGGGGFGVFFFFPRGVFPASSFPCGVVIPALNKVRGFPSSIKKKKRKKKKKKKKKKKKK

SEQ ID NO: 324225 - protein, 220 aa, Zea mays
  Clone ID: MRT4577_58768C.1.pep
MVKNAEAAVRKAISGTSIPNLEIRRLQENSMIQDEADLCDAVQEQNNQKHQKMKSSMESQDGYLTSLPNQESADVVGSDNIVEVHNKVIELPLVNEMNSQTIKRDQYYNFSEDEDLMLVSSYLNVSKDSITGRDKKEGTFWERVWKYYNKNRTFESDHSWLSLKHRWLAIQKEVNIFQGYYDAIERKNHSGQTSDDKHAEAEVEFREKQGKAFSVFHVWM

SEQ ID NO: 324226 - protein, 133 aa, Zea mays
  Clone ID: MRT4577_58769C.1.pep
FFVVSLVGTLYVKGALFFAFRLGLGFQGGFCGRVGPPNIFASPIQGLFALKGFVLFSWGGSASLFFWDLFGLSGTIRLHKELPGFTFQFHQVQGGLGPGFRCKIGPPPQRKILYFTVGWVSPLGRFWAFVGGQ

SEQ ID NO: 324227 - protein, 64 aa, Zea mays
  Clone ID: MRT4577_5876C.1.pep
TYRVVSGGGRAGAIPVGVSVASLLLIAACRRACRCSYMGAGRCSAMEHADCRRVATSSSWVNIR

SEQ ID NO: 324228 - protein, 115 aa, Zea mays
  Clone ID: MRT4577_58770C.1.pep
RPPERRAPWRSPCRWSPNPCRSSGRCWHRSSQGSRGFFECLCRYPGMGGIYALLLLNFKGWVGRRCPVCGWVHNTGPSDPGDMGALVVVVFVGSPVAATSRVFPRHRPRPPPHYI

SEQ ID NO: 324229 - protein, 117 aa, Zea mays
  unsure (1)..(117): unsure at all Xaa locations
  Clone ID: MRT4577_58771C.1.pep
AGCVXXPAARPLKPPISPLSPRAPARKGAXQGRPLYXXPVLSVPPAGSQMXXRXAXXTEPSXHNVPNVRLXIPIPQRTRRGAXFVRRAPTRGRECEGWCQCVPPPAGVIHGPSGSLR

SEQ ID NO: 324230 - protein, 67 aa, Zea mays
  Clone ID: MRT4577_58772C.1.pep
GLSVVFSCWFPLCCLFLFRPCFFLIGFVWLFDCGLLLRWYLFGFLLVLVVSYIFIYLLGVGFLCLLD

SEQ ID NO: 324231 - protein, 79 aa, Zea mays
  Clone ID: MRT4577_58773C.1.pep
VAIPKAHMLKVGVAYRIKVKLFLGVQSVKSRFWGLISRLRVLFCPAHMENKRERVGFFGLGCKVPFYTLCSVGFSGVQA

SEQ ID NO: 324232 - protein, 111 aa, Zea mays
  Clone ID: MRT4577_58774C.1.pep
IPYSQRARIDSSPCALHGSSRGDGDGQYWGAGAAALLSRGTTIVGPLGRGRAPPVTPDRGTHGNAYRAQHNAVPYNLTSKACSISMVARTATRLHCCIALLCMVQARFSSE

SEQ ID NO: 324233 - protein, 60 aa, Zea mays
  Clone ID: MRT4577_58775C.1.pep
GTDFLIRLSYSLSSREFDYQKTNSTPLLVLRETIPIVAPTIGEGARRHKQGPTRESSDQT

SEQ ID NO: 324234 - protein, 59 aa, Zea mays
  Clone ID: MRT4577_58776C.1.pep
PLHRYQATYGVVLQSFLQQQPKGELAALMAAQVAQHLTAMCGLHLAKPAPCFNNACWRW

SEQ ID NO: 324235 - protein, 115 aa, Zea mays
  Clone ID: MRT4577_58777C.1.pep
KTITIDEYLSRYARPLRLHALSIHIEHRHGAQSPPSARKRDTWTVTASTPHSSSYATMCPTVIVDSITAPLAIPPVLRSPSTRKMLNVFNQNDSQRPDTSYDLPIDCAFYLPQAI

SEQ ID NO: 324236 - protein, 50 aa, Zea mays
  unsure (1)..(50): unsure at all Xaa locations
  Clone ID: MRT4577_58778C.1.pep
GWLSAIMADLWTDYADFCSKIYGDRVEHXYTFNEPTIVSLLCYDTGSHPP

SEQ ID NO: 324237 - protein, 151 aa, Zea mays
  Clone ID: MRT4577_58779C.1.pep
LVGRYKPLSHASAHASAPACCGWPWAPCAPRPPRPRPRRARSPTTPGRSRWRAARCTTASSRSTTSPTASTRPPSPSPPATATPPAPCSTPCAPTWTPATRASRSARSSRRSWPSTTPSSPSSPATASPSPPPPACARSPVHVLAPRQQQQ

SEQ ID NO: 324238 - protein, 101 aa, Zea mays
  Clone ID: MRT4577_5877C.1.pep
RLWLKRTSSVIWCMTARALQYAALVLVRTHRTMGTYCGATAVILFGCLSAHLLVSSMVFHLFAITLPSNERVPPKTVSIRAAAPCLLSGLWVYDQCPGFSL

SEQ ID NO: 324239 - protein, 108 aa, Zea mays
  Clone ID: MRT4577_58780C.1.pep
HQGANLIIFFEEKGNINTGAYLHVTDSQFQQCSPVSDSCHTEQLGFLDSERGKKERPKLLDSPLTLLLTHTHCTHAFWLQDLWSSLLRELPWLNIYRRTSAVFLELVF

SEQ ID NO: 324240 - protein, 150 aa, Zea mays
  Clone ID: MRT4577_58781C.1.pep
MVVGLVVSSRRQLVLAASCSEVTWLHTDIQPKETEGVERRGEWTKARPDRHGWRCCCIGTGTGTGKGDETRGVGWYSAGTGALTGAENQLRLTSDAAAETQTQTPLVCVLFRPCSCLVRMQQRSLSLLRRCIHLLLFFSTRSLADKEMKK

SEQ ID NO: 324241 - protein, 53 aa, Zea mays
  Clone ID: MRT4577_58782C.1.pep
AYYISHLSFRFQASNTCIHSIAIVAYILPQPIEGQPLCCSSLPPQGILVQHTQ

SEQ ID NO: 324242 - protein, 62 aa, Zea mays
  Clone ID: MRT4577_58783C.1.pep
ILMIKKSPEFFAWGKGFYFAKKSFLYPTYGFFYWAGPKLKQCKGITLKNFFDPKLGPGKKKF

SEQ ID NO: 324243 - protein, 91 aa, Zea mays
  Clone ID: MRT4577_58784C.1.pep
GPKKKGGRTKFKWPPKKISEKNFQGKQGLEQTNILNKNLGGKKACFLKNTKNFFLGAPRGSKKKKWGKHYLKFKSLTQGKGNLNPKPRLKW

SEQ ID NO: 324244 - protein, 43 aa, Zea mays
  Clone ID: MRT4577_58785C.1.pep
MPSTKPISHLTLHRKTWYPSTIRCVISPSISQPHLWSRLTNKT

SEQ ID NO: 324245 - protein, 101 aa, Zea mays
  Clone ID: MRT4577_58786C.1.pep
KSVIFSCLDVYYSGFPSPSLYLFISVTLILIFLHLLLYTVPSKGSLRLHTPTHTQTQTYIDTDFYIVRYIDIYIYIYIHIYIYILSPPTVYVCVYTYSHKQ

SEQ ID NO: 324246 - protein, 158 aa, Zea mays
  unsure (1)..(158): unsure at all Xaa locations
  Clone ID: MRT4577_58787C.1.pep
ANKLEPXRKAQLARALGLQPRQVAIWFQNRRARWKTKQLEKDYDALRRQLDAARAENDALLSHNKKLQTEIMALKGGGGGRQEAASELINLNVKETEASCSNRSSDENSSEINLDISRPPRAADESPAAMDSYRGIPFYACARADDVDQLQLLHSGGH

SEQ ID NO: 324247 - protein, 118 aa, Zea mays
  Clone ID: MRT4577_58788C.1.pep
QPHGGSLRLQALSSAAMVSQPGAERAATTGLAAATARLSRPTEGTGFSEATDDSGTTATGNSGTGRCTPHDFAMHSAPSPIVAEVGPAANLLAPEEDQTICVDRHWQLPGRPRGTQSP

SEQ ID NO: 324248 - protein, 78 aa, Zea mays
  Clone ID: MRT4577_58789C.1.pep
GGRERDSCKLQPPDSSYSVIIDNIKKVYPPKDGNAEKFTVRGSSLSVQRGQCFGLLVNGAGKPLIRVLCCINHILYCK

SEQ ID NO: 324249 - protein, 279 aa, Zea mays
  unsure (1)..(279): unsure at all Xaa locations
  Clone ID: MRT4577_5878C.1.pep
MALQSNQPSAMRLVLPITGSSTSEPAIKRXKKEAQRRVQHVGVQGPFIRSKWSHIPITFSQEDLQLKDHPHNDAMVISCVIKGFLVHNVLVDTGSAADIIFAKAFTQIQEPDDKIHDATHPLYGFGGRQIVELGKIKMPVTFGYIHNTRTEQVVFDIYPYNAIIGRGTLNAFEAILHLAYLCMKIPSKQGPIAVHGSQEAARRAEGSWTDSKAIHNIDETGAYQQYKHKREKATLADQPKPMLLCEDIVEQKVLLGSQLSDEQEKILLRFLFNNKYVFA

SEQ ID NO: 324250 - protein, 54 aa, Zea mays
  Clone ID: MRT4577_58790C.1.pep
AIYNQRCPRRTGPLPTLLLKQELENIRRAENCNDRSQYKVALERSLLWMLEASK

SEQ ID NO: 324251 - protein, 63 aa, Zea mays
  Clone ID: MRT4577_58791C.1.pep
KKKKAFPPPPLNWKEMVYNTPRIVVLKAGTGASCVVLTHLLFRAVYFQDKKEGQDLAPPPPKL

SEQ ID NO: 324252 - protein, 88 aa, Zea mays
  Clone ID: MRT4577_58792C.1.pep
LGCSHTLLLNKFKCFISYRTTGFGIWDNQLSQLGMQSTSTLCPLAVIRHKHHLQRSANSDPKPQETKATPAGAISFYRLMLPRAEVSS

SEQ ID NO: 324253 - protein, 57 aa, Zea mays
  Clone ID: MRT4577_58793C.1.pep
RCDYLLTCRRSYCCISQSARGPHFLSLGRSFKEPPRLVASVALALDERSRILRLWLL

SEQ ID NO: 324254 - protein, 40 aa, Zea mays
  Clone ID: MRT4577_58794C.1.pep
MCQTSHLWPPCPRRGARGPRKQLHLTPWMLFLANCVVYDV

SEQ ID NO: 324255 - protein, 65 aa, Zea mays
  Clone ID: MRT4577_58795C.1.pep
GGHVNTTIPAVRARILPVLIFWFQTDPPITSHHGAGMDIVILEDGQRVVVEDMPEGVAWVGSDRG

SEQ ID NO: 324256 - protein, 59 aa, Zea mays
  Clone ID: MRT4577_58796C.1.pep
QTRGGTFGTACRQARTSYTRHPSTRSGHPPKLYRSVRRGRCIVVRLNRGNAASVRPASA

SEQ ID NO: 324257 - protein, 113 aa, Zea mays
  Clone ID: MRT4577_58797C.1.pep
HLSGADNDGHEGDACAQRTGFPEFKSEEMANIMNDFDDPQDLAPTGLFLGLTKYMVIQGEPGAVIHGNKGSGGITVNNIGHALVVGIDDQPMTPAQCNMVLATLGDYVLEQGM

SEQ ID NO: 324258 - protein, 105 aa, Zea mays
  unsure (1)..(105): unsure at all Xaa locations
  Clone ID: MRT4577_58798C.1.pep
LGRAGLXLGINYTKPISVPGSELASVDRSVAMLSNTTAIAEAWSRLDXKFDLMYSKRAFVHWYVGEGMEEGEFSEAREDLAALEKDYEEVANDSLDDEGVEEGEY

SEQ ID NO: 324259 - protein, 49 aa, Zea mays
  Clone ID: MRT4577_58799C.1.pep
GDGGSGNQVLTQGQALLGFRRPNAHLQNRRALHQDLFAAHIHLAAGSSR

SEQ ID NO: 324260 - protein, 94 aa, Zea mays
  Clone ID: MRT4577_5879C.1.pep
MADVDWARYDDRAFHDDDQDTPPEHLRAFEAFVETVVPLDMVLAFGREQSTRARRPGHGREDDVKEKLKLWAKAVAAKARRQYITKQDNDDQNA

SEQ ID NO: 324261 - protein, 109 aa, Zea mays
  unsure (1)..(109): unsure at all Xaa locations
  Clone ID: MRT4577_587C.1.pep
DNEAXXDXXRRXXDTGRPXXGNXNRXXXQXXXTQTGPXRGEGXXNXXGNEXQTNXXPXPRSHXXXAXHXPXRXAEKAXHEQXAXAESTNSAXEPXAXTAKXDPRXGKXX

SEQ ID NO: 324262 - protein, 113 aa, Zea mays
  Clone ID: MRT4577_58800C.1.pep
SSDEVGPEFSVHLFEPKKIVSKSPQFFRPRISVRTLTRQSGTHPNAMSKLQSECQIRQANPPHLGFFVLLEEKQLAFLLGGGELEHVAFVRCQKQLGCSLTVVLLAWFGVKFA

SEQ ID NO: 324263 - protein, 443 aa, Zea mays
  Clone ID: MRT4577_58801C.1.pep
MAAPSGGGGGGAGEGSSSAAAAATIGVHGVDQVAEAMWQMNLEEAMELGPYPERVGEPDCSYYMRTGMCRFGMTCKFNHPADRKLAVAAARMKGEYPQRIGQPECQYYLKTGTCKFGATCKFHHPREKAAMATRVQLNELGYPLRPNEKECAYYLRTGQCKFGSTCKFHHSQPSTMMVAVRGSVYSPGQSATSPGQHAYQGAVTSWPLSRSASFIASPRWPGHSSYAQVIVPPGLVQVPGWSPYTAQIGSSSSEDQQRTPGAAQYYTGSRQSGTSIGDQGMFSSYQAGSVPVGLYAVQRENLFPERPDQPECQFYMKTGDCKFGAVCKFHHPRERIIPTPNCALSPLGLPLRPGEPICSFYNRYGMCKFGPNCKFDHPMGNAMYGQAPSPASEAPAPRRMLAHVPPSHPEASPDGGSGRSRRIAHSDSQQIPSGERSAEREAS

SEQ ID NO: 324264 - protein, 338 aa, Zea mays
  Clone ID: MRT4577_58802C.1.pep
QYYLKTGTCKFGATCKFHHPREKAAMATRVQLNELGYPLRLNEKECAYYLRTGQCKFGSTCKFHHPQPSTMMVAVRGSVYSPGQSATSPGHHAYQGAVTSWPLSRSASFIASPRWPGHSSYAQVIVPPGLVQVPGWSPYAAQIGSSSSDDQQRTPGAAQYYTGSRQSGTPGIGDRGMFSSYQAGSVPVGLYAVQTENVFPERPDQPECQFYMKTGDCKFGSVCKFHHPRERIIPTPNCALSPLGLPLRPGEPICSFYNRYGMCKFGPNCKFHHPMGNPMYGHASSPTSEAQTSRRMLAHVPSHPEVSPDSGSGRSRRIVHSDSQQIPSVERITEREAS

SEQ ID NO: 324265 - protein, 93 aa, Zea mays
  Clone ID: MRT4577_58803C.1.pep
MAAPSGGGGGGAGEGSSSAAAAMTIGAHGVDQVTEAMWQMNLGDAMELGPYPERVGDPDCSYYMRTGMCRFGMTCKFIQPADRKAFGGGSRMN

SEQ ID NO: 324266 - protein, 107 aa, Zea mays
  unsure (1)..(107): unsure at all Xaa locations
  Clone ID: MRT4577_58804C.1.pep
KXXKKRGGFFKQKFFGGPQPPKPPKQLFPGGLSNQTGGIPAPKFWAPQPLNRQIPLGPQRLAFLVPKSPPLGSHPHLFAFFGPPKKGAGASTGALGFFGPRASLFSL

SEQ ID NO: 324267 - protein, 136 aa, Zea mays
  Clone ID: MRT4577_58805C.1.pep
RGRKRGGRPPGPAKSKTGKETNPLCQRRPNRFCVWGALPSKKDLHRCLTWPTVVRIQRQCGMLKQRLMVPTALNQFTCTLCKNLATNLLKMLLKYRPVDTVDKKERLVKRAQAENDGKTAGSKKPIAVKYGLNHVT

SEQ ID NO: 324268 - protein, 52 aa, Zea mays
  Clone ID: MRT4577_58806C.1.pep
WEGTSFINAGSLIMGKITLQIENPYGLGPSYIRLHKTRKAGDLGKFVKKTGS

SEQ ID NO: 324269 - protein, 50 aa, Zea mays
  Clone ID: MRT4577_58807C.1.pep
LYMMLACACCYPPILMAYLDLRILLGCNFKLHYYSVNCELSITCTVKLNK

SEQ ID NO: 324270 - protein, 97 aa, Zea mays
  unsure (1)..(97): unsure at all Xaa locations
  Clone ID: MRT4577_58808C.1.pep
RLPFLYPPVVLMLIHYFITFAFACTPHQFVWQKLWSIISHRSLASGAADRLTVVVPIWFLAIIFPLFGXPIMASVGSAPLSFTVYIIMAPANMVTFR

SEQ ID NO: 324271 - protein, 65 aa, Zea mays
  Clone ID: MRT4577_58809C.1.pep
LSVCFLVFVRHISVLKPLVLFVAVVPYGCGSQADGCYFPPSGVRRRHSMLKTSPCVCFLEEKKEM

SEQ ID NO: 324272 - protein, 69 aa, Zea mays
  Clone ID: MRT4577_5880C.1.pep
VFVACSFFHQFLNSLYEPNCALSVLYFYYYFCNLAKRPLYWRPFLYTGLIWNEKSTFTSTCFFRLFHVN

SEQ ID NO: 324273 - protein, 55 aa, Zea mays
  Clone ID: MRT4577_58810C.1.pep
LLSAEAYDSLDPNGNITIKWDIMQWTPDGYVVSRIAHSNSCISFIFSLVGPGLFY

SEQ ID NO: 324274 - protein, 127 aa, Zea mays
  Clone ID: MRT4577_58811C.1.pep
RTTSSLLGGAGGDQPGMGMVGAGGVLPSQSSPFSSLVSPRTQYGGGSGNGLLAGASSVASMLSRQHSYGNGGTGAMPGSGAGLPIGGLQHRGGLDGVGDLVGTGGPDSMVFSSYFSAPGSFVNQLGA

SEQ ID NO: 324275 - protein, 112 aa, Zea mays
  Clone ID: MRT4577_58812C.1.pep
KEGMSSRNVNAGHLSLTQGLVPSASSSSSWSHEMSSDTTGRASTRTSLVPSKQMASHRVAVEKAVVVRWRARPAFGRHAKKMSQAGCPSGGAQPWRTVNRLLVGRCAPHESP

SEQ ID NO: 324276 - protein, 67 aa, Zea mays
  Clone ID: MRT4577_58813C.1.pep
CSESHGPISMVARRTGCYSVSSSISSSSVLMVVMCSVLVDRVGDKPLVGCVHVLREDSLNRVCAIGA

SEQ ID NO: 324277 - protein, 240 aa, Zea mays
  Clone ID: MRT4577_58814C.1.pep
MDLRYSHAWPRINAWDLVVKVKYGDTLKRFNVSVKGSHLEHDLPALRLKISIAFKFNSDTEYILTYTDDDGDDVMPDDDNELRDAAVNQKLNPLRIIVQLKGGNVETARTEQHTTNLKSPRSTSLEDELAQVKSAIDEALQFVPEQIPAVLAKLSHDLHSRAALSAPTLAELLYRIVELVVRSSNIQPSGGSGVGSQKLEIQRLSLKLHLCQFQHQIPQTCKIPRHPEMGLKSVLFGSRC

SEQ ID NO: 324278 - protein, 156 aa, Zea mays
  unsure (1)..(156): unsure at all Xaa locations
  Clone ID: MRT4577_58815C.1.pep
EQQRSSGRWEHERRAPTPLQAAVFGSTMGCPPAATRNVEGPWRHHDANPAREGGFGYPHTHNFLPTNGMAPXIEPIPSAIPHMVHDAFGSHPHSQFDRPLGNIPKVPFPXFDGENPKLWQTRCQDYFTMYSVDTSVWIRIARMHFTXSAARWLQSV

SEQ ID NO: 324279 - protein, 87 aa, Zea mays
  Clone ID: MRT4577_58816C.1.pep
PHSGQLAPCMRQSDPVCRWSTLIAALNPHAVVALFLVCLPHMVSGVAVCSITGPEHPVRGVVLAFPTEELPRVLDVLGEVHEPVLVV

SEQ ID NO: 324280 - protein, 121 aa, Zea mays
  Clone ID: MRT4577_58817C.1.pep
EEAARGPAAGLEDGSGGTPRDVGRPGAAGGPVRLRRRVHLRHGLRARVHQLHSLLVTAILSFAAACSAAGVVVLFERDAYLCRRDPQLPCGRFEVAAAFAFLCWTFSAASALVMSWLLASL

SEQ ID NO: 324281 - protein, 488 aa, Zea mays
  Clone ID: MRT4577_58818C.1.pep
MGEFCPSPQGDSALAAPPLTLSSPSPATAVRPSYGSCDRRYVKLVFDNLHGSISVDPLALQFVDTEEFQRLRDLKQLGLTYLVYPGAVHTRFEHSLGVYSLAGKAINNLKTYQGEELGIDHVDMQTVKLAGLLHDIGHGPFSHLFEHEFLPRVDPGSSWSHEDMSVLLLDSIVDKHAIDIENGYLKMVKEMITASAKPTSTESANEKHFLYDIVANGRNGIDVDKFDYVGRDCRACGLGCNFQYWRLLEGMRVMGDEICYPAKDYLSIHKLFSTRADLHRTVYTHAKVKAAELMLVDALIEANDYLGISLHAHDPEEFWKLDDTIIKTIETAPNNELKKAKEIIQRIRRRELYKFCNQYSVPKDKLEHFKNITAQDIVCSQKSSEVLLKEEDVAVSNVKIDLTRGKDNPLESIKFFKDFGCDEKFPITDDRVSHLLPAYNEDRIVRVYAKKPELVDVVSEAFENLQMRMYGEKTQVHETPKRKRIRSN

SEQ ID NO: 324282 - protein, 218 aa, Zea mays
  Clone ID: MRT4577_58819C.1.pep
CCCSKEGRRGSSDKLLYFKAVELMLVDALVEANDYLGISLHAHDPEEFWKLDDTIIKTIETAPNNELKKAKEIIQRIRRRELYKFCNQYSVPKDKLEHFKNITAQDIVCSQKSSEVLLKEEDVAVCNVKIDLTRGKYNPLESIKFFMDFGCNEKFPIIDDRVSHLLPAYNEDRIVRVYAKNPELVDVVSEAFENLQMRMYGEKTQVHETPKKKKIRSN

SEQ ID NO: 324283 - protein, 73 aa, Zea mays
  Clone ID: MRT4577_5881C.1.pep
RPGVSFPRSKSRRSCRPCTWRFSTVIHFRASRNRQSSFSDQETELSEFYEAEDPEHLFGEGKCPLTYYVTFTV

SEQ ID NO: 324284 - protein, 183 aa, Zea mays
  unsure (1)..(183): unsure at all Xaa locations
  Clone ID: MRT4577_58820C.1.pep
MCGNIXGKIQIIGDLPGRQXNAHLKGNLVLMRKTVLSFXVTSIPSYLMDGLGEFLXRGGTCQLVSSTXIGDPNNGIPRKVGQEASLEHWLXLHPXPLMGNEDQLRLTFHCEVENHGXPVAIIVXNNHAFERFLKTITIDDVPGHGPIEXLTTXWVYQLDKYRYNRVLLCNDTYLRRQMPATLK

SEQ ID NO: 324285 - protein, 73 aa, Zea mays
  Clone ID: MRT4577_58821C.1.pep
PSTTGKSVMFASPAKPAGGGMTFLSEVVTLSVMEAKKVILADKPNAYIVVLSTTTQAVTFRLWVRPCTCLRSG

SEQ ID NO: 324286 - protein, 46 aa, Zea mays
  Clone ID: MRT4577_58822C.1.pep
GVVSEVVVSGAGEAAYEEGGLNIMRHAISIRSPTTENVAEPHEAEH

SEQ ID NO: 324287 - protein, 53 aa, Zea mays
  Clone ID: MRT4577_58823C.1.pep
CWTYAADVMKSAVYWATTAKRMRAADKTTGTIGKSLSSINVDNVEENRRALRE

SEQ ID NO: 324288 - protein, 129 aa, Zea mays
  Clone ID: MRT4577_58824C.1.pep
SSASTPAITARPAATSLTWKARSARSLRQAAARLVPPVGPRTATADPLGREGSAFPTATPTARPERVQCPAWGRMAAAAGVAHNHHPHGRPHACPRRPSSSGQPREGGSGSLSAIAFSATAEAQREKGR

SEQ ID NO: 324289 - protein, 102 aa, Zea mays
  unsure (1)..(102): unsure at all Xaa locations
  Clone ID: MRT4577_58825C.1.pep
ALXQAXDLRHXXENIKAXXKNTXTQVAKKGLXMNPXGELFSARXSGKGLVXAXDXGGXFPSAGDAGRGRLPXVPEVGGLSGGALGGGGLLFGGRWGGSPGGG

SEQ ID NO: 324290 - protein, 77 aa, Zea mays
  Clone ID: MRT4577_58826C.1.pep
ILYFNYSLVQSSSDIFHFIDLQNFVFLLLNIFTRFGIEVGMSKQLPAPTITKDHPVSVIYKILGANSCNILLELFPI

SEQ ID NO: 324291 - protein, 135 aa, Zea mays
  Clone ID: MRT4577_58827C.1.pep
FPLYALVLCPPVLSLRLRSRSLLPNPIVAFLLRGRLPLLVQAEVLLPLSSASAHGVLFWPAFCLSVRCLFIYFFLFFFFYFIFILLFLFFFHNYFIFYFLFLSYFIIFIFICFLFIFLFFLIPLYIIFFFIFYFF

SEQ ID NO: 324292 - protein, 51 aa, Zea mays
  Clone ID: MRT4577_58828C.1.pep
KKSRGGYNDTLSYAYINTPTLSIFTSDIILHAPYVTLDCHLKAFRHPTQSI

SEQ ID NO: 324293 - protein, 43 aa, Zea mays
  Clone ID: MRT4577_58829C.1.pep
RSASTIQNSEMGARGRPMPCGWPTSLYLKKIYNNLGFLAHTLL

SEQ ID NO: 324294 - protein, 61 aa, Zea mays
  unsure (1)..(61): unsure at all Xaa locations
  Clone ID: MRT4577_5882C.1.pep
PRVRPRVRPRVRPRVRPRVRGRPFFFFFFFIXFFFFFFSKFFIFQQNSKNFIILTLIHLAY

SEQ ID NO: 324295 - protein, 196 aa, Zea mays
  unsure (1)..(196): unsure at all Xaa locations
  Clone ID: MRT4577_58830C.1.pep
DHATDADYCVXTADTRLSSXYSILTRDHSKISELSDKREIASSGLQGDIXALHKNLPGTELLXYQHHNNIRMSCPAMQHILSNTLYYIRFFPYYAFNGLGGIDRHRKGCSVTYDASLLYERSDYSAQLTXSTLIMPVLNNQLKSPSALLLPDRDAVTPLSDYEDIYLRKDVVASATERHIYTXDYIEIAVINKDVT

SEQ ID NO: 324296 - protein, 42 aa, Zea mays
  Clone ID: MRT4577_58831C.1.pep
HHGLCYGMTLAASSRQAAKAMPNITDYATEWLWQLVEDEALR

SEQ ID NO: 324297 - protein, 62 aa, Zea mays
  Clone ID: MRT4577_58832C.1.pep
KALRLRIFSHIILTKKGQPTARAHPTCLKWKKYIVPSTIKRGKRRQVHLITLNGATHLKNCS

SEQ ID NO: 324298 - protein, 86 aa, Zea mays
  Clone ID: MRT4577_58833C.1.pep
QFQGFQQQFFPPIRQVDPLPRFQGTYGVVLQSFLQQQPQGELPALIAAPVGHHLPAIFGFQFQQPGPFPFKTTSGGFFFLGNYFLW

SEQ ID NO: 324299 - protein, 101 aa, Zea mays
  Clone ID: MRT4577_58834C.1.pep
IRHEAPTTAPPHPSRAMLTPQRRDASVPPPHRELPCPARARYLPSCPPLTPYFFGQPRSERAIPSASLTYTRNLTITGALTTPVDAATDAPCLSQAFASRH

SEQ ID NO: 324300 - protein, 224 aa, Zea mays
  unsure (1)..(224): unsure at all Xaa locations
  Clone ID: MRT4577_58835C.1.pep
MTPQPHAVCLPYPAQGHIAPMLSVARLLHARGFHVTFVNSEYNHARLVRTRGTAAMAGGAGFRFATIPDGMQGPSDGVDDDVTQDIPSLCKSTTETCLGPFRRLLAELNAAGDRPPVTCVVSDLIMGFSMDAAKELGLPYVQLWTASAVSYLGYRHYRLLIDRGIAPLKHIKQLTDGYLDMPVEDVPXLRSMRLRDFPTFIRSMDPXDEFMVXYAIKETERAAG

SEQ ID NO: 324301 - protein, 200 aa, Zea mays
  unsure (1)..(200): unsure at all Xaa locations
  Clone ID: MRT4577_58836C.1.pep
YVDDIVLTASSTSLLQWVITALQQAFSMTDLGPLHHFLGLTVTRQPNGFPTRPPTRPLEVLERAGMTDCKPCSTPVDMNGKLSGTEGPPVDDPTHYRGLAGALQYITFTRPDISYAVQQVCLHMHDPREPHYTLIKRILRYLHGTLDHGLHLRPTDVSALVAYSDADXAGCPDTRRSTSGYAVFLGDNLISWSSKHQPTI

SEQ ID NO: 324302 - protein, 63 aa, Zea mays
  Clone ID: MRT4577_58837C.1.pep
GTCKTWPCHNIIGYYSKSKWSPDRFSRFFKGAREHSQEQLGVCFSIYNTNERAQVARTLLKFV

SEQ ID NO: 324303 - protein, 89 aa, Zea mays
  Clone ID: MRT4577_58838C.1.pep
SYNRLPIQGQFGLFPSLSMLEFLSVTSLHRHVFTSGKDSFVALLNCRKISPFLGSFISPNASYKVFVGETSCGLRLHIVSSLMKLLGIE

SEQ ID NO: 324304 - protein, 77 aa, Zea mays
  unsure (1)..(77): unsure at all Xaa locations
  Clone ID: MRT4577_58839C.1.pep
FNLGPGSSVFSAASSTFSIDLTLPWFIVVRLGIKYMNLPFSHDELLGAYSVLWGIYFLXCRSVDVLGIVASKHTSST

SEQ ID NO: 324305 - protein, 123 aa, Zea mays
  Clone ID: MRT4577_5883C.1.pep
PTRTVVRQFVTVETYAPQAHCPQGHCCSAAVSPHGSSCRLTTPTPPLPDLAQVVTSSPLAHGCGHIVAGLPTRPCRSAAASRHAAVSIPRQGSRQAGALLFQRPGRITCIFIFSHSRSDLAFL

SEQ ID NO: 324306 - protein, 151 aa, Zea mays
  unsure (1)..(151): unsure at all Xaa locations
  Clone ID: MRT4577_58841C.1.pep
DVQHPYALTTIVLLKDDYPRGGPHRSIRKENELFANGDLTLRISATEMGRTSAMYSQDRRLSPPPPIYPYVPRETGFLTGGSAMKASDGYGAGTGSAQRLXDDDDFIVHMNAPHIERSXDXGRXYSGXWDFVVVNGGAAXRSASAAVLPSG

SEQ ID NO: 324307 - protein, 61 aa, Zea mays
  Clone ID: MRT4577_58842C.1.pep
LNKARCGLAFASSCTDPCGYFIWDGVHLTDAVYRSIADGWLKGPYCRPPITALIVLVGSWD

SEQ ID NO: 324308 - protein, 67 aa, Zea mays
  Clone ID: MRT4577_58843C.1.pep
PTPFSLFFHHPNQKGVWGDFFYTGFPKPKLKPKGKPFGPSPGEAFNPKENILGYKKGPKMRNLTKNP

SEQ ID NO: 324309 - protein, 48 aa, Zea mays
  Clone ID: MRT4577_58844C.1.pep
NKRICLVSKKKKKKKERYKKKKKQNKTKKKKKKKKKKKKKKKKKRPPF

SEQ ID NO: 324310 - protein, 507 aa, Zea mays
  unsure (1)..(507): unsure at all Xaa locations
  Clone ID: MRT4577_58845C.1.pep
MESYLKENFGGVQAKHSSDEALRRWRKVVGLVKNPKRRFRFTANLDKRNEATAMKRNNHEKLRVAVLVSKAALQFIHSVAPSSEYKVPADVKAAGFGICAEELSSIVEGHDVKKLKSHGGVQGLASKLSTSESDGLTTSADKLATRRDVFGVNKFAEAESRGFLVFVWEALQDMTLMILAACAFFSLIVGIATEGWPKGAHDGLGIVASILLVVFVTASSDYRQSLQFKDLDREKKKITVQVTRSGYRQKLSIYELLVGDIVHLSIGDQVPADGLFMSGFSLLINESSLTGESEPVAVNVEYPFLLSGTKVQDGSCKMLVTTVGMRTQWGKLMATLSEGGDDETPLQVKLNGVATIIGKIGLIFAVVTFAVLTQSLFRRKIIDGTYLSWTGDDALELLEFFAIAVTIVVVAVPEGLPLAVTLSLAFAMKKMMNDKALVRHLAACETMVSATSICSDKTGTLTTNHMTVVKACICGKIKELDGXRISRTCSXLPDSVMAILXQFIFNN

SEQ ID NO: 324311 - protein, 186 aa, Zea mays
  unsure (1)..(186): unsure at all Xaa locations
  Clone ID: MRT4577_58846C.1.pep
MDAHSARKKLGLLALLLLAAAVRPASPLPVEDXLLNSGDLDTXAPNGGVEEAASDADGASSIPGXNIDATAXESVSARXHTSGMYSLIXQGDXATRLGNDRYIXQVAHAHNESEHANTFRAARTCAQLXALNRSLTXGASHNXDLQTLYNIXRWDANTLAFHATEQQAQLQFMNPAMKDDPTCGPI

SEQ ID NO: 324312 - protein, 93 aa, Zea mays
  Clone ID: MRT4577_58847C.1.pep
MHSGVHEKKKNPRPFDHGDDGIENAGSHRACNMNRPITMKRISFKKKKKKKKKKKKKKKKKKKKKKKKKKKKKKKKKKKKKKKKKKGGAVRVF

SEQ ID NO: 324313 - protein, 65 aa, Zea mays
  unsure (1)..(65): unsure at all Xaa locations
  Clone ID: MRT4577_58848C.1.pep
RKVLRTTEQVGXVLVGLTADECVLSRFLYNECINHSFVYEAPLPVSMFALRLIDKAQVRTSPCAS

SEQ ID NO: 324314 - protein, 118 aa, Zea mays
  unsure (1)..(118): unsure at all Xaa locations
  Clone ID: MRT4577_58849C.1.pep
SRPAVFRIHVGQPARRXRRRPTPGPSSAAPFAGDERPPRQVHPPPSLLPLQPKAPASQTGRRSLLYPXSPPPKPTTTSLSSTGARRSPSTSGGPPTLGELHRRALVRSARQSSTWHIG

SEQ ID NO: 324315 - protein, 57 aa, Zea mays
  Clone ID: MRT4577_5884C.1.pep
RFDHRTLEANTSKRSEYEPDHKLDLGRKTRAYRGPATEAETEADARKDEMLLLVQAL

SEQ ID NO: 324316 - protein, 144 aa, Zea mays
  Clone ID: MRT4577_58850C.1.pep
RFSAPVEFDDETPSRHTSPPPVFQTSPIRAPSVSEKRSSTARRLWRGRLLSHPNPVSSRPRRRRFNRRAGVRGPSIDPIPICRERNIVEHVNKIAPRFQEGIKAFSGSPIVGEIRGLGLILGTEFVDNKSPNDPFAGESRSSFF

SEQ ID NO: 324317 - protein, 100 aa, Zea mays
  unsure (1)..(100): unsure at all Xaa locations
  Clone ID: MRT4577_58851C.1.pep
SQDSHHSISKLTFSYANIEACMXKLVCHPEYARLSIEQDKHYFXPYVETRYSYGSPPXLIMLDTQGXQHSRPSTDCINWRASXHFCEFLNDKVQPVKSDS

SEQ ID NO: 324318 - protein, 98 aa, Zea mays
  Clone ID: MRT4577_58852C.1.pep
FAISLYSTPITRRTATPWRSVAVAVEHLNRVKFKAFLMRLSVCCASGCLIQKLRQIRIFIPCMLGRLIQVLKVRCGGTEFRIPSPLPPTRALEIGIRE

SEQ ID NO: 324319 - protein, 473 aa, Zea mays
  Clone ID: MRT4577_58853C.1.pep
HPSGTVTKDLEPSPLFSTTASKMPQVMVVARNFMDMVAALPAGKLDMLYDSAFICEAVLRSLPPLAKKYALQMLYVLAPVTAAAMEEWVLDEYAAKHKVAIDKLLQLRVFVEVRDRRRDVSYKMNQKFQGNMQKYLVDGGSLPREPLPLSVTGRLPTPADLEAYALDQWECFLLQLINSSQVEKGSSFSSSMMKTFQRGLLSSRDGEASKLTENGFQFLLMETNAQLWYIMREYISSAEERGVDPTELISFLLELSFHKLGAAYSLNTLTDVQRIAIRDLAELGLVKQQQGRKDSWFIPTQLATNLSASLSDSSSNKEGFVVVETNFRMYAYSTSKLHCEILRLFARVEYQLPNLIVGAVTKESIYGAFENGITAEQIISFLRQNAHPRVADKIPAVPENVTDQIRLWETDLNRVDMIPSHLYEDFPSKEWFEQCCDYARDNGYLLWEDPKRMRLIVRGEFHPEMREFLRRQR

SEQ ID NO: 324320 - protein, 173 aa, Zea mays
  Clone ID: MRT4577_58854C.1.pep
MSGLFARQAWATASKVRSTALRAPKVAFTCRVNNIAPRRSFSVSMNLLARKYTESHEWIDVAADGKTCTIGISNYAAEALGDVVYVELPAVGEETAQGESFGSVESVKSASDINSPVSGSVVEVNDPIVETPADLGKDPEKSGWLIKVEAEDVSALDALMDEAAYAEHIKGEH

SEQ ID NO: 324321 - protein, 379 aa, Zea mays
  unsure (1)..(379): unsure at all Xaa locations
  Clone ID: MRT4577_58855C.1.pep
SSVAALQIYRIGPHIPFSDFGVEGQRKLTQSSILVVGAGGLGSPLALHLAACGVGCLGIVDGDDVELNNLHRQIIHKEAYVGQSKVKSAADACREINSSIKVVENHHTLKPCNALEIARKYDIVVDATDNLPTRYMISDFAVLLNTPFVSGAALAFQSPSTEQYQKKVSRELLQFGNPXADNSXFRSPDSGARGVVQVPIGCLQALEEIRVSXLVLVKLRGXRSPDCTHCGENSVFXREDFQKFDYESFTQSPMSDKAAASVNVLPESARITCREYKKLADDGEPHLLLDVRPAHHFQIASISPSHNIPLSMLEEKLPALEASLKEAGEGSALVVLCRRGNDSQRAVQLLREKGFANAKDIIGGLQAWGQDVDPDFPVY

SEQ ID NO: 324322 - protein, 473 aa, Zea mays
  Clone ID: MRT4577_58856C.1.pep
HPSGTVTKDLEPSPLFSTTASKMPQVMVVARNFMDMVAALPAGKLDMLYDSAFICEAVLRSLPPLAKKYALQMLYVLAPVTAAAMEEWVLDEYAAKHKVAIDKLLQLRVFVEVRDRRRDVSYKMNQKFQGNMQKYLVDGGSLPREPLPLSVTGRLPTPADLEAYALDQWECFLLQLINSSQVEKGSSFSSSMMKTFQRGLLSSRDGEASKLTENGFQFLLMETNAQLWYIMREYISSAEERGVDPTELISFLLELSFHKLGAAYSVNTLTDVQRIAIRDLAELGLVKQQQGRKDSWFIPTQLATNLSASLSDSSSNKEGFVVVETNFRMYAYSTSKLHCEILRLFARVEYQLPNLIVGAVTKESIYGAFENGITAEQIISFLRQNAHPRVADKIPAVPENVTDQIRLWETDLNRVEMIPSHLYEDFPSKEWFEQCCDYARDNGYLLWEDPKRMRLIVRGEFHPEMREFLRRQR

SEQ ID NO: 324323 - protein, 98 aa, Zea mays
  unsure (1)..(98): unsure at all Xaa locations
  Clone ID: MRT4577_58857C.1.pep
GSFITVIISPGINPKLQPVYLFEGDAHLYSGLACGLDGLPAGMPIGIVGDLGVRENVLQPKLLVGMILIVSFAEALALXVLSSLEYILSSRTGRSRGD

SEQ ID NO: 324324 - protein, 89 aa, Zea mays
  unsure (1)..(89): unsure at all Xaa locations
  Clone ID: MRT4577_58858C.1.pep
GRALPTPGDEHPKIYRMKLWATNEVRAKSKFLYFXTNLXRVEXGNXHXLAINEIXERNPATIKNYGIWLCYQSKTGYXNMDKEYLDTTL

SEQ ID NO: 324325 - protein, 120 aa, Zea mays
  unsure (1)..(120): unsure at all Xaa locations
  Clone ID: MRT4577_58859C.1.pep
SDQANEXQSGLXNPEGPCGNPVHVVVPPXVGRSRRKXRGASSHGHSPRHLHMTLPRLCLVVNCCAAPSNVFLPSLCFCQSQGRGWGSPPCSFVGLKEEPPPEYCCHECYSWLIIKFVGSF

SEQ ID NO: 324326 - protein, 73 aa, Zea mays
  unsure (1)..(73): unsure at all Xaa locations
  Clone ID: MRT4577_5885C.1.pep
WNGTYSWSSSRPEWRSLNNAILLSHTSVLISAPGARYAVRNIFARSNSYIGSIVLFCTIEXTPYQRPYSYVGI

SEQ ID NO: 324327 - protein, 136 aa, Zea mays
  unsure (1)..(136): unsure at all Xaa locations
  Clone ID: MRT4577_58860C.1.pep
RHQTSARRGPPSGPNQPHRSAARAGNGAXXGSDPXNXGAAAAEPAGSHXDEXKRRGGGARQPXXKNEGPTPRXGQXAAAAPAKDAPGXAGEPDEEAXXRAKASSERTRDGTAHGGDTNGRTTGDGGTXHRRTKARA

SEQ ID NO: 324328 - protein, 73 aa, Zea mays
  Clone ID: MRT4577_58861C.1.pep
KKKKKKKKKKKKKKKKKKKKKKKKKKKKKKKKKKKGTKVIKKSKLIYNINEKKKKIHIKKTKKKTRGSNLSKA

SEQ ID NO: 324329 - protein, 102 aa, Zea mays
  Clone ID: MRT4577_58862C.1.pep
HPLEGIGRTRSWAWKSWEAASLARADLLLAPVAAGSVPSPSGSVPGAGAPFRPLFNDFGPPSMGYVQAMKPPGAQGSQSTDTDLLSVIDEMGKEIRPTYAGS

SEQ ID NO: 324330 - protein, 102 aa, Zea mays
  Clone ID: MRT4577_58863C.1.pep
LGKKDFGPRRLIPQSHGGRSVTKKLKRSWKEEGELHRSDDGFLTRMITEVLDRIDQPRHHHAMHHASLSLSLSLSLSLAFSATSPSLSSSSGPSFTGRRPSA

SEQ ID NO: 324331 - protein, 91 aa, Zea mays
  Clone ID: MRT4577_58864C.1.pep
QIRTFLRWTSHRSNPPQRGRPIGSRTCFKTIEISKAEPEPGRNHFVQLPQEFGRAQRFKSGSGPPPQKENKGHLPRPNVILGVCGNVLSEV

SEQ ID NO: 324332 - protein, 79 aa, Zea mays
  Clone ID: MRT4577_58865C.1.pep
PPALFLNSGGSVKSSACPPQGPRARRKACSLALGPGPFFSFLGPVFFFFFRPFLFFLAILCFFCFFFPLFFSSFFLLVF

SEQ ID NO: 324333 - protein, 70 aa, Zea mays
  Clone ID: MRT4577_58866C.1.pep
LRFSHDVALSDKMTLIASMYIRPRGHHRISEVSRSVARTHALLEVSGVECNYEHFVNPLSEQEYTRLMSL

SEQ ID NO: 324334 - protein, 70 aa, Zea mays
  Clone ID: MRT4577_58867C.1.pep
AVRQVCTSEASTDALADNSVSKHRQLESECYLQLIDSACSALLPGPEPCMIGSLPSGHTAQTNGIQEDVT

SEQ ID NO: 324335 - protein, 87 aa, Zea mays
  Clone ID: MRT4577_58868C.1.pep
HAYDQAAVARTVTSKLKIPERDATMVRVENPLPAVLSHLLDVRDFFCGTVDDKASWRRHAHLSPRRARHGRPLGAELKDARSSVRVK

SEQ ID NO: 324336 - protein, 132 aa, Zea mays
  Clone ID: MRT4577_58869C.1.pep
SRMGFWGIIPRGGGFSAFFPGQKAVGIPPLGVRPGIPQKGPPFLGALMNRGWGHSPFKGPPFFGVISPPQRPPNGKKGFFFFFFSLPPPPFYFLIWEKPGWVGGLPPLSRRELPFGKNFIFFFLGRAGGFFF

SEQ ID NO: 324337 - protein, 755 aa, Zea mays
  Clone ID: MRT4577_5886C.1.pep
MWPAARGFVAAQCLLTSRPLCLCVCDSDPGAAVRVHQLLDLHLRLLQRHPVSAALPFPAPTTGFRTPVLLSAFSVVILSRLLGWECDLQCAFIQTALMYYYPQFLTRTDRCTCSREFTHRVKSVSMSTFSTQEVEALQKGGNQRAKESFLKDFDTQKMRLPDSSNSGSLRDFIKAVYVERRYAGGRFSERPPRDKQNQKAHEEEHRRPNSYHSFSQSPPYDYQYEEGRNGKRSAFLSRKPGSDKGHQGKISGFCYSSHSLHQRMSRDGFTGENSVSRTSNCSGSSISDTVRTAPQSPNFPDSGCFSPPVVQDQSNVHSSCGLTSSQRAVSAGDLDSISLKSGKSNLSDLIFENDNVHRTEKSSNSAAPSFIAFSDAISAPNQASFDSKASQEHHVTTIDQSVDLFSNTLTETPSADKVIPTAHSMDNAGWATFDTPPEQKQPALTGLSYVSATSIDKQALNHDLFSSESNDELTWFRSSKDDASVTNHNQSTATSLDTCSSEPWSIFDASSGSTQYTVKGDLSLMTSRLQEPKGTMNENSSQLWHSFDDANGIVCAQPRIDDHSNTASISLSTSNPFVCSIVLKESYDDDSHKVLMGELTPNTLIAASSEPSLGGPSTEQMPLNPFDLPFDTQSGTPDLFMDVSSLQEALPSPDLPTFLDGLPERWFSSSSCAYVPSASASHAELLSADICFPAGPGIYQLALYQLEILLYRGHHSENNLRLGLGMFLWFGDLRARNLFCANRDTLQGYQRRWGI

SEQ ID NO: 324338 - protein, 58 aa, Zea mays
  Clone ID: MRT4577_58870C.1.pep
SVSASSYRVRGGPVNLIRVRVRIFLSAVLRMNRLLWHELFKKQLLHVLWLGFHFSLLE

SEQ ID NO: 324339 - protein, 54 aa, Zea mays
  Clone ID: MRT4577_58871C.1.pep
RIAIIDKNARIGENVKIINVDNIQEASRETDGYFIKSGIVTVIKDALIPSGTVI

SEQ ID NO: 324340 - protein, 72 aa, Zea mays
  Clone ID: MRT4577_58872C.1.pep
GLNGRVRGVLNSLSPTHIAEGLIYTSRSSWTPKNSLTGSFLTEKIEPKALKFEKKTSPNYPDGFGLLNSTNI

SEQ ID NO: 324341 - protein, 216 aa, Zea mays
  Clone ID: MRT4577_58873C.1.pep
MADLEALKLYINYYSAILTTPLPQHYDPDLLAQYFASRPHILASRVIQILFTFLSAVVKMRISKRAQLTTDATYSSGNSGNGFDDTQYMVGQLLKETFLTLGPTFVKVGQSLSTRPDIIGSEICEALAELHERVPIFPREDAMKIIEGEFGCPVSHMFSYVSDEPVAAASFGQVYQGRTVDGALVAIKVQQPDLLPSVLRDIYILRLGLAFIRKIA

SEQ ID NO: 324342 - protein, 63 aa, Zea mays
  unsure (1)..(63): unsure at all Xaa locations
  Clone ID: MRT4577_58874C.1.pep
FKKGSVTNMLTSHXGKXFGFKAHGSTFGGXTNSPAIXKSFQGPPHGSQVERDKLNKYLPGRPS

SEQ ID NO: 324343 - protein, 212 aa, Zea mays
  Clone ID: MRT4577_58875C.1.pep
MAGGKSTGNAARSRKRVEATVLKRSRDGSAFTRCEACNKDVPVVLIDMHSCSLDEKIRMTLEAQVVEKTVEVASADRKKSSAKGGGNKDAKRKRSPTAFFLFMDDFRKEFKATHPDNKSVATVAKEGGERWKSMTDEEKKPYIEKAAELKAEAENGEGSGENNVATKKAKTDDQEVDQPAKKLRKCKALHEDEDDDGDQEDEDEKNELDDDM

SEQ ID NO: 324344 - protein, 93 aa, Zea mays
  unsure (1)..(93): unsure at all Xaa locations
  Clone ID: MRT4577_58876C.1.pep
MHVFQSSKAGNYLDDPELQELSLAFSARVGVQAFYQFKRINAVMQCSSSIVRMAGFSSXDSAWLLSLTVAAMKAAVPIVGIHLIDRCGRRLIS

SEQ ID NO: 324345 - protein, 290 aa, Zea mays
  Clone ID: MRT4577_58877C.1.pep
LIQQLAVFKGYSAAFCALKLAGKKFPSSTSLHIQLLGMQILHERALHRGHLKVAQQICDEFGVLSSAVSGVDIELKTEFSVRRARTLLAAKQFSQAAAVANSLFSTCYKYNMQVENASVLLLLAEIHKKSDNAVLGLPYALASQSFCKSFNLDLLEASATLTLAELWLDLGSSHAKKALSLVYQSLPMILGHGGLELRARAHVVLAKCHLSDLKFSVLEDPEAVLDPLNQATEDLQALEYHEMAAEAYYLKAMAYNHLGKLDEREEAAARFKDHVTALETPHNEEDSLKY

SEQ ID NO: 324346 - protein, 60 aa, Zea mays
  Clone ID: MRT4577_58878C.1.pep
LKILSGYKYSKAMYSLHHFSLALVSGEPCATEKPPARLIWSGDRPHACLQTTRRTRRAVH

SEQ ID NO: 324347 - protein, 100 aa, Zea mays
  Clone ID: MRT4577_58879C.1.pep
PAGITPETSGEREIEALPVPFGCLAGQAKLGGLSASPTYTACLRDLSGWGMAGLVGNSSPNLGTPQQSHLYRGQDMWAYYIQVKNRYRRMRRMEDAVLCS

SEQ ID NO: 324348 - protein, 68 aa, Zea mays
  Clone ID: MRT4577_5887C.1.pep
MAKEAGGEGAMSEPVLRKELVSYCYVAEWIFLSFTVIVYNKYILDPKMYNCPFPISLTMVHMAFCSSL

SEQ ID NO: 324349 - protein, 412 aa, Zea mays
  unsure (1)..(412): unsure at all Xaa locations
  Clone ID: MRT4577_58880C.1.pep
PGESVLNAMKSNTNQRVSPXFALVLCPTRELAIQLTAEANVLLKYHEGIGVQSLIGGTRFKLDQRRLESDPCQILVATPGRLLDHIENKSSFSVRLMRLKLLVLDEADHLLDLGFRKDIEKIVDTLPRQRQTLLFSATIPKEVRRVSQLVLKRDHVFVDTVGLGAVETPTKVQQSCLVVPHELHFHTVHHLLREHIDREVDYKVIVFCTTAMVTEFMYIMLRDLKLNVREIHSRKPQLYRTRISEEFRGSNRIVLVTSDVSTRGVNYPDVTLVIQVGVPPDREHYIHRLGRTAREGKSGKGILLLAPWEQYFLDEIGDLPIDKYPAPDVDQEMKQKVDDSIEMVDMSIKEAAYHAWLGYYNSIADIGRDKRMVVDLANRFGASIGLEKPPAIYRKTALKMGLKDVPGIRIRK

SEQ ID NO: 324350 - protein, 45 aa, Zea mays
  Clone ID: MRT4577_58881C.1.pep
LAALAHATPSIYPFGPILFVVARASPSRCPLPVAAGHHPLPDVRH

SEQ ID NO: 324351 - protein, 54 aa, Zea mays
  Clone ID: MRT4577_58882C.1.pep
YRTQEDGADISKQASRFPSSLITKNAGVNGDFVIKKGLLYDRCQLWLQCCQELV

SEQ ID NO: 324352 - protein, 48 aa, Zea mays
  Clone ID: MRT4577_58883C.1.pep
DARSPPDQGVISIITSAMLYANLSCSIVACSCALFLLPSGFISPQTVR

SEQ ID NO: 324353 - protein, 112 aa, Zea mays
  Clone ID: MRT4577_58884C.1.pep
ESSVLCHPVHTAGQVYAQLVTFMFNNIVVPPLIIVNLFRLPSHKAEVLCSSVWVPTPVLRASEEPPRRPAPMPSMLRKKRCKLVSSGHRAVLGSTCHIVVVSAFRVFRGGGP

SEQ ID NO: 324354 - protein, 200 aa, Zea mays
  Clone ID: MRT4577_58885C.1.pep
QPPSQSLAPAYSVLTTVAFFVVQRGSSLHTPLFALALLGLLRCAAVSCSAAAAATTLLHRESYAGKSEFRTVNRKPLGSCVDPSPYLAIDVGAAGPIPDEAFLQVTVSGVQRPDPSDWVAMITPSNSIVAGCPLSEVNYVETGDLANLPLLCHYPVKAQYLTSDPGYLGCKNAGCGKRDASGACTARTCAATLTFHVVTF

SEQ ID NO: 324355 - protein, 85 aa, Zea mays
  Clone ID: MRT4577_58886C.1.pep
FNGLCSFKPTFNSSPFTNETPYTFYPSLKPQKTFAETELYLLTLLEHLLTPSKLTRPINSSLYYDLLNFLQPLPLPFVVYHPFNS

SEQ ID NO: 324356 - protein, 108 aa, Zea mays
  Clone ID: MRT4577_58887C.1.pep
FFLLTPSPSGLSQSLCVVMAPIECTMHVGAVKVGVGASVAADEDDARQARVDDHLGFEVPAVRAGRRQAYHSPAHTPVHAKCSSRCHLGALGVRAGRGDHRGGIIFFS

SEQ ID NO: 324357 - protein, 197 aa, Zea mays
  unsure (1)..(197): unsure at all Xaa locations
  Clone ID: MRT4577_58888C.1.pep
ASLLGELNDIGQERGNGLTHVVXNRRGDNKSSGVYETRGGTIGQAGVPEXEPLSLQGDPIXVKVHLXLKSPEVVYGAXWVXPLRHSCYAFMEGVPGSPGGXVPEKLYKGFEGVVFLESPQSVYRKNISLLEXGEFHXQADGGGLIRSGDSQYRGAGYCKKGYLSTCLLDLKIKACVSQRLHTHGFSVGNPPYCYTTR

SEQ ID NO: 324358 - protein, 114 aa, Zea mays
  Clone ID: MRT4577_58889C.1.pep
MENLDDCTCVPGERNLDETNLTMSYYERILNDITPGFWGRSMEIIYQTSACAAMLTDVTYWGLLVPFFYRDKDGLPVITDGARSLNAGPVLIDTLLSNMPFLCDRMDLFAFWSC

SEQ ID NO: 324359 - protein, 58 aa, Zea mays
  Clone ID: MRT4577_5888C.1.pep
SQVNFLPDCHLFNLCWPGLCASSTPWVVVSCHFSCVSRTFANPCLLGHLSFGAMVAHA

SEQ ID NO: 324360 - protein, 104 aa, Zea mays
  Clone ID: MRT4577_58890C.1.pep
VRVRYVQVAFLASHSDTCVPSDQQHINSFRTATLVVSAAHKNKYLWDRCAQTLKIDHLSGVICDKVLGVHDIIQFFSIYTKTFIFGTHTVEHSLIIVTGISSSS

SEQ ID NO: 324361 - protein, 121 aa, Zea mays
  Clone ID: MRT4577_58891C.1.pep
QHKRYIPQKRRVLMLQQKGNISNVTTSVCMAVFLCNPQIGGPYPTHWGLGASVGGFQTGGRSERLSPVFFSGWMTMISLLQSVYHGSPYSCVPFDGQESHCSCAILCISCYLLVESIRKSF

SEQ ID NO: 324362 - protein, 54 aa, Zea mays
  Clone ID: MRT4577_58892C.1.pep
QKKNQALQFIYMKEKKVLLPYENVRISSKECTLIDLIRNPCIHELITITITTKP

SEQ ID NO: 324363 - protein, 123 aa, Zea mays
  Clone ID: MRT4577_58893C.1.pep
FQLYILLQQQEQWLGGAAEGGRRPADQLASGGGAPTGNDHARTHACNLQLFYFFRTSYMKQAPIFLGGGAVLLADGHGENWTPSRARDDDGVAPFIGIIHVPLLPWKPGRRGLVAQATEQQQQ

SEQ ID NO: 324364 - protein, 39 aa, Zea mays
  Clone ID: MRT4577_58894C.1.pep
FHFFNTKPSSDDSKNNMKKVHCNHKKCGILDMNRISVQS

SEQ ID NO: 324365 - protein, 65 aa, Zea mays
  unsure (1)..(65): unsure at all Xaa locations
  Clone ID: MRT4577_58895C.1.pep
SPCATVHAMLRVVESGGVHQNASMATVSATTILPGSVVXYTPKHICIASSSLGTPSMAISTPSSI

SEQ ID NO: 324366 - protein, 82 aa, Zea mays
  Clone ID: MRT4577_58896C.1.pep
RLMWERICTRCYCYTETVSPSTLACQMAESTSCTSKFLGLISSRMTVTEPLMLILTTLMLLVHLLLAMYLWDLELTFDVGAN

SEQ ID NO: 324367 - protein, 261 aa, Zea mays
  unsure (1)..(261): unsure at all Xaa locations
  Clone ID: MRT4577_58897C.1.pep
MAAASLARLSRRATTSTSVAAPAFRRLLSATSTAPAAASAPXRPPARPPPRPXADRVRWDYRGQRQLVPLGQWMPKVAVDAYVAPEAVLAGQVTVHDGASVWSGAVLRGDLNKIALGFCANVQERCVLHAAWATPTGLPAETLVDRYVTVGAYCLLRSCTIEPECIIGQHSILMEGSLVETNSILEAGSVLPPGRRIPTGELWAGSPARFVRKLTNEEIMDIPKLATAINDLMQSHFSEFLPYSNAYLEVEKLKKSFSIPL

SEQ ID NO: 324368 - protein, 76 aa, Zea mays
  Clone ID: MRT4577_58898C.1.pep
MSACPCTPGARDGEGKEEAAAALHGLQLEAYRSTMRALYASGPLTWAQEALLTNLRLSLNISNEEHLLQLKRLLSS

SEQ ID NO: 324369 - protein, 134 aa, Zea mays
  unsure (1)..(134): unsure at all Xaa locations
  Clone ID: MRT4577_58899C.1.pep
LWENPNVEPYRIQQVIERGLLPLXPRYYNITSSLIXNXPLVHXLAQNIKAQHLQQLELTNLAGYSQQQQLIAFNQLGALNSDSYLLQQQLPLNQLSAGYPQRLLAYNQLTALNSAAYSQQXQLLPFKQLSGVSP

SEQ ID NO: 324370 - protein, 204 aa, Zea mays
  Clone ID: MRT4577_5889C.1.pep
NVRYELFFHTGFSPDRVAVSSLLAVGAVHQHLVLKNERTRIGLLVDSAEPREVHHFCSLLGFGADAICPYLAIEAIWRLQIDEKIPLQDDGQLYPKELIDKYFYASNNGIMKVLAKMGISTLASYKGAQIFEALGLASEVVSKCFEGTPSRVEGSTFEMLAQDALHLHELAFPSRTLPPGSAEANSLPNPGDHQKNILDTPDAG

SEQ ID NO: 324371 - protein, 121 aa, Zea mays
  unsure (1)..(121): unsure at all Xaa locations
  Clone ID: MRT4577_588C.1.pep
GSPRLGFVGERIYMAPSYGEYRCFVXGLGWGTGDHXSSYYAFSTYAEGLESEMILDRETHRCRGFLFLALCQLEAXMCYAFVGMSGRXLDGRLISVFVAQDRGGGVRDFGGCDCAVRASAR

SEQ ID NO: 324372 - protein, 232 aa, Zea mays
  unsure (1)..(232): unsure at all Xaa locations
  Clone ID: MRT4577_58900C.1.pep
MAPPMKVYGWAVSPWMARALVCLEEAGADYEIVPMSRCGGDHRRPEHLAKNPFGEIPVLEDGDLTLYQSRAIARYVLRKLKPELLRXEGDLEGSAMVDAWMEVXEAHXHMEPALWPIIRHSIXIGQYVGXRDRDHQRPSFNENLDXRLRKVLPRXYSARLSVCKYLXGDDISAADLCHFGFMRYFMATEYPGLVDAYPHXKAWWDALLARPSVXKVMAGMPPDFGYASGNIP

SEQ ID NO: 324373 - protein, 95 aa, Zea mays
  Clone ID: MRT4577_58901C.1.pep
ARNSARATFPTISSPPPPTPTQGGFYKTLRFLHPQPTQAIHATHEKPDHHTTPSQATDRHRQTTTPGRISQADRPKQQQTNEPTALEPAPPGQPT

SEQ ID NO: 324374 - protein, 41 aa, Zea mays
  unsure (1)..(41): unsure at all Xaa locations
  Clone ID: MRT4577_58902C.1.pep
FLQTGRAKPEFTPEPKIKPKPKPEPKSEPIPQHKPVXIVRV

SEQ ID NO: 324375 - protein, 87 aa, Zea mays
  Clone ID: MRT4577_58903C.1.pep
GAEQRPHPPHTRRRRPKSNGEQSTGRHNRGCENKTPRCARKTKEYTKTCREKNITKHILKTTHTLTCKPQKEAQRGRSAIYQDVIPT

SEQ ID NO: 324376 - protein, 208 aa, Zea mays
  unsure (1)..(208): unsure at all Xaa locations
  Clone ID: MRT4577_58904C.1.pep
MAPPMKVYGWAVSPWMARALVCLEEAGADYEIVPMSRCGGDHRRPEHLAKNXSRAIARYVLRKLKPELLREGDLEGSAMVDAWMEVEAHHMEPALWPIIRHSIIGQYVGRDRDHQAVIDENLDRLRKVLPAYEARLSVCKYLAGDVISAADLCHFGFMRYFMATEYAGLVHAYPHVKAWWDALLARPSVQKVMAGMPPDFGYASGNIP

SEQ ID NO: 324377 - protein, 207 aa, Zea mays
  unsure (1)..(207): unsure at all Xaa locations
  Clone ID: MRT4577_58905C.1.pep
MAPPMKVYGWAVSPWMARALVCLEEAGADYEIVPMSRCGGDHRRPEHLAKNXWLALSAVASSTDMDDGSDPXFEFPAATLICPVNCSLTLVXSKIISNSSSMFCAXPFGEIPVLEDGDITLYXYTQYXSRAIARYVLRKLKPELLREGDLEGSAMVDAWMEVEAHHMEPALWPIIRHSIIGQYVGRERDHHAVIDENLDRLRKVLPA

SEQ ID NO: 324378 - protein, 316 aa, Zea mays
  unsure (1)..(316): unsure at all Xaa locations
  Clone ID: MRT4577_58906C.1.pep
MAPPMEVYGWAVSPWMARALVCLXEAGADYEIVPMSRCGSNHRRPEHLAKNXWIALSVVVSSTDMDDGSDPXFEFTSATLICPVNCSLTLVXSKIISNSFSMFCAXPFVEIPVLEDGDITLYRKLSIYSISLSILLLICSIQLPTNNSSGLISLTLLIPESRAIARYVLRKLKPELLREGDLEGSAMVDAWMEVEAHHMEPALWPIIRHSIIGQYVGRERDHQAVIDENLDRLRKVLPAYEARLSVCKYLXGDDISAADLCHFGFMRYFMATEYAGLVDAYPHVKAWWDALLARPSVQKVMAGMPPDFGYASGNIP

SEQ ID NO: 324379 - protein, 61 aa, Zea mays
  Clone ID: MRT4577_58907C.1.pep
PTLQKSSLTHPILLHYSTTHPTRQQHPNVSYLSNSSAYEAILPSTIQSIAYHQNHLMAKLT

SEQ ID NO: 324380 - protein, 75 aa, Zea mays
  Clone ID: MRT4577_58908C.1.pep
ITDSAICPTSSTVLLYLLQPPCLVVVDQRSLWSLRCSVIEVGDTSLAEGGLDLTMEGDTWEDMTFTMSAAAQDNK

SEQ ID NO: 324381 - protein, 98 aa, Zea mays
  Clone ID: MRT4577_58909C.1.pep
KRGGGTPLHPPGPFGKKGRKSPRFPPKKKNNWPNWVSRPKRHPRKSWGPNWKFLPPPRTKELGFVTSFGEQQGFFLRVREQFFPEKFGKPGYFFPPPI

SEQ ID NO: 324382 - protein, 93 aa, Zea mays
  unsure (1)..(93): unsure at all Xaa locations
  Clone ID: MRT4577_5890C.1.pep
MRSVLVYQASRGATGTTGLXTGVKCVEIHHQALHEALPGDNVGFNVKNAAVKDLKRGFXAANSKDDPAKEAASFTSHVIIINHPGQIGIGFAP

SEQ ID NO: 324383 - protein, 55 aa, Zea mays
  Clone ID: MRT4577_58910C.1.pep
PARPTRSVGFYGLEDHCPPKPMNAPPMLMTIYCHSAFADALLFILAGVMPNKSQC

SEQ ID NO: 324384 - protein, 91 aa, Zea mays
  Clone ID: MRT4577_58911C.1.pep
APRKCYMVCLAPLMHFYPELGDRVFWSELLCVEGQSLREGVVRPPACTSPRLCRYFVSWGSKVLSSSVCIPLPFFNQNTPRSLKKKKKKNK

SEQ ID NO: 324385 - protein, 36 aa, Zea mays
  Clone ID: MRT4577_58912C.1.pep
TRSFYKLACLISRRQVYLFCSYYLLMKTVCTCVCGK

SEQ ID NO: 324386 - protein, 89 aa, Zea mays
  Clone ID: MRT4577_58913C.1.pep
WPTTFLNLEPTAYSFCHQPYTNLFHWSPHLARCTMCGTSIPSAKFMIFSRACLSPIKRTVFLLMGTRRAICSNVRDFQLPFIILSLVGS

SEQ ID NO: 324387 - protein, 370 aa, Zea mays
  Clone ID: MRT4577_58914C.1.pep
MAVDPRQVVAGFLTLSMFVMLGNMIKHDHFSPVTEELGFEATGVVWDTRKLDNDAEMSSVDTAGVEDLMDAVEEVKPCWTKPSPKNQPSNGFVTFSLTMGPEYHISQITDAVVIARGLGATLVLPDIRGNELGNKRKFQDIYNVDKFVRSLDGVVEVIEDIPDEVSAKKPAVIRVPNRVTESFITGTIQPIFQKNKLQELSKKSDGKVLAIDLRTDLLEKKSCKTTRGARRKGCYSPDEVLAFLRSVGFSANTTIYLTETSWYKGLDVLKEEFPNTWYKGDIMPAENKAEFLKSSNADLARALDLEICSQSDVFVPAVAGLFYGHVTGKRIASGRTQIVVPSQSSTSTHASDFISTYISNKNHLAYACYC

SEQ ID NO: 324388 - protein, 421 aa, Zea mays
  Clone ID: MRT4577_58915C.1.pep
MAVDPRQVVAGFLTLSMFVMLGNMIKHDHFSPVTEELGLEATGVVSNTRKLDNNAEMSSVDTAGVEDLMDAVEEVKPCWTKPSPKNQPSNGFVTFSLTMGPEYHISQITDAVVIARYLGATLVLPDIRGNELGNKRKFQDMYNVDKFVRSLDGVVEVIEDIPDEVSAKKPAVIRVPNRVTESFITGTIQPIFQKNKYLRLAVIFSSVSLRPKETNNKDMDTTACLAMFGGLELKHEYSEVARKMLDRLQELSKKSDGKVLAIDLRTDLLEQKSCKTTRGARRKGCYSPDEVLAFLRSVGFSANTTIYLTETSWHKGLDVLKEEFPNTWYKGDIMPAENKAEFLKSSNADLARALDLEICSQSDVFVPAVAGLFYGHVTGKRIASGRTQILVPSQSSTSTHASDFISTYISNKNHLAYACYC

SEQ ID NO: 324389 - protein, 286 aa, Zea mays
  Clone ID: MRT4577_58916C.1.pep
MAPPLAAVSSSSPLFSPSSSRPIRRCHAPPPSISFQTRGRSPTAAAAAESSVSTLLEVRGLTASVKETGQQILAGVDLTIREGEVLVGHPHYEVTGGTILFKGEDLVDMGPEDRSLAGLFMSFQAPIEIPGVSNFDFLLMAVNARRERSGLPALGPLEFYSVVSPKVDALKMDPKFLDRNVNEGFSGGERKRNEILQLSVIGADLALLDEIDSGLDVDALEDVANAVNGLLTPQNSVLMITHYQRLLDLIKPSYVPIMENGKIIKTGDSSIATQINEGGFKSIALV

SEQ ID NO: 324390 - protein, 421 aa, Zea mays
  Clone ID: MRT4577_58917C.1.pep
MAVDPRQVVAGFLTLSMFVMLGNMIKHDHFSPVTEELGLEATGAVSNTMKLDNNAEMNSVDMAGVEDLMDTIEEVKPCWTKPSPKNQPSNGFVTFSLTMGPEYHISQITDAVVIARYLGATLVLPDIRGNELGNKRKFQDMYNVDKFVRSLDGVVEVIEDIPDEVSAKKPAVIRVPNRVTESFITGTIQPIFQKNKYLRLAVIFSSVSLRPKETNNKDMDATACLAMFGGLELKHEYSEVARKMLDRLQELSKKSDGKVLAIDLRTDLLEKKSCKTTSGARRKGCYNPDEVLAFLRSVGFSANTTIYLTETWWHKGLNDLKEEFPNTYTKDDIMPAENKGEFLKSSNADLASALDLEICSQSDVFIPAVAGLFYGHVTGKRIASGRTQIIVPSQSSTSTHASDFTSTYISNKNHLAYTCYC

SEQ ID NO: 324391 - protein, 305 aa, Zea mays
  Clone ID: MRT4577_58918C.1.pep
MAPPLAAVSSSSPLFSPSSSRPIRRCHAPPPSISFGRSPTAAAAAAAAAAESSVSTLLEVRGLTASVKETGQQILAGVDLTIREGEIHAIMGKNGSGKSTLTKVLVGHPHYEVTGGTILFKGEDLVDMEPEDRSLAGLFMSFQAPIEIPGVSNFDFLLMAVNARRERSGLPALGPLEFYSVVSPKVDALKMDPKFLDRNVNEGFSGGERKRNEILQLSVIGADLALLDEIDSGLDVDALEDVANAVNGLLTPQNSVLMITHYQRLLDLIKPSYVHIMENGKIIKTGDSSIATQINEGGFKSIALV

SEQ ID NO: 324392 - protein, 62 aa, Zea mays
  Clone ID: MRT4577_58919C.1.pep
CESGLINAGLLTCFATRMGAKVERESYMPGYYATGDLNMEPNGRWSPYYEEMTSNDQLCNGF

SEQ ID NO: 324393 - protein, 410 aa, Zea mays
  Clone ID: MRT4577_5891C.1.pep
MGSWEENVRQFLLEEEEDDDELFFVILPAIIPYLSEEKRPIHTSSLTGAKKVKEILEGHESWCKSEFRMEKEIFKATSNFLRRENLLRDTRGVSVEKQLGMFMYMISHNASNQMLQKAFQHSGETIHRKISEVFEIVPILTQRFVKLPSSVQTHARIATDSRFMPFFQNCLGAIDGTHVSITIAEDRAPPYRNRKGTLSHNVMVVCDFDLNFTFVSCGWEGSASDAGVLRSAISKRFSVPEGKFYLVDGGYANTPSYIAPYRGVRYHLSQFRRSRSSQSGYANYKELFNHRHAILRNHIERAIGVLKKRFPILKVDTFHPIENQIKIAAAAITFHNIIRGQNGDEGWLDNQLDYISPSHYIGVTWYLQSAEWKQHMKLTRKRKMDDLLGYVSLSCACCISCYREDRGPGE

SEQ ID NO: 324394 - protein, 303 aa, Zea mays
  unsure (1)..(303): unsure at all Xaa locations
  Clone ID: MRT4577_58920C.1.pep
MAPPLAAVSSSSPLFSPSSSRPIRRCHAPPPSISFQTRGRSPTAAAAAESSVSTLLEVRGLTASVKETGQQILAGVDLTIREGEIHAIMGKNGSGKSTLTKVLVGHPHYEVTGGTILFKGEDLVDMEPEDRSLAGLFMSFQAPIEIPGVSNFDFLLMAVNARRERSGLPALGPLEFYSVVSPKVDALKMDPKFLDRNVNEGFSGGERKRNEILQLSVIGADLALLDEIDSGLDVDALEXVANAVNVLLMQXNVAVDTSKLCTYDYSFPTHLGXIMENGKIIKTGDSSIATQINEGGFKSIALV

SEQ ID NO: 324395 - protein, 64 aa, Zea mays
  Clone ID: MRT4577_58921C.1.pep
FLGAKKKKKKKKKKKKKKKKKKKKKKKKIKKKKKKKKKKKKKKKKKKKKKKKGGPLKKFKINKP

SEQ ID NO: 324396 - protein, 290 aa, Zea mays
  Clone ID: MRT4577_58922C.1.pep
HASDFIAVSFVKSGGLTHGLKSYIAARSRGSDIGVIAKIESIDALKNLEEIIRASDGVMVARGDLGAQIPLEQVPSIQQRIVRMCRQLNKPVIVASQLLESMIEYPTPTRAEVADVSEAVRQRADALMLSGESAMGRYPEKALSVLRSVSLRIERWWREEKRQEALELQGVSSSFSDKISEEICNSAAKMANNLGVDAVFVYTKDGYMGSLLSRCRPDCPIFAFTSSTSVRRRLNLQWGLIPFRLSESDDMESNLNRTFSLLKARGMVQSGDLVIALSDMLQSIQVVNVP

SEQ ID NO: 324397 - protein, 76 aa, Zea mays
  Clone ID: MRT4577_58923C.1.pep
CEWLPSLGAPVFSTLGFCMGMFCESVMAYHFLPGSPIPYFLPRFFFCPHLRKRCFLCGCRFEFPGTTPGSAFGVVY

SEQ ID NO: 324398 - protein, 64 aa, Zea mays
  Clone ID: MRT4577_58924C.1.pep
PHTEYIPPPFLSLPRGKHISLKTPTDTTIIIQVQNSVSSDNGKANIPDLRTICTRSATADYCWE

SEQ ID NO: 324399 - protein, 106 aa, Zea mays
  Clone ID: MRT4577_58925C.1.pep
LQRPPASTSKVCRLWSSREFQGLFMRLHGALLLRLALLGFPSHLLVLTSKLVNEPGAHLDRVVTHCRDMARRVLLAEADCPRLRGTWRRRSARASDGRPTRHASAP

SEQ ID NO: 324400 - protein, 117 aa, Zea mays
  Clone ID: MRT4577_58926C.1.pep
GLVWWFWSSAKIPKTRVRGGKTRKRGRTKVANTRPKFVLKENGQDSPQVTRLFGTGRGRAICVNGPPRFCHIRGKMHKRVWIGVGNIVLVGLRDYQDNRADVILKSMNDEAPLLKAY

SEQ ID NO: 324401 - protein, 214 aa, Zea mays
  unsure (1)..(214): unsure at all Xaa locations
  Clone ID: MRT4577_58927C.1.pep
LCDEQIQNQLPGFSAKDSTVNEQSPAALPSYHPLARTIILGFSKGGVVVNQLVTELSRWGASGSTTXAAADVPRPAAAGPRPPPHPTQSHLLLAPTRSSDDLLSSISELHYVDAGLNRAGSYVADRAVIGRIREHVVRRAGDKTRLRFALHGTPRQWCDPSRPWIREEKDAMVQVLADEARRSEGRLVLSEKLYFEGRPRSLLMHFEVLEAMDI

SEQ ID NO: 324402 - protein, 120 aa, Zea mays
  Clone ID: MRT4577_58928C.1.pep
VQAPRMVFPDLGLTPPVTKKRKSSSTTSMAAKKKKSSAMSVRSGQGSNQPDPMPLSIMMPSMEVADKEENQETKKEVAGHGKKNKREPEVIGSPAMGTRSKASCSGSPAMGTRSKRKLNV

SEQ ID NO: 324403 - protein, 380 aa, Zea mays
  Clone ID: MRT4577_58929C.1.pep
VACSTGRNPGRTSVRSPSRPLHSRQPRRRGHGPVDRRRLRPTLQRRTPLPRRCLAPPLASQNARHSPTEPELFRWKQVPRVNAILFTGDRVRGTGDPVIERLSDAAHLAGVLAGKLPGEANAWVVDAARFAGPFAVYRELVPTVDAAGDPKGYDPTGFPAAAGVANILARSIGEIQNQVPGLSAKDSAGNQHPPSYHPPARTIILGFSKGGVVVNQLVTELSRWGASGSTNQAAAADVPRPAAAGPGPPPHPTQNDLLLLGAPTRSSDDLLSSISELHYVDAGLNRAGAYVADRAVIGRIREHVVRAGDKSLRFALHGTPRQWCDPSRPWIREEKDAMVRNLRCASKLSEGRLVLSEKLYFEGRPRSLLMHFEVLEAMDI

SEQ ID NO: 324404 - protein, 71 aa, Zea mays
  Clone ID: MRT4577_5892C.1.pep
PTHPNIYHINMLDNCIPYFHGSHGNGVSDILTSIHHPHNSTYHPFNIPHLTQNVNTTITTYNTIQTHLQLN

SEQ ID NO: 324405 - protein, 84 aa, Zea mays
  Clone ID: MRT4577_58930C.1.pep
NQMGNPGVGPLVGVKLIGKGGKKNLGVKPQFILNPLVSPPKGVKRKTLFLRLNWFPWPFKGQKKYLGFLEKRGIFFSPGGGPPF

SEQ ID NO: 324406 - protein, 60 aa, Zea mays
  Clone ID: MRT4577_58931C.1.pep
SSAVNNRSSDINKKIRTALGKGKKIVFLTRVDPFPVALLAVLFGVKSEILSSNATNPMLT

SEQ ID NO: 324407 - protein, 83 aa, Zea mays
  Clone ID: MRT4577_58932C.1.pep
FFFFFLTHQENIISNYHQSTVSRSIGEPSKAMDTDIELPLPGNIIRMDLPSYIYMLPIPTGSVGFFPTIIHENTRFSYVPSSH

SEQ ID NO: 324408 - protein, 88 aa, Zea mays
  Clone ID: MRT4577_58933C.1.pep
LYSTPSSDRSAPASMWLFQCSMSKSFTCICALVSQVEQESSVRGGILQNVMFKLASVDTLVHFPLRGSLQCAVPRHPAPRASLVVRKE

SEQ ID NO: 324409 - protein, 103 aa, Zea mays
  unsure (1)..(103): unsure at all Xaa locations
  Clone ID: MRT4577_58934C.1.pep
AEFGSRRLSNVWVLLLTVNHNTTGAGLIFTAVGSIPKPALIHLFNTMNRPYNMKLHVRNRFIKHNCQELXLPEGLNSLKGFVAYNKPLVNITRETLEHTNTLK

SEQ ID NO: 324410 - protein, 78 aa, Zea mays
  Clone ID: MRT4577_58935C.1.pep
PHQPLFVDQCPNFLESAALKNLHRLAPGPFSCSIWEDGPNFFGWEGQEIKKKLGPGESCKSNRCVVKFQVFCFTCLNC

SEQ ID NO: 324411 - protein, 79 aa, Zea mays
  Clone ID: MRT4577_58936C.1.pep
NQKNRFKQGAGIPPTLKNYVGQNKIRLVKPKRGECLSNRKLVLNNGLEEKLSKNTLLKIFMVTQEFLVATLRENCPPPF

SEQ ID NO: 324412 - protein, 176 aa, Zea mays
  unsure (1)..(176): unsure at all Xaa locations
  Clone ID: MRT4577_58937C.1.pep
MTRIFVQRGTAGSSSSSGRSDTQPVQPAAAAREEELPLQPQPQLPELLAIDDTTDNLNEGSENISNKPLRTDDTISESSSSAEERAAREKPLKDDSNVINPTFLVEEPVGIQIPDQIEHENSVLSVTGSSQMAGAASHPPPPXAPPPKPLLGNNGLRRMGXGSSNSVRIGSXRRPV

SEQ ID NO: 324413 - protein, 539 aa, Zea mays
  Clone ID: MRT4577_58938C.1.pep
MTRIFVQRGTAGSSSSSGRSGTQPVQPAAAAREEELPLQPQPQLPELLAIDDTTDNLNEGSENISNKPLRTDDTISESSSSAEERAAREKPLKDDSNVINPTFLVEEPVGIQIPDQIEHENSVLSVTGSSQMAGAASHPPPPPAPPPKPLLGNNGLRRMGPGSSNSVRIGSSRRPVAWPLVAARTSASGSRPSSPRSLVDGEGYNSADEQGPCYALSYDDSERERMFDHDLRRVKGLEIRKMAEDGNCLFRAVADQVYGDAEAYDMARQMCVDYMERERDHFSQFITEIESFTLYCKRKRRDKVYGNNVEIQAFAEMYNRPIHIYSYSTEPINIFQGSYNTDVPPIRLSYHHGNHYNSVVDPRRQTVGAGLGFSSLRGTNNVDRDQVKAAIKAQQDQQIENALLAEGRFYSDLELTEREIERMVMESSRSEYLAKEKKLNIRESSTSRAEPSSSAAISGSSRSVAGADRGKEDYFVLPDTALTRSMQLLLAMGFSYIQVMEAYSIFGEDVDSMVCYLLETGGTGASAGGSNRRKGKAAE

SEQ ID NO: 324414 - protein, 118 aa, Zea mays
  Clone ID: MRT4577_58939C.1.pep
AEKRTRAATGTLKEKQHGDPTPAGQPSMEQRKASNEAPEDSRKNSLEGPGRIPRDGSNRTQAPEDDKGGNTEPNGQNRGRKHKRTLGQGEAESSEQTKDKPAQVTTKTEAKKNAGKAT

SEQ ID NO: 324415 - protein, 138 aa, Zea mays
  Clone ID: MRT4577_5893C.1.pep
PSVRPASAQRPPTRPPTRPLVLDRERSRTSLSLWPRLVFSSREWRRCAISVAAPSASDFWDARRTRVGRRWSCFGRRRTWALAASDPDRSQPDRSQSAEWKQHMKLTRKRKMDDLLGYVSLSCACCISCYREDRGPGE

SEQ ID NO: 324416 - protein, 93 aa, Zea mays
  Clone ID: MRT4577_58940C.1.pep
PPPFFFFFFFFFFFFFFFFFFFFFFFFLTPTKLELCGLLDDLNPKQVNISHNSFQSHTIHMKIGITEQNLIWYAKARYCFELPSINTYARWKK

SEQ ID NO: 324417 - protein, 63 aa, Zea mays
  Clone ID: MRT4577_58941C.1.pep
MHDTKSAYSSSCPTGRISFKLYDWNPAELPRRLRHQIFEWLGSMPVELEGYIRPGCTILTVVF

SEQ ID NO: 324418 - protein, 183 aa, Zea mays
  Clone ID: MRT4577_58942C.1.pep
MGRTKDELLARLEELKIDFKRYDHPVVLTVEEQAKHVGNFGGALTKNLLLKDKKHRLYIVSALADTKVDMKILSQRLGLGKGGVRMAPEENLCQVLQVPLGCVTPFALFNESASAVSLLLDQGFKSKQSCYFHPLTNDVTIALSSSNLDKFLLSIGKQPVYVDLESPVVGKDNPPDLADLVPS

SEQ ID NO: 324419 - protein, 87 aa, Zea mays
  Clone ID: MRT4577_58943C.1.pep
MASKWVRPEVYPLFAATGVAIGICAFSLLRNITGNPEVRVNKMGRAAGVLENHEEGRRYAEHGLRAYVQDKTPEIMPGINKFFTSPK

SEQ ID NO: 324420 - protein, 105 aa, Zea mays
  Clone ID: MRT4577_58944C.1.pep
GGFFFFWVFLKQNGLFFPTKKTRAGYIITQGQDVHILIPSRGQKPDPALEHLYFILYENKKEGEGKPNLRTQYPWISKQAGGEMNVIPVQCVNCWPRGWRQGKPH

SEQ ID NO: 324421 - protein, 333 aa, Zea mays
  Clone ID: MRT4577_58946C.1.pep
MALVRRCLCGSEEDCRALLGMENLRLFSYREIRAGTNNFDQSNKLGRGGFGTVYKGVLRDGTEFAAKVLSSESEQGIKEFLAEIESISQVKHANLVRLLGCCVQRKKRILVYEYLANNSLDHALKGAAADLPWSTRSGICLGTAKGLSYLHEEHEPNIVHRDIKASNVLLDRDYLPKIGDFGLAKLFPDNITHISTAVVGTSGYLAPEYFVHGQLTKKADVYSFGVLVLEIVSGRRVSQTIQSDMFPVREAWMMYQQGRLLEIVDASMGSYPEKEVLRYIKVGLACTQATPSSRPTMRQVLALLSERRCSRRVSPSTAATTRPLPWGVCPPVR

SEQ ID NO: 324422 - protein, 91 aa, Zea mays
  unsure (1)..(91): unsure at all Xaa locations
  Clone ID: MRT4577_58947C.1.pep
GGVVLVCRRRWVFHAXRVTRARVFGSTVVVGVLPSLVVVPRLLLDRVRLAFLARLARGRAAVWVXGLFSAVGVAASAAGGAATGASLPVLD

SEQ ID NO: 324423 - protein, 75 aa, Zea mays
  Clone ID: MRT4577_58948C.1.pep
PPIVSSDMYSSSGIEKILVPASLLQLFPIVVPLSYSSCNPTFRYTTSSLGIFCVPYSSHLLSIEPGETSYPLDSS

SEQ ID NO: 324424 - protein, 144 aa, Zea mays
  Clone ID: MRT4577_58949C.1.pep
FSTREIELKPSTSPQTRVVYINHLYRRFVHVEAIRHVMERTKEELLRMHNHLLDISVGFDESFVIDDDVRLKNAILDDDNACVCMTLRLIRAETEILPRGATRNSTTHARGLRHAHVERSHSDKHWEGQMSRPNAQQTSSWTRY

SEQ ID NO: 324425 - protein, 78 aa, Zea mays
  unsure (1)..(78): unsure at all Xaa locations
  Clone ID: MRT4577_5894C.1.pep
TKPXXGATQPTQQRQGADXEGLQEDDYLSKLTYIYRCTESSKLYGQVSLSLLDYFAKKFHAFLWDLCRCCKFSSKYSW

SEQ ID NO: 324426 - protein, 105 aa, Zea mays
  Clone ID: MRT4577_58950C.1.pep
FPTVADLAHRPVRCTLNSPVLPSDRWHGHVSRADHPSVSWPDRQLAHRTVRCTPDSPVNFTRSRSRQSRERPLGTRRPGAQITVPCTIVRCTVHHRTVWCPACVA

SEQ ID NO: 324427 - protein, 56 aa, Zea mays
  Clone ID: MRT4577_58951C.1.pep
GLFGTRGLKVSNISNPFPPSNLANQCFVVFLRSRSLTPTSNGSCISLLLAVTYEEC

SEQ ID NO: 324428 - protein, 123 aa, Zea mays
  Clone ID: MRT4577_58952C.1.pep
WFVCTKKCYVGPGFRGVRMVNKFFRIFTPFPGAKVPGGVRIGTNIVFLKWLKGNTQRGKIVPWGKCLASAPPQDIFFEFRFWRGKKSRPSNLYRPPSFRKFLKLLSVPPNTTFGWSAFFLKKY

SEQ ID NO: 324429 - protein, 144 aa, Zea mays
  Clone ID: MRT4577_58953C.1.pep
YRRPLLEFFFFFFFFFFFFFFFFFFFFFPTHFGGFFFFFCPKGLGKINRRPGGFNRHKFNPLKKKDTRAISETVNAFTENPFKTPGEGEPPKNKHWANPCFFLISKPNFLFDTKIFSHMGKPVNKKPCPQTRGPQKTTRLKELY

SEQ ID NO: 324430 - protein, 78 aa, Zea mays
  unsure (1)..(78): unsure at all Xaa locations
  Clone ID: MRT4577_58954C.1.pep
ERGGEAATTGREEEXXXXAXXIFXXSSYISSIXXNSXSHNXFTHFITTFYNPTHNSSXLXPPPFLQXSPPHQHXTFHL

SEQ ID NO: 324431 - protein, 185 aa, Zea mays
  unsure (1)..(185): unsure at all Xaa locations
  Clone ID: MRT4577_58955C.1.pep
LSRSIGFPKLETDISRYRRRHLVGSLFYSNFKXNFSSTFYCFEQRRCFLTKVACAQSMLLSKALRMQQDLEDKKHEVIIEGLESKLKDQAAAPEKKDFELQTTEGLLAEAKAKIAKLNTELLSKSESFEQEKXKLNAKFKTEVEKSSNLQKSLTELQNKCLELSSRCVQRLKQIFNSVGASCEKF

SEQ ID NO: 324432 - protein, 64 aa, Zea mays
  Clone ID: MRT4577_58956C.1.pep
GLPAQLKNTKNFPIKHRIFLKTHPLKKNGVNTGQAWWLARFKYKLQLQPIKRAAQIPLKHLHGV

SEQ ID NO: 324433 - protein, 48 aa, Zea mays
  Clone ID: MRT4577_58957C.1.pep
RQNSLVVNRNFSNCGAPPLVIHPSGYNLTISGTKKTPESPSLGGIAFI

SEQ ID NO: 324434 - protein, 34 aa, Zea mays
  Clone ID: MRT4577_58958C.1.pep
AHALPYWPSRLPVKSALPFIQELGTGGVSPINRK

SEQ ID NO: 324435 - protein, 92 aa, Zea mays
  Clone ID: MRT4577_58959C.1.pep
KTAKMHANCKKGNDQVLIVGTTKSAGRPMMSNGEAEKFGTRSSHCNPHHRLTYLPLSSSSHCSPHHPSLLVLPAVAGDRDHGTHVVVLALLA

SEQ ID NO: 324436 - protein, 97 aa, Zea mays
  Clone ID: MRT4577_5895C.1.pep
VGKRWLWSSCQCDNFSLLDSAFSLLLSWTPVKLYNFRGKHLPQTLHANNEFSLFVIGHGTCFFDIRLLYASIFSWLIRKSFSSCTSSSWTQTSAMSR

SEQ ID NO: 324437 - protein, 76 aa, Zea mays
  Clone ID: MRT4577_58960C.1.pep
KGSGLLAERFDRENPILYVIIHITGRLYIRSETNGSTLYIVEDTVNFTQDSTSHGPQAVHLPSTSILDCMLNQISQ

SEQ ID NO: 324438 - protein, 92 aa, Zea mays
  Clone ID: MRT4577_58961C.1.pep
GSPFPRGSLLSVLGQVPGWHGLSPSLCQVSHWLCVGRYLVSGSCLIAFPIPVGAVLPHGSFELALACFPPCGECAGFSSHIPLVGVAGPRNH

SEQ ID NO: 324439 - protein, 122 aa, Zea mays
  Clone ID: MRT4577_58962C.1.pep
ARNSARARRDSLKKIEIWKLPPVLLVHLKRFSYDGRWKQKLQTSVDFPLENLDLSQYVIGPKSSLKKYNLFSVSNHYGGLDGGHYTAYCKNAARQRWFKFDDHEVSDISVSSVRSSAAYILF

SEQ ID NO: 324440 - protein, 123 aa, Zea mays
  Clone ID: MRT4577_58963C.1.pep
KTRVPNYLASMNSTKSIDMKGRACRSASKEDTFWVLTQNTCSWRQETDKHDCKKFQRFSGLFSNSCSTFWVLTQNTCSWYQETDKHDCKKFQRFSGLFSNSCSTVTKDGAEQLEKTRRNIGNF

SEQ ID NO: 324441 - protein, 180 aa, Zea mays
  unsure (1)..(180): unsure at all Xaa locations
  Clone ID: MRT4577_58964C.1.pep
YFLLTGKIAKENRFGRSLFERLSGLDFPKHMLNIQYRMHLWISKFPNQKFYEGKIIDGLNVKDYNNIYLDVHIYGPYSFIHVEDGFEENNXGLKNIVEAAVVANIVGRLAEACAEQKKKTNVGIISPYAAQVISLQERVQIYKKHDFLSIEVCTVDSCQSAEKDIXILFTVRQNNGGNIG

SEQ ID NO: 324442 - protein, 62 aa, Zea mays
  Clone ID: MRT4577_58965C.1.pep
RSTSQAFFLFNNLNSDGGYILEVIRPTECCQVILKSARLGIHLQVTTALILLHKYGNKNYNN

SEQ ID NO: 324443 - protein, 44 aa, Zea mays
  Clone ID: MRT4577_58966C.1.pep
HGCLNRKLHLMISYLLLKLKRNEHWLSSDSFKTQAHNIGASRKH

SEQ ID NO: 324444 - protein, 111 aa, Zea mays
  unsure (1)..(111): unsure at all Xaa locations
  Clone ID: MRT4577_58967C.1.pep
QRHDEPHRXQRGGAEDREHGRRXQPHXRRQRQQQXHXDQHRRDRXRRRRGDAKPRGPPTEGDEASXGXGHGDHXPAGDXXPPPAQGXGPQDRRGREADKEAXGAAXQHXAG

SEQ ID NO: 324445 - protein, 90 aa, Zea mays
  Clone ID: MRT4577_58968C.1.pep
GPRYMMEPTCTQVTQVHVLLLLLLVMKGLVISTVVLHLTTVDAPTVSRARLTVPPGGELHRALLWWNRGASAVLPPPIDNMTSYKKDARP

SEQ ID NO: 324446 - protein, 110 aa, Zea mays
  Clone ID: MRT4577_58969C.1.pep
RRRRRPSVALSCSARGLAGARARWCDVSPRRVVSSFCRACTFSSQHYLKLSESESPCQTCAVHRKRPPPPHPKFAKQCAMPASPTVIPYAAESHHLEILRSSLCGDLFCW

SEQ ID NO: 324447 - protein, 181 aa, Zea mays
  Clone ID: MRT4577_5896C.1.pep
FLFIDREQIWFVIPSTREGHGFPIDVLESSTQAFVVPMESKRVSDQDALIDLESGNGTTVSNYTNGGDASFTVGQARTAPNGAWNGCVCANGCPRDDRNQHMDCSPPASDAVARSGDDRKSEGEEKLMDSSGGEKTKKKRSKKPPASDAVARSGDDRKSEGEEKLRTAQEGRRRRRSGPRK

SEQ ID NO: 324448 - protein, 174 aa, Zea mays
  unsure (1)..(174): unsure at all Xaa locations
  Clone ID: MRT4577_58970C.1.pep
GRDDFCTVLPLLRSPPQXADPVPAPWSRPSLPRQTPHDPSTQRPTLCAPSPLGMRHRPSRHAPPCPTAYEISEGRTGRSRLLGAGFAAVPPGEPSRYPISAMAICPNQXDSPSDHPRXKPPAPQPPSKAARAPPPSPPTPRPPCCCSCPVPLPHAQSDPPHGAGWTKGIRWWPS

SEQ ID NO: 324449 - protein, 149 aa, Zea mays
  Clone ID: MRT4577_58971C.1.pep
MMKRHRPVSSSESSDECPSTSFTSSSMYRKKSKNPKEQKKSAEVFRKDLISAMKIPDSHHVNPDSYYLFTDTWKEEWEKGVQVPANPDSVPTPSLRIISEKVKEMLFVRPRKYIRCSSPESAEPGYINTLEQAASTCRYDLDDMDIFWL

SEQ ID NO: 324450 - protein, 85 aa, Zea mays
  Clone ID: MRT4577_58972C.1.pep
AAADVKLSVAIEEKASVLYCYRRWLGGILLVGVCRLLNSLLPIPVGASLLEVLCLLHRLVIVCVPCISPQLAVPRAGGLYLHFSG

SEQ ID NO: 324451 - protein, 129 aa, Zea mays
  Clone ID: MRT4577_58973C.1.pep
MDADVPLNDEARQPLSRKVSIASSKVNPYLDRLTLRYEREGEPSLLSAVDLFVSTVDPLKEPPLVTVNTVLSILAVDYPVDKVCCYVSDDGASMLTFEALSETAEFARKWVPILKKVCIEPRAPEFYFS

SEQ ID NO: 324452 - protein, 871 aa, Zea mays
  unsure (1)..(871): unsure at all Xaa locations
  Clone ID: MRT4577_58974C.1.pep
ELSSSLHKRIHPYPVSEPGSXVGREERVSWKERMDDWKSKQGILGGGGGGDPEDMDADVPLNDEARQPLSRKVSIASSKVNPYRMVIVVRLVVLAFFLRYRILHPVPDAIGLWLVSIICEIWFAVSWILDQFPKWFPIDRETYLDRLTLRYEREGEPSLLSAVDLFVSTVDPLKEPPLVTANTVLSILAVDYPVDKVSCYVSDDGASMLTFEALSETAEFARKWVPFCKKFCIEPRAPEFYFSLKVDYLKDKVQPTFVQERRAMKREYEEFKVRINALVAKAMKVPAEGWIMKDGTPWPGNNTRDHPGMIQVFLGHSGGHDTEGNELPRLVYVSREKRPGFQHHKKAGAMNALIRVSAVLTNAPFMLNLDCDHYINNSKAIREAMCFLMDPQVGRKVCYVQFPQRFDGIDVHDRYANRNTVFFDINMKGLDGIQGPVYVGTGCVFRRQALYGYNPPKGPKRPKMVTCDCCPCFGRKKRKDAKDGLPEGTADIGVDSDKEMLMSQMNFEKRFGQSAAFVTSTLMEEGGVPPSSSPAALLKEAIHVISCGYEDKTDWGLELGWIYGSITEDILTGFKMHCRGWRSVYCMPKRAAFKGSAPINLSDRLNQVLRWALGSVEIFFSRHSPLLYGYKNGNLKWLERFAYINTTIYPFTSLPLLAYCTLPAVCLLTGKFIMPSISTFASLFFIALFMSIFATGILEMRWSGVSIEEWWRNEQFWVIGGVSAHLFAVVQGLLKVLAGIDTNFTVTSKATGDEDDEFAELYAFKWTTLLIPPTTLLIINIIGVVAGISDAINNGYQSWGPLFGKLFFAFWVIVHLYPFLKGLMGRQNRTPTIVVIWSVLLASIFSLLWVRIDPFIVRTKGPDVRQCGINC

SEQ ID NO: 324453 - protein, 90 aa, Zea mays
  Clone ID: MRT4577_58975C.1.pep
SIILLISQYTIALFQRLHIILNRLASNIQEVNSPLHNQEDAPLVSPSQRWCDPNAVPGSTPPAARQSQILQYDVDKRSICQLDCRFRCRA

SEQ ID NO: 324454 - protein, 67 aa, Zea mays
  Clone ID: MRT4577_58976C.1.pep
GFGPPKYLKGFFPPKNGVFPLYWEKNSPKTHIVGTPPFFFLPRGPKNPPPRRVYSPFKKTPPILSGG

SEQ ID NO: 324455 - protein, 66 aa, Zea mays
  Clone ID: MRT4577_58977C.1.pep
MAARISAFLKNAWAKEPVLVVSFTVWGLAIIMPMISPYTQYASMIIKATPYNYPVPVRDNGNMPDV

SEQ ID NO: 324456 - protein, 64 aa, Zea mays
  Clone ID: MRT4577_58978C.1.pep
CAQSLYMGEVITCTLSLSIWPARLRLASTMHTIETLLDVDRHCFVWLLFCVRTYSTTAQPVTVC

SEQ ID NO: 324457 - protein, 241 aa, Zea mays
  Clone ID: MRT4577_58979C.1.pep
PTRPQNSRSWMRMHFTTNEWQTNFKKFIQTTFGGTTRGETAPCPCSRCRCMSYKTQSQVQSHLVIRGFDESFIEEGNQANDSDEGNAATVVNDDETGDSGSVTELVSTLISGAIHEDIIGNINEEPNAKAKAFFNLLTEAKKELYPGCKEVTKVSFIVRLFQIKCMFGLSKSALAVVLQLFRLVLPEGHCVTDTLDTSCCHESLVWHQCFVAMKHLVVTKPFATDSNVALTLITMKYVVAI

SEQ ID NO: 324458 - protein, 104 aa, Zea mays
  Clone ID: MRT4577_5897C.1.pep
RRLLLSPEHVVTSSCLESLEHAASSSCLKSLEHADASSRLNTPTPHQLLQHPTLNWEAHNPLINLSRSTTKWYRWSSSTSARASCRCWCSYSHRHRPGSRRVGD

SEQ ID NO: 324459 - protein, 63 aa, Zea mays
  Clone ID: MRT4577_58980C.1.pep
VHGRGKKKSRPSIHSGRIRGFQLQRQARQRRTVKWVNDTKGFRFIFPEDGTRTSLRAPIDDQV

SEQ ID NO: 324460 - protein, 37 aa, Zea mays
  Clone ID: MRT4577_58981C.1.pep
ADHIPDQPVRRHRCDSGLLMMMRHREMFAMHHTLSIS

SEQ ID NO: 324461 - protein, 67 aa, Zea mays
  Clone ID: MRT4577_58982C.1.pep
THLNSHYSGHLFIQKKTFLIFKKKFYPHTLIQVLYLSFSKNSYVRPTHFLLPFKYSYTQIKPFPSLI

SEQ ID NO: 324462 - protein, 282 aa, Zea mays
  Clone ID: MRT4577_58983C.1.pep
HASAATFAFFSFNGTAGVWRTGAIRDAGGWKDRTTVEDMDLAVRATLKGWKFVYVGDVRVKSELPSTYKAYCRQQFRWSSGGANLFRKMAKDVLFAKDISLVKKFYMLYSFFFVRRVVAPTAACILYNVIIPISVTIPELYLPVWGVAYIPMVLTVVTAIRHPKNLHILPFWILFESVMTLHRMRAAMTGLLELEGFNQWIVTKKVGNDLEDTEVPLLQKTRKRLRDRVNLPEIGFSVFLFLCASYNLVFHGKTSYYLYMYLQGLAFLLLGFNFTGNCSCYQ

SEQ ID NO: 324463 - protein, 92 aa, Zea mays
  Clone ID: MRT4577_58984C.1.pep
MAALAPSKILGTKLNFAGSSRYASAAPTAGAQKIVALLSKKPAQKRKPSAVSSSSPDSSDELAKWYGPDRRIYLPDGLLDRAEVPECLTGQV

SEQ ID NO: 324464 - protein, 104 aa, Zea mays
  unsure (1)..(104): unsure at all Xaa locations
  Clone ID: MRT4577_58985C.1.pep
CVLMLLALSACVANATIFPQCSQAPIAVLLSPYPTSMIASVCENPGLLPYRLQKAIAASNIXLSPLFQQSSALSLGQSCAQTMMPQLLQXLVLPVINQIALANL

SEQ ID NO: 324465 - protein, 57 aa, Zea mays
  Clone ID: MRT4577_58986C.1.pep
HASAYLQLVRLFRSSLNIESHSYVTWISFADSQKSTCFYQKANMITQNLLCNEPLID

SEQ ID NO: 324466 - protein, 67 aa, Zea mays
  Clone ID: MRT4577_58987C.1.pep
PHAEVTGFGEAFAKSPDGVVTAAQLHGRAGTAKAEAAPSTSAALPPPVVAIHMNVLGMVGRLALPAT

SEQ ID NO: 324467 - protein, 39 aa, Zea mays
  Clone ID: MRT4577_58988C.1.pep
LLYTSVPTRSYNMALRYELEAANQESVLITTHISVHVDP

SEQ ID NO: 324468 - protein, 55 aa, Zea mays
  Clone ID: MRT4577_58989C.1.pep
TVIINSWRYYKELEERPEQGFLTKRRGEEETRQISLPPKHYYELGEQKKKKKAHS

SEQ ID NO: 324469 - protein, 235 aa, Zea mays
  unsure (1)..(235): unsure at all Xaa locations
  Clone ID: MRT4577_5898C.1.pep
MGSWEENVRQFLLEEEEDDDELFFVILPAIIPYLSEEKRPIHTSSLTGAKKVKEILEGHESWCKSEVRMEKEIFKATSNFLRRENLLRDTRGVSVEKQLGMFMYMISHNASXQMLQKAFQHSGETIHRKISEVFEIVPILTQRFVKLPSSVQTHARIATDSRFMPFFQXLQLQTHNYPMLIATCPQHIFNICPLMQNCLGAIGGTHVFITIAEDRAPPNRNRKGXLSHNVMVGCD

SEQ ID NO: 324470 - protein, 82 aa, Zea mays
  Clone ID: MRT4577_58990C.1.pep
AFCYRRVGGLPTLLYWGGGVGSKLTGVSTLTMTEHTWISQSSMEKIHHFMLLPEETIKHHLEDPNPDQAQKQPHWKGRFLWG

SEQ ID NO: 324471 - protein, 161 aa, Zea mays
  Clone ID: MRT4577_58991C.1.pep
MSDTDEHHFESKADSGASKTYPQQAGAIRKGGHIVIKARPCKVVEVSTSKTGKHGHAKCHFVAIDIFNGKKLEDIVPSSHNCDVPHVDRQDYQLIDITDDGYVSLLTESGNTKDDLKLPTDDVLLGQIKTGFADGKDLILSVMSAMGEEQICAVKEIGGGK

SEQ ID NO: 324472 - protein, 95 aa, Zea mays
  unsure (1)..(95): unsure at all Xaa locations
  Clone ID: MRT4577_58992C.1.pep
PSRPPPPPPPPPPPGPGVVSPPGEFRXAPPPAHGQTPKTTPRTHPQPAPTPHGPPQPPGGPPDKKKKKNRGTPPPAGDGSTPGNGGPHRAPGRGR

SEQ ID NO: 324473 - protein, 683 aa, Zea mays
  Clone ID: MRT4577_58993C.1.pep
ATLSSKSRGRVRAASASAGTRRTRSARAGPGFQETARNRDLGGASSRRSRSIHLTSSLSTKSLSLRSGSLKNLSYQYSTGADGRIEMISNADNDRKYPAPRGYFFKLLKLNAPEWPYAVLGAIGSVLSGFIGPTFAIVMGEMLDVFYYRDPNEIEKKTKLYVFIYIGTGIYAVVAYLVQHYFFSIMGENLTTRVRRMMLSAILRNEVGWFDEEENNSSLVAAHLAVDAADVKSAIAERISVILQNMTSLMTSFVVGFIIEWRVAILILATFPLLVLANFAQQLSMKGFAGDTAKAHAKSSMVAGEGVSNIRTVAAFNAQSKILSLFSHELRVPEQQILRRSQTSGLLFGLSQLCLYSSEALILWYGSHLVRSHGSTFSKVIKVFVVLVVTANSVAETVSLAPEIIRGGESIRSIFGILNRATRIEPDDPESERVTTIRGDIELRHVDFSYPARPDIQIFKDFNLKIQAGRSQALVGASGSGKSTIIALIERFYDPCGGKVAIDGKDIRTLNLKSLRRKIGLVQQEPVLFASSILENIAYGKEGASEEEVVEAAKTANVHGFVSQLPDGYRTAVGERGMQLSGGQKQRIAIARAVLKDPAILLLDEATSALDAESECVLQEALERLMKGRTTVLVAHRLSTIRGVDRIAVVQDGRVVEHGSHSDLLARPEGAYSRLLQLQHHRV

SEQ ID NO: 324474 - protein, 77 aa, Zea mays
  Clone ID: MRT4577_58994C.1.pep
GGFQFSASGHFSPFFFLLPPFFFLNKGKGFLILLPKNPRPPFFFHFYRKKIGFHGTDILIFAGIFTRTIPKLFFDHW

SEQ ID NO: 324475 - protein, 81 aa, Zea mays
  Clone ID: MRT4577_58995C.1.pep
LDMHVLRQEHLFGQDPLLQSWPLNPVSSVTGSINAVAVRIACLGTLVSPCYWYRSTLLMIPWNTCFHGASSPLNSTSCLRT

SEQ ID NO: 324476 - protein, 279 aa, Zea mays
  unsure (1)..(279): unsure at all Xaa locations
  Clone ID: MRT4577_58996C.1.pep
RPSSRSSPVSVLLRLCQGPGRTSTTALYPPHRCKTIYLVRHAQGIHNVAGEKDFGAYMSHELFDAQLTPLGWNQVDGLREHVKKSGLAEKIELVITSPLLRTMQTAVGVFGGEKYADGVNAPPLMVENAGHSGRPAVSSLNRPPFIAVETCREHLGVHPCDKRRSITEYRPLFPAIDFSLIEIDGDVLWEPDVRETNEAVALRGYEVXDWLWTREEKEIAIVSHSGFLXFHTLSMYSKECHPTIRDEVSKHFXNCELXRRLVLVDRSMLGVTFVKIQLC

SEQ ID NO: 324477 - protein, 68 aa, Zea mays
  Clone ID: MRT4577_58997C.1.pep
HVLSSFYVVVSRSVHTPHPGLLCITPPPPWSGSVSPLCCVDLVIFAHMCLDPAHYVSSRLVFQIKIKL

SEQ ID NO: 324478 - protein, 49 aa, Zea mays
  Clone ID: MRT4577_58998C.1.pep
CGSSRGCPPFRLRPFHLVHGGAGGGKSFASGHGVCGGRLAPWSEAILIQ

SEQ ID NO: 324479 - protein, 348 aa, Zea mays
  unsure (1)..(348): unsure at all Xaa locations
  Clone ID: MRT4577_58999C.1.pep
MELGATTALYPLHRCKTIYLVRHAQGIHNVAGEKDFGAYMSHELFDAQLTPLGWNQVRFCSFFFFPQLNQPSRTGIVTAHRVLVSTDNXFQGWSCASTNKFYFGLSXKVDGLREHVKKSGLAEKIELVISSPLLRTMQTAVSVFGGEKYTDGVNAPPLMVENARHSGRPAVSSLNCPPFIAVETCREHLXCLVWLLLNQGVHPCDKRRSITEYRPLFPAIDFSLIENDEDVLWEPDVREPNEAVALRGXMKFMDWLWTREEKEIAIVRSXSGFLFHTLSMYSKECHPPIRDEVSKHFANCELRSMVLVDRSMLGSYSSRFNYAGKNPTGLDVPSDIADKKQVDEAQKN

SEQ ID NO: 324480 - protein, 58 aa, Zea mays
  Clone ID: MRT4577_5899C.1.pep
MLKRVLGEHERCNTLQLIAAPVVPYQFSLTYFLSSCLDLSHTVWFQWECLALNDTFPL

SEQ ID NO: 324481 - protein, 123 aa, Zea mays
  Clone ID: MRT4577_589C.1.pep
KSALFAGRLSLRFGPFLNGFGTAGFPIGSRPVSAVRLLFVSSLLRPPRLCPLCFGVVFCVELLAADNFSPVPPLPLVPPWLAPGSAPLVGAVPLLGVALGVVPGVVPPRVSHFHGWQCGPFPV

SEQ ID NO: 324482 - protein, 101 aa, Zea mays
  unsure (1)..(101): unsure at all Xaa locations
  Clone ID: MRT4577_58C.1.pep
AGVHVGNSCFELYSLKHRIQADSXMLGDKNIRGGHDAFGGFYSDPVAEQHVPRAVFQDLEPNVIGDVRTCTXLQLFHPQQLISGDEDAANYFGRGHYSTGK

SEQ ID NO: 324483 - protein, 108 aa, Zea mays
  Clone ID: MRT4577_59000C.1.pep
MGPAACVAMAGAARRWPAVEGDLGEHVHWRWGTKVRPVDAEREAAHGGVTSSGHAGQGRRLERSRPGRKGWRGSVPRRMGAARRRRLGGGGCRLGSPRPRPGRSRGRG

SEQ ID NO: 324484 - protein, 98 aa, Zea mays
  unsure (1)..(98): unsure at all Xaa locations
  Clone ID: MRT4577_59001C.1.pep
MSYQVSSRSSNKSSVDVFDFMQEVXKQTEERFYKALARVKSMVQYQEAKDQYHRIFVVVSKRQESLAMQVKILEESXEMVMSEFKVIXDTNAPIPGHF

SEQ ID NO: 324485 - protein, 190 aa, Zea mays
  unsure (1)..(190): unsure at all Xaa locations
  Clone ID: MRT4577_59002C.1.pep
PTHTTLRTHIRGARRDGNGDYGGDGAHVRELFTTVLAKKDTPMLTVALDTATPTTTVYTVRRGPIGTTIPAIXVNVXPVQNDNLRSTXLWXCPSENMIARLXSEYFHNAQCLIFSGRPMDRPPMLAARSDDELPTPRLRLXSIVTTKPMGCLVASXGADLPNAMAAAEITDXLALHSLNRPLCDIQSTCA

SEQ ID NO: 324486 - protein, 132 aa, Zea mays
  Clone ID: MRT4577_59003C.1.pep
LCKMGEINTAISLVKDCLGNIENGPAEFKYTLTILEACRSKSPEKVINVVYEMIEVGCSMEEIVYSAIIYGFCKYASSTEARQVFTIMRDQNILSEANFIVYEDMLNEHLKEATADLVISGWKFFDLESNLK

SEQ ID NO: 324487 - protein, 60 aa, Zea mays
  Clone ID: MRT4577_59004C.1.pep
IQFKLSMVQLVAFGSKSHPSVAHPRLVSSLLGIEMDQYYSCSILNSIIFHPLHWLIKVHK

SEQ ID NO: 324488 - protein, 55 aa, Zea mays
  Clone ID: MRT4577_59005C.1.pep
FQNYSILRSGFADLFPHNVLYSWWGYVVITTPNGVLDHEEAIRQNVGGQVLGYFH

SEQ ID NO: 324489 - protein, 129 aa, Zea mays
  Clone ID: MRT4577_59006C.1.pep
MGRRILNDALRTMVNADRRGNASALLRPISGVMVSFLNIMKYRGYIKNFEVIDENRVGKIRVELDGRLKDCKALTYRQDLKAKEIERYRVRMLPTRQWGYVVITTPNGVLDHEEAIRQNVGGQVLGYFH

SEQ ID NO: 324490 - protein, 92 aa, Zea mays
  Clone ID: MRT4577_59007C.1.pep
ESREPSLQSSAAAIFRPYSPFFVESTPNLARVYHHTPCVMRVHCSQATSIHHVIFVQLAAASDSMPVPQPFHSLSIYETYILPMSCCVDISL

SEQ ID NO: 324491 - protein, 96 aa, Zea mays
  Clone ID: MRT4577_59008C.1.pep
PQSQPPSETVMHTSSLKNTWIVEGHAGKDGGAFLIFIYHPPLERLEVLLLLLGFRHGEEIFVRLSDAGACLLLRDDGFADVLMALQRQPAVDAWSC

SEQ ID NO: 324492 - protein, 188 aa, Zea mays
  Clone ID: MRT4577_59009C.1.pep
MVSVSFKIHGAVAALLLGSLILCSGASMDQPAAYKHVAPAPTPAPAPIQPVIIVQGLIYCKSCNLRGYNAGMDASPLANATAKLVCYGSKGGYRVLNMTSTATDESGYFLVMVYDLAMFSRRSCRVYLRTSPTPLCDAPFLPADASLGIVLKREEVRPSLPVGVRGVYSARTALMYAAAQGCQVPGLY

SEQ ID NO: 324493 - protein, 136 aa, Zea mays
  Clone ID: MRT4577_5900C.1.pep
PRRSSIFLFRVSFICCFHSALCAQCRPKGTALARSNCNAAVGRPSLLVAPVIAFGSARHSNRGLSGPHLLHANNECGLFVIGHGTCFFDIRLLYASIFSWLIRKSFSSCTSSSWTQTSAMSVSMRVGTPTPAASSC

SEQ ID NO: 324494 - protein, 57 aa, Zea mays
  Clone ID: MRT4577_59010C.1.pep
YRGLSSSFFFFFFFFFFFFFFFFFFFFFFFFFFFWNKKKKIGWGKTPGQFIGEKGAP

SEQ ID NO: 324495 - protein, 107 aa, Zea mays
  Clone ID: MRT4577_59011C.1.pep
TGRGSKGEGSPLDHRGPTACHPRIKTLETSSCIKSGSGVPTTFGGSDRGVQRDQQGERRHKPPLVRGPQLCRGVTRKRRPPPGAKTRAAEGSRHHDTPRPSDAGRTT

SEQ ID NO: 324496 - protein, 88 aa, Zea mays
  Clone ID: MRT4577_59012C.1.pep
ELEQPVVVLHRERDGIVRGEGVVVEEERAGQVGVAAAHVELVEDEPLGRLTGAAADHGLAFDNAGAGVLQRWARSGGGLPASASKGER

SEQ ID NO: 324497 - protein, 75 aa, Zea mays
  Clone ID: MRT4577_59013C.1.pep
GGKQPPMFTDQFETPSSAGHPIARCGSVYYPRATSLELYLTFGRKLGLPRPWRTFKTWFWENLTGSRTLQFAPHN

SEQ ID NO: 324498 - protein, 75 aa, Zea mays
  Clone ID: MRT4577_59014C.1.pep
LDFYGNQSHRIRCTQVHNPTRQVLANQHPHHMLVFCWFWHALRVGPSILEAMSENYFIGPSRIYMCIIYLIYIYI

SEQ ID NO: 324499 - protein, 95 aa, Zea mays
  unsure (1)..(95): unsure at all Xaa locations
  Clone ID: MRT4577_59015C.1.pep
RKNAKQSSLPPLSSSSSWCGASRTPPIPVLPLAGARAFLGFPLPQPPTPLTSRQRRWGLVGVFFFFRGRGRGREGRGXRRXXAAPXGRXRAPRXP

SEQ ID NO: 324500 - protein, 64 aa, Zea mays
  Clone ID: MRT4577_59016C.1.pep
PILIASIFLIDVEYFISCGIKTRISTDQQAVDTSFISTGFIIAVRSDSTAVSVQPAYSALLPLL

SEQ ID NO: 324501 - protein, 83 aa, Zea mays
  Clone ID: MRT4577_59017C.1.pep
SPVKVSRPKKYSLHVNVPRWKPVKTDISLLKHDIQLIASGHKRVYIHMRAYTTMLYIRTYIEVYYPNPLVRPRISPRMRGLAC

SEQ ID NO: 324502 - protein, 64 aa, Zea mays
  Clone ID: MRT4577_59018C.1.pep
LRTQQQVLSYCIIREDWIAITKNPGYWLRNVYQSGLDKGKLVRSCRKCQVFFTGVVEDVWYSKR

SEQ ID NO: 324503 - protein, 86 aa, Zea mays
  unsure (1)..(86): unsure at all Xaa locations
  Clone ID: MRT4577_59019C.1.pep
DLSKVSDQLXSPYASGKDVQAIKPVVVDNPLSSKGLRHLAFSHKFKRXFFPPGAFFTSGMVQSIDPAWARQGIFPPDLVSRIRAKT

SEQ ID NO: 324504 - protein, 113 aa, Zea mays
  Clone ID: MRT4577_5901C.1.pep
PSSGLHPLFQPHPFFFGGPLLSSGLLPCGPCRSSPWAMRSCSVYASRCLPLYTVVLVPFGSLGPGMSLCPLLLPHFPPCASSHHRSVRSSPGRVMERISPFKIPPHAFVLCRS

SEQ ID NO: 324505 - protein, 108 aa, Zea mays
  Clone ID: MRT4577_59020C.1.pep
KSGLYNMRRHFHWKDANGKMLKGGDYFTYSFENGVHLLESGQSLLSVYAWSLGVREVIANQLRNPKLWFSLKNAYDATRRLEYSRDGPCAEILFVPTERGAFDRYTAC

SEQ ID NO: 324506 - protein, 69 aa, Zea mays
  Clone ID: MRT4577_59021C.1.pep
PNLVPFHNIPTFSTCHYNLISFFCSPLTTFPQPDFQMVLSKNPCIHHFNCCGNTPLFRHFFQYHKAPPF

SEQ ID NO: 324507 - protein, 100 aa, Zea mays
  Clone ID: MRT4577_59022C.1.pep
TPALKTRHSPCVENASGICILKPHKLSELKSSKTAIIEKNCCFQQWSLWAAEACCQPAGTTLGGTASEMTGGGYRTLSPTSRVGTTPRGPPQTGTVGSTG

SEQ ID NO: 324508 - protein, 60 aa, Zea mays
  Clone ID: MRT4577_59023C.1.pep
SGCFSTSSMDSGLPASRATAALHLITFPAVVIASLSLSPSRISGEKRYTETAKNEVALRS

SEQ ID NO: 324509 - protein, 71 aa, Zea mays
  Clone ID: MRT4577_59024C.1.pep
CSTFHRRARDRPQLVPGYTYYVELTALLSYSAALDTLTLNGSQRQTSVADCWRPECDVATLKTPVHIVKAA

SEQ ID NO: 324510 - protein, 118 aa, Zea mays
  unsure (1)..(118): unsure at all Xaa locations
  Clone ID: MRT4577_59025C.1.pep
LLAYIMENGIADVTTIETPVPMDDALKDYKRLDHIHRHMDSINESIDVRXYVHGYFACNLLYNFEWTDRYTVRYGIGYIDRNNYRTHYMKESDQWIKQINASKKTITKILTPAYKSWA

SEQ ID NO: 324511 - protein, 47 aa, Zea mays
  Clone ID: MRT4577_59026C.1.pep
PLYINILYVVATHHDSLTMINVNYFKELMRTSLLLHSLLDLRHPPSV

SEQ ID NO: 324512 - protein, 63 aa, Zea mays
  unsure (1)..(63): unsure at all Xaa locations
  Clone ID: MRT4577_59027C.1.pep
HVQDTFDIVTSQNYTGRKCPXRSKISRSSDTKSATRQLDDFLTTLHKRLLDKKKRVTHEDLQA

SEQ ID NO: 324513 - protein, 304 aa, Zea mays
  unsure (1)..(304): unsure at all Xaa locations
  Clone ID: MRT4577_59028C.1.pep
MSGGTPAASSSLRAALSYCVRQVRAYDYHHYLCLLHLAPAVRKAAFTFRAFNIQTARAMDVVSDPRTGLMRLLWWKEAVDKVFGNKLVEHLVAHALSSVIADHKVSKHWLKRSVEARINDTNREEGTIPGTSAELERYAEDTQSTILYMTLQAGGIQSTVADHAASHIGKASGLLLLLKALPHHVNKQGTVHYIPASVAEECGLLITREGGRSEVRAGVRLPDVVFKVTSVAEAHLHKARELASSVPKEAIPVLLPALPAXVLLDTLRRCEFNVFDPRLSRGVHEVSPLWXQLKLNWNAWRSRY

SEQ ID NO: 324514 - protein, 117 aa, Zea mays
  unsure (1)..(117): unsure at all Xaa locations
  Clone ID: MRT4577_59029C.1.pep
MPKIKTSRVEYPEGWVLIEPTIRELDAKMREAENDTHDGKRKCEALWPIFRISHQRSRYIYDLFYKRKEISKELYEFCLXRGYADRNLIAKWKKPGYERLCCLRCIQTRDHNFATTC

SEQ ID NO: 324515 - protein, 50 aa, Zea mays
  Clone ID: MRT4577_5902C.1.pep
MDGEQAARWAAAQDGVPAGADLVGAGLRQMSFLWLGYRDSWVFYEGTMTY

SEQ ID NO: 324516 - protein, 92 aa, Zea mays
  Clone ID: MRT4577_59030C.1.pep
GSEEEDMDALLNNSLPPPHPENEEDPEEDLSETETPKLKKKKKPKKPRDPKIPKSKRQKKERMLLCRQLGDSSGEGPEFVEEEEEVALRSDS

SEQ ID NO: 324517 - protein, 207 aa, Zea mays
  unsure (1)..(207): unsure at all Xaa locations
  Clone ID: MRT4577_59031C.1.pep
MSGGTPAASSSLRAALSYCVRQVRAYDYHHYLCLLHLAPAMRKAAFTFRAFNIETARAMDVVSDPRTCLMRLLWWKEAVDKVFGNKLVEHPVAQALSSVIADHKVSKHWLKRSVEARINDANREEGTIPGTSAELERYAEDTQSTILYMTLQAGGIQSTVADHAASHIGKASGLLLLLKALPHHVNKQGTVHYIPXASVAEECXLLI

SEQ ID NO: 324518 - protein, 305 aa, Zea mays
  unsure (1)..(305): unsure at all Xaa locations
  Clone ID: MRT4577_59032C.1.pep
MSGGTPAASSSLRAALSYCVRQVRAYDYHHYLCLLHLAPAVRKAAFTFRAFNIQTARAMDVVSDPRTGLMRLLWWKEAVDKVFGNKLVEHLVAHALSSVIADHKVSKHWLKRSVEARINDTNREEGTIPGTSAELERYAXEDTQSTILYMTLQAGGIQSTVADHAASHIGKASGLLLLLKALPHHVNKQGTVHYIPASVAEECGLLITREGGRSEVRAGVRLPDVVFKVTSVAEAHLHKARELASSVPKEAIPVLLPALPAXVLLDTLRRCEFNVFDPRLSRGVHEVSPLWXQLKLNWNAWRSRY

SEQ ID NO: 324519 - protein, 62 aa, Zea mays
  Clone ID: MRT4577_59033C.1.pep
SKLLKCWICKRCKKKSHWEQMHLFLWQFSNEPFHSTWVICYSVVQISCWPHPNNLAFNVMLK

SEQ ID NO: 324520 - protein, 304 aa, Zea mays
  Clone ID: MRT4577_59034C.1.pep
MSGGTPAASSSLRTALSYCVRQVRAYDYHHYLCLLHLAPAVRKAAFTFRAFNIETARAMDVVSDPRTGLMRLLWWKEAVDKVFGNKLVEHPVAQALSSVIADHKVSKHWLKRSVEARINDANREEGTIPGTSAELERYAEDTQSTILYMTLQAGGIQSTVADHAASHIGKASGLLLLLKALPHHVNKQGTVHYIPASVAEECGLLITREGGRSEVRAGERLPDAVFKVASVAEAHLHKARELAPSVPKEAIPVLLPALPAQVLLDTLRRCEFNVFDPRLSRGVHGVSPLWYQLKLNWNAWRSRY

SEQ ID NO: 324521 - protein, 304 aa, Zea mays
  unsure (1)..(304): unsure at all Xaa locations
  Clone ID: MRT4577_59035C.1.pep
MSGGTPAASSSLRAALSYCVRQVRAYDYHHYLCLLHLAPAVRKAAFTFRAFNIQTARAMDVVSDPRTGLMRLLWWKEAVDKVFGNKLVEHLVAHALSSVIADHKVSKHWLKRSVEARINDTNREEGTIPXTSAELERYAEDTQSTILYMTLQAGGIQSTVXDHAXSHIGKASGLLLLLKALPHHVNNQGTVHYIPASVAEECGLLITREGGRSEVRAGERLLDVVFKVASVAEAHLHKARELAPSVPKEAIPMLLPALPAQVLLDTLRRXEFNVFDPWLSRGVHGVSPLWYQLKLNWNARRSRY

SEQ ID NO: 324522 - protein, 144 aa, Zea mays
  Clone ID: MRT4577_59036C.1.pep
MTTTRAAGRHGLARLPLPRGRGSRSRDEEEHNRRFCVNDAAPAGSASSCSDLTSGGFFPEGANGGTRSAAFPPSACQRDSPTPPRRVEIAQAFASSNSTTQPTRRSNGEHGAQAGGYRADFPDGFVFGVATSAYQARRSWNSKS

SEQ ID NO: 324523 - protein, 112 aa, Zea mays
  Clone ID: MRT4577_59037C.1.pep
HGGRGGGVVEAVPERFDDFDVVFVCYFPGMGVSAGALLKSLAKRCSKGARVVMFLDQGRQNFEQQRREHPDVVTSDLPSIAFLEKAASGNKYEITEFVDEPSFYLAVLQFQG

SEQ ID NO: 324524 - protein, 36 aa, Zea mays
  unsure (1)..(36): unsure at all Xaa locations
  Clone ID: MRT4577_59038C.1.pep
GGGYGGDAGGXSGGEGGXRGGNRDGGYGNSDGKWRN

SEQ ID NO: 324525 - protein, 260 aa, Zea mays
  Clone ID: MRT4577_59039C.1.pep
MAAASTSLPLGFSSHHRPTPRIRPQPQSQSQPLKAKPLNPLRFSLALTPATAKPRLAAMPDDVAVANFVEKDWSFLESAGANLQRALASGALSPASRVLALTPTASFVRSLLASSPCELLVAAHESMYVLAGVKEAHDEVRCFHLEGGGGGRGGGVVEAVPERFDDFDVVFVCYFPGMGVSAGALLKSLAKRCSKGARVVMFLDQGRQNFEQQRREHPDVVTSDLPSIAFLEKAASGNKYEITEFVDEPSFYLAVLQFQG

SEQ ID NO: 324526 - protein, 205 aa, Zea mays
  unsure (1)..(205): unsure at all Xaa locations
  Clone ID: MRT4577_5903C.1.pep
PPPPAXISQPPPPGEGFPPCPAERAPPAAVPWPSSSACHPRPPLDSLSPPLLLPXARPTSPSRXRQAPLQPTRPAXPRSPRARPRHSDPPCSRAPATVRRPAPGPCTARPAAXEPAAQRPALRSSSRARPAERLAPXPPAPCIHDAKPPTEPLHHTASAQPDRATTASTAEAEQPRPFPLRSRHFNGVVTPLPLILSLMNVINGA

SEQ ID NO: 324527 - protein, 48 aa, Zea mays
  Clone ID: MRT4577_59040C.1.pep
ITICNLDYKQSINFIPLNETASFRLSHIWLPKPMSIILYLHTNPYTSQ

SEQ ID NO: 324528 - protein, 86 aa, Zea mays
  unsure (1)..(86): unsure at all Xaa locations
  Clone ID: MRT4577_59041C.1.pep
XNFLWECFFFYREDGYVPARNAHTRTRATWAPRVGPPAIQRWNKHKRALLTKPGAGALGAPRLVPITIIPTDGRRLQLFMERDPCH

SEQ ID NO: 324529 - protein, 39 aa, Zea mays
  Clone ID: MRT4577_59042C.1.pep
VAAEYRSPSWHASLGGELRWTSKCSYQIYKKQQKCHIEE

SEQ ID NO: 324530 - protein, 279 aa, Zea mays
  unsure (1)..(279): unsure at all Xaa locations
  Clone ID: MRT4577_59043C.1.pep
MGNWVPRGRPDKGLPAFLSCDLLASLPLPDSLLLHVCPTHFIEGPPVKTISAIRGLHGMLGLPDHILVAAASDSIESLPSCEATNKFGASFETPSGRRLVKPSDYMELISCMKPNIWASLADEVPAWVTEKRNKVSVDRTLRWLDACIALDVASGTNSFGVIVGGSSLEQRKLCATEVSKRNVSGFWIAGFGFGESIEERCTLLNATTDCLPREKPRLVSRLGLPEEVLEGVAAGIDLFDSXYIYQLTMGGFALIFPGDMVEREMQKGVLNTTDGDSTK

SEQ ID NO: 324531 - protein, 84 aa, Zea mays
  Clone ID: MRT4577_59044C.1.pep
LSIVSVISGPIRGLLAMPLSGTEAPPYFFPRAGPKFSLSNPAVQAPLVFLAPHQAFFGNFHGSLLCNLLERSLVVFVTVISIAP

SEQ ID NO: 324532 - protein, 258 aa, Zea mays
  unsure (1)..(258): unsure at all Xaa locations
  Clone ID: MRT4577_59045C.1.pep
LGTSRPASLVSSFTVPLVSAVLGAAIALVFLAGYLRRKRAAIAHIPPTETAAAPDQPKHVRPSNQAQYKKGHLRPHHHAADKDAAKKHHHLDVNTLRGHTDSVTALAFSNDACNLVTVCADGAIRVFRIDDTSSKSFKILRINLPAGAHPTAVTFSEGSSSVVVAAQALXWDHKVWHGKSGKEFGTVDTNQLKNNMADISPNGRFIAAAAFTADVKVWEIVYSKDXSVKGVNXSMQLKGHKSAVTCLCFAPXSEQIIL

SEQ ID NO: 324533 - protein, 237 aa, Zea mays
  unsure (1)..(237): unsure at all Xaa locations
  Clone ID: MRT4577_59046C.1.pep
MAASLVSSFTVPLVSAVLGAAIALAFLAGYLRRKRAAIAHIPPTATAAAPDQPKHVRPSNQAQYKKGHLRPHHHAADKALLGSSLYMYADVSAPPTAENKLQGKLSPPEIKWSHPKIHGKESVLNLAAARATHGSGDGSTIIISCSEATDIKVWHGKSGKEFGTVDTNQLKNNMADISPNGRFIAAAAFTADVKVWEIVYSKDGSVKEVNKVMQXQGHKSAVTCLCFAXNSEQIITA

SEQ ID NO: 324534 - protein, 76 aa, Zea mays
  Clone ID: MRT4577_59047C.1.pep
KAFGTLTFLGFFFFKKFPIPLFWGLKLFYLMGTLLPNASSYHGSQCLERSGLVRTRGPIISVRGAVKMLPLPRYRP

SEQ ID NO: 324535 - protein, 133 aa, Zea mays
  Clone ID: MRT4577_59048C.1.pep
ACPPLQPGPVQEGPSPPASPRGRQVCADGAIRVFRIDDTSSKSFKILRINLPAGAHPTAVTFSEGSSSVVAAAQALLGSSLYMYADVSAPPTAENKLQGKLSPPEIKWSHPKIHGKESVLNLAAARATHGSGD

SEQ ID NO: 324536 - protein, 46 aa, Zea mays
  Clone ID: MRT4577_59049C.1.pep
FCSFDIGQMRKSLVSWAQSRSKVSKKANNVVSRIQFLQGHGASSTM

SEQ ID NO: 324537 - protein, 135 aa, Zea mays
  Clone ID: MRT4577_5904C.1.pep
KDLRQSFRGRLESESEAPVNPDCFHDIIKKLEVFQDGKLRDKMEDMARQILQYKDLVKQLKDELKEEKLKAKEEAEDLTQEMAELRYEMTCLLEEECKRRACIEQASLQRIANLEAQIKREKNKSSTCLVPLPAV

SEQ ID NO: 324538 - protein, 111 aa, Zea mays
  Clone ID: MRT4577_59050C.1.pep
LWLHSCAARRRAQLRCQPNLLTCCSAARGETGRRVPAALPSGGAAAGRRGRTWLASTGSFQRSKPAGRCEARLYTRRVPSASSVPSSPWRVQCSKARSRFLPTQHETGHFC

SEQ ID NO: 324539 - protein, 54 aa, Zea mays
  Clone ID: MRT4577_59051C.1.pep
FIFLGMLFTTGGFFNILRGKNKRKAPGPVYTIGWEATLNRSLKEYTPIYWPPRL

SEQ ID NO: 324540 - protein, 499 aa, Zea mays
  Clone ID: MRT4577_59052C.1.pep
MLSAKKKKTKKKKKKKAVEKKRKYLGKALPFSSLAFTTRRPIRHRPPQPASQGQMAASLVSSFTVPLVSAVLGAAIALVFLAGYLRRKRAAIAHIPPTETAAAPDQPKHVRPSNQAQYKKGHLRPHHHAADKDAAKKHHHLDVNTLRGHTDSVTALAFSNDACNLVTVCADGAIRVFRIDDTSSKSFKILRINLPAGAHPTAVTFSEGSSSVVVAAQALLGSSLYMYADVSAPPTAENKLQGKLSPPEIKWSHPKIHGKESVLNLAAARATHGSGDGSTIIISCSEATDIKVWHGKSGKEFGTVDTNQLKNNMADISPNGRFIAAAAFTADVKVWEIVYSKDGSVKEVNKVMQLKGHKSAVTCLCFAPNSEQIITASKDGSIRVWNINVRYHLDEDPKTLRVMPIPLHDSKGSVCQYDHMTVSPDGKILAVTSGSTLQWLLVETGAVLDTADKAHEGDITGIAWAPRTIPNGGVHVFILATAGVDKKVKLWTAPDVGST

SEQ ID NO: 324541 - protein, 304 aa, Zea mays
  Clone ID: MRT4577_59053C.1.pep
MLAVFSGEVVEVPAELVAAGSRTPSPKTKASELVARFLGTSCPAAVSVRLADLGHLAYSHANQALLRPRYCTTTYAAYSAAVRRREPAPWMDAVLCSPFHASAMDGQAWSFAAKDEVFCLFEGVLDNLGRLSQQYGLSKGANEVLLVIEAYKALRDRAPYPASLMLAQLAGAYAFVLFDASTNSLLVASGGDVPLFWGVTADGCVAFSDDIDVLKGSCGKSLAPFPQGCFYSNALGGLKCYENPKNKVTAVPANEEEICGATFQVRSVPFSKKEFSSMHALVRQASIIIGLMRCLERKDPETRG

SEQ ID NO: 324542 - protein, 65 aa, Zea mays
  Clone ID: MRT4577_59054C.1.pep
GVYPGFLESTQHLQVHSGSSAVGWAALSSRSIFGVSSFCWSMRRGFHPSFLCFSGQKKKKKRQIT

SEQ ID NO: 324543 - protein, 40 aa, Zea mays
  unsure (1)..(40): unsure at all Xaa locations
  Clone ID: MRT4577_59055C.1.pep
YRCCVVYVQNKVVFFKKRSIKGCRTCFLRIRLXDCYFNXY

SEQ ID NO: 324544 - protein, 261 aa, Zea mays
  unsure (1)..(261): unsure at all Xaa locations
  Clone ID: MRT4577_59056C.1.pep
MLAVFSGEVVEVPAELVAAGSRTPSPKTKASELVARFLGTSCPAAVSVRLADLGHLAYSHANQALLRPRSFAAKDEVFCLFEGVLDNLGRLSQQYGLSKGANEVLLVIEAYKALRDRAPYPASLMLAQLAGAYAFVLFDASTNSLLVASGGDVPLFWGVTADGCVAFSDDIDVLKGSCGKSLAPFPQGCFYSNALGGLKCYENPKNKVTAVPANEEEICGAXPSRWKELRCSQRCIRRXXFLRLQAWTGGNCTWXWWCNVT

SEQ ID NO: 324545 - protein, 194 aa, Zea mays
  Clone ID: MRT4577_59058C.1.pep
CSVPVGCGAARCLVTSRLTPRTEASVRHLPPQAAAPSPARELKSQSRTQEAEAPRGRRQRLRRLPTHSTPSLPQPKQHPVSISQAQKSESGRIGEWLRRRRNAGRYVSRRRCFVRSFLRSWMGSCIGPLPSIRFFSFLFIWKLWWHHSLFFSLHLDRLQHHSLSFFSKLGARSVSSCIALSCLLVAPHFQWDPS

SEQ ID NO: 324546 - protein, 83 aa, Zea mays
  Clone ID: MRT4577_59059C.1.pep
NKSHMQILVKVFTEAVPFPGPDRVWRESATLRAQCGGGRHHAAAIGVVREHVYLAEPARGVGDSRSIGRPAPPPWQSFSVRVL

SEQ ID NO: 324547 - protein, 79 aa, Zea mays
  Clone ID: MRT4577_5905C.1.pep
MPLPANLVMGSAFVALGVALLAGFLYVAVWSKALAPSDNWFLLAVQNDRYYCLLVPLTVPVIIVAVYLHWLSMKMFKHA

SEQ ID NO: 324548 - protein, 145 aa, Zea mays
  Clone ID: MRT4577_59060C.1.pep
RDHGLGHDGPDGGVAPQRAGSRRGPARQLLRRQRGRRRPRLIILRYRQQAARRRRRRPVELHAIVVDGAAGPCVALDRRPTIRRRSPYLCTYVRRRELGIGKALPHVCVWLSGWPHNLSPPSISLAGPTHKAPVNWVRLVKKKKK

SEQ ID NO: 324549 - protein, 101 aa, Zea mays
  Clone ID: MRT4577_59061C.1.pep
KYVQSSPARTDFNRAFSAQCGQMCAFKICFLRKSPSALIIWRAVPTVFQQQVNCVPRKWHGQICAQLWIRRRNFLVLTDTQLDTQAYSGGRRMCSNTRAIA

SEQ ID NO: 324550 - protein, 69 aa, Zea mays
  Clone ID: MRT4577_59062C.1.pep
PLPPNELVFFPRPQGGPSFLPPFIAVPPFPITKLCPIFRGPYYSRKVFWPLYWSFLYIFPIVCYPMCSL

SEQ ID NO: 324551 - protein, 64 aa, Zea mays
  unsure (1)..(64): unsure at all Xaa locations
  Clone ID: MRT4577_59063C.1.pep
IDKHMFHDMFXMKGKGYAFKSEMLLMESIHKSNADKAREKTLSDQFDAKRSKTNASRYRYIVMI

SEQ ID NO: 324552 - protein, 141 aa, Zea mays
  unsure (1)..(141): unsure at all Xaa locations
  Clone ID: MRT4577_59064C.1.pep
NKRTTPTRGGKGENKKNXQHRGPQAPTQRRGGHQTKPGAPAERHARHHKQTETDRHPPXAEGGATXHAAEGRQQRRHEGQXRPRDRGTRQQHQKPKNEHGTPTNXTTNTSKTKRGTTKKNTXYKPNNKKNQTTKNKQNERT

SEQ ID NO: 324553 - protein, 188 aa, Zea mays
  Clone ID: MRT4577_59065C.1.pep
VLRTNNMLQAITMGKPVVTSMWLENCGQAGCFIDERKYIMRDEKKEKEIGFSMLISLASACKHPLLLGKRVFVTSNVKPSQVVMTSLVKSSSGQPLERVGRSIMEGKGVPPDLLVISCEEDYEACAPLLEKGASVFSVELLLNGIVIQKLEYERHRLFMDRVKQTRSSRWLKDPVQGRFVPVPKRPRA

SEQ ID NO: 324554 - protein, 868 aa, Zea mays
  unsure (1)..(868): unsure at all Xaa locations
  Clone ID: MRT4577_59066C.1.pep
GLEFLQGTHLLPEKLDPQSVACFFRYTAGLDKNLVGDFLGNHDEFCVQVLHEFAQTFDFQEMNLDTALRLFLETFRLPGESQKIQRVLEAFSDRYYEQSPQSFANKDTALLLSYSIIMLNTDQHNMQVKKKMTEDDFIKNNRNINGGSDLPREMLSELYHSICRNEIKTTPEQGLGYFEMSPSRWIDLMRKSKSTSPYIIGDSQPFLDHDMFAVMSGPTIAAIAVVFDHSEHEEVLLTCIEGFLGVAKISAFHHLEDVLDDLVVSLCKFTTLLNTSLVEEPVTAFGDDLKARLATETLFTIANRYGDYIRTGWRNVLDCILRLHKLGLLPARVASDAADDSELPAEAVQRKAAPSSVPPSHIPVMGTPRKSSGLMGRFSQLLSLDSERTRSQPTEQQLAAHQRTLQXIQKCRIDSIFTESKFLQPERLLQLAKALIWAAGRPQKVASSPDDEDTAVFCLELLIAITLNNRDRIVLLWQGVYEHIASIVQSTVMPCALVEKAIFGLLRICQRLLPYKENLADELLRSLQLVLKLDARVADAYCENITQEVARLVKANAAHIKSQMGWRTVILLLSITARHPDASEVGFEAIVFIMTEGAHLSLANYGFCIDAARQFAESRVGLADRSVRALDLMSDSVRNLALWSQEIKATTFEEGEKGPEAIREMWLRLLQALKKLSLDQREEVRNHALASLQRCLTSTGELCLQSATWSHAFDLVIFSLLDDLLEISQNHSQKDYRNMEGSLVLAMKLVAKVYLQLLPDLFGLSSFCKLWLGVLSRMEKYVKVKVRGKRSDRLQEVVPDLLKNILLVMKSKGILAKRSTIGGDSLWELTWLHANNISTSLLPDVFPSQEYEQQSSTGSPRGPSPVEA

SEQ ID NO: 324555 - protein, 40 aa, Zea mays
  Clone ID: MRT4577_59067C.1.pep
ISHLYLCYNEFVPSIIIDPCLIHHGLGLLLRNSVTATSKL

SEQ ID NO: 324556 - protein, 52 aa, Zea mays
  Clone ID: MRT4577_59068C.1.pep
MFGRAPKKSDITKYYEILGVPKSASQNDLKKAYRKAAIKNHPDKAGDPEKFK

SEQ ID NO: 324557 - protein, 84 aa, Zea mays
  Clone ID: MRT4577_59069C.1.pep
GPPFNRKKNRPLRAAFYPKGCKTTAGVKMKNKRGGSKKKKKKKPPEPRPYFLNAGAGRPAGQPLKKDGNHRGKKTPLGGRILNH

SEQ ID NO: 324558 - protein, 87 aa, Zea mays
  Clone ID: MRT4577_5906C.1.pep
LDREKIWSRLTTSESIEVLEKDLAIFGFFVALGRSTQGYLSFKGLTDLDDSLNGIVRYLIGGSVLYYPQLSSISSYQLYVEVVCEEL

SEQ ID NO: 324559 - protein, 126 aa, Zea mays
  unsure (1)..(126): unsure at all Xaa locations
  Clone ID: MRT4577_59070C.1.pep
KKVKQAPXLILPDVREAFSVNCDASYTGLGCVLMQEGRVVAYSSRQLKIHERNYPTHDLELAVVVHALKTWRHYLYEQKCDIYTDHKSLEYIFTQSELNMRQRKWLELMKDYEQEIHNPPAKANVV

SEQ ID NO: 324560 - protein, 98 aa, Zea mays
  Clone ID: MRT4577_59071C.1.pep
RRCLVQRGRCQGRGRADGRATGGRGTGSFRPRLRRAPPAPPDTAGAPRPPQSWQARPRPPPPPWRDRVTRPRCVVYDATVEPERRGAEQNCSKSLEPN

SEQ ID NO: 324561 - protein, 193 aa, Zea mays
  unsure (1)..(193): unsure at all Xaa locations
  Clone ID: MRT4577_59072C.1.pep
RANLLNTDVGANGRDDSAASPEPGRDVAACDPGVRTLGAVAAPDNSEAPGQTKGRTLSATAPPCPWQNRHCSSLFLAEPQSCSGRCPLGWAGGRWGAPPKPEGRMPRRRRSRGATKGEQDWARARERETARSERRATPEAAGSLGLGLGGARTRAAGEAARRRPDEMTTASSSALAARAWTEGWTRAWAXGRG

SEQ ID NO: 324562 - protein, 42 aa, Zea mays
  Clone ID: MRT4577_59073C.1.pep
IINLPINIDLIHSYFNIHTLIIKLNLHLSIHFTSKQSNSLPT

SEQ ID NO: 324563 - protein, 116 aa, Zea mays
  unsure (1)..(116): unsure at all Xaa locations
  Clone ID: MRT4577_59074C.1.pep
PGGVXAPPRXRXXPSXLRXRXXGXVXPPAVLXARCWWRPWVLLARAAVXALXPXPFAGAVGPPPAWFGFLXASPLRLAAWXRGXXALPCCXLGXPPSPPXXXPRWLXLLPXXVCSL

SEQ ID NO: 324564 - protein, 136 aa, Zea mays
  unsure (1)..(136): unsure at all Xaa locations
  Clone ID: MRT4577_59075C.1.pep
APKSLPAPTPVSSPPTEVKSSPPPTPVSSPPPAPKSAPPPTPVSSAPTELKSCPPPAAVSSPPSAPKSAPXPAPVSLPPAEVNSCLPPXPISYPPHRAESPPTPAPMCSLPPPVKSARAPTPGSKAPPTMKFSPTP

SEQ ID NO: 324565 - protein, 96 aa, Zea mays
  unsure (1)..(96): unsure at all Xaa locations
  Clone ID: MRT4577_59076C.1.pep
LNLFVNDVLIFVSTPHPIGNTYXLGTAPLHDITTEIAKTNGPTCYNTDXMFSIDNALCSISQQNDSIIDLSTVVSTVINTALETMISGANSSTKSD

SEQ ID NO: 324566 - protein, 375 aa, Zea mays
  Clone ID: MRT4577_59077C.1.pep
MERLLAGLLLGFLLLIASVGSHATRAPDQYWKSALPDTPMPSSLSQLLNTPAGKGGVGGGSSGKKPGGTTVGVGKGGVGVNVNPTKPGGAGTTVGVGKGGVGVGVNPGYGKPGGTTVGVGKGGVGVHVNPGKKPVHVPVGPFQYEYAASETQLHDDPSVALFFREEDLQPGKKTTVQFASTAMAGAKFLPRSDAEAIPFSSQKVPEILARLSVDPDSVEAAEMAQTLHDCEAPAARGERKACATSLESMVDFATASLGTSHVRAASTVVGREGSPRQEYTVTGVKRAGGGRLVACHAEPYAYAVFACHLTQQTRAYSVSMLGRDGTAVDAVAVCHADTSGWNPKHVAFQVLRVKPGTVPICHFLPQDHVVWTRGG

SEQ ID NO: 324567 - protein, 270 aa, Zea mays
  unsure (1)..(270): unsure at all Xaa locations
  Clone ID: MRT4577_59078C.1.pep
MQVASVGSHAARAPXEYWKSALPDTPMPTSLSQLLDAAXYNNRQLQTFIKSSVDKILRIGMCLSHHTNIRANATSSIPCLFAAGGGTTVNVGWGGVHVDAGHGKPGGTTVDVGKGGVGVNVNPGRSGKPGGTTVGVGKGGVGVNVNPGYGKPGGTTVGVGKGGVGVNVNPGKXGTTVGVGKGGVGVNVNPGKPAGGAGTTVGVGKGGVGVGVNPGHGKPGGTTVGVGKGRGLAVHVKPGXKPVHVNVSPFIYTYXASGTQLHDDPSVALF

SEQ ID NO: 324568 - protein, 42 aa, Zea mays
  Clone ID: MRT4577_59079C.1.pep
SVTLSYLLSYLKVYSIVSVIYNAKFSYILYDVLQTALGRVCF

SEQ ID NO: 324569 - protein, 509 aa, Zea mays
  Clone ID: MRT4577_5907C.1.pep
MAASPTSSLAPPVVPMELHAGNRDRLVAALRGHISASARPLHGLVLLQGGEEKTRYCTDHLELFRQESYFAYLFGVQEPGFYGAIDIASGQSILFAPRLPADYAVWMGEIKPLSYFRDTYKVDMVFYVDEIARVVQDHFGNHGKPLLFLLHGRNTDSGNFSKPASFEGMEKFDTDLITLHPILTECRVIKSDLELALIRYANDVSSEAHIEVMRRARPGMKEYQLESIFLHHVYMYGGCRHCSYTCICATGDNSAVLHYGHAAAPNDRTLNDGDMALMDMGAEYHFYGSDITCSYPINGKFNRSQTIIYNAVLKAHNAVISDMRPGVNWMDMHKLAERAILESLRKEQIVQGDVDDMMAQRLGAVFMPHGLGHLLGIDTHDPGGYPEGLERPKDPGLSSLRTTRELKEGMVITVEPGCYFIDALLTKTRDDPISSKFFNWQEVEKYKSFGGVRIESDVYVTAQGCRNLTNCPRETWEIEAVMAGAPWPLPASSSMVVAAENSNDISKAS

SEQ ID NO: 324570 - protein, 189 aa, Zea mays
  unsure (1)..(189): unsure at all Xaa locations
  Clone ID: MRT4577_59080C.1.pep
MERLLAGLLLGFLLLIASVGSHATRAPDQYWKSALPDTPMPSSLSQLLNTPAGXLSLLDTCCIGRLVHRTNILRNNTGRXSIACVFVGKGGVGGGSSGKKPGGTTVGVGKGGVGVNVNPTKPGGAGTTVGVGKGGVCVGVNPGYGKPGGTTVGVGKGGVGVHVNPGKKPVHVPVGPFQYEYAASDTQLH

SEQ ID NO: 324571 - protein, 456 aa, Zea mays
  Clone ID: MRT4577_59081C.1.pep
MERLIAGLLGFLLVASVGSHAARAPDQYWKSALPDTPMPTSLSQLLDAAPAGGGTTVNVGWGGVHVDAGHGKPGGTTVDVGKGGVGVNVNPGRSGKPGGTTVGVGKGGVGVNVNPGYGKPGGTTVGVGKGDVGVNVNPGKPGGTTVGVGKGGVGVKVNPGKPAGGAGTTVGVGKGGVGVGVNPGHGKPGGTTVGVGKGGVGVHVNPGKKPVHVNVSPFIYTYAASETQLHDDPSVALFFQEKDLQPGKKMTVQFASTGTTGAKFLPRSEAEAIPFSSQKVPEILARLSVDPDSVEAAEMAQTLRDCEAPAAKGEKKACATSLESMVDFATASLGTRHVRAVSTVVAKEGSPKQEYTVTGVERAAGGTDDDGRAVACHAEPYAYAVFACHLTRQTRAYSVSMLGRDGTAVDAVAVCHADTSGWNPKHVAFQMLNVKPGTVPVCHFLPQDHVVWTPSG

SEQ ID NO: 324572 - protein, 48 aa, Zea mays
  Clone ID: MRT4577_59082C.1.pep
FASFPCYLIHSVHFSVTVTIVMTNFHLTANQNDIDRNELQRLGLNREV

SEQ ID NO: 324573 - protein, 110 aa, Zea mays
  Clone ID: MRT4577_59083C.1.pep
PAKFFGGQYFGGPIHWPPSRKGPFRNNWGKKPFSPLGRPHPKVLTFLGPGRGQTPGLVQKKKPPFKLGGKNPPGQAPQCPVLGTTRNFLGIYFLGARPFPRGGPFFEPGP

SEQ ID NO: 324574 - protein, 555 aa, Zea mays
  unsure (1)..(555): unsure at all Xaa locations
  Clone ID: MRT4577_59084C.1.pep
DAWADAWVRLLLDEQALIEPVAAGTTALESLRSVSPKAEGVSLSDSEKGFTEVILSRLLARPDAAPLYSEAVRLLGKLQESLVMDVKWILQGQDAILGRRSTRQQLVHIAQRKXFVXKTQVWKPWGWSSLLSDAIPNKTAKRKLEVTSIEEGEVVDDTVDAKRPTKTPPHSVDRSFEGIRSINKYLTEKALAELVLPCIDRSSADIRGILSVDLTKQMGAISEHIKAIALNGAKQAGSVPSGNEVPSNKSSGRKGIRGGSPNIGRRAPVGNDPSPPSASALRAALWLRLQFIIRLLPVIMADRSMRQTLASAILGLLATRMIYEDADLPLPPTNATALRREVDSLLEPPLDVLLDRPGESLFERLLCVLHALLGSYKPSWLKSRSASRSTIRSQRDFSAFDNEAAEGLQSALDHMELPETIRRRIQAAMPLLPPSRRPCMQCQPPQLSLAALSPLQSSTSGVGPQQKSSCVSWVPTNVSVRSKAALPSHDPETEVDPWSLLEDGTNCPPSTASGSNGSSGVTGDHANLKASSWLKGAVRVRRTELTYIGSVDDDS

SEQ ID NO: 324575 - protein, 94 aa, Zea mays
  Clone ID: MRT4577_59085C.1.pep
SFVYIFFFCLSFSIFYFLVLVFSFCLVFNLCCLFCLIFIFYLFFFSRGKKRGKLSTVIVGGEYFYTIRLGQEKNDCPRGAFLPLKALARNDWGG

SEQ ID NO: 324576 - protein, 98 aa, Zea mays
  Clone ID: MRT4577_59086C.1.pep
ALCIQVCDSISKCHVVYHLYSIPIYVISYNDEATNIVDYRSQEVMVQKAFEVCIRSWTSLDERLVSTFSSMIMKASRISSRHGYPGYGGEEVRTYGGR

SEQ ID NO: 324577 - protein, 139 aa, Zea mays
  Clone ID: MRT4577_59087C.1.pep
MEKPGELVKWSLILENSESAALMRIEFLVVAIAFIFLLMSFLDMFRRQSRHSYIKYLLLVLDAISDSTFIYTIGLMQSAPFKKDLFSVWALLLVNLRVNACFISAYGIPDQDNSRINESKVMALLRVGFLVGTNNSQFK

SEQ ID NO: 324578 - protein, 183 aa, Zea mays
  Clone ID: MRT4577_59088C.1.pep
MATKSSVTGNAAAKSSAPKAAEEQVCTLLSKRLQRVSCHCLRIAAAVLVVYSFAVTAWRVRHQPQDLAFVAAALFLLAELQACLRRAERLAPESPAGERRRVRAAVWALSTALSCAFAYRVAAVMPPPLAVLVWCITASVGLVGLCLLVLCRDQQYQALRNDDAACDCDRRASAKTSPTDELV

SEQ ID NO: 324579 - protein, 38 aa, Zea mays
  Clone ID: MRT4577_59089C.1.pep
GKMVEVTAFTERTTSSTSWSFLGELKLSINRGFLCGCE

SEQ ID NO: 324580 - protein, 48 aa, Zea mays
  unsure (1)..(48): unsure at all Xaa locations
  Clone ID: MRT4577_5908C.1.pep
VRAPHRAECHVCQCPLEYRTKIEVHRTPVFFMLLRGTKMXGKEMKSNY

SEQ ID NO: 324581 - protein, 38 aa, Zea mays
  Clone ID: MRT4577_59090C.1.pep
LASYSHVSGRGQHGWCLTLSLVTIREGVHRGFLSDQGS

SEQ ID NO: 324582 - protein, 59 aa, Zea mays
  unsure (1)..(59): unsure at all Xaa locations
  Clone ID: MRT4577_59091C.1.pep
LVQRGGVTECYASPWAGSVSKDLGEPSAWGGGGGFXFLLYXSFTILLSLPPLRAGWGGF

SEQ ID NO: 324583 - protein, 183 aa, Zea mays
  Clone ID: MRT4577_59092C.1.pep
MLPRKREVVASEVDNLQKKTRPAAADDAMARPTEIDEDLHSRQLAVYGRETMKRLFASNVLVSGLQGLGAEIAKNLVLAGVKSVTLHDDGNVELWDLSSNFFLSEKDVGQNRAQACVLKLQDLNNAVVISTLTGDLTKEHLSKFQAVVFTDITLEKAVEFDDYCHNHQPPIAFIKSEVRGLFG

SEQ ID NO: 324584 - protein, 132 aa, Zea mays
  Clone ID: MRT4577_59093C.1.pep
MTFKRRNGGRNKHGRGHVKYIRCSNCAKCCPKDKAIKRFLVRNIVEQAAVRDVQEACVHDGYVLPKLYAKVHHCVSCAIHAHIVRVRSRENRRNREPPQRFRRRDDGPRPGQGPPRPGAAATAAPPAAAPRT

SEQ ID NO: 324585 - protein, 190 aa, Zea mays
  unsure (1)..(190): unsure at all Xaa locations
  Clone ID: MRT4577_59094C.1.pep
MRAVSVWYCCPWGLLLLHCLCSFSVGSPSPSISPEKKVGSQGLRFRLAGFPRKPYEGRVEIQRAGEWGTICDDDFTLQAAHVLCRELGFTEATGWTHSAKYGPGTGRIWLDNLSCRGTEGSVTECASRGWGNSDCTHDEDAXGVICKDQRLPGFSDSNVIXXVEHQLQVEXEVRLRPAVEWXGKRPLPVT

SEQ ID NO: 324586 - protein, 55 aa, Zea mays
  Clone ID: MRT4577_59095C.1.pep
CSRAQHHHRPGILSPPVPNNPRPIALADQVIPIDRRPPPNHTARLSPKTFLQTLL

SEQ ID NO: 324587 - protein, 237 aa, Zea mays
  Clone ID: MRT4577_59096C.1.pep
MLGAMDERIPPPPFFQYSPSGVHSSPHHHNPIRSSASERERYIAELLAERQKLVPFLQVLPFCNRLLNQEILRASSLPPNPNFVEPERFDYGSPLRLAGHPMNGQPMDMEGWTGMHAEHMGIHHSPSMGWNGGPGVVGGPVVKKLVRMDVPAEKYPNFNFVGRLLGPRGNSLKRVEATTQCRVYIRGRGSVKDTVKENKLRDKPGYEHLNEPLHVLIEAEFRADIVDVRLNQAVVIL

SEQ ID NO: 324588 - protein, 84 aa, Zea mays
  unsure (1)..(84): unsure at all Xaa locations
  Clone ID: MRT4577_59097C.1.pep
MIMPKKNPNEIFTYLFQXEGVLIPKKDYNLPNHPQIDVPNLQGINLMQSFKSKEYVKETFSWQYYYWYLTNDGIEHLRNYLNLP

SEQ ID NO: 324589 - protein, 152 aa, Zea mays
  unsure (1)..(152): unsure at all Xaa locations
  Clone ID: MRT4577_59098C.1.pep
DQQQLAKAVAEQVFLAIANIKLRERLENQSIRDPLTGLFNRRYLEQFFLQEIGRAKRYNHSIGVIMGDIDHFKQFNDQLGHDAGDHVLKTIGRILQSNIRGSDIACRYGGEEMTIVLPQTSLEDTLVKAESLRQAIASXEVEYKGKELGTLT

SEQ ID NO: 324590 - protein, 94 aa, Zea mays
  Clone ID: MRT4577_59099C.1.pep
SYKAAVEEGITNGFGMGSVFCIFFSSYGLAIWYGGKLVLSKGYSGGDVINILFAIMTGAMSLGNATPCMAAFAEGQSAAYRLFTTIKRKPEIDP

SEQ ID NO: 324591 - protein, 85 aa, Zea mays
  Clone ID: MRT4577_5909C.1.pep
PTLPFLSGLVPKKTDKSERRVHFFFFFFWTCLQSCTSTLRTQCVNVYVIISMWIEVAAEAGTIDHNMHEQDIRNDRAKETTIKEF

SEQ ID NO: 324592 - protein, 96 aa, Zea mays
  Clone ID: MRT4577_590C.1.pep
MAASVACAFFFDAEPVGEPGMPALDACALCAKPLARDSDVFMYRGDTPFCSEECRHEQMHLDAVSARQAARRVQRFSAEAECHRGQRQSRKVSIAS

SEQ ID NO: 324593 - protein, 107 aa, Zea mays
  Clone ID: MRT4577_59100C.1.pep
MYSYLFSHQLLIIISAFPVQWDTAGQERFRTITSSYYRGAHGIIIVYDVTDMESFNNIKQWLSEIDRYASDNVCKLLVGNKCDLVDSKVVDTEKAKVSFCLCFSLKH

SEQ ID NO: 324594 - protein, 51 aa, Zea mays
  Clone ID: MRT4577_59101C.1.pep
SLVAHAPCNVLDVGGVAYIDEAHAQADGSNAAQCSLYGAMYTFRCLAGRVG

SEQ ID NO: 324595 - protein, 65 aa, Zea mays
  Clone ID: MRT4577_59102C.1.pep
TPHSCRDRLIPSPSPDSNYHLSHTRPCPHPSRRHLLTSQPPLPSPSSPLRLLLHPSRPRNTLKSL

SEQ ID NO: 324596 - protein, 102 aa, Zea mays
  Clone ID: MRT4577_59103C.1.pep
RPSDGISYLGVGIHGQGCREHLLPRFSSLPVSIAVASLRASGWHILGLSFVSPVTTAIFQESLQHIHDASRRGQAYSHPRPAPVSRLRQRGSFSINGSSRRV

SEQ ID NO: 324597 - protein, 61 aa, Zea mays
  Clone ID: MRT4577_59104C.1.pep
LCFFLNSHGFKRPKVGHGFMYWLKSCLPLPGLLYFDIRQGGLDYIFVMKERSLFWVWFSLF

SEQ ID NO: 324598 - protein, 107 aa, Zea mays
  unsure (1)..(107): unsure at all Xaa locations
  Clone ID: MRT4577_59105C.1.pep
MAIARYVINCRDALPWKDAKTVSISEVXVSPPHTMEVRVKILYTSLCHIDVYFWEGKAQTPLFPXILGRDAIYISKTLRDGVTDFAPRDYLLPVLTRECTXCSHCDS

SEQ ID NO: 324599 - protein, 102 aa, Zea mays
  Clone ID: MRT4577_59106C.1.pep
ARHPWVYIFKDIIGFLSAFELSWAQATQRVDGGTNTRGGVQTPWPQEELREPEGIGGPFIWERLVGNCRCNHWTPEGKPTRPKPKFTGWIGSYGGALKRTLI

SEQ ID NO: 324600 - protein, 55 aa, Zea mays
  Clone ID: MRT4577_59107C.1.pep
RQCELLTPSFRTAQLADGHARWLPAPAWLSILRPGRWLVPVDACYASLANQPDTR

SEQ ID NO: 324601 - protein, 43 aa, Zea mays
  Clone ID: MRT4577_59108C.1.pep
MMHANSESDVTSLAASTPSRSPKRCGGAVYGGYYVQSPSRESL

SEQ ID NO: 324602 - protein, 88 aa, Zea mays
  Clone ID: MRT4577_59109C.1.pep
VFGENLRELRRNAPRRKEMPGSKGAGQNTRPAHGGPQHSKLKNSIKRNNPVDCTKYGSKERKSLNPSHLPRLQLTRGQMKRQIYTRST

SEQ ID NO: 324603 - protein, 100 aa, Zea mays
  Clone ID: MRT4577_5910C.1.pep
RPGRDFNNKPHNGAILLLIPSTSRFPRCRRAQRSQRGCLEAVGKRHRKVLRDNIQSITKTTIRRMNRRAADKRISGLIYQETRGVLKIFLENVIGDSEIY

SEQ ID NO: 324604 - protein, 69 aa, Zea mays
  unsure (1)..(69): unsure at all Xaa locations
  Clone ID: MRT4577_59110C.1.pep
VIFIDPGPNNSGFIKSLGSFKPGRLAFINHQHWVMPYTNHINELPTSYQKADLXKYKDDPGTTLLGLDG

SEQ ID NO: 324605 - protein, 103 aa, Zea mays
  Clone ID: MRT4577_59111C.1.pep
DYDYSTKCDPIGRTSSTPKGSEPSASDASKPQRTYHKFDTNSDPDLPDPRSDTPHTAVSSTDFALALETSASSLEVLLSIATIIGYHLTSIDYLGDSTVSPHD

SEQ ID NO: 324606 - protein, 87 aa, Zea mays
  Clone ID: MRT4577_59112C.1.pep
MSTIGPTGSQNICSYSWSFEAVAPFPSSSSMLLFPDLTTGLDGKPNFNPQTNAYSLTIPCLTYSLYSPWAYAKIATLTLAANCATYT

SEQ ID NO: 324607 - protein, 70 aa, Zea mays
  Clone ID: MRT4577_59113C.1.pep
MAHSGPVVSCMLLLVGAQLLMVVMATQTSAAAAAAAGDQQRGAGRLLLWQVTCHYSACNCRTCPTYGWAC

SEQ ID NO: 324608 - protein, 120 aa, Zea mays
  Clone ID: MRT4577_59114C.1.pep
WAGSFLLRPRLRCRLITIPTSGGSRVPRERPSGLLKPVGEPGLSEFVPLLGTISLGRWRCPYPADLGTGSSQLPSGSGPDTPSIVLVCSPPGNLVDHRRHLRTQPFYELNVPLFVSQVIL

SEQ ID NO: 324609 - protein, 34 aa, Zea mays
  Clone ID: MRT4577_59115C.1.pep
TNPHANARDPDHSKPVPVEIDYNTCTIPQPLVTI

SEQ ID NO: 324610 - protein, 78 aa, Zea mays
  Clone ID: MRT4577_59116C.1.pep
RVRGSPIERALFFFFFCVKSSIKREWAMDSFPIYPQRIHGGMAPYTGMLTSYSIDVRDHNYYWIRIDAQPICINASHK

SEQ ID NO: 324611 - protein, 59 aa, Zea mays
  Clone ID: MRT4577_59117C.1.pep
DAPVVSSEFGSRMHPAISPSRQKWGMAIDRLGGSGPPQTYDDCMTNMLVHHQYIRKTGA

SEQ ID NO: 324612 - protein, 131 aa, Zea mays
  unsure (1)..(131): unsure at all Xaa locations
  Clone ID: MRT4577_59118C.1.pep
KTHQALFPINNLTTWGTKILALLALLALLASTTNAFIIPQCSLAPSDIIPQLLLPATLMSFEHSTMQAYMLQHVLEASVLHQXMPNCNNNFWAHLXTLQTILTQQQQQFLPALSQLVVLNPVFYYQQKLLV

SEQ ID NO: 324613 - protein, 82 aa, Zea mays
  Clone ID: MRT4577_59119C.1.pep
DSDSDDEFDSPSYDELANLLKEYTQIIRKSKAKCDKLKDENEFLTAKYDIVVKASDDMKEENKTMSSTVNELKSSLKDAKNK

SEQ ID NO: 324614 - protein, 54 aa, Zea mays
  Clone ID: MRT4577_5911C.1.pep
AFYIFRNARNRIYYVIPRKRHTILKAKNYFDLCNFSPQHYLSCFIPASNPVLFH

SEQ ID NO: 324615 - protein, 191 aa, Zea mays
  unsure (1)..(191): unsure at all Xaa locations
  Clone ID: MRT4577_59120C.1.pep
SPPTPSPPQALTPSPLRPLRLRQARQLTAPAAIAKEKIHISIVAIAHVDSGKSTTTGHLIYKLVGIDKRAIEXFEKEAADMXKMTFKYAWVLDKLRGDRERGITIDIALRKFETTKYSCTVIDAPVHRDFIKNMITGTSQADCAVLIIDSTTGGFDAAISTAGSNREHPLPAVTLCVKQRICCXKPTDATT

SEQ ID NO: 324616 - protein, 251 aa, Zea mays
  Clone ID: MRT4577_59121C.1.pep
MASQWAAPPPGYSAGHGQAYGDQQLATPPPQAATAVAVTAASNGVGNPYVVVTPASAAPSTCQTVRKALGRYGKLLEDGTRKAADATGNIWHHLRTAPNMADAAVARLTQGTKVYAEGGHDRVFYQTFGAMPGEQLRKAYACYLSTSSGPVIGTLYLSTARLAFCSDSPLCYQGPAGQPHECMYYKVVLPLSQVTSVNPSSSMRNRAERYIQIRTMDNHEFWFMGFVNYDKALKNLYEALQHRDVSAHQRC

SEQ ID NO: 324617 - protein, 123 aa, Zea mays
  unsure (1)..(123): unsure at all Xaa locations
  Clone ID: MRT4577_59122C.1.pep
KQSYVVVCAAVYIKLRRSCHLDTVQSGGTALSIVKQGDLVVVGDSRVVLGTTSDDDAIMXVQLIVQLKPNLPQEXXRIRWCNGRXYYLADEPGXHFVLQPSQESSILAMSRVFDTTISRTVES

SEQ ID NO: 324618 - protein, 40 aa, Zea mays
  Clone ID: MRT4577_59123C.1.pep
FQAFFSKVPEDWGPLFPLSYDCAQLNPASYFHWPPVCVNP

SEQ ID NO: 324619 - protein, 104 aa, Zea mays
  Clone ID: MRT4577_59124C.1.pep
SAGSIGRVPRFDTRGISQQRSMAHQTTRVMVHGQRDSASSVPWLHRRIDLSIQATRFREHYERVSSFWRPRLFFVFFPFFSSPYPPSILSSLLLVHLSNYFTFN

SEQ ID NO: 324620 - protein, 99 aa, Zea mays
  Clone ID: MRT4577_59125C.1.pep
KKKKKKKFRDIFFIFFYFLFLIAPEVLNLEKIVQGGFPVSQHKTSRGGNTYGFHLVDGSRCPPPKKKDSKKNKKKAPFPWSSSFGAGNEPHPRYWGISD

SEQ ID NO: 324621 - protein, 62 aa, Zea mays
  unsure (1)..(62): unsure at all Xaa locations
  Clone ID: MRT4577_59126C.1.pep
LQGRLQNQEIDQIDVDLHETMPSGFKAYAKXVMADAIEIGNYLKSKGYQIVTDATDNHIVIR

SEQ ID NO: 324622 - protein, 71 aa, Zea mays
  Clone ID: MRT4577_59127C.1.pep
MEFAGEVDDFALDLIREHLLGGDGGVQATANHDQAGPFCDDVTFPGLPPSAAEPQAHTQRPMFFPQQQQQQ

SEQ ID NO: 324623 - protein, 112 aa, Zea mays
  Clone ID: MRT4577_59128C.1.pep
KLIHGIYVFDPNLNIHSSVANLYIYFPYTESHKRLTSLNPEIEELLYKQTENTEHKFVLNYRNKPIIFSMARLDRVNNLTGLVDLYGRNKRLQELVNHLVVCSDHENPFKDN

SEQ ID NO: 324624 - protein, 49 aa, Zea mays
  Clone ID: MRT4577_59129C.1.pep
LARSRSIMSAHASRSILVIMLARDSIIADRGSAVAYGVTSLIRLHLCAH

SEQ ID NO: 324625 - protein, 55 aa, Zea mays
  Clone ID: MRT4577_5912C.1.pep
ILCLFQTPHKEVDGLVSCRGDFLQHRRTKWLTIYTTLTLLIHEFVDCYDMPFDSR

SEQ ID NO: 324626 - protein, 44 aa, Zea mays
  Clone ID: MRT4577_59130C.1.pep
LKGGRILIYMCLVIFFKIAETSLFVFYTRVIYDWQFFKHSEMVG

SEQ ID NO: 324627 - protein, 81 aa, Zea mays
  Clone ID: MRT4577_59131C.1.pep
GPAAAATVPARSRPRAPLSDPGRNKGDGAAAAEGAGGRRAARPLVGGGGVPGVGSGQARLAPSMRWCHSLVVVCVNASCSL

SEQ ID NO: 324628 - protein, 61 aa, Zea mays
  Clone ID: MRT4577_59132C.1.pep
PYAAARLKLGHQITSGSRNQLTHDLFGKPSTNLGKEKPFMGYWQKQWLNYFQKKVQPLVGG

SEQ ID NO: 324629 - protein, 70 aa, Zea mays
  Clone ID: MRT4577_59133C.1.pep
MGLQIQYMSMQVRGLPCAHNFHVECIDQWLRLNVKCPPCRCSVFPNLDLSALNNLWSTSEPDHSSCSASN

SEQ ID NO: 324630 - protein, 228 aa, Zea mays
  unsure (1)..(228): unsure at all Xaa locations
  Clone ID: MRT4577_59134C.1.pep
MQHDQKKKAPSEMDFFTEYGEGSRYKIEEVIGKGSYGVVCSAVDTHTGEKVAIKKINDIFEHVSDATRILREIKLLRLLRHPDIVEIKHILLPPSRREFRDIYVVFELMESDLHQVIKANDDLTPEHYQFFLYQLLRGLKYIHTANVFHRDLKPKNILANADCKLKICDFGLARVAFSDTPTAIFWTDYVATRWYRAPELCGSFFSKYTPAIDIWSIXGCIFAELLTG

SEQ ID NO: 324631 - protein, 632 aa, Zea mays
  Clone ID: MRT4577_59135C.1.pep
MDNIEVRRRKKKGRSSGRRQGGRVQAVLRAGLVAMAFALLCLCSSTPSAIALTPDGEALLELKLAFNATVQRLTSWRPSDPNPCGWEGISCSVPDLRVQSINLPFMQLGGIISPSIGRLDKLQRLALHQNSLHGPIPAEIKNCTELRAIYLRANYLQGGIPSEIGELVHLTILDLSSNLLRGTIPASIGSLTHLRFLNLSTNFFSGEIPNAGVLGTFKSSSFVGNLELCGLSIQRACRGTLGFPAVLPHSDPLSSAGVSPINNNKTSHFLNGVVIGSMSTLALALVAVLGFLWICLLSRKKSIGGNYVKMDKQTVPDGAKLVTYQWNLPYSSSEIIRRLELLDEEDVVGCGGFGTVYRMVMDDGTSFAVKRIDLSRESRDRTFEKELEILGSIRHINLVNLRGYCRLPTAKLLVYDFVELGSLECYLHGDEQEEQPLNWNARMKIALGSARGLAYLHHDCSPGIVHRDIKASNILLDRSLEPRVSDFGLARLLVDSAAHVTTVVAGTFGYLAPEYLQNGHATEKSDVYSFGVLMLELVTGKRPTDSCFIKKGLNIVGWLNTLTGEHRLEDIIDERCGDVEVEAVEAILDIAAMCTDADPGQRPSMSAVLKMLEEEILSPCMSELCYEQHLEL

SEQ ID NO: 324632 - protein, 120 aa, Zea mays
  unsure (1)..(120): unsure at all Xaa locations
  Clone ID: MRT4577_59136C.1.pep
MACGPRRLGSPCPRPPPAAVXRGPGRPARGRXRSSAVAGERGPPASTGAASPAARXGGGPGGAGATPRRTRVRGPSARAGVPPPARASRPLAASSGSSARGRGPGCAEAPGHCLRGTTPA

SEQ ID NO: 324633 - protein, 287 aa, Zea mays
  Clone ID: MRT4577_59137C.1.pep
ITAVSGRGGIRPPVGFFHLRALGQGRSVVSQPRLSCTRACGHSAAPSEMDFFTEYGEGSRYKIEEVIGKGSYGVVCSALDTHTGEKVAIKKINDIFEHVSDATRILREIKLLRLLRHPDIVEIKHILLPPSRREFRDIYVVFELMESDLHQVIKANDDLTPEHYQFFLYQLLRGLKYIHTANVFHRDLKPKNILANADCKLKICDFGLARVAFSDTPTAIFWTDYVATRWYRAPELCGSFFSKYTPAIDIWSIGCIFAELLTGKPLFPGKNVVHQLDIITDLMGTPS

SEQ ID NO: 324634 - protein, 415 aa, Zea mays
  unsure (1)..(415): unsure at all Xaa locations
  Clone ID: MRT4577_59138C.1.pep
RVASVSSSNPHIFTPYEYFKLTLCDFVLAKVDFSGSXTSVFFPDIRKSRWYRTLXLCGSFFSQYTPGIVIWXSLGFIFAELLTGKPLFPXGKNVVHQLDIITDLIGTPSPEAISRIRNEKARRYLSSMRRKKPIPFTQKFPNADPLALCLLERMLAFEPKDRPSAEEALAHPYFKNIANVDREPSAQAVTKLEFEFERRRVTKEDIRELIYREILEYHPKMLKEFIEGTESSGFMYPSAVDNFKKQFAYLEEHYAKGSTGTPPERQHNSLPRPSVVYSDNQSQSTANITEDLSKCIIRENAQKTQQYNASVANKFPPHVPQGAAARPGKAVGSVLQYNLSQASAAEQYEQRRIARHPAVAPNNIPSGSSYPRRSQTCKSETGDAESHMDANQARQPKPYAANKLPATVDSRGGHW

SEQ ID NO: 324635 - protein, 566 aa, Zea mays
  unsure (1)..(566): unsure at all Xaa locations
  Clone ID: MRT4577_59139C.1.pep
MQHDQKKKAPSEMDFFTEYGEGSRYKIEEVIGKGSYGVVCSALDTHTGEKVAIKKINDIFEHVSDATRILREIKLLRLLRHPDIVEIKHILLPPSRREFRDIYVVFELMESDLHQVIKANDDLTPEHYQFFLYQLLRGLKYIHTANVFHRDLKPKNILANADCKLKICDFGLARVAFSDTPTAIFWTDYQTRQDDQTSYEGRTAFSRRLAXLNPAHRFSHVAMDAVDSVVDPLRDFAKDSVRLVKRCHKPDRKEFTKVAARTAIGFXSSWASSASSSSSSSFPSTTLSSVPARLRARLAXSSAILLRARDSEDLGLWNSIVNDIFFPXLCFWSKSLNDKASGCLDVDSGRRRVTKDDIRELIYREILEYHPKMLKEFIEGTESSGFMYPSAVDNFKKQFAYLEEHYAKGSTGTPPERQHNSLPRPSVVYSDNQSQSTANITEDLSKCIIRENAQKTQQYNASVANKFPPHVPQGAAARPGKAVGSVLQYNLSQASAAEQYEQRRAARHPAVAPNNIPSGSSYPRRNQTCKSETGDTERMDVNQAGQPKPYAANKLPATVDGRGGHW

SEQ ID NO: 324636 - protein, 344 aa, Zea mays
  Clone ID: MRT4577_5913C.1.pep
MAASLRASSSLRSRLLSFSSGCSLCPWRLLLSSPVHSDAPHQTETLAFDEIQLSPEKPATATAFVLHGLLGSGRNWRSFSRALVSELRNRSPSDEWRMVLVDLRNHGRSAGIKGLGPPHNISTAAKDLADLVKARGWPWPDVVVGHSMGGKVALDFAESCSRGVYGDSANLPKQLWVLDSVPGQVETENSDGEVEQVLQTLASLPSSLPSRKWVVDHMLSLGFSKSLSEWIGSNLKKDNDHVTWAFNLQAAIDMFSSYRERDYWSVLEHPPKDLEIAIVQAEHSDRWVPDDVQRLKALAGRESKPDVGKVSLHVLPNSGHWVHVDNPKGLLEIMVPNFLSAVQN

SEQ ID NO: 324637 - protein, 180 aa, Zea mays
  unsure (1)..(180): unsure at all Xaa locations
  Clone ID: MRT4577_59140C.1.pep
ACRWSLLAGRLPGRKXNEXKNYWNRTLGPGAGGSRVVFAPDTGSHATPAAAGSREMTGGQKGAAPRADLGSPGSAAVVWAPKAARCTGGLFFHRDTPHAGGTETPTPTPMMAGGGGGEARSSDDCSSAASVSPLVGSSQHDPCFSGDGGDGDWMDDVRALASFLESDEEWLRCHTAEQLV

SEQ ID NO: 324638 - protein, 108 aa, Zea mays
  Clone ID: MRT4577_59141C.1.pep
LLILDLFYASLHLTGDVARPGKAVGSVMQYSPCPAPAAERYEQRRIARHPAVAPNNIPSGSSYPRRSQTCKSETGDAESHMDANQARQPKPYAANKLPATVDSRGGHW

SEQ ID NO: 324639 - protein, 61 aa, Zea mays
  Clone ID: MRT4577_59142C.1.pep
LLGGRVGLERSLPPFLGMFTDYRVNVFITAAPNMTMIVIIILVPVAISFLQCLNLSINLTD

SEQ ID NO: 324640 - protein, 71 aa, Zea mays
  Clone ID: MRT4577_59143C.1.pep
FIWCRCTHRRLTQPPSELAPLACYASLSQQWSPSVLQMHVTVKSVTRPHSVRFVHIPEISSLGSTKSPFLV

SEQ ID NO: 324641 - protein, 149 aa, Zea mays
  unsure (1)..(149): unsure at all Xaa locations
  Clone ID: MRT4577_59144C.1.pep
RRVRGRVGTMDRAILTNVHLENGEEWHVNSLXYKRGTTXAGDPCPVLYCGPDGLDPSRDCSVLRGSEVSSXCAELEXRALTNRLKAGQTRAAYRAVAMILMNKEREGYTIXGEAHVLPALHVSYQSWSKILAYLNSTANGTASINLRGQ

SEQ ID NO: 324642 - protein, 79 aa, Zea mays
  Clone ID: MRT4577_59145C.1.pep
ETARLGMSFFYYKKGRSSIHRCGAPINLKPKPEVRWASKIIVDQAYECCSFPFCNKRNCTVGYELDFLLPFCCSGLLWL

SEQ ID NO: 324643 - protein, 108 aa, Zea mays
  unsure (1)..(108): unsure at all Xaa locations
  Clone ID: MRT4577_59146C.1.pep
GSDPRRXGPLTSFASSPPSVCRRLRPRTSLSLSWSPKMTEVALRRAGIVXAIYGTQVXGASLRKPNQERWKGISCIPSTFCEVLWESLAVKEEKQVGNLWGAKDLWER

SEQ ID NO: 324644 - protein, 51 aa, Zea mays
  Clone ID: MRT4577_59147C.1.pep
KFITKHNPKTFKKNTHFFYCKLKKGLLLILVPHTNKVVFKKEKTHHQVPFK

SEQ ID NO: 324645 - protein, 70 aa, Zea mays
  Clone ID: MRT4577_59148C.1.pep
PRVRPRVRGSVLNFLHVFRPLLNITGEFTAEDVEAALITPNEILDDVHMPLLKAACIVLPSLEWDAAFSL

SEQ ID NO: 324646 - protein, 121 aa, Zea mays
  Clone ID: MRT4577_59149C.1.pep
LSSQGSAIPMLTNCRQALALQGFVRTVGRHCRLCLCSVELGGPRASGASAPPASATSGVAAAPPSWLGVGSTGVVLRPSGPLFLCVVSPCCLMWCLSASACFCGLMVVVSSAPRSRVHAAV

SEQ ID NO: 324647 - protein, 108 aa, Zea mays
  unsure (1)..(108): unsure at all Xaa locations
  Clone ID: MRT4577_5914C.1.pep
DACSFCKLHKLSFLDMSGCLNLVSLPESFCDLRSLENLNLSSFHELRELPLGNHQELLILDMSNCHKIQILPMSFCNLLHLXKDLNLSCCYELQELPEDFGKKSWAFV

SEQ ID NO: 324648 - protein, 66 aa, Zea mays
  Clone ID: MRT4577_59150C.1.pep
YRANLALHSMLHYVVYLCADTRASLSQYLYLFDAEFYRIDAYSTSERLDISLIADSILSAFRHINL

SEQ ID NO: 324649 - protein, 60 aa, Zea mays
  Clone ID: MRT4577_59151C.1.pep
RASSGLWIVAISKGTGGRLVFYMSYLFADKRSPRPGSGRSPTSPRLLASHTERQRLPASK

SEQ ID NO: 324650 - protein, 65 aa, Zea mays
  Clone ID: MRT4577_59152C.1.pep
CSPSETSLAEVCKMVGFLAPAVNHAAAQPVLRSDPDGRSTASYSLPHLPATASQSTKRRRDLTAT

SEQ ID NO: 324651 - protein, 116 aa, Zea mays
  Clone ID: MRT4577_59153C.1.pep
HVVSRSRSHQNEGYDIPRGGKILPVLAAVHLDSSLYEDPSRFNPWRWKSNNAPSSFMPYGGGPRLCAGSELAKLEMAIFLHHLVLNFRWELAEPDQAFVYPFVDFPKGLPIRVQRV

SEQ ID NO: 324652 - protein, 55 aa, Zea mays
  Clone ID: MRT4577_59154C.1.pep
QGTSITSGDLAGGAETRCRDEQPRLHPHSPTLARVFYSGIELFCRRTSPTVSSPQ

SEQ ID NO: 324653 - protein, 44 aa, Zea mays
  Clone ID: MRT4577_59155C.1.pep
DVPHPLSKKRYSLLDTSWLSGYSHAVKLLVRTPGSVSCFEGKLF

SEQ ID NO: 324654 - protein, 59 aa, Zea mays
  unsure (1)..(59): unsure at all Xaa locations
  Clone ID: MRT4577_59156C.1.pep
XSYYTFLTPFLHTLKFNYFTVSYIYSIFQIHLFXKLGRADLIHTTPQISFKNPHYTFGL

SEQ ID NO: 324655 - protein, 250 aa, Zea mays
  Clone ID: MRT4577_59157C.1.pep
MADYHFVYKDVEGASTQWDDIQRRLGNLPPKPEPFKPPPFAPKVDAGEQPKSKEWLDEREAEELEELEDDLDDDRFLEQYRKMRLAELREAAKAARFGSIVPITGSDFVREVSQAPSDVWVVVFLYKDGIPECGLLQNCLEELATRYPATKFVKIISTDCIPNYPDRNVPTILVYNNSAVKGTYVGLQKFGGKRCTPESVALALCQSDPVLNDGHGGSDSSRDNVIEGVRRKFIEKVVAQHEEREEEDSD

SEQ ID NO: 324656 - protein, 45 aa, Zea mays
  Clone ID: MRT4577_59158C.1.pep
QTVCAILLYFSPIGSNSVVPQLAQVGSPNVFPSFELLAFRPNARS

SEQ ID NO: 324657 - protein, 102 aa, Zea mays
  Clone ID: MRT4577_59159C.1.pep
TGARAGDAGTQVSRSHGQQSRRSNRRREATGSSAGMHRNDRSSVAWSRRGGRIQCPHNCTRKPHPGCLLGQTPGRCPAFSALGRKMSLKLKTWDSSSVRRMK

SEQ ID NO: 324658 - protein, 137 aa, Zea mays
  unsure (1)..(137): unsure at all Xaa locations
  Clone ID: MRT4577_5915C.1.pep
ASPARVKKRSFPVGAPSRKATGPPPVAMVARALLSGGAMAQEVFLGAGNGGLXFKPSQFPVKAGDPLPFKNKAGFPPKVVFEKKKGPNGVYPPKISQEEYPNGPGETYSVPLPGPGTYGFFCEPHQGAGMVGKIPVN

SEQ ID NO: 324659 - protein, 250 aa, Zea mays
  Clone ID: MRT4577_59160C.1.pep
MADYHFVYKDVEGASTEWDDIQRRLGNLPPKPEPFKPPPFAPKVDADEQPKSKEWLDVREPEELEELEDDLDDDRFLEKYRKMRLAELREAAKAARFGTILPITGSDFVREVSQAQSDVWVVVFLYKDGIPECGLLQNCLEELATRYPATKFVKIISTDCIPNYPDRNVPTILVYNNSAVKGTYVGLQKFGGKRCTPESVALALCQSDPVLNDGHGGSDSSRGNVFEGVRRKFIEKVVAQHEEREEEDSD

SEQ ID NO: 324660 - protein, 50 aa, Zea mays
  Clone ID: MRT4577_59161C.1.pep
LTCVIQFVFDQLHISSTNIFSISLSLSRERHCLSLISYIYLVLIYSLYPC

SEQ ID NO: 324661 - protein, 98 aa, Zea mays
  Clone ID: MRT4577_59162C.1.pep
IDYRDYLRWLSRGNSRSHNSSWIAFCRLSRTRITGYKRKVLGVPSEKLSGDVPRARITNIFFSEILGPLVLVAVTLVPYLFINARTGVTRMVKRRPTP

SEQ ID NO: 324662 - protein, 77 aa, Zea mays
  Clone ID: MRT4577_59163C.1.pep
SRVSSRTHTINEREPVTQKGAKHLTLHVRSPSTVSIPYKDEGLLCSHLTGIRRPGIVHLNEPIVLNDNCHHGGRLSS

SEQ ID NO: 324663 - protein, 107 aa, Zea mays
  Clone ID: MRT4577_59164C.1.pep
MYSYKRQSAPWSEDELGSLWIGVRRYRMNNWNAMLMDSRLRFSISRMPEDLAKQWDKEQNKLEGPAQADCYLGRAFCCRCSKSGCGGGQAQTGLSLGEYYLGRASCS

SEQ ID NO: 324664 - protein, 57 aa, Zea mays
  Clone ID: MRT4577_59165C.1.pep
MSPLPLLWLIGLQDLLVGEVASCHFDASESSRARFVALKLPAEAGAVHEYEPNKMLS

SEQ ID NO: 324665 - protein, 126 aa, Zea mays
  Clone ID: MRT4577_59166C.1.pep
MPAAMPSPPGRLLASIPLRCHAPTQQPSTTAARGLLLRGACSPVVKRVPDGGGWLLWHQSGPRVALSTSMDGLRWSAPVSPDPLLPSEDWGTFDTACVRPSDVLLASGLAGFSRCLPFSAGWCVFC

SEQ ID NO: 324666 - protein, 233 aa, Zea mays
  Clone ID: MRT4577_59167C.1.pep
PEANQNAWKSLSVVELTNSCSRESMILTIMNSIRDLPDLELENIRSQLLRDFSPDDVCPSSAHFLESPGKIAPSCSDDDTDYDYQEAELIDLRNDNNTYLEASATTLAAIAIPVPTTNLLSIDELLETVVNDVSSQTGGQCLVSMAGDIPFQEMTSPCEAFSMGKPPKMSLLMSFKQNKQAAMVVVPDNQSPNPFLLQSISAGEAQVAGDVQQPFLRLPPSSPYDNFLKAAGC

SEQ ID NO: 324667 - protein, 63 aa, Zea mays
  Clone ID: MRT4577_59168C.1.pep
LPPFRCAICQVDQEPFEGLMTDNVGGCCSAPSTPWGGPYLCSDCRKKKDAMEGKRSNRSATCR

SEQ ID NO: 324668 - protein, 103 aa, Zea mays
  unsure (1)..(103): unsure at all Xaa locations
  Clone ID: MRT4577_59169C.1.pep
KNRLKVMGSVISDWEGNDRSTTPAHANYSDSIEAGVGAGNDMIMVPCRYTQLMLDLATQVHNKVMPMSSICDALXRIIPATITMGLYESTYSDCSIADLIGTQ

SEQ ID NO: 324669 - protein, 55 aa, Zea mays
  Clone ID: MRT4577_5916C.1.pep
PPSFPLHFALARVIGYWTLCENESLCFWMNPPKRWRSDLFSLLGLCICVGRLMCL

SEQ ID NO: 324670 - protein, 282 aa, Zea mays
  unsure (1)..(282): unsure at all Xaa locations
  Clone ID: MRT4577_59170C.1.pep
MDPFLXLVHENKLQRLXDYTEDPSTSYGSPEDNQNALKSLSVVELTNSCSRESMILTIMNSIRDLPDLELENIRSQLLRDFSPDDVCPSSAHFLESPGKIAPPCSDDDTDYDYQEVHGNFEQAELIDLRNDNNTYLEASATTLAAIAIPVPTTNLLSIDELLETVVNDVSSQTGGQCLVSMAGDIPFQEMTSHCEAFSMGKHHKMSLLMSFKQNKQAAMVVVPDNQVSHAEAAHTSDKQSTNPFLLQSISAGEAQVAGDVQQPFLRLPPSSPYDNFLKAAGC

SEQ ID NO: 324671 - protein, 50 aa, Zea mays
  Clone ID: MRT4577_59171C.1.pep
MDNIFVSIHYKFHSYTYIITVNLFLISSLIKYPPSIIFLRNTMTIIHPLH

SEQ ID NO: 324672 - protein, 58 aa, Zea mays
  unsure (1)..(58): unsure at all Xaa locations
  Clone ID: MRT4577_59172C.1.pep
EKFLNIEEKMVKKKGYLKGKMVILKEFHLSSKAIRTKGINHPRLDDNSSNTPNRNSSX

SEQ ID NO: 324673 - protein, 38 aa, Zea mays
  Clone ID: MRT4577_59173C.1.pep
FKMLIAFKPIPPITIGILHVPFFTTNKFINSFLNILLP

SEQ ID NO: 324674 - protein, 86 aa, Zea mays
  Clone ID: MRT4577_59174C.1.pep
SRKLQLRLTNKKITADGSSYVRACNCKRQHSTAPSYFVRDDSRSRGADSLKRSPAVRQAPPDDEPSPVVEEAVAAVEAAAAFPTAV

SEQ ID NO: 324675 - protein, 168 aa, Zea mays
  unsure (1)..(168): unsure at all Xaa locations
  Clone ID: MRT4577_59175C.1.pep
VVVFFFFFFFFFFFFFFFFFFFFFFFFFFFFSPQRNPFFHHLLGHFFQTRRRXGXTPPINQTXLTKDPSFNPXFPPFKKPNPPPRVFPPPPPLKSCLINPKTPSPPWTGPTNGRLKKTPPTFQKLFFGTPPPCGCPPFLTPPFPWGGPPPRTPGRPPLQGPPSFSPPP

SEQ ID NO: 324676 - protein, 124 aa, Zea mays
  Clone ID: MRT4577_59176C.1.pep
RLARLGPRRAAHSQRVPLVGCWWICVRAPNRSSLLRWQQRLVSKGPGDQLGDFVRPRHWPARPALPEEGRARLVVRHEPGGAGAPGVRAGRCDQQCREPRQVLEPTAQDRRVLAGGCGHQPAGR

SEQ ID NO: 324677 - protein, 68 aa, Zea mays
  unsure (1)..(68): unsure at all Xaa locations
  Clone ID: MRT4577_59177C.1.pep
EKTALNCSWSPDQETVELDEEPEVDIVRLGAVRXSLIPPTADEVDTHSCGXGGARVPAIAAYLVRLLL

SEQ ID NO: 324678 - protein, 107 aa, Zea mays
  unsure (1)..(107): unsure at all Xaa locations
  Clone ID: MRT4577_59178C.1.pep
DLPFPXXRKKGGEFKXHXHNNXNFHXQHKKNXNPFLLNPKPXIXXXTPQXLQTFNKINIGGGGDNNFLXXXPPXLPLKLYXXXXXTLTNKXLXXPHXXTXXXIQKLP

SEQ ID NO: 324679 - protein, 36 aa, Zea mays
  Clone ID: MRT4577_59179C.1.pep
RRKFPEAFLCGTRQSRKYPRARRLSVGCIVAFGVTA

SEQ ID NO: 324680 - protein, 62 aa, Zea mays
  Clone ID: MRT4577_5917C.1.pep
VRGNERLPPIASPNHMHPLPWVPNLCGNGFSPWNEMHSEVSVLATKHVLPFLVIHYLWLKFQ

SEQ ID NO: 324681 - protein, 86 aa, Zea mays
  Clone ID: MRT4577_59180C.1.pep
GGPLWRVFGGFHALFLPQRFQGPFTLWFLLGPEAAPGFWFFRRVVPAPPVPFFLGGWGLPPLSGGFCGGLAFFFIGFWVKNPHFLH

SEQ ID NO: 324682 - protein, 78 aa, Zea mays
  Clone ID: MRT4577_59181C.1.pep
LSRIRQLVRLPMVMRRLWHGARDALQLRVHVALVEAPLGVAQVGVVEGGGRLDVPGVLDHLVQVGVGQADVHGAPTRG

SEQ ID NO: 324683 - protein, 76 aa, Zea mays
  Clone ID: MRT4577_59182C.1.pep
LHDQVNQKKCRLHKLDKSIQDTKNIEERSLEQHAMNKLVERAYRKLKVVEISLHMIVLLKSMLVLHEITNVLALLF

SEQ ID NO: 324684 - protein, 197 aa, Zea mays
  Clone ID: MRT4577_59183C.1.pep
DAWAQPPSSPSVRRTSPHHRLTKTLIPSRHGGCCGDGDEDDDGEGGDEEDDDEEVDGEEKEAAGVVEISDEDDDDGDGEADDDDDDDGDDDDDDDEDSDDEEEVDGEDDQEAGLGTEYLVQPLGRAEDEEHSSDFEPEENGEDADDEEIDEEDDDGEDSVKAQTSTKRKRSGDDEEDDDDGDDDGDDDDDGRPPSKR

SEQ ID NO: 324685 - protein, 199 aa, Zea mays
  Clone ID: MRT4577_59184C.1.pep
FCLPSHCCLAPGREGSPCSAIRTTALSPSRSDAEPLAIVAVASCPSPLSLPLPSSKHLPLLLPPLKALVGPPPPHLHPIIAYAIAAAFGSFSLSLDCSLIFTEALLTPAIPSVSACAGGILPSLSRFILRSVRALSNRRHGELAPLPCSPRAPTISSTTFKPPTTTSSSTTRPLTHPNLVRRKRAAALRLGRPRPAPRR

SEQ ID NO: 324686 - protein, 160 aa, Zea mays
  Clone ID: MRT4577_59185C.1.pep
KPAVEAEADERAAEEMAPKKAAAAKKAAEEVEVEEVVDGDEAVDGEGDGDEDDDDDDEDSDDEEEVDGEDDQEEELGTEYLVQPLGRAEDEEHSSDFEPEENGEGADDEEIDEEDDDGEDSVKAQTSTKRKRSGDEEEEDDDDGDDDGDDDDDGRPPSKR

SEQ ID NO: 324687 - protein, 69 aa, Zea mays
  Clone ID: MRT4577_59186C.1.pep
SRVYGSQQQVCRAKSRDSDRIDANVAGHAQGVTAELLMVPTSAPPSYTRGHVQPHIARREHLDQYASLH

SEQ ID NO: 324688 - protein, 211 aa, Zea mays
  Clone ID: MRT4577_59187C.1.pep
MKPAVEAEADERAAEEMAPKKAAAAKKAAEEVEVEEVVDGDEAVDGEGDGDEDDDGEGGDEEDDDEEVDGEEKEAAGVVEISDEDDDDGDGEADDDDDDDGDDDDDDDEDSDDEEEVDGEDDQEEELGTEYLVQPLGRAEDEEHSSDFEPEENGEGADDEEIDEEDDDGEDSVKAQTSTKRKRSGDEEEEDDDDGDDDGDDDDDGRPPSKR

SEQ ID NO: 324689 - protein, 87 aa, Zea mays
  unsure (1)..(87): unsure at all Xaa locations
  Clone ID: MRT4577_59188C.1.pep
AEEGGXMLGLGASDFEFGVDPSADPEISLALRVSMEEQRQRQEEEARRAAAASAADAGIALSGTEGERDSDDALLKMTISQQEFGRA

SEQ ID NO: 324690 - protein, 85 aa, Zea mays
  unsure (1)..(85): unsure at all Xaa locations
  Clone ID: MRT4577_59189C.1.pep
MTLPPGLYSGTSSLALVARASAFGLGLVYGNMKLKVLKXNRCHRRRLKPPLIIKPLFFLYNKMPKAGGDVSPVSLISSFMIHPLA

SEQ ID NO: 324691 - protein, 66 aa, Zea mays
  Clone ID: MRT4577_5918C.1.pep
GHGTERYFIPFQSTQKVFVPGIFSTSACSPSLLSIVKDCTKRLWMFFLHIATEINTVDNILPKSSP

SEQ ID NO: 324692 - protein, 51 aa, Zea mays
  Clone ID: MRT4577_59190C.1.pep
DFGGFEMSLPTDYPFIVYMTYVSVQCYAISSSAEPLKTGLYLPMFPSCLII

SEQ ID NO: 324693 - protein, 94 aa, Zea mays
  unsure (1)..(94): unsure at all Xaa locations
  Clone ID: MRT4577_59191C.1.pep
DTGRHCWLALIPDENVGRKLERRKHSYNFKLFIQSSKGIQAVMLEKIKKHIPMRTITAISHRLPYKVFSSSGSSNEDFHNLDXWFLXLALVSEG

SEQ ID NO: 324694 - protein, 81 aa, Zea mays
  Clone ID: MRT4577_59192C.1.pep
DQTSSYSVNQSEIESIDSLLLDISMLRAATDNFAESNRLGEGGFGTVYKGVLPDNQEIAVKRLSQSSGRGVQELTRELAAV

SEQ ID NO: 324695 - protein, 86 aa, Zea mays
  Clone ID: MRT4577_59193C.1.pep
CPLCEGFIFVFTVSNSNNRIKKFPSFLQDLRTPSRVGDVFSVTNEATLASTMLGACMLPSEITIQGFCRWRTDTVTMHALVPAELF

SEQ ID NO: 324696 - protein, 107 aa, Zea mays
  unsure (1)..(107): unsure at all Xaa locations
  Clone ID: MRT4577_59194C.1.pep
ETDLRGLDLEAIMEFYHREVGVFKGGSKKPPVGEGLNKASEGAFLNIQWVNKKTGEEYCXGAKVERFREILIKKAEEQGPEFLSFYSSQGKWKFRVKQFRAYGVPCR

SEQ ID NO: 324697 - protein, 551 aa, Zea mays
  Clone ID: MRT4577_59195C.1.pep
MAVGGTQPVLRKYLGALKDTTTVSLAKVNSDYKELDIAIVKATNHVERPSKEKYIREIFHSISAARPRADVAYCIHALARRLSKTRNWAVALKTLIVIHRALREVDPTFREELISYGRSRSHMLNMAYFKDDSSAEAWDYSAWVRIYALYLEERLECFRVLKYDVETDPPRTKDLDTVALLDHLPSLQQLLFRLLACQPQGASSYNVIIQHALSMVALESIKIYTAISDGTINLVDKFFEMQRNDAVRALDVYKRATNQAERLSEFYEVCKTIHIGRGEKFLKIEQPPASFLNTMEEYVRDAPTGQKEKAILAIEYKKEPEEEEKPSSPPAAPEPEPEQVPEPEPEPVKEEAPEAEPDLLGLNEPNPAATAIEEQNALALAIVPIDDAPKAAPTFGNGVTGWELALVTAPSSNETAVAPSKKLAGGLDLLTLDSLYDEANRRASQPASYNPWEATPAAPAPMMTMAPVMHDPFYASNGYAAPHGVQMAAMAQQQQAFMLQQQQMMTMAPAQPVVHHPMQMQQNPANPFGNPFAAAGMPLHAGPGNVYTGLI

SEQ ID NO: 324698 - protein, 58 aa, Zea mays
  Clone ID: MRT4577_59196C.1.pep
KQKRGFCPFPTSKPKGGAGAPNLSQNNLKFCRGGPHTNCYQCFGWGKRLKTTLKQHFF

SEQ ID NO: 324699 - protein, 530 aa, Zea mays
  Clone ID: MRT4577_59197C.1.pep
MAVGGTQPVLRKYLGALKDTTTVSLAKVNSDYKELDIAIVKATNHVERPSKEKYIREIFHSISAARPRADVAYCIHALARRLSKTRNWAVALKTLIVIHRALREVDPTFREELLNYGRSRSHMLNMAYFKDDSSAEAWDYSAWVRIYALYLEERLECFRVLKYDVETDPPRTKDLDTVDLLDHLPQLQQLLFRLLACQPQGASSYNVIIQHALSMVALESVKIYTAISDGTINLVDKFFEMQRNDAVRALDVYKRATNQAERLSEFHEVCKTIHIGRGEKFLKIEQPPASFLQTMEDYVRDAPTGQKQKTILAIEYKKEPEEEEKPASPPPAPEQEPEQEPEPEPEPVKEEAPEAEPDLLGLNEPSPAATAIEEQNALALAIVPIDDVPGAAPTFENGVTGWELALVTAPSSTETAVAPSKKLAGGLDLLTLDSLYDEANRRASQPASYNPWDATASAPMMTTMAPAMHDPFYASNGYAAPHGVQMAAMAHHQQQQQVFMLQQQMMAPAPAVHHPMQMQQNPANPFGNPF

SEQ ID NO: 324700 - protein, 52 aa, Zea mays
  Clone ID: MRT4577_59198C.1.pep
FKTKIKELEGFSPPLLPKMSQGKGPGMGPPPGMDKNPPSGGTGPGPKIEGVD

SEQ ID NO: 324701 - protein, 88 aa, Zea mays
  Clone ID: MRT4577_59199C.1.pep
MAMRLAAAAAAAFVRRLAPARPPVPILAAASTAEAVTCGRGDKKTKRGKRFKGSYGNARPKREKKIERIKDRVEVPRSTPWPLPFKLI

SEQ ID NO: 324702 - protein, 62 aa, Zea mays
  Clone ID: MRT4577_5919C.1.pep
QQASASAGRLLSCMNVLASASFHCLQKCPGHHRSQRALIQLLPAHLMHAVLTDLSECPYGNI

SEQ ID NO: 324703 - protein, 41 aa, Zea mays
  unsure (1)..(41): unsure at all Xaa locations
  Clone ID: MRT4577_591C.1.pep
RLPTLHEHNHTYLIXILPLPPSNQSGCRHQCALHKCRHPRK

SEQ ID NO: 324704 - protein, 88 aa, Zea mays
  Clone ID: MRT4577_59200C.1.pep
MATRLAAAAAATFMRRLAPARPPVPILAAASTAEAVTCGRGDKKTKRGKRFKGSYGNARPKREKKIERIKDRVEVPRSTPWPLPFKLI

SEQ ID NO: 324705 - protein, 181 aa, Zea mays
  unsure (1)..(181): unsure at all Xaa locations
  Clone ID: MRT4577_59201C.1.pep
GPTRKGVCGPPPPPGSGPWWEFGGGGPGQPPLPPSGPWAGGPPRIDVGPPRPGGGPTGXGGLTQNQKRGGPNERGPCPQNPNGPAEXLKGGXPQPFEPKGEPPGNPPQGLSNRNPLLGLXKIGRTGVPPSGWXPRSGPLKGGSPWAGLGQKPRTPYGRPHVRAGGKRAQSGPPKRRFFWVS

SEQ ID NO: 324706 - protein, 75 aa, Zea mays
  Clone ID: MRT4577_59202C.1.pep
NKGWAYIPYLGFIKTNFWNGGITYTKKAPAFGGFNLRAQKTKHRRGGFKALQKLLFVESFKGGVGNIKIPFFLAF

SEQ ID NO: 324707 - protein, 96 aa, Zea mays
  Clone ID: MRT4577_59203C.1.pep
LEYARNIETNLQVNDFFWKLLSLEYTILAFVDNSCQNPDCASSVCRLLSVVSLPHQLDHKLPVLTQKIIRYLLPPPLNHYFHGFMYSGQKKCFCPW

SEQ ID NO: 324708 - protein, 44 aa, Zea mays
  Clone ID: MRT4577_59204C.1.pep
FTPVFLICPHVNAKKVGLKGQNKLCVSGYSCYHMSCIPVAGTPK

SEQ ID NO: 324709 - protein, 286 aa, Zea mays
  unsure (1)..(286): unsure at all Xaa locations
  Clone ID: MRT4577_59205C.1.pep
ASLTSSSSYVAPAWFPAPRVRHLELIVMLAGGVYGFATQMLAYSPMPFNADGSIPPERLPNHEHAIMYASLLVYAGSAIYLDRHRHRHRHTTLCMLLLAAVFAQELFVFHVHSTDHAGVEGRLHWFLQAAAATCLATALLGAAXXGGGLPAEVQFAVSLVRSASLAFQGLWGVVIGVVWIPGMAPKGCFLDDGGVNLRCHGEDSLHHAVAVVNLQFGWCFVLVTVLVLGVYVYVCKMYTAGDGEVYGRLPEAEAGDEDDHHHDMKTRNCKLAVHDVHEFMSMEIDV

SEQ ID NO: 324710 - protein, 511 aa, Zea mays
  Clone ID: MRT4577_59206C.1.pep
MRRASPSLSPARGPAVFAAAVVVFLPVLFPGLFSPLGHAFPSVFSEWNAPKPMHPSLLNEALRWTATDGQKKDLWSPLPYQGWKPCLTPSVSHKLPLEPSGYIQVFLDGGLNQQRMGICDAIAVAKILNATLVIPHLEVNPVWKDSSSFEEIFDVDHFINSLKDEVSIIKVLPKEFSWSTREYYGTGIRATRIKTAPLHASANWYLENVSPILQSYGIVAIAPFSHRLAFDDLPVDLQRLRCKVNFQALVFRSHIISLGETLVKRLRSPVRVHSSKSIHQVVGDTNQAEKYAVLHLRFDKDMAAHSACDFGGGRAEQLALAKYRQVIWQGRVLNSQLTDEELRNTGRCPLTPEEIGLLLVALGFDNRTRLYLASHKVYGGEARISSLRKLFPLMEDKRSLASEDELANVEGKASVLAALDYYISMHSDIFISASPGNMHNALVAHRSYENLKTIRPNMALLGRTFANKSMEWPEFQQVVQAGHKGRYGQIRLRKATQSIYTYPAPDCMCQG

SEQ ID NO: 324711 - protein, 37 aa, Zea mays
  Clone ID: MRT4577_59207C.1.pep
VDDIESSALSHACTCGALFVFRTSPLVIVNLLSRVGL

SEQ ID NO: 324712 - protein, 172 aa, Zea mays
  Clone ID: MRT4577_59208C.1.pep
PRVRKILNATLVIPHLEVNPVWKDSRCLCSLKLYIPCSPVEAEIFFFIYYTGSFFPGCSSFEEIFDVDHFINSLKDEVSIIKVLPKEFSWSTREYYGTGIRATRIKTAPLHASANWYLENVSPILQSYGIVAIAPFSHRLAFDDLPVDLQRLRCKVNFQALVFRSHIILLGE

SEQ ID NO: 324713 - protein, 87 aa, Zea mays
  Clone ID: MRT4577_59209C.1.pep
GHSLSLIRVFDFCVEKTICREVVLDKRLLLNKEVTCVLQSMVYFGAWYRRIPAEYSTIVGYIWVPWGKFTGRRFPQQGWENHSYQPI

SEQ ID NO: 324714 - protein, 178 aa, Zea mays
  unsure (1)..(178): unsure at all Xaa locations
  Clone ID: MRT4577_5920C.1.pep
GRRXGRREXQXKNKXXPKARXGRXAXDPKXRXDEAGRKRKGADEXPNGXHXXXXEKENGTREXXEAAXXAGNKXRTKXAGKXAXHXRXRXHPXQGXRXNKRXTRAGAXRXQTGRRGAXGKXQGTGXRGDXGQXXXXGRXKDNKXAQAXEXRRRAKTKPPGRQKTTESRKRGXTKXSRA

SEQ ID NO: 324715 - protein, 610 aa, Zea mays
  unsure (1)..(610): unsure at all Xaa locations
  Clone ID: MRT4577_59210C.1.pep
MERRRADKEEAEEPLRPEEEEDEEDEEEGWDDWCSDGEDVGGGLLCLFCSSSFDSESSLFEHCAAEHCFDFHMIVKELGLDFYSCIKLINFVRSKVAEKKCWSCGQAFSSNTELCSHLHTVENCLIEGKVPWEDDVYLKPFMEDDSLLHSLSIDDDDEDGDCGVSMEKGQYSAGNEVLAEPWGNKLSSISERNDSDISAQFQQECTIGSTQREVRESLHVAIDGHLKVARASVNSKXIKTVDDNYFGSYSSFGIHREMLGDKVRTDAYRDAILGNPSLISGATVLDVGCGTGILSLFAARAGASRVVAVDGSAKMASVATQVAKNNGLLYDENVEAEQKQGSAQVISVVHTKAEELNQKIQVPQNGFDLLVSEWMGYCLLYESMLSSVIYARDHFLKPGGAILPDTAMILGAGFGKGGTSLPFWENGYGFDMSCIGKEVTSTSARFPVVDVLSSQDIVTETAVLHSFDLASMKESEMDFTASFELMLSESSATVSGVTWCYGIVLWFDTGFTDRFCKEKPVVLSTSPFSTPTHWSQTIFTFEEPIAMAKEESTLGSSALAGTDECPATALRSRISIVRASEHRSIDISVETTAISSDGRKRSWPVQIFNL

SEQ ID NO: 324716 - protein, 120 aa, Zea mays
  unsure (1)..(120): unsure at all Xaa locations
  Clone ID: MRT4577_59211C.1.pep
ENPIVQPYRIQQAIATGSLRLSPLFLQQPSALLQQYXLVHWGQHQHTLTLAATCDTLHIVFIPLAXMNSVXAHIHSPLCCYPAFFIQPLAXIXNSAAYLQQQQLLPFSQLADVSPAAFLD

SEQ ID NO: 324717 - protein, 76 aa, Zea mays
  unsure (1)..(76): unsure at all Xaa locations
  Clone ID: MRT4577_59212C.1.pep
LEXTQPAEXQRXXXPLGRQXTRXXSXXHXQXAERARXXXNSXHXRGXSKHNSKGKPPXXXPAXERNTKGXXXQAXQ

SEQ ID NO: 324718 - protein, 230 aa, Zea mays
  unsure (1)..(230): unsure at all Xaa locations
  Clone ID: MRT4577_59213C.1.pep
MERRRADKEEAEEPLRPEEEEDEEDEEEGWDDWCSDGEDVGGGLLCLFCSSSFDSESSLFEHCAAEHCFDFHMIVKELGLDFYSCIKLINFVRSKVYGXEGRISSLRKLFPLMEDKRSLASEDELANVEGKASVLAALDYYISMHSDIFISASPGNMHNALVAHRSHGNWKTIRPNMALLGRTFANKSMEWPEFQQVVQAGHKGRYGQIRLRKATQSIYTYPAPDCMCQG

SEQ ID NO: 324719 - protein, 291 aa, Zea mays
  Clone ID: MRT4577_59214C.1.pep
MAEVTPPADGQPASWSEIPRDLAGMVLCLLPAYADRARFAAVCPQWRAAARLLAPSLPPALPLLALPNGIFYSLPYSKPCRFPGSGCVGYKGAAFGSWLVFPRDEGCFLVDPFAGATVTLPALSSVRLRPPNAADNYVKYQERATPNGRHYVTWLDIRDSKHVPTLNKLIMCSPNLVAAFVGTGHISQILMCQPGASSWSVRAYDPCAAFEDMAFYQGKLYALDDDENLLVVDISQDQSTGDPHVCRIGQVIKGDPDHLFDAWMPDDTTGRKKLYLVESCGALLMVRKKVC

SEQ ID NO: 324720 - protein, 115 aa, Zea mays
  unsure (1)..(115): unsure at all Xaa locations
  Clone ID: MRT4577_59215C.1.pep
HPLTNASELPNSTIDLGFADFVGKAVNVPSSSAFXARXVTMLKTALKAKPDQDCQTLRYCPYPDLHLGPLPDKPPSYLTVQFPGHYRCDTARLQANLQTLXLNWQLQLIHSRYHM

SEQ ID NO: 324721 - protein, 118 aa, Zea mays
  Clone ID: MRT4577_59216C.1.pep
HIISPTLHGEGCPGYATVGRCSSPSLHSRLRSLRRCRGARRDFFAAVYRGGVRRPTSRTTKGVSGWIRGASRKKSRVNGFSNQGVRIEAPTGRLHRRNRRSTVSVVDSTRLLHRTGLR

SEQ ID NO: 324722 - protein, 81 aa, Zea mays
  unsure (1)..(81): unsure at all Xaa locations
  Clone ID: MRT4577_59217C.1.pep
HSRNRKSLWFLPFDHTLDSDDATDLATIVFYGWFIRPLTXGIDSDIMLEDVGDRLLQFTETXAALVTGHIXFLGGMYYVSQ

SEQ ID NO: 324723 - protein, 95 aa, Zea mays
  Clone ID: MRT4577_59218C.1.pep
KKGNQNWTFGGGGKSAFRKKGGPIQILVRPGTGGPKKNACPQKAKKKTPWLELWGEPKFYGRVRRKTPRFKGQFPPPPEGFKGGPPPGPLKGGFF

SEQ ID NO: 324724 - protein, 119 aa, Zea mays
  Clone ID: MRT4577_59219C.1.pep
VAAHRGELHQLQQFHIHGKGARVGPPRPHAKWRKWVVQRSRVTLETPRSYPSRRLCTLRVSEVTDGPPVQSHVPRRRGDVRAAPVQARAHLCIRFHVFFSFFMFGFLRSLFFLCYVLHS

SEQ ID NO: 324725 - protein, 110 aa, Zea mays
  Clone ID: MRT4577_5921C.1.pep
VLHQLGKRGSSANLLNWGTARIFQFRKWKKSGNEMVFPPPKGEMGPQKRRTKGPQGEGNPQKSPLEGARTKKEIFLYFVLLCGFVFRFYFFFFFFFFLFFFFFFFFFFFF

SEQ ID NO: 324726 - protein, 65 aa, Zea mays
  Clone ID: MRT4577_59220C.1.pep
PRVRLHIPRPHHRAYLLPSRGRLPRSSWWSIKAADPYHTNELSTNTPAHAVDPYVRRPTDMVRFS

SEQ ID NO: 324727 - protein, 108 aa, Zea mays
  Clone ID: MRT4577_59221C.1.pep
NCPSQGKKATGYTRHGQIQTDGRPGGAAAAQQLVIALHPTIRELLRCSRDSQDPCGHSCHASSSMICSGQRTAALIRAGVPLQACISRQVFTQPRPHAELRDEGSVLI

SEQ ID NO: 324728 - protein, 34 aa, Zea mays
  Clone ID: MRT4577_59222C.1.pep
FYVNEDKDVWKVDRLYELYQNLAVTHSVIFVNTR

SEQ ID NO: 324729 - protein, 73 aa, Zea mays
  unsure (1)..(73): unsure at all Xaa locations
  Clone ID: MRT4577_59223C.1.pep
TXSTPSDDEPGGRCSAGWRARTWWRKEKWQARRCSLLFPGGVGIGWGIEEPSPPRKRREGQGKEEGWTLVPNS

SEQ ID NO: 324730 - protein, 80 aa, Zea mays
  Clone ID: MRT4577_59224C.1.pep
RRDWRLRTRLSPRLKASSISYRRRCSSTPFRRHHDGSASLIHIWPMPGIHGLKTRCYGALLSLHACPFTAHCSPCPGDKT

SEQ ID NO: 324731 - protein, 257 aa, Zea mays
  Clone ID: MRT4577_59225C.1.pep
MEVLSSSRFARAILPNLLDPAIRILSKPPCRRRRAVQTLASNAHAPTAAPSPSPSLALLLATALRGGRTGGELPDLATAATGGAGIGTLLMSTTAAAVTKARESPYLLALAANPTFVSGLVAWAVAQAAKALLTSVVERRWDLRMLFSSGGMPSSHTALCTALTASVALCHGVSDALFPVCLGFSLIVMYDATGVRRHAGMQAEVLNKIVEDLFEGHPISERKLKELLGHTPSQVFAGAILGILVAWYCCQGCIVPM

SEQ ID NO: 324732 - protein, 55 aa, Zea mays
  Clone ID: MRT4577_59226C.1.pep
MAPKVALFLALSLLFAAAAHGCEPYCPGPAVPTPPVLPTPSSHSHGRCPSSKRVY

SEQ ID NO: 324733 - protein, 505 aa, Zea mays
  unsure (1)..(505): unsure at all Xaa locations
  Clone ID: MRT4577_59227C.1.pep
SHPIFPLLGTGGIVFYSFFWISRSWKDSIIVLQSTKALSPWSEELKVVGRCIDAIASKVAADPANVTWSYSHSSKKGGACAEIVEPAGKPSIAPKDWWVEDLCELDVDLYKRVMVAIKSKGRMSPELIGEALKAYAVRWLPDSYDALVAEDYMRRNQCLVETIIWLLPSDKSSGCSCRFLLKLLKVAILVGGGEHVKEELIRRISFQLHKATVKDLLLPATSPNDGTYDVRLVHNLVQRFVAXEQRCXNGGFIEKSDEKMIELNFEQESILSVGELVDGYLSEVASDQDLSLSMFVELATAVPEVARPVHDNLYYAVDAYLKEHPDINKSEKKKICSLVDVKKLSADASAHATQNDRLPLRLVVQVLFFQQLRAGPSKELALIDNGEHACTRPTQDQCDRGEXDTEASKLTEXQVTSLSARXASSTGSASTGAAGXFKDQLGGLLLQSRSRRIFDKLWSSKGQGEHGGKGSETSGSSQSPPLSAKPAEVKPSPLPPLRGRRYSVS

SEQ ID NO: 324734 - protein, 64 aa, Zea mays
  Clone ID: MRT4577_59228C.1.pep
PLQPPSFFFFFNSYKSSFTSEHEFFYEHSYKIPHTGHNNACLEQTMKNSYPVRYKKNHKCYMLL

SEQ ID NO: 324735 - protein, 67 aa, Zea mays
  Clone ID: MRT4577_59229C.1.pep
CIIKCVRTVWTFLSEEGGCCVYAPRFKSFGVPRACDFVNVTKWITLPYYHVNCIGLLGSKKKNNTRF

SEQ ID NO: 324736 - protein, 93 aa, Zea mays
  Clone ID: MRT4577_5922C.1.pep
STTVYFFVLHLWYRLRNFKSLGPFATLYLLARAVSWARFHLSMVGPLHDLSSGLPIVGQNLMEMGGLRDQIPQLFNLRASNTRIHFIDRLRMS

SEQ ID NO: 324737 - protein, 90 aa, Zea mays
  Clone ID: MRT4577_59230C.1.pep
FLGRESGRAGGGGHKDTAPTPTNRQEPHDGPRTNGSTALAGAQATAKGRTKSRGDPRPREPRMNTRARGRGTQTEEGTHGKGAQRATRET

SEQ ID NO: 324738 - protein, 73 aa, Zea mays
  Clone ID: MRT4577_59231C.1.pep
RIRVEVWSHRVLLGSGHSDSKVEYRKDKHLHVLLPPTCSSHSRSNISLVVAEDDGFDSDREGSRRHLVIRLSL

SEQ ID NO: 324739 - protein, 359 aa, Zea mays
  Clone ID: MRT4577_59232C.1.pep
MEQQQHQEVRRNRKGVLQVQDGSEIRALVENKAEFARFVDDRFRKLDADGDGRLSVKELQPAVADIGAAIGLPARGSSPQADHIYAEVLNEFTRGKQESVGKAEFQRVLSDILLGMAAGLKRDPIVILRINGEDLSEFVESPRYEPEAVAIFSQAVGGPTNTNDATLRQCLLAAVGELTIDHGMPPASDPWVMENVVEPAFQELPASPTQQLTLDEPVPSVRRLLSNKFEFDKLLDSVWREVPKERKDKQASKEYLRIALDRIADSAGLPPLGAVGQVDAVVNEAFKMAKADDLRAVDEAEFKKLLTEVLGAVMLQLDASPVAVSTNTVVHEPMCTSSSSSALLSPTPLSPMVSSPASE

SEQ ID NO: 324740 - protein, 406 aa, Zea mays
  Clone ID: MRT4577_59233C.1.pep
LEAGRKKKIKKKKKKKQQHQEVRRNRKGVLQVQDGSEIRALVENKAEFARFVDDRFRKLDADGDGRLSVKELQPAVADIGAAIGLPAKGSSPQADHIYAEVLNEFTRGKQESVGKAEFQRVLSDILLGMAAGLKRDPIVILRINGEDLSEFVESPRYEPEALAIFSQAVGPTNDATLRQCLLAAVGELTIDHGMPPASDPWVMENVVEPALQELPASATQQLELDQPVPSQEAFLQEFRRLVGAITLRLRQHPVIVAHTENNFDGSGVRRLLSNKFEFDKLLDSVWREVPKERKDKQASKEYLRIALDRIADSAGLPPLGAVGQVDAVVNEAFSTRKADDLRAVDEAEFKKLLTEVLGAVMLQLDASPVAVSTNTVVHEPMCTSSSSSALLSPTPLSPMVSSPASE

SEQ ID NO: 324741 - protein, 128 aa, Zea mays
  unsure (1)..(128): unsure at all Xaa locations
  Clone ID: MRT4577_59234C.1.pep
KRGLVTKKFFIPGGGAPKKKISIHLAAWAKKLLGMESFSPKKFFXALKVSPSPLGEKVGVNPISFFPELRNPPPKGEKTPGPHFRKGPFPPLLEEKFFPPFLVSPKPLSLPPEGVQIFFKIYALSPFR

SEQ ID NO: 324742 - protein, 129 aa, Zea mays
  unsure (1)..(129): unsure at all Xaa locations
  Clone ID: MRT4577_59235C.1.pep
KIFPRPTAGLSRAIDQCQTVKYNMNSRAGRGFTLEDLKALCIPKRLGPTIDITVEXLLMNKYLEELHANVQRLKTYLAKLVILPRRAHKVXAADSTLEELNNATQYQGDYMPITFGEKRYVKVVNVTDE

SEQ ID NO: 324743 - protein, 78 aa, Zea mays
  Clone ID: MRT4577_59236C.1.pep
HWVPRGRPGAMVVLSCLSLAAAQTARTMMHSGCELQRQTDHRNGMLMNLQPRGGGWAPNGGRRHGIRTADVHWLLLHL

SEQ ID NO: 324744 - protein, 98 aa, Zea mays
  unsure (1)..(98): unsure at all Xaa locations
  Clone ID: MRT4577_59237C.1.pep
TKKKLLSWKEGEDNFESLKGAAPFFFFFFFFFFFFFFFFYFFFFFFWRRAVWSKGKEVVKAKLLLGLNKHFLFKNNNCNDLIPXRLNFPTITGAVRPG

SEQ ID NO: 324745 - protein, 64 aa, Zea mays
  Clone ID: MRT4577_59238C.1.pep
MDCFLCPMSCCDDLLVLHGAGGQAGTGSCCGSTASDEYGSSEEDGATWGSLWNLDGAGEVCTLW

SEQ ID NO: 324746 - protein, 74 aa, Zea mays
  Clone ID: MRT4577_59239C.1.pep
VRIMEILGPYLLAGSTEETPASALGRKLDPHRKERVVCQLRDRTGVSRVPRGRFLVCAALLEAMVQADLRAIPM

SEQ ID NO: 324747 - protein, 72 aa, Zea mays
  unsure (1)..(72): unsure at all Xaa locations
  Clone ID: MRT4577_5923C.1.pep
YELATYIVKYTSNILAPWAAKILAFLAFLXFSTSRGSGNIIPQWXQQYLFPVTAARFEYPTIQSYRLQEAIA

SEQ ID NO: 324748 - protein, 140 aa, Zea mays
  Clone ID: MRT4577_59240C.1.pep
IFLRLVQLCRKYCHLLGRSTCSTFSIWQYSTLFPLFSFFGESSNNCQVLMMEYFDKPLRLESQGLVQHYQPCEKRRRESICEVEIISTICLGDIEIGALGGGEVSTDDEEEERVGGAYFRRRSRHISSHRSHRGSGFAMM

SEQ ID NO: 324749 - protein, 82 aa, Zea mays
  Clone ID: MRT4577_59241C.1.pep
VGNLSWGVDDMALENLFNEQEQVVEARVIYDRDSGRSKGFGFVTLSSSQEVQKAINSLNGADLDGRQIRVSEGEARPPRGQF

SEQ ID NO: 324750 - protein, 97 aa, Zea mays
  Clone ID: MRT4577_59242C.1.pep
MRARNWKTVQGLTRSTCAGGFLNSGERDWAIPVTRAPGSSLSKSHGFTRKLNEGLDRTEEDGRGAGHGGYSRAALAGREEVAGANGWLGQVRRGTEE

SEQ ID NO: 324751 - protein, 45 aa, Zea mays
  Clone ID: MRT4577_59243C.1.pep
AHCFKCTHPSCLVKKKVERSRDGHVTEIIYKGTRNHPMPTQSRRP

SEQ ID NO: 324752 - protein, 91 aa, Zea mays
  Clone ID: MRT4577_59244C.1.pep
KIHGSNALWFMSQGHNLCSQWPPLVEHLQIILTASLVTIPVAGRSQVPRAVPEQHVKDINSLGLNISNMVSLLTLKGHITPKVLKADNRDQ

SEQ ID NO: 324753 - protein, 80 aa, Zea mays
  Clone ID: MRT4577_59245C.1.pep
SHNLIHFQLNGVVCIFLIQPSCMVAHMLYSLQHNDCSFSQTRLHIFCLIVLSTKHLWFTWHHRCLHVSGSLCRFFVLIFF

SEQ ID NO: 324754 - protein, 119 aa, Zea mays
  Clone ID: MRT4577_59246C.1.pep
GWRVDDLLFDDPAFSAASKASGYSDDGHEQVPSLDADLFDVVASGRPGKRGGVWSTGAGALGFDKATPASVVAVPTQGFVREMSWNSDSDSDVFAVPEFPHPPPAKKARPAPASTFWCF

SEQ ID NO: 324755 - protein, 85 aa, Zea mays
  unsure (1)..(85): unsure at all Xaa locations
  Clone ID: MRT4577_59247C.1.pep
MSGSGEHHFESKADTRAYKTYPQQAGTVRKNSFIVIKNRPCKVVXVSTSKTGKHGHAKCHFVTIYIFNGKKLEDIAPSSHNCYLS

SEQ ID NO: 324756 - protein, 151 aa, Zea mays
  Clone ID: MRT4577_59248C.1.pep
MEVELEHGGDEGGDRGSESSSSSSKRSFGASSDATVSSTPSKLQALRFAEDLSLPSVQVVVMSANMGCSHCRQRVANVVSKMNGLLDYMVDFGKKEVTVRGKVVHTKKKKKRHMRALLGAAGAGWDDARSAASLPGGHARTLSWFWGCYSS

SEQ ID NO: 324757 - protein, 89 aa, Zea mays
  Clone ID: MRT4577_5924C.1.pep
TCSSLVLHVCLDLAKGLGMYHPQSEYSAPTCLNASDLQSKFQNNALCCRLLPQLDHVHVYNLKFLNKKKASQSLLKQQQFIRRYIVLKR

SEQ ID NO: 324758 - protein, 96 aa, Zea mays
  Clone ID: MRT4577_59250C.1.pep
GHHGLFRHFDQFLPWRYITAHVPVGRISVSFSQGSQARVAAYPSLNLQSLAFLGMNGTMVQEYMVDQSWLPLCMVSSMNHVLCRQPPSVYRSSIMS

SEQ ID NO: 324759 - protein, 72 aa, Zea mays
  Clone ID: MRT4577_59251C.1.pep
QWPLRVPLCPPTQAAQRAAENAFRLPRVDEQVHRAVMAANRAATAARVAAIKAGGDRMDGKFCEKKKKKKKE

SEQ ID NO: 324760 - protein, 189 aa, Zea mays
  unsure (1)..(189): unsure at all Xaa locations
  Clone ID: MRT4577_59252C.1.pep
MRRHGWQLPYHPLQVVAVSVFLALAFAFYVFFAPFVGRNVFQYVVIGLYTPLQTQLIXGLQIKEVSELVRKRQTQASEGMQKGFFRXRLQLEGTGEKQEHEVAASSEMSMTQYKDNIPSCMSSTFSAFLLLFYPLSFVLSCCQSHEWSSEQKXRKEGMFFCSLXEVXVLKYSKHXCRVCDKXVDGFDHH

SEQ ID NO: 324761 - protein, 47 aa, Zea mays
  Clone ID: MRT4577_59253C.1.pep
LLHRRTYAVQEPRTRELKVYRSIDVRRRLVQEQTSRDPTAKNLHISQ

SEQ ID NO: 324762 - protein, 66 aa, Zea mays
  Clone ID: MRT4577_59254C.1.pep
LYSPFLPCTLEPVLDNSVPPTFVLCYKGMIHTRRHKKIVLSRKLGPCMCILRDAKSHFIYTDHLLF

SEQ ID NO: 324763 - protein, 61 aa, Zea mays
  unsure (1)..(61): unsure at all Xaa locations
  Clone ID: MRT4577_59255C.1.pep
LIGYGVSLLSLLRRRSEPQSGTNVXDIGTCATPKKVGCCFFLSAPSPGSYASRKINTFPFL

SEQ ID NO: 324764 - protein, 40 aa, Zea mays
  Clone ID: MRT4577_59256C.1.pep
LSYHVPHIARIDGLCALSIFYSQSILISPHASLTELTFFY

SEQ ID NO: 324765 - protein, 157 aa, Zea mays
  Clone ID: MRT4577_59257C.1.pep
RGATPPLKMGRSLVLPCAHACCILYLGITTCTHATAALTHVNARDELWNASRTTGLLKQDLMHKVLTQACDLLDLNKRFADLIPTLYDQKVLTKHLNTFLLAQAHKLNGRQLFVKDVHPVVKYFTVAVKDDYTVDLPLDQMLLNLLLQTIDSGSIPN

SEQ ID NO: 324766 - protein, 80 aa, Zea mays
  unsure (1)..(80): unsure at all Xaa locations
  Clone ID: MRT4577_59258C.1.pep
FRRVXKKKKKKKKKKKKKKKKKKKKKKKKKKKKKKKKKKKKKKKKKKKKKKNKKKKGGPFLGVGGWGPLLSNFFFFFWGP

SEQ ID NO: 324767 - protein, 91 aa, Zea mays
  unsure (1)..(91): unsure at all Xaa locations
  Clone ID: MRT4577_59259C.1.pep
KAFYLNIASIFGMGVPPXRGGVMPWANSLGAKDTPGKLGGWPNRDGGFFKPCFSPAEKAAKGIPLGAPPKKVQARLKNDFLVEGGAQNGFR

SEQ ID NO: 324768 - protein, 206 aa, Zea mays
  Clone ID: MRT4577_5925C.1.pep
MASFPLLFLPPPVVGHESGLFNPRVDVGGEALSTAAAAYTTTSNDCRVRVSVRLELPPAESYLHMQTDDTLLKDPLVLAACGDLLLVHMVVHDAADDLSCKQNLFVYKAHPTRPSLSRLPNPDTFTGWAQSCGIVPCDDGGFVVASFRTIKTDLDLQTGLAMERVEFLHYSPATGHWDLKSPTMPYDGEALKPCLWETDQVFSYPD

SEQ ID NO: 324769 - protein, 55 aa, Zea mays
  Clone ID: MRT4577_59260C.1.pep
MLGGGMGSLLIIKLKLVAFIMVYWASGLGPVIDLVVFISTTVDLLGMFRLDYTAL

SEQ ID NO: 324770 - protein, 156 aa, Zea mays
  Clone ID: MRT4577_59261C.1.pep
LTIYQCSDGGGVQLMCTSLDRHDALAADFAPPTTPSRNRRANTERSSAAAGLPFLNPTPTTSSSCCLPRADVAVVADDNAAAAAPPPSSARVLLLVVLLPSSSSVVVVSTAATRPVPVSAAARWWCERDSARWAGAGEAVGSTRGRRRRSFVDNNG

SEQ ID NO: 324771 - protein, 103 aa, Zea mays
  Clone ID: MRT4577_59262C.1.pep
YAAIRSLPPFRHAAGMRHRCHGWSPIPRRRRNMKLERSPAVCTFAHGLCAYLRPYLSDLPWATDSESIACLDCPILSFLSLLLASVCGALMVSDYWTANVSLL

SEQ ID NO: 324772 - protein, 239 aa, Zea mays
  unsure (1)..(239): unsure at all Xaa locations
  Clone ID: MRT4577_59263C.1.pep
QQRLNLLPHKHLHQQRTLPQKPPRNQILQRQLLFHLIQITQIVVPDEVGASFERADEASEKKQSNPMREMKVQKLVLNISVGESGDRLTRAAKVLEQLSGQSPVFSKARYTVRSFGIRRNEKIACYVTVRGEKAMQLLESGLKVKEYELLRRNFSDTGCFGFGIQEHIDLGIKYDPSTGIYGMDFYVVLERAGYRVARRRRCQXSRVGIQHRVTKEDAMKWFQVKYEGVILNKAQANTS

SEQ ID NO: 324773 - protein, 63 aa, Zea mays
  Clone ID: MRT4577_59264C.1.pep
NTAYHTITAFHIATYMITFLFKKQPGKPQETTSNASSTNLATTALTYLHFHAALPKFIQQRID

SEQ ID NO: 324774 - protein, 51 aa, Zea mays
  Clone ID: MRT4577_59265C.1.pep
NGQNFPIMEAPKGKVVKVIIQMEGLFKHNKPCFFPRKGVLPPSILLEKLLF

SEQ ID NO: 324775 - protein, 90 aa, Zea mays
  unsure (1)..(90): unsure at all Xaa locations
  Clone ID: MRT4577_59266C.1.pep
ARGQGFAKASASSMPGIDPCCXXGRGWGRLLLNGDGAGGVGWDVMHWGRWRTRWKRRGAQRGQRIALGWGGIGPAGRGAAGPTQGFPLAQ

SEQ ID NO: 324776 - protein, 48 aa, Zea mays
  Clone ID: MRT4577_59267C.1.pep
QAVAYGIITTRLHGIFMSFHVKVEIVTSAAARIRVTFYCRDLSYLFLV

SEQ ID NO: 324777 - protein, 83 aa, Zea mays
  Clone ID: MRT4577_59268C.1.pep
TIPQAVCLSIPVADGTSILSHVPRSSSLVHCQGSFRWTPMLRRPRISGYKKIALATSISCSKYYVCYVPGPTCRGSAPLYVPP

SEQ ID NO: 324778 - protein, 119 aa, Zea mays
  Clone ID: MRT4577_59269C.1.pep
MSNQPTMAAAPVRAWVLVLALALACGLLQLRPSDAAAPAQPVAVAATMVSSGAAKPKCVPGAKNDKACRVGAVHDPENQEEEGSSVTLKAPAAAPDDSDGSDYNDPDEPNDNQLIVVGH

SEQ ID NO: 324779 - protein, 65 aa, Zea mays
  Clone ID: MRT4577_5926C.1.pep
LVLDRKRPPFFFFFFFFVKNQCHISITHNKMFYQFRLQNISNKILVVLKTEKGRGDIDSLQKKKL

SEQ ID NO: 324780 - protein, 50 aa, Zea mays
  Clone ID: MRT4577_59270C.1.pep
SATSDWFVPDRASDFTSSPSLSLVNRVNGRARIAAMALPSMGFKPQTGVH

SEQ ID NO: 324781 - protein, 130 aa, Zea mays
  Clone ID: MRT4577_59271C.1.pep
HAYACLHIACIYGHERFCRDVLALTTNSQQSPAAAPLLVTINADGETPLLAAVASGHVSVALFILGRCREERLSEAILTQDKRGFNALHHAIRNGHRGLALQLVDAEPGLSKAVNKHDESPLFIAVMRNY

SEQ ID NO: 324782 - protein, 87 aa, Zea mays
  Clone ID: MRT4577_59272C.1.pep
SLIAVKFAELFSKIGRRSGKELEKEPEFLMSGDAGMVRMIPSEPMVVETFSAYPPLGRFAVRDMRHSVPVGVFKSLQKKDPSGAKKT

SEQ ID NO: 324783 - protein, 57 aa, Zea mays
  Clone ID: MRT4577_59273C.1.pep
LSPFFFFFFFFFFFLYLTGIYKYTCTFKNSYTKSRQTQTLGHTPRAFTWKRGEEPTR

SEQ ID NO: 324784 - protein, 108 aa, Zea mays
  Clone ID: MRT4577_59274C.1.pep
CEKESDLCLQLRNLVWATSKHDIYLVSHYSIRHWSALSGVDTELINVQGHVAPREKHAGSLSEGFYQTQVSTLAVKDNLLVAGGFQGELICKHLDREGISFCCRTTYG

SEQ ID NO: 324785 - protein, 85 aa, Zea mays
  Clone ID: MRT4577_59275C.1.pep
QPLCVLMMGPVHRLERVQQKLEGELGGTNTHCAYPMRRCVSEVVSNSCKPHDWGLFVPVENYTWAWHGPPPLIFLRHACSAPGLD

SEQ ID NO: 324786 - protein, 96 aa, Zea mays
  unsure (1)..(96): unsure at all Xaa locations
  Clone ID: MRT4577_59276C.1.pep
PCLGVREVGFVFRGNSPSPCLCRGRYWPMWELPMFGLSAAPRVFQALLGAVHSWPEAFQRVLGLPNIEPXQCVCFVACKPPGSDLSAPVGPPPGAG

SEQ ID NO: 324787 - protein, 240 aa, Zea mays
  Clone ID: MRT4577_59277C.1.pep
RTRGPGSGTGATKALAAADSPSYKELQKKFGSSKELIESARSIITSKEAPAAVADLTSRVEVAKQVSACSYETGTSWGQEVGWVYGSMTEDVLTGQRIHAAGWRSALLSPDPPAFLGGAPTGGPASLTQYKRWATGLLEIVLSRHNPFLLSASKRLRFRQCLAYLVIDVWPVRAPFELCYALLGPYCLIANRSFLPKASEPGFVVPLALFLAYNAYNLGEYVDCRLSARAWWNNSAMQRI

SEQ ID NO: 324788 - protein, 100 aa, Zea mays
  Clone ID: MRT4577_59278C.1.pep
APYVPKAIQLELECNKAIAAINKCESHEDNKAPAKEEEEENQEECYKYKWQVNHEDYEKDNQERARLSRVMELPETYAPSFIQQLRRLHKAHVRDPKIIT

SEQ ID NO: 324789 - protein, 48 aa, Zea mays
  Clone ID: MRT4577_59279C.1.pep
LNCALDWNSHCFTDRYSACHVDYCSACDHDYHEDEPQAMRRAAMMIPL

SEQ ID NO: 324790 - protein, 103 aa, Zea mays
  Clone ID: MRT4577_5927C.1.pep
FIYFFHKAPITDKTATSEVTPPLNTEGQNPVVQDPPTYGAPKFDRTPLTEATPELVGRNISTQTAVVEPRHVSREQCARQLFKFIYSQQLDPSMTIIDFGGYG

SEQ ID NO: 324791 - protein, 213 aa, Zea mays
  unsure (1)..(213): unsure at all Xaa locations
  Clone ID: MRT4577_59280C.1.pep
MGTEADAAAVDSLRSQIPFQTDGELILPPRDVGLVLVDLCNGFCTVGAGNLAPVAPNKQISKMVEEAARLSKLFCDRNLPIFAFLDTHYPDKPEPPYPPHCIIGTGEENFVPDLEWLEKEPNVTIKRKSYIDGYISCIEEDGSSVFVDWVGKYQIKTILVLAICTDISRKHXQAQLLRDIVIYSEGCAXTYDFPVEIAMNIKGALXHPQVPYH

SEQ ID NO: 324792 - protein, 245 aa, Zea mays
  Clone ID: MRT4577_59281C.1.pep
MGTEADAAAVDSLRSQIPFQTDGELILPPRDVGLVLVDLCNGFCTVGAGNLAPVAPNKQISKMVEEAARLSKLFCDRNLPIFAFLDTHYPDKPEPPYPPHCIIGTGEENFVPDLEWLEKEPNVTIKRKSCIDGYISCIEEDGSSVFVDWVGKYQIKTVLVLGICTDICVLDFASSTLAARNIDRVPPLRDVVIYSEGCATYDLPVEIAMNIKGALAHPQDLMHHIGLYMAKGRGAKVVDRVVIEP

SEQ ID NO: 324793 - protein, 251 aa, Zea mays
  Clone ID: MRT4577_59282C.1.pep
MHDKRRMGTEADAAAVDLLRSQIPFQTDGEFVLPPRGVGLVLVDLCNGFCTVGAGNLAPVAPNKQISKMVEEAARLSKLFCDRNLPIFAFLDTHYPDKPEPPYPPHCIIGTGEEDFVPDLEWLEKEPNVTIKRKSCIDGYISCIEKDGSSVFADWIGKYQIKTVLVLGICTDICVLDFASSTLAARNIDRVPPLQDVVIYSGGCATYDLPVEIATNIKGALAHPQDLMHHIGLYMAKGRGAKIVDRVVIEP

SEQ ID NO: 324794 - protein, 92 aa, Zea mays
  Clone ID: MRT4577_59283C.1.pep
SRDELGFGSRPEQWRVAARLRNAGRNIDRQIRDVQRADTQVETAIREAAKRNDIGSAKALAKAVVRSRPAVNRLYEHKAQLQSISMQLGEIV

SEQ ID NO: 324795 - protein, 159 aa, Zea mays
  Clone ID: MRT4577_59284C.1.pep
MSIKMKGIFKGLKIISQMFAHKEQEMEIGYPTDVKHVAHIGLGTSDTSPSWMAEFKGTDDSSAGSVSTAAQSRQTSWASADFEQPRSMLPIDIFQDKRPGQKNPDVQRGEKKARRKKTKKNRASSPPVSSARSFSARSTASFATAYDPFSESQRGFPVA

SEQ ID NO: 324796 - protein, 65 aa, Zea mays
  unsure (1)..(65): unsure at all Xaa locations
  Clone ID: MRT4577_59285C.1.pep
SEQSRPPLSQSSSVSFKSHLLAAHDYLCGPVQLPAGVGGGPLAIGSPPSGEVGLGINKAQAVXGP

SEQ ID NO: 324797 - protein, 61 aa, Zea mays
  Clone ID: MRT4577_59286C.1.pep
IQSGPNLYKSTSNTDVPLHIPSSRNLQRRPTQKHHVGNLWCTVGSQTPTPCLIFSSTYFSP

SEQ ID NO: 324798 - protein, 70 aa, Zea mays
  unsure (1)..(70): unsure at all Xaa locations
  Clone ID: MRT4577_59287C.1.pep
MIGERLTSRLPHWYLKISEVGAYIGAAMDLFMIHTGFYXKDTVLEAEKRVCENKPEGQAMREDLNQCRKH

SEQ ID NO: 324799 - protein, 68 aa, Zea mays
  Clone ID: MRT4577_59288C.1.pep
TAELTSQNTPAETMNNMSIPCQASGPLVGLQSTNKNIVRTLPFIFLPFFETAQGKTNAPKPFVKTLNN

SEQ ID NO: 324800 - protein, 84 aa, Zea mays
  Clone ID: MRT4577_59289C.1.pep
SSLYTPCLFGSCERRIDPHSTKNGAPPTNCLLVTGESSLHSMLRDTITISCAESPTINHVKCRIPEKDQMTMYQYCINITSPEM

SEQ ID NO: 324801 - protein, 45 aa, Zea mays
  Clone ID: MRT4577_5928C.1.pep
KNFKIFIFCQQVPPWSLAITIVVVWTNGCYVKTNYLLYCGNPVPD

SEQ ID NO: 324802 - protein, 99 aa, Zea mays
  Clone ID: MRT4577_59290C.1.pep
WKRGVFLGHFLPARFQGQKKQGFKKGVLNEKRSFFRAPRTWGGLRAGKRPFQNLGGGLPGGGGVPFPKWENLLATFHPGNVFMIPAPLSKTFFTFWKNF

SEQ ID NO: 324803 - protein, 54 aa, Zea mays
  Clone ID: MRT4577_59291C.1.pep
NNADNAKLTYTGMPPGCVIVTMGRSTRSTRGPSYQWGHVSTVYPSPIYLHVILR

SEQ ID NO: 324804 - protein, 55 aa, Zea mays
  Clone ID: MRT4577_59292C.1.pep
GLSSCNWLTAHALLHVMGEDLHTLLHKQSLNLLQQGSCGVHQDLVPDLFFGNGRL

SEQ ID NO: 324805 - protein, 185 aa, Zea mays
  Clone ID: MRT4577_59293C.1.pep
MAGAGAGAGAGALAGLAACATLACNVAGAVLFLLSQDDERLRRGCAARLGAGGVASQPVEECGDEEALAPDAVLNLELGDPTMYRAFWREVGDCGATVIRGCQGMSYFSDDDAVLCWFLEPELEREVRRLHRIVGNAVVDGYHLVVGTGATQLYQAAMYALSSPARRDQPVPVVSPAPYYSSYPP

SEQ ID NO: 324806 - protein, 50 aa, Zea mays
  Clone ID: MRT4577_59294C.1.pep
RKKKKKKKKKGGGGKKKKKKKKKKKKKKIKKKKIKKKKNKKKIKYYIKET

SEQ ID NO: 324807 - protein, 215 aa, Zea mays
  unsure (1)..(215): unsure at all Xaa locations
  Clone ID: MRT4577_59295C.1.pep
PGAIVSWXTXITAFVQXNDFDXGGLLLVYQMQKSGFAADLVTLTAVLSAASNTGDLHIGKQAHSYLIRHGIEGEGLESYLIDMYAKSGRIEIAQRVFDDYGNAKRDEVTWNAMIAGYTQTGHPEQAILAFRAMIEACLEPTSVTLASVLPACDPLGGGLCAGKQIHCFALRRCLDTNVFVGTALVDMYSKCGEISTAEHVFADMTEKSTVSYTTM

SEQ ID NO: 324808 - protein, 102 aa, Zea mays
  Clone ID: MRT4577_59296C.1.pep
PAGAANPFDHNDPFAMSNSFAPPSNVQLAMMAEQQQYYHAQQQQYYQIQQQHQMVMLPPQTYQQQSQYSAPSQSGLSNPFGDPFSSLVTMANPPKQSNSNLV

SEQ ID NO: 324809 - protein, 113 aa, Zea mays
  Clone ID: MRT4577_59297C.1.pep
FSGRRGHLSPCTRRTAGPTGLFQSPQFSSATPTWRDLFSGSPPPPRLSAQRDASKRHLVEGARPRAAHERLRRRSVAPRWRSRHRVRPRQQGPLRRRRGAAGTGRRPALLPVP

SEQ ID NO: 324810 - protein, 96 aa, Zea mays
  unsure (1)..(96): unsure at all Xaa locations
  Clone ID: MRT4577_59298C.1.pep
RRHASGLRHSLSLRAQKTRRTMRGCSCLLSWLRXAQLTIQRRWAAATARSLPPRCICTSVTCTSGHLHRGHLPRRPPAPPAMCRRGHLPPHHATTL

SEQ ID NO: 324811 - protein, 455 aa, Zea mays
  unsure (1)..(455): unsure at all Xaa locations
  Clone ID: MRT4577_59299C.1.pep
MPPKKTAAPGAALQPLDTNQETLSLREARNQKRKATSPTLQEEELDQEIRDLEVIHQQVQRKKEKMARPADLQKKIDEAAEEMRHLTQDDQDRRPQHRELRQESSYNDDEWYDDFHHGNFTFDDTSPLAAELQAIPWPQSYKPPQLSMYDGHSDPKQFLMSYEATISSYGGNAAVMAKYFVMTVQNVAQTWYSSLRPGTITSWQKLKDMLVTSFQGVQTKPVTAQALFQCTQYQKEYLQTNVRRFLRLRAQAPIVPNDIVIEAMIKGLRPGPTSKYFARKPPQTLKKLLQKMDEYIRADNDFRQRREEAYRFSEMTRGFGGRLHPRHVRSIHNSNANDERANNAQHGHQNSQSSSMTPFRPPALRGRGGRSFSGGRFGSQPRKLYCLFCGEDKGHTTRTCHVTIQKQKEIAEAGARQSQPKQVLHTASCYSPYVPEYVGNQXAYDLCSASHSQAS

SEQ ID NO: 324812 - protein, 72 aa, Zea mays
  Clone ID: MRT4577_5929C.1.pep
CLSALTCCVRCQKNSPRARGVPQLVLAVVRVFLRLFSWALWSLGSLRSLCINRLNLLDAAAPGAADLEDPVL

SEQ ID NO: 324813 - protein, 110 aa, Zea mays
  Clone ID: MRT4577_592C.1.pep
FGSSPDPMLSAACAPPVRRLRFVRAARLPRARDRVSCIGDYLFLVGGCCGANAEERRLVLIHVLRVSRIHGVGEGRSERYWLRRDLQPIRLVAKVTQEAGLQLARGVQAC

SEQ ID NO: 324814 - protein, 129 aa, Zea mays
  unsure (1)..(129): unsure at all Xaa locations
  Clone ID: MRT4577_59300C.1.pep
MLIFQSSFHLLIGPGHALRRHGRSSRDAAAARRRLFLGQSRSPPWWQRLLPQKPAARVKTNSSYDDAPGLLAALKEMKDGLDLVRGKVEAITRKVKANQLPAAXGIGYLEAKXHLLLGYCQDIVYYLLR

SEQ ID NO: 324815 - protein, 97 aa, Zea mays
  Clone ID: MRT4577_59301C.1.pep
YIIFVKWDVIYADIPKLIPFIDLPCQFASWAVPSLNPSVASDESPLRRLLAAVHATRYAVTVAPPVTQPSLGAAYFSDKVARHHGGSVGCRRSQRRE

SEQ ID NO: 324816 - protein, 100 aa, Zea mays
  unsure (1)..(100): unsure at all Xaa locations
  Clone ID: MRT4577_59302C.1.pep
MVAAPAAAEASGESKNEFLIRDDAPGLLAALKEMKDGLDLVRGKVEAITRKVKANQLPAANGIGYLEAKNHLLLGYCQDIVYYLLRXXKXLSVDGHPVVQ

SEQ ID NO: 324817 - protein, 91 aa, Zea mays
  Clone ID: MRT4577_59303C.1.pep
MASAEAPLLHIAAEVLPPLASAAVLFLAVAITYGHLTVMGRHVAAVPVAGAGNARARLGLSFRLCVRGRSTIGSDKPQGGGDTVPARALAC

SEQ ID NO: 324818 - protein, 88 aa, Zea mays
  Clone ID: MRT4577_59304C.1.pep
HSANGGVKITRKRSGNTPVLNSILDGLQKKPQPKKRNFWLTFLYANHAKKRGMHRPPLNCFLGSPNKGHPHNFALARTQGGAHPQPRE

SEQ ID NO: 324819 - protein, 66 aa, Zea mays
  Clone ID: MRT4577_59305C.1.pep
MARSLAHATLLLVGAVVAVADCWTTGGGENEEVAGICKKTRGPVACVGAGGKGGGRRGAAGGPVGA

SEQ ID NO: 324820 - protein, 87 aa, Zea mays
  unsure (1)..(87): unsure at all Xaa locations
  Clone ID: MRT4577_59306C.1.pep
GGRRAPPARGASGVRRSAREKRRKAERGLRAIRAGGPVQWVERAIGSGDPRRNEDYGXGQRGRRAKGXPPRPXSEKKHSLKGQKEKK

SEQ ID NO: 324821 - protein, 153 aa, Zea mays
  Clone ID: MRT4577_59307C.1.pep
KIWFVECGPPQRGMQMWAPANPSGAQKQGSPGRIVVFVPRGLWFPPRPLCPSRRGFFFGGRSKKGSRGQRPRFWGSPDPSKKKLGTPLEPGGFWAPPSRFDLPGAGPKNFFWVLGGCPPEFCPAPFFFLGPVGRQNLHVYIGEGFSPGGLGPP

SEQ ID NO: 324822 - protein, 65 aa, Zea mays
  Clone ID: MRT4577_59308C.1.pep
TGNNEGPGKRLGGVTTPPGGGPPKINPVRRPKKTAEKGSRGGSKEAKSPKKAPKSPKKAKTPRPE

SEQ ID NO: 324823 - protein, 84 aa, Zea mays
  Clone ID: MRT4577_59309C.1.pep
KKGFGFSSQGAFLGAPRATPKGPKPFPYWGLVPKSQTAPGFFEPPGGAIFPQFCGKRVFWARFPPLVFGGKVVWSPNCRKSLPP

SEQ ID NO: 324824 - protein, 137 aa, Zea mays
  unsure (1)..(137): unsure at all Xaa locations
  Clone ID: MRT4577_5930C.1.pep
MAGRGKAIGAGAAKKATSRSSKAGLQFPVGRIARFLKAXGKYAERVGAGAPVYLAAVLEYLAAEVLELAGNAARDNKKTRXIVPRHIQLAVRNDEELTKLLGGATIASGGVMPNIHQHLLPKKAGSSKASTVDDDDN

SEQ ID NO: 324825 - protein, 86 aa, Zea mays
  unsure (1)..(86): unsure at all Xaa locations
  Clone ID: MRT4577_59310C.1.pep
STFLTALGTKIFALLALLSLSVSATTAFITPQCSLAPNAIIPQVLPSITSMGIXHPIVQACRLQQALAQLQQQSLAHLTIQTMITQ

SEQ ID NO: 324826 - protein, 186 aa, Zea mays
  Clone ID: MRT4577_59311C.1.pep
LGTSRPAGTVSTPRPIRGREQGFRPWPKQGREGFPRAHPLHSCTRRHFLSLAHPTSHPLSCSWGQLLGRGRRRGRPLRGDSQGGREPRRHEPPRARRRAQRSGVGSGGAAEDWLLVVAGAANAGCRADRAASTADLAIPGEEKRADLCLLITGGDLQCYLHVCVACRSSNSRIFATPCVRCVLRMD

SEQ ID NO: 324827 - protein, 111 aa, Zea mays
  Clone ID: MRT4577_59312C.1.pep
PPGGGGGGGNSNPLGGVFRGSQLGPKLGGKRGKSVSWGKMFSPQNSPKNTSRKQKGKNRGGPKGGPTQINWGGPTAPFPRGKPGGPLVLKKRPTPGEGGFAFWGLFPFLGK

SEQ ID NO: 324828 - protein, 103 aa, Zea mays
  Clone ID: MRT4577_59313C.1.pep
FIIACSYARRVLLKNMSTKSIQAQSETSKLAADAVSNLRTVTAFSSQGRVLRLFGQAQDGPHRESVRQSWFAGLGLSASVRAPLVAEDLRRIPTHSLPSKPTR

SEQ ID NO: 324829 - protein, 94 aa, Zea mays
  Clone ID: MRT4577_59314C.1.pep
FRCWGWQSIEFASGVSFSDMLSQSARPGRQEKARPSAITRPACRRWHGAYVSHLRGLPYVLLSPPFRSDRVLDFLLTTAALFRCQGQGGYREHI

SEQ ID NO: 324830 - protein, 139 aa, Zea mays
  unsure (1)..(139): unsure at all Xaa locations
  Clone ID: MRT4577_59315C.1.pep
THAXAFDGNIGLYPFVFTEPAERRSANRLRGTMITKAMISVTRDVIRRYVIDKLLPHIKAKCPAEDRHSTIWILDNCRTNIAVDDPELXTRRWMGIRLMCQPANSADCNVLDRSFLQLYSRRCFGVVCRLASVEGVWHT

SEQ ID NO: 324831 - protein, 120 aa, Zea mays
  unsure (1)..(120): unsure at all Xaa locations
  Clone ID: MRT4577_59316C.1.pep
MDQPGDVSITQGVHPPVGIRYYRDYIAELDKAIYHGPTVIGDFAWSLLDXFEWRHGYTFLFGMENVHCETFERYPKDSAIWFEHRLSKKRRYRISYKRTCGFRCHQKVHSADRLSMSDLA

SEQ ID NO: 324832 - protein, 62 aa, Zea mays
  Clone ID: MRT4577_59317C.1.pep
QLYSMLAFPSKTTYRTSISFLTAAITPRACTSQWTATGSLPIRCASSMACAGMDCRRVVVVS

SEQ ID NO: 324833 - protein, 131 aa, Zea mays
  unsure (1)..(131): unsure at all Xaa locations
  Clone ID: MRT4577_59318C.1.pep
RRSRSRRRSSSPCSATIRGGSTTTPPCCCXLKFFDWSGRHRRYHHTRASYHTVFRLVRCARRNAVLLDWLHRFFDTSARGDHLRLHDTLIIGYAIAGDPQRGLNIFGRMRFHGLDPDPVSLRILLNSLVDA

SEQ ID NO: 324834 - protein, 535 aa, Zea mays
  unsure (1)..(535): unsure at all Xaa locations
  Clone ID: MRT4577_59319C.1.pep
ISRWKFSXMIHDAKIKFSDHSILRIVQMLGRYGNWKCVLQVVEWLQSHERFKSYKSRYIYTTVLDVLGKAKRPFEALNVFYTMQNQLSSYPDMAAYHCIAVTLGQAGLIKELFDVIDCMCSPPRKKFKLSPLQNWDPRLEPDLIVYNAVLNACVQQKQWEGAFWVLQQLKEKNICPTNSTYGLVMEVMLVCGKYNLVYEFFNKVDKSSIPGALNYKVLVNALWREGKIDEAVMAVKDMESRGIVGSASLYYDLARCLCSGGRCKEALLQVEKICKVANKPLVVTYTGLIQTCIDNGGMEDAKYIFNHMCNYCSPNSVTCNIMMKSYIKHGMLEDAKDLLHDILNCRIRSKADSNQVATADKFTFNTFMEACAAAKRWNDFEYAFREMLLNGYHFDERRHLRMVLDAFRHGKEQLLDDLWHYLCRHSRVPPSPVIMERFCLKLMQGDTLAAISCVSSFHEGKICNVSSMSWLNLLSRNADRLKEEHVTKLAHELNSLISLRSSSDSISLSLYQKIISSCTAFLSGATVVEKAPSGQ

SEQ ID NO: 324835 - protein, 100 aa, Zea mays
  Clone ID: MRT4577_5931C.1.pep
QSPTTGTTPLPQTLLTCAARSEPEFRTMRVCVCVFCLAAIGCRRGQPRREARHHRLLPRSLYPLPNSSHPPQPTGSRSAPAALIPIFLLRCSLACCACAC

SEQ ID NO: 324836 - protein, 54 aa, Zea mays
  Clone ID: MRT4577_59320C.1.pep
AFLYKYCEENKTVSISIELEHSMFTLYIEILPLGHVISEYKKTKKKKKKKKKKR

SEQ ID NO: 324837 - protein, 415 aa, Zea mays
  unsure (1)..(415): unsure at all Xaa locations
  Clone ID: MRT4577_59321C.1.pep
RLYPSTSAPSFPSPHAPRERSFRIPHRIGRVPLTEKIGLGGASVLSVVRSDAKEGTTTGVSAKDRTNTILALASPNSKPEDFNSPGHIFPLKYREGGVLKRAGHTEASVDLAMLAGLPPVAVLCEIVDDDDGSMALLPKLQQFAKRENLKIISIADLIRYRRKRVLWSLDRGVAHGDGHAVNEDDVTKFGVVPGDGRANVQDVVTKLAXMVPMEIGTPXQDGVTKVACGATHRDGDVGCQDGVMKVTCGAVHGDGDAGCQDDTTKLAAEAIGSDRNPRGIGLGHKLQAYNLQDDGRDTVEANLELGLPADSREYGIGAQILRHLGARTMRLMTNNPAKYTGLKGYGLSVLGRVPLLTPITTENRRYMETKRLKMGHVYGSRSSNHANGSGLAGAGEREEQDQNDSAGVQERTPEA

SEQ ID NO: 324838 - protein, 58 aa, Zea mays
  Clone ID: MRT4577_59322C.1.pep
DARLTSWYKELSLLNPMNFLQIPALDVSKPMIIPICAVIKSQSTGHLAAYGNLETGAI

SEQ ID NO: 324839 - protein, 75 aa, Zea mays
  Clone ID: MRT4577_59323C.1.pep
YVNYVFTSILNLFFVGEGPYSSLLLGPRVSLGRCTSARARRIPTSSNQISCSLLKRLTVVCFQFILIAESCCITG

SEQ ID NO: 324840 - protein, 88 aa, Zea mays
  unsure (1)..(88): unsure at all Xaa locations
  Clone ID: MRT4577_59324C.1.pep
LEGVSSSRGLHAGRGPRRLSIEGNIXACTAQSLGHLLDMMFRESARWSYTFQTFSFSSRLNVXLEPFPEKLLQARTPVQIFERSVYVT

SEQ ID NO: 324841 - protein, 59 aa, Zea mays
  Clone ID: MRT4577_59325C.1.pep
SSSMRKITVANSQGTHHYSIIYISFIYLRRGGLAHKNYPTTLAPEHQENHSFRKHNLKE

SEQ ID NO: 324842 - protein, 103 aa, Zea mays
  Clone ID: MRT4577_59326C.1.pep
GMCATSPTVGVLLKGWLARCLFFQSVMKFSCRNLYFDLCKLIIYIDKIRTDMLVFGHPLFSPPCNSMHHAPKVMCIIQSSLDDVLVTDLTKKFPLVAARCDKD

SEQ ID NO: 324843 - protein, 72 aa, Zea mays
  Clone ID: MRT4577_59327C.1.pep
NPAPKLKNLRGGPSCCQTRGETKGLGFTWGGFFPTQGAPKKGLGREKISWGPGGLRKTLAIFSLAKKKDWAP

SEQ ID NO: 324844 - protein, 112 aa, Zea mays
  Clone ID: MRT4577_59328C.1.pep
ASPLQLGYDHLFNFIQKCLGGGSHPWFPYMAKNRHLLPPRQLKKKQTLAHPPNRGPIYIYKTRAPKGQNKAAATNKKPRPGVAYILQATAQTQNLKTLLTKPRKQKNNFHPP
